United States Patent Application Publication US 2018/0305689 A1 - sequence listing, part 103

SEQ ID NO: 1506839 - RNA, 19 nt, Artificial Sequence
  Description of Artificial Sequence: Synthetic oligonucleotide
  Antisense strand to SEQ ID NO: 1506838
aauucuagagagaaacucc

SEQ ID NO: 1506840 - RNA, 19 nt, Artificial Sequence
  Description of Artificial Sequence: Synthetic oligonucleotide
  Sense strand starting at position 781 of SEQ ID NO: 1244679
aguuucucucuagaauugu

SEQ ID NO: 1506841 - RNA, 19 nt, Artificial Sequence
  Description of Artificial Sequence: Synthetic oligonucleotide
  Antisense strand to SEQ ID NO: 1506840
acaauucuagagagaaacu

SEQ ID NO: 1506842 - RNA, 19 nt, Artificial Sequence
  Description of Artificial Sequence: Synthetic oligonucleotide
  Sense strand starting at position 790 of SEQ ID NO: 1244679
cuagaauugugcucuaggu

SEQ ID NO: 1506843 - RNA, 19 nt, Artificial Sequence
  Description of Artificial Sequence: Synthetic oligonucleotide
  Antisense strand to SEQ ID NO: 1506842
accuagagcacaauucuag

SEQ ID NO: 1506844 - RNA, 19 nt, Artificial Sequence
  Description of Artificial Sequence: Synthetic oligonucleotide
  Sense strand starting at position 1092 of SEQ ID NO: 1244679
aguggguggcgugaugaau

SEQ ID NO: 1506845 - RNA, 19 nt, Artificial Sequence
  Description of Artificial Sequence: Synthetic oligonucleotide
  Antisense strand to SEQ ID NO: 1506844
auucaucacgccacccacu

SEQ ID NO: 1506846 - RNA, 19 nt, Artificial Sequence
  Description of Artificial Sequence: Synthetic oligonucleotide
  Sense strand starting at position 1856 of SEQ ID NO: 1244679
ucugauucuccaugagaaa

SEQ ID NO: 1506847 - RNA, 19 nt, Artificial Sequence
  Description of Artificial Sequence: Synthetic oligonucleotide
  Antisense strand to SEQ ID NO: 1506846
uuucucauggagaaucaga

SEQ ID NO: 1506848 - RNA, 19 nt, Artificial Sequence
  Description of Artificial Sequence: Synthetic oligonucleotide
  Sense strand starting at position 1937 of SEQ ID NO: 1244679
ugggaagacauccgagagu

SEQ ID NO: 1506849 - RNA, 19 nt, Artificial Sequence
  Description of Artificial Sequence: Synthetic oligonucleotide
  Antisense strand to SEQ ID NO: 1506848
acucucggaugucuuccca

SEQ ID NO: 1506850 - RNA, 19 nt, Artificial Sequence
  Description of Artificial Sequence: Synthetic oligonucleotide
  Sense strand starting at position 1993 of SEQ ID NO: 1244679
uccgucuugggacgauaau

SEQ ID NO: 1506851 - RNA, 19 nt, Artificial Sequence
  Description of Artificial Sequence: Synthetic oligonucleotide
  Antisense strand to SEQ ID NO: 1506850
auuaucgucccaagacgga

SEQ ID NO: 1506852 - RNA, 19 nt, Artificial Sequence
  Description of Artificial Sequence: Synthetic oligonucleotide
  Sense strand starting at position 2005 of SEQ ID NO: 1244679
cgauaaugaagauggcuuu

SEQ ID NO: 1506853 - RNA, 19 nt, Artificial Sequence
  Description of Artificial Sequence: Synthetic oligonucleotide
  Antisense strand to SEQ ID NO: 1506852
aaagccaucuucauuaucg

SEQ ID NO: 1506854 - RNA, 19 nt, Artificial Sequence
  Description of Artificial Sequence: Synthetic oligonucleotide
  Sense strand starting at position 2049 of SEQ ID NO: 1244679
uuacuuugcgcucaauaaa

SEQ ID NO: 1506855 - RNA, 19 nt, Artificial Sequence
  Description of Artificial Sequence: Synthetic oligonucleotide
  Antisense strand to SEQ ID NO: 1506854
uuuauugagcgcaaaguaa

SEQ ID NO: 1506856 - RNA, 19 nt, Artificial Sequence
  Description of Artificial Sequence: Synthetic oligonucleotide
  Sense strand starting at position 2096 of SEQ ID NO: 1244679
agcaaacugugcucacaga

SEQ ID NO: 1506857 - RNA, 19 nt, Artificial Sequence
  Description of Artificial Sequence: Synthetic oligonucleotide
  Antisense strand to SEQ ID NO: 1506856
ucugugagcacaguuugcu

SEQ ID NO: 1506858 - RNA, 19 nt, Artificial Sequence
  Description of Artificial Sequence: Synthetic oligonucleotide
  Sense strand starting at position 2097 of SEQ ID NO: 1244679
gcaaacugugcucacagaa

SEQ ID NO: 1506859 - RNA, 19 nt, Artificial Sequence
  Description of Artificial Sequence: Synthetic oligonucleotide
  Antisense strand to SEQ ID NO: 1506858
uucugugagcacaguuugc

SEQ ID NO: 1506860 - RNA, 19 nt, Artificial Sequence
  Description of Artificial Sequence: Synthetic oligonucleotide
  Sense strand starting at position 2365 of SEQ ID NO: 1244679
auggcauaggcaugagaga

SEQ ID NO: 1506861 - RNA, 19 nt, Artificial Sequence
  Description of Artificial Sequence: Synthetic oligonucleotide
  Antisense strand to SEQ ID NO: 1506860
ucucucaugccuaugccau

SEQ ID NO: 1506862 - RNA, 19 nt, Artificial Sequence
  Description of Artificial Sequence: Synthetic oligonucleotide
  Sense strand starting at position 2382 of SEQ ID NO: 1244679
gaggguuuccuagagcugu

SEQ ID NO: 1506863 - RNA, 19 nt, Artificial Sequence
  Description of Artificial Sequence: Synthetic oligonucleotide
  Antisense strand to SEQ ID NO: 1506862
acagcucuaggaaacccuc

SEQ ID NO: 1506864 - RNA, 19 nt, Artificial Sequence
  Description of Artificial Sequence: Synthetic oligonucleotide
  Sense strand starting at position 2444 of SEQ ID NO: 1244679
guugcuuaggcuggaaaug

SEQ ID NO: 1506865 - RNA, 19 nt, Artificial Sequence
  Description of Artificial Sequence: Synthetic oligonucleotide
  Antisense strand to SEQ ID NO: 1506864
cauuuccagccuaagcaac

SEQ ID NO: 1506866 - RNA, 19 nt, Artificial Sequence
  Description of Artificial Sequence: Synthetic oligonucleotide
  Sense strand starting at position 2741 of SEQ ID NO: 1244679
ggguguagccuguacuauu

SEQ ID NO: 1506867 - RNA, 19 nt, Artificial Sequence
  Description of Artificial Sequence: Synthetic oligonucleotide
  Antisense strand to SEQ ID NO: 1506866
aauaguacaggcuacaccc

SEQ ID NO: 1506868 - RNA, 19 nt, Artificial Sequence
  Description of Artificial Sequence: Synthetic oligonucleotide
  Sense strand starting at position 2902 of SEQ ID NO: 1244679
agagcuuuaauggguacaa

SEQ ID NO: 1506869 - RNA, 19 nt, Artificial Sequence
  Description of Artificial Sequence: Synthetic oligonucleotide
  Antisense strand to SEQ ID NO: 1506868
uuguacccauuaaagcucu

SEQ ID NO: 1506870 - RNA, 19 nt, Artificial Sequence
  Description of Artificial Sequence: Synthetic oligonucleotide
  Sense strand starting at position 2903 of SEQ ID NO: 1244679
gagcuuuaauggguacaau

SEQ ID NO: 1506871 - RNA, 19 nt, Artificial Sequence
  Description of Artificial Sequence: Synthetic oligonucleotide
  Antisense strand to SEQ ID NO: 1506870
auuguacccauuaaagcuc

SEQ ID NO: 1506872 - RNA, 19 nt, Artificial Sequence
  Description of Artificial Sequence: Synthetic oligonucleotide
  Sense strand starting at position 2928 of SEQ ID NO: 1244679
ggauccuauggcugauguu

SEQ ID NO: 1506873 - RNA, 19 nt, Artificial Sequence
  Description of Artificial Sequence: Synthetic oligonucleotide
  Antisense strand to SEQ ID NO: 1506872
aacaucagccauaggaucc

SEQ ID NO: 1506874 - RNA, 19 nt, Artificial Sequence
  Description of Artificial Sequence: Synthetic oligonucleotide
  Sense strand starting at position 2929 of SEQ ID NO: 1244679
gauccuauggcugauguua

SEQ ID NO: 1506875 - RNA, 19 nt, Artificial Sequence
  Description of Artificial Sequence: Synthetic oligonucleotide
  Antisense strand to SEQ ID NO: 1506874
uaacaucagccauaggauc

SEQ ID NO: 1506876 - RNA, 19 nt, Artificial Sequence
  Description of Artificial Sequence: Synthetic oligonucleotide
  Sense strand starting at position 2942 of SEQ ID NO: 1244679
auguuauuauucccuguag

SEQ ID NO: 1506877 - RNA, 19 nt, Artificial Sequence
  Description of Artificial Sequence: Synthetic oligonucleotide
  Antisense strand to SEQ ID NO: 1506876
cuacagggaauaauaacau

SEQ ID NO: 1506878 - RNA, 19 nt, Artificial Sequence
  Description of Artificial Sequence: Synthetic oligonucleotide
  Sense strand starting at position 2944 of SEQ ID NO: 1244679
guuauuauucccuguagag

SEQ ID NO: 1506879 - RNA, 19 nt, Artificial Sequence
  Description of Artificial Sequence: Synthetic oligonucleotide
  Antisense strand to SEQ ID NO: 1506878
cucuacagggaauaauaac

SEQ ID NO: 1506880 - RNA, 19 nt, Artificial Sequence
  Description of Artificial Sequence: Synthetic oligonucleotide
  Sense strand starting at position 3032 of SEQ ID NO: 1244679
gaacuugguugcucuccaa

SEQ ID NO: 1506881 - RNA, 19 nt, Artificial Sequence
  Description of Artificial Sequence: Synthetic oligonucleotide
  Antisense strand to SEQ ID NO: 1506880
uuggagagcaaccaaguuc

SEQ ID NO: 1506882 - RNA, 19 nt, Artificial Sequence
  Description of Artificial Sequence: Synthetic oligonucleotide
  Sense strand starting at position 3121 of SEQ ID NO: 1244679
ugcucaaguuccuuagaga

SEQ ID NO: 1506883 - RNA, 19 nt, Artificial Sequence
  Description of Artificial Sequence: Synthetic oligonucleotide
  Antisense strand to SEQ ID NO: 1506882
ucucuaaggaacuugagca

SEQ ID NO: 1506884 - RNA, 19 nt, Artificial Sequence
  Description of Artificial Sequence: Synthetic oligonucleotide
  Sense strand starting at position 3122 of SEQ ID NO: 1244679
gcucaaguuccuuagagag

SEQ ID NO: 1506885 - RNA, 19 nt, Artificial Sequence
  Description of Artificial Sequence: Synthetic oligonucleotide
  Antisense strand to SEQ ID NO: 1506884
cucucuaaggaacuugagc

SEQ ID NO: 1506886 - RNA, 19 nt, Artificial Sequence
  Description of Artificial Sequence: Synthetic oligonucleotide
  Sense strand starting at position 3274 of SEQ ID NO: 1244679
uuaggaagacgcugggauu

SEQ ID NO: 1506887 - RNA, 19 nt, Artificial Sequence
  Description of Artificial Sequence: Synthetic oligonucleotide
  Antisense strand to SEQ ID NO: 1506886
aaucccagcgucuuccuaa

SEQ ID NO: 1506888 - RNA, 19 nt, Artificial Sequence
  Description of Artificial Sequence: Synthetic oligonucleotide
  Sense strand starting at position 3462 of SEQ ID NO: 1244679
gagguagaagguuguguga

SEQ ID NO: 1506889 - RNA, 19 nt, Artificial Sequence
  Description of Artificial Sequence: Synthetic oligonucleotide
  Antisense strand to SEQ ID NO: 1506888
ucacacaaccuucuaccuc

SEQ ID NO: 1506890 - RNA, 19 nt, Artificial Sequence
  Description of Artificial Sequence: Synthetic oligonucleotide
  Sense strand starting at position 3505 of SEQ ID NO: 1244679
ggcaaaugucaugagauuc

SEQ ID NO: 1506891 - RNA, 19 nt, Artificial Sequence
  Description of Artificial Sequence: Synthetic oligonucleotide
  Antisense strand to SEQ ID NO: 1506890
gaaucucaugacauuugcc

SEQ ID NO: 1506892 - RNA, 19 nt, Artificial Sequence
  Description of Artificial Sequence: Synthetic oligonucleotide
  Sense strand starting at position 3624 of SEQ ID NO: 1244679
aaucuuguauugccaggau

SEQ ID NO: 1506893 - RNA, 19 nt, Artificial Sequence
  Description of Artificial Sequence: Synthetic oligonucleotide
  Antisense strand to SEQ ID NO: 1506892
auccuggcaauacaagauu

SEQ ID NO: 1506894 - RNA, 19 nt, Artificial Sequence
  Description of Artificial Sequence: Synthetic oligonucleotide
  Sense strand starting at position 3627 of SEQ ID NO: 1244679
cuuguauugccaggaugau

SEQ ID NO: 1506895 - RNA, 19 nt, Artificial Sequence
  Description of Artificial Sequence: Synthetic oligonucleotide
  Antisense strand to SEQ ID NO: 1506894
aucauccuggcaauacaag

SEQ ID NO: 1506896 - RNA, 19 nt, Artificial Sequence
  Description of Artificial Sequence: Synthetic oligonucleotide
  Sense strand starting at position 3628 of SEQ ID NO: 1244679
uuguauugccaggaugauu

SEQ ID NO: 1506897 - RNA, 19 nt, Artificial Sequence
  Description of Artificial Sequence: Synthetic oligonucleotide
  Antisense strand to SEQ ID NO: 1506896
aaucauccuggcaauacaa

SEQ ID NO: 1506898 - RNA, 19 nt, Artificial Sequence
  Description of Artificial Sequence: Synthetic oligonucleotide
  Sense strand starting at position 3772 of SEQ ID NO: 1244679
uucccuauggccugaacua

SEQ ID NO: 1506899 - RNA, 19 nt, Artificial Sequence
  Description of Artificial Sequence: Synthetic oligonucleotide
  Antisense strand to SEQ ID NO: 1506898
uaguucaggccauagggaa

SEQ ID NO: 1506900 - RNA, 19 nt, Artificial Sequence
  Description of Artificial Sequence: Synthetic oligonucleotide
  Sense strand starting at position 3773 of SEQ ID NO: 1244679
ucccuauggccugaacuaa

SEQ ID NO: 1506901 - RNA, 19 nt, Artificial Sequence
  Description of Artificial Sequence: Synthetic oligonucleotide
  Antisense strand to SEQ ID NO: 1506900
uuaguucaggccauaggga

SEQ ID NO: 1506902 - RNA, 19 nt, Artificial Sequence
  Description of Artificial Sequence: Synthetic oligonucleotide
  Sense strand starting at position 3820 of SEQ ID NO: 1244679
cccagaauacaguacugua

SEQ ID NO: 1506903 - RNA, 19 nt, Artificial Sequence
  Description of Artificial Sequence: Synthetic oligonucleotide
  Antisense strand to SEQ ID NO: 1506902
uacaguacuguauucuggg

SEQ ID NO: 1506904 - RNA, 19 nt, Artificial Sequence
  Description of Artificial Sequence: Synthetic oligonucleotide
  Sense strand starting at position 3867 of SEQ ID NO: 1244679
gcaugaugggcaugacaau

SEQ ID NO: 1506905 - RNA, 19 nt, Artificial Sequence
  Description of Artificial Sequence: Synthetic oligonucleotide
  Antisense strand to SEQ ID NO: 1506904
auugucaugcccaucaugc

SEQ ID NO: 1506906 - RNA, 19 nt, Artificial Sequence
  Description of Artificial Sequence: Synthetic oligonucleotide
  Sense strand starting at position 76 of SEQ ID NO: 1244680
acaucugagaaguggguua

SEQ ID NO: 1506907 - RNA, 19 nt, Artificial Sequence
  Description of Artificial Sequence: Synthetic oligonucleotide
  Antisense strand to SEQ ID NO: 1506906
uaacccacuucucagaugu

SEQ ID NO: 1506908 - RNA, 19 nt, Artificial Sequence
  Description of Artificial Sequence: Synthetic oligonucleotide
  Sense strand starting at position 132 of SEQ ID NO: 1244680
ggacucagauaccaaauua

SEQ ID NO: 1506909 - RNA, 19 nt, Artificial Sequence
  Description of Artificial Sequence: Synthetic oligonucleotide
  Antisense strand to SEQ ID NO: 1506908
uaauuugguaucugagucc

SEQ ID NO: 1506910 - RNA, 19 nt, Artificial Sequence
  Description of Artificial Sequence: Synthetic oligonucleotide
  Sense strand starting at position 165 of SEQ ID NO: 1244680
auauguaaaugacugugaa

SEQ ID NO: 1506911 - RNA, 19 nt, Artificial Sequence
  Description of Artificial Sequence: Synthetic oligonucleotide
  Antisense strand to SEQ ID NO: 1506910
uucacagucauuuacauau

SEQ ID NO: 1506912 - RNA, 19 nt, Artificial Sequence
  Description of Artificial Sequence: Synthetic oligonucleotide
  Sense strand starting at position 166 of SEQ ID NO: 1244680
uauguaaaugacugugaau

SEQ ID NO: 1506913 - RNA, 19 nt, Artificial Sequence
  Description of Artificial Sequence: Synthetic oligonucleotide
  Antisense strand to SEQ ID NO: 1506912
auucacagucauuuacaua

SEQ ID NO: 1506914 - RNA, 19 nt, Artificial Sequence
  Description of Artificial Sequence: Synthetic oligonucleotide
  Sense strand starting at position 168 of SEQ ID NO: 1244680
uguaaaugacugugaauga

SEQ ID NO: 1506915 - RNA, 19 nt, Artificial Sequence
  Description of Artificial Sequence: Synthetic oligonucleotide
  Antisense strand to SEQ ID NO: 1506914
ucauucacagucauuuaca

SEQ ID NO: 1506916 - RNA, 19 nt, Artificial Sequence
  Description of Artificial Sequence: Synthetic oligonucleotide
  Sense strand starting at position 169 of SEQ ID NO: 1244680
guaaaugacugugaaugag

SEQ ID NO: 1506917 - RNA, 19 nt, Artificial Sequence
  Description of Artificial Sequence: Synthetic oligonucleotide
  Antisense strand to SEQ ID NO: 1506916
cucauucacagucauuuac

SEQ ID NO: 1506918 - RNA, 19 nt, Artificial Sequence
  Description of Artificial Sequence: Synthetic oligonucleotide
  Sense strand starting at position 833 of SEQ ID NO: 1244680
uucgggauucgagggagaa

SEQ ID NO: 1506919 - RNA, 19 nt, Artificial Sequence
  Description of Artificial Sequence: Synthetic oligonucleotide
  Antisense strand to SEQ ID NO: 1506918
uucucccucgaaucccgaa

SEQ ID NO: 1506920 - RNA, 19 nt, Artificial Sequence
  Description of Artificial Sequence: Synthetic oligonucleotide
  Sense strand starting at position 834 of SEQ ID NO: 1244680
ucgggauucgagggagaac

SEQ ID NO: 1506921 - RNA, 19 nt, Artificial Sequence
  Description of Artificial Sequence: Synthetic oligonucleotide
  Antisense strand to SEQ ID NO: 1506920
guucucccucgaaucccga

SEQ ID NO: 1506922 - RNA, 19 nt, Artificial Sequence
  Description of Artificial Sequence: Synthetic oligonucleotide
  Sense strand starting at position 913 of SEQ ID NO: 1244680
acugauguuugacugggaa

SEQ ID NO: 1506923 - RNA, 19 nt, Artificial Sequence
  Description of Artificial Sequence: Synthetic oligonucleotide
  Antisense strand to SEQ ID NO: 1506922
uucccagucaaacaucagu

SEQ ID NO: 1506924 - RNA, 19 nt, Artificial Sequence
  Description of Artificial Sequence: Synthetic oligonucleotide
  Sense strand starting at position 915 of SEQ ID NO: 1244680
ugauguuugacugggaagu

SEQ ID NO: 1506925 - RNA, 19 nt, Artificial Sequence
  Description of Artificial Sequence: Synthetic oligonucleotide
  Antisense strand to SEQ ID NO: 1506924
acuucccagucaaacauca

SEQ ID NO: 1506926 - RNA, 19 nt, Artificial Sequence
  Description of Artificial Sequence: Synthetic oligonucleotide
  Sense strand starting at position 916 of SEQ ID NO: 1244680
gauguuugacugggaagug

SEQ ID NO: 1506927 - RNA, 19 nt, Artificial Sequence
  Description of Artificial Sequence: Synthetic oligonucleotide
  Antisense strand to SEQ ID NO: 1506926
cacuucccagucaaacauc

SEQ ID NO: 1506928 - RNA, 19 nt, Artificial Sequence
  Description of Artificial Sequence: Synthetic oligonucleotide
  Sense strand starting at position 981 of SEQ ID NO: 1244680
ugugugaagguauguguga

SEQ ID NO: 1506929 - RNA, 19 nt, Artificial Sequence
  Description of Artificial Sequence: Synthetic oligonucleotide
  Antisense strand to SEQ ID NO: 1506928
ucacacauaccuucacaca

SEQ ID NO: 1506930 - RNA, 19 nt, Artificial Sequence
  Description of Artificial Sequence: Synthetic oligonucleotide
  Sense strand starting at position 995 of SEQ ID NO: 1244680
ugugagggucugugaggau

SEQ ID NO: 1506931 - RNA, 19 nt, Artificial Sequence
  Description of Artificial Sequence: Synthetic oligonucleotide
  Antisense strand to SEQ ID NO: 1506930
auccucacagacccucaca

SEQ ID NO: 1506932 - RNA, 19 nt, Artificial Sequence
  Description of Artificial Sequence: Synthetic oligonucleotide
  Sense strand starting at position 1345 of SEQ ID NO: 1244680
ggguguguaugugugaaag

SEQ ID NO: 1506933 - RNA, 19 nt, Artificial Sequence
  Description of Artificial Sequence: Synthetic oligonucleotide
  Antisense strand to SEQ ID NO: 1506932
cuuucacacauacacaccc

SEQ ID NO: 1506934 - RNA, 19 nt, Artificial Sequence
  Description of Artificial Sequence: Synthetic oligonucleotide
  Sense strand starting at position 2091 of SEQ ID NO: 1244680
gcaccaaaucugggauaga

SEQ ID NO: 1506935 - RNA, 19 nt, Artificial Sequence
  Description of Artificial Sequence: Synthetic oligonucleotide
  Antisense strand to SEQ ID NO: 1506934
ucuaucccagauuuggugc

SEQ ID NO: 1506936 - RNA, 19 nt, Artificial Sequence
  Description of Artificial Sequence: Synthetic oligonucleotide
  Sense strand starting at position 2555 of SEQ ID NO: 1244680
cgugcuuuccugggcacaa

SEQ ID NO: 1506937 - RNA, 19 nt, Artificial Sequence
  Description of Artificial Sequence: Synthetic oligonucleotide
  Antisense strand to SEQ ID NO: 1506936
uugugcccaggaaagcacg

SEQ ID NO: 1506938 - RNA, 19 nt, Artificial Sequence
  Description of Artificial Sequence: Synthetic oligonucleotide
  Sense strand starting at position 2556 of SEQ ID NO: 1244680
gugcuuuccugggcacaac

SEQ ID NO: 1506939 - RNA, 19 nt, Artificial Sequence
  Description of Artificial Sequence: Synthetic oligonucleotide
  Antisense strand to SEQ ID NO: 1506938
guugugcccaggaaagcac

SEQ ID NO: 1506940 - RNA, 19 nt, Artificial Sequence
  Description of Artificial Sequence: Synthetic oligonucleotide
  Sense strand starting at position 2590 of SEQ ID NO: 1244680
gcuccaagcuccucgaaga

SEQ ID NO: 1506941 - RNA, 19 nt, Artificial Sequence
  Description of Artificial Sequence: Synthetic oligonucleotide
  Antisense strand to SEQ ID NO: 1506940
ucuucgaggagcuuggagc

SEQ ID NO: 1506942 - RNA, 19 nt, Artificial Sequence
  Description of Artificial Sequence: Synthetic oligonucleotide
  Sense strand starting at position 2600 of SEQ ID NO: 1244680
ccucgaagacuaggaucuu

SEQ ID NO: 1506943 - RNA, 19 nt, Artificial Sequence
  Description of Artificial Sequence: Synthetic oligonucleotide
  Antisense strand to SEQ ID NO: 1506942
aagauccuagucuucgagg

SEQ ID NO: 1506944 - RNA, 19 nt, Artificial Sequence
  Description of Artificial Sequence: Synthetic oligonucleotide
  Sense strand starting at position 2833 of SEQ ID NO: 1244680
aggguucauucggcgcaua

SEQ ID NO: 1506945 - RNA, 19 nt, Artificial Sequence
  Description of Artificial Sequence: Synthetic oligonucleotide
  Antisense strand to SEQ ID NO: 1506944
uaugcgccgaaugaacccu

SEQ ID NO: 1506946 - RNA, 19 nt, Artificial Sequence
  Description of Artificial Sequence: Synthetic oligonucleotide
  Sense strand starting at position 2940 of SEQ ID NO: 1244680
acuauaaacuggcaagaau

SEQ ID NO: 1506947 - RNA, 19 nt, Artificial Sequence
  Description of Artificial Sequence: Synthetic oligonucleotide
  Antisense strand to SEQ ID NO: 1506946
auucuugccaguuuauagu

SEQ ID NO: 1506948 - RNA, 19 nt, Artificial Sequence
  Description of Artificial Sequence: Synthetic oligonucleotide
  Sense strand starting at position 2953 of SEQ ID NO: 1244680
aagaauagugcuugccucu

SEQ ID NO: 1506949 - RNA, 19 nt, Artificial Sequence
  Description of Artificial Sequence: Synthetic oligonucleotide
  Antisense strand to SEQ ID NO: 1506948
agaggcaagcacuauucuu

SEQ ID NO: 1506950 - RNA, 19 nt, Artificial Sequence
  Description of Artificial Sequence: Synthetic oligonucleotide
  Sense strand starting at position 2999 of SEQ ID NO: 1244680
uaaugaaugcagcgcauau

SEQ ID NO: 1506951 - RNA, 19 nt, Artificial Sequence
  Description of Artificial Sequence: Synthetic oligonucleotide
  Antisense strand to SEQ ID NO: 1506950
auaugcgcugcauucauua

SEQ ID NO: 1506952 - RNA, 19 nt, Artificial Sequence
  Description of Artificial Sequence: Synthetic oligonucleotide
  Sense strand starting at position 3003 of SEQ ID NO: 1244680
gaaugcagcgcauauuuau

SEQ ID NO: 1506953 - RNA, 19 nt, Artificial Sequence
  Description of Artificial Sequence: Synthetic oligonucleotide
  Antisense strand to SEQ ID NO: 1506952
auaaauaugcgcugcauuc

SEQ ID NO: 1506954 - RNA, 19 nt, Artificial Sequence
  Description of Artificial Sequence: Synthetic oligonucleotide
  Sense strand starting at position 3009 of SEQ ID NO: 1244680
agcgcauauuuaugaaaca

SEQ ID NO: 1506955 - RNA, 19 nt, Artificial Sequence
  Description of Artificial Sequence: Synthetic oligonucleotide
  Antisense strand to SEQ ID NO: 1506954
uguuucauaaauaugcgcu

SEQ ID NO: 1506956 - RNA, 19 nt, Artificial Sequence
  Description of Artificial Sequence: Synthetic oligonucleotide
  Sense strand starting at position 3010 of SEQ ID NO: 1244680
gcgcauauuuaugaaacac

SEQ ID NO: 1506957 - RNA, 19 nt, Artificial Sequence
  Description of Artificial Sequence: Synthetic oligonucleotide
  Antisense strand to SEQ ID NO: 1506956
guguuucauaaauaugcgc

SEQ ID NO: 1506958 - RNA, 19 nt, Artificial Sequence
  Description of Artificial Sequence: Synthetic oligonucleotide
  Sense strand starting at position 3035 of SEQ ID NO: 1244680
uguaucagacauugaaauu

SEQ ID NO: 1506959 - RNA, 19 nt, Artificial Sequence
  Description of Artificial Sequence: Synthetic oligonucleotide
  Antisense strand to SEQ ID NO: 1506958
aauuucaaugucugauaca

SEQ ID NO: 1506960 - RNA, 19 nt, Artificial Sequence
  Description of Artificial Sequence: Synthetic oligonucleotide
  Sense strand starting at position 3130 of SEQ ID NO: 1244680
ugcugagaaucuuacauau

SEQ ID NO: 1506961 - RNA, 19 nt, Artificial Sequence
  Description of Artificial Sequence: Synthetic oligonucleotide
  Antisense strand to SEQ ID NO: 1506960
auauguaagauucucagca

SEQ ID NO: 1506962 - RNA, 19 nt, Artificial Sequence
  Description of Artificial Sequence: Synthetic oligonucleotide
  Sense strand starting at position 3178 of SEQ ID NO: 1244680
ucagcaguuccaugaggca

SEQ ID NO: 1506963 - RNA, 19 nt, Artificial Sequence
  Description of Artificial Sequence: Synthetic oligonucleotide
  Antisense strand to SEQ ID NO: 1506962
ugccucauggaacugcuga

SEQ ID NO: 1506964 - RNA, 19 nt, Artificial Sequence
  Description of Artificial Sequence: Synthetic oligonucleotide
  Sense strand starting at position 3187 of SEQ ID NO: 1244680
ccaugaggcagguauuauu

SEQ ID NO: 1506965 - RNA, 19 nt, Artificial Sequence
  Description of Artificial Sequence: Synthetic oligonucleotide
  Antisense strand to SEQ ID NO: 1506964
aauaauaccugccucaugg

SEQ ID NO: 1506966 - RNA, 19 nt, Artificial Sequence
  Description of Artificial Sequence: Synthetic oligonucleotide
  Sense strand starting at position 3201 of SEQ ID NO: 1244680
uuauuacugugcccauuua

SEQ ID NO: 1506967 - RNA, 19 nt, Artificial Sequence
  Description of Artificial Sequence: Synthetic oligonucleotide
  Antisense strand to SEQ ID NO: 1506966
uaaaugggcacaguaauaa

SEQ ID NO: 1506968 - RNA, 19 nt, Artificial Sequence
  Description of Artificial Sequence: Synthetic oligonucleotide
  Sense strand starting at position 3209 of SEQ ID NO: 1244680
gugcccauuuaacagauga

SEQ ID NO: 1506969 - RNA, 19 nt, Artificial Sequence
  Description of Artificial Sequence: Synthetic oligonucleotide
  Antisense strand to SEQ ID NO: 1506968
ucaucuguuaaaugggcac

SEQ ID NO: 1506970 - RNA, 19 nt, Artificial Sequence
  Description of Artificial Sequence: Synthetic oligonucleotide
  Sense strand starting at position 3263 of SEQ ID NO: 1244680
ggccacauugcugaugagu

SEQ ID NO: 1506971 - RNA, 19 nt, Artificial Sequence
  Description of Artificial Sequence: Synthetic oligonucleotide
  Antisense strand to SEQ ID NO: 1506970
acucaucagcaauguggcc

SEQ ID NO: 1506972 - RNA, 19 nt, Artificial Sequence
  Description of Artificial Sequence: Synthetic oligonucleotide
  Sense strand starting at position 3266 of SEQ ID NO: 1244680
cacauugcugaugaguaga

SEQ ID NO: 1506973 - RNA, 19 nt, Artificial Sequence
  Description of Artificial Sequence: Synthetic oligonucleotide
  Antisense strand to SEQ ID NO: 1506972
ucuacucaucagcaaugug

SEQ ID NO: 1506974 - RNA, 19 nt, Artificial Sequence
  Description of Artificial Sequence: Synthetic oligonucleotide
  Sense strand starting at position 3268 of SEQ ID NO: 1244680
cauugcugaugaguagaau

SEQ ID NO: 1506975 - RNA, 19 nt, Artificial Sequence
  Description of Artificial Sequence: Synthetic oligonucleotide
  Antisense strand to SEQ ID NO: 1506974
auucuacucaucagcaaug

SEQ ID NO: 1506976 - RNA, 19 nt, Artificial Sequence
  Description of Artificial Sequence: Synthetic oligonucleotide
  Sense strand starting at position 3743 of SEQ ID NO: 1244680
ggcaguauuugucccagca

SEQ ID NO: 1506977 - RNA, 19 nt, Artificial Sequence
  Description of Artificial Sequence: Synthetic oligonucleotide
  Antisense strand to SEQ ID NO: 1506976
ugcugggacaaauacugcc

SEQ ID NO: 1506978 - RNA, 19 nt, Artificial Sequence
  Description of Artificial Sequence: Synthetic oligonucleotide
  Sense strand starting at position 3772 of SEQ ID NO: 1244680
aucucucugucuucucaga

SEQ ID NO: 1506979 - RNA, 19 nt, Artificial Sequence
  Description of Artificial Sequence: Synthetic oligonucleotide
  Antisense strand to SEQ ID NO: 1506978
ucugagaagacagagagau

SEQ ID NO: 1506980 - RNA, 19 nt, Artificial Sequence
  Description of Artificial Sequence: Synthetic oligonucleotide
  Sense strand starting at position 3774 of SEQ ID NO: 1244680
cucucugucuucucagaga

SEQ ID NO: 1506981 - RNA, 19 nt, Artificial Sequence
  Description of Artificial Sequence: Synthetic oligonucleotide
  Antisense strand to SEQ ID NO: 1506980
ucucugagaagacagagag

SEQ ID NO: 1506982 - RNA, 19 nt, Artificial Sequence
  Description of Artificial Sequence: Synthetic oligonucleotide
  Sense strand starting at position 3777 of SEQ ID NO: 1244680
ucugucuucucagagacag

SEQ ID NO: 1506983 - RNA, 19 nt, Artificial Sequence
  Description of Artificial Sequence: Synthetic oligonucleotide
  Antisense strand to SEQ ID NO: 1506982
cugucucugagaagacaga

SEQ ID NO: 1506984 - RNA, 19 nt, Artificial Sequence
  Description of Artificial Sequence: Synthetic oligonucleotide
  Sense strand starting at position 3899 of SEQ ID NO: 1244680
ugagcuucuccaugugacu

SEQ ID NO: 1506985 - RNA, 19 nt, Artificial Sequence
  Description of Artificial Sequence: Synthetic oligonucleotide
  Antisense strand to SEQ ID NO: 1506984
agucacauggagaagcuca

SEQ ID NO: 1506986 - RNA, 19 nt, Artificial Sequence
  Description of Artificial Sequence: Synthetic oligonucleotide
  Sense strand starting at position 202 of SEQ ID NO: 1244681
uugccagaagucuaggcaa

SEQ ID NO: 1506987 - RNA, 19 nt, Artificial Sequence
  Description of Artificial Sequence: Synthetic oligonucleotide
  Antisense strand to SEQ ID NO: 1506986
uugccuagacuucuggcaa

SEQ ID NO: 1506988 - RNA, 19 nt, Artificial Sequence
  Description of Artificial Sequence: Synthetic oligonucleotide
  Sense strand starting at position 204 of SEQ ID NO: 1244681
gccagaagucuaggcaaug

SEQ ID NO: 1506989 - RNA, 19 nt, Artificial Sequence
  Description of Artificial Sequence: Synthetic oligonucleotide
  Antisense strand to SEQ ID NO: 1506988
cauugccuagacuucuggc

SEQ ID NO: 1506990 - RNA, 19 nt, Artificial Sequence
  Description of Artificial Sequence: Synthetic oligonucleotide
  Sense strand starting at position 205 of SEQ ID NO: 1244681
ccagaagucuaggcaaugu

SEQ ID NO: 1506991 - RNA, 19 nt, Artificial Sequence
  Description of Artificial Sequence: Synthetic oligonucleotide
  Antisense strand to SEQ ID NO: 1506990
acauugccuagacuucugg

SEQ ID NO: 1506992 - RNA, 19 nt, Artificial Sequence
  Description of Artificial Sequence: Synthetic oligonucleotide
  Sense strand starting at position 470 of SEQ ID NO: 1244681
guacaaagggaugguugau

SEQ ID NO: 1506993 - RNA, 19 nt, Artificial Sequence
  Description of Artificial Sequence: Synthetic oligonucleotide
  Antisense strand to SEQ ID NO: 1506992
aucaaccaucccuuuguac

SEQ ID NO: 1506994 - RNA, 19 nt, Artificial Sequence
  Description of Artificial Sequence: Synthetic oligonucleotide
  Sense strand starting at position 484 of SEQ ID NO: 1244681
uugaucugucgcuaggaac

SEQ ID NO: 1506995 - RNA, 19 nt, Artificial Sequence
  Description of Artificial Sequence: Synthetic oligonucleotide
  Antisense strand to SEQ ID NO: 1506994
guuccuagcgacagaucaa

SEQ ID NO: 1506996 - RNA, 19 nt, Artificial Sequence
  Description of Artificial Sequence: Synthetic oligonucleotide
  Sense strand starting at position 620 of SEQ ID NO: 1244681
acucaauauuuggaacuga

SEQ ID NO: 1506997 - RNA, 19 nt, Artificial Sequence
  Description of Artificial Sequence: Synthetic oligonucleotide
  Antisense strand to SEQ ID NO: 1506996
ucaguuccaaauauugagu

SEQ ID NO: 1506998 - RNA, 19 nt, Artificial Sequence
  Description of Artificial Sequence: Synthetic oligonucleotide
  Sense strand starting at position 631 of SEQ ID NO: 1244681
ggaacugacuaucugguaa

SEQ ID NO: 1506999 - RNA, 19 nt, Artificial Sequence
  Description of Artificial Sequence: Synthetic oligonucleotide
  Antisense strand to SEQ ID NO: 1506998
uuaccagauagucaguucc

SEQ ID NO: 1507000 - RNA, 19 nt, Artificial Sequence
  Description of Artificial Sequence: Synthetic oligonucleotide
  Sense strand starting at position 638 of SEQ ID NO: 1244681
acuaucugguaauccuaga

SEQ ID NO: 1507001 - RNA, 19 nt, Artificial Sequence
  Description of Artificial Sequence: Synthetic oligonucleotide
  Antisense strand to SEQ ID NO: 1507000
ucuaggauuaccagauagu

SEQ ID NO: 1507002 - RNA, 19 nt, Artificial Sequence
  Description of Artificial Sequence: Synthetic oligonucleotide
  Sense strand starting at position 696 of SEQ ID NO: 1244681
agauuucccuaguaggaca

SEQ ID NO: 1507003 - RNA, 19 nt, Artificial Sequence
  Description of Artificial Sequence: Synthetic oligonucleotide
  Antisense strand to SEQ ID NO: 1507002
uguccuacuagggaaaucu

SEQ ID NO: 1507004 - RNA, 19 nt, Artificial Sequence
  Description of Artificial Sequence: Synthetic oligonucleotide
  Sense strand starting at position 748 of SEQ ID NO: 1244681
caggaucuacuuuaguguu

SEQ ID NO: 1507005 - RNA, 19 nt, Artificial Sequence
  Description of Artificial Sequence: Synthetic oligonucleotide
  Antisense strand to SEQ ID NO: 1507004
aacacuaaaguagauccug

SEQ ID NO: 1507006 - RNA, 19 nt, Artificial Sequence
  Description of Artificial Sequence: Synthetic oligonucleotide
  Sense strand starting at position 750 of SEQ ID NO: 1244681
ggaucuacuuuaguguuaa

SEQ ID NO: 1507007 - RNA, 19 nt, Artificial Sequence
  Description of Artificial Sequence: Synthetic oligonucleotide
  Antisense strand to SEQ ID NO: 1507006
uuaacacuaaaguagaucc

SEQ ID NO: 1507008 - RNA, 19 nt, Artificial Sequence
  Description of Artificial Sequence: Synthetic oligonucleotide
  Sense strand starting at position 761 of SEQ ID NO: 1244681
aguguuaaacuaggcugaa

SEQ ID NO: 1507009 - RNA, 19 nt, Artificial Sequence
  Description of Artificial Sequence: Synthetic oligonucleotide
  Antisense strand to SEQ ID NO: 1507008
uucagccuaguuuaacacu

SEQ ID NO: 1507010 - RNA, 19 nt, Artificial Sequence
  Description of Artificial Sequence: Synthetic oligonucleotide
  Sense strand starting at position 762 of SEQ ID NO: 1244681
guguuaaacuaggcugaag

SEQ ID NO: 1507011 - RNA, 19 nt, Artificial Sequence
  Description of Artificial Sequence: Synthetic oligonucleotide
  Antisense strand to SEQ ID NO: 1507010
cuucagccuaguuuaacac

SEQ ID NO: 1507012 - RNA, 19 nt, Artificial Sequence
  Description of Artificial Sequence: Synthetic oligonucleotide
  Sense strand starting at position 1177 of SEQ ID NO: 1244681
ccaguugagacuggucauu

SEQ ID NO: 1507013 - RNA, 19 nt, Artificial Sequence
  Description of Artificial Sequence: Synthetic oligonucleotide
  Antisense strand to SEQ ID NO: 1507012
aaugaccagucucaacugg

SEQ ID NO: 1507014 - RNA, 19 nt, Artificial Sequence
  Description of Artificial Sequence: Synthetic oligonucleotide
  Sense strand starting at position 1227 of SEQ ID NO: 1244681
cagggauuccacugacuua

SEQ ID NO: 1507015 - RNA, 19 nt, Artificial Sequence
  Description of Artificial Sequence: Synthetic oligonucleotide
  Antisense strand to SEQ ID NO: 1507014
uaagucaguggaaucccug

SEQ ID NO: 1507016 - RNA, 19 nt, Artificial Sequence
  Description of Artificial Sequence: Synthetic oligonucleotide
  Sense strand starting at position 1329 of SEQ ID NO: 1244681
ggcagaggcuucucuacca

SEQ ID NO: 1507017 - RNA, 19 nt, Artificial Sequence
  Description of Artificial Sequence: Synthetic oligonucleotide
  Antisense strand to SEQ ID NO: 1507016
ugguagagaagccucugcc

SEQ ID NO: 1507018 - RNA, 19 nt, Artificial Sequence
  Description of Artificial Sequence: Synthetic oligonucleotide
  Sense strand starting at position 1400 of SEQ ID NO: 1244681
uucccagaguucuuccaga

SEQ ID NO: 1507019 - RNA, 19 nt, Artificial Sequence
  Description of Artificial Sequence: Synthetic oligonucleotide
  Antisense strand to SEQ ID NO: 1507018
ucuggaagaacucugggaa

SEQ ID NO: 1507020 - RNA, 19 nt, Artificial Sequence
  Description of Artificial Sequence: Synthetic oligonucleotide
  Sense strand starting at position 1414 of SEQ ID NO: 1244681
ccagaucugaccugauggu

SEQ ID NO: 1507021 - RNA, 19 nt, Artificial Sequence
  Description of Artificial Sequence: Synthetic oligonucleotide
  Antisense strand to SEQ ID NO: 1507020
accaucaggucagaucugg

SEQ ID NO: 1507022 - RNA, 19 nt, Artificial Sequence
  Description of Artificial Sequence: Synthetic oligonucleotide
  Sense strand starting at position 2059 of SEQ ID NO: 1244681
cucuuccagucugcagaaa

SEQ ID NO: 1507023 - RNA, 19 nt, Artificial Sequence
  Description of Artificial Sequence: Synthetic oligonucleotide
  Antisense strand to SEQ ID NO: 1507022
uuucugcagacuggaagag

SEQ ID NO: 1507024 - RNA, 19 nt, Artificial Sequence
  Description of Artificial Sequence: Synthetic oligonucleotide
  Sense strand starting at position 2109 of SEQ ID NO: 1244681
acuagaaauuucugugaua

SEQ ID NO: 1507025 - RNA, 19 nt, Artificial Sequence
  Description of Artificial Sequence: Synthetic oligonucleotide
  Antisense strand to SEQ ID NO: 1507024
uaucacagaaauuucuagu

SEQ ID NO: 1507026 - RNA, 19 nt, Artificial Sequence
  Description of Artificial Sequence: Synthetic oligonucleotide
  Sense strand starting at position 2112 of SEQ ID NO: 1244681
agaaauuucugugauacag

SEQ ID NO: 1507027 - RNA, 19 nt, Artificial Sequence
  Description of Artificial Sequence: Synthetic oligonucleotide
  Antisense strand to SEQ ID NO: 1507026
cuguaucacagaaauuucu

SEQ ID NO: 1507028 - RNA, 19 nt, Artificial Sequence
  Description of Artificial Sequence: Synthetic oligonucleotide
  Sense strand starting at position 2176 of SEQ ID NO: 1244681
caggauguucuggguugau

SEQ ID NO: 1507029 - RNA, 19 nt, Artificial Sequence
  Description of Artificial Sequence: Synthetic oligonucleotide
  Antisense strand to SEQ ID NO: 1507028
aucaacccagaacauccug

SEQ ID NO: 1507030 - RNA, 19 nt, Artificial Sequence
  Description of Artificial Sequence: Synthetic oligonucleotide
  Sense strand starting at position 2179 of SEQ ID NO: 1244681
gauguucuggguugaugag

SEQ ID NO: 1507031 - RNA, 19 nt, Artificial Sequence
  Description of Artificial Sequence: Synthetic oligonucleotide
  Antisense strand to SEQ ID NO: 1507030
cucaucaacccagaacauc

SEQ ID NO: 1507032 - RNA, 19 nt, Artificial Sequence
  Description of Artificial Sequence: Synthetic oligonucleotide
  Sense strand starting at position 2671 of SEQ ID NO: 1244681
gagccugaucagugugaga

SEQ ID NO: 1507033 - RNA, 19 nt, Artificial Sequence
  Description of Artificial Sequence: Synthetic oligonucleotide
  Antisense strand to SEQ ID NO: 1507032
ucucacacugaucaggcuc

SEQ ID NO: 1507034 - RNA, 19 nt, Artificial Sequence
  Description of Artificial Sequence: Synthetic oligonucleotide
  Sense strand starting at position 2673 of SEQ ID NO: 1244681
gccugaucagugugagaca

SEQ ID NO: 1507035 - RNA, 19 nt, Artificial Sequence
  Description of Artificial Sequence: Synthetic oligonucleotide
  Antisense strand to SEQ ID NO: 1507034
ugucucacacugaucaggc

SEQ ID NO: 1507036 - RNA, 19 nt, Artificial Sequence
  Description of Artificial Sequence: Synthetic oligonucleotide
  Sense strand starting at position 2769 of SEQ ID NO: 1244681
cccacaaauccucguggau

SEQ ID NO: 1507037 - RNA, 19 nt, Artificial Sequence
  Description of Artificial Sequence: Synthetic oligonucleotide
  Antisense strand to SEQ ID NO: 1507036
auccacgaggauuuguggg

SEQ ID NO: 1507038 - RNA, 19 nt, Artificial Sequence
  Description of Artificial Sequence: Synthetic oligonucleotide
  Sense strand starting at position 2870 of SEQ ID NO: 1244681
aucauuugcgccugccaaa

SEQ ID NO: 1507039 - RNA, 19 nt, Artificial Sequence
  Description of Artificial Sequence: Synthetic oligonucleotide
  Antisense strand to SEQ ID NO: 1507038
uuuggcaggcgcaaaugau

SEQ ID NO: 1507040 - RNA, 19 nt, Artificial Sequence
  Description of Artificial Sequence: Synthetic oligonucleotide
  Sense strand starting at position 2981 of SEQ ID NO: 1244681
ccgauuuaguuucuagcuu

SEQ ID NO: 1507041 - RNA, 19 nt, Artificial Sequence
  Description of Artificial Sequence: Synthetic oligonucleotide
  Antisense strand to SEQ ID NO: 1507040
aagcuagaaacuaaaucgg

SEQ ID NO: 1507042 - RNA, 19 nt, Artificial Sequence
  Description of Artificial Sequence: Synthetic oligonucleotide
  Sense strand starting at position 3044 of SEQ ID NO: 1244681
cuuugauuaccuggcagau

SEQ ID NO: 1507043 - RNA, 19 nt, Artificial Sequence
  Description of Artificial Sequence: Synthetic oligonucleotide
  Antisense strand to SEQ ID NO: 1507042
aucugccagguaaucaaag

SEQ ID NO: 1507044 - RNA, 19 nt, Artificial Sequence
  Description of Artificial Sequence: Synthetic oligonucleotide
  Sense strand starting at position 3057 of SEQ ID NO: 1244681
gcagauuggagaggaguaa

SEQ ID NO: 1507045 - RNA, 19 nt, Artificial Sequence
  Description of Artificial Sequence: Synthetic oligonucleotide
  Antisense strand to SEQ ID NO: 1507044
uuacuccucuccaaucugc

SEQ ID NO: 1507046 - RNA, 19 nt, Artificial Sequence
  Description of Artificial Sequence: Synthetic oligonucleotide
  Sense strand starting at position 3235 of SEQ ID NO: 1244681
gguuguguuagcucucagu

SEQ ID NO: 1507047 - RNA, 19 nt, Artificial Sequence
  Description of Artificial Sequence: Synthetic oligonucleotide
  Antisense strand to SEQ ID NO: 1507046
acugagagcuaacacaacc

SEQ ID NO: 1507048 - RNA, 19 nt, Artificial Sequence
  Description of Artificial Sequence: Synthetic oligonucleotide
  Sense strand starting at position 3237 of SEQ ID NO: 1244681
uuguguuagcucucaguuc

SEQ ID NO: 1507049 - RNA, 19 nt, Artificial Sequence
  Description of Artificial Sequence: Synthetic oligonucleotide
  Antisense strand to SEQ ID NO: 1507048
gaacugagagcuaacacaa

SEQ ID NO: 1507050 - RNA, 19 nt, Artificial Sequence
  Description of Artificial Sequence: Synthetic oligonucleotide
  Sense strand starting at position 3276 of SEQ ID NO: 1244681
acgaaacacucaguaaaca

SEQ ID NO: 1507051 - RNA, 19 nt, Artificial Sequence
  Description of Artificial Sequence: Synthetic oligonucleotide
  Antisense strand to SEQ ID NO: 1507050
uguuuacugaguguuucgu

SEQ ID NO: 1507052 - RNA, 19 nt, Artificial Sequence
  Description of Artificial Sequence: Synthetic oligonucleotide
  Sense strand starting at position 3301 of SEQ ID NO: 1244681
uuaauaaucugagugaggu

SEQ ID NO: 1507053 - RNA, 19 nt, Artificial Sequence
  Description of Artificial Sequence: Synthetic oligonucleotide
  Antisense strand to SEQ ID NO: 1507052
accucacucagauuauuaa

SEQ ID NO: 1507054 - RNA, 19 nt, Artificial Sequence
  Description of Artificial Sequence: Synthetic oligonucleotide
  Sense strand starting at position 3302 of SEQ ID NO: 1244681
uaauaaucugagugagguc

SEQ ID NO: 1507055 - RNA, 19 nt, Artificial Sequence
  Description of Artificial Sequence: Synthetic oligonucleotide
  Antisense strand to SEQ ID NO: 1507054
gaccucacucagauuauua

SEQ ID NO: 1507056 - RNA, 19 nt, Artificial Sequence
  Description of Artificial Sequence: Synthetic oligonucleotide
  Sense strand starting at position 3691 of SEQ ID NO: 1244681
ugccaaguccuacaauagu

SEQ ID NO: 1507057 - RNA, 19 nt, Artificial Sequence
  Description of Artificial Sequence: Synthetic oligonucleotide
  Antisense strand to SEQ ID NO: 1507056
acuauuguaggacuuggca

SEQ ID NO: 1507058 - RNA, 19 nt, Artificial Sequence
  Description of Artificial Sequence: Synthetic oligonucleotide
  Sense strand starting at position 3823 of SEQ ID NO: 1244681
gcugucucccuguauagaa

SEQ ID NO: 1507059 - RNA, 19 nt, Artificial Sequence
  Description of Artificial Sequence: Synthetic oligonucleotide
  Antisense strand to SEQ ID NO: 1507058
uucuauacagggagacagc

SEQ ID NO: 1507060 - RNA, 19 nt, Artificial Sequence
  Description of Artificial Sequence: Synthetic oligonucleotide
  Sense strand starting at position 3833 of SEQ ID NO: 1244681
uguauagaaucucugaucu

SEQ ID NO: 1507061 - RNA, 19 nt, Artificial Sequence
  Description of Artificial Sequence: Synthetic oligonucleotide
  Antisense strand to SEQ ID NO: 1507060
agaucagagauucuauaca

SEQ ID NO: 1507062 - RNA, 19 nt, Artificial Sequence
  Description of Artificial Sequence: Synthetic oligonucleotide
  Sense strand starting at position 3930 of SEQ ID NO: 1244681
uggaaucuuuauguagaug

SEQ ID NO: 1507063 - RNA, 19 nt, Artificial Sequence
  Description of Artificial Sequence: Synthetic oligonucleotide
  Antisense strand to SEQ ID NO: 1507062
caucuacauaaagauucca

SEQ ID NO: 1507064 - RNA, 19 nt, Artificial Sequence
  Description of Artificial Sequence: Synthetic oligonucleotide
  Sense strand starting at position 3935 of SEQ ID NO: 1244681
ucuuuauguagaugaagga

SEQ ID NO: 1507065 - RNA, 19 nt, Artificial Sequence
  Description of Artificial Sequence: Synthetic oligonucleotide
  Antisense strand to SEQ ID NO: 1507064
uccuucaucuacauaaaga

SEQ ID NO: 1507066 - RNA, 19 nt, Artificial Sequence
  Description of Artificial Sequence: Synthetic oligonucleotide
  Sense strand starting at position 113 of SEQ ID NO: 1244682
ggcaaugugguccauggau

SEQ ID NO: 1507067 - RNA, 19 nt, Artificial Sequence
  Description of Artificial Sequence: Synthetic oligonucleotide
  Antisense strand to SEQ ID NO: 1507066
auccauggaccacauugcc

SEQ ID NO: 1507068 - RNA, 19 nt, Artificial Sequence
  Description of Artificial Sequence: Synthetic oligonucleotide
  Sense strand starting at position 390 of SEQ ID NO: 1244682
gagacaggguccuuaauua

SEQ ID NO: 1507069 - RNA, 19 nt, Artificial Sequence
  Description of Artificial Sequence: Synthetic oligonucleotide
  Antisense strand to SEQ ID NO: 1507068
uaauuaaggacccugucuc

SEQ ID NO: 1507070 - RNA, 19 nt, Artificial Sequence
  Description of Artificial Sequence: Synthetic oligonucleotide
  Sense strand starting at position 398 of SEQ ID NO: 1244682
guccuuaauuaaggguaaa

SEQ ID NO: 1507071 - RNA, 19 nt, Artificial Sequence
  Description of Artificial Sequence: Synthetic oligonucleotide
  Antisense strand to SEQ ID NO: 1507070
uuuacccuuaauuaaggac

SEQ ID NO: 1507072 - RNA, 19 nt, Artificial Sequence
  Description of Artificial Sequence: Synthetic oligonucleotide
  Sense strand starting at position 412 of SEQ ID NO: 1244682
guaaaugaaucauaaggau

SEQ ID NO: 1507073 - RNA, 19 nt, Artificial Sequence
  Description of Artificial Sequence: Synthetic oligonucleotide
  Antisense strand to SEQ ID NO: 1507072
auccuuaugauucauuuac

SEQ ID NO: 1507074 - RNA, 19 nt, Artificial Sequence
  Description of Artificial Sequence: Synthetic oligonucleotide
  Sense strand starting at position 833 of SEQ ID NO: 1244682
ccgcuugucaugugaggaa

SEQ ID NO: 1507075 - RNA, 19 nt, Artificial Sequence
  Description of Artificial Sequence: Synthetic oligonucleotide
  Antisense strand to SEQ ID NO: 1507074
uuccucacaugacaagcgg

SEQ ID NO: 1507076 - RNA, 19 nt, Artificial Sequence
  Description of Artificial Sequence: Synthetic oligonucleotide
  Sense strand starting at position 836 of SEQ ID NO: 1244682
cuugucaugugaggaaaca

SEQ ID NO: 1507077 - RNA, 19 nt, Artificial Sequence
  Description of Artificial Sequence: Synthetic oligonucleotide
  Antisense strand to SEQ ID NO: 1507076
uguuuccucacaugacaag

SEQ ID NO: 1507078 - RNA, 19 nt, Artificial Sequence
  Description of Artificial Sequence: Synthetic oligonucleotide
  Sense strand starting at position 962 of SEQ ID NO: 1244682
ucuguuuaagccgauccau

SEQ ID NO: 1507079 - RNA, 19 nt, Artificial Sequence
  Description of Artificial Sequence: Synthetic oligonucleotide
  Antisense strand to SEQ ID NO: 1507078
auggaucggcuuaaacaga

SEQ ID NO: 1507080 - RNA, 19 nt, Artificial Sequence
  Description of Artificial Sequence: Synthetic oligonucleotide
  Sense strand starting at position 981 of SEQ ID NO: 1244682
ggcaguccgugcuaagaaa

SEQ ID NO: 1507081 - RNA, 19 nt, Artificial Sequence
  Description of Artificial Sequence: Synthetic oligonucleotide
  Antisense strand to SEQ ID NO: 1507080
uuucuuagcacggacugcc

SEQ ID NO: 1507082 - RNA, 19 nt, Artificial Sequence
  Description of Artificial Sequence: Synthetic oligonucleotide
  Sense strand starting at position 1034 of SEQ ID NO: 1244682
gacagccuccuguaggaau

SEQ ID NO: 1507083 - RNA, 19 nt, Artificial Sequence
  Description of Artificial Sequence: Synthetic oligonucleotide
  Antisense strand to SEQ ID NO: 1507082
auuccuacaggaggcuguc

SEQ ID NO: 1507084 - RNA, 19 nt, Artificial Sequence
  Description of Artificial Sequence: Synthetic oligonucleotide
  Sense strand starting at position 1046 of SEQ ID NO: 1244682
uaggaauucugauccgcag

SEQ ID NO: 1507085 - RNA, 19 nt, Artificial Sequence
  Description of Artificial Sequence: Synthetic oligonucleotide
  Antisense strand to SEQ ID NO: 1507084
cugcggaucagaauuccua

SEQ ID NO: 1507086 - RNA, 19 nt, Artificial Sequence
  Description of Artificial Sequence: Synthetic oligonucleotide
  Sense strand starting at position 1050 of SEQ ID NO: 1244682
aauucugauccgcagguga

SEQ ID NO: 1507087 - RNA, 19 nt, Artificial Sequence
  Description of Artificial Sequence: Synthetic oligonucleotide
  Antisense strand to SEQ ID NO: 1507086
ucaccugcggaucagaauu

SEQ ID NO: 1507088 - RNA, 19 nt, Artificial Sequence
  Description of Artificial Sequence: Synthetic oligonucleotide
  Sense strand starting at position 1076 of SEQ ID NO: 1244682
ugcagauucucugcugugu

SEQ ID NO: 1507089 - RNA, 19 nt, Artificial Sequence
  Description of Artificial Sequence: Synthetic oligonucleotide
  Antisense strand to SEQ ID NO: 1507088
acacagcagagaaucugca

SEQ ID NO: 1507090 - RNA, 19 nt, Artificial Sequence
  Description of Artificial Sequence: Synthetic oligonucleotide
  Sense strand starting at position 1077 of SEQ ID NO: 1244682
gcagauucucugcuguguu

SEQ ID NO: 1507091 - RNA, 19 nt, Artificial Sequence
  Description of Artificial Sequence: Synthetic oligonucleotide
  Antisense strand to SEQ ID NO: 1507090
aacacagcagagaaucugc

SEQ ID NO: 1507092 - RNA, 19 nt, Artificial Sequence
  Description of Artificial Sequence: Synthetic oligonucleotide
  Sense strand starting at position 1078 of SEQ ID NO: 1244682
cagauucucugcuguguuu

SEQ ID NO: 1507093 - RNA, 19 nt, Artificial Sequence
  Description of Artificial Sequence: Synthetic oligonucleotide
  Antisense strand to SEQ ID NO: 1507092
aaacacagcagagaaucug

SEQ ID NO: 1507094 - RNA, 19 nt, Artificial Sequence
  Description of Artificial Sequence: Synthetic oligonucleotide
  Sense strand starting at position 1089 of SEQ ID NO: 1244682
cuguguuucugggaggcga

SEQ ID NO: 1507095 - RNA, 19 nt, Artificial Sequence
  Description of Artificial Sequence: Synthetic oligonucleotide
  Antisense strand to SEQ ID NO: 1507094
ucgccucccagaaacacag

SEQ ID NO: 1507096 - RNA, 19 nt, Artificial Sequence
  Description of Artificial Sequence: Synthetic oligonucleotide
  Sense strand starting at position 1117 of SEQ ID NO: 1244682
aggagagcuguuuauguua

SEQ ID NO: 1507097 - RNA, 19 nt, Artificial Sequence
  Description of Artificial Sequence: Synthetic oligonucleotide
  Antisense strand to SEQ ID NO: 1507096
uaacauaaacagcucuccu

SEQ ID NO: 1507098 - RNA, 19 nt, Artificial Sequence
  Description of Artificial Sequence: Synthetic oligonucleotide
  Sense strand starting at position 1119 of SEQ ID NO: 1244682
gagagcuguuuauguuaca

SEQ ID NO: 1507099 - RNA, 19 nt, Artificial Sequence
  Description of Artificial Sequence: Synthetic oligonucleotide
  Antisense strand to SEQ ID NO: 1507098
uguaacauaaacagcucuc

SEQ ID NO: 1507100 - RNA, 19 nt, Artificial Sequence
  Description of Artificial Sequence: Synthetic oligonucleotide
  Sense strand starting at position 1233 of SEQ ID NO: 1244682
uggguuuggccuugucacu

SEQ ID NO: 1507101 - RNA, 19 nt, Artificial Sequence
  Description of Artificial Sequence: Synthetic oligonucleotide
  Antisense strand to SEQ ID NO: 1507100
agugacaaggccaaaccca

SEQ ID NO: 1507102 - RNA, 19 nt, Artificial Sequence
  Description of Artificial Sequence: Synthetic oligonucleotide
  Sense strand starting at position 1240 of SEQ ID NO: 1244682
ggccuugucacuugucaug

SEQ ID NO: 1507103 - RNA, 19 nt, Artificial Sequence
  Description of Artificial Sequence: Synthetic oligonucleotide
  Antisense strand to SEQ ID NO: 1507102
caugacaagugacaaggcc

SEQ ID NO: 1507104 - RNA, 19 nt, Artificial Sequence
  Description of Artificial Sequence: Synthetic oligonucleotide
  Sense strand starting at position 1245 of SEQ ID NO: 1244682
ugucacuugucaugagcca

SEQ ID NO: 1507105 - RNA, 19 nt, Artificial Sequence
  Description of Artificial Sequence: Synthetic oligonucleotide
  Antisense strand to SEQ ID NO: 1507104
uggcucaugacaagugaca

SEQ ID NO: 1507106 - RNA, 19 nt, Artificial Sequence
  Description of Artificial Sequence: Synthetic oligonucleotide
  Sense strand starting at position 1258 of SEQ ID NO: 1244682
gagccagagccuugauuac

SEQ ID NO: 1507107 - RNA, 19 nt, Artificial Sequence
  Description of Artificial Sequence: Synthetic oligonucleotide
  Antisense strand to SEQ ID NO: 1507106
guaaucaaggcucuggcuc

SEQ ID NO: 1507108 - RNA, 19 nt, Artificial Sequence
  Description of Artificial Sequence: Synthetic oligonucleotide
  Sense strand starting at position 1282 of SEQ ID NO: 1244682
ccggaagucuugugagcag

SEQ ID NO: 1507109 - RNA, 19 nt, Artificial Sequence
  Description of Artificial Sequence: Synthetic oligonucleotide
  Antisense strand to SEQ ID NO: 1507108
cugcucacaagacuuccgg

SEQ ID NO: 1507110 - RNA, 19 nt, Artificial Sequence
  Description of Artificial Sequence: Synthetic oligonucleotide
  Sense strand starting at position 1303 of SEQ ID NO: 1244682
cggugcuugcucuggagga

SEQ ID NO: 1507111 - RNA, 19 nt, Artificial Sequence
  Description of Artificial Sequence: Synthetic oligonucleotide
  Antisense strand to SEQ ID NO: 1507110
uccuccagagcaagcaccg

SEQ ID NO: 1507112 - RNA, 19 nt, Artificial Sequence
  Description of Artificial Sequence: Synthetic oligonucleotide
  Sense strand starting at position 1304 of SEQ ID NO: 1244682
ggugcuugcucuggaggaa

SEQ ID NO: 1507113 - RNA, 19 nt, Artificial Sequence
  Description of Artificial Sequence: Synthetic oligonucleotide
  Antisense strand to SEQ ID NO: 1507112
uuccuccagagcaagcacc

SEQ ID NO: 1507114 - RNA, 19 nt, Artificial Sequence
  Description of Artificial Sequence: Synthetic oligonucleotide
  Sense strand starting at position 1381 of SEQ ID NO: 1244682
ggcugugcccuugggauaa

SEQ ID NO: 1507115 - RNA, 19 nt, Artificial Sequence
  Description of Artificial Sequence: Synthetic oligonucleotide
  Antisense strand to SEQ ID NO: 1507114
uuaucccaagggcacagcc

SEQ ID NO: 1507116 - RNA, 19 nt, Artificial Sequence
  Description of Artificial Sequence: Synthetic oligonucleotide
  Sense strand starting at position 1649 of SEQ ID NO: 1244682
ggagacacccgugaagagu

SEQ ID NO: 1507117 - RNA, 19 nt, Artificial Sequence
  Description of Artificial Sequence: Synthetic oligonucleotide
  Antisense strand to SEQ ID NO: 1507116
acucuucacgggugucucc

SEQ ID NO: 1507118 - RNA, 19 nt, Artificial Sequence
  Description of Artificial Sequence: Synthetic oligonucleotide
  Sense strand starting at position 2503 of SEQ ID NO: 1244682
gauguccucccagaagcaa

SEQ ID NO: 1507119 - RNA, 19 nt, Artificial Sequence
  Description of Artificial Sequence: Synthetic oligonucleotide
  Antisense strand to SEQ ID NO: 1507118
uugcuucugggaggacauc

SEQ ID NO: 1507120 - RNA, 19 nt, Artificial Sequence
  Description of Artificial Sequence: Synthetic oligonucleotide
  Sense strand starting at position 2809 of SEQ ID NO: 1244682
gccagaaguguugagccua

SEQ ID NO: 1507121 - RNA, 19 nt, Artificial Sequence
  Description of Artificial Sequence: Synthetic oligonucleotide
  Antisense strand to SEQ ID NO: 1507120
uaggcucaacacuucuggc

SEQ ID NO: 1507122 - RNA, 19 nt, Artificial Sequence
  Description of Artificial Sequence: Synthetic oligonucleotide
  Sense strand starting at position 2814 of SEQ ID NO: 1244682
aaguguugagccuaauuag

SEQ ID NO: 1507123 - RNA, 19 nt, Artificial Sequence
  Description of Artificial Sequence: Synthetic oligonucleotide
  Antisense strand to SEQ ID NO: 1507122
cuaauuaggcucaacacuu

SEQ ID NO: 1507124 - RNA, 19 nt, Artificial Sequence
  Description of Artificial Sequence: Synthetic oligonucleotide
  Sense strand starting at position 2849 of SEQ ID NO: 1244682
ugaggaaucgcuuaucagu

SEQ ID NO: 1507125 - RNA, 19 nt, Artificial Sequence
  Description of Artificial Sequence: Synthetic oligonucleotide
  Antisense strand to SEQ ID NO: 1507124
acugauaagcgauuccuca

SEQ ID NO: 1507126 - RNA, 19 nt, Artificial Sequence
  Description of Artificial Sequence: Synthetic oligonucleotide
  Sense strand starting at position 2851 of SEQ ID NO: 1244682
aggaaucgcuuaucaguuu

SEQ ID NO: 1507127 - RNA, 19 nt, Artificial Sequence
  Description of Artificial Sequence: Synthetic oligonucleotide
  Antisense strand to SEQ ID NO: 1507126
aaacugauaagcgauuccu

SEQ ID NO: 1507128 - RNA, 19 nt, Artificial Sequence
  Description of Artificial Sequence: Synthetic oligonucleotide
  Sense strand starting at position 2862 of SEQ ID NO: 1244682
aucaguuucuuaucuggga

SEQ ID NO: 1507129 - RNA, 19 nt, Artificial Sequence
  Description of Artificial Sequence: Synthetic oligonucleotide
  Antisense strand to SEQ ID NO: 1507128
ucccagauaagaaacugau

SEQ ID NO: 1507130 - RNA, 19 nt, Artificial Sequence
  Description of Artificial Sequence: Synthetic oligonucleotide
  Sense strand starting at position 2866 of SEQ ID NO: 1244682
guuucuuaucugggagagu

SEQ ID NO: 1507131 - RNA, 19 nt, Artificial Sequence
  Description of Artificial Sequence: Synthetic oligonucleotide
  Antisense strand to SEQ ID NO: 1507130
acucucccagauaagaaac

SEQ ID NO: 1507132 - RNA, 19 nt, Artificial Sequence
  Description of Artificial Sequence: Synthetic oligonucleotide
  Sense strand starting at position 2867 of SEQ ID NO: 1244682
uuucuuaucugggagaguu

SEQ ID NO: 1507133 - RNA, 19 nt, Artificial Sequence
  Description of Artificial Sequence: Synthetic oligonucleotide
  Antisense strand to SEQ ID NO: 1507132
aacucucccagauaagaaa

SEQ ID NO: 1507134 - RNA, 19 nt, Artificial Sequence
  Description of Artificial Sequence: Synthetic oligonucleotide
  Sense strand starting at position 3418 of SEQ ID NO: 1244682
agccauaucucagaaacag

SEQ ID NO: 1507135 - RNA, 19 nt, Artificial Sequence
  Description of Artificial Sequence: Synthetic oligonucleotide
  Antisense strand to SEQ ID NO: 1507134
cuguuucugagauauggcu

SEQ ID NO: 1507136 - RNA, 19 nt, Artificial Sequence
  Description of Artificial Sequence: Synthetic oligonucleotide
  Sense strand starting at position 3510 of SEQ ID NO: 1244682
uuugguuuacaguguguga

SEQ ID NO: 1507137 - RNA, 19 nt, Artificial Sequence
  Description of Artificial Sequence: Synthetic oligonucleotide
  Antisense strand to SEQ ID NO: 1507136
ucacacacuguaaaccaaa

SEQ ID NO: 1507138 - RNA, 19 nt, Artificial Sequence
  Description of Artificial Sequence: Synthetic oligonucleotide
  Sense strand starting at position 366 of SEQ ID NO: 1244683
guccacuuuccaggauguu

SEQ ID NO: 1507139 - RNA, 19 nt, Artificial Sequence
  Description of Artificial Sequence: Synthetic oligonucleotide
  Antisense strand to SEQ ID NO: 1507138
aacauccuggaaaguggac

SEQ ID NO: 1507140 - RNA, 19 nt, Artificial Sequence
  Description of Artificial Sequence: Synthetic oligonucleotide
  Sense strand starting at position 367 of SEQ ID NO: 1244683
uccacuuuccaggauguua

SEQ ID NO: 1507141 - RNA, 19 nt, Artificial Sequence
  Description of Artificial Sequence: Synthetic oligonucleotide
  Antisense strand to SEQ ID NO: 1507140
uaacauccuggaaagugga

SEQ ID NO: 1507142 - RNA, 19 nt, Artificial Sequence
  Description of Artificial Sequence: Synthetic oligonucleotide
  Sense strand starting at position 372 of SEQ ID NO: 1244683
uuuccaggauguuaugaga

SEQ ID NO: 1507143 - RNA, 19 nt, Artificial Sequence
  Description of Artificial Sequence: Synthetic oligonucleotide
  Antisense strand to SEQ ID NO: 1507142
ucucauaacauccuggaaa

SEQ ID NO: 1507144 - RNA, 19 nt, Artificial Sequence
  Description of Artificial Sequence: Synthetic oligonucleotide
  Sense strand starting at position 419 of SEQ ID NO: 1244683
cuaauuacggcucagcuaa

SEQ ID NO: 1507145 - RNA, 19 nt, Artificial Sequence
  Description of Artificial Sequence: Synthetic oligonucleotide
  Antisense strand to SEQ ID NO: 1507144
uuagcugagccguaauuag

SEQ ID NO: 1507146 - RNA, 19 nt, Artificial Sequence
  Description of Artificial Sequence: Synthetic oligonucleotide
  Sense strand starting at position 709 of SEQ ID NO: 1244683
gauuacaggcgugagguua

SEQ ID NO: 1507147 - RNA, 19 nt, Artificial Sequence
  Description of Artificial Sequence: Synthetic oligonucleotide
  Antisense strand to SEQ ID NO: 1507146
uaaccucacgccuguaauc

SEQ ID NO: 1507148 - RNA, 19 nt, Artificial Sequence
  Description of Artificial Sequence: Synthetic oligonucleotide
  Sense strand starting at position 932 of SEQ ID NO: 1244683
gguggaguuuacuuaccag

SEQ ID NO: 1507149 - RNA, 19 nt, Artificial Sequence
  Description of Artificial Sequence: Synthetic oligonucleotide
  Antisense strand to SEQ ID NO: 1507148
cugguaaguaaacuccacc

SEQ ID NO: 1507150 - RNA, 19 nt, Artificial Sequence
  Description of Artificial Sequence: Synthetic oligonucleotide
  Sense strand starting at position 935 of SEQ ID NO: 1244683
ggaguuuacuuaccaggca

SEQ ID NO: 1507151 - RNA, 19 nt, Artificial Sequence
  Description of Artificial Sequence: Synthetic oligonucleotide
  Antisense strand to SEQ ID NO: 1507150
ugccugguaaguaaacucc

SEQ ID NO: 1507152 - RNA, 19 nt, Artificial Sequence
  Description of Artificial Sequence: Synthetic oligonucleotide
  Sense strand starting at position 1026 of SEQ ID NO: 1244683
ccagcucucauaugggagu

SEQ ID NO: 1507153 - RNA, 19 nt, Artificial Sequence
  Description of Artificial Sequence: Synthetic oligonucleotide
  Antisense strand to SEQ ID NO: 1507152
acucccauaugagagcugg

SEQ ID NO: 1507154 - RNA, 19 nt, Artificial Sequence
  Description of Artificial Sequence: Synthetic oligonucleotide
  Sense strand starting at position 1032 of SEQ ID NO: 1244683
cucauaugggagugaguca

SEQ ID NO: 1507155 - RNA, 19 nt, Artificial Sequence
  Description of Artificial Sequence: Synthetic oligonucleotide
  Antisense strand to SEQ ID NO: 1507154
ugacucacucccauaugag

SEQ ID NO: 1507156 - RNA, 19 nt, Artificial Sequence
  Description of Artificial Sequence: Synthetic oligonucleotide
  Sense strand starting at position 1033 of SEQ ID NO: 1244683
ucauaugggagugagucau

SEQ ID NO: 1507157 - RNA, 19 nt, Artificial Sequence
  Description of Artificial Sequence: Synthetic oligonucleotide
  Antisense strand to SEQ ID NO: 1507156
augacucacucccauauga

SEQ ID NO: 1507158 - RNA, 19 nt, Artificial Sequence
  Description of Artificial Sequence: Synthetic oligonucleotide
  Sense strand starting at position 1039 of SEQ ID NO: 1244683
gggagugagucauucacau

SEQ ID NO: 1507159 - RNA, 19 nt, Artificial Sequence
  Description of Artificial Sequence: Synthetic oligonucleotide
  Antisense strand to SEQ ID NO: 1507158
augugaaugacucacuccc

SEQ ID NO: 1507160 - RNA, 19 nt, Artificial Sequence
  Description of Artificial Sequence: Synthetic oligonucleotide
  Sense strand starting at position 1749 of SEQ ID NO: 1244683
ggguucuugacucgacuuu

SEQ ID NO: 1507161 - RNA, 19 nt, Artificial Sequence
  Description of Artificial Sequence: Synthetic oligonucleotide
  Antisense strand to SEQ ID NO: 1507160
aaagucgagucaagaaccc

SEQ ID NO: 1507162 - RNA, 19 nt, Artificial Sequence
  Description of Artificial Sequence: Synthetic oligonucleotide
  Sense strand starting at position 1750 of SEQ ID NO: 1244683
gguucuugacucgacuuua

SEQ ID NO: 1507163 - RNA, 19 nt, Artificial Sequence
  Description of Artificial Sequence: Synthetic oligonucleotide
  Antisense strand to SEQ ID NO: 1507162
uaaagucgagucaagaacc

SEQ ID NO: 1507164 - RNA, 19 nt, Artificial Sequence
  Description of Artificial Sequence: Synthetic oligonucleotide
  Sense strand starting at position 2409 of SEQ ID NO: 1244683
guugucaaguuucugggaa

SEQ ID NO: 1507165 - RNA, 19 nt, Artificial Sequence
  Description of Artificial Sequence: Synthetic oligonucleotide
  Antisense strand to SEQ ID NO: 1507164
uucccagaaacuugacaac

SEQ ID NO: 1507166 - RNA, 19 nt, Artificial Sequence
  Description of Artificial Sequence: Synthetic oligonucleotide
  Sense strand starting at position 2411 of SEQ ID NO: 1244683
ugucaaguuucugggaaga

SEQ ID NO: 1507167 - RNA, 19 nt, Artificial Sequence
  Description of Artificial Sequence: Synthetic oligonucleotide
  Antisense strand to SEQ ID NO: 1507166
ucuucccagaaacuugaca

SEQ ID NO: 1507168 - RNA, 19 nt, Artificial Sequence
  Description of Artificial Sequence: Synthetic oligonucleotide
  Sense strand starting at position 2413 of SEQ ID NO: 1244683
ucaaguuucugggaagauu

SEQ ID NO: 1507169 - RNA, 19 nt, Artificial Sequence
  Description of Artificial Sequence: Synthetic oligonucleotide
  Antisense strand to SEQ ID NO: 1507168
aaucuucccagaaacuuga

SEQ ID NO: 1507170 - RNA, 19 nt, Artificial Sequence
  Description of Artificial Sequence: Synthetic oligonucleotide
  Sense strand starting at position 2416 of SEQ ID NO: 1244683
aguuucugggaagauuagu

SEQ ID NO: 1507171 - RNA, 19 nt, Artificial Sequence
  Description of Artificial Sequence: Synthetic oligonucleotide
  Antisense strand to SEQ ID NO: 1507170
acuaaucuucccagaaacu

SEQ ID NO: 1507172 - RNA, 19 nt, Artificial Sequence
  Description of Artificial Sequence: Synthetic oligonucleotide
  Sense strand starting at position 2600 of SEQ ID NO: 1244683
aagugucuuccacgcgauu

SEQ ID NO: 1507173 - RNA, 19 nt, Artificial Sequence
  Description of Artificial Sequence: Synthetic oligonucleotide
  Antisense strand to SEQ ID NO: 1507172
aaucgcguggaagacacuu

SEQ ID NO: 1507174 - RNA, 19 nt, Artificial Sequence
  Description of Artificial Sequence: Synthetic oligonucleotide
  Sense strand starting at position 2647 of SEQ ID NO: 1244683
aagaaagguugcucagagu

SEQ ID NO: 1507175 - RNA, 19 nt, Artificial Sequence
  Description of Artificial Sequence: Synthetic oligonucleotide
  Antisense strand to SEQ ID NO: 1507174
acucugagcaaccuuucuu

SEQ ID NO: 1507176 - RNA, 19 nt, Artificial Sequence
  Description of Artificial Sequence: Synthetic oligonucleotide
  Sense strand starting at position 2650 of SEQ ID NO: 1244683
aaagguugcucagagugau

SEQ ID NO: 1507177 - RNA, 19 nt, Artificial Sequence
  Description of Artificial Sequence: Synthetic oligonucleotide
  Antisense strand to SEQ ID NO: 1507176
aucacucugagcaaccuuu

SEQ ID NO: 1507178 - RNA, 19 nt, Artificial Sequence
  Description of Artificial Sequence: Synthetic oligonucleotide
  Sense strand starting at position 2653 of SEQ ID NO: 1244683
gguugcucagagugauaaa

SEQ ID NO: 1507179 - RNA, 19 nt, Artificial Sequence
  Description of Artificial Sequence: Synthetic oligonucleotide
  Antisense strand to SEQ ID NO: 1507178
uuuaucacucugagcaacc

SEQ ID NO: 1507180 - RNA, 19 nt, Artificial Sequence
  Description of Artificial Sequence: Synthetic oligonucleotide
  Sense strand starting at position 2654 of SEQ ID NO: 1244683
guugcucagagugauaaag

SEQ ID NO: 1507181 - RNA, 19 nt, Artificial Sequence
  Description of Artificial Sequence: Synthetic oligonucleotide
  Antisense strand to SEQ ID NO: 1507180
cuuuaucacucugagcaac

SEQ ID NO: 1507182 - RNA, 19 nt, Artificial Sequence
  Description of Artificial Sequence: Synthetic oligonucleotide
  Sense strand starting at position 2656 of SEQ ID NO: 1244683
ugcucagagugauaaagaa

SEQ ID NO: 1507183 - RNA, 19 nt, Artificial Sequence
  Description of Artificial Sequence: Synthetic oligonucleotide
  Antisense strand to SEQ ID NO: 1507182
uucuuuaucacucugagca

SEQ ID NO: 1507184 - RNA, 19 nt, Artificial Sequence
  Description of Artificial Sequence: Synthetic oligonucleotide
  Sense strand starting at position 2747 of SEQ ID NO: 1244683
aauggagccuuccagucaa

SEQ ID NO: 1507185 - RNA, 19 nt, Artificial Sequence
  Description of Artificial Sequence: Synthetic oligonucleotide
  Antisense strand to SEQ ID NO: 1507184
uugacuggaaggcuccauu

SEQ ID NO: 1507186 - RNA, 19 nt, Artificial Sequence
  Description of Artificial Sequence: Synthetic oligonucleotide
  Sense strand starting at position 2762 of SEQ ID NO: 1244683
ucaacaugcuucuacguga

SEQ ID NO: 1507187 - RNA, 19 nt, Artificial Sequence
  Description of Artificial Sequence: Synthetic oligonucleotide
  Antisense strand to SEQ ID NO: 1507186
ucacguagaagcauguuga

SEQ ID NO: 1507188 - RNA, 19 nt, Artificial Sequence
  Description of Artificial Sequence: Synthetic oligonucleotide
  Sense strand starting at position 3210 of SEQ ID NO: 1244683
agggcuauuuggccguuau

SEQ ID NO: 1507189 - RNA, 19 nt, Artificial Sequence
  Description of Artificial Sequence: Synthetic oligonucleotide
  Antisense strand to SEQ ID NO: 1507188
auaacggccaaauagcccu

SEQ ID NO: 1507190 - RNA, 19 nt, Artificial Sequence
  Description of Artificial Sequence: Synthetic oligonucleotide
  Sense strand starting at position 3211 of SEQ ID NO: 1244683
gggcuauuuggccguuauu

SEQ ID NO: 1507191 - RNA, 19 nt, Artificial Sequence
  Description of Artificial Sequence: Synthetic oligonucleotide
  Antisense strand to SEQ ID NO: 1507190
aauaacggccaaauagccc

SEQ ID NO: 1507192 - RNA, 19 nt, Artificial Sequence
  Description of Artificial Sequence: Synthetic oligonucleotide
  Sense strand starting at position 3515 of SEQ ID NO: 1244683
ugguguucuagguggcuaa

SEQ ID NO: 1507193 - RNA, 19 nt, Artificial Sequence
  Description of Artificial Sequence: Synthetic oligonucleotide
  Antisense strand to SEQ ID NO: 1507192
uuagccaccuagaacacca

SEQ ID NO: 1507194 - RNA, 19 nt, Artificial Sequence
  Description of Artificial Sequence: Synthetic oligonucleotide
  Sense strand starting at position 3516 of SEQ ID NO: 1244683
gguguucuagguggcuaau

SEQ ID NO: 1507195 - RNA, 19 nt, Artificial Sequence
  Description of Artificial Sequence: Synthetic oligonucleotide
  Antisense strand to SEQ ID NO: 1507194
auuagccaccuagaacacc

SEQ ID NO: 1507196 - RNA, 19 nt, Artificial Sequence
  Description of Artificial Sequence: Synthetic oligonucleotide
  Sense strand starting at position 3527 of SEQ ID NO: 1244683
uggcuaaugccucgaagug

SEQ ID NO: 1507197 - RNA, 19 nt, Artificial Sequence
  Description of Artificial Sequence: Synthetic oligonucleotide
  Antisense strand to SEQ ID NO: 1507196
cacuucgaggcauuagcca

SEQ ID NO: 1507198 - RNA, 19 nt, Artificial Sequence
  Description of Artificial Sequence: Synthetic oligonucleotide
  Sense strand starting at position 3619 of SEQ ID NO: 1244683
auucuuugcuuuggucaga

SEQ ID NO: 1507199 - RNA, 19 nt, Artificial Sequence
  Description of Artificial Sequence: Synthetic oligonucleotide
  Antisense strand to SEQ ID NO: 1507198
ucugaccaaagcaaagaau

SEQ ID NO: 1507200 - RNA, 19 nt, Artificial Sequence
  Description of Artificial Sequence: Synthetic oligonucleotide
  Sense strand starting at position 3620 of SEQ ID NO: 1244683
uucuuugcuuuggucagaa

SEQ ID NO: 1507201 - RNA, 19 nt, Artificial Sequence
  Description of Artificial Sequence: Synthetic oligonucleotide
  Antisense strand to SEQ ID NO: 1507200
uucugaccaaagcaaagaa

SEQ ID NO: 1507202 - RNA, 19 nt, Artificial Sequence
  Description of Artificial Sequence: Synthetic oligonucleotide
  Sense strand starting at position 3622 of SEQ ID NO: 1244683
cuuugcuuuggucagaauu

SEQ ID NO: 1507203 - RNA, 19 nt, Artificial Sequence
  Description of Artificial Sequence: Synthetic oligonucleotide
  Antisense strand to SEQ ID NO: 1507202
aauucugaccaaagcaaag

SEQ ID NO: 1507204 - RNA, 19 nt, Artificial Sequence
  Description of Artificial Sequence: Synthetic oligonucleotide
  Sense strand starting at position 3722 of SEQ ID NO: 1244683
aaugcaaugcuggagugaa

SEQ ID NO: 1507205 - RNA, 19 nt, Artificial Sequence
  Description of Artificial Sequence: Synthetic oligonucleotide
  Antisense strand to SEQ ID NO: 1507204
uucacuccagcauugcauu

SEQ ID NO: 1507206 - RNA, 19 nt, Artificial Sequence
  Description of Artificial Sequence: Synthetic oligonucleotide
  Sense strand starting at position 3752 of SEQ ID NO: 1244683
cugagauguucucggauau

SEQ ID NO: 1507207 - RNA, 19 nt, Artificial Sequence
  Description of Artificial Sequence: Synthetic oligonucleotide
  Antisense strand to SEQ ID NO: 1507206
auauccgagaacaucucag

SEQ ID NO: 1507208 - RNA, 19 nt, Artificial Sequence
  Description of Artificial Sequence: Synthetic oligonucleotide
  Sense strand starting at position 3753 of SEQ ID NO: 1244683
ugagauguucucggauauc

SEQ ID NO: 1507209 - RNA, 19 nt, Artificial Sequence
  Description of Artificial Sequence: Synthetic oligonucleotide
  Antisense strand to SEQ ID NO: 1507208
gauauccgagaacaucuca

SEQ ID NO: 1507210 - RNA, 19 nt, Artificial Sequence
  Description of Artificial Sequence: Synthetic oligonucleotide
  Sense strand starting at position 3756 of SEQ ID NO: 1244683
gauguucucggauaucuuu

SEQ ID NO: 1507211 - RNA, 19 nt, Artificial Sequence
  Description of Artificial Sequence: Synthetic oligonucleotide
  Antisense strand to SEQ ID NO: 1507210
aaagauauccgagaacauc

SEQ ID NO: 1507212 - RNA, 19 nt, Artificial Sequence
  Description of Artificial Sequence: Synthetic oligonucleotide
  Sense strand starting at position 3920 of SEQ ID NO: 1244683
uugaaugaauugggaaaca

SEQ ID NO: 1507213 - RNA, 19 nt, Artificial Sequence
  Description of Artificial Sequence: Synthetic oligonucleotide
  Antisense strand to SEQ ID NO: 1507212
uguuucccaauucauucaa

SEQ ID NO: 1507214 - RNA, 19 nt, Artificial Sequence
  Description of Artificial Sequence: Synthetic oligonucleotide
  Sense strand starting at position 3966 of SEQ ID NO: 1244683
gcuugaaacaucggugguu

SEQ ID NO: 1507215 - RNA, 19 nt, Artificial Sequence
  Description of Artificial Sequence: Synthetic oligonucleotide
  Antisense strand to SEQ ID NO: 1507214
aaccaccgauguuucaagc

SEQ ID NO: 1507216 - RNA, 19 nt, Artificial Sequence
  Description of Artificial Sequence: Synthetic oligonucleotide
  Sense strand starting at position 3967 of SEQ ID NO: 1244683
cuugaaacaucggugguuu

SEQ ID NO: 1507217 - RNA, 19 nt, Artificial Sequence
  Description of Artificial Sequence: Synthetic oligonucleotide
  Antisense strand to SEQ ID NO: 1507216
aaaccaccgauguuucaag

SEQ ID NO: 1507218 - RNA, 19 nt, Artificial Sequence
  Description of Artificial Sequence: Synthetic oligonucleotide
  Sense strand starting at position 364 of SEQ ID NO: 1244684
guccacuuuccaggauguu

SEQ ID NO: 1507219 - RNA, 19 nt, Artificial Sequence
  Description of Artificial Sequence: Synthetic oligonucleotide
  Antisense strand to SEQ ID NO: 1507218
aacauccuggaaaguggac

SEQ ID NO: 1507220 - RNA, 19 nt, Artificial Sequence
  Description of Artificial Sequence: Synthetic oligonucleotide
  Sense strand starting at position 365 of SEQ ID NO: 1244684
uccacuuuccaggauguua

SEQ ID NO: 1507221 - RNA, 19 nt, Artificial Sequence
  Description of Artificial Sequence: Synthetic oligonucleotide
  Antisense strand to SEQ ID NO: 1507220
uaacauccuggaaagugga

SEQ ID NO: 1507222 - RNA, 19 nt, Artificial Sequence
  Description of Artificial Sequence: Synthetic oligonucleotide
  Sense strand starting at position 370 of SEQ ID NO: 1244684
uuuccaggauguuaugaga

SEQ ID NO: 1507223 - RNA, 19 nt, Artificial Sequence
  Description of Artificial Sequence: Synthetic oligonucleotide
  Antisense strand to SEQ ID NO: 1507222
ucucauaacauccuggaaa

SEQ ID NO: 1507224 - RNA, 19 nt, Artificial Sequence
  Description of Artificial Sequence: Synthetic oligonucleotide
  Sense strand starting at position 417 of SEQ ID NO: 1244684
cuaauuacggcucagcuaa

SEQ ID NO: 1507225 - RNA, 19 nt, Artificial Sequence
  Description of Artificial Sequence: Synthetic oligonucleotide
  Antisense strand to SEQ ID NO: 1507224
uuagcugagccguaauuag

SEQ ID NO: 1507226 - RNA, 19 nt, Artificial Sequence
  Description of Artificial Sequence: Synthetic oligonucleotide
  Sense strand starting at position 707 of SEQ ID NO: 1244684
gauuacaggcgugagguua

SEQ ID NO: 1507227 - RNA, 19 nt, Artificial Sequence
  Description of Artificial Sequence: Synthetic oligonucleotide
  Antisense strand to SEQ ID NO: 1507226
uaaccucacgccuguaauc

SEQ ID NO: 1507228 - RNA, 19 nt, Artificial Sequence
  Description of Artificial Sequence: Synthetic oligonucleotide
  Sense strand starting at position 930 of SEQ ID NO: 1244684
gguggaguuuacuuaccag

SEQ ID NO: 1507229 - RNA, 19 nt, Artificial Sequence
  Description of Artificial Sequence: Synthetic oligonucleotide
  Antisense strand to SEQ ID NO: 1507228
cugguaaguaaacuccacc

SEQ ID NO: 1507230 - RNA, 19 nt, Artificial Sequence
  Description of Artificial Sequence: Synthetic oligonucleotide
  Sense strand starting at position 933 of SEQ ID NO: 1244684
ggaguuuacuuaccaggca

SEQ ID NO: 1507231 - RNA, 19 nt, Artificial Sequence
  Description of Artificial Sequence: Synthetic oligonucleotide
  Antisense strand to SEQ ID NO: 1507230
ugccugguaaguaaacucc

SEQ ID NO: 1507232 - RNA, 19 nt, Artificial Sequence
  Description of Artificial Sequence: Synthetic oligonucleotide
  Sense strand starting at position 1024 of SEQ ID NO: 1244684
ccagcucucauaugggagu

SEQ ID NO: 1507233 - RNA, 19 nt, Artificial Sequence
  Description of Artificial Sequence: Synthetic oligonucleotide
  Antisense strand to SEQ ID NO: 1507232
acucccauaugagagcugg

SEQ ID NO: 1507234 - RNA, 19 nt, Artificial Sequence
  Description of Artificial Sequence: Synthetic oligonucleotide
  Sense strand starting at position 1030 of SEQ ID NO: 1244684
cucauaugggagugaguca

SEQ ID NO: 1507235 - RNA, 19 nt, Artificial Sequence
  Description of Artificial Sequence: Synthetic oligonucleotide
  Antisense strand to SEQ ID NO: 1507234
ugacucacucccauaugag

SEQ ID NO: 1507236 - RNA, 19 nt, Artificial Sequence
  Description of Artificial Sequence: Synthetic oligonucleotide
  Sense strand starting at position 1031 of SEQ ID NO: 1244684
ucauaugggagugagucau

SEQ ID NO: 1507237 - RNA, 19 nt, Artificial Sequence
  Description of Artificial Sequence: Synthetic oligonucleotide
  Antisense strand to SEQ ID NO: 1507236
augacucacucccauauga

SEQ ID NO: 1507238 - RNA, 19 nt, Artificial Sequence
  Description of Artificial Sequence: Synthetic oligonucleotide
  Sense strand starting at position 1037 of SEQ ID NO: 1244684
gggagugagucauucacau

SEQ ID NO: 1507239 - RNA, 19 nt, Artificial Sequence
  Description of Artificial Sequence: Synthetic oligonucleotide
  Antisense strand to SEQ ID NO: 1507238
augugaaugacucacuccc

SEQ ID NO: 1507240 - RNA, 19 nt, Artificial Sequence
  Description of Artificial Sequence: Synthetic oligonucleotide
  Sense strand starting at position 1747 of SEQ ID NO: 1244684
ggguucuugacucgacuuu

SEQ ID NO: 1507241 - RNA, 19 nt, Artificial Sequence
  Description of Artificial Sequence: Synthetic oligonucleotide
  Antisense strand to SEQ ID NO: 1507240
aaagucgagucaagaaccc

SEQ ID NO: 1507242 - RNA, 19 nt, Artificial Sequence
  Description of Artificial Sequence: Synthetic oligonucleotide
  Sense strand starting at position 1748 of SEQ ID NO: 1244684
gguucuugacucgacuuua

SEQ ID NO: 1507243 - RNA, 19 nt, Artificial Sequence
  Description of Artificial Sequence: Synthetic oligonucleotide
  Antisense strand to SEQ ID NO: 1507242
uaaagucgagucaagaacc

SEQ ID NO: 1507244 - RNA, 19 nt, Artificial Sequence
  Description of Artificial Sequence: Synthetic oligonucleotide
  Sense strand starting at position 2407 of SEQ ID NO: 1244684
guugucaaguuucugggaa

SEQ ID NO: 1507245 - RNA, 19 nt, Artificial Sequence
  Description of Artificial Sequence: Synthetic oligonucleotide
  Antisense strand to SEQ ID NO: 1507244
uucccagaaacuugacaac

SEQ ID NO: 1507246 - RNA, 19 nt, Artificial Sequence
  Description of Artificial Sequence: Synthetic oligonucleotide
  Sense strand starting at position 2409 of SEQ ID NO: 1244684
ugucaaguuucugggaaga

SEQ ID NO: 1507247 - RNA, 19 nt, Artificial Sequence
  Description of Artificial Sequence: Synthetic oligonucleotide
  Antisense strand to SEQ ID NO: 1507246
ucuucccagaaacuugaca

SEQ ID NO: 1507248 - RNA, 19 nt, Artificial Sequence
  Description of Artificial Sequence: Synthetic oligonucleotide
  Sense strand starting at position 2411 of SEQ ID NO: 1244684
ucaaguuucugggaagauu

SEQ ID NO: 1507249 - RNA, 19 nt, Artificial Sequence
  Description of Artificial Sequence: Synthetic oligonucleotide
  Antisense strand to SEQ ID NO: 1507248
aaucuucccagaaacuuga

SEQ ID NO: 1507250 - RNA, 19 nt, Artificial Sequence
  Description of Artificial Sequence: Synthetic oligonucleotide
  Sense strand starting at position 2414 of SEQ ID NO: 1244684
aguuucugggaagauuagu

SEQ ID NO: 1507251 - RNA, 19 nt, Artificial Sequence
  Description of Artificial Sequence: Synthetic oligonucleotide
  Antisense strand to SEQ ID NO: 1507250
acuaaucuucccagaaacu

SEQ ID NO: 1507252 - RNA, 19 nt, Artificial Sequence
  Description of Artificial Sequence: Synthetic oligonucleotide
  Sense strand starting at position 2598 of SEQ ID NO: 1244684
aagugucuuccacgcgauu

SEQ ID NO: 1507253 - RNA, 19 nt, Artificial Sequence
  Description of Artificial Sequence: Synthetic oligonucleotide
  Antisense strand to SEQ ID NO: 1507252
aaucgcguggaagacacuu

SEQ ID NO: 1507254 - RNA, 19 nt, Artificial Sequence
  Description of Artificial Sequence: Synthetic oligonucleotide
  Sense strand starting at position 2645 of SEQ ID NO: 1244684
aagaaagguugcucagagu

SEQ ID NO: 1507255 - RNA, 19 nt, Artificial Sequence
  Description of Artificial Sequence: Synthetic oligonucleotide
  Antisense strand to SEQ ID NO: 1507254
acucugagcaaccuuucuu

SEQ ID NO: 1507256 - RNA, 19 nt, Artificial Sequence
  Description of Artificial Sequence: Synthetic oligonucleotide
  Sense strand starting at position 2648 of SEQ ID NO: 1244684
aaagguugcucagagugau

SEQ ID NO: 1507257 - RNA, 19 nt, Artificial Sequence
  Description of Artificial Sequence: Synthetic oligonucleotide
  Antisense strand to SEQ ID NO: 1507256
aucacucugagcaaccuuu

SEQ ID NO: 1507258 - RNA, 19 nt, Artificial Sequence
  Description of Artificial Sequence: Synthetic oligonucleotide
  Sense strand starting at position 2651 of SEQ ID NO: 1244684
gguugcucagagugauaaa

SEQ ID NO: 1507259 - RNA, 19 nt, Artificial Sequence
  Description of Artificial Sequence: Synthetic oligonucleotide
  Antisense strand to SEQ ID NO: 1507258
uuuaucacucugagcaacc

SEQ ID NO: 1507260 - RNA, 19 nt, Artificial Sequence
  Description of Artificial Sequence: Synthetic oligonucleotide
  Sense strand starting at position 2652 of SEQ ID NO: 1244684
guugcucagagugauaaag

SEQ ID NO: 1507261 - RNA, 19 nt, Artificial Sequence
  Description of Artificial Sequence: Synthetic oligonucleotide
  Antisense strand to SEQ ID NO: 1507260
cuuuaucacucugagcaac

SEQ ID NO: 1507262 - RNA, 19 nt, Artificial Sequence
  Description of Artificial Sequence: Synthetic oligonucleotide
  Sense strand starting at position 2654 of SEQ ID NO: 1244684
ugcucagagugauaaagaa

SEQ ID NO: 1507263 - RNA, 19 nt, Artificial Sequence
  Description of Artificial Sequence: Synthetic oligonucleotide
  Antisense strand to SEQ ID NO: 1507262
uucuuuaucacucugagca

SEQ ID NO: 1507264 - RNA, 19 nt, Artificial Sequence
  Description of Artificial Sequence: Synthetic oligonucleotide
  Sense strand starting at position 2745 of SEQ ID NO: 1244684
aauggagccuuccagucaa

SEQ ID NO: 1507265 - RNA, 19 nt, Artificial Sequence
  Description of Artificial Sequence: Synthetic oligonucleotide
  Antisense strand to SEQ ID NO: 1507264
uugacuggaaggcuccauu

SEQ ID NO: 1507266 - RNA, 19 nt, Artificial Sequence
  Description of Artificial Sequence: Synthetic oligonucleotide
  Sense strand starting at position 2760 of SEQ ID NO: 1244684
ucaacaugcuucuacguga

SEQ ID NO: 1507267 - RNA, 19 nt, Artificial Sequence
  Description of Artificial Sequence: Synthetic oligonucleotide
  Antisense strand to SEQ ID NO: 1507266
ucacguagaagcauguuga

SEQ ID NO: 1507268 - RNA, 19 nt, Artificial Sequence
  Description of Artificial Sequence: Synthetic oligonucleotide
  Sense strand starting at position 3208 of SEQ ID NO: 1244684
agggcuauuuggccguuau

SEQ ID NO: 1507269 - RNA, 19 nt, Artificial Sequence
  Description of Artificial Sequence: Synthetic oligonucleotide
  Antisense strand to SEQ ID NO: 1507268
auaacggccaaauagcccu

SEQ ID NO: 1507270 - RNA, 19 nt, Artificial Sequence
  Description of Artificial Sequence: Synthetic oligonucleotide
  Sense strand starting at position 3209 of SEQ ID NO: 1244684
gggcuauuuggccguuauu

SEQ ID NO: 1507271 - RNA, 19 nt, Artificial Sequence
  Description of Artificial Sequence: Synthetic oligonucleotide
  Antisense strand to SEQ ID NO: 1507270
aauaacggccaaauagccc

SEQ ID NO: 1507272 - RNA, 19 nt, Artificial Sequence
  Description of Artificial Sequence: Synthetic oligonucleotide
  Sense strand starting at position 3513 of SEQ ID NO: 1244684
ugguguucuagguggcuaa

SEQ ID NO: 1507273 - RNA, 19 nt, Artificial Sequence
  Description of Artificial Sequence: Synthetic oligonucleotide
  Antisense strand to SEQ ID NO: 1507272
uuagccaccuagaacacca

SEQ ID NO: 1507274 - RNA, 19 nt, Artificial Sequence
  Description of Artificial Sequence: Synthetic oligonucleotide
  Sense strand starting at position 3514 of SEQ ID NO: 1244684
gguguucuagguggcuaau

SEQ ID NO: 1507275 - RNA, 19 nt, Artificial Sequence
  Description of Artificial Sequence: Synthetic oligonucleotide
  Antisense strand to SEQ ID NO: 1507274
auuagccaccuagaacacc

SEQ ID NO: 1507276 - RNA, 19 nt, Artificial Sequence
  Description of Artificial Sequence: Synthetic oligonucleotide
  Sense strand starting at position 3525 of SEQ ID NO: 1244684
uggcuaaugccucgaagug

SEQ ID NO: 1507277 - RNA, 19 nt, Artificial Sequence
  Description of Artificial Sequence: Synthetic oligonucleotide
  Antisense strand to SEQ ID NO: 1507276
cacuucgaggcauuagcca

SEQ ID NO: 1507278 - RNA, 19 nt, Artificial Sequence
  Description of Artificial Sequence: Synthetic oligonucleotide
  Sense strand starting at position 3617 of SEQ ID NO: 1244684
auucuuugcuuuggucaga

SEQ ID NO: 1507279 - RNA, 19 nt, Artificial Sequence
  Description of Artificial Sequence: Synthetic oligonucleotide
  Antisense strand to SEQ ID NO: 1507278
ucugaccaaagcaaagaau

SEQ ID NO: 1507280 - RNA, 19 nt, Artificial Sequence
  Description of Artificial Sequence: Synthetic oligonucleotide
  Sense strand starting at position 3618 of SEQ ID NO: 1244684
uucuuugcuuuggucagaa

SEQ ID NO: 1507281 - RNA, 19 nt, Artificial Sequence
  Description of Artificial Sequence: Synthetic oligonucleotide
  Antisense strand to SEQ ID NO: 1507280
uucugaccaaagcaaagaa

SEQ ID NO: 1507282 - RNA, 19 nt, Artificial Sequence
  Description of Artificial Sequence: Synthetic oligonucleotide
  Sense strand starting at position 3620 of SEQ ID NO: 1244684
cuuugcuuuggucagaauu

SEQ ID NO: 1507283 - RNA, 19 nt, Artificial Sequence
  Description of Artificial Sequence: Synthetic oligonucleotide
  Antisense strand to SEQ ID NO: 1507282
aauucugaccaaagcaaag

SEQ ID NO: 1507284 - RNA, 19 nt, Artificial Sequence
  Description of Artificial Sequence: Synthetic oligonucleotide
  Sense strand starting at position 3720 of SEQ ID NO: 1244684
aaugcaaugcuggagugaa

SEQ ID NO: 1507285 - RNA, 19 nt, Artificial Sequence
  Description of Artificial Sequence: Synthetic oligonucleotide
  Antisense strand to SEQ ID NO: 1507284
uucacuccagcauugcauu

SEQ ID NO: 1507286 - RNA, 19 nt, Artificial Sequence
  Description of Artificial Sequence: Synthetic oligonucleotide
  Sense strand starting at position 3750 of SEQ ID NO: 1244684
cugagauguucucggauau

SEQ ID NO: 1507287 - RNA, 19 nt, Artificial Sequence
  Description of Artificial Sequence: Synthetic oligonucleotide
  Antisense strand to SEQ ID NO: 1507286
auauccgagaacaucucag

SEQ ID NO: 1507288 - RNA, 19 nt, Artificial Sequence
  Description of Artificial Sequence: Synthetic oligonucleotide
  Sense strand starting at position 3751 of SEQ ID NO: 1244684
ugagauguucucggauauc

SEQ ID NO: 1507289 - RNA, 19 nt, Artificial Sequence
  Description of Artificial Sequence: Synthetic oligonucleotide
  Antisense strand to SEQ ID NO: 1507288
gauauccgagaacaucuca

SEQ ID NO: 1507290 - RNA, 19 nt, Artificial Sequence
  Description of Artificial Sequence: Synthetic oligonucleotide
  Sense strand starting at position 3754 of SEQ ID NO: 1244684
gauguucucggauaucuuu

SEQ ID NO: 1507291 - RNA, 19 nt, Artificial Sequence
  Description of Artificial Sequence: Synthetic oligonucleotide
  Antisense strand to SEQ ID NO: 1507290
aaagauauccgagaacauc

SEQ ID NO: 1507292 - RNA, 19 nt, Artificial Sequence
  Description of Artificial Sequence: Synthetic oligonucleotide
  Sense strand starting at position 3918 of SEQ ID NO: 1244684
uugaaugaauugggaaaca

SEQ ID NO: 1507293 - RNA, 19 nt, Artificial Sequence
  Description of Artificial Sequence: Synthetic oligonucleotide
  Antisense strand to SEQ ID NO: 1507292
uguuucccaauucauucaa

SEQ ID NO: 1507294 - RNA, 19 nt, Artificial Sequence
  Description of Artificial Sequence: Synthetic oligonucleotide
  Sense strand starting at position 3964 of SEQ ID NO: 1244684
gcuugaaacaucggugguu

SEQ ID NO: 1507295 - RNA, 19 nt, Artificial Sequence
  Description of Artificial Sequence: Synthetic oligonucleotide
  Antisense strand to SEQ ID NO: 1507294
aaccaccgauguuucaagc

SEQ ID NO: 1507296 - RNA, 19 nt, Artificial Sequence
  Description of Artificial Sequence: Synthetic oligonucleotide
  Sense strand starting at position 3965 of SEQ ID NO: 1244684
cuugaaacaucggugguuu

SEQ ID NO: 1507297 - RNA, 19 nt, Artificial Sequence
  Description of Artificial Sequence: Synthetic oligonucleotide
  Antisense strand to SEQ ID NO: 1507296
aaaccaccgauguuucaag

SEQ ID NO: 1507298 - RNA, 19 nt, Artificial Sequence
  Description of Artificial Sequence: Synthetic oligonucleotide
  Sense strand starting at position 72 of SEQ ID NO: 1244685
cccuuuacuugaucuugga

SEQ ID NO: 1507299 - RNA, 19 nt, Artificial Sequence
  Description of Artificial Sequence: Synthetic oligonucleotide
  Antisense strand to SEQ ID NO: 1507298
uccaagaucaaguaaaggg

SEQ ID NO: 1507300 - RNA, 19 nt, Artificial Sequence
  Description of Artificial Sequence: Synthetic oligonucleotide
  Sense strand starting at position 230 of SEQ ID NO: 1244685
ugauuauccugaggccuca

SEQ ID NO: 1507301 - RNA, 19 nt, Artificial Sequence
  Description of Artificial Sequence: Synthetic oligonucleotide
  Antisense strand to SEQ ID NO: 1507300
ugaggccucaggauaauca

SEQ ID NO: 1507302 - RNA, 19 nt, Artificial Sequence
  Description of Artificial Sequence: Synthetic oligonucleotide
  Sense strand starting at position 337 of SEQ ID NO: 1244685
ggaaaucuaccucggagau

SEQ ID NO: 1507303 - RNA, 19 nt, Artificial Sequence
  Description of Artificial Sequence: Synthetic oligonucleotide
  Antisense strand to SEQ ID NO: 1507302
aucuccgagguagauuucc

SEQ ID NO: 1507304 - RNA, 19 nt, Artificial Sequence
  Description of Artificial Sequence: Synthetic oligonucleotide
  Sense strand starting at position 338 of SEQ ID NO: 1244685
gaaaucuaccucggagauu

SEQ ID NO: 1507305 - RNA, 19 nt, Artificial Sequence
  Description of Artificial Sequence: Synthetic oligonucleotide
  Antisense strand to SEQ ID NO: 1507304
aaucuccgagguagauuuc

SEQ ID NO: 1507306 - RNA, 19 nt, Artificial Sequence
  Description of Artificial Sequence: Synthetic oligonucleotide
  Sense strand starting at position 339 of SEQ ID NO: 1244685
aaaucuaccucggagauug

SEQ ID NO: 1507307 - RNA, 19 nt, Artificial Sequence
  Description of Artificial Sequence: Synthetic oligonucleotide
  Antisense strand to SEQ ID NO: 1507306
caaucuccgagguagauuu

SEQ ID NO: 1507308 - RNA, 19 nt, Artificial Sequence
  Description of Artificial Sequence: Synthetic oligonucleotide
  Sense strand starting at position 506 of SEQ ID NO: 1244685
gcuggagugugacagagau

SEQ ID NO: 1507309 - RNA, 19 nt, Artificial Sequence
  Description of Artificial Sequence: Synthetic oligonucleotide
  Antisense strand to SEQ ID NO: 1507308
aucucugucacacuccagc

SEQ ID NO: 1507310 - RNA, 19 nt, Artificial Sequence
  Description of Artificial Sequence: Synthetic oligonucleotide
  Sense strand starting at position 957 of SEQ ID NO: 1244685
gaggcagccuaguacuaua

SEQ ID NO: 1507311 - RNA, 19 nt, Artificial Sequence
  Description of Artificial Sequence: Synthetic oligonucleotide
  Antisense strand to SEQ ID NO: 1507310
uauaguacuaggcugccuc

SEQ ID NO: 1507312 - RNA, 19 nt, Artificial Sequence
  Description of Artificial Sequence: Synthetic oligonucleotide
  Sense strand starting at position 965 of SEQ ID NO: 1244685
cuaguacuauaguggaaag

SEQ ID NO: 1507313 - RNA, 19 nt, Artificial Sequence
  Description of Artificial Sequence: Synthetic oligonucleotide
  Antisense strand to SEQ ID NO: 1507312
cuuuccacuauaguacuag

SEQ ID NO: 1507314 - RNA, 19 nt, Artificial Sequence
  Description of Artificial Sequence: Synthetic oligonucleotide
  Sense strand starting at position 976 of SEQ ID NO: 1244685
guggaaagaacaugccuua

SEQ ID NO: 1507315 - RNA, 19 nt, Artificial Sequence
  Description of Artificial Sequence: Synthetic oligonucleotide
  Antisense strand to SEQ ID NO: 1507314
uaaggcauguucuuuccac

SEQ ID NO: 1507316 - RNA, 19 nt, Artificial Sequence
  Description of Artificial Sequence: Synthetic oligonucleotide
  Sense strand starting at position 1027 of SEQ ID NO: 1244685
cucagcucuugucacuuau

SEQ ID NO: 1507317 - RNA, 19 nt, Artificial Sequence
  Description of Artificial Sequence: Synthetic oligonucleotide
  Antisense strand to SEQ ID NO: 1507316
auaagugacaagagcugag

SEQ ID NO: 1507318 - RNA, 19 nt, Artificial Sequence
  Description of Artificial Sequence: Synthetic oligonucleotide
  Sense strand starting at position 1049 of SEQ ID NO: 1244685
cugacugagccuuagaauu

SEQ ID NO: 1507319 - RNA, 19 nt, Artificial Sequence
  Description of Artificial Sequence: Synthetic oligonucleotide
  Antisense strand to SEQ ID NO: 1507318
aauucuaaggcucagucag

SEQ ID NO: 1507320 - RNA, 19 nt, Artificial Sequence
  Description of Artificial Sequence: Synthetic oligonucleotide
  Sense strand starting at position 1110 of SEQ ID NO: 1244685
guucguguggauuaaacga

SEQ ID NO: 1507321 - RNA, 19 nt, Artificial Sequence
  Description of Artificial Sequence: Synthetic oligonucleotide
  Antisense strand to SEQ ID NO: 1507320
ucguuuaauccacacgaac

SEQ ID NO: 1507322 - RNA, 19 nt, Artificial Sequence
  Description of Artificial Sequence: Synthetic oligonucleotide
  Sense strand starting at position 1112 of SEQ ID NO: 1244685
ucguguggauuaaacgaga

SEQ ID NO: 1507323 - RNA, 19 nt, Artificial Sequence
  Description of Artificial Sequence: Synthetic oligonucleotide
  Antisense strand to SEQ ID NO: 1507322
ucucguuuaauccacacga

SEQ ID NO: 1507324 - RNA, 19 nt, Artificial Sequence
  Description of Artificial Sequence: Synthetic oligonucleotide
  Sense strand starting at position 1125 of SEQ ID NO: 1244685
acgagaugacagugguaga

SEQ ID NO: 1507325 - RNA, 19 nt, Artificial Sequence
  Description of Artificial Sequence: Synthetic oligonucleotide
  Antisense strand to SEQ ID NO: 1507324
ucuaccacugucaucucgu

SEQ ID NO: 1507326 - RNA, 19 nt, Artificial Sequence
  Description of Artificial Sequence: Synthetic oligonucleotide
  Sense strand starting at position 1430 of SEQ ID NO: 1244685
aaggaaagauuguguaugu

SEQ ID NO: 1507327 - RNA, 19 nt, Artificial Sequence
  Description of Artificial Sequence: Synthetic oligonucleotide
  Antisense strand to SEQ ID NO: 1507326
acauacacaaucuuuccuu

SEQ ID NO: 1507328 - RNA, 19 nt, Artificial Sequence
  Description of Artificial Sequence: Synthetic oligonucleotide
  Sense strand starting at position 1434 of SEQ ID NO: 1244685
aaagauuguguaugucaug

SEQ ID NO: 1507329 - RNA, 19 nt, Artificial Sequence
  Description of Artificial Sequence: Synthetic oligonucleotide
  Antisense strand to SEQ ID NO: 1507328
caugacauacacaaucuuu

SEQ ID NO: 1507330 - RNA, 19 nt, Artificial Sequence
  Description of Artificial Sequence: Synthetic oligonucleotide
  Sense strand starting at position 1441 of SEQ ID NO: 1244685
guguaugucauguguccuu

SEQ ID NO: 1507331 - RNA, 19 nt, Artificial Sequence
  Description of Artificial Sequence: Synthetic oligonucleotide
  Antisense strand to SEQ ID NO: 1507330
aaggacacaugacauacac

SEQ ID NO: 1507332 - RNA, 19 nt, Artificial Sequence
  Description of Artificial Sequence: Synthetic oligonucleotide
  Sense strand starting at position 1444 of SEQ ID NO: 1244685
uaugucauguguccuuuga

SEQ ID NO: 1507333 - RNA, 19 nt, Artificial Sequence
  Description of Artificial Sequence: Synthetic oligonucleotide
  Antisense strand to SEQ ID NO: 1507332
ucaaaggacacaugacaua

SEQ ID NO: 1507334 - RNA, 19 nt, Artificial Sequence
  Description of Artificial Sequence: Synthetic oligonucleotide
  Sense strand starting at position 1446 of SEQ ID NO: 1244685
ugucauguguccuuugaga

SEQ ID NO: 1507335 - RNA, 19 nt, Artificial Sequence
  Description of Artificial Sequence: Synthetic oligonucleotide
  Antisense strand to SEQ ID NO: 1507334
ucucaaaggacacaugaca

SEQ ID NO: 1507336 - RNA, 19 nt, Artificial Sequence
  Description of Artificial Sequence: Synthetic oligonucleotide
  Sense strand starting at position 1448 of SEQ ID NO: 1244685
ucauguguccuuugagaac

SEQ ID NO: 1507337 - RNA, 19 nt, Artificial Sequence
  Description of Artificial Sequence: Synthetic oligonucleotide
  Antisense strand to SEQ ID NO: 1507336
guucucaaaggacacauga

SEQ ID NO: 1507338 - RNA, 19 nt, Artificial Sequence
  Description of Artificial Sequence: Synthetic oligonucleotide
  Sense strand starting at position 1583 of SEQ ID NO: 1244685
cauacuuugugaucuuggu

SEQ ID NO: 1507339 - RNA, 19 nt, Artificial Sequence
  Description of Artificial Sequence: Synthetic oligonucleotide
  Antisense strand to SEQ ID NO: 1507338
accaagaucacaaaguaug

SEQ ID NO: 1507340 - RNA, 19 nt, Artificial Sequence
  Description of Artificial Sequence: Synthetic oligonucleotide
  Sense strand starting at position 1707 of SEQ ID NO: 1244685
ugaguagggacaugucaga

SEQ ID NO: 1507341 - RNA, 19 nt, Artificial Sequence
  Description of Artificial Sequence: Synthetic oligonucleotide
  Antisense strand to SEQ ID NO: 1507340
ucugacaugucccuacuca

SEQ ID NO: 1507342 - RNA, 19 nt, Artificial Sequence
  Description of Artificial Sequence: Synthetic oligonucleotide
  Sense strand starting at position 2158 of SEQ ID NO: 1244685
ccgagaaaguuucugaacu

SEQ ID NO: 1507343 - RNA, 19 nt, Artificial Sequence
  Description of Artificial Sequence: Synthetic oligonucleotide
  Antisense strand to SEQ ID NO: 1507342
aguucagaaacuuucucgg

SEQ ID NO: 1507344 - RNA, 19 nt, Artificial Sequence
  Description of Artificial Sequence: Synthetic oligonucleotide
  Sense strand starting at position 2159 of SEQ ID NO: 1244685
cgagaaaguuucugaacug

SEQ ID NO: 1507345 - RNA, 19 nt, Artificial Sequence
  Description of Artificial Sequence: Synthetic oligonucleotide
  Antisense strand to SEQ ID NO: 1507344
caguucagaaacuuucucg

SEQ ID NO: 1507346 - RNA, 19 nt, Artificial Sequence
  Description of Artificial Sequence: Synthetic oligonucleotide
  Sense strand starting at position 2205 of SEQ ID NO: 1244685
uccucuagggccugaucua

SEQ ID NO: 1507347 - RNA, 19 nt, Artificial Sequence
  Description of Artificial Sequence: Synthetic oligonucleotide
  Antisense strand to SEQ ID NO: 1507346
uagaucaggcccuagagga

SEQ ID NO: 1507348 - RNA, 19 nt, Artificial Sequence
  Description of Artificial Sequence: Synthetic oligonucleotide
  Sense strand starting at position 2217 of SEQ ID NO: 1244685
ugaucuagguccuccaaga

SEQ ID NO: 1507349 - RNA, 19 nt, Artificial Sequence
  Description of Artificial Sequence: Synthetic oligonucleotide
  Antisense strand to SEQ ID NO: 1507348
ucuuggaggaccuagauca

SEQ ID NO: 1507350 - RNA, 19 nt, Artificial Sequence
  Description of Artificial Sequence: Synthetic oligonucleotide
  Sense strand starting at position 2541 of SEQ ID NO: 1244685
ccaagaagguauugucugu

SEQ ID NO: 1507351 - RNA, 19 nt, Artificial Sequence
  Description of Artificial Sequence: Synthetic oligonucleotide
  Antisense strand to SEQ ID NO: 1507350
acagacaauaccuucuugg

SEQ ID NO: 1507352 - RNA, 19 nt, Artificial Sequence
  Description of Artificial Sequence: Synthetic oligonucleotide
  Sense strand starting at position 2545 of SEQ ID NO: 1244685
gaagguauugucugugugu

SEQ ID NO: 1507353 - RNA, 19 nt, Artificial Sequence
  Description of Artificial Sequence: Synthetic oligonucleotide
  Antisense strand to SEQ ID NO: 1507352
acacacagacaauaccuuc

SEQ ID NO: 1507354 - RNA, 19 nt, Artificial Sequence
  Description of Artificial Sequence: Synthetic oligonucleotide
  Sense strand starting at position 2546 of SEQ ID NO: 1244685
aagguauugucugugugua

SEQ ID NO: 1507355 - RNA, 19 nt, Artificial Sequence
  Description of Artificial Sequence: Synthetic oligonucleotide
  Antisense strand to SEQ ID NO: 1507354
uacacacagacaauaccuu

SEQ ID NO: 1507356 - RNA, 19 nt, Artificial Sequence
  Description of Artificial Sequence: Synthetic oligonucleotide
  Sense strand starting at position 2547 of SEQ ID NO: 1244685
agguauugucuguguguau

SEQ ID NO: 1507357 - RNA, 19 nt, Artificial Sequence
  Description of Artificial Sequence: Synthetic oligonucleotide
  Antisense strand to SEQ ID NO: 1507356
auacacacagacaauaccu

SEQ ID NO: 1507358 - RNA, 19 nt, Artificial Sequence
  Description of Artificial Sequence: Synthetic oligonucleotide
  Sense strand starting at position 2548 of SEQ ID NO: 1244685
gguauugucuguguguaug

SEQ ID NO: 1507359 - RNA, 19 nt, Artificial Sequence
  Description of Artificial Sequence: Synthetic oligonucleotide
  Antisense strand to SEQ ID NO: 1507358
cauacacacagacaauacc

SEQ ID NO: 1507360 - RNA, 19 nt, Artificial Sequence
  Description of Artificial Sequence: Synthetic oligonucleotide
  Sense strand starting at position 2550 of SEQ ID NO: 1244685
uauugucuguguguaugau

SEQ ID NO: 1507361 - RNA, 19 nt, Artificial Sequence
  Description of Artificial Sequence: Synthetic oligonucleotide
  Antisense strand to SEQ ID NO: 1507360
aucauacacacagacaaua

SEQ ID NO: 1507362 - RNA, 19 nt, Artificial Sequence
  Description of Artificial Sequence: Synthetic oligonucleotide
  Sense strand starting at position 2551 of SEQ ID NO: 1244685
auugucuguguguaugauu

SEQ ID NO: 1507363 - RNA, 19 nt, Artificial Sequence
  Description of Artificial Sequence: Synthetic oligonucleotide
  Antisense strand to SEQ ID NO: 1507362
aaucauacacacagacaau

SEQ ID NO: 1507364 - RNA, 19 nt, Artificial Sequence
  Description of Artificial Sequence: Synthetic oligonucleotide
  Sense strand starting at position 2571 of SEQ ID NO: 1244685
agugaauauuaagaaggga

SEQ ID NO: 1507365 - RNA, 19 nt, Artificial Sequence
  Description of Artificial Sequence: Synthetic oligonucleotide
  Antisense strand to SEQ ID NO: 1507364
ucccuucuuaauauucacu

SEQ ID NO: 1507366 - RNA, 19 nt, Artificial Sequence
  Description of Artificial Sequence: Synthetic oligonucleotide
  Sense strand starting at position 2637 of SEQ ID NO: 1244685
gccuaaacagucuagcagu

SEQ ID NO: 1507367 - RNA, 19 nt, Artificial Sequence
  Description of Artificial Sequence: Synthetic oligonucleotide
  Antisense strand to SEQ ID NO: 1507366
acugcuagacuguuuaggc

SEQ ID NO: 1507368 - RNA, 19 nt, Artificial Sequence
  Description of Artificial Sequence: Synthetic oligonucleotide
  Sense strand starting at position 2643 of SEQ ID NO: 1244685
acagucuagcaguagaaau

SEQ ID NO: 1507369 - RNA, 19 nt, Artificial Sequence
  Description of Artificial Sequence: Synthetic oligonucleotide
  Antisense strand to SEQ ID NO: 1507368
auuucuacugcuagacugu

SEQ ID NO: 1507370 - RNA, 19 nt, Artificial Sequence
  Description of Artificial Sequence: Synthetic oligonucleotide
  Sense strand starting at position 33 of SEQ ID NO: 1244686
ccgagaaaguuucugaacu

SEQ ID NO: 1507371 - RNA, 19 nt, Artificial Sequence
  Description of Artificial Sequence: Synthetic oligonucleotide
  Antisense strand to SEQ ID NO: 1507370
aguucagaaacuuucucgg

SEQ ID NO: 1507372 - RNA, 19 nt, Artificial Sequence
  Description of Artificial Sequence: Synthetic oligonucleotide
  Sense strand starting at position 80 of SEQ ID NO: 1244686
uccucuagggccugaucua

SEQ ID NO: 1507373 - RNA, 19 nt, Artificial Sequence
  Description of Artificial Sequence: Synthetic oligonucleotide
  Antisense strand to SEQ ID NO: 1507372
uagaucaggcccuagagga

SEQ ID NO: 1507374 - RNA, 19 nt, Artificial Sequence
  Description of Artificial Sequence: Synthetic oligonucleotide
  Sense strand starting at position 92 of SEQ ID NO: 1244686
ugaucuagguccuccaaga

SEQ ID NO: 1507375 - RNA, 19 nt, Artificial Sequence
  Description of Artificial Sequence: Synthetic oligonucleotide
  Antisense strand to SEQ ID NO: 1507374
ucuuggaggaccuagauca

SEQ ID NO: 1507376 - RNA, 19 nt, Artificial Sequence
  Description of Artificial Sequence: Synthetic oligonucleotide
  Sense strand starting at position 420 of SEQ ID NO: 1244686
gaagguauugucugugugu

SEQ ID NO: 1507377 - RNA, 19 nt, Artificial Sequence
  Description of Artificial Sequence: Synthetic oligonucleotide
  Antisense strand to SEQ ID NO: 1507376
acacacagacaauaccuuc

SEQ ID NO: 1507378 - RNA, 19 nt, Artificial Sequence
  Description of Artificial Sequence: Synthetic oligonucleotide
  Sense strand starting at position 421 of SEQ ID NO: 1244686
aagguauugucugugugua

SEQ ID NO: 1507379 - RNA, 19 nt, Artificial Sequence
  Description of Artificial Sequence: Synthetic oligonucleotide
  Antisense strand to SEQ ID NO: 1507378
uacacacagacaauaccuu

SEQ ID NO: 1507380 - RNA, 19 nt, Artificial Sequence
  Description of Artificial Sequence: Synthetic oligonucleotide
  Sense strand starting at position 422 of SEQ ID NO: 1244686
agguauugucuguguguau

SEQ ID NO: 1507381 - RNA, 19 nt, Artificial Sequence
  Description of Artificial Sequence: Synthetic oligonucleotide
  Antisense strand to SEQ ID NO: 1507380
auacacacagacaauaccu

SEQ ID NO: 1507382 - RNA, 19 nt, Artificial Sequence
  Description of Artificial Sequence: Synthetic oligonucleotide
  Sense strand starting at position 423 of SEQ ID NO: 1244686
gguauugucuguguguaug

SEQ ID NO: 1507383 - RNA, 19 nt, Artificial Sequence
  Description of Artificial Sequence: Synthetic oligonucleotide
  Antisense strand to SEQ ID NO: 1507382
cauacacacagacaauacc

SEQ ID NO: 1507384 - RNA, 19 nt, Artificial Sequence
  Description of Artificial Sequence: Synthetic oligonucleotide
  Sense strand starting at position 425 of SEQ ID NO: 1244686
uauugucuguguguaugau

SEQ ID NO: 1507385 - RNA, 19 nt, Artificial Sequence
  Description of Artificial Sequence: Synthetic oligonucleotide
  Antisense strand to SEQ ID NO: 1507384
aucauacacacagacaaua

SEQ ID NO: 1507386 - RNA, 19 nt, Artificial Sequence
  Description of Artificial Sequence: Synthetic oligonucleotide
  Sense strand starting at position 426 of SEQ ID NO: 1244686
auugucuguguguaugauu

SEQ ID NO: 1507387 - RNA, 19 nt, Artificial Sequence
  Description of Artificial Sequence: Synthetic oligonucleotide
  Antisense strand to SEQ ID NO: 1507386
aaucauacacacagacaau

SEQ ID NO: 1507388 - RNA, 19 nt, Artificial Sequence
  Description of Artificial Sequence: Synthetic oligonucleotide
  Sense strand starting at position 446 of SEQ ID NO: 1244686
agugaauauuaagaaggga

SEQ ID NO: 1507389 - RNA, 19 nt, Artificial Sequence
  Description of Artificial Sequence: Synthetic oligonucleotide
  Antisense strand to SEQ ID NO: 1507388
ucccuucuuaauauucacu

SEQ ID NO: 1507390 - RNA, 19 nt, Artificial Sequence
  Description of Artificial Sequence: Synthetic oligonucleotide
  Sense strand starting at position 512 of SEQ ID NO: 1244686
gccuaaacagucuagcagu

SEQ ID NO: 1507391 - RNA, 19 nt, Artificial Sequence
  Description of Artificial Sequence: Synthetic oligonucleotide
  Antisense strand to SEQ ID NO: 1507390
acugcuagacuguuuaggc

SEQ ID NO: 1507392 - RNA, 19 nt, Artificial Sequence
  Description of Artificial Sequence: Synthetic oligonucleotide
  Sense strand starting at position 518 of SEQ ID NO: 1244686
acagucuagcaguagaaau

SEQ ID NO: 1507393 - RNA, 19 nt, Artificial Sequence
  Description of Artificial Sequence: Synthetic oligonucleotide
  Antisense strand to SEQ ID NO: 1507392
auuucuacugcuagacugu

SEQ ID NO: 1507394 - RNA, 19 nt, Artificial Sequence
  Description of Artificial Sequence: Synthetic oligonucleotide
  Sense strand starting at position 2058 of SEQ ID NO: 1244686
agcugauuggcugacaguu

SEQ ID NO: 1507395 - RNA, 19 nt, Artificial Sequence
  Description of Artificial Sequence: Synthetic oligonucleotide
  Antisense strand to SEQ ID NO: 1507394
aacugucagccaaucagcu

SEQ ID NO: 1507396 - RNA, 19 nt, Artificial Sequence
  Description of Artificial Sequence: Synthetic oligonucleotide
  Sense strand starting at position 2302 of SEQ ID NO: 1244686
cugggacuuuggucccaga

SEQ ID NO: 1507397 - RNA, 19 nt, Artificial Sequence
  Description of Artificial Sequence: Synthetic oligonucleotide
  Antisense strand to SEQ ID NO: 1507396
ucugggaccaaagucccag

SEQ ID NO: 1507398 - RNA, 19 nt, Artificial Sequence
  Description of Artificial Sequence: Synthetic oligonucleotide
  Sense strand starting at position 2305 of SEQ ID NO: 1244686
ggacuuuggucccagacag

SEQ ID NO: 1507399 - RNA, 19 nt, Artificial Sequence
  Description of Artificial Sequence: Synthetic oligonucleotide
  Antisense strand to SEQ ID NO: 1507398
cugucugggaccaaagucc

SEQ ID NO: 1507400 - RNA, 19 nt, Artificial Sequence
  Description of Artificial Sequence: Synthetic oligonucleotide
  Sense strand starting at position 2365 of SEQ ID NO: 1244686
gagggagacuguggagaua

SEQ ID NO: 1507401 - RNA, 19 nt, Artificial Sequence
  Description of Artificial Sequence: Synthetic oligonucleotide
  Antisense strand to SEQ ID NO: 1507400
uaucuccacagucucccuc

SEQ ID NO: 1507402 - RNA, 19 nt, Artificial Sequence
  Description of Artificial Sequence: Synthetic oligonucleotide
  Sense strand starting at position 2367 of SEQ ID NO: 1244686
gggagacuguggagauauc

SEQ ID NO: 1507403 - RNA, 19 nt, Artificial Sequence
  Description of Artificial Sequence: Synthetic oligonucleotide
  Antisense strand to SEQ ID NO: 1507402
gauaucuccacagucuccc

SEQ ID NO: 1507404 - RNA, 19 nt, Artificial Sequence
  Description of Artificial Sequence: Synthetic oligonucleotide
  Sense strand starting at position 2378 of SEQ ID NO: 1244686
gagauauccugaggcugau

SEQ ID NO: 1507405 - RNA, 19 nt, Artificial Sequence
  Description of Artificial Sequence: Synthetic oligonucleotide
  Antisense strand to SEQ ID NO: 1507404
aucagccucaggauaucuc

SEQ ID NO: 1507406 - RNA, 19 nt, Artificial Sequence
  Description of Artificial Sequence: Synthetic oligonucleotide
  Sense strand starting at position 2390 of SEQ ID NO: 1244686
ggcugauucgggugaagac

SEQ ID NO: 1507407 - RNA, 19 nt, Artificial Sequence
  Description of Artificial Sequence: Synthetic oligonucleotide
  Antisense strand to SEQ ID NO: 1507406
gucuucacccgaaucagcc

SEQ ID NO: 1507408 - RNA, 19 nt, Artificial Sequence
  Description of Artificial Sequence: Synthetic oligonucleotide
  Sense strand starting at position 2391 of SEQ ID NO: 1244686
gcugauucgggugaagacu

SEQ ID NO: 1507409 - RNA, 19 nt, Artificial Sequence
  Description of Artificial Sequence: Synthetic oligonucleotide
  Antisense strand to SEQ ID NO: 1507408
agucuucacccgaaucagc

SEQ ID NO: 1507410 - RNA, 19 nt, Artificial Sequence
  Description of Artificial Sequence: Synthetic oligonucleotide
  Sense strand starting at position 2763 of SEQ ID NO: 1244686
uggagacaauccuuucuau

SEQ ID NO: 1507411 - RNA, 19 nt, Artificial Sequence
  Description of Artificial Sequence: Synthetic oligonucleotide
  Antisense strand to SEQ ID NO: 1507410
auagaaaggauugucucca

SEQ ID NO: 1507412 - RNA, 19 nt, Artificial Sequence
  Description of Artificial Sequence: Synthetic oligonucleotide
  Sense strand starting at position 2787 of SEQ ID NO: 1244686
uuugguagcagagauucuu

SEQ ID NO: 1507413 - RNA, 19 nt, Artificial Sequence
  Description of Artificial Sequence: Synthetic oligonucleotide
  Antisense strand to SEQ ID NO: 1507412
aagaaucucugcuaccaaa

SEQ ID NO: 1507414 - RNA, 19 nt, Artificial Sequence
  Description of Artificial Sequence: Synthetic oligonucleotide
  Sense strand starting at position 2834 of SEQ ID NO: 1244686
gcaccuggcccuuagaagu

SEQ ID NO: 1507415 - RNA, 19 nt, Artificial Sequence
  Description of Artificial Sequence: Synthetic oligonucleotide
  Antisense strand to SEQ ID NO: 1507414
acuucuaagggccaggugc

SEQ ID NO: 1507416 - RNA, 19 nt, Artificial Sequence
  Description of Artificial Sequence: Synthetic oligonucleotide
  Sense strand starting at position 2984 of SEQ ID NO: 1244686
caccauuuaucuggaggau

SEQ ID NO: 1507417 - RNA, 19 nt, Artificial Sequence
  Description of Artificial Sequence: Synthetic oligonucleotide
  Antisense strand to SEQ ID NO: 1507416
auccuccagauaaauggug

SEQ ID NO: 1507418 - RNA, 19 nt, Artificial Sequence
  Description of Artificial Sequence: Synthetic oligonucleotide
  Sense strand starting at position 2996 of SEQ ID NO: 1244686
ggaggauaucuaugugaug

SEQ ID NO: 1507419 - RNA, 19 nt, Artificial Sequence
  Description of Artificial Sequence: Synthetic oligonucleotide
  Antisense strand to SEQ ID NO: 1507418
caucacauagauauccucc

SEQ ID NO: 1507420 - RNA, 19 nt, Artificial Sequence
  Description of Artificial Sequence: Synthetic oligonucleotide
  Sense strand starting at position 3005 of SEQ ID NO: 1244686
cuaugugaugccggaauau

SEQ ID NO: 1507421 - RNA, 19 nt, Artificial Sequence
  Description of Artificial Sequence: Synthetic oligonucleotide
  Antisense strand to SEQ ID NO: 1507420
auauuccggcaucacauag

SEQ ID NO: 1507422 - RNA, 19 nt, Artificial Sequence
  Description of Artificial Sequence: Synthetic oligonucleotide
  Sense strand starting at position 3251 of SEQ ID NO: 1244686
ugaagaagcaaggguauau

SEQ ID NO: 1507423 - RNA, 19 nt, Artificial Sequence
  Description of Artificial Sequence: Synthetic oligonucleotide
  Antisense strand to SEQ ID NO: 1507422
auauacccuugcuucuuca

SEQ ID NO: 1507424 - RNA, 19 nt, Artificial Sequence
  Description of Artificial Sequence: Synthetic oligonucleotide
  Sense strand starting at position 3336 of SEQ ID NO: 1244686
aguguugucuucucccaca

SEQ ID NO: 1507425 - RNA, 19 nt, Artificial Sequence
  Description of Artificial Sequence: Synthetic oligonucleotide
  Antisense strand to SEQ ID NO: 1507424
ugugggagaagacaacacu

SEQ ID NO: 1507426 - RNA, 19 nt, Artificial Sequence
  Description of Artificial Sequence: Synthetic oligonucleotide
  Sense strand starting at position 3414 of SEQ ID NO: 1244686
gggccauggacuuguacaa

SEQ ID NO: 1507427 - RNA, 19 nt, Artificial Sequence
  Description of Artificial Sequence: Synthetic oligonucleotide
  Antisense strand to SEQ ID NO: 1507426
uuguacaaguccauggccc

SEQ ID NO: 1507428 - RNA, 19 nt, Artificial Sequence
  Description of Artificial Sequence: Synthetic oligonucleotide
  Sense strand starting at position 3442 of SEQ ID NO: 1244686
agcccaagaucugacggaa

SEQ ID NO: 1507429 - RNA, 19 nt, Artificial Sequence
  Description of Artificial Sequence: Synthetic oligonucleotide
  Antisense strand to SEQ ID NO: 1507428
uuccgucagaucuugggcu

SEQ ID NO: 1507430 - RNA, 19 nt, Artificial Sequence
  Description of Artificial Sequence: Synthetic oligonucleotide
  Sense strand starting at position 3445 of SEQ ID NO: 1244686
ccaagaucugacggaagcu

SEQ ID NO: 1507431 - RNA, 19 nt, Artificial Sequence
  Description of Artificial Sequence: Synthetic oligonucleotide
  Antisense strand to SEQ ID NO: 1507430
agcuuccgucagaucuugg

SEQ ID NO: 1507432 - RNA, 19 nt, Artificial Sequence
  Description of Artificial Sequence: Synthetic oligonucleotide
  Sense strand starting at position 3501 of SEQ ID NO: 1244686
cgagaaaguuggcaggaaa

SEQ ID NO: 1507433 - RNA, 19 nt, Artificial Sequence
  Description of Artificial Sequence: Synthetic oligonucleotide
  Antisense strand to SEQ ID NO: 1507432
uuuccugccaacuuucucg

SEQ ID NO: 1507434 - RNA, 19 nt, Artificial Sequence
  Description of Artificial Sequence: Synthetic oligonucleotide
  Sense strand starting at position 3523 of SEQ ID NO: 1244686
acgccaucccuaggaggau

SEQ ID NO: 1507435 - RNA, 19 nt, Artificial Sequence
  Description of Artificial Sequence: Synthetic oligonucleotide
  Antisense strand to SEQ ID NO: 1507434
auccuccuagggauggcgu

SEQ ID NO: 1507436 - RNA, 19 nt, Artificial Sequence
  Description of Artificial Sequence: Synthetic oligonucleotide
  Sense strand starting at position 3532 of SEQ ID NO: 1244686
cuaggaggaucucugucuu

SEQ ID NO: 1507437 - RNA, 19 nt, Artificial Sequence
  Description of Artificial Sequence: Synthetic oligonucleotide
  Antisense strand to SEQ ID NO: 1507436
aagacagagauccuccuag

SEQ ID NO: 1507438 - RNA, 19 nt, Artificial Sequence
  Description of Artificial Sequence: Synthetic oligonucleotide
  Sense strand starting at position 3536 of SEQ ID NO: 1244686
gaggaucucugucuugagu

SEQ ID NO: 1507439 - RNA, 19 nt, Artificial Sequence
  Description of Artificial Sequence: Synthetic oligonucleotide
  Antisense strand to SEQ ID NO: 1507438
acucaagacagagauccuc

SEQ ID NO: 1507440 - RNA, 19 nt, Artificial Sequence
  Description of Artificial Sequence: Synthetic oligonucleotide
  Sense strand starting at position 3642 of SEQ ID NO: 1244686
gggugccuauccucaagua

SEQ ID NO: 1507441 - RNA, 19 nt, Artificial Sequence
  Description of Artificial Sequence: Synthetic oligonucleotide
  Antisense strand to SEQ ID NO: 1507440
uacuugaggauaggcaccc

SEQ ID NO: 1507442 - RNA, 19 nt, Artificial Sequence
  Description of Artificial Sequence: Synthetic oligonucleotide
  Sense strand starting at position 3643 of SEQ ID NO: 1244686
ggugccuauccucaaguau

SEQ ID NO: 1507443 - RNA, 19 nt, Artificial Sequence
  Description of Artificial Sequence: Synthetic oligonucleotide
  Antisense strand to SEQ ID NO: 1507442
auacuugaggauaggcacc

SEQ ID NO: 1507444 - RNA, 19 nt, Artificial Sequence
  Description of Artificial Sequence: Synthetic oligonucleotide
  Sense strand starting at position 3650 of SEQ ID NO: 1244686
auccucaaguauuggaaga

SEQ ID NO: 1507445 - RNA, 19 nt, Artificial Sequence
  Description of Artificial Sequence: Synthetic oligonucleotide
  Antisense strand to SEQ ID NO: 1507444
ucuuccaauacuugaggau

SEQ ID NO: 1507446 - RNA, 19 nt, Artificial Sequence
  Description of Artificial Sequence: Synthetic oligonucleotide
  Sense strand starting at position 3693 of SEQ ID NO: 1244686
uuccuuguugagggugaaa

SEQ ID NO: 1507447 - RNA, 19 nt, Artificial Sequence
  Description of Artificial Sequence: Synthetic oligonucleotide
  Antisense strand to SEQ ID NO: 1507446
uuucacccucaacaaggaa

SEQ ID NO: 1507448 - RNA, 19 nt, Artificial Sequence
  Description of Artificial Sequence: Synthetic oligonucleotide
  Sense strand starting at position 3720 of SEQ ID NO: 1244686
agaauuacauguccugaug

SEQ ID NO: 1507449 - RNA, 19 nt, Artificial Sequence
  Description of Artificial Sequence: Synthetic oligonucleotide
  Antisense strand to SEQ ID NO: 1507448
caucaggacauguaauucu

SEQ ID NO: 1507450 - RNA, 19 nt, Artificial Sequence
  Description of Artificial Sequence: Synthetic oligonucleotide
  Sense strand starting at position 576 of SEQ ID NO: 1244687
agguaagagccaugacugu

SEQ ID NO: 1507451 - RNA, 19 nt, Artificial Sequence
  Description of Artificial Sequence: Synthetic oligonucleotide
  Antisense strand to SEQ ID NO: 1507450
acagucauggcucuuaccu

SEQ ID NO: 1507452 - RNA, 19 nt, Artificial Sequence
  Description of Artificial Sequence: Synthetic oligonucleotide
  Sense strand starting at position 580 of SEQ ID NO: 1244687
aagagccaugacuguuaaa

SEQ ID NO: 1507453 - RNA, 19 nt, Artificial Sequence
  Description of Artificial Sequence: Synthetic oligonucleotide
  Antisense strand to SEQ ID NO: 1507452
uuuaacagucauggcucuu

SEQ ID NO: 1507454 - RNA, 19 nt, Artificial Sequence
  Description of Artificial Sequence: Synthetic oligonucleotide
  Sense strand starting at position 1601 of SEQ ID NO: 1244687
ggccuucuacaaggugaga

SEQ ID NO: 1507455 - RNA, 19 nt, Artificial Sequence
  Description of Artificial Sequence: Synthetic oligonucleotide
  Antisense strand to SEQ ID NO: 1507454
ucucaccuuguagaaggcc

SEQ ID NO: 1507456 - RNA, 19 nt, Artificial Sequence
  Description of Artificial Sequence: Synthetic oligonucleotide
  Sense strand starting at position 1707 of SEQ ID NO: 1244687
aguccuggcccuuagaauc

SEQ ID NO: 1507457 - RNA, 19 nt, Artificial Sequence
  Description of Artificial Sequence: Synthetic oligonucleotide
  Antisense strand to SEQ ID NO: 1507456
gauucuaagggccaggacu

SEQ ID NO: 1507458 - RNA, 19 nt, Artificial Sequence
  Description of Artificial Sequence: Synthetic oligonucleotide
  Sense strand starting at position 1857 of SEQ ID NO: 1244687
ccauuauugucccuggcuu

SEQ ID NO: 1507459 - RNA, 19 nt, Artificial Sequence
  Description of Artificial Sequence: Synthetic oligonucleotide
  Antisense strand to SEQ ID NO: 1507458
aagccagggacaauaaugg

SEQ ID NO: 1507460 - RNA, 19 nt, Artificial Sequence
  Description of Artificial Sequence: Synthetic oligonucleotide
  Sense strand starting at position 1932 of SEQ ID NO: 1244687
cguugucugguggaagaca

SEQ ID NO: 1507461 - RNA, 19 nt, Artificial Sequence
  Description of Artificial Sequence: Synthetic oligonucleotide
  Antisense strand to SEQ ID NO: 1507460
ugucuuccaccagacaacg

SEQ ID NO: 1507462 - RNA, 19 nt, Artificial Sequence
  Description of Artificial Sequence: Synthetic oligonucleotide
  Sense strand starting at position 1991 of SEQ ID NO: 1244687
cauggagaauugucuuucu

SEQ ID NO: 1507463 - RNA, 19 nt, Artificial Sequence
  Description of Artificial Sequence: Synthetic oligonucleotide
  Antisense strand to SEQ ID NO: 1507462
agaaagacaauucuccaug

SEQ ID NO: 1507464 - RNA, 19 nt, Artificial Sequence
  Description of Artificial Sequence: Synthetic oligonucleotide
  Sense strand starting at position 1994 of SEQ ID NO: 1244687
ggagaauugucuuucuucc

SEQ ID NO: 1507465 - RNA, 19 nt, Artificial Sequence
  Description of Artificial Sequence: Synthetic oligonucleotide
  Antisense strand to SEQ ID NO: 1507464
ggaagaaagacaauucucc

SEQ ID NO: 1507466 - RNA, 19 nt, Artificial Sequence
  Description of Artificial Sequence: Synthetic oligonucleotide
  Sense strand starting at position 2140 of SEQ ID NO: 1244687
gagaaauggucagauccau

SEQ ID NO: 1507467 - RNA, 19 nt, Artificial Sequence
  Description of Artificial Sequence: Synthetic oligonucleotide
  Antisense strand to SEQ ID NO: 1507466
auggaucugaccauuucuc

SEQ ID NO: 1507468 - RNA, 19 nt, Artificial Sequence
  Description of Artificial Sequence: Synthetic oligonucleotide
  Sense strand starting at position 2193 of SEQ ID NO: 1244687
uggguuggaucagucaagu

SEQ ID NO: 1507469 - RNA, 19 nt, Artificial Sequence
  Description of Artificial Sequence: Synthetic oligonucleotide
  Antisense strand to SEQ ID NO: 1507468
acuugacugauccaaccca

SEQ ID NO: 1507470 - RNA, 19 nt, Artificial Sequence
  Description of Artificial Sequence: Synthetic oligonucleotide
  Sense strand starting at position 2355 of SEQ ID NO: 1244687
uauaguuucuucgucuuga

SEQ ID NO: 1507471 - RNA, 19 nt, Artificial Sequence
  Description of Artificial Sequence: Synthetic oligonucleotide
  Antisense strand to SEQ ID NO: 1507470
ucaagacgaagaaacuaua

SEQ ID NO: 1507472 - RNA, 19 nt, Artificial Sequence
  Description of Artificial Sequence: Synthetic oligonucleotide
  Sense strand starting at position 2356 of SEQ ID NO: 1244687
auaguuucuucgucuugag

SEQ ID NO: 1507473 - RNA, 19 nt, Artificial Sequence
  Description of Artificial Sequence: Synthetic oligonucleotide
  Antisense strand to SEQ ID NO: 1507472
cucaagacgaagaaacuau

SEQ ID NO: 1507474 - RNA, 19 nt, Artificial Sequence
  Description of Artificial Sequence: Synthetic oligonucleotide
  Sense strand starting at position 2364 of SEQ ID NO: 1244687
uucgucuugaggcauguaa

SEQ ID NO: 1507475 - RNA, 19 nt, Artificial Sequence
  Description of Artificial Sequence: Synthetic oligonucleotide
  Antisense strand to SEQ ID NO: 1507474
uuacaugccucaagacgaa

SEQ ID NO: 1507476 - RNA, 19 nt, Artificial Sequence
  Description of Artificial Sequence: Synthetic oligonucleotide
  Sense strand starting at position 2368 of SEQ ID NO: 1244687
ucuugaggcauguaagcuu

SEQ ID NO: 1507477 - RNA, 19 nt, Artificial Sequence
  Description of Artificial Sequence: Synthetic oligonucleotide
  Antisense strand to SEQ ID NO: 1507476
aagcuuacaugccucaaga

SEQ ID NO: 1507478 - RNA, 19 nt, Artificial Sequence
  Description of Artificial Sequence: Synthetic oligonucleotide
  Sense strand starting at position 2466 of SEQ ID NO: 1244687
ugaagacucuuggccaacu

SEQ ID NO: 1507479 - RNA, 19 nt, Artificial Sequence
  Description of Artificial Sequence: Synthetic oligonucleotide
  Antisense strand to SEQ ID NO: 1507478
aguuggccaagagucuuca

SEQ ID NO: 1507480 - RNA, 19 nt, Artificial Sequence
  Description of Artificial Sequence: Synthetic oligonucleotide
  Sense strand starting at position 2707 of SEQ ID NO: 1244687
gacuguugguauucugaac

SEQ ID NO: 1507481 - RNA, 19 nt, Artificial Sequence
  Description of Artificial Sequence: Synthetic oligonucleotide
  Antisense strand to SEQ ID NO: 1507480
guucagaauaccaacaguc

SEQ ID NO: 1507482 - RNA, 19 nt, Artificial Sequence
  Description of Artificial Sequence: Synthetic oligonucleotide
  Sense strand starting at position 2752 of SEQ ID NO: 1244687
ccuagagacucuccugauu

SEQ ID NO: 1507483 - RNA, 19 nt, Artificial Sequence
  Description of Artificial Sequence: Synthetic oligonucleotide
  Antisense strand to SEQ ID NO: 1507482
aaucaggagagucucuagg

SEQ ID NO: 1507484 - RNA, 19 nt, Artificial Sequence
  Description of Artificial Sequence: Synthetic oligonucleotide
  Sense strand starting at position 2771 of SEQ ID NO: 1244687
ucugucucauucuuugauu

SEQ ID NO: 1507485 - RNA, 19 nt, Artificial Sequence
  Description of Artificial Sequence: Synthetic oligonucleotide
  Antisense strand to SEQ ID NO: 1507484
aaucaaagaaugagacaga

SEQ ID NO: 1507486 - RNA, 19 nt, Artificial Sequence
  Description of Artificial Sequence: Synthetic oligonucleotide
  Sense strand starting at position 2825 of SEQ ID NO: 1244687
uggcaucacuuguuaagag

SEQ ID NO: 1507487 - RNA, 19 nt, Artificial Sequence
  Description of Artificial Sequence: Synthetic oligonucleotide
  Antisense strand to SEQ ID NO: 1507486
cucuuaacaagugaugcca

SEQ ID NO: 1507488 - RNA, 19 nt, Artificial Sequence
  Description of Artificial Sequence: Synthetic oligonucleotide
  Sense strand starting at position 2923 of SEQ ID NO: 1244687
uuggaaaugucuuucuuug

SEQ ID NO: 1507489 - RNA, 19 nt, Artificial Sequence
  Description of Artificial Sequence: Synthetic oligonucleotide
  Antisense strand to SEQ ID NO: 1507488
caaagaaagacauuuccaa

SEQ ID NO: 1507490 - RNA, 19 nt, Artificial Sequence
  Description of Artificial Sequence: Synthetic oligonucleotide
  Sense strand starting at position 2925 of SEQ ID NO: 1244687
ggaaaugucuuucuuugac

SEQ ID NO: 1507491 - RNA, 19 nt, Artificial Sequence
  Description of Artificial Sequence: Synthetic oligonucleotide
  Antisense strand to SEQ ID NO: 1507490
gucaaagaaagacauuucc

SEQ ID NO: 1507492 - RNA, 19 nt, Artificial Sequence
  Description of Artificial Sequence: Synthetic oligonucleotide
  Sense strand starting at position 2983 of SEQ ID NO: 1244687
cuuguaauuucucuugggu

SEQ ID NO: 1507493 - RNA, 19 nt, Artificial Sequence
  Description of Artificial Sequence: Synthetic oligonucleotide
  Antisense strand to SEQ ID NO: 1507492
acccaagagaaauuacaag

SEQ ID NO: 1507494 - RNA, 19 nt, Artificial Sequence
  Description of Artificial Sequence: Synthetic oligonucleotide
  Sense strand starting at position 2986 of SEQ ID NO: 1244687
guaauuucucuuggguggu

SEQ ID NO: 1507495 - RNA, 19 nt, Artificial Sequence
  Description of Artificial Sequence: Synthetic oligonucleotide
  Antisense strand to SEQ ID NO: 1507494
accacccaagagaaauuac

SEQ ID NO: 1507496 - RNA, 19 nt, Artificial Sequence
  Description of Artificial Sequence: Synthetic oligonucleotide
  Sense strand starting at position 3437 of SEQ ID NO: 1244687
gguacccaugucuaacuua

SEQ ID NO: 1507497 - RNA, 19 nt, Artificial Sequence
  Description of Artificial Sequence: Synthetic oligonucleotide
  Antisense strand to SEQ ID NO: 1507496
uaaguuagacauggguacc

SEQ ID NO: 1507498 - RNA, 19 nt, Artificial Sequence
  Description of Artificial Sequence: Synthetic oligonucleotide
  Sense strand starting at position 3492 of SEQ ID NO: 1244687
auuucuguauuccugugua

SEQ ID NO: 1507499 - RNA, 19 nt, Artificial Sequence
  Description of Artificial Sequence: Synthetic oligonucleotide
  Antisense strand to SEQ ID NO: 1507498
uacacaggaauacagaaau

SEQ ID NO: 1507500 - RNA, 19 nt, Artificial Sequence
  Description of Artificial Sequence: Synthetic oligonucleotide
  Sense strand starting at position 3495 of SEQ ID NO: 1244687
ucuguauuccuguguaauc

SEQ ID NO: 1507501 - RNA, 19 nt, Artificial Sequence
  Description of Artificial Sequence: Synthetic oligonucleotide
  Antisense strand to SEQ ID NO: 1507500
gauuacacaggaauacaga

SEQ ID NO: 1507502 - RNA, 19 nt, Artificial Sequence
  Description of Artificial Sequence: Synthetic oligonucleotide
  Sense strand starting at position 3532 of SEQ ID NO: 1244687
cccugucuagcugaaggaa

SEQ ID NO: 1507503 - RNA, 19 nt, Artificial Sequence
  Description of Artificial Sequence: Synthetic oligonucleotide
  Antisense strand to SEQ ID NO: 1507502
uuccuucagcuagacaggg

SEQ ID NO: 1507504 - RNA, 19 nt, Artificial Sequence
  Description of Artificial Sequence: Synthetic oligonucleotide
  Sense strand starting at position 3545 of SEQ ID NO: 1244687
aaggaagcucccugcugau

SEQ ID NO: 1507505 - RNA, 19 nt, Artificial Sequence
  Description of Artificial Sequence: Synthetic oligonucleotide
  Antisense strand to SEQ ID NO: 1507504
aucagcagggagcuuccuu

SEQ ID NO: 1507506 - RNA, 19 nt, Artificial Sequence
  Description of Artificial Sequence: Synthetic oligonucleotide
  Sense strand starting at position 3579 of SEQ ID NO: 1244687
ugugcauacuugccuaacu

SEQ ID NO: 1507507 - RNA, 19 nt, Artificial Sequence
  Description of Artificial Sequence: Synthetic oligonucleotide
  Antisense strand to SEQ ID NO: 1507506
aguuaggcaaguaugcaca

SEQ ID NO: 1507508 - RNA, 19 nt, Artificial Sequence
  Description of Artificial Sequence: Synthetic oligonucleotide
  Sense strand starting at position 3589 of SEQ ID NO: 1244687
ugccuaacucuugggacuu

SEQ ID NO: 1507509 - RNA, 19 nt, Artificial Sequence
  Description of Artificial Sequence: Synthetic oligonucleotide
  Antisense strand to SEQ ID NO: 1507508
aagucccaagaguuaggca

SEQ ID NO: 1507510 - RNA, 19 nt, Artificial Sequence
  Description of Artificial Sequence: Synthetic oligonucleotide
  Sense strand starting at position 3683 of SEQ ID NO: 1244687
gcacauuugucucucauau

SEQ ID NO: 1507511 - RNA, 19 nt, Artificial Sequence
  Description of Artificial Sequence: Synthetic oligonucleotide
  Antisense strand to SEQ ID NO: 1507510
auaugagagacaaaugugc

SEQ ID NO: 1507512 - RNA, 19 nt, Artificial Sequence
  Description of Artificial Sequence: Synthetic oligonucleotide
  Sense strand starting at position 3718 of SEQ ID NO: 1244687
gcauuaccuuuguugaaau

SEQ ID NO: 1507513 - RNA, 19 nt, Artificial Sequence
  Description of Artificial Sequence: Synthetic oligonucleotide
  Antisense strand to SEQ ID NO: 1507512
auuucaacaaagguaaugc

SEQ ID NO: 1507514 - RNA, 19 nt, Artificial Sequence
  Description of Artificial Sequence: Synthetic oligonucleotide
  Sense strand starting at position 3731 of SEQ ID NO: 1244687
ugaaauagcuuccuaaagu

SEQ ID NO: 1507515 - RNA, 19 nt, Artificial Sequence
  Description of Artificial Sequence: Synthetic oligonucleotide
  Antisense strand to SEQ ID NO: 1507514
acuuuaggaagcuauuuca

SEQ ID NO: 1507516 - RNA, 19 nt, Artificial Sequence
  Description of Artificial Sequence: Synthetic oligonucleotide
  Sense strand starting at position 3758 of SEQ ID NO: 1244687
cuguuuaccuugguaucuu

SEQ ID NO: 1507517 - RNA, 19 nt, Artificial Sequence
  Description of Artificial Sequence: Synthetic oligonucleotide
  Antisense strand to SEQ ID NO: 1507516
aagauaccaagguaaacag

SEQ ID NO: 1507518 - RNA, 19 nt, Artificial Sequence
  Description of Artificial Sequence: Synthetic oligonucleotide
  Sense strand starting at position 3825 of SEQ ID NO: 1244687
agugauucuuaaguugagu

SEQ ID NO: 1507519 - RNA, 19 nt, Artificial Sequence
  Description of Artificial Sequence: Synthetic oligonucleotide
  Antisense strand to SEQ ID NO: 1507518
acucaacuuaagaaucacu

SEQ ID NO: 1507520 - RNA, 19 nt, Artificial Sequence
  Description of Artificial Sequence: Synthetic oligonucleotide
  Sense strand starting at position 3833 of SEQ ID NO: 1244687
uuaaguugaguccaagauc

SEQ ID NO: 1507521 - RNA, 19 nt, Artificial Sequence
  Description of Artificial Sequence: Synthetic oligonucleotide
  Antisense strand to SEQ ID NO: 1507520
gaucuuggacucaacuuaa

SEQ ID NO: 1507522 - RNA, 19 nt, Artificial Sequence
  Description of Artificial Sequence: Synthetic oligonucleotide
  Sense strand starting at position 3847 of SEQ ID NO: 1244687
agaucaagauaugauguuu

SEQ ID NO: 1507523 - RNA, 19 nt, Artificial Sequence
  Description of Artificial Sequence: Synthetic oligonucleotide
  Antisense strand to SEQ ID NO: 1507522
aaacaucauaucuugaucu

SEQ ID NO: 1507524 - RNA, 19 nt, Artificial Sequence
  Description of Artificial Sequence: Synthetic oligonucleotide
  Sense strand starting at position 3855 of SEQ ID NO: 1244687
auaugauguuugcuuuguu

SEQ ID NO: 1507525 - RNA, 19 nt, Artificial Sequence
  Description of Artificial Sequence: Synthetic oligonucleotide
  Antisense strand to SEQ ID NO: 1507524
aacaaagcaaacaucauau

SEQ ID NO: 1507526 - RNA, 19 nt, Artificial Sequence
  Description of Artificial Sequence: Synthetic oligonucleotide
  Sense strand starting at position 3902 of SEQ ID NO: 1244687
gagaaagauugguauccag

SEQ ID NO: 1507527 - RNA, 19 nt, Artificial Sequence
  Description of Artificial Sequence: Synthetic oligonucleotide
  Antisense strand to SEQ ID NO: 1507526
cuggauaccaaucuuucuc

SEQ ID NO: 1507528 - RNA, 19 nt, Artificial Sequence
  Description of Artificial Sequence: Synthetic oligonucleotide
  Sense strand starting at position 3974 of SEQ ID NO: 1244687
auaaguguccagcagaaag

SEQ ID NO: 1507529 - RNA, 19 nt, Artificial Sequence
  Description of Artificial Sequence: Synthetic oligonucleotide
  Antisense strand to SEQ ID NO: 1507528
cuuucugcuggacacuuau

SEQ ID NO: 1507530 - RNA, 19 nt, Artificial Sequence
  Description of Artificial Sequence: Synthetic oligonucleotide
  Sense strand starting at position 183 of SEQ ID NO: 1244688
gggugauuaaugugcacag

SEQ ID NO: 1507531 - RNA, 19 nt, Artificial Sequence
  Description of Artificial Sequence: Synthetic oligonucleotide
  Antisense strand to SEQ ID NO: 1507530
cugugcacauuaaucaccc

SEQ ID NO: 1507532 - RNA, 19 nt, Artificial Sequence
  Description of Artificial Sequence: Synthetic oligonucleotide
  Sense strand starting at position 185 of SEQ ID NO: 1244688
gugauuaaugugcacagca

SEQ ID NO: 1507533 - RNA, 19 nt, Artificial Sequence
  Description of Artificial Sequence: Synthetic oligonucleotide
  Antisense strand to SEQ ID NO: 1507532
ugcugugcacauuaaucac

SEQ ID NO: 1507534 - RNA, 19 nt, Artificial Sequence
  Description of Artificial Sequence: Synthetic oligonucleotide
  Sense strand starting at position 251 of SEQ ID NO: 1244688
agaagagcucaaggugaau

SEQ ID NO: 1507535 - RNA, 19 nt, Artificial Sequence
  Description of Artificial Sequence: Synthetic oligonucleotide
  Antisense strand to SEQ ID NO: 1507534
auucaccuugagcucuucu

SEQ ID NO: 1507536 - RNA, 19 nt, Artificial Sequence
  Description of Artificial Sequence: Synthetic oligonucleotide
  Sense strand starting at position 382 of SEQ ID NO: 1244688
caggguuuguucccugaga

SEQ ID NO: 1507537 - RNA, 19 nt, Artificial Sequence
  Description of Artificial Sequence: Synthetic oligonucleotide
  Antisense strand to SEQ ID NO: 1507536
ucucagggaacaaacccug

SEQ ID NO: 1507538 - RNA, 19 nt, Artificial Sequence
  Description of Artificial Sequence: Synthetic oligonucleotide
  Sense strand starting at position 476 of SEQ ID NO: 1244688
gugucauuccuagaguucu

SEQ ID NO: 1507539 - RNA, 19 nt, Artificial Sequence
  Description of Artificial Sequence: Synthetic oligonucleotide
  Antisense strand to SEQ ID NO: 1507538
agaacucuaggaaugacac

SEQ ID NO: 1507540 - RNA, 19 nt, Artificial Sequence
  Description of Artificial Sequence: Synthetic oligonucleotide
  Sense strand starting at position 610 of SEQ ID NO: 1244688
ugagcucuuggcguaaguu

SEQ ID NO: 1507541 - RNA, 19 nt, Artificial Sequence
  Description of Artificial Sequence: Synthetic oligonucleotide
  Antisense strand to SEQ ID NO: 1507540
aacuuacgccaagagcuca

SEQ ID NO: 1507542 - RNA, 19 nt, Artificial Sequence
  Description of Artificial Sequence: Synthetic oligonucleotide
  Sense strand starting at position 611 of SEQ ID NO: 1244688
gagcucuuggcguaaguuu

SEQ ID NO: 1507543 - RNA, 19 nt, Artificial Sequence
  Description of Artificial Sequence: Synthetic oligonucleotide
  Antisense strand to SEQ ID NO: 1507542
aaacuuacgccaagagcuc

SEQ ID NO: 1507544 - RNA, 19 nt, Artificial Sequence
  Description of Artificial Sequence: Synthetic oligonucleotide
  Sense strand starting at position 658 of SEQ ID NO: 1244688
gaacguaagcagugaaaga

SEQ ID NO: 1507545 - RNA, 19 nt, Artificial Sequence
  Description of Artificial Sequence: Synthetic oligonucleotide
  Antisense strand to SEQ ID NO: 1507544
ucuuucacugcuuacguuc

SEQ ID NO: 1507546 - RNA, 19 nt, Artificial Sequence
  Description of Artificial Sequence: Synthetic oligonucleotide
  Sense strand starting at position 741 of SEQ ID NO: 1244688
gaacgaguccucuagucuc

SEQ ID NO: 1507547 - RNA, 19 nt, Artificial Sequence
  Description of Artificial Sequence: Synthetic oligonucleotide
  Antisense strand to SEQ ID NO: 1507546
gagacuagaggacucguuc

SEQ ID NO: 1507548 - RNA, 19 nt, Artificial Sequence
  Description of Artificial Sequence: Synthetic oligonucleotide
  Sense strand starting at position 749 of SEQ ID NO: 1244688
ccucuagucucagcaggaa

SEQ ID NO: 1507549 - RNA, 19 nt, Artificial Sequence
  Description of Artificial Sequence: Synthetic oligonucleotide
  Antisense strand to SEQ ID NO: 1507548
uuccugcugagacuagagg

SEQ ID NO: 1507550 - RNA, 19 nt, Artificial Sequence
  Description of Artificial Sequence: Synthetic oligonucleotide
  Sense strand starting at position 752 of SEQ ID NO: 1244688
cuagucucagcaggaaaga

SEQ ID NO: 1507551 - RNA, 19 nt, Artificial Sequence
  Description of Artificial Sequence: Synthetic oligonucleotide
  Antisense strand to SEQ ID NO: 1507550
ucuuuccugcugagacuag

SEQ ID NO: 1507552 - RNA, 19 nt, Artificial Sequence
  Description of Artificial Sequence: Synthetic oligonucleotide
  Sense strand starting at position 800 of SEQ ID NO: 1244688
ggagacaccaucugugcuu

SEQ ID NO: 1507553 - RNA, 19 nt, Artificial Sequence
  Description of Artificial Sequence: Synthetic oligonucleotide
  Antisense strand to SEQ ID NO: 1507552
aagcacagauggugucucc

SEQ ID NO: 1507554 - RNA, 19 nt, Artificial Sequence
  Description of Artificial Sequence: Synthetic oligonucleotide
  Sense strand starting at position 806 of SEQ ID NO: 1244688
accaucugugcuuggucaa

SEQ ID NO: 1507555 - RNA, 19 nt, Artificial Sequence
  Description of Artificial Sequence: Synthetic oligonucleotide
  Antisense strand to SEQ ID NO: 1507554
uugaccaagcacagauggu

SEQ ID NO: 1507556 - RNA, 19 nt, Artificial Sequence
  Description of Artificial Sequence: Synthetic oligonucleotide
  Sense strand starting at position 809 of SEQ ID NO: 1244688
aucugugcuuggucaacau

SEQ ID NO: 1507557 - RNA, 19 nt, Artificial Sequence
  Description of Artificial Sequence: Synthetic oligonucleotide
  Antisense strand to SEQ ID NO: 1507556
auguugaccaagcacagau

SEQ ID NO: 1507558 - RNA, 19 nt, Artificial Sequence
  Description of Artificial Sequence: Synthetic oligonucleotide
  Sense strand starting at position 813 of SEQ ID NO: 1244688
gugcuuggucaacauggaa

SEQ ID NO: 1507559 - RNA, 19 nt, Artificial Sequence
  Description of Artificial Sequence: Synthetic oligonucleotide
  Antisense strand to SEQ ID NO: 1507558
uuccauguugaccaagcac

SEQ ID NO: 1507560 - RNA, 19 nt, Artificial Sequence
  Description of Artificial Sequence: Synthetic oligonucleotide
  Sense strand starting at position 890 of SEQ ID NO: 1244688
ccuaauguacgagaacauc

SEQ ID NO: 1507561 - RNA, 19 nt, Artificial Sequence
  Description of Artificial Sequence: Synthetic oligonucleotide
  Antisense strand to SEQ ID NO: 1507560
gauguucucguacauuagg

SEQ ID NO: 1507562 - RNA, 19 nt, Artificial Sequence
  Description of Artificial Sequence: Synthetic oligonucleotide
  Sense strand starting at position 898 of SEQ ID NO: 1244688
acgagaacaucucaguuga

SEQ ID NO: 1507563 - RNA, 19 nt, Artificial Sequence
  Description of Artificial Sequence: Synthetic oligonucleotide
  Antisense strand to SEQ ID NO: 1507562
ucaacugagauguucucgu

SEQ ID NO: 1507564 - RNA, 19 nt, Artificial Sequence
  Description of Artificial Sequence: Synthetic oligonucleotide
  Sense strand starting at position 949 of SEQ ID NO: 1244688
uuccaacauuggucaguuu

SEQ ID NO: 1507565 - RNA, 19 nt, Artificial Sequence
  Description of Artificial Sequence: Synthetic oligonucleotide
  Antisense strand to SEQ ID NO: 1507564
aaacugaccaauguuggaa

SEQ ID NO: 1507566 - RNA, 19 nt, Artificial Sequence
  Description of Artificial Sequence: Synthetic oligonucleotide
  Sense strand starting at position 956 of SEQ ID NO: 1244688
auuggucaguuuccuauau

SEQ ID NO: 1507567 - RNA, 19 nt, Artificial Sequence
  Description of Artificial Sequence: Synthetic oligonucleotide
  Antisense strand to SEQ ID NO: 1507566
auauaggaaacugaccaau

SEQ ID NO: 1507568 - RNA, 19 nt, Artificial Sequence
  Description of Artificial Sequence: Synthetic oligonucleotide
  Sense strand starting at position 957 of SEQ ID NO: 1244688
uuggucaguuuccuauauu

SEQ ID NO: 1507569 - RNA, 19 nt, Artificial Sequence
  Description of Artificial Sequence: Synthetic oligonucleotide
  Antisense strand to SEQ ID NO: 1507568
aauauaggaaacugaccaa

SEQ ID NO: 1507570 - RNA, 19 nt, Artificial Sequence
  Description of Artificial Sequence: Synthetic oligonucleotide
  Sense strand starting at position 960 of SEQ ID NO: 1244688
gucaguuuccuauauugaa

SEQ ID NO: 1507571 - RNA, 19 nt, Artificial Sequence
  Description of Artificial Sequence: Synthetic oligonucleotide
  Antisense strand to SEQ ID NO: 1507570
uucaauauaggaaacugac

SEQ ID NO: 1507572 - RNA, 19 nt, Artificial Sequence
  Description of Artificial Sequence: Synthetic oligonucleotide
  Sense strand starting at position 978 of SEQ ID NO: 1244688
agaugacacucugauuuga

SEQ ID NO: 1507573 - RNA, 19 nt, Artificial Sequence
  Description of Artificial Sequence: Synthetic oligonucleotide
  Antisense strand to SEQ ID NO: 1507572
ucaaaucagagugucaucu

SEQ ID NO: 1507574 - RNA, 19 nt, Artificial Sequence
  Description of Artificial Sequence: Synthetic oligonucleotide
  Sense strand starting at position 1213 of SEQ ID NO: 1244688
ccugauuuauugcaugcaa

SEQ ID NO: 1507575 - RNA, 19 nt, Artificial Sequence
  Description of Artificial Sequence: Synthetic oligonucleotide
  Antisense strand to SEQ ID NO: 1507574
uugcaugcaauaaaucagg

SEQ ID NO: 1507576 - RNA, 19 nt, Artificial Sequence
  Description of Artificial Sequence: Synthetic oligonucleotide
  Sense strand starting at position 1273 of SEQ ID NO: 1244688
ugaugaugccgagagugaa

SEQ ID NO: 1507577 - RNA, 19 nt, Artificial Sequence
  Description of Artificial Sequence: Synthetic oligonucleotide
  Antisense strand to SEQ ID NO: 1507576
uucacucucggcaucauca

SEQ ID NO: 1507578 - RNA, 19 nt, Artificial Sequence
  Description of Artificial Sequence: Synthetic oligonucleotide
  Sense strand starting at position 1353 of SEQ ID NO: 1244688
ggcgcucucaccuguggau

SEQ ID NO: 1507579 - RNA, 19 nt, Artificial Sequence
  Description of Artificial Sequence: Synthetic oligonucleotide
  Antisense strand to SEQ ID NO: 1507578
auccacaggugagagcgcc

SEQ ID NO: 1507580 - RNA, 19 nt, Artificial Sequence
  Description of Artificial Sequence: Synthetic oligonucleotide
  Sense strand starting at position 3083 of SEQ ID NO: 1244688
aguuauucgacacggcgaa

SEQ ID NO: 1507581 - RNA, 19 nt, Artificial Sequence
  Description of Artificial Sequence: Synthetic oligonucleotide
  Antisense strand to SEQ ID NO: 1507580
uucgccgugucgaauaacu

SEQ ID NO: 1507582 - RNA, 19 nt, Artificial Sequence
  Description of Artificial Sequence: Synthetic oligonucleotide
  Sense strand starting at position 3317 of SEQ ID NO: 1244688
ggucaaacccauugcuaca

SEQ ID NO: 1507583 - RNA, 19 nt, Artificial Sequence
  Description of Artificial Sequence: Synthetic oligonucleotide
  Antisense strand to SEQ ID NO: 1507582
uguagcaauggguuugacc

SEQ ID NO: 1507584 - RNA, 19 nt, Artificial Sequence
  Description of Artificial Sequence: Synthetic oligonucleotide
  Sense strand starting at position 3357 of SEQ ID NO: 1244688
ggucaaguggcuugucuga

SEQ ID NO: 1507585 - RNA, 19 nt, Artificial Sequence
  Description of Artificial Sequence: Synthetic oligonucleotide
  Antisense strand to SEQ ID NO: 1507584
ucagacaagccacuugacc

SEQ ID NO: 1507586 - RNA, 19 nt, Artificial Sequence
  Description of Artificial Sequence: Synthetic oligonucleotide
  Sense strand starting at position 3484 of SEQ ID NO: 1244688
auggcaacucuuugcuaua

SEQ ID NO: 1507587 - RNA, 19 nt, Artificial Sequence
  Description of Artificial Sequence: Synthetic oligonucleotide
  Antisense strand to SEQ ID NO: 1507586
uauagcaaagaguugccau

SEQ ID NO: 1507588 - RNA, 19 nt, Artificial Sequence
  Description of Artificial Sequence: Synthetic oligonucleotide
  Sense strand starting at position 3486 of SEQ ID NO: 1244688
ggcaacucuuugcuauacu

SEQ ID NO: 1507589 - RNA, 19 nt, Artificial Sequence
  Description of Artificial Sequence: Synthetic oligonucleotide
  Antisense strand to SEQ ID NO: 1507588
aguauagcaaagaguugcc

SEQ ID NO: 1507590 - RNA, 19 nt, Artificial Sequence
  Description of Artificial Sequence: Synthetic oligonucleotide
  Sense strand starting at position 3580 of SEQ ID NO: 1244688
uguugaaaucucugugcug

SEQ ID NO: 1507591 - RNA, 19 nt, Artificial Sequence
  Description of Artificial Sequence: Synthetic oligonucleotide
  Antisense strand to SEQ ID NO: 1507590
cagcacagagauuucaaca

SEQ ID NO: 1507592 - RNA, 19 nt, Artificial Sequence
  Description of Artificial Sequence: Synthetic oligonucleotide
  Sense strand starting at position 3582 of SEQ ID NO: 1244688
uugaaaucucugugcugca

SEQ ID NO: 1507593 - RNA, 19 nt, Artificial Sequence
  Description of Artificial Sequence: Synthetic oligonucleotide
  Antisense strand to SEQ ID NO: 1507592
ugcagcacagagauuucaa

SEQ ID NO: 1507594 - RNA, 19 nt, Artificial Sequence
  Description of Artificial Sequence: Synthetic oligonucleotide
  Sense strand starting at position 3662 of SEQ ID NO: 1244688
gugucugggucuguggaaa

SEQ ID NO: 1507595 - RNA, 19 nt, Artificial Sequence
  Description of Artificial Sequence: Synthetic oligonucleotide
  Antisense strand to SEQ ID NO: 1507594
uuuccacagacccagacac

SEQ ID NO: 1507596 - RNA, 19 nt, Artificial Sequence
  Description of Artificial Sequence: Synthetic oligonucleotide
  Sense strand starting at position 3682 of SEQ ID NO: 1244688
gaggccugagucuaacuuu

SEQ ID NO: 1507597 - RNA, 19 nt, Artificial Sequence
  Description of Artificial Sequence: Synthetic oligonucleotide
  Antisense strand to SEQ ID NO: 1507596
aaaguuagacucaggccuc

SEQ ID NO: 1507598 - RNA, 19 nt, Artificial Sequence
  Description of Artificial Sequence: Synthetic oligonucleotide
  Sense strand starting at position 3724 of SEQ ID NO: 1244688
agagaaucauaguaccauc

SEQ ID NO: 1507599 - RNA, 19 nt, Artificial Sequence
  Description of Artificial Sequence: Synthetic oligonucleotide
  Antisense strand to SEQ ID NO: 1507598
gaugguacuaugauucucu

SEQ ID NO: 1507600 - RNA, 19 nt, Artificial Sequence
  Description of Artificial Sequence: Synthetic oligonucleotide
  Sense strand starting at position 3746 of SEQ ID NO: 1244688
ggcguguguccuuggagga

SEQ ID NO: 1507601 - RNA, 19 nt, Artificial Sequence
  Description of Artificial Sequence: Synthetic oligonucleotide
  Antisense strand to SEQ ID NO: 1507600
uccuccaaggacacacgcc

SEQ ID NO: 1507602 - RNA, 19 nt, Artificial Sequence
  Description of Artificial Sequence: Synthetic oligonucleotide
  Sense strand starting at position 3747 of SEQ ID NO: 1244688
gcguguguccuuggaggag

SEQ ID NO: 1507603 - RNA, 19 nt, Artificial Sequence
  Description of Artificial Sequence: Synthetic oligonucleotide
  Antisense strand to SEQ ID NO: 1507602
cuccuccaaggacacacgc

SEQ ID NO: 1507604 - RNA, 19 nt, Artificial Sequence
  Description of Artificial Sequence: Synthetic oligonucleotide
  Sense strand starting at position 3803 of SEQ ID NO: 1244688
caagauucugccugcguga

SEQ ID NO: 1507605 - RNA, 19 nt, Artificial Sequence
  Description of Artificial Sequence: Synthetic oligonucleotide
  Antisense strand to SEQ ID NO: 1507604
ucacgcaggcagaaucuug

SEQ ID NO: 1507606 - RNA, 19 nt, Artificial Sequence
  Description of Artificial Sequence: Synthetic oligonucleotide
  Sense strand starting at position 3918 of SEQ ID NO: 1244688
cccacucaugugugaccua

SEQ ID NO: 1507607 - RNA, 19 nt, Artificial Sequence
  Description of Artificial Sequence: Synthetic oligonucleotide
  Antisense strand to SEQ ID NO: 1507606
uaggucacacaugaguggg

SEQ ID NO: 1507608 - RNA, 19 nt, Artificial Sequence
  Description of Artificial Sequence: Synthetic oligonucleotide
  Sense strand starting at position 3921 of SEQ ID NO: 1244688
acucaugugugaccuaaac

SEQ ID NO: 1507609 - RNA, 19 nt, Artificial Sequence
  Description of Artificial Sequence: Synthetic oligonucleotide
  Antisense strand to SEQ ID NO: 1507608
guuuaggucacacaugagu

SEQ ID NO: 1507610 - RNA, 19 nt, Artificial Sequence
  Description of Artificial Sequence: Synthetic oligonucleotide
  Sense strand starting at position 243 of SEQ ID NO: 1244689
uugggaaucuuagggacau

SEQ ID NO: 1507611 - RNA, 19 nt, Artificial Sequence
  Description of Artificial Sequence: Synthetic oligonucleotide
  Antisense strand to SEQ ID NO: 1507610
augucccuaagauucccaa

SEQ ID NO: 1507612 - RNA, 19 nt, Artificial Sequence
  Description of Artificial Sequence: Synthetic oligonucleotide
  Sense strand starting at position 244 of SEQ ID NO: 1244689
ugggaaucuuagggacauc

SEQ ID NO: 1507613 - RNA, 19 nt, Artificial Sequence
  Description of Artificial Sequence: Synthetic oligonucleotide
  Antisense strand to SEQ ID NO: 1507612
gaugucccuaagauuccca

SEQ ID NO: 1507614 - RNA, 19 nt, Artificial Sequence
  Description of Artificial Sequence: Synthetic oligonucleotide
  Sense strand starting at position 274 of SEQ ID NO: 1244689
ucaguaauaccugguaagu

SEQ ID NO: 1507615 - RNA, 19 nt, Artificial Sequence
  Description of Artificial Sequence: Synthetic oligonucleotide
  Antisense strand to SEQ ID NO: 1507614
acuuaccagguauuacuga

SEQ ID NO: 1507616 - RNA, 19 nt, Artificial Sequence
  Description of Artificial Sequence: Synthetic oligonucleotide
  Sense strand starting at position 335 of SEQ ID NO: 1244689
auuggauauuucuguagag

SEQ ID NO: 1507617 - RNA, 19 nt, Artificial Sequence
  Description of Artificial Sequence: Synthetic oligonucleotide
  Antisense strand to SEQ ID NO: 1507616
cucuacagaaauauccaau

SEQ ID NO: 1507618 - RNA, 19 nt, Artificial Sequence
  Description of Artificial Sequence: Synthetic oligonucleotide
  Sense strand starting at position 370 of SEQ ID NO: 1244689
guggcaugauccucaacgu

SEQ ID NO: 1507619 - RNA, 19 nt, Artificial Sequence
  Description of Artificial Sequence: Synthetic oligonucleotide
  Antisense strand to SEQ ID NO: 1507618
acguugaggaucaugccac

SEQ ID NO: 1507620 - RNA, 19 nt, Artificial Sequence
  Description of Artificial Sequence: Synthetic oligonucleotide
  Sense strand starting at position 491 of SEQ ID NO: 1244689
ggaucugcucagggaacua

SEQ ID NO: 1507621 - RNA, 19 nt, Artificial Sequence
  Description of Artificial Sequence: Synthetic oligonucleotide
  Antisense strand to SEQ ID NO: 1507620
uaguucccugagcagaucc

SEQ ID NO: 1507622 - RNA, 19 nt, Artificial Sequence
  Description of Artificial Sequence: Synthetic oligonucleotide
  Sense strand starting at position 503 of SEQ ID NO: 1244689
ggaacuaacuuguugcaca

SEQ ID NO: 1507623 - RNA, 19 nt, Artificial Sequence
  Description of Artificial Sequence: Synthetic oligonucleotide
  Antisense strand to SEQ ID NO: 1507622
ugugcaacaaguuaguucc

SEQ ID NO: 1507624 - RNA, 19 nt, Artificial Sequence
  Description of Artificial Sequence: Synthetic oligonucleotide
  Sense strand starting at position 582 of SEQ ID NO: 1244689
ggagcuaacuugucuaaag

SEQ ID NO: 1507625 - RNA, 19 nt, Artificial Sequence
  Description of Artificial Sequence: Synthetic oligonucleotide
  Antisense strand to SEQ ID NO: 1507624
cuuuagacaaguuagcucc

SEQ ID NO: 1507626 - RNA, 19 nt, Artificial Sequence
  Description of Artificial Sequence: Synthetic oligonucleotide
  Sense strand starting at position 583 of SEQ ID NO: 1244689
gagcuaacuugucuaaagc

SEQ ID NO: 1507627 - RNA, 19 nt, Artificial Sequence
  Description of Artificial Sequence: Synthetic oligonucleotide
  Antisense strand to SEQ ID NO: 1507626
gcuuuagacaaguuagcuc

SEQ ID NO: 1507628 - RNA, 19 nt, Artificial Sequence
  Description of Artificial Sequence: Synthetic oligonucleotide
  Sense strand starting at position 592 of SEQ ID NO: 1244689
ugucuaaagccauauaaga

SEQ ID NO: 1507629 - RNA, 19 nt, Artificial Sequence
  Description of Artificial Sequence: Synthetic oligonucleotide
  Antisense strand to SEQ ID NO: 1507628
ucuuauauggcuuuagaca

SEQ ID NO: 1507630 - RNA, 19 nt, Artificial Sequence
  Description of Artificial Sequence: Synthetic oligonucleotide
  Sense strand starting at position 647 of SEQ ID NO: 1244689
ggccuugucccaggacauu

SEQ ID NO: 1507631 - RNA, 19 nt, Artificial Sequence
  Description of Artificial Sequence: Synthetic oligonucleotide
  Antisense strand to SEQ ID NO: 1507630
aauguccugggacaaggcc

SEQ ID NO: 1507632 - RNA, 19 nt, Artificial Sequence
  Description of Artificial Sequence: Synthetic oligonucleotide
  Sense strand starting at position 1098 of SEQ ID NO: 1244689
ccagucuauucucugggua

SEQ ID NO: 1507633 - RNA, 19 nt, Artificial Sequence
  Description of Artificial Sequence: Synthetic oligonucleotide
  Antisense strand to SEQ ID NO: 1507632
uacccagagaauagacugg

SEQ ID NO: 1507634 - RNA, 19 nt, Artificial Sequence
  Description of Artificial Sequence: Synthetic oligonucleotide
  Sense strand starting at position 1099 of SEQ ID NO: 1244689
cagucuauucucuggguaa

SEQ ID NO: 1507635 - RNA, 19 nt, Artificial Sequence
  Description of Artificial Sequence: Synthetic oligonucleotide
  Antisense strand to SEQ ID NO: 1507634
uuacccagagaauagacug

SEQ ID NO: 1507636 - RNA, 19 nt, Artificial Sequence
  Description of Artificial Sequence: Synthetic oligonucleotide
  Sense strand starting at position 1101 of SEQ ID NO: 1244689
gucuauucucuggguaacu

SEQ ID NO: 1507637 - RNA, 19 nt, Artificial Sequence
  Description of Artificial Sequence: Synthetic oligonucleotide
  Antisense strand to SEQ ID NO: 1507636
aguuacccagagaauagac

SEQ ID NO: 1507638 - RNA, 19 nt, Artificial Sequence
  Description of Artificial Sequence: Synthetic oligonucleotide
  Sense strand starting at position 1111 of SEQ ID NO: 1244689
uggguaacugcccgauuga

SEQ ID NO: 1507639 - RNA, 19 nt, Artificial Sequence
  Description of Artificial Sequence: Synthetic oligonucleotide
  Antisense strand to SEQ ID NO: 1507638
ucaaucgggcaguuaccca

SEQ ID NO: 1507640 - RNA, 19 nt, Artificial Sequence
  Description of Artificial Sequence: Synthetic oligonucleotide
  Sense strand starting at position 1112 of SEQ ID NO: 1244689
ggguaacugcccgauugaa

SEQ ID NO: 1507641 - RNA, 19 nt, Artificial Sequence
  Description of Artificial Sequence: Synthetic oligonucleotide
  Antisense strand to SEQ ID NO: 1507640
uucaaucgggcaguuaccc

SEQ ID NO: 1507642 - RNA, 19 nt, Artificial Sequence
  Description of Artificial Sequence: Synthetic oligonucleotide
  Sense strand starting at position 1158 of SEQ ID NO: 1244689
gaccaagggucacuuaacu

SEQ ID NO: 1507643 - RNA, 19 nt, Artificial Sequence
  Description of Artificial Sequence: Synthetic oligonucleotide
  Antisense strand to SEQ ID NO: 1507642
aguuaagugacccuugguc

SEQ ID NO: 1507644 - RNA, 19 nt, Artificial Sequence
  Description of Artificial Sequence: Synthetic oligonucleotide
  Sense strand starting at position 1219 of SEQ ID NO: 1244689
gugcaacauuugucuccua

SEQ ID NO: 1507645 - RNA, 19 nt, Artificial Sequence
  Description of Artificial Sequence: Synthetic oligonucleotide
  Antisense strand to SEQ ID NO: 1507644
uaggagacaaauguugcac

SEQ ID NO: 1507646 - RNA, 19 nt, Artificial Sequence
  Description of Artificial Sequence: Synthetic oligonucleotide
  Sense strand starting at position 1455 of SEQ ID NO: 1244689
cuugcagcuuuguugugaa

SEQ ID NO: 1507647 - RNA, 19 nt, Artificial Sequence
  Description of Artificial Sequence: Synthetic oligonucleotide
  Antisense strand to SEQ ID NO: 1507646
uucacaacaaagcugcaag

SEQ ID NO: 1507648 - RNA, 19 nt, Artificial Sequence
  Description of Artificial Sequence: Synthetic oligonucleotide
  Sense strand starting at position 1467 of SEQ ID NO: 1244689
uugugaaggagcuaggauu

SEQ ID NO: 1507649 - RNA, 19 nt, Artificial Sequence
  Description of Artificial Sequence: Synthetic oligonucleotide
  Antisense strand to SEQ ID NO: 1507648
aauccuagcuccuucacaa

SEQ ID NO: 1507650 - RNA, 19 nt, Artificial Sequence
  Description of Artificial Sequence: Synthetic oligonucleotide
  Sense strand starting at position 1473 of SEQ ID NO: 1244689
aggagcuaggauuguuuaa

SEQ ID NO: 1507651 - RNA, 19 nt, Artificial Sequence
  Description of Artificial Sequence: Synthetic oligonucleotide
  Antisense strand to SEQ ID NO: 1507650
uuaaacaauccuagcuccu

SEQ ID NO: 1507652 - RNA, 19 nt, Artificial Sequence
  Description of Artificial Sequence: Synthetic oligonucleotide
  Sense strand starting at position 1475 of SEQ ID NO: 1244689
gagcuaggauuguuuaaau

SEQ ID NO: 1507653 - RNA, 19 nt, Artificial Sequence
  Description of Artificial Sequence: Synthetic oligonucleotide
  Antisense strand to SEQ ID NO: 1507652
auuuaaacaauccuagcuc

SEQ ID NO: 1507654 - RNA, 19 nt, Artificial Sequence
  Description of Artificial Sequence: Synthetic oligonucleotide
  Sense strand starting at position 1546 of SEQ ID NO: 1244689
cgauaagccuucgcauucu

SEQ ID NO: 1507655 - RNA, 19 nt, Artificial Sequence
  Description of Artificial Sequence: Synthetic oligonucleotide
  Antisense strand to SEQ ID NO: 1507654
agaaugcgaaggcuuaucg

SEQ ID NO: 1507656 - RNA, 19 nt, Artificial Sequence
  Description of Artificial Sequence: Synthetic oligonucleotide
  Sense strand starting at position 1596 of SEQ ID NO: 1244689
accgaaugugccuggaacu

SEQ ID NO: 1507657 - RNA, 19 nt, Artificial Sequence
  Description of Artificial Sequence: Synthetic oligonucleotide
  Antisense strand to SEQ ID NO: 1507656
aguuccaggcacauucggu

SEQ ID NO: 1507658 - RNA, 19 nt, Artificial Sequence
  Description of Artificial Sequence: Synthetic oligonucleotide
  Sense strand starting at position 1676 of SEQ ID NO: 1244689
ccgucauugcggcugcaga

SEQ ID NO: 1507659 - RNA, 19 nt, Artificial Sequence
  Description of Artificial Sequence: Synthetic oligonucleotide
  Antisense strand to SEQ ID NO: 1507658
ucugcagccgcaaugacgg

SEQ ID NO: 1507660 - RNA, 19 nt, Artificial Sequence
  Description of Artificial Sequence: Synthetic oligonucleotide
  Sense strand starting at position 2178 of SEQ ID NO: 1244689
ugguguguggaccaagauu

SEQ ID NO: 1507661 - RNA, 19 nt, Artificial Sequence
  Description of Artificial Sequence: Synthetic oligonucleotide
  Antisense strand to SEQ ID NO: 1507660
aaucuugguccacacacca

SEQ ID NO: 1507662 - RNA, 19 nt, Artificial Sequence
  Description of Artificial Sequence: Synthetic oligonucleotide
  Sense strand starting at position 2242 of SEQ ID NO: 1244689
gggccgugggauuaugagu

SEQ ID NO: 1507663 - RNA, 19 nt, Artificial Sequence
  Description of Artificial Sequence: Synthetic oligonucleotide
  Antisense strand to SEQ ID NO: 1507662
acucauaaucccacggccc

SEQ ID NO: 1507664 - RNA, 19 nt, Artificial Sequence
  Description of Artificial Sequence: Synthetic oligonucleotide
  Sense strand starting at position 2247 of SEQ ID NO: 1244689
gugggauuaugagugaauu

SEQ ID NO: 1507665 - RNA, 19 nt, Artificial Sequence
  Description of Artificial Sequence: Synthetic oligonucleotide
  Antisense strand to SEQ ID NO: 1507664
aauucacucauaaucccac

SEQ ID NO: 1507666 - RNA, 19 nt, Artificial Sequence
  Description of Artificial Sequence: Synthetic oligonucleotide
  Sense strand starting at position 2288 of SEQ ID NO: 1244689
uuugcaggguggucauuua

SEQ ID NO: 1507667 - RNA, 19 nt, Artificial Sequence
  Description of Artificial Sequence: Synthetic oligonucleotide
  Antisense strand to SEQ ID NO: 1507666
uaaaugaccacccugcaaa

SEQ ID NO: 1507668 - RNA, 19 nt, Artificial Sequence
  Description of Artificial Sequence: Synthetic oligonucleotide
  Sense strand starting at position 2311 of SEQ ID NO: 1244689
aggacaaaugugcguccaa

SEQ ID NO: 1507669 - RNA, 19 nt, Artificial Sequence
  Description of Artificial Sequence: Synthetic oligonucleotide
  Antisense strand to SEQ ID NO: 1507668
uuggacgcacauuuguccu

SEQ ID NO: 1507670 - RNA, 19 nt, Artificial Sequence
  Description of Artificial Sequence: Synthetic oligonucleotide
  Sense strand starting at position 2312 of SEQ ID NO: 1244689
ggacaaaugugcguccaaa

SEQ ID NO: 1507671 - RNA, 19 nt, Artificial Sequence
  Description of Artificial Sequence: Synthetic oligonucleotide
  Antisense strand to SEQ ID NO: 1507670
uuuggacgcacauuugucc

SEQ ID NO: 1507672 - RNA, 19 nt, Artificial Sequence
  Description of Artificial Sequence: Synthetic oligonucleotide
  Sense strand starting at position 2336 of SEQ ID NO: 1244689
acauuauuacucuguaggu

SEQ ID NO: 1507673 - RNA, 19 nt, Artificial Sequence
  Description of Artificial Sequence: Synthetic oligonucleotide
  Antisense strand to SEQ ID NO: 1507672
accuacagaguaauaaugu

SEQ ID NO: 1507674 - RNA, 19 nt, Artificial Sequence
  Description of Artificial Sequence: Synthetic oligonucleotide
  Sense strand starting at position 2338 of SEQ ID NO: 1244689
auuauuacucuguaggugu

SEQ ID NO: 1507675 - RNA, 19 nt, Artificial Sequence
  Description of Artificial Sequence: Synthetic oligonucleotide
  Antisense strand to SEQ ID NO: 1507674
acaccuacagaguaauaau

SEQ ID NO: 1507676 - RNA, 19 nt, Artificial Sequence
  Description of Artificial Sequence: Synthetic oligonucleotide
  Sense strand starting at position 2341 of SEQ ID NO: 1244689
auuacucuguagguguaua

SEQ ID NO: 1507677 - RNA, 19 nt, Artificial Sequence
  Description of Artificial Sequence: Synthetic oligonucleotide
  Antisense strand to SEQ ID NO: 1507676
uauacaccuacagaguaau

SEQ ID NO: 1507678 - RNA, 19 nt, Artificial Sequence
  Description of Artificial Sequence: Synthetic oligonucleotide
  Sense strand starting at position 2342 of SEQ ID NO: 1244689
uuacucuguagguguauaa

SEQ ID NO: 1507679 - RNA, 19 nt, Artificial Sequence
  Description of Artificial Sequence: Synthetic oligonucleotide
  Antisense strand to SEQ ID NO: 1507678
uuauacaccuacagaguaa

SEQ ID NO: 1507680 - RNA, 19 nt, Artificial Sequence
  Description of Artificial Sequence: Synthetic oligonucleotide
  Sense strand starting at position 2349 of SEQ ID NO: 1244689
guagguguauaauccaaga

SEQ ID NO: 1507681 - RNA, 19 nt, Artificial Sequence
  Description of Artificial Sequence: Synthetic oligonucleotide
  Antisense strand to SEQ ID NO: 1507680
ucuuggauuauacaccuac

SEQ ID NO: 1507682 - RNA, 19 nt, Artificial Sequence
  Description of Artificial Sequence: Synthetic oligonucleotide
  Sense strand starting at position 2545 of SEQ ID NO: 1244689
gagacaacgucucaagaag

SEQ ID NO: 1507683 - RNA, 19 nt, Artificial Sequence
  Description of Artificial Sequence: Synthetic oligonucleotide
  Antisense strand to SEQ ID NO: 1507682
cuucuugagacguugucuc

SEQ ID NO: 1507684 - RNA, 19 nt, Artificial Sequence
  Description of Artificial Sequence: Synthetic oligonucleotide
  Sense strand starting at position 2617 of SEQ ID NO: 1244689
accuauuguuaagaaugau

SEQ ID NO: 1507685 - RNA, 19 nt, Artificial Sequence
  Description of Artificial Sequence: Synthetic oligonucleotide
  Antisense strand to SEQ ID NO: 1507684
aucauucuuaacaauaggu

SEQ ID NO: 1507686 - RNA, 19 nt, Artificial Sequence
  Description of Artificial Sequence: Synthetic oligonucleotide
  Sense strand starting at position 2662 of SEQ ID NO: 1244689
accugaggcugcgucauaa

SEQ ID NO: 1507687 - RNA, 19 nt, Artificial Sequence
  Description of Artificial Sequence: Synthetic oligonucleotide
  Antisense strand to SEQ ID NO: 1507686
uuaugacgcagccucaggu

SEQ ID NO: 1507688 - RNA, 19 nt, Artificial Sequence
  Description of Artificial Sequence: Synthetic oligonucleotide
  Sense strand starting at position 2666 of SEQ ID NO: 1244689
gaggcugcgucauaaauuu

SEQ ID NO: 1507689 - RNA, 19 nt, Artificial Sequence
  Description of Artificial Sequence: Synthetic oligonucleotide
  Antisense strand to SEQ ID NO: 1507688
aaauuuaugacgcagccuc

SEQ ID NO: 1507690 - RNA, 19 nt, Artificial Sequence
  Description of Artificial Sequence: Synthetic oligonucleotide
  Sense strand starting at position 379 of SEQ ID NO: 1244690
auaguccuuuaaguaagaa

SEQ ID NO: 1507691 - RNA, 19 nt, Artificial Sequence
  Description of Artificial Sequence: Synthetic oligonucleotide
  Antisense strand to SEQ ID NO: 1507690
uucuuacuuaaaggacuau

SEQ ID NO: 1507692 - RNA, 19 nt, Artificial Sequence
  Description of Artificial Sequence: Synthetic oligonucleotide
  Sense strand starting at position 435 of SEQ ID NO: 1244690
cuugaaagcuucuauguag

SEQ ID NO: 1507693 - RNA, 19 nt, Artificial Sequence
  Description of Artificial Sequence: Synthetic oligonucleotide
  Antisense strand to SEQ ID NO: 1507692
cuacauagaagcuuucaag

SEQ ID NO: 1507694 - RNA, 19 nt, Artificial Sequence
  Description of Artificial Sequence: Synthetic oligonucleotide
  Sense strand starting at position 438 of SEQ ID NO: 1244690
gaaagcuucuauguagaua

SEQ ID NO: 1507695 - RNA, 19 nt, Artificial Sequence
  Description of Artificial Sequence: Synthetic oligonucleotide
  Antisense strand to SEQ ID NO: 1507694
uaucuacauagaagcuuuc

SEQ ID NO: 1507696 - RNA, 19 nt, Artificial Sequence
  Description of Artificial Sequence: Synthetic oligonucleotide
  Sense strand starting at position 441 of SEQ ID NO: 1244690
agcuucuauguagauacaa

SEQ ID NO: 1507697 - RNA, 19 nt, Artificial Sequence
  Description of Artificial Sequence: Synthetic oligonucleotide
  Antisense strand to SEQ ID NO: 1507696
uuguaucuacauagaagcu

SEQ ID NO: 1507698 - RNA, 19 nt, Artificial Sequence
  Description of Artificial Sequence: Synthetic oligonucleotide
  Sense strand starting at position 453 of SEQ ID NO: 1244690
gauacaaagugcuccugaa

SEQ ID NO: 1507699 - RNA, 19 nt, Artificial Sequence
  Description of Artificial Sequence: Synthetic oligonucleotide
  Antisense strand to SEQ ID NO: 1507698
uucaggagcacuuuguauc

SEQ ID NO: 1507700 - RNA, 19 nt, Artificial Sequence
  Description of Artificial Sequence: Synthetic oligonucleotide
  Sense strand starting at position 529 of SEQ ID NO: 1244690
guccauguauguggcaaga

SEQ ID NO: 1507701 - RNA, 19 nt, Artificial Sequence
  Description of Artificial Sequence: Synthetic oligonucleotide
  Antisense strand to SEQ ID NO: 1507700
ucuugccacauacauggac

SEQ ID NO: 1507702 - RNA, 19 nt, Artificial Sequence
  Description of Artificial Sequence: Synthetic oligonucleotide
  Sense strand starting at position 539 of SEQ ID NO: 1244690
guggcaagagcuugugaaa

SEQ ID NO: 1507703 - RNA, 19 nt, Artificial Sequence
  Description of Artificial Sequence: Synthetic oligonucleotide
  Antisense strand to SEQ ID NO: 1507702
uuucacaagcucuugccac

SEQ ID NO: 1507704 - RNA, 19 nt, Artificial Sequence
  Description of Artificial Sequence: Synthetic oligonucleotide
  Sense strand starting at position 1233 of SEQ ID NO: 1244690
gcauucugcuucuguggaa

SEQ ID NO: 1507705 - RNA, 19 nt, Artificial Sequence
  Description of Artificial Sequence: Synthetic oligonucleotide
  Antisense strand to SEQ ID NO: 1507704
uuccacagaagcagaaugc

SEQ ID NO: 1507706 - RNA, 19 nt, Artificial Sequence
  Description of Artificial Sequence: Synthetic oligonucleotide
  Sense strand starting at position 1234 of SEQ ID NO: 1244690
cauucugcuucuguggaau

SEQ ID NO: 1507707 - RNA, 19 nt, Artificial Sequence
  Description of Artificial Sequence: Synthetic oligonucleotide
  Antisense strand to SEQ ID NO: 1507706
auuccacagaagcagaaug

SEQ ID NO: 1507708 - RNA, 19 nt, Artificial Sequence
  Description of Artificial Sequence: Synthetic oligonucleotide
  Sense strand starting at position 1236 of SEQ ID NO: 1244690
uucugcuucuguggaauga

SEQ ID NO: 1507709 - RNA, 19 nt, Artificial Sequence
  Description of Artificial Sequence: Synthetic oligonucleotide
  Antisense strand to SEQ ID NO: 1507708
ucauuccacagaagcagaa

SEQ ID NO: 1507710 - RNA, 19 nt, Artificial Sequence
  Description of Artificial Sequence: Synthetic oligonucleotide
  Sense strand starting at position 1262 of SEQ ID NO: 1244690
gccaguuaggccugauuug

SEQ ID NO: 1507711 - RNA, 19 nt, Artificial Sequence
  Description of Artificial Sequence: Synthetic oligonucleotide
  Antisense strand to SEQ ID NO: 1507710
caaaucaggccuaacuggc

SEQ ID NO: 1507712 - RNA, 19 nt, Artificial Sequence
  Description of Artificial Sequence: Synthetic oligonucleotide
  Sense strand starting at position 1387 of SEQ ID NO: 1244690
aagggaggccuguggucau

SEQ ID NO: 1507713 - RNA, 19 nt, Artificial Sequence
  Description of Artificial Sequence: Synthetic oligonucleotide
  Antisense strand to SEQ ID NO: 1507712
augaccacaggccucccuu

SEQ ID NO: 1507714 - RNA, 19 nt, Artificial Sequence
  Description of Artificial Sequence: Synthetic oligonucleotide
  Sense strand starting at position 1540 of SEQ ID NO: 1244690
gaaggauucugggaccaga

SEQ ID NO: 1507715 - RNA, 19 nt, Artificial Sequence
  Description of Artificial Sequence: Synthetic oligonucleotide
  Antisense strand to SEQ ID NO: 1507714
ucuggucccagaauccuuc

SEQ ID NO: 1507716 - RNA, 19 nt, Artificial Sequence
  Description of Artificial Sequence: Synthetic oligonucleotide
  Sense strand starting at position 1864 of SEQ ID NO: 1244690
ggucaaugccgagggugau

SEQ ID NO: 1507717 - RNA, 19 nt, Artificial Sequence
  Description of Artificial Sequence: Synthetic oligonucleotide
  Antisense strand to SEQ ID NO: 1507716
aucacccucggcauugacc

SEQ ID NO: 1507718 - RNA, 19 nt, Artificial Sequence
  Description of Artificial Sequence: Synthetic oligonucleotide
  Sense strand starting at position 2780 of SEQ ID NO: 1244690
ugcagauugcuuuggagac

SEQ ID NO: 1507719 - RNA, 19 nt, Artificial Sequence
  Description of Artificial Sequence: Synthetic oligonucleotide
  Antisense strand to SEQ ID NO: 1507718
gucuccaaagcaaucugca

SEQ ID NO: 1507720 - RNA, 19 nt, Artificial Sequence
  Description of Artificial Sequence: Synthetic oligonucleotide
  Sense strand starting at position 3014 of SEQ ID NO: 1244690
guuucucaaccucguuauu

SEQ ID NO: 1507721 - RNA, 19 nt, Artificial Sequence
  Description of Artificial Sequence: Synthetic oligonucleotide
  Antisense strand to SEQ ID NO: 1507720
aauaacgagguugagaaac

SEQ ID NO: 1507722 - RNA, 19 nt, Artificial Sequence
  Description of Artificial Sequence: Synthetic oligonucleotide
  Sense strand starting at position 3023 of SEQ ID NO: 1244690
ccucguuauuccuaccuac

SEQ ID NO: 1507723 - RNA, 19 nt, Artificial Sequence
  Description of Artificial Sequence: Synthetic oligonucleotide
  Antisense strand to SEQ ID NO: 1507722
guagguaggaauaacgagg

SEQ ID NO: 1507724 - RNA, 19 nt, Artificial Sequence
  Description of Artificial Sequence: Synthetic oligonucleotide
  Sense strand starting at position 3064 of SEQ ID NO: 1244690
ccacuaguacgcuguguau

SEQ ID NO: 1507725 - RNA, 19 nt, Artificial Sequence
  Description of Artificial Sequence: Synthetic oligonucleotide
  Antisense strand to SEQ ID NO: 1507724
auacacagcguacuagugg

SEQ ID NO: 1507726 - RNA, 19 nt, Artificial Sequence
  Description of Artificial Sequence: Synthetic oligonucleotide
  Sense strand starting at position 3066 of SEQ ID NO: 1244690
acuaguacgcuguguauuu

SEQ ID NO: 1507727 - RNA, 19 nt, Artificial Sequence
  Description of Artificial Sequence: Synthetic oligonucleotide
  Antisense strand to SEQ ID NO: 1507726
aaauacacagcguacuagu

SEQ ID NO: 1507728 - RNA, 19 nt, Artificial Sequence
  Description of Artificial Sequence: Synthetic oligonucleotide
  Sense strand starting at position 3079 of SEQ ID NO: 1244690
guauuuguuucuguggcca

SEQ ID NO: 1507729 - RNA, 19 nt, Artificial Sequence
  Description of Artificial Sequence: Synthetic oligonucleotide
  Antisense strand to SEQ ID NO: 1507728
uggccacagaaacaaauac

SEQ ID NO: 1507730 - RNA, 19 nt, Artificial Sequence
  Description of Artificial Sequence: Synthetic oligonucleotide
  Sense strand starting at position 3081 of SEQ ID NO: 1244690
auuuguuucuguggccaca

SEQ ID NO: 1507731 - RNA, 19 nt, Artificial Sequence
  Description of Artificial Sequence: Synthetic oligonucleotide
  Antisense strand to SEQ ID NO: 1507730
uguggccacagaaacaaau

SEQ ID NO: 1507732 - RNA, 19 nt, Artificial Sequence
  Description of Artificial Sequence: Synthetic oligonucleotide
  Sense strand starting at position 3083 of SEQ ID NO: 1244690
uuguuucuguggccacaaa

SEQ ID NO: 1507733 - RNA, 19 nt, Artificial Sequence
  Description of Artificial Sequence: Synthetic oligonucleotide
  Antisense strand to SEQ ID NO: 1507732
uuuguggccacagaaacaa

SEQ ID NO: 1507734 - RNA, 19 nt, Artificial Sequence
  Description of Artificial Sequence: Synthetic oligonucleotide
  Sense strand starting at position 3469 of SEQ ID NO: 1244690
cuugacaaugcgugcuuua

SEQ ID NO: 1507735 - RNA, 19 nt, Artificial Sequence
  Description of Artificial Sequence: Synthetic oligonucleotide
  Antisense strand to SEQ ID NO: 1507734
uaaagcacgcauugucaag

SEQ ID NO: 1507736 - RNA, 19 nt, Artificial Sequence
  Description of Artificial Sequence: Synthetic oligonucleotide
  Sense strand starting at position 3472 of SEQ ID NO: 1244690
gacaaugcgugcuuuacau

SEQ ID NO: 1507737 - RNA, 19 nt, Artificial Sequence
  Description of Artificial Sequence: Synthetic oligonucleotide
  Antisense strand to SEQ ID NO: 1507736
auguaaagcacgcauuguc

SEQ ID NO: 1507738 - RNA, 19 nt, Artificial Sequence
  Description of Artificial Sequence: Synthetic oligonucleotide
  Sense strand starting at position 3495 of SEQ ID NO: 1244690
ucauuuaaguccugugagg

SEQ ID NO: 1507739 - RNA, 19 nt, Artificial Sequence
  Description of Artificial Sequence: Synthetic oligonucleotide
  Antisense strand to SEQ ID NO: 1507738
ccucacaggacuuaaauga

SEQ ID NO: 1507740 - RNA, 19 nt, Artificial Sequence
  Description of Artificial Sequence: Synthetic oligonucleotide
  Sense strand starting at position 3633 of SEQ ID NO: 1244690
cagggaguuccaggucgua

SEQ ID NO: 1507741 - RNA, 19 nt, Artificial Sequence
  Description of Artificial Sequence: Synthetic oligonucleotide
  Antisense strand to SEQ ID NO: 1507740
uacgaccuggaacucccug

SEQ ID NO: 1507742 - RNA, 19 nt, Artificial Sequence
  Description of Artificial Sequence: Synthetic oligonucleotide
  Sense strand starting at position 3636 of SEQ ID NO: 1244690
ggaguuccaggucguagaa

SEQ ID NO: 1507743 - RNA, 19 nt, Artificial Sequence
  Description of Artificial Sequence: Synthetic oligonucleotide
  Antisense strand to SEQ ID NO: 1507742
uucuacgaccuggaacucc

SEQ ID NO: 1507744 - RNA, 19 nt, Artificial Sequence
  Description of Artificial Sequence: Synthetic oligonucleotide
  Sense strand starting at position 3714 of SEQ ID NO: 1244690
ccagguugcuccugggaag

SEQ ID NO: 1507745 - RNA, 19 nt, Artificial Sequence
  Description of Artificial Sequence: Synthetic oligonucleotide
  Antisense strand to SEQ ID NO: 1507744
cuucccaggagcaaccugg

SEQ ID NO: 1507746 - RNA, 19 nt, Artificial Sequence
  Description of Artificial Sequence: Synthetic oligonucleotide
  Sense strand starting at position 3745 of SEQ ID NO: 1244690
ugaggagccuucuugaaac

SEQ ID NO: 1507747 - RNA, 19 nt, Artificial Sequence
  Description of Artificial Sequence: Synthetic oligonucleotide
  Antisense strand to SEQ ID NO: 1507746
guuucaagaaggcuccuca

SEQ ID NO: 1507748 - RNA, 19 nt, Artificial Sequence
  Description of Artificial Sequence: Synthetic oligonucleotide
  Sense strand starting at position 3758 of SEQ ID NO: 1244690
ugaaacaugugacaucuga

SEQ ID NO: 1507749 - RNA, 19 nt, Artificial Sequence
  Description of Artificial Sequence: Synthetic oligonucleotide
  Antisense strand to SEQ ID NO: 1507748
ucagaugucacauguuuca

SEQ ID NO: 1507750 - RNA, 19 nt, Artificial Sequence
  Description of Artificial Sequence: Synthetic oligonucleotide
  Sense strand starting at position 3786 of SEQ ID NO: 1244690
ggacaauaguuagaacuua

SEQ ID NO: 1507751 - RNA, 19 nt, Artificial Sequence
  Description of Artificial Sequence: Synthetic oligonucleotide
  Antisense strand to SEQ ID NO: 1507750
uaaguucuaacuauugucc

SEQ ID NO: 1507752 - RNA, 19 nt, Artificial Sequence
  Description of Artificial Sequence: Synthetic oligonucleotide
  Sense strand starting at position 3828 of SEQ ID NO: 1244690
agcccauugucaggagaua

SEQ ID NO: 1507753 - RNA, 19 nt, Artificial Sequence
  Description of Artificial Sequence: Synthetic oligonucleotide
  Antisense strand to SEQ ID NO: 1507752
uaucuccugacaaugggcu

SEQ ID NO: 1507754 - RNA, 19 nt, Artificial Sequence
  Description of Artificial Sequence: Synthetic oligonucleotide
  Sense strand starting at position 3829 of SEQ ID NO: 1244690
gcccauugucaggagauac

SEQ ID NO: 1507755 - RNA, 19 nt, Artificial Sequence
  Description of Artificial Sequence: Synthetic oligonucleotide
  Antisense strand to SEQ ID NO: 1507754
guaucuccugacaaugggc

SEQ ID NO: 1507756 - RNA, 19 nt, Artificial Sequence
  Description of Artificial Sequence: Synthetic oligonucleotide
  Sense strand starting at position 3874 of SEQ ID NO: 1244690
agccacuaguuguauguaa

SEQ ID NO: 1507757 - RNA, 19 nt, Artificial Sequence
  Description of Artificial Sequence: Synthetic oligonucleotide
  Antisense strand to SEQ ID NO: 1507756
uuacauacaacuaguggcu

SEQ ID NO: 1507758 - RNA, 19 nt, Artificial Sequence
  Description of Artificial Sequence: Synthetic oligonucleotide
  Sense strand starting at position 3876 of SEQ ID NO: 1244690
ccacuaguuguauguaauu

SEQ ID NO: 1507759 - RNA, 19 nt, Artificial Sequence
  Description of Artificial Sequence: Synthetic oligonucleotide
  Antisense strand to SEQ ID NO: 1507758
aauuacauacaacuagugg

SEQ ID NO: 1507760 - RNA, 19 nt, Artificial Sequence
  Description of Artificial Sequence: Synthetic oligonucleotide
  Sense strand starting at position 3885 of SEQ ID NO: 1244690
guauguaauuaucaaucug

SEQ ID NO: 1507761 - RNA, 19 nt, Artificial Sequence
  Description of Artificial Sequence: Synthetic oligonucleotide
  Antisense strand to SEQ ID NO: 1507760
cagauugauaauuacauac

SEQ ID NO: 1507762 - RNA, 19 nt, Artificial Sequence
  Description of Artificial Sequence: Synthetic oligonucleotide
  Sense strand starting at position 66 of SEQ ID NO: 1244691
ggaucaaggugucuugugu

SEQ ID NO: 1507763 - RNA, 19 nt, Artificial Sequence
  Description of Artificial Sequence: Synthetic oligonucleotide
  Antisense strand to SEQ ID NO: 1507762
acacaagacaccuugaucc

SEQ ID NO: 1507764 - RNA, 19 nt, Artificial Sequence
  Description of Artificial Sequence: Synthetic oligonucleotide
  Sense strand starting at position 100 of SEQ ID NO: 1244691
cccgacuccugcuuaaacu

SEQ ID NO: 1507765 - RNA, 19 nt, Artificial Sequence
  Description of Artificial Sequence: Synthetic oligonucleotide
  Antisense strand to SEQ ID NO: 1507764
aguuuaagcaggagucggg

SEQ ID NO: 1507766 - RNA, 19 nt, Artificial Sequence
  Description of Artificial Sequence: Synthetic oligonucleotide
  Sense strand starting at position 216 of SEQ ID NO: 1244691
uuuaguugccauuggaagu

SEQ ID NO: 1507767 - RNA, 19 nt, Artificial Sequence
  Description of Artificial Sequence: Synthetic oligonucleotide
  Antisense strand to SEQ ID NO: 1507766
acuuccaauggcaacuaaa

SEQ ID NO: 1507768 - RNA, 19 nt, Artificial Sequence
  Description of Artificial Sequence: Synthetic oligonucleotide
  Sense strand starting at position 217 of SEQ ID NO: 1244691
uuaguugccauuggaaguu

SEQ ID NO: 1507769 - RNA, 19 nt, Artificial Sequence
  Description of Artificial Sequence: Synthetic oligonucleotide
  Antisense strand to SEQ ID NO: 1507768
aacuuccaauggcaacuaa

SEQ ID NO: 1507770 - RNA, 19 nt, Artificial Sequence
  Description of Artificial Sequence: Synthetic oligonucleotide
  Sense strand starting at position 243 of SEQ ID NO: 1244691
aggucacgugacuguuaca

SEQ ID NO: 1507771 - RNA, 19 nt, Artificial Sequence
  Description of Artificial Sequence: Synthetic oligonucleotide
  Antisense strand to SEQ ID NO: 1507770
uguaacagucacgugaccu

SEQ ID NO: 1507772 - RNA, 19 nt, Artificial Sequence
  Description of Artificial Sequence: Synthetic oligonucleotide
  Sense strand starting at position 636 of SEQ ID NO: 1244691
ccggguauuugagucagua

SEQ ID NO: 1507773 - RNA, 19 nt, Artificial Sequence
  Description of Artificial Sequence: Synthetic oligonucleotide
  Antisense strand to SEQ ID NO: 1507772
uacugacucaaauacccgg

SEQ ID NO: 1507774 - RNA, 19 nt, Artificial Sequence
  Description of Artificial Sequence: Synthetic oligonucleotide
  Sense strand starting at position 640 of SEQ ID NO: 1244691
guauuugagucaguaguga

SEQ ID NO: 1507775 - RNA, 19 nt, Artificial Sequence
  Description of Artificial Sequence: Synthetic oligonucleotide
  Antisense strand to SEQ ID NO: 1507774
ucacuacugacucaaauac

SEQ ID NO: 1507776 - RNA, 19 nt, Artificial Sequence
  Description of Artificial Sequence: Synthetic oligonucleotide
  Sense strand starting at position 856 of SEQ ID NO: 1244691
agcuuuacaguaugguuau

SEQ ID NO: 1507777 - RNA, 19 nt, Artificial Sequence
  Description of Artificial Sequence: Synthetic oligonucleotide
  Antisense strand to SEQ ID NO: 1507776
auaaccauacuguaaagcu

SEQ ID NO: 1507778 - RNA, 19 nt, Artificial Sequence
  Description of Artificial Sequence: Synthetic oligonucleotide
  Sense strand starting at position 885 of SEQ ID NO: 1244691
gccugauccuugucaccua

SEQ ID NO: 1507779 - RNA, 19 nt, Artificial Sequence
  Description of Artificial Sequence: Synthetic oligonucleotide
  Antisense strand to SEQ ID NO: 1507778
uaggugacaaggaucaggc

SEQ ID NO: 1507780 - RNA, 19 nt, Artificial Sequence
  Description of Artificial Sequence: Synthetic oligonucleotide
  Sense strand starting at position 1039 of SEQ ID NO: 1244691
caggauaacuugucaguga

SEQ ID NO: 1507781 - RNA, 19 nt, Artificial Sequence
  Description of Artificial Sequence: Synthetic oligonucleotide
  Antisense strand to SEQ ID NO: 1507780
ucacugacaaguuauccug

SEQ ID NO: 1507782 - RNA, 19 nt, Artificial Sequence
  Description of Artificial Sequence: Synthetic oligonucleotide
  Sense strand starting at position 1042 of SEQ ID NO: 1244691
gauaacuugucagugaaac

SEQ ID NO: 1507783 - RNA, 19 nt, Artificial Sequence
  Description of Artificial Sequence: Synthetic oligonucleotide
  Antisense strand to SEQ ID NO: 1507782
guuucacugacaaguuauc

SEQ ID NO: 1507784 - RNA, 19 nt, Artificial Sequence
  Description of Artificial Sequence: Synthetic oligonucleotide
  Sense strand starting at position 1043 of SEQ ID NO: 1244691
auaacuugucagugaaacu

SEQ ID NO: 1507785 - RNA, 19 nt, Artificial Sequence
  Description of Artificial Sequence: Synthetic oligonucleotide
  Antisense strand to SEQ ID NO: 1507784
aguuucacugacaaguuau

SEQ ID NO: 1507786 - RNA, 19 nt, Artificial Sequence
  Description of Artificial Sequence: Synthetic oligonucleotide
  Sense strand starting at position 1109 of SEQ ID NO: 1244691
cuuacugugucacuuucua

SEQ ID NO: 1507787 - RNA, 19 nt, Artificial Sequence
  Description of Artificial Sequence: Synthetic oligonucleotide
  Antisense strand to SEQ ID NO: 1507786
uagaaagugacacaguaag

SEQ ID NO: 1507788 - RNA, 19 nt, Artificial Sequence
  Description of Artificial Sequence: Synthetic oligonucleotide
  Sense strand starting at position 1113 of SEQ ID NO: 1244691
cugugucacuuucuacuua

SEQ ID NO: 1507789 - RNA, 19 nt, Artificial Sequence
  Description of Artificial Sequence: Synthetic oligonucleotide
  Antisense strand to SEQ ID NO: 1507788
uaaguagaaagugacacag

SEQ ID NO: 1507790 - RNA, 19 nt, Artificial Sequence
  Description of Artificial Sequence: Synthetic oligonucleotide
  Sense strand starting at position 1128 of SEQ ID NO: 1244691
cuuaucuucccucgacaug

SEQ ID NO: 1507791 - RNA, 19 nt, Artificial Sequence
  Description of Artificial Sequence: Synthetic oligonucleotide
  Antisense strand to SEQ ID NO: 1507790
caugucgagggaagauaag

SEQ ID NO: 1507792 - RNA, 19 nt, Artificial Sequence
  Description of Artificial Sequence: Synthetic oligonucleotide
  Sense strand starting at position 1296 of SEQ ID NO: 1244691
aagcguuuaccuuagguaa

SEQ ID NO: 1507793 - RNA, 19 nt, Artificial Sequence
  Description of Artificial Sequence: Synthetic oligonucleotide
  Antisense strand to SEQ ID NO: 1507792
uuaccuaagguaaacgcuu

SEQ ID NO: 1507794 - RNA, 19 nt, Artificial Sequence
  Description of Artificial Sequence: Synthetic oligonucleotide
  Sense strand starting at position 1300 of SEQ ID NO: 1244691
guuuaccuuagguaaguuu

SEQ ID NO: 1507795 - RNA, 19 nt, Artificial Sequence
  Description of Artificial Sequence: Synthetic oligonucleotide
  Antisense strand to SEQ ID NO: 1507794
aaacuuaccuaagguaaac

SEQ ID NO: 1507796 - RNA, 19 nt, Artificial Sequence
  Description of Artificial Sequence: Synthetic oligonucleotide
  Sense strand starting at position 1318 of SEQ ID NO: 1244691
uuggucauuucguuucuuu

SEQ ID NO: 1507797 - RNA, 19 nt, Artificial Sequence
  Description of Artificial Sequence: Synthetic oligonucleotide
  Antisense strand to SEQ ID NO: 1507796
aaagaaacgaaaugaccaa

SEQ ID NO: 1507798 - RNA, 19 nt, Artificial Sequence
  Description of Artificial Sequence: Synthetic oligonucleotide
  Sense strand starting at position 1321 of SEQ ID NO: 1244691
gucauuucguuucuuuaag

SEQ ID NO: 1507799 - RNA, 19 nt, Artificial Sequence
  Description of Artificial Sequence: Synthetic oligonucleotide
  Antisense strand to SEQ ID NO: 1507798
cuuaaagaaacgaaaugac

SEQ ID NO: 1507800 - RNA, 19 nt, Artificial Sequence
  Description of Artificial Sequence: Synthetic oligonucleotide
  Sense strand starting at position 1376 of SEQ ID NO: 1244691
ucgcgauuacuggagcuca

SEQ ID NO: 1507801 - RNA, 19 nt, Artificial Sequence
  Description of Artificial Sequence: Synthetic oligonucleotide
  Antisense strand to SEQ ID NO: 1507800
ugagcuccaguaaucgcga

SEQ ID NO: 1507802 - RNA, 19 nt, Artificial Sequence
  Description of Artificial Sequence: Synthetic oligonucleotide
  Sense strand starting at position 1451 of SEQ ID NO: 1244691
uguguagacgaccaaguau

SEQ ID NO: 1507803 - RNA, 19 nt, Artificial Sequence
  Description of Artificial Sequence: Synthetic oligonucleotide
  Antisense strand to SEQ ID NO: 1507802
auacuuggucgucuacaca

SEQ ID NO: 1507804 - RNA, 19 nt, Artificial Sequence
  Description of Artificial Sequence: Synthetic oligonucleotide
  Sense strand starting at position 2752 of SEQ ID NO: 1244691
gguggaaaugugugggacu

SEQ ID NO: 1507805 - RNA, 19 nt, Artificial Sequence
  Description of Artificial Sequence: Synthetic oligonucleotide
  Antisense strand to SEQ ID NO: 1507804
agucccacacauuuccacc

SEQ ID NO: 1507806 - RNA, 19 nt, Artificial Sequence
  Description of Artificial Sequence: Synthetic oligonucleotide
  Sense strand starting at position 2819 of SEQ ID NO: 1244691
aggcauuagucucucagac

SEQ ID NO: 1507807 - RNA, 19 nt, Artificial Sequence
  Description of Artificial Sequence: Synthetic oligonucleotide
  Antisense strand to SEQ ID NO: 1507806
gucugagagacuaaugccu

SEQ ID NO: 1507808 - RNA, 19 nt, Artificial Sequence
  Description of Artificial Sequence: Synthetic oligonucleotide
  Sense strand starting at position 2849 of SEQ ID NO: 1244691
cuguguggcacugauuaug

SEQ ID NO: 1507809 - RNA, 19 nt, Artificial Sequence
  Description of Artificial Sequence: Synthetic oligonucleotide
  Antisense strand to SEQ ID NO: 1507808
cauaaucagugccacacag

SEQ ID NO: 1507810 - RNA, 19 nt, Artificial Sequence
  Description of Artificial Sequence: Synthetic oligonucleotide
  Sense strand starting at position 3054 of SEQ ID NO: 1244691
cgacuuuccagauguggau

SEQ ID NO: 1507811 - RNA, 19 nt, Artificial Sequence
  Description of Artificial Sequence: Synthetic oligonucleotide
  Antisense strand to SEQ ID NO: 1507810
auccacaucuggaaagucg

SEQ ID NO: 1507812 - RNA, 19 nt, Artificial Sequence
  Description of Artificial Sequence: Synthetic oligonucleotide
  Sense strand starting at position 3190 of SEQ ID NO: 1244691
gucagaaguguacacacau

SEQ ID NO: 1507813 - RNA, 19 nt, Artificial Sequence
  Description of Artificial Sequence: Synthetic oligonucleotide
  Antisense strand to SEQ ID NO: 1507812
auguguguacacuucugac

SEQ ID NO: 1507814 - RNA, 19 nt, Artificial Sequence
  Description of Artificial Sequence: Synthetic oligonucleotide
  Sense strand starting at position 3273 of SEQ ID NO: 1244691
ccucacucuccuggugaga

SEQ ID NO: 1507815 - RNA, 19 nt, Artificial Sequence
  Description of Artificial Sequence: Synthetic oligonucleotide
  Antisense strand to SEQ ID NO: 1507814
ucucaccaggagagugagg

SEQ ID NO: 1507816 - RNA, 19 nt, Artificial Sequence
  Description of Artificial Sequence: Synthetic oligonucleotide
  Sense strand starting at position 3308 of SEQ ID NO: 1244691
uggguauuccucugaaauc

SEQ ID NO: 1507817 - RNA, 19 nt, Artificial Sequence
  Description of Artificial Sequence: Synthetic oligonucleotide
  Antisense strand to SEQ ID NO: 1507816
gauuucagaggaauaccca

SEQ ID NO: 1507818 - RNA, 19 nt, Artificial Sequence
  Description of Artificial Sequence: Synthetic oligonucleotide
  Sense strand starting at position 3319 of SEQ ID NO: 1244691
cugaaaucugagcguccau

SEQ ID NO: 1507819 - RNA, 19 nt, Artificial Sequence
  Description of Artificial Sequence: Synthetic oligonucleotide
  Antisense strand to SEQ ID NO: 1507818
auggacgcucagauuucag

SEQ ID NO: 1507820 - RNA, 19 nt, Artificial Sequence
  Description of Artificial Sequence: Synthetic oligonucleotide
  Sense strand starting at position 3393 of SEQ ID NO: 1244691
augguuuacuuggcggaca

SEQ ID NO: 1507821 - RNA, 19 nt, Artificial Sequence
  Description of Artificial Sequence: Synthetic oligonucleotide
  Antisense strand to SEQ ID NO: 1507820
uguccgccaaguaaaccau

SEQ ID NO: 1507822 - RNA, 19 nt, Artificial Sequence
  Description of Artificial Sequence: Synthetic oligonucleotide
  Sense strand starting at position 3395 of SEQ ID NO: 1244691
gguuuacuuggcggacaag

SEQ ID NO: 1507823 - RNA, 19 nt, Artificial Sequence
  Description of Artificial Sequence: Synthetic oligonucleotide
  Antisense strand to SEQ ID NO: 1507822
cuuguccgccaaguaaacc

SEQ ID NO: 1507824 - RNA, 19 nt, Artificial Sequence
  Description of Artificial Sequence: Synthetic oligonucleotide
  Sense strand starting at position 3396 of SEQ ID NO: 1244691
guuuacuuggcggacaagu

SEQ ID NO: 1507825 - RNA, 19 nt, Artificial Sequence
  Description of Artificial Sequence: Synthetic oligonucleotide
  Antisense strand to SEQ ID NO: 1507824
acuuguccgccaaguaaac

SEQ ID NO: 1507826 - RNA, 19 nt, Artificial Sequence
  Description of Artificial Sequence: Synthetic oligonucleotide
  Sense strand starting at position 3404 of SEQ ID NO: 1244691
ggcggacaaguuugagaga

SEQ ID NO: 1507827 - RNA, 19 nt, Artificial Sequence
  Description of Artificial Sequence: Synthetic oligonucleotide
  Antisense strand to SEQ ID NO: 1507826
ucucucaaacuuguccgcc

SEQ ID NO: 1507828 - RNA, 19 nt, Artificial Sequence
  Description of Artificial Sequence: Synthetic oligonucleotide
  Sense strand starting at position 3413 of SEQ ID NO: 1244691
guuugagagaccuggccuu

SEQ ID NO: 1507829 - RNA, 19 nt, Artificial Sequence
  Description of Artificial Sequence: Synthetic oligonucleotide
  Antisense strand to SEQ ID NO: 1507828
aaggccaggucucucaaac

SEQ ID NO: 1507830 - RNA, 19 nt, Artificial Sequence
  Description of Artificial Sequence: Synthetic oligonucleotide
  Sense strand starting at position 3697 of SEQ ID NO: 1244691
gagguauggccucgaaacu

SEQ ID NO: 1507831 - RNA, 19 nt, Artificial Sequence
  Description of Artificial Sequence: Synthetic oligonucleotide
  Antisense strand to SEQ ID NO: 1507830
aguuucgaggccauaccuc

SEQ ID NO: 1507832 - RNA, 19 nt, Artificial Sequence
  Description of Artificial Sequence: Synthetic oligonucleotide
  Sense strand starting at position 3915 of SEQ ID NO: 1244691
gaggcagaucaugacguuu

SEQ ID NO: 1507833 - RNA, 19 nt, Artificial Sequence
  Description of Artificial Sequence: Synthetic oligonucleotide
  Antisense strand to SEQ ID NO: 1507832
aaacgucaugaucugccuc

SEQ ID NO: 1507834 - RNA, 19 nt, Artificial Sequence
  Description of Artificial Sequence: Synthetic oligonucleotide
  Sense strand starting at position 3939 of SEQ ID NO: 1244691
auggauacuuaugauauga

SEQ ID NO: 1507835 - RNA, 19 nt, Artificial Sequence
  Description of Artificial Sequence: Synthetic oligonucleotide
  Antisense strand to SEQ ID NO: 1507834
ucauaucauaaguauccau

SEQ ID NO: 1507836 - RNA, 19 nt, Artificial Sequence
  Description of Artificial Sequence: Synthetic oligonucleotide
  Sense strand starting at position 3941 of SEQ ID NO: 1244691
ggauacuuaugauaugauu

SEQ ID NO: 1507837 - RNA, 19 nt, Artificial Sequence
  Description of Artificial Sequence: Synthetic oligonucleotide
  Antisense strand to SEQ ID NO: 1507836
aaucauaucauaaguaucc

SEQ ID NO: 1507838 - RNA, 19 nt, Artificial Sequence
  Description of Artificial Sequence: Synthetic oligonucleotide
  Sense strand starting at position 3970 of SEQ ID NO: 1244691
ccuggauucuacuuagaca

SEQ ID NO: 1507839 - RNA, 19 nt, Artificial Sequence
  Description of Artificial Sequence: Synthetic oligonucleotide
  Antisense strand to SEQ ID NO: 1507838
ugucuaaguagaauccagg

SEQ ID NO: 1507840 - RNA, 19 nt, Artificial Sequence
  Description of Artificial Sequence: Synthetic oligonucleotide
  Sense strand starting at position 3973 of SEQ ID NO: 1244691
ggauucuacuuagacaaga

SEQ ID NO: 1507841 - RNA, 19 nt, Artificial Sequence
  Description of Artificial Sequence: Synthetic oligonucleotide
  Antisense strand to SEQ ID NO: 1507840
ucuugucuaaguagaaucc

SEQ ID NO: 1507842 - RNA, 19 nt, Artificial Sequence
  Description of Artificial Sequence: Synthetic oligonucleotide
  Sense strand starting at position 163 of SEQ ID NO: 1244692
agguuucuuccaggaucac

SEQ ID NO: 1507843 - RNA, 19 nt, Artificial Sequence
  Description of Artificial Sequence: Synthetic oligonucleotide
  Antisense strand to SEQ ID NO: 1507842
gugauccuggaagaaaccu

SEQ ID NO: 1507844 - RNA, 19 nt, Artificial Sequence
  Description of Artificial Sequence: Synthetic oligonucleotide
  Sense strand starting at position 261 of SEQ ID NO: 1244692
gcaguaaugccagggaaug

SEQ ID NO: 1507845 - RNA, 19 nt, Artificial Sequence
  Description of Artificial Sequence: Synthetic oligonucleotide
  Antisense strand to SEQ ID NO: 1507844
cauucccuggcauuacugc

SEQ ID NO: 1507846 - RNA, 19 nt, Artificial Sequence
  Description of Artificial Sequence: Synthetic oligonucleotide
  Sense strand starting at position 827 of SEQ ID NO: 1244692
gggcgaucaagcugguaau

SEQ ID NO: 1507847 - RNA, 19 nt, Artificial Sequence
  Description of Artificial Sequence: Synthetic oligonucleotide
  Antisense strand to SEQ ID NO: 1507846
auuaccagcuugaucgccc

SEQ ID NO: 1507848 - RNA, 19 nt, Artificial Sequence
  Description of Artificial Sequence: Synthetic oligonucleotide
  Sense strand starting at position 1126 of SEQ ID NO: 1244692
uugccaccuccggaucaaa

SEQ ID NO: 1507849 - RNA, 19 nt, Artificial Sequence
  Description of Artificial Sequence: Synthetic oligonucleotide
  Antisense strand to SEQ ID NO: 1507848
uuugauccggagguggcaa

SEQ ID NO: 1507850 - RNA, 19 nt, Artificial Sequence
  Description of Artificial Sequence: Synthetic oligonucleotide
  Sense strand starting at position 1166 of SEQ ID NO: 1244692
uuaggaaguugugcauaca

SEQ ID NO: 1507851 - RNA, 19 nt, Artificial Sequence
  Description of Artificial Sequence: Synthetic oligonucleotide
  Antisense strand to SEQ ID NO: 1507850
uguaugcacaacuuccuaa

SEQ ID NO: 1507852 - RNA, 19 nt, Artificial Sequence
  Description of Artificial Sequence: Synthetic oligonucleotide
  Sense strand starting at position 1167 of SEQ ID NO: 1244692
uaggaaguugugcauacaa

SEQ ID NO: 1507853 - RNA, 19 nt, Artificial Sequence
  Description of Artificial Sequence: Synthetic oligonucleotide
  Antisense strand to SEQ ID NO: 1507852
uuguaugcacaacuuccua

SEQ ID NO: 1507854 - RNA, 19 nt, Artificial Sequence
  Description of Artificial Sequence: Synthetic oligonucleotide
  Sense strand starting at position 1169 of SEQ ID NO: 1244692
ggaaguugugcauacaagu

SEQ ID NO: 1507855 - RNA, 19 nt, Artificial Sequence
  Description of Artificial Sequence: Synthetic oligonucleotide
  Antisense strand to SEQ ID NO: 1507854
acuuguaugcacaacuucc

SEQ ID NO: 1507856 - RNA, 19 nt, Artificial Sequence
  Description of Artificial Sequence: Synthetic oligonucleotide
  Sense strand starting at position 1301 of SEQ ID NO: 1244692
ccuuucuuggagugugaac

SEQ ID NO: 1507857 - RNA, 19 nt, Artificial Sequence
  Description of Artificial Sequence: Synthetic oligonucleotide
  Antisense strand to SEQ ID NO: 1507856
guucacacuccaagaaagg

SEQ ID NO: 1507858 - RNA, 19 nt, Artificial Sequence
  Description of Artificial Sequence: Synthetic oligonucleotide
  Sense strand starting at position 1477 of SEQ ID NO: 1244692
cgccauuucccugacgagu

SEQ ID NO: 1507859 - RNA, 19 nt, Artificial Sequence
  Description of Artificial Sequence: Synthetic oligonucleotide
  Antisense strand to SEQ ID NO: 1507858
acucgucagggaaauggcg

SEQ ID NO: 1507860 - RNA, 19 nt, Artificial Sequence
  Description of Artificial Sequence: Synthetic oligonucleotide
  Sense strand starting at position 1490 of SEQ ID NO: 1244692
acgaguuucccggauguaa

SEQ ID NO: 1507861 - RNA, 19 nt, Artificial Sequence
  Description of Artificial Sequence: Synthetic oligonucleotide
  Antisense strand to SEQ ID NO: 1507860
uuacauccgggaaacucgu

SEQ ID NO: 1507862 - RNA, 19 nt, Artificial Sequence
  Description of Artificial Sequence: Synthetic oligonucleotide
  Sense strand starting at position 1722 of SEQ ID NO: 1244692
cauguugaauaguugacau

SEQ ID NO: 1507863 - RNA, 19 nt, Artificial Sequence
  Description of Artificial Sequence: Synthetic oligonucleotide
  Antisense strand to SEQ ID NO: 1507862
augucaacuauucaacaug

SEQ ID NO: 1507864 - RNA, 19 nt, Artificial Sequence
  Description of Artificial Sequence: Synthetic oligonucleotide
  Sense strand starting at position 2017 of SEQ ID NO: 1244692
gagcuugagauuggugcaa

SEQ ID NO: 1507865 - RNA, 19 nt, Artificial Sequence
  Description of Artificial Sequence: Synthetic oligonucleotide
  Antisense strand to SEQ ID NO: 1507864
uugcaccaaucucaagcuc

SEQ ID NO: 1507866 - RNA, 19 nt, Artificial Sequence
  Description of Artificial Sequence: Synthetic oligonucleotide
  Sense strand starting at position 2380 of SEQ ID NO: 1244692
cgauuauuucuuuguuauc

SEQ ID NO: 1507867 - RNA, 19 nt, Artificial Sequence
  Description of Artificial Sequence: Synthetic oligonucleotide
  Antisense strand to SEQ ID NO: 1507866
gauaacaaagaaauaaucg

SEQ ID NO: 1507868 - RNA, 19 nt, Artificial Sequence
  Description of Artificial Sequence: Synthetic oligonucleotide
  Sense strand starting at position 2399 of SEQ ID NO: 1244692
ugagcucgcgucuugagua

SEQ ID NO: 1507869 - RNA, 19 nt, Artificial Sequence
  Description of Artificial Sequence: Synthetic oligonucleotide
  Antisense strand to SEQ ID NO: 1507868
uacucaagacgcgagcuca

SEQ ID NO: 1507870 - RNA, 19 nt, Artificial Sequence
  Description of Artificial Sequence: Synthetic oligonucleotide
  Sense strand starting at position 2630 of SEQ ID NO: 1244692
auauuugcugcucaaugca

SEQ ID NO: 1507871 - RNA, 19 nt, Artificial Sequence
  Description of Artificial Sequence: Synthetic oligonucleotide
  Antisense strand to SEQ ID NO: 1507870
ugcauugagcagcaaauau

SEQ ID NO: 1507872 - RNA, 19 nt, Artificial Sequence
  Description of Artificial Sequence: Synthetic oligonucleotide
  Sense strand starting at position 2780 of SEQ ID NO: 1244692
aaaguuuaaguugguacau

SEQ ID NO: 1507873 - RNA, 19 nt, Artificial Sequence
  Description of Artificial Sequence: Synthetic oligonucleotide
  Antisense strand to SEQ ID NO: 1507872
auguaccaacuuaaacuuu

SEQ ID NO: 1507874 - RNA, 19 nt, Artificial Sequence
  Description of Artificial Sequence: Synthetic oligonucleotide
  Sense strand starting at position 2781 of SEQ ID NO: 1244692
aaguuuaaguugguacauu

SEQ ID NO: 1507875 - RNA, 19 nt, Artificial Sequence
  Description of Artificial Sequence: Synthetic oligonucleotide
  Antisense strand to SEQ ID NO: 1507874
aauguaccaacuuaaacuu

SEQ ID NO: 1507876 - RNA, 19 nt, Artificial Sequence
  Description of Artificial Sequence: Synthetic oligonucleotide
  Sense strand starting at position 2806 of SEQ ID NO: 1244692
cugggaauauuacuauguu

SEQ ID NO: 1507877 - RNA, 19 nt, Artificial Sequence
  Description of Artificial Sequence: Synthetic oligonucleotide
  Antisense strand to SEQ ID NO: 1507876
aacauaguaauauucccag

SEQ ID NO: 1507878 - RNA, 19 nt, Artificial Sequence
  Description of Artificial Sequence: Synthetic oligonucleotide
  Sense strand starting at position 2809 of SEQ ID NO: 1244692
ggaauauuacuauguuacu

SEQ ID NO: 1507879 - RNA, 19 nt, Artificial Sequence
  Description of Artificial Sequence: Synthetic oligonucleotide
  Antisense strand to SEQ ID NO: 1507878
aguaacauaguaauauucc

SEQ ID NO: 1507880 - RNA, 19 nt, Artificial Sequence
  Description of Artificial Sequence: Synthetic oligonucleotide
  Sense strand starting at position 2814 of SEQ ID NO: 1244692
auuacuauguuacucgaua

SEQ ID NO: 1507881 - RNA, 19 nt, Artificial Sequence
  Description of Artificial Sequence: Synthetic oligonucleotide
  Antisense strand to SEQ ID NO: 1507880
uaucgaguaacauaguaau

SEQ ID NO: 1507882 - RNA, 19 nt, Artificial Sequence
  Description of Artificial Sequence: Synthetic oligonucleotide
  Sense strand starting at position 2815 of SEQ ID NO: 1244692
uuacuauguuacucgauau

SEQ ID NO: 1507883 - RNA, 19 nt, Artificial Sequence
  Description of Artificial Sequence: Synthetic oligonucleotide
  Antisense strand to SEQ ID NO: 1507882
auaucgaguaacauaguaa

SEQ ID NO: 1507884 - RNA, 19 nt, Artificial Sequence
  Description of Artificial Sequence: Synthetic oligonucleotide
  Sense strand starting at position 2819 of SEQ ID NO: 1244692
uauguuacucgauauuguc

SEQ ID NO: 1507885 - RNA, 19 nt, Artificial Sequence
  Description of Artificial Sequence: Synthetic oligonucleotide
  Antisense strand to SEQ ID NO: 1507884
gacaauaucgaguaacaua

SEQ ID NO: 1507886 - RNA, 19 nt, Artificial Sequence
  Description of Artificial Sequence: Synthetic oligonucleotide
  Sense strand starting at position 2825 of SEQ ID NO: 1244692
acucgauauugucuggcau

SEQ ID NO: 1507887 - RNA, 19 nt, Artificial Sequence
  Description of Artificial Sequence: Synthetic oligonucleotide
  Antisense strand to SEQ ID NO: 1507886
augccagacaauaucgagu

SEQ ID NO: 1507888 - RNA, 19 nt, Artificial Sequence
  Description of Artificial Sequence: Synthetic oligonucleotide
  Sense strand starting at position 2861 of SEQ ID NO: 1244692
uuuaaaugcguguccuguu

SEQ ID NO: 1507889 - RNA, 19 nt, Artificial Sequence
  Description of Artificial Sequence: Synthetic oligonucleotide
  Antisense strand to SEQ ID NO: 1507888
aacaggacacgcauuuaaa

SEQ ID NO: 1507890 - RNA, 19 nt, Artificial Sequence
  Description of Artificial Sequence: Synthetic oligonucleotide
  Sense strand starting at position 2875 of SEQ ID NO: 1244692
cuguuuacugagugccuaa

SEQ ID NO: 1507891 - RNA, 19 nt, Artificial Sequence
  Description of Artificial Sequence: Synthetic oligonucleotide
  Antisense strand to SEQ ID NO: 1507890
uuaggcacucaguaaacag

SEQ ID NO: 1507892 - RNA, 19 nt, Artificial Sequence
  Description of Artificial Sequence: Synthetic oligonucleotide
  Sense strand starting at position 2892 of SEQ ID NO: 1244692
aauacugugcgggaugaga

SEQ ID NO: 1507893 - RNA, 19 nt, Artificial Sequence
  Description of Artificial Sequence: Synthetic oligonucleotide
  Antisense strand to SEQ ID NO: 1507892
ucucaucccgcacaguauu

SEQ ID NO: 1507894 - RNA, 19 nt, Artificial Sequence
  Description of Artificial Sequence: Synthetic oligonucleotide
  Sense strand starting at position 2920 of SEQ ID NO: 1244692
gcugcagucucuuuggaaa

SEQ ID NO: 1507895 - RNA, 19 nt, Artificial Sequence
  Description of Artificial Sequence: Synthetic oligonucleotide
  Antisense strand to SEQ ID NO: 1507894
uuuccaaagagacugcagc

SEQ ID NO: 1507896 - RNA, 19 nt, Artificial Sequence
  Description of Artificial Sequence: Synthetic oligonucleotide
  Sense strand starting at position 3016 of SEQ ID NO: 1244692
gaaauagugcuaugggugu

SEQ ID NO: 1507897 - RNA, 19 nt, Artificial Sequence
  Description of Artificial Sequence: Synthetic oligonucleotide
  Antisense strand to SEQ ID NO: 1507896
acacccauagcacuauuuc

SEQ ID NO: 1507898 - RNA, 19 nt, Artificial Sequence
  Description of Artificial Sequence: Synthetic oligonucleotide
  Sense strand starting at position 3023 of SEQ ID NO: 1244692
ugcuauggguguucaagaa

SEQ ID NO: 1507899 - RNA, 19 nt, Artificial Sequence
  Description of Artificial Sequence: Synthetic oligonucleotide
  Antisense strand to SEQ ID NO: 1507898
uucuugaacacccauagca

SEQ ID NO: 1507900 - RNA, 19 nt, Artificial Sequence
  Description of Artificial Sequence: Synthetic oligonucleotide
  Sense strand starting at position 3077 of SEQ ID NO: 1244692
gaaggcuauuuguggagga

SEQ ID NO: 1507901 - RNA, 19 nt, Artificial Sequence
  Description of Artificial Sequence: Synthetic oligonucleotide
  Antisense strand to SEQ ID NO: 1507900
uccuccacaaauagccuuc

SEQ ID NO: 1507902 - RNA, 19 nt, Artificial Sequence
  Description of Artificial Sequence: Synthetic oligonucleotide
  Sense strand starting at position 3164 of SEQ ID NO: 1244692
cugcuacagcuuugaaagu

SEQ ID NO: 1507903 - RNA, 19 nt, Artificial Sequence
  Description of Artificial Sequence: Synthetic oligonucleotide
  Antisense strand to SEQ ID NO: 1507902
acuuucaaagcuguagcag

SEQ ID NO: 1507904 - RNA, 19 nt, Artificial Sequence
  Description of Artificial Sequence: Synthetic oligonucleotide
  Sense strand starting at position 3500 of SEQ ID NO: 1244692
ucauaucauuggguggagu

SEQ ID NO: 1507905 - RNA, 19 nt, Artificial Sequence
  Description of Artificial Sequence: Synthetic oligonucleotide
  Antisense strand to SEQ ID NO: 1507904
acuccacccaaugauauga

SEQ ID NO: 1507906 - RNA, 19 nt, Artificial Sequence
  Description of Artificial Sequence: Synthetic oligonucleotide
  Sense strand starting at position 3501 of SEQ ID NO: 1244692
cauaucauuggguggaguu

SEQ ID NO: 1507907 - RNA, 19 nt, Artificial Sequence
  Description of Artificial Sequence: Synthetic oligonucleotide
  Antisense strand to SEQ ID NO: 1507906
aacuccacccaaugauaug

SEQ ID NO: 1507908 - RNA, 19 nt, Artificial Sequence
  Description of Artificial Sequence: Synthetic oligonucleotide
  Sense strand starting at position 3502 of SEQ ID NO: 1244692
auaucauuggguggaguuu

SEQ ID NO: 1507909 - RNA, 19 nt, Artificial Sequence
  Description of Artificial Sequence: Synthetic oligonucleotide
  Antisense strand to SEQ ID NO: 1507908
aaacuccacccaaugauau

SEQ ID NO: 1507910 - RNA, 19 nt, Artificial Sequence
  Description of Artificial Sequence: Synthetic oligonucleotide
  Sense strand starting at position 3555 of SEQ ID NO: 1244692
cuguaauucuuacuguauu

SEQ ID NO: 1507911 - RNA, 19 nt, Artificial Sequence
  Description of Artificial Sequence: Synthetic oligonucleotide
  Antisense strand to SEQ ID NO: 1507910
aauacaguaagaauuacag

SEQ ID NO: 1507912 - RNA, 19 nt, Artificial Sequence
  Description of Artificial Sequence: Synthetic oligonucleotide
  Sense strand starting at position 3621 of SEQ ID NO: 1244692
gccauaugaagauguggua

SEQ ID NO: 1507913 - RNA, 19 nt, Artificial Sequence
  Description of Artificial Sequence: Synthetic oligonucleotide
  Antisense strand to SEQ ID NO: 1507912
uaccacaucuucauauggc

SEQ ID NO: 1507914 - RNA, 19 nt, Artificial Sequence
  Description of Artificial Sequence: Synthetic oligonucleotide
  Sense strand starting at position 3628 of SEQ ID NO: 1244692
gaagaugugguaugauaug

SEQ ID NO: 1507915 - RNA, 19 nt, Artificial Sequence
  Description of Artificial Sequence: Synthetic oligonucleotide
  Antisense strand to SEQ ID NO: 1507914
cauaucauaccacaucuuc

SEQ ID NO: 1507916 - RNA, 19 nt, Artificial Sequence
  Description of Artificial Sequence: Synthetic oligonucleotide
  Sense strand starting at position 3915 of SEQ ID NO: 1244692
auguguauaaagugcuaua

SEQ ID NO: 1507917 - RNA, 19 nt, Artificial Sequence
  Description of Artificial Sequence: Synthetic oligonucleotide
  Antisense strand to SEQ ID NO: 1507916
uauagcacuuuauacacau

SEQ ID NO: 1507918 - RNA, 19 nt, Artificial Sequence
  Description of Artificial Sequence: Synthetic oligonucleotide
  Sense strand starting at position 3920 of SEQ ID NO: 1244692
uauaaagugcuauagaagu

SEQ ID NO: 1507919 - RNA, 19 nt, Artificial Sequence
  Description of Artificial Sequence: Synthetic oligonucleotide
  Antisense strand to SEQ ID NO: 1507918
acuucuauagcacuuuaua

SEQ ID NO: 1507920 - RNA, 19 nt, Artificial Sequence
  Description of Artificial Sequence: Synthetic oligonucleotide
  Sense strand starting at position 3962 of SEQ ID NO: 1244692
aguauaaauucuguaagga

SEQ ID NO: 1507921 - RNA, 19 nt, Artificial Sequence
  Description of Artificial Sequence: Synthetic oligonucleotide
  Antisense strand to SEQ ID NO: 1507920
uccuuacagaauuuauacu

SEQ ID NO: 1507922 - RNA, 19 nt, Artificial Sequence
  Description of Artificial Sequence: Synthetic oligonucleotide
  Sense strand starting at position 71 of SEQ ID NO: 1244693
gcaagcuugauacagaagu

SEQ ID NO: 1507923 - RNA, 19 nt, Artificial Sequence
  Description of Artificial Sequence: Synthetic oligonucleotide
  Antisense strand to SEQ ID NO: 1507922
acuucuguaucaagcuugc

SEQ ID NO: 1507924 - RNA, 19 nt, Artificial Sequence
  Description of Artificial Sequence: Synthetic oligonucleotide
  Sense strand starting at position 84 of SEQ ID NO: 1244693
agaaguaugcgacaugcaa

SEQ ID NO: 1507925 - RNA, 19 nt, Artificial Sequence
  Description of Artificial Sequence: Synthetic oligonucleotide
  Antisense strand to SEQ ID NO: 1507924
uugcaugucgcauacuucu

SEQ ID NO: 1507926 - RNA, 19 nt, Artificial Sequence
  Description of Artificial Sequence: Synthetic oligonucleotide
  Sense strand starting at position 88 of SEQ ID NO: 1244693
guaugcgacaugcaauuaa

SEQ ID NO: 1507927 - RNA, 19 nt, Artificial Sequence
  Description of Artificial Sequence: Synthetic oligonucleotide
  Antisense strand to SEQ ID NO: 1507926
uuaauugcaugucgcauac

SEQ ID NO: 1507928 - RNA, 19 nt, Artificial Sequence
  Description of Artificial Sequence: Synthetic oligonucleotide
  Sense strand starting at position 233 of SEQ ID NO: 1244693
gcagaaaugaguuguuuac

SEQ ID NO: 1507929 - RNA, 19 nt, Artificial Sequence
  Description of Artificial Sequence: Synthetic oligonucleotide
  Antisense strand to SEQ ID NO: 1507928
guaaacaacucauuucugc

SEQ ID NO: 1507930 - RNA, 19 nt, Artificial Sequence
  Description of Artificial Sequence: Synthetic oligonucleotide
  Sense strand starting at position 235 of SEQ ID NO: 1244693
agaaaugaguuguuuacca

SEQ ID NO: 1507931 - RNA, 19 nt, Artificial Sequence
  Description of Artificial Sequence: Synthetic oligonucleotide
  Antisense strand to SEQ ID NO: 1507930
ugguaaacaacucauuucu

SEQ ID NO: 1507932 - RNA, 19 nt, Artificial Sequence
  Description of Artificial Sequence: Synthetic oligonucleotide
  Sense strand starting at position 239 of SEQ ID NO: 1244693
augaguuguuuaccaaagu

SEQ ID NO: 1507933 - RNA, 19 nt, Artificial Sequence
  Description of Artificial Sequence: Synthetic oligonucleotide
  Antisense strand to SEQ ID NO: 1507932
acuuugguaaacaacucau

SEQ ID NO: 1507934 - RNA, 19 nt, Artificial Sequence
  Description of Artificial Sequence: Synthetic oligonucleotide
  Sense strand starting at position 397 of SEQ ID NO: 1244693
gguuuccucucaucaaaug

SEQ ID NO: 1507935 - RNA, 19 nt, Artificial Sequence
  Description of Artificial Sequence: Synthetic oligonucleotide
  Antisense strand to SEQ ID NO: 1507934
cauuugaugagaggaaacc

SEQ ID NO: 1507936 - RNA, 19 nt, Artificial Sequence
  Description of Artificial Sequence: Synthetic oligonucleotide
  Sense strand starting at position 638 of SEQ ID NO: 1244693
auuuauucugaucguaagu

SEQ ID NO: 1507937 - RNA, 19 nt, Artificial Sequence
  Description of Artificial Sequence: Synthetic oligonucleotide
  Antisense strand to SEQ ID NO: 1507936
acuuacgaucagaauaaau

SEQ ID NO: 1507938 - RNA, 19 nt, Artificial Sequence
  Description of Artificial Sequence: Synthetic oligonucleotide
  Sense strand starting at position 770 of SEQ ID NO: 1244693
auauuugauuaggaggcau

SEQ ID NO: 1507939 - RNA, 19 nt, Artificial Sequence
  Description of Artificial Sequence: Synthetic oligonucleotide
  Antisense strand to SEQ ID NO: 1507938
augccuccuaaucaaauau

SEQ ID NO: 1507940 - RNA, 19 nt, Artificial Sequence
  Description of Artificial Sequence: Synthetic oligonucleotide
  Sense strand starting at position 794 of SEQ ID NO: 1244693
ccgagauaacaagguaaug

SEQ ID NO: 1507941 - RNA, 19 nt, Artificial Sequence
  Description of Artificial Sequence: Synthetic oligonucleotide
  Antisense strand to SEQ ID NO: 1507940
cauuaccuuguuaucucgg

SEQ ID NO: 1507942 - RNA, 19 nt, Artificial Sequence
  Description of Artificial Sequence: Synthetic oligonucleotide
  Sense strand starting at position 893 of SEQ ID NO: 1244693
ucuguuaaauaugugucaa

SEQ ID NO: 1507943 - RNA, 19 nt, Artificial Sequence
  Description of Artificial Sequence: Synthetic oligonucleotide
  Antisense strand to SEQ ID NO: 1507942
uugacacauauuuaacaga

SEQ ID NO: 1507944 - RNA, 19 nt, Artificial Sequence
  Description of Artificial Sequence: Synthetic oligonucleotide
  Sense strand starting at position 895 of SEQ ID NO: 1244693
uguuaaauaugugucaacu

SEQ ID NO: 1507945 - RNA, 19 nt, Artificial Sequence
  Description of Artificial Sequence: Synthetic oligonucleotide
  Antisense strand to SEQ ID NO: 1507944
aguugacacauauuuaaca

SEQ ID NO: 1507946 - RNA, 19 nt, Artificial Sequence
  Description of Artificial Sequence: Synthetic oligonucleotide
  Sense strand starting at position 903 of SEQ ID NO: 1244693
augugucaacuaugucaac

SEQ ID NO: 1507947 - RNA, 19 nt, Artificial Sequence
  Description of Artificial Sequence: Synthetic oligonucleotide
  Antisense strand to SEQ ID NO: 1507946
guugacauaguugacacau

SEQ ID NO: 1507948 - RNA, 19 nt, Artificial Sequence
  Description of Artificial Sequence: Synthetic oligonucleotide
  Sense strand starting at position 1033 of SEQ ID NO: 1244693
agugacuuccaccacgaaa

SEQ ID NO: 1507949 - RNA, 19 nt, Artificial Sequence
  Description of Artificial Sequence: Synthetic oligonucleotide
  Antisense strand to SEQ ID NO: 1507948
uuucgugguggaagucacu

SEQ ID NO: 1507950 - RNA, 19 nt, Artificial Sequence
  Description of Artificial Sequence: Synthetic oligonucleotide
  Sense strand starting at position 1088 of SEQ ID NO: 1244693
ugugacaucucuuuggagu

SEQ ID NO: 1507951 - RNA, 19 nt, Artificial Sequence
  Description of Artificial Sequence: Synthetic oligonucleotide
  Antisense strand to SEQ ID NO: 1507950
acuccaaagagaugucaca

SEQ ID NO: 1507952 - RNA, 19 nt, Artificial Sequence
  Description of Artificial Sequence: Synthetic oligonucleotide
  Sense strand starting at position 1089 of SEQ ID NO: 1244693
gugacaucucuuuggagug

SEQ ID NO: 1507953 - RNA, 19 nt, Artificial Sequence
  Description of Artificial Sequence: Synthetic oligonucleotide
  Antisense strand to SEQ ID NO: 1507952
cacuccaaagagaugucac

SEQ ID NO: 1507954 - RNA, 19 nt, Artificial Sequence
  Description of Artificial Sequence: Synthetic oligonucleotide
  Sense strand starting at position 1140 of SEQ ID NO: 1244693
gccggaacucuuuaaacca

SEQ ID NO: 1507955 - RNA, 19 nt, Artificial Sequence
  Description of Artificial Sequence: Synthetic oligonucleotide
  Antisense strand to SEQ ID NO: 1507954
ugguuuaaagaguuccggc

SEQ ID NO: 1507956 - RNA, 19 nt, Artificial Sequence
  Description of Artificial Sequence: Synthetic oligonucleotide
  Sense strand starting at position 1299 of SEQ ID NO: 1244693
acgucugcagggugauaaa

SEQ ID NO: 1507957 - RNA, 19 nt, Artificial Sequence
  Description of Artificial Sequence: Synthetic oligonucleotide
  Antisense strand to SEQ ID NO: 1507956
uuuaucacccugcagacgu

SEQ ID NO: 1507958 - RNA, 19 nt, Artificial Sequence
  Description of Artificial Sequence: Synthetic oligonucleotide
  Sense strand starting at position 1448 of SEQ ID NO: 1244693
uucugugagaggugaggaa

SEQ ID NO: 1507959 - RNA, 19 nt, Artificial Sequence
  Description of Artificial Sequence: Synthetic oligonucleotide
  Antisense strand to SEQ ID NO: 1507958
uuccucaccucucacagaa

SEQ ID NO: 1507960 - RNA, 19 nt, Artificial Sequence
  Description of Artificial Sequence: Synthetic oligonucleotide
  Sense strand starting at position 1510 of SEQ ID NO: 1244693
agggcaguccuuuggagaa

SEQ ID NO: 1507961 - RNA, 19 nt, Artificial Sequence
  Description of Artificial Sequence: Synthetic oligonucleotide
  Antisense strand to SEQ ID NO: 1507960
uucuccaaaggacugcccu

SEQ ID NO: 1507962 - RNA, 19 nt, Artificial Sequence
  Description of Artificial Sequence: Synthetic oligonucleotide
  Sense strand starting at position 2416 of SEQ ID NO: 1244693
aaacuucgcucuuugggaa

SEQ ID NO: 1507963 - RNA, 19 nt, Artificial Sequence
  Description of Artificial Sequence: Synthetic oligonucleotide
  Antisense strand to SEQ ID NO: 1507962
uucccaaagagcgaaguuu

SEQ ID NO: 1507964 - RNA, 19 nt, Artificial Sequence
  Description of Artificial Sequence: Synthetic oligonucleotide
  Sense strand starting at position 2711 of SEQ ID NO: 1244693
cugguugugacaugguacu

SEQ ID NO: 1507965 - RNA, 19 nt, Artificial Sequence
  Description of Artificial Sequence: Synthetic oligonucleotide
  Antisense strand to SEQ ID NO: 1507964
aguaccaugucacaaccag

SEQ ID NO: 1507966 - RNA, 19 nt, Artificial Sequence
  Description of Artificial Sequence: Synthetic oligonucleotide
  Sense strand starting at position 2730 of SEQ ID NO: 1244693
guaauagugccagauguua

SEQ ID NO: 1507967 - RNA, 19 nt, Artificial Sequence
  Description of Artificial Sequence: Synthetic oligonucleotide
  Antisense strand to SEQ ID NO: 1507966
uaacaucuggcacuauuac

SEQ ID NO: 1507968 - RNA, 19 nt, Artificial Sequence
  Description of Artificial Sequence: Synthetic oligonucleotide
  Sense strand starting at position 2794 of SEQ ID NO: 1244693
uucugaaacucucugugaa

SEQ ID NO: 1507969 - RNA, 19 nt, Artificial Sequence
  Description of Artificial Sequence: Synthetic oligonucleotide
  Antisense strand to SEQ ID NO: 1507968
uucacagagaguuucagaa

SEQ ID NO: 1507970 - RNA, 19 nt, Artificial Sequence
  Description of Artificial Sequence: Synthetic oligonucleotide
  Sense strand starting at position 2795 of SEQ ID NO: 1244693
ucugaaacucucugugaau

SEQ ID NO: 1507971 - RNA, 19 nt, Artificial Sequence
  Description of Artificial Sequence: Synthetic oligonucleotide
  Antisense strand to SEQ ID NO: 1507970
auucacagagaguuucaga

SEQ ID NO: 1507972 - RNA, 19 nt, Artificial Sequence
  Description of Artificial Sequence: Synthetic oligonucleotide
  Sense strand starting at position 2796 of SEQ ID NO: 1244693
cugaaacucucugugaauc

SEQ ID NO: 1507973 - RNA, 19 nt, Artificial Sequence
  Description of Artificial Sequence: Synthetic oligonucleotide
  Antisense strand to SEQ ID NO: 1507972
gauucacagagaguuucag

SEQ ID NO: 1507974 - RNA, 19 nt, Artificial Sequence
  Description of Artificial Sequence: Synthetic oligonucleotide
  Sense strand starting at position 2797 of SEQ ID NO: 1244693
ugaaacucucugugaaucu

SEQ ID NO: 1507975 - RNA, 19 nt, Artificial Sequence
  Description of Artificial Sequence: Synthetic oligonucleotide
  Antisense strand to SEQ ID NO: 1507974
agauucacagagaguuuca

SEQ ID NO: 1507976 - RNA, 19 nt, Artificial Sequence
  Description of Artificial Sequence: Synthetic oligonucleotide
  Sense strand starting at position 2874 of SEQ ID NO: 1244693
uauaaagugcuaugguuga

SEQ ID NO: 1507977 - RNA, 19 nt, Artificial Sequence
  Description of Artificial Sequence: Synthetic oligonucleotide
  Antisense strand to SEQ ID NO: 1507976
ucaaccauagcacuuuaua

SEQ ID NO: 1507978 - RNA, 19 nt, Artificial Sequence
  Description of Artificial Sequence: Synthetic oligonucleotide
  Sense strand starting at position 2878 of SEQ ID NO: 1244693
aagugcuaugguugauaaa

SEQ ID NO: 1507979 - RNA, 19 nt, Artificial Sequence
  Description of Artificial Sequence: Synthetic oligonucleotide
  Antisense strand to SEQ ID NO: 1507978
uuuaucaaccauagcacuu

SEQ ID NO: 1507980 - RNA, 19 nt, Artificial Sequence
  Description of Artificial Sequence: Synthetic oligonucleotide
  Sense strand starting at position 3114 of SEQ ID NO: 1244693
gcaugugaguguuuaaagg

SEQ ID NO: 1507981 - RNA, 19 nt, Artificial Sequence
  Description of Artificial Sequence: Synthetic oligonucleotide
  Antisense strand to SEQ ID NO: 1507980
ccuuuaaacacucacaugc

SEQ ID NO: 1507982 - RNA, 19 nt, Artificial Sequence
  Description of Artificial Sequence: Synthetic oligonucleotide
  Sense strand starting at position 3116 of SEQ ID NO: 1244693
augugaguguuuaaaggug

SEQ ID NO: 1507983 - RNA, 19 nt, Artificial Sequence
  Description of Artificial Sequence: Synthetic oligonucleotide
  Antisense strand to SEQ ID NO: 1507982
caccuuuaaacacucacau

SEQ ID NO: 1507984 - RNA, 19 nt, Artificial Sequence
  Description of Artificial Sequence: Synthetic oligonucleotide
  Sense strand starting at position 3187 of SEQ ID NO: 1244693
gaggacuuuccagguggaa

SEQ ID NO: 1507985 - RNA, 19 nt, Artificial Sequence
  Description of Artificial Sequence: Synthetic oligonucleotide
  Antisense strand to SEQ ID NO: 1507984
uuccaccuggaaaguccuc

SEQ ID NO: 1507986 - RNA, 19 nt, Artificial Sequence
  Description of Artificial Sequence: Synthetic oligonucleotide
  Sense strand starting at position 3281 of SEQ ID NO: 1244693
guagaaagacuaugguugu

SEQ ID NO: 1507987 - RNA, 19 nt, Artificial Sequence
  Description of Artificial Sequence: Synthetic oligonucleotide
  Antisense strand to SEQ ID NO: 1507986
acaaccauagucuuucuac

SEQ ID NO: 1507988 - RNA, 19 nt, Artificial Sequence
  Description of Artificial Sequence: Synthetic oligonucleotide
  Sense strand starting at position 3284 of SEQ ID NO: 1244693
gaaagacuaugguugucaa

SEQ ID NO: 1507989 - RNA, 19 nt, Artificial Sequence
  Description of Artificial Sequence: Synthetic oligonucleotide
  Antisense strand to SEQ ID NO: 1507988
uugacaaccauagucuuuc

SEQ ID NO: 1507990 - RNA, 19 nt, Artificial Sequence
  Description of Artificial Sequence: Synthetic oligonucleotide
  Sense strand starting at position 3287 of SEQ ID NO: 1244693
agacuaugguugucaagau

SEQ ID NO: 1507991 - RNA, 19 nt, Artificial Sequence
  Description of Artificial Sequence: Synthetic oligonucleotide
  Antisense strand to SEQ ID NO: 1507990
aucuugacaaccauagucu

SEQ ID NO: 1507992 - RNA, 19 nt, Artificial Sequence
  Description of Artificial Sequence: Synthetic oligonucleotide
  Sense strand starting at position 3321 of SEQ ID NO: 1244693
ugugaagggacuugaaagu

SEQ ID NO: 1507993 - RNA, 19 nt, Artificial Sequence
  Description of Artificial Sequence: Synthetic oligonucleotide
  Antisense strand to SEQ ID NO: 1507992
acuuucaagucccuucaca

SEQ ID NO: 1507994 - RNA, 19 nt, Artificial Sequence
  Description of Artificial Sequence: Synthetic oligonucleotide
  Sense strand starting at position 3357 of SEQ ID NO: 1244693
acuuaauugagagggcacu

SEQ ID NO: 1507995 - RNA, 19 nt, Artificial Sequence
  Description of Artificial Sequence: Synthetic oligonucleotide
  Antisense strand to SEQ ID NO: 1507994
agugcccucucaauuaagu

SEQ ID NO: 1507996 - RNA, 19 nt, Artificial Sequence
  Description of Artificial Sequence: Synthetic oligonucleotide
  Sense strand starting at position 3650 of SEQ ID NO: 1244693
cgagaaggaugagugugau

SEQ ID NO: 1507997 - RNA, 19 nt, Artificial Sequence
  Description of Artificial Sequence: Synthetic oligonucleotide
  Antisense strand to SEQ ID NO: 1507996
aucacacucauccuucucg

SEQ ID NO: 1507998 - RNA, 19 nt, Artificial Sequence
  Description of Artificial Sequence: Synthetic oligonucleotide
  Sense strand starting at position 3716 of SEQ ID NO: 1244693
caaagaugagggugugauc

SEQ ID NO: 1507999 - RNA, 19 nt, Artificial Sequence
  Description of Artificial Sequence: Synthetic oligonucleotide
  Antisense strand to SEQ ID NO: 1507998
gaucacacccucaucuuug

SEQ ID NO: 1508000 - RNA, 19 nt, Artificial Sequence
  Description of Artificial Sequence: Synthetic oligonucleotide
  Sense strand starting at position 3775 of SEQ ID NO: 1244693
ggugcauugguuucagugu

SEQ ID NO: 1508001 - RNA, 19 nt, Artificial Sequence
  Description of Artificial Sequence: Synthetic oligonucleotide
  Antisense strand to SEQ ID NO: 1508000
acacugaaaccaaugcacc

SEQ ID NO: 1508002 - RNA, 19 nt, Artificial Sequence
  Description of Artificial Sequence: Synthetic oligonucleotide
  Sense strand starting at position 45 of SEQ ID NO: 1244694
ugcgcuugugguguagaca

SEQ ID NO: 1508003 - RNA, 19 nt, Artificial Sequence
  Description of Artificial Sequence: Synthetic oligonucleotide
  Antisense strand to SEQ ID NO: 1508002
ugucuacaccacaagcgca

SEQ ID NO: 1508004 - RNA, 19 nt, Artificial Sequence
  Description of Artificial Sequence: Synthetic oligonucleotide
  Sense strand starting at position 56 of SEQ ID NO: 1244694
uguagacagugucuugaga

SEQ ID NO: 1508005 - RNA, 19 nt, Artificial Sequence
  Description of Artificial Sequence: Synthetic oligonucleotide
  Antisense strand to SEQ ID NO: 1508004
ucucaagacacugucuaca

SEQ ID NO: 1508006 - RNA, 19 nt, Artificial Sequence
  Description of Artificial Sequence: Synthetic oligonucleotide
  Sense strand starting at position 67 of SEQ ID NO: 1244694
ucuugagacuuccuguuau

SEQ ID NO: 1508007 - RNA, 19 nt, Artificial Sequence
  Description of Artificial Sequence: Synthetic oligonucleotide
  Antisense strand to SEQ ID NO: 1508006
auaacaggaagucucaaga

SEQ ID NO: 1508008 - RNA, 19 nt, Artificial Sequence
  Description of Artificial Sequence: Synthetic oligonucleotide
  Sense strand starting at position 104 of SEQ ID NO: 1244694
aggcacuauccuggaagga

SEQ ID NO: 1508009 - RNA, 19 nt, Artificial Sequence
  Description of Artificial Sequence: Synthetic oligonucleotide
  Antisense strand to SEQ ID NO: 1508008
uccuuccaggauagugccu

SEQ ID NO: 1508010 - RNA, 19 nt, Artificial Sequence
  Description of Artificial Sequence: Synthetic oligonucleotide
  Sense strand starting at position 214 of SEQ ID NO: 1244694
auauuuaucuuguaggaga

SEQ ID NO: 1508011 - RNA, 19 nt, Artificial Sequence
  Description of Artificial Sequence: Synthetic oligonucleotide
  Antisense strand to SEQ ID NO: 1508010
ucuccuacaagauaaauau

SEQ ID NO: 1508012 - RNA, 19 nt, Artificial Sequence
  Description of Artificial Sequence: Synthetic oligonucleotide
  Sense strand starting at position 250 of SEQ ID NO: 1244694
ggagcaaaguccuugagag

SEQ ID NO: 1508013 - RNA, 19 nt, Artificial Sequence
  Description of Artificial Sequence: Synthetic oligonucleotide
  Antisense strand to SEQ ID NO: 1508012
cucucaaggacuuugcucc

SEQ ID NO: 1508014 - RNA, 19 nt, Artificial Sequence
  Description of Artificial Sequence: Synthetic oligonucleotide
  Sense strand starting at position 442 of SEQ ID NO: 1244694
gggcaaguuacugaaucuu

SEQ ID NO: 1508015 - RNA, 19 nt, Artificial Sequence
  Description of Artificial Sequence: Synthetic oligonucleotide
  Antisense strand to SEQ ID NO: 1508014
aagauucaguaacuugccc

SEQ ID NO: 1508016 - RNA, 19 nt, Artificial Sequence
  Description of Artificial Sequence: Synthetic oligonucleotide
  Sense strand starting at position 598 of SEQ ID NO: 1244694
cggcuuuggccugagauga

SEQ ID NO: 1508017 - RNA, 19 nt, Artificial Sequence
  Description of Artificial Sequence: Synthetic oligonucleotide
  Antisense strand to SEQ ID NO: 1508016
ucaucucaggccaaagccg

SEQ ID NO: 1508018 - RNA, 19 nt, Artificial Sequence
  Description of Artificial Sequence: Synthetic oligonucleotide
  Sense strand starting at position 833 of SEQ ID NO: 1244694
augcuuuggcaccagauca

SEQ ID NO: 1508019 - RNA, 19 nt, Artificial Sequence
  Description of Artificial Sequence: Synthetic oligonucleotide
  Antisense strand to SEQ ID NO: 1508018
ugaucuggugccaaagcau

SEQ ID NO: 1508020 - RNA, 19 nt, Artificial Sequence
  Description of Artificial Sequence: Synthetic oligonucleotide
  Sense strand starting at position 874 of SEQ ID NO: 1244694
agcugugugauuugccaga

SEQ ID NO: 1508021 - RNA, 19 nt, Artificial Sequence
  Description of Artificial Sequence: Synthetic oligonucleotide
  Antisense strand to SEQ ID NO: 1508020
ucuggcaaaucacacagcu

SEQ ID NO: 1508022 - RNA, 19 nt, Artificial Sequence
  Description of Artificial Sequence: Synthetic oligonucleotide
  Sense strand starting at position 893 of SEQ ID NO: 1244694
ggccgacugacugaagauu

SEQ ID NO: 1508023 - RNA, 19 nt, Artificial Sequence
  Description of Artificial Sequence: Synthetic oligonucleotide
  Antisense strand to SEQ ID NO: 1508022
aaucuucagucagucggcc

SEQ ID NO: 1508024 - RNA, 19 nt, Artificial Sequence
  Description of Artificial Sequence: Synthetic oligonucleotide
  Sense strand starting at position 1008 of SEQ ID NO: 1244694
aguguauaauauccaaguu

SEQ ID NO: 1508025 - RNA, 19 nt, Artificial Sequence
  Description of Artificial Sequence: Synthetic oligonucleotide
  Antisense strand to SEQ ID NO: 1508024
aacuuggauauuauacacu

SEQ ID NO: 1508026 - RNA, 19 nt, Artificial Sequence
  Description of Artificial Sequence: Synthetic oligonucleotide
  Sense strand starting at position 1051 of SEQ ID NO: 1244694
gacuuugacuaagugacuu

SEQ ID NO: 1508027 - RNA, 19 nt, Artificial Sequence
  Description of Artificial Sequence: Synthetic oligonucleotide
  Antisense strand to SEQ ID NO: 1508026
aagucacuuagucaaaguc

SEQ ID NO: 1508028 - RNA, 19 nt, Artificial Sequence
  Description of Artificial Sequence: Synthetic oligonucleotide
  Sense strand starting at position 1112 of SEQ ID NO: 1244694
accucuuaagaugguggaa

SEQ ID NO: 1508029 - RNA, 19 nt, Artificial Sequence
  Description of Artificial Sequence: Synthetic oligonucleotide
  Antisense strand to SEQ ID NO: 1508028
uuccaccaucuuaagaggu

SEQ ID NO: 1508030 - RNA, 19 nt, Artificial Sequence
  Description of Artificial Sequence: Synthetic oligonucleotide
  Sense strand starting at position 1555 of SEQ ID NO: 1244694
uugcaucuuguugauggaa

SEQ ID NO: 1508031 - RNA, 19 nt, Artificial Sequence
  Description of Artificial Sequence: Synthetic oligonucleotide
  Antisense strand to SEQ ID NO: 1508030
uuccaucaacaagaugcaa

SEQ ID NO: 1508032 - RNA, 19 nt, Artificial Sequence
  Description of Artificial Sequence: Synthetic oligonucleotide
  Sense strand starting at position 1733 of SEQ ID NO: 1244694
ugaggaaguuaugcuggau

SEQ ID NO: 1508033 - RNA, 19 nt, Artificial Sequence
  Description of Artificial Sequence: Synthetic oligonucleotide
  Antisense strand to SEQ ID NO: 1508032
auccagcauaacuuccuca

SEQ ID NO: 1508034 - RNA, 19 nt, Artificial Sequence
  Description of Artificial Sequence: Synthetic oligonucleotide
  Sense strand starting at position 1736 of SEQ ID NO: 1244694
ggaaguuaugcuggauccu

SEQ ID NO: 1508035 - RNA, 19 nt, Artificial Sequence
  Description of Artificial Sequence: Synthetic oligonucleotide
  Antisense strand to SEQ ID NO: 1508034
aggauccagcauaacuucc

SEQ ID NO: 1508036 - RNA, 19 nt, Artificial Sequence
  Description of Artificial Sequence: Synthetic oligonucleotide
  Sense strand starting at position 1737 of SEQ ID NO: 1244694
gaaguuaugcuggauccua

SEQ ID NO: 1508037 - RNA, 19 nt, Artificial Sequence
  Description of Artificial Sequence: Synthetic oligonucleotide
  Antisense strand to SEQ ID NO: 1508036
uaggauccagcauaacuuc

SEQ ID NO: 1508038 - RNA, 19 nt, Artificial Sequence
  Description of Artificial Sequence: Synthetic oligonucleotide
  Sense strand starting at position 1799 of SEQ ID NO: 1244694
ggaguuaucugugcucaga

SEQ ID NO: 1508039 - RNA, 19 nt, Artificial Sequence
  Description of Artificial Sequence: Synthetic oligonucleotide
  Antisense strand to SEQ ID NO: 1508038
ucugagcacagauaacucc

SEQ ID NO: 1508040 - RNA, 19 nt, Artificial Sequence
  Description of Artificial Sequence: Synthetic oligonucleotide
  Sense strand starting at position 1802 of SEQ ID NO: 1244694
guuaucugugcucagaaca

SEQ ID NO: 1508041 - RNA, 19 nt, Artificial Sequence
  Description of Artificial Sequence: Synthetic oligonucleotide
  Antisense strand to SEQ ID NO: 1508040
uguucugagcacagauaac

SEQ ID NO: 1508042 - RNA, 19 nt, Artificial Sequence
  Description of Artificial Sequence: Synthetic oligonucleotide
  Sense strand starting at position 2044 of SEQ ID NO: 1244694
aguguuaaccauugaccca

SEQ ID NO: 1508043 - RNA, 19 nt, Artificial Sequence
  Description of Artificial Sequence: Synthetic oligonucleotide
  Antisense strand to SEQ ID NO: 1508042
ugggucaaugguuaacacu

SEQ ID NO: 1508044 - RNA, 19 nt, Artificial Sequence
  Description of Artificial Sequence: Synthetic oligonucleotide
  Sense strand starting at position 2214 of SEQ ID NO: 1244694
gcguuaacuccuucuguuc

SEQ ID NO: 1508045 - RNA, 19 nt, Artificial Sequence
  Description of Artificial Sequence: Synthetic oligonucleotide
  Antisense strand to SEQ ID NO: 1508044
gaacagaaggaguuaacgc

SEQ ID NO: 1508046 - RNA, 19 nt, Artificial Sequence
  Description of Artificial Sequence: Synthetic oligonucleotide
  Sense strand starting at position 2369 of SEQ ID NO: 1244694
agcugagcacuuuauguga

SEQ ID NO: 1508047 - RNA, 19 nt, Artificial Sequence
  Description of Artificial Sequence: Synthetic oligonucleotide
  Antisense strand to SEQ ID NO: 1508046
ucacauaaagugcucagcu

SEQ ID NO: 1508048 - RNA, 19 nt, Artificial Sequence
  Description of Artificial Sequence: Synthetic oligonucleotide
  Sense strand starting at position 2439 of SEQ ID NO: 1244694
ucagucuaagauugacagu

SEQ ID NO: 1508049 - RNA, 19 nt, Artificial Sequence
  Description of Artificial Sequence: Synthetic oligonucleotide
  Antisense strand to SEQ ID NO: 1508048
acugucaaucuuagacuga

SEQ ID NO: 1508050 - RNA, 19 nt, Artificial Sequence
  Description of Artificial Sequence: Synthetic oligonucleotide
  Sense strand starting at position 2530 of SEQ ID NO: 1244694
cuacaucuugugugacacu

SEQ ID NO: 1508051 - RNA, 19 nt, Artificial Sequence
  Description of Artificial Sequence: Synthetic oligonucleotide
  Antisense strand to SEQ ID NO: 1508050
agugucacacaagauguag

SEQ ID NO: 1508052 - RNA, 19 nt, Artificial Sequence
  Description of Artificial Sequence: Synthetic oligonucleotide
  Sense strand starting at position 2632 of SEQ ID NO: 1244694
cuuauauauguugagcuuu

SEQ ID NO: 1508053 - RNA, 19 nt, Artificial Sequence
  Description of Artificial Sequence: Synthetic oligonucleotide
  Antisense strand to SEQ ID NO: 1508052
aaagcucaacauauauaag

SEQ ID NO: 1508054 - RNA, 19 nt, Artificial Sequence
  Description of Artificial Sequence: Synthetic oligonucleotide
  Sense strand starting at position 2634 of SEQ ID NO: 1244694
uauauauguugagcuuuga

SEQ ID NO: 1508055 - RNA, 19 nt, Artificial Sequence
  Description of Artificial Sequence: Synthetic oligonucleotide
  Antisense strand to SEQ ID NO: 1508054
ucaaagcucaacauauaua

SEQ ID NO: 1508056 - RNA, 19 nt, Artificial Sequence
  Description of Artificial Sequence: Synthetic oligonucleotide
  Sense strand starting at position 2668 of SEQ ID NO: 1244694
cgaugaagguuaguuucuu

SEQ ID NO: 1508057 - RNA, 19 nt, Artificial Sequence
  Description of Artificial Sequence: Synthetic oligonucleotide
  Antisense strand to SEQ ID NO: 1508056
aagaaacuaaccuucaucg

SEQ ID NO: 1508058 - RNA, 19 nt, Artificial Sequence
  Description of Artificial Sequence: Synthetic oligonucleotide
  Sense strand starting at position 2669 of SEQ ID NO: 1244694
gaugaagguuaguuucuuu

SEQ ID NO: 1508059 - RNA, 19 nt, Artificial Sequence
  Description of Artificial Sequence: Synthetic oligonucleotide
  Antisense strand to SEQ ID NO: 1508058
aaagaaacuaaccuucauc

SEQ ID NO: 1508060 - RNA, 19 nt, Artificial Sequence
  Description of Artificial Sequence: Synthetic oligonucleotide
  Sense strand starting at position 2716 of SEQ ID NO: 1244694
agcaaagauugucucuuau

SEQ ID NO: 1508061 - RNA, 19 nt, Artificial Sequence
  Description of Artificial Sequence: Synthetic oligonucleotide
  Antisense strand to SEQ ID NO: 1508060
auaagagacaaucuuugcu

SEQ ID NO: 1508062 - RNA, 19 nt, Artificial Sequence
  Description of Artificial Sequence: Synthetic oligonucleotide
  Sense strand starting at position 2907 of SEQ ID NO: 1244694
ggugguaaagacugacauu

SEQ ID NO: 1508063 - RNA, 19 nt, Artificial Sequence
  Description of Artificial Sequence: Synthetic oligonucleotide
  Antisense strand to SEQ ID NO: 1508062
aaugucagucuuuaccacc

SEQ ID NO: 1508064 - RNA, 19 nt, Artificial Sequence
  Description of Artificial Sequence: Synthetic oligonucleotide
  Sense strand starting at position 2939 of SEQ ID NO: 1244694
guacaagucaguuacugua

SEQ ID NO: 1508065 - RNA, 19 nt, Artificial Sequence
  Description of Artificial Sequence: Synthetic oligonucleotide
  Antisense strand to SEQ ID NO: 1508064
uacaguaacugacuuguac

SEQ ID NO: 1508066 - RNA, 19 nt, Artificial Sequence
  Description of Artificial Sequence: Synthetic oligonucleotide
  Sense strand starting at position 2971 of SEQ ID NO: 1244694
guaacuacaccauggguua

SEQ ID NO: 1508067 - RNA, 19 nt, Artificial Sequence
  Description of Artificial Sequence: Synthetic oligonucleotide
  Antisense strand to SEQ ID NO: 1508066
uaacccaugguguaguuac

SEQ ID NO: 1508068 - RNA, 19 nt, Artificial Sequence
  Description of Artificial Sequence: Synthetic oligonucleotide
  Sense strand starting at position 3097 of SEQ ID NO: 1244694
gcagaagcucugggugaaa

SEQ ID NO: 1508069 - RNA, 19 nt, Artificial Sequence
  Description of Artificial Sequence: Synthetic oligonucleotide
  Antisense strand to SEQ ID NO: 1508068
uuucacccagagcuucugc

SEQ ID NO: 1508070 - RNA, 19 nt, Artificial Sequence
  Description of Artificial Sequence: Synthetic oligonucleotide
  Sense strand starting at position 3286 of SEQ ID NO: 1244694
caaguuguaguuuggaaga

SEQ ID NO: 1508071 - RNA, 19 nt, Artificial Sequence
  Description of Artificial Sequence: Synthetic oligonucleotide
  Antisense strand to SEQ ID NO: 1508070
ucuuccaaacuacaacuug

SEQ ID NO: 1508072 - RNA, 19 nt, Artificial Sequence
  Description of Artificial Sequence: Synthetic oligonucleotide
  Sense strand starting at position 3300 of SEQ ID NO: 1244694
gaagaaauugugggucuua

SEQ ID NO: 1508073 - RNA, 19 nt, Artificial Sequence
  Description of Artificial Sequence: Synthetic oligonucleotide
  Antisense strand to SEQ ID NO: 1508072
uaagacccacaauuucuuc

SEQ ID NO: 1508074 - RNA, 19 nt, Artificial Sequence
  Description of Artificial Sequence: Synthetic oligonucleotide
  Sense strand starting at position 3301 of SEQ ID NO: 1244694
aagaaauugugggucuuau

SEQ ID NO: 1508075 - RNA, 19 nt, Artificial Sequence
  Description of Artificial Sequence: Synthetic oligonucleotide
  Antisense strand to SEQ ID NO: 1508074
auaagacccacaauuucuu

SEQ ID NO: 1508076 - RNA, 19 nt, Artificial Sequence
  Description of Artificial Sequence: Synthetic oligonucleotide
  Sense strand starting at position 3395 of SEQ ID NO: 1244694
uguuucugagguuaucaga

SEQ ID NO: 1508077 - RNA, 19 nt, Artificial Sequence
  Description of Artificial Sequence: Synthetic oligonucleotide
  Antisense strand to SEQ ID NO: 1508076
ucugauaaccucagaaaca

SEQ ID NO: 1508078 - RNA, 19 nt, Artificial Sequence
  Description of Artificial Sequence: Synthetic oligonucleotide
  Sense strand starting at position 3405 of SEQ ID NO: 1244694
guuaucagaguaugaugau

SEQ ID NO: 1508079 - RNA, 19 nt, Artificial Sequence
  Description of Artificial Sequence: Synthetic oligonucleotide
  Antisense strand to SEQ ID NO: 1508078
aucaucauacucugauaac

SEQ ID NO: 1508080 - RNA, 19 nt, Artificial Sequence
  Description of Artificial Sequence: Synthetic oligonucleotide
  Sense strand starting at position 3914 of SEQ ID NO: 1244694
cuaucucaccuugguggaa

SEQ ID NO: 1508081 - RNA, 19 nt, Artificial Sequence
  Description of Artificial Sequence: Synthetic oligonucleotide
  Antisense strand to SEQ ID NO: 1508080
uuccaccaaggugagauag

SEQ ID NO: 1508082 - RNA, 19 nt, Artificial Sequence
  Description of Artificial Sequence: Synthetic oligonucleotide
  Sense strand starting at position 348 of SEQ ID NO: 1244695
cuauaaucauuccagggaa

SEQ ID NO: 1508083 - RNA, 19 nt, Artificial Sequence
  Description of Artificial Sequence: Synthetic oligonucleotide
  Antisense strand to SEQ ID NO: 1508082
uucccuggaaugauuauag

SEQ ID NO: 1508084 - RNA, 19 nt, Artificial Sequence
  Description of Artificial Sequence: Synthetic oligonucleotide
  Sense strand starting at position 439 of SEQ ID NO: 1244695
cagacuucuugcuacagag

SEQ ID NO: 1508085 - RNA, 19 nt, Artificial Sequence
  Description of Artificial Sequence: Synthetic oligonucleotide
  Antisense strand to SEQ ID NO: 1508084
cucuguagcaagaagucug

SEQ ID NO: 1508086 - RNA, 19 nt, Artificial Sequence
  Description of Artificial Sequence: Synthetic oligonucleotide
  Sense strand starting at position 623 of SEQ ID NO: 1244695
cuuaaagugucagaaccaa

SEQ ID NO: 1508087 - RNA, 19 nt, Artificial Sequence
  Description of Artificial Sequence: Synthetic oligonucleotide
  Antisense strand to SEQ ID NO: 1508086
uugguucugacacuuuaag

SEQ ID NO: 1508088 - RNA, 19 nt, Artificial Sequence
  Description of Artificial Sequence: Synthetic oligonucleotide
  Sense strand starting at position 698 of SEQ ID NO: 1244695
uggcuaaagucacacagau

SEQ ID NO: 1508089 - RNA, 19 nt, Artificial Sequence
  Description of Artificial Sequence: Synthetic oligonucleotide
  Antisense strand to SEQ ID NO: 1508088
aucugugugacuuuagcca

SEQ ID NO: 1508090 - RNA, 19 nt, Artificial Sequence
  Description of Artificial Sequence: Synthetic oligonucleotide
  Sense strand starting at position 867 of SEQ ID NO: 1244695
uuuccugucugggcugaga

SEQ ID NO: 1508091 - RNA, 19 nt, Artificial Sequence
  Description of Artificial Sequence: Synthetic oligonucleotide
  Antisense strand to SEQ ID NO: 1508090
ucucagcccagacaggaaa

SEQ ID NO: 1508092 - RNA, 19 nt, Artificial Sequence
  Description of Artificial Sequence: Synthetic oligonucleotide
  Sense strand starting at position 1063 of SEQ ID NO: 1244695
ggaggaagcuucccugcaa

SEQ ID NO: 1508093 - RNA, 19 nt, Artificial Sequence
  Description of Artificial Sequence: Synthetic oligonucleotide
  Antisense strand to SEQ ID NO: 1508092
uugcagggaagcuuccucc

SEQ ID NO: 1508094 - RNA, 19 nt, Artificial Sequence
  Description of Artificial Sequence: Synthetic oligonucleotide
  Sense strand starting at position 1103 of SEQ ID NO: 1244695
gcgcgagcucugggaaugu

SEQ ID NO: 1508095 - RNA, 19 nt, Artificial Sequence
  Description of Artificial Sequence: Synthetic oligonucleotide
  Antisense strand to SEQ ID NO: 1508094
acauucccagagcucgcgc

SEQ ID NO: 1508096 - RNA, 19 nt, Artificial Sequence
  Description of Artificial Sequence: Synthetic oligonucleotide
  Sense strand starting at position 1105 of SEQ ID NO: 1244695
gcgagcucugggaaugugu

SEQ ID NO: 1508097 - RNA, 19 nt, Artificial Sequence
  Description of Artificial Sequence: Synthetic oligonucleotide
  Antisense strand to SEQ ID NO: 1508096
acacauucccagagcucgc

SEQ ID NO: 1508098 - RNA, 19 nt, Artificial Sequence
  Description of Artificial Sequence: Synthetic oligonucleotide
  Sense strand starting at position 1191 of SEQ ID NO: 1244695
ggagcaggauuaugaauca

SEQ ID NO: 1508099 - RNA, 19 nt, Artificial Sequence
  Description of Artificial Sequence: Synthetic oligonucleotide
  Antisense strand to SEQ ID NO: 1508098
ugauucauaauccugcucc

SEQ ID NO: 1508100 - RNA, 19 nt, Artificial Sequence
  Description of Artificial Sequence: Synthetic oligonucleotide
  Sense strand starting at position 1200 of SEQ ID NO: 1244695
uuaugaaucagauguggcu

SEQ ID NO: 1508101 - RNA, 19 nt, Artificial Sequence
  Description of Artificial Sequence: Synthetic oligonucleotide
  Antisense strand to SEQ ID NO: 1508100
agccacaucugauucauaa

SEQ ID NO: 1508102 - RNA, 19 nt, Artificial Sequence
  Description of Artificial Sequence: Synthetic oligonucleotide
  Sense strand starting at position 1233 of SEQ ID NO: 1244695
gaauguggaucauagauag

SEQ ID NO: 1508103 - RNA, 19 nt, Artificial Sequence
  Description of Artificial Sequence: Synthetic oligonucleotide
  Antisense strand to SEQ ID NO: 1508102
cuaucuaugauccacauuc

SEQ ID NO: 1508104 - RNA, 19 nt, Artificial Sequence
  Description of Artificial Sequence: Synthetic oligonucleotide
  Sense strand starting at position 1300 of SEQ ID NO: 1244695
gauccacgugggugaugau

SEQ ID NO: 1508105 - RNA, 19 nt, Artificial Sequence
  Description of Artificial Sequence: Synthetic oligonucleotide
  Antisense strand to SEQ ID NO: 1508104
aucaucacccacguggauc

SEQ ID NO: 1508106 - RNA, 19 nt, Artificial Sequence
  Description of Artificial Sequence: Synthetic oligonucleotide
  Sense strand starting at position 1364 of SEQ ID NO: 1244695
ugaagucuucuuuggcgaa

SEQ ID NO: 1508107 - RNA, 19 nt, Artificial Sequence
  Description of Artificial Sequence: Synthetic oligonucleotide
  Antisense strand to SEQ ID NO: 1508106
uucgccaaagaagacuuca

SEQ ID NO: 1508108 - RNA, 19 nt, Artificial Sequence
  Description of Artificial Sequence: Synthetic oligonucleotide
  Sense strand starting at position 1365 of SEQ ID NO: 1244695
gaagucuucuuuggcgaag

SEQ ID NO: 1508109 - RNA, 19 nt, Artificial Sequence
  Description of Artificial Sequence: Synthetic oligonucleotide
  Antisense strand to SEQ ID NO: 1508108
cuucgccaaagaagacuuc

SEQ ID NO: 1508110 - RNA, 19 nt, Artificial Sequence
  Description of Artificial Sequence: Synthetic oligonucleotide
  Sense strand starting at position 1368 of SEQ ID NO: 1244695
gucuucuuuggcgaaggga

SEQ ID NO: 1508111 - RNA, 19 nt, Artificial Sequence
  Description of Artificial Sequence: Synthetic oligonucleotide
  Antisense strand to SEQ ID NO: 1508110
ucccuucgccaaagaagac

SEQ ID NO: 1508112 - RNA, 19 nt, Artificial Sequence
  Description of Artificial Sequence: Synthetic oligonucleotide
  Sense strand starting at position 1461 of SEQ ID NO: 1244695
aggguuaugcacuguggga

SEQ ID NO: 1508113 - RNA, 19 nt, Artificial Sequence
  Description of Artificial Sequence: Synthetic oligonucleotide
  Antisense strand to SEQ ID NO: 1508112
ucccacagugcauaacccu

SEQ ID NO: 1508114 - RNA, 19 nt, Artificial Sequence
  Description of Artificial Sequence: Synthetic oligonucleotide
  Sense strand starting at position 1463 of SEQ ID NO: 1244695
gguuaugcacugugggaga

SEQ ID NO: 1508115 - RNA, 19 nt, Artificial Sequence
  Description of Artificial Sequence: Synthetic oligonucleotide
  Antisense strand to SEQ ID NO: 1508114
ucucccacagugcauaacc

SEQ ID NO: 1508116 - RNA, 19 nt, Artificial Sequence
  Description of Artificial Sequence: Synthetic oligonucleotide
  Sense strand starting at position 1465 of SEQ ID NO: 1244695
uuaugcacugugggagauu

SEQ ID NO: 1508117 - RNA, 19 nt, Artificial Sequence
  Description of Artificial Sequence: Synthetic oligonucleotide
  Antisense strand to SEQ ID NO: 1508116
aaucucccacagugcauaa

SEQ ID NO: 1508118 - RNA, 19 nt, Artificial Sequence
  Description of Artificial Sequence: Synthetic oligonucleotide
  Sense strand starting at position 1513 of SEQ ID NO: 1244695
cugggaucuguguggcuga

SEQ ID NO: 1508119 - RNA, 19 nt, Artificial Sequence
  Description of Artificial Sequence: Synthetic oligonucleotide
  Antisense strand to SEQ ID NO: 1508118
ucagccacacagaucccag

SEQ ID NO: 1508120 - RNA, 19 nt, Artificial Sequence
  Description of Artificial Sequence: Synthetic oligonucleotide
  Sense strand starting at position 1526 of SEQ ID NO: 1244695
ggcugagaucugugcucac

SEQ ID NO: 1508121 - RNA, 19 nt, Artificial Sequence
  Description of Artificial Sequence: Synthetic oligonucleotide
  Antisense strand to SEQ ID NO: 1508120
gugagcacagaucucagcc

SEQ ID NO: 1508122 - RNA, 19 nt, Artificial Sequence
  Description of Artificial Sequence: Synthetic oligonucleotide
  Sense strand starting at position 1529 of SEQ ID NO: 1244695
ugagaucugugcucacuuc

SEQ ID NO: 1508123 - RNA, 19 nt, Artificial Sequence
  Description of Artificial Sequence: Synthetic oligonucleotide
  Antisense strand to SEQ ID NO: 1508122
gaagugagcacagaucuca

SEQ ID NO: 1508124 - RNA, 19 nt, Artificial Sequence
  Description of Artificial Sequence: Synthetic oligonucleotide
  Sense strand starting at position 1579 of SEQ ID NO: 1244695
cgcccugggaucuguaaac

SEQ ID NO: 1508125 - RNA, 19 nt, Artificial Sequence
  Description of Artificial Sequence: Synthetic oligonucleotide
  Antisense strand to SEQ ID NO: 1508124
guuuacagaucccagggcg

SEQ ID NO: 1508126 - RNA, 19 nt, Artificial Sequence
  Description of Artificial Sequence: Synthetic oligonucleotide
  Sense strand starting at position 2360 of SEQ ID NO: 1244695
cugggucucucaggucuau

SEQ ID NO: 1508127 - RNA, 19 nt, Artificial Sequence
  Description of Artificial Sequence: Synthetic oligonucleotide
  Antisense strand to SEQ ID NO: 1508126
auagaccugagagacccag

SEQ ID NO: 1508128 - RNA, 19 nt, Artificial Sequence
  Description of Artificial Sequence: Synthetic oligonucleotide
  Sense strand starting at position 2424 of SEQ ID NO: 1244695
cggugucucuccgagaggu

SEQ ID NO: 1508129 - RNA, 19 nt, Artificial Sequence
  Description of Artificial Sequence: Synthetic oligonucleotide
  Antisense strand to SEQ ID NO: 1508128
accucucggagagacaccg

SEQ ID NO: 1508130 - RNA, 19 nt, Artificial Sequence
  Description of Artificial Sequence: Synthetic oligonucleotide
  Sense strand starting at position 2425 of SEQ ID NO: 1244695
ggugucucuccgagaggug

SEQ ID NO: 1508131 - RNA, 19 nt, Artificial Sequence
  Description of Artificial Sequence: Synthetic oligonucleotide
  Antisense strand to SEQ ID NO: 1508130
caccucucggagagacacc

SEQ ID NO: 1508132 - RNA, 19 nt, Artificial Sequence
  Description of Artificial Sequence: Synthetic oligonucleotide
  Sense strand starting at position 2426 of SEQ ID NO: 1244695
gugucucuccgagaggugu

SEQ ID NO: 1508133 - RNA, 19 nt, Artificial Sequence
  Description of Artificial Sequence: Synthetic oligonucleotide
  Antisense strand to SEQ ID NO: 1508132
acaccucucggagagacac

SEQ ID NO: 1508134 - RNA, 19 nt, Artificial Sequence
  Description of Artificial Sequence: Synthetic oligonucleotide
  Sense strand starting at position 2790 of SEQ ID NO: 1244695
gagacagucgcccauguau

SEQ ID NO: 1508135 - RNA, 19 nt, Artificial Sequence
  Description of Artificial Sequence: Synthetic oligonucleotide
  Antisense strand to SEQ ID NO: 1508134
auacaugggcgacugucuc

SEQ ID NO: 1508136 - RNA, 19 nt, Artificial Sequence
  Description of Artificial Sequence: Synthetic oligonucleotide
  Sense strand starting at position 2792 of SEQ ID NO: 1244695
gacagucgcccauguauuc

SEQ ID NO: 1508137 - RNA, 19 nt, Artificial Sequence
  Description of Artificial Sequence: Synthetic oligonucleotide
  Antisense strand to SEQ ID NO: 1508136
gaauacaugggcgacuguc

SEQ ID NO: 1508138 - RNA, 19 nt, Artificial Sequence
  Description of Artificial Sequence: Synthetic oligonucleotide
  Sense strand starting at position 3000 of SEQ ID NO: 1244695
gccggcuccuuagugauua

SEQ ID NO: 1508139 - RNA, 19 nt, Artificial Sequence
  Description of Artificial Sequence: Synthetic oligonucleotide
  Antisense strand to SEQ ID NO: 1508138
uaaucacuaaggagccggc

SEQ ID NO: 1508140 - RNA, 19 nt, Artificial Sequence
  Description of Artificial Sequence: Synthetic oligonucleotide
  Sense strand starting at position 3004 of SEQ ID NO: 1244695
gcuccuuagugauuaccau

SEQ ID NO: 1508141 - RNA, 19 nt, Artificial Sequence
  Description of Artificial Sequence: Synthetic oligonucleotide
  Antisense strand to SEQ ID NO: 1508140
augguaaucacuaaggagc

SEQ ID NO: 1508142 - RNA, 19 nt, Artificial Sequence
  Description of Artificial Sequence: Synthetic oligonucleotide
  Sense strand starting at position 3082 of SEQ ID NO: 1244695
ggacgugucucggcccgaa

SEQ ID NO: 1508143 - RNA, 19 nt, Artificial Sequence
  Description of Artificial Sequence: Synthetic oligonucleotide
  Antisense strand to SEQ ID NO: 1508142
uucgggccgagacacgucc

SEQ ID NO: 1508144 - RNA, 19 nt, Artificial Sequence
  Description of Artificial Sequence: Synthetic oligonucleotide
  Sense strand starting at position 3114 of SEQ ID NO: 1244695
cugaaucaagcucaugagu

SEQ ID NO: 1508145 - RNA, 19 nt, Artificial Sequence
  Description of Artificial Sequence: Synthetic oligonucleotide
  Antisense strand to SEQ ID NO: 1508144
acucaugagcuugauucag

SEQ ID NO: 1508146 - RNA, 19 nt, Artificial Sequence
  Description of Artificial Sequence: Synthetic oligonucleotide
  Sense strand starting at position 3116 of SEQ ID NO: 1244695
gaaucaagcucaugaguuc

SEQ ID NO: 1508147 - RNA, 19 nt, Artificial Sequence
  Description of Artificial Sequence: Synthetic oligonucleotide
  Antisense strand to SEQ ID NO: 1508146
gaacucaugagcuugauuc

SEQ ID NO: 1508148 - RNA, 19 nt, Artificial Sequence
  Description of Artificial Sequence: Synthetic oligonucleotide
  Sense strand starting at position 3405 of SEQ ID NO: 1244695
guguauaauuguggugugu

SEQ ID NO: 1508149 - RNA, 19 nt, Artificial Sequence
  Description of Artificial Sequence: Synthetic oligonucleotide
  Antisense strand to SEQ ID NO: 1508148
acacaccacaauuauacac

SEQ ID NO: 1508150 - RNA, 19 nt, Artificial Sequence
  Description of Artificial Sequence: Synthetic oligonucleotide
  Sense strand starting at position 3407 of SEQ ID NO: 1244695
guauaauugugguguguuc

SEQ ID NO: 1508151 - RNA, 19 nt, Artificial Sequence
  Description of Artificial Sequence: Synthetic oligonucleotide
  Antisense strand to SEQ ID NO: 1508150
gaacacaccacaauuauac

SEQ ID NO: 1508152 - RNA, 19 nt, Artificial Sequence
  Description of Artificial Sequence: Synthetic oligonucleotide
  Sense strand starting at position 3409 of SEQ ID NO: 1244695
auaauugugguguguucaa

SEQ ID NO: 1508153 - RNA, 19 nt, Artificial Sequence
  Description of Artificial Sequence: Synthetic oligonucleotide
  Antisense strand to SEQ ID NO: 1508152
uugaacacaccacaauuau

SEQ ID NO: 1508154 - RNA, 19 nt, Artificial Sequence
  Description of Artificial Sequence: Synthetic oligonucleotide
  Sense strand starting at position 3439 of SEQ ID NO: 1244695
gagcauauuuaucacucga

SEQ ID NO: 1508155 - RNA, 19 nt, Artificial Sequence
  Description of Artificial Sequence: Synthetic oligonucleotide
  Antisense strand to SEQ ID NO: 1508154
ucgagugauaaauaugcuc

SEQ ID NO: 1508156 - RNA, 19 nt, Artificial Sequence
  Description of Artificial Sequence: Synthetic oligonucleotide
  Sense strand starting at position 3773 of SEQ ID NO: 1244695
ccgcgucuggcccaaauau

SEQ ID NO: 1508157 - RNA, 19 nt, Artificial Sequence
  Description of Artificial Sequence: Synthetic oligonucleotide
  Antisense strand to SEQ ID NO: 1508156
auauuugggccagacgcgg

SEQ ID NO: 1508158 - RNA, 19 nt, Artificial Sequence
  Description of Artificial Sequence: Synthetic oligonucleotide
  Sense strand starting at position 3914 of SEQ ID NO: 1244695
gugccuuucucagugccua

SEQ ID NO: 1508159 - RNA, 19 nt, Artificial Sequence
  Description of Artificial Sequence: Synthetic oligonucleotide
  Antisense strand to SEQ ID NO: 1508158
uaggcacugagaaaggcac

SEQ ID NO: 1508160 - RNA, 19 nt, Artificial Sequence
  Description of Artificial Sequence: Synthetic oligonucleotide
  Sense strand starting at position 3915 of SEQ ID NO: 1244695
ugccuuucucagugccuaa

SEQ ID NO: 1508161 - RNA, 19 nt, Artificial Sequence
  Description of Artificial Sequence: Synthetic oligonucleotide
  Antisense strand to SEQ ID NO: 1508160
uuaggcacugagaaaggca

SEQ ID NO: 1508162 - RNA, 19 nt, Artificial Sequence
  Description of Artificial Sequence: Synthetic oligonucleotide
  Sense strand starting at position 34 of SEQ ID NO: 1244696
aggauaguuguaggcagau

SEQ ID NO: 1508163 - RNA, 19 nt, Artificial Sequence
  Description of Artificial Sequence: Synthetic oligonucleotide
  Antisense strand to SEQ ID NO: 1508162
aucugccuacaacuauccu

SEQ ID NO: 1508164 - RNA, 19 nt, Artificial Sequence
  Description of Artificial Sequence: Synthetic oligonucleotide
  Sense strand starting at position 36 of SEQ ID NO: 1244696
gauaguuguaggcagaucu

SEQ ID NO: 1508165 - RNA, 19 nt, Artificial Sequence
  Description of Artificial Sequence: Synthetic oligonucleotide
  Antisense strand to SEQ ID NO: 1508164
agaucugccuacaacuauc

SEQ ID NO: 1508166 - RNA, 19 nt, Artificial Sequence
  Description of Artificial Sequence: Synthetic oligonucleotide
  Sense strand starting at position 683 of SEQ ID NO: 1244696
gccgaaaguaucgagaaga

SEQ ID NO: 1508167 - RNA, 19 nt, Artificial Sequence
  Description of Artificial Sequence: Synthetic oligonucleotide
  Antisense strand to SEQ ID NO: 1508166
ucuucucgauacuuucggc

SEQ ID NO: 1508168 - RNA, 19 nt, Artificial Sequence
  Description of Artificial Sequence: Synthetic oligonucleotide
  Sense strand starting at position 1220 of SEQ ID NO: 1244696
gcuguuugccucccucgaa

SEQ ID NO: 1508169 - RNA, 19 nt, Artificial Sequence
  Description of Artificial Sequence: Synthetic oligonucleotide
  Antisense strand to SEQ ID NO: 1508168
uucgagggaggcaaacagc

SEQ ID NO: 1508170 - RNA, 19 nt, Artificial Sequence
  Description of Artificial Sequence: Synthetic oligonucleotide
  Sense strand starting at position 1223 of SEQ ID NO: 1244696
guuugccucccucgaacua

SEQ ID NO: 1508171 - RNA, 19 nt, Artificial Sequence
  Description of Artificial Sequence: Synthetic oligonucleotide
  Antisense strand to SEQ ID NO: 1508170
uaguucgagggaggcaaac

SEQ ID NO: 1508172 - RNA, 19 nt, Artificial Sequence
  Description of Artificial Sequence: Synthetic oligonucleotide
  Sense strand starting at position 1299 of SEQ ID NO: 1244696
cagguugucggguaaucag

SEQ ID NO: 1508173 - RNA, 19 nt, Artificial Sequence
  Description of Artificial Sequence: Synthetic oligonucleotide
  Antisense strand to SEQ ID NO: 1508172
cugauuacccgacaaccug

SEQ ID NO: 1508174 - RNA, 19 nt, Artificial Sequence
  Description of Artificial Sequence: Synthetic oligonucleotide
  Sense strand starting at position 1307 of SEQ ID NO: 1244696
cggguaaucaggugggucu

SEQ ID NO: 1508175 - RNA, 19 nt, Artificial Sequence
  Description of Artificial Sequence: Synthetic oligonucleotide
  Antisense strand to SEQ ID NO: 1508174
agacccaccugauuacccg

SEQ ID NO: 1508176 - RNA, 19 nt, Artificial Sequence
  Description of Artificial Sequence: Synthetic oligonucleotide
  Sense strand starting at position 1448 of SEQ ID NO: 1244696
cggucaaagugcucggcaa

SEQ ID NO: 1508177 - RNA, 19 nt, Artificial Sequence
  Description of Artificial Sequence: Synthetic oligonucleotide
  Antisense strand to SEQ ID NO: 1508176
uugccgagcacuuugaccg

SEQ ID NO: 1508178 - RNA, 19 nt, Artificial Sequence
  Description of Artificial Sequence: Synthetic oligonucleotide
  Sense strand starting at position 1513 of SEQ ID NO: 1244696
cccguuuaucgcgaaggcu

SEQ ID NO: 1508179 - RNA, 19 nt, Artificial Sequence
  Description of Artificial Sequence: Synthetic oligonucleotide
  Antisense strand to SEQ ID NO: 1508178
agccuucgcgauaaacggg

SEQ ID NO: 1508180 - RNA, 19 nt, Artificial Sequence
  Description of Artificial Sequence: Synthetic oligonucleotide
  Sense strand starting at position 1514 of SEQ ID NO: 1244696
ccguuuaucgcgaaggcug

SEQ ID NO: 1508181 - RNA, 19 nt, Artificial Sequence
  Description of Artificial Sequence: Synthetic oligonucleotide
  Antisense strand to SEQ ID NO: 1508180
cagccuucgcgauaaacgg

SEQ ID NO: 1508182 - RNA, 19 nt, Artificial Sequence
  Description of Artificial Sequence: Synthetic oligonucleotide
  Sense strand starting at position 1608 of SEQ ID NO: 1244696
ggaaacaucugugagagaa

SEQ ID NO: 1508183 - RNA, 19 nt, Artificial Sequence
  Description of Artificial Sequence: Synthetic oligonucleotide
  Antisense strand to SEQ ID NO: 1508182
uucucucacagauguuucc

SEQ ID NO: 1508184 - RNA, 19 nt, Artificial Sequence
  Description of Artificial Sequence: Synthetic oligonucleotide
  Sense strand starting at position 1977 of SEQ ID NO: 1244696
cgggcucucucgguaaaca

SEQ ID NO: 1508185 - RNA, 19 nt, Artificial Sequence
  Description of Artificial Sequence: Synthetic oligonucleotide
  Antisense strand to SEQ ID NO: 1508184
uguuuaccgagagagcccg

SEQ ID NO: 1508186 - RNA, 19 nt, Artificial Sequence
  Description of Artificial Sequence: Synthetic oligonucleotide
  Sense strand starting at position 2108 of SEQ ID NO: 1244696
gggauugaauuauguacac

SEQ ID NO: 1508187 - RNA, 19 nt, Artificial Sequence
  Description of Artificial Sequence: Synthetic oligonucleotide
  Antisense strand to SEQ ID NO: 1508186
guguacauaauucaauccc

SEQ ID NO: 1508188 - RNA, 19 nt, Artificial Sequence
  Description of Artificial Sequence: Synthetic oligonucleotide
  Sense strand starting at position 2269 of SEQ ID NO: 1244696
ccgccaacgcguggaaaua

SEQ ID NO: 1508189 - RNA, 19 nt, Artificial Sequence
  Description of Artificial Sequence: Synthetic oligonucleotide
  Antisense strand to SEQ ID NO: 1508188
uauuuccacgcguuggcgg

SEQ ID NO: 1508190 - RNA, 19 nt, Artificial Sequence
  Description of Artificial Sequence: Synthetic oligonucleotide
  Sense strand starting at position 2348 of SEQ ID NO: 1244696
ccagguaaaucucggauau

SEQ ID NO: 1508191 - RNA, 19 nt, Artificial Sequence
  Description of Artificial Sequence: Synthetic oligonucleotide
  Antisense strand to SEQ ID NO: 1508190
auauccgagauuuaccugg

SEQ ID NO: 1508192 - RNA, 19 nt, Artificial Sequence
  Description of Artificial Sequence: Synthetic oligonucleotide
  Sense strand starting at position 2349 of SEQ ID NO: 1244696
cagguaaaucucggauauc

SEQ ID NO: 1508193 - RNA, 19 nt, Artificial Sequence
  Description of Artificial Sequence: Synthetic oligonucleotide
  Antisense strand to SEQ ID NO: 1508192
gauauccgagauuuaccug

SEQ ID NO: 1508194 - RNA, 19 nt, Artificial Sequence
  Description of Artificial Sequence: Synthetic oligonucleotide
  Sense strand starting at position 2350 of SEQ ID NO: 1244696
agguaaaucucggauauca

SEQ ID NO: 1508195 - RNA, 19 nt, Artificial Sequence
  Description of Artificial Sequence: Synthetic oligonucleotide
  Antisense strand to SEQ ID NO: 1508194
ugauauccgagauuuaccu

SEQ ID NO: 1508196 - RNA, 19 nt, Artificial Sequence
  Description of Artificial Sequence: Synthetic oligonucleotide
  Sense strand starting at position 2352 of SEQ ID NO: 1244696
guaaaucucggauaucaau

SEQ ID NO: 1508197 - RNA, 19 nt, Artificial Sequence
  Description of Artificial Sequence: Synthetic oligonucleotide
  Antisense strand to SEQ ID NO: 1508196
auugauauccgagauuuac

SEQ ID NO: 1508198 - RNA, 19 nt, Artificial Sequence
  Description of Artificial Sequence: Synthetic oligonucleotide
  Sense strand starting at position 2361 of SEQ ID NO: 1244696
ggauaucaaucagaucaca

SEQ ID NO: 1508199 - RNA, 19 nt, Artificial Sequence
  Description of Artificial Sequence: Synthetic oligonucleotide
  Antisense strand to SEQ ID NO: 1508198
ugugaucugauugauaucc

SEQ ID NO: 1508200 - RNA, 19 nt, Artificial Sequence
  Description of Artificial Sequence: Synthetic oligonucleotide
  Sense strand starting at position 2395 of SEQ ID NO: 1244696
ccagcucugugcuuagaau

SEQ ID NO: 1508201 - RNA, 19 nt, Artificial Sequence
  Description of Artificial Sequence: Synthetic oligonucleotide
  Antisense strand to SEQ ID NO: 1508200
auucuaagcacagagcugg

SEQ ID NO: 1508202 - RNA, 19 nt, Artificial Sequence
  Description of Artificial Sequence: Synthetic oligonucleotide
  Sense strand starting at position 2396 of SEQ ID NO: 1244696
cagcucugugcuuagaaua

SEQ ID NO: 1508203 - RNA, 19 nt, Artificial Sequence
  Description of Artificial Sequence: Synthetic oligonucleotide
  Antisense strand to SEQ ID NO: 1508202
uauucuaagcacagagcug

SEQ ID NO: 1508204 - RNA, 19 nt, Artificial Sequence
  Description of Artificial Sequence: Synthetic oligonucleotide
  Sense strand starting at position 2401 of SEQ ID NO: 1244696
cugugcuuagaauaacaga

SEQ ID NO: 1508205 - RNA, 19 nt, Artificial Sequence
  Description of Artificial Sequence: Synthetic oligonucleotide
  Antisense strand to SEQ ID NO: 1508204
ucuguuauucuaagcacag

SEQ ID NO: 1508206 - RNA, 19 nt, Artificial Sequence
  Description of Artificial Sequence: Synthetic oligonucleotide
  Sense strand starting at position 2793 of SEQ ID NO: 1244696
ugugaagaccugcagugua

SEQ ID NO: 1508207 - RNA, 19 nt, Artificial Sequence
  Description of Artificial Sequence: Synthetic oligonucleotide
  Antisense strand to SEQ ID NO: 1508206
uacacugcaggucuucaca

SEQ ID NO: 1508208 - RNA, 19 nt, Artificial Sequence
  Description of Artificial Sequence: Synthetic oligonucleotide
  Sense strand starting at position 3204 of SEQ ID NO: 1244696
aacugaagcucucagggaa

SEQ ID NO: 1508209 - RNA, 19 nt, Artificial Sequence
  Description of Artificial Sequence: Synthetic oligonucleotide
  Antisense strand to SEQ ID NO: 1508208
uucccugagagcuucaguu

SEQ ID NO: 1508210 - RNA, 19 nt, Artificial Sequence
  Description of Artificial Sequence: Synthetic oligonucleotide
  Sense strand starting at position 3314 of SEQ ID NO: 1244696
agggaaagauccuggauac

SEQ ID NO: 1508211 - RNA, 19 nt, Artificial Sequence
  Description of Artificial Sequence: Synthetic oligonucleotide
  Antisense strand to SEQ ID NO: 1508210
guauccaggaucuuucccu

SEQ ID NO: 1508212 - RNA, 19 nt, Artificial Sequence
  Description of Artificial Sequence: Synthetic oligonucleotide
  Sense strand starting at position 3421 of SEQ ID NO: 1244696
aaggauucuugagaucaga

SEQ ID NO: 1508213 - RNA, 19 nt, Artificial Sequence
  Description of Artificial Sequence: Synthetic oligonucleotide
  Antisense strand to SEQ ID NO: 1508212
ucugaucucaagaauccuu

SEQ ID NO: 1508214 - RNA, 19 nt, Artificial Sequence
  Description of Artificial Sequence: Synthetic oligonucleotide
  Sense strand starting at position 3443 of SEQ ID NO: 1244696
ucuaaacacuuagguuaga

SEQ ID NO: 1508215 - RNA, 19 nt, Artificial Sequence
  Description of Artificial Sequence: Synthetic oligonucleotide
  Antisense strand to SEQ ID NO: 1508214
ucuaaccuaaguguuuaga

SEQ ID NO: 1508216 - RNA, 19 nt, Artificial Sequence
  Description of Artificial Sequence: Synthetic oligonucleotide
  Sense strand starting at position 3546 of SEQ ID NO: 1244696
gggucuuguccaggcugaa

SEQ ID NO: 1508217 - RNA, 19 nt, Artificial Sequence
  Description of Artificial Sequence: Synthetic oligonucleotide
  Antisense strand to SEQ ID NO: 1508216
uucagccuggacaagaccc

SEQ ID NO: 1508218 - RNA, 19 nt, Artificial Sequence
  Description of Artificial Sequence: Synthetic oligonucleotide
  Sense strand starting at position 3844 of SEQ ID NO: 1244696
ggucauugaagccagguau

SEQ ID NO: 1508219 - RNA, 19 nt, Artificial Sequence
  Description of Artificial Sequence: Synthetic oligonucleotide
  Antisense strand to SEQ ID NO: 1508218
auaccuggcuucaaugacc

SEQ ID NO: 1508220 - RNA, 19 nt, Artificial Sequence
  Description of Artificial Sequence: Synthetic oligonucleotide
  Sense strand starting at position 3848 of SEQ ID NO: 1244696
auugaagccagguauugau

SEQ ID NO: 1508221 - RNA, 19 nt, Artificial Sequence
  Description of Artificial Sequence: Synthetic oligonucleotide
  Antisense strand to SEQ ID NO: 1508220
aucaauaccuggcuucaau

SEQ ID NO: 1508222 - RNA, 19 nt, Artificial Sequence
  Description of Artificial Sequence: Synthetic oligonucleotide
  Sense strand starting at position 3899 of SEQ ID NO: 1244696
uugauagguugacauucuu

SEQ ID NO: 1508223 - RNA, 19 nt, Artificial Sequence
  Description of Artificial Sequence: Synthetic oligonucleotide
  Antisense strand to SEQ ID NO: 1508222
aagaaugucaaccuaucaa

SEQ ID NO: 1508224 - RNA, 19 nt, Artificial Sequence
  Description of Artificial Sequence: Synthetic oligonucleotide
  Sense strand starting at position 3905 of SEQ ID NO: 1244696
gguugacauucuuuaccuc

SEQ ID NO: 1508225 - RNA, 19 nt, Artificial Sequence
  Description of Artificial Sequence: Synthetic oligonucleotide
  Antisense strand to SEQ ID NO: 1508224
gagguaaagaaugucaacc

SEQ ID NO: 1508226 - RNA, 19 nt, Artificial Sequence
  Description of Artificial Sequence: Synthetic oligonucleotide
  Sense strand starting at position 3906 of SEQ ID NO: 1244696
guugacauucuuuaccuca

SEQ ID NO: 1508227 - RNA, 19 nt, Artificial Sequence
  Description of Artificial Sequence: Synthetic oligonucleotide
  Antisense strand to SEQ ID NO: 1508226
ugagguaaagaaugucaac

SEQ ID NO: 1508228 - RNA, 19 nt, Artificial Sequence
  Description of Artificial Sequence: Synthetic oligonucleotide
  Sense strand starting at position 3938 of SEQ ID NO: 1244696
agagauguguucuuugguu

SEQ ID NO: 1508229 - RNA, 19 nt, Artificial Sequence
  Description of Artificial Sequence: Synthetic oligonucleotide
  Antisense strand to SEQ ID NO: 1508228
aaccaaagaacacaucucu

SEQ ID NO: 1508230 - RNA, 19 nt, Artificial Sequence
  Description of Artificial Sequence: Synthetic oligonucleotide
  Sense strand starting at position 3940 of SEQ ID NO: 1244696
agauguguucuuugguuua

SEQ ID NO: 1508231 - RNA, 19 nt, Artificial Sequence
  Description of Artificial Sequence: Synthetic oligonucleotide
  Antisense strand to SEQ ID NO: 1508230
uaaaccaaagaacacaucu

SEQ ID NO: 1508232 - RNA, 19 nt, Artificial Sequence
  Description of Artificial Sequence: Synthetic oligonucleotide
  Sense strand starting at position 3942 of SEQ ID NO: 1244696
auguguucuuugguuuaau

SEQ ID NO: 1508233 - RNA, 19 nt, Artificial Sequence
  Description of Artificial Sequence: Synthetic oligonucleotide
  Antisense strand to SEQ ID NO: 1508232
auuaaaccaaagaacacau

SEQ ID NO: 1508234 - RNA, 19 nt, Artificial Sequence
  Description of Artificial Sequence: Synthetic oligonucleotide
  Sense strand starting at position 3943 of SEQ ID NO: 1244696
uguguucuuugguuuaauu

SEQ ID NO: 1508235 - RNA, 19 nt, Artificial Sequence
  Description of Artificial Sequence: Synthetic oligonucleotide
  Antisense strand to SEQ ID NO: 1508234
aauuaaaccaaagaacaca

SEQ ID NO: 1508236 - RNA, 19 nt, Artificial Sequence
  Description of Artificial Sequence: Synthetic oligonucleotide
  Sense strand starting at position 25 of SEQ ID NO: 1244697
gucccacagaccugggaua

SEQ ID NO: 1508237 - RNA, 19 nt, Artificial Sequence
  Description of Artificial Sequence: Synthetic oligonucleotide
  Antisense strand to SEQ ID NO: 1508236
uaucccaggucugugggac

SEQ ID NO: 1508238 - RNA, 19 nt, Artificial Sequence
  Description of Artificial Sequence: Synthetic oligonucleotide
  Sense strand starting at position 40 of SEQ ID NO: 1244697
gauacaaucuuggcuugga

SEQ ID NO: 1508239 - RNA, 19 nt, Artificial Sequence
  Description of Artificial Sequence: Synthetic oligonucleotide
  Antisense strand to SEQ ID NO: 1508238
uccaagccaagauuguauc

SEQ ID NO: 1508240 - RNA, 19 nt, Artificial Sequence
  Description of Artificial Sequence: Synthetic oligonucleotide
  Sense strand starting at position 41 of SEQ ID NO: 1244697
auacaaucuuggcuuggau

SEQ ID NO: 1508241 - RNA, 19 nt, Artificial Sequence
  Description of Artificial Sequence: Synthetic oligonucleotide
  Antisense strand to SEQ ID NO: 1508240
auccaagccaagauuguau

SEQ ID NO: 1508242 - RNA, 19 nt, Artificial Sequence
  Description of Artificial Sequence: Synthetic oligonucleotide
  Sense strand starting at position 69 of SEQ ID NO: 1244697
cuguguaaccuuguguguu

SEQ ID NO: 1508243 - RNA, 19 nt, Artificial Sequence
  Description of Artificial Sequence: Synthetic oligonucleotide
  Antisense strand to SEQ ID NO: 1508242
aacacacaagguuacacag

SEQ ID NO: 1508244 - RNA, 19 nt, Artificial Sequence
  Description of Artificial Sequence: Synthetic oligonucleotide
  Sense strand starting at position 163 of SEQ ID NO: 1244697
gagacaaaguuuguaaggu

SEQ ID NO: 1508245 - RNA, 19 nt, Artificial Sequence
  Description of Artificial Sequence: Synthetic oligonucleotide
  Antisense strand to SEQ ID NO: 1508244
accuuacaaacuuugucuc

SEQ ID NO: 1508246 - RNA, 19 nt, Artificial Sequence
  Description of Artificial Sequence: Synthetic oligonucleotide
  Sense strand starting at position 200 of SEQ ID NO: 1244697
gaguuagaccugggcucua

SEQ ID NO: 1508247 - RNA, 19 nt, Artificial Sequence
  Description of Artificial Sequence: Synthetic oligonucleotide
  Antisense strand to SEQ ID NO: 1508246
uagagcccaggucuaacuc

SEQ ID NO: 1508248 - RNA, 19 nt, Artificial Sequence
  Description of Artificial Sequence: Synthetic oligonucleotide
  Sense strand starting at position 245 of SEQ ID NO: 1244697
ugccaaguuguauaagcuu

SEQ ID NO: 1508249 - RNA, 19 nt, Artificial Sequence
  Description of Artificial Sequence: Synthetic oligonucleotide
  Antisense strand to SEQ ID NO: 1508248
aagcuuauacaacuuggca

SEQ ID NO: 1508250 - RNA, 19 nt, Artificial Sequence
  Description of Artificial Sequence: Synthetic oligonucleotide
  Sense strand starting at position 252 of SEQ ID NO: 1244697
uuguauaagcuuuaaagcu

SEQ ID NO: 1508251 - RNA, 19 nt, Artificial Sequence
  Description of Artificial Sequence: Synthetic oligonucleotide
  Antisense strand to SEQ ID NO: 1508250
agcuuuaaagcuuauacaa

SEQ ID NO: 1508252 - RNA, 19 nt, Artificial Sequence
  Description of Artificial Sequence: Synthetic oligonucleotide
  Sense strand starting at position 286 of SEQ ID NO: 1244697
auccaauaaugauaucgau

SEQ ID NO: 1508253 - RNA, 19 nt, Artificial Sequence
  Description of Artificial Sequence: Synthetic oligonucleotide
  Antisense strand to SEQ ID NO: 1508252
aucgauaucauuauuggau

SEQ ID NO: 1508254 - RNA, 19 nt, Artificial Sequence
  Description of Artificial Sequence: Synthetic oligonucleotide
  Sense strand starting at position 521 of SEQ ID NO: 1244697
acgugauuucaccguguua

SEQ ID NO: 1508255 - RNA, 19 nt, Artificial Sequence
  Description of Artificial Sequence: Synthetic oligonucleotide
  Antisense strand to SEQ ID NO: 1508254
uaacacggugaaaucacgu

SEQ ID NO: 1508256 - RNA, 19 nt, Artificial Sequence
  Description of Artificial Sequence: Synthetic oligonucleotide
  Sense strand starting at position 523 of SEQ ID NO: 1244697
gugauuucaccguguuagc

SEQ ID NO: 1508257 - RNA, 19 nt, Artificial Sequence
  Description of Artificial Sequence: Synthetic oligonucleotide
  Antisense strand to SEQ ID NO: 1508256
gcuaacacggugaaaucac

SEQ ID NO: 1508258 - RNA, 19 nt, Artificial Sequence
  Description of Artificial Sequence: Synthetic oligonucleotide
  Sense strand starting at position 1043 of SEQ ID NO: 1244697
auguuugucgcuuuaguca

SEQ ID NO: 1508259 - RNA, 19 nt, Artificial Sequence
  Description of Artificial Sequence: Synthetic oligonucleotide
  Antisense strand to SEQ ID NO: 1508258
ugacuaaagcgacaaacau

SEQ ID NO: 1508260 - RNA, 19 nt, Artificial Sequence
  Description of Artificial Sequence: Synthetic oligonucleotide
  Sense strand starting at position 1151 of SEQ ID NO: 1244697
gugaacauccaacgaucua

SEQ ID NO: 1508261 - RNA, 19 nt, Artificial Sequence
  Description of Artificial Sequence: Synthetic oligonucleotide
  Antisense strand to SEQ ID NO: 1508260
uagaucguuggauguucac

SEQ ID NO: 1508262 - RNA, 19 nt, Artificial Sequence
  Description of Artificial Sequence: Synthetic oligonucleotide
  Sense strand starting at position 2049 of SEQ ID NO: 1244697
ccaguuuccguguagauga

SEQ ID NO: 1508263 - RNA, 19 nt, Artificial Sequence
  Description of Artificial Sequence: Synthetic oligonucleotide
  Antisense strand to SEQ ID NO: 1508262
ucaucuacacggaaacugg

SEQ ID NO: 1508264 - RNA, 19 nt, Artificial Sequence
  Description of Artificial Sequence: Synthetic oligonucleotide
  Sense strand starting at position 2054 of SEQ ID NO: 1244697
uuccguguagaugaucuau

SEQ ID NO: 1508265 - RNA, 19 nt, Artificial Sequence
  Description of Artificial Sequence: Synthetic oligonucleotide
  Antisense strand to SEQ ID NO: 1508264
auagaucaucuacacggaa

SEQ ID NO: 1508266 - RNA, 19 nt, Artificial Sequence
  Description of Artificial Sequence: Synthetic oligonucleotide
  Sense strand starting at position 2056 of SEQ ID NO: 1244697
ccguguagaugaucuauuu

SEQ ID NO: 1508267 - RNA, 19 nt, Artificial Sequence
  Description of Artificial Sequence: Synthetic oligonucleotide
  Antisense strand to SEQ ID NO: 1508266
aaauagaucaucuacacgg

SEQ ID NO: 1508268 - RNA, 19 nt, Artificial Sequence
  Description of Artificial Sequence: Synthetic oligonucleotide
  Sense strand starting at position 2163 of SEQ ID NO: 1244697
gcgggauuuaggcauuguu

SEQ ID NO: 1508269 - RNA, 19 nt, Artificial Sequence
  Description of Artificial Sequence: Synthetic oligonucleotide
  Antisense strand to SEQ ID NO: 1508268
aacaaugccuaaaucccgc

SEQ ID NO: 1508270 - RNA, 19 nt, Artificial Sequence
  Description of Artificial Sequence: Synthetic oligonucleotide
  Sense strand starting at position 2337 of SEQ ID NO: 1244697
aggguuagugguggguaaa

SEQ ID NO: 1508271 - RNA, 19 nt, Artificial Sequence
  Description of Artificial Sequence: Synthetic oligonucleotide
  Antisense strand to SEQ ID NO: 1508270
uuuacccaccacuaacccu

SEQ ID NO: 1508272 - RNA, 19 nt, Artificial Sequence
  Description of Artificial Sequence: Synthetic oligonucleotide
  Sense strand starting at position 2338 of SEQ ID NO: 1244697
ggguuagugguggguaaac

SEQ ID NO: 1508273 - RNA, 19 nt, Artificial Sequence
  Description of Artificial Sequence: Synthetic oligonucleotide
  Antisense strand to SEQ ID NO: 1508272
guuuacccaccacuaaccc

SEQ ID NO: 1508274 - RNA, 19 nt, Artificial Sequence
  Description of Artificial Sequence: Synthetic oligonucleotide
  Sense strand starting at position 2373 of SEQ ID NO: 1244697
aggacucucuugcuuuaau

SEQ ID NO: 1508275 - RNA, 19 nt, Artificial Sequence
  Description of Artificial Sequence: Synthetic oligonucleotide
  Antisense strand to SEQ ID NO: 1508274
auuaaagcaagagaguccu

SEQ ID NO: 1508276 - RNA, 19 nt, Artificial Sequence
  Description of Artificial Sequence: Synthetic oligonucleotide
  Sense strand starting at position 2374 of SEQ ID NO: 1244697
ggacucucuugcuuuaaug

SEQ ID NO: 1508277 - RNA, 19 nt, Artificial Sequence
  Description of Artificial Sequence: Synthetic oligonucleotide
  Antisense strand to SEQ ID NO: 1508276
cauuaaagcaagagagucc

SEQ ID NO: 1508278 - RNA, 19 nt, Artificial Sequence
  Description of Artificial Sequence: Synthetic oligonucleotide
  Sense strand starting at position 2516 of SEQ ID NO: 1244697
aagccuggaucccugagaa

SEQ ID NO: 1508279 - RNA, 19 nt, Artificial Sequence
  Description of Artificial Sequence: Synthetic oligonucleotide
  Antisense strand to SEQ ID NO: 1508278
uucucagggauccaggcuu

SEQ ID NO: 1508280 - RNA, 19 nt, Artificial Sequence
  Description of Artificial Sequence: Synthetic oligonucleotide
  Sense strand starting at position 2585 of SEQ ID NO: 1244697
ucauuucuguagugggaac

SEQ ID NO: 1508281 - RNA, 19 nt, Artificial Sequence
  Description of Artificial Sequence: Synthetic oligonucleotide
  Antisense strand to SEQ ID NO: 1508280
guucccacuacagaaauga

SEQ ID NO: 1508282 - RNA, 19 nt, Artificial Sequence
  Description of Artificial Sequence: Synthetic oligonucleotide
  Sense strand starting at position 2977 of SEQ ID NO: 1244697
ccuugaaaccguggacuca

SEQ ID NO: 1508283 - RNA, 19 nt, Artificial Sequence
  Description of Artificial Sequence: Synthetic oligonucleotide
  Antisense strand to SEQ ID NO: 1508282
ugaguccacgguuucaagg

SEQ ID NO: 1508284 - RNA, 19 nt, Artificial Sequence
  Description of Artificial Sequence: Synthetic oligonucleotide
  Sense strand starting at position 3048 of SEQ ID NO: 1244697
gagggagguguguagucuu

SEQ ID NO: 1508285 - RNA, 19 nt, Artificial Sequence
  Description of Artificial Sequence: Synthetic oligonucleotide
  Antisense strand to SEQ ID NO: 1508284
aagacuacacaccucccuc

SEQ ID NO: 1508286 - RNA, 19 nt, Artificial Sequence
  Description of Artificial Sequence: Synthetic oligonucleotide
  Sense strand starting at position 3051 of SEQ ID NO: 1244697
ggagguguguagucuuaaa

SEQ ID NO: 1508287 - RNA, 19 nt, Artificial Sequence
  Description of Artificial Sequence: Synthetic oligonucleotide
  Antisense strand to SEQ ID NO: 1508286
uuuaagacuacacaccucc

SEQ ID NO: 1508288 - RNA, 19 nt, Artificial Sequence
  Description of Artificial Sequence: Synthetic oligonucleotide
  Sense strand starting at position 3186 of SEQ ID NO: 1244697
cagaaauugcuguggcugu

SEQ ID NO: 1508289 - RNA, 19 nt, Artificial Sequence
  Description of Artificial Sequence: Synthetic oligonucleotide
  Antisense strand to SEQ ID NO: 1508288
acagccacagcaauuucug

SEQ ID NO: 1508290 - RNA, 19 nt, Artificial Sequence
  Description of Artificial Sequence: Synthetic oligonucleotide
  Sense strand starting at position 3190 of SEQ ID NO: 1244697
aauugcuguggcuguauua

SEQ ID NO: 1508291 - RNA, 19 nt, Artificial Sequence
  Description of Artificial Sequence: Synthetic oligonucleotide
  Antisense strand to SEQ ID NO: 1508290
uaauacagccacagcaauu

SEQ ID NO: 1508292 - RNA, 19 nt, Artificial Sequence
  Description of Artificial Sequence: Synthetic oligonucleotide
  Sense strand starting at position 3199 of SEQ ID NO: 1244697
ggcuguauuacauagugau

SEQ ID NO: 1508293 - RNA, 19 nt, Artificial Sequence
  Description of Artificial Sequence: Synthetic oligonucleotide
  Antisense strand to SEQ ID NO: 1508292
aucacuauguaauacagcc

SEQ ID NO: 1508294 - RNA, 19 nt, Artificial Sequence
  Description of Artificial Sequence: Synthetic oligonucleotide
  Sense strand starting at position 3214 of SEQ ID NO: 1244697
ugauuaagaacucgggucu

SEQ ID NO: 1508295 - RNA, 19 nt, Artificial Sequence
  Description of Artificial Sequence: Synthetic oligonucleotide
  Antisense strand to SEQ ID NO: 1508294
agacccgaguucuuaauca

SEQ ID NO: 1508296 - RNA, 19 nt, Artificial Sequence
  Description of Artificial Sequence: Synthetic oligonucleotide
  Sense strand starting at position 3215 of SEQ ID NO: 1244697
gauuaagaacucgggucuu

SEQ ID NO: 1508297 - RNA, 19 nt, Artificial Sequence
  Description of Artificial Sequence: Synthetic oligonucleotide
  Antisense strand to SEQ ID NO: 1508296
aagacccgaguucuuaauc

SEQ ID NO: 1508298 - RNA, 19 nt, Artificial Sequence
  Description of Artificial Sequence: Synthetic oligonucleotide
  Sense strand starting at position 3221 of SEQ ID NO: 1244697
gaacucgggucuuuagaau

SEQ ID NO: 1508299 - RNA, 19 nt, Artificial Sequence
  Description of Artificial Sequence: Synthetic oligonucleotide
  Antisense strand to SEQ ID NO: 1508298
auucuaaagacccgaguuc

SEQ ID NO: 1508300 - RNA, 19 nt, Artificial Sequence
  Description of Artificial Sequence: Synthetic oligonucleotide
  Sense strand starting at position 3626 of SEQ ID NO: 1244697
gaugcugaaucucucaguu

SEQ ID NO: 1508301 - RNA, 19 nt, Artificial Sequence
  Description of Artificial Sequence: Synthetic oligonucleotide
  Antisense strand to SEQ ID NO: 1508300
aacugagagauucagcauc

SEQ ID NO: 1508302 - RNA, 19 nt, Artificial Sequence
  Description of Artificial Sequence: Synthetic oligonucleotide
  Sense strand starting at position 3630 of SEQ ID NO: 1244697
cugaaucucucaguugguu

SEQ ID NO: 1508303 - RNA, 19 nt, Artificial Sequence
  Description of Artificial Sequence: Synthetic oligonucleotide
  Antisense strand to SEQ ID NO: 1508302
aaccaacugagagauucag

SEQ ID NO: 1508304 - RNA, 19 nt, Artificial Sequence
  Description of Artificial Sequence: Synthetic oligonucleotide
  Sense strand starting at position 3667 of SEQ ID NO: 1244697
ggauaauaguaccuacuau

SEQ ID NO: 1508305 - RNA, 19 nt, Artificial Sequence
  Description of Artificial Sequence: Synthetic oligonucleotide
  Antisense strand to SEQ ID NO: 1508304
auaguagguacuauuaucc

SEQ ID NO: 1508306 - RNA, 19 nt, Artificial Sequence
  Description of Artificial Sequence: Synthetic oligonucleotide
  Sense strand starting at position 3681 of SEQ ID NO: 1244697
acuauuaagcguugcccaa

SEQ ID NO: 1508307 - RNA, 19 nt, Artificial Sequence
  Description of Artificial Sequence: Synthetic oligonucleotide
  Antisense strand to SEQ ID NO: 1508306
uugggcaacgcuuaauagu

SEQ ID NO: 1508308 - RNA, 19 nt, Artificial Sequence
  Description of Artificial Sequence: Synthetic oligonucleotide
  Sense strand starting at position 3734 of SEQ ID NO: 1244697
cuuaguuuaugugcugaca

SEQ ID NO: 1508309 - RNA, 19 nt, Artificial Sequence
  Description of Artificial Sequence: Synthetic oligonucleotide
  Antisense strand to SEQ ID NO: 1508308
ugucagcacauaaacuaag

SEQ ID NO: 1508310 - RNA, 19 nt, Artificial Sequence
  Description of Artificial Sequence: Synthetic oligonucleotide
  Sense strand starting at position 3757 of SEQ ID NO: 1244697
gcaggagccaaguaauauu

SEQ ID NO: 1508311 - RNA, 19 nt, Artificial Sequence
  Description of Artificial Sequence: Synthetic oligonucleotide
  Antisense strand to SEQ ID NO: 1508310
aauauuacuuggcuccugc

SEQ ID NO: 1508312 - RNA, 19 nt, Artificial Sequence
  Description of Artificial Sequence: Synthetic oligonucleotide
  Sense strand starting at position 3775 of SEQ ID NO: 1244697
uagcuuagcuggucuuauu

SEQ ID NO: 1508313 - RNA, 19 nt, Artificial Sequence
  Description of Artificial Sequence: Synthetic oligonucleotide
  Antisense strand to SEQ ID NO: 1508312
aauaagaccagcuaagcua

SEQ ID NO: 1508314 - RNA, 19 nt, Artificial Sequence
  Description of Artificial Sequence: Synthetic oligonucleotide
  Sense strand starting at position 3783 of SEQ ID NO: 1244697
cuggucuuauugguguuau

SEQ ID NO: 1508315 - RNA, 19 nt, Artificial Sequence
  Description of Artificial Sequence: Synthetic oligonucleotide
  Antisense strand to SEQ ID NO: 1508314
auaacaccaauaagaccag

SEQ ID NO: 1508316 - RNA, 19 nt, Artificial Sequence
  Description of Artificial Sequence: Synthetic oligonucleotide
  Sense strand starting at position 629 of SEQ ID NO: 1244698
gaaacugaggcguggguua

SEQ ID NO: 1508317 - RNA, 19 nt, Artificial Sequence
  Description of Artificial Sequence: Synthetic oligonucleotide
  Antisense strand to SEQ ID NO: 1508316
uaacccacgccucaguuuc

SEQ ID NO: 1508318 - RNA, 19 nt, Artificial Sequence
  Description of Artificial Sequence: Synthetic oligonucleotide
  Sense strand starting at position 777 of SEQ ID NO: 1244698
ggcuguuagucauugccca

SEQ ID NO: 1508319 - RNA, 19 nt, Artificial Sequence
  Description of Artificial Sequence: Synthetic oligonucleotide
  Antisense strand to SEQ ID NO: 1508318
ugggcaaugacuaacagcc

SEQ ID NO: 1508320 - RNA, 19 nt, Artificial Sequence
  Description of Artificial Sequence: Synthetic oligonucleotide
  Sense strand starting at position 778 of SEQ ID NO: 1244698
gcuguuagucauugcccaa

SEQ ID NO: 1508321 - RNA, 19 nt, Artificial Sequence
  Description of Artificial Sequence: Synthetic oligonucleotide
  Antisense strand to SEQ ID NO: 1508320
uugggcaaugacuaacagc

SEQ ID NO: 1508322 - RNA, 19 nt, Artificial Sequence
  Description of Artificial Sequence: Synthetic oligonucleotide
  Sense strand starting at position 948 of SEQ ID NO: 1244698
cgcggaccgagcuauuuau

SEQ ID NO: 1508323 - RNA, 19 nt, Artificial Sequence
  Description of Artificial Sequence: Synthetic oligonucleotide
  Antisense strand to SEQ ID NO: 1508322
auaaauagcucgguccgcg

SEQ ID NO: 1508324 - RNA, 19 nt, Artificial Sequence
  Description of Artificial Sequence: Synthetic oligonucleotide
  Sense strand starting at position 2245 of SEQ ID NO: 1244698
cuuuguuggccuggaccaa

SEQ ID NO: 1508325 - RNA, 19 nt, Artificial Sequence
  Description of Artificial Sequence: Synthetic oligonucleotide
  Antisense strand to SEQ ID NO: 1508324
uugguccaggccaacaaag

SEQ ID NO: 1508326 - RNA, 19 nt, Artificial Sequence
  Description of Artificial Sequence: Synthetic oligonucleotide
  Sense strand starting at position 2261 of SEQ ID NO: 1244698
caaggagucuaguugucag

SEQ ID NO: 1508327 - RNA, 19 nt, Artificial Sequence
  Description of Artificial Sequence: Synthetic oligonucleotide
  Antisense strand to SEQ ID NO: 1508326
cugacaacuagacuccuug

SEQ ID NO: 1508328 - RNA, 19 nt, Artificial Sequence
  Description of Artificial Sequence: Synthetic oligonucleotide
  Sense strand starting at position 2510 of SEQ ID NO: 1244698
gccuguucuuucuauguaa

SEQ ID NO: 1508329 - RNA, 19 nt, Artificial Sequence
  Description of Artificial Sequence: Synthetic oligonucleotide
  Antisense strand to SEQ ID NO: 1508328
uuacauagaaagaacaggc

SEQ ID NO: 1508330 - RNA, 19 nt, Artificial Sequence
  Description of Artificial Sequence: Synthetic oligonucleotide
  Sense strand starting at position 2512 of SEQ ID NO: 1244698
cuguucuuucuauguaaug

SEQ ID NO: 1508331 - RNA, 19 nt, Artificial Sequence
  Description of Artificial Sequence: Synthetic oligonucleotide
  Antisense strand to SEQ ID NO: 1508330
cauuacauagaaagaacag

SEQ ID NO: 1508332 - RNA, 19 nt, Artificial Sequence
  Description of Artificial Sequence: Synthetic oligonucleotide
  Sense strand starting at position 2513 of SEQ ID NO: 1244698
uguucuuucuauguaaugu

SEQ ID NO: 1508333 - RNA, 19 nt, Artificial Sequence
  Description of Artificial Sequence: Synthetic oligonucleotide
  Antisense strand to SEQ ID NO: 1508332
acauuacauagaaagaaca

SEQ ID NO: 1508334 - RNA, 19 nt, Artificial Sequence
  Description of Artificial Sequence: Synthetic oligonucleotide
  Sense strand starting at position 2517 of SEQ ID NO: 1244698
cuuucuauguaauguuaca

SEQ ID NO: 1508335 - RNA, 19 nt, Artificial Sequence
  Description of Artificial Sequence: Synthetic oligonucleotide
  Antisense strand to SEQ ID NO: 1508334
uguaacauuacauagaaag

SEQ ID NO: 1508336 - RNA, 19 nt, Artificial Sequence
  Description of Artificial Sequence: Synthetic oligonucleotide
  Sense strand starting at position 2694 of SEQ ID NO: 1244698
ugaagacucuacuuaguug

SEQ ID NO: 1508337 - RNA, 19 nt, Artificial Sequence
  Description of Artificial Sequence: Synthetic oligonucleotide
  Antisense strand to SEQ ID NO: 1508336
caacuaaguagagucuuca

SEQ ID NO: 1508338 - RNA, 19 nt, Artificial Sequence
  Description of Artificial Sequence: Synthetic oligonucleotide
  Sense strand starting at position 2860 of SEQ ID NO: 1244698
aucaguuucugaggaggga

SEQ ID NO: 1508339 - RNA, 19 nt, Artificial Sequence
  Description of Artificial Sequence: Synthetic oligonucleotide
  Antisense strand to SEQ ID NO: 1508338
ucccuccucagaaacugau

SEQ ID NO: 1508340 - RNA, 19 nt, Artificial Sequence
  Description of Artificial Sequence: Synthetic oligonucleotide
  Sense strand starting at position 2974 of SEQ ID NO: 1244698
aucccagauuguugaguca

SEQ ID NO: 1508341 - RNA, 19 nt, Artificial Sequence
  Description of Artificial Sequence: Synthetic oligonucleotide
  Antisense strand to SEQ ID NO: 1508340
ugacucaacaaucugggau

SEQ ID NO: 1508342 - RNA, 19 nt, Artificial Sequence
  Description of Artificial Sequence: Synthetic oligonucleotide
  Sense strand starting at position 3210 of SEQ ID NO: 1244698
ugggaagacgcccagucau

SEQ ID NO: 1508343 - RNA, 19 nt, Artificial Sequence
  Description of Artificial Sequence: Synthetic oligonucleotide
  Antisense strand to SEQ ID NO: 1508342
augacugggcgucuuccca

SEQ ID NO: 1508344 - RNA, 19 nt, Artificial Sequence
  Description of Artificial Sequence: Synthetic oligonucleotide
  Sense strand starting at position 3412 of SEQ ID NO: 1244698
ggucaagucugugggcuuu

SEQ ID NO: 1508345 - RNA, 19 nt, Artificial Sequence
  Description of Artificial Sequence: Synthetic oligonucleotide
  Antisense strand to SEQ ID NO: 1508344
aaagcccacagacuugacc

SEQ ID NO: 1508346 - RNA, 19 nt, Artificial Sequence
  Description of Artificial Sequence: Synthetic oligonucleotide
  Sense strand starting at position 3449 of SEQ ID NO: 1244698
accacagaguggucacagu

SEQ ID NO: 1508347 - RNA, 19 nt, Artificial Sequence
  Description of Artificial Sequence: Synthetic oligonucleotide
  Antisense strand to SEQ ID NO: 1508346
acugugaccacucuguggu

SEQ ID NO: 1508348 - RNA, 19 nt, Artificial Sequence
  Description of Artificial Sequence: Synthetic oligonucleotide
  Sense strand starting at position 3456 of SEQ ID NO: 1244698
aguggucacagugauguga

SEQ ID NO: 1508349 - RNA, 19 nt, Artificial Sequence
  Description of Artificial Sequence: Synthetic oligonucleotide
  Antisense strand to SEQ ID NO: 1508348
ucacaucacugugaccacu

SEQ ID NO: 1508350 - RNA, 19 nt, Artificial Sequence
  Description of Artificial Sequence: Synthetic oligonucleotide
  Sense strand starting at position 3506 of SEQ ID NO: 1244698
cagguuguuacccagagga

SEQ ID NO: 1508351 - RNA, 19 nt, Artificial Sequence
  Description of Artificial Sequence: Synthetic oligonucleotide
  Antisense strand to SEQ ID NO: 1508350
uccucuggguaacaaccug

SEQ ID NO: 1508352 - RNA, 19 nt, Artificial Sequence
  Description of Artificial Sequence: Synthetic oligonucleotide
  Sense strand starting at position 3803 of SEQ ID NO: 1244698
ccacuuugguuucggguaa

SEQ ID NO: 1508353 - RNA, 19 nt, Artificial Sequence
  Description of Artificial Sequence: Synthetic oligonucleotide
  Antisense strand to SEQ ID NO: 1508352
uuacccgaaaccaaagugg

SEQ ID NO: 1508354 - RNA, 19 nt, Artificial Sequence
  Description of Artificial Sequence: Synthetic oligonucleotide
  Sense strand starting at position 3807 of SEQ ID NO: 1244698
uuugguuucggguaagaug

SEQ ID NO: 1508355 - RNA, 19 nt, Artificial Sequence
  Description of Artificial Sequence: Synthetic oligonucleotide
  Antisense strand to SEQ ID NO: 1508354
caucuuacccgaaaccaaa

SEQ ID NO: 1508356 - RNA, 19 nt, Artificial Sequence
  Description of Artificial Sequence: Synthetic oligonucleotide
  Sense strand starting at position 3859 of SEQ ID NO: 1244698
cuggaugugucagagacag

SEQ ID NO: 1508357 - RNA, 19 nt, Artificial Sequence
  Description of Artificial Sequence: Synthetic oligonucleotide
  Antisense strand to SEQ ID NO: 1508356
cugucucugacacauccag

SEQ ID NO: 1508358 - RNA, 19 nt, Artificial Sequence
  Description of Artificial Sequence: Synthetic oligonucleotide
  Sense strand starting at position 9 of SEQ ID NO: 1244699
cgcucauacugguauuguu

SEQ ID NO: 1508359 - RNA, 19 nt, Artificial Sequence
  Description of Artificial Sequence: Synthetic oligonucleotide
  Antisense strand to SEQ ID NO: 1508358
aacaauaccaguaugagcg

SEQ ID NO: 1508360 - RNA, 19 nt, Artificial Sequence
  Description of Artificial Sequence: Synthetic oligonucleotide
  Sense strand starting at position 12 of SEQ ID NO: 1244699
ucauacugguauuguuuaa

SEQ ID NO: 1508361 - RNA, 19 nt, Artificial Sequence
  Description of Artificial Sequence: Synthetic oligonucleotide
  Antisense strand to SEQ ID NO: 1508360
uuaaacaauaccaguauga

SEQ ID NO: 1508362 - RNA, 19 nt, Artificial Sequence
  Description of Artificial Sequence: Synthetic oligonucleotide
  Sense strand starting at position 35 of SEQ ID NO: 1244699
ucccuaagaugacaguaua

SEQ ID NO: 1508363 - RNA, 19 nt, Artificial Sequence
  Description of Artificial Sequence: Synthetic oligonucleotide
  Antisense strand to SEQ ID NO: 1508362
uauacugucaucuuaggga

SEQ ID NO: 1508364 - RNA, 19 nt, Artificial Sequence
  Description of Artificial Sequence: Synthetic oligonucleotide
  Sense strand starting at position 400 of SEQ ID NO: 1244699
auaugcacuugaggaauga

SEQ ID NO: 1508365 - RNA, 19 nt, Artificial Sequence
  Description of Artificial Sequence: Synthetic oligonucleotide
  Antisense strand to SEQ ID NO: 1508364
ucauuccucaagugcauau

SEQ ID NO: 1508366 - RNA, 19 nt, Artificial Sequence
  Description of Artificial Sequence: Synthetic oligonucleotide
  Sense strand starting at position 404 of SEQ ID NO: 1244699
gcacuugaggaaugaaacu

SEQ ID NO: 1508367 - RNA, 19 nt, Artificial Sequence
  Description of Artificial Sequence: Synthetic oligonucleotide
  Antisense strand to SEQ ID NO: 1508366
aguuucauuccucaagugc

SEQ ID NO: 1508368 - RNA, 19 nt, Artificial Sequence
  Description of Artificial Sequence: Synthetic oligonucleotide
  Sense strand starting at position 773 of SEQ ID NO: 1244699
cugaauuagugucaaggag

SEQ ID NO: 1508369 - RNA, 19 nt, Artificial Sequence
  Description of Artificial Sequence: Synthetic oligonucleotide
  Antisense strand to SEQ ID NO: 1508368
cuccuugacacuaauucag

SEQ ID NO: 1508370 - RNA, 19 nt, Artificial Sequence
  Description of Artificial Sequence: Synthetic oligonucleotide
  Sense strand starting at position 897 of SEQ ID NO: 1244699
gggccaucuucugugucaa

SEQ ID NO: 1508371 - RNA, 19 nt, Artificial Sequence
  Description of Artificial Sequence: Synthetic oligonucleotide
  Antisense strand to SEQ ID NO: 1508370
uugacacagaagauggccc

SEQ ID NO: 1508372 - RNA, 19 nt, Artificial Sequence
  Description of Artificial Sequence: Synthetic oligonucleotide
  Sense strand starting at position 898 of SEQ ID NO: 1244699
ggccaucuucugugucaag

SEQ ID NO: 1508373 - RNA, 19 nt, Artificial Sequence
  Description of Artificial Sequence: Synthetic oligonucleotide
  Antisense strand to SEQ ID NO: 1508372
cuugacacagaagauggcc

SEQ ID NO: 1508374 - RNA, 19 nt, Artificial Sequence
  Description of Artificial Sequence: Synthetic oligonucleotide
  Sense strand starting at position 899 of SEQ ID NO: 1244699
gccaucuucugugucaaga

SEQ ID NO: 1508375 - RNA, 19 nt, Artificial Sequence
  Description of Artificial Sequence: Synthetic oligonucleotide
  Antisense strand to SEQ ID NO: 1508374
ucuugacacagaagauggc

SEQ ID NO: 1508376 - RNA, 19 nt, Artificial Sequence
  Description of Artificial Sequence: Synthetic oligonucleotide
  Sense strand starting at position 901 of SEQ ID NO: 1244699
caucuucugugucaagaug

SEQ ID NO: 1508377 - RNA, 19 nt, Artificial Sequence
  Description of Artificial Sequence: Synthetic oligonucleotide
  Antisense strand to SEQ ID NO: 1508376
caucuugacacagaagaug

SEQ ID NO: 1508378 - RNA, 19 nt, Artificial Sequence
  Description of Artificial Sequence: Synthetic oligonucleotide
  Sense strand starting at position 909 of SEQ ID NO: 1244699
gugucaagaugaggcauuu

SEQ ID NO: 1508379 - RNA, 19 nt, Artificial Sequence
  Description of Artificial Sequence: Synthetic oligonucleotide
  Antisense strand to SEQ ID NO: 1508378
aaaugccucaucuugacac

SEQ ID NO: 1508380 - RNA, 19 nt, Artificial Sequence
  Description of Artificial Sequence: Synthetic oligonucleotide
  Sense strand starting at position 995 of SEQ ID NO: 1244699
cugaaauggcuccaggagu

SEQ ID NO: 1508381 - RNA, 19 nt, Artificial Sequence
  Description of Artificial Sequence: Synthetic oligonucleotide
  Antisense strand to SEQ ID NO: 1508380
acuccuggagccauuucag

SEQ ID NO: 1508382 - RNA, 19 nt, Artificial Sequence
  Description of Artificial Sequence: Synthetic oligonucleotide
  Sense strand starting at position 1187 of SEQ ID NO: 1244699
cccgguguuccagggacaa

SEQ ID NO: 1508383 - RNA, 19 nt, Artificial Sequence
  Description of Artificial Sequence: Synthetic oligonucleotide
  Antisense strand to SEQ ID NO: 1508382
uugucccuggaacaccggg

SEQ ID NO: 1508384 - RNA, 19 nt, Artificial Sequence
  Description of Artificial Sequence: Synthetic oligonucleotide
  Sense strand starting at position 1356 of SEQ ID NO: 1244699
uggccucugggaugagaaa

SEQ ID NO: 1508385 - RNA, 19 nt, Artificial Sequence
  Description of Artificial Sequence: Synthetic oligonucleotide
  Antisense strand to SEQ ID NO: 1508384
uuucucaucccagaggcca

SEQ ID NO: 1508386 - RNA, 19 nt, Artificial Sequence
  Description of Artificial Sequence: Synthetic oligonucleotide
  Sense strand starting at position 1365 of SEQ ID NO: 1244699
ggaugagaaagcugaucuc

SEQ ID NO: 1508387 - RNA, 19 nt, Artificial Sequence
  Description of Artificial Sequence: Synthetic oligonucleotide
  Antisense strand to SEQ ID NO: 1508386
gagaucagcuuucucaucc

SEQ ID NO: 1508388 - RNA, 19 nt, Artificial Sequence
  Description of Artificial Sequence: Synthetic oligonucleotide
  Sense strand starting at position 1368 of SEQ ID NO: 1244699
ugagaaagcugaucuccca

SEQ ID NO: 1508389 - RNA, 19 nt, Artificial Sequence
  Description of Artificial Sequence: Synthetic oligonucleotide
  Antisense strand to SEQ ID NO: 1508388
ugggagaucagcuuucuca

SEQ ID NO: 1508390 - RNA, 19 nt, Artificial Sequence
  Description of Artificial Sequence: Synthetic oligonucleotide
  Sense strand starting at position 1477 of SEQ ID NO: 1244699
gggaaagucccuugcagga

SEQ ID NO: 1508391 - RNA, 19 nt, Artificial Sequence
  Description of Artificial Sequence: Synthetic oligonucleotide
  Antisense strand to SEQ ID NO: 1508390
uccugcaagggacuuuccc

SEQ ID NO: 1508392 - RNA, 19 nt, Artificial Sequence
  Description of Artificial Sequence: Synthetic oligonucleotide
  Sense strand starting at position 1590 of SEQ ID NO: 1244699
cuggcuuuagaccaggauu

SEQ ID NO: 1508393 - RNA, 19 nt, Artificial Sequence
  Description of Artificial Sequence: Synthetic oligonucleotide
  Antisense strand to SEQ ID NO: 1508392
aauccuggucuaaagccag

SEQ ID NO: 1508394 - RNA, 19 nt, Artificial Sequence
  Description of Artificial Sequence: Synthetic oligonucleotide
  Sense strand starting at position 1593 of SEQ ID NO: 1244699
gcuuuagaccaggauucga

SEQ ID NO: 1508395 - RNA, 19 nt, Artificial Sequence
  Description of Artificial Sequence: Synthetic oligonucleotide
  Antisense strand to SEQ ID NO: 1508394
ucgaauccuggucuaaagc

SEQ ID NO: 1508396 - RNA, 19 nt, Artificial Sequence
  Description of Artificial Sequence: Synthetic oligonucleotide
  Sense strand starting at position 1603 of SEQ ID NO: 1244699
aggauucgaccaugaaguc

SEQ ID NO: 1508397 - RNA, 19 nt, Artificial Sequence
  Description of Artificial Sequence: Synthetic oligonucleotide
  Antisense strand to SEQ ID NO: 1508396
gacuucauggucgaauccu

SEQ ID NO: 1508398 - RNA, 19 nt, Artificial Sequence
  Description of Artificial Sequence: Synthetic oligonucleotide
  Sense strand starting at position 2065 of SEQ ID NO: 1244699
aaggguaauucguuuccuu

SEQ ID NO: 1508399 - RNA, 19 nt, Artificial Sequence
  Description of Artificial Sequence: Synthetic oligonucleotide
  Antisense strand to SEQ ID NO: 1508398
aaggaaacgaauuacccuu

SEQ ID NO: 1508400 - RNA, 19 nt, Artificial Sequence
  Description of Artificial Sequence: Synthetic oligonucleotide
  Sense strand starting at position 2600 of SEQ ID NO: 1244699
gucucagagcuuugaagac

SEQ ID NO: 1508401 - RNA, 19 nt, Artificial Sequence
  Description of Artificial Sequence: Synthetic oligonucleotide
  Antisense strand to SEQ ID NO: 1508400
gucuucaaagcucugagac

SEQ ID NO: 1508402 - RNA, 19 nt, Artificial Sequence
  Description of Artificial Sequence: Synthetic oligonucleotide
  Sense strand starting at position 413 of SEQ ID NO: 1244700
aggagccuguccucugaga

SEQ ID NO: 1508403 - RNA, 19 nt, Artificial Sequence
  Description of Artificial Sequence: Synthetic oligonucleotide
  Antisense strand to SEQ ID NO: 1508402
ucucagaggacaggcuccu

SEQ ID NO: 1508404 - RNA, 19 nt, Artificial Sequence
  Description of Artificial Sequence: Synthetic oligonucleotide
  Sense strand starting at position 1189 of SEQ ID NO: 1244700
cagauuaccuccugggaca

SEQ ID NO: 1508405 - RNA, 19 nt, Artificial Sequence
  Description of Artificial Sequence: Synthetic oligonucleotide
  Antisense strand to SEQ ID NO: 1508404
ugucccaggagguaaucug

SEQ ID NO: 1508406 - RNA, 19 nt, Artificial Sequence
  Description of Artificial Sequence: Synthetic oligonucleotide
  Sense strand starting at position 1295 of SEQ ID NO: 1244700
ccaugauucuggcagcaga

SEQ ID NO: 1508407 - RNA, 19 nt, Artificial Sequence
  Description of Artificial Sequence: Synthetic oligonucleotide
  Antisense strand to SEQ ID NO: 1508406
ucugcugccagaaucaugg

SEQ ID NO: 1508408 - RNA, 19 nt, Artificial Sequence
  Description of Artificial Sequence: Synthetic oligonucleotide
  Sense strand starting at position 1372 of SEQ ID NO: 1244700
caggucucucccggucuaa

SEQ ID NO: 1508409 - RNA, 19 nt, Artificial Sequence
  Description of Artificial Sequence: Synthetic oligonucleotide
  Antisense strand to SEQ ID NO: 1508408
uuagaccgggagagaccug

SEQ ID NO: 1508410 - RNA, 19 nt, Artificial Sequence
  Description of Artificial Sequence: Synthetic oligonucleotide
  Sense strand starting at position 1384 of SEQ ID NO: 1244700
ggucuaaaucuagguggag

SEQ ID NO: 1508411 - RNA, 19 nt, Artificial Sequence
  Description of Artificial Sequence: Synthetic oligonucleotide
  Antisense strand to SEQ ID NO: 1508410
cuccaccuagauuuagacc

SEQ ID NO: 1508412 - RNA, 19 nt, Artificial Sequence
  Description of Artificial Sequence: Synthetic oligonucleotide
  Sense strand starting at position 1643 of SEQ ID NO: 1244700
ugacuccuccagugagauc

SEQ ID NO: 1508413 - RNA, 19 nt, Artificial Sequence
  Description of Artificial Sequence: Synthetic oligonucleotide
  Antisense strand to SEQ ID NO: 1508412
gaucucacuggaggaguca

SEQ ID NO: 1508414 - RNA, 19 nt, Artificial Sequence
  Description of Artificial Sequence: Synthetic oligonucleotide
  Sense strand starting at position 1784 of SEQ ID NO: 1244700
uggugucccuuucuaaacu

SEQ ID NO: 1508415 - RNA, 19 nt, Artificial Sequence
  Description of Artificial Sequence: Synthetic oligonucleotide
  Antisense strand to SEQ ID NO: 1508414
aguuuagaaagggacacca

SEQ ID NO: 1508416 - RNA, 19 nt, Artificial Sequence
  Description of Artificial Sequence: Synthetic oligonucleotide
  Sense strand starting at position 1807 of SEQ ID NO: 1244700
gagcucagcucguuugagu

SEQ ID NO: 1508417 - RNA, 19 nt, Artificial Sequence
  Description of Artificial Sequence: Synthetic oligonucleotide
  Antisense strand to SEQ ID NO: 1508416
acucaaacgagcugagcuc

SEQ ID NO: 1508418 - RNA, 19 nt, Artificial Sequence
  Description of Artificial Sequence: Synthetic oligonucleotide
  Sense strand starting at position 1814 of SEQ ID NO: 1244700
gcucguuugagucaaguug

SEQ ID NO: 1508419 - RNA, 19 nt, Artificial Sequence
  Description of Artificial Sequence: Synthetic oligonucleotide
  Antisense strand to SEQ ID NO: 1508418
caacuugacucaaacgagc

SEQ ID NO: 1508420 - RNA, 19 nt, Artificial Sequence
  Description of Artificial Sequence: Synthetic oligonucleotide
  Sense strand starting at position 2130 of SEQ ID NO: 1244700
cgucuuugccucuaaggca

SEQ ID NO: 1508421 - RNA, 19 nt, Artificial Sequence
  Description of Artificial Sequence: Synthetic oligonucleotide
  Antisense strand to SEQ ID NO: 1508420
ugccuuagaggcaaagacg

SEQ ID NO: 1508422 - RNA, 19 nt, Artificial Sequence
  Description of Artificial Sequence: Synthetic oligonucleotide
  Sense strand starting at position 2180 of SEQ ID NO: 1244700
ggaccuuugcugggagagu

SEQ ID NO: 1508423 - RNA, 19 nt, Artificial Sequence
  Description of Artificial Sequence: Synthetic oligonucleotide
  Antisense strand to SEQ ID NO: 1508422
acucucccagcaaaggucc

SEQ ID NO: 1508424 - RNA, 19 nt, Artificial Sequence
  Description of Artificial Sequence: Synthetic oligonucleotide
  Sense strand starting at position 2331 of SEQ ID NO: 1244700
gggcuuccuaaguguucca

SEQ ID NO: 1508425 - RNA, 19 nt, Artificial Sequence
  Description of Artificial Sequence: Synthetic oligonucleotide
  Antisense strand to SEQ ID NO: 1508424
uggaacacuuaggaagccc

SEQ ID NO: 1508426 - RNA, 19 nt, Artificial Sequence
  Description of Artificial Sequence: Synthetic oligonucleotide
  Sense strand starting at position 2334 of SEQ ID NO: 1244700
cuuccuaaguguuccacga

SEQ ID NO: 1508427 - RNA, 19 nt, Artificial Sequence
  Description of Artificial Sequence: Synthetic oligonucleotide
  Antisense strand to SEQ ID NO: 1508426
ucguggaacacuuaggaag

SEQ ID NO: 1508428 - RNA, 19 nt, Artificial Sequence
  Description of Artificial Sequence: Synthetic oligonucleotide
  Sense strand starting at position 2336 of SEQ ID NO: 1244700
uccuaaguguuccacgaag

SEQ ID NO: 1508429 - RNA, 19 nt, Artificial Sequence
  Description of Artificial Sequence: Synthetic oligonucleotide
  Antisense strand to SEQ ID NO: 1508428
cuucguggaacacuuagga

SEQ ID NO: 1508430 - RNA, 19 nt, Artificial Sequence
  Description of Artificial Sequence: Synthetic oligonucleotide
  Sense strand starting at position 2338 of SEQ ID NO: 1244700
cuaaguguuccacgaaguc

SEQ ID NO: 1508431 - RNA, 19 nt, Artificial Sequence
  Description of Artificial Sequence: Synthetic oligonucleotide
  Antisense strand to SEQ ID NO: 1508430
gacuucguggaacacuuag

SEQ ID NO: 1508432 - RNA, 19 nt, Artificial Sequence
  Description of Artificial Sequence: Synthetic oligonucleotide
  Sense strand starting at position 2347 of SEQ ID NO: 1244700
ccacgaagucacuguuacu

SEQ ID NO: 1508433 - RNA, 19 nt, Artificial Sequence
  Description of Artificial Sequence: Synthetic oligonucleotide
  Antisense strand to SEQ ID NO: 1508432
aguaacagugacuucgugg

SEQ ID NO: 1508434 - RNA, 19 nt, Artificial Sequence
  Description of Artificial Sequence: Synthetic oligonucleotide
  Sense strand starting at position 2353 of SEQ ID NO: 1244700
agucacuguuacugggaaa

SEQ ID NO: 1508435 - RNA, 19 nt, Artificial Sequence
  Description of Artificial Sequence: Synthetic oligonucleotide
  Antisense strand to SEQ ID NO: 1508434
uuucccaguaacagugacu

SEQ ID NO: 1508436 - RNA, 19 nt, Artificial Sequence
  Description of Artificial Sequence: Synthetic oligonucleotide
  Sense strand starting at position 2354 of SEQ ID NO: 1244700
gucacuguuacugggaaau

SEQ ID NO: 1508437 - RNA, 19 nt, Artificial Sequence
  Description of Artificial Sequence: Synthetic oligonucleotide
  Antisense strand to SEQ ID NO: 1508436
auuucccaguaacagugac

SEQ ID NO: 1508438 - RNA, 19 nt, Artificial Sequence
  Description of Artificial Sequence: Synthetic oligonucleotide
  Sense strand starting at position 2366 of SEQ ID NO: 1244700
gggaaaugcugcuugacga

SEQ ID NO: 1508439 - RNA, 19 nt, Artificial Sequence
  Description of Artificial Sequence: Synthetic oligonucleotide
  Antisense strand to SEQ ID NO: 1508438
ucgucaagcagcauuuccc

SEQ ID NO: 1508440 - RNA, 19 nt, Artificial Sequence
  Description of Artificial Sequence: Synthetic oligonucleotide
  Sense strand starting at position 2406 of SEQ ID NO: 1244700
ggcugucuggaugaugaca

SEQ ID NO: 1508441 - RNA, 19 nt, Artificial Sequence
  Description of Artificial Sequence: Synthetic oligonucleotide
  Antisense strand to SEQ ID NO: 1508440
ugucaucauccagacagcc

SEQ ID NO: 1508442 - RNA, 19 nt, Artificial Sequence
  Description of Artificial Sequence: Synthetic oligonucleotide
  Sense strand starting at position 2517 of SEQ ID NO: 1244700
cggaaccauuucugggaaa

SEQ ID NO: 1508443 - RNA, 19 nt, Artificial Sequence
  Description of Artificial Sequence: Synthetic oligonucleotide
  Antisense strand to SEQ ID NO: 1508442
uuucccagaaaugguuccg

SEQ ID NO: 1508444 - RNA, 19 nt, Artificial Sequence
  Description of Artificial Sequence: Synthetic oligonucleotide
  Sense strand starting at position 2518 of SEQ ID NO: 1244700
ggaaccauuucugggaaac

SEQ ID NO: 1508445 - RNA, 19 nt, Artificial Sequence
  Description of Artificial Sequence: Synthetic oligonucleotide
  Antisense strand to SEQ ID NO: 1508444
guuucccagaaaugguucc

SEQ ID NO: 1508446 - RNA, 19 nt, Artificial Sequence
  Description of Artificial Sequence: Synthetic oligonucleotide
  Sense strand starting at position 2676 of SEQ ID NO: 1244700
cgcucauacugguauuguu

SEQ ID NO: 1508447 - RNA, 19 nt, Artificial Sequence
  Description of Artificial Sequence: Synthetic oligonucleotide
  Antisense strand to SEQ ID NO: 1508446
aacaauaccaguaugagcg

SEQ ID NO: 1508448 - RNA, 19 nt, Artificial Sequence
  Description of Artificial Sequence: Synthetic oligonucleotide
  Sense strand starting at position 2679 of SEQ ID NO: 1244700
ucauacugguauuguuuaa

SEQ ID NO: 1508449 - RNA, 19 nt, Artificial Sequence
  Description of Artificial Sequence: Synthetic oligonucleotide
  Antisense strand to SEQ ID NO: 1508448
uuaaacaauaccaguauga

SEQ ID NO: 1508450 - RNA, 19 nt, Artificial Sequence
  Description of Artificial Sequence: Synthetic oligonucleotide
  Sense strand starting at position 2702 of SEQ ID NO: 1244700
ucccuaagaugacaguaua

SEQ ID NO: 1508451 - RNA, 19 nt, Artificial Sequence
  Description of Artificial Sequence: Synthetic oligonucleotide
  Antisense strand to SEQ ID NO: 1508450
uauacugucaucuuaggga

SEQ ID NO: 1508452 - RNA, 19 nt, Artificial Sequence
  Description of Artificial Sequence: Synthetic oligonucleotide
  Sense strand starting at position 3067 of SEQ ID NO: 1244700
auaugcacuugaggaauga

SEQ ID NO: 1508453 - RNA, 19 nt, Artificial Sequence
  Description of Artificial Sequence: Synthetic oligonucleotide
  Antisense strand to SEQ ID NO: 1508452
ucauuccucaagugcauau

SEQ ID NO: 1508454 - RNA, 19 nt, Artificial Sequence
  Description of Artificial Sequence: Synthetic oligonucleotide
  Sense strand starting at position 3071 of SEQ ID NO: 1244700
gcacuugaggaaugaaacu

SEQ ID NO: 1508455 - RNA, 19 nt, Artificial Sequence
  Description of Artificial Sequence: Synthetic oligonucleotide
  Antisense strand to SEQ ID NO: 1508454
aguuucauuccucaagugc

SEQ ID NO: 1508456 - RNA, 19 nt, Artificial Sequence
  Description of Artificial Sequence: Synthetic oligonucleotide
  Sense strand starting at position 3440 of SEQ ID NO: 1244700
cugaauuagugucaaggag

SEQ ID NO: 1508457 - RNA, 19 nt, Artificial Sequence
  Description of Artificial Sequence: Synthetic oligonucleotide
  Antisense strand to SEQ ID NO: 1508456
cuccuugacacuaauucag

SEQ ID NO: 1508458 - RNA, 19 nt, Artificial Sequence
  Description of Artificial Sequence: Synthetic oligonucleotide
  Sense strand starting at position 3564 of SEQ ID NO: 1244700
gggccaucuucugugucaa

SEQ ID NO: 1508459 - RNA, 19 nt, Artificial Sequence
  Description of Artificial Sequence: Synthetic oligonucleotide
  Antisense strand to SEQ ID NO: 1508458
uugacacagaagauggccc

SEQ ID NO: 1508460 - RNA, 19 nt, Artificial Sequence
  Description of Artificial Sequence: Synthetic oligonucleotide
  Sense strand starting at position 3565 of SEQ ID NO: 1244700
ggccaucuucugugucaag

SEQ ID NO: 1508461 - RNA, 19 nt, Artificial Sequence
  Description of Artificial Sequence: Synthetic oligonucleotide
  Antisense strand to SEQ ID NO: 1508460
cuugacacagaagauggcc

SEQ ID NO: 1508462 - RNA, 19 nt, Artificial Sequence
  Description of Artificial Sequence: Synthetic oligonucleotide
  Sense strand starting at position 3566 of SEQ ID NO: 1244700
gccaucuucugugucaaga

SEQ ID NO: 1508463 - RNA, 19 nt, Artificial Sequence
  Description of Artificial Sequence: Synthetic oligonucleotide
  Antisense strand to SEQ ID NO: 1508462
ucuugacacagaagauggc

SEQ ID NO: 1508464 - RNA, 19 nt, Artificial Sequence
  Description of Artificial Sequence: Synthetic oligonucleotide
  Sense strand starting at position 3568 of SEQ ID NO: 1244700
caucuucugugucaagaug

SEQ ID NO: 1508465 - RNA, 19 nt, Artificial Sequence
  Description of Artificial Sequence: Synthetic oligonucleotide
  Antisense strand to SEQ ID NO: 1508464
caucuugacacagaagaug

SEQ ID NO: 1508466 - RNA, 19 nt, Artificial Sequence
  Description of Artificial Sequence: Synthetic oligonucleotide
  Sense strand starting at position 3576 of SEQ ID NO: 1244700
gugucaagaugaggcauuu

SEQ ID NO: 1508467 - RNA, 19 nt, Artificial Sequence
  Description of Artificial Sequence: Synthetic oligonucleotide
  Antisense strand to SEQ ID NO: 1508466
aaaugccucaucuugacac

SEQ ID NO: 1508468 - RNA, 19 nt, Artificial Sequence
  Description of Artificial Sequence: Synthetic oligonucleotide
  Sense strand starting at position 3662 of SEQ ID NO: 1244700
cugaaauggcuccaggagu

SEQ ID NO: 1508469 - RNA, 19 nt, Artificial Sequence
  Description of Artificial Sequence: Synthetic oligonucleotide
  Antisense strand to SEQ ID NO: 1508468
acuccuggagccauuucag

SEQ ID NO: 1508470 - RNA, 19 nt, Artificial Sequence
  Description of Artificial Sequence: Synthetic oligonucleotide
  Sense strand starting at position 3854 of SEQ ID NO: 1244700
cccgguguuccagggacaa

SEQ ID NO: 1508471 - RNA, 19 nt, Artificial Sequence
  Description of Artificial Sequence: Synthetic oligonucleotide
  Antisense strand to SEQ ID NO: 1508470
uugucccuggaacaccggg

SEQ ID NO: 1508472 - RNA, 19 nt, Artificial Sequence
  Description of Artificial Sequence: Synthetic oligonucleotide
  Sense strand starting at position 1288 of SEQ ID NO: 1244701
aggagccuguccucugaga

SEQ ID NO: 1508473 - RNA, 19 nt, Artificial Sequence
  Description of Artificial Sequence: Synthetic oligonucleotide
  Antisense strand to SEQ ID NO: 1508472
ucucagaggacaggcuccu

SEQ ID NO: 1508474 - RNA, 19 nt, Artificial Sequence
  Description of Artificial Sequence: Synthetic oligonucleotide
  Sense strand starting at position 2064 of SEQ ID NO: 1244701
cagauuaccuccugggaca

SEQ ID NO: 1508475 - RNA, 19 nt, Artificial Sequence
  Description of Artificial Sequence: Synthetic oligonucleotide
  Antisense strand to SEQ ID NO: 1508474
ugucccaggagguaaucug

SEQ ID NO: 1508476 - RNA, 19 nt, Artificial Sequence
  Description of Artificial Sequence: Synthetic oligonucleotide
  Sense strand starting at position 2170 of SEQ ID NO: 1244701
ccaugauucuggcagcaga

SEQ ID NO: 1508477 - RNA, 19 nt, Artificial Sequence
  Description of Artificial Sequence: Synthetic oligonucleotide
  Antisense strand to SEQ ID NO: 1508476
ucugcugccagaaucaugg

SEQ ID NO: 1508478 - RNA, 19 nt, Artificial Sequence
  Description of Artificial Sequence: Synthetic oligonucleotide
  Sense strand starting at position 2247 of SEQ ID NO: 1244701
caggucucucccggucuaa

SEQ ID NO: 1508479 - RNA, 19 nt, Artificial Sequence
  Description of Artificial Sequence: Synthetic oligonucleotide
  Antisense strand to SEQ ID NO: 1508478
uuagaccgggagagaccug

SEQ ID NO: 1508480 - RNA, 19 nt, Artificial Sequence
  Description of Artificial Sequence: Synthetic oligonucleotide
  Sense strand starting at position 2259 of SEQ ID NO: 1244701
ggucuaaaucuagguggag

SEQ ID NO: 1508481 - RNA, 19 nt, Artificial Sequence
  Description of Artificial Sequence: Synthetic oligonucleotide
  Antisense strand to SEQ ID NO: 1508480
cuccaccuagauuuagacc

SEQ ID NO: 1508482 - RNA, 19 nt, Artificial Sequence
  Description of Artificial Sequence: Synthetic oligonucleotide
  Sense strand starting at position 2518 of SEQ ID NO: 1244701
ugacuccuccagugagauc

SEQ ID NO: 1508483 - RNA, 19 nt, Artificial Sequence
  Description of Artificial Sequence: Synthetic oligonucleotide
  Antisense strand to SEQ ID NO: 1508482
gaucucacuggaggaguca

SEQ ID NO: 1508484 - RNA, 19 nt, Artificial Sequence
  Description of Artificial Sequence: Synthetic oligonucleotide
  Sense strand starting at position 2659 of SEQ ID NO: 1244701
uggugucccuuucuaaacu

SEQ ID NO: 1508485 - RNA, 19 nt, Artificial Sequence
  Description of Artificial Sequence: Synthetic oligonucleotide
  Antisense strand to SEQ ID NO: 1508484
aguuuagaaagggacacca

SEQ ID NO: 1508486 - RNA, 19 nt, Artificial Sequence
  Description of Artificial Sequence: Synthetic oligonucleotide
  Sense strand starting at position 2682 of SEQ ID NO: 1244701
gagcucagcucguuugagu

SEQ ID NO: 1508487 - RNA, 19 nt, Artificial Sequence
  Description of Artificial Sequence: Synthetic oligonucleotide
  Antisense strand to SEQ ID NO: 1508486
acucaaacgagcugagcuc

SEQ ID NO: 1508488 - RNA, 19 nt, Artificial Sequence
  Description of Artificial Sequence: Synthetic oligonucleotide
  Sense strand starting at position 2689 of SEQ ID NO: 1244701
gcucguuugagucaaguug

SEQ ID NO: 1508489 - RNA, 19 nt, Artificial Sequence
  Description of Artificial Sequence: Synthetic oligonucleotide
  Antisense strand to SEQ ID NO: 1508488
caacuugacucaaacgagc

SEQ ID NO: 1508490 - RNA, 19 nt, Artificial Sequence
  Description of Artificial Sequence: Synthetic oligonucleotide
  Sense strand starting at position 3005 of SEQ ID NO: 1244701
cgucuuugccucuaaggca

SEQ ID NO: 1508491 - RNA, 19 nt, Artificial Sequence
  Description of Artificial Sequence: Synthetic oligonucleotide
  Antisense strand to SEQ ID NO: 1508490
ugccuuagaggcaaagacg

SEQ ID NO: 1508492 - RNA, 19 nt, Artificial Sequence
  Description of Artificial Sequence: Synthetic oligonucleotide
  Sense strand starting at position 3055 of SEQ ID NO: 1244701
ggaccuuugcugggagagu

SEQ ID NO: 1508493 - RNA, 19 nt, Artificial Sequence
  Description of Artificial Sequence: Synthetic oligonucleotide
  Antisense strand to SEQ ID NO: 1508492
acucucccagcaaaggucc

SEQ ID NO: 1508494 - RNA, 19 nt, Artificial Sequence
  Description of Artificial Sequence: Synthetic oligonucleotide
  Sense strand starting at position 3206 of SEQ ID NO: 1244701
gggcuuccuaaguguucca

SEQ ID NO: 1508495 - RNA, 19 nt, Artificial Sequence
  Description of Artificial Sequence: Synthetic oligonucleotide
  Antisense strand to SEQ ID NO: 1508494
uggaacacuuaggaagccc

SEQ ID NO: 1508496 - RNA, 19 nt, Artificial Sequence
  Description of Artificial Sequence: Synthetic oligonucleotide
  Sense strand starting at position 3209 of SEQ ID NO: 1244701
cuuccuaaguguuccacga

SEQ ID NO: 1508497 - RNA, 19 nt, Artificial Sequence
  Description of Artificial Sequence: Synthetic oligonucleotide
  Antisense strand to SEQ ID NO: 1508496
ucguggaacacuuaggaag

SEQ ID NO: 1508498 - RNA, 19 nt, Artificial Sequence
  Description of Artificial Sequence: Synthetic oligonucleotide
  Sense strand starting at position 3211 of SEQ ID NO: 1244701
uccuaaguguuccacgaag

SEQ ID NO: 1508499 - RNA, 19 nt, Artificial Sequence
  Description of Artificial Sequence: Synthetic oligonucleotide
  Antisense strand to SEQ ID NO: 1508498
cuucguggaacacuuagga

SEQ ID NO: 1508500 - RNA, 19 nt, Artificial Sequence
  Description of Artificial Sequence: Synthetic oligonucleotide
  Sense strand starting at position 3213 of SEQ ID NO: 1244701
cuaaguguuccacgaaguc

SEQ ID NO: 1508501 - RNA, 19 nt, Artificial Sequence
  Description of Artificial Sequence: Synthetic oligonucleotide
  Antisense strand to SEQ ID NO: 1508500
gacuucguggaacacuuag

SEQ ID NO: 1508502 - RNA, 19 nt, Artificial Sequence
  Description of Artificial Sequence: Synthetic oligonucleotide
  Sense strand starting at position 3222 of SEQ ID NO: 1244701
ccacgaagucacuguuacu

SEQ ID NO: 1508503 - RNA, 19 nt, Artificial Sequence
  Description of Artificial Sequence: Synthetic oligonucleotide
  Antisense strand to SEQ ID NO: 1508502
aguaacagugacuucgugg

SEQ ID NO: 1508504 - RNA, 19 nt, Artificial Sequence
  Description of Artificial Sequence: Synthetic oligonucleotide
  Sense strand starting at position 3228 of SEQ ID NO: 1244701
agucacuguuacugggaaa

SEQ ID NO: 1508505 - RNA, 19 nt, Artificial Sequence
  Description of Artificial Sequence: Synthetic oligonucleotide
  Antisense strand to SEQ ID NO: 1508504
uuucccaguaacagugacu

SEQ ID NO: 1508506 - RNA, 19 nt, Artificial Sequence
  Description of Artificial Sequence: Synthetic oligonucleotide
  Sense strand starting at position 3229 of SEQ ID NO: 1244701
gucacuguuacugggaaau

SEQ ID NO: 1508507 - RNA, 19 nt, Artificial Sequence
  Description of Artificial Sequence: Synthetic oligonucleotide
  Antisense strand to SEQ ID NO: 1508506
auuucccaguaacagugac

SEQ ID NO: 1508508 - RNA, 19 nt, Artificial Sequence
  Description of Artificial Sequence: Synthetic oligonucleotide
  Sense strand starting at position 3241 of SEQ ID NO: 1244701
gggaaaugcugcuugacga

SEQ ID NO: 1508509 - RNA, 19 nt, Artificial Sequence
  Description of Artificial Sequence: Synthetic oligonucleotide
  Antisense strand to SEQ ID NO: 1508508
ucgucaagcagcauuuccc

SEQ ID NO: 1508510 - RNA, 19 nt, Artificial Sequence
  Description of Artificial Sequence: Synthetic oligonucleotide
  Sense strand starting at position 3281 of SEQ ID NO: 1244701
ggcugucuggaugaugaca

SEQ ID NO: 1508511 - RNA, 19 nt, Artificial Sequence
  Description of Artificial Sequence: Synthetic oligonucleotide
  Antisense strand to SEQ ID NO: 1508510
ugucaucauccagacagcc

SEQ ID NO: 1508512 - RNA, 19 nt, Artificial Sequence
  Description of Artificial Sequence: Synthetic oligonucleotide
  Sense strand starting at position 3392 of SEQ ID NO: 1244701
cggaaccauuucugggaaa

SEQ ID NO: 1508513 - RNA, 19 nt, Artificial Sequence
  Description of Artificial Sequence: Synthetic oligonucleotide
  Antisense strand to SEQ ID NO: 1508512
uuucccagaaaugguuccg

SEQ ID NO: 1508514 - RNA, 19 nt, Artificial Sequence
  Description of Artificial Sequence: Synthetic oligonucleotide
  Sense strand starting at position 3393 of SEQ ID NO: 1244701
ggaaccauuucugggaaac

SEQ ID NO: 1508515 - RNA, 19 nt, Artificial Sequence
  Description of Artificial Sequence: Synthetic oligonucleotide
  Antisense strand to SEQ ID NO: 1508514
guuucccagaaaugguucc

SEQ ID NO: 1508516 - RNA, 19 nt, Artificial Sequence
  Description of Artificial Sequence: Synthetic oligonucleotide
  Sense strand starting at position 3551 of SEQ ID NO: 1244701
cgcucauacugguauuguu

SEQ ID NO: 1508517 - RNA, 19 nt, Artificial Sequence
  Description of Artificial Sequence: Synthetic oligonucleotide
  Antisense strand to SEQ ID NO: 1508516
aacaauaccaguaugagcg

SEQ ID NO: 1508518 - RNA, 19 nt, Artificial Sequence
  Description of Artificial Sequence: Synthetic oligonucleotide
  Sense strand starting at position 3554 of SEQ ID NO: 1244701
ucauacugguauuguuuaa

SEQ ID NO: 1508519 - RNA, 19 nt, Artificial Sequence
  Description of Artificial Sequence: Synthetic oligonucleotide
  Antisense strand to SEQ ID NO: 1508518
uuaaacaauaccaguauga

SEQ ID NO: 1508520 - RNA, 19 nt, Artificial Sequence
  Description of Artificial Sequence: Synthetic oligonucleotide
  Sense strand starting at position 3577 of SEQ ID NO: 1244701
ucccuaagaugacaguaua

SEQ ID NO: 1508521 - RNA, 19 nt, Artificial Sequence
  Description of Artificial Sequence: Synthetic oligonucleotide
  Antisense strand to SEQ ID NO: 1508520
uauacugucaucuuaggga

SEQ ID NO: 1508522 - RNA, 19 nt, Artificial Sequence
  Description of Artificial Sequence: Synthetic oligonucleotide
  Sense strand starting at position 3942 of SEQ ID NO: 1244701
auaugcacuugaggaauga

SEQ ID NO: 1508523 - RNA, 19 nt, Artificial Sequence
  Description of Artificial Sequence: Synthetic oligonucleotide
  Antisense strand to SEQ ID NO: 1508522
ucauuccucaagugcauau

SEQ ID NO: 1508524 - RNA, 19 nt, Artificial Sequence
  Description of Artificial Sequence: Synthetic oligonucleotide
  Sense strand starting at position 3946 of SEQ ID NO: 1244701
gcacuugaggaaugaaacu

SEQ ID NO: 1508525 - RNA, 19 nt, Artificial Sequence
  Description of Artificial Sequence: Synthetic oligonucleotide
  Antisense strand to SEQ ID NO: 1508524
aguuucauuccucaagugc

SEQ ID NO: 1508526 - RNA, 19 nt, Artificial Sequence
  Description of Artificial Sequence: Synthetic oligonucleotide
  Sense strand starting at position 1234 of SEQ ID NO: 1244702
gaaacugaggcguggguua

SEQ ID NO: 1508527 - RNA, 19 nt, Artificial Sequence
  Description of Artificial Sequence: Synthetic oligonucleotide
  Antisense strand to SEQ ID NO: 1508526
uaacccacgccucaguuuc

SEQ ID NO: 1508528 - RNA, 19 nt, Artificial Sequence
  Description of Artificial Sequence: Synthetic oligonucleotide
  Sense strand starting at position 1382 of SEQ ID NO: 1244702
ggcuguuagucauugccca

SEQ ID NO: 1508529 - RNA, 19 nt, Artificial Sequence
  Description of Artificial Sequence: Synthetic oligonucleotide
  Antisense strand to SEQ ID NO: 1508528
ugggcaaugacuaacagcc

SEQ ID NO: 1508530 - RNA, 19 nt, Artificial Sequence
  Description of Artificial Sequence: Synthetic oligonucleotide
  Sense strand starting at position 1383 of SEQ ID NO: 1244702
gcuguuagucauugcccaa

SEQ ID NO: 1508531 - RNA, 19 nt, Artificial Sequence
  Description of Artificial Sequence: Synthetic oligonucleotide
  Antisense strand to SEQ ID NO: 1508530
uugggcaaugacuaacagc

SEQ ID NO: 1508532 - RNA, 19 nt, Artificial Sequence
  Description of Artificial Sequence: Synthetic oligonucleotide
  Sense strand starting at position 1553 of SEQ ID NO: 1244702
cgcggaccgagcuauuuau

SEQ ID NO: 1508533 - RNA, 19 nt, Artificial Sequence
  Description of Artificial Sequence: Synthetic oligonucleotide
  Antisense strand to SEQ ID NO: 1508532
auaaauagcucgguccgcg

SEQ ID NO: 1508534 - RNA, 19 nt, Artificial Sequence
  Description of Artificial Sequence: Synthetic oligonucleotide
  Sense strand starting at position 2850 of SEQ ID NO: 1244702
cuuuguuggccuggaccaa

SEQ ID NO: 1508535 - RNA, 19 nt, Artificial Sequence
  Description of Artificial Sequence: Synthetic oligonucleotide
  Antisense strand to SEQ ID NO: 1508534
uugguccaggccaacaaag

SEQ ID NO: 1508536 - RNA, 19 nt, Artificial Sequence
  Description of Artificial Sequence: Synthetic oligonucleotide
  Sense strand starting at position 2866 of SEQ ID NO: 1244702
caaggagucuaguugucag

SEQ ID NO: 1508537 - RNA, 19 nt, Artificial Sequence
  Description of Artificial Sequence: Synthetic oligonucleotide
  Antisense strand to SEQ ID NO: 1508536
cugacaacuagacuccuug

SEQ ID NO: 1508538 - RNA, 19 nt, Artificial Sequence
  Description of Artificial Sequence: Synthetic oligonucleotide
  Sense strand starting at position 3115 of SEQ ID NO: 1244702
gccuguucuuucuauguaa

SEQ ID NO: 1508539 - RNA, 19 nt, Artificial Sequence
  Description of Artificial Sequence: Synthetic oligonucleotide
  Antisense strand to SEQ ID NO: 1508538
uuacauagaaagaacaggc

SEQ ID NO: 1508540 - RNA, 19 nt, Artificial Sequence
  Description of Artificial Sequence: Synthetic oligonucleotide
  Sense strand starting at position 3117 of SEQ ID NO: 1244702
cuguucuuucuauguaaug

SEQ ID NO: 1508541 - RNA, 19 nt, Artificial Sequence
  Description of Artificial Sequence: Synthetic oligonucleotide
  Antisense strand to SEQ ID NO: 1508540
cauuacauagaaagaacag

SEQ ID NO: 1508542 - RNA, 19 nt, Artificial Sequence
  Description of Artificial Sequence: Synthetic oligonucleotide
  Sense strand starting at position 3118 of SEQ ID NO: 1244702
uguucuuucuauguaaugu

SEQ ID NO: 1508543 - RNA, 19 nt, Artificial Sequence
  Description of Artificial Sequence: Synthetic oligonucleotide
  Antisense strand to SEQ ID NO: 1508542
acauuacauagaaagaaca

SEQ ID NO: 1508544 - RNA, 19 nt, Artificial Sequence
  Description of Artificial Sequence: Synthetic oligonucleotide
  Sense strand starting at position 3122 of SEQ ID NO: 1244702
cuuucuauguaauguuaca

SEQ ID NO: 1508545 - RNA, 19 nt, Artificial Sequence
  Description of Artificial Sequence: Synthetic oligonucleotide
  Antisense strand to SEQ ID NO: 1508544
uguaacauuacauagaaag

SEQ ID NO: 1508546 - RNA, 19 nt, Artificial Sequence
  Description of Artificial Sequence: Synthetic oligonucleotide
  Sense strand starting at position 3299 of SEQ ID NO: 1244702
ugaagacucuacuuaguug

SEQ ID NO: 1508547 - RNA, 19 nt, Artificial Sequence
  Description of Artificial Sequence: Synthetic oligonucleotide
  Antisense strand to SEQ ID NO: 1508546
caacuaaguagagucuuca

SEQ ID NO: 1508548 - RNA, 19 nt, Artificial Sequence
  Description of Artificial Sequence: Synthetic oligonucleotide
  Sense strand starting at position 3465 of SEQ ID NO: 1244702
aucaguuucugaggaggga

SEQ ID NO: 1508549 - RNA, 19 nt, Artificial Sequence
  Description of Artificial Sequence: Synthetic oligonucleotide
  Antisense strand to SEQ ID NO: 1508548
ucccuccucagaaacugau

SEQ ID NO: 1508550 - RNA, 19 nt, Artificial Sequence
  Description of Artificial Sequence: Synthetic oligonucleotide
  Sense strand starting at position 3579 of SEQ ID NO: 1244702
aucccagauuguugaguca

SEQ ID NO: 1508551 - RNA, 19 nt, Artificial Sequence
  Description of Artificial Sequence: Synthetic oligonucleotide
  Antisense strand to SEQ ID NO: 1508550
ugacucaacaaucugggau

SEQ ID NO: 1508552 - RNA, 19 nt, Artificial Sequence
  Description of Artificial Sequence: Synthetic oligonucleotide
  Sense strand starting at position 3815 of SEQ ID NO: 1244702
ugggaagacgcccagucau

SEQ ID NO: 1508553 - RNA, 19 nt, Artificial Sequence
  Description of Artificial Sequence: Synthetic oligonucleotide
  Antisense strand to SEQ ID NO: 1508552
augacugggcgucuuccca

SEQ ID NO: 1508554 - RNA, 19 nt, Artificial Sequence
  Description of Artificial Sequence: Synthetic oligonucleotide
  Sense strand starting at position 606 of SEQ ID NO: 1244703
uggugugugcuuugggcaa

SEQ ID NO: 1508555 - RNA, 19 nt, Artificial Sequence
  Description of Artificial Sequence: Synthetic oligonucleotide
  Antisense strand to SEQ ID NO: 1508554
uugcccaaagcacacacca

SEQ ID NO: 1508556 - RNA, 19 nt, Artificial Sequence
  Description of Artificial Sequence: Synthetic oligonucleotide
  Sense strand starting at position 638 of SEQ ID NO: 1244703
gcaagaugcuucgcucuca

SEQ ID NO: 1508557 - RNA, 19 nt, Artificial Sequence
  Description of Artificial Sequence: Synthetic oligonucleotide
  Antisense strand to SEQ ID NO: 1508556
ugagagcgaagcaucuugc

SEQ ID NO: 1508558 - RNA, 19 nt, Artificial Sequence
  Description of Artificial Sequence: Synthetic oligonucleotide
  Sense strand starting at position 776 of SEQ ID NO: 1244703
gggagaaguuuagacgaua

SEQ ID NO: 1508559 - RNA, 19 nt, Artificial Sequence
  Description of Artificial Sequence: Synthetic oligonucleotide
  Antisense strand to SEQ ID NO: 1508558
uaucgucuaaacuucuccc

SEQ ID NO: 1508560 - RNA, 19 nt, Artificial Sequence
  Description of Artificial Sequence: Synthetic oligonucleotide
  Sense strand starting at position 787 of SEQ ID NO: 1244703
agacgauacuucuggucuu

SEQ ID NO: 1508561 - RNA, 19 nt, Artificial Sequence
  Description of Artificial Sequence: Synthetic oligonucleotide
  Antisense strand to SEQ ID NO: 1508560
aagaccagaaguaucgucu

SEQ ID NO: 1508562 - RNA, 19 nt, Artificial Sequence
  Description of Artificial Sequence: Synthetic oligonucleotide
  Sense strand starting at position 788 of SEQ ID NO: 1244703
gacgauacuucuggucuuu

SEQ ID NO: 1508563 - RNA, 19 nt, Artificial Sequence
  Description of Artificial Sequence: Synthetic oligonucleotide
  Antisense strand to SEQ ID NO: 1508562
aaagaccagaaguaucguc

SEQ ID NO: 1508564 - RNA, 19 nt, Artificial Sequence
  Description of Artificial Sequence: Synthetic oligonucleotide
  Sense strand starting at position 790 of SEQ ID NO: 1244703
cgauacuucuggucuuucu

SEQ ID NO: 1508565 - RNA, 19 nt, Artificial Sequence
  Description of Artificial Sequence: Synthetic oligonucleotide
  Antisense strand to SEQ ID NO: 1508564
agaaagaccagaaguaucg

SEQ ID NO: 1508566 - RNA, 19 nt, Artificial Sequence
  Description of Artificial Sequence: Synthetic oligonucleotide
  Sense strand starting at position 799 of SEQ ID NO: 1244703
uggucuuucucccaucuca

SEQ ID NO: 1508567 - RNA, 19 nt, Artificial Sequence
  Description of Artificial Sequence: Synthetic oligonucleotide
  Antisense strand to SEQ ID NO: 1508566
ugagaugggagaaagacca

SEQ ID NO: 1508568 - RNA, 19 nt, Artificial Sequence
  Description of Artificial Sequence: Synthetic oligonucleotide
  Sense strand starting at position 839 of SEQ ID NO: 1244703
cagggcgccucaucugaua

SEQ ID NO: 1508569 - RNA, 19 nt, Artificial Sequence
  Description of Artificial Sequence: Synthetic oligonucleotide
  Antisense strand to SEQ ID NO: 1508568
uaucagaugaggcgcccug

SEQ ID NO: 1508570 - RNA, 19 nt, Artificial Sequence
  Description of Artificial Sequence: Synthetic oligonucleotide
  Sense strand starting at position 842 of SEQ ID NO: 1244703
ggcgccucaucugauaaca

SEQ ID NO: 1508571 - RNA, 19 nt, Artificial Sequence
  Description of Artificial Sequence: Synthetic oligonucleotide
  Antisense strand to SEQ ID NO: 1508570
uguuaucagaugaggcgcc

SEQ ID NO: 1508572 - RNA, 19 nt, Artificial Sequence
  Description of Artificial Sequence: Synthetic oligonucleotide
  Sense strand starting at position 1440 of SEQ ID NO: 1244703
ggcuguguccgcccuggaa

SEQ ID NO: 1508573 - RNA, 19 nt, Artificial Sequence
  Description of Artificial Sequence: Synthetic oligonucleotide
  Antisense strand to SEQ ID NO: 1508572
uuccagggcggacacagcc

SEQ ID NO: 1508574 - RNA, 19 nt, Artificial Sequence
  Description of Artificial Sequence: Synthetic oligonucleotide
  Sense strand starting at position 1442 of SEQ ID NO: 1244703
cuguguccgcccuggaauu

SEQ ID NO: 1508575 - RNA, 19 nt, Artificial Sequence
  Description of Artificial Sequence: Synthetic oligonucleotide
  Antisense strand to SEQ ID NO: 1508574
aauuccagggcggacacag

SEQ ID NO: 1508576 - RNA, 19 nt, Artificial Sequence
  Description of Artificial Sequence: Synthetic oligonucleotide
  Sense strand starting at position 2108 of SEQ ID NO: 1244703
gguugaggaucccuucuuu

SEQ ID NO: 1508577 - RNA, 19 nt, Artificial Sequence
  Description of Artificial Sequence: Synthetic oligonucleotide
  Antisense strand to SEQ ID NO: 1508576
aaagaagggauccucaacc

SEQ ID NO: 1508578 - RNA, 19 nt, Artificial Sequence
  Description of Artificial Sequence: Synthetic oligonucleotide
  Sense strand starting at position 2155 of SEQ ID NO: 1244703
caaugaaagccucgagcuu

SEQ ID NO: 1508579 - RNA, 19 nt, Artificial Sequence
  Description of Artificial Sequence: Synthetic oligonucleotide
  Antisense strand to SEQ ID NO: 1508578
aagcucgaggcuuucauug

SEQ ID NO: 1508580 - RNA, 19 nt, Artificial Sequence
  Description of Artificial Sequence: Synthetic oligonucleotide
  Sense strand starting at position 2156 of SEQ ID NO: 1244703
aaugaaagccucgagcuuu

SEQ ID NO: 1508581 - RNA, 19 nt, Artificial Sequence
  Description of Artificial Sequence: Synthetic oligonucleotide
  Antisense strand to SEQ ID NO: 1508580
aaagcucgaggcuuucauu

SEQ ID NO: 1508582 - RNA, 19 nt, Artificial Sequence
  Description of Artificial Sequence: Synthetic oligonucleotide
  Sense strand starting at position 2274 of SEQ ID NO: 1244703
gcauguggcccucagaacu

SEQ ID NO: 1508583 - RNA, 19 nt, Artificial Sequence
  Description of Artificial Sequence: Synthetic oligonucleotide
  Antisense strand to SEQ ID NO: 1508582
aguucugagggccacaugc

SEQ ID NO: 1508584 - RNA, 19 nt, Artificial Sequence
  Description of Artificial Sequence: Synthetic oligonucleotide
  Sense strand starting at position 2328 of SEQ ID NO: 1244703
cuggguaguccuugaugug

SEQ ID NO: 1508585 - RNA, 19 nt, Artificial Sequence
  Description of Artificial Sequence: Synthetic oligonucleotide
  Antisense strand to SEQ ID NO: 1508584
cacaucaaggacuacccag

SEQ ID NO: 1508586 - RNA, 19 nt, Artificial Sequence
  Description of Artificial Sequence: Synthetic oligonucleotide
  Sense strand starting at position 2331 of SEQ ID NO: 1244703
gguaguccuugaugugcau

SEQ ID NO: 1508587 - RNA, 19 nt, Artificial Sequence
  Description of Artificial Sequence: Synthetic oligonucleotide
  Antisense strand to SEQ ID NO: 1508586
augcacaucaaggacuacc

SEQ ID NO: 1508588 - RNA, 19 nt, Artificial Sequence
  Description of Artificial Sequence: Synthetic oligonucleotide
  Sense strand starting at position 2335 of SEQ ID NO: 1244703
guccuugaugugcauuagu

SEQ ID NO: 1508589 - RNA, 19 nt, Artificial Sequence
  Description of Artificial Sequence: Synthetic oligonucleotide
  Antisense strand to SEQ ID NO: 1508588
acuaaugcacaucaaggac

SEQ ID NO: 1508590 - RNA, 19 nt, Artificial Sequence
  Description of Artificial Sequence: Synthetic oligonucleotide
  Sense strand starting at position 2338 of SEQ ID NO: 1244703
cuugaugugcauuaguuga

SEQ ID NO: 1508591 - RNA, 19 nt, Artificial Sequence
  Description of Artificial Sequence: Synthetic oligonucleotide
  Antisense strand to SEQ ID NO: 1508590
ucaacuaaugcacaucaag

SEQ ID NO: 1508592 - RNA, 19 nt, Artificial Sequence
  Description of Artificial Sequence: Synthetic oligonucleotide
  Sense strand starting at position 2340 of SEQ ID NO: 1244703
ugaugugcauuaguugaaa

SEQ ID NO: 1508593 - RNA, 19 nt, Artificial Sequence
  Description of Artificial Sequence: Synthetic oligonucleotide
  Antisense strand to SEQ ID NO: 1508592
uuucaacuaaugcacauca

SEQ ID NO: 1508594 - RNA, 19 nt, Artificial Sequence
  Description of Artificial Sequence: Synthetic oligonucleotide
  Sense strand starting at position 2343 of SEQ ID NO: 1244703
ugugcauuaguugaaaugu

SEQ ID NO: 1508595 - RNA, 19 nt, Artificial Sequence
  Description of Artificial Sequence: Synthetic oligonucleotide
  Antisense strand to SEQ ID NO: 1508594
acauuucaacuaaugcaca

SEQ ID NO: 1508596 - RNA, 19 nt, Artificial Sequence
  Description of Artificial Sequence: Synthetic oligonucleotide
  Sense strand starting at position 2352 of SEQ ID NO: 1244703
guugaaauguacucaguug

SEQ ID NO: 1508597 - RNA, 19 nt, Artificial Sequence
  Description of Artificial Sequence: Synthetic oligonucleotide
  Antisense strand to SEQ ID NO: 1508596
caacugaguacauuucaac

SEQ ID NO: 1508598 - RNA, 19 nt, Artificial Sequence
  Description of Artificial Sequence: Synthetic oligonucleotide
  Sense strand starting at position 2372 of SEQ ID NO: 1244703
ccgggagucucgcucuguu

SEQ ID NO: 1508599 - RNA, 19 nt, Artificial Sequence
  Description of Artificial Sequence: Synthetic oligonucleotide
  Antisense strand to SEQ ID NO: 1508598
aacagagcgagacucccgg

SEQ ID NO: 1508600 - RNA, 19 nt, Artificial Sequence
  Description of Artificial Sequence: Synthetic oligonucleotide
  Sense strand starting at position 2768 of SEQ ID NO: 1244703
uuauguccaguccagauau

SEQ ID NO: 1508601 - RNA, 19 nt, Artificial Sequence
  Description of Artificial Sequence: Synthetic oligonucleotide
  Antisense strand to SEQ ID NO: 1508600
auaucuggacuggacauaa

SEQ ID NO: 1508602 - RNA, 19 nt, Artificial Sequence
  Description of Artificial Sequence: Synthetic oligonucleotide
  Sense strand starting at position 2843 of SEQ ID NO: 1244703
ggaacuugccauugacacu

SEQ ID NO: 1508603 - RNA, 19 nt, Artificial Sequence
  Description of Artificial Sequence: Synthetic oligonucleotide
  Antisense strand to SEQ ID NO: 1508602
agugucaauggcaaguucc

SEQ ID NO: 1508604 - RNA, 19 nt, Artificial Sequence
  Description of Artificial Sequence: Synthetic oligonucleotide
  Sense strand starting at position 2896 of SEQ ID NO: 1244703
uuaugugcuccaugcuuga

SEQ ID NO: 1508605 - RNA, 19 nt, Artificial Sequence
  Description of Artificial Sequence: Synthetic oligonucleotide
  Antisense strand to SEQ ID NO: 1508604
ucaagcauggagcacauaa

SEQ ID NO: 1508606 - RNA, 19 nt, Artificial Sequence
  Description of Artificial Sequence: Synthetic oligonucleotide
  Sense strand starting at position 2900 of SEQ ID NO: 1244703
gugcuccaugcuugagcaa

SEQ ID NO: 1508607 - RNA, 19 nt, Artificial Sequence
  Description of Artificial Sequence: Synthetic oligonucleotide
  Antisense strand to SEQ ID NO: 1508606
uugcucaagcauggagcac

SEQ ID NO: 1508608 - RNA, 19 nt, Artificial Sequence
  Description of Artificial Sequence: Synthetic oligonucleotide
  Sense strand starting at position 2901 of SEQ ID NO: 1244703
ugcuccaugcuugagcaaa

SEQ ID NO: 1508609 - RNA, 19 nt, Artificial Sequence
  Description of Artificial Sequence: Synthetic oligonucleotide
  Antisense strand to SEQ ID NO: 1508608
uuugcucaagcauggagca

SEQ ID NO: 1508610 - RNA, 19 nt, Artificial Sequence
  Description of Artificial Sequence: Synthetic oligonucleotide
  Sense strand starting at position 2903 of SEQ ID NO: 1244703
cuccaugcuugagcaaauu

SEQ ID NO: 1508611 - RNA, 19 nt, Artificial Sequence
  Description of Artificial Sequence: Synthetic oligonucleotide
  Antisense strand to SEQ ID NO: 1508610
aauuugcucaagcauggag

SEQ ID NO: 1508612 - RNA, 19 nt, Artificial Sequence
  Description of Artificial Sequence: Synthetic oligonucleotide
  Sense strand starting at position 2949 of SEQ ID NO: 1244703
ggccaaaucccaugagucu

SEQ ID NO: 1508613 - RNA, 19 nt, Artificial Sequence
  Description of Artificial Sequence: Synthetic oligonucleotide
  Antisense strand to SEQ ID NO: 1508612
agacucaugggauuuggcc

SEQ ID NO: 1508614 - RNA, 19 nt, Artificial Sequence
  Description of Artificial Sequence: Synthetic oligonucleotide
  Sense strand starting at position 3124 of SEQ ID NO: 1244703
acuguaggugacugaucuu

SEQ ID NO: 1508615 - RNA, 19 nt, Artificial Sequence
  Description of Artificial Sequence: Synthetic oligonucleotide
  Antisense strand to SEQ ID NO: 1508614
aagaucagucaccuacagu

SEQ ID NO: 1508616 - RNA, 19 nt, Artificial Sequence
  Description of Artificial Sequence: Synthetic oligonucleotide
  Sense strand starting at position 3130 of SEQ ID NO: 1244703
ggugacugaucuuucggau

SEQ ID NO: 1508617 - RNA, 19 nt, Artificial Sequence
  Description of Artificial Sequence: Synthetic oligonucleotide
  Antisense strand to SEQ ID NO: 1508616
auccgaaagaucagucacc

SEQ ID NO: 1508618 - RNA, 19 nt, Artificial Sequence
  Description of Artificial Sequence: Synthetic oligonucleotide
  Sense strand starting at position 3133 of SEQ ID NO: 1244703
gacugaucuuucggaucca

SEQ ID NO: 1508619 - RNA, 19 nt, Artificial Sequence
  Description of Artificial Sequence: Synthetic oligonucleotide
  Antisense strand to SEQ ID NO: 1508618
uggauccgaaagaucaguc

SEQ ID NO: 1508620 - RNA, 19 nt, Artificial Sequence
  Description of Artificial Sequence: Synthetic oligonucleotide
  Sense strand starting at position 3134 of SEQ ID NO: 1244703
acugaucuuucggauccau

SEQ ID NO: 1508621 - RNA, 19 nt, Artificial Sequence
  Description of Artificial Sequence: Synthetic oligonucleotide
  Antisense strand to SEQ ID NO: 1508620
auggauccgaaagaucagu

SEQ ID NO: 1508622 - RNA, 19 nt, Artificial Sequence
  Description of Artificial Sequence: Synthetic oligonucleotide
  Sense strand starting at position 3264 of SEQ ID NO: 1244703
gcgucugaggucagaaguu

SEQ ID NO: 1508623 - RNA, 19 nt, Artificial Sequence
  Description of Artificial Sequence: Synthetic oligonucleotide
  Antisense strand to SEQ ID NO: 1508622
aacuucugaccucagacgc

SEQ ID NO: 1508624 - RNA, 19 nt, Artificial Sequence
  Description of Artificial Sequence: Synthetic oligonucleotide
  Sense strand starting at position 3911 of SEQ ID NO: 1244703
cucuguuccuggguuggau

SEQ ID NO: 1508625 - RNA, 19 nt, Artificial Sequence
  Description of Artificial Sequence: Synthetic oligonucleotide
  Antisense strand to SEQ ID NO: 1508624
auccaacccaggaacagag

SEQ ID NO: 1508626 - RNA, 19 nt, Artificial Sequence
  Description of Artificial Sequence: Synthetic oligonucleotide
  Sense strand starting at position 3930 of SEQ ID NO: 1244703
ggcagaaguggcugaguca

SEQ ID NO: 1508627 - RNA, 19 nt, Artificial Sequence
  Description of Artificial Sequence: Synthetic oligonucleotide
  Antisense strand to SEQ ID NO: 1508626
ugacucagccacuucugcc

SEQ ID NO: 1508628 - RNA, 19 nt, Artificial Sequence
  Description of Artificial Sequence: Synthetic oligonucleotide
  Sense strand starting at position 3933 of SEQ ID NO: 1244703
agaaguggcugagucagau

SEQ ID NO: 1508629 - RNA, 19 nt, Artificial Sequence
  Description of Artificial Sequence: Synthetic oligonucleotide
  Antisense strand to SEQ ID NO: 1508628
aucugacucagccacuucu

SEQ ID NO: 1508630 - RNA, 19 nt, Artificial Sequence
  Description of Artificial Sequence: Synthetic oligonucleotide
  Sense strand starting at position 3969 of SEQ ID NO: 1244703
ucagcugauccauggaguu

SEQ ID NO: 1508631 - RNA, 19 nt, Artificial Sequence
  Description of Artificial Sequence: Synthetic oligonucleotide
  Antisense strand to SEQ ID NO: 1508630
aacuccauggaucagcuga

SEQ ID NO: 1508632 - RNA, 19 nt, Artificial Sequence
  Description of Artificial Sequence: Synthetic oligonucleotide
  Sense strand starting at position 21 of SEQ ID NO: 1244704
gaucgaucuccuuguucua

SEQ ID NO: 1508633 - RNA, 19 nt, Artificial Sequence
  Description of Artificial Sequence: Synthetic oligonucleotide
  Antisense strand to SEQ ID NO: 1508632
uagaacaaggagaucgauc

SEQ ID NO: 1508634 - RNA, 19 nt, Artificial Sequence
  Description of Artificial Sequence: Synthetic oligonucleotide
  Sense strand starting at position 63 of SEQ ID NO: 1244704
gcuccugaguagucuuaaa

SEQ ID NO: 1508635 - RNA, 19 nt, Artificial Sequence
  Description of Artificial Sequence: Synthetic oligonucleotide
  Antisense strand to SEQ ID NO: 1508634
uuuaagacuacucaggagc

SEQ ID NO: 1508636 - RNA, 19 nt, Artificial Sequence
  Description of Artificial Sequence: Synthetic oligonucleotide
  Sense strand starting at position 98 of SEQ ID NO: 1244704
gcagcauccugggagcuaa

SEQ ID NO: 1508637 - RNA, 19 nt, Artificial Sequence
  Description of Artificial Sequence: Synthetic oligonucleotide
  Antisense strand to SEQ ID NO: 1508636
uuagcucccaggaugcugc

SEQ ID NO: 1508638 - RNA, 19 nt, Artificial Sequence
  Description of Artificial Sequence: Synthetic oligonucleotide
  Sense strand starting at position 820 of SEQ ID NO: 1244704
uggugugugcuuugggcaa

SEQ ID NO: 1508639 - RNA, 19 nt, Artificial Sequence
  Description of Artificial Sequence: Synthetic oligonucleotide
  Antisense strand to SEQ ID NO: 1508638
uugcccaaagcacacacca

SEQ ID NO: 1508640 - RNA, 19 nt, Artificial Sequence
  Description of Artificial Sequence: Synthetic oligonucleotide
  Sense strand starting at position 852 of SEQ ID NO: 1244704
gcaagaugcuucgcucuca

SEQ ID NO: 1508641 - RNA, 19 nt, Artificial Sequence
  Description of Artificial Sequence: Synthetic oligonucleotide
  Antisense strand to SEQ ID NO: 1508640
ugagagcgaagcaucuugc

SEQ ID NO: 1508642 - RNA, 19 nt, Artificial Sequence
  Description of Artificial Sequence: Synthetic oligonucleotide
  Sense strand starting at position 990 of SEQ ID NO: 1244704
gggagaaguuuagacgaua

SEQ ID NO: 1508643 - RNA, 19 nt, Artificial Sequence
  Description of Artificial Sequence: Synthetic oligonucleotide
  Antisense strand to SEQ ID NO: 1508642
uaucgucuaaacuucuccc

SEQ ID NO: 1508644 - RNA, 19 nt, Artificial Sequence
  Description of Artificial Sequence: Synthetic oligonucleotide
  Sense strand starting at position 1001 of SEQ ID NO: 1244704
agacgauacuucuggucuu

SEQ ID NO: 1508645 - RNA, 19 nt, Artificial Sequence
  Description of Artificial Sequence: Synthetic oligonucleotide
  Antisense strand to SEQ ID NO: 1508644
aagaccagaaguaucgucu

SEQ ID NO: 1508646 - RNA, 19 nt, Artificial Sequence
  Description of Artificial Sequence: Synthetic oligonucleotide
  Sense strand starting at position 1002 of SEQ ID NO: 1244704
gacgauacuucuggucuuu

SEQ ID NO: 1508647 - RNA, 19 nt, Artificial Sequence
  Description of Artificial Sequence: Synthetic oligonucleotide
  Antisense strand to SEQ ID NO: 1508646
aaagaccagaaguaucguc

SEQ ID NO: 1508648 - RNA, 19 nt, Artificial Sequence
  Description of Artificial Sequence: Synthetic oligonucleotide
  Sense strand starting at position 1004 of SEQ ID NO: 1244704
cgauacuucuggucuuucu

SEQ ID NO: 1508649 - RNA, 19 nt, Artificial Sequence
  Description of Artificial Sequence: Synthetic oligonucleotide
  Antisense strand to SEQ ID NO: 1508648
agaaagaccagaaguaucg

SEQ ID NO: 1508650 - RNA, 19 nt, Artificial Sequence
  Description of Artificial Sequence: Synthetic oligonucleotide
  Sense strand starting at position 1013 of SEQ ID NO: 1244704
uggucuuucucccaucuca

SEQ ID NO: 1508651 - RNA, 19 nt, Artificial Sequence
  Description of Artificial Sequence: Synthetic oligonucleotide
  Antisense strand to SEQ ID NO: 1508650
ugagaugggagaaagacca

SEQ ID NO: 1508652 - RNA, 19 nt, Artificial Sequence
  Description of Artificial Sequence: Synthetic oligonucleotide
  Sense strand starting at position 1053 of SEQ ID NO: 1244704
cagggcgccucaucugaua

SEQ ID NO: 1508653 - RNA, 19 nt, Artificial Sequence
  Description of Artificial Sequence: Synthetic oligonucleotide
  Antisense strand to SEQ ID NO: 1508652
uaucagaugaggcgcccug

SEQ ID NO: 1508654 - RNA, 19 nt, Artificial Sequence
  Description of Artificial Sequence: Synthetic oligonucleotide
  Sense strand starting at position 1056 of SEQ ID NO: 1244704
ggcgccucaucugauaaca

SEQ ID NO: 1508655 - RNA, 19 nt, Artificial Sequence
  Description of Artificial Sequence: Synthetic oligonucleotide
  Antisense strand to SEQ ID NO: 1508654
uguuaucagaugaggcgcc

SEQ ID NO: 1508656 - RNA, 19 nt, Artificial Sequence
  Description of Artificial Sequence: Synthetic oligonucleotide
  Sense strand starting at position 1654 of SEQ ID NO: 1244704
ggcuguguccgcccuggaa

SEQ ID NO: 1508657 - RNA, 19 nt, Artificial Sequence
  Description of Artificial Sequence: Synthetic oligonucleotide
  Antisense strand to SEQ ID NO: 1508656
uuccagggcggacacagcc

SEQ ID NO: 1508658 - RNA, 19 nt, Artificial Sequence
  Description of Artificial Sequence: Synthetic oligonucleotide
  Sense strand starting at position 1656 of SEQ ID NO: 1244704
cuguguccgcccuggaauu

SEQ ID NO: 1508659 - RNA, 19 nt, Artificial Sequence
  Description of Artificial Sequence: Synthetic oligonucleotide
  Antisense strand to SEQ ID NO: 1508658
aauuccagggcggacacag

SEQ ID NO: 1508660 - RNA, 19 nt, Artificial Sequence
  Description of Artificial Sequence: Synthetic oligonucleotide
  Sense strand starting at position 2322 of SEQ ID NO: 1244704
gguugaggaucccuucuuu

SEQ ID NO: 1508661 - RNA, 19 nt, Artificial Sequence
  Description of Artificial Sequence: Synthetic oligonucleotide
  Antisense strand to SEQ ID NO: 1508660
aaagaagggauccucaacc

SEQ ID NO: 1508662 - RNA, 19 nt, Artificial Sequence
  Description of Artificial Sequence: Synthetic oligonucleotide
  Sense strand starting at position 2369 of SEQ ID NO: 1244704
caaugaaagccucgagcuu

SEQ ID NO: 1508663 - RNA, 19 nt, Artificial Sequence
  Description of Artificial Sequence: Synthetic oligonucleotide
  Antisense strand to SEQ ID NO: 1508662
aagcucgaggcuuucauug

SEQ ID NO: 1508664 - RNA, 19 nt, Artificial Sequence
  Description of Artificial Sequence: Synthetic oligonucleotide
  Sense strand starting at position 2370 of SEQ ID NO: 1244704
aaugaaagccucgagcuuu

SEQ ID NO: 1508665 - RNA, 19 nt, Artificial Sequence
  Description of Artificial Sequence: Synthetic oligonucleotide
  Antisense strand to SEQ ID NO: 1508664
aaagcucgaggcuuucauu

SEQ ID NO: 1508666 - RNA, 19 nt, Artificial Sequence
  Description of Artificial Sequence: Synthetic oligonucleotide
  Sense strand starting at position 2488 of SEQ ID NO: 1244704
gcauguggcccucagaacu

SEQ ID NO: 1508667 - RNA, 19 nt, Artificial Sequence
  Description of Artificial Sequence: Synthetic oligonucleotide
  Antisense strand to SEQ ID NO: 1508666
aguucugagggccacaugc

SEQ ID NO: 1508668 - RNA, 19 nt, Artificial Sequence
  Description of Artificial Sequence: Synthetic oligonucleotide
  Sense strand starting at position 2542 of SEQ ID NO: 1244704
cuggguaguccuugaugug

SEQ ID NO: 1508669 - RNA, 19 nt, Artificial Sequence
  Description of Artificial Sequence: Synthetic oligonucleotide
  Antisense strand to SEQ ID NO: 1508668
cacaucaaggacuacccag

SEQ ID NO: 1508670 - RNA, 19 nt, Artificial Sequence
  Description of Artificial Sequence: Synthetic oligonucleotide
  Sense strand starting at position 2545 of SEQ ID NO: 1244704
gguaguccuugaugugcau

SEQ ID NO: 1508671 - RNA, 19 nt, Artificial Sequence
  Description of Artificial Sequence: Synthetic oligonucleotide
  Antisense strand to SEQ ID NO: 1508670
augcacaucaaggacuacc

SEQ ID NO: 1508672 - RNA, 19 nt, Artificial Sequence
  Description of Artificial Sequence: Synthetic oligonucleotide
  Sense strand starting at position 2549 of SEQ ID NO: 1244704
guccuugaugugcauuagu

SEQ ID NO: 1508673 - RNA, 19 nt, Artificial Sequence
  Description of Artificial Sequence: Synthetic oligonucleotide
  Antisense strand to SEQ ID NO: 1508672
acuaaugcacaucaaggac

SEQ ID NO: 1508674 - RNA, 19 nt, Artificial Sequence
  Description of Artificial Sequence: Synthetic oligonucleotide
  Sense strand starting at position 2552 of SEQ ID NO: 1244704
cuugaugugcauuaguuga

SEQ ID NO: 1508675 - RNA, 19 nt, Artificial Sequence
  Description of Artificial Sequence: Synthetic oligonucleotide
  Antisense strand to SEQ ID NO: 1508674
ucaacuaaugcacaucaag

SEQ ID NO: 1508676 - RNA, 19 nt, Artificial Sequence
  Description of Artificial Sequence: Synthetic oligonucleotide
  Sense strand starting at position 2554 of SEQ ID NO: 1244704
ugaugugcauuaguugaaa

SEQ ID NO: 1508677 - RNA, 19 nt, Artificial Sequence
  Description of Artificial Sequence: Synthetic oligonucleotide
  Antisense strand to SEQ ID NO: 1508676
uuucaacuaaugcacauca

SEQ ID NO: 1508678 - RNA, 19 nt, Artificial Sequence
  Description of Artificial Sequence: Synthetic oligonucleotide
  Sense strand starting at position 2557 of SEQ ID NO: 1244704
ugugcauuaguugaaaugu

SEQ ID NO: 1508679 - RNA, 19 nt, Artificial Sequence
  Description of Artificial Sequence: Synthetic oligonucleotide
  Antisense strand to SEQ ID NO: 1508678
acauuucaacuaaugcaca

SEQ ID NO: 1508680 - RNA, 19 nt, Artificial Sequence
  Description of Artificial Sequence: Synthetic oligonucleotide
  Sense strand starting at position 2566 of SEQ ID NO: 1244704
guugaaauguacucaguug

SEQ ID NO: 1508681 - RNA, 19 nt, Artificial Sequence
  Description of Artificial Sequence: Synthetic oligonucleotide
  Antisense strand to SEQ ID NO: 1508680
caacugaguacauuucaac

SEQ ID NO: 1508682 - RNA, 19 nt, Artificial Sequence
  Description of Artificial Sequence: Synthetic oligonucleotide
  Sense strand starting at position 2586 of SEQ ID NO: 1244704
ccgggagucucgcucuguu

SEQ ID NO: 1508683 - RNA, 19 nt, Artificial Sequence
  Description of Artificial Sequence: Synthetic oligonucleotide
  Antisense strand to SEQ ID NO: 1508682
aacagagcgagacucccgg

SEQ ID NO: 1508684 - RNA, 19 nt, Artificial Sequence
  Description of Artificial Sequence: Synthetic oligonucleotide
  Sense strand starting at position 2982 of SEQ ID NO: 1244704
uuauguccaguccagauau

SEQ ID NO: 1508685 - RNA, 19 nt, Artificial Sequence
  Description of Artificial Sequence: Synthetic oligonucleotide
  Antisense strand to SEQ ID NO: 1508684
auaucuggacuggacauaa

SEQ ID NO: 1508686 - RNA, 19 nt, Artificial Sequence
  Description of Artificial Sequence: Synthetic oligonucleotide
  Sense strand starting at position 3057 of SEQ ID NO: 1244704
ggaacuugccauugacacu

SEQ ID NO: 1508687 - RNA, 19 nt, Artificial Sequence
  Description of Artificial Sequence: Synthetic oligonucleotide
  Antisense strand to SEQ ID NO: 1508686
agugucaauggcaaguucc

SEQ ID NO: 1508688 - RNA, 19 nt, Artificial Sequence
  Description of Artificial Sequence: Synthetic oligonucleotide
  Sense strand starting at position 3110 of SEQ ID NO: 1244704
uuaugugcuccaugcuuga

SEQ ID NO: 1508689 - RNA, 19 nt, Artificial Sequence
  Description of Artificial Sequence: Synthetic oligonucleotide
  Antisense strand to SEQ ID NO: 1508688
ucaagcauggagcacauaa

SEQ ID NO: 1508690 - RNA, 19 nt, Artificial Sequence
  Description of Artificial Sequence: Synthetic oligonucleotide
  Sense strand starting at position 3114 of SEQ ID NO: 1244704
gugcuccaugcuugagcaa

SEQ ID NO: 1508691 - RNA, 19 nt, Artificial Sequence
  Description of Artificial Sequence: Synthetic oligonucleotide
  Antisense strand to SEQ ID NO: 1508690
uugcucaagcauggagcac

SEQ ID NO: 1508692 - RNA, 19 nt, Artificial Sequence
  Description of Artificial Sequence: Synthetic oligonucleotide
  Sense strand starting at position 3115 of SEQ ID NO: 1244704
ugcuccaugcuugagcaaa

SEQ ID NO: 1508693 - RNA, 19 nt, Artificial Sequence
  Description of Artificial Sequence: Synthetic oligonucleotide
  Antisense strand to SEQ ID NO: 1508692
uuugcucaagcauggagca

SEQ ID NO: 1508694 - RNA, 19 nt, Artificial Sequence
  Description of Artificial Sequence: Synthetic oligonucleotide
  Sense strand starting at position 3117 of SEQ ID NO: 1244704
cuccaugcuugagcaaauu

SEQ ID NO: 1508695 - RNA, 19 nt, Artificial Sequence
  Description of Artificial Sequence: Synthetic oligonucleotide
  Antisense strand to SEQ ID NO: 1508694
aauuugcucaagcauggag

SEQ ID NO: 1508696 - RNA, 19 nt, Artificial Sequence
  Description of Artificial Sequence: Synthetic oligonucleotide
  Sense strand starting at position 3163 of SEQ ID NO: 1244704
ggccaaaucccaugagucu

SEQ ID NO: 1508697 - RNA, 19 nt, Artificial Sequence
  Description of Artificial Sequence: Synthetic oligonucleotide
  Antisense strand to SEQ ID NO: 1508696
agacucaugggauuuggcc

SEQ ID NO: 1508698 - RNA, 19 nt, Artificial Sequence
  Description of Artificial Sequence: Synthetic oligonucleotide
  Sense strand starting at position 3338 of SEQ ID NO: 1244704
acuguaggugacugaucuu

SEQ ID NO: 1508699 - RNA, 19 nt, Artificial Sequence
  Description of Artificial Sequence: Synthetic oligonucleotide
  Antisense strand to SEQ ID NO: 1508698
aagaucagucaccuacagu

SEQ ID NO: 1508700 - RNA, 19 nt, Artificial Sequence
  Description of Artificial Sequence: Synthetic oligonucleotide
  Sense strand starting at position 3344 of SEQ ID NO: 1244704
ggugacugaucuuucggau

SEQ ID NO: 1508701 - RNA, 19 nt, Artificial Sequence
  Description of Artificial Sequence: Synthetic oligonucleotide
  Antisense strand to SEQ ID NO: 1508700
auccgaaagaucagucacc

SEQ ID NO: 1508702 - RNA, 19 nt, Artificial Sequence
  Description of Artificial Sequence: Synthetic oligonucleotide
  Sense strand starting at position 3347 of SEQ ID NO: 1244704
gacugaucuuucggaucca

SEQ ID NO: 1508703 - RNA, 19 nt, Artificial Sequence
  Description of Artificial Sequence: Synthetic oligonucleotide
  Antisense strand to SEQ ID NO: 1508702
uggauccgaaagaucaguc

SEQ ID NO: 1508704 - RNA, 19 nt, Artificial Sequence
  Description of Artificial Sequence: Synthetic oligonucleotide
  Sense strand starting at position 3348 of SEQ ID NO: 1244704
acugaucuuucggauccau

SEQ ID NO: 1508705 - RNA, 19 nt, Artificial Sequence
  Description of Artificial Sequence: Synthetic oligonucleotide
  Antisense strand to SEQ ID NO: 1508704
auggauccgaaagaucagu

SEQ ID NO: 1508706 - RNA, 19 nt, Artificial Sequence
  Description of Artificial Sequence: Synthetic oligonucleotide
  Sense strand starting at position 3478 of SEQ ID NO: 1244704
gcgucugaggucagaaguu

SEQ ID NO: 1508707 - RNA, 19 nt, Artificial Sequence
  Description of Artificial Sequence: Synthetic oligonucleotide
  Antisense strand to SEQ ID NO: 1508706
aacuucugaccucagacgc

SEQ ID NO: 1508708 - RNA, 19 nt, Artificial Sequence
  Description of Artificial Sequence: Synthetic oligonucleotide
  Sense strand starting at position 53 of SEQ ID NO: 1244705
uugccaaaggcuuggaaau

SEQ ID NO: 1508709 - RNA, 19 nt, Artificial Sequence
  Description of Artificial Sequence: Synthetic oligonucleotide
  Antisense strand to SEQ ID NO: 1508708
auuuccaagccuuuggcaa

SEQ ID NO: 1508710 - RNA, 19 nt, Artificial Sequence
  Description of Artificial Sequence: Synthetic oligonucleotide
  Sense strand starting at position 54 of SEQ ID NO: 1244705
ugccaaaggcuuggaaauc

SEQ ID NO: 1508711 - RNA, 19 nt, Artificial Sequence
  Description of Artificial Sequence: Synthetic oligonucleotide
  Antisense strand to SEQ ID NO: 1508710
gauuuccaagccuuuggca

SEQ ID NO: 1508712 - RNA, 19 nt, Artificial Sequence
  Description of Artificial Sequence: Synthetic oligonucleotide
  Sense strand starting at position 64 of SEQ ID NO: 1244705
uuggaaauccgcuauccuu

SEQ ID NO: 1508713 - RNA, 19 nt, Artificial Sequence
  Description of Artificial Sequence: Synthetic oligonucleotide
  Antisense strand to SEQ ID NO: 1508712
aaggauagcggauuuccaa

SEQ ID NO: 1508714 - RNA, 19 nt, Artificial Sequence
  Description of Artificial Sequence: Synthetic oligonucleotide
  Sense strand starting at position 97 of SEQ ID NO: 1244705
gauuuaauuugucgagaga

SEQ ID NO: 1508715 - RNA, 19 nt, Artificial Sequence
  Description of Artificial Sequence: Synthetic oligonucleotide
  Antisense strand to SEQ ID NO: 1508714
ucucucgacaaauuaaauc

SEQ ID NO: 1508716 - RNA, 19 nt, Artificial Sequence
  Description of Artificial Sequence: Synthetic oligonucleotide
  Sense strand starting at position 155 of SEQ ID NO: 1244705
agaccaucagaguguuauu

SEQ ID NO: 1508717 - RNA, 19 nt, Artificial Sequence
  Description of Artificial Sequence: Synthetic oligonucleotide
  Antisense strand to SEQ ID NO: 1508716
aauaacacucugauggucu

SEQ ID NO: 1508718 - RNA, 19 nt, Artificial Sequence
  Description of Artificial Sequence: Synthetic oligonucleotide
  Sense strand starting at position 204 of SEQ ID NO: 1244705
gcaggcucuggauggaaau

SEQ ID NO: 1508719 - RNA, 19 nt, Artificial Sequence
  Description of Artificial Sequence: Synthetic oligonucleotide
  Antisense strand to SEQ ID NO: 1508718
auuuccauccagagccugc

SEQ ID NO: 1508720 - RNA, 19 nt, Artificial Sequence
  Description of Artificial Sequence: Synthetic oligonucleotide
  Sense strand starting at position 239 of SEQ ID NO: 1244705
uaggcagaccucgagcaaa

SEQ ID NO: 1508721 - RNA, 19 nt, Artificial Sequence
  Description of Artificial Sequence: Synthetic oligonucleotide
  Antisense strand to SEQ ID NO: 1508720
uuugcucgaggucugccua

SEQ ID NO: 1508722 - RNA, 19 nt, Artificial Sequence
  Description of Artificial Sequence: Synthetic oligonucleotide
  Sense strand starting at position 264 of SEQ ID NO: 1244705
gcggauuucucuucuucuu

SEQ ID NO: 1508723 - RNA, 19 nt, Artificial Sequence
  Description of Artificial Sequence: Synthetic oligonucleotide
  Antisense strand to SEQ ID NO: 1508722
aagaagaagagaaauccgc

SEQ ID NO: 1508724 - RNA, 19 nt, Artificial Sequence
  Description of Artificial Sequence: Synthetic oligonucleotide
  Sense strand starting at position 343 of SEQ ID NO: 1244705
gucuguauuuggcuaaagu

SEQ ID NO: 1508725 - RNA, 19 nt, Artificial Sequence
  Description of Artificial Sequence: Synthetic oligonucleotide
  Antisense strand to SEQ ID NO: 1508724
acuuuagccaaauacagac

SEQ ID NO: 1508726 - RNA, 19 nt, Artificial Sequence
  Description of Artificial Sequence: Synthetic oligonucleotide
  Sense strand starting at position 420 of SEQ ID NO: 1244705
gauguugaaucacuggcua

SEQ ID NO: 1508727 - RNA, 19 nt, Artificial Sequence
  Description of Artificial Sequence: Synthetic oligonucleotide
  Antisense strand to SEQ ID NO: 1508726
uagccagugauucaacauc

SEQ ID NO: 1508728 - RNA, 19 nt, Artificial Sequence
  Description of Artificial Sequence: Synthetic oligonucleotide
  Sense strand starting at position 493 of SEQ ID NO: 1244705
aaguguccuccucaggagu

SEQ ID NO: 1508729 - RNA, 19 nt, Artificial Sequence
  Description of Artificial Sequence: Synthetic oligonucleotide
  Antisense strand to SEQ ID NO: 1508728
acuccugaggaggacacuu

SEQ ID NO: 1508730 - RNA, 19 nt, Artificial Sequence
  Description of Artificial Sequence: Synthetic oligonucleotide
  Sense strand starting at position 560 of SEQ ID NO: 1244705
guuagugguacucauuaca

SEQ ID NO: 1508731 - RNA, 19 nt, Artificial Sequence
  Description of Artificial Sequence: Synthetic oligonucleotide
  Antisense strand to SEQ ID NO: 1508730
uguaaugaguaccacuaac

SEQ ID NO: 1508732 - RNA, 19 nt, Artificial Sequence
  Description of Artificial Sequence: Synthetic oligonucleotide
  Sense strand starting at position 681 of SEQ ID NO: 1244705
aucaucuggccggauguau

SEQ ID NO: 1508733 - RNA, 19 nt, Artificial Sequence
  Description of Artificial Sequence: Synthetic oligonucleotide
  Antisense strand to SEQ ID NO: 1508732
auacauccggccagaugau

SEQ ID NO: 1508734 - RNA, 19 nt, Artificial Sequence
  Description of Artificial Sequence: Synthetic oligonucleotide
  Sense strand starting at position 742 of SEQ ID NO: 1244705
ggagaugcaugguuuagag

SEQ ID NO: 1508735 - RNA, 19 nt, Artificial Sequence
  Description of Artificial Sequence: Synthetic oligonucleotide
  Antisense strand to SEQ ID NO: 1508734
cucuaaaccaugcaucucc

SEQ ID NO: 1508736 - RNA, 19 nt, Artificial Sequence
  Description of Artificial Sequence: Synthetic oligonucleotide
  Sense strand starting at position 865 of SEQ ID NO: 1244705
aaccaucuccugcgagaag

SEQ ID NO: 1508737 - RNA, 19 nt, Artificial Sequence
  Description of Artificial Sequence: Synthetic oligonucleotide
  Antisense strand to SEQ ID NO: 1508736
cuucucgcaggagaugguu

SEQ ID NO: 1508738 - RNA, 19 nt, Artificial Sequence
  Description of Artificial Sequence: Synthetic oligonucleotide
  Sense strand starting at position 1404 of SEQ ID NO: 1244705
gaagguaccucugacauuu

SEQ ID NO: 1508739 - RNA, 19 nt, Artificial Sequence
  Description of Artificial Sequence: Synthetic oligonucleotide
  Antisense strand to SEQ ID NO: 1508738
aaaugucagagguaccuuc

SEQ ID NO: 1508740 - RNA, 19 nt, Artificial Sequence
  Description of Artificial Sequence: Synthetic oligonucleotide
  Sense strand starting at position 1540 of SEQ ID NO: 1244705
ccaggcgugccuuuaggua

SEQ ID NO: 1508741 - RNA, 19 nt, Artificial Sequence
  Description of Artificial Sequence: Synthetic oligonucleotide
  Antisense strand to SEQ ID NO: 1508740
uaccuaaaggcacgccugg

SEQ ID NO: 1508742 - RNA, 19 nt, Artificial Sequence
  Description of Artificial Sequence: Synthetic oligonucleotide
  Sense strand starting at position 1554 of SEQ ID NO: 1244705
agguaucuuccgggaccca

SEQ ID NO: 1508743 - RNA, 19 nt, Artificial Sequence
  Description of Artificial Sequence: Synthetic oligonucleotide
  Antisense strand to SEQ ID NO: 1508742
ugggucccggaagauaccu

SEQ ID NO: 1508744 - RNA, 19 nt, Artificial Sequence
  Description of Artificial Sequence: Synthetic oligonucleotide
  Sense strand starting at position 1555 of SEQ ID NO: 1244705
gguaucuuccgggacccaa

SEQ ID NO: 1508745 - RNA, 19 nt, Artificial Sequence
  Description of Artificial Sequence: Synthetic oligonucleotide
  Antisense strand to SEQ ID NO: 1508744
uugggucccggaagauacc

SEQ ID NO: 1508746 - RNA, 19 nt, Artificial Sequence
  Description of Artificial Sequence: Synthetic oligonucleotide
  Sense strand starting at position 1889 of SEQ ID NO: 1244705
cuuauaagccgcucgguaa

SEQ ID NO: 1508747 - RNA, 19 nt, Artificial Sequence
  Description of Artificial Sequence: Synthetic oligonucleotide
  Antisense strand to SEQ ID NO: 1508746
uuaccgagcggcuuauaag

SEQ ID NO: 1508748 - RNA, 19 nt, Artificial Sequence
  Description of Artificial Sequence: Synthetic oligonucleotide
  Sense strand starting at position 3093 of SEQ ID NO: 1244705
caaggucaccgugaacuaa

SEQ ID NO: 1508749 - RNA, 19 nt, Artificial Sequence
  Description of Artificial Sequence: Synthetic oligonucleotide
  Antisense strand to SEQ ID NO: 1508748
uuaguucacggugaccuug

SEQ ID NO: 1508750 - RNA, 19 nt, Artificial Sequence
  Description of Artificial Sequence: Synthetic oligonucleotide
  Sense strand starting at position 3150 of SEQ ID NO: 1244705
ggacaaagcaugugucaga

SEQ ID NO: 1508751 - RNA, 19 nt, Artificial Sequence
  Description of Artificial Sequence: Synthetic oligonucleotide
  Antisense strand to SEQ ID NO: 1508750
ucugacacaugcuuugucc

SEQ ID NO: 1508752 - RNA, 19 nt, Artificial Sequence
  Description of Artificial Sequence: Synthetic oligonucleotide
  Sense strand starting at position 3151 of SEQ ID NO: 1244705
gacaaagcaugugucagau

SEQ ID NO: 1508753 - RNA, 19 nt, Artificial Sequence
  Description of Artificial Sequence: Synthetic oligonucleotide
  Antisense strand to SEQ ID NO: 1508752
aucugacacaugcuuuguc

SEQ ID NO: 1508754 - RNA, 19 nt, Artificial Sequence
  Description of Artificial Sequence: Synthetic oligonucleotide
  Sense strand starting at position 3263 of SEQ ID NO: 1244705
aggccauguuauuugcauu

SEQ ID NO: 1508755 - RNA, 19 nt, Artificial Sequence
  Description of Artificial Sequence: Synthetic oligonucleotide
  Antisense strand to SEQ ID NO: 1508754
aaugcaaauaacauggccu

SEQ ID NO: 1508756 - RNA, 19 nt, Artificial Sequence
  Description of Artificial Sequence: Synthetic oligonucleotide
  Sense strand starting at position 3398 of SEQ ID NO: 1244705
ggaggagucggcgaucuga

SEQ ID NO: 1508757 - RNA, 19 nt, Artificial Sequence
  Description of Artificial Sequence: Synthetic oligonucleotide
  Antisense strand to SEQ ID NO: 1508756
ucagaucgccgacuccucc

SEQ ID NO: 1508758 - RNA, 19 nt, Artificial Sequence
  Description of Artificial Sequence: Synthetic oligonucleotide
  Sense strand starting at position 3467 of SEQ ID NO: 1244705
auaggcucuccugaguuaa

SEQ ID NO: 1508759 - RNA, 19 nt, Artificial Sequence
  Description of Artificial Sequence: Synthetic oligonucleotide
  Antisense strand to SEQ ID NO: 1508758
uuaacucaggagagccuau

SEQ ID NO: 1508760 - RNA, 19 nt, Artificial Sequence
  Description of Artificial Sequence: Synthetic oligonucleotide
  Sense strand starting at position 3527 of SEQ ID NO: 1244705
gggagaagauucguuggua

SEQ ID NO: 1508761 - RNA, 19 nt, Artificial Sequence
  Description of Artificial Sequence: Synthetic oligonucleotide
  Antisense strand to SEQ ID NO: 1508760
uaccaacgaaucuucuccc

SEQ ID NO: 1508762 - RNA, 19 nt, Artificial Sequence
  Description of Artificial Sequence: Synthetic oligonucleotide
  Sense strand starting at position 3528 of SEQ ID NO: 1244705
ggagaagauucguugguac

SEQ ID NO: 1508763 - RNA, 19 nt, Artificial Sequence
  Description of Artificial Sequence: Synthetic oligonucleotide
  Antisense strand to SEQ ID NO: 1508762
guaccaacgaaucuucucc

SEQ ID NO: 1508764 - RNA, 19 nt, Artificial Sequence
  Description of Artificial Sequence: Synthetic oligonucleotide
  Sense strand starting at position 3530 of SEQ ID NO: 1244705
agaagauucguugguacag

SEQ ID NO: 1508765 - RNA, 19 nt, Artificial Sequence
  Description of Artificial Sequence: Synthetic oligonucleotide
  Antisense strand to SEQ ID NO: 1508764
cuguaccaacgaaucuucu

SEQ ID NO: 1508766 - RNA, 19 nt, Artificial Sequence
  Description of Artificial Sequence: Synthetic oligonucleotide
  Sense strand starting at position 3611 of SEQ ID NO: 1244705
ggcguaauuuaaccucgua

SEQ ID NO: 1508767 - RNA, 19 nt, Artificial Sequence
  Description of Artificial Sequence: Synthetic oligonucleotide
  Antisense strand to SEQ ID NO: 1508766
uacgagguuaaauuacgcc

SEQ ID NO: 1508768 - RNA, 19 nt, Artificial Sequence
  Description of Artificial Sequence: Synthetic oligonucleotide
  Sense strand starting at position 3624 of SEQ ID NO: 1244705
cucguagagcguuaauuuc

SEQ ID NO: 1508769 - RNA, 19 nt, Artificial Sequence
  Description of Artificial Sequence: Synthetic oligonucleotide
  Antisense strand to SEQ ID NO: 1508768
gaaauuaacgcucuacgag

SEQ ID NO: 1508770 - RNA, 19 nt, Artificial Sequence
  Description of Artificial Sequence: Synthetic oligonucleotide
  Sense strand starting at position 3630 of SEQ ID NO: 1244705
gagcguuaauuucuccaga

SEQ ID NO: 1508771 - RNA, 19 nt, Artificial Sequence
  Description of Artificial Sequence: Synthetic oligonucleotide
  Antisense strand to SEQ ID NO: 1508770
ucuggagaaauuaacgcuc

SEQ ID NO: 1508772 - RNA, 19 nt, Artificial Sequence
  Description of Artificial Sequence: Synthetic oligonucleotide
  Sense strand starting at position 3631 of SEQ ID NO: 1244705
agcguuaauuucuccagau

SEQ ID NO: 1508773 - RNA, 19 nt, Artificial Sequence
  Description of Artificial Sequence: Synthetic oligonucleotide
  Antisense strand to SEQ ID NO: 1508772
aucuggagaaauuaacgcu

SEQ ID NO: 1508774 - RNA, 19 nt, Artificial Sequence
  Description of Artificial Sequence: Synthetic oligonucleotide
  Sense strand starting at position 3632 of SEQ ID NO: 1244705
gcguuaauuucuccagauc

SEQ ID NO: 1508775 - RNA, 19 nt, Artificial Sequence
  Description of Artificial Sequence: Synthetic oligonucleotide
  Antisense strand to SEQ ID NO: 1508774
gaucuggagaaauuaacgc

SEQ ID NO: 1508776 - RNA, 19 nt, Artificial Sequence
  Description of Artificial Sequence: Synthetic oligonucleotide
  Sense strand starting at position 3669 of SEQ ID NO: 1244705
gugguauucccagaauugg

SEQ ID NO: 1508777 - RNA, 19 nt, Artificial Sequence
  Description of Artificial Sequence: Synthetic oligonucleotide
  Antisense strand to SEQ ID NO: 1508776
ccaauucugggaauaccac

SEQ ID NO: 1508778 - RNA, 19 nt, Artificial Sequence
  Description of Artificial Sequence: Synthetic oligonucleotide
  Sense strand starting at position 3677 of SEQ ID NO: 1244705
cccagaauuggaggguuua

SEQ ID NO: 1508779 - RNA, 19 nt, Artificial Sequence
  Description of Artificial Sequence: Synthetic oligonucleotide
  Antisense strand to SEQ ID NO: 1508778
uaaacccuccaauucuggg

SEQ ID NO: 1508780 - RNA, 19 nt, Artificial Sequence
  Description of Artificial Sequence: Synthetic oligonucleotide
  Sense strand starting at position 3770 of SEQ ID NO: 1244705
gcuguuacgauuuaugcuu

SEQ ID NO: 1508781 - RNA, 19 nt, Artificial Sequence
  Description of Artificial Sequence: Synthetic oligonucleotide
  Antisense strand to SEQ ID NO: 1508780
aagcauaaaucguaacagc

SEQ ID NO: 1508782 - RNA, 19 nt, Artificial Sequence
  Description of Artificial Sequence: Synthetic oligonucleotide
  Sense strand starting at position 3817 of SEQ ID NO: 1244705
acacacucccugugagaga

SEQ ID NO: 1508783 - RNA, 19 nt, Artificial Sequence
  Description of Artificial Sequence: Synthetic oligonucleotide
  Antisense strand to SEQ ID NO: 1508782
ucucucacagggagugugu

SEQ ID NO: 1508784 - RNA, 19 nt, Artificial Sequence
  Description of Artificial Sequence: Synthetic oligonucleotide
  Sense strand starting at position 3915 of SEQ ID NO: 1244705
cagggcugccuguaagaua

SEQ ID NO: 1508785 - RNA, 19 nt, Artificial Sequence
  Description of Artificial Sequence: Synthetic oligonucleotide
  Antisense strand to SEQ ID NO: 1508784
uaucuuacaggcagcccug

SEQ ID NO: 1508786 - RNA, 19 nt, Artificial Sequence
  Description of Artificial Sequence: Synthetic oligonucleotide
  Sense strand starting at position 3923 of SEQ ID NO: 1244705
ccuguaagauaaucuuuga

SEQ ID NO: 1508787 - RNA, 19 nt, Artificial Sequence
  Description of Artificial Sequence: Synthetic oligonucleotide
  Antisense strand to SEQ ID NO: 1508786
ucaaagauuaucuuacagg

SEQ ID NO: 1508788 - RNA, 19 nt, Artificial Sequence
  Description of Artificial Sequence: Synthetic oligonucleotide
  Sense strand starting at position 238 of SEQ ID NO: 1244706
gggacaaagugcucaagaa

SEQ ID NO: 1508789 - RNA, 19 nt, Artificial Sequence
  Description of Artificial Sequence: Synthetic oligonucleotide
  Antisense strand to SEQ ID NO: 1508788
uucuugagcacuuuguccc

SEQ ID NO: 1508790 - RNA, 19 nt, Artificial Sequence
  Description of Artificial Sequence: Synthetic oligonucleotide
  Sense strand starting at position 749 of SEQ ID NO: 1244706
ccagcauuguugcucauua

SEQ ID NO: 1508791 - RNA, 19 nt, Artificial Sequence
  Description of Artificial Sequence: Synthetic oligonucleotide
  Antisense strand to SEQ ID NO: 1508790
uaaugagcaacaaugcugg

SEQ ID NO: 1508792 - RNA, 19 nt, Artificial Sequence
  Description of Artificial Sequence: Synthetic oligonucleotide
  Sense strand starting at position 751 of SEQ ID NO: 1244706
agcauuguugcucauuagu

SEQ ID NO: 1508793 - RNA, 19 nt, Artificial Sequence
  Description of Artificial Sequence: Synthetic oligonucleotide
  Antisense strand to SEQ ID NO: 1508792
acuaaugagcaacaaugcu

SEQ ID NO: 1508794 - RNA, 19 nt, Artificial Sequence
  Description of Artificial Sequence: Synthetic oligonucleotide
  Sense strand starting at position 754 of SEQ ID NO: 1244706
auuguugcucauuaguaaa

SEQ ID NO: 1508795 - RNA, 19 nt, Artificial Sequence
  Description of Artificial Sequence: Synthetic oligonucleotide
  Antisense strand to SEQ ID NO: 1508794
uuuacuaaugagcaacaau

SEQ ID NO: 1508796 - RNA, 19 nt, Artificial Sequence
  Description of Artificial Sequence: Synthetic oligonucleotide
  Sense strand starting at position 782 of SEQ ID NO: 1244706
cucaaaggcugcuggaaua

SEQ ID NO: 1508797 - RNA, 19 nt, Artificial Sequence
  Description of Artificial Sequence: Synthetic oligonucleotide
  Antisense strand to SEQ ID NO: 1508796
uauuccagcagccuuugag

SEQ ID NO: 1508798 - RNA, 19 nt, Artificial Sequence
  Description of Artificial Sequence: Synthetic oligonucleotide
  Sense strand starting at position 924 of SEQ ID NO: 1244706
cuuuguucucuguggcaag

SEQ ID NO: 1508799 - RNA, 19 nt, Artificial Sequence
  Description of Artificial Sequence: Synthetic oligonucleotide
  Antisense strand to SEQ ID NO: 1508798
cuugccacagagaacaaag

SEQ ID NO: 1508800 - RNA, 19 nt, Artificial Sequence
  Description of Artificial Sequence: Synthetic oligonucleotide
  Sense strand starting at position 927 of SEQ ID NO: 1244706
uguucucuguggcaagaca

SEQ ID NO: 1508801 - RNA, 19 nt, Artificial Sequence
  Description of Artificial Sequence: Synthetic oligonucleotide
  Antisense strand to SEQ ID NO: 1508800
ugucuugccacagagaaca

SEQ ID NO: 1508802 - RNA, 19 nt, Artificial Sequence
  Description of Artificial Sequence: Synthetic oligonucleotide
  Sense strand starting at position 965 of SEQ ID NO: 1244706
cuuggcugucccugggaaa

SEQ ID NO: 1508803 - RNA, 19 nt, Artificial Sequence
  Description of Artificial Sequence: Synthetic oligonucleotide
  Antisense strand to SEQ ID NO: 1508802
uuucccagggacagccaag

SEQ ID NO: 1508804 - RNA, 19 nt, Artificial Sequence
  Description of Artificial Sequence: Synthetic oligonucleotide
  Sense strand starting at position 968 of SEQ ID NO: 1244706
ggcugucccugggaaacaa

SEQ ID NO: 1508805 - RNA, 19 nt, Artificial Sequence
  Description of Artificial Sequence: Synthetic oligonucleotide
  Antisense strand to SEQ ID NO: 1508804
uuguuucccagggacagcc

SEQ ID NO: 1508806 - RNA, 19 nt, Artificial Sequence
  Description of Artificial Sequence: Synthetic oligonucleotide
  Sense strand starting at position 984 of SEQ ID NO: 1244706
caaggagagcucugucuua

SEQ ID NO: 1508807 - RNA, 19 nt, Artificial Sequence
  Description of Artificial Sequence: Synthetic oligonucleotide
  Antisense strand to SEQ ID NO: 1508806
uaagacagagcucuccuug

SEQ ID NO: 1508808 - RNA, 19 nt, Artificial Sequence
  Description of Artificial Sequence: Synthetic oligonucleotide
  Sense strand starting at position 1050 of SEQ ID NO: 1244706
gcugcuucucgugcugaga

SEQ ID NO: 1508809 - RNA, 19 nt, Artificial Sequence
  Description of Artificial Sequence: Synthetic oligonucleotide
  Antisense strand to SEQ ID NO: 1508808
ucucagcacgagaagcagc

SEQ ID NO: 1508810 - RNA, 19 nt, Artificial Sequence
  Description of Artificial Sequence: Synthetic oligonucleotide
  Sense strand starting at position 1052 of SEQ ID NO: 1244706
ugcuucucgugcugagaaa

SEQ ID NO: 1508811 - RNA, 19 nt, Artificial Sequence
  Description of Artificial Sequence: Synthetic oligonucleotide
  Antisense strand to SEQ ID NO: 1508810
uuucucagcacgagaagca

SEQ ID NO: 1508812 - RNA, 19 nt, Artificial Sequence
  Description of Artificial Sequence: Synthetic oligonucleotide
  Sense strand starting at position 1053 of SEQ ID NO: 1244706
gcuucucgugcugagaaac

SEQ ID NO: 1508813 - RNA, 19 nt, Artificial Sequence
  Description of Artificial Sequence: Synthetic oligonucleotide
  Antisense strand to SEQ ID NO: 1508812
guuucucagcacgagaagc

SEQ ID NO: 1508814 - RNA, 19 nt, Artificial Sequence
  Description of Artificial Sequence: Synthetic oligonucleotide
  Sense strand starting at position 1132 of SEQ ID NO: 1244706
gugugcugguccuaacauc

SEQ ID NO: 1508815 - RNA, 19 nt, Artificial Sequence
  Description of Artificial Sequence: Synthetic oligonucleotide
  Antisense strand to SEQ ID NO: 1508814
gauguuaggaccagcacac

SEQ ID NO: 1508816 - RNA, 19 nt, Artificial Sequence
  Description of Artificial Sequence: Synthetic oligonucleotide
  Sense strand starting at position 1364 of SEQ ID NO: 1244706
gaaggagcguucuugaaug

SEQ ID NO: 1508817 - RNA, 19 nt, Artificial Sequence
  Description of Artificial Sequence: Synthetic oligonucleotide
  Antisense strand to SEQ ID NO: 1508816
cauucaagaacgcuccuuc

SEQ ID NO: 1508818 - RNA, 19 nt, Artificial Sequence
  Description of Artificial Sequence: Synthetic oligonucleotide
  Sense strand starting at position 1366 of SEQ ID NO: 1244706
aggagcguucuugaaugua

SEQ ID NO: 1508819 - RNA, 19 nt, Artificial Sequence
  Description of Artificial Sequence: Synthetic oligonucleotide
  Antisense strand to SEQ ID NO: 1508818
uacauucaagaacgcuccu

SEQ ID NO: 1508820 - RNA, 19 nt, Artificial Sequence
  Description of Artificial Sequence: Synthetic oligonucleotide
  Sense strand starting at position 1431 of SEQ ID NO: 1244706
cagguauuaaaguguagag

SEQ ID NO: 1508821 - RNA, 19 nt, Artificial Sequence
  Description of Artificial Sequence: Synthetic oligonucleotide
  Antisense strand to SEQ ID NO: 1508820
cucuacacuuuaauaccug

SEQ ID NO: 1508822 - RNA, 19 nt, Artificial Sequence
  Description of Artificial Sequence: Synthetic oligonucleotide
  Sense strand starting at position 1433 of SEQ ID NO: 1244706
gguauuaaaguguagagcu

SEQ ID NO: 1508823 - RNA, 19 nt, Artificial Sequence
  Description of Artificial Sequence: Synthetic oligonucleotide
  Antisense strand to SEQ ID NO: 1508822
agcucuacacuuuaauacc

SEQ ID NO: 1508824 - RNA, 19 nt, Artificial Sequence
  Description of Artificial Sequence: Synthetic oligonucleotide
  Sense strand starting at position 2768 of SEQ ID NO: 1244706
ggcucuuguucccaggaga

SEQ ID NO: 1508825 - RNA, 19 nt, Artificial Sequence
  Description of Artificial Sequence: Synthetic oligonucleotide
  Antisense strand to SEQ ID NO: 1508824
ucuccugggaacaagagcc

SEQ ID NO: 1508826 - RNA, 19 nt, Artificial Sequence
  Description of Artificial Sequence: Synthetic oligonucleotide
  Sense strand starting at position 2818 of SEQ ID NO: 1244706
uccacuucccugcgaagaa

SEQ ID NO: 1508827 - RNA, 19 nt, Artificial Sequence
  Description of Artificial Sequence: Synthetic oligonucleotide
  Antisense strand to SEQ ID NO: 1508826
uucuucgcagggaagugga

SEQ ID NO: 1508828 - RNA, 19 nt, Artificial Sequence
  Description of Artificial Sequence: Synthetic oligonucleotide
  Sense strand starting at position 3136 of SEQ ID NO: 1244706
uggguuuauugggccguaa

SEQ ID NO: 1508829 - RNA, 19 nt, Artificial Sequence
  Description of Artificial Sequence: Synthetic oligonucleotide
  Antisense strand to SEQ ID NO: 1508828
uuacggcccaauaaaccca

SEQ ID NO: 1508830 - RNA, 19 nt, Artificial Sequence
  Description of Artificial Sequence: Synthetic oligonucleotide
  Sense strand starting at position 3222 of SEQ ID NO: 1244706
agaagucaucagcggaaga

SEQ ID NO: 1508831 - RNA, 19 nt, Artificial Sequence
  Description of Artificial Sequence: Synthetic oligonucleotide
  Antisense strand to SEQ ID NO: 1508830
ucuuccgcugaugacuucu

SEQ ID NO: 1508832 - RNA, 19 nt, Artificial Sequence
  Description of Artificial Sequence: Synthetic oligonucleotide
  Sense strand starting at position 3223 of SEQ ID NO: 1244706
gaagucaucagcggaagau

SEQ ID NO: 1508833 - RNA, 19 nt, Artificial Sequence
  Description of Artificial Sequence: Synthetic oligonucleotide
  Antisense strand to SEQ ID NO: 1508832
aucuuccgcugaugacuuc

SEQ ID NO: 1508834 - RNA, 19 nt, Artificial Sequence
  Description of Artificial Sequence: Synthetic oligonucleotide
  Sense strand starting at position 3224 of SEQ ID NO: 1244706
aagucaucagcggaagauu

SEQ ID NO: 1508835 - RNA, 19 nt, Artificial Sequence
  Description of Artificial Sequence: Synthetic oligonucleotide
  Antisense strand to SEQ ID NO: 1508834
aaucuuccgcugaugacuu

SEQ ID NO: 1508836 - RNA, 19 nt, Artificial Sequence
  Description of Artificial Sequence: Synthetic oligonucleotide
  Sense strand starting at position 3287 of SEQ ID NO: 1244706
ggaaguguguccuggaccu

SEQ ID NO: 1508837 - RNA, 19 nt, Artificial Sequence
  Description of Artificial Sequence: Synthetic oligonucleotide
  Antisense strand to SEQ ID NO: 1508836
agguccaggacacacuucc

SEQ ID NO: 1508838 - RNA, 19 nt, Artificial Sequence
  Description of Artificial Sequence: Synthetic oligonucleotide
  Sense strand starting at position 3539 of SEQ ID NO: 1244706
ggaucacgcugggcuuaaa

SEQ ID NO: 1508839 - RNA, 19 nt, Artificial Sequence
  Description of Artificial Sequence: Synthetic oligonucleotide
  Antisense strand to SEQ ID NO: 1508838
uuuaagcccagcgugaucc

SEQ ID NO: 1508840 - RNA, 19 nt, Artificial Sequence
  Description of Artificial Sequence: Synthetic oligonucleotide
  Sense strand starting at position 3603 of SEQ ID NO: 1244706
gcccgaucuuaacggaaau

SEQ ID NO: 1508841 - RNA, 19 nt, Artificial Sequence
  Description of Artificial Sequence: Synthetic oligonucleotide
  Antisense strand to SEQ ID NO: 1508840
auuuccguuaagaucgggc

SEQ ID NO: 1508842 - RNA, 19 nt, Artificial Sequence
  Description of Artificial Sequence: Synthetic oligonucleotide
  Sense strand starting at position 3614 of SEQ ID NO: 1244706
acggaaauuucccagcaag

SEQ ID NO: 1508843 - RNA, 19 nt, Artificial Sequence
  Description of Artificial Sequence: Synthetic oligonucleotide
  Antisense strand to SEQ ID NO: 1508842
cuugcugggaaauuuccgu

SEQ ID NO: 1508844 - RNA, 19 nt, Artificial Sequence
  Description of Artificial Sequence: Synthetic oligonucleotide
  Sense strand starting at position 3674 of SEQ ID NO: 1244706
gacugagucccgcagacuu

SEQ ID NO: 1508845 - RNA, 19 nt, Artificial Sequence
  Description of Artificial Sequence: Synthetic oligonucleotide
  Antisense strand to SEQ ID NO: 1508844
aagucugcgggacucaguc

SEQ ID NO: 1508846 - RNA, 19 nt, Artificial Sequence
  Description of Artificial Sequence: Synthetic oligonucleotide
  Sense strand starting at position 3708 of SEQ ID NO: 1244706
gccugucucacucagugua

SEQ ID NO: 1508847 - RNA, 19 nt, Artificial Sequence
  Description of Artificial Sequence: Synthetic oligonucleotide
  Antisense strand to SEQ ID NO: 1508846
uacacugagugagacaggc

SEQ ID NO: 1508848 - RNA, 19 nt, Artificial Sequence
  Description of Artificial Sequence: Synthetic oligonucleotide
  Sense strand starting at position 3710 of SEQ ID NO: 1244706
cugucucacucaguguaaa

SEQ ID NO: 1508849 - RNA, 19 nt, Artificial Sequence
  Description of Artificial Sequence: Synthetic oligonucleotide
  Antisense strand to SEQ ID NO: 1508848
uuuacacugagugagacag

SEQ ID NO: 1508850 - RNA, 19 nt, Artificial Sequence
  Description of Artificial Sequence: Synthetic oligonucleotide
  Sense strand starting at position 3711 of SEQ ID NO: 1244706
ugucucacucaguguaaac

SEQ ID NO: 1508851 - RNA, 19 nt, Artificial Sequence
  Description of Artificial Sequence: Synthetic oligonucleotide
  Antisense strand to SEQ ID NO: 1508850
guuuacacugagugagaca

SEQ ID NO: 1508852 - RNA, 19 nt, Artificial Sequence
  Description of Artificial Sequence: Synthetic oligonucleotide
  Sense strand starting at position 3721 of SEQ ID NO: 1244706
aguguaaaccgagaugagu

SEQ ID NO: 1508853 - RNA, 19 nt, Artificial Sequence
  Description of Artificial Sequence: Synthetic oligonucleotide
  Antisense strand to SEQ ID NO: 1508852
acucaucucgguuuacacu

SEQ ID NO: 1508854 - RNA, 19 nt, Artificial Sequence
  Description of Artificial Sequence: Synthetic oligonucleotide
  Sense strand starting at position 3730 of SEQ ID NO: 1244706
cgagaugaguugcauccau

SEQ ID NO: 1508855 - RNA, 19 nt, Artificial Sequence
  Description of Artificial Sequence: Synthetic oligonucleotide
  Antisense strand to SEQ ID NO: 1508854
auggaugcaacucaucucg

SEQ ID NO: 1508856 - RNA, 19 nt, Artificial Sequence
  Description of Artificial Sequence: Synthetic oligonucleotide
  Sense strand starting at position 3751 of SEQ ID NO: 1244706
gcucccgauuaccaagaau

SEQ ID NO: 1508857 - RNA, 19 nt, Artificial Sequence
  Description of Artificial Sequence: Synthetic oligonucleotide
  Antisense strand to SEQ ID NO: 1508856
auucuugguaaucgggagc

SEQ ID NO: 1508858 - RNA, 19 nt, Artificial Sequence
  Description of Artificial Sequence: Synthetic oligonucleotide
  Sense strand starting at position 27 of SEQ ID NO: 1244707
ugacaagaccgcugaucau

SEQ ID NO: 1508859 - RNA, 19 nt, Artificial Sequence
  Description of Artificial Sequence: Synthetic oligonucleotide
  Antisense strand to SEQ ID NO: 1508858
augaucagcggucuuguca

SEQ ID NO: 1508860 - RNA, 19 nt, Artificial Sequence
  Description of Artificial Sequence: Synthetic oligonucleotide
  Sense strand starting at position 67 of SEQ ID NO: 1244707
gauguugucagagaaguag

SEQ ID NO: 1508861 - RNA, 19 nt, Artificial Sequence
  Description of Artificial Sequence: Synthetic oligonucleotide
  Antisense strand to SEQ ID NO: 1508860
cuacuucucugacaacauc

SEQ ID NO: 1508862 - RNA, 19 nt, Artificial Sequence
  Description of Artificial Sequence: Synthetic oligonucleotide
  Sense strand starting at position 181 of SEQ ID NO: 1244707
guaagaacugcuuggauug

SEQ ID NO: 1508863 - RNA, 19 nt, Artificial Sequence
  Description of Artificial Sequence: Synthetic oligonucleotide
  Antisense strand to SEQ ID NO: 1508862
caauccaagcaguucuuac

SEQ ID NO: 1508864 - RNA, 19 nt, Artificial Sequence
  Description of Artificial Sequence: Synthetic oligonucleotide
  Sense strand starting at position 363 of SEQ ID NO: 1244707
acccucuucccgggugauu

SEQ ID NO: 1508865 - RNA, 19 nt, Artificial Sequence
  Description of Artificial Sequence: Synthetic oligonucleotide
  Antisense strand to SEQ ID NO: 1508864
aaucacccgggaagagggu

SEQ ID NO: 1508866 - RNA, 19 nt, Artificial Sequence
  Description of Artificial Sequence: Synthetic oligonucleotide
  Sense strand starting at position 380 of SEQ ID NO: 1244707
uucgaaucagggcguuaaa

SEQ ID NO: 1508867 - RNA, 19 nt, Artificial Sequence
  Description of Artificial Sequence: Synthetic oligonucleotide
  Antisense strand to SEQ ID NO: 1508866
uuuaacgcccugauucgaa

SEQ ID NO: 1508868 - RNA, 19 nt, Artificial Sequence
  Description of Artificial Sequence: Synthetic oligonucleotide
  Sense strand starting at position 517 of SEQ ID NO: 1244707
gcuccagauccgggauaaa

SEQ ID NO: 1508869 - RNA, 19 nt, Artificial Sequence
  Description of Artificial Sequence: Synthetic oligonucleotide
  Antisense strand to SEQ ID NO: 1508868
uuuaucccggaucuggagc

SEQ ID NO: 1508870 - RNA, 19 nt, Artificial Sequence
  Description of Artificial Sequence: Synthetic oligonucleotide
  Sense strand starting at position 548 of SEQ ID NO: 1244707
ucauucuagauucgaggga

SEQ ID NO: 1508871 - RNA, 19 nt, Artificial Sequence
  Description of Artificial Sequence: Synthetic oligonucleotide
  Antisense strand to SEQ ID NO: 1508870
ucccucgaaucuagaauga

SEQ ID NO: 1508872 - RNA, 19 nt, Artificial Sequence
  Description of Artificial Sequence: Synthetic oligonucleotide
  Sense strand starting at position 610 of SEQ ID NO: 1244707
ggcagucaugcggauaaga

SEQ ID NO: 1508873 - RNA, 19 nt, Artificial Sequence
  Description of Artificial Sequence: Synthetic oligonucleotide
  Antisense strand to SEQ ID NO: 1508872
ucuuauccgcaugacugcc

SEQ ID NO: 1508874 - RNA, 19 nt, Artificial Sequence
  Description of Artificial Sequence: Synthetic oligonucleotide
  Sense strand starting at position 738 of SEQ ID NO: 1244707
caaacagcacgguauagau

SEQ ID NO: 1508875 - RNA, 19 nt, Artificial Sequence
  Description of Artificial Sequence: Synthetic oligonucleotide
  Antisense strand to SEQ ID NO: 1508874
aucuauaccgugcuguuug

SEQ ID NO: 1508876 - RNA, 19 nt, Artificial Sequence
  Description of Artificial Sequence: Synthetic oligonucleotide
  Sense strand starting at position 885 of SEQ ID NO: 1244707
cccaauacccaguguaaau

SEQ ID NO: 1508877 - RNA, 19 nt, Artificial Sequence
  Description of Artificial Sequence: Synthetic oligonucleotide
  Antisense strand to SEQ ID NO: 1508876
auuuacacuggguauuggg

SEQ ID NO: 1508878 - RNA, 19 nt, Artificial Sequence
  Description of Artificial Sequence: Synthetic oligonucleotide
  Sense strand starting at position 1171 of SEQ ID NO: 1244707
ugagcauguguauaagagu

SEQ ID NO: 1508879 - RNA, 19 nt, Artificial Sequence
  Description of Artificial Sequence: Synthetic oligonucleotide
  Antisense strand to SEQ ID NO: 1508878
acucuuauacacaugcuca

SEQ ID NO: 1508880 - RNA, 19 nt, Artificial Sequence
  Description of Artificial Sequence: Synthetic oligonucleotide
  Sense strand starting at position 1179 of SEQ ID NO: 1244707
uguauaagagucuauaugu

SEQ ID NO: 1508881 - RNA, 19 nt, Artificial Sequence
  Description of Artificial Sequence: Synthetic oligonucleotide
  Antisense strand to SEQ ID NO: 1508880
acauauagacucuuauaca

SEQ ID NO: 1508882 - RNA, 19 nt, Artificial Sequence
  Description of Artificial Sequence: Synthetic oligonucleotide
  Sense strand starting at position 1220 of SEQ ID NO: 1244707
aaagucuaguuguccagua

SEQ ID NO: 1508883 - RNA, 19 nt, Artificial Sequence
  Description of Artificial Sequence: Synthetic oligonucleotide
  Antisense strand to SEQ ID NO: 1508882
uacuggacaacuagacuuu

SEQ ID NO: 1508884 - RNA, 19 nt, Artificial Sequence
  Description of Artificial Sequence: Synthetic oligonucleotide
  Sense strand starting at position 1410 of SEQ ID NO: 1244707
uuagcaaugcgcugggaaa

SEQ ID NO: 1508885 - RNA, 19 nt, Artificial Sequence
  Description of Artificial Sequence: Synthetic oligonucleotide
  Antisense strand to SEQ ID NO: 1508884
uuucccagcgcauugcuaa

SEQ ID NO: 1508886 - RNA, 19 nt, Artificial Sequence
  Description of Artificial Sequence: Synthetic oligonucleotide
  Sense strand starting at position 1516 of SEQ ID NO: 1244707
cucgcaauacgcuggagau

SEQ ID NO: 1508887 - RNA, 19 nt, Artificial Sequence
  Description of Artificial Sequence: Synthetic oligonucleotide
  Antisense strand to SEQ ID NO: 1508886
aucuccagcguauugcgag

SEQ ID NO: 1508888 - RNA, 19 nt, Artificial Sequence
  Description of Artificial Sequence: Synthetic oligonucleotide
  Sense strand starting at position 1967 of SEQ ID NO: 1244707
guaacugauuuggaaacca

SEQ ID NO: 1508889 - RNA, 19 nt, Artificial Sequence
  Description of Artificial Sequence: Synthetic oligonucleotide
  Antisense strand to SEQ ID NO: 1508888
ugguuuccaaaucaguuac

SEQ ID NO: 1508890 - RNA, 19 nt, Artificial Sequence
  Description of Artificial Sequence: Synthetic oligonucleotide
  Sense strand starting at position 2029 of SEQ ID NO: 1244707
agagaagaguuuguuugaa

SEQ ID NO: 1508891 - RNA, 19 nt, Artificial Sequence
  Description of Artificial Sequence: Synthetic oligonucleotide
  Antisense strand to SEQ ID NO: 1508890
uucaaacaaacucuucucu

SEQ ID NO: 1508892 - RNA, 19 nt, Artificial Sequence
  Description of Artificial Sequence: Synthetic oligonucleotide
  Sense strand starting at position 2031 of SEQ ID NO: 1244707
agaagaguuuguuugaagg

SEQ ID NO: 1508893 - RNA, 19 nt, Artificial Sequence
  Description of Artificial Sequence: Synthetic oligonucleotide
  Antisense strand to SEQ ID NO: 1508892
ccuucaaacaaacucuucu

SEQ ID NO: 1508894 - RNA, 19 nt, Artificial Sequence
  Description of Artificial Sequence: Synthetic oligonucleotide
  Sense strand starting at position 2045 of SEQ ID NO: 1244707
gaaggucucgcgagaucga

SEQ ID NO: 1508895 - RNA, 19 nt, Artificial Sequence
  Description of Artificial Sequence: Synthetic oligonucleotide
  Antisense strand to SEQ ID NO: 1508894
ucgaucucgcgagaccuuc

SEQ ID NO: 1508896 - RNA, 19 nt, Artificial Sequence
  Description of Artificial Sequence: Synthetic oligonucleotide
  Sense strand starting at position 2144 of SEQ ID NO: 1244707
gagcacucucgcgagauuu

SEQ ID NO: 1508897 - RNA, 19 nt, Artificial Sequence
  Description of Artificial Sequence: Synthetic oligonucleotide
  Antisense strand to SEQ ID NO: 1508896
aaaucucgcgagagugcuc

SEQ ID NO: 1508898 - RNA, 19 nt, Artificial Sequence
  Description of Artificial Sequence: Synthetic oligonucleotide
  Sense strand starting at position 2146 of SEQ ID NO: 1244707
gcacucucgcgagauuuga

SEQ ID NO: 1508899 - RNA, 19 nt, Artificial Sequence
  Description of Artificial Sequence: Synthetic oligonucleotide
  Antisense strand to SEQ ID NO: 1508898
ucaaaucucgcgagagugc

SEQ ID NO: 1508900 - RNA, 19 nt, Artificial Sequence
  Description of Artificial Sequence: Synthetic oligonucleotide
  Sense strand starting at position 2185 of SEQ ID NO: 1244707
ggaggagagguuuguaaac

SEQ ID NO: 1508901 - RNA, 19 nt, Artificial Sequence
  Description of Artificial Sequence: Synthetic oligonucleotide
  Antisense strand to SEQ ID NO: 1508900
guuuacaaaccucuccucc

SEQ ID NO: 1508902 - RNA, 19 nt, Artificial Sequence
  Description of Artificial Sequence: Synthetic oligonucleotide
  Sense strand starting at position 3097 of SEQ ID NO: 1244707
gagguuuguccugggugaa

SEQ ID NO: 1508903 - RNA, 19 nt, Artificial Sequence
  Description of Artificial Sequence: Synthetic oligonucleotide
  Antisense strand to SEQ ID NO: 1508902
uucacccaggacaaaccuc

SEQ ID NO: 1508904 - RNA, 19 nt, Artificial Sequence
  Description of Artificial Sequence: Synthetic oligonucleotide
  Sense strand starting at position 3100 of SEQ ID NO: 1244707
guuuguccugggugaaacu

SEQ ID NO: 1508905 - RNA, 19 nt, Artificial Sequence
  Description of Artificial Sequence: Synthetic oligonucleotide
  Antisense strand to SEQ ID NO: 1508904
aguuucacccaggacaaac

SEQ ID NO: 1508906 - RNA, 19 nt, Artificial Sequence
  Description of Artificial Sequence: Synthetic oligonucleotide
  Sense strand starting at position 3201 of SEQ ID NO: 1244707
cuggaacuccgagguuauc

SEQ ID NO: 1508907 - RNA, 19 nt, Artificial Sequence
  Description of Artificial Sequence: Synthetic oligonucleotide
  Antisense strand to SEQ ID NO: 1508906
gauaaccucggaguuccag

SEQ ID NO: 1508908 - RNA, 19 nt, Artificial Sequence
  Description of Artificial Sequence: Synthetic oligonucleotide
  Sense strand starting at position 3286 of SEQ ID NO: 1244707
gcuaguuauugcuuauaug

SEQ ID NO: 1508909 - RNA, 19 nt, Artificial Sequence
  Description of Artificial Sequence: Synthetic oligonucleotide
  Antisense strand to SEQ ID NO: 1508908
cauauaagcaauaacuagc

SEQ ID NO: 1508910 - RNA, 19 nt, Artificial Sequence
  Description of Artificial Sequence: Synthetic oligonucleotide
  Sense strand starting at position 3287 of SEQ ID NO: 1244707
cuaguuauugcuuauauga

SEQ ID NO: 1508911 - RNA, 19 nt, Artificial Sequence
  Description of Artificial Sequence: Synthetic oligonucleotide
  Antisense strand to SEQ ID NO: 1508910
ucauauaagcaauaacuag

SEQ ID NO: 1508912 - RNA, 19 nt, Artificial Sequence
  Description of Artificial Sequence: Synthetic oligonucleotide
  Sense strand starting at position 3297 of SEQ ID NO: 1244707
cuuauaugacuuugggcaa

SEQ ID NO: 1508913 - RNA, 19 nt, Artificial Sequence
  Description of Artificial Sequence: Synthetic oligonucleotide
  Antisense strand to SEQ ID NO: 1508912
uugcccaaagucauauaag

SEQ ID NO: 1508914 - RNA, 19 nt, Artificial Sequence
  Description of Artificial Sequence: Synthetic oligonucleotide
  Sense strand starting at position 3464 of SEQ ID NO: 1244707
aguagcagucgaguuguuu

SEQ ID NO: 1508915 - RNA, 19 nt, Artificial Sequence
  Description of Artificial Sequence: Synthetic oligonucleotide
  Antisense strand to SEQ ID NO: 1508914
aaacaacucgacugcuacu

SEQ ID NO: 1508916 - RNA, 19 nt, Artificial Sequence
  Description of Artificial Sequence: Synthetic oligonucleotide
  Sense strand starting at position 3465 of SEQ ID NO: 1244707
guagcagucgaguuguuug

SEQ ID NO: 1508917 - RNA, 19 nt, Artificial Sequence
  Description of Artificial Sequence: Synthetic oligonucleotide
  Antisense strand to SEQ ID NO: 1508916
caaacaacucgacugcuac

SEQ ID NO: 1508918 - RNA, 19 nt, Artificial Sequence
  Description of Artificial Sequence: Synthetic oligonucleotide
  Sense strand starting at position 3470 of SEQ ID NO: 1244707
agucgaguuguuugugaga

SEQ ID NO: 1508919 - RNA, 19 nt, Artificial Sequence
  Description of Artificial Sequence: Synthetic oligonucleotide
  Antisense strand to SEQ ID NO: 1508918
ucucacaaacaacucgacu

SEQ ID NO: 1508920 - RNA, 19 nt, Artificial Sequence
  Description of Artificial Sequence: Synthetic oligonucleotide
  Sense strand starting at position 3477 of SEQ ID NO: 1244707
uuguuugugagauggguaa

SEQ ID NO: 1508921 - RNA, 19 nt, Artificial Sequence
  Description of Artificial Sequence: Synthetic oligonucleotide
  Antisense strand to SEQ ID NO: 1508920
uuacccaucucacaaacaa

SEQ ID NO: 1508922 - RNA, 19 nt, Artificial Sequence
  Description of Artificial Sequence: Synthetic oligonucleotide
  Sense strand starting at position 3479 of SEQ ID NO: 1244707
guuugugagauggguaauu

SEQ ID NO: 1508923 - RNA, 19 nt, Artificial Sequence
  Description of Artificial Sequence: Synthetic oligonucleotide
  Antisense strand to SEQ ID NO: 1508922
aauuacccaucucacaaac

SEQ ID NO: 1508924 - RNA, 19 nt, Artificial Sequence
  Description of Artificial Sequence: Synthetic oligonucleotide
  Sense strand starting at position 3785 of SEQ ID NO: 1244707
gggagugugucuguaugag

SEQ ID NO: 1508925 - RNA, 19 nt, Artificial Sequence
  Description of Artificial Sequence: Synthetic oligonucleotide
  Antisense strand to SEQ ID NO: 1508924
cucauacagacacacuccc

SEQ ID NO: 1508926 - RNA, 19 nt, Artificial Sequence
  Description of Artificial Sequence: Synthetic oligonucleotide
  Sense strand starting at position 3786 of SEQ ID NO: 1244707
ggagugugucuguaugagu

SEQ ID NO: 1508927 - RNA, 19 nt, Artificial Sequence
  Description of Artificial Sequence: Synthetic oligonucleotide
  Antisense strand to SEQ ID NO: 1508926
acucauacagacacacucc

SEQ ID NO: 1508928 - RNA, 19 nt, Artificial Sequence
  Description of Artificial Sequence: Synthetic oligonucleotide
  Sense strand starting at position 3842 of SEQ ID NO: 1244707
gaaagugacaugggugguu

SEQ ID NO: 1508929 - RNA, 19 nt, Artificial Sequence
  Description of Artificial Sequence: Synthetic oligonucleotide
  Antisense strand to SEQ ID NO: 1508928
aaccacccaugucacuuuc

SEQ ID NO: 1508930 - RNA, 19 nt, Artificial Sequence
  Description of Artificial Sequence: Synthetic oligonucleotide
  Sense strand starting at position 3847 of SEQ ID NO: 1244707
ugacaugggugguuugaga

SEQ ID NO: 1508931 - RNA, 19 nt, Artificial Sequence
  Description of Artificial Sequence: Synthetic oligonucleotide
  Antisense strand to SEQ ID NO: 1508930
ucucaaaccacccauguca

SEQ ID NO: 1508932 - RNA, 19 nt, Artificial Sequence
  Description of Artificial Sequence: Synthetic oligonucleotide
  Sense strand starting at position 3851 of SEQ ID NO: 1244707
augggugguuugagaauug

SEQ ID NO: 1508933 - RNA, 19 nt, Artificial Sequence
  Description of Artificial Sequence: Synthetic oligonucleotide
  Antisense strand to SEQ ID NO: 1508932
caauucucaaaccacccau

SEQ ID NO: 1508934 - RNA, 19 nt, Artificial Sequence
  Description of Artificial Sequence: Synthetic oligonucleotide
  Sense strand starting at position 3914 of SEQ ID NO: 1244707
ugcaguauaggguacagau

SEQ ID NO: 1508935 - RNA, 19 nt, Artificial Sequence
  Description of Artificial Sequence: Synthetic oligonucleotide
  Antisense strand to SEQ ID NO: 1508934
aucuguacccuauacugca

SEQ ID NO: 1508936 - RNA, 19 nt, Artificial Sequence
  Description of Artificial Sequence: Synthetic oligonucleotide
  Sense strand starting at position 3966 of SEQ ID NO: 1244707
agaguuuggugaagggaug

SEQ ID NO: 1508937 - RNA, 19 nt, Artificial Sequence
  Description of Artificial Sequence: Synthetic oligonucleotide
  Antisense strand to SEQ ID NO: 1508936
caucccuucaccaaacucu

SEQ ID NO: 1508938 - RNA, 19 nt, Artificial Sequence
  Description of Artificial Sequence: Synthetic oligonucleotide
  Sense strand starting at position 9 of SEQ ID NO: 1244708
aauguaagcccguggaaac

SEQ ID NO: 1508939 - RNA, 19 nt, Artificial Sequence
  Description of Artificial Sequence: Synthetic oligonucleotide
  Antisense strand to SEQ ID NO: 1508938
guuuccacgggcuuacauu

SEQ ID NO: 1508940 - RNA, 19 nt, Artificial Sequence
  Description of Artificial Sequence: Synthetic oligonucleotide
  Sense strand starting at position 26 of SEQ ID NO: 1244708
acacgaccuuggucucauu

SEQ ID NO: 1508941 - RNA, 19 nt, Artificial Sequence
  Description of Artificial Sequence: Synthetic oligonucleotide
  Antisense strand to SEQ ID NO: 1508940
aaugagaccaaggucgugu

SEQ ID NO: 1508942 - RNA, 19 nt, Artificial Sequence
  Description of Artificial Sequence: Synthetic oligonucleotide
  Sense strand starting at position 58 of SEQ ID NO: 1244708
auuuccgguuccuggaaua

SEQ ID NO: 1508943 - RNA, 19 nt, Artificial Sequence
  Description of Artificial Sequence: Synthetic oligonucleotide
  Antisense strand to SEQ ID NO: 1508942
uauuccaggaaccggaaau

SEQ ID NO: 1508944 - RNA, 19 nt, Artificial Sequence
  Description of Artificial Sequence: Synthetic oligonucleotide
  Sense strand starting at position 73 of SEQ ID NO: 1244708
aauagagcccaucauggua

SEQ ID NO: 1508945 - RNA, 19 nt, Artificial Sequence
  Description of Artificial Sequence: Synthetic oligonucleotide
  Antisense strand to SEQ ID NO: 1508944
uaccaugaugggcucuauu

SEQ ID NO: 1508946 - RNA, 19 nt, Artificial Sequence
  Description of Artificial Sequence: Synthetic oligonucleotide
  Sense strand starting at position 81 of SEQ ID NO: 1244708
ccaucaugguaagugcuua

SEQ ID NO: 1508947 - RNA, 19 nt, Artificial Sequence
  Description of Artificial Sequence: Synthetic oligonucleotide
  Antisense strand to SEQ ID NO: 1508946
uaagcacuuaccaugaugg

SEQ ID NO: 1508948 - RNA, 19 nt, Artificial Sequence
  Description of Artificial Sequence: Synthetic oligonucleotide
  Sense strand starting at position 86 of SEQ ID NO: 1244708
augguaagugcuuaauaau

SEQ ID NO: 1508949 - RNA, 19 nt, Artificial Sequence
  Description of Artificial Sequence: Synthetic oligonucleotide
  Antisense strand to SEQ ID NO: 1508948
auuauuaagcacuuaccau

SEQ ID NO: 1508950 - RNA, 19 nt, Artificial Sequence
  Description of Artificial Sequence: Synthetic oligonucleotide
  Sense strand starting at position 122 of SEQ ID NO: 1244708
acaggcuugauaggcaauu

SEQ ID NO: 1508951 - RNA, 19 nt, Artificial Sequence
  Description of Artificial Sequence: Synthetic oligonucleotide
  Antisense strand to SEQ ID NO: 1508950
aauugccuaucaagccugu

SEQ ID NO: 1508952 - RNA, 19 nt, Artificial Sequence
  Description of Artificial Sequence: Synthetic oligonucleotide
  Sense strand starting at position 134 of SEQ ID NO: 1244708
ggcaauuguuggucccaga

SEQ ID NO: 1508953 - RNA, 19 nt, Artificial Sequence
  Description of Artificial Sequence: Synthetic oligonucleotide
  Antisense strand to SEQ ID NO: 1508952
ucugggaccaacaauugcc

SEQ ID NO: 1508954 - RNA, 19 nt, Artificial Sequence
  Description of Artificial Sequence: Synthetic oligonucleotide
  Sense strand starting at position 141 of SEQ ID NO: 1244708
guuggucccagagaucaac

SEQ ID NO: 1508955 - RNA, 19 nt, Artificial Sequence
  Description of Artificial Sequence: Synthetic oligonucleotide
  Antisense strand to SEQ ID NO: 1508954
guugaucucugggaccaac

SEQ ID NO: 1508956 - RNA, 19 nt, Artificial Sequence
  Description of Artificial Sequence: Synthetic oligonucleotide
  Sense strand starting at position 190 of SEQ ID NO: 1244708
gcaaacuccugcucacuga

SEQ ID NO: 1508957 - RNA, 19 nt, Artificial Sequence
  Description of Artificial Sequence: Synthetic oligonucleotide
  Antisense strand to SEQ ID NO: 1508956
ucagugagcaggaguuugc

SEQ ID NO: 1508958 - RNA, 19 nt, Artificial Sequence
  Description of Artificial Sequence: Synthetic oligonucleotide
  Sense strand starting at position 809 of SEQ ID NO: 1244708
uaaccagaguggucugacu

SEQ ID NO: 1508959 - RNA, 19 nt, Artificial Sequence
  Description of Artificial Sequence: Synthetic oligonucleotide
  Antisense strand to SEQ ID NO: 1508958
agucagaccacucugguua

SEQ ID NO: 1508960 - RNA, 19 nt, Artificial Sequence
  Description of Artificial Sequence: Synthetic oligonucleotide
  Sense strand starting at position 894 of SEQ ID NO: 1244708
guucccuacgucugaaaua

SEQ ID NO: 1508961 - RNA, 19 nt, Artificial Sequence
  Description of Artificial Sequence: Synthetic oligonucleotide
  Antisense strand to SEQ ID NO: 1508960
uauuucagacguagggaac

SEQ ID NO: 1508962 - RNA, 19 nt, Artificial Sequence
  Description of Artificial Sequence: Synthetic oligonucleotide
  Sense strand starting at position 1051 of SEQ ID NO: 1244708
acauacggucuguagaguu

SEQ ID NO: 1508963 - RNA, 19 nt, Artificial Sequence
  Description of Artificial Sequence: Synthetic oligonucleotide
  Antisense strand to SEQ ID NO: 1508962
aacucuacagaccguaugu

SEQ ID NO: 1508964 - RNA, 19 nt, Artificial Sequence
  Description of Artificial Sequence: Synthetic oligonucleotide
  Sense strand starting at position 1061 of SEQ ID NO: 1244708
uguagaguuguacaaagca

SEQ ID NO: 1508965 - RNA, 19 nt, Artificial Sequence
  Description of Artificial Sequence: Synthetic oligonucleotide
  Antisense strand to SEQ ID NO: 1508964
ugcuuuguacaacucuaca

SEQ ID NO: 1508966 - RNA, 19 nt, Artificial Sequence
  Description of Artificial Sequence: Synthetic oligonucleotide
  Sense strand starting at position 1085 of SEQ ID NO: 1244708
agaagucuguaaccacaca

SEQ ID NO: 1508967 - RNA, 19 nt, Artificial Sequence
  Description of Artificial Sequence: Synthetic oligonucleotide
  Antisense strand to SEQ ID NO: 1508966
ugugugguuacagacuucu

SEQ ID NO: 1508968 - RNA, 19 nt, Artificial Sequence
  Description of Artificial Sequence: Synthetic oligonucleotide
  Sense strand starting at position 1112 of SEQ ID NO: 1244708
gguaguugguaacugauca

SEQ ID NO: 1508969 - RNA, 19 nt, Artificial Sequence
  Description of Artificial Sequence: Synthetic oligonucleotide
  Antisense strand to SEQ ID NO: 1508968
ugaucaguuaccaacuacc

SEQ ID NO: 1508970 - RNA, 19 nt, Artificial Sequence
  Description of Artificial Sequence: Synthetic oligonucleotide
  Sense strand starting at position 1162 of SEQ ID NO: 1244708
gguagaccugucgauaauu

SEQ ID NO: 1508971 - RNA, 19 nt, Artificial Sequence
  Description of Artificial Sequence: Synthetic oligonucleotide
  Antisense strand to SEQ ID NO: 1508970
aauuaucgacaggucuacc

SEQ ID NO: 1508972 - RNA, 19 nt, Artificial Sequence
  Description of Artificial Sequence: Synthetic oligonucleotide
  Sense strand starting at position 1164 of SEQ ID NO: 1244708
uagaccugucgauaauucu

SEQ ID NO: 1508973 - RNA, 19 nt, Artificial Sequence
  Description of Artificial Sequence: Synthetic oligonucleotide
  Antisense strand to SEQ ID NO: 1508972
agaauuaucgacaggucua

SEQ ID NO: 1508974 - RNA, 19 nt, Artificial Sequence
  Description of Artificial Sequence: Synthetic oligonucleotide
  Sense strand starting at position 1167 of SEQ ID NO: 1244708
accugucgauaauucuaua

SEQ ID NO: 1508975 - RNA, 19 nt, Artificial Sequence
  Description of Artificial Sequence: Synthetic oligonucleotide
  Antisense strand to SEQ ID NO: 1508974
uauagaauuaucgacaggu

SEQ ID NO: 1508976 - RNA, 19 nt, Artificial Sequence
  Description of Artificial Sequence: Synthetic oligonucleotide
  Sense strand starting at position 1172 of SEQ ID NO: 1244708
ucgauaauucuauacuguu

SEQ ID NO: 1508977 - RNA, 19 nt, Artificial Sequence
  Description of Artificial Sequence: Synthetic oligonucleotide
  Antisense strand to SEQ ID NO: 1508976
aacaguauagaauuaucga

SEQ ID NO: 1508978 - RNA, 19 nt, Artificial Sequence
  Description of Artificial Sequence: Synthetic oligonucleotide
  Sense strand starting at position 1188 of SEQ ID NO: 1244708
guuugaauuuguuauggca

SEQ ID NO: 1508979 - RNA, 19 nt, Artificial Sequence
  Description of Artificial Sequence: Synthetic oligonucleotide
  Antisense strand to SEQ ID NO: 1508978
ugccauaacaaauucaaac

SEQ ID NO: 1508980 - RNA, 19 nt, Artificial Sequence
  Description of Artificial Sequence: Synthetic oligonucleotide
  Sense strand starting at position 1190 of SEQ ID NO: 1244708
uugaauuuguuauggcaaa

SEQ ID NO: 1508981 - RNA, 19 nt, Artificial Sequence
  Description of Artificial Sequence: Synthetic oligonucleotide
  Antisense strand to SEQ ID NO: 1508980
uuugccauaacaaauucaa

SEQ ID NO: 1508982 - RNA, 19 nt, Artificial Sequence
  Description of Artificial Sequence: Synthetic oligonucleotide
  Sense strand starting at position 1254 of SEQ ID NO: 1244708
guucuugaauacuuguagu

SEQ ID NO: 1508983 - RNA, 19 nt, Artificial Sequence
  Description of Artificial Sequence: Synthetic oligonucleotide
  Antisense strand to SEQ ID NO: 1508982
acuacaaguauucaagaac

SEQ ID NO: 1508984 - RNA, 19 nt, Artificial Sequence
  Description of Artificial Sequence: Synthetic oligonucleotide
  Sense strand starting at position 2087 of SEQ ID NO: 1244708
gcaagauaucaccggguaa

SEQ ID NO: 1508985 - RNA, 19 nt, Artificial Sequence
  Description of Artificial Sequence: Synthetic oligonucleotide
  Antisense strand to SEQ ID NO: 1508984
uuacccggugauaucuugc

SEQ ID NO: 1508986 - RNA, 19 nt, Artificial Sequence
  Description of Artificial Sequence: Synthetic oligonucleotide
  Sense strand starting at position 2089 of SEQ ID NO: 1244708
aagauaucaccggguaaug

SEQ ID NO: 1508987 - RNA, 19 nt, Artificial Sequence
  Description of Artificial Sequence: Synthetic oligonucleotide
  Antisense strand to SEQ ID NO: 1508986
cauuacccggugauaucuu

SEQ ID NO: 1508988 - RNA, 19 nt, Artificial Sequence
  Description of Artificial Sequence: Synthetic oligonucleotide
  Sense strand starting at position 2091 of SEQ ID NO: 1244708
gauaucaccggguaaugua

SEQ ID NO: 1508989 - RNA, 19 nt, Artificial Sequence
  Description of Artificial Sequence: Synthetic oligonucleotide
  Antisense strand to SEQ ID NO: 1508988
uacauuacccggugauauc

SEQ ID NO: 1508990 - RNA, 19 nt, Artificial Sequence
  Description of Artificial Sequence: Synthetic oligonucleotide
  Sense strand starting at position 2344 of SEQ ID NO: 1244708
augccagaacccggauaau

SEQ ID NO: 1508991 - RNA, 19 nt, Artificial Sequence
  Description of Artificial Sequence: Synthetic oligonucleotide
  Antisense strand to SEQ ID NO: 1508990
auuauccggguucuggcau

SEQ ID NO: 1508992 - RNA, 19 nt, Artificial Sequence
  Description of Artificial Sequence: Synthetic oligonucleotide
  Sense strand starting at position 2353 of SEQ ID NO: 1244708
cccggauaaucucaacuug

SEQ ID NO: 1508993 - RNA, 19 nt, Artificial Sequence
  Description of Artificial Sequence: Synthetic oligonucleotide
  Antisense strand to SEQ ID NO: 1508992
caaguugagauuauccggg

SEQ ID NO: 1508994 - RNA, 19 nt, Artificial Sequence
  Description of Artificial Sequence: Synthetic oligonucleotide
  Sense strand starting at position 2361 of SEQ ID NO: 1244708
aucucaacuugguaaagau

SEQ ID NO: 1508995 - RNA, 19 nt, Artificial Sequence
  Description of Artificial Sequence: Synthetic oligonucleotide
  Antisense strand to SEQ ID NO: 1508994
aucuuuaccaaguugagau

SEQ ID NO: 1508996 - RNA, 19 nt, Artificial Sequence
  Description of Artificial Sequence: Synthetic oligonucleotide
  Sense strand starting at position 2418 of SEQ ID NO: 1244708
gagaauagaugagaacagu

SEQ ID NO: 1508997 - RNA, 19 nt, Artificial Sequence
  Description of Artificial Sequence: Synthetic oligonucleotide
  Antisense strand to SEQ ID NO: 1508996
acuguucucaucuauucuc

SEQ ID NO: 1508998 - RNA, 19 nt, Artificial Sequence
  Description of Artificial Sequence: Synthetic oligonucleotide
  Sense strand starting at position 2714 of SEQ ID NO: 1244708
aguggaauaacccgaugaa

SEQ ID NO: 1508999 - RNA, 19 nt, Artificial Sequence
  Description of Artificial Sequence: Synthetic oligonucleotide
  Antisense strand to SEQ ID NO: 1508998
uucaucggguuauuccacu

SEQ ID NO: 1509000 - RNA, 19 nt, Artificial Sequence
  Description of Artificial Sequence: Synthetic oligonucleotide
  Sense strand starting at position 2726 of SEQ ID NO: 1244708
cgaugaagccgcguagagu

SEQ ID NO: 1509001 - RNA, 19 nt, Artificial Sequence
  Description of Artificial Sequence: Synthetic oligonucleotide
  Antisense strand to SEQ ID NO: 1509000
acucuacgcggcuucaucg

SEQ ID NO: 1509002 - RNA, 19 nt, Artificial Sequence
  Description of Artificial Sequence: Synthetic oligonucleotide
  Sense strand starting at position 2778 of SEQ ID NO: 1244708
gggcaaucuuguuuccucu

SEQ ID NO: 1509003 - RNA, 19 nt, Artificial Sequence
  Description of Artificial Sequence: Synthetic oligonucleotide
  Antisense strand to SEQ ID NO: 1509002
agaggaaacaagauugccc

SEQ ID NO: 1509004 - RNA, 19 nt, Artificial Sequence
  Description of Artificial Sequence: Synthetic oligonucleotide
  Sense strand starting at position 2822 of SEQ ID NO: 1244708
ugcccagcguuauucugaa

SEQ ID NO: 1509005 - RNA, 19 nt, Artificial Sequence
  Description of Artificial Sequence: Synthetic oligonucleotide
  Antisense strand to SEQ ID NO: 1509004
uucagaauaacgcugggca

SEQ ID NO: 1509006 - RNA, 19 nt, Artificial Sequence
  Description of Artificial Sequence: Synthetic oligonucleotide
  Sense strand starting at position 2877 of SEQ ID NO: 1244708
caguaugugucuuuaaagg

SEQ ID NO: 1509007 - RNA, 19 nt, Artificial Sequence
  Description of Artificial Sequence: Synthetic oligonucleotide
  Antisense strand to SEQ ID NO: 1509006
ccuuuaaagacacauacug

SEQ ID NO: 1509008 - RNA, 19 nt, Artificial Sequence
  Description of Artificial Sequence: Synthetic oligonucleotide
  Sense strand starting at position 2885 of SEQ ID NO: 1244708
gucuuuaaaggacaagcau

SEQ ID NO: 1509009 - RNA, 19 nt, Artificial Sequence
  Description of Artificial Sequence: Synthetic oligonucleotide
  Antisense strand to SEQ ID NO: 1509008
augcuuguccuuuaaagac

SEQ ID NO: 1509010 - RNA, 19 nt, Artificial Sequence
  Description of Artificial Sequence: Synthetic oligonucleotide
  Sense strand starting at position 2988 of SEQ ID NO: 1244708
augaauuaguguuuacacu

SEQ ID NO: 1509011 - RNA, 19 nt, Artificial Sequence
  Description of Artificial Sequence: Synthetic oligonucleotide
  Antisense strand to SEQ ID NO: 1509010
aguguaaacacuaauucau

SEQ ID NO: 1509012 - RNA, 19 nt, Artificial Sequence
  Description of Artificial Sequence: Synthetic oligonucleotide
  Sense strand starting at position 2989 of SEQ ID NO: 1244708
ugaauuaguguuuacacuu

SEQ ID NO: 1509013 - RNA, 19 nt, Artificial Sequence
  Description of Artificial Sequence: Synthetic oligonucleotide
  Antisense strand to SEQ ID NO: 1509012
aaguguaaacacuaauuca

SEQ ID NO: 1509014 - RNA, 19 nt, Artificial Sequence
  Description of Artificial Sequence: Synthetic oligonucleotide
  Sense strand starting at position 3576 of SEQ ID NO: 1244708
gcugaaauguccuucuuaa

SEQ ID NO: 1509015 - RNA, 19 nt, Artificial Sequence
  Description of Artificial Sequence: Synthetic oligonucleotide
  Antisense strand to SEQ ID NO: 1509014
uuaagaaggacauuucagc

SEQ ID NO: 1509016 - RNA, 19 nt, Artificial Sequence
  Description of Artificial Sequence: Synthetic oligonucleotide
  Sense strand starting at position 3945 of SEQ ID NO: 1244708
guuugucugaauugagauc

SEQ ID NO: 1509017 - RNA, 19 nt, Artificial Sequence
  Description of Artificial Sequence: Synthetic oligonucleotide
  Antisense strand to SEQ ID NO: 1509016
gaucucaauucagacaaac

SEQ ID NO: 1509018 - RNA, 19 nt, Artificial Sequence
  Description of Artificial Sequence: Synthetic oligonucleotide
  Sense strand starting at position 3 of SEQ ID NO: 1244709
gugguuggagaauggcaau

SEQ ID NO: 1509019 - RNA, 19 nt, Artificial Sequence
  Description of Artificial Sequence: Synthetic oligonucleotide
  Antisense strand to SEQ ID NO: 1509018
auugccauucuccaaccac

SEQ ID NO: 1509020 - RNA, 19 nt, Artificial Sequence
  Description of Artificial Sequence: Synthetic oligonucleotide
  Sense strand starting at position 171 of SEQ ID NO: 1244709
gagguaucgagcugacuuu

SEQ ID NO: 1509021 - RNA, 19 nt, Artificial Sequence
  Description of Artificial Sequence: Synthetic oligonucleotide
  Antisense strand to SEQ ID NO: 1509020
aaagucagcucgauaccuc

SEQ ID NO: 1509022 - RNA, 19 nt, Artificial Sequence
  Description of Artificial Sequence: Synthetic oligonucleotide
  Sense strand starting at position 403 of SEQ ID NO: 1244709
agauguugagauuguuaau

SEQ ID NO: 1509023 - RNA, 19 nt, Artificial Sequence
  Description of Artificial Sequence: Synthetic oligonucleotide
  Antisense strand to SEQ ID NO: 1509022
auuaacaaucucaacaucu

SEQ ID NO: 1509024 - RNA, 19 nt, Artificial Sequence
  Description of Artificial Sequence: Synthetic oligonucleotide
  Sense strand starting at position 455 of SEQ ID NO: 1244709
cucucugacguauguuaaa

SEQ ID NO: 1509025 - RNA, 19 nt, Artificial Sequence
  Description of Artificial Sequence: Synthetic oligonucleotide
  Antisense strand to SEQ ID NO: 1509024
uuuaacauacgucagagag

SEQ ID NO: 1509026 - RNA, 19 nt, Artificial Sequence
  Description of Artificial Sequence: Synthetic oligonucleotide
  Sense strand starting at position 558 of SEQ ID NO: 1244709
caggauucgcacuaaugcu

SEQ ID NO: 1509027 - RNA, 19 nt, Artificial Sequence
  Description of Artificial Sequence: Synthetic oligonucleotide
  Antisense strand to SEQ ID NO: 1509026
agcauuagugcgaauccug

SEQ ID NO: 1509028 - RNA, 19 nt, Artificial Sequence
  Description of Artificial Sequence: Synthetic oligonucleotide
  Sense strand starting at position 589 of SEQ ID NO: 1244709
gcauuugucucccucgauc

SEQ ID NO: 1509029 - RNA, 19 nt, Artificial Sequence
  Description of Artificial Sequence: Synthetic oligonucleotide
  Antisense strand to SEQ ID NO: 1509028
gaucgagggagacaaaugc

SEQ ID NO: 1509030 - RNA, 19 nt, Artificial Sequence
  Description of Artificial Sequence: Synthetic oligonucleotide
  Sense strand starting at position 1033 of SEQ ID NO: 1244709
uccagaaagucugauucca

SEQ ID NO: 1509031 - RNA, 19 nt, Artificial Sequence
  Description of Artificial Sequence: Synthetic oligonucleotide
  Antisense strand to SEQ ID NO: 1509030
uggaaucagacuuucugga

SEQ ID NO: 1509032 - RNA, 19 nt, Artificial Sequence
  Description of Artificial Sequence: Synthetic oligonucleotide
  Sense strand starting at position 1401 of SEQ ID NO: 1244709
ccaucagauggguguguau

SEQ ID NO: 1509033 - RNA, 19 nt, Artificial Sequence
  Description of Artificial Sequence: Synthetic oligonucleotide
  Antisense strand to SEQ ID NO: 1509032
auacacacccaucugaugg

SEQ ID NO: 1509034 - RNA, 19 nt, Artificial Sequence
  Description of Artificial Sequence: Synthetic oligonucleotide
  Sense strand starting at position 1414 of SEQ ID NO: 1244709
guguauagggcagaucaga

SEQ ID NO: 1509035 - RNA, 19 nt, Artificial Sequence
  Description of Artificial Sequence: Synthetic oligonucleotide
  Antisense strand to SEQ ID NO: 1509034
ucugaucugcccuauacac

SEQ ID NO: 1509036 - RNA, 19 nt, Artificial Sequence
  Description of Artificial Sequence: Synthetic oligonucleotide
  Sense strand starting at position 1538 of SEQ ID NO: 1244709
gaggaucugcccugaaggu

SEQ ID NO: 1509037 - RNA, 19 nt, Artificial Sequence
  Description of Artificial Sequence: Synthetic oligonucleotide
  Antisense strand to SEQ ID NO: 1509036
accuucagggcagauccuc

SEQ ID NO: 1509038 - RNA, 19 nt, Artificial Sequence
  Description of Artificial Sequence: Synthetic oligonucleotide
  Sense strand starting at position 1568 of SEQ ID NO: 1244709
gcccucuucuuaccaugua

SEQ ID NO: 1509039 - RNA, 19 nt, Artificial Sequence
  Description of Artificial Sequence: Synthetic oligonucleotide
  Antisense strand to SEQ ID NO: 1509038
uacaugguaagaagagggc

SEQ ID NO: 1509040 - RNA, 19 nt, Artificial Sequence
  Description of Artificial Sequence: Synthetic oligonucleotide
  Sense strand starting at position 1571 of SEQ ID NO: 1244709
cucuucuuaccauguagau

SEQ ID NO: 1509041 - RNA, 19 nt, Artificial Sequence
  Description of Artificial Sequence: Synthetic oligonucleotide
  Antisense strand to SEQ ID NO: 1509040
aucuacaugguaagaagag

SEQ ID NO: 1509042 - RNA, 19 nt, Artificial Sequence
  Description of Artificial Sequence: Synthetic oligonucleotide
  Sense strand starting at position 1814 of SEQ ID NO: 1244709
ggaagacauuucgguagug

SEQ ID NO: 1509043 - RNA, 19 nt, Artificial Sequence
  Description of Artificial Sequence: Synthetic oligonucleotide
  Antisense strand to SEQ ID NO: 1509042
cacuaccgaaaugucuucc

SEQ ID NO: 1509044 - RNA, 19 nt, Artificial Sequence
  Description of Artificial Sequence: Synthetic oligonucleotide
  Sense strand starting at position 1855 of SEQ ID NO: 1244709
ugcaguucuccuugcaacu

SEQ ID NO: 1509045 - RNA, 19 nt, Artificial Sequence
  Description of Artificial Sequence: Synthetic oligonucleotide
  Antisense strand to SEQ ID NO: 1509044
aguugcaaggagaacugca

SEQ ID NO: 1509046 - RNA, 19 nt, Artificial Sequence
  Description of Artificial Sequence: Synthetic oligonucleotide
  Sense strand starting at position 1931 of SEQ ID NO: 1244709
ccaggccacucaucaagaa

SEQ ID NO: 1509047 - RNA, 19 nt, Artificial Sequence
  Description of Artificial Sequence: Synthetic oligonucleotide
  Antisense strand to SEQ ID NO: 1509046
uucuugaugaguggccugg

SEQ ID NO: 1509048 - RNA, 19 nt, Artificial Sequence
  Description of Artificial Sequence: Synthetic oligonucleotide
  Sense strand starting at position 2062 of SEQ ID NO: 1244709
ugcagaagauaagaauuua

SEQ ID NO: 1509049 - RNA, 19 nt, Artificial Sequence
  Description of Artificial Sequence: Synthetic oligonucleotide
  Antisense strand to SEQ ID NO: 1509048
uaaauucuuaucuucugca

SEQ ID NO: 1509050 - RNA, 19 nt, Artificial Sequence
  Description of Artificial Sequence: Synthetic oligonucleotide
  Sense strand starting at position 2094 of SEQ ID NO: 1244709
gggugucagggucaaaugu

SEQ ID NO: 1509051 - RNA, 19 nt, Artificial Sequence
  Description of Artificial Sequence: Synthetic oligonucleotide
  Antisense strand to SEQ ID NO: 1509050
acauuugacccugacaccc

SEQ ID NO: 1509052 - RNA, 19 nt, Artificial Sequence
  Description of Artificial Sequence: Synthetic oligonucleotide
  Sense strand starting at position 2109 of SEQ ID NO: 1244709
augucaaguggucaaacgu

SEQ ID NO: 1509053 - RNA, 19 nt, Artificial Sequence
  Description of Artificial Sequence: Synthetic oligonucleotide
  Antisense strand to SEQ ID NO: 1509052
acguuugaccacuugacau

SEQ ID NO: 1509054 - RNA, 19 nt, Artificial Sequence
  Description of Artificial Sequence: Synthetic oligonucleotide
  Sense strand starting at position 2118 of SEQ ID NO: 1244709
ggucaaacgucagcuggaa

SEQ ID NO: 1509055 - RNA, 19 nt, Artificial Sequence
  Description of Artificial Sequence: Synthetic oligonucleotide
  Antisense strand to SEQ ID NO: 1509054
uuccagcugacguuugacc

SEQ ID NO: 1509056 - RNA, 19 nt, Artificial Sequence
  Description of Artificial Sequence: Synthetic oligonucleotide
  Sense strand starting at position 2120 of SEQ ID NO: 1244709
ucaaacgucagcuggaauu

SEQ ID NO: 1509057 - RNA, 19 nt, Artificial Sequence
  Description of Artificial Sequence: Synthetic oligonucleotide
  Antisense strand to SEQ ID NO: 1509056
aauuccagcugacguuuga

SEQ ID NO: 1509058 - RNA, 19 nt, Artificial Sequence
  Description of Artificial Sequence: Synthetic oligonucleotide
  Sense strand starting at position 2130 of SEQ ID NO: 1244709
gcuggaauuugggagucaa

SEQ ID NO: 1509059 - RNA, 19 nt, Artificial Sequence
  Description of Artificial Sequence: Synthetic oligonucleotide
  Antisense strand to SEQ ID NO: 1509058
uugacucccaaauuccagc

SEQ ID NO: 1509060 - RNA, 19 nt, Artificial Sequence
  Description of Artificial Sequence: Synthetic oligonucleotide
  Sense strand starting at position 2170 of SEQ ID NO: 1244709
auagaaaucuaggagauuc

SEQ ID NO: 1509061 - RNA, 19 nt, Artificial Sequence
  Description of Artificial Sequence: Synthetic oligonucleotide
  Antisense strand to SEQ ID NO: 1509060
gaaucuccuagauuucuau

SEQ ID NO: 1509062 - RNA, 19 nt, Artificial Sequence
  Description of Artificial Sequence: Synthetic oligonucleotide
  Sense strand starting at position 2180 of SEQ ID NO: 1244709
aggagauucuggugagaag

SEQ ID NO: 1509063 - RNA, 19 nt, Artificial Sequence
  Description of Artificial Sequence: Synthetic oligonucleotide
  Antisense strand to SEQ ID NO: 1509062
cuucucaccagaaucuccu

SEQ ID NO: 1509064 - RNA, 19 nt, Artificial Sequence
  Description of Artificial Sequence: Synthetic oligonucleotide
  Sense strand starting at position 2376 of SEQ ID NO: 1244709
gggagaagagccggugauu

SEQ ID NO: 1509065 - RNA, 19 nt, Artificial Sequence
  Description of Artificial Sequence: Synthetic oligonucleotide
  Antisense strand to SEQ ID NO: 1509064
aaucaccggcucuucuccc

SEQ ID NO: 1509066 - RNA, 19 nt, Artificial Sequence
  Description of Artificial Sequence: Synthetic oligonucleotide
  Sense strand starting at position 2387 of SEQ ID NO: 1244709
cggugauuuccucgagcca

SEQ ID NO: 1509067 - RNA, 19 nt, Artificial Sequence
  Description of Artificial Sequence: Synthetic oligonucleotide
  Antisense strand to SEQ ID NO: 1509066
uggcucgaggaaaucaccg

SEQ ID NO: 1509068 - RNA, 19 nt, Artificial Sequence
  Description of Artificial Sequence: Synthetic oligonucleotide
  Sense strand starting at position 2407 of SEQ ID NO: 1244709
caacgagaucucgauccga

SEQ ID NO: 1509069 - RNA, 19 nt, Artificial Sequence
  Description of Artificial Sequence: Synthetic oligonucleotide
  Antisense strand to SEQ ID NO: 1509068
ucggaucgagaucucguug

SEQ ID NO: 1509070 - RNA, 19 nt, Artificial Sequence
  Description of Artificial Sequence: Synthetic oligonucleotide
  Sense strand starting at position 2411 of SEQ ID NO: 1244709
gagaucucgauccgagaaa

SEQ ID NO: 1509071 - RNA, 19 nt, Artificial Sequence
  Description of Artificial Sequence: Synthetic oligonucleotide
  Antisense strand to SEQ ID NO: 1509070
uuucucggaucgagaucuc

SEQ ID NO: 1509072 - RNA, 19 nt, Artificial Sequence
  Description of Artificial Sequence: Synthetic oligonucleotide
  Sense strand starting at position 2412 of SEQ ID NO: 1244709
agaucucgauccgagaaag

SEQ ID NO: 1509073 - RNA, 19 nt, Artificial Sequence
  Description of Artificial Sequence: Synthetic oligonucleotide
  Antisense strand to SEQ ID NO: 1509072
cuuucucggaucgagaucu

SEQ ID NO: 1509074 - RNA, 19 nt, Artificial Sequence
  Description of Artificial Sequence: Synthetic oligonucleotide
  Sense strand starting at position 2437 of SEQ ID NO: 1244709
ggacucuggccaggaauga

SEQ ID NO: 1509075 - RNA, 19 nt, Artificial Sequence
  Description of Artificial Sequence: Synthetic oligonucleotide
  Antisense strand to SEQ ID NO: 1509074
ucauuccuggccagagucc

SEQ ID NO: 1509076 - RNA, 19 nt, Artificial Sequence
  Description of Artificial Sequence: Synthetic oligonucleotide
  Sense strand starting at position 2677 of SEQ ID NO: 1244709
guuggaauuaacuguccag

SEQ ID NO: 1509077 - RNA, 19 nt, Artificial Sequence
  Description of Artificial Sequence: Synthetic oligonucleotide
  Antisense strand to SEQ ID NO: 1509076
cuggacaguuaauuccaac

SEQ ID NO: 1509078 - RNA, 19 nt, Artificial Sequence
  Description of Artificial Sequence: Synthetic oligonucleotide
  Sense strand starting at position 2680 of SEQ ID NO: 1244709
ggaauuaacuguccaggcu

SEQ ID NO: 1509079 - RNA, 19 nt, Artificial Sequence
  Description of Artificial Sequence: Synthetic oligonucleotide
  Antisense strand to SEQ ID NO: 1509078
agccuggacaguuaauucc

SEQ ID NO: 1509080 - RNA, 19 nt, Artificial Sequence
  Description of Artificial Sequence: Synthetic oligonucleotide
  Sense strand starting at position 2760 of SEQ ID NO: 1244709
uuguuauuggcagggaaga

SEQ ID NO: 1509081 - RNA, 19 nt, Artificial Sequence
  Description of Artificial Sequence: Synthetic oligonucleotide
  Antisense strand to SEQ ID NO: 1509080
ucuucccugccaauaacaa

SEQ ID NO: 1509082 - RNA, 19 nt, Artificial Sequence
  Description of Artificial Sequence: Synthetic oligonucleotide
  Sense strand starting at position 3026 of SEQ ID NO: 1244709
guuggugcuugguuaauua

SEQ ID NO: 1509083 - RNA, 19 nt, Artificial Sequence
  Description of Artificial Sequence: Synthetic oligonucleotide
  Antisense strand to SEQ ID NO: 1509082
uaauuaaccaagcaccaac

SEQ ID NO: 1509084 - RNA, 19 nt, Artificial Sequence
  Description of Artificial Sequence: Synthetic oligonucleotide
  Sense strand starting at position 3030 of SEQ ID NO: 1244709
gugcuugguuaauuaaauc

SEQ ID NO: 1509085 - RNA, 19 nt, Artificial Sequence
  Description of Artificial Sequence: Synthetic oligonucleotide
  Antisense strand to SEQ ID NO: 1509084
gauuuaauuaaccaagcac

SEQ ID NO: 1509086 - RNA, 19 nt, Artificial Sequence
  Description of Artificial Sequence: Synthetic oligonucleotide
  Sense strand starting at position 3135 of SEQ ID NO: 1244709
gaucuuagcucacugagag

SEQ ID NO: 1509087 - RNA, 19 nt, Artificial Sequence
  Description of Artificial Sequence: Synthetic oligonucleotide
  Antisense strand to SEQ ID NO: 1509086
cucucagugagcuaagauc

SEQ ID NO: 1509088 - RNA, 19 nt, Artificial Sequence
  Description of Artificial Sequence: Synthetic oligonucleotide
  Sense strand starting at position 3253 of SEQ ID NO: 1244709
aauagagaccaccguguua

SEQ ID NO: 1509089 - RNA, 19 nt, Artificial Sequence
  Description of Artificial Sequence: Synthetic oligonucleotide
  Antisense strand to SEQ ID NO: 1509088
uaacacgguggucucuauu

SEQ ID NO: 1509090 - RNA, 19 nt, Artificial Sequence
  Description of Artificial Sequence: Synthetic oligonucleotide
  Sense strand starting at position 3540 of SEQ ID NO: 1244709
uccugugucucuuuagcau

SEQ ID NO: 1509091 - RNA, 19 nt, Artificial Sequence
  Description of Artificial Sequence: Synthetic oligonucleotide
  Antisense strand to SEQ ID NO: 1509090
augcuaaagagacacagga

SEQ ID NO: 1509092 - RNA, 19 nt, Artificial Sequence
  Description of Artificial Sequence: Synthetic oligonucleotide
  Sense strand starting at position 3772 of SEQ ID NO: 1244709
gaagucagcauuuggguuu

SEQ ID NO: 1509093 - RNA, 19 nt, Artificial Sequence
  Description of Artificial Sequence: Synthetic oligonucleotide
  Antisense strand to SEQ ID NO: 1509092
aaacccaaaugcugacuuc

SEQ ID NO: 1509094 - RNA, 19 nt, Artificial Sequence
  Description of Artificial Sequence: Synthetic oligonucleotide
  Sense strand starting at position 3775 of SEQ ID NO: 1244709
gucagcauuuggguuuauu

SEQ ID NO: 1509095 - RNA, 19 nt, Artificial Sequence
  Description of Artificial Sequence: Synthetic oligonucleotide
  Antisense strand to SEQ ID NO: 1509094
aauaaacccaaaugcugac

SEQ ID NO: 1509096 - RNA, 19 nt, Artificial Sequence
  Description of Artificial Sequence: Synthetic oligonucleotide
  Sense strand starting at position 3800 of SEQ ID NO: 1244709
ugcauaauccagugaauca

SEQ ID NO: 1509097 - RNA, 19 nt, Artificial Sequence
  Description of Artificial Sequence: Synthetic oligonucleotide
  Antisense strand to SEQ ID NO: 1509096
ugauucacuggauuaugca

SEQ ID NO: 1509098 - RNA, 19 nt, Artificial Sequence
  Description of Artificial Sequence: Synthetic oligonucleotide
  Sense strand starting at position 1087 of SEQ ID NO: 1244710
ggcccacugugagacuuua

SEQ ID NO: 1509099 - RNA, 19 nt, Artificial Sequence
  Description of Artificial Sequence: Synthetic oligonucleotide
  Antisense strand to SEQ ID NO: 1509098
uaaagucucacagugggcc

SEQ ID NO: 1509100 - RNA, 19 nt, Artificial Sequence
  Description of Artificial Sequence: Synthetic oligonucleotide
  Sense strand starting at position 1129 of SEQ ID NO: 1244710
cgaaacaucuguugccuca

SEQ ID NO: 1509101 - RNA, 19 nt, Artificial Sequence
  Description of Artificial Sequence: Synthetic oligonucleotide
  Antisense strand to SEQ ID NO: 1509100
ugaggcaacagauguuucg

SEQ ID NO: 1509102 - RNA, 19 nt, Artificial Sequence
  Description of Artificial Sequence: Synthetic oligonucleotide
  Sense strand starting at position 1156 of SEQ ID NO: 1244710
ggcaaugaccucuaaagca

SEQ ID NO: 1509103 - RNA, 19 nt, Artificial Sequence
  Description of Artificial Sequence: Synthetic oligonucleotide
  Antisense strand to SEQ ID NO: 1509102
ugcuuuagaggucauugcc

SEQ ID NO: 1509104 - RNA, 19 nt, Artificial Sequence
  Description of Artificial Sequence: Synthetic oligonucleotide
  Sense strand starting at position 1247 of SEQ ID NO: 1244710
aggagugguuccgaaggaa

SEQ ID NO: 1509105 - RNA, 19 nt, Artificial Sequence
  Description of Artificial Sequence: Synthetic oligonucleotide
  Antisense strand to SEQ ID NO: 1509104
uuccuucggaaccacuccu

SEQ ID NO: 1509106 - RNA, 19 nt, Artificial Sequence
  Description of Artificial Sequence: Synthetic oligonucleotide
  Sense strand starting at position 1275 of SEQ ID NO: 1244710
ccagaccuaucgcucgaau

SEQ ID NO: 1509107 - RNA, 19 nt, Artificial Sequence
  Description of Artificial Sequence: Synthetic oligonucleotide
  Antisense strand to SEQ ID NO: 1509106
auucgagcgauaggucugg

SEQ ID NO: 1509108 - RNA, 19 nt, Artificial Sequence
  Description of Artificial Sequence: Synthetic oligonucleotide
  Sense strand starting at position 1278 of SEQ ID NO: 1244710
gaccuaucgcucgaaugca

SEQ ID NO: 1509109 - RNA, 19 nt, Artificial Sequence
  Description of Artificial Sequence: Synthetic oligonucleotide
  Antisense strand to SEQ ID NO: 1509108
ugcauucgagcgauagguc

SEQ ID NO: 1509110 - RNA, 19 nt, Artificial Sequence
  Description of Artificial Sequence: Synthetic oligonucleotide
  Sense strand starting at position 2127 of SEQ ID NO: 1244710
gggcgaguuccaugccugu

SEQ ID NO: 1509111 - RNA, 19 nt, Artificial Sequence
  Description of Artificial Sequence: Synthetic oligonucleotide
  Antisense strand to SEQ ID NO: 1509110
acaggcauggaacucgccc

SEQ ID NO: 1509112 - RNA, 19 nt, Artificial Sequence
  Description of Artificial Sequence: Synthetic oligonucleotide
  Sense strand starting at position 2642 of SEQ ID NO: 1244710
gagaaugaguucuucgaga

SEQ ID NO: 1509113 - RNA, 19 nt, Artificial Sequence
  Description of Artificial Sequence: Synthetic oligonucleotide
  Antisense strand to SEQ ID NO: 1509112
ucucgaagaacucauucuc

SEQ ID NO: 1509114 - RNA, 19 nt, Artificial Sequence
  Description of Artificial Sequence: Synthetic oligonucleotide
  Sense strand starting at position 2644 of SEQ ID NO: 1244710
gaaugaguucuucgagauc

SEQ ID NO: 1509115 - RNA, 19 nt, Artificial Sequence
  Description of Artificial Sequence: Synthetic oligonucleotide
  Antisense strand to SEQ ID NO: 1509114
gaucucgaagaacucauuc

SEQ ID NO: 1509116 - RNA, 19 nt, Artificial Sequence
  Description of Artificial Sequence: Synthetic oligonucleotide
  Sense strand starting at position 2687 of SEQ ID NO: 1244710
gaaguuacuugccgggcua

SEQ ID NO: 1509117 - RNA, 19 nt, Artificial Sequence
  Description of Artificial Sequence: Synthetic oligonucleotide
  Antisense strand to SEQ ID NO: 1509116
uagcccggcaaguaacuuc

SEQ ID NO: 1509118 - RNA, 19 nt, Artificial Sequence
  Description of Artificial Sequence: Synthetic oligonucleotide
  Sense strand starting at position 2932 of SEQ ID NO: 1244710
ucgcgugaccuugggcaaa

SEQ ID NO: 1509119 - RNA, 19 nt, Artificial Sequence
  Description of Artificial Sequence: Synthetic oligonucleotide
  Antisense strand to SEQ ID NO: 1509118
uuugcccaaggucacgcga

SEQ ID NO: 1509120 - RNA, 19 nt, Artificial Sequence
  Description of Artificial Sequence: Synthetic oligonucleotide
  Sense strand starting at position 2973 of SEQ ID NO: 1244710
gaaugacucugcgcggaga

SEQ ID NO: 1509121 - RNA, 19 nt, Artificial Sequence
  Description of Artificial Sequence: Synthetic oligonucleotide
  Antisense strand to SEQ ID NO: 1509120
ucuccgcgcagagucauuc

SEQ ID NO: 1509122 - RNA, 19 nt, Artificial Sequence
  Description of Artificial Sequence: Synthetic oligonucleotide
  Sense strand starting at position 3028 of SEQ ID NO: 1244710
gguguugguugcucucgua

SEQ ID NO: 1509123 - RNA, 19 nt, Artificial Sequence
  Description of Artificial Sequence: Synthetic oligonucleotide
  Antisense strand to SEQ ID NO: 1509122
uacgagagcaaccaacacc

SEQ ID NO: 1509124 - RNA, 19 nt, Artificial Sequence
  Description of Artificial Sequence: Synthetic oligonucleotide
  Sense strand starting at position 3035 of SEQ ID NO: 1244710
guugcucucguaucgugau

SEQ ID NO: 1509125 - RNA, 19 nt, Artificial Sequence
  Description of Artificial Sequence: Synthetic oligonucleotide
  Antisense strand to SEQ ID NO: 1509124
aucacgauacgagagcaac

SEQ ID NO: 1509126 - RNA, 19 nt, Artificial Sequence
  Description of Artificial Sequence: Synthetic oligonucleotide
  Sense strand starting at position 3036 of SEQ ID NO: 1244710
uugcucucguaucgugauu

SEQ ID NO: 1509127 - RNA, 19 nt, Artificial Sequence
  Description of Artificial Sequence: Synthetic oligonucleotide
  Antisense strand to SEQ ID NO: 1509126
aaucacgauacgagagcaa

SEQ ID NO: 1509128 - RNA, 19 nt, Artificial Sequence
  Description of Artificial Sequence: Synthetic oligonucleotide
  Sense strand starting at position 3038 of SEQ ID NO: 1244710
gcucucguaucgugauuuc

SEQ ID NO: 1509129 - RNA, 19 nt, Artificial Sequence
  Description of Artificial Sequence: Synthetic oligonucleotide
  Antisense strand to SEQ ID NO: 1509128
gaaaucacgauacgagagc

SEQ ID NO: 1509130 - RNA, 19 nt, Artificial Sequence
  Description of Artificial Sequence: Synthetic oligonucleotide
  Sense strand starting at position 3041 of SEQ ID NO: 1244710
cucguaucgugauuucuuc

SEQ ID NO: 1509131 - RNA, 19 nt, Artificial Sequence
  Description of Artificial Sequence: Synthetic oligonucleotide
  Antisense strand to SEQ ID NO: 1509130
gaagaaaucacgauacgag

SEQ ID NO: 1509132 - RNA, 19 nt, Artificial Sequence
  Description of Artificial Sequence: Synthetic oligonucleotide
  Sense strand starting at position 3048 of SEQ ID NO: 1244710
cgugauuucuucugagucu

SEQ ID NO: 1509133 - RNA, 19 nt, Artificial Sequence
  Description of Artificial Sequence: Synthetic oligonucleotide
  Antisense strand to SEQ ID NO: 1509132
agacucagaagaaaucacg

SEQ ID NO: 1509134 - RNA, 19 nt, Artificial Sequence
  Description of Artificial Sequence: Synthetic oligonucleotide
  Sense strand starting at position 3049 of SEQ ID NO: 1244710
gugauuucuucugagucuc

SEQ ID NO: 1509135 - RNA, 19 nt, Artificial Sequence
  Description of Artificial Sequence: Synthetic oligonucleotide
  Antisense strand to SEQ ID NO: 1509134
gagacucagaagaaaucac

SEQ ID NO: 1509136 - RNA, 19 nt, Artificial Sequence
  Description of Artificial Sequence: Synthetic oligonucleotide
  Sense strand starting at position 3070 of SEQ ID NO: 1244710
aacucuuugcaguagguua

SEQ ID NO: 1509137 - RNA, 19 nt, Artificial Sequence
  Description of Artificial Sequence: Synthetic oligonucleotide
  Antisense strand to SEQ ID NO: 1509136
uaaccuacugcaaagaguu

SEQ ID NO: 1509138 - RNA, 19 nt, Artificial Sequence
  Description of Artificial Sequence: Synthetic oligonucleotide
  Sense strand starting at position 3077 of SEQ ID NO: 1244710
ugcaguagguuauuguuga

SEQ ID NO: 1509139 - RNA, 19 nt, Artificial Sequence
  Description of Artificial Sequence: Synthetic oligonucleotide
  Antisense strand to SEQ ID NO: 1509138
ucaacaauaaccuacugca

SEQ ID NO: 1509140 - RNA, 19 nt, Artificial Sequence
  Description of Artificial Sequence: Synthetic oligonucleotide
  Sense strand starting at position 3078 of SEQ ID NO: 1244710
gcaguagguuauuguugaa

SEQ ID NO: 1509141 - RNA, 19 nt, Artificial Sequence
  Description of Artificial Sequence: Synthetic oligonucleotide
  Antisense strand to SEQ ID NO: 1509140
uucaacaauaaccuacugc

SEQ ID NO: 1509142 - RNA, 19 nt, Artificial Sequence
  Description of Artificial Sequence: Synthetic oligonucleotide
  Sense strand starting at position 3081 of SEQ ID NO: 1244710
guagguuauuguugaaaua

SEQ ID NO: 1509143 - RNA, 19 nt, Artificial Sequence
  Description of Artificial Sequence: Synthetic oligonucleotide
  Antisense strand to SEQ ID NO: 1509142
uauuucaacaauaaccuac

SEQ ID NO: 1509144 - RNA, 19 nt, Artificial Sequence
  Description of Artificial Sequence: Synthetic oligonucleotide
  Sense strand starting at position 3731 of SEQ ID NO: 1244710
acgugaagagccggagauu

SEQ ID NO: 1509145 - RNA, 19 nt, Artificial Sequence
  Description of Artificial Sequence: Synthetic oligonucleotide
  Antisense strand to SEQ ID NO: 1509144
aaucuccggcucuucacgu

SEQ ID NO: 1509146 - RNA, 19 nt, Artificial Sequence
  Description of Artificial Sequence: Synthetic oligonucleotide
  Sense strand starting at position 3835 of SEQ ID NO: 1244710
cccgcuugucagggagaca

SEQ ID NO: 1509147 - RNA, 19 nt, Artificial Sequence
  Description of Artificial Sequence: Synthetic oligonucleotide
  Antisense strand to SEQ ID NO: 1509146
ugucucccugacaagcggg

SEQ ID NO: 1509148 - RNA, 19 nt, Artificial Sequence
  Description of Artificial Sequence: Synthetic oligonucleotide
  Sense strand starting at position 3895 of SEQ ID NO: 1244710
ccacuucgcguuuagaacu

SEQ ID NO: 1509149 - RNA, 19 nt, Artificial Sequence
  Description of Artificial Sequence: Synthetic oligonucleotide
  Antisense strand to SEQ ID NO: 1509148
aguucuaaacgcgaagugg

SEQ ID NO: 1509150 - RNA, 19 nt, Artificial Sequence
  Description of Artificial Sequence: Synthetic oligonucleotide
  Sense strand starting at position 3905 of SEQ ID NO: 1244710
uuuagaacuucugugcuau

SEQ ID NO: 1509151 - RNA, 19 nt, Artificial Sequence
  Description of Artificial Sequence: Synthetic oligonucleotide
  Antisense strand to SEQ ID NO: 1509150
auagcacagaaguucuaaa

SEQ ID NO: 1509152 - RNA, 19 nt, Artificial Sequence
  Description of Artificial Sequence: Synthetic oligonucleotide
  Sense strand starting at position 3906 of SEQ ID NO: 1244710
uuagaacuucugugcuauc

SEQ ID NO: 1509153 - RNA, 19 nt, Artificial Sequence
  Description of Artificial Sequence: Synthetic oligonucleotide
  Antisense strand to SEQ ID NO: 1509152
gauagcacagaaguucuaa

SEQ ID NO: 1509154 - RNA, 19 nt, Artificial Sequence
  Description of Artificial Sequence: Synthetic oligonucleotide
  Sense strand starting at position 3916 of SEQ ID NO: 1244710
ugugcuaucuugcuuauuu

SEQ ID NO: 1509155 - RNA, 19 nt, Artificial Sequence
  Description of Artificial Sequence: Synthetic oligonucleotide
  Antisense strand to SEQ ID NO: 1509154
aaauaagcaagauagcaca

SEQ ID NO: 1509156 - RNA, 19 nt, Artificial Sequence
  Description of Artificial Sequence: Synthetic oligonucleotide
  Sense strand starting at position 3917 of SEQ ID NO: 1244710
gugcuaucuugcuuauuug

SEQ ID NO: 1509157 - RNA, 19 nt, Artificial Sequence
  Description of Artificial Sequence: Synthetic oligonucleotide
  Antisense strand to SEQ ID NO: 1509156
caaauaagcaagauagcac

SEQ ID NO: 1509158 - RNA, 19 nt, Artificial Sequence
  Description of Artificial Sequence: Synthetic oligonucleotide
  Sense strand starting at position 3927 of SEQ ID NO: 1244710
gcuuauuuguccuaacaga

SEQ ID NO: 1509159 - RNA, 19 nt, Artificial Sequence
  Description of Artificial Sequence: Synthetic oligonucleotide
  Antisense strand to SEQ ID NO: 1509158
ucuguuaggacaaauaagc

SEQ ID NO: 1509160 - RNA, 19 nt, Artificial Sequence
  Description of Artificial Sequence: Synthetic oligonucleotide
  Sense strand starting at position 368 of SEQ ID NO: 1244711
uccugaggccuccaugagu

SEQ ID NO: 1509161 - RNA, 19 nt, Artificial Sequence
  Description of Artificial Sequence: Synthetic oligonucleotide
  Antisense strand to SEQ ID NO: 1509160
acucauggaggccucagga

SEQ ID NO: 1509162 - RNA, 19 nt, Artificial Sequence
  Description of Artificial Sequence: Synthetic oligonucleotide
  Sense strand starting at position 460 of SEQ ID NO: 1244711
agagacaaucugcgucaca

SEQ ID NO: 1509163 - RNA, 19 nt, Artificial Sequence
  Description of Artificial Sequence: Synthetic oligonucleotide
  Antisense strand to SEQ ID NO: 1509162
ugugacgcagauugucucu

SEQ ID NO: 1509164 - RNA, 19 nt, Artificial Sequence
  Description of Artificial Sequence: Synthetic oligonucleotide
  Sense strand starting at position 528 of SEQ ID NO: 1244711
cgcugauggugucugggau

SEQ ID NO: 1509165 - RNA, 19 nt, Artificial Sequence
  Description of Artificial Sequence: Synthetic oligonucleotide
  Antisense strand to SEQ ID NO: 1509164
aucccagacaccaucagcg

SEQ ID NO: 1509166 - RNA, 19 nt, Artificial Sequence
  Description of Artificial Sequence: Synthetic oligonucleotide
  Sense strand starting at position 529 of SEQ ID NO: 1244711
gcugauggugucugggauu

SEQ ID NO: 1509167 - RNA, 19 nt, Artificial Sequence
  Description of Artificial Sequence: Synthetic oligonucleotide
  Antisense strand to SEQ ID NO: 1509166
aaucccagacaccaucagc

SEQ ID NO: 1509168 - RNA, 19 nt, Artificial Sequence
  Description of Artificial Sequence: Synthetic oligonucleotide
  Sense strand starting at position 535 of SEQ ID NO: 1244711
ggugucugggauugauacu

SEQ ID NO: 1509169 - RNA, 19 nt, Artificial Sequence
  Description of Artificial Sequence: Synthetic oligonucleotide
  Antisense strand to SEQ ID NO: 1509168
aguaucaaucccagacacc

SEQ ID NO: 1509170 - RNA, 19 nt, Artificial Sequence
  Description of Artificial Sequence: Synthetic oligonucleotide
  Sense strand starting at position 541 of SEQ ID NO: 1244711
ugggauugauacuguguau

SEQ ID NO: 1509171 - RNA, 19 nt, Artificial Sequence
  Description of Artificial Sequence: Synthetic oligonucleotide
  Antisense strand to SEQ ID NO: 1509170
auacacaguaucaauccca

SEQ ID NO: 1509172 - RNA, 19 nt, Artificial Sequence
  Description of Artificial Sequence: Synthetic oligonucleotide
  Sense strand starting at position 544 of SEQ ID NO: 1244711
gauugauacuguguauucu

SEQ ID NO: 1509173 - RNA, 19 nt, Artificial Sequence
  Description of Artificial Sequence: Synthetic oligonucleotide
  Antisense strand to SEQ ID NO: 1509172
agaauacacaguaucaauc

SEQ ID NO: 1509174 - RNA, 19 nt, Artificial Sequence
  Description of Artificial Sequence: Synthetic oligonucleotide
  Sense strand starting at position 552 of SEQ ID NO: 1244711
cuguguauucugcacuguu

SEQ ID NO: 1509175 - RNA, 19 nt, Artificial Sequence
  Description of Artificial Sequence: Synthetic oligonucleotide
  Antisense strand to SEQ ID NO: 1509174
aacagugcagaauacacag

SEQ ID NO: 1509176 - RNA, 19 nt, Artificial Sequence
  Description of Artificial Sequence: Synthetic oligonucleotide
  Sense strand starting at position 560 of SEQ ID NO: 1244711
ucugcacuguuucugagau

SEQ ID NO: 1509177 - RNA, 19 nt, Artificial Sequence
  Description of Artificial Sequence: Synthetic oligonucleotide
  Antisense strand to SEQ ID NO: 1509176
aucucagaaacagugcaga

SEQ ID NO: 1509178 - RNA, 19 nt, Artificial Sequence
  Description of Artificial Sequence: Synthetic oligonucleotide
  Sense strand starting at position 562 of SEQ ID NO: 1244711
ugcacuguuucugagauau

SEQ ID NO: 1509179 - RNA, 19 nt, Artificial Sequence
  Description of Artificial Sequence: Synthetic oligonucleotide
  Antisense strand to SEQ ID NO: 1509178
auaucucagaaacagugca

SEQ ID NO: 1509180 - RNA, 19 nt, Artificial Sequence
  Description of Artificial Sequence: Synthetic oligonucleotide
  Sense strand starting at position 564 of SEQ ID NO: 1244711
cacuguuucugagauaugg

SEQ ID NO: 1509181 - RNA, 19 nt, Artificial Sequence
  Description of Artificial Sequence: Synthetic oligonucleotide
  Antisense strand to SEQ ID NO: 1509180
ccauaucucagaaacagug

SEQ ID NO: 1509182 - RNA, 19 nt, Artificial Sequence
  Description of Artificial Sequence: Synthetic oligonucleotide
  Sense strand starting at position 566 of SEQ ID NO: 1244711
cuguuucugagauauggcu

SEQ ID NO: 1509183 - RNA, 19 nt, Artificial Sequence
  Description of Artificial Sequence: Synthetic oligonucleotide
  Antisense strand to SEQ ID NO: 1509182
agccauaucucagaaacag

SEQ ID NO: 1509184 - RNA, 19 nt, Artificial Sequence
  Description of Artificial Sequence: Synthetic oligonucleotide
  Sense strand starting at position 573 of SEQ ID NO: 1244711
ugagauauggcuggcagca

SEQ ID NO: 1509185 - RNA, 19 nt, Artificial Sequence
  Description of Artificial Sequence: Synthetic oligonucleotide
  Antisense strand to SEQ ID NO: 1509184
ugcugccagccauaucuca

SEQ ID NO: 1509186 - RNA, 19 nt, Artificial Sequence
  Description of Artificial Sequence: Synthetic oligonucleotide
  Sense strand starting at position 995 of SEQ ID NO: 1244711
gccaacaaugugugcaaga

SEQ ID NO: 1509187 - RNA, 19 nt, Artificial Sequence
  Description of Artificial Sequence: Synthetic oligonucleotide
  Antisense strand to SEQ ID NO: 1509186
ucuugcacacauuguuggc

SEQ ID NO: 1509188 - RNA, 19 nt, Artificial Sequence
  Description of Artificial Sequence: Synthetic oligonucleotide
  Sense strand starting at position 996 of SEQ ID NO: 1244711
ccaacaaugugugcaagau

SEQ ID NO: 1509189 - RNA, 19 nt, Artificial Sequence
  Description of Artificial Sequence: Synthetic oligonucleotide
  Antisense strand to SEQ ID NO: 1509188
aucuugcacacauuguugg

SEQ ID NO: 1509190 - RNA, 19 nt, Artificial Sequence
  Description of Artificial Sequence: Synthetic oligonucleotide
  Sense strand starting at position 997 of SEQ ID NO: 1244711
caacaaugugugcaagaug

SEQ ID NO: 1509191 - RNA, 19 nt, Artificial Sequence
  Description of Artificial Sequence: Synthetic oligonucleotide
  Antisense strand to SEQ ID NO: 1509190
caucuugcacacauuguug

SEQ ID NO: 1509192 - RNA, 19 nt, Artificial Sequence
  Description of Artificial Sequence: Synthetic oligonucleotide
  Sense strand starting at position 1128 of SEQ ID NO: 1244711
auaagaaacugauaagcga

SEQ ID NO: 1509193 - RNA, 19 nt, Artificial Sequence
  Description of Artificial Sequence: Synthetic oligonucleotide
  Antisense strand to SEQ ID NO: 1509192
ucgcuuaucaguuucuuau

SEQ ID NO: 1509194 - RNA, 19 nt, Artificial Sequence
  Description of Artificial Sequence: Synthetic oligonucleotide
  Sense strand starting at position 1139 of SEQ ID NO: 1244711
auaagcgauuccucauuga

SEQ ID NO: 1509195 - RNA, 19 nt, Artificial Sequence
  Description of Artificial Sequence: Synthetic oligonucleotide
  Antisense strand to SEQ ID NO: 1509194
ucaaugaggaaucgcuuau

SEQ ID NO: 1509196 - RNA, 19 nt, Artificial Sequence
  Description of Artificial Sequence: Synthetic oligonucleotide
  Sense strand starting at position 1142 of SEQ ID NO: 1244711
agcgauuccucauugagaa

SEQ ID NO: 1509197 - RNA, 19 nt, Artificial Sequence
  Description of Artificial Sequence: Synthetic oligonucleotide
  Antisense strand to SEQ ID NO: 1509196
uucucaaugaggaaucgcu

SEQ ID NO: 1509198 - RNA, 19 nt, Artificial Sequence
  Description of Artificial Sequence: Synthetic oligonucleotide
  Sense strand starting at position 1143 of SEQ ID NO: 1244711
gcgauuccucauugagaag

SEQ ID NO: 1509199 - RNA, 19 nt, Artificial Sequence
  Description of Artificial Sequence: Synthetic oligonucleotide
  Antisense strand to SEQ ID NO: 1509198
cuucucaaugaggaaucgc

SEQ ID NO: 1509200 - RNA, 19 nt, Artificial Sequence
  Description of Artificial Sequence: Synthetic oligonucleotide
  Sense strand starting at position 1144 of SEQ ID NO: 1244711
cgauuccucauugagaagu

SEQ ID NO: 1509201 - RNA, 19 nt, Artificial Sequence
  Description of Artificial Sequence: Synthetic oligonucleotide
  Antisense strand to SEQ ID NO: 1509200
acuucucaaugaggaaucg

SEQ ID NO: 1509202 - RNA, 19 nt, Artificial Sequence
  Description of Artificial Sequence: Synthetic oligonucleotide
  Sense strand starting at position 1479 of SEQ ID NO: 1244711
aguugcuucugggaggaca

SEQ ID NO: 1509203 - RNA, 19 nt, Artificial Sequence
  Description of Artificial Sequence: Synthetic oligonucleotide
  Antisense strand to SEQ ID NO: 1509202
uguccucccagaagcaacu

SEQ ID NO: 1509204 - RNA, 19 nt, Artificial Sequence
  Description of Artificial Sequence: Synthetic oligonucleotide
  Sense strand starting at position 1509 of SEQ ID NO: 1244711
cgguuaauucaggugcgca

SEQ ID NO: 1509205 - RNA, 19 nt, Artificial Sequence
  Description of Artificial Sequence: Synthetic oligonucleotide
  Antisense strand to SEQ ID NO: 1509204
ugcgcaccugaauuaaccg

SEQ ID NO: 1509206 - RNA, 19 nt, Artificial Sequence
  Description of Artificial Sequence: Synthetic oligonucleotide
  Sense strand starting at position 1510 of SEQ ID NO: 1244711
gguuaauucaggugcgcag

SEQ ID NO: 1509207 - RNA, 19 nt, Artificial Sequence
  Description of Artificial Sequence: Synthetic oligonucleotide
  Antisense strand to SEQ ID NO: 1509206
cugcgcaccugaauuaacc

SEQ ID NO: 1509208 - RNA, 19 nt, Artificial Sequence
  Description of Artificial Sequence: Synthetic oligonucleotide
  Sense strand starting at position 2580 of SEQ ID NO: 1244711
cugugucucagcugucuuu

SEQ ID NO: 1509209 - RNA, 19 nt, Artificial Sequence
  Description of Artificial Sequence: Synthetic oligonucleotide
  Antisense strand to SEQ ID NO: 1509208
aaagacagcugagacacag

SEQ ID NO: 1509210 - RNA, 19 nt, Artificial Sequence
  Description of Artificial Sequence: Synthetic oligonucleotide
  Sense strand starting at position 2711 of SEQ ID NO: 1244711
agacuuccgguuuagguaa

SEQ ID NO: 1509211 - RNA, 19 nt, Artificial Sequence
  Description of Artificial Sequence: Synthetic oligonucleotide
  Antisense strand to SEQ ID NO: 1509210
uuaccuaaaccggaagucu

SEQ ID NO: 1509212 - RNA, 19 nt, Artificial Sequence
  Description of Artificial Sequence: Synthetic oligonucleotide
  Sense strand starting at position 2813 of SEQ ID NO: 1244711
guugcccucuuucugauua

SEQ ID NO: 1509213 - RNA, 19 nt, Artificial Sequence
  Description of Artificial Sequence: Synthetic oligonucleotide
  Antisense strand to SEQ ID NO: 1509212
uaaucagaaagagggcaac

SEQ ID NO: 1509214 - RNA, 19 nt, Artificial Sequence
  Description of Artificial Sequence: Synthetic oligonucleotide
  Sense strand starting at position 2855 of SEQ ID NO: 1244711
uucggcucacuguaacaua

SEQ ID NO: 1509215 - RNA, 19 nt, Artificial Sequence
  Description of Artificial Sequence: Synthetic oligonucleotide
  Antisense strand to SEQ ID NO: 1509214
uauguuacagugagccgaa

SEQ ID NO: 1509216 - RNA, 19 nt, Artificial Sequence
  Description of Artificial Sequence: Synthetic oligonucleotide
  Sense strand starting at position 2934 of SEQ ID NO: 1244711
ucaccugcggaucagaauu

SEQ ID NO: 1509217 - RNA, 19 nt, Artificial Sequence
  Description of Artificial Sequence: Synthetic oligonucleotide
  Antisense strand to SEQ ID NO: 1509216
aauucugauccgcagguga

SEQ ID NO: 1509218 - RNA, 19 nt, Artificial Sequence
  Description of Artificial Sequence: Synthetic oligonucleotide
  Sense strand starting at position 3018 of SEQ ID NO: 1244711
ugccauggaucggcuuaaa

SEQ ID NO: 1509219 - RNA, 19 nt, Artificial Sequence
  Description of Artificial Sequence: Synthetic oligonucleotide
  Antisense strand to SEQ ID NO: 1509218
uuuaagccgauccauggca

SEQ ID NO: 1509220 - RNA, 19 nt, Artificial Sequence
  Description of Artificial Sequence: Synthetic oligonucleotide
  Sense strand starting at position 3027 of SEQ ID NO: 1244711
ucggcuuaaacagaaaugu

SEQ ID NO: 1509221 - RNA, 19 nt, Artificial Sequence
  Description of Artificial Sequence: Synthetic oligonucleotide
  Antisense strand to SEQ ID NO: 1509220
acauuucuguuuaagccga

SEQ ID NO: 1509222 - RNA, 19 nt, Artificial Sequence
  Description of Artificial Sequence: Synthetic oligonucleotide
  Sense strand starting at position 3146 of SEQ ID NO: 1244711
acuguuuccucacaugaca

SEQ ID NO: 1509223 - RNA, 19 nt, Artificial Sequence
  Description of Artificial Sequence: Synthetic oligonucleotide
  Antisense strand to SEQ ID NO: 1509222
ugucaugugaggaaacagu

SEQ ID NO: 1509224 - RNA, 19 nt, Artificial Sequence
  Description of Artificial Sequence: Synthetic oligonucleotide
  Sense strand starting at position 3491 of SEQ ID NO: 1244711
ugggcuuacgggcaugaaa

SEQ ID NO: 1509225 - RNA, 19 nt, Artificial Sequence
  Description of Artificial Sequence: Synthetic oligonucleotide
  Antisense strand to SEQ ID NO: 1509224
uuucaugcccguaagccca

SEQ ID NO: 1509226 - RNA, 19 nt, Artificial Sequence
  Description of Artificial Sequence: Synthetic oligonucleotide
  Sense strand starting at position 3564 of SEQ ID NO: 1244711
aggaucucauccuuaugau

SEQ ID NO: 1509227 - RNA, 19 nt, Artificial Sequence
  Description of Artificial Sequence: Synthetic oligonucleotide
  Antisense strand to SEQ ID NO: 1509226
aucauaaggaugagauccu

SEQ ID NO: 1509228 - RNA, 19 nt, Artificial Sequence
  Description of Artificial Sequence: Synthetic oligonucleotide
  Sense strand starting at position 3600 of SEQ ID NO: 1244711
aggacccugucuccagaua

SEQ ID NO: 1509229 - RNA, 19 nt, Artificial Sequence
  Description of Artificial Sequence: Synthetic oligonucleotide
  Antisense strand to SEQ ID NO: 1509228
uaucuggagacaggguccu

SEQ ID NO: 1509230 - RNA, 19 nt, Artificial Sequence
  Description of Artificial Sequence: Synthetic oligonucleotide
  Sense strand starting at position 3617 of SEQ ID NO: 1244711
uacagugauguugacguua

SEQ ID NO: 1509231 - RNA, 19 nt, Artificial Sequence
  Description of Artificial Sequence: Synthetic oligonucleotide
  Antisense strand to SEQ ID NO: 1509230
uaacgucaacaucacugua

SEQ ID NO: 1509232 - RNA, 19 nt, Artificial Sequence
  Description of Artificial Sequence: Synthetic oligonucleotide
  Sense strand starting at position 3630 of SEQ ID NO: 1244711
acguuagggcuucagcaua

SEQ ID NO: 1509233 - RNA, 19 nt, Artificial Sequence
  Description of Artificial Sequence: Synthetic oligonucleotide
  Antisense strand to SEQ ID NO: 1509232
uaugcugaagcccuaacgu

SEQ ID NO: 1509234 - RNA, 19 nt, Artificial Sequence
  Description of Artificial Sequence: Synthetic oligonucleotide
  Sense strand starting at position 3704 of SEQ ID NO: 1244711
acacucuggguuuggagaa

SEQ ID NO: 1509235 - RNA, 19 nt, Artificial Sequence
  Description of Artificial Sequence: Synthetic oligonucleotide
  Antisense strand to SEQ ID NO: 1509234
uucuccaaacccagagugu

SEQ ID NO: 1509236 - RNA, 19 nt, Artificial Sequence
  Description of Artificial Sequence: Synthetic oligonucleotide
  Sense strand starting at position 3880 of SEQ ID NO: 1244711
ccacauugccucugaggga

SEQ ID NO: 1509237 - RNA, 19 nt, Artificial Sequence
  Description of Artificial Sequence: Synthetic oligonucleotide
  Antisense strand to SEQ ID NO: 1509236
ucccucagaggcaaugugg

SEQ ID NO: 1509238 - RNA, 19 nt, Artificial Sequence
  Description of Artificial Sequence: Synthetic oligonucleotide
  Sense strand starting at position 3977 of SEQ ID NO: 1244711
ggaagaagcuugguguggu

SEQ ID NO: 1509239 - RNA, 19 nt, Artificial Sequence
  Description of Artificial Sequence: Synthetic oligonucleotide
  Antisense strand to SEQ ID NO: 1509238
accacaccaagcuucuucc

SEQ ID NO: 1509240 - RNA, 19 nt, Artificial Sequence
  Description of Artificial Sequence: Synthetic oligonucleotide
  Sense strand starting at position 638 of SEQ ID NO: 1244712
gcacaaagaucucaaugua

SEQ ID NO: 1509241 - RNA, 19 nt, Artificial Sequence
  Description of Artificial Sequence: Synthetic oligonucleotide
  Antisense strand to SEQ ID NO: 1509240
uacauugagaucuuugugc

SEQ ID NO: 1509242 - RNA, 19 nt, Artificial Sequence
  Description of Artificial Sequence: Synthetic oligonucleotide
  Sense strand starting at position 694 of SEQ ID NO: 1244712
acuggauguuuggguccau

SEQ ID NO: 1509243 - RNA, 19 nt, Artificial Sequence
  Description of Artificial Sequence: Synthetic oligonucleotide
  Antisense strand to SEQ ID NO: 1509242
auggacccaaacauccagu

SEQ ID NO: 1509244 - RNA, 19 nt, Artificial Sequence
  Description of Artificial Sequence: Synthetic oligonucleotide
  Sense strand starting at position 695 of SEQ ID NO: 1244712
cuggauguuuggguccaua

SEQ ID NO: 1509245 - RNA, 19 nt, Artificial Sequence
  Description of Artificial Sequence: Synthetic oligonucleotide
  Antisense strand to SEQ ID NO: 1509244
uauggacccaaacauccag

SEQ ID NO: 1509246 - RNA, 19 nt, Artificial Sequence
  Description of Artificial Sequence: Synthetic oligonucleotide
  Sense strand starting at position 718 of SEQ ID NO: 1244712
agagaaauguuugagaacu

SEQ ID NO: 1509247 - RNA, 19 nt, Artificial Sequence
  Description of Artificial Sequence: Synthetic oligonucleotide
  Antisense strand to SEQ ID NO: 1509246
aguucucaaacauuucucu

SEQ ID NO: 1509248 - RNA, 19 nt, Artificial Sequence
  Description of Artificial Sequence: Synthetic oligonucleotide
  Sense strand starting at position 720 of SEQ ID NO: 1244712
agaaauguuugagaacuug

SEQ ID NO: 1509249 - RNA, 19 nt, Artificial Sequence
  Description of Artificial Sequence: Synthetic oligonucleotide
  Antisense strand to SEQ ID NO: 1509248
caaguucucaaacauuucu

SEQ ID NO: 1509250 - RNA, 19 nt, Artificial Sequence
  Description of Artificial Sequence: Synthetic oligonucleotide
  Sense strand starting at position 827 of SEQ ID NO: 1244712
accugaguguccucuguga

SEQ ID NO: 1509251 - RNA, 19 nt, Artificial Sequence
  Description of Artificial Sequence: Synthetic oligonucleotide
  Antisense strand to SEQ ID NO: 1509250
ucacagaggacacucaggu

SEQ ID NO: 1509252 - RNA, 19 nt, Artificial Sequence
  Description of Artificial Sequence: Synthetic oligonucleotide
  Sense strand starting at position 829 of SEQ ID NO: 1244712
cugaguguccucugugaga

SEQ ID NO: 1509253 - RNA, 19 nt, Artificial Sequence
  Description of Artificial Sequence: Synthetic oligonucleotide
  Antisense strand to SEQ ID NO: 1509252
ucucacagaggacacucag

SEQ ID NO: 1509254 - RNA, 19 nt, Artificial Sequence
  Description of Artificial Sequence: Synthetic oligonucleotide
  Sense strand starting at position 831 of SEQ ID NO: 1244712
gaguguccucugugagaug

SEQ ID NO: 1509255 - RNA, 19 nt, Artificial Sequence
  Description of Artificial Sequence: Synthetic oligonucleotide
  Antisense strand to SEQ ID NO: 1509254
caucucacagaggacacuc

SEQ ID NO: 1509256 - RNA, 19 nt, Artificial Sequence
  Description of Artificial Sequence: Synthetic oligonucleotide
  Sense strand starting at position 851 of SEQ ID NO: 1244712
gggugauguugccugccuu

SEQ ID NO: 1509257 - RNA, 19 nt, Artificial Sequence
  Description of Artificial Sequence: Synthetic oligonucleotide
  Antisense strand to SEQ ID NO: 1509256
aaggcaggcaacaucaccc

SEQ ID NO: 1509258 - RNA, 19 nt, Artificial Sequence
  Description of Artificial Sequence: Synthetic oligonucleotide
  Sense strand starting at position 871 of SEQ ID NO: 1244712
ccuaccuaucugugagagu

SEQ ID NO: 1509259 - RNA, 19 nt, Artificial Sequence
  Description of Artificial Sequence: Synthetic oligonucleotide
  Antisense strand to SEQ ID NO: 1509258
acucucacagauagguagg

SEQ ID NO: 1509260 - RNA, 19 nt, Artificial Sequence
  Description of Artificial Sequence: Synthetic oligonucleotide
  Sense strand starting at position 872 of SEQ ID NO: 1244712
cuaccuaucugugagagug

SEQ ID NO: 1509261 - RNA, 19 nt, Artificial Sequence
  Description of Artificial Sequence: Synthetic oligonucleotide
  Antisense strand to SEQ ID NO: 1509260
cacucucacagauagguag

SEQ ID NO: 1509262 - RNA, 19 nt, Artificial Sequence
  Description of Artificial Sequence: Synthetic oligonucleotide
  Sense strand starting at position 874 of SEQ ID NO: 1244712
accuaucugugagaguguu

SEQ ID NO: 1509263 - RNA, 19 nt, Artificial Sequence
  Description of Artificial Sequence: Synthetic oligonucleotide
  Antisense strand to SEQ ID NO: 1509262
aacacucucacagauaggu

SEQ ID NO: 1509264 - RNA, 19 nt, Artificial Sequence
  Description of Artificial Sequence: Synthetic oligonucleotide
  Sense strand starting at position 880 of SEQ ID NO: 1244712
cugugagaguguugugaaa

SEQ ID NO: 1509265 - RNA, 19 nt, Artificial Sequence
  Description of Artificial Sequence: Synthetic oligonucleotide
  Antisense strand to SEQ ID NO: 1509264
uuucacaacacucucacag

SEQ ID NO: 1509266 - RNA, 19 nt, Artificial Sequence
  Description of Artificial Sequence: Synthetic oligonucleotide
  Sense strand starting at position 1042 of SEQ ID NO: 1244712
agugcuguuccagaaagga

SEQ ID NO: 1509267 - RNA, 19 nt, Artificial Sequence
  Description of Artificial Sequence: Synthetic oligonucleotide
  Antisense strand to SEQ ID NO: 1509266
uccuuucuggaacagcacu

SEQ ID NO: 1509268 - RNA, 19 nt, Artificial Sequence
  Description of Artificial Sequence: Synthetic oligonucleotide
  Sense strand starting at position 1757 of SEQ ID NO: 1244712
gaugaauccuacuucggag

SEQ ID NO: 1509269 - RNA, 19 nt, Artificial Sequence
  Description of Artificial Sequence: Synthetic oligonucleotide
  Antisense strand to SEQ ID NO: 1509268
cuccgaaguaggauucauc

SEQ ID NO: 1509270 - RNA, 19 nt, Artificial Sequence
  Description of Artificial Sequence: Synthetic oligonucleotide
  Sense strand starting at position 2128 of SEQ ID NO: 1244712
uuuagaguuuggcuggagu

SEQ ID NO: 1509271 - RNA, 19 nt, Artificial Sequence
  Description of Artificial Sequence: Synthetic oligonucleotide
  Antisense strand to SEQ ID NO: 1509270
acuccagccaaacucuaaa

SEQ ID NO: 1509272 - RNA, 19 nt, Artificial Sequence
  Description of Artificial Sequence: Synthetic oligonucleotide
  Sense strand starting at position 2567 of SEQ ID NO: 1244712
cuuaaagaguccgcgacau

SEQ ID NO: 1509273 - RNA, 19 nt, Artificial Sequence
  Description of Artificial Sequence: Synthetic oligonucleotide
  Antisense strand to SEQ ID NO: 1509272
augucgcggacucuuuaag

SEQ ID NO: 1509274 - RNA, 19 nt, Artificial Sequence
  Description of Artificial Sequence: Synthetic oligonucleotide
  Sense strand starting at position 2614 of SEQ ID NO: 1244712
ccaggaaauuccguuccca

SEQ ID NO: 1509275 - RNA, 19 nt, Artificial Sequence
  Description of Artificial Sequence: Synthetic oligonucleotide
  Antisense strand to SEQ ID NO: 1509274
ugggaacggaauuuccugg

SEQ ID NO: 1509276 - RNA, 19 nt, Artificial Sequence
  Description of Artificial Sequence: Synthetic oligonucleotide
  Sense strand starting at position 2803 of SEQ ID NO: 1244712
cucugaggucucugagcau

SEQ ID NO: 1509277 - RNA, 19 nt, Artificial Sequence
  Description of Artificial Sequence: Synthetic oligonucleotide
  Antisense strand to SEQ ID NO: 1509276
augcucagagaccucagag

SEQ ID NO: 1509278 - RNA, 19 nt, Artificial Sequence
  Description of Artificial Sequence: Synthetic oligonucleotide
  Sense strand starting at position 2806 of SEQ ID NO: 1244712
ugaggucucugagcauaug

SEQ ID NO: 1509279 - RNA, 19 nt, Artificial Sequence
  Description of Artificial Sequence: Synthetic oligonucleotide
  Antisense strand to SEQ ID NO: 1509278
cauaugcucagagaccuca

SEQ ID NO: 1509280 - RNA, 19 nt, Artificial Sequence
  Description of Artificial Sequence: Synthetic oligonucleotide
  Sense strand starting at position 2866 of SEQ ID NO: 1244712
uuuggauccucggccaaau

SEQ ID NO: 1509281 - RNA, 19 nt, Artificial Sequence
  Description of Artificial Sequence: Synthetic oligonucleotide
  Antisense strand to SEQ ID NO: 1509280
auuuggccgaggauccaaa

SEQ ID NO: 1509282 - RNA, 19 nt, Artificial Sequence
  Description of Artificial Sequence: Synthetic oligonucleotide
  Sense strand starting at position 2956 of SEQ ID NO: 1244712
gagagugucuggcucagaa

SEQ ID NO: 1509283 - RNA, 19 nt, Artificial Sequence
  Description of Artificial Sequence: Synthetic oligonucleotide
  Antisense strand to SEQ ID NO: 1509282
uucugagccagacacucuc

SEQ ID NO: 1509284 - RNA, 19 nt, Artificial Sequence
  Description of Artificial Sequence: Synthetic oligonucleotide
  Sense strand starting at position 3033 of SEQ ID NO: 1244712
guggauugcacuuggaauc

SEQ ID NO: 1509285 - RNA, 19 nt, Artificial Sequence
  Description of Artificial Sequence: Synthetic oligonucleotide
  Antisense strand to SEQ ID NO: 1509284
gauuccaagugcaauccac

SEQ ID NO: 1509286 - RNA, 19 nt, Artificial Sequence
  Description of Artificial Sequence: Synthetic oligonucleotide
  Sense strand starting at position 3067 of SEQ ID NO: 1244712
ucgccuuuccgccaccaua

SEQ ID NO: 1509287 - RNA, 19 nt, Artificial Sequence
  Description of Artificial Sequence: Synthetic oligonucleotide
  Antisense strand to SEQ ID NO: 1509286
uaugguggcggaaaggcga

SEQ ID NO: 1509288 - RNA, 19 nt, Artificial Sequence
  Description of Artificial Sequence: Synthetic oligonucleotide
  Sense strand starting at position 3086 of SEQ ID NO: 1244712
gggcuucagugacaucuga

SEQ ID NO: 1509289 - RNA, 19 nt, Artificial Sequence
  Description of Artificial Sequence: Synthetic oligonucleotide
  Antisense strand to SEQ ID NO: 1509288
ucagaugucacugaagccc

SEQ ID NO: 1509290 - RNA, 19 nt, Artificial Sequence
  Description of Artificial Sequence: Synthetic oligonucleotide
  Sense strand starting at position 3160 of SEQ ID NO: 1244712
cagcucuagugaucagcau

SEQ ID NO: 1509291 - RNA, 19 nt, Artificial Sequence
  Description of Artificial Sequence: Synthetic oligonucleotide
  Antisense strand to SEQ ID NO: 1509290
augcugaucacuagagcug

SEQ ID NO: 1509292 - RNA, 19 nt, Artificial Sequence
  Description of Artificial Sequence: Synthetic oligonucleotide
  Sense strand starting at position 3166 of SEQ ID NO: 1244712
uagugaucagcauguccaa

SEQ ID NO: 1509293 - RNA, 19 nt, Artificial Sequence
  Description of Artificial Sequence: Synthetic oligonucleotide
  Antisense strand to SEQ ID NO: 1509292
uuggacaugcugaucacua

SEQ ID NO: 1509294 - RNA, 19 nt, Artificial Sequence
  Description of Artificial Sequence: Synthetic oligonucleotide
  Sense strand starting at position 3287 of SEQ ID NO: 1244712
cguuuauccaguuaguuuc

SEQ ID NO: 1509295 - RNA, 19 nt, Artificial Sequence
  Description of Artificial Sequence: Synthetic oligonucleotide
  Antisense strand to SEQ ID NO: 1509294
gaaacuaacuggauaaacg

SEQ ID NO: 1509296 - RNA, 19 nt, Artificial Sequence
  Description of Artificial Sequence: Synthetic oligonucleotide
  Sense strand starting at position 3290 of SEQ ID NO: 1244712
uuauccaguuaguuuccaa

SEQ ID NO: 1509297 - RNA, 19 nt, Artificial Sequence
  Description of Artificial Sequence: Synthetic oligonucleotide
  Antisense strand to SEQ ID NO: 1509296
uuggaaacuaacuggauaa

SEQ ID NO: 1509298 - RNA, 19 nt, Artificial Sequence
  Description of Artificial Sequence: Synthetic oligonucleotide
  Sense strand starting at position 3293 of SEQ ID NO: 1244712
uccaguuaguuuccaacau

SEQ ID NO: 1509299 - RNA, 19 nt, Artificial Sequence
  Description of Artificial Sequence: Synthetic oligonucleotide
  Antisense strand to SEQ ID NO: 1509298
auguuggaaacuaacugga

SEQ ID NO: 1509300 - RNA, 19 nt, Artificial Sequence
  Description of Artificial Sequence: Synthetic oligonucleotide
  Sense strand starting at position 3294 of SEQ ID NO: 1244712
ccaguuaguuuccaacauu

SEQ ID NO: 1509301 - RNA, 19 nt, Artificial Sequence
  Description of Artificial Sequence: Synthetic oligonucleotide
  Antisense strand to SEQ ID NO: 1509300
aauguuggaaacuaacugg

SEQ ID NO: 1509302 - RNA, 19 nt, Artificial Sequence
  Description of Artificial Sequence: Synthetic oligonucleotide
  Sense strand starting at position 3297 of SEQ ID NO: 1244712
guuaguuuccaacauuggu

SEQ ID NO: 1509303 - RNA, 19 nt, Artificial Sequence
  Description of Artificial Sequence: Synthetic oligonucleotide
  Antisense strand to SEQ ID NO: 1509302
accaauguuggaaacuaac

SEQ ID NO: 1509304 - RNA, 19 nt, Artificial Sequence
  Description of Artificial Sequence: Synthetic oligonucleotide
  Sense strand starting at position 3401 of SEQ ID NO: 1244712
ggucuucgugcuccucuua

SEQ ID NO: 1509305 - RNA, 19 nt, Artificial Sequence
  Description of Artificial Sequence: Synthetic oligonucleotide
  Antisense strand to SEQ ID NO: 1509304
uaagaggagcacgaagacc

SEQ ID NO: 1509306 - RNA, 19 nt, Artificial Sequence
  Description of Artificial Sequence: Synthetic oligonucleotide
  Sense strand starting at position 3423 of SEQ ID NO: 1244712
ccuuuaugacgagggcaga

SEQ ID NO: 1509307 - RNA, 19 nt, Artificial Sequence
  Description of Artificial Sequence: Synthetic oligonucleotide
  Antisense strand to SEQ ID NO: 1509306
ucugcccucgucauaaagg

SEQ ID NO: 1509308 - RNA, 19 nt, Artificial Sequence
  Description of Artificial Sequence: Synthetic oligonucleotide
  Sense strand starting at position 3476 of SEQ ID NO: 1244712
gcaagaagucacugucucu

SEQ ID NO: 1509309 - RNA, 19 nt, Artificial Sequence
  Description of Artificial Sequence: Synthetic oligonucleotide
  Antisense strand to SEQ ID NO: 1509308
agagacagugacuucuugc

SEQ ID NO: 1509310 - RNA, 19 nt, Artificial Sequence
  Description of Artificial Sequence: Synthetic oligonucleotide
  Sense strand starting at position 3624 of SEQ ID NO: 1244712
augccuaaguccuuauugu

SEQ ID NO: 1509311 - RNA, 19 nt, Artificial Sequence
  Description of Artificial Sequence: Synthetic oligonucleotide
  Antisense strand to SEQ ID NO: 1509310
acaauaaggacuuaggcau

SEQ ID NO: 1509312 - RNA, 19 nt, Artificial Sequence
  Description of Artificial Sequence: Synthetic oligonucleotide
  Sense strand starting at position 3625 of SEQ ID NO: 1244712
ugccuaaguccuuauugua

SEQ ID NO: 1509313 - RNA, 19 nt, Artificial Sequence
  Description of Artificial Sequence: Synthetic oligonucleotide
  Antisense strand to SEQ ID NO: 1509312
uacaauaaggacuuaggca

SEQ ID NO: 1509314 - RNA, 19 nt, Artificial Sequence
  Description of Artificial Sequence: Synthetic oligonucleotide
  Sense strand starting at position 3673 of SEQ ID NO: 1244712
ucuugauuccuuugcugca

SEQ ID NO: 1509315 - RNA, 19 nt, Artificial Sequence
  Description of Artificial Sequence: Synthetic oligonucleotide
  Antisense strand to SEQ ID NO: 1509314
ugcagcaaaggaaucaaga

SEQ ID NO: 1509316 - RNA, 19 nt, Artificial Sequence
  Description of Artificial Sequence: Synthetic oligonucleotide
  Sense strand starting at position 251 of SEQ ID NO: 1244713
accugaguuggguaguuga

SEQ ID NO: 1509317 - RNA, 19 nt, Artificial Sequence
  Description of Artificial Sequence: Synthetic oligonucleotide
  Antisense strand to SEQ ID NO: 1509316
ucaacuacccaacucaggu

SEQ ID NO: 1509318 - RNA, 19 nt, Artificial Sequence
  Description of Artificial Sequence: Synthetic oligonucleotide
  Sense strand starting at position 254 of SEQ ID NO: 1244713
ugaguuggguaguugacaa

SEQ ID NO: 1509319 - RNA, 19 nt, Artificial Sequence
  Description of Artificial Sequence: Synthetic oligonucleotide
  Antisense strand to SEQ ID NO: 1509318
uugucaacuacccaacuca

SEQ ID NO: 1509320 - RNA, 19 nt, Artificial Sequence
  Description of Artificial Sequence: Synthetic oligonucleotide
  Sense strand starting at position 281 of SEQ ID NO: 1244713
gcugaauugcuggagacca

SEQ ID NO: 1509321 - RNA, 19 nt, Artificial Sequence
  Description of Artificial Sequence: Synthetic oligonucleotide
  Antisense strand to SEQ ID NO: 1509320
uggucuccagcaauucagc

SEQ ID NO: 1509322 - RNA, 19 nt, Artificial Sequence
  Description of Artificial Sequence: Synthetic oligonucleotide
  Sense strand starting at position 496 of SEQ ID NO: 1244713
aaaggaacuugucugucaa

SEQ ID NO: 1509323 - RNA, 19 nt, Artificial Sequence
  Description of Artificial Sequence: Synthetic oligonucleotide
  Antisense strand to SEQ ID NO: 1509322
uugacagacaaguuccuuu

SEQ ID NO: 1509324 - RNA, 19 nt, Artificial Sequence
  Description of Artificial Sequence: Synthetic oligonucleotide
  Sense strand starting at position 497 of SEQ ID NO: 1244713
aaggaacuugucugucaaa

SEQ ID NO: 1509325 - RNA, 19 nt, Artificial Sequence
  Description of Artificial Sequence: Synthetic oligonucleotide
  Antisense strand to SEQ ID NO: 1509324
uuugacagacaaguuccuu

SEQ ID NO: 1509326 - RNA, 19 nt, Artificial Sequence
  Description of Artificial Sequence: Synthetic oligonucleotide
  Sense strand starting at position 498 of SEQ ID NO: 1244713
aggaacuugucugucaaac

SEQ ID NO: 1509327 - RNA, 19 nt, Artificial Sequence
  Description of Artificial Sequence: Synthetic oligonucleotide
  Antisense strand to SEQ ID NO: 1509326
guuugacagacaaguuccu

SEQ ID NO: 1509328 - RNA, 19 nt, Artificial Sequence
  Description of Artificial Sequence: Synthetic oligonucleotide
  Sense strand starting at position 525 of SEQ ID NO: 1244713
agcuauuucuguccuguua

SEQ ID NO: 1509329 - RNA, 19 nt, Artificial Sequence
  Description of Artificial Sequence: Synthetic oligonucleotide
  Antisense strand to SEQ ID NO: 1509328
uaacaggacagaaauagcu

SEQ ID NO: 1509330 - RNA, 19 nt, Artificial Sequence
  Description of Artificial Sequence: Synthetic oligonucleotide
  Sense strand starting at position 537 of SEQ ID NO: 1244713
ccuguuacacugggaaauc

SEQ ID NO: 1509331 - RNA, 19 nt, Artificial Sequence
  Description of Artificial Sequence: Synthetic oligonucleotide
  Antisense strand to SEQ ID NO: 1509330
gauuucccaguguaacagg

SEQ ID NO: 1509332 - RNA, 19 nt, Artificial Sequence
  Description of Artificial Sequence: Synthetic oligonucleotide
  Sense strand starting at position 916 of SEQ ID NO: 1244713
ugaguuagccuuuaagguu

SEQ ID NO: 1509333 - RNA, 19 nt, Artificial Sequence
  Description of Artificial Sequence: Synthetic oligonucleotide
  Antisense strand to SEQ ID NO: 1509332
aaccuuaaaggcuaacuca

SEQ ID NO: 1509334 - RNA, 19 nt, Artificial Sequence
  Description of Artificial Sequence: Synthetic oligonucleotide
  Sense strand starting at position 922 of SEQ ID NO: 1244713
agccuuuaagguugaauca

SEQ ID NO: 1509335 - RNA, 19 nt, Artificial Sequence
  Description of Artificial Sequence: Synthetic oligonucleotide
  Antisense strand to SEQ ID NO: 1509334
ugauucaaccuuaaaggcu

SEQ ID NO: 1509336 - RNA, 19 nt, Artificial Sequence
  Description of Artificial Sequence: Synthetic oligonucleotide
  Sense strand starting at position 923 of SEQ ID NO: 1244713
gccuuuaagguugaaucaa

SEQ ID NO: 1509337 - RNA, 19 nt, Artificial Sequence
  Description of Artificial Sequence: Synthetic oligonucleotide
  Antisense strand to SEQ ID NO: 1509336
uugauucaaccuuaaaggc

SEQ ID NO: 1509338 - RNA, 19 nt, Artificial Sequence
  Description of Artificial Sequence: Synthetic oligonucleotide
  Sense strand starting at position 990 of SEQ ID NO: 1244713
acaaauuacuaucugggua

SEQ ID NO: 1509339 - RNA, 19 nt, Artificial Sequence
  Description of Artificial Sequence: Synthetic oligonucleotide
  Antisense strand to SEQ ID NO: 1509338
uacccagauaguaauuugu

SEQ ID NO: 1509340 - RNA, 19 nt, Artificial Sequence
  Description of Artificial Sequence: Synthetic oligonucleotide
  Sense strand starting at position 994 of SEQ ID NO: 1244713
auuacuaucuggguacuca

SEQ ID NO: 1509341 - RNA, 19 nt, Artificial Sequence
  Description of Artificial Sequence: Synthetic oligonucleotide
  Antisense strand to SEQ ID NO: 1509340
ugaguacccagauaguaau

SEQ ID NO: 1509342 - RNA, 19 nt, Artificial Sequence
  Description of Artificial Sequence: Synthetic oligonucleotide
  Sense strand starting at position 998 of SEQ ID NO: 1244713
cuaucuggguacucacaga

SEQ ID NO: 1509343 - RNA, 19 nt, Artificial Sequence
  Description of Artificial Sequence: Synthetic oligonucleotide
  Antisense strand to SEQ ID NO: 1509342
ucugugaguacccagauag

SEQ ID NO: 1509344 - RNA, 19 nt, Artificial Sequence
  Description of Artificial Sequence: Synthetic oligonucleotide
  Sense strand starting at position 1109 of SEQ ID NO: 1244713
ccucuuguucuagaaauga

SEQ ID NO: 1509345 - RNA, 19 nt, Artificial Sequence
  Description of Artificial Sequence: Synthetic oligonucleotide
  Antisense strand to SEQ ID NO: 1509344
ucauuucuagaacaagagg

SEQ ID NO: 1509346 - RNA, 19 nt, Artificial Sequence
  Description of Artificial Sequence: Synthetic oligonucleotide
  Sense strand starting at position 1408 of SEQ ID NO: 1244713
cgguauuucggcuauggca

SEQ ID NO: 1509347 - RNA, 19 nt, Artificial Sequence
  Description of Artificial Sequence: Synthetic oligonucleotide
  Antisense strand to SEQ ID NO: 1509346
ugccauagccgaaauaccg

SEQ ID NO: 1509348 - RNA, 19 nt, Artificial Sequence
  Description of Artificial Sequence: Synthetic oligonucleotide
  Sense strand starting at position 1604 of SEQ ID NO: 1244713
ccuggaguucuggaauucu

SEQ ID NO: 1509349 - RNA, 19 nt, Artificial Sequence
  Description of Artificial Sequence: Synthetic oligonucleotide
  Antisense strand to SEQ ID NO: 1509348
agaauuccagaacuccagg

SEQ ID NO: 1509350 - RNA, 19 nt, Artificial Sequence
  Description of Artificial Sequence: Synthetic oligonucleotide
  Sense strand starting at position 1613 of SEQ ID NO: 1244713
cuggaauucuggguaggcu

SEQ ID NO: 1509351 - RNA, 19 nt, Artificial Sequence
  Description of Artificial Sequence: Synthetic oligonucleotide
  Antisense strand to SEQ ID NO: 1509350
agccuacccagaauuccag

SEQ ID NO: 1509352 - RNA, 19 nt, Artificial Sequence
  Description of Artificial Sequence: Synthetic oligonucleotide
  Sense strand starting at position 2412 of SEQ ID NO: 1244713
ugccaaauuccuuacugga

SEQ ID NO: 1509353 - RNA, 19 nt, Artificial Sequence
  Description of Artificial Sequence: Synthetic oligonucleotide
  Antisense strand to SEQ ID NO: 1509352
uccaguaaggaauuuggca

SEQ ID NO: 1509354 - RNA, 19 nt, Artificial Sequence
  Description of Artificial Sequence: Synthetic oligonucleotide
  Sense strand starting at position 2707 of SEQ ID NO: 1244713
agguauuauuagucaucac

SEQ ID NO: 1509355 - RNA, 19 nt, Artificial Sequence
  Description of Artificial Sequence: Synthetic oligonucleotide
  Antisense strand to SEQ ID NO: 1509354
gugaugacuaauaauaccu

SEQ ID NO: 1509356 - RNA, 19 nt, Artificial Sequence
  Description of Artificial Sequence: Synthetic oligonucleotide
  Sense strand starting at position 2711 of SEQ ID NO: 1244713
auuauuagucaucacuguu

SEQ ID NO: 1509357 - RNA, 19 nt, Artificial Sequence
  Description of Artificial Sequence: Synthetic oligonucleotide
  Antisense strand to SEQ ID NO: 1509356
aacagugaugacuaauaau

SEQ ID NO: 1509358 - RNA, 19 nt, Artificial Sequence
  Description of Artificial Sequence: Synthetic oligonucleotide
  Sense strand starting at position 2769 of SEQ ID NO: 1244713
aauggaagcuuacugaagu

SEQ ID NO: 1509359 - RNA, 19 nt, Artificial Sequence
  Description of Artificial Sequence: Synthetic oligonucleotide
  Antisense strand to SEQ ID NO: 1509358
acuucaguaagcuuccauu

SEQ ID NO: 1509360 - RNA, 19 nt, Artificial Sequence
  Description of Artificial Sequence: Synthetic oligonucleotide
  Sense strand starting at position 2921 of SEQ ID NO: 1244713
acgaauugccagggcaaga

SEQ ID NO: 1509361 - RNA, 19 nt, Artificial Sequence
  Description of Artificial Sequence: Synthetic oligonucleotide
  Antisense strand to SEQ ID NO: 1509360
ucuugcccuggcaauucgu

SEQ ID NO: 1509362 - RNA, 19 nt, Artificial Sequence
  Description of Artificial Sequence: Synthetic oligonucleotide
  Sense strand starting at position 3217 of SEQ ID NO: 1244713
auauuaguggcaugggaaa

SEQ ID NO: 1509363 - RNA, 19 nt, Artificial Sequence
  Description of Artificial Sequence: Synthetic oligonucleotide
  Antisense strand to SEQ ID NO: 1509362
uuucccaugccacuaauau

SEQ ID NO: 1509364 - RNA, 19 nt, Artificial Sequence
  Description of Artificial Sequence: Synthetic oligonucleotide
  Sense strand starting at position 3366 of SEQ ID NO: 1244713
gcuuguccugagucgaguu

SEQ ID NO: 1509365 - RNA, 19 nt, Artificial Sequence
  Description of Artificial Sequence: Synthetic oligonucleotide
  Antisense strand to SEQ ID NO: 1509364
aacucgacucaggacaagc

SEQ ID NO: 1509366 - RNA, 19 nt, Artificial Sequence
  Description of Artificial Sequence: Synthetic oligonucleotide
  Sense strand starting at position 3382 of SEQ ID NO: 1244713
guuuccucacgugaaauua

SEQ ID NO: 1509367 - RNA, 19 nt, Artificial Sequence
  Description of Artificial Sequence: Synthetic oligonucleotide
  Antisense strand to SEQ ID NO: 1509366
uaauuucacgugaggaaac

SEQ ID NO: 1509368 - RNA, 19 nt, Artificial Sequence
  Description of Artificial Sequence: Synthetic oligonucleotide
  Sense strand starting at position 3391 of SEQ ID NO: 1244713
cgugaaauuaaugggaaua

SEQ ID NO: 1509369 - RNA, 19 nt, Artificial Sequence
  Description of Artificial Sequence: Synthetic oligonucleotide
  Antisense strand to SEQ ID NO: 1509368
uauucccauuaauuucacg

SEQ ID NO: 1509370 - RNA, 19 nt, Artificial Sequence
  Description of Artificial Sequence: Synthetic oligonucleotide
  Sense strand starting at position 3511 of SEQ ID NO: 1244713
gggaaaguuauucgaucua

SEQ ID NO: 1509371 - RNA, 19 nt, Artificial Sequence
  Description of Artificial Sequence: Synthetic oligonucleotide
  Antisense strand to SEQ ID NO: 1509370
uagaucgaauaacuuuccc

SEQ ID NO: 1509372 - RNA, 19 nt, Artificial Sequence
  Description of Artificial Sequence: Synthetic oligonucleotide
  Sense strand starting at position 3531 of SEQ ID NO: 1244713
uuguccuuuccugauuaua

SEQ ID NO: 1509373 - RNA, 19 nt, Artificial Sequence
  Description of Artificial Sequence: Synthetic oligonucleotide
  Antisense strand to SEQ ID NO: 1509372
uauaaucaggaaaggacaa

SEQ ID NO: 1509374 - RNA, 19 nt, Artificial Sequence
  Description of Artificial Sequence: Synthetic oligonucleotide
  Sense strand starting at position 3533 of SEQ ID NO: 1244713
guccuuuccugauuauaca

SEQ ID NO: 1509375 - RNA, 19 nt, Artificial Sequence
  Description of Artificial Sequence: Synthetic oligonucleotide
  Antisense strand to SEQ ID NO: 1509374
uguauaaucaggaaaggac

SEQ ID NO: 1509376 - RNA, 19 nt, Artificial Sequence
  Description of Artificial Sequence: Synthetic oligonucleotide
  Sense strand starting at position 3541 of SEQ ID NO: 1244713
cugauuauacagugggacu

SEQ ID NO: 1509377 - RNA, 19 nt, Artificial Sequence
  Description of Artificial Sequence: Synthetic oligonucleotide
  Antisense strand to SEQ ID NO: 1509376
agucccacuguauaaucag

SEQ ID NO: 1509378 - RNA, 19 nt, Artificial Sequence
  Description of Artificial Sequence: Synthetic oligonucleotide
  Sense strand starting at position 3542 of SEQ ID NO: 1244713
ugauuauacagugggacuu

SEQ ID NO: 1509379 - RNA, 19 nt, Artificial Sequence
  Description of Artificial Sequence: Synthetic oligonucleotide
  Antisense strand to SEQ ID NO: 1509378
aagucccacuguauaauca

SEQ ID NO: 1509380 - RNA, 19 nt, Artificial Sequence
  Description of Artificial Sequence: Synthetic oligonucleotide
  Sense strand starting at position 3543 of SEQ ID NO: 1244713
gauuauacagugggacuua

SEQ ID NO: 1509381 - RNA, 19 nt, Artificial Sequence
  Description of Artificial Sequence: Synthetic oligonucleotide
  Antisense strand to SEQ ID NO: 1509380
uaagucccacuguauaauc

SEQ ID NO: 1509382 - RNA, 19 nt, Artificial Sequence
  Description of Artificial Sequence: Synthetic oligonucleotide
  Sense strand starting at position 3647 of SEQ ID NO: 1244713
aaugaauggugguugggau

SEQ ID NO: 1509383 - RNA, 19 nt, Artificial Sequence
  Description of Artificial Sequence: Synthetic oligonucleotide
  Antisense strand to SEQ ID NO: 1509382
aucccaaccaccauucauu

SEQ ID NO: 1509384 - RNA, 19 nt, Artificial Sequence
  Description of Artificial Sequence: Synthetic oligonucleotide
  Sense strand starting at position 3648 of SEQ ID NO: 1244713
augaauggugguugggaua

SEQ ID NO: 1509385 - RNA, 19 nt, Artificial Sequence
  Description of Artificial Sequence: Synthetic oligonucleotide
  Antisense strand to SEQ ID NO: 1509384
uaucccaaccaccauucau

SEQ ID NO: 1509386 - RNA, 19 nt, Artificial Sequence
  Description of Artificial Sequence: Synthetic oligonucleotide
  Sense strand starting at position 3661 of SEQ ID NO: 1244713
gggauagccugguuuagga

SEQ ID NO: 1509387 - RNA, 19 nt, Artificial Sequence
  Description of Artificial Sequence: Synthetic oligonucleotide
  Antisense strand to SEQ ID NO: 1509386
uccuaaaccaggcuauccc

SEQ ID NO: 1509388 - RNA, 19 nt, Artificial Sequence
  Description of Artificial Sequence: Synthetic oligonucleotide
  Sense strand starting at position 3691 of SEQ ID NO: 1244713
ggucuuaugaggcagauac

SEQ ID NO: 1509389 - RNA, 19 nt, Artificial Sequence
  Description of Artificial Sequence: Synthetic oligonucleotide
  Antisense strand to SEQ ID NO: 1509388
guaucugccucauaagacc

SEQ ID NO: 1509390 - RNA, 19 nt, Artificial Sequence
  Description of Artificial Sequence: Synthetic oligonucleotide
  Sense strand starting at position 3817 of SEQ ID NO: 1244713
uugagaugguuauucccau

SEQ ID NO: 1509391 - RNA, 19 nt, Artificial Sequence
  Description of Artificial Sequence: Synthetic oligonucleotide
  Antisense strand to SEQ ID NO: 1509390
augggaauaaccaucucaa

SEQ ID NO: 1509392 - RNA, 19 nt, Artificial Sequence
  Description of Artificial Sequence: Synthetic oligonucleotide
  Sense strand starting at position 3818 of SEQ ID NO: 1244713
ugagaugguuauucccauu

SEQ ID NO: 1509393 - RNA, 19 nt, Artificial Sequence
  Description of Artificial Sequence: Synthetic oligonucleotide
  Antisense strand to SEQ ID NO: 1509392
aaugggaauaaccaucuca

SEQ ID NO: 1509394 - RNA, 19 nt, Artificial Sequence
  Description of Artificial Sequence: Synthetic oligonucleotide
  Sense strand starting at position 3949 of SEQ ID NO: 1244713
guggguacucccugagaug

SEQ ID NO: 1509395 - RNA, 19 nt, Artificial Sequence
  Description of Artificial Sequence: Synthetic oligonucleotide
  Antisense strand to SEQ ID NO: 1509394
caucucagggaguacccac

SEQ ID NO: 1509396 - RNA, 19 nt, Artificial Sequence
  Description of Artificial Sequence: Synthetic oligonucleotide
  Sense strand starting at position 130 of SEQ ID NO: 1244714
ucaauaagcuggucuacau

SEQ ID NO: 1509397 - RNA, 19 nt, Artificial Sequence
  Description of Artificial Sequence: Synthetic oligonucleotide
  Antisense strand to SEQ ID NO: 1509396
auguagaccagcuuauuga

SEQ ID NO: 1509398 - RNA, 19 nt, Artificial Sequence
  Description of Artificial Sequence: Synthetic oligonucleotide
  Sense strand starting at position 140 of SEQ ID NO: 1244714
ggucuacauucuuacucuu

SEQ ID NO: 1509399 - RNA, 19 nt, Artificial Sequence
  Description of Artificial Sequence: Synthetic oligonucleotide
  Antisense strand to SEQ ID NO: 1509398
aagaguaagaauguagacc

SEQ ID NO: 1509400 - RNA, 19 nt, Artificial Sequence
  Description of Artificial Sequence: Synthetic oligonucleotide
  Sense strand starting at position 179 of SEQ ID NO: 1244714
cuagauuaacagugcuagu

SEQ ID NO: 1509401 - RNA, 19 nt, Artificial Sequence
  Description of Artificial Sequence: Synthetic oligonucleotide
  Antisense strand to SEQ ID NO: 1509400
acuagcacuguuaaucuag

SEQ ID NO: 1509402 - RNA, 19 nt, Artificial Sequence
  Description of Artificial Sequence: Synthetic oligonucleotide
  Sense strand starting at position 182 of SEQ ID NO: 1244714
gauuaacagugcuaguaca

SEQ ID NO: 1509403 - RNA, 19 nt, Artificial Sequence
  Description of Artificial Sequence: Synthetic oligonucleotide
  Antisense strand to SEQ ID NO: 1509402
uguacuagcacuguuaauc

SEQ ID NO: 1509404 - RNA, 19 nt, Artificial Sequence
  Description of Artificial Sequence: Synthetic oligonucleotide
  Sense strand starting at position 189 of SEQ ID NO: 1244714
agugcuaguacagaugauu

SEQ ID NO: 1509405 - RNA, 19 nt, Artificial Sequence
  Description of Artificial Sequence: Synthetic oligonucleotide
  Antisense strand to SEQ ID NO: 1509404
aaucaucuguacuagcacu

SEQ ID NO: 1509406 - RNA, 19 nt, Artificial Sequence
  Description of Artificial Sequence: Synthetic oligonucleotide
  Sense strand starting at position 240 of SEQ ID NO: 1244714
cauguacucaggugaggaa

SEQ ID NO: 1509407 - RNA, 19 nt, Artificial Sequence
  Description of Artificial Sequence: Synthetic oligonucleotide
  Antisense strand to SEQ ID NO: 1509406
uuccucaccugaguacaug

SEQ ID NO: 1509408 - RNA, 19 nt, Artificial Sequence
  Description of Artificial Sequence: Synthetic oligonucleotide
  Sense strand starting at position 301 of SEQ ID NO: 1244714
caaagaagugacugcauau

SEQ ID NO: 1509409 - RNA, 19 nt, Artificial Sequence
  Description of Artificial Sequence: Synthetic oligonucleotide
  Antisense strand to SEQ ID NO: 1509408
auaugcagucacuucuuug

SEQ ID NO: 1509410 - RNA, 19 nt, Artificial Sequence
  Description of Artificial Sequence: Synthetic oligonucleotide
  Sense strand starting at position 411 of SEQ ID NO: 1244714
cuguaauccuuguuugaug

SEQ ID NO: 1509411 - RNA, 19 nt, Artificial Sequence
  Description of Artificial Sequence: Synthetic oligonucleotide
  Antisense strand to SEQ ID NO: 1509410
caucaaacaaggauuacag

SEQ ID NO: 1509412 - RNA, 19 nt, Artificial Sequence
  Description of Artificial Sequence: Synthetic oligonucleotide
  Sense strand starting at position 412 of SEQ ID NO: 1244714
uguaauccuuguuugaugu

SEQ ID NO: 1509413 - RNA, 19 nt, Artificial Sequence
  Description of Artificial Sequence: Synthetic oligonucleotide
  Antisense strand to SEQ ID NO: 1509412
acaucaaacaaggauuaca

SEQ ID NO: 1509414 - RNA, 19 nt, Artificial Sequence
  Description of Artificial Sequence: Synthetic oligonucleotide
  Sense strand starting at position 416 of SEQ ID NO: 1244714
auccuuguuugaugucaau

SEQ ID NO: 1509415 - RNA, 19 nt, Artificial Sequence
  Description of Artificial Sequence: Synthetic oligonucleotide
  Antisense strand to SEQ ID NO: 1509414
auugacaucaaacaaggau

SEQ ID NO: 1509416 - RNA, 19 nt, Artificial Sequence
  Description of Artificial Sequence: Synthetic oligonucleotide
  Sense strand starting at position 539 of SEQ ID NO: 1244714
ggcucugucuuugccggaa

SEQ ID NO: 1509417 - RNA, 19 nt, Artificial Sequence
  Description of Artificial Sequence: Synthetic oligonucleotide
  Antisense strand to SEQ ID NO: 1509416
uuccggcaaagacagagcc

SEQ ID NO: 1509418 - RNA, 19 nt, Artificial Sequence
  Description of Artificial Sequence: Synthetic oligonucleotide
  Sense strand starting at position 541 of SEQ ID NO: 1244714
cucugucuuugccggaaca

SEQ ID NO: 1509419 - RNA, 19 nt, Artificial Sequence
  Description of Artificial Sequence: Synthetic oligonucleotide
  Antisense strand to SEQ ID NO: 1509418
uguuccggcaaagacagag

SEQ ID NO: 1509420 - RNA, 19 nt, Artificial Sequence
  Description of Artificial Sequence: Synthetic oligonucleotide
  Sense strand starting at position 543 of SEQ ID NO: 1244714
cugucuuugccggaacacu

SEQ ID NO: 1509421 - RNA, 19 nt, Artificial Sequence
  Description of Artificial Sequence: Synthetic oligonucleotide
  Antisense strand to SEQ ID NO: 1509420
aguguuccggcaaagacag

SEQ ID NO: 1509422 - RNA, 19 nt, Artificial Sequence
  Description of Artificial Sequence: Synthetic oligonucleotide
  Sense strand starting at position 637 of SEQ ID NO: 1244714
uggaucugcuccucagacu

SEQ ID NO: 1509423 - RNA, 19 nt, Artificial Sequence
  Description of Artificial Sequence: Synthetic oligonucleotide
  Antisense strand to SEQ ID NO: 1509422
agucugaggagcagaucca

SEQ ID NO: 1509424 - RNA, 19 nt, Artificial Sequence
  Description of Artificial Sequence: Synthetic oligonucleotide
  Sense strand starting at position 638 of SEQ ID NO: 1244714
ggaucugcuccucagacuu

SEQ ID NO: 1509425 - RNA, 19 nt, Artificial Sequence
  Description of Artificial Sequence: Synthetic oligonucleotide
  Antisense strand to SEQ ID NO: 1509424
aagucugaggagcagaucc

SEQ ID NO: 1509426 - RNA, 19 nt, Artificial Sequence
  Description of Artificial Sequence: Synthetic oligonucleotide
  Sense strand starting at position 663 of SEQ ID NO: 1244714
uuaguuaugcccugauucu

SEQ ID NO: 1509427 - RNA, 19 nt, Artificial Sequence
  Description of Artificial Sequence: Synthetic oligonucleotide
  Antisense strand to SEQ ID NO: 1509426
agaaucagggcauaacuaa

SEQ ID NO: 1509428 - RNA, 19 nt, Artificial Sequence
  Description of Artificial Sequence: Synthetic oligonucleotide
  Sense strand starting at position 767 of SEQ ID NO: 1244714
acccuugacucugagaggu

SEQ ID NO: 1509429 - RNA, 19 nt, Artificial Sequence
  Description of Artificial Sequence: Synthetic oligonucleotide
  Antisense strand to SEQ ID NO: 1509428
accucucagagucaagggu

SEQ ID NO: 1509430 - RNA, 19 nt, Artificial Sequence
  Description of Artificial Sequence: Synthetic oligonucleotide
  Sense strand starting at position 769 of SEQ ID NO: 1244714
ccuugacucugagagguau

SEQ ID NO: 1509431 - RNA, 19 nt, Artificial Sequence
  Description of Artificial Sequence: Synthetic oligonucleotide
  Antisense strand to SEQ ID NO: 1509430
auaccucucagagucaagg

SEQ ID NO: 1509432 - RNA, 19 nt, Artificial Sequence
  Description of Artificial Sequence: Synthetic oligonucleotide
  Sense strand starting at position 931 of SEQ ID NO: 1244714
gagguucugggcuguaaug

SEQ ID NO: 1509433 - RNA, 19 nt, Artificial Sequence
  Description of Artificial Sequence: Synthetic oligonucleotide
  Antisense strand to SEQ ID NO: 1509432
cauuacagcccagaaccuc

SEQ ID NO: 1509434 - RNA, 19 nt, Artificial Sequence
  Description of Artificial Sequence: Synthetic oligonucleotide
  Sense strand starting at position 933 of SEQ ID NO: 1244714
gguucugggcuguaaugau

SEQ ID NO: 1509435 - RNA, 19 nt, Artificial Sequence
  Description of Artificial Sequence: Synthetic oligonucleotide
  Antisense strand to SEQ ID NO: 1509434
aucauuacagcccagaacc

SEQ ID NO: 1509436 - RNA, 19 nt, Artificial Sequence
  Description of Artificial Sequence: Synthetic oligonucleotide
  Sense strand starting at position 1003 of SEQ ID NO: 1244714
agucucauggagcauauaa

SEQ ID NO: 1509437 - RNA, 19 nt, Artificial Sequence
  Description of Artificial Sequence: Synthetic oligonucleotide
  Antisense strand to SEQ ID NO: 1509436
uuauaugcuccaugagacu

SEQ ID NO: 1509438 - RNA, 19 nt, Artificial Sequence
  Description of Artificial Sequence: Synthetic oligonucleotide
  Sense strand starting at position 1402 of SEQ ID NO: 1244714
gaugauuaguccuaggaug

SEQ ID NO: 1509439 - RNA, 19 nt, Artificial Sequence
  Description of Artificial Sequence: Synthetic oligonucleotide
  Antisense strand to SEQ ID NO: 1509438
cauccuaggacuaaucauc

SEQ ID NO: 1509440 - RNA, 19 nt, Artificial Sequence
  Description of Artificial Sequence: Synthetic oligonucleotide
  Sense strand starting at position 1404 of SEQ ID NO: 1244714
ugauuaguccuaggaugca

SEQ ID NO: 1509441 - RNA, 19 nt, Artificial Sequence
  Description of Artificial Sequence: Synthetic oligonucleotide
  Antisense strand to SEQ ID NO: 1509440
ugcauccuaggacuaauca

SEQ ID NO: 1509442 - RNA, 19 nt, Artificial Sequence
  Description of Artificial Sequence: Synthetic oligonucleotide
  Sense strand starting at position 1501 of SEQ ID NO: 1244714
ggaagaaccuuugcgaaca

SEQ ID NO: 1509443 - RNA, 19 nt, Artificial Sequence
  Description of Artificial Sequence: Synthetic oligonucleotide
  Antisense strand to SEQ ID NO: 1509442
uguucgcaaagguucuucc

SEQ ID NO: 1509444 - RNA, 19 nt, Artificial Sequence
  Description of Artificial Sequence: Synthetic oligonucleotide
  Sense strand starting at position 1725 of SEQ ID NO: 1244714
ccugguaagccauacgaga

SEQ ID NO: 1509445 - RNA, 19 nt, Artificial Sequence
  Description of Artificial Sequence: Synthetic oligonucleotide
  Antisense strand to SEQ ID NO: 1509444
ucucguauggcuuaccagg

SEQ ID NO: 1509446 - RNA, 19 nt, Artificial Sequence
  Description of Artificial Sequence: Synthetic oligonucleotide
  Sense strand starting at position 1727 of SEQ ID NO: 1244714
ugguaagccauacgagaaa

SEQ ID NO: 1509447 - RNA, 19 nt, Artificial Sequence
  Description of Artificial Sequence: Synthetic oligonucleotide
  Antisense strand to SEQ ID NO: 1509446
uuucucguauggcuuacca

SEQ ID NO: 1509448 - RNA, 19 nt, Artificial Sequence
  Description of Artificial Sequence: Synthetic oligonucleotide
  Sense strand starting at position 1875 of SEQ ID NO: 1244714
uggagucaggcugguugaa

SEQ ID NO: 1509449 - RNA, 19 nt, Artificial Sequence
  Description of Artificial Sequence: Synthetic oligonucleotide
  Antisense strand to SEQ ID NO: 1509448
uucaaccagccugacucca

SEQ ID NO: 1509450 - RNA, 19 nt, Artificial Sequence
  Description of Artificial Sequence: Synthetic oligonucleotide
  Sense strand starting at position 1877 of SEQ ID NO: 1244714
gagucaggcugguugaaau

SEQ ID NO: 1509451 - RNA, 19 nt, Artificial Sequence
  Description of Artificial Sequence: Synthetic oligonucleotide
  Antisense strand to SEQ ID NO: 1509450
auuucaaccagccugacuc

SEQ ID NO: 1509452 - RNA, 19 nt, Artificial Sequence
  Description of Artificial Sequence: Synthetic oligonucleotide
  Sense strand starting at position 1910 of SEQ ID NO: 1244714
gccaucuuuccuuggacuu

SEQ ID NO: 1509453 - RNA, 19 nt, Artificial Sequence
  Description of Artificial Sequence: Synthetic oligonucleotide
  Antisense strand to SEQ ID NO: 1509452
aaguccaaggaaagauggc

SEQ ID NO: 1509454 - RNA, 19 nt, Artificial Sequence
  Description of Artificial Sequence: Synthetic oligonucleotide
  Sense strand starting at position 2001 of SEQ ID NO: 1244714
gugggauucuucccuggaa

SEQ ID NO: 1509455 - RNA, 19 nt, Artificial Sequence
  Description of Artificial Sequence: Synthetic oligonucleotide
  Antisense strand to SEQ ID NO: 1509454
uuccagggaagaaucccac

SEQ ID NO: 1509456 - RNA, 19 nt, Artificial Sequence
  Description of Artificial Sequence: Synthetic oligonucleotide
  Sense strand starting at position 2002 of SEQ ID NO: 1244714
ugggauucuucccuggaac

SEQ ID NO: 1509457 - RNA, 19 nt, Artificial Sequence
  Description of Artificial Sequence: Synthetic oligonucleotide
  Antisense strand to SEQ ID NO: 1509456
guuccagggaagaauccca

SEQ ID NO: 1509458 - RNA, 19 nt, Artificial Sequence
  Description of Artificial Sequence: Synthetic oligonucleotide
  Sense strand starting at position 2003 of SEQ ID NO: 1244714
gggauucuucccuggaacu

SEQ ID NO: 1509459 - RNA, 19 nt, Artificial Sequence
  Description of Artificial Sequence: Synthetic oligonucleotide
  Antisense strand to SEQ ID NO: 1509458
aguuccagggaagaauccc

SEQ ID NO: 1509460 - RNA, 19 nt, Artificial Sequence
  Description of Artificial Sequence: Synthetic oligonucleotide
  Sense strand starting at position 2004 of SEQ ID NO: 1244714
ggauucuucccuggaacuc

SEQ ID NO: 1509461 - RNA, 19 nt, Artificial Sequence
  Description of Artificial Sequence: Synthetic oligonucleotide
  Antisense strand to SEQ ID NO: 1509460
gaguuccagggaagaaucc

SEQ ID NO: 1509462 - RNA, 19 nt, Artificial Sequence
  Description of Artificial Sequence: Synthetic oligonucleotide
  Sense strand starting at position 2017 of SEQ ID NO: 1244714
gaacucuccugagguggua

SEQ ID NO: 1509463 - RNA, 19 nt, Artificial Sequence
  Description of Artificial Sequence: Synthetic oligonucleotide
  Antisense strand to SEQ ID NO: 1509462
uaccaccucaggagaguuc

SEQ ID NO: 1509464 - RNA, 19 nt, Artificial Sequence
  Description of Artificial Sequence: Synthetic oligonucleotide
  Sense strand starting at position 3651 of SEQ ID NO: 1244714
ucagguaucuuauacauug

SEQ ID NO: 1509465 - RNA, 19 nt, Artificial Sequence
  Description of Artificial Sequence: Synthetic oligonucleotide
  Antisense strand to SEQ ID NO: 1509464
caauguauaagauaccuga

SEQ ID NO: 1509466 - RNA, 19 nt, Artificial Sequence
  Description of Artificial Sequence: Synthetic oligonucleotide
  Sense strand starting at position 1411 of SEQ ID NO: 1244715
ccagccuguuagggagaaa

SEQ ID NO: 1509467 - RNA, 19 nt, Artificial Sequence
  Description of Artificial Sequence: Synthetic oligonucleotide
  Antisense strand to SEQ ID NO: 1509466
uuucucccuaacaggcugg

SEQ ID NO: 1509468 - RNA, 19 nt, Artificial Sequence
  Description of Artificial Sequence: Synthetic oligonucleotide
  Sense strand starting at position 1523 of SEQ ID NO: 1244715
ugggcuaucuugcugagga

SEQ ID NO: 1509469 - RNA, 19 nt, Artificial Sequence
  Description of Artificial Sequence: Synthetic oligonucleotide
  Antisense strand to SEQ ID NO: 1509468
uccucagcaagauagccca

SEQ ID NO: 1509470 - RNA, 19 nt, Artificial Sequence
  Description of Artificial Sequence: Synthetic oligonucleotide
  Sense strand starting at position 1524 of SEQ ID NO: 1244715
gggcuaucuugcugaggaa

SEQ ID NO: 1509471 - RNA, 19 nt, Artificial Sequence
  Description of Artificial Sequence: Synthetic oligonucleotide
  Antisense strand to SEQ ID NO: 1509470
uuccucagcaagauagccc

SEQ ID NO: 1509472 - RNA, 19 nt, Artificial Sequence
  Description of Artificial Sequence: Synthetic oligonucleotide
  Sense strand starting at position 1525 of SEQ ID NO: 1244715
ggcuaucuugcugaggaac

SEQ ID NO: 1509473 - RNA, 19 nt, Artificial Sequence
  Description of Artificial Sequence: Synthetic oligonucleotide
  Antisense strand to SEQ ID NO: 1509472
guuccucagcaagauagcc

SEQ ID NO: 1509474 - RNA, 19 nt, Artificial Sequence
  Description of Artificial Sequence: Synthetic oligonucleotide
  Sense strand starting at position 1537 of SEQ ID NO: 1244715
gaggaacucuucggagcua

SEQ ID NO: 1509475 - RNA, 19 nt, Artificial Sequence
  Description of Artificial Sequence: Synthetic oligonucleotide
  Antisense strand to SEQ ID NO: 1509474
uagcuccgaagaguuccuc

SEQ ID NO: 1509476 - RNA, 19 nt, Artificial Sequence
  Description of Artificial Sequence: Synthetic oligonucleotide
  Sense strand starting at position 1567 of SEQ ID NO: 1244715
aaagaugagugagauguua

SEQ ID NO: 1509477 - RNA, 19 nt, Artificial Sequence
  Description of Artificial Sequence: Synthetic oligonucleotide
  Antisense strand to SEQ ID NO: 1509476
uaacaucucacucaucuuu

SEQ ID NO: 1509478 - RNA, 19 nt, Artificial Sequence
  Description of Artificial Sequence: Synthetic oligonucleotide
  Sense strand starting at position 1569 of SEQ ID NO: 1244715
agaugagugagauguuaua

SEQ ID NO: 1509479 - RNA, 19 nt, Artificial Sequence
  Description of Artificial Sequence: Synthetic oligonucleotide
  Antisense strand to SEQ ID NO: 1509478
uauaacaucucacucaucu

SEQ ID NO: 1509480 - RNA, 19 nt, Artificial Sequence
  Description of Artificial Sequence: Synthetic oligonucleotide
  Sense strand starting at position 1615 of SEQ ID NO: 1244715
gugagcaguccuggagcau

SEQ ID NO: 1509481 - RNA, 19 nt, Artificial Sequence
  Description of Artificial Sequence: Synthetic oligonucleotide
  Antisense strand to SEQ ID NO: 1509480
augcuccaggacugcucac

SEQ ID NO: 1509482 - RNA, 19 nt, Artificial Sequence
  Description of Artificial Sequence: Synthetic oligonucleotide
  Sense strand starting at position 1631 of SEQ ID NO: 1244715
caucguuucccuggguaag

SEQ ID NO: 1509483 - RNA, 19 nt, Artificial Sequence
  Description of Artificial Sequence: Synthetic oligonucleotide
  Antisense strand to SEQ ID NO: 1509482
cuuacccagggaaacgaug

SEQ ID NO: 1509484 - RNA, 19 nt, Artificial Sequence
  Description of Artificial Sequence: Synthetic oligonucleotide
  Sense strand starting at position 1632 of SEQ ID NO: 1244715
aucguuucccuggguaagu

SEQ ID NO: 1509485 - RNA, 19 nt, Artificial Sequence
  Description of Artificial Sequence: Synthetic oligonucleotide
  Antisense strand to SEQ ID NO: 1509484
acuuacccagggaaacgau

SEQ ID NO: 1509486 - RNA, 19 nt, Artificial Sequence
  Description of Artificial Sequence: Synthetic oligonucleotide
  Sense strand starting at position 1633 of SEQ ID NO: 1244715
ucguuucccuggguaaguu

SEQ ID NO: 1509487 - RNA, 19 nt, Artificial Sequence
  Description of Artificial Sequence: Synthetic oligonucleotide
  Antisense strand to SEQ ID NO: 1509486
aacuuacccagggaaacga

SEQ ID NO: 1509488 - RNA, 19 nt, Artificial Sequence
  Description of Artificial Sequence: Synthetic oligonucleotide
  Sense strand starting at position 1645 of SEQ ID NO: 1244715
guaaguuguuccugggagg

SEQ ID NO: 1509489 - RNA, 19 nt, Artificial Sequence
  Description of Artificial Sequence: Synthetic oligonucleotide
  Antisense strand to SEQ ID NO: 1509488
ccucccaggaacaacuuac

SEQ ID NO: 1509490 - RNA, 19 nt, Artificial Sequence
  Description of Artificial Sequence: Synthetic oligonucleotide
  Sense strand starting at position 1646 of SEQ ID NO: 1244715
uaaguuguuccugggagga

SEQ ID NO: 1509491 - RNA, 19 nt, Artificial Sequence
  Description of Artificial Sequence: Synthetic oligonucleotide
  Antisense strand to SEQ ID NO: 1509490
uccucccaggaacaacuua

SEQ ID NO: 1509492 - RNA, 19 nt, Artificial Sequence
  Description of Artificial Sequence: Synthetic oligonucleotide
  Sense strand starting at position 1648 of SEQ ID NO: 1244715
aguuguuccugggaggaga

SEQ ID NO: 1509493 - RNA, 19 nt, Artificial Sequence
  Description of Artificial Sequence: Synthetic oligonucleotide
  Antisense strand to SEQ ID NO: 1509492
ucuccucccaggaacaacu

SEQ ID NO: 1509494 - RNA, 19 nt, Artificial Sequence
  Description of Artificial Sequence: Synthetic oligonucleotide
  Sense strand starting at position 1678 of SEQ ID NO: 1244715
ggaugcucucucggauuga

SEQ ID NO: 1509495 - RNA, 19 nt, Artificial Sequence
  Description of Artificial Sequence: Synthetic oligonucleotide
  Antisense strand to SEQ ID NO: 1509494
ucaauccgagagagcaucc

SEQ ID NO: 1509496 - RNA, 19 nt, Artificial Sequence
  Description of Artificial Sequence: Synthetic oligonucleotide
  Sense strand starting at position 1682 of SEQ ID NO: 1244715
gcucucucggauugaggaa

SEQ ID NO: 1509497 - RNA, 19 nt, Artificial Sequence
  Description of Artificial Sequence: Synthetic oligonucleotide
  Antisense strand to SEQ ID NO: 1509496
uuccucaauccgagagagc

SEQ ID NO: 1509498 - RNA, 19 nt, Artificial Sequence
  Description of Artificial Sequence: Synthetic oligonucleotide
  Sense strand starting at position 1704 of SEQ ID NO: 1244715
gaggaagccucagaugcua

SEQ ID NO: 1509499 - RNA, 19 nt, Artificial Sequence
  Description of Artificial Sequence: Synthetic oligonucleotide
  Antisense strand to SEQ ID NO: 1509498
uagcaucugaggcuuccuc

SEQ ID NO: 1509500 - RNA, 19 nt, Artificial Sequence
  Description of Artificial Sequence: Synthetic oligonucleotide
  Sense strand starting at position 1718 of SEQ ID NO: 1244715
ugcuaugcaucuguaugau

SEQ ID NO: 1509501 - RNA, 19 nt, Artificial Sequence
  Description of Artificial Sequence: Synthetic oligonucleotide
  Antisense strand to SEQ ID NO: 1509500
aucauacagaugcauagca

SEQ ID NO: 1509502 - RNA, 19 nt, Artificial Sequence
  Description of Artificial Sequence: Synthetic oligonucleotide
  Sense strand starting at position 1773 of SEQ ID NO: 1244715
gaauucuauuuguggguau

SEQ ID NO: 1509503 - RNA, 19 nt, Artificial Sequence
  Description of Artificial Sequence: Synthetic oligonucleotide
  Antisense strand to SEQ ID NO: 1509502
auacccacaaauagaauuc

SEQ ID NO: 1509504 - RNA, 19 nt, Artificial Sequence
  Description of Artificial Sequence: Synthetic oligonucleotide
  Sense strand starting at position 1784 of SEQ ID NO: 1244715
guggguaucucugagacag

SEQ ID NO: 1509505 - RNA, 19 nt, Artificial Sequence
  Description of Artificial Sequence: Synthetic oligonucleotide
  Antisense strand to SEQ ID NO: 1509504
cugucucagagauacccac

SEQ ID NO: 1509506 - RNA, 19 nt, Artificial Sequence
  Description of Artificial Sequence: Synthetic oligonucleotide
  Sense strand starting at position 1786 of SEQ ID NO: 1244715
ggguaucucugagacagcu

SEQ ID NO: 1509507 - RNA, 19 nt, Artificial Sequence
  Description of Artificial Sequence: Synthetic oligonucleotide
  Antisense strand to SEQ ID NO: 1509506
agcugucucagagauaccc

SEQ ID NO: 1509508 - RNA, 19 nt, Artificial Sequence
  Description of Artificial Sequence: Synthetic oligonucleotide
  Sense strand starting at position 2065 of SEQ ID NO: 1244715
uuuguuugcgacgaaguuu

SEQ ID NO: 1509509 - RNA, 19 nt, Artificial Sequence
  Description of Artificial Sequence: Synthetic oligonucleotide
  Antisense strand to SEQ ID NO: 1509508
aaacuucgucgcaaacaaa

SEQ ID NO: 1509510 - RNA, 19 nt, Artificial Sequence
  Description of Artificial Sequence: Synthetic oligonucleotide
  Sense strand starting at position 2073 of SEQ ID NO: 1244715
cgacgaaguuuccacucuu

SEQ ID NO: 1509511 - RNA, 19 nt, Artificial Sequence
  Description of Artificial Sequence: Synthetic oligonucleotide
  Antisense strand to SEQ ID NO: 1509510
aagaguggaaacuucgucg

SEQ ID NO: 1509512 - RNA, 19 nt, Artificial Sequence
  Description of Artificial Sequence: Synthetic oligonucleotide
  Sense strand starting at position 2195 of SEQ ID NO: 1244715
acaagaaugugccacuaca

SEQ ID NO: 1509513 - RNA, 19 nt, Artificial Sequence
  Description of Artificial Sequence: Synthetic oligonucleotide
  Antisense strand to SEQ ID NO: 1509512
uguaguggcacauucuugu

SEQ ID NO: 1509514 - RNA, 19 nt, Artificial Sequence
  Description of Artificial Sequence: Synthetic oligonucleotide
  Sense strand starting at position 2564 of SEQ ID NO: 1244715
acuccaaaguuugucugau

SEQ ID NO: 1509515 - RNA, 19 nt, Artificial Sequence
  Description of Artificial Sequence: Synthetic oligonucleotide
  Antisense strand to SEQ ID NO: 1509514
aucagacaaacuuuggagu

SEQ ID NO: 1509516 - RNA, 19 nt, Artificial Sequence
  Description of Artificial Sequence: Synthetic oligonucleotide
  Sense strand starting at position 2565 of SEQ ID NO: 1244715
cuccaaaguuugucugauu

SEQ ID NO: 1509517 - RNA, 19 nt, Artificial Sequence
  Description of Artificial Sequence: Synthetic oligonucleotide
  Antisense strand to SEQ ID NO: 1509516
aaucagacaaacuuuggag

SEQ ID NO: 1509518 - RNA, 19 nt, Artificial Sequence
  Description of Artificial Sequence: Synthetic oligonucleotide
  Sense strand starting at position 2566 of SEQ ID NO: 1244715
uccaaaguuugucugauuc

SEQ ID NO: 1509519 - RNA, 19 nt, Artificial Sequence
  Description of Artificial Sequence: Synthetic oligonucleotide
  Antisense strand to SEQ ID NO: 1509518
gaaucagacaaacuuugga

SEQ ID NO: 1509520 - RNA, 19 nt, Artificial Sequence
  Description of Artificial Sequence: Synthetic oligonucleotide
  Sense strand starting at position 2632 of SEQ ID NO: 1244715
auuuauaucuugcaugguu

SEQ ID NO: 1509521 - RNA, 19 nt, Artificial Sequence
  Description of Artificial Sequence: Synthetic oligonucleotide
  Antisense strand to SEQ ID NO: 1509520
aaccaugcaagauauaaau

SEQ ID NO: 1509522 - RNA, 19 nt, Artificial Sequence
  Description of Artificial Sequence: Synthetic oligonucleotide
  Sense strand starting at position 3041 of SEQ ID NO: 1244715
ggaggaguucuugggauug

SEQ ID NO: 1509523 - RNA, 19 nt, Artificial Sequence
  Description of Artificial Sequence: Synthetic oligonucleotide
  Antisense strand to SEQ ID NO: 1509522
caaucccaagaacuccucc

SEQ ID NO: 1509524 - RNA, 19 nt, Artificial Sequence
  Description of Artificial Sequence: Synthetic oligonucleotide
  Sense strand starting at position 3051 of SEQ ID NO: 1244715
uugggauugucccugugga

SEQ ID NO: 1509525 - RNA, 19 nt, Artificial Sequence
  Description of Artificial Sequence: Synthetic oligonucleotide
  Antisense strand to SEQ ID NO: 1509524
uccacagggacaaucccaa

SEQ ID NO: 1509526 - RNA, 19 nt, Artificial Sequence
  Description of Artificial Sequence: Synthetic oligonucleotide
  Sense strand starting at position 3052 of SEQ ID NO: 1244715
ugggauugucccuguggag

SEQ ID NO: 1509527 - RNA, 19 nt, Artificial Sequence
  Description of Artificial Sequence: Synthetic oligonucleotide
  Antisense strand to SEQ ID NO: 1509526
cuccacagggacaauccca

SEQ ID NO: 1509528 - RNA, 19 nt, Artificial Sequence
  Description of Artificial Sequence: Synthetic oligonucleotide
  Sense strand starting at position 3064 of SEQ ID NO: 1244715
uguggaguuucaggaaugu

SEQ ID NO: 1509529 - RNA, 19 nt, Artificial Sequence
  Description of Artificial Sequence: Synthetic oligonucleotide
  Antisense strand to SEQ ID NO: 1509528
acauuccugaaacuccaca

SEQ ID NO: 1509530 - RNA, 19 nt, Artificial Sequence
  Description of Artificial Sequence: Synthetic oligonucleotide
  Sense strand starting at position 3167 of SEQ ID NO: 1244715
guauacagauguggaucua

SEQ ID NO: 1509531 - RNA, 19 nt, Artificial Sequence
  Description of Artificial Sequence: Synthetic oligonucleotide
  Antisense strand to SEQ ID NO: 1509530
uagauccacaucuguauac

SEQ ID NO: 1509532 - RNA, 19 nt, Artificial Sequence
  Description of Artificial Sequence: Synthetic oligonucleotide
  Sense strand starting at position 3295 of SEQ ID NO: 1244715
cugagcuuuccugcgcauu

SEQ ID NO: 1509533 - RNA, 19 nt, Artificial Sequence
  Description of Artificial Sequence: Synthetic oligonucleotide
  Antisense strand to SEQ ID NO: 1509532
aaugcgcaggaaagcucag

SEQ ID NO: 1509534 - RNA, 19 nt, Artificial Sequence
  Description of Artificial Sequence: Synthetic oligonucleotide
  Sense strand starting at position 3307 of SEQ ID NO: 1244715
gcgcauuccuggagagggu

SEQ ID NO: 1509535 - RNA, 19 nt, Artificial Sequence
  Description of Artificial Sequence: Synthetic oligonucleotide
  Antisense strand to SEQ ID NO: 1509534
acccucuccaggaaugcgc

SEQ ID NO: 1509536 - RNA, 19 nt, Artificial Sequence
  Description of Artificial Sequence: Synthetic oligonucleotide
  Sense strand starting at position 3394 of SEQ ID NO: 1244715
ugauuaugagucugccaug

SEQ ID NO: 1509537 - RNA, 19 nt, Artificial Sequence
  Description of Artificial Sequence: Synthetic oligonucleotide
  Antisense strand to SEQ ID NO: 1509536
cauggcagacucauaauca

SEQ ID NO: 1509538 - RNA, 19 nt, Artificial Sequence
  Description of Artificial Sequence: Synthetic oligonucleotide
  Sense strand starting at position 3395 of SEQ ID NO: 1244715
gauuaugagucugccaugu

SEQ ID NO: 1509539 - RNA, 19 nt, Artificial Sequence
  Description of Artificial Sequence: Synthetic oligonucleotide
  Antisense strand to SEQ ID NO: 1509538
acauggcagacucauaauc

SEQ ID NO: 1509540 - RNA, 19 nt, Artificial Sequence
  Description of Artificial Sequence: Synthetic oligonucleotide
  Sense strand starting at position 3397 of SEQ ID NO: 1244715
uuaugagucugccauguca

SEQ ID NO: 1509541 - RNA, 19 nt, Artificial Sequence
  Description of Artificial Sequence: Synthetic oligonucleotide
  Antisense strand to SEQ ID NO: 1509540
ugacauggcagacucauaa

SEQ ID NO: 1509542 - RNA, 19 nt, Artificial Sequence
  Description of Artificial Sequence: Synthetic oligonucleotide
  Sense strand starting at position 3399 of SEQ ID NO: 1244715
augagucugccaugucaug

SEQ ID NO: 1509543 - RNA, 19 nt, Artificial Sequence
  Description of Artificial Sequence: Synthetic oligonucleotide
  Antisense strand to SEQ ID NO: 1509542
caugacauggcagacucau

SEQ ID NO: 1509544 - RNA, 19 nt, Artificial Sequence
  Description of Artificial Sequence: Synthetic oligonucleotide
  Sense strand starting at position 3426 of SEQ ID NO: 1244715
cugagagccuguguguuau

SEQ ID NO: 1509545 - RNA, 19 nt, Artificial Sequence
  Description of Artificial Sequence: Synthetic oligonucleotide
  Antisense strand to SEQ ID NO: 1509544
auaacacacaggcucucag

SEQ ID NO: 1509546 - RNA, 19 nt, Artificial Sequence
  Description of Artificial Sequence: Synthetic oligonucleotide
  Sense strand starting at position 517 of SEQ ID NO: 1244716
agcacuaaaugcuuguuua

SEQ ID NO: 1509547 - RNA, 19 nt, Artificial Sequence
  Description of Artificial Sequence: Synthetic oligonucleotide
  Antisense strand to SEQ ID NO: 1509546
uaaacaagcauuuagugcu

SEQ ID NO: 1509548 - RNA, 19 nt, Artificial Sequence
  Description of Artificial Sequence: Synthetic oligonucleotide
  Sense strand starting at position 518 of SEQ ID NO: 1244716
gcacuaaaugcuuguuuau

SEQ ID NO: 1509549 - RNA, 19 nt, Artificial Sequence
  Description of Artificial Sequence: Synthetic oligonucleotide
  Antisense strand to SEQ ID NO: 1509548
auaaacaagcauuuagugc

SEQ ID NO: 1509550 - RNA, 19 nt, Artificial Sequence
  Description of Artificial Sequence: Synthetic oligonucleotide
  Sense strand starting at position 520 of SEQ ID NO: 1244716
acuaaaugcuuguuuauug

SEQ ID NO: 1509551 - RNA, 19 nt, Artificial Sequence
  Description of Artificial Sequence: Synthetic oligonucleotide
  Antisense strand to SEQ ID NO: 1509550
caauaaacaagcauuuagu

SEQ ID NO: 1509552 - RNA, 19 nt, Artificial Sequence
  Description of Artificial Sequence: Synthetic oligonucleotide
  Sense strand starting at position 524 of SEQ ID NO: 1244716
aaugcuuguuuauuguaga

SEQ ID NO: 1509553 - RNA, 19 nt, Artificial Sequence
  Description of Artificial Sequence: Synthetic oligonucleotide
  Antisense strand to SEQ ID NO: 1509552
ucuacaauaaacaagcauu

SEQ ID NO: 1509554 - RNA, 19 nt, Artificial Sequence
  Description of Artificial Sequence: Synthetic oligonucleotide
  Sense strand starting at position 595 of SEQ ID NO: 1244716
cuggaaugacgcuaaacuu

SEQ ID NO: 1509555 - RNA, 19 nt, Artificial Sequence
  Description of Artificial Sequence: Synthetic oligonucleotide
  Antisense strand to SEQ ID NO: 1509554
aaguuuagcgucauuccag

SEQ ID NO: 1509556 - RNA, 19 nt, Artificial Sequence
  Description of Artificial Sequence: Synthetic oligonucleotide
  Sense strand starting at position 640 of SEQ ID NO: 1244716
ugguaacgucugcacacau

SEQ ID NO: 1509557 - RNA, 19 nt, Artificial Sequence
  Description of Artificial Sequence: Synthetic oligonucleotide
  Antisense strand to SEQ ID NO: 1509556
augugugcagacguuacca

SEQ ID NO: 1509558 - RNA, 19 nt, Artificial Sequence
  Description of Artificial Sequence: Synthetic oligonucleotide
  Sense strand starting at position 1005 of SEQ ID NO: 1244716
uugugaaacgcagaucuua

SEQ ID NO: 1509559 - RNA, 19 nt, Artificial Sequence
  Description of Artificial Sequence: Synthetic oligonucleotide
  Antisense strand to SEQ ID NO: 1509558
uaagaucugcguuucacaa

SEQ ID NO: 1509560 - RNA, 19 nt, Artificial Sequence
  Description of Artificial Sequence: Synthetic oligonucleotide
  Sense strand starting at position 1013 of SEQ ID NO: 1244716
cgcagaucuuagguguaua

SEQ ID NO: 1509561 - RNA, 19 nt, Artificial Sequence
  Description of Artificial Sequence: Synthetic oligonucleotide
  Antisense strand to SEQ ID NO: 1509560
uauacaccuaagaucugcg

SEQ ID NO: 1509562 - RNA, 19 nt, Artificial Sequence
  Description of Artificial Sequence: Synthetic oligonucleotide
  Sense strand starting at position 1014 of SEQ ID NO: 1244716
gcagaucuuagguguauaa

SEQ ID NO: 1509563 - RNA, 19 nt, Artificial Sequence
  Description of Artificial Sequence: Synthetic oligonucleotide
  Antisense strand to SEQ ID NO: 1509562
uuauacaccuaagaucugc

SEQ ID NO: 1509564 - RNA, 19 nt, Artificial Sequence
  Description of Artificial Sequence: Synthetic oligonucleotide
  Sense strand starting at position 1023 of SEQ ID NO: 1244716
agguguauaaccuggugga

SEQ ID NO: 1509565 - RNA, 19 nt, Artificial Sequence
  Description of Artificial Sequence: Synthetic oligonucleotide
  Antisense strand to SEQ ID NO: 1509564
uccaccagguuauacaccu

SEQ ID NO: 1509566 - RNA, 19 nt, Artificial Sequence
  Description of Artificial Sequence: Synthetic oligonucleotide
  Sense strand starting at position 1024 of SEQ ID NO: 1244716
gguguauaaccugguggau

SEQ ID NO: 1509567 - RNA, 19 nt, Artificial Sequence
  Description of Artificial Sequence: Synthetic oligonucleotide
  Antisense strand to SEQ ID NO: 1509566
auccaccagguuauacacc

SEQ ID NO: 1509568 - RNA, 19 nt, Artificial Sequence
  Description of Artificial Sequence: Synthetic oligonucleotide
  Sense strand starting at position 1097 of SEQ ID NO: 1244716
gugaguugugugcuucuga

SEQ ID NO: 1509569 - RNA, 19 nt, Artificial Sequence
  Description of Artificial Sequence: Synthetic oligonucleotide
  Antisense strand to SEQ ID NO: 1509568
ucagaagcacacaacucac

SEQ ID NO: 1509570 - RNA, 19 nt, Artificial Sequence
  Description of Artificial Sequence: Synthetic oligonucleotide
  Sense strand starting at position 1098 of SEQ ID NO: 1244716
ugaguugugugcuucugaa

SEQ ID NO: 1509571 - RNA, 19 nt, Artificial Sequence
  Description of Artificial Sequence: Synthetic oligonucleotide
  Antisense strand to SEQ ID NO: 1509570
uucagaagcacacaacuca

SEQ ID NO: 1509572 - RNA, 19 nt, Artificial Sequence
  Description of Artificial Sequence: Synthetic oligonucleotide
  Sense strand starting at position 1188 of SEQ ID NO: 1244716
uccgauucuggaggaucau

SEQ ID NO: 1509573 - RNA, 19 nt, Artificial Sequence
  Description of Artificial Sequence: Synthetic oligonucleotide
  Antisense strand to SEQ ID NO: 1509572
augauccuccagaaucgga

SEQ ID NO: 1509574 - RNA, 19 nt, Artificial Sequence
  Description of Artificial Sequence: Synthetic oligonucleotide
  Sense strand starting at position 1299 of SEQ ID NO: 1244716
gcgcuucucauccacggau

SEQ ID NO: 1509575 - RNA, 19 nt, Artificial Sequence
  Description of Artificial Sequence: Synthetic oligonucleotide
  Antisense strand to SEQ ID NO: 1509574
auccguggaugagaagcgc

SEQ ID NO: 1509576 - RNA, 19 nt, Artificial Sequence
  Description of Artificial Sequence: Synthetic oligonucleotide
  Sense strand starting at position 1312 of SEQ ID NO: 1244716
acggauucucuacgggaac

SEQ ID NO: 1509577 - RNA, 19 nt, Artificial Sequence
  Description of Artificial Sequence: Synthetic oligonucleotide
  Antisense strand to SEQ ID NO: 1509576
guucccguagagaauccgu

SEQ ID NO: 1509578 - RNA, 19 nt, Artificial Sequence
  Description of Artificial Sequence: Synthetic oligonucleotide
  Sense strand starting at position 1473 of SEQ ID NO: 1244716
accggacucaccuguuuga

SEQ ID NO: 1509579 - RNA, 19 nt, Artificial Sequence
  Description of Artificial Sequence: Synthetic oligonucleotide
  Antisense strand to SEQ ID NO: 1509578
ucaaacaggugaguccggu

SEQ ID NO: 1509580 - RNA, 19 nt, Artificial Sequence
  Description of Artificial Sequence: Synthetic oligonucleotide
  Sense strand starting at position 1578 of SEQ ID NO: 1244716
gucauagugagaggucuag

SEQ ID NO: 1509581 - RNA, 19 nt, Artificial Sequence
  Description of Artificial Sequence: Synthetic oligonucleotide
  Antisense strand to SEQ ID NO: 1509580
cuagaccucucacuaugac

SEQ ID NO: 1509582 - RNA, 19 nt, Artificial Sequence
  Description of Artificial Sequence: Synthetic oligonucleotide
  Sense strand starting at position 2179 of SEQ ID NO: 1244716
gcgaggccucgguuuggau

SEQ ID NO: 1509583 - RNA, 19 nt, Artificial Sequence
  Description of Artificial Sequence: Synthetic oligonucleotide
  Antisense strand to SEQ ID NO: 1509582
auccaaaccgaggccucgc

SEQ ID NO: 1509584 - RNA, 19 nt, Artificial Sequence
  Description of Artificial Sequence: Synthetic oligonucleotide
  Sense strand starting at position 2273 of SEQ ID NO: 1244716
ccuuuauucccaggaccga

SEQ ID NO: 1509585 - RNA, 19 nt, Artificial Sequence
  Description of Artificial Sequence: Synthetic oligonucleotide
  Antisense strand to SEQ ID NO: 1509584
ucgguccugggaauaaagg

SEQ ID NO: 1509586 - RNA, 19 nt, Artificial Sequence
  Description of Artificial Sequence: Synthetic oligonucleotide
  Sense strand starting at position 2274 of SEQ ID NO: 1244716
cuuuauucccaggaccgau

SEQ ID NO: 1509587 - RNA, 19 nt, Artificial Sequence
  Description of Artificial Sequence: Synthetic oligonucleotide
  Antisense strand to SEQ ID NO: 1509586
aucgguccugggaauaaag

SEQ ID NO: 1509588 - RNA, 19 nt, Artificial Sequence
  Description of Artificial Sequence: Synthetic oligonucleotide
  Sense strand starting at position 2358 of SEQ ID NO: 1244716
gucuguugugaggaauuag

SEQ ID NO: 1509589 - RNA, 19 nt, Artificial Sequence
  Description of Artificial Sequence: Synthetic oligonucleotide
  Antisense strand to SEQ ID NO: 1509588
cuaauuccucacaacagac

SEQ ID NO: 1509590 - RNA, 19 nt, Artificial Sequence
  Description of Artificial Sequence: Synthetic oligonucleotide
  Sense strand starting at position 2474 of SEQ ID NO: 1244716
cgcccagaucaguggcaau

SEQ ID NO: 1509591 - RNA, 19 nt, Artificial Sequence
  Description of Artificial Sequence: Synthetic oligonucleotide
  Antisense strand to SEQ ID NO: 1509590
auugccacugaucugggcg

SEQ ID NO: 1509592 - RNA, 19 nt, Artificial Sequence
  Description of Artificial Sequence: Synthetic oligonucleotide
  Sense strand starting at position 2631 of SEQ ID NO: 1244716
augagaauuccucggguag

SEQ ID NO: 1509593 - RNA, 19 nt, Artificial Sequence
  Description of Artificial Sequence: Synthetic oligonucleotide
  Antisense strand to SEQ ID NO: 1509592
cuacccgaggaauucucau

SEQ ID NO: 1509594 - RNA, 19 nt, Artificial Sequence
  Description of Artificial Sequence: Synthetic oligonucleotide
  Sense strand starting at position 2632 of SEQ ID NO: 1244716
ugagaauuccucggguaga

SEQ ID NO: 1509595 - RNA, 19 nt, Artificial Sequence
  Description of Artificial Sequence: Synthetic oligonucleotide
  Antisense strand to SEQ ID NO: 1509594
ucuacccgaggaauucuca

SEQ ID NO: 1509596 - RNA, 19 nt, Artificial Sequence
  Description of Artificial Sequence: Synthetic oligonucleotide
  Sense strand starting at position 2686 of SEQ ID NO: 1244716
ucccgauagaucuguggau

SEQ ID NO: 1509597 - RNA, 19 nt, Artificial Sequence
  Description of Artificial Sequence: Synthetic oligonucleotide
  Antisense strand to SEQ ID NO: 1509596
auccacagaucuaucggga

SEQ ID NO: 1509598 - RNA, 19 nt, Artificial Sequence
  Description of Artificial Sequence: Synthetic oligonucleotide
  Sense strand starting at position 2687 of SEQ ID NO: 1244716
cccgauagaucuguggauu

SEQ ID NO: 1509599 - RNA, 19 nt, Artificial Sequence
  Description of Artificial Sequence: Synthetic oligonucleotide
  Antisense strand to SEQ ID NO: 1509598
aauccacagaucuaucggg

SEQ ID NO: 1509600 - RNA, 19 nt, Artificial Sequence
  Description of Artificial Sequence: Synthetic oligonucleotide
  Sense strand starting at position 2688 of SEQ ID NO: 1244716
ccgauagaucuguggauuc

SEQ ID NO: 1509601 - RNA, 19 nt, Artificial Sequence
  Description of Artificial Sequence: Synthetic oligonucleotide
  Antisense strand to SEQ ID NO: 1509600
gaauccacagaucuaucgg

SEQ ID NO: 1509602 - RNA, 19 nt, Artificial Sequence
  Description of Artificial Sequence: Synthetic oligonucleotide
  Sense strand starting at position 2719 of SEQ ID NO: 1244716
ugcucacucugagucuaau

SEQ ID NO: 1509603 - RNA, 19 nt, Artificial Sequence
  Description of Artificial Sequence: Synthetic oligonucleotide
  Antisense strand to SEQ ID NO: 1509602
auuagacucagagugagca

SEQ ID NO: 1509604 - RNA, 19 nt, Artificial Sequence
  Description of Artificial Sequence: Synthetic oligonucleotide
  Sense strand starting at position 2836 of SEQ ID NO: 1244716
aggaccaggugucuuagaa

SEQ ID NO: 1509605 - RNA, 19 nt, Artificial Sequence
  Description of Artificial Sequence: Synthetic oligonucleotide
  Antisense strand to SEQ ID NO: 1509604
uucuaagacaccugguccu

SEQ ID NO: 1509606 - RNA, 19 nt, Artificial Sequence
  Description of Artificial Sequence: Synthetic oligonucleotide
  Sense strand starting at position 2925 of SEQ ID NO: 1244716
ggaggaaaugccuggguaa

SEQ ID NO: 1509607 - RNA, 19 nt, Artificial Sequence
  Description of Artificial Sequence: Synthetic oligonucleotide
  Antisense strand to SEQ ID NO: 1509606
uuacccaggcauuuccucc

SEQ ID NO: 1509608 - RNA, 19 nt, Artificial Sequence
  Description of Artificial Sequence: Synthetic oligonucleotide
  Sense strand starting at position 2926 of SEQ ID NO: 1244716
gaggaaaugccuggguaaa

SEQ ID NO: 1509609 - RNA, 19 nt, Artificial Sequence
  Description of Artificial Sequence: Synthetic oligonucleotide
  Antisense strand to SEQ ID NO: 1509608
uuuacccaggcauuuccuc

SEQ ID NO: 1509610 - RNA, 19 nt, Artificial Sequence
  Description of Artificial Sequence: Synthetic oligonucleotide
  Sense strand starting at position 2927 of SEQ ID NO: 1244716
aggaaaugccuggguaaag

SEQ ID NO: 1509611 - RNA, 19 nt, Artificial Sequence
  Description of Artificial Sequence: Synthetic oligonucleotide
  Antisense strand to SEQ ID NO: 1509610
cuuuacccaggcauuuccu

SEQ ID NO: 1509612 - RNA, 19 nt, Artificial Sequence
  Description of Artificial Sequence: Synthetic oligonucleotide
  Sense strand starting at position 2928 of SEQ ID NO: 1244716
ggaaaugccuggguaaaga

SEQ ID NO: 1509613 - RNA, 19 nt, Artificial Sequence
  Description of Artificial Sequence: Synthetic oligonucleotide
  Antisense strand to SEQ ID NO: 1509612
ucuuuacccaggcauuucc

SEQ ID NO: 1509614 - RNA, 19 nt, Artificial Sequence
  Description of Artificial Sequence: Synthetic oligonucleotide
  Sense strand starting at position 3354 of SEQ ID NO: 1244716
ucaaauguuaugcaugcga

SEQ ID NO: 1509615 - RNA, 19 nt, Artificial Sequence
  Description of Artificial Sequence: Synthetic oligonucleotide
  Antisense strand to SEQ ID NO: 1509614
ucgcaugcauaacauuuga

SEQ ID NO: 1509616 - RNA, 19 nt, Artificial Sequence
  Description of Artificial Sequence: Synthetic oligonucleotide
  Sense strand starting at position 3424 of SEQ ID NO: 1244716
acccgcuauugagcuuuaa

SEQ ID NO: 1509617 - RNA, 19 nt, Artificial Sequence
  Description of Artificial Sequence: Synthetic oligonucleotide
  Antisense strand to SEQ ID NO: 1509616
uuaaagcucaauagcgggu

SEQ ID NO: 1509618 - RNA, 19 nt, Artificial Sequence
  Description of Artificial Sequence: Synthetic oligonucleotide
  Sense strand starting at position 3428 of SEQ ID NO: 1244716
gcuauugagcuuuaagaac

SEQ ID NO: 1509619 - RNA, 19 nt, Artificial Sequence
  Description of Artificial Sequence: Synthetic oligonucleotide
  Antisense strand to SEQ ID NO: 1509618
guucuuaaagcucaauagc

SEQ ID NO: 1509620 - RNA, 19 nt, Artificial Sequence
  Description of Artificial Sequence: Synthetic oligonucleotide
  Sense strand starting at position 3516 of SEQ ID NO: 1244716
cccugcuauccugagacau

SEQ ID NO: 1509621 - RNA, 19 nt, Artificial Sequence
  Description of Artificial Sequence: Synthetic oligonucleotide
  Antisense strand to SEQ ID NO: 1509620
augucucaggauagcaggg

SEQ ID NO: 1509622 - RNA, 19 nt, Artificial Sequence
  Description of Artificial Sequence: Synthetic oligonucleotide
  Sense strand starting at position 3934 of SEQ ID NO: 1244716
gucucuuaauauucguuua

SEQ ID NO: 1509623 - RNA, 19 nt, Artificial Sequence
  Description of Artificial Sequence: Synthetic oligonucleotide
  Antisense strand to SEQ ID NO: 1509622
uaaacgaauauuaagagac

SEQ ID NO: 1509624 - RNA, 19 nt, Artificial Sequence
  Description of Artificial Sequence: Synthetic oligonucleotide
  Sense strand starting at position 3973 of SEQ ID NO: 1244716
ggaauuggccugcacguau

SEQ ID NO: 1509625 - RNA, 19 nt, Artificial Sequence
  Description of Artificial Sequence: Synthetic oligonucleotide
  Antisense strand to SEQ ID NO: 1509624
auacgugcaggccaauucc

SEQ ID NO: 1509626 - RNA, 19 nt, Artificial Sequence
  Description of Artificial Sequence: Synthetic oligonucleotide
  Sense strand starting at position 3 of SEQ ID NO: 1244717
gaucuugugggcuggugaa

SEQ ID NO: 1509627 - RNA, 19 nt, Artificial Sequence
  Description of Artificial Sequence: Synthetic oligonucleotide
  Antisense strand to SEQ ID NO: 1509626
uucaccagcccacaagauc

SEQ ID NO: 1509628 - RNA, 19 nt, Artificial Sequence
  Description of Artificial Sequence: Synthetic oligonucleotide
  Sense strand starting at position 106 of SEQ ID NO: 1244717
gcacccuccugaguaagaa

SEQ ID NO: 1509629 - RNA, 19 nt, Artificial Sequence
  Description of Artificial Sequence: Synthetic oligonucleotide
  Antisense strand to SEQ ID NO: 1509628
uucuuacucaggagggugc

SEQ ID NO: 1509630 - RNA, 19 nt, Artificial Sequence
  Description of Artificial Sequence: Synthetic oligonucleotide
  Sense strand starting at position 179 of SEQ ID NO: 1244717
agcauugaucacgggcaau

SEQ ID NO: 1509631 - RNA, 19 nt, Artificial Sequence
  Description of Artificial Sequence: Synthetic oligonucleotide
  Antisense strand to SEQ ID NO: 1509630
auugcccgugaucaaugcu

SEQ ID NO: 1509632 - RNA, 19 nt, Artificial Sequence
  Description of Artificial Sequence: Synthetic oligonucleotide
  Sense strand starting at position 215 of SEQ ID NO: 1244717
cggagaaguuucuucucua

SEQ ID NO: 1509633 - RNA, 19 nt, Artificial Sequence
  Description of Artificial Sequence: Synthetic oligonucleotide
  Antisense strand to SEQ ID NO: 1509632
uagagaagaaacuucuccg

SEQ ID NO: 1509634 - RNA, 19 nt, Artificial Sequence
  Description of Artificial Sequence: Synthetic oligonucleotide
  Sense strand starting at position 216 of SEQ ID NO: 1244717
ggagaaguuucuucucuau

SEQ ID NO: 1509635 - RNA, 19 nt, Artificial Sequence
  Description of Artificial Sequence: Synthetic oligonucleotide
  Antisense strand to SEQ ID NO: 1509634
auagagaagaaacuucucc

SEQ ID NO: 1509636 - RNA, 19 nt, Artificial Sequence
  Description of Artificial Sequence: Synthetic oligonucleotide
  Sense strand starting at position 242 of SEQ ID NO: 1244717
uuuaaauccucgcuacaag

SEQ ID NO: 1509637 - RNA, 19 nt, Artificial Sequence
  Description of Artificial Sequence: Synthetic oligonucleotide
  Antisense strand to SEQ ID NO: 1509636
cuuguagcgaggauuuaaa

SEQ ID NO: 1509638 - RNA, 19 nt, Artificial Sequence
  Description of Artificial Sequence: Synthetic oligonucleotide
  Sense strand starting at position 293 of SEQ ID NO: 1244717
uugggagcuaguuaggaau

SEQ ID NO: 1509639 - RNA, 19 nt, Artificial Sequence
  Description of Artificial Sequence: Synthetic oligonucleotide
  Antisense strand to SEQ ID NO: 1509638
auuccuaacuagcucccaa

SEQ ID NO: 1509640 - RNA, 19 nt, Artificial Sequence
  Description of Artificial Sequence: Synthetic oligonucleotide
  Sense strand starting at position 299 of SEQ ID NO: 1244717
gcuaguuaggaaugcagaa

SEQ ID NO: 1509641 - RNA, 19 nt, Artificial Sequence
  Description of Artificial Sequence: Synthetic oligonucleotide
  Antisense strand to SEQ ID NO: 1509640
uucugcauuccuaacuagc

SEQ ID NO: 1509642 - RNA, 19 nt, Artificial Sequence
  Description of Artificial Sequence: Synthetic oligonucleotide
  Sense strand starting at position 863 of SEQ ID NO: 1244717
ucugcagagucucaagaga

SEQ ID NO: 1509643 - RNA, 19 nt, Artificial Sequence
  Description of Artificial Sequence: Synthetic oligonucleotide
  Antisense strand to SEQ ID NO: 1509642
ucucuugagacucugcaga

SEQ ID NO: 1509644 - RNA, 19 nt, Artificial Sequence
  Description of Artificial Sequence: Synthetic oligonucleotide
  Sense strand starting at position 989 of SEQ ID NO: 1244717
cucagaauuccucacgaug

SEQ ID NO: 1509645 - RNA, 19 nt, Artificial Sequence
  Description of Artificial Sequence: Synthetic oligonucleotide
  Antisense strand to SEQ ID NO: 1509644
caucgugaggaauucugag

SEQ ID NO: 1509646 - RNA, 19 nt, Artificial Sequence
  Description of Artificial Sequence: Synthetic oligonucleotide
  Sense strand starting at position 1047 of SEQ ID NO: 1244717
ggagaaucauucucugacc

SEQ ID NO: 1509647 - RNA, 19 nt, Artificial Sequence
  Description of Artificial Sequence: Synthetic oligonucleotide
  Antisense strand to SEQ ID NO: 1509646
ggucagagaaugauucucc

SEQ ID NO: 1509648 - RNA, 19 nt, Artificial Sequence
  Description of Artificial Sequence: Synthetic oligonucleotide
  Sense strand starting at position 1049 of SEQ ID NO: 1244717
agaaucauucucugaccgu

SEQ ID NO: 1509649 - RNA, 19 nt, Artificial Sequence
  Description of Artificial Sequence: Synthetic oligonucleotide
  Antisense strand to SEQ ID NO: 1509648
acggucagagaaugauucu

SEQ ID NO: 1509650 - RNA, 19 nt, Artificial Sequence
  Description of Artificial Sequence: Synthetic oligonucleotide
  Sense strand starting at position 1128 of SEQ ID NO: 1244717
ggcauucccggcugauuga

SEQ ID NO: 1509651 - RNA, 19 nt, Artificial Sequence
  Description of Artificial Sequence: Synthetic oligonucleotide
  Antisense strand to SEQ ID NO: 1509650
ucaaucagccgggaaugcc

SEQ ID NO: 1509652 - RNA, 19 nt, Artificial Sequence
  Description of Artificial Sequence: Synthetic oligonucleotide
  Sense strand starting at position 1129 of SEQ ID NO: 1244717
gcauucccggcugauugau

SEQ ID NO: 1509653 - RNA, 19 nt, Artificial Sequence
  Description of Artificial Sequence: Synthetic oligonucleotide
  Antisense strand to SEQ ID NO: 1509652
aucaaucagccgggaaugc

SEQ ID NO: 1509654 - RNA, 19 nt, Artificial Sequence
  Description of Artificial Sequence: Synthetic oligonucleotide
  Sense strand starting at position 1137 of SEQ ID NO: 1244717
ggcugauugauacagguuu

SEQ ID NO: 1509655 - RNA, 19 nt, Artificial Sequence
  Description of Artificial Sequence: Synthetic oligonucleotide
  Antisense strand to SEQ ID NO: 1509654
aaaccuguaucaaucagcc

SEQ ID NO: 1509656 - RNA, 19 nt, Artificial Sequence
  Description of Artificial Sequence: Synthetic oligonucleotide
  Sense strand starting at position 1188 of SEQ ID NO: 1244717
ccuguuguuccgcuuccaa

SEQ ID NO: 1509657 - RNA, 19 nt, Artificial Sequence
  Description of Artificial Sequence: Synthetic oligonucleotide
  Antisense strand to SEQ ID NO: 1509656
uuggaagcggaacaacagg

SEQ ID NO: 1509658 - RNA, 19 nt, Artificial Sequence
  Description of Artificial Sequence: Synthetic oligonucleotide
  Sense strand starting at position 1357 of SEQ ID NO: 1244717
ucucuaaugccucgcuacu

SEQ ID NO: 1509659 - RNA, 19 nt, Artificial Sequence
  Description of Artificial Sequence: Synthetic oligonucleotide
  Antisense strand to SEQ ID NO: 1509658
aguagcgaggcauuagaga

SEQ ID NO: 1509660 - RNA, 19 nt, Artificial Sequence
  Description of Artificial Sequence: Synthetic oligonucleotide
  Sense strand starting at position 1449 of SEQ ID NO: 1244717
gcugcaaguuaaccagauu

SEQ ID NO: 1509661 - RNA, 19 nt, Artificial Sequence
  Description of Artificial Sequence: Synthetic oligonucleotide
  Antisense strand to SEQ ID NO: 1509660
aaucugguuaacuugcagc

SEQ ID NO: 1509662 - RNA, 19 nt, Artificial Sequence
  Description of Artificial Sequence: Synthetic oligonucleotide
  Sense strand starting at position 1628 of SEQ ID NO: 1244717
gaaggcaugucauugccuu

SEQ ID NO: 1509663 - RNA, 19 nt, Artificial Sequence
  Description of Artificial Sequence: Synthetic oligonucleotide
  Antisense strand to SEQ ID NO: 1509662
aaggcaaugacaugccuuc

SEQ ID NO: 1509664 - RNA, 19 nt, Artificial Sequence
  Description of Artificial Sequence: Synthetic oligonucleotide
  Sense strand starting at position 2042 of SEQ ID NO: 1244717
gcaacucccgccugaagaa

SEQ ID NO: 1509665 - RNA, 19 nt, Artificial Sequence
  Description of Artificial Sequence: Synthetic oligonucleotide
  Antisense strand to SEQ ID NO: 1509664
uucuucaggcgggaguugc

SEQ ID NO: 1509666 - RNA, 19 nt, Artificial Sequence
  Description of Artificial Sequence: Synthetic oligonucleotide
  Sense strand starting at position 2056 of SEQ ID NO: 1244717
aagaauagauucucugguu

SEQ ID NO: 1509667 - RNA, 19 nt, Artificial Sequence
  Description of Artificial Sequence: Synthetic oligonucleotide
  Antisense strand to SEQ ID NO: 1509666
aaccagagaaucuauucuu

SEQ ID NO: 1509668 - RNA, 19 nt, Artificial Sequence
  Description of Artificial Sequence: Synthetic oligonucleotide
  Sense strand starting at position 2057 of SEQ ID NO: 1244717
agaauagauucucugguuc

SEQ ID NO: 1509669 - RNA, 19 nt, Artificial Sequence
  Description of Artificial Sequence: Synthetic oligonucleotide
  Antisense strand to SEQ ID NO: 1509668
gaaccagagaaucuauucu

SEQ ID NO: 1509670 - RNA, 19 nt, Artificial Sequence
  Description of Artificial Sequence: Synthetic oligonucleotide
  Sense strand starting at position 2190 of SEQ ID NO: 1244717
gaaagagcccuuuguaaca

SEQ ID NO: 1509671 - RNA, 19 nt, Artificial Sequence
  Description of Artificial Sequence: Synthetic oligonucleotide
  Antisense strand to SEQ ID NO: 1509670
uguuacaaagggcucuuuc

SEQ ID NO: 1509672 - RNA, 19 nt, Artificial Sequence
  Description of Artificial Sequence: Synthetic oligonucleotide
  Sense strand starting at position 2210 of SEQ ID NO: 1244717
cccugauguuacuuaugcu

SEQ ID NO: 1509673 - RNA, 19 nt, Artificial Sequence
  Description of Artificial Sequence: Synthetic oligonucleotide
  Antisense strand to SEQ ID NO: 1509672
agcauaaguaacaucaggg

SEQ ID NO: 1509674 - RNA, 19 nt, Artificial Sequence
  Description of Artificial Sequence: Synthetic oligonucleotide
  Sense strand starting at position 2216 of SEQ ID NO: 1244717
uguuacuuaugcuucuaca

SEQ ID NO: 1509675 - RNA, 19 nt, Artificial Sequence
  Description of Artificial Sequence: Synthetic oligonucleotide
  Antisense strand to SEQ ID NO: 1509674
uguagaagcauaaguaaca

SEQ ID NO: 1509676 - RNA, 19 nt, Artificial Sequence
  Description of Artificial Sequence: Synthetic oligonucleotide
  Sense strand starting at position 2333 of SEQ ID NO: 1244717
cggcaucauucuccaguca

SEQ ID NO: 1509677 - RNA, 19 nt, Artificial Sequence
  Description of Artificial Sequence: Synthetic oligonucleotide
  Antisense strand to SEQ ID NO: 1509676
ugacuggagaaugaugccg

SEQ ID NO: 1509678 - RNA, 19 nt, Artificial Sequence
  Description of Artificial Sequence: Synthetic oligonucleotide
  Sense strand starting at position 2334 of SEQ ID NO: 1244717
ggcaucauucuccagucaa

SEQ ID NO: 1509679 - RNA, 19 nt, Artificial Sequence
  Description of Artificial Sequence: Synthetic oligonucleotide
  Antisense strand to SEQ ID NO: 1509678
uugacuggagaaugaugcc

SEQ ID NO: 1509680 - RNA, 19 nt, Artificial Sequence
  Description of Artificial Sequence: Synthetic oligonucleotide
  Sense strand starting at position 2851 of SEQ ID NO: 1244717
ggucaaaggcuuugaucug

SEQ ID NO: 1509681 - RNA, 19 nt, Artificial Sequence
  Description of Artificial Sequence: Synthetic oligonucleotide
  Antisense strand to SEQ ID NO: 1509680
cagaucaaagccuuugacc

SEQ ID NO: 1509682 - RNA, 19 nt, Artificial Sequence
  Description of Artificial Sequence: Synthetic oligonucleotide
  Sense strand starting at position 2857 of SEQ ID NO: 1244717
aggcuuugaucugcaggau

SEQ ID NO: 1509683 - RNA, 19 nt, Artificial Sequence
  Description of Artificial Sequence: Synthetic oligonucleotide
  Antisense strand to SEQ ID NO: 1509682
auccugcagaucaaagccu

SEQ ID NO: 1509684 - RNA, 19 nt, Artificial Sequence
  Description of Artificial Sequence: Synthetic oligonucleotide
  Sense strand starting at position 2858 of SEQ ID NO: 1244717
ggcuuugaucugcaggauu

SEQ ID NO: 1509685 - RNA, 19 nt, Artificial Sequence
  Description of Artificial Sequence: Synthetic oligonucleotide
  Antisense strand to SEQ ID NO: 1509684
aauccugcagaucaaagcc

SEQ ID NO: 1509686 - RNA, 19 nt, Artificial Sequence
  Description of Artificial Sequence: Synthetic oligonucleotide
  Sense strand starting at position 3317 of SEQ ID NO: 1244717
gggcaaugugugggacaua

SEQ ID NO: 1509687 - RNA, 19 nt, Artificial Sequence
  Description of Artificial Sequence: Synthetic oligonucleotide
  Antisense strand to SEQ ID NO: 1509686
uaugucccacacauugccc

SEQ ID NO: 1509688 - RNA, 19 nt, Artificial Sequence
  Description of Artificial Sequence: Synthetic oligonucleotide
  Sense strand starting at position 3320 of SEQ ID NO: 1244717
caaugugugggacauacuu

SEQ ID NO: 1509689 - RNA, 19 nt, Artificial Sequence
  Description of Artificial Sequence: Synthetic oligonucleotide
  Antisense strand to SEQ ID NO: 1509688
aaguaugucccacacauug

SEQ ID NO: 1509690 - RNA, 19 nt, Artificial Sequence
  Description of Artificial Sequence: Synthetic oligonucleotide
  Sense strand starting at position 3322 of SEQ ID NO: 1244717
augugugggacauacuuau

SEQ ID NO: 1509691 - RNA, 19 nt, Artificial Sequence
  Description of Artificial Sequence: Synthetic oligonucleotide
  Antisense strand to SEQ ID NO: 1509690
auaaguaugucccacacau

SEQ ID NO: 1509692 - RNA, 19 nt, Artificial Sequence
  Description of Artificial Sequence: Synthetic oligonucleotide
  Sense strand starting at position 3326 of SEQ ID NO: 1244717
gugggacauacuuauguua

SEQ ID NO: 1509693 - RNA, 19 nt, Artificial Sequence
  Description of Artificial Sequence: Synthetic oligonucleotide
  Antisense strand to SEQ ID NO: 1509692
uaacauaaguaugucccac

SEQ ID NO: 1509694 - RNA, 19 nt, Artificial Sequence
  Description of Artificial Sequence: Synthetic oligonucleotide
  Sense strand starting at position 3348 of SEQ ID NO: 1244717
gcauauuuguuguugaucu

SEQ ID NO: 1509695 - RNA, 19 nt, Artificial Sequence
  Description of Artificial Sequence: Synthetic oligonucleotide
  Antisense strand to SEQ ID NO: 1509694
agaucaacaacaaauaugc

SEQ ID NO: 1509696 - RNA, 19 nt, Artificial Sequence
  Description of Artificial Sequence: Synthetic oligonucleotide
  Sense strand starting at position 3443 of SEQ ID NO: 1244717
cguggucucgauggccaua

SEQ ID NO: 1509697 - RNA, 19 nt, Artificial Sequence
  Description of Artificial Sequence: Synthetic oligonucleotide
  Antisense strand to SEQ ID NO: 1509696
uauggccaucgagaccacg

SEQ ID NO: 1509698 - RNA, 19 nt, Artificial Sequence
  Description of Artificial Sequence: Synthetic oligonucleotide
  Sense strand starting at position 3486 of SEQ ID NO: 1244717
ucuuucuuccaguggaacu

SEQ ID NO: 1509699 - RNA, 19 nt, Artificial Sequence
  Description of Artificial Sequence: Synthetic oligonucleotide
  Antisense strand to SEQ ID NO: 1509698
aguuccacuggaagaaaga

SEQ ID NO: 1509700 - RNA, 19 nt, Artificial Sequence
  Description of Artificial Sequence: Synthetic oligonucleotide
  Sense strand starting at position 3579 of SEQ ID NO: 1244717
gguggucuuugcccuuaaa

SEQ ID NO: 1509701 - RNA, 19 nt, Artificial Sequence
  Description of Artificial Sequence: Synthetic oligonucleotide
  Antisense strand to SEQ ID NO: 1509700
uuuaagggcaaagaccacc

SEQ ID NO: 1509702 - RNA, 19 nt, Artificial Sequence
  Description of Artificial Sequence: Synthetic oligonucleotide
  Sense strand starting at position 3949 of SEQ ID NO: 1244717
gcaagaucucgucgcuaca

SEQ ID NO: 1509703 - RNA, 19 nt, Artificial Sequence
  Description of Artificial Sequence: Synthetic oligonucleotide
  Antisense strand to SEQ ID NO: 1509702
uguagcgacgagaucuugc

SEQ ID NO: 1509704 - RNA, 19 nt, Artificial Sequence
  Description of Artificial Sequence: Synthetic oligonucleotide
  Sense strand starting at position 3951 of SEQ ID NO: 1244717
aagaucucgucgcuacaaa

SEQ ID NO: 1509705 - RNA, 19 nt, Artificial Sequence
  Description of Artificial Sequence: Synthetic oligonucleotide
  Antisense strand to SEQ ID NO: 1509704
uuuguagcgacgagaucuu

SEQ ID NO: 1509706 - RNA, 19 nt, Artificial Sequence
  Description of Artificial Sequence: Synthetic oligonucleotide
  Sense strand starting at position 16 of SEQ ID NO: 1244718
aagauuucuugcugaugug

SEQ ID NO: 1509707 - RNA, 19 nt, Artificial Sequence
  Description of Artificial Sequence: Synthetic oligonucleotide
  Antisense strand to SEQ ID NO: 1509706
cacaucagcaagaaaucuu

SEQ ID NO: 1509708 - RNA, 19 nt, Artificial Sequence
  Description of Artificial Sequence: Synthetic oligonucleotide
  Sense strand starting at position 54 of SEQ ID NO: 1244718
cccuuaggcuauuaggaaa

SEQ ID NO: 1509709 - RNA, 19 nt, Artificial Sequence
  Description of Artificial Sequence: Synthetic oligonucleotide
  Antisense strand to SEQ ID NO: 1509708
uuuccuaauagccuaaggg

SEQ ID NO: 1509710 - RNA, 19 nt, Artificial Sequence
  Description of Artificial Sequence: Synthetic oligonucleotide
  Sense strand starting at position 57 of SEQ ID NO: 1244718
uuaggcuauuaggaaauau

SEQ ID NO: 1509711 - RNA, 19 nt, Artificial Sequence
  Description of Artificial Sequence: Synthetic oligonucleotide
  Antisense strand to SEQ ID NO: 1509710
auauuuccuaauagccuaa

SEQ ID NO: 1509712 - RNA, 19 nt, Artificial Sequence
  Description of Artificial Sequence: Synthetic oligonucleotide
  Sense strand starting at position 91 of SEQ ID NO: 1244718
ggcuaaagguuaguuauaa

SEQ ID NO: 1509713 - RNA, 19 nt, Artificial Sequence
  Description of Artificial Sequence: Synthetic oligonucleotide
  Antisense strand to SEQ ID NO: 1509712
uuauaacuaaccuuuagcc

SEQ ID NO: 1509714 - RNA, 19 nt, Artificial Sequence
  Description of Artificial Sequence: Synthetic oligonucleotide
  Sense strand starting at position 92 of SEQ ID NO: 1244718
gcuaaagguuaguuauaaa

SEQ ID NO: 1509715 - RNA, 19 nt, Artificial Sequence
  Description of Artificial Sequence: Synthetic oligonucleotide
  Antisense strand to SEQ ID NO: 1509714
uuuauaacuaaccuuuagc

SEQ ID NO: 1509716 - RNA, 19 nt, Artificial Sequence
  Description of Artificial Sequence: Synthetic oligonucleotide
  Sense strand starting at position 292 of SEQ ID NO: 1244718
gcuuucucuuccugcaaag

SEQ ID NO: 1509717 - RNA, 19 nt, Artificial Sequence
  Description of Artificial Sequence: Synthetic oligonucleotide
  Antisense strand to SEQ ID NO: 1509716
cuuugcaggaagagaaagc

SEQ ID NO: 1509718 - RNA, 19 nt, Artificial Sequence
  Description of Artificial Sequence: Synthetic oligonucleotide
  Sense strand starting at position 347 of SEQ ID NO: 1244718
ggaagucaaaccugggcua

SEQ ID NO: 1509719 - RNA, 19 nt, Artificial Sequence
  Description of Artificial Sequence: Synthetic oligonucleotide
  Antisense strand to SEQ ID NO: 1509718
uagcccagguuugacuucc

SEQ ID NO: 1509720 - RNA, 19 nt, Artificial Sequence
  Description of Artificial Sequence: Synthetic oligonucleotide
  Sense strand starting at position 397 of SEQ ID NO: 1244718
cagggauuaugugagcuca

SEQ ID NO: 1509721 - RNA, 19 nt, Artificial Sequence
  Description of Artificial Sequence: Synthetic oligonucleotide
  Antisense strand to SEQ ID NO: 1509720
ugagcucacauaaucccug

SEQ ID NO: 1509722 - RNA, 19 nt, Artificial Sequence
  Description of Artificial Sequence: Synthetic oligonucleotide
  Sense strand starting at position 467 of SEQ ID NO: 1244718
cugucaagguugccuaaga

SEQ ID NO: 1509723 - RNA, 19 nt, Artificial Sequence
  Description of Artificial Sequence: Synthetic oligonucleotide
  Antisense strand to SEQ ID NO: 1509722
ucuuaggcaaccuugacag

SEQ ID NO: 1509724 - RNA, 19 nt, Artificial Sequence
  Description of Artificial Sequence: Synthetic oligonucleotide
  Sense strand starting at position 468 of SEQ ID NO: 1244718
ugucaagguugccuaagaa

SEQ ID NO: 1509725 - RNA, 19 nt, Artificial Sequence
  Description of Artificial Sequence: Synthetic oligonucleotide
  Antisense strand to SEQ ID NO: 1509724
uucuuaggcaaccuugaca

SEQ ID NO: 1509726 - RNA, 19 nt, Artificial Sequence
  Description of Artificial Sequence: Synthetic oligonucleotide
  Sense strand starting at position 541 of SEQ ID NO: 1244718
uuuacugcccuguagucau

SEQ ID NO: 1509727 - RNA, 19 nt, Artificial Sequence
  Description of Artificial Sequence: Synthetic oligonucleotide
  Antisense strand to SEQ ID NO: 1509726
augacuacagggcaguaaa

SEQ ID NO: 1509728 - RNA, 19 nt, Artificial Sequence
  Description of Artificial Sequence: Synthetic oligonucleotide
  Sense strand starting at position 577 of SEQ ID NO: 1244718
guaugaaggugugaaggua

SEQ ID NO: 1509729 - RNA, 19 nt, Artificial Sequence
  Description of Artificial Sequence: Synthetic oligonucleotide
  Antisense strand to SEQ ID NO: 1509728
uaccuucacaccuucauac

SEQ ID NO: 1509730 - RNA, 19 nt, Artificial Sequence
  Description of Artificial Sequence: Synthetic oligonucleotide
  Sense strand starting at position 613 of SEQ ID NO: 1244718
gcagaugucauguagagaa

SEQ ID NO: 1509731 - RNA, 19 nt, Artificial Sequence
  Description of Artificial Sequence: Synthetic oligonucleotide
  Antisense strand to SEQ ID NO: 1509730
uucucuacaugacaucugc

SEQ ID NO: 1509732 - RNA, 19 nt, Artificial Sequence
  Description of Artificial Sequence: Synthetic oligonucleotide
  Sense strand starting at position 617 of SEQ ID NO: 1244718
augucauguagagaagcau

SEQ ID NO: 1509733 - RNA, 19 nt, Artificial Sequence
  Description of Artificial Sequence: Synthetic oligonucleotide
  Antisense strand to SEQ ID NO: 1509732
augcuucucuacaugacau

SEQ ID NO: 1509734 - RNA, 19 nt, Artificial Sequence
  Description of Artificial Sequence: Synthetic oligonucleotide
  Sense strand starting at position 650 of SEQ ID NO: 1244718
cagcaauuccagugacaag

SEQ ID NO: 1509735 - RNA, 19 nt, Artificial Sequence
  Description of Artificial Sequence: Synthetic oligonucleotide
  Antisense strand to SEQ ID NO: 1509734
cuugucacuggaauugcug

SEQ ID NO: 1509736 - RNA, 19 nt, Artificial Sequence
  Description of Artificial Sequence: Synthetic oligonucleotide
  Sense strand starting at position 790 of SEQ ID NO: 1244718
uuuggagaaucauaaggca

SEQ ID NO: 1509737 - RNA, 19 nt, Artificial Sequence
  Description of Artificial Sequence: Synthetic oligonucleotide
  Antisense strand to SEQ ID NO: 1509736
ugccuuaugauucuccaaa

SEQ ID NO: 1509738 - RNA, 19 nt, Artificial Sequence
  Description of Artificial Sequence: Synthetic oligonucleotide
  Sense strand starting at position 821 of SEQ ID NO: 1244718
aagaaauuguguccagcaa

SEQ ID NO: 1509739 - RNA, 19 nt, Artificial Sequence
  Description of Artificial Sequence: Synthetic oligonucleotide
  Antisense strand to SEQ ID NO: 1509738
uugcuggacacaauuucuu

SEQ ID NO: 1509740 - RNA, 19 nt, Artificial Sequence
  Description of Artificial Sequence: Synthetic oligonucleotide
  Sense strand starting at position 822 of SEQ ID NO: 1244718
agaaauuguguccagcaag

SEQ ID NO: 1509741 - RNA, 19 nt, Artificial Sequence
  Description of Artificial Sequence: Synthetic oligonucleotide
  Antisense strand to SEQ ID NO: 1509740
cuugcuggacacaauuucu

SEQ ID NO: 1509742 - RNA, 19 nt, Artificial Sequence
  Description of Artificial Sequence: Synthetic oligonucleotide
  Sense strand starting at position 853 of SEQ ID NO: 1244718
uccacaauggccugaggaa

SEQ ID NO: 1509743 - RNA, 19 nt, Artificial Sequence
  Description of Artificial Sequence: Synthetic oligonucleotide
  Antisense strand to SEQ ID NO: 1509742
uuccucaggccauugugga

SEQ ID NO: 1509744 - RNA, 19 nt, Artificial Sequence
  Description of Artificial Sequence: Synthetic oligonucleotide
  Sense strand starting at position 871 of SEQ ID NO: 1244718
acgucuagauucuagauga

SEQ ID NO: 1509745 - RNA, 19 nt, Artificial Sequence
  Description of Artificial Sequence: Synthetic oligonucleotide
  Antisense strand to SEQ ID NO: 1509744
ucaucuagaaucuagacgu

SEQ ID NO: 1509746 - RNA, 19 nt, Artificial Sequence
  Description of Artificial Sequence: Synthetic oligonucleotide
  Sense strand starting at position 1116 of SEQ ID NO: 1244718
ggccuugcgcaagacagau

SEQ ID NO: 1509747 - RNA, 19 nt, Artificial Sequence
  Description of Artificial Sequence: Synthetic oligonucleotide
  Antisense strand to SEQ ID NO: 1509746
aucugucuugcgcaaggcc

SEQ ID NO: 1509748 - RNA, 19 nt, Artificial Sequence
  Description of Artificial Sequence: Synthetic oligonucleotide
  Sense strand starting at position 1128 of SEQ ID NO: 1244718
gacagaucgcucugagccu

SEQ ID NO: 1509749 - RNA, 19 nt, Artificial Sequence
  Description of Artificial Sequence: Synthetic oligonucleotide
  Antisense strand to SEQ ID NO: 1509748
aggcucagagcgaucuguc

SEQ ID NO: 1509750 - RNA, 19 nt, Artificial Sequence
  Description of Artificial Sequence: Synthetic oligonucleotide
  Sense strand starting at position 1145 of SEQ ID NO: 1244718
cucgaugucuucguccaca

SEQ ID NO: 1509751 - RNA, 19 nt, Artificial Sequence
  Description of Artificial Sequence: Synthetic oligonucleotide
  Antisense strand to SEQ ID NO: 1509750
uguggacgaagacaucgag

SEQ ID NO: 1509752 - RNA, 19 nt, Artificial Sequence
  Description of Artificial Sequence: Synthetic oligonucleotide
  Sense strand starting at position 1792 of SEQ ID NO: 1244718
gcagcucacuccgagguaa

SEQ ID NO: 1509753 - RNA, 19 nt, Artificial Sequence
  Description of Artificial Sequence: Synthetic oligonucleotide
  Antisense strand to SEQ ID NO: 1509752
uuaccucggagugagcugc

SEQ ID NO: 1509754 - RNA, 19 nt, Artificial Sequence
  Description of Artificial Sequence: Synthetic oligonucleotide
  Sense strand starting at position 2269 of SEQ ID NO: 1244718
gcccgcaucuguucgucau

SEQ ID NO: 1509755 - RNA, 19 nt, Artificial Sequence
  Description of Artificial Sequence: Synthetic oligonucleotide
  Antisense strand to SEQ ID NO: 1509754
augacgaacagaugcgggc

SEQ ID NO: 1509756 - RNA, 19 nt, Artificial Sequence
  Description of Artificial Sequence: Synthetic oligonucleotide
  Sense strand starting at position 3139 of SEQ ID NO: 1244718
gaaguuggcccuuggaaau

SEQ ID NO: 1509757 - RNA, 19 nt, Artificial Sequence
  Description of Artificial Sequence: Synthetic oligonucleotide
  Antisense strand to SEQ ID NO: 1509756
auuuccaagggccaacuuc

SEQ ID NO: 1509758 - RNA, 19 nt, Artificial Sequence
  Description of Artificial Sequence: Synthetic oligonucleotide
  Sense strand starting at position 3676 of SEQ ID NO: 1244718
gcagcauggcgagaaccau

SEQ ID NO: 1509759 - RNA, 19 nt, Artificial Sequence
  Description of Artificial Sequence: Synthetic oligonucleotide
  Antisense strand to SEQ ID NO: 1509758
augguucucgccaugcugc

SEQ ID NO: 1509760 - RNA, 19 nt, Artificial Sequence
  Description of Artificial Sequence: Synthetic oligonucleotide
  Sense strand starting at position 3685 of SEQ ID NO: 1244718
cgagaaccaucucuaccaa

SEQ ID NO: 1509761 - RNA, 19 nt, Artificial Sequence
  Description of Artificial Sequence: Synthetic oligonucleotide
  Antisense strand to SEQ ID NO: 1509760
uugguagagaugguucucg

SEQ ID NO: 1509762 - RNA, 19 nt, Artificial Sequence
  Description of Artificial Sequence: Synthetic oligonucleotide
  Sense strand starting at position 41 of SEQ ID NO: 1244719
auaaauaggguagguauua

SEQ ID NO: 1509763 - RNA, 19 nt, Artificial Sequence
  Description of Artificial Sequence: Synthetic oligonucleotide
  Antisense strand to SEQ ID NO: 1509762
uaauaccuacccuauuuau

SEQ ID NO: 1509764 - RNA, 19 nt, Artificial Sequence
  Description of Artificial Sequence: Synthetic oligonucleotide
  Sense strand starting at position 42 of SEQ ID NO: 1244719
uaaauaggguagguauuaa

SEQ ID NO: 1509765 - RNA, 19 nt, Artificial Sequence
  Description of Artificial Sequence: Synthetic oligonucleotide
  Antisense strand to SEQ ID NO: 1509764
uuaauaccuacccuauuua

SEQ ID NO: 1509766 - RNA, 19 nt, Artificial Sequence
  Description of Artificial Sequence: Synthetic oligonucleotide
  Sense strand starting at position 46 of SEQ ID NO: 1244719
uaggguagguauuaacaau

SEQ ID NO: 1509767 - RNA, 19 nt, Artificial Sequence
  Description of Artificial Sequence: Synthetic oligonucleotide
  Antisense strand to SEQ ID NO: 1509766
auuguuaauaccuacccua

SEQ ID NO: 1509768 - RNA, 19 nt, Artificial Sequence
  Description of Artificial Sequence: Synthetic oligonucleotide
  Sense strand starting at position 76 of SEQ ID NO: 1244719
ugauauguguuaugacuuc

SEQ ID NO: 1509769 - RNA, 19 nt, Artificial Sequence
  Description of Artificial Sequence: Synthetic oligonucleotide
  Antisense strand to SEQ ID NO: 1509768
gaagucauaacacauauca

SEQ ID NO: 1509770 - RNA, 19 nt, Artificial Sequence
  Description of Artificial Sequence: Synthetic oligonucleotide
  Sense strand starting at position 143 of SEQ ID NO: 1244719
agggaaguguccucuggca

SEQ ID NO: 1509771 - RNA, 19 nt, Artificial Sequence
  Description of Artificial Sequence: Synthetic oligonucleotide
  Antisense strand to SEQ ID NO: 1509770
ugccagaggacacuucccu

SEQ ID NO: 1509772 - RNA, 19 nt, Artificial Sequence
  Description of Artificial Sequence: Synthetic oligonucleotide
  Sense strand starting at position 267 of SEQ ID NO: 1244719
uucuccuguccuuguuauu

SEQ ID NO: 1509773 - RNA, 19 nt, Artificial Sequence
  Description of Artificial Sequence: Synthetic oligonucleotide
  Antisense strand to SEQ ID NO: 1509772
aauaacaaggacaggagaa

SEQ ID NO: 1509774 - RNA, 19 nt, Artificial Sequence
  Description of Artificial Sequence: Synthetic oligonucleotide
  Sense strand starting at position 276 of SEQ ID NO: 1244719
ccuuguuauucuguuguga

SEQ ID NO: 1509775 - RNA, 19 nt, Artificial Sequence
  Description of Artificial Sequence: Synthetic oligonucleotide
  Antisense strand to SEQ ID NO: 1509774
ucacaacagaauaacaagg

SEQ ID NO: 1509776 - RNA, 19 nt, Artificial Sequence
  Description of Artificial Sequence: Synthetic oligonucleotide
  Sense strand starting at position 278 of SEQ ID NO: 1244719
uuguuauucuguugugacc

SEQ ID NO: 1509777 - RNA, 19 nt, Artificial Sequence
  Description of Artificial Sequence: Synthetic oligonucleotide
  Antisense strand to SEQ ID NO: 1509776
ggucacaacagaauaacaa

SEQ ID NO: 1509778 - RNA, 19 nt, Artificial Sequence
  Description of Artificial Sequence: Synthetic oligonucleotide
  Sense strand starting at position 284 of SEQ ID NO: 1244719
uucuguugugaccacacau

SEQ ID NO: 1509779 - RNA, 19 nt, Artificial Sequence
  Description of Artificial Sequence: Synthetic oligonucleotide
  Antisense strand to SEQ ID NO: 1509778
auguguggucacaacagaa

SEQ ID NO: 1509780 - RNA, 19 nt, Artificial Sequence
  Description of Artificial Sequence: Synthetic oligonucleotide
  Sense strand starting at position 304 of SEQ ID NO: 1244719
gacugcugucaggauguuu

SEQ ID NO: 1509781 - RNA, 19 nt, Artificial Sequence
  Description of Artificial Sequence: Synthetic oligonucleotide
  Antisense strand to SEQ ID NO: 1509780
aaacauccugacagcaguc

SEQ ID NO: 1509782 - RNA, 19 nt, Artificial Sequence
  Description of Artificial Sequence: Synthetic oligonucleotide
  Sense strand starting at position 315 of SEQ ID NO: 1244719
ggauguuuaugcuuugggu

SEQ ID NO: 1509783 - RNA, 19 nt, Artificial Sequence
  Description of Artificial Sequence: Synthetic oligonucleotide
  Antisense strand to SEQ ID NO: 1509782
acccaaagcauaaacaucc

SEQ ID NO: 1509784 - RNA, 19 nt, Artificial Sequence
  Description of Artificial Sequence: Synthetic oligonucleotide
  Sense strand starting at position 330 of SEQ ID NO: 1244719
ggguuucacuggucaaggu

SEQ ID NO: 1509785 - RNA, 19 nt, Artificial Sequence
  Description of Artificial Sequence: Synthetic oligonucleotide
  Antisense strand to SEQ ID NO: 1509784
accuugaccagugaaaccc

SEQ ID NO: 1509786 - RNA, 19 nt, Artificial Sequence
  Description of Artificial Sequence: Synthetic oligonucleotide
  Sense strand starting at position 818 of SEQ ID NO: 1244719
gcuaguaauggucagauug

SEQ ID NO: 1509787 - RNA, 19 nt, Artificial Sequence
  Description of Artificial Sequence: Synthetic oligonucleotide
  Antisense strand to SEQ ID NO: 1509786
caaucugaccauuacuagc

SEQ ID NO: 1509788 - RNA, 19 nt, Artificial Sequence
  Description of Artificial Sequence: Synthetic oligonucleotide
  Sense strand starting at position 850 of SEQ ID NO: 1244719
ggccaagccucugugugua

SEQ ID NO: 1509789 - RNA, 19 nt, Artificial Sequence
  Description of Artificial Sequence: Synthetic oligonucleotide
  Antisense strand to SEQ ID NO: 1509788
uacacacagaggcuuggcc

SEQ ID NO: 1509790 - RNA, 19 nt, Artificial Sequence
  Description of Artificial Sequence: Synthetic oligonucleotide
  Sense strand starting at position 946 of SEQ ID NO: 1244719
uuacaugugccuuauuaag

SEQ ID NO: 1509791 - RNA, 19 nt, Artificial Sequence
  Description of Artificial Sequence: Synthetic oligonucleotide
  Antisense strand to SEQ ID NO: 1509790
cuuaauaaggcacauguaa

SEQ ID NO: 1509792 - RNA, 19 nt, Artificial Sequence
  Description of Artificial Sequence: Synthetic oligonucleotide
  Sense strand starting at position 948 of SEQ ID NO: 1244719
acaugugccuuauuaagau

SEQ ID NO: 1509793 - RNA, 19 nt, Artificial Sequence
  Description of Artificial Sequence: Synthetic oligonucleotide
  Antisense strand to SEQ ID NO: 1509792
aucuuaauaaggcacaugu

SEQ ID NO: 1509794 - RNA, 19 nt, Artificial Sequence
  Description of Artificial Sequence: Synthetic oligonucleotide
  Sense strand starting at position 952 of SEQ ID NO: 1244719
gugccuuauuaagauccaa

SEQ ID NO: 1509795 - RNA, 19 nt, Artificial Sequence
  Description of Artificial Sequence: Synthetic oligonucleotide
  Antisense strand to SEQ ID NO: 1509794
uuggaucuuaauaaggcac

SEQ ID NO: 1509796 - RNA, 19 nt, Artificial Sequence
  Description of Artificial Sequence: Synthetic oligonucleotide
  Sense strand starting at position 1514 of SEQ ID NO: 1244719
cugaacuuaguguagacau

SEQ ID NO: 1509797 - RNA, 19 nt, Artificial Sequence
  Description of Artificial Sequence: Synthetic oligonucleotide
  Antisense strand to SEQ ID NO: 1509796
augucuacacuaaguucag

SEQ ID NO: 1509798 - RNA, 19 nt, Artificial Sequence
  Description of Artificial Sequence: Synthetic oligonucleotide
  Sense strand starting at position 1516 of SEQ ID NO: 1244719
gaacuuaguguagacaucu

SEQ ID NO: 1509799 - RNA, 19 nt, Artificial Sequence
  Description of Artificial Sequence: Synthetic oligonucleotide
  Antisense strand to SEQ ID NO: 1509798
agaugucuacacuaaguuc

SEQ ID NO: 1509800 - RNA, 19 nt, Artificial Sequence
  Description of Artificial Sequence: Synthetic oligonucleotide
  Sense strand starting at position 1546 of SEQ ID NO: 1244719
cacgcuauugugcagaacu

SEQ ID NO: 1509801 - RNA, 19 nt, Artificial Sequence
  Description of Artificial Sequence: Synthetic oligonucleotide
  Antisense strand to SEQ ID NO: 1509800
aguucugcacaauagcgug

SEQ ID NO: 1509802 - RNA, 19 nt, Artificial Sequence
  Description of Artificial Sequence: Synthetic oligonucleotide
  Sense strand starting at position 1653 of SEQ ID NO: 1244719
ggcuuacauuccuucugaa

SEQ ID NO: 1509803 - RNA, 19 nt, Artificial Sequence
  Description of Artificial Sequence: Synthetic oligonucleotide
  Antisense strand to SEQ ID NO: 1509802
uucagaaggaauguaagcc

SEQ ID NO: 1509804 - RNA, 19 nt, Artificial Sequence
  Description of Artificial Sequence: Synthetic oligonucleotide
  Sense strand starting at position 1787 of SEQ ID NO: 1244719
guaggucauccugacaucu

SEQ ID NO: 1509805 - RNA, 19 nt, Artificial Sequence
  Description of Artificial Sequence: Synthetic oligonucleotide
  Antisense strand to SEQ ID NO: 1509804
agaugucaggaugaccuac

SEQ ID NO: 1509806 - RNA, 19 nt, Artificial Sequence
  Description of Artificial Sequence: Synthetic oligonucleotide
  Sense strand starting at position 1865 of SEQ ID NO: 1244719
ggucucagcugcgcauaau

SEQ ID NO: 1509807 - RNA, 19 nt, Artificial Sequence
  Description of Artificial Sequence: Synthetic oligonucleotide
  Antisense strand to SEQ ID NO: 1509806
auuaugcgcagcugagacc

SEQ ID NO: 1509808 - RNA, 19 nt, Artificial Sequence
  Description of Artificial Sequence: Synthetic oligonucleotide
  Sense strand starting at position 1875 of SEQ ID NO: 1244719
gcgcauaauggcuguucga

SEQ ID NO: 1509809 - RNA, 19 nt, Artificial Sequence
  Description of Artificial Sequence: Synthetic oligonucleotide
  Antisense strand to SEQ ID NO: 1509808
ucgaacagccauuaugcgc

SEQ ID NO: 1509810 - RNA, 19 nt, Artificial Sequence
  Description of Artificial Sequence: Synthetic oligonucleotide
  Sense strand starting at position 2016 of SEQ ID NO: 1244719
ggagcuguuuccugacuca

SEQ ID NO: 1509811 - RNA, 19 nt, Artificial Sequence
  Description of Artificial Sequence: Synthetic oligonucleotide
  Antisense strand to SEQ ID NO: 1509810
ugagucaggaaacagcucc

SEQ ID NO: 1509812 - RNA, 19 nt, Artificial Sequence
  Description of Artificial Sequence: Synthetic oligonucleotide
  Sense strand starting at position 2019 of SEQ ID NO: 1244719
gcuguuuccugacucacca

SEQ ID NO: 1509813 - RNA, 19 nt, Artificial Sequence
  Description of Artificial Sequence: Synthetic oligonucleotide
  Antisense strand to SEQ ID NO: 1509812
uggugagucaggaaacagc

SEQ ID NO: 1509814 - RNA, 19 nt, Artificial Sequence
  Description of Artificial Sequence: Synthetic oligonucleotide
  Sense strand starting at position 2292 of SEQ ID NO: 1244719
cuggcauucuggccauaga

SEQ ID NO: 1509815 - RNA, 19 nt, Artificial Sequence
  Description of Artificial Sequence: Synthetic oligonucleotide
  Antisense strand to SEQ ID NO: 1509814
ucuauggccagaaugccag

SEQ ID NO: 1509816 - RNA, 19 nt, Artificial Sequence
  Description of Artificial Sequence: Synthetic oligonucleotide
  Sense strand starting at position 2366 of SEQ ID NO: 1244719
gcgggagcuucucuaagau

SEQ ID NO: 1509817 - RNA, 19 nt, Artificial Sequence
  Description of Artificial Sequence: Synthetic oligonucleotide
  Antisense strand to SEQ ID NO: 1509816
aucuuagagaagcucccgc

SEQ ID NO: 1509818 - RNA, 19 nt, Artificial Sequence
  Description of Artificial Sequence: Synthetic oligonucleotide
  Sense strand starting at position 2912 of SEQ ID NO: 1244719
gucugaacguggucacaua

SEQ ID NO: 1509819 - RNA, 19 nt, Artificial Sequence
  Description of Artificial Sequence: Synthetic oligonucleotide
  Antisense strand to SEQ ID NO: 1509818
uaugugaccacguucagac

SEQ ID NO: 1509820 - RNA, 19 nt, Artificial Sequence
  Description of Artificial Sequence: Synthetic oligonucleotide
  Sense strand starting at position 3271 of SEQ ID NO: 1244719
ucugaagagggauguuuau

SEQ ID NO: 1509821 - RNA, 19 nt, Artificial Sequence
  Description of Artificial Sequence: Synthetic oligonucleotide
  Antisense strand to SEQ ID NO: 1509820
auaaacaucccucuucaga

SEQ ID NO: 1509822 - RNA, 19 nt, Artificial Sequence
  Description of Artificial Sequence: Synthetic oligonucleotide
  Sense strand starting at position 3277 of SEQ ID NO: 1244719
gagggauguuuauccucuu

SEQ ID NO: 1509823 - RNA, 19 nt, Artificial Sequence
  Description of Artificial Sequence: Synthetic oligonucleotide
  Antisense strand to SEQ ID NO: 1509822
aagaggauaaacaucccuc

SEQ ID NO: 1509824 - RNA, 19 nt, Artificial Sequence
  Description of Artificial Sequence: Synthetic oligonucleotide
  Sense strand starting at position 3328 of SEQ ID NO: 1244719
augccuuccucagguuuaa

SEQ ID NO: 1509825 - RNA, 19 nt, Artificial Sequence
  Description of Artificial Sequence: Synthetic oligonucleotide
  Antisense strand to SEQ ID NO: 1509824
uuaaaccugaggaaggcau

SEQ ID NO: 1509826 - RNA, 19 nt, Artificial Sequence
  Description of Artificial Sequence: Synthetic oligonucleotide
  Sense strand starting at position 3340 of SEQ ID NO: 1244719
gguuuaaagucagacuuga

SEQ ID NO: 1509827 - RNA, 19 nt, Artificial Sequence
  Description of Artificial Sequence: Synthetic oligonucleotide
  Antisense strand to SEQ ID NO: 1509826
ucaagucugacuuuaaacc

SEQ ID NO: 1509828 - RNA, 19 nt, Artificial Sequence
  Description of Artificial Sequence: Synthetic oligonucleotide
  Sense strand starting at position 3435 of SEQ ID NO: 1244719
guggcuucugcugagaaau

SEQ ID NO: 1509829 - RNA, 19 nt, Artificial Sequence
  Description of Artificial Sequence: Synthetic oligonucleotide
  Antisense strand to SEQ ID NO: 1509828
auuucucagcagaagccac

SEQ ID NO: 1509830 - RNA, 19 nt, Artificial Sequence
  Description of Artificial Sequence: Synthetic oligonucleotide
  Sense strand starting at position 3933 of SEQ ID NO: 1244719
gccaucuccuucuggacua

SEQ ID NO: 1509831 - RNA, 19 nt, Artificial Sequence
  Description of Artificial Sequence: Synthetic oligonucleotide
  Antisense strand to SEQ ID NO: 1509830
uaguccagaaggagauggc

SEQ ID NO: 1509832 - RNA, 19 nt, Artificial Sequence
  Description of Artificial Sequence: Synthetic oligonucleotide
  Sense strand starting at position 30 of SEQ ID NO: 1244720
uuuacugcccuguagucau

SEQ ID NO: 1509833 - RNA, 19 nt, Artificial Sequence
  Description of Artificial Sequence: Synthetic oligonucleotide
  Antisense strand to SEQ ID NO: 1509832
augacuacagggcaguaaa

SEQ ID NO: 1509834 - RNA, 19 nt, Artificial Sequence
  Description of Artificial Sequence: Synthetic oligonucleotide
  Sense strand starting at position 66 of SEQ ID NO: 1244720
guaugaaggugugaaggua

SEQ ID NO: 1509835 - RNA, 19 nt, Artificial Sequence
  Description of Artificial Sequence: Synthetic oligonucleotide
  Antisense strand to SEQ ID NO: 1509834
uaccuucacaccuucauac

SEQ ID NO: 1509836 - RNA, 19 nt, Artificial Sequence
  Description of Artificial Sequence: Synthetic oligonucleotide
  Sense strand starting at position 102 of SEQ ID NO: 1244720
gcagaugucauguagagaa

SEQ ID NO: 1509837 - RNA, 19 nt, Artificial Sequence
  Description of Artificial Sequence: Synthetic oligonucleotide
  Antisense strand to SEQ ID NO: 1509836
uucucuacaugacaucugc

SEQ ID NO: 1509838 - RNA, 19 nt, Artificial Sequence
  Description of Artificial Sequence: Synthetic oligonucleotide
  Sense strand starting at position 106 of SEQ ID NO: 1244720
augucauguagagaagcau

SEQ ID NO: 1509839 - RNA, 19 nt, Artificial Sequence
  Description of Artificial Sequence: Synthetic oligonucleotide
  Antisense strand to SEQ ID NO: 1509838
augcuucucuacaugacau

SEQ ID NO: 1509840 - RNA, 19 nt, Artificial Sequence
  Description of Artificial Sequence: Synthetic oligonucleotide
  Sense strand starting at position 139 of SEQ ID NO: 1244720
cagcaauuccagugacaag

SEQ ID NO: 1509841 - RNA, 19 nt, Artificial Sequence
  Description of Artificial Sequence: Synthetic oligonucleotide
  Antisense strand to SEQ ID NO: 1509840
cuugucacuggaauugcug

SEQ ID NO: 1509842 - RNA, 19 nt, Artificial Sequence
  Description of Artificial Sequence: Synthetic oligonucleotide
  Sense strand starting at position 279 of SEQ ID NO: 1244720
uuuggagaaucauaaggca

SEQ ID NO: 1509843 - RNA, 19 nt, Artificial Sequence
  Description of Artificial Sequence: Synthetic oligonucleotide
  Antisense strand to SEQ ID NO: 1509842
ugccuuaugauucuccaaa

SEQ ID NO: 1509844 - RNA, 19 nt, Artificial Sequence
  Description of Artificial Sequence: Synthetic oligonucleotide
  Sense strand starting at position 310 of SEQ ID NO: 1244720
aagaaauuguguccagcaa

SEQ ID NO: 1509845 - RNA, 19 nt, Artificial Sequence
  Description of Artificial Sequence: Synthetic oligonucleotide
  Antisense strand to SEQ ID NO: 1509844
uugcuggacacaauuucuu

SEQ ID NO: 1509846 - RNA, 19 nt, Artificial Sequence
  Description of Artificial Sequence: Synthetic oligonucleotide
  Sense strand starting at position 311 of SEQ ID NO: 1244720
agaaauuguguccagcaag

SEQ ID NO: 1509847 - RNA, 19 nt, Artificial Sequence
  Description of Artificial Sequence: Synthetic oligonucleotide
  Antisense strand to SEQ ID NO: 1509846
cuugcuggacacaauuucu

SEQ ID NO: 1509848 - RNA, 19 nt, Artificial Sequence
  Description of Artificial Sequence: Synthetic oligonucleotide
  Sense strand starting at position 342 of SEQ ID NO: 1244720
uccacaauggccugaggaa

SEQ ID NO: 1509849 - RNA, 19 nt, Artificial Sequence
  Description of Artificial Sequence: Synthetic oligonucleotide
  Antisense strand to SEQ ID NO: 1509848
uuccucaggccauugugga

SEQ ID NO: 1509850 - RNA, 19 nt, Artificial Sequence
  Description of Artificial Sequence: Synthetic oligonucleotide
  Sense strand starting at position 360 of SEQ ID NO: 1244720
acgucuagauucuagauga

SEQ ID NO: 1509851 - RNA, 19 nt, Artificial Sequence
  Description of Artificial Sequence: Synthetic oligonucleotide
  Antisense strand to SEQ ID NO: 1509850
ucaucuagaaucuagacgu

SEQ ID NO: 1509852 - RNA, 19 nt, Artificial Sequence
  Description of Artificial Sequence: Synthetic oligonucleotide
  Sense strand starting at position 605 of SEQ ID NO: 1244720
ggccuugcgcaagacagau

SEQ ID NO: 1509853 - RNA, 19 nt, Artificial Sequence
  Description of Artificial Sequence: Synthetic oligonucleotide
  Antisense strand to SEQ ID NO: 1509852
aucugucuugcgcaaggcc

SEQ ID NO: 1509854 - RNA, 19 nt, Artificial Sequence
  Description of Artificial Sequence: Synthetic oligonucleotide
  Sense strand starting at position 617 of SEQ ID NO: 1244720
gacagaucgcucugagccu

SEQ ID NO: 1509855 - RNA, 19 nt, Artificial Sequence
  Description of Artificial Sequence: Synthetic oligonucleotide
  Antisense strand to SEQ ID NO: 1509854
aggcucagagcgaucuguc

SEQ ID NO: 1509856 - RNA, 19 nt, Artificial Sequence
  Description of Artificial Sequence: Synthetic oligonucleotide
  Sense strand starting at position 634 of SEQ ID NO: 1244720
cucgaugucuucguccaca

SEQ ID NO: 1509857 - RNA, 19 nt, Artificial Sequence
  Description of Artificial Sequence: Synthetic oligonucleotide
  Antisense strand to SEQ ID NO: 1509856
uguggacgaagacaucgag

SEQ ID NO: 1509858 - RNA, 19 nt, Artificial Sequence
  Description of Artificial Sequence: Synthetic oligonucleotide
  Sense strand starting at position 1281 of SEQ ID NO: 1244720
gcagcucacuccgagguaa

SEQ ID NO: 1509859 - RNA, 19 nt, Artificial Sequence
  Description of Artificial Sequence: Synthetic oligonucleotide
  Antisense strand to SEQ ID NO: 1509858
uuaccucggagugagcugc

SEQ ID NO: 1509860 - RNA, 19 nt, Artificial Sequence
  Description of Artificial Sequence: Synthetic oligonucleotide
  Sense strand starting at position 1758 of SEQ ID NO: 1244720
gcccgcaucuguucgucau

SEQ ID NO: 1509861 - RNA, 19 nt, Artificial Sequence
  Description of Artificial Sequence: Synthetic oligonucleotide
  Antisense strand to SEQ ID NO: 1509860
augacgaacagaugcgggc

SEQ ID NO: 1509862 - RNA, 19 nt, Artificial Sequence
  Description of Artificial Sequence: Synthetic oligonucleotide
  Sense strand starting at position 2628 of SEQ ID NO: 1244720
gaaguuggcccuuggaaau

SEQ ID NO: 1509863 - RNA, 19 nt, Artificial Sequence
  Description of Artificial Sequence: Synthetic oligonucleotide
  Antisense strand to SEQ ID NO: 1509862
auuuccaagggccaacuuc

SEQ ID NO: 1509864 - RNA, 19 nt, Artificial Sequence
  Description of Artificial Sequence: Synthetic oligonucleotide
  Sense strand starting at position 3165 of SEQ ID NO: 1244720
gcagcauggcgagaaccau

SEQ ID NO: 1509865 - RNA, 19 nt, Artificial Sequence
  Description of Artificial Sequence: Synthetic oligonucleotide
  Antisense strand to SEQ ID NO: 1509864
augguucucgccaugcugc

SEQ ID NO: 1509866 - RNA, 19 nt, Artificial Sequence
  Description of Artificial Sequence: Synthetic oligonucleotide
  Sense strand starting at position 3174 of SEQ ID NO: 1244720
cgagaaccaucucuaccaa

SEQ ID NO: 1509867 - RNA, 19 nt, Artificial Sequence
  Description of Artificial Sequence: Synthetic oligonucleotide
  Antisense strand to SEQ ID NO: 1509866
uugguagagaugguucucg

SEQ ID NO: 1509868 - RNA, 19 nt, Artificial Sequence
  Description of Artificial Sequence: Synthetic oligonucleotide
  Sense strand starting at position 3564 of SEQ ID NO: 1244720
acuacugucuacugaaguu

SEQ ID NO: 1509869 - RNA, 19 nt, Artificial Sequence
  Description of Artificial Sequence: Synthetic oligonucleotide
  Antisense strand to SEQ ID NO: 1509868
aacuucaguagacaguagu

SEQ ID NO: 1509870 - RNA, 19 nt, Artificial Sequence
  Description of Artificial Sequence: Synthetic oligonucleotide
  Sense strand starting at position 3942 of SEQ ID NO: 1244720
uuaggcagucgcugugauu

SEQ ID NO: 1509871 - RNA, 19 nt, Artificial Sequence
  Description of Artificial Sequence: Synthetic oligonucleotide
  Antisense strand to SEQ ID NO: 1509870
aaucacagcgacugccuaa

SEQ ID NO: 1509872 - RNA, 19 nt, Artificial Sequence
  Description of Artificial Sequence: Synthetic oligonucleotide
  Sense strand starting at position 14 of SEQ ID NO: 1244721
uagguccugugauucuuau

SEQ ID NO: 1509873 - RNA, 19 nt, Artificial Sequence
  Description of Artificial Sequence: Synthetic oligonucleotide
  Antisense strand to SEQ ID NO: 1509872
auaagaaucacaggaccua

SEQ ID NO: 1509874 - RNA, 19 nt, Artificial Sequence
  Description of Artificial Sequence: Synthetic oligonucleotide
  Sense strand starting at position 20 of SEQ ID NO: 1244721
cugugauucuuaucagaga

SEQ ID NO: 1509875 - RNA, 19 nt, Artificial Sequence
  Description of Artificial Sequence: Synthetic oligonucleotide
  Antisense strand to SEQ ID NO: 1509874
ucucugauaagaaucacag

SEQ ID NO: 1509876 - RNA, 19 nt, Artificial Sequence
  Description of Artificial Sequence: Synthetic oligonucleotide
  Sense strand starting at position 38 of SEQ ID NO: 1244721
aagugaguaccaggcauua

SEQ ID NO: 1509877 - RNA, 19 nt, Artificial Sequence
  Description of Artificial Sequence: Synthetic oligonucleotide
  Antisense strand to SEQ ID NO: 1509876
uaaugccugguacucacuu

SEQ ID NO: 1509878 - RNA, 19 nt, Artificial Sequence
  Description of Artificial Sequence: Synthetic oligonucleotide
  Sense strand starting at position 40 of SEQ ID NO: 1244721
gugaguaccaggcauuaau

SEQ ID NO: 1509879 - RNA, 19 nt, Artificial Sequence
  Description of Artificial Sequence: Synthetic oligonucleotide
  Antisense strand to SEQ ID NO: 1509878
auuaaugccugguacucac

SEQ ID NO: 1509880 - RNA, 19 nt, Artificial Sequence
  Description of Artificial Sequence: Synthetic oligonucleotide
  Sense strand starting at position 51 of SEQ ID NO: 1244721
gcauuaauggcauggacuu

SEQ ID NO: 1509881 - RNA, 19 nt, Artificial Sequence
  Description of Artificial Sequence: Synthetic oligonucleotide
  Antisense strand to SEQ ID NO: 1509880
aaguccaugccauuaaugc

SEQ ID NO: 1509882 - RNA, 19 nt, Artificial Sequence
  Description of Artificial Sequence: Synthetic oligonucleotide
  Sense strand starting at position 58 of SEQ ID NO: 1244721
uggcauggacuuuguuuaa

SEQ ID NO: 1509883 - RNA, 19 nt, Artificial Sequence
  Description of Artificial Sequence: Synthetic oligonucleotide
  Antisense strand to SEQ ID NO: 1509882
uuaaacaaaguccaugcca

SEQ ID NO: 1509884 - RNA, 19 nt, Artificial Sequence
  Description of Artificial Sequence: Synthetic oligonucleotide
  Sense strand starting at position 61 of SEQ ID NO: 1244721
cauggacuuuguuuaagaa

SEQ ID NO: 1509885 - RNA, 19 nt, Artificial Sequence
  Description of Artificial Sequence: Synthetic oligonucleotide
  Antisense strand to SEQ ID NO: 1509884
uucuuaaacaaaguccaug

SEQ ID NO: 1509886 - RNA, 19 nt, Artificial Sequence
  Description of Artificial Sequence: Synthetic oligonucleotide
  Sense strand starting at position 107 of SEQ ID NO: 1244721
ggguaaagcaauuagugua

SEQ ID NO: 1509887 - RNA, 19 nt, Artificial Sequence
  Description of Artificial Sequence: Synthetic oligonucleotide
  Antisense strand to SEQ ID NO: 1509886
uacacuaauugcuuuaccc

SEQ ID NO: 1509888 - RNA, 19 nt, Artificial Sequence
  Description of Artificial Sequence: Synthetic oligonucleotide
  Sense strand starting at position 114 of SEQ ID NO: 1244721
gcaauuaguguaugagcca

SEQ ID NO: 1509889 - RNA, 19 nt, Artificial Sequence
  Description of Artificial Sequence: Synthetic oligonucleotide
  Antisense strand to SEQ ID NO: 1509888
uggcucauacacuaauugc

SEQ ID NO: 1509890 - RNA, 19 nt, Artificial Sequence
  Description of Artificial Sequence: Synthetic oligonucleotide
  Sense strand starting at position 172 of SEQ ID NO: 1244721
gguugauaacaguggguua

SEQ ID NO: 1509891 - RNA, 19 nt, Artificial Sequence
  Description of Artificial Sequence: Synthetic oligonucleotide
  Antisense strand to SEQ ID NO: 1509890
uaacccacuguuaucaacc

SEQ ID NO: 1509892 - RNA, 19 nt, Artificial Sequence
  Description of Artificial Sequence: Synthetic oligonucleotide
  Sense strand starting at position 173 of SEQ ID NO: 1244721
guugauaacaguggguuaa

SEQ ID NO: 1509893 - RNA, 19 nt, Artificial Sequence
  Description of Artificial Sequence: Synthetic oligonucleotide
  Antisense strand to SEQ ID NO: 1509892
uuaacccacuguuaucaac

SEQ ID NO: 1509894 - RNA, 19 nt, Artificial Sequence
  Description of Artificial Sequence: Synthetic oligonucleotide
  Sense strand starting at position 174 of SEQ ID NO: 1244721
uugauaacaguggguuaau

SEQ ID NO: 1509895 - RNA, 19 nt, Artificial Sequence
  Description of Artificial Sequence: Synthetic oligonucleotide
  Antisense strand to SEQ ID NO: 1509894
auuaacccacuguuaucaa

SEQ ID NO: 1509896 - RNA, 19 nt, Artificial Sequence
  Description of Artificial Sequence: Synthetic oligonucleotide
  Sense strand starting at position 175 of SEQ ID NO: 1244721
ugauaacaguggguuaauu

SEQ ID NO: 1509897 - RNA, 19 nt, Artificial Sequence
  Description of Artificial Sequence: Synthetic oligonucleotide
  Antisense strand to SEQ ID NO: 1509896
aauuaacccacuguuauca

SEQ ID NO: 1509898 - RNA, 19 nt, Artificial Sequence
  Description of Artificial Sequence: Synthetic oligonucleotide
  Sense strand starting at position 186 of SEQ ID NO: 1244721
gguuaauuacuuuagcuac

SEQ ID NO: 1509899 - RNA, 19 nt, Artificial Sequence
  Description of Artificial Sequence: Synthetic oligonucleotide
  Antisense strand to SEQ ID NO: 1509898
guagcuaaaguaauuaacc

SEQ ID NO: 1509900 - RNA, 19 nt, Artificial Sequence
  Description of Artificial Sequence: Synthetic oligonucleotide
  Sense strand starting at position 248 of SEQ ID NO: 1244721
ggauuucuuaguugucugu

SEQ ID NO: 1509901 - RNA, 19 nt, Artificial Sequence
  Description of Artificial Sequence: Synthetic oligonucleotide
  Antisense strand to SEQ ID NO: 1509900
acagacaacuaagaaaucc

SEQ ID NO: 1509902 - RNA, 19 nt, Artificial Sequence
  Description of Artificial Sequence: Synthetic oligonucleotide
  Sense strand starting at position 284 of SEQ ID NO: 1244721
gggcauaacuauguuucca

SEQ ID NO: 1509903 - RNA, 19 nt, Artificial Sequence
  Description of Artificial Sequence: Synthetic oligonucleotide
  Antisense strand to SEQ ID NO: 1509902
uggaaacauaguuaugccc

SEQ ID NO: 1509904 - RNA, 19 nt, Artificial Sequence
  Description of Artificial Sequence: Synthetic oligonucleotide
  Sense strand starting at position 408 of SEQ ID NO: 1244721
gaacaugagaggcgugaua

SEQ ID NO: 1509905 - RNA, 19 nt, Artificial Sequence
  Description of Artificial Sequence: Synthetic oligonucleotide
  Antisense strand to SEQ ID NO: 1509904
uaucacgccucucauguuc

SEQ ID NO: 1509906 - RNA, 19 nt, Artificial Sequence
  Description of Artificial Sequence: Synthetic oligonucleotide
  Sense strand starting at position 410 of SEQ ID NO: 1244721
acaugagaggcgugauagu

SEQ ID NO: 1509907 - RNA, 19 nt, Artificial Sequence
  Description of Artificial Sequence: Synthetic oligonucleotide
  Antisense strand to SEQ ID NO: 1509906
acuaucacgccucucaugu

SEQ ID NO: 1509908 - RNA, 19 nt, Artificial Sequence
  Description of Artificial Sequence: Synthetic oligonucleotide
  Sense strand starting at position 647 of SEQ ID NO: 1244721
cagugaucaccacgaagau

SEQ ID NO: 1509909 - RNA, 19 nt, Artificial Sequence
  Description of Artificial Sequence: Synthetic oligonucleotide
  Antisense strand to SEQ ID NO: 1509908
aucuucguggugaucacug

SEQ ID NO: 1509910 - RNA, 19 nt, Artificial Sequence
  Description of Artificial Sequence: Synthetic oligonucleotide
  Sense strand starting at position 672 of SEQ ID NO: 1244721
ugaguagagggcuaaaugu

SEQ ID NO: 1509911 - RNA, 19 nt, Artificial Sequence
  Description of Artificial Sequence: Synthetic oligonucleotide
  Antisense strand to SEQ ID NO: 1509910
acauuuagcccucuacuca

SEQ ID NO: 1509912 - RNA, 19 nt, Artificial Sequence
  Description of Artificial Sequence: Synthetic oligonucleotide
  Sense strand starting at position 681 of SEQ ID NO: 1244721
ggcuaaauguuuccuggac

SEQ ID NO: 1509913 - RNA, 19 nt, Artificial Sequence
  Description of Artificial Sequence: Synthetic oligonucleotide
  Antisense strand to SEQ ID NO: 1509912
guccaggaaacauuuagcc

SEQ ID NO: 1509914 - RNA, 19 nt, Artificial Sequence
  Description of Artificial Sequence: Synthetic oligonucleotide
  Sense strand starting at position 682 of SEQ ID NO: 1244721
gcuaaauguuuccuggacu

SEQ ID NO: 1509915 - RNA, 19 nt, Artificial Sequence
  Description of Artificial Sequence: Synthetic oligonucleotide
  Antisense strand to SEQ ID NO: 1509914
aguccaggaaacauuuagc

SEQ ID NO: 1509916 - RNA, 19 nt, Artificial Sequence
  Description of Artificial Sequence: Synthetic oligonucleotide
  Sense strand starting at position 716 of SEQ ID NO: 1244721
ccacauagagcuggacaau

SEQ ID NO: 1509917 - RNA, 19 nt, Artificial Sequence
  Description of Artificial Sequence: Synthetic oligonucleotide
  Antisense strand to SEQ ID NO: 1509916
auuguccagcucuaugugg

SEQ ID NO: 1509918 - RNA, 19 nt, Artificial Sequence
  Description of Artificial Sequence: Synthetic oligonucleotide
  Sense strand starting at position 1760 of SEQ ID NO: 1244721
cacagauacugcgugguga

SEQ ID NO: 1509919 - RNA, 19 nt, Artificial Sequence
  Description of Artificial Sequence: Synthetic oligonucleotide
  Antisense strand to SEQ ID NO: 1509918
ucaccacgcaguaucugug

SEQ ID NO: 1509920 - RNA, 19 nt, Artificial Sequence
  Description of Artificial Sequence: Synthetic oligonucleotide
  Sense strand starting at position 2277 of SEQ ID NO: 1244721
ugcguuggucucccgauaa

SEQ ID NO: 1509921 - RNA, 19 nt, Artificial Sequence
  Description of Artificial Sequence: Synthetic oligonucleotide
  Antisense strand to SEQ ID NO: 1509920
uuaucgggagaccaacgca

SEQ ID NO: 1509922 - RNA, 19 nt, Artificial Sequence
  Description of Artificial Sequence: Synthetic oligonucleotide
  Sense strand starting at position 2281 of SEQ ID NO: 1244721
uuggucucccgauaacucu

SEQ ID NO: 1509923 - RNA, 19 nt, Artificial Sequence
  Description of Artificial Sequence: Synthetic oligonucleotide
  Antisense strand to SEQ ID NO: 1509922
agaguuaucgggagaccaa

SEQ ID NO: 1509924 - RNA, 19 nt, Artificial Sequence
  Description of Artificial Sequence: Synthetic oligonucleotide
  Sense strand starting at position 2289 of SEQ ID NO: 1244721
ccgauaacucuacaggcua

SEQ ID NO: 1509925 - RNA, 19 nt, Artificial Sequence
  Description of Artificial Sequence: Synthetic oligonucleotide
  Antisense strand to SEQ ID NO: 1509924
uagccuguagaguuaucgg

SEQ ID NO: 1509926 - RNA, 19 nt, Artificial Sequence
  Description of Artificial Sequence: Synthetic oligonucleotide
  Sense strand starting at position 2324 of SEQ ID NO: 1244721
gcuaucuaccgcugaggaa

SEQ ID NO: 1509927 - RNA, 19 nt, Artificial Sequence
  Description of Artificial Sequence: Synthetic oligonucleotide
  Antisense strand to SEQ ID NO: 1509926
uuccucagcgguagauagc

SEQ ID NO: 1509928 - RNA, 19 nt, Artificial Sequence
  Description of Artificial Sequence: Synthetic oligonucleotide
  Sense strand starting at position 2325 of SEQ ID NO: 1244721
cuaucuaccgcugaggaaa

SEQ ID NO: 1509929 - RNA, 19 nt, Artificial Sequence
  Description of Artificial Sequence: Synthetic oligonucleotide
  Antisense strand to SEQ ID NO: 1509928
uuuccucagcgguagauag

SEQ ID NO: 1509930 - RNA, 19 nt, Artificial Sequence
  Description of Artificial Sequence: Synthetic oligonucleotide
  Sense strand starting at position 2345 of SEQ ID NO: 1244721
gaggucaucggguacucaa

SEQ ID NO: 1509931 - RNA, 19 nt, Artificial Sequence
  Description of Artificial Sequence: Synthetic oligonucleotide
  Antisense strand to SEQ ID NO: 1509930
uugaguacccgaugaccuc

SEQ ID NO: 1509932 - RNA, 19 nt, Artificial Sequence
  Description of Artificial Sequence: Synthetic oligonucleotide
  Sense strand starting at position 2400 of SEQ ID NO: 1244721
ugauguucugcgcuguaac

SEQ ID NO: 1509933 - RNA, 19 nt, Artificial Sequence
  Description of Artificial Sequence: Synthetic oligonucleotide
  Antisense strand to SEQ ID NO: 1509932
guuacagcgcagaacauca

SEQ ID NO: 1509934 - RNA, 19 nt, Artificial Sequence
  Description of Artificial Sequence: Synthetic oligonucleotide
  Sense strand starting at position 2991 of SEQ ID NO: 1244721
cugggaaacuagucuuguu

SEQ ID NO: 1509935 - RNA, 19 nt, Artificial Sequence
  Description of Artificial Sequence: Synthetic oligonucleotide
  Antisense strand to SEQ ID NO: 1509934
aacaagacuaguuucccag

SEQ ID NO: 1509936 - RNA, 19 nt, Artificial Sequence
  Description of Artificial Sequence: Synthetic oligonucleotide
  Sense strand starting at position 3100 of SEQ ID NO: 1244721
gguggcucccauuauagga

SEQ ID NO: 1509937 - RNA, 19 nt, Artificial Sequence
  Description of Artificial Sequence: Synthetic oligonucleotide
  Antisense strand to SEQ ID NO: 1509936
uccuauaaugggagccacc

SEQ ID NO: 1509938 - RNA, 19 nt, Artificial Sequence
  Description of Artificial Sequence: Synthetic oligonucleotide
  Sense strand starting at position 3481 of SEQ ID NO: 1244721
gccaccuucccugagaaca

SEQ ID NO: 1509939 - RNA, 19 nt, Artificial Sequence
  Description of Artificial Sequence: Synthetic oligonucleotide
  Antisense strand to SEQ ID NO: 1509938
uguucucagggaagguggc

SEQ ID NO: 1509940 - RNA, 19 nt, Artificial Sequence
  Description of Artificial Sequence: Synthetic oligonucleotide
  Sense strand starting at position 3554 of SEQ ID NO: 1244721
gauggauggcuccaauucu

SEQ ID NO: 1509941 - RNA, 19 nt, Artificial Sequence
  Description of Artificial Sequence: Synthetic oligonucleotide
  Antisense strand to SEQ ID NO: 1509940
agaauuggagccauccauc

SEQ ID NO: 1509942 - RNA, 19 nt, Artificial Sequence
  Description of Artificial Sequence: Synthetic oligonucleotide
  Sense strand starting at position 3658 of SEQ ID NO: 1244721
aggugcuggcuagauacua

SEQ ID NO: 1509943 - RNA, 19 nt, Artificial Sequence
  Description of Artificial Sequence: Synthetic oligonucleotide
  Antisense strand to SEQ ID NO: 1509942
uaguaucuagccagcaccu

SEQ ID NO: 1509944 - RNA, 19 nt, Artificial Sequence
  Description of Artificial Sequence: Synthetic oligonucleotide
  Sense strand starting at position 3860 of SEQ ID NO: 1244721
uuggcuaaauccuuggaau

SEQ ID NO: 1509945 - RNA, 19 nt, Artificial Sequence
  Description of Artificial Sequence: Synthetic oligonucleotide
  Antisense strand to SEQ ID NO: 1509944
auuccaaggauuuagccaa

SEQ ID NO: 1509946 - RNA, 19 nt, Artificial Sequence
  Description of Artificial Sequence: Synthetic oligonucleotide
  Sense strand starting at position 3861 of SEQ ID NO: 1244721
uggcuaaauccuuggaauu

SEQ ID NO: 1509947 - RNA, 19 nt, Artificial Sequence
  Description of Artificial Sequence: Synthetic oligonucleotide
  Antisense strand to SEQ ID NO: 1509946
aauuccaaggauuuagcca

SEQ ID NO: 1509948 - RNA, 19 nt, Artificial Sequence
  Description of Artificial Sequence: Synthetic oligonucleotide
  Sense strand starting at position 3862 of SEQ ID NO: 1244721
ggcuaaauccuuggaauua

SEQ ID NO: 1509949 - RNA, 19 nt, Artificial Sequence
  Description of Artificial Sequence: Synthetic oligonucleotide
  Antisense strand to SEQ ID NO: 1509948
uaauuccaaggauuuagcc

SEQ ID NO: 1509950 - RNA, 19 nt, Artificial Sequence
  Description of Artificial Sequence: Synthetic oligonucleotide
  Sense strand starting at position 3940 of SEQ ID NO: 1244721
ggguguggcucaucccaga

SEQ ID NO: 1509951 - RNA, 19 nt, Artificial Sequence
  Description of Artificial Sequence: Synthetic oligonucleotide
  Antisense strand to SEQ ID NO: 1509950
ucugggaugagccacaccc

SEQ ID NO: 1509952 - RNA, 19 nt, Artificial Sequence
  Description of Artificial Sequence: Synthetic oligonucleotide
  Sense strand starting at position 30 of SEQ ID NO: 1244722
gcugcuuccugacuuacuu

SEQ ID NO: 1509953 - RNA, 19 nt, Artificial Sequence
  Description of Artificial Sequence: Synthetic oligonucleotide
  Antisense strand to SEQ ID NO: 1509952
aaguaagucaggaagcagc

SEQ ID NO: 1509954 - RNA, 19 nt, Artificial Sequence
  Description of Artificial Sequence: Synthetic oligonucleotide
  Sense strand starting at position 42 of SEQ ID NO: 1244722
cuuacuuucggaggucaaa

SEQ ID NO: 1509955 - RNA, 19 nt, Artificial Sequence
  Description of Artificial Sequence: Synthetic oligonucleotide
  Antisense strand to SEQ ID NO: 1509954
uuugaccuccgaaaguaag

SEQ ID NO: 1509956 - RNA, 19 nt, Artificial Sequence
  Description of Artificial Sequence: Synthetic oligonucleotide
  Sense strand starting at position 713 of SEQ ID NO: 1244722
aguucuuucuggucuguga

SEQ ID NO: 1509957 - RNA, 19 nt, Artificial Sequence
  Description of Artificial Sequence: Synthetic oligonucleotide
  Antisense strand to SEQ ID NO: 1509956
ucacagaccagaaagaacu

SEQ ID NO: 1509958 - RNA, 19 nt, Artificial Sequence
  Description of Artificial Sequence: Synthetic oligonucleotide
  Sense strand starting at position 715 of SEQ ID NO: 1244722
uucuuucuggucugugaga

SEQ ID NO: 1509959 - RNA, 19 nt, Artificial Sequence
  Description of Artificial Sequence: Synthetic oligonucleotide
  Antisense strand to SEQ ID NO: 1509958
ucucacagaccagaaagaa

SEQ ID NO: 1509960 - RNA, 19 nt, Artificial Sequence
  Description of Artificial Sequence: Synthetic oligonucleotide
  Sense strand starting at position 716 of SEQ ID NO: 1244722
ucuuucuggucugugagaa

SEQ ID NO: 1509961 - RNA, 19 nt, Artificial Sequence
  Description of Artificial Sequence: Synthetic oligonucleotide
  Antisense strand to SEQ ID NO: 1509960
uucucacagaccagaaaga

SEQ ID NO: 1509962 - RNA, 19 nt, Artificial Sequence
  Description of Artificial Sequence: Synthetic oligonucleotide
  Sense strand starting at position 717 of SEQ ID NO: 1244722
cuuucuggucugugagaaa

SEQ ID NO: 1509963 - RNA, 19 nt, Artificial Sequence
  Description of Artificial Sequence: Synthetic oligonucleotide
  Antisense strand to SEQ ID NO: 1509962
uuucucacagaccagaaag

SEQ ID NO: 1509964 - RNA, 19 nt, Artificial Sequence
  Description of Artificial Sequence: Synthetic oligonucleotide
  Sense strand starting at position 728 of SEQ ID NO: 1244722
gugagaaagcauggcugau

SEQ ID NO: 1509965 - RNA, 19 nt, Artificial Sequence
  Description of Artificial Sequence: Synthetic oligonucleotide
  Antisense strand to SEQ ID NO: 1509964
aucagccaugcuuucucac

SEQ ID NO: 1509966 - RNA, 19 nt, Artificial Sequence
  Description of Artificial Sequence: Synthetic oligonucleotide
  Sense strand starting at position 732 of SEQ ID NO: 1244722
gaaagcauggcugauggau

SEQ ID NO: 1509967 - RNA, 19 nt, Artificial Sequence
  Description of Artificial Sequence: Synthetic oligonucleotide
  Antisense strand to SEQ ID NO: 1509966
auccaucagccaugcuuuc

SEQ ID NO: 1509968 - RNA, 19 nt, Artificial Sequence
  Description of Artificial Sequence: Synthetic oligonucleotide
  Sense strand starting at position 761 of SEQ ID NO: 1244722
ggcuuugaccucggcauua

SEQ ID NO: 1509969 - RNA, 19 nt, Artificial Sequence
  Description of Artificial Sequence: Synthetic oligonucleotide
  Antisense strand to SEQ ID NO: 1509968
uaaugccgaggucaaagcc

SEQ ID NO: 1509970 - RNA, 19 nt, Artificial Sequence
  Description of Artificial Sequence: Synthetic oligonucleotide
  Sense strand starting at position 993 of SEQ ID NO: 1244722
cguggauaggauuguguuu

SEQ ID NO: 1509971 - RNA, 19 nt, Artificial Sequence
  Description of Artificial Sequence: Synthetic oligonucleotide
  Antisense strand to SEQ ID NO: 1509970
aaacacaauccuauccacg

SEQ ID NO: 1509972 - RNA, 19 nt, Artificial Sequence
  Description of Artificial Sequence: Synthetic oligonucleotide
  Sense strand starting at position 1192 of SEQ ID NO: 1244722
ucugguuuccucgguagag

SEQ ID NO: 1509973 - RNA, 19 nt, Artificial Sequence
  Description of Artificial Sequence: Synthetic oligonucleotide
  Antisense strand to SEQ ID NO: 1509972
cucuaccgaggaaaccaga

SEQ ID NO: 1509974 - RNA, 19 nt, Artificial Sequence
  Description of Artificial Sequence: Synthetic oligonucleotide
  Sense strand starting at position 1194 of SEQ ID NO: 1244722
ugguuuccucgguagaggu

SEQ ID NO: 1509975 - RNA, 19 nt, Artificial Sequence
  Description of Artificial Sequence: Synthetic oligonucleotide
  Antisense strand to SEQ ID NO: 1509974
accucuaccgaggaaacca

SEQ ID NO: 1509976 - RNA, 19 nt, Artificial Sequence
  Description of Artificial Sequence: Synthetic oligonucleotide
  Sense strand starting at position 1195 of SEQ ID NO: 1244722
gguuuccucgguagagguu

SEQ ID NO: 1509977 - RNA, 19 nt, Artificial Sequence
  Description of Artificial Sequence: Synthetic oligonucleotide
  Antisense strand to SEQ ID NO: 1509976
aaccucuaccgaggaaacc

SEQ ID NO: 1509978 - RNA, 19 nt, Artificial Sequence
  Description of Artificial Sequence: Synthetic oligonucleotide
  Sense strand starting at position 1204 of SEQ ID NO: 1244722
gguagagguugacugaauu

SEQ ID NO: 1509979 - RNA, 19 nt, Artificial Sequence
  Description of Artificial Sequence: Synthetic oligonucleotide
  Antisense strand to SEQ ID NO: 1509978
aauucagucaaccucuacc

SEQ ID NO: 1509980 - RNA, 19 nt, Artificial Sequence
  Description of Artificial Sequence: Synthetic oligonucleotide
  Sense strand starting at position 1212 of SEQ ID NO: 1244722
uugacugaauucugaagaa

SEQ ID NO: 1509981 - RNA, 19 nt, Artificial Sequence
  Description of Artificial Sequence: Synthetic oligonucleotide
  Antisense strand to SEQ ID NO: 1509980
uucuucagaauucagucaa

SEQ ID NO: 1509982 - RNA, 19 nt, Artificial Sequence
  Description of Artificial Sequence: Synthetic oligonucleotide
  Sense strand starting at position 1285 of SEQ ID NO: 1244722
cgggauuauuuagaucgca

SEQ ID NO: 1509983 - RNA, 19 nt, Artificial Sequence
  Description of Artificial Sequence: Synthetic oligonucleotide
  Antisense strand to SEQ ID NO: 1509982
ugcgaucuaaauaaucccg

SEQ ID NO: 1509984 - RNA, 19 nt, Artificial Sequence
  Description of Artificial Sequence: Synthetic oligonucleotide
  Sense strand starting at position 1300 of SEQ ID NO: 1244722
cgcagagcucccgaacuuu

SEQ ID NO: 1509985 - RNA, 19 nt, Artificial Sequence
  Description of Artificial Sequence: Synthetic oligonucleotide
  Antisense strand to SEQ ID NO: 1509984
aaaguucgggagcucugcg

SEQ ID NO: 1509986 - RNA, 19 nt, Artificial Sequence
  Description of Artificial Sequence: Synthetic oligonucleotide
  Sense strand starting at position 1337 of SEQ ID NO: 1244722
gaaacaaguucccuugugu

SEQ ID NO: 1509987 - RNA, 19 nt, Artificial Sequence
  Description of Artificial Sequence: Synthetic oligonucleotide
  Antisense strand to SEQ ID NO: 1509986
acacaagggaacuuguuuc

SEQ ID NO: 1509988 - RNA, 19 nt, Artificial Sequence
  Description of Artificial Sequence: Synthetic oligonucleotide
  Sense strand starting at position 1389 of SEQ ID NO: 1244722
ggaaucagcucccagagaa

SEQ ID NO: 1509989 - RNA, 19 nt, Artificial Sequence
  Description of Artificial Sequence: Synthetic oligonucleotide
  Antisense strand to SEQ ID NO: 1509988
uucucugggagcugauucc

SEQ ID NO: 1509990 - RNA, 19 nt, Artificial Sequence
  Description of Artificial Sequence: Synthetic oligonucleotide
  Sense strand starting at position 2396 of SEQ ID NO: 1244722
gcgcauuugcugugcagau

SEQ ID NO: 1509991 - RNA, 19 nt, Artificial Sequence
  Description of Artificial Sequence: Synthetic oligonucleotide
  Antisense strand to SEQ ID NO: 1509990
aucugcacagcaaaugcgc

SEQ ID NO: 1509992 - RNA, 19 nt, Artificial Sequence
  Description of Artificial Sequence: Synthetic oligonucleotide
  Sense strand starting at position 2397 of SEQ ID NO: 1244722
cgcauuugcugugcagauu

SEQ ID NO: 1509993 - RNA, 19 nt, Artificial Sequence
  Description of Artificial Sequence: Synthetic oligonucleotide
  Antisense strand to SEQ ID NO: 1509992
aaucugcacagcaaaugcg

SEQ ID NO: 1509994 - RNA, 19 nt, Artificial Sequence
  Description of Artificial Sequence: Synthetic oligonucleotide
  Sense strand starting at position 2409 of SEQ ID NO: 1244722
gcagauugaguuggguaca

SEQ ID NO: 1509995 - RNA, 19 nt, Artificial Sequence
  Description of Artificial Sequence: Synthetic oligonucleotide
  Antisense strand to SEQ ID NO: 1509994
uguacccaacucaaucugc

SEQ ID NO: 1509996 - RNA, 19 nt, Artificial Sequence
  Description of Artificial Sequence: Synthetic oligonucleotide
  Sense strand starting at position 2466 of SEQ ID NO: 1244722
ucucaucaguuguuccauu

SEQ ID NO: 1509997 - RNA, 19 nt, Artificial Sequence
  Description of Artificial Sequence: Synthetic oligonucleotide
  Antisense strand to SEQ ID NO: 1509996
aauggaacaacugaugaga

SEQ ID NO: 1509998 - RNA, 19 nt, Artificial Sequence
  Description of Artificial Sequence: Synthetic oligonucleotide
  Sense strand starting at position 2467 of SEQ ID NO: 1244722
cucaucaguuguuccauua

SEQ ID NO: 1509999 - RNA, 19 nt, Artificial Sequence
  Description of Artificial Sequence: Synthetic oligonucleotide
  Antisense strand to SEQ ID NO: 1509998
uaauggaacaacugaugag

SEQ ID NO: 1510000 - RNA, 19 nt, Artificial Sequence
  Description of Artificial Sequence: Synthetic oligonucleotide
  Sense strand starting at position 2555 of SEQ ID NO: 1244722
ggucguguuggaaguuuau

SEQ ID NO: 1510001 - RNA, 19 nt, Artificial Sequence
  Description of Artificial Sequence: Synthetic oligonucleotide
  Antisense strand to SEQ ID NO: 1510000
auaaacuuccaacacgacc

SEQ ID NO: 1510002 - RNA, 19 nt, Artificial Sequence
  Description of Artificial Sequence: Synthetic oligonucleotide
  Sense strand starting at position 2561 of SEQ ID NO: 1244722
guuggaaguuuauccauca

SEQ ID NO: 1510003 - RNA, 19 nt, Artificial Sequence
  Description of Artificial Sequence: Synthetic oligonucleotide
  Antisense strand to SEQ ID NO: 1510002
ugauggauaaacuuccaac

SEQ ID NO: 1510004 - RNA, 19 nt, Artificial Sequence
  Description of Artificial Sequence: Synthetic oligonucleotide
  Sense strand starting at position 2562 of SEQ ID NO: 1244722
uuggaaguuuauccaucaa

SEQ ID NO: 1510005 - RNA, 19 nt, Artificial Sequence
  Description of Artificial Sequence: Synthetic oligonucleotide
  Antisense strand to SEQ ID NO: 1510004
uugauggauaaacuuccaa

SEQ ID NO: 1510006 - RNA, 19 nt, Artificial Sequence
  Description of Artificial Sequence: Synthetic oligonucleotide
  Sense strand starting at position 2660 of SEQ ID NO: 1244722
aucugcaaacgugaaagaa

SEQ ID NO: 1510007 - RNA, 19 nt, Artificial Sequence
  Description of Artificial Sequence: Synthetic oligonucleotide
  Antisense strand to SEQ ID NO: 1510006
uucuuucacguuugcagau

SEQ ID NO: 1510008 - RNA, 19 nt, Artificial Sequence
  Description of Artificial Sequence: Synthetic oligonucleotide
  Sense strand starting at position 2815 of SEQ ID NO: 1244722
aauuccuuccguuguaaug

SEQ ID NO: 1510009 - RNA, 19 nt, Artificial Sequence
  Description of Artificial Sequence: Synthetic oligonucleotide
  Antisense strand to SEQ ID NO: 1510008
cauuacaacggaaggaauu

SEQ ID NO: 1510010 - RNA, 19 nt, Artificial Sequence
  Description of Artificial Sequence: Synthetic oligonucleotide
  Sense strand starting at position 2833 of SEQ ID NO: 1244722
gauccaauguaaguagaga

SEQ ID NO: 1510011 - RNA, 19 nt, Artificial Sequence
  Description of Artificial Sequence: Synthetic oligonucleotide
  Antisense strand to SEQ ID NO: 1510010
ucucuacuuacauuggauc

SEQ ID NO: 1510012 - RNA, 19 nt, Artificial Sequence
  Description of Artificial Sequence: Synthetic oligonucleotide
  Sense strand starting at position 3213 of SEQ ID NO: 1244722
accagaucauucuuguugu

SEQ ID NO: 1510013 - RNA, 19 nt, Artificial Sequence
  Description of Artificial Sequence: Synthetic oligonucleotide
  Antisense strand to SEQ ID NO: 1510012
acaacaagaaugaucuggu

SEQ ID NO: 1510014 - RNA, 19 nt, Artificial Sequence
  Description of Artificial Sequence: Synthetic oligonucleotide
  Sense strand starting at position 3275 of SEQ ID NO: 1244722
uugggauucuuuccguagu

SEQ ID NO: 1510015 - RNA, 19 nt, Artificial Sequence
  Description of Artificial Sequence: Synthetic oligonucleotide
  Antisense strand to SEQ ID NO: 1510014
acuacggaaagaaucccaa

SEQ ID NO: 1510016 - RNA, 19 nt, Artificial Sequence
  Description of Artificial Sequence: Synthetic oligonucleotide
  Sense strand starting at position 3277 of SEQ ID NO: 1244722
gggauucuuuccguaguuu

SEQ ID NO: 1510017 - RNA, 19 nt, Artificial Sequence
  Description of Artificial Sequence: Synthetic oligonucleotide
  Antisense strand to SEQ ID NO: 1510016
aaacuacggaaagaauccc

SEQ ID NO: 1510018 - RNA, 19 nt, Artificial Sequence
  Description of Artificial Sequence: Synthetic oligonucleotide
  Sense strand starting at position 3278 of SEQ ID NO: 1244722
ggauucuuuccguaguuuc

SEQ ID NO: 1510019 - RNA, 19 nt, Artificial Sequence
  Description of Artificial Sequence: Synthetic oligonucleotide
  Antisense strand to SEQ ID NO: 1510018
gaaacuacggaaagaaucc

SEQ ID NO: 1510020 - RNA, 19 nt, Artificial Sequence
  Description of Artificial Sequence: Synthetic oligonucleotide
  Sense strand starting at position 3352 of SEQ ID NO: 1244722
cugauacccucguuccuau

SEQ ID NO: 1510021 - RNA, 19 nt, Artificial Sequence
  Description of Artificial Sequence: Synthetic oligonucleotide
  Antisense strand to SEQ ID NO: 1510020
auaggaacgaggguaucag

SEQ ID NO: 1510022 - RNA, 19 nt, Artificial Sequence
  Description of Artificial Sequence: Synthetic oligonucleotide
  Sense strand starting at position 3369 of SEQ ID NO: 1244722
aucuuucccgucuguuaaa

SEQ ID NO: 1510023 - RNA, 19 nt, Artificial Sequence
  Description of Artificial Sequence: Synthetic oligonucleotide
  Antisense strand to SEQ ID NO: 1510022
uuuaacagacgggaaagau

SEQ ID NO: 1510024 - RNA, 19 nt, Artificial Sequence
  Description of Artificial Sequence: Synthetic oligonucleotide
  Sense strand starting at position 3646 of SEQ ID NO: 1244722
aacugagagugucaacaga

SEQ ID NO: 1510025 - RNA, 19 nt, Artificial Sequence
  Description of Artificial Sequence: Synthetic oligonucleotide
  Antisense strand to SEQ ID NO: 1510024
ucuguugacacucucaguu

SEQ ID NO: 1510026 - RNA, 19 nt, Artificial Sequence
  Description of Artificial Sequence: Synthetic oligonucleotide
  Sense strand starting at position 3723 of SEQ ID NO: 1244722
ggaaguccugacugaugua

SEQ ID NO: 1510027 - RNA, 19 nt, Artificial Sequence
  Description of Artificial Sequence: Synthetic oligonucleotide
  Antisense strand to SEQ ID NO: 1510026
uacaucagucaggacuucc

SEQ ID NO: 1510028 - RNA, 19 nt, Artificial Sequence
  Description of Artificial Sequence: Synthetic oligonucleotide
  Sense strand starting at position 3767 of SEQ ID NO: 1244722
guauaauguuaggaaagaa

SEQ ID NO: 1510029 - RNA, 19 nt, Artificial Sequence
  Description of Artificial Sequence: Synthetic oligonucleotide
  Antisense strand to SEQ ID NO: 1510028
uucuuuccuaacauuauac

SEQ ID NO: 1510030 - RNA, 19 nt, Artificial Sequence
  Description of Artificial Sequence: Synthetic oligonucleotide
  Sense strand starting at position 3793 of SEQ ID NO: 1244722
agggauuacucacaguaga

SEQ ID NO: 1510031 - RNA, 19 nt, Artificial Sequence
  Description of Artificial Sequence: Synthetic oligonucleotide
  Antisense strand to SEQ ID NO: 1510030
ucuacugugaguaaucccu

SEQ ID NO: 1510032 - RNA, 19 nt, Artificial Sequence
  Description of Artificial Sequence: Synthetic oligonucleotide
  Sense strand starting at position 34 of SEQ ID NO: 1244723
acagaaacuccgcagacau

SEQ ID NO: 1510033 - RNA, 19 nt, Artificial Sequence
  Description of Artificial Sequence: Synthetic oligonucleotide
  Antisense strand to SEQ ID NO: 1510032
augucugcggaguuucugu

SEQ ID NO: 1510034 - RNA, 19 nt, Artificial Sequence
  Description of Artificial Sequence: Synthetic oligonucleotide
  Sense strand starting at position 41 of SEQ ID NO: 1244723
cuccgcagacauugacaaa

SEQ ID NO: 1510035 - RNA, 19 nt, Artificial Sequence
  Description of Artificial Sequence: Synthetic oligonucleotide
  Antisense strand to SEQ ID NO: 1510034
uuugucaaugucugcggag

SEQ ID NO: 1510036 - RNA, 19 nt, Artificial Sequence
  Description of Artificial Sequence: Synthetic oligonucleotide
  Sense strand starting at position 82 of SEQ ID NO: 1244723
acaagagcuugucagguga

SEQ ID NO: 1510037 - RNA, 19 nt, Artificial Sequence
  Description of Artificial Sequence: Synthetic oligonucleotide
  Antisense strand to SEQ ID NO: 1510036
ucaccugacaagcucuugu

SEQ ID NO: 1510038 - RNA, 19 nt, Artificial Sequence
  Description of Artificial Sequence: Synthetic oligonucleotide
  Sense strand starting at position 238 of SEQ ID NO: 1244723
ucagguuccaccugugaag

SEQ ID NO: 1510039 - RNA, 19 nt, Artificial Sequence
  Description of Artificial Sequence: Synthetic oligonucleotide
  Antisense strand to SEQ ID NO: 1510038
cuucacagguggaaccuga

SEQ ID NO: 1510040 - RNA, 19 nt, Artificial Sequence
  Description of Artificial Sequence: Synthetic oligonucleotide
  Sense strand starting at position 442 of SEQ ID NO: 1244723
cagugcucacgauguagau

SEQ ID NO: 1510041 - RNA, 19 nt, Artificial Sequence
  Description of Artificial Sequence: Synthetic oligonucleotide
  Antisense strand to SEQ ID NO: 1510040
aucuacaucgugagcacug

SEQ ID NO: 1510042 - RNA, 19 nt, Artificial Sequence
  Description of Artificial Sequence: Synthetic oligonucleotide
  Sense strand starting at position 446 of SEQ ID NO: 1244723
gcucacgauguagaucaua

SEQ ID NO: 1510043 - RNA, 19 nt, Artificial Sequence
  Description of Artificial Sequence: Synthetic oligonucleotide
  Antisense strand to SEQ ID NO: 1510042
uaugaucuacaucgugagc

SEQ ID NO: 1510044 - RNA, 19 nt, Artificial Sequence
  Description of Artificial Sequence: Synthetic oligonucleotide
  Sense strand starting at position 748 of SEQ ID NO: 1244723
gacccaagugucugauacu

SEQ ID NO: 1510045 - RNA, 19 nt, Artificial Sequence
  Description of Artificial Sequence: Synthetic oligonucleotide
  Antisense strand to SEQ ID NO: 1510044
aguaucagacacuuggguc

SEQ ID NO: 1510046 - RNA, 19 nt, Artificial Sequence
  Description of Artificial Sequence: Synthetic oligonucleotide
  Sense strand starting at position 751 of SEQ ID NO: 1244723
ccaagugucugauacugcu

SEQ ID NO: 1510047 - RNA, 19 nt, Artificial Sequence
  Description of Artificial Sequence: Synthetic oligonucleotide
  Antisense strand to SEQ ID NO: 1510046
agcaguaucagacacuugg

SEQ ID NO: 1510048 - RNA, 19 nt, Artificial Sequence
  Description of Artificial Sequence: Synthetic oligonucleotide
  Sense strand starting at position 754 of SEQ ID NO: 1244723
agugucugauacugcuauu

SEQ ID NO: 1510049 - RNA, 19 nt, Artificial Sequence
  Description of Artificial Sequence: Synthetic oligonucleotide
  Antisense strand to SEQ ID NO: 1510048
aauagcaguaucagacacu

SEQ ID NO: 1510050 - RNA, 19 nt, Artificial Sequence
  Description of Artificial Sequence: Synthetic oligonucleotide
  Sense strand starting at position 757 of SEQ ID NO: 1244723
gucugauacugcuauugca

SEQ ID NO: 1510051 - RNA, 19 nt, Artificial Sequence
  Description of Artificial Sequence: Synthetic oligonucleotide
  Antisense strand to SEQ ID NO: 1510050
ugcaauagcaguaucagac

SEQ ID NO: 1510052 - RNA, 19 nt, Artificial Sequence
  Description of Artificial Sequence: Synthetic oligonucleotide
  Sense strand starting at position 869 of SEQ ID NO: 1244723
guacuaggauuugaguuaa

SEQ ID NO: 1510053 - RNA, 19 nt, Artificial Sequence
  Description of Artificial Sequence: Synthetic oligonucleotide
  Antisense strand to SEQ ID NO: 1510052
uuaacucaaauccuaguac

SEQ ID NO: 1510054 - RNA, 19 nt, Artificial Sequence
  Description of Artificial Sequence: Synthetic oligonucleotide
  Sense strand starting at position 1400 of SEQ ID NO: 1244723
cccauuuguccuggagcca

SEQ ID NO: 1510055 - RNA, 19 nt, Artificial Sequence
  Description of Artificial Sequence: Synthetic oligonucleotide
  Antisense strand to SEQ ID NO: 1510054
uggcuccaggacaaauggg

SEQ ID NO: 1510056 - RNA, 19 nt, Artificial Sequence
  Description of Artificial Sequence: Synthetic oligonucleotide
  Sense strand starting at position 1922 of SEQ ID NO: 1244723
cagccuggcugaugaguaa

SEQ ID NO: 1510057 - RNA, 19 nt, Artificial Sequence
  Description of Artificial Sequence: Synthetic oligonucleotide
  Antisense strand to SEQ ID NO: 1510056
uuacucaucagccaggcug

SEQ ID NO: 1510058 - RNA, 19 nt, Artificial Sequence
  Description of Artificial Sequence: Synthetic oligonucleotide
  Sense strand starting at position 2040 of SEQ ID NO: 1244723
aggacagguuccugggagu

SEQ ID NO: 1510059 - RNA, 19 nt, Artificial Sequence
  Description of Artificial Sequence: Synthetic oligonucleotide
  Antisense strand to SEQ ID NO: 1510058
acucccaggaaccuguccu

SEQ ID NO: 1510060 - RNA, 19 nt, Artificial Sequence
  Description of Artificial Sequence: Synthetic oligonucleotide
  Sense strand starting at position 2082 of SEQ ID NO: 1244723
ucuggucucccagagggau

SEQ ID NO: 1510061 - RNA, 19 nt, Artificial Sequence
  Description of Artificial Sequence: Synthetic oligonucleotide
  Antisense strand to SEQ ID NO: 1510060
aucccucugggagaccaga

SEQ ID NO: 1510062 - RNA, 19 nt, Artificial Sequence
  Description of Artificial Sequence: Synthetic oligonucleotide
  Sense strand starting at position 2223 of SEQ ID NO: 1244723
gcgugauggugcccacagu

SEQ ID NO: 1510063 - RNA, 19 nt, Artificial Sequence
  Description of Artificial Sequence: Synthetic oligonucleotide
  Antisense strand to SEQ ID NO: 1510062
acugugggcaccaucacgc

SEQ ID NO: 1510064 - RNA, 19 nt, Artificial Sequence
  Description of Artificial Sequence: Synthetic oligonucleotide
  Sense strand starting at position 2521 of SEQ ID NO: 1244723
ggcagugcuugggaaagca

SEQ ID NO: 1510065 - RNA, 19 nt, Artificial Sequence
  Description of Artificial Sequence: Synthetic oligonucleotide
  Antisense strand to SEQ ID NO: 1510064
ugcuuucccaagcacugcc

SEQ ID NO: 1510066 - RNA, 19 nt, Artificial Sequence
  Description of Artificial Sequence: Synthetic oligonucleotide
  Sense strand starting at position 2761 of SEQ ID NO: 1244723
ugugguucagcccaggaga

SEQ ID NO: 1510067 - RNA, 19 nt, Artificial Sequence
  Description of Artificial Sequence: Synthetic oligonucleotide
  Antisense strand to SEQ ID NO: 1510066
ucuccugggcugaaccaca

SEQ ID NO: 1510068 - RNA, 19 nt, Artificial Sequence
  Description of Artificial Sequence: Synthetic oligonucleotide
  Sense strand starting at position 2905 of SEQ ID NO: 1244723
gcaggauuccgagaugcag

SEQ ID NO: 1510069 - RNA, 19 nt, Artificial Sequence
  Description of Artificial Sequence: Synthetic oligonucleotide
  Antisense strand to SEQ ID NO: 1510068
cugcaucucggaauccugc

SEQ ID NO: 1510070 - RNA, 19 nt, Artificial Sequence
  Description of Artificial Sequence: Synthetic oligonucleotide
  Sense strand starting at position 3136 of SEQ ID NO: 1244723
uuguucugaugguucuuau

SEQ ID NO: 1510071 - RNA, 19 nt, Artificial Sequence
  Description of Artificial Sequence: Synthetic oligonucleotide
  Antisense strand to SEQ ID NO: 1510070
auaagaaccaucagaacaa

SEQ ID NO: 1510072 - RNA, 19 nt, Artificial Sequence
  Description of Artificial Sequence: Synthetic oligonucleotide
  Sense strand starting at position 3140 of SEQ ID NO: 1244723
ucugaugguucuuaucaca

SEQ ID NO: 1510073 - RNA, 19 nt, Artificial Sequence
  Description of Artificial Sequence: Synthetic oligonucleotide
  Antisense strand to SEQ ID NO: 1510072
ugugauaagaaccaucaga

SEQ ID NO: 1510074 - RNA, 19 nt, Artificial Sequence
  Description of Artificial Sequence: Synthetic oligonucleotide
  Sense strand starting at position 3143 of SEQ ID NO: 1244723
gaugguucuuaucacagca

SEQ ID NO: 1510075 - RNA, 19 nt, Artificial Sequence
  Description of Artificial Sequence: Synthetic oligonucleotide
  Antisense strand to SEQ ID NO: 1510074
ugcugugauaagaaccauc

SEQ ID NO: 1510076 - RNA, 19 nt, Artificial Sequence
  Description of Artificial Sequence: Synthetic oligonucleotide
  Sense strand starting at position 3221 of SEQ ID NO: 1244723
uuaucaccaucgugauugu

SEQ ID NO: 1510077 - RNA, 19 nt, Artificial Sequence
  Description of Artificial Sequence: Synthetic oligonucleotide
  Antisense strand to SEQ ID NO: 1510076
acaaucacgauggugauaa

SEQ ID NO: 1510078 - RNA, 19 nt, Artificial Sequence
  Description of Artificial Sequence: Synthetic oligonucleotide
  Sense strand starting at position 3224 of SEQ ID NO: 1244723
ucaccaucgugauugugau

SEQ ID NO: 1510079 - RNA, 19 nt, Artificial Sequence
  Description of Artificial Sequence: Synthetic oligonucleotide
  Antisense strand to SEQ ID NO: 1510078
aucacaaucacgaugguga

SEQ ID NO: 1510080 - RNA, 19 nt, Artificial Sequence
  Description of Artificial Sequence: Synthetic oligonucleotide
  Sense strand starting at position 3228 of SEQ ID NO: 1244723
caucgugauugugaugaug

SEQ ID NO: 1510081 - RNA, 19 nt, Artificial Sequence
  Description of Artificial Sequence: Synthetic oligonucleotide
  Antisense strand to SEQ ID NO: 1510080
caucaucacaaucacgaug

SEQ ID NO: 1510082 - RNA, 19 nt, Artificial Sequence
  Description of Artificial Sequence: Synthetic oligonucleotide
  Sense strand starting at position 3230 of SEQ ID NO: 1244723
ucgugauugugaugaugac

SEQ ID NO: 1510083 - RNA, 19 nt, Artificial Sequence
  Description of Artificial Sequence: Synthetic oligonucleotide
  Antisense strand to SEQ ID NO: 1510082
gucaucaucacaaucacga

SEQ ID NO: 1510084 - RNA, 19 nt, Artificial Sequence
  Description of Artificial Sequence: Synthetic oligonucleotide
  Sense strand starting at position 3231 of SEQ ID NO: 1244723
cgugauugugaugaugaca

SEQ ID NO: 1510085 - RNA, 19 nt, Artificial Sequence
  Description of Artificial Sequence: Synthetic oligonucleotide
  Antisense strand to SEQ ID NO: 1510084
ugucaucaucacaaucacg

SEQ ID NO: 1510086 - RNA, 19 nt, Artificial Sequence
  Description of Artificial Sequence: Synthetic oligonucleotide
  Sense strand starting at position 3236 of SEQ ID NO: 1244723
uugugaugaugacaccaaa

SEQ ID NO: 1510087 - RNA, 19 nt, Artificial Sequence
  Description of Artificial Sequence: Synthetic oligonucleotide
  Antisense strand to SEQ ID NO: 1510086
uuuggugucaucaucacaa

SEQ ID NO: 1510088 - RNA, 19 nt, Artificial Sequence
  Description of Artificial Sequence: Synthetic oligonucleotide
  Sense strand starting at position 3295 of SEQ ID NO: 1244723
ggcuauugcuaguaugucu

SEQ ID NO: 1510089 - RNA, 19 nt, Artificial Sequence
  Description of Artificial Sequence: Synthetic oligonucleotide
  Antisense strand to SEQ ID NO: 1510088
agacauacuagcaauagcc

SEQ ID NO: 1510090 - RNA, 19 nt, Artificial Sequence
  Description of Artificial Sequence: Synthetic oligonucleotide
  Sense strand starting at position 3300 of SEQ ID NO: 1244723
uugcuaguaugucugacuu

SEQ ID NO: 1510091 - RNA, 19 nt, Artificial Sequence
  Description of Artificial Sequence: Synthetic oligonucleotide
  Antisense strand to SEQ ID NO: 1510090
aagucagacauacuagcaa

SEQ ID NO: 1510092 - RNA, 19 nt, Artificial Sequence
  Description of Artificial Sequence: Synthetic oligonucleotide
  Sense strand starting at position 3397 of SEQ ID NO: 1244723
gccgcaaauccuccugcau

SEQ ID NO: 1510093 - RNA, 19 nt, Artificial Sequence
  Description of Artificial Sequence: Synthetic oligonucleotide
  Antisense strand to SEQ ID NO: 1510092
augcaggaggauuugcggc

SEQ ID NO: 1510094 - RNA, 19 nt, Artificial Sequence
  Description of Artificial Sequence: Synthetic oligonucleotide
  Sense strand starting at position 3434 of SEQ ID NO: 1244723
gggucucuguuaugugaaa

SEQ ID NO: 1510095 - RNA, 19 nt, Artificial Sequence
  Description of Artificial Sequence: Synthetic oligonucleotide
  Antisense strand to SEQ ID NO: 1510094
uuucacauaacagagaccc

SEQ ID NO: 1510096 - RNA, 19 nt, Artificial Sequence
  Description of Artificial Sequence: Synthetic oligonucleotide
  Sense strand starting at position 3435 of SEQ ID NO: 1244723
ggucucuguuaugugaaac

SEQ ID NO: 1510097 - RNA, 19 nt, Artificial Sequence
  Description of Artificial Sequence: Synthetic oligonucleotide
  Antisense strand to SEQ ID NO: 1510096
guuucacauaacagagacc

SEQ ID NO: 1510098 - RNA, 19 nt, Artificial Sequence
  Description of Artificial Sequence: Synthetic oligonucleotide
  Sense strand starting at position 3688 of SEQ ID NO: 1244723
gaagguguucagugcagac

SEQ ID NO: 1510099 - RNA, 19 nt, Artificial Sequence
  Description of Artificial Sequence: Synthetic oligonucleotide
  Antisense strand to SEQ ID NO: 1510098
gucugcacugaacaccuuc

SEQ ID NO: 1510100 - RNA, 19 nt, Artificial Sequence
  Description of Artificial Sequence: Synthetic oligonucleotide
  Sense strand starting at position 3712 of SEQ ID NO: 1244723
gccaucagcucggugacau

SEQ ID NO: 1510101 - RNA, 19 nt, Artificial Sequence
  Description of Artificial Sequence: Synthetic oligonucleotide
  Antisense strand to SEQ ID NO: 1510100
augucaccgagcugauggc

SEQ ID NO: 1510102 - RNA, 19 nt, Artificial Sequence
  Description of Artificial Sequence: Synthetic oligonucleotide
  Sense strand starting at position 3713 of SEQ ID NO: 1244723
ccaucagcucggugacauc

SEQ ID NO: 1510103 - RNA, 19 nt, Artificial Sequence
  Description of Artificial Sequence: Synthetic oligonucleotide
  Antisense strand to SEQ ID NO: 1510102
gaugucaccgagcugaugg

SEQ ID NO: 1510104 - RNA, 19 nt, Artificial Sequence
  Description of Artificial Sequence: Synthetic oligonucleotide
  Sense strand starting at position 3732 of SEQ ID NO: 1244723
aggcuuuauccagagcuga

SEQ ID NO: 1510105 - RNA, 19 nt, Artificial Sequence
  Description of Artificial Sequence: Synthetic oligonucleotide
  Antisense strand to SEQ ID NO: 1510104
ucagcucuggauaaagccu

SEQ ID NO: 1510106 - RNA, 19 nt, Artificial Sequence
  Description of Artificial Sequence: Synthetic oligonucleotide
  Sense strand starting at position 3776 of SEQ ID NO: 1244723
ggacaaaggucgggucauc

SEQ ID NO: 1510107 - RNA, 19 nt, Artificial Sequence
  Description of Artificial Sequence: Synthetic oligonucleotide
  Antisense strand to SEQ ID NO: 1510106
gaugacccgaccuuugucc

SEQ ID NO: 1510108 - RNA, 19 nt, Artificial Sequence
  Description of Artificial Sequence: Synthetic oligonucleotide
  Sense strand starting at position 3897 of SEQ ID NO: 1244723
ggaagacacucuccuccua

SEQ ID NO: 1510109 - RNA, 19 nt, Artificial Sequence
  Description of Artificial Sequence: Synthetic oligonucleotide
  Antisense strand to SEQ ID NO: 1510108
uaggaggagagugucuucc

SEQ ID NO: 1510110 - RNA, 19 nt, Artificial Sequence
  Description of Artificial Sequence: Synthetic oligonucleotide
  Sense strand starting at position 3976 of SEQ ID NO: 1244723
ggcgauuacugacuccacu

SEQ ID NO: 1510111 - RNA, 19 nt, Artificial Sequence
  Description of Artificial Sequence: Synthetic oligonucleotide
  Antisense strand to SEQ ID NO: 1510110
aguggagucaguaaucgcc

SEQ ID NO: 1510112 - RNA, 19 nt, Artificial Sequence
  Description of Artificial Sequence: Synthetic oligonucleotide
  Sense strand starting at position 32 of SEQ ID NO: 1244724
cgagguagucccuacugca

SEQ ID NO: 1510113 - RNA, 19 nt, Artificial Sequence
  Description of Artificial Sequence: Synthetic oligonucleotide
  Antisense strand to SEQ ID NO: 1510112
ugcaguagggacuaccucg

SEQ ID NO: 1510114 - RNA, 19 nt, Artificial Sequence
  Description of Artificial Sequence: Synthetic oligonucleotide
  Sense strand starting at position 280 of SEQ ID NO: 1244724
ugccuaucugaggagugga

SEQ ID NO: 1510115 - RNA, 19 nt, Artificial Sequence
  Description of Artificial Sequence: Synthetic oligonucleotide
  Antisense strand to SEQ ID NO: 1510114
uccacuccucagauaggca

SEQ ID NO: 1510116 - RNA, 19 nt, Artificial Sequence
  Description of Artificial Sequence: Synthetic oligonucleotide
  Sense strand starting at position 439 of SEQ ID NO: 1244724
aggguucugagacaucagu

SEQ ID NO: 1510117 - RNA, 19 nt, Artificial Sequence
  Description of Artificial Sequence: Synthetic oligonucleotide
  Antisense strand to SEQ ID NO: 1510116
acugaugucucagaacccu

SEQ ID NO: 1510118 - RNA, 19 nt, Artificial Sequence
  Description of Artificial Sequence: Synthetic oligonucleotide
  Sense strand starting at position 758 of SEQ ID NO: 1244724
gggacaacuuccuaguggu

SEQ ID NO: 1510119 - RNA, 19 nt, Artificial Sequence
  Description of Artificial Sequence: Synthetic oligonucleotide
  Antisense strand to SEQ ID NO: 1510118
accacuaggaaguuguccc

SEQ ID NO: 1510120 - RNA, 19 nt, Artificial Sequence
  Description of Artificial Sequence: Synthetic oligonucleotide
  Sense strand starting at position 779 of SEQ ID NO: 1244724
ggcaccaccuuuguguaau

SEQ ID NO: 1510121 - RNA, 19 nt, Artificial Sequence
  Description of Artificial Sequence: Synthetic oligonucleotide
  Antisense strand to SEQ ID NO: 1510120
auuacacaaagguggugcc

SEQ ID NO: 1510122 - RNA, 19 nt, Artificial Sequence
  Description of Artificial Sequence: Synthetic oligonucleotide
  Sense strand starting at position 791 of SEQ ID NO: 1244724
guguaaucagcccgaacug

SEQ ID NO: 1510123 - RNA, 19 nt, Artificial Sequence
  Description of Artificial Sequence: Synthetic oligonucleotide
  Antisense strand to SEQ ID NO: 1510122
caguucgggcugauuacac

SEQ ID NO: 1510124 - RNA, 19 nt, Artificial Sequence
  Description of Artificial Sequence: Synthetic oligonucleotide
  Sense strand starting at position 883 of SEQ ID NO: 1244724
gaagaagaguaaugucauu

SEQ ID NO: 1510125 - RNA, 19 nt, Artificial Sequence
  Description of Artificial Sequence: Synthetic oligonucleotide
  Antisense strand to SEQ ID NO: 1510124
aaugacauuacucuucuuc

SEQ ID NO: 1510126 - RNA, 19 nt, Artificial Sequence
  Description of Artificial Sequence: Synthetic oligonucleotide
  Sense strand starting at position 968 of SEQ ID NO: 1244724
agguaucagagccagguua

SEQ ID NO: 1510127 - RNA, 19 nt, Artificial Sequence
  Description of Artificial Sequence: Synthetic oligonucleotide
  Antisense strand to SEQ ID NO: 1510126
uaaccuggcucugauaccu

SEQ ID NO: 1510128 - RNA, 19 nt, Artificial Sequence
  Description of Artificial Sequence: Synthetic oligonucleotide
  Sense strand starting at position 970 of SEQ ID NO: 1244724
guaucagagccagguuaca

SEQ ID NO: 1510129 - RNA, 19 nt, Artificial Sequence
  Description of Artificial Sequence: Synthetic oligonucleotide
  Antisense strand to SEQ ID NO: 1510128
uguaaccuggcucugauac

SEQ ID NO: 1510130 - RNA, 19 nt, Artificial Sequence
  Description of Artificial Sequence: Synthetic oligonucleotide
  Sense strand starting at position 1052 of SEQ ID NO: 1244724
acuguuagcugguuuagag

SEQ ID NO: 1510131 - RNA, 19 nt, Artificial Sequence
  Description of Artificial Sequence: Synthetic oligonucleotide
  Antisense strand to SEQ ID NO: 1510130
cucuaaaccagcuaacagu

SEQ ID NO: 1510132 - RNA, 19 nt, Artificial Sequence
  Description of Artificial Sequence: Synthetic oligonucleotide
  Sense strand starting at position 1060 of SEQ ID NO: 1244724
cugguuuagaguuaguugu

SEQ ID NO: 1510133 - RNA, 19 nt, Artificial Sequence
  Description of Artificial Sequence: Synthetic oligonucleotide
  Antisense strand to SEQ ID NO: 1510132
acaacuaacucuaaaccag

SEQ ID NO: 1510134 - RNA, 19 nt, Artificial Sequence
  Description of Artificial Sequence: Synthetic oligonucleotide
  Sense strand starting at position 1062 of SEQ ID NO: 1244724
gguuuagaguuaguuguua

SEQ ID NO: 1510135 - RNA, 19 nt, Artificial Sequence
  Description of Artificial Sequence: Synthetic oligonucleotide
  Antisense strand to SEQ ID NO: 1510134
uaacaacuaacucuaaacc

SEQ ID NO: 1510136 - RNA, 19 nt, Artificial Sequence
  Description of Artificial Sequence: Synthetic oligonucleotide
  Sense strand starting at position 1064 of SEQ ID NO: 1244724
uuuagaguuaguuguuaag

SEQ ID NO: 1510137 - RNA, 19 nt, Artificial Sequence
  Description of Artificial Sequence: Synthetic oligonucleotide
  Antisense strand to SEQ ID NO: 1510136
cuuaacaacuaacucuaaa

SEQ ID NO: 1510138 - RNA, 19 nt, Artificial Sequence
  Description of Artificial Sequence: Synthetic oligonucleotide
  Sense strand starting at position 1066 of SEQ ID NO: 1244724
uagaguuaguuguuaagau

SEQ ID NO: 1510139 - RNA, 19 nt, Artificial Sequence
  Description of Artificial Sequence: Synthetic oligonucleotide
  Antisense strand to SEQ ID NO: 1510138
aucuuaacaacuaacucua

SEQ ID NO: 1510140 - RNA, 19 nt, Artificial Sequence
  Description of Artificial Sequence: Synthetic oligonucleotide
  Sense strand starting at position 1067 of SEQ ID NO: 1244724
agaguuaguuguuaagauc

SEQ ID NO: 1510141 - RNA, 19 nt, Artificial Sequence
  Description of Artificial Sequence: Synthetic oligonucleotide
  Antisense strand to SEQ ID NO: 1510140
gaucuuaacaacuaacucu

SEQ ID NO: 1510142 - RNA, 19 nt, Artificial Sequence
  Description of Artificial Sequence: Synthetic oligonucleotide
  Sense strand starting at position 1224 of SEQ ID NO: 1244724
uguuguaagcauuaaggaa

SEQ ID NO: 1510143 - RNA, 19 nt, Artificial Sequence
  Description of Artificial Sequence: Synthetic oligonucleotide
  Antisense strand to SEQ ID NO: 1510142
uuccuuaaugcuuacaaca

SEQ ID NO: 1510144 - RNA, 19 nt, Artificial Sequence
  Description of Artificial Sequence: Synthetic oligonucleotide
  Sense strand starting at position 1373 of SEQ ID NO: 1244724
cucaguucccauggaauua

SEQ ID NO: 1510145 - RNA, 19 nt, Artificial Sequence
  Description of Artificial Sequence: Synthetic oligonucleotide
  Antisense strand to SEQ ID NO: 1510144
uaauuccaugggaacugag

SEQ ID NO: 1510146 - RNA, 19 nt, Artificial Sequence
  Description of Artificial Sequence: Synthetic oligonucleotide
  Sense strand starting at position 1383 of SEQ ID NO: 1244724
auggaauuagccugagcua

SEQ ID NO: 1510147 - RNA, 19 nt, Artificial Sequence
  Description of Artificial Sequence: Synthetic oligonucleotide
  Antisense strand to SEQ ID NO: 1510146
uagcucaggcuaauuccau

SEQ ID NO: 1510148 - RNA, 19 nt, Artificial Sequence
  Description of Artificial Sequence: Synthetic oligonucleotide
  Sense strand starting at position 1384 of SEQ ID NO: 1244724
uggaauuagccugagcuaa

SEQ ID NO: 1510149 - RNA, 19 nt, Artificial Sequence
  Description of Artificial Sequence: Synthetic oligonucleotide
  Antisense strand to SEQ ID NO: 1510148
uuagcucaggcuaauucca

SEQ ID NO: 1510150 - RNA, 19 nt, Artificial Sequence
  Description of Artificial Sequence: Synthetic oligonucleotide
  Sense strand starting at position 1386 of SEQ ID NO: 1244724
gaauuagccugagcuaagu

SEQ ID NO: 1510151 - RNA, 19 nt, Artificial Sequence
  Description of Artificial Sequence: Synthetic oligonucleotide
  Antisense strand to SEQ ID NO: 1510150
acuuagcucaggcuaauuc

SEQ ID NO: 1510152 - RNA, 19 nt, Artificial Sequence
  Description of Artificial Sequence: Synthetic oligonucleotide
  Sense strand starting at position 1411 of SEQ ID NO: 1244724
agauucucaugugguagga

SEQ ID NO: 1510153 - RNA, 19 nt, Artificial Sequence
  Description of Artificial Sequence: Synthetic oligonucleotide
  Antisense strand to SEQ ID NO: 1510152
uccuaccacaugagaaucu

SEQ ID NO: 1510154 - RNA, 19 nt, Artificial Sequence
  Description of Artificial Sequence: Synthetic oligonucleotide
  Sense strand starting at position 1513 of SEQ ID NO: 1244724
gauacugugucagcugaca

SEQ ID NO: 1510155 - RNA, 19 nt, Artificial Sequence
  Description of Artificial Sequence: Synthetic oligonucleotide
  Antisense strand to SEQ ID NO: 1510154
ugucagcugacacaguauc

SEQ ID NO: 1510156 - RNA, 19 nt, Artificial Sequence
  Description of Artificial Sequence: Synthetic oligonucleotide
  Sense strand starting at position 1763 of SEQ ID NO: 1244724
gcaacauaugcaugguaac

SEQ ID NO: 1510157 - RNA, 19 nt, Artificial Sequence
  Description of Artificial Sequence: Synthetic oligonucleotide
  Antisense strand to SEQ ID NO: 1510156
guuaccaugcauauguugc

SEQ ID NO: 1510158 - RNA, 19 nt, Artificial Sequence
  Description of Artificial Sequence: Synthetic oligonucleotide
  Sense strand starting at position 1766 of SEQ ID NO: 1244724
acauaugcaugguaacauu

SEQ ID NO: 1510159 - RNA, 19 nt, Artificial Sequence
  Description of Artificial Sequence: Synthetic oligonucleotide
  Antisense strand to SEQ ID NO: 1510158
aauguuaccaugcauaugu

SEQ ID NO: 1510160 - RNA, 19 nt, Artificial Sequence
  Description of Artificial Sequence: Synthetic oligonucleotide
  Sense strand starting at position 2135 of SEQ ID NO: 1244724
agaguuaucucuuacccac

SEQ ID NO: 1510161 - RNA, 19 nt, Artificial Sequence
  Description of Artificial Sequence: Synthetic oligonucleotide
  Antisense strand to SEQ ID NO: 1510160
guggguaagagauaacucu

SEQ ID NO: 1510162 - RNA, 19 nt, Artificial Sequence
  Description of Artificial Sequence: Synthetic oligonucleotide
  Sense strand starting at position 2241 of SEQ ID NO: 1244724
ugacucuuccuuuguggau

SEQ ID NO: 1510163 - RNA, 19 nt, Artificial Sequence
  Description of Artificial Sequence: Synthetic oligonucleotide
  Antisense strand to SEQ ID NO: 1510162
auccacaaaggaagaguca

SEQ ID NO: 1510164 - RNA, 19 nt, Artificial Sequence
  Description of Artificial Sequence: Synthetic oligonucleotide
  Sense strand starting at position 2667 of SEQ ID NO: 1244724
agcucuaaugucugggcau

SEQ ID NO: 1510165 - RNA, 19 nt, Artificial Sequence
  Description of Artificial Sequence: Synthetic oligonucleotide
  Antisense strand to SEQ ID NO: 1510164
augcccagacauuagagcu

SEQ ID NO: 1510166 - RNA, 19 nt, Artificial Sequence
  Description of Artificial Sequence: Synthetic oligonucleotide
  Sense strand starting at position 2834 of SEQ ID NO: 1244724
guaggcucugguugcuaaa

SEQ ID NO: 1510167 - RNA, 19 nt, Artificial Sequence
  Description of Artificial Sequence: Synthetic oligonucleotide
  Antisense strand to SEQ ID NO: 1510166
uuuagcaaccagagccuac

SEQ ID NO: 1510168 - RNA, 19 nt, Artificial Sequence
  Description of Artificial Sequence: Synthetic oligonucleotide
  Sense strand starting at position 2872 of SEQ ID NO: 1244724
gaguacagaucagcaagaa

SEQ ID NO: 1510169 - RNA, 19 nt, Artificial Sequence
  Description of Artificial Sequence: Synthetic oligonucleotide
  Antisense strand to SEQ ID NO: 1510168
uucuugcugaucuguacuc

SEQ ID NO: 1510170 - RNA, 19 nt, Artificial Sequence
  Description of Artificial Sequence: Synthetic oligonucleotide
  Sense strand starting at position 2949 of SEQ ID NO: 1244724
agaggaggguguccuagua

SEQ ID NO: 1510171 - RNA, 19 nt, Artificial Sequence
  Description of Artificial Sequence: Synthetic oligonucleotide
  Antisense strand to SEQ ID NO: 1510170
uacuaggacacccuccucu

SEQ ID NO: 1510172 - RNA, 19 nt, Artificial Sequence
  Description of Artificial Sequence: Synthetic oligonucleotide
  Sense strand starting at position 3181 of SEQ ID NO: 1244724
ggcugaguccuguggagag

SEQ ID NO: 1510173 - RNA, 19 nt, Artificial Sequence
  Description of Artificial Sequence: Synthetic oligonucleotide
  Antisense strand to SEQ ID NO: 1510172
cucuccacaggacucagcc

SEQ ID NO: 1510174 - RNA, 19 nt, Artificial Sequence
  Description of Artificial Sequence: Synthetic oligonucleotide
  Sense strand starting at position 3228 of SEQ ID NO: 1244724
gcagaauccuguuuaugga

SEQ ID NO: 1510175 - RNA, 19 nt, Artificial Sequence
  Description of Artificial Sequence: Synthetic oligonucleotide
  Antisense strand to SEQ ID NO: 1510174
uccauaaacaggauucugc

SEQ ID NO: 1510176 - RNA, 19 nt, Artificial Sequence
  Description of Artificial Sequence: Synthetic oligonucleotide
  Sense strand starting at position 3231 of SEQ ID NO: 1244724
gaauccuguuuauggagga

SEQ ID NO: 1510177 - RNA, 19 nt, Artificial Sequence
  Description of Artificial Sequence: Synthetic oligonucleotide
  Antisense strand to SEQ ID NO: 1510176
uccuccauaaacaggauuc

SEQ ID NO: 1510178 - RNA, 19 nt, Artificial Sequence
  Description of Artificial Sequence: Synthetic oligonucleotide
  Sense strand starting at position 3247 of SEQ ID NO: 1244724
ggaccucgguuccaggaau

SEQ ID NO: 1510179 - RNA, 19 nt, Artificial Sequence
  Description of Artificial Sequence: Synthetic oligonucleotide
  Antisense strand to SEQ ID NO: 1510178
auuccuggaaccgaggucc

SEQ ID NO: 1510180 - RNA, 19 nt, Artificial Sequence
  Description of Artificial Sequence: Synthetic oligonucleotide
  Sense strand starting at position 3456 of SEQ ID NO: 1244724
ggacaacacuguuuacgau

SEQ ID NO: 1510181 - RNA, 19 nt, Artificial Sequence
  Description of Artificial Sequence: Synthetic oligonucleotide
  Antisense strand to SEQ ID NO: 1510180
aucguaaacaguguugucc

SEQ ID NO: 1510182 - RNA, 19 nt, Artificial Sequence
  Description of Artificial Sequence: Synthetic oligonucleotide
  Sense strand starting at position 3462 of SEQ ID NO: 1244724
cacuguuuacgauguuuau

SEQ ID NO: 1510183 - RNA, 19 nt, Artificial Sequence
  Description of Artificial Sequence: Synthetic oligonucleotide
  Antisense strand to SEQ ID NO: 1510182
auaaacaucguaaacagug

SEQ ID NO: 1510184 - RNA, 19 nt, Artificial Sequence
  Description of Artificial Sequence: Synthetic oligonucleotide
  Sense strand starting at position 3512 of SEQ ID NO: 1244724
agagcagugacuugcccaa

SEQ ID NO: 1510185 - RNA, 19 nt, Artificial Sequence
  Description of Artificial Sequence: Synthetic oligonucleotide
  Antisense strand to SEQ ID NO: 1510184
uugggcaagucacugcucu

SEQ ID NO: 1510186 - RNA, 19 nt, Artificial Sequence
  Description of Artificial Sequence: Synthetic oligonucleotide
  Sense strand starting at position 3569 of SEQ ID NO: 1244724
cugcuaaucugccuggaca

SEQ ID NO: 1510187 - RNA, 19 nt, Artificial Sequence
  Description of Artificial Sequence: Synthetic oligonucleotide
  Antisense strand to SEQ ID NO: 1510186
uguccaggcagauuagcag

SEQ ID NO: 1510188 - RNA, 19 nt, Artificial Sequence
  Description of Artificial Sequence: Synthetic oligonucleotide
  Sense strand starting at position 3591 of SEQ ID NO: 1244724
gguguucugccagaucuga

SEQ ID NO: 1510189 - RNA, 19 nt, Artificial Sequence
  Description of Artificial Sequence: Synthetic oligonucleotide
  Antisense strand to SEQ ID NO: 1510188
ucagaucuggcagaacacc

SEQ ID NO: 1510190 - RNA, 19 nt, Artificial Sequence
  Description of Artificial Sequence: Synthetic oligonucleotide
  Sense strand starting at position 3650 of SEQ ID NO: 1244724
gagagaggcccuggcuaaa

SEQ ID NO: 1510191 - RNA, 19 nt, Artificial Sequence
  Description of Artificial Sequence: Synthetic oligonucleotide
  Antisense strand to SEQ ID NO: 1510190
uuuagccagggccucucuc

SEQ ID NO: 1510192 - RNA, 19 nt, Artificial Sequence
  Description of Artificial Sequence: Synthetic oligonucleotide
  Sense strand starting at position 389 of SEQ ID NO: 1244725
gaggguagugauggcaaca

SEQ ID NO: 1510193 - RNA, 19 nt, Artificial Sequence
  Description of Artificial Sequence: Synthetic oligonucleotide
  Antisense strand to SEQ ID NO: 1510192
uguugccaucacuacccuc

SEQ ID NO: 1510194 - RNA, 19 nt, Artificial Sequence
  Description of Artificial Sequence: Synthetic oligonucleotide
  Sense strand starting at position 452 of SEQ ID NO: 1244725
gcagucagugcccagaaga

SEQ ID NO: 1510195 - RNA, 19 nt, Artificial Sequence
  Description of Artificial Sequence: Synthetic oligonucleotide
  Antisense strand to SEQ ID NO: 1510194
ucuucugggcacugacugc

SEQ ID NO: 1510196 - RNA, 19 nt, Artificial Sequence
  Description of Artificial Sequence: Synthetic oligonucleotide
  Sense strand starting at position 657 of SEQ ID NO: 1244725
gcaggaaagugacauuaga

SEQ ID NO: 1510197 - RNA, 19 nt, Artificial Sequence
  Description of Artificial Sequence: Synthetic oligonucleotide
  Antisense strand to SEQ ID NO: 1510196
ucuaaugucacuuuccugc

SEQ ID NO: 1510198 - RNA, 19 nt, Artificial Sequence
  Description of Artificial Sequence: Synthetic oligonucleotide
  Sense strand starting at position 664 of SEQ ID NO: 1244725
agugacauuagagguacaa

SEQ ID NO: 1510199 - RNA, 19 nt, Artificial Sequence
  Description of Artificial Sequence: Synthetic oligonucleotide
  Antisense strand to SEQ ID NO: 1510198
uuguaccucuaaugucacu

SEQ ID NO: 1510200 - RNA, 19 nt, Artificial Sequence
  Description of Artificial Sequence: Synthetic oligonucleotide
  Sense strand starting at position 935 of SEQ ID NO: 1244725
aaggaaugaugccauguca

SEQ ID NO: 1510201 - RNA, 19 nt, Artificial Sequence
  Description of Artificial Sequence: Synthetic oligonucleotide
  Antisense strand to SEQ ID NO: 1510200
ugacauggcaucauuccuu

SEQ ID NO: 1510202 - RNA, 19 nt, Artificial Sequence
  Description of Artificial Sequence: Synthetic oligonucleotide
  Sense strand starting at position 1238 of SEQ ID NO: 1244725
guccaaagaugcuuugguu

SEQ ID NO: 1510203 - RNA, 19 nt, Artificial Sequence
  Description of Artificial Sequence: Synthetic oligonucleotide
  Antisense strand to SEQ ID NO: 1510202
aaccaaagcaucuuuggac

SEQ ID NO: 1510204 - RNA, 19 nt, Artificial Sequence
  Description of Artificial Sequence: Synthetic oligonucleotide
  Sense strand starting at position 1241 of SEQ ID NO: 1244725
caaagaugcuuugguucuu

SEQ ID NO: 1510205 - RNA, 19 nt, Artificial Sequence
  Description of Artificial Sequence: Synthetic oligonucleotide
  Antisense strand to SEQ ID NO: 1510204
aagaaccaaagcaucuuug

SEQ ID NO: 1510206 - RNA, 19 nt, Artificial Sequence
  Description of Artificial Sequence: Synthetic oligonucleotide
  Sense strand starting at position 1247 of SEQ ID NO: 1244725
ugcuuugguucuucuggaa

SEQ ID NO: 1510207 - RNA, 19 nt, Artificial Sequence
  Description of Artificial Sequence: Synthetic oligonucleotide
  Antisense strand to SEQ ID NO: 1510206
uuccagaagaaccaaagca

SEQ ID NO: 1510208 - RNA, 19 nt, Artificial Sequence
  Description of Artificial Sequence: Synthetic oligonucleotide
  Sense strand starting at position 1250 of SEQ ID NO: 1244725
uuugguucuucuggaaacu

SEQ ID NO: 1510209 - RNA, 19 nt, Artificial Sequence
  Description of Artificial Sequence: Synthetic oligonucleotide
  Antisense strand to SEQ ID NO: 1510208
aguuuccagaagaaccaaa

SEQ ID NO: 1510210 - RNA, 19 nt, Artificial Sequence
  Description of Artificial Sequence: Synthetic oligonucleotide
  Sense strand starting at position 1859 of SEQ ID NO: 1244725
gaacgagauucggucucaa

SEQ ID NO: 1510211 - RNA, 19 nt, Artificial Sequence
  Description of Artificial Sequence: Synthetic oligonucleotide
  Antisense strand to SEQ ID NO: 1510210
uugagaccgaaucucguuc

SEQ ID NO: 1510212 - RNA, 19 nt, Artificial Sequence
  Description of Artificial Sequence: Synthetic oligonucleotide
  Sense strand starting at position 3274 of SEQ ID NO: 1244725
cuggcccuuuaaugauauu

SEQ ID NO: 1510213 - RNA, 19 nt, Artificial Sequence
  Description of Artificial Sequence: Synthetic oligonucleotide
  Antisense strand to SEQ ID NO: 1510212
aauaucauuaaagggccag

SEQ ID NO: 1510214 - RNA, 19 nt, Artificial Sequence
  Description of Artificial Sequence: Synthetic oligonucleotide
  Sense strand starting at position 3295 of SEQ ID NO: 1244725
guacuuguuuacucacuga

SEQ ID NO: 1510215 - RNA, 19 nt, Artificial Sequence
  Description of Artificial Sequence: Synthetic oligonucleotide
  Antisense strand to SEQ ID NO: 1510214
ucagugaguaaacaaguac

SEQ ID NO: 1510216 - RNA, 19 nt, Artificial Sequence
  Description of Artificial Sequence: Synthetic oligonucleotide
  Sense strand starting at position 3298 of SEQ ID NO: 1244725
cuuguuuacucacugacca

SEQ ID NO: 1510217 - RNA, 19 nt, Artificial Sequence
  Description of Artificial Sequence: Synthetic oligonucleotide
  Antisense strand to SEQ ID NO: 1510216
uggucagugaguaaacaag

SEQ ID NO: 1510218 - RNA, 19 nt, Artificial Sequence
  Description of Artificial Sequence: Synthetic oligonucleotide
  Sense strand starting at position 3310 of SEQ ID NO: 1244725
cugaccaucucagggauua

SEQ ID NO: 1510219 - RNA, 19 nt, Artificial Sequence
  Description of Artificial Sequence: Synthetic oligonucleotide
  Antisense strand to SEQ ID NO: 1510218
uaaucccugagauggucag

SEQ ID NO: 1510220 - RNA, 19 nt, Artificial Sequence
  Description of Artificial Sequence: Synthetic oligonucleotide
  Sense strand starting at position 3311 of SEQ ID NO: 1244725
ugaccaucucagggauuac

SEQ ID NO: 1510221 - RNA, 19 nt, Artificial Sequence
  Description of Artificial Sequence: Synthetic oligonucleotide
  Antisense strand to SEQ ID NO: 1510220
guaaucccugagaugguca

SEQ ID NO: 1510222 - RNA, 19 nt, Artificial Sequence
  Description of Artificial Sequence: Synthetic oligonucleotide
  Sense strand starting at position 3320 of SEQ ID NO: 1244725
cagggauuacccugaccua

SEQ ID NO: 1510223 - RNA, 19 nt, Artificial Sequence
  Description of Artificial Sequence: Synthetic oligonucleotide
  Antisense strand to SEQ ID NO: 1510222
uaggucaggguaaucccug

SEQ ID NO: 1510224 - RNA, 19 nt, Artificial Sequence
  Description of Artificial Sequence: Synthetic oligonucleotide
  Sense strand starting at position 3323 of SEQ ID NO: 1244725
ggauuacccugaccuacua

SEQ ID NO: 1510225 - RNA, 19 nt, Artificial Sequence
  Description of Artificial Sequence: Synthetic oligonucleotide
  Antisense strand to SEQ ID NO: 1510224
uaguaggucaggguaaucc

SEQ ID NO: 1510226 - RNA, 19 nt, Artificial Sequence
  Description of Artificial Sequence: Synthetic oligonucleotide
  Sense strand starting at position 3414 of SEQ ID NO: 1244725
gagaaagugucuuccucaa

SEQ ID NO: 1510227 - RNA, 19 nt, Artificial Sequence
  Description of Artificial Sequence: Synthetic oligonucleotide
  Antisense strand to SEQ ID NO: 1510226
uugaggaagacacuuucuc

SEQ ID NO: 1510228 - RNA, 19 nt, Artificial Sequence
  Description of Artificial Sequence: Synthetic oligonucleotide
  Sense strand starting at position 11 of SEQ ID NO: 1244726
aggaauauagcacguuaca

SEQ ID NO: 1510229 - RNA, 19 nt, Artificial Sequence
  Description of Artificial Sequence: Synthetic oligonucleotide
  Antisense strand to SEQ ID NO: 1510228
uguaacgugcuauauuccu

SEQ ID NO: 1510230 - RNA, 19 nt, Artificial Sequence
  Description of Artificial Sequence: Synthetic oligonucleotide
  Sense strand starting at position 58 of SEQ ID NO: 1244726
acccuugcuccuuggaaca

SEQ ID NO: 1510231 - RNA, 19 nt, Artificial Sequence
  Description of Artificial Sequence: Synthetic oligonucleotide
  Antisense strand to SEQ ID NO: 1510230
uguuccaaggagcaagggu

SEQ ID NO: 1510232 - RNA, 19 nt, Artificial Sequence
  Description of Artificial Sequence: Synthetic oligonucleotide
  Sense strand starting at position 138 of SEQ ID NO: 1244726
gagauuaagugacuuaagu

SEQ ID NO: 1510233 - RNA, 19 nt, Artificial Sequence
  Description of Artificial Sequence: Synthetic oligonucleotide
  Antisense strand to SEQ ID NO: 1510232
acuuaagucacuuaaucuc

SEQ ID NO: 1510234 - RNA, 19 nt, Artificial Sequence
  Description of Artificial Sequence: Synthetic oligonucleotide
  Sense strand starting at position 208 of SEQ ID NO: 1244726
ggcuacuugugaguuaaua

SEQ ID NO: 1510235 - RNA, 19 nt, Artificial Sequence
  Description of Artificial Sequence: Synthetic oligonucleotide
  Antisense strand to SEQ ID NO: 1510234
uauuaacucacaaguagcc

SEQ ID NO: 1510236 - RNA, 19 nt, Artificial Sequence
  Description of Artificial Sequence: Synthetic oligonucleotide
  Sense strand starting at position 246 of SEQ ID NO: 1244726
aggagccguuauccgaaau

SEQ ID NO: 1510237 - RNA, 19 nt, Artificial Sequence
  Description of Artificial Sequence: Synthetic oligonucleotide
  Antisense strand to SEQ ID NO: 1510236
auuucggauaacggcuccu

SEQ ID NO: 1510238 - RNA, 19 nt, Artificial Sequence
  Description of Artificial Sequence: Synthetic oligonucleotide
  Sense strand starting at position 247 of SEQ ID NO: 1244726
ggagccguuauccgaaaua

SEQ ID NO: 1510239 - RNA, 19 nt, Artificial Sequence
  Description of Artificial Sequence: Synthetic oligonucleotide
  Antisense strand to SEQ ID NO: 1510238
uauuucggauaacggcucc

SEQ ID NO: 1510240 - RNA, 19 nt, Artificial Sequence
  Description of Artificial Sequence: Synthetic oligonucleotide
  Sense strand starting at position 257 of SEQ ID NO: 1244726
uccgaaauauuugaaacca

SEQ ID NO: 1510241 - RNA, 19 nt, Artificial Sequence
  Description of Artificial Sequence: Synthetic oligonucleotide
  Antisense strand to SEQ ID NO: 1510240
ugguuucaaauauuucgga

SEQ ID NO: 1510242 - RNA, 19 nt, Artificial Sequence
  Description of Artificial Sequence: Synthetic oligonucleotide
  Sense strand starting at position 308 of SEQ ID NO: 1244726
uggagauacuuacagaaua

SEQ ID NO: 1510243 - RNA, 19 nt, Artificial Sequence
  Description of Artificial Sequence: Synthetic oligonucleotide
  Antisense strand to SEQ ID NO: 1510242
uauucuguaaguaucucca

SEQ ID NO: 1510244 - RNA, 19 nt, Artificial Sequence
  Description of Artificial Sequence: Synthetic oligonucleotide
  Sense strand starting at position 1309 of SEQ ID NO: 1244726
gggucagaucucugcucau

SEQ ID NO: 1510245 - RNA, 19 nt, Artificial Sequence
  Description of Artificial Sequence: Synthetic oligonucleotide
  Antisense strand to SEQ ID NO: 1510244
augagcagagaucugaccc

SEQ ID NO: 1510246 - RNA, 19 nt, Artificial Sequence
  Description of Artificial Sequence: Synthetic oligonucleotide
  Sense strand starting at position 1322 of SEQ ID NO: 1244726
gcucauuucucacuguuau

SEQ ID NO: 1510247 - RNA, 19 nt, Artificial Sequence
  Description of Artificial Sequence: Synthetic oligonucleotide
  Antisense strand to SEQ ID NO: 1510246
auaacagugagaaaugagc

SEQ ID NO: 1510248 - RNA, 19 nt, Artificial Sequence
  Description of Artificial Sequence: Synthetic oligonucleotide
  Sense strand starting at position 1326 of SEQ ID NO: 1244726
auuucucacuguuaugaag

SEQ ID NO: 1510249 - RNA, 19 nt, Artificial Sequence
  Description of Artificial Sequence: Synthetic oligonucleotide
  Antisense strand to SEQ ID NO: 1510248
cuucauaacagugagaaau

SEQ ID NO: 1510250 - RNA, 19 nt, Artificial Sequence
  Description of Artificial Sequence: Synthetic oligonucleotide
  Sense strand starting at position 1345 of SEQ ID NO: 1244726
ggagaaagaaccggcuuau

SEQ ID NO: 1510251 - RNA, 19 nt, Artificial Sequence
  Description of Artificial Sequence: Synthetic oligonucleotide
  Antisense strand to SEQ ID NO: 1510250
auaagccgguucuuucucc

SEQ ID NO: 1510252 - RNA, 19 nt, Artificial Sequence
  Description of Artificial Sequence: Synthetic oligonucleotide
  Sense strand starting at position 1447 of SEQ ID NO: 1244726
uccggauucugauccagca

SEQ ID NO: 1510253 - RNA, 19 nt, Artificial Sequence
  Description of Artificial Sequence: Synthetic oligonucleotide
  Antisense strand to SEQ ID NO: 1510252
ugcuggaucagaauccgga

SEQ ID NO: 1510254 - RNA, 19 nt, Artificial Sequence
  Description of Artificial Sequence: Synthetic oligonucleotide
  Sense strand starting at position 1666 of SEQ ID NO: 1244726
gagaaacgggcuuggucaa

SEQ ID NO: 1510255 - RNA, 19 nt, Artificial Sequence
  Description of Artificial Sequence: Synthetic oligonucleotide
  Antisense strand to SEQ ID NO: 1510254
uugaccaagcccguuucuc

SEQ ID NO: 1510256 - RNA, 19 nt, Artificial Sequence
  Description of Artificial Sequence: Synthetic oligonucleotide
  Sense strand starting at position 1679 of SEQ ID NO: 1244726
ggucaaggucuccaagcaa

SEQ ID NO: 1510257 - RNA, 19 nt, Artificial Sequence
  Description of Artificial Sequence: Synthetic oligonucleotide
  Antisense strand to SEQ ID NO: 1510256
uugcuuggagaccuugacc

SEQ ID NO: 1510258 - RNA, 19 nt, Artificial Sequence
  Description of Artificial Sequence: Synthetic oligonucleotide
  Sense strand starting at position 2035 of SEQ ID NO: 1244726
cagggagcucauugaucau

SEQ ID NO: 1510259 - RNA, 19 nt, Artificial Sequence
  Description of Artificial Sequence: Synthetic oligonucleotide
  Antisense strand to SEQ ID NO: 1510258
augaucaaugagcucccug

SEQ ID NO: 1510260 - RNA, 19 nt, Artificial Sequence
  Description of Artificial Sequence: Synthetic oligonucleotide
  Sense strand starting at position 2038 of SEQ ID NO: 1244726
ggagcucauugaucauuaa

SEQ ID NO: 1510261 - RNA, 19 nt, Artificial Sequence
  Description of Artificial Sequence: Synthetic oligonucleotide
  Antisense strand to SEQ ID NO: 1510260
uuaaugaucaaugagcucc

SEQ ID NO: 1510262 - RNA, 19 nt, Artificial Sequence
  Description of Artificial Sequence: Synthetic oligonucleotide
  Sense strand starting at position 2210 of SEQ ID NO: 1244726
gaaggagccuccuugaacu

SEQ ID NO: 1510263 - RNA, 19 nt, Artificial Sequence
  Description of Artificial Sequence: Synthetic oligonucleotide
  Antisense strand to SEQ ID NO: 1510262
aguucaaggaggcuccuuc

SEQ ID NO: 1510264 - RNA, 19 nt, Artificial Sequence
  Description of Artificial Sequence: Synthetic oligonucleotide
  Sense strand starting at position 2278 of SEQ ID NO: 1244726
cccaaauagucccagaaag

SEQ ID NO: 1510265 - RNA, 19 nt, Artificial Sequence
  Description of Artificial Sequence: Synthetic oligonucleotide
  Antisense strand to SEQ ID NO: 1510264
cuuucugggacuauuuggg

SEQ ID NO: 1510266 - RNA, 19 nt, Artificial Sequence
  Description of Artificial Sequence: Synthetic oligonucleotide
  Sense strand starting at position 2365 of SEQ ID NO: 1244726
ccgccucaccucugaagau

SEQ ID NO: 1510267 - RNA, 19 nt, Artificial Sequence
  Description of Artificial Sequence: Synthetic oligonucleotide
  Antisense strand to SEQ ID NO: 1510266
aucuucagaggugaggcgg

SEQ ID NO: 1510268 - RNA, 19 nt, Artificial Sequence
  Description of Artificial Sequence: Synthetic oligonucleotide
  Sense strand starting at position 2557 of SEQ ID NO: 1244726
uuucuagacccgugaaaca

SEQ ID NO: 1510269 - RNA, 19 nt, Artificial Sequence
  Description of Artificial Sequence: Synthetic oligonucleotide
  Antisense strand to SEQ ID NO: 1510268
uguuucacgggucuagaaa

SEQ ID NO: 1510270 - RNA, 19 nt, Artificial Sequence
  Description of Artificial Sequence: Synthetic oligonucleotide
  Sense strand starting at position 2680 of SEQ ID NO: 1244726
guggcuguucugcacauga

SEQ ID NO: 1510271 - RNA, 19 nt, Artificial Sequence
  Description of Artificial Sequence: Synthetic oligonucleotide
  Antisense strand to SEQ ID NO: 1510270
ucaugugcagaacagccac

SEQ ID NO: 1510272 - RNA, 19 nt, Artificial Sequence
  Description of Artificial Sequence: Synthetic oligonucleotide
  Sense strand starting at position 2682 of SEQ ID NO: 1244726
ggcuguucugcacaugauc

SEQ ID NO: 1510273 - RNA, 19 nt, Artificial Sequence
  Description of Artificial Sequence: Synthetic oligonucleotide
  Antisense strand to SEQ ID NO: 1510272
gaucaugugcagaacagcc

SEQ ID NO: 1510274 - RNA, 19 nt, Artificial Sequence
  Description of Artificial Sequence: Synthetic oligonucleotide
  Sense strand starting at position 2721 of SEQ ID NO: 1244726
ggcuguuccgcacaugauc

SEQ ID NO: 1510275 - RNA, 19 nt, Artificial Sequence
  Description of Artificial Sequence: Synthetic oligonucleotide
  Antisense strand to SEQ ID NO: 1510274
gaucaugugcggaacagcc

SEQ ID NO: 1510276 - RNA, 19 nt, Artificial Sequence
  Description of Artificial Sequence: Synthetic oligonucleotide
  Sense strand starting at position 2765 of SEQ ID NO: 1244726
cagaguaggcaaugucuca

SEQ ID NO: 1510277 - RNA, 19 nt, Artificial Sequence
  Description of Artificial Sequence: Synthetic oligonucleotide
  Antisense strand to SEQ ID NO: 1510276
ugagacauugccuacucug

SEQ ID NO: 1510278 - RNA, 19 nt, Artificial Sequence
  Description of Artificial Sequence: Synthetic oligonucleotide
  Sense strand starting at position 2772 of SEQ ID NO: 1244726
ggcaaugucucauccuagu

SEQ ID NO: 1510279 - RNA, 19 nt, Artificial Sequence
  Description of Artificial Sequence: Synthetic oligonucleotide
  Antisense strand to SEQ ID NO: 1510278
acuaggaugagacauugcc

SEQ ID NO: 1510280 - RNA, 19 nt, Artificial Sequence
  Description of Artificial Sequence: Synthetic oligonucleotide
  Sense strand starting at position 2778 of SEQ ID NO: 1244726
gucucauccuagucaagga

SEQ ID NO: 1510281 - RNA, 19 nt, Artificial Sequence
  Description of Artificial Sequence: Synthetic oligonucleotide
  Antisense strand to SEQ ID NO: 1510280
uccuugacuaggaugagac

SEQ ID NO: 1510282 - RNA, 19 nt, Artificial Sequence
  Description of Artificial Sequence: Synthetic oligonucleotide
  Sense strand starting at position 2886 of SEQ ID NO: 1244726
acgaguuccaucuggauuc

SEQ ID NO: 1510283 - RNA, 19 nt, Artificial Sequence
  Description of Artificial Sequence: Synthetic oligonucleotide
  Antisense strand to SEQ ID NO: 1510282
gaauccagauggaacucgu

SEQ ID NO: 1510284 - RNA, 19 nt, Artificial Sequence
  Description of Artificial Sequence: Synthetic oligonucleotide
  Sense strand starting at position 2893 of SEQ ID NO: 1244726
ccaucuggauuccaucaga

SEQ ID NO: 1510285 - RNA, 19 nt, Artificial Sequence
  Description of Artificial Sequence: Synthetic oligonucleotide
  Antisense strand to SEQ ID NO: 1510284
ucugauggaauccagaugg

SEQ ID NO: 1510286 - RNA, 19 nt, Artificial Sequence
  Description of Artificial Sequence: Synthetic oligonucleotide
  Sense strand starting at position 2928 of SEQ ID NO: 1244726
cuaauucuaucaguguaca

SEQ ID NO: 1510287 - RNA, 19 nt, Artificial Sequence
  Description of Artificial Sequence: Synthetic oligonucleotide
  Antisense strand to SEQ ID NO: 1510286
uguacacugauagaauuag

SEQ ID NO: 1510288 - RNA, 19 nt, Artificial Sequence
  Description of Artificial Sequence: Synthetic oligonucleotide
  Sense strand starting at position 2971 of SEQ ID NO: 1244726
cgccucugcucagugacau

SEQ ID NO: 1510289 - RNA, 19 nt, Artificial Sequence
  Description of Artificial Sequence: Synthetic oligonucleotide
  Antisense strand to SEQ ID NO: 1510288
augucacugagcagaggcg

SEQ ID NO: 1510290 - RNA, 19 nt, Artificial Sequence
  Description of Artificial Sequence: Synthetic oligonucleotide
  Sense strand starting at position 2972 of SEQ ID NO: 1244726
gccucugcucagugacaug

SEQ ID NO: 1510291 - RNA, 19 nt, Artificial Sequence
  Description of Artificial Sequence: Synthetic oligonucleotide
  Antisense strand to SEQ ID NO: 1510290
caugucacugagcagaggc

SEQ ID NO: 1510292 - RNA, 19 nt, Artificial Sequence
  Description of Artificial Sequence: Synthetic oligonucleotide
  Sense strand starting at position 2982 of SEQ ID NO: 1244726
agugacaugacucgugacu

SEQ ID NO: 1510293 - RNA, 19 nt, Artificial Sequence
  Description of Artificial Sequence: Synthetic oligonucleotide
  Antisense strand to SEQ ID NO: 1510292
agucacgagucaugucacu

SEQ ID NO: 1510294 - RNA, 19 nt, Artificial Sequence
  Description of Artificial Sequence: Synthetic oligonucleotide
  Sense strand starting at position 3031 of SEQ ID NO: 1244726
gcagcacuuccagaagugu

SEQ ID NO: 1510295 - RNA, 19 nt, Artificial Sequence
  Description of Artificial Sequence: Synthetic oligonucleotide
  Antisense strand to SEQ ID NO: 1510294
acacuucuggaagugcugc

SEQ ID NO: 1510296 - RNA, 19 nt, Artificial Sequence
  Description of Artificial Sequence: Synthetic oligonucleotide
  Sense strand starting at position 3097 of SEQ ID NO: 1244726
gccagccuguuacucaaua

SEQ ID NO: 1510297 - RNA, 19 nt, Artificial Sequence
  Description of Artificial Sequence: Synthetic oligonucleotide
  Antisense strand to SEQ ID NO: 1510296
uauugaguaacaggcuggc

SEQ ID NO: 1510298 - RNA, 19 nt, Artificial Sequence
  Description of Artificial Sequence: Synthetic oligonucleotide
  Sense strand starting at position 3589 of SEQ ID NO: 1244726
gaugguguuuacuucccaa

SEQ ID NO: 1510299 - RNA, 19 nt, Artificial Sequence
  Description of Artificial Sequence: Synthetic oligonucleotide
  Antisense strand to SEQ ID NO: 1510298
uugggaaguaaacaccauc

SEQ ID NO: 1510300 - RNA, 19 nt, Artificial Sequence
  Description of Artificial Sequence: Synthetic oligonucleotide
  Sense strand starting at position 3610 of SEQ ID NO: 1244726
cauugcuugcaauguguuu

SEQ ID NO: 1510301 - RNA, 19 nt, Artificial Sequence
  Description of Artificial Sequence: Synthetic oligonucleotide
  Antisense strand to SEQ ID NO: 1510300
aaacacauugcaagcaaug

SEQ ID NO: 1510302 - RNA, 19 nt, Artificial Sequence
  Description of Artificial Sequence: Synthetic oligonucleotide
  Sense strand starting at position 3699 of SEQ ID NO: 1244726
ccauuaauagaguaguugu

SEQ ID NO: 1510303 - RNA, 19 nt, Artificial Sequence
  Description of Artificial Sequence: Synthetic oligonucleotide
  Antisense strand to SEQ ID NO: 1510302
acaacuacucuauuaaugg

SEQ ID NO: 1510304 - RNA, 19 nt, Artificial Sequence
  Description of Artificial Sequence: Synthetic oligonucleotide
  Sense strand starting at position 3738 of SEQ ID NO: 1244726
gaccguuggcuaggucuua

SEQ ID NO: 1510305 - RNA, 19 nt, Artificial Sequence
  Description of Artificial Sequence: Synthetic oligonucleotide
  Antisense strand to SEQ ID NO: 1510304
uaagaccuagccaacgguc

SEQ ID NO: 1510306 - RNA, 19 nt, Artificial Sequence
  Description of Artificial Sequence: Synthetic oligonucleotide
  Sense strand starting at position 3881 of SEQ ID NO: 1244726
caguaaaggugcucuuaag

SEQ ID NO: 1510307 - RNA, 19 nt, Artificial Sequence
  Description of Artificial Sequence: Synthetic oligonucleotide
  Antisense strand to SEQ ID NO: 1510306
cuuaagagcaccuuuacug

SEQ ID NO: 1510308 - RNA, 19 nt, Artificial Sequence
  Description of Artificial Sequence: Synthetic oligonucleotide
  Sense strand starting at position 177 of SEQ ID NO: 1244727
gagaaacgggcuuggucaa

SEQ ID NO: 1510309 - RNA, 19 nt, Artificial Sequence
  Description of Artificial Sequence: Synthetic oligonucleotide
  Antisense strand to SEQ ID NO: 1510308
uugaccaagcccguuucuc

SEQ ID NO: 1510310 - RNA, 19 nt, Artificial Sequence
  Description of Artificial Sequence: Synthetic oligonucleotide
  Sense strand starting at position 190 of SEQ ID NO: 1244727
ggucaaggucuccaagcaa

SEQ ID NO: 1510311 - RNA, 19 nt, Artificial Sequence
  Description of Artificial Sequence: Synthetic oligonucleotide
  Antisense strand to SEQ ID NO: 1510310
uugcuuggagaccuugacc

SEQ ID NO: 1510312 - RNA, 19 nt, Artificial Sequence
  Description of Artificial Sequence: Synthetic oligonucleotide
  Sense strand starting at position 546 of SEQ ID NO: 1244727
cagggagcucauugaucau

SEQ ID NO: 1510313 - RNA, 19 nt, Artificial Sequence
  Description of Artificial Sequence: Synthetic oligonucleotide
  Antisense strand to SEQ ID NO: 1510312
augaucaaugagcucccug

SEQ ID NO: 1510314 - RNA, 19 nt, Artificial Sequence
  Description of Artificial Sequence: Synthetic oligonucleotide
  Sense strand starting at position 549 of SEQ ID NO: 1244727
ggagcucauugaucauuaa

SEQ ID NO: 1510315 - RNA, 19 nt, Artificial Sequence
  Description of Artificial Sequence: Synthetic oligonucleotide
  Antisense strand to SEQ ID NO: 1510314
uuaaugaucaaugagcucc

SEQ ID NO: 1510316 - RNA, 19 nt, Artificial Sequence
  Description of Artificial Sequence: Synthetic oligonucleotide
  Sense strand starting at position 721 of SEQ ID NO: 1244727
gaaggagccuccuugaacu

SEQ ID NO: 1510317 - RNA, 19 nt, Artificial Sequence
  Description of Artificial Sequence: Synthetic oligonucleotide
  Antisense strand to SEQ ID NO: 1510316
aguucaaggaggcuccuuc

SEQ ID NO: 1510318 - RNA, 19 nt, Artificial Sequence
  Description of Artificial Sequence: Synthetic oligonucleotide
  Sense strand starting at position 789 of SEQ ID NO: 1244727
cccaaauagucccagaaag

SEQ ID NO: 1510319 - RNA, 19 nt, Artificial Sequence
  Description of Artificial Sequence: Synthetic oligonucleotide
  Antisense strand to SEQ ID NO: 1510318
cuuucugggacuauuuggg

SEQ ID NO: 1510320 - RNA, 19 nt, Artificial Sequence
  Description of Artificial Sequence: Synthetic oligonucleotide
  Sense strand starting at position 876 of SEQ ID NO: 1244727
ccgccucaccucugaagau

SEQ ID NO: 1510321 - RNA, 19 nt, Artificial Sequence
  Description of Artificial Sequence: Synthetic oligonucleotide
  Antisense strand to SEQ ID NO: 1510320
aucuucagaggugaggcgg

SEQ ID NO: 1510322 - RNA, 19 nt, Artificial Sequence
  Description of Artificial Sequence: Synthetic oligonucleotide
  Sense strand starting at position 1068 of SEQ ID NO: 1244727
uuucuagacccgugaaaca

SEQ ID NO: 1510323 - RNA, 19 nt, Artificial Sequence
  Description of Artificial Sequence: Synthetic oligonucleotide
  Antisense strand to SEQ ID NO: 1510322
uguuucacgggucuagaaa

SEQ ID NO: 1510324 - RNA, 19 nt, Artificial Sequence
  Description of Artificial Sequence: Synthetic oligonucleotide
  Sense strand starting at position 1191 of SEQ ID NO: 1244727
guggcuguucugcacauga

SEQ ID NO: 1510325 - RNA, 19 nt, Artificial Sequence
  Description of Artificial Sequence: Synthetic oligonucleotide
  Antisense strand to SEQ ID NO: 1510324
ucaugugcagaacagccac

SEQ ID NO: 1510326 - RNA, 19 nt, Artificial Sequence
  Description of Artificial Sequence: Synthetic oligonucleotide
  Sense strand starting at position 1193 of SEQ ID NO: 1244727
ggcuguucugcacaugauc

SEQ ID NO: 1510327 - RNA, 19 nt, Artificial Sequence
  Description of Artificial Sequence: Synthetic oligonucleotide
  Antisense strand to SEQ ID NO: 1510326
gaucaugugcagaacagcc

SEQ ID NO: 1510328 - RNA, 19 nt, Artificial Sequence
  Description of Artificial Sequence: Synthetic oligonucleotide
  Sense strand starting at position 1232 of SEQ ID NO: 1244727
ggcuguuccgcacaugauc

SEQ ID NO: 1510329 - RNA, 19 nt, Artificial Sequence
  Description of Artificial Sequence: Synthetic oligonucleotide
  Antisense strand to SEQ ID NO: 1510328
gaucaugugcggaacagcc

SEQ ID NO: 1510330 - RNA, 19 nt, Artificial Sequence
  Description of Artificial Sequence: Synthetic oligonucleotide
  Sense strand starting at position 1276 of SEQ ID NO: 1244727
cagaguaggcaaugucuca

SEQ ID NO: 1510331 - RNA, 19 nt, Artificial Sequence
  Description of Artificial Sequence: Synthetic oligonucleotide
  Antisense strand to SEQ ID NO: 1510330
ugagacauugccuacucug

SEQ ID NO: 1510332 - RNA, 19 nt, Artificial Sequence
  Description of Artificial Sequence: Synthetic oligonucleotide
  Sense strand starting at position 1283 of SEQ ID NO: 1244727
ggcaaugucucauccuagu

SEQ ID NO: 1510333 - RNA, 19 nt, Artificial Sequence
  Description of Artificial Sequence: Synthetic oligonucleotide
  Antisense strand to SEQ ID NO: 1510332
acuaggaugagacauugcc

SEQ ID NO: 1510334 - RNA, 19 nt, Artificial Sequence
  Description of Artificial Sequence: Synthetic oligonucleotide
  Sense strand starting at position 1289 of SEQ ID NO: 1244727
gucucauccuagucaagga

SEQ ID NO: 1510335 - RNA, 19 nt, Artificial Sequence
  Description of Artificial Sequence: Synthetic oligonucleotide
  Antisense strand to SEQ ID NO: 1510334
uccuugacuaggaugagac

SEQ ID NO: 1510336 - RNA, 19 nt, Artificial Sequence
  Description of Artificial Sequence: Synthetic oligonucleotide
  Sense strand starting at position 1397 of SEQ ID NO: 1244727
acgaguuccaucuggauuc

SEQ ID NO: 1510337 - RNA, 19 nt, Artificial Sequence
  Description of Artificial Sequence: Synthetic oligonucleotide
  Antisense strand to SEQ ID NO: 1510336
gaauccagauggaacucgu

SEQ ID NO: 1510338 - RNA, 19 nt, Artificial Sequence
  Description of Artificial Sequence: Synthetic oligonucleotide
  Sense strand starting at position 1404 of SEQ ID NO: 1244727
ccaucuggauuccaucaga

SEQ ID NO: 1510339 - RNA, 19 nt, Artificial Sequence
  Description of Artificial Sequence: Synthetic oligonucleotide
  Antisense strand to SEQ ID NO: 1510338
ucugauggaauccagaugg

SEQ ID NO: 1510340 - RNA, 19 nt, Artificial Sequence
  Description of Artificial Sequence: Synthetic oligonucleotide
  Sense strand starting at position 1439 of SEQ ID NO: 1244727
cuaauucuaucaguguaca

SEQ ID NO: 1510341 - RNA, 19 nt, Artificial Sequence
  Description of Artificial Sequence: Synthetic oligonucleotide
  Antisense strand to SEQ ID NO: 1510340
uguacacugauagaauuag

SEQ ID NO: 1510342 - RNA, 19 nt, Artificial Sequence
  Description of Artificial Sequence: Synthetic oligonucleotide
  Sense strand starting at position 1483 of SEQ ID NO: 1244727
gccucugcucagugacaug

SEQ ID NO: 1510343 - RNA, 19 nt, Artificial Sequence
  Description of Artificial Sequence: Synthetic oligonucleotide
  Antisense strand to SEQ ID NO: 1510342
caugucacugagcagaggc

SEQ ID NO: 1510344 - RNA, 19 nt, Artificial Sequence
  Description of Artificial Sequence: Synthetic oligonucleotide
  Sense strand starting at position 1493 of SEQ ID NO: 1244727
agugacaugacucgugacu

SEQ ID NO: 1510345 - RNA, 19 nt, Artificial Sequence
  Description of Artificial Sequence: Synthetic oligonucleotide
  Antisense strand to SEQ ID NO: 1510344
agucacgagucaugucacu

SEQ ID NO: 1510346 - RNA, 19 nt, Artificial Sequence
  Description of Artificial Sequence: Synthetic oligonucleotide
  Sense strand starting at position 1542 of SEQ ID NO: 1244727
gcagcacuuccagaagugu

SEQ ID NO: 1510347 - RNA, 19 nt, Artificial Sequence
  Description of Artificial Sequence: Synthetic oligonucleotide
  Antisense strand to SEQ ID NO: 1510346
acacuucuggaagugcugc

SEQ ID NO: 1510348 - RNA, 19 nt, Artificial Sequence
  Description of Artificial Sequence: Synthetic oligonucleotide
  Sense strand starting at position 1608 of SEQ ID NO: 1244727
gccagccuguuacucaaua

SEQ ID NO: 1510349 - RNA, 19 nt, Artificial Sequence
  Description of Artificial Sequence: Synthetic oligonucleotide
  Antisense strand to SEQ ID NO: 1510348
uauugaguaacaggcuggc

SEQ ID NO: 1510350 - RNA, 19 nt, Artificial Sequence
  Description of Artificial Sequence: Synthetic oligonucleotide
  Sense strand starting at position 2100 of SEQ ID NO: 1244727
gaugguguuuacuucccaa

SEQ ID NO: 1510351 - RNA, 19 nt, Artificial Sequence
  Description of Artificial Sequence: Synthetic oligonucleotide
  Antisense strand to SEQ ID NO: 1510350
uugggaaguaaacaccauc

SEQ ID NO: 1510352 - RNA, 19 nt, Artificial Sequence
  Description of Artificial Sequence: Synthetic oligonucleotide
  Sense strand starting at position 2210 of SEQ ID NO: 1244727
ccauuaauagaguaguugu

SEQ ID NO: 1510353 - RNA, 19 nt, Artificial Sequence
  Description of Artificial Sequence: Synthetic oligonucleotide
  Antisense strand to SEQ ID NO: 1510352
acaacuacucuauuaaugg

SEQ ID NO: 1510354 - RNA, 19 nt, Artificial Sequence
  Description of Artificial Sequence: Synthetic oligonucleotide
  Sense strand starting at position 2249 of SEQ ID NO: 1244727
gaccguuggcuaggucuua

SEQ ID NO: 1510355 - RNA, 19 nt, Artificial Sequence
  Description of Artificial Sequence: Synthetic oligonucleotide
  Antisense strand to SEQ ID NO: 1510354
uaagaccuagccaacgguc

SEQ ID NO: 1510356 - RNA, 19 nt, Artificial Sequence
  Description of Artificial Sequence: Synthetic oligonucleotide
  Sense strand starting at position 2392 of SEQ ID NO: 1244727
caguaaaggugcucuuaag

SEQ ID NO: 1510357 - RNA, 19 nt, Artificial Sequence
  Description of Artificial Sequence: Synthetic oligonucleotide
  Antisense strand to SEQ ID NO: 1510356
cuuaagagcaccuuuacug

SEQ ID NO: 1510358 - RNA, 19 nt, Artificial Sequence
  Description of Artificial Sequence: Synthetic oligonucleotide
  Sense strand starting at position 2504 of SEQ ID NO: 1244727
cagccaugucugcgggaga

SEQ ID NO: 1510359 - RNA, 19 nt, Artificial Sequence
  Description of Artificial Sequence: Synthetic oligonucleotide
  Antisense strand to SEQ ID NO: 1510358
ucucccgcagacauggcug

SEQ ID NO: 1510360 - RNA, 19 nt, Artificial Sequence
  Description of Artificial Sequence: Synthetic oligonucleotide
  Sense strand starting at position 2507 of SEQ ID NO: 1244727
ccaugucugcgggagaaga

SEQ ID NO: 1510361 - RNA, 19 nt, Artificial Sequence
  Description of Artificial Sequence: Synthetic oligonucleotide
  Antisense strand to SEQ ID NO: 1510360
ucuucucccgcagacaugg

SEQ ID NO: 1510362 - RNA, 19 nt, Artificial Sequence
  Description of Artificial Sequence: Synthetic oligonucleotide
  Sense strand starting at position 2625 of SEQ ID NO: 1244727
ugagaagucauccguacca

SEQ ID NO: 1510363 - RNA, 19 nt, Artificial Sequence
  Description of Artificial Sequence: Synthetic oligonucleotide
  Antisense strand to SEQ ID NO: 1510362
ugguacggaugacuucuca

SEQ ID NO: 1510364 - RNA, 19 nt, Artificial Sequence
  Description of Artificial Sequence: Synthetic oligonucleotide
  Sense strand starting at position 2627 of SEQ ID NO: 1244727
agaagucauccguaccaca

SEQ ID NO: 1510365 - RNA, 19 nt, Artificial Sequence
  Description of Artificial Sequence: Synthetic oligonucleotide
  Antisense strand to SEQ ID NO: 1510364
ugugguacggaugacuucu

SEQ ID NO: 1510366 - RNA, 19 nt, Artificial Sequence
  Description of Artificial Sequence: Synthetic oligonucleotide
  Sense strand starting at position 2771 of SEQ ID NO: 1244727
caucuaugagcuuaugagu

SEQ ID NO: 1510367 - RNA, 19 nt, Artificial Sequence
  Description of Artificial Sequence: Synthetic oligonucleotide
  Antisense strand to SEQ ID NO: 1510366
acucauaagcucauagaug

SEQ ID NO: 1510368 - RNA, 19 nt, Artificial Sequence
  Description of Artificial Sequence: Synthetic oligonucleotide
  Sense strand starting at position 2780 of SEQ ID NO: 1244727
gcuuaugaguuucuuucuu

SEQ ID NO: 1510369 - RNA, 19 nt, Artificial Sequence
  Description of Artificial Sequence: Synthetic oligonucleotide
  Antisense strand to SEQ ID NO: 1510368
aagaaagaaacucauaagc

SEQ ID NO: 1510370 - RNA, 19 nt, Artificial Sequence
  Description of Artificial Sequence: Synthetic oligonucleotide
  Sense strand starting at position 2784 of SEQ ID NO: 1244727
augaguuucuuucuuaagu

SEQ ID NO: 1510371 - RNA, 19 nt, Artificial Sequence
  Description of Artificial Sequence: Synthetic oligonucleotide
  Antisense strand to SEQ ID NO: 1510370
acuuaagaaagaaacucau

SEQ ID NO: 1510372 - RNA, 19 nt, Artificial Sequence
  Description of Artificial Sequence: Synthetic oligonucleotide
  Sense strand starting at position 2785 of SEQ ID NO: 1244727
ugaguuucuuucuuaagug

SEQ ID NO: 1510373 - RNA, 19 nt, Artificial Sequence
  Description of Artificial Sequence: Synthetic oligonucleotide
  Antisense strand to SEQ ID NO: 1510372
cacuuaagaaagaaacuca

SEQ ID NO: 1510374 - RNA, 19 nt, Artificial Sequence
  Description of Artificial Sequence: Synthetic oligonucleotide
  Sense strand starting at position 3045 of SEQ ID NO: 1244727
gucuguccugauggagaaa

SEQ ID NO: 1510375 - RNA, 19 nt, Artificial Sequence
  Description of Artificial Sequence: Synthetic oligonucleotide
  Antisense strand to SEQ ID NO: 1510374
uuucuccaucaggacagac

SEQ ID NO: 1510376 - RNA, 19 nt, Artificial Sequence
  Description of Artificial Sequence: Synthetic oligonucleotide
  Sense strand starting at position 3146 of SEQ ID NO: 1244727
gaagguggugagugaauua

SEQ ID NO: 1510377 - RNA, 19 nt, Artificial Sequence
  Description of Artificial Sequence: Synthetic oligonucleotide
  Antisense strand to SEQ ID NO: 1510376
uaauucacucaccaccuuc

SEQ ID NO: 1510378 - RNA, 19 nt, Artificial Sequence
  Description of Artificial Sequence: Synthetic oligonucleotide
  Sense strand starting at position 3234 of SEQ ID NO: 1244727
ggaugauacacuuguaagu

SEQ ID NO: 1510379 - RNA, 19 nt, Artificial Sequence
  Description of Artificial Sequence: Synthetic oligonucleotide
  Antisense strand to SEQ ID NO: 1510378
acuuacaaguguaucaucc

SEQ ID NO: 1510380 - RNA, 19 nt, Artificial Sequence
  Description of Artificial Sequence: Synthetic oligonucleotide
  Sense strand starting at position 3414 of SEQ ID NO: 1244727
gacaaugucuggcucuauu

SEQ ID NO: 1510381 - RNA, 19 nt, Artificial Sequence
  Description of Artificial Sequence: Synthetic oligonucleotide
  Antisense strand to SEQ ID NO: 1510380
aauagagccagacauuguc

SEQ ID NO: 1510382 - RNA, 19 nt, Artificial Sequence
  Description of Artificial Sequence: Synthetic oligonucleotide
  Sense strand starting at position 3726 of SEQ ID NO: 1244727
uuguaagaccucuggccuu

SEQ ID NO: 1510383 - RNA, 19 nt, Artificial Sequence
  Description of Artificial Sequence: Synthetic oligonucleotide
  Antisense strand to SEQ ID NO: 1510382
aaggccagaggucuuacaa

SEQ ID NO: 1510384 - RNA, 19 nt, Artificial Sequence
  Description of Artificial Sequence: Synthetic oligonucleotide
  Sense strand starting at position 3826 of SEQ ID NO: 1244727
guuuccuuccacugauaca

SEQ ID NO: 1510385 - RNA, 19 nt, Artificial Sequence
  Description of Artificial Sequence: Synthetic oligonucleotide
  Antisense strand to SEQ ID NO: 1510384
uguaucaguggaaggaaac

SEQ ID NO: 1510386 - RNA, 19 nt, Artificial Sequence
  Description of Artificial Sequence: Synthetic oligonucleotide
  Sense strand starting at position 3857 of SEQ ID NO: 1244727
gaguguugccaggugcuuu

SEQ ID NO: 1510387 - RNA, 19 nt, Artificial Sequence
  Description of Artificial Sequence: Synthetic oligonucleotide
  Antisense strand to SEQ ID NO: 1510386
aaagcaccuggcaacacuc

SEQ ID NO: 1510388 - RNA, 19 nt, Artificial Sequence
  Description of Artificial Sequence: Synthetic oligonucleotide
  Sense strand starting at position 157 of SEQ ID NO: 1244728
agaggaauuucugaggucu

SEQ ID NO: 1510389 - RNA, 19 nt, Artificial Sequence
  Description of Artificial Sequence: Synthetic oligonucleotide
  Antisense strand to SEQ ID NO: 1510388
agaccucagaaauuccucu

SEQ ID NO: 1510390 - RNA, 19 nt, Artificial Sequence
  Description of Artificial Sequence: Synthetic oligonucleotide
  Sense strand starting at position 159 of SEQ ID NO: 1244728
aggaauuucugaggucuuu

SEQ ID NO: 1510391 - RNA, 19 nt, Artificial Sequence
  Description of Artificial Sequence: Synthetic oligonucleotide
  Antisense strand to SEQ ID NO: 1510390
aaagaccucagaaauuccu

SEQ ID NO: 1510392 - RNA, 19 nt, Artificial Sequence
  Description of Artificial Sequence: Synthetic oligonucleotide
  Sense strand starting at position 265 of SEQ ID NO: 1244728
uuugaauaucugugcuggu

SEQ ID NO: 1510393 - RNA, 19 nt, Artificial Sequence
  Description of Artificial Sequence: Synthetic oligonucleotide
  Antisense strand to SEQ ID NO: 1510392
accagcacagauauucaaa

SEQ ID NO: 1510394 - RNA, 19 nt, Artificial Sequence
  Description of Artificial Sequence: Synthetic oligonucleotide
  Sense strand starting at position 282 of SEQ ID NO: 1244728
gugguuauaucucugagag

SEQ ID NO: 1510395 - RNA, 19 nt, Artificial Sequence
  Description of Artificial Sequence: Synthetic oligonucleotide
  Antisense strand to SEQ ID NO: 1510394
cucucagagauauaaccac

SEQ ID NO: 1510396 - RNA, 19 nt, Artificial Sequence
  Description of Artificial Sequence: Synthetic oligonucleotide
  Sense strand starting at position 283 of SEQ ID NO: 1244728
ugguuauaucucugagagg

SEQ ID NO: 1510397 - RNA, 19 nt, Artificial Sequence
  Description of Artificial Sequence: Synthetic oligonucleotide
  Antisense strand to SEQ ID NO: 1510396
ccucucagagauauaacca

SEQ ID NO: 1510398 - RNA, 19 nt, Artificial Sequence
  Description of Artificial Sequence: Synthetic oligonucleotide
  Sense strand starting at position 304 of SEQ ID NO: 1244728
uuagauggaucaccagagu

SEQ ID NO: 1510399 - RNA, 19 nt, Artificial Sequence
  Description of Artificial Sequence: Synthetic oligonucleotide
  Antisense strand to SEQ ID NO: 1510398
acucuggugauccaucuaa

SEQ ID NO: 1510400 - RNA, 19 nt, Artificial Sequence
  Description of Artificial Sequence: Synthetic oligonucleotide
  Sense strand starting at position 307 of SEQ ID NO: 1244728
gauggaucaccagaguguu

SEQ ID NO: 1510401 - RNA, 19 nt, Artificial Sequence
  Description of Artificial Sequence: Synthetic oligonucleotide
  Antisense strand to SEQ ID NO: 1510400
aacacucuggugauccauc

SEQ ID NO: 1510402 - RNA, 19 nt, Artificial Sequence
  Description of Artificial Sequence: Synthetic oligonucleotide
  Sense strand starting at position 360 of SEQ ID NO: 1244728
aucuguucuuuagugggaa

SEQ ID NO: 1510403 - RNA, 19 nt, Artificial Sequence
  Description of Artificial Sequence: Synthetic oligonucleotide
  Antisense strand to SEQ ID NO: 1510402
uucccacuaaagaacagau

SEQ ID NO: 1510404 - RNA, 19 nt, Artificial Sequence
  Description of Artificial Sequence: Synthetic oligonucleotide
  Sense strand starting at position 416 of SEQ ID NO: 1244728
ccaaguggcuugcucaauu

SEQ ID NO: 1510405 - RNA, 19 nt, Artificial Sequence
  Description of Artificial Sequence: Synthetic oligonucleotide
  Antisense strand to SEQ ID NO: 1510404
aauugagcaagccacuugg

SEQ ID NO: 1510406 - RNA, 19 nt, Artificial Sequence
  Description of Artificial Sequence: Synthetic oligonucleotide
  Sense strand starting at position 470 of SEQ ID NO: 1244728
ccauauuggaacggucacu

SEQ ID NO: 1510407 - RNA, 19 nt, Artificial Sequence
  Description of Artificial Sequence: Synthetic oligonucleotide
  Antisense strand to SEQ ID NO: 1510406
agugaccguuccaauaugg

SEQ ID NO: 1510408 - RNA, 19 nt, Artificial Sequence
  Description of Artificial Sequence: Synthetic oligonucleotide
  Sense strand starting at position 656 of SEQ ID NO: 1244728
gucaccuucuuagacauuu

SEQ ID NO: 1510409 - RNA, 19 nt, Artificial Sequence
  Description of Artificial Sequence: Synthetic oligonucleotide
  Antisense strand to SEQ ID NO: 1510408
aaaugucuaagaaggugac

SEQ ID NO: 1510410 - RNA, 19 nt, Artificial Sequence
  Description of Artificial Sequence: Synthetic oligonucleotide
  Sense strand starting at position 719 of SEQ ID NO: 1244728
ucuuccuaugaugagaguu

SEQ ID NO: 1510411 - RNA, 19 nt, Artificial Sequence
  Description of Artificial Sequence: Synthetic oligonucleotide
  Antisense strand to SEQ ID NO: 1510410
aacucucaucauaggaaga

SEQ ID NO: 1510412 - RNA, 19 nt, Artificial Sequence
  Description of Artificial Sequence: Synthetic oligonucleotide
  Sense strand starting at position 727 of SEQ ID NO: 1244728
ugaugagaguuagcuagca

SEQ ID NO: 1510413 - RNA, 19 nt, Artificial Sequence
  Description of Artificial Sequence: Synthetic oligonucleotide
  Antisense strand to SEQ ID NO: 1510412
ugcuagcuaacucucauca

SEQ ID NO: 1510414 - RNA, 19 nt, Artificial Sequence
  Description of Artificial Sequence: Synthetic oligonucleotide
  Sense strand starting at position 809 of SEQ ID NO: 1244728
acacaaagucuuuguaaug

SEQ ID NO: 1510415 - RNA, 19 nt, Artificial Sequence
  Description of Artificial Sequence: Synthetic oligonucleotide
  Antisense strand to SEQ ID NO: 1510414
cauuacaaagacuuugugu

SEQ ID NO: 1510416 - RNA, 19 nt, Artificial Sequence
  Description of Artificial Sequence: Synthetic oligonucleotide
  Sense strand starting at position 976 of SEQ ID NO: 1244728
caagaacaaguuugaaugu

SEQ ID NO: 1510417 - RNA, 19 nt, Artificial Sequence
  Description of Artificial Sequence: Synthetic oligonucleotide
  Antisense strand to SEQ ID NO: 1510416
acauucaaacuuguucuug

SEQ ID NO: 1510418 - RNA, 19 nt, Artificial Sequence
  Description of Artificial Sequence: Synthetic oligonucleotide
  Sense strand starting at position 977 of SEQ ID NO: 1244728
aagaacaaguuugaaugua

SEQ ID NO: 1510419 - RNA, 19 nt, Artificial Sequence
  Description of Artificial Sequence: Synthetic oligonucleotide
  Antisense strand to SEQ ID NO: 1510418
uacauucaaacuuguucuu

SEQ ID NO: 1510420 - RNA, 19 nt, Artificial Sequence
  Description of Artificial Sequence: Synthetic oligonucleotide
  Sense strand starting at position 1005 of SEQ ID NO: 1244728
caagcaaaugaugguuaua

SEQ ID NO: 1510421 - RNA, 19 nt, Artificial Sequence
  Description of Artificial Sequence: Synthetic oligonucleotide
  Antisense strand to SEQ ID NO: 1510420
uauaaccaucauuugcuug

SEQ ID NO: 1510422 - RNA, 19 nt, Artificial Sequence
  Description of Artificial Sequence: Synthetic oligonucleotide
  Sense strand starting at position 1007 of SEQ ID NO: 1244728
agcaaaugaugguuauauc

SEQ ID NO: 1510423 - RNA, 19 nt, Artificial Sequence
  Description of Artificial Sequence: Synthetic oligonucleotide
  Antisense strand to SEQ ID NO: 1510422
gauauaaccaucauuugcu

SEQ ID NO: 1510424 - RNA, 19 nt, Artificial Sequence
  Description of Artificial Sequence: Synthetic oligonucleotide
  Sense strand starting at position 1184 of SEQ ID NO: 1244728
gggcauuugugucaaccag

SEQ ID NO: 1510425 - RNA, 19 nt, Artificial Sequence
  Description of Artificial Sequence: Synthetic oligonucleotide
  Antisense strand to SEQ ID NO: 1510424
cugguugacacaaaugccc

SEQ ID NO: 1510426 - RNA, 19 nt, Artificial Sequence
  Description of Artificial Sequence: Synthetic oligonucleotide
  Sense strand starting at position 1589 of SEQ ID NO: 1244728
ggaagaaggucuggaaaga

SEQ ID NO: 1510427 - RNA, 19 nt, Artificial Sequence
  Description of Artificial Sequence: Synthetic oligonucleotide
  Antisense strand to SEQ ID NO: 1510426
ucuuuccagaccuucuucc

SEQ ID NO: 1510428 - RNA, 19 nt, Artificial Sequence
  Description of Artificial Sequence: Synthetic oligonucleotide
  Sense strand starting at position 1602 of SEQ ID NO: 1244728
gaaagaaacguggguucga

SEQ ID NO: 1510429 - RNA, 19 nt, Artificial Sequence
  Description of Artificial Sequence: Synthetic oligonucleotide
  Antisense strand to SEQ ID NO: 1510428
ucgaacccacguuucuuuc

SEQ ID NO: 1510430 - RNA, 19 nt, Artificial Sequence
  Description of Artificial Sequence: Synthetic oligonucleotide
  Sense strand starting at position 1776 of SEQ ID NO: 1244728
auggucugaucucuagaua

SEQ ID NO: 1510431 - RNA, 19 nt, Artificial Sequence
  Description of Artificial Sequence: Synthetic oligonucleotide
  Antisense strand to SEQ ID NO: 1510430
uaucuagagaucagaccau

SEQ ID NO: 1510432 - RNA, 19 nt, Artificial Sequence
  Description of Artificial Sequence: Synthetic oligonucleotide
  Sense strand starting at position 1828 of SEQ ID NO: 1244728
gucacuuugaggcgaauaa

SEQ ID NO: 1510433 - RNA, 19 nt, Artificial Sequence
  Description of Artificial Sequence: Synthetic oligonucleotide
  Antisense strand to SEQ ID NO: 1510432
uuauucgccucaaagugac

SEQ ID NO: 1510434 - RNA, 19 nt, Artificial Sequence
  Description of Artificial Sequence: Synthetic oligonucleotide
  Sense strand starting at position 1829 of SEQ ID NO: 1244728
ucacuuugaggcgaauaaa

SEQ ID NO: 1510435 - RNA, 19 nt, Artificial Sequence
  Description of Artificial Sequence: Synthetic oligonucleotide
  Antisense strand to SEQ ID NO: 1510434
uuuauucgccucaaaguga

SEQ ID NO: 1510436 - RNA, 19 nt, Artificial Sequence
  Description of Artificial Sequence: Synthetic oligonucleotide
  Sense strand starting at position 1832 of SEQ ID NO: 1244728
cuuugaggcgaauaaacuu

SEQ ID NO: 1510437 - RNA, 19 nt, Artificial Sequence
  Description of Artificial Sequence: Synthetic oligonucleotide
  Antisense strand to SEQ ID NO: 1510436
aaguuuauucgccucaaag

SEQ ID NO: 1510438 - RNA, 19 nt, Artificial Sequence
  Description of Artificial Sequence: Synthetic oligonucleotide
  Sense strand starting at position 2213 of SEQ ID NO: 1244728
ucuuucuuccugggaccua

SEQ ID NO: 1510439 - RNA, 19 nt, Artificial Sequence
  Description of Artificial Sequence: Synthetic oligonucleotide
  Antisense strand to SEQ ID NO: 1510438
uaggucccaggaagaaaga

SEQ ID NO: 1510440 - RNA, 19 nt, Artificial Sequence
  Description of Artificial Sequence: Synthetic oligonucleotide
  Sense strand starting at position 2231 of SEQ ID NO: 1244728
agcaguacucgauacccau

SEQ ID NO: 1510441 - RNA, 19 nt, Artificial Sequence
  Description of Artificial Sequence: Synthetic oligonucleotide
  Antisense strand to SEQ ID NO: 1510440
auggguaucgaguacugcu

SEQ ID NO: 1510442 - RNA, 19 nt, Artificial Sequence
  Description of Artificial Sequence: Synthetic oligonucleotide
  Sense strand starting at position 2243 of SEQ ID NO: 1244728
uacccaugcguuuaucuga

SEQ ID NO: 1510443 - RNA, 19 nt, Artificial Sequence
  Description of Artificial Sequence: Synthetic oligonucleotide
  Antisense strand to SEQ ID NO: 1510442
ucagauaaacgcaugggua

SEQ ID NO: 1510444 - RNA, 19 nt, Artificial Sequence
  Description of Artificial Sequence: Synthetic oligonucleotide
  Sense strand starting at position 2287 of SEQ ID NO: 1244728
cuuagaggcccuugucuaa

SEQ ID NO: 1510445 - RNA, 19 nt, Artificial Sequence
  Description of Artificial Sequence: Synthetic oligonucleotide
  Antisense strand to SEQ ID NO: 1510444
uuagacaagggccucuaag

SEQ ID NO: 1510446 - RNA, 19 nt, Artificial Sequence
  Description of Artificial Sequence: Synthetic oligonucleotide
  Sense strand starting at position 2636 of SEQ ID NO: 1244728
cuccaaccuggugacaauu

SEQ ID NO: 1510447 - RNA, 19 nt, Artificial Sequence
  Description of Artificial Sequence: Synthetic oligonucleotide
  Antisense strand to SEQ ID NO: 1510446
aauugucaccagguuggag

SEQ ID NO: 1510448 - RNA, 19 nt, Artificial Sequence
  Description of Artificial Sequence: Synthetic oligonucleotide
  Sense strand starting at position 2644 of SEQ ID NO: 1244728
uggugacaauuugaauuau

SEQ ID NO: 1510449 - RNA, 19 nt, Artificial Sequence
  Description of Artificial Sequence: Synthetic oligonucleotide
  Antisense strand to SEQ ID NO: 1510448
auaauucaaauugucacca

SEQ ID NO: 1510450 - RNA, 19 nt, Artificial Sequence
  Description of Artificial Sequence: Synthetic oligonucleotide
  Sense strand starting at position 2694 of SEQ ID NO: 1244728
gaaccaugugcauguaguu

SEQ ID NO: 1510451 - RNA, 19 nt, Artificial Sequence
  Description of Artificial Sequence: Synthetic oligonucleotide
  Antisense strand to SEQ ID NO: 1510450
aacuacaugcacaugguuc

SEQ ID NO: 1510452 - RNA, 19 nt, Artificial Sequence
  Description of Artificial Sequence: Synthetic oligonucleotide
  Sense strand starting at position 3263 of SEQ ID NO: 1244728
gggagauccugggagaggu

SEQ ID NO: 1510453 - RNA, 19 nt, Artificial Sequence
  Description of Artificial Sequence: Synthetic oligonucleotide
  Antisense strand to SEQ ID NO: 1510452
accucucccaggaucuccc

SEQ ID NO: 1510454 - RNA, 19 nt, Artificial Sequence
  Description of Artificial Sequence: Synthetic oligonucleotide
  Sense strand starting at position 3542 of SEQ ID NO: 1244728
ccaacaagcuugggaauuu

SEQ ID NO: 1510455 - RNA, 19 nt, Artificial Sequence
  Description of Artificial Sequence: Synthetic oligonucleotide
  Antisense strand to SEQ ID NO: 1510454
aaauucccaagcuuguugg

SEQ ID NO: 1510456 - RNA, 19 nt, Artificial Sequence
  Description of Artificial Sequence: Synthetic oligonucleotide
  Sense strand starting at position 3646 of SEQ ID NO: 1244728
cuuaaaugagcauguuugu

SEQ ID NO: 1510457 - RNA, 19 nt, Artificial Sequence
  Description of Artificial Sequence: Synthetic oligonucleotide
  Antisense strand to SEQ ID NO: 1510456
acaaacaugcucauuuaag

SEQ ID NO: 1510458 - RNA, 19 nt, Artificial Sequence
  Description of Artificial Sequence: Synthetic oligonucleotide
  Sense strand starting at position 3659 of SEQ ID NO: 1244728
guuugugcuguauaggcaa

SEQ ID NO: 1510459 - RNA, 19 nt, Artificial Sequence
  Description of Artificial Sequence: Synthetic oligonucleotide
  Antisense strand to SEQ ID NO: 1510458
uugccuauacagcacaaac

SEQ ID NO: 1510460 - RNA, 19 nt, Artificial Sequence
  Description of Artificial Sequence: Synthetic oligonucleotide
  Sense strand starting at position 3802 of SEQ ID NO: 1244728
aggucuguccagugugacu

SEQ ID NO: 1510461 - RNA, 19 nt, Artificial Sequence
  Description of Artificial Sequence: Synthetic oligonucleotide
  Antisense strand to SEQ ID NO: 1510460
agucacacuggacagaccu

SEQ ID NO: 1510462 - RNA, 19 nt, Artificial Sequence
  Description of Artificial Sequence: Synthetic oligonucleotide
  Sense strand starting at position 3807 of SEQ ID NO: 1244728
uguccagugugacuucuua

SEQ ID NO: 1510463 - RNA, 19 nt, Artificial Sequence
  Description of Artificial Sequence: Synthetic oligonucleotide
  Antisense strand to SEQ ID NO: 1510462
uaagaagucacacuggaca

SEQ ID NO: 1510464 - RNA, 19 nt, Artificial Sequence
  Description of Artificial Sequence: Synthetic oligonucleotide
  Sense strand starting at position 3811 of SEQ ID NO: 1244728
cagugugacuucuuagcac

SEQ ID NO: 1510465 - RNA, 19 nt, Artificial Sequence
  Description of Artificial Sequence: Synthetic oligonucleotide
  Antisense strand to SEQ ID NO: 1510464
gugcuaagaagucacacug

SEQ ID NO: 1510466 - RNA, 19 nt, Artificial Sequence
  Description of Artificial Sequence: Synthetic oligonucleotide
  Sense strand starting at position 3871 of SEQ ID NO: 1244728
gacucuuucuagccgaaga

SEQ ID NO: 1510467 - RNA, 19 nt, Artificial Sequence
  Description of Artificial Sequence: Synthetic oligonucleotide
  Antisense strand to SEQ ID NO: 1510466
ucuucggcuagaaagaguc

SEQ ID NO: 1510468 - RNA, 19 nt, Artificial Sequence
  Description of Artificial Sequence: Synthetic oligonucleotide
  Sense strand starting at position 616 of SEQ ID NO: 1244729
ucacauuccugagaaucgu

SEQ ID NO: 1510469 - RNA, 19 nt, Artificial Sequence
  Description of Artificial Sequence: Synthetic oligonucleotide
  Antisense strand to SEQ ID NO: 1510468
acgauucucaggaauguga

SEQ ID NO: 1510470 - RNA, 19 nt, Artificial Sequence
  Description of Artificial Sequence: Synthetic oligonucleotide
  Sense strand starting at position 631 of SEQ ID NO: 1244729
ucguaaauccucugaggug

SEQ ID NO: 1510471 - RNA, 19 nt, Artificial Sequence
  Description of Artificial Sequence: Synthetic oligonucleotide
  Antisense strand to SEQ ID NO: 1510470
caccucagaggauuuacga

SEQ ID NO: 1510472 - RNA, 19 nt, Artificial Sequence
  Description of Artificial Sequence: Synthetic oligonucleotide
  Sense strand starting at position 724 of SEQ ID NO: 1244729
ggcuuccucucccuuagaa

SEQ ID NO: 1510473 - RNA, 19 nt, Artificial Sequence
  Description of Artificial Sequence: Synthetic oligonucleotide
  Antisense strand to SEQ ID NO: 1510472
uucuaagggagaggaagcc

SEQ ID NO: 1510474 - RNA, 19 nt, Artificial Sequence
  Description of Artificial Sequence: Synthetic oligonucleotide
  Sense strand starting at position 2184 of SEQ ID NO: 1244729
ggaaguguuuguuaccgag

SEQ ID NO: 1510475 - RNA, 19 nt, Artificial Sequence
  Description of Artificial Sequence: Synthetic oligonucleotide
  Antisense strand to SEQ ID NO: 1510474
cucgguaacaaacacuucc

SEQ ID NO: 1510476 - RNA, 19 nt, Artificial Sequence
  Description of Artificial Sequence: Synthetic oligonucleotide
  Sense strand starting at position 2573 of SEQ ID NO: 1244729
ggugauccgcccugggauu

SEQ ID NO: 1510477 - RNA, 19 nt, Artificial Sequence
  Description of Artificial Sequence: Synthetic oligonucleotide
  Antisense strand to SEQ ID NO: 1510476
aaucccagggcggaucacc

SEQ ID NO: 1510478 - RNA, 19 nt, Artificial Sequence
  Description of Artificial Sequence: Synthetic oligonucleotide
  Sense strand starting at position 2574 of SEQ ID NO: 1244729
gugauccgcccugggauua

SEQ ID NO: 1510479 - RNA, 19 nt, Artificial Sequence
  Description of Artificial Sequence: Synthetic oligonucleotide
  Antisense strand to SEQ ID NO: 1510478
uaaucccagggcggaucac

SEQ ID NO: 1510480 - RNA, 19 nt, Artificial Sequence
  Description of Artificial Sequence: Synthetic oligonucleotide
  Sense strand starting at position 2714 of SEQ ID NO: 1244729
gccggucagucucgagaau

SEQ ID NO: 1510481 - RNA, 19 nt, Artificial Sequence
  Description of Artificial Sequence: Synthetic oligonucleotide
  Antisense strand to SEQ ID NO: 1510480
auucucgagacugaccggc

SEQ ID NO: 1510482 - RNA, 19 nt, Artificial Sequence
  Description of Artificial Sequence: Synthetic oligonucleotide
  Sense strand starting at position 2715 of SEQ ID NO: 1244729
ccggucagucucgagaauu

SEQ ID NO: 1510483 - RNA, 19 nt, Artificial Sequence
  Description of Artificial Sequence: Synthetic oligonucleotide
  Antisense strand to SEQ ID NO: 1510482
aauucucgagacugaccgg

SEQ ID NO: 1510484 - RNA, 19 nt, Artificial Sequence
  Description of Artificial Sequence: Synthetic oligonucleotide
  Sense strand starting at position 2758 of SEQ ID NO: 1244729
uacagaguuguuugaauaa

SEQ ID NO: 1510485 - RNA, 19 nt, Artificial Sequence
  Description of Artificial Sequence: Synthetic oligonucleotide
  Antisense strand to SEQ ID NO: 1510484
uuauucaaacaacucugua

SEQ ID NO: 1510486 - RNA, 19 nt, Artificial Sequence
  Description of Artificial Sequence: Synthetic oligonucleotide
  Sense strand starting at position 2991 of SEQ ID NO: 1244729
aggacagacucagguaauc

SEQ ID NO: 1510487 - RNA, 19 nt, Artificial Sequence
  Description of Artificial Sequence: Synthetic oligonucleotide
  Antisense strand to SEQ ID NO: 1510486
gauuaccugagucuguccu

SEQ ID NO: 1510488 - RNA, 19 nt, Artificial Sequence
  Description of Artificial Sequence: Synthetic oligonucleotide
  Sense strand starting at position 3205 of SEQ ID NO: 1244729
uuggcagugaaugacaauu

SEQ ID NO: 1510489 - RNA, 19 nt, Artificial Sequence
  Description of Artificial Sequence: Synthetic oligonucleotide
  Antisense strand to SEQ ID NO: 1510488
aauugucauucacugccaa

SEQ ID NO: 1510490 - RNA, 19 nt, Artificial Sequence
  Description of Artificial Sequence: Synthetic oligonucleotide
  Sense strand starting at position 483 of SEQ ID NO: 1244730
acuugaaaucauuacguua

SEQ ID NO: 1510491 - RNA, 19 nt, Artificial Sequence
  Description of Artificial Sequence: Synthetic oligonucleotide
  Antisense strand to SEQ ID NO: 1510490
uaacguaaugauuucaagu

SEQ ID NO: 1510492 - RNA, 19 nt, Artificial Sequence
  Description of Artificial Sequence: Synthetic oligonucleotide
  Sense strand starting at position 576 of SEQ ID NO: 1244730
auuguauucuaagagcaga

SEQ ID NO: 1510493 - RNA, 19 nt, Artificial Sequence
  Description of Artificial Sequence: Synthetic oligonucleotide
  Antisense strand to SEQ ID NO: 1510492
ucugcucuuagaauacaau

SEQ ID NO: 1510494 - RNA, 19 nt, Artificial Sequence
  Description of Artificial Sequence: Synthetic oligonucleotide
  Sense strand starting at position 695 of SEQ ID NO: 1244730
acacaacaguuauuauagu

SEQ ID NO: 1510495 - RNA, 19 nt, Artificial Sequence
  Description of Artificial Sequence: Synthetic oligonucleotide
  Antisense strand to SEQ ID NO: 1510494
acuauaauaacuguugugu

SEQ ID NO: 1510496 - RNA, 19 nt, Artificial Sequence
  Description of Artificial Sequence: Synthetic oligonucleotide
  Sense strand starting at position 930 of SEQ ID NO: 1244730
gcauaauuggauuguuggu

SEQ ID NO: 1510497 - RNA, 19 nt, Artificial Sequence
  Description of Artificial Sequence: Synthetic oligonucleotide
  Antisense strand to SEQ ID NO: 1510496
accaacaauccaauuaugc

SEQ ID NO: 1510498 - RNA, 19 nt, Artificial Sequence
  Description of Artificial Sequence: Synthetic oligonucleotide
  Sense strand starting at position 992 of SEQ ID NO: 1244730
ccgugaugugauuauuaaa

SEQ ID NO: 1510499 - RNA, 19 nt, Artificial Sequence
  Description of Artificial Sequence: Synthetic oligonucleotide
  Antisense strand to SEQ ID NO: 1510498
uuuaauaaucacaucacgg

SEQ ID NO: 1510500 - RNA, 19 nt, Artificial Sequence
  Description of Artificial Sequence: Synthetic oligonucleotide
  Sense strand starting at position 1010 of SEQ ID NO: 1244730
acauuacaugccugucuua

SEQ ID NO: 1510501 - RNA, 19 nt, Artificial Sequence
  Description of Artificial Sequence: Synthetic oligonucleotide
  Antisense strand to SEQ ID NO: 1510500
uaagacaggcauguaaugu

SEQ ID NO: 1510502 - RNA, 19 nt, Artificial Sequence
  Description of Artificial Sequence: Synthetic oligonucleotide
  Sense strand starting at position 1156 of SEQ ID NO: 1244730
cuuagagcucuuuguccuu

SEQ ID NO: 1510503 - RNA, 19 nt, Artificial Sequence
  Description of Artificial Sequence: Synthetic oligonucleotide
  Antisense strand to SEQ ID NO: 1510502
aaggacaaagagcucuaag

SEQ ID NO: 1510504 - RNA, 19 nt, Artificial Sequence
  Description of Artificial Sequence: Synthetic oligonucleotide
  Sense strand starting at position 1185 of SEQ ID NO: 1244730
acguguauucuacagaucu

SEQ ID NO: 1510505 - RNA, 19 nt, Artificial Sequence
  Description of Artificial Sequence: Synthetic oligonucleotide
  Antisense strand to SEQ ID NO: 1510504
agaucuguagaauacacgu

SEQ ID NO: 1510506 - RNA, 19 nt, Artificial Sequence
  Description of Artificial Sequence: Synthetic oligonucleotide
  Sense strand starting at position 1320 of SEQ ID NO: 1244730
agugguuggucggucacau

SEQ ID NO: 1510507 - RNA, 19 nt, Artificial Sequence
  Description of Artificial Sequence: Synthetic oligonucleotide
  Antisense strand to SEQ ID NO: 1510506
augugaccgaccaaccacu

SEQ ID NO: 1510508 - RNA, 19 nt, Artificial Sequence
  Description of Artificial Sequence: Synthetic oligonucleotide
  Sense strand starting at position 1349 of SEQ ID NO: 1244730
agaacuaguuucucaaguu

SEQ ID NO: 1510509 - RNA, 19 nt, Artificial Sequence
  Description of Artificial Sequence: Synthetic oligonucleotide
  Antisense strand to SEQ ID NO: 1510508
aacuugagaaacuaguucu

SEQ ID NO: 1510510 - RNA, 19 nt, Artificial Sequence
  Description of Artificial Sequence: Synthetic oligonucleotide
  Sense strand starting at position 1933 of SEQ ID NO: 1244730
caggucgaguccuuauaua

SEQ ID NO: 1510511 - RNA, 19 nt, Artificial Sequence
  Description of Artificial Sequence: Synthetic oligonucleotide
  Antisense strand to SEQ ID NO: 1510510
uauauaaggacucgaccug

SEQ ID NO: 1510512 - RNA, 19 nt, Artificial Sequence
  Description of Artificial Sequence: Synthetic oligonucleotide
  Sense strand starting at position 2026 of SEQ ID NO: 1244730
gcgaacucugccgcguuaa

SEQ ID NO: 1510513 - RNA, 19 nt, Artificial Sequence
  Description of Artificial Sequence: Synthetic oligonucleotide
  Antisense strand to SEQ ID NO: 1510512
uuaacgcggcagaguucgc

SEQ ID NO: 1510514 - RNA, 19 nt, Artificial Sequence
  Description of Artificial Sequence: Synthetic oligonucleotide
  Sense strand starting at position 2028 of SEQ ID NO: 1244730
gaacucugccgcguuaaau

SEQ ID NO: 1510515 - RNA, 19 nt, Artificial Sequence
  Description of Artificial Sequence: Synthetic oligonucleotide
  Antisense strand to SEQ ID NO: 1510514
auuuaacgcggcagaguuc

SEQ ID NO: 1510516 - RNA, 19 nt, Artificial Sequence
  Description of Artificial Sequence: Synthetic oligonucleotide
  Sense strand starting at position 2029 of SEQ ID NO: 1244730
aacucugccgcguuaaauu

SEQ ID NO: 1510517 - RNA, 19 nt, Artificial Sequence
  Description of Artificial Sequence: Synthetic oligonucleotide
  Antisense strand to SEQ ID NO: 1510516
aauuuaacgcggcagaguu

SEQ ID NO: 1510518 - RNA, 19 nt, Artificial Sequence
  Description of Artificial Sequence: Synthetic oligonucleotide
  Sense strand starting at position 2036 of SEQ ID NO: 1244730
ccgcguuaaauugccuaga

SEQ ID NO: 1510519 - RNA, 19 nt, Artificial Sequence
  Description of Artificial Sequence: Synthetic oligonucleotide
  Antisense strand to SEQ ID NO: 1510518
ucuaggcaauuuaacgcgg

SEQ ID NO: 1510520 - RNA, 19 nt, Artificial Sequence
  Description of Artificial Sequence: Synthetic oligonucleotide
  Sense strand starting at position 2037 of SEQ ID NO: 1244730
cgcguuaaauugccuagaa

SEQ ID NO: 1510521 - RNA, 19 nt, Artificial Sequence
  Description of Artificial Sequence: Synthetic oligonucleotide
  Antisense strand to SEQ ID NO: 1510520
uucuaggcaauuuaacgcg

SEQ ID NO: 1510522 - RNA, 19 nt, Artificial Sequence
  Description of Artificial Sequence: Synthetic oligonucleotide
  Sense strand starting at position 2038 of SEQ ID NO: 1244730
gcguuaaauugccuagaag

SEQ ID NO: 1510523 - RNA, 19 nt, Artificial Sequence
  Description of Artificial Sequence: Synthetic oligonucleotide
  Antisense strand to SEQ ID NO: 1510522
cuucuaggcaauuuaacgc

SEQ ID NO: 1510524 - RNA, 19 nt, Artificial Sequence
  Description of Artificial Sequence: Synthetic oligonucleotide
  Sense strand starting at position 2084 of SEQ ID NO: 1244730
aguucuuaguuuccgggaa

SEQ ID NO: 1510525 - RNA, 19 nt, Artificial Sequence
  Description of Artificial Sequence: Synthetic oligonucleotide
  Antisense strand to SEQ ID NO: 1510524
uucccggaaacuaagaacu

SEQ ID NO: 1510526 - RNA, 19 nt, Artificial Sequence
  Description of Artificial Sequence: Synthetic oligonucleotide
  Sense strand starting at position 2373 of SEQ ID NO: 1244730
gagcucucgccagagcuuu

SEQ ID NO: 1510527 - RNA, 19 nt, Artificial Sequence
  Description of Artificial Sequence: Synthetic oligonucleotide
  Antisense strand to SEQ ID NO: 1510526
aaagcucuggcgagagcuc

SEQ ID NO: 1510528 - RNA, 19 nt, Artificial Sequence
  Description of Artificial Sequence: Synthetic oligonucleotide
  Sense strand starting at position 2611 of SEQ ID NO: 1244730
gagccagagugggauuuaa

SEQ ID NO: 1510529 - RNA, 19 nt, Artificial Sequence
  Description of Artificial Sequence: Synthetic oligonucleotide
  Antisense strand to SEQ ID NO: 1510528
uuaaaucccacucuggcuc

SEQ ID NO: 1510530 - RNA, 19 nt, Artificial Sequence
  Description of Artificial Sequence: Synthetic oligonucleotide
  Sense strand starting at position 2743 of SEQ ID NO: 1244730
ccaggauucuguccgagug

SEQ ID NO: 1510531 - RNA, 19 nt, Artificial Sequence
  Description of Artificial Sequence: Synthetic oligonucleotide
  Antisense strand to SEQ ID NO: 1510530
cacucggacagaauccugg

SEQ ID NO: 1510532 - RNA, 19 nt, Artificial Sequence
  Description of Artificial Sequence: Synthetic oligonucleotide
  Sense strand starting at position 2744 of SEQ ID NO: 1244730
caggauucuguccgagugu

SEQ ID NO: 1510533 - RNA, 19 nt, Artificial Sequence
  Description of Artificial Sequence: Synthetic oligonucleotide
  Antisense strand to SEQ ID NO: 1510532
acacucggacagaauccug

SEQ ID NO: 1510534 - RNA, 19 nt, Artificial Sequence
  Description of Artificial Sequence: Synthetic oligonucleotide
  Sense strand starting at position 2751 of SEQ ID NO: 1244730
cuguccgaguguuuggauu

SEQ ID NO: 1510535 - RNA, 19 nt, Artificial Sequence
  Description of Artificial Sequence: Synthetic oligonucleotide
  Antisense strand to SEQ ID NO: 1510534
aauccaaacacucggacag

SEQ ID NO: 1510536 - RNA, 19 nt, Artificial Sequence
  Description of Artificial Sequence: Synthetic oligonucleotide
  Sense strand starting at position 2925 of SEQ ID NO: 1244730
gcgguuaaugccgcacuga

SEQ ID NO: 1510537 - RNA, 19 nt, Artificial Sequence
  Description of Artificial Sequence: Synthetic oligonucleotide
  Antisense strand to SEQ ID NO: 1510536
ucagugcggcauuaaccgc

SEQ ID NO: 1510538 - RNA, 19 nt, Artificial Sequence
  Description of Artificial Sequence: Synthetic oligonucleotide
  Sense strand starting at position 2926 of SEQ ID NO: 1244730
cgguuaaugccgcacugau

SEQ ID NO: 1510539 - RNA, 19 nt, Artificial Sequence
  Description of Artificial Sequence: Synthetic oligonucleotide
  Antisense strand to SEQ ID NO: 1510538
aucagugcggcauuaaccg

SEQ ID NO: 1510540 - RNA, 19 nt, Artificial Sequence
  Description of Artificial Sequence: Synthetic oligonucleotide
  Sense strand starting at position 2955 of SEQ ID NO: 1244730
uccagugaaagcgaaagua

SEQ ID NO: 1510541 - RNA, 19 nt, Artificial Sequence
  Description of Artificial Sequence: Synthetic oligonucleotide
  Antisense strand to SEQ ID NO: 1510540
uacuuucgcuuucacugga

SEQ ID NO: 1510542 - RNA, 19 nt, Artificial Sequence
  Description of Artificial Sequence: Synthetic oligonucleotide
  Sense strand starting at position 3002 of SEQ ID NO: 1244730
auacaauguguguauggau

SEQ ID NO: 1510543 - RNA, 19 nt, Artificial Sequence
  Description of Artificial Sequence: Synthetic oligonucleotide
  Antisense strand to SEQ ID NO: 1510542
auccauacacacauuguau

SEQ ID NO: 1510544 - RNA, 19 nt, Artificial Sequence
  Description of Artificial Sequence: Synthetic oligonucleotide
  Sense strand starting at position 3037 of SEQ ID NO: 1244730
uacacuuauguguauguua

SEQ ID NO: 1510545 - RNA, 19 nt, Artificial Sequence
  Description of Artificial Sequence: Synthetic oligonucleotide
  Antisense strand to SEQ ID NO: 1510544
uaacauacacauaagugua

SEQ ID NO: 1510546 - RNA, 19 nt, Artificial Sequence
  Description of Artificial Sequence: Synthetic oligonucleotide
  Sense strand starting at position 3050 of SEQ ID NO: 1244730
auguuacgcacguuuguua

SEQ ID NO: 1510547 - RNA, 19 nt, Artificial Sequence
  Description of Artificial Sequence: Synthetic oligonucleotide
  Antisense strand to SEQ ID NO: 1510546
uaacaaacgugcguaacau

SEQ ID NO: 1510548 - RNA, 19 nt, Artificial Sequence
  Description of Artificial Sequence: Synthetic oligonucleotide
  Sense strand starting at position 3133 of SEQ ID NO: 1244730
ucaguaaaucuucguauuc

SEQ ID NO: 1510549 - RNA, 19 nt, Artificial Sequence
  Description of Artificial Sequence: Synthetic oligonucleotide
  Antisense strand to SEQ ID NO: 1510548
gaauacgaagauuuacuga

SEQ ID NO: 1510550 - RNA, 19 nt, Artificial Sequence
  Description of Artificial Sequence: Synthetic oligonucleotide
  Sense strand starting at position 3188 of SEQ ID NO: 1244730
uacagagagucugugcaaa

SEQ ID NO: 1510551 - RNA, 19 nt, Artificial Sequence
  Description of Artificial Sequence: Synthetic oligonucleotide
  Antisense strand to SEQ ID NO: 1510550
uuugcacagacucucugua

SEQ ID NO: 1510552 - RNA, 19 nt, Artificial Sequence
  Description of Artificial Sequence: Synthetic oligonucleotide
  Sense strand starting at position 3199 of SEQ ID NO: 1244730
ugugcaaaccuguaccaaa

SEQ ID NO: 1510553 - RNA, 19 nt, Artificial Sequence
  Description of Artificial Sequence: Synthetic oligonucleotide
  Antisense strand to SEQ ID NO: 1510552
uuugguacagguuugcaca

SEQ ID NO: 1510554 - RNA, 19 nt, Artificial Sequence
  Description of Artificial Sequence: Synthetic oligonucleotide
  Sense strand starting at position 3370 of SEQ ID NO: 1244730
agccgaucuuucuuaugaa

SEQ ID NO: 1510555 - RNA, 19 nt, Artificial Sequence
  Description of Artificial Sequence: Synthetic oligonucleotide
  Antisense strand to SEQ ID NO: 1510554
uucauaagaaagaucggcu

SEQ ID NO: 1510556 - RNA, 19 nt, Artificial Sequence
  Description of Artificial Sequence: Synthetic oligonucleotide
  Sense strand starting at position 3400 of SEQ ID NO: 1244730
ggaaguucuuuagcuggaa

SEQ ID NO: 1510557 - RNA, 19 nt, Artificial Sequence
  Description of Artificial Sequence: Synthetic oligonucleotide
  Antisense strand to SEQ ID NO: 1510556
uuccagcuaaagaacuucc

SEQ ID NO: 1510558 - RNA, 19 nt, Artificial Sequence
  Description of Artificial Sequence: Synthetic oligonucleotide
  Sense strand starting at position 3403 of SEQ ID NO: 1244730
aguucuuuagcuggaagga

SEQ ID NO: 1510559 - RNA, 19 nt, Artificial Sequence
  Description of Artificial Sequence: Synthetic oligonucleotide
  Antisense strand to SEQ ID NO: 1510558
uccuuccagcuaaagaacu

SEQ ID NO: 1510560 - RNA, 19 nt, Artificial Sequence
  Description of Artificial Sequence: Synthetic oligonucleotide
  Sense strand starting at position 3404 of SEQ ID NO: 1244730
guucuuuagcuggaaggaa

SEQ ID NO: 1510561 - RNA, 19 nt, Artificial Sequence
  Description of Artificial Sequence: Synthetic oligonucleotide
  Antisense strand to SEQ ID NO: 1510560
uuccuuccagcuaaagaac

SEQ ID NO: 1510562 - RNA, 19 nt, Artificial Sequence
  Description of Artificial Sequence: Synthetic oligonucleotide
  Sense strand starting at position 3475 of SEQ ID NO: 1244730
gauaguaaauaugcagaua

SEQ ID NO: 1510563 - RNA, 19 nt, Artificial Sequence
  Description of Artificial Sequence: Synthetic oligonucleotide
  Antisense strand to SEQ ID NO: 1510562
uaucugcauauuuacuauc

SEQ ID NO: 1510564 - RNA, 19 nt, Artificial Sequence
  Description of Artificial Sequence: Synthetic oligonucleotide
  Sense strand starting at position 3866 of SEQ ID NO: 1244730
uuaacugaggcucaauagu

SEQ ID NO: 1510565 - RNA, 19 nt, Artificial Sequence
  Description of Artificial Sequence: Synthetic oligonucleotide
  Antisense strand to SEQ ID NO: 1510564
acuauugagccucaguuaa

SEQ ID NO: 1510566 - RNA, 19 nt, Artificial Sequence
  Description of Artificial Sequence: Synthetic oligonucleotide
  Sense strand starting at position 3875 of SEQ ID NO: 1244730
gcucaauaguuauuguaag

SEQ ID NO: 1510567 - RNA, 19 nt, Artificial Sequence
  Description of Artificial Sequence: Synthetic oligonucleotide
  Antisense strand to SEQ ID NO: 1510566
cuuacaauaacuauugagc

SEQ ID NO: 1510568 - RNA, 19 nt, Artificial Sequence
  Description of Artificial Sequence: Synthetic oligonucleotide
  Sense strand starting at position 3889 of SEQ ID NO: 1244730
guaagaaacgggcguuuga

SEQ ID NO: 1510569 - RNA, 19 nt, Artificial Sequence
  Description of Artificial Sequence: Synthetic oligonucleotide
  Antisense strand to SEQ ID NO: 1510568
ucaaacgcccguuucuuac

SEQ ID NO: 1510570 - RNA, 19 nt, Artificial Sequence
  Description of Artificial Sequence: Synthetic oligonucleotide
  Sense strand starting at position 61 of SEQ ID NO: 1244731
auuuauaagucagcgguuu

SEQ ID NO: 1510571 - RNA, 19 nt, Artificial Sequence
  Description of Artificial Sequence: Synthetic oligonucleotide
  Antisense strand to SEQ ID NO: 1510570
aaaccgcugacuuauaaau

SEQ ID NO: 1510572 - RNA, 19 nt, Artificial Sequence
  Description of Artificial Sequence: Synthetic oligonucleotide
  Sense strand starting at position 102 of SEQ ID NO: 1244731
ggucaaacuuccucgcacu

SEQ ID NO: 1510573 - RNA, 19 nt, Artificial Sequence
  Description of Artificial Sequence: Synthetic oligonucleotide
  Antisense strand to SEQ ID NO: 1510572
agugcgaggaaguuugacc

SEQ ID NO: 1510574 - RNA, 19 nt, Artificial Sequence
  Description of Artificial Sequence: Synthetic oligonucleotide
  Sense strand starting at position 103 of SEQ ID NO: 1244731
gucaaacuuccucgcacuu

SEQ ID NO: 1510575 - RNA, 19 nt, Artificial Sequence
  Description of Artificial Sequence: Synthetic oligonucleotide
  Antisense strand to SEQ ID NO: 1510574
aagugcgaggaaguuugac

SEQ ID NO: 1510576 - RNA, 19 nt, Artificial Sequence
  Description of Artificial Sequence: Synthetic oligonucleotide
  Sense strand starting at position 151 of SEQ ID NO: 1244731
aggagaacaucacacuuua

SEQ ID NO: 1510577 - RNA, 19 nt, Artificial Sequence
  Description of Artificial Sequence: Synthetic oligonucleotide
  Antisense strand to SEQ ID NO: 1510576
uaaagugugauguucuccu

SEQ ID NO: 1510578 - RNA, 19 nt, Artificial Sequence
  Description of Artificial Sequence: Synthetic oligonucleotide
  Sense strand starting at position 316 of SEQ ID NO: 1244731
ggcuuaguacuaggccuaa

SEQ ID NO: 1510579 - RNA, 19 nt, Artificial Sequence
  Description of Artificial Sequence: Synthetic oligonucleotide
  Antisense strand to SEQ ID NO: 1510578
uuaggccuaguacuaagcc

SEQ ID NO: 1510580 - RNA, 19 nt, Artificial Sequence
  Description of Artificial Sequence: Synthetic oligonucleotide
  Sense strand starting at position 408 of SEQ ID NO: 1244731
ccaaucuuagagcgucaga

SEQ ID NO: 1510581 - RNA, 19 nt, Artificial Sequence
  Description of Artificial Sequence: Synthetic oligonucleotide
  Antisense strand to SEQ ID NO: 1510580
ucugacgcucuaagauugg

SEQ ID NO: 1510582 - RNA, 19 nt, Artificial Sequence
  Description of Artificial Sequence: Synthetic oligonucleotide
  Sense strand starting at position 579 of SEQ ID NO: 1244731
auuccacuagagugauagu

SEQ ID NO: 1510583 - RNA, 19 nt, Artificial Sequence
  Description of Artificial Sequence: Synthetic oligonucleotide
  Antisense strand to SEQ ID NO: 1510582
acuaucacucuaguggaau

SEQ ID NO: 1510584 - RNA, 19 nt, Artificial Sequence
  Description of Artificial Sequence: Synthetic oligonucleotide
  Sense strand starting at position 589 of SEQ ID NO: 1244731
agugauagucaugaacuuu

SEQ ID NO: 1510585 - RNA, 19 nt, Artificial Sequence
  Description of Artificial Sequence: Synthetic oligonucleotide
  Antisense strand to SEQ ID NO: 1510584
aaaguucaugacuaucacu

SEQ ID NO: 1510586 - RNA, 19 nt, Artificial Sequence
  Description of Artificial Sequence: Synthetic oligonucleotide
  Sense strand starting at position 643 of SEQ ID NO: 1244731
aaccuuagccaguagagua

SEQ ID NO: 1510587 - RNA, 19 nt, Artificial Sequence
  Description of Artificial Sequence: Synthetic oligonucleotide
  Antisense strand to SEQ ID NO: 1510586
uacucuacuggcuaagguu

SEQ ID NO: 1510588 - RNA, 19 nt, Artificial Sequence
  Description of Artificial Sequence: Synthetic oligonucleotide
  Sense strand starting at position 704 of SEQ ID NO: 1244731
accugaaacacgugugagu

SEQ ID NO: 1510589 - RNA, 19 nt, Artificial Sequence
  Description of Artificial Sequence: Synthetic oligonucleotide
  Antisense strand to SEQ ID NO: 1510588
acucacacguguuucaggu

SEQ ID NO: 1510590 - RNA, 19 nt, Artificial Sequence
  Description of Artificial Sequence: Synthetic oligonucleotide
  Sense strand starting at position 718 of SEQ ID NO: 1244731
ugaguucgcccuggagaag

SEQ ID NO: 1510591 - RNA, 19 nt, Artificial Sequence
  Description of Artificial Sequence: Synthetic oligonucleotide
  Antisense strand to SEQ ID NO: 1510590
cuucuccagggcgaacuca

SEQ ID NO: 1510592 - RNA, 19 nt, Artificial Sequence
  Description of Artificial Sequence: Synthetic oligonucleotide
  Sense strand starting at position 1032 of SEQ ID NO: 1244731
auauguuaccagugaagag

SEQ ID NO: 1510593 - RNA, 19 nt, Artificial Sequence
  Description of Artificial Sequence: Synthetic oligonucleotide
  Antisense strand to SEQ ID NO: 1510592
cucuucacugguaacauau

SEQ ID NO: 1510594 - RNA, 19 nt, Artificial Sequence
  Description of Artificial Sequence: Synthetic oligonucleotide
  Sense strand starting at position 1218 of SEQ ID NO: 1244731
ggguuuaaguacccucuaa

SEQ ID NO: 1510595 - RNA, 19 nt, Artificial Sequence
  Description of Artificial Sequence: Synthetic oligonucleotide
  Antisense strand to SEQ ID NO: 1510594
uuagaggguacuuaaaccc

SEQ ID NO: 1510596 - RNA, 19 nt, Artificial Sequence
  Description of Artificial Sequence: Synthetic oligonucleotide
  Sense strand starting at position 1222 of SEQ ID NO: 1244731
uuaaguacccucuaaaguu

SEQ ID NO: 1510597 - RNA, 19 nt, Artificial Sequence
  Description of Artificial Sequence: Synthetic oligonucleotide
  Antisense strand to SEQ ID NO: 1510596
aacuuuagaggguacuuaa

SEQ ID NO: 1510598 - RNA, 19 nt, Artificial Sequence
  Description of Artificial Sequence: Synthetic oligonucleotide
  Sense strand starting at position 1258 of SEQ ID NO: 1244731
gugugcacacaauguaaau

SEQ ID NO: 1510599 - RNA, 19 nt, Artificial Sequence
  Description of Artificial Sequence: Synthetic oligonucleotide
  Antisense strand to SEQ ID NO: 1510598
auuuacauugugugcacac

SEQ ID NO: 1510600 - RNA, 19 nt, Artificial Sequence
  Description of Artificial Sequence: Synthetic oligonucleotide
  Sense strand starting at position 1306 of SEQ ID NO: 1244731
guugcagaaagcgaucaau

SEQ ID NO: 1510601 - RNA, 19 nt, Artificial Sequence
  Description of Artificial Sequence: Synthetic oligonucleotide
  Antisense strand to SEQ ID NO: 1510600
auugaucgcuuucugcaac

SEQ ID NO: 1510602 - RNA, 19 nt, Artificial Sequence
  Description of Artificial Sequence: Synthetic oligonucleotide
  Sense strand starting at position 1399 of SEQ ID NO: 1244731
guuacauuccuaugcacau

SEQ ID NO: 1510603 - RNA, 19 nt, Artificial Sequence
  Description of Artificial Sequence: Synthetic oligonucleotide
  Antisense strand to SEQ ID NO: 1510602
augugcauaggaauguaac

SEQ ID NO: 1510604 - RNA, 19 nt, Artificial Sequence
  Description of Artificial Sequence: Synthetic oligonucleotide
  Sense strand starting at position 1520 of SEQ ID NO: 1244731
ggaaguuuguggaaaguug

SEQ ID NO: 1510605 - RNA, 19 nt, Artificial Sequence
  Description of Artificial Sequence: Synthetic oligonucleotide
  Antisense strand to SEQ ID NO: 1510604
caacuuuccacaaacuucc

SEQ ID NO: 1510606 - RNA, 19 nt, Artificial Sequence
  Description of Artificial Sequence: Synthetic oligonucleotide
  Sense strand starting at position 1608 of SEQ ID NO: 1244731
ggaucuucccgggaguggu

SEQ ID NO: 1510607 - RNA, 19 nt, Artificial Sequence
  Description of Artificial Sequence: Synthetic oligonucleotide
  Antisense strand to SEQ ID NO: 1510606
accacucccgggaagaucc

SEQ ID NO: 1510608 - RNA, 19 nt, Artificial Sequence
  Description of Artificial Sequence: Synthetic oligonucleotide
  Sense strand starting at position 1698 of SEQ ID NO: 1244731
aagguuuagcgauggagca

SEQ ID NO: 1510609 - RNA, 19 nt, Artificial Sequence
  Description of Artificial Sequence: Synthetic oligonucleotide
  Antisense strand to SEQ ID NO: 1510608
ugcuccaucgcuaaaccuu

SEQ ID NO: 1510610 - RNA, 19 nt, Artificial Sequence
  Description of Artificial Sequence: Synthetic oligonucleotide
  Sense strand starting at position 1839 of SEQ ID NO: 1244731
gagugaucucuagggagcu

SEQ ID NO: 1510611 - RNA, 19 nt, Artificial Sequence
  Description of Artificial Sequence: Synthetic oligonucleotide
  Antisense strand to SEQ ID NO: 1510610
agcucccuagagaucacuc

SEQ ID NO: 1510612 - RNA, 19 nt, Artificial Sequence
  Description of Artificial Sequence: Synthetic oligonucleotide
  Sense strand starting at position 1966 of SEQ ID NO: 1244731
gcucacucuccacagagua

SEQ ID NO: 1510613 - RNA, 19 nt, Artificial Sequence
  Description of Artificial Sequence: Synthetic oligonucleotide
  Antisense strand to SEQ ID NO: 1510612
uacucuguggagagugagc

SEQ ID NO: 1510614 - RNA, 19 nt, Artificial Sequence
  Description of Artificial Sequence: Synthetic oligonucleotide
  Sense strand starting at position 2330 of SEQ ID NO: 1244731
agcggauugcuccaggaca

SEQ ID NO: 1510615 - RNA, 19 nt, Artificial Sequence
  Description of Artificial Sequence: Synthetic oligonucleotide
  Antisense strand to SEQ ID NO: 1510614
uguccuggagcaauccgcu

SEQ ID NO: 1510616 - RNA, 19 nt, Artificial Sequence
  Description of Artificial Sequence: Synthetic oligonucleotide
  Sense strand starting at position 2332 of SEQ ID NO: 1244731
cggauugcuccaggacaga

SEQ ID NO: 1510617 - RNA, 19 nt, Artificial Sequence
  Description of Artificial Sequence: Synthetic oligonucleotide
  Antisense strand to SEQ ID NO: 1510616
ucuguccuggagcaauccg

SEQ ID NO: 1510618 - RNA, 19 nt, Artificial Sequence
  Description of Artificial Sequence: Synthetic oligonucleotide
  Sense strand starting at position 2400 of SEQ ID NO: 1244731
uugggagauuccuuuauug

SEQ ID NO: 1510619 - RNA, 19 nt, Artificial Sequence
  Description of Artificial Sequence: Synthetic oligonucleotide
  Antisense strand to SEQ ID NO: 1510618
caauaaaggaaucucccaa

SEQ ID NO: 1510620 - RNA, 19 nt, Artificial Sequence
  Description of Artificial Sequence: Synthetic oligonucleotide
  Sense strand starting at position 2404 of SEQ ID NO: 1244731
gagauuccuuuauugggau

SEQ ID NO: 1510621 - RNA, 19 nt, Artificial Sequence
  Description of Artificial Sequence: Synthetic oligonucleotide
  Antisense strand to SEQ ID NO: 1510620
aucccaauaaaggaaucuc

SEQ ID NO: 1510622 - RNA, 19 nt, Artificial Sequence
  Description of Artificial Sequence: Synthetic oligonucleotide
  Sense strand starting at position 2410 of SEQ ID NO: 1244731
ccuuuauugggaugcucca

SEQ ID NO: 1510623 - RNA, 19 nt, Artificial Sequence
  Description of Artificial Sequence: Synthetic oligonucleotide
  Antisense strand to SEQ ID NO: 1510622
uggagcaucccaauaaagg

SEQ ID NO: 1510624 - RNA, 19 nt, Artificial Sequence
  Description of Artificial Sequence: Synthetic oligonucleotide
  Sense strand starting at position 2430 of SEQ ID NO: 1244731
aggcuagucuggccggaua

SEQ ID NO: 1510625 - RNA, 19 nt, Artificial Sequence
  Description of Artificial Sequence: Synthetic oligonucleotide
  Antisense strand to SEQ ID NO: 1510624
uauccggccagacuagccu

SEQ ID NO: 1510626 - RNA, 19 nt, Artificial Sequence
  Description of Artificial Sequence: Synthetic oligonucleotide
  Sense strand starting at position 2516 of SEQ ID NO: 1244731
ccugcuaacuugucuaaga

SEQ ID NO: 1510627 - RNA, 19 nt, Artificial Sequence
  Description of Artificial Sequence: Synthetic oligonucleotide
  Antisense strand to SEQ ID NO: 1510626
ucuuagacaaguuagcagg

SEQ ID NO: 1510628 - RNA, 19 nt, Artificial Sequence
  Description of Artificial Sequence: Synthetic oligonucleotide
  Sense strand starting at position 2517 of SEQ ID NO: 1244731
cugcuaacuugucuaagaa

SEQ ID NO: 1510629 - RNA, 19 nt, Artificial Sequence
  Description of Artificial Sequence: Synthetic oligonucleotide
  Antisense strand to SEQ ID NO: 1510628
uucuuagacaaguuagcag

SEQ ID NO: 1510630 - RNA, 19 nt, Artificial Sequence
  Description of Artificial Sequence: Synthetic oligonucleotide
  Sense strand starting at position 2526 of SEQ ID NO: 1244731
ugucuaagaauuggugucu

SEQ ID NO: 1510631 - RNA, 19 nt, Artificial Sequence
  Description of Artificial Sequence: Synthetic oligonucleotide
  Antisense strand to SEQ ID NO: 1510630
agacaccaauucuuagaca

SEQ ID NO: 1510632 - RNA, 19 nt, Artificial Sequence
  Description of Artificial Sequence: Synthetic oligonucleotide
  Sense strand starting at position 2531 of SEQ ID NO: 1244731
aagaauuggugucucagua

SEQ ID NO: 1510633 - RNA, 19 nt, Artificial Sequence
  Description of Artificial Sequence: Synthetic oligonucleotide
  Antisense strand to SEQ ID NO: 1510632
uacugagacaccaauucuu

SEQ ID NO: 1510634 - RNA, 19 nt, Artificial Sequence
  Description of Artificial Sequence: Synthetic oligonucleotide
  Sense strand starting at position 2535 of SEQ ID NO: 1244731
auuggugucucaguacaua

SEQ ID NO: 1510635 - RNA, 19 nt, Artificial Sequence
  Description of Artificial Sequence: Synthetic oligonucleotide
  Antisense strand to SEQ ID NO: 1510634
uauguacugagacaccaau

SEQ ID NO: 1510636 - RNA, 19 nt, Artificial Sequence
  Description of Artificial Sequence: Synthetic oligonucleotide
  Sense strand starting at position 2789 of SEQ ID NO: 1244731
gauacagucucaccgaagu

SEQ ID NO: 1510637 - RNA, 19 nt, Artificial Sequence
  Description of Artificial Sequence: Synthetic oligonucleotide
  Antisense strand to SEQ ID NO: 1510636
acuucggugagacuguauc

SEQ ID NO: 1510638 - RNA, 19 nt, Artificial Sequence
  Description of Artificial Sequence: Synthetic oligonucleotide
  Sense strand starting at position 3607 of SEQ ID NO: 1244731
ugagaaucgcuuggaugga

SEQ ID NO: 1510639 - RNA, 19 nt, Artificial Sequence
  Description of Artificial Sequence: Synthetic oligonucleotide
  Antisense strand to SEQ ID NO: 1510638
uccauccaagcgauucuca

SEQ ID NO: 1510640 - RNA, 19 nt, Artificial Sequence
  Description of Artificial Sequence: Synthetic oligonucleotide
  Sense strand starting at position 3773 of SEQ ID NO: 1244731
gauggcuuccaaggcagaa

SEQ ID NO: 1510641 - RNA, 19 nt, Artificial Sequence
  Description of Artificial Sequence: Synthetic oligonucleotide
  Antisense strand to SEQ ID NO: 1510640
uucugccuuggaagccauc

SEQ ID NO: 1510642 - RNA, 19 nt, Artificial Sequence
  Description of Artificial Sequence: Synthetic oligonucleotide
  Sense strand starting at position 3802 of SEQ ID NO: 1244731
uuaagaaguuguucccaug

SEQ ID NO: 1510643 - RNA, 19 nt, Artificial Sequence
  Description of Artificial Sequence: Synthetic oligonucleotide
  Antisense strand to SEQ ID NO: 1510642
caugggaacaacuucuuaa

SEQ ID NO: 1510644 - RNA, 19 nt, Artificial Sequence
  Description of Artificial Sequence: Synthetic oligonucleotide
  Sense strand starting at position 3808 of SEQ ID NO: 1244731
aguuguucccaugggaaug

SEQ ID NO: 1510645 - RNA, 19 nt, Artificial Sequence
  Description of Artificial Sequence: Synthetic oligonucleotide
  Antisense strand to SEQ ID NO: 1510644
cauucccaugggaacaacu

SEQ ID NO: 1510646 - RNA, 19 nt, Artificial Sequence
  Description of Artificial Sequence: Synthetic oligonucleotide
  Sense strand starting at position 3809 of SEQ ID NO: 1244731
guuguucccaugggaaugu

SEQ ID NO: 1510647 - RNA, 19 nt, Artificial Sequence
  Description of Artificial Sequence: Synthetic oligonucleotide
  Antisense strand to SEQ ID NO: 1510646
acauucccaugggaacaac

SEQ ID NO: 1510648 - RNA, 19 nt, Artificial Sequence
  Description of Artificial Sequence: Synthetic oligonucleotide
  Sense strand starting at position 3833 of SEQ ID NO: 1244731
gcaggcaugacauaucaga

SEQ ID NO: 1510649 - RNA, 19 nt, Artificial Sequence
  Description of Artificial Sequence: Synthetic oligonucleotide
  Antisense strand to SEQ ID NO: 1510648
ucugauaugucaugccugc

SEQ ID NO: 1510650 - RNA, 19 nt, Artificial Sequence
  Description of Artificial Sequence: Synthetic oligonucleotide
  Sense strand starting at position 113 of SEQ ID NO: 1244732
gggagccuauuauuaugau

SEQ ID NO: 1510651 - RNA, 19 nt, Artificial Sequence
  Description of Artificial Sequence: Synthetic oligonucleotide
  Antisense strand to SEQ ID NO: 1510650
aucauaauaauaggcuccc

SEQ ID NO: 1510652 - RNA, 19 nt, Artificial Sequence
  Description of Artificial Sequence: Synthetic oligonucleotide
  Sense strand starting at position 129 of SEQ ID NO: 1244732
gaugacuauugggaggaua

SEQ ID NO: 1510653 - RNA, 19 nt, Artificial Sequence
  Description of Artificial Sequence: Synthetic oligonucleotide
  Antisense strand to SEQ ID NO: 1510652
uauccucccaauagucauc

SEQ ID NO: 1510654 - RNA, 19 nt, Artificial Sequence
  Description of Artificial Sequence: Synthetic oligonucleotide
  Sense strand starting at position 174 of SEQ ID NO: 1244732
ugcccaggguucccauaaa

SEQ ID NO: 1510655 - RNA, 19 nt, Artificial Sequence
  Description of Artificial Sequence: Synthetic oligonucleotide
  Antisense strand to SEQ ID NO: 1510654
uuuaugggaacccugggca

SEQ ID NO: 1510656 - RNA, 19 nt, Artificial Sequence
  Description of Artificial Sequence: Synthetic oligonucleotide
  Sense strand starting at position 422 of SEQ ID NO: 1244732
uacaguagauguucugaga

SEQ ID NO: 1510657 - RNA, 19 nt, Artificial Sequence
  Description of Artificial Sequence: Synthetic oligonucleotide
  Antisense strand to SEQ ID NO: 1510656
ucucagaacaucuacugua

SEQ ID NO: 1510658 - RNA, 19 nt, Artificial Sequence
  Description of Artificial Sequence: Synthetic oligonucleotide
  Sense strand starting at position 473 of SEQ ID NO: 1244732
gguugauuguucucaguga

SEQ ID NO: 1510659 - RNA, 19 nt, Artificial Sequence
  Description of Artificial Sequence: Synthetic oligonucleotide
  Antisense strand to SEQ ID NO: 1510658
ucacugagaacaaucaacc

SEQ ID NO: 1510660 - RNA, 19 nt, Artificial Sequence
  Description of Artificial Sequence: Synthetic oligonucleotide
  Sense strand starting at position 477 of SEQ ID NO: 1244732
gauuguucucagugaacca

SEQ ID NO: 1510661 - RNA, 19 nt, Artificial Sequence
  Description of Artificial Sequence: Synthetic oligonucleotide
  Antisense strand to SEQ ID NO: 1510660
ugguucacugagaacaauc

SEQ ID NO: 1510662 - RNA, 19 nt, Artificial Sequence
  Description of Artificial Sequence: Synthetic oligonucleotide
  Sense strand starting at position 573 of SEQ ID NO: 1244732
cauugaaagugacauugaa

SEQ ID NO: 1510663 - RNA, 19 nt, Artificial Sequence
  Description of Artificial Sequence: Synthetic oligonucleotide
  Antisense strand to SEQ ID NO: 1510662
uucaaugucacuuucaaug

SEQ ID NO: 1510664 - RNA, 19 nt, Artificial Sequence
  Description of Artificial Sequence: Synthetic oligonucleotide
  Sense strand starting at position 713 of SEQ ID NO: 1244732
auuuauaagucagcgguuu

SEQ ID NO: 1510665 - RNA, 19 nt, Artificial Sequence
  Description of Artificial Sequence: Synthetic oligonucleotide
  Antisense strand to SEQ ID NO: 1510664
aaaccgcugacuuauaaau

SEQ ID NO: 1510666 - RNA, 19 nt, Artificial Sequence
  Description of Artificial Sequence: Synthetic oligonucleotide
  Sense strand starting at position 754 of SEQ ID NO: 1244732
ggucaaacuuccucgcacu

SEQ ID NO: 1510667 - RNA, 19 nt, Artificial Sequence
  Description of Artificial Sequence: Synthetic oligonucleotide
  Antisense strand to SEQ ID NO: 1510666
agugcgaggaaguuugacc

SEQ ID NO: 1510668 - RNA, 19 nt, Artificial Sequence
  Description of Artificial Sequence: Synthetic oligonucleotide
  Sense strand starting at position 803 of SEQ ID NO: 1244732
aggagaacaucacacuuua

SEQ ID NO: 1510669 - RNA, 19 nt, Artificial Sequence
  Description of Artificial Sequence: Synthetic oligonucleotide
  Antisense strand to SEQ ID NO: 1510668
uaaagugugauguucuccu

SEQ ID NO: 1510670 - RNA, 19 nt, Artificial Sequence
  Description of Artificial Sequence: Synthetic oligonucleotide
  Sense strand starting at position 968 of SEQ ID NO: 1244732
ggcuuaguacuaggccuaa

SEQ ID NO: 1510671 - RNA, 19 nt, Artificial Sequence
  Description of Artificial Sequence: Synthetic oligonucleotide
  Antisense strand to SEQ ID NO: 1510670
uuaggccuaguacuaagcc

SEQ ID NO: 1510672 - RNA, 19 nt, Artificial Sequence
  Description of Artificial Sequence: Synthetic oligonucleotide
  Sense strand starting at position 1060 of SEQ ID NO: 1244732
ccaaucuuagagcgucaga

SEQ ID NO: 1510673 - RNA, 19 nt, Artificial Sequence
  Description of Artificial Sequence: Synthetic oligonucleotide
  Antisense strand to SEQ ID NO: 1510672
ucugacgcucuaagauugg

SEQ ID NO: 1510674 - RNA, 19 nt, Artificial Sequence
  Description of Artificial Sequence: Synthetic oligonucleotide
  Sense strand starting at position 1231 of SEQ ID NO: 1244732
auuccacuagagugauagu

SEQ ID NO: 1510675 - RNA, 19 nt, Artificial Sequence
  Description of Artificial Sequence: Synthetic oligonucleotide
  Antisense strand to SEQ ID NO: 1510674
acuaucacucuaguggaau

SEQ ID NO: 1510676 - RNA, 19 nt, Artificial Sequence
  Description of Artificial Sequence: Synthetic oligonucleotide
  Sense strand starting at position 1241 of SEQ ID NO: 1244732
agugauagucaugaacuuu

SEQ ID NO: 1510677 - RNA, 19 nt, Artificial Sequence
  Description of Artificial Sequence: Synthetic oligonucleotide
  Antisense strand to SEQ ID NO: 1510676
aaaguucaugacuaucacu

SEQ ID NO: 1510678 - RNA, 19 nt, Artificial Sequence
  Description of Artificial Sequence: Synthetic oligonucleotide
  Sense strand starting at position 1295 of SEQ ID NO: 1244732
aaccuuagccaguagagua

SEQ ID NO: 1510679 - RNA, 19 nt, Artificial Sequence
  Description of Artificial Sequence: Synthetic oligonucleotide
  Antisense strand to SEQ ID NO: 1510678
uacucuacuggcuaagguu

SEQ ID NO: 1510680 - RNA, 19 nt, Artificial Sequence
  Description of Artificial Sequence: Synthetic oligonucleotide
  Sense strand starting at position 1356 of SEQ ID NO: 1244732
accugaaacacgugugagu

SEQ ID NO: 1510681 - RNA, 19 nt, Artificial Sequence
  Description of Artificial Sequence: Synthetic oligonucleotide
  Antisense strand to SEQ ID NO: 1510680
acucacacguguuucaggu

SEQ ID NO: 1510682 - RNA, 19 nt, Artificial Sequence
  Description of Artificial Sequence: Synthetic oligonucleotide
  Sense strand starting at position 1370 of SEQ ID NO: 1244732
ugaguucgcccuggagaag

SEQ ID NO: 1510683 - RNA, 19 nt, Artificial Sequence
  Description of Artificial Sequence: Synthetic oligonucleotide
  Antisense strand to SEQ ID NO: 1510682
cuucuccagggcgaacuca

SEQ ID NO: 1510684 - RNA, 19 nt, Artificial Sequence
  Description of Artificial Sequence: Synthetic oligonucleotide
  Sense strand starting at position 1684 of SEQ ID NO: 1244732
auauguuaccagugaagag

SEQ ID NO: 1510685 - RNA, 19 nt, Artificial Sequence
  Description of Artificial Sequence: Synthetic oligonucleotide
  Antisense strand to SEQ ID NO: 1510684
cucuucacugguaacauau

SEQ ID NO: 1510686 - RNA, 19 nt, Artificial Sequence
  Description of Artificial Sequence: Synthetic oligonucleotide
  Sense strand starting at position 1870 of SEQ ID NO: 1244732
ggguuuaaguacccucuaa

SEQ ID NO: 1510687 - RNA, 19 nt, Artificial Sequence
  Description of Artificial Sequence: Synthetic oligonucleotide
  Antisense strand to SEQ ID NO: 1510686
uuagaggguacuuaaaccc

SEQ ID NO: 1510688 - RNA, 19 nt, Artificial Sequence
  Description of Artificial Sequence: Synthetic oligonucleotide
  Sense strand starting at position 1874 of SEQ ID NO: 1244732
uuaaguacccucuaaaguu

SEQ ID NO: 1510689 - RNA, 19 nt, Artificial Sequence
  Description of Artificial Sequence: Synthetic oligonucleotide
  Antisense strand to SEQ ID NO: 1510688
aacuuuagaggguacuuaa

SEQ ID NO: 1510690 - RNA, 19 nt, Artificial Sequence
  Description of Artificial Sequence: Synthetic oligonucleotide
  Sense strand starting at position 1910 of SEQ ID NO: 1244732
gugugcacacaauguaaau

SEQ ID NO: 1510691 - RNA, 19 nt, Artificial Sequence
  Description of Artificial Sequence: Synthetic oligonucleotide
  Antisense strand to SEQ ID NO: 1510690
auuuacauugugugcacac

SEQ ID NO: 1510692 - RNA, 19 nt, Artificial Sequence
  Description of Artificial Sequence: Synthetic oligonucleotide
  Sense strand starting at position 1958 of SEQ ID NO: 1244732
guugcagaaagcgaucaau

SEQ ID NO: 1510693 - RNA, 19 nt, Artificial Sequence
  Description of Artificial Sequence: Synthetic oligonucleotide
  Antisense strand to SEQ ID NO: 1510692
auugaucgcuuucugcaac

SEQ ID NO: 1510694 - RNA, 19 nt, Artificial Sequence
  Description of Artificial Sequence: Synthetic oligonucleotide
  Sense strand starting at position 2051 of SEQ ID NO: 1244732
guuacauuccuaugcacau

SEQ ID NO: 1510695 - RNA, 19 nt, Artificial Sequence
  Description of Artificial Sequence: Synthetic oligonucleotide
  Antisense strand to SEQ ID NO: 1510694
augugcauaggaauguaac

SEQ ID NO: 1510696 - RNA, 19 nt, Artificial Sequence
  Description of Artificial Sequence: Synthetic oligonucleotide
  Sense strand starting at position 2172 of SEQ ID NO: 1244732
ggaaguuuguggaaaguug

SEQ ID NO: 1510697 - RNA, 19 nt, Artificial Sequence
  Description of Artificial Sequence: Synthetic oligonucleotide
  Antisense strand to SEQ ID NO: 1510696
caacuuuccacaaacuucc

SEQ ID NO: 1510698 - RNA, 19 nt, Artificial Sequence
  Description of Artificial Sequence: Synthetic oligonucleotide
  Sense strand starting at position 2260 of SEQ ID NO: 1244732
ggaucuucccgggaguggu

SEQ ID NO: 1510699 - RNA, 19 nt, Artificial Sequence
  Description of Artificial Sequence: Synthetic oligonucleotide
  Antisense strand to SEQ ID NO: 1510698
accacucccgggaagaucc

SEQ ID NO: 1510700 - RNA, 19 nt, Artificial Sequence
  Description of Artificial Sequence: Synthetic oligonucleotide
  Sense strand starting at position 2350 of SEQ ID NO: 1244732
aagguuuagcgauggagca

SEQ ID NO: 1510701 - RNA, 19 nt, Artificial Sequence
  Description of Artificial Sequence: Synthetic oligonucleotide
  Antisense strand to SEQ ID NO: 1510700
ugcuccaucgcuaaaccuu

SEQ ID NO: 1510702 - RNA, 19 nt, Artificial Sequence
  Description of Artificial Sequence: Synthetic oligonucleotide
  Sense strand starting at position 2491 of SEQ ID NO: 1244732
gagugaucucuagggagcu

SEQ ID NO: 1510703 - RNA, 19 nt, Artificial Sequence
  Description of Artificial Sequence: Synthetic oligonucleotide
  Antisense strand to SEQ ID NO: 1510702
agcucccuagagaucacuc

SEQ ID NO: 1510704 - RNA, 19 nt, Artificial Sequence
  Description of Artificial Sequence: Synthetic oligonucleotide
  Sense strand starting at position 2618 of SEQ ID NO: 1244732
gcucacucuccacagagua

SEQ ID NO: 1510705 - RNA, 19 nt, Artificial Sequence
  Description of Artificial Sequence: Synthetic oligonucleotide
  Antisense strand to SEQ ID NO: 1510704
uacucuguggagagugagc

SEQ ID NO: 1510706 - RNA, 19 nt, Artificial Sequence
  Description of Artificial Sequence: Synthetic oligonucleotide
  Sense strand starting at position 2982 of SEQ ID NO: 1244732
agcggauugcuccaggaca

SEQ ID NO: 1510707 - RNA, 19 nt, Artificial Sequence
  Description of Artificial Sequence: Synthetic oligonucleotide
  Antisense strand to SEQ ID NO: 1510706
uguccuggagcaauccgcu

SEQ ID NO: 1510708 - RNA, 19 nt, Artificial Sequence
  Description of Artificial Sequence: Synthetic oligonucleotide
  Sense strand starting at position 2984 of SEQ ID NO: 1244732
cggauugcuccaggacaga

SEQ ID NO: 1510709 - RNA, 19 nt, Artificial Sequence
  Description of Artificial Sequence: Synthetic oligonucleotide
  Antisense strand to SEQ ID NO: 1510708
ucuguccuggagcaauccg

SEQ ID NO: 1510710 - RNA, 19 nt, Artificial Sequence
  Description of Artificial Sequence: Synthetic oligonucleotide
  Sense strand starting at position 3052 of SEQ ID NO: 1244732
uugggagauuccuuuauug

SEQ ID NO: 1510711 - RNA, 19 nt, Artificial Sequence
  Description of Artificial Sequence: Synthetic oligonucleotide
  Antisense strand to SEQ ID NO: 1510710
caauaaaggaaucucccaa

SEQ ID NO: 1510712 - RNA, 19 nt, Artificial Sequence
  Description of Artificial Sequence: Synthetic oligonucleotide
  Sense strand starting at position 3056 of SEQ ID NO: 1244732
gagauuccuuuauugggau

SEQ ID NO: 1510713 - RNA, 19 nt, Artificial Sequence
  Description of Artificial Sequence: Synthetic oligonucleotide
  Antisense strand to SEQ ID NO: 1510712
aucccaauaaaggaaucuc

SEQ ID NO: 1510714 - RNA, 19 nt, Artificial Sequence
  Description of Artificial Sequence: Synthetic oligonucleotide
  Sense strand starting at position 3062 of SEQ ID NO: 1244732
ccuuuauugggaugcucca

SEQ ID NO: 1510715 - RNA, 19 nt, Artificial Sequence
  Description of Artificial Sequence: Synthetic oligonucleotide
  Antisense strand to SEQ ID NO: 1510714
uggagcaucccaauaaagg

SEQ ID NO: 1510716 - RNA, 19 nt, Artificial Sequence
  Description of Artificial Sequence: Synthetic oligonucleotide
  Sense strand starting at position 3082 of SEQ ID NO: 1244732
aggcuagucuggccggaua

SEQ ID NO: 1510717 - RNA, 19 nt, Artificial Sequence
  Description of Artificial Sequence: Synthetic oligonucleotide
  Antisense strand to SEQ ID NO: 1510716
uauccggccagacuagccu

SEQ ID NO: 1510718 - RNA, 19 nt, Artificial Sequence
  Description of Artificial Sequence: Synthetic oligonucleotide
  Sense strand starting at position 3168 of SEQ ID NO: 1244732
ccugcuaacuugucuaaga

SEQ ID NO: 1510719 - RNA, 19 nt, Artificial Sequence
  Description of Artificial Sequence: Synthetic oligonucleotide
  Antisense strand to SEQ ID NO: 1510718
ucuuagacaaguuagcagg

SEQ ID NO: 1510720 - RNA, 19 nt, Artificial Sequence
  Description of Artificial Sequence: Synthetic oligonucleotide
  Sense strand starting at position 3169 of SEQ ID NO: 1244732
cugcuaacuugucuaagaa

SEQ ID NO: 1510721 - RNA, 19 nt, Artificial Sequence
  Description of Artificial Sequence: Synthetic oligonucleotide
  Antisense strand to SEQ ID NO: 1510720
uucuuagacaaguuagcag

SEQ ID NO: 1510722 - RNA, 19 nt, Artificial Sequence
  Description of Artificial Sequence: Synthetic oligonucleotide
  Sense strand starting at position 3178 of SEQ ID NO: 1244732
ugucuaagaauuggugucu

SEQ ID NO: 1510723 - RNA, 19 nt, Artificial Sequence
  Description of Artificial Sequence: Synthetic oligonucleotide
  Antisense strand to SEQ ID NO: 1510722
agacaccaauucuuagaca

SEQ ID NO: 1510724 - RNA, 19 nt, Artificial Sequence
  Description of Artificial Sequence: Synthetic oligonucleotide
  Sense strand starting at position 3183 of SEQ ID NO: 1244732
aagaauuggugucucagua

SEQ ID NO: 1510725 - RNA, 19 nt, Artificial Sequence
  Description of Artificial Sequence: Synthetic oligonucleotide
  Antisense strand to SEQ ID NO: 1510724
uacugagacaccaauucuu

SEQ ID NO: 1510726 - RNA, 19 nt, Artificial Sequence
  Description of Artificial Sequence: Synthetic oligonucleotide
  Sense strand starting at position 3187 of SEQ ID NO: 1244732
auuggugucucaguacaua

SEQ ID NO: 1510727 - RNA, 19 nt, Artificial Sequence
  Description of Artificial Sequence: Synthetic oligonucleotide
  Antisense strand to SEQ ID NO: 1510726
uauguacugagacaccaau

SEQ ID NO: 1510728 - RNA, 19 nt, Artificial Sequence
  Description of Artificial Sequence: Synthetic oligonucleotide
  Sense strand starting at position 3441 of SEQ ID NO: 1244732
gauacagucucaccgaagu

SEQ ID NO: 1510729 - RNA, 19 nt, Artificial Sequence
  Description of Artificial Sequence: Synthetic oligonucleotide
  Antisense strand to SEQ ID NO: 1510728
acuucggugagacuguauc

SEQ ID NO: 1510730 - RNA, 19 nt, Artificial Sequence
  Description of Artificial Sequence: Synthetic oligonucleotide
  Sense strand starting at position 15 of SEQ ID NO: 1244733
uccuuucuccauugguuau

SEQ ID NO: 1510731 - RNA, 19 nt, Artificial Sequence
  Description of Artificial Sequence: Synthetic oligonucleotide
  Antisense strand to SEQ ID NO: 1510730
auaaccaauggagaaagga

SEQ ID NO: 1510732 - RNA, 19 nt, Artificial Sequence
  Description of Artificial Sequence: Synthetic oligonucleotide
  Sense strand starting at position 37 of SEQ ID NO: 1244733
gguggacuuuaucaaagau

SEQ ID NO: 1510733 - RNA, 19 nt, Artificial Sequence
  Description of Artificial Sequence: Synthetic oligonucleotide
  Antisense strand to SEQ ID NO: 1510732
aucuuugauaaaguccacc

SEQ ID NO: 1510734 - RNA, 19 nt, Artificial Sequence
  Description of Artificial Sequence: Synthetic oligonucleotide
  Sense strand starting at position 158 of SEQ ID NO: 1244733
cuugaaguauagcuugaaa

SEQ ID NO: 1510735 - RNA, 19 nt, Artificial Sequence
  Description of Artificial Sequence: Synthetic oligonucleotide
  Antisense strand to SEQ ID NO: 1510734
uuucaagcuauacuucaag

SEQ ID NO: 1510736 - RNA, 19 nt, Artificial Sequence
  Description of Artificial Sequence: Synthetic oligonucleotide
  Sense strand starting at position 160 of SEQ ID NO: 1244733
ugaaguauagcuugaaaug

SEQ ID NO: 1510737 - RNA, 19 nt, Artificial Sequence
  Description of Artificial Sequence: Synthetic oligonucleotide
  Antisense strand to SEQ ID NO: 1510736
cauuucaagcuauacuuca

SEQ ID NO: 1510738 - RNA, 19 nt, Artificial Sequence
  Description of Artificial Sequence: Synthetic oligonucleotide
  Sense strand starting at position 161 of SEQ ID NO: 1244733
gaaguauagcuugaaaugc

SEQ ID NO: 1510739 - RNA, 19 nt, Artificial Sequence
  Description of Artificial Sequence: Synthetic oligonucleotide
  Antisense strand to SEQ ID NO: 1510738
gcauuucaagcuauacuuc

SEQ ID NO: 1510740 - RNA, 19 nt, Artificial Sequence
  Description of Artificial Sequence: Synthetic oligonucleotide
  Sense strand starting at position 451 of SEQ ID NO: 1244733
cauaguucuccucguaaag

SEQ ID NO: 1510741 - RNA, 19 nt, Artificial Sequence
  Description of Artificial Sequence: Synthetic oligonucleotide
  Antisense strand to SEQ ID NO: 1510740
cuuuacgaggagaacuaug

SEQ ID NO: 1510742 - RNA, 19 nt, Artificial Sequence
  Description of Artificial Sequence: Synthetic oligonucleotide
  Sense strand starting at position 578 of SEQ ID NO: 1244733
aggccuugcccuggaugaa

SEQ ID NO: 1510743 - RNA, 19 nt, Artificial Sequence
  Description of Artificial Sequence: Synthetic oligonucleotide
  Antisense strand to SEQ ID NO: 1510742
uucauccagggcaaggccu

SEQ ID NO: 1510744 - RNA, 19 nt, Artificial Sequence
  Description of Artificial Sequence: Synthetic oligonucleotide
  Sense strand starting at position 619 of SEQ ID NO: 1244733
cacagaaggugacagaaau

SEQ ID NO: 1510745 - RNA, 19 nt, Artificial Sequence
  Description of Artificial Sequence: Synthetic oligonucleotide
  Antisense strand to SEQ ID NO: 1510744
auuucugucaccuucugug

SEQ ID NO: 1510746 - RNA, 19 nt, Artificial Sequence
  Description of Artificial Sequence: Synthetic oligonucleotide
  Sense strand starting at position 647 of SEQ ID NO: 1244733
cccucagauugcuuaagga

SEQ ID NO: 1510747 - RNA, 19 nt, Artificial Sequence
  Description of Artificial Sequence: Synthetic oligonucleotide
  Antisense strand to SEQ ID NO: 1510746
uccuuaagcaaucugaggg

SEQ ID NO: 1510748 - RNA, 19 nt, Artificial Sequence
  Description of Artificial Sequence: Synthetic oligonucleotide
  Sense strand starting at position 669 of SEQ ID NO: 1244733
uacgcauaccacugggaaa

SEQ ID NO: 1510749 - RNA, 19 nt, Artificial Sequence
  Description of Artificial Sequence: Synthetic oligonucleotide
  Antisense strand to SEQ ID NO: 1510748
uuucccagugguaugcgua

SEQ ID NO: 1510750 - RNA, 19 nt, Artificial Sequence
  Description of Artificial Sequence: Synthetic oligonucleotide
  Sense strand starting at position 1024 of SEQ ID NO: 1244733
ugauuuaggcuauguuguu

SEQ ID NO: 1510751 - RNA, 19 nt, Artificial Sequence
  Description of Artificial Sequence: Synthetic oligonucleotide
  Antisense strand to SEQ ID NO: 1510750
aacaacauagccuaaauca

SEQ ID NO: 1510752 - RNA, 19 nt, Artificial Sequence
  Description of Artificial Sequence: Synthetic oligonucleotide
  Sense strand starting at position 1179 of SEQ ID NO: 1244733
gagcgugauuugccgucuu

SEQ ID NO: 1510753 - RNA, 19 nt, Artificial Sequence
  Description of Artificial Sequence: Synthetic oligonucleotide
  Antisense strand to SEQ ID NO: 1510752
aagacggcaaaucacgcuc

SEQ ID NO: 1510754 - RNA, 19 nt, Artificial Sequence
  Description of Artificial Sequence: Synthetic oligonucleotide
  Sense strand starting at position 1198 of SEQ ID NO: 1244733
cggauaccacuuugcauuu

SEQ ID NO: 1510755 - RNA, 19 nt, Artificial Sequence
  Description of Artificial Sequence: Synthetic oligonucleotide
  Antisense strand to SEQ ID NO: 1510754
aaaugcaaagugguauccg

SEQ ID NO: 1510756 - RNA, 19 nt, Artificial Sequence
  Description of Artificial Sequence: Synthetic oligonucleotide
  Sense strand starting at position 1207 of SEQ ID NO: 1244733
cuuugcauuuaguucggaa

SEQ ID NO: 1510757 - RNA, 19 nt, Artificial Sequence
  Description of Artificial Sequence: Synthetic oligonucleotide
  Antisense strand to SEQ ID NO: 1510756
uuccgaacuaaaugcaaag

SEQ ID NO: 1510758 - RNA, 19 nt, Artificial Sequence
  Description of Artificial Sequence: Synthetic oligonucleotide
  Sense strand starting at position 1209 of SEQ ID NO: 1244733
uugcauuuaguucggaaca

SEQ ID NO: 1510759 - RNA, 19 nt, Artificial Sequence
  Description of Artificial Sequence: Synthetic oligonucleotide
  Antisense strand to SEQ ID NO: 1510758
uguuccgaacuaaaugcaa

SEQ ID NO: 1510760 - RNA, 19 nt, Artificial Sequence
  Description of Artificial Sequence: Synthetic oligonucleotide
  Sense strand starting at position 1273 of SEQ ID NO: 1244733
gcaagagggugcuugguuu

SEQ ID NO: 1510761 - RNA, 19 nt, Artificial Sequence
  Description of Artificial Sequence: Synthetic oligonucleotide
  Antisense strand to SEQ ID NO: 1510760
aaaccaagcacccucuugc

SEQ ID NO: 1510762 - RNA, 19 nt, Artificial Sequence
  Description of Artificial Sequence: Synthetic oligonucleotide
  Sense strand starting at position 1318 of SEQ ID NO: 1244733
gucagugccuggucacauu

SEQ ID NO: 1510763 - RNA, 19 nt, Artificial Sequence
  Description of Artificial Sequence: Synthetic oligonucleotide
  Antisense strand to SEQ ID NO: 1510762
aaugugaccaggcacugac

SEQ ID NO: 1510764 - RNA, 19 nt, Artificial Sequence
  Description of Artificial Sequence: Synthetic oligonucleotide
  Sense strand starting at position 1791 of SEQ ID NO: 1244733
acgaauuuaucugccagca

SEQ ID NO: 1510765 - RNA, 19 nt, Artificial Sequence
  Description of Artificial Sequence: Synthetic oligonucleotide
  Antisense strand to SEQ ID NO: 1510764
ugcuggcagauaaauucgu

SEQ ID NO: 1510766 - RNA, 19 nt, Artificial Sequence
  Description of Artificial Sequence: Synthetic oligonucleotide
  Sense strand starting at position 1803 of SEQ ID NO: 1244733
gccagcaauucccuggaaa

SEQ ID NO: 1510767 - RNA, 19 nt, Artificial Sequence
  Description of Artificial Sequence: Synthetic oligonucleotide
  Antisense strand to SEQ ID NO: 1510766
uuuccagggaauugcuggc

SEQ ID NO: 1510768 - RNA, 19 nt, Artificial Sequence
  Description of Artificial Sequence: Synthetic oligonucleotide
  Sense strand starting at position 1804 of SEQ ID NO: 1244733
ccagcaauucccuggaaac

SEQ ID NO: 1510769 - RNA, 19 nt, Artificial Sequence
  Description of Artificial Sequence: Synthetic oligonucleotide
  Antisense strand to SEQ ID NO: 1510768
guuuccagggaauugcugg

SEQ ID NO: 1510770 - RNA, 19 nt, Artificial Sequence
  Description of Artificial Sequence: Synthetic oligonucleotide
  Sense strand starting at position 1872 of SEQ ID NO: 1244733
guuaaacgcccacgugaau

SEQ ID NO: 1510771 - RNA, 19 nt, Artificial Sequence
  Description of Artificial Sequence: Synthetic oligonucleotide
  Antisense strand to SEQ ID NO: 1510770
auucacgugggcguuuaac

SEQ ID NO: 1510772 - RNA, 19 nt, Artificial Sequence
  Description of Artificial Sequence: Synthetic oligonucleotide
  Sense strand starting at position 1884 of SEQ ID NO: 1244733
cgugaauagcucugaggga

SEQ ID NO: 1510773 - RNA, 19 nt, Artificial Sequence
  Description of Artificial Sequence: Synthetic oligonucleotide
  Antisense strand to SEQ ID NO: 1510772
ucccucagagcuauucacg

SEQ ID NO: 1510774 - RNA, 19 nt, Artificial Sequence
  Description of Artificial Sequence: Synthetic oligonucleotide
  Sense strand starting at position 1924 of SEQ ID NO: 1244733
gucuguaccuauuuguauu

SEQ ID NO: 1510775 - RNA, 19 nt, Artificial Sequence
  Description of Artificial Sequence: Synthetic oligonucleotide
  Antisense strand to SEQ ID NO: 1510774
aauacaaauagguacagac

SEQ ID NO: 1510776 - RNA, 19 nt, Artificial Sequence
  Description of Artificial Sequence: Synthetic oligonucleotide
  Sense strand starting at position 2704 of SEQ ID NO: 1244733
gccaauuaguuggcuucga

SEQ ID NO: 1510777 - RNA, 19 nt, Artificial Sequence
  Description of Artificial Sequence: Synthetic oligonucleotide
  Antisense strand to SEQ ID NO: 1510776
ucgaagccaacuaauuggc

SEQ ID NO: 1510778 - RNA, 19 nt, Artificial Sequence
  Description of Artificial Sequence: Synthetic oligonucleotide
  Sense strand starting at position 2705 of SEQ ID NO: 1244733
ccaauuaguuggcuucgaa

SEQ ID NO: 1510779 - RNA, 19 nt, Artificial Sequence
  Description of Artificial Sequence: Synthetic oligonucleotide
  Antisense strand to SEQ ID NO: 1510778
uucgaagccaacuaauugg

SEQ ID NO: 1510780 - RNA, 19 nt, Artificial Sequence
  Description of Artificial Sequence: Synthetic oligonucleotide
  Sense strand starting at position 2784 of SEQ ID NO: 1244733
uuguuaugguaauuacgau

SEQ ID NO: 1510781 - RNA, 19 nt, Artificial Sequence
  Description of Artificial Sequence: Synthetic oligonucleotide
  Antisense strand to SEQ ID NO: 1510780
aucguaauuaccauaacaa

SEQ ID NO: 1510782 - RNA, 19 nt, Artificial Sequence
  Description of Artificial Sequence: Synthetic oligonucleotide
  Sense strand starting at position 2785 of SEQ ID NO: 1244733
uguuaugguaauuacgaua

SEQ ID NO: 1510783 - RNA, 19 nt, Artificial Sequence
  Description of Artificial Sequence: Synthetic oligonucleotide
  Antisense strand to SEQ ID NO: 1510782
uaucguaauuaccauaaca

SEQ ID NO: 1510784 - RNA, 19 nt, Artificial Sequence
  Description of Artificial Sequence: Synthetic oligonucleotide
  Sense strand starting at position 3022 of SEQ ID NO: 1244733
gagcacaugcauugaaagu

SEQ ID NO: 1510785 - RNA, 19 nt, Artificial Sequence
  Description of Artificial Sequence: Synthetic oligonucleotide
  Antisense strand to SEQ ID NO: 1510784
acuuucaaugcaugugcuc

SEQ ID NO: 1510786 - RNA, 19 nt, Artificial Sequence
  Description of Artificial Sequence: Synthetic oligonucleotide
  Sense strand starting at position 3235 of SEQ ID NO: 1244733
gcaauagagucucuugaac

SEQ ID NO: 1510787 - RNA, 19 nt, Artificial Sequence
  Description of Artificial Sequence: Synthetic oligonucleotide
  Antisense strand to SEQ ID NO: 1510786
guucaagagacucuauugc

SEQ ID NO: 1510788 - RNA, 19 nt, Artificial Sequence
  Description of Artificial Sequence: Synthetic oligonucleotide
  Sense strand starting at position 3516 of SEQ ID NO: 1244733
uuacgacgucguuccuaua

SEQ ID NO: 1510789 - RNA, 19 nt, Artificial Sequence
  Description of Artificial Sequence: Synthetic oligonucleotide
  Antisense strand to SEQ ID NO: 1510788
uauaggaacgacgucguaa

SEQ ID NO: 1510790 - RNA, 19 nt, Artificial Sequence
  Description of Artificial Sequence: Synthetic oligonucleotide
  Sense strand starting at position 3565 of SEQ ID NO: 1244733
gcacuuugagcggaggaga

SEQ ID NO: 1510791 - RNA, 19 nt, Artificial Sequence
  Description of Artificial Sequence: Synthetic oligonucleotide
  Antisense strand to SEQ ID NO: 1510790
ucuccuccgcucaaagugc

SEQ ID NO: 1510792 - RNA, 19 nt, Artificial Sequence
  Description of Artificial Sequence: Synthetic oligonucleotide
  Sense strand starting at position 3610 of SEQ ID NO: 1244733
ucaggacuagccuggcaau

SEQ ID NO: 1510793 - RNA, 19 nt, Artificial Sequence
  Description of Artificial Sequence: Synthetic oligonucleotide
  Antisense strand to SEQ ID NO: 1510792
auugccaggcuaguccuga

SEQ ID NO: 1510794 - RNA, 19 nt, Artificial Sequence
  Description of Artificial Sequence: Synthetic oligonucleotide
  Sense strand starting at position 3611 of SEQ ID NO: 1244733
caggacuagccuggcaaua

SEQ ID NO: 1510795 - RNA, 19 nt, Artificial Sequence
  Description of Artificial Sequence: Synthetic oligonucleotide
  Antisense strand to SEQ ID NO: 1510794
uauugccaggcuaguccug

SEQ ID NO: 1510796 - RNA, 19 nt, Artificial Sequence
  Description of Artificial Sequence: Synthetic oligonucleotide
  Sense strand starting at position 3624 of SEQ ID NO: 1244733
gcaauauaaggagacguca

SEQ ID NO: 1510797 - RNA, 19 nt, Artificial Sequence
  Description of Artificial Sequence: Synthetic oligonucleotide
  Antisense strand to SEQ ID NO: 1510796
ugacgucuccuuauauugc

SEQ ID NO: 1510798 - RNA, 19 nt, Artificial Sequence
  Description of Artificial Sequence: Synthetic oligonucleotide
  Sense strand starting at position 3800 of SEQ ID NO: 1244733
gugaaacccuguccguaua

SEQ ID NO: 1510799 - RNA, 19 nt, Artificial Sequence
  Description of Artificial Sequence: Synthetic oligonucleotide
  Antisense strand to SEQ ID NO: 1510798
uauacggacaggguuucac

SEQ ID NO: 1510800 - RNA, 19 nt, Artificial Sequence
  Description of Artificial Sequence: Synthetic oligonucleotide
  Sense strand starting at position 3802 of SEQ ID NO: 1244733
gaaacccuguccguauaua

SEQ ID NO: 1510801 - RNA, 19 nt, Artificial Sequence
  Description of Artificial Sequence: Synthetic oligonucleotide
  Antisense strand to SEQ ID NO: 1510800
uauauacggacaggguuuc

SEQ ID NO: 1510802 - RNA, 19 nt, Artificial Sequence
  Description of Artificial Sequence: Synthetic oligonucleotide
  Sense strand starting at position 3889 of SEQ ID NO: 1244733
gguuuacucucgguaucca

SEQ ID NO: 1510803 - RNA, 19 nt, Artificial Sequence
  Description of Artificial Sequence: Synthetic oligonucleotide
  Antisense strand to SEQ ID NO: 1510802
uggauaccgagaguaaacc

SEQ ID NO: 1510804 - RNA, 19 nt, Artificial Sequence
  Description of Artificial Sequence: Synthetic oligonucleotide
  Sense strand starting at position 3890 of SEQ ID NO: 1244733
guuuacucucgguauccaa

SEQ ID NO: 1510805 - RNA, 19 nt, Artificial Sequence
  Description of Artificial Sequence: Synthetic oligonucleotide
  Antisense strand to SEQ ID NO: 1510804
uuggauaccgagaguaaac

SEQ ID NO: 1510806 - RNA, 19 nt, Artificial Sequence
  Description of Artificial Sequence: Synthetic oligonucleotide
  Sense strand starting at position 3897 of SEQ ID NO: 1244733
cucgguauccaagagugau

SEQ ID NO: 1510807 - RNA, 19 nt, Artificial Sequence
  Description of Artificial Sequence: Synthetic oligonucleotide
  Antisense strand to SEQ ID NO: 1510806
aucacucuuggauaccgag

SEQ ID NO: 1510808 - RNA, 19 nt, Artificial Sequence
  Description of Artificial Sequence: Synthetic oligonucleotide
  Sense strand starting at position 3907 of SEQ ID NO: 1244733
aagagugauuuagauguga

SEQ ID NO: 1510809 - RNA, 19 nt, Artificial Sequence
  Description of Artificial Sequence: Synthetic oligonucleotide
  Antisense strand to SEQ ID NO: 1510808
ucacaucuaaaucacucuu

SEQ ID NO: 1510810 - RNA, 19 nt, Artificial Sequence
  Description of Artificial Sequence: Synthetic oligonucleotide
  Sense strand starting at position 44 of SEQ ID NO: 1244734
ucaggauucugucuugcau

SEQ ID NO: 1510811 - RNA, 19 nt, Artificial Sequence
  Description of Artificial Sequence: Synthetic oligonucleotide
  Antisense strand to SEQ ID NO: 1510810
augcaagacagaauccuga

SEQ ID NO: 1510812 - RNA, 19 nt, Artificial Sequence
  Description of Artificial Sequence: Synthetic oligonucleotide
  Sense strand starting at position 56 of SEQ ID NO: 1244734
cuugcauuccgagaccacu

SEQ ID NO: 1510813 - RNA, 19 nt, Artificial Sequence
  Description of Artificial Sequence: Synthetic oligonucleotide
  Antisense strand to SEQ ID NO: 1510812
aguggucucggaaugcaag

SEQ ID NO: 1510814 - RNA, 19 nt, Artificial Sequence
  Description of Artificial Sequence: Synthetic oligonucleotide
  Sense strand starting at position 62 of SEQ ID NO: 1244734
uuccgagaccacugaaaca

SEQ ID NO: 1510815 - RNA, 19 nt, Artificial Sequence
  Description of Artificial Sequence: Synthetic oligonucleotide
  Antisense strand to SEQ ID NO: 1510814
uguuucaguggucucggaa

SEQ ID NO: 1510816 - RNA, 19 nt, Artificial Sequence
  Description of Artificial Sequence: Synthetic oligonucleotide
  Sense strand starting at position 73 of SEQ ID NO: 1244734
cugaaacaucuuugucaag

SEQ ID NO: 1510817 - RNA, 19 nt, Artificial Sequence
  Description of Artificial Sequence: Synthetic oligonucleotide
  Antisense strand to SEQ ID NO: 1510816
cuugacaaagauguuucag

SEQ ID NO: 1510818 - RNA, 19 nt, Artificial Sequence
  Description of Artificial Sequence: Synthetic oligonucleotide
  Sense strand starting at position 84 of SEQ ID NO: 1244734
uugucaaguuaccuguaaa

SEQ ID NO: 1510819 - RNA, 19 nt, Artificial Sequence
  Description of Artificial Sequence: Synthetic oligonucleotide
  Antisense strand to SEQ ID NO: 1510818
uuuacagguaacuugacaa

SEQ ID NO: 1510820 - RNA, 19 nt, Artificial Sequence
  Description of Artificial Sequence: Synthetic oligonucleotide
  Sense strand starting at position 166 of SEQ ID NO: 1244734
auuguuaaagccuagauaa

SEQ ID NO: 1510821 - RNA, 19 nt, Artificial Sequence
  Description of Artificial Sequence: Synthetic oligonucleotide
  Antisense strand to SEQ ID NO: 1510820
uuaucuaggcuuuaacaau

SEQ ID NO: 1510822 - RNA, 19 nt, Artificial Sequence
  Description of Artificial Sequence: Synthetic oligonucleotide
  Sense strand starting at position 176 of SEQ ID NO: 1244734
ccuagauaagcugauaguu

SEQ ID NO: 1510823 - RNA, 19 nt, Artificial Sequence
  Description of Artificial Sequence: Synthetic oligonucleotide
  Antisense strand to SEQ ID NO: 1510822
aacuaucagcuuaucuagg

SEQ ID NO: 1510824 - RNA, 19 nt, Artificial Sequence
  Description of Artificial Sequence: Synthetic oligonucleotide
  Sense strand starting at position 275 of SEQ ID NO: 1244734
cucuuccuuuggguauaaa

SEQ ID NO: 1510825 - RNA, 19 nt, Artificial Sequence
  Description of Artificial Sequence: Synthetic oligonucleotide
  Antisense strand to SEQ ID NO: 1510824
uuuauacccaaaggaagag

SEQ ID NO: 1510826 - RNA, 19 nt, Artificial Sequence
  Description of Artificial Sequence: Synthetic oligonucleotide
  Sense strand starting at position 307 of SEQ ID NO: 1244734
gugcuacuugcagauucuu

SEQ ID NO: 1510827 - RNA, 19 nt, Artificial Sequence
  Description of Artificial Sequence: Synthetic oligonucleotide
  Antisense strand to SEQ ID NO: 1510826
aagaaucugcaaguagcac

SEQ ID NO: 1510828 - RNA, 19 nt, Artificial Sequence
  Description of Artificial Sequence: Synthetic oligonucleotide
  Sense strand starting at position 312 of SEQ ID NO: 1244734
acuugcagauucuuuguaa

SEQ ID NO: 1510829 - RNA, 19 nt, Artificial Sequence
  Description of Artificial Sequence: Synthetic oligonucleotide
  Antisense strand to SEQ ID NO: 1510828
uuacaaagaaucugcaagu

SEQ ID NO: 1510830 - RNA, 19 nt, Artificial Sequence
  Description of Artificial Sequence: Synthetic oligonucleotide
  Sense strand starting at position 313 of SEQ ID NO: 1244734
cuugcagauucuuuguaag

SEQ ID NO: 1510831 - RNA, 19 nt, Artificial Sequence
  Description of Artificial Sequence: Synthetic oligonucleotide
  Antisense strand to SEQ ID NO: 1510830
cuuacaaagaaucugcaag

SEQ ID NO: 1510832 - RNA, 19 nt, Artificial Sequence
  Description of Artificial Sequence: Synthetic oligonucleotide
  Sense strand starting at position 315 of SEQ ID NO: 1244734
ugcagauucuuuguaaggu

SEQ ID NO: 1510833 - RNA, 19 nt, Artificial Sequence
  Description of Artificial Sequence: Synthetic oligonucleotide
  Antisense strand to SEQ ID NO: 1510832
accuuacaaagaaucugca

SEQ ID NO: 1510834 - RNA, 19 nt, Artificial Sequence
  Description of Artificial Sequence: Synthetic oligonucleotide
  Sense strand starting at position 321 of SEQ ID NO: 1244734
uucuuuguaagguagagau

SEQ ID NO: 1510835 - RNA, 19 nt, Artificial Sequence
  Description of Artificial Sequence: Synthetic oligonucleotide
  Antisense strand to SEQ ID NO: 1510834
aucucuaccuuacaaagaa

SEQ ID NO: 1510836 - RNA, 19 nt, Artificial Sequence
  Description of Artificial Sequence: Synthetic oligonucleotide
  Sense strand starting at position 418 of SEQ ID NO: 1244734
ucaggaagcuuaccaauau

SEQ ID NO: 1510837 - RNA, 19 nt, Artificial Sequence
  Description of Artificial Sequence: Synthetic oligonucleotide
  Antisense strand to SEQ ID NO: 1510836
auauugguaagcuuccuga

SEQ ID NO: 1510838 - RNA, 19 nt, Artificial Sequence
  Description of Artificial Sequence: Synthetic oligonucleotide
  Sense strand starting at position 469 of SEQ ID NO: 1244734
acagaauaacuuugcuaga

SEQ ID NO: 1510839 - RNA, 19 nt, Artificial Sequence
  Description of Artificial Sequence: Synthetic oligonucleotide
  Antisense strand to SEQ ID NO: 1510838
ucuagcaaaguuauucugu

SEQ ID NO: 1510840 - RNA, 19 nt, Artificial Sequence
  Description of Artificial Sequence: Synthetic oligonucleotide
  Sense strand starting at position 471 of SEQ ID NO: 1244734
agaauaacuuugcuagaau

SEQ ID NO: 1510841 - RNA, 19 nt, Artificial Sequence
  Description of Artificial Sequence: Synthetic oligonucleotide
  Antisense strand to SEQ ID NO: 1510840
auucuagcaaaguuauucu

SEQ ID NO: 1510842 - RNA, 19 nt, Artificial Sequence
  Description of Artificial Sequence: Synthetic oligonucleotide
  Sense strand starting at position 571 of SEQ ID NO: 1244734
gaaagaccuguaugcagaa

SEQ ID NO: 1510843 - RNA, 19 nt, Artificial Sequence
  Description of Artificial Sequence: Synthetic oligonucleotide
  Antisense strand to SEQ ID NO: 1510842
uucugcauacaggucuuuc

SEQ ID NO: 1510844 - RNA, 19 nt, Artificial Sequence
  Description of Artificial Sequence: Synthetic oligonucleotide
  Sense strand starting at position 648 of SEQ ID NO: 1244734
ccuacacaugcaugggaau

SEQ ID NO: 1510845 - RNA, 19 nt, Artificial Sequence
  Description of Artificial Sequence: Synthetic oligonucleotide
  Antisense strand to SEQ ID NO: 1510844
auucccaugcauguguagg

SEQ ID NO: 1510846 - RNA, 19 nt, Artificial Sequence
  Description of Artificial Sequence: Synthetic oligonucleotide
  Sense strand starting at position 649 of SEQ ID NO: 1244734
cuacacaugcaugggaaua

SEQ ID NO: 1510847 - RNA, 19 nt, Artificial Sequence
  Description of Artificial Sequence: Synthetic oligonucleotide
  Antisense strand to SEQ ID NO: 1510846
uauucccaugcauguguag

SEQ ID NO: 1510848 - RNA, 19 nt, Artificial Sequence
  Description of Artificial Sequence: Synthetic oligonucleotide
  Sense strand starting at position 660 of SEQ ID NO: 1244734
ugggaauaauuagagauaa

SEQ ID NO: 1510849 - RNA, 19 nt, Artificial Sequence
  Description of Artificial Sequence: Synthetic oligonucleotide
  Antisense strand to SEQ ID NO: 1510848
uuaucucuaauuauuccca

SEQ ID NO: 1510850 - RNA, 19 nt, Artificial Sequence
  Description of Artificial Sequence: Synthetic oligonucleotide
  Sense strand starting at position 686 of SEQ ID NO: 1244734
ccuugcuucucuguggaaa

SEQ ID NO: 1510851 - RNA, 19 nt, Artificial Sequence
  Description of Artificial Sequence: Synthetic oligonucleotide
  Antisense strand to SEQ ID NO: 1510850
uuuccacagagaagcaagg

SEQ ID NO: 1510852 - RNA, 19 nt, Artificial Sequence
  Description of Artificial Sequence: Synthetic oligonucleotide
  Sense strand starting at position 687 of SEQ ID NO: 1244734
cuugcuucucuguggaaau

SEQ ID NO: 1510853 - RNA, 19 nt, Artificial Sequence
  Description of Artificial Sequence: Synthetic oligonucleotide
  Antisense strand to SEQ ID NO: 1510852
auuuccacagagaagcaag

SEQ ID NO: 1510854 - RNA, 19 nt, Artificial Sequence
  Description of Artificial Sequence: Synthetic oligonucleotide
  Sense strand starting at position 711 of SEQ ID NO: 1244734
gaaacaguuucgccuccua

SEQ ID NO: 1510855 - RNA, 19 nt, Artificial Sequence
  Description of Artificial Sequence: Synthetic oligonucleotide
  Antisense strand to SEQ ID NO: 1510854
uaggaggcgaaacuguuuc

SEQ ID NO: 1510856 - RNA, 19 nt, Artificial Sequence
  Description of Artificial Sequence: Synthetic oligonucleotide
  Sense strand starting at position 731 of SEQ ID NO: 1244734
acagguauacuguagguaa

SEQ ID NO: 1510857 - RNA, 19 nt, Artificial Sequence
  Description of Artificial Sequence: Synthetic oligonucleotide
  Antisense strand to SEQ ID NO: 1510856
uuaccuacaguauaccugu

SEQ ID NO: 1510858 - RNA, 19 nt, Artificial Sequence
  Description of Artificial Sequence: Synthetic oligonucleotide
  Sense strand starting at position 822 of SEQ ID NO: 1244734
gcuagucucaggcagaaac

SEQ ID NO: 1510859 - RNA, 19 nt, Artificial Sequence
  Description of Artificial Sequence: Synthetic oligonucleotide
  Antisense strand to SEQ ID NO: 1510858
guuucugccugagacuagc

SEQ ID NO: 1510860 - RNA, 19 nt, Artificial Sequence
  Description of Artificial Sequence: Synthetic oligonucleotide
  Sense strand starting at position 969 of SEQ ID NO: 1244734
ucuagauugcaggguaauc

SEQ ID NO: 1510861 - RNA, 19 nt, Artificial Sequence
  Description of Artificial Sequence: Synthetic oligonucleotide
  Antisense strand to SEQ ID NO: 1510860
gauuacccugcaaucuaga

SEQ ID NO: 1510862 - RNA, 19 nt, Artificial Sequence
  Description of Artificial Sequence: Synthetic oligonucleotide
  Sense strand starting at position 1009 of SEQ ID NO: 1244734
uggcaauucuaauucuguu

SEQ ID NO: 1510863 - RNA, 19 nt, Artificial Sequence
  Description of Artificial Sequence: Synthetic oligonucleotide
  Antisense strand to SEQ ID NO: 1510862
aacagaauuagaauugcca

SEQ ID NO: 1510864 - RNA, 19 nt, Artificial Sequence
  Description of Artificial Sequence: Synthetic oligonucleotide
  Sense strand starting at position 1232 of SEQ ID NO: 1244734
gcgauagggucucccuaca

SEQ ID NO: 1510865 - RNA, 19 nt, Artificial Sequence
  Description of Artificial Sequence: Synthetic oligonucleotide
  Antisense strand to SEQ ID NO: 1510864
uguagggagacccuaucgc

SEQ ID NO: 1510866 - RNA, 19 nt, Artificial Sequence
  Description of Artificial Sequence: Synthetic oligonucleotide
  Sense strand starting at position 1389 of SEQ ID NO: 1244734
agugguuagugagucaaug

SEQ ID NO: 1510867 - RNA, 19 nt, Artificial Sequence
  Description of Artificial Sequence: Synthetic oligonucleotide
  Antisense strand to SEQ ID NO: 1510866
cauugacucacuaaccacu

SEQ ID NO: 1510868 - RNA, 19 nt, Artificial Sequence
  Description of Artificial Sequence: Synthetic oligonucleotide
  Sense strand starting at position 1406 of SEQ ID NO: 1244734
ugccaagaacccugaaaca

SEQ ID NO: 1510869 - RNA, 19 nt, Artificial Sequence
  Description of Artificial Sequence: Synthetic oligonucleotide
  Antisense strand to SEQ ID NO: 1510868
uguuucaggguucuuggca

SEQ ID NO: 1510870 - RNA, 19 nt, Artificial Sequence
  Description of Artificial Sequence: Synthetic oligonucleotide
  Sense strand starting at position 2144 of SEQ ID NO: 1244734
gguucaucgcuugagccaa

SEQ ID NO: 1510871 - RNA, 19 nt, Artificial Sequence
  Description of Artificial Sequence: Synthetic oligonucleotide
  Antisense strand to SEQ ID NO: 1510870
uuggcucaagcgaugaacc

SEQ ID NO: 1510872 - RNA, 19 nt, Artificial Sequence
  Description of Artificial Sequence: Synthetic oligonucleotide
  Sense strand starting at position 2271 of SEQ ID NO: 1244734
acucaaauguagucucaga

SEQ ID NO: 1510873 - RNA, 19 nt, Artificial Sequence
  Description of Artificial Sequence: Synthetic oligonucleotide
  Antisense strand to SEQ ID NO: 1510872
ucugagacuacauuugagu

SEQ ID NO: 1510874 - RNA, 19 nt, Artificial Sequence
  Description of Artificial Sequence: Synthetic oligonucleotide
  Sense strand starting at position 2326 of SEQ ID NO: 1244734
cgaggaaguccaggguaaa

SEQ ID NO: 1510875 - RNA, 19 nt, Artificial Sequence
  Description of Artificial Sequence: Synthetic oligonucleotide
  Antisense strand to SEQ ID NO: 1510874
uuuacccuggacuuccucg

SEQ ID NO: 1510876 - RNA, 19 nt, Artificial Sequence
  Description of Artificial Sequence: Synthetic oligonucleotide
  Sense strand starting at position 2339 of SEQ ID NO: 1244734
gguaaagugagucgagauc

SEQ ID NO: 1510877 - RNA, 19 nt, Artificial Sequence
  Description of Artificial Sequence: Synthetic oligonucleotide
  Antisense strand to SEQ ID NO: 1510876
gaucucgacucacuuuacc

SEQ ID NO: 1510878 - RNA, 19 nt, Artificial Sequence
  Description of Artificial Sequence: Synthetic oligonucleotide
  Sense strand starting at position 3126 of SEQ ID NO: 1244734
uuguacauaucuuuacgga

SEQ ID NO: 1510879 - RNA, 19 nt, Artificial Sequence
  Description of Artificial Sequence: Synthetic oligonucleotide
  Antisense strand to SEQ ID NO: 1510878
uccguaaagauauguacaa

SEQ ID NO: 1510880 - RNA, 19 nt, Artificial Sequence
  Description of Artificial Sequence: Synthetic oligonucleotide
  Sense strand starting at position 3127 of SEQ ID NO: 1244734
uguacauaucuuuacggau

SEQ ID NO: 1510881 - RNA, 19 nt, Artificial Sequence
  Description of Artificial Sequence: Synthetic oligonucleotide
  Antisense strand to SEQ ID NO: 1510880
auccguaaagauauguaca

SEQ ID NO: 1510882 - RNA, 19 nt, Artificial Sequence
  Description of Artificial Sequence: Synthetic oligonucleotide
  Sense strand starting at position 3321 of SEQ ID NO: 1244734
ugugcaaaccuguacugaa

SEQ ID NO: 1510883 - RNA, 19 nt, Artificial Sequence
  Description of Artificial Sequence: Synthetic oligonucleotide
  Antisense strand to SEQ ID NO: 1510882
uucaguacagguuugcaca

SEQ ID NO: 1510884 - RNA, 19 nt, Artificial Sequence
  Description of Artificial Sequence: Synthetic oligonucleotide
  Sense strand starting at position 3382 of SEQ ID NO: 1244734
gcugucaaucuagaauucu

SEQ ID NO: 1510885 - RNA, 19 nt, Artificial Sequence
  Description of Artificial Sequence: Synthetic oligonucleotide
  Antisense strand to SEQ ID NO: 1510884
agaauucuagauugacagc

SEQ ID NO: 1510886 - RNA, 19 nt, Artificial Sequence
  Description of Artificial Sequence: Synthetic oligonucleotide
  Sense strand starting at position 3931 of SEQ ID NO: 1244734
auaauaaacgcguagguaa

SEQ ID NO: 1510887 - RNA, 19 nt, Artificial Sequence
  Description of Artificial Sequence: Synthetic oligonucleotide
  Antisense strand to SEQ ID NO: 1510886
uuaccuacgcguuuauuau

SEQ ID NO: 1510888 - RNA, 19 nt, Artificial Sequence
  Description of Artificial Sequence: Synthetic oligonucleotide
  Sense strand starting at position 3938 of SEQ ID NO: 1244734
acgcguagguaacuauaaa

SEQ ID NO: 1510889 - RNA, 19 nt, Artificial Sequence
  Description of Artificial Sequence: Synthetic oligonucleotide
  Antisense strand to SEQ ID NO: 1510888
uuuauaguuaccuacgcgu

SEQ ID NO: 1510890 - RNA, 19 nt, Artificial Sequence
  Description of Artificial Sequence: Synthetic oligonucleotide
  Sense strand starting at position 242 of SEQ ID NO: 1244735
cuuaaacaguguuucucua

SEQ ID NO: 1510891 - RNA, 19 nt, Artificial Sequence
  Description of Artificial Sequence: Synthetic oligonucleotide
  Antisense strand to SEQ ID NO: 1510890
uagagaaacacuguuuaag

SEQ ID NO: 1510892 - RNA, 19 nt, Artificial Sequence
  Description of Artificial Sequence: Synthetic oligonucleotide
  Sense strand starting at position 249 of SEQ ID NO: 1244735
aguguuucucuagaauauc

SEQ ID NO: 1510893 - RNA, 19 nt, Artificial Sequence
  Description of Artificial Sequence: Synthetic oligonucleotide
  Antisense strand to SEQ ID NO: 1510892
gauauucuagagaaacacu

SEQ ID NO: 1510894 - RNA, 19 nt, Artificial Sequence
  Description of Artificial Sequence: Synthetic oligonucleotide
  Sense strand starting at position 301 of SEQ ID NO: 1244735
ggaugaucagccugcacaa

SEQ ID NO: 1510895 - RNA, 19 nt, Artificial Sequence
  Description of Artificial Sequence: Synthetic oligonucleotide
  Antisense strand to SEQ ID NO: 1510894
uugugcaggcugaucaucc

SEQ ID NO: 1510896 - RNA, 19 nt, Artificial Sequence
  Description of Artificial Sequence: Synthetic oligonucleotide
  Sense strand starting at position 303 of SEQ ID NO: 1244735
augaucagccugcacaauu

SEQ ID NO: 1510897 - RNA, 19 nt, Artificial Sequence
  Description of Artificial Sequence: Synthetic oligonucleotide
  Antisense strand to SEQ ID NO: 1510896
aauugugcaggcugaucau

SEQ ID NO: 1510898 - RNA, 19 nt, Artificial Sequence
  Description of Artificial Sequence: Synthetic oligonucleotide
  Sense strand starting at position 373 of SEQ ID NO: 1244735
gauggcauacuguaacuuu

SEQ ID NO: 1510899 - RNA, 19 nt, Artificial Sequence
  Description of Artificial Sequence: Synthetic oligonucleotide
  Antisense strand to SEQ ID NO: 1510898
aaaguuacaguaugccauc

SEQ ID NO: 1510900 - RNA, 19 nt, Artificial Sequence
  Description of Artificial Sequence: Synthetic oligonucleotide
  Sense strand starting at position 694 of SEQ ID NO: 1244735
aguuguuuaggccauagaa

SEQ ID NO: 1510901 - RNA, 19 nt, Artificial Sequence
  Description of Artificial Sequence: Synthetic oligonucleotide
  Antisense strand to SEQ ID NO: 1510900
uucuauggccuaaacaacu

SEQ ID NO: 1510902 - RNA, 19 nt, Artificial Sequence
  Description of Artificial Sequence: Synthetic oligonucleotide
  Sense strand starting at position 696 of SEQ ID NO: 1244735
uuguuuaggccauagaauc

SEQ ID NO: 1510903 - RNA, 19 nt, Artificial Sequence
  Description of Artificial Sequence: Synthetic oligonucleotide
  Antisense strand to SEQ ID NO: 1510902
gauucuauggccuaaacaa

SEQ ID NO: 1510904 - RNA, 19 nt, Artificial Sequence
  Description of Artificial Sequence: Synthetic oligonucleotide
  Sense strand starting at position 735 of SEQ ID NO: 1244735
uuuauauucugagucuuug

SEQ ID NO: 1510905 - RNA, 19 nt, Artificial Sequence
  Description of Artificial Sequence: Synthetic oligonucleotide
  Antisense strand to SEQ ID NO: 1510904
caaagacucagaauauaaa

SEQ ID NO: 1510906 - RNA, 19 nt, Artificial Sequence
  Description of Artificial Sequence: Synthetic oligonucleotide
  Sense strand starting at position 739 of SEQ ID NO: 1244735
uauucugagucuuuggaac

SEQ ID NO: 1510907 - RNA, 19 nt, Artificial Sequence
  Description of Artificial Sequence: Synthetic oligonucleotide
  Antisense strand to SEQ ID NO: 1510906
guuccaaagacucagaaua

SEQ ID NO: 1510908 - RNA, 19 nt, Artificial Sequence
  Description of Artificial Sequence: Synthetic oligonucleotide
  Sense strand starting at position 788 of SEQ ID NO: 1244735
ggagaacacuuauaagaaa

SEQ ID NO: 1510909 - RNA, 19 nt, Artificial Sequence
  Description of Artificial Sequence: Synthetic oligonucleotide
  Antisense strand to SEQ ID NO: 1510908
uuucuuauaaguguucucc

SEQ ID NO: 1510910 - RNA, 19 nt, Artificial Sequence
  Description of Artificial Sequence: Synthetic oligonucleotide
  Sense strand starting at position 904 of SEQ ID NO: 1244735
cccuuuaccugacugagua

SEQ ID NO: 1510911 - RNA, 19 nt, Artificial Sequence
  Description of Artificial Sequence: Synthetic oligonucleotide
  Antisense strand to SEQ ID NO: 1510910
uacucagucagguaaaggg

SEQ ID NO: 1510912 - RNA, 19 nt, Artificial Sequence
  Description of Artificial Sequence: Synthetic oligonucleotide
  Sense strand starting at position 905 of SEQ ID NO: 1244735
ccuuuaccugacugaguau

SEQ ID NO: 1510913 - RNA, 19 nt, Artificial Sequence
  Description of Artificial Sequence: Synthetic oligonucleotide
  Antisense strand to SEQ ID NO: 1510912
auacucagucagguaaagg

SEQ ID NO: 1510914 - RNA, 19 nt, Artificial Sequence
  Description of Artificial Sequence: Synthetic oligonucleotide
  Sense strand starting at position 916 of SEQ ID NO: 1244735
cugaguauccagcaucaug

SEQ ID NO: 1510915 - RNA, 19 nt, Artificial Sequence
  Description of Artificial Sequence: Synthetic oligonucleotide
  Antisense strand to SEQ ID NO: 1510914
caugaugcuggauacucag

SEQ ID NO: 1510916 - RNA, 19 nt, Artificial Sequence
  Description of Artificial Sequence: Synthetic oligonucleotide
  Sense strand starting at position 1109 of SEQ ID NO: 1244735
ggcuucucacagcagaagu

SEQ ID NO: 1510917 - RNA, 19 nt, Artificial Sequence
  Description of Artificial Sequence: Synthetic oligonucleotide
  Antisense strand to SEQ ID NO: 1510916
acuucugcugugagaagcc

SEQ ID NO: 1510918 - RNA, 19 nt, Artificial Sequence
  Description of Artificial Sequence: Synthetic oligonucleotide
  Sense strand starting at position 1295 of SEQ ID NO: 1244735
uccuuaauccgagguauga

SEQ ID NO: 1510919 - RNA, 19 nt, Artificial Sequence
  Description of Artificial Sequence: Synthetic oligonucleotide
  Antisense strand to SEQ ID NO: 1510918
ucauaccucggauuaagga

SEQ ID NO: 1510920 - RNA, 19 nt, Artificial Sequence
  Description of Artificial Sequence: Synthetic oligonucleotide
  Sense strand starting at position 1297 of SEQ ID NO: 1244735
cuuaauccgagguaugacu

SEQ ID NO: 1510921 - RNA, 19 nt, Artificial Sequence
  Description of Artificial Sequence: Synthetic oligonucleotide
  Antisense strand to SEQ ID NO: 1510920
agucauaccucggauuaag

SEQ ID NO: 1510922 - RNA, 19 nt, Artificial Sequence
  Description of Artificial Sequence: Synthetic oligonucleotide
  Sense strand starting at position 1364 of SEQ ID NO: 1244735
uugaguuucuccuuauaca

SEQ ID NO: 1510923 - RNA, 19 nt, Artificial Sequence
  Description of Artificial Sequence: Synthetic oligonucleotide
  Antisense strand to SEQ ID NO: 1510922
uguauaaggagaaacucaa

SEQ ID NO: 1510924 - RNA, 19 nt, Artificial Sequence
  Description of Artificial Sequence: Synthetic oligonucleotide
  Sense strand starting at position 1365 of SEQ ID NO: 1244735
ugaguuucuccuuauacau

SEQ ID NO: 1510925 - RNA, 19 nt, Artificial Sequence
  Description of Artificial Sequence: Synthetic oligonucleotide
  Antisense strand to SEQ ID NO: 1510924
auguauaaggagaaacuca

SEQ ID NO: 1510926 - RNA, 19 nt, Artificial Sequence
  Description of Artificial Sequence: Synthetic oligonucleotide
  Sense strand starting at position 1597 of SEQ ID NO: 1244735
gcugcaaauccuuagugga

SEQ ID NO: 1510927 - RNA, 19 nt, Artificial Sequence
  Description of Artificial Sequence: Synthetic oligonucleotide
  Antisense strand to SEQ ID NO: 1510926
uccacuaaggauuugcagc

SEQ ID NO: 1510928 - RNA, 19 nt, Artificial Sequence
  Description of Artificial Sequence: Synthetic oligonucleotide
  Sense strand starting at position 1674 of SEQ ID NO: 1244735
gcauguagucaagguauuu

SEQ ID NO: 1510929 - RNA, 19 nt, Artificial Sequence
  Description of Artificial Sequence: Synthetic oligonucleotide
  Antisense strand to SEQ ID NO: 1510928
aaauaccuugacuacaugc

SEQ ID NO: 1510930 - RNA, 19 nt, Artificial Sequence
  Description of Artificial Sequence: Synthetic oligonucleotide
  Sense strand starting at position 1822 of SEQ ID NO: 1244735
acauauagcccggauaauu

SEQ ID NO: 1510931 - RNA, 19 nt, Artificial Sequence
  Description of Artificial Sequence: Synthetic oligonucleotide
  Antisense strand to SEQ ID NO: 1510930
aauuauccgggcuauaugu

SEQ ID NO: 1510932 - RNA, 19 nt, Artificial Sequence
  Description of Artificial Sequence: Synthetic oligonucleotide
  Sense strand starting at position 2389 of SEQ ID NO: 1244735
agucuugcuacguugcaau

SEQ ID NO: 1510933 - RNA, 19 nt, Artificial Sequence
  Description of Artificial Sequence: Synthetic oligonucleotide
  Antisense strand to SEQ ID NO: 1510932
auugcaacguagcaagacu

SEQ ID NO: 1510934 - RNA, 19 nt, Artificial Sequence
  Description of Artificial Sequence: Synthetic oligonucleotide
  Sense strand starting at position 2471 of SEQ ID NO: 1244735
ggaaauuaucuuugauacu

SEQ ID NO: 1510935 - RNA, 19 nt, Artificial Sequence
  Description of Artificial Sequence: Synthetic oligonucleotide
  Antisense strand to SEQ ID NO: 1510934
aguaucaaagauaauuucc

SEQ ID NO: 1510936 - RNA, 19 nt, Artificial Sequence
  Description of Artificial Sequence: Synthetic oligonucleotide
  Sense strand starting at position 2520 of SEQ ID NO: 1244735
uuagccuugccagaauaag

SEQ ID NO: 1510937 - RNA, 19 nt, Artificial Sequence
  Description of Artificial Sequence: Synthetic oligonucleotide
  Antisense strand to SEQ ID NO: 1510936
cuuauucuggcaaggcuaa

SEQ ID NO: 1510938 - RNA, 19 nt, Artificial Sequence
  Description of Artificial Sequence: Synthetic oligonucleotide
  Sense strand starting at position 2534 of SEQ ID NO: 1244735
auaaguaggcauggauaaa

SEQ ID NO: 1510939 - RNA, 19 nt, Artificial Sequence
  Description of Artificial Sequence: Synthetic oligonucleotide
  Antisense strand to SEQ ID NO: 1510938
uuuauccaugccuacuuau

SEQ ID NO: 1510940 - RNA, 19 nt, Artificial Sequence
  Description of Artificial Sequence: Synthetic oligonucleotide
  Sense strand starting at position 2547 of SEQ ID NO: 1244735
gauaaaggugaaugccuaa

SEQ ID NO: 1510941 - RNA, 19 nt, Artificial Sequence
  Description of Artificial Sequence: Synthetic oligonucleotide
  Antisense strand to SEQ ID NO: 1510940
uuaggcauucaccuuuauc

SEQ ID NO: 1510942 - RNA, 19 nt, Artificial Sequence
  Description of Artificial Sequence: Synthetic oligonucleotide
  Sense strand starting at position 2719 of SEQ ID NO: 1244735
gugagaagaugcucuuauu

SEQ ID NO: 1510943 - RNA, 19 nt, Artificial Sequence
  Description of Artificial Sequence: Synthetic oligonucleotide
  Antisense strand to SEQ ID NO: 1510942
aauaagagcaucuucucac

SEQ ID NO: 1510944 - RNA, 19 nt, Artificial Sequence
  Description of Artificial Sequence: Synthetic oligonucleotide
  Sense strand starting at position 2722 of SEQ ID NO: 1244735
agaagaugcucuuauuuau

SEQ ID NO: 1510945 - RNA, 19 nt, Artificial Sequence
  Description of Artificial Sequence: Synthetic oligonucleotide
  Antisense strand to SEQ ID NO: 1510944
auaaauaagagcaucuucu

SEQ ID NO: 1510946 - RNA, 19 nt, Artificial Sequence
  Description of Artificial Sequence: Synthetic oligonucleotide
  Sense strand starting at position 2797 of SEQ ID NO: 1244735
guauauguacuguagaaga

SEQ ID NO: 1510947 - RNA, 19 nt, Artificial Sequence
  Description of Artificial Sequence: Synthetic oligonucleotide
  Antisense strand to SEQ ID NO: 1510946
ucuucuacaguacauauac

SEQ ID NO: 1510948 - RNA, 19 nt, Artificial Sequence
  Description of Artificial Sequence: Synthetic oligonucleotide
  Sense strand starting at position 2897 of SEQ ID NO: 1244735
auugcuuucgaucaggagu

SEQ ID NO: 1510949 - RNA, 19 nt, Artificial Sequence
  Description of Artificial Sequence: Synthetic oligonucleotide
  Antisense strand to SEQ ID NO: 1510948
acuccugaucgaaagcaau

SEQ ID NO: 1510950 - RNA, 19 nt, Artificial Sequence
  Description of Artificial Sequence: Synthetic oligonucleotide
  Sense strand starting at position 2900 of SEQ ID NO: 1244735
gcuuucgaucaggaguuga

SEQ ID NO: 1510951 - RNA, 19 nt, Artificial Sequence
  Description of Artificial Sequence: Synthetic oligonucleotide
  Antisense strand to SEQ ID NO: 1510950
ucaacuccugaucgaaagc

SEQ ID NO: 1510952 - RNA, 19 nt, Artificial Sequence
  Description of Artificial Sequence: Synthetic oligonucleotide
  Sense strand starting at position 3220 of SEQ ID NO: 1244735
gaaagaaugucaguugaua

SEQ ID NO: 1510953 - RNA, 19 nt, Artificial Sequence
  Description of Artificial Sequence: Synthetic oligonucleotide
  Antisense strand to SEQ ID NO: 1510952
uaucaacugacauucuuuc

SEQ ID NO: 1510954 - RNA, 19 nt, Artificial Sequence
  Description of Artificial Sequence: Synthetic oligonucleotide
  Sense strand starting at position 3286 of SEQ ID NO: 1244735
aguacauugccucauauac

SEQ ID NO: 1510955 - RNA, 19 nt, Artificial Sequence
  Description of Artificial Sequence: Synthetic oligonucleotide
  Antisense strand to SEQ ID NO: 1510954
guauaugaggcaauguacu

SEQ ID NO: 1510956 - RNA, 19 nt, Artificial Sequence
  Description of Artificial Sequence: Synthetic oligonucleotide
  Sense strand starting at position 3295 of SEQ ID NO: 1244735
ccucauauacagugugaug

SEQ ID NO: 1510957 - RNA, 19 nt, Artificial Sequence
  Description of Artificial Sequence: Synthetic oligonucleotide
  Antisense strand to SEQ ID NO: 1510956
caucacacuguauaugagg

SEQ ID NO: 1510958 - RNA, 19 nt, Artificial Sequence
  Description of Artificial Sequence: Synthetic oligonucleotide
  Sense strand starting at position 3623 of SEQ ID NO: 1244735
uguauauacucaccaagag

SEQ ID NO: 1510959 - RNA, 19 nt, Artificial Sequence
  Description of Artificial Sequence: Synthetic oligonucleotide
  Antisense strand to SEQ ID NO: 1510958
cucuuggugaguauauaca

SEQ ID NO: 1510960 - RNA, 19 nt, Artificial Sequence
  Description of Artificial Sequence: Synthetic oligonucleotide
  Sense strand starting at position 3766 of SEQ ID NO: 1244735
cuucuauagguacauguaa

SEQ ID NO: 1510961 - RNA, 19 nt, Artificial Sequence
  Description of Artificial Sequence: Synthetic oligonucleotide
  Antisense strand to SEQ ID NO: 1510960
uuacauguaccuauagaag

SEQ ID NO: 1510962 - RNA, 19 nt, Artificial Sequence
  Description of Artificial Sequence: Synthetic oligonucleotide
  Sense strand starting at position 3774 of SEQ ID NO: 1244735
gguacauguaaauguagua

SEQ ID NO: 1510963 - RNA, 19 nt, Artificial Sequence
  Description of Artificial Sequence: Synthetic oligonucleotide
  Antisense strand to SEQ ID NO: 1510962
uacuacauuuacauguacc

SEQ ID NO: 1510964 - RNA, 19 nt, Artificial Sequence
  Description of Artificial Sequence: Synthetic oligonucleotide
  Sense strand starting at position 3807 of SEQ ID NO: 1244735
agggaaauuucccauaaca

SEQ ID NO: 1510965 - RNA, 19 nt, Artificial Sequence
  Description of Artificial Sequence: Synthetic oligonucleotide
  Antisense strand to SEQ ID NO: 1510964
uguuaugggaaauuucccu

SEQ ID NO: 1510966 - RNA, 19 nt, Artificial Sequence
  Description of Artificial Sequence: Synthetic oligonucleotide
  Sense strand starting at position 3939 of SEQ ID NO: 1244735
guugcaaaccuccagcaau

SEQ ID NO: 1510967 - RNA, 19 nt, Artificial Sequence
  Description of Artificial Sequence: Synthetic oligonucleotide
  Antisense strand to SEQ ID NO: 1510966
auugcuggagguuugcaac

SEQ ID NO: 1510968 - RNA, 19 nt, Artificial Sequence
  Description of Artificial Sequence: Synthetic oligonucleotide
  Sense strand starting at position 3974 of SEQ ID NO: 1244735
aucaaauagucccucuagu

SEQ ID NO: 1510969 - RNA, 19 nt, Artificial Sequence
  Description of Artificial Sequence: Synthetic oligonucleotide
  Antisense strand to SEQ ID NO: 1510968
acuagagggacuauuugau

SEQ ID NO: 1510970 - RNA, 19 nt, Artificial Sequence
  Description of Artificial Sequence: Synthetic oligonucleotide
  Sense strand starting at position 23 of SEQ ID NO: 1244736
ggacauaucccaugguuaa

SEQ ID NO: 1510971 - RNA, 19 nt, Artificial Sequence
  Description of Artificial Sequence: Synthetic oligonucleotide
  Antisense strand to SEQ ID NO: 1510970
uuaaccaugggauaugucc

SEQ ID NO: 1510972 - RNA, 19 nt, Artificial Sequence
  Description of Artificial Sequence: Synthetic oligonucleotide
  Sense strand starting at position 51 of SEQ ID NO: 1244736
gcuauaaacacgugugaau

SEQ ID NO: 1510973 - RNA, 19 nt, Artificial Sequence
  Description of Artificial Sequence: Synthetic oligonucleotide
  Antisense strand to SEQ ID NO: 1510972
auucacacguguuuauagc

SEQ ID NO: 1510974 - RNA, 19 nt, Artificial Sequence
  Description of Artificial Sequence: Synthetic oligonucleotide
  Sense strand starting at position 72 of SEQ ID NO: 1244736
ucauaaucaggccaggagu

SEQ ID NO: 1510975 - RNA, 19 nt, Artificial Sequence
  Description of Artificial Sequence: Synthetic oligonucleotide
  Antisense strand to SEQ ID NO: 1510974
acuccuggccugauuauga

SEQ ID NO: 1510976 - RNA, 19 nt, Artificial Sequence
  Description of Artificial Sequence: Synthetic oligonucleotide
  Sense strand starting at position 159 of SEQ ID NO: 1244736
agaguuuaauucuugugac

SEQ ID NO: 1510977 - RNA, 19 nt, Artificial Sequence
  Description of Artificial Sequence: Synthetic oligonucleotide
  Antisense strand to SEQ ID NO: 1510976
gucacaagaauuaaacucu

SEQ ID NO: 1510978 - RNA, 19 nt, Artificial Sequence
  Description of Artificial Sequence: Synthetic oligonucleotide
  Sense strand starting at position 631 of SEQ ID NO: 1244736
ccuagaggcuuggcucuaa

SEQ ID NO: 1510979 - RNA, 19 nt, Artificial Sequence
  Description of Artificial Sequence: Synthetic oligonucleotide
  Antisense strand to SEQ ID NO: 1510978
uuagagccaagccucuagg

SEQ ID NO: 1510980 - RNA, 19 nt, Artificial Sequence
  Description of Artificial Sequence: Synthetic oligonucleotide
  Sense strand starting at position 635 of SEQ ID NO: 1244736
gaggcuuggcucuaaacca

SEQ ID NO: 1510981 - RNA, 19 nt, Artificial Sequence
  Description of Artificial Sequence: Synthetic oligonucleotide
  Antisense strand to SEQ ID NO: 1510980
ugguuuagagccaagccuc

SEQ ID NO: 1510982 - RNA, 19 nt, Artificial Sequence
  Description of Artificial Sequence: Synthetic oligonucleotide
  Sense strand starting at position 837 of SEQ ID NO: 1244736
gcccuugcuuauuugcaua

SEQ ID NO: 1510983 - RNA, 19 nt, Artificial Sequence
  Description of Artificial Sequence: Synthetic oligonucleotide
  Antisense strand to SEQ ID NO: 1510982
uaugcaaauaagcaagggc

SEQ ID NO: 1510984 - RNA, 19 nt, Artificial Sequence
  Description of Artificial Sequence: Synthetic oligonucleotide
  Sense strand starting at position 842 of SEQ ID NO: 1244736
ugcuuauuugcauauguua

SEQ ID NO: 1510985 - RNA, 19 nt, Artificial Sequence
  Description of Artificial Sequence: Synthetic oligonucleotide
  Antisense strand to SEQ ID NO: 1510984
uaacauaugcaaauaagca

SEQ ID NO: 1510986 - RNA, 19 nt, Artificial Sequence
  Description of Artificial Sequence: Synthetic oligonucleotide
  Sense strand starting at position 1026 of SEQ ID NO: 1244736
gaagucuggugguucaaga

SEQ ID NO: 1510987 - RNA, 19 nt, Artificial Sequence
  Description of Artificial Sequence: Synthetic oligonucleotide
  Antisense strand to SEQ ID NO: 1510986
ucuugaaccaccagacuuc

SEQ ID NO: 1510988 - RNA, 19 nt, Artificial Sequence
  Description of Artificial Sequence: Synthetic oligonucleotide
  Sense strand starting at position 1045 of SEQ ID NO: 1244736
uguaaucugagacgaagaa

SEQ ID NO: 1510989 - RNA, 19 nt, Artificial Sequence
  Description of Artificial Sequence: Synthetic oligonucleotide
  Antisense strand to SEQ ID NO: 1510988
uucuucgucucagauuaca

SEQ ID NO: 1510990 - RNA, 19 nt, Artificial Sequence
  Description of Artificial Sequence: Synthetic oligonucleotide
  Sense strand starting at position 1100 of SEQ ID NO: 1244736
cuuacuuccuggucucaua

SEQ ID NO: 1510991 - RNA, 19 nt, Artificial Sequence
  Description of Artificial Sequence: Synthetic oligonucleotide
  Antisense strand to SEQ ID NO: 1510990
uaugagaccaggaaguaag

SEQ ID NO: 1510992 - RNA, 19 nt, Artificial Sequence
  Description of Artificial Sequence: Synthetic oligonucleotide
  Sense strand starting at position 1144 of SEQ ID NO: 1244736
uaggguggauuugagagau

SEQ ID NO: 1510993 - RNA, 19 nt, Artificial Sequence
  Description of Artificial Sequence: Synthetic oligonucleotide
  Antisense strand to SEQ ID NO: 1510992
aucucucaaauccacccua

SEQ ID NO: 1510994 - RNA, 19 nt, Artificial Sequence
  Description of Artificial Sequence: Synthetic oligonucleotide
  Sense strand starting at position 1156 of SEQ ID NO: 1244736
gagagaucuugaccucuug

SEQ ID NO: 1510995 - RNA, 19 nt, Artificial Sequence
  Description of Artificial Sequence: Synthetic oligonucleotide
  Antisense strand to SEQ ID NO: 1510994
caagaggucaagaucucuc

SEQ ID NO: 1510996 - RNA, 19 nt, Artificial Sequence
  Description of Artificial Sequence: Synthetic oligonucleotide
  Sense strand starting at position 1267 of SEQ ID NO: 1244736
gccugaauuugggcuucga

SEQ ID NO: 1510997 - RNA, 19 nt, Artificial Sequence
  Description of Artificial Sequence: Synthetic oligonucleotide
  Antisense strand to SEQ ID NO: 1510996
ucgaagcccaaauucaggc

SEQ ID NO: 1510998 - RNA, 19 nt, Artificial Sequence
  Description of Artificial Sequence: Synthetic oligonucleotide
  Sense strand starting at position 1367 of SEQ ID NO: 1244736
gcucuaguuagucacugua

SEQ ID NO: 1510999 - RNA, 19 nt, Artificial Sequence
  Description of Artificial Sequence: Synthetic oligonucleotide
  Antisense strand to SEQ ID NO: 1510998
uacagugacuaacuagagc

SEQ ID NO: 1511000 - RNA, 19 nt, Artificial Sequence
  Description of Artificial Sequence: Synthetic oligonucleotide
  Sense strand starting at position 1626 of SEQ ID NO: 1244736
cagguuugguuugcuaaga

SEQ ID NO: 1511001 - RNA, 19 nt, Artificial Sequence
  Description of Artificial Sequence: Synthetic oligonucleotide
  Antisense strand to SEQ ID NO: 1511000
ucuuagcaaaccaaaccug

SEQ ID NO: 1511002 - RNA, 19 nt, Artificial Sequence
  Description of Artificial Sequence: Synthetic oligonucleotide
  Sense strand starting at position 1627 of SEQ ID NO: 1244736
agguuugguuugcuaagau

SEQ ID NO: 1511003 - RNA, 19 nt, Artificial Sequence
  Description of Artificial Sequence: Synthetic oligonucleotide
  Antisense strand to SEQ ID NO: 1511002
aucuuagcaaaccaaaccu

SEQ ID NO: 1511004 - RNA, 19 nt, Artificial Sequence
  Description of Artificial Sequence: Synthetic oligonucleotide
  Sense strand starting at position 1741 of SEQ ID NO: 1244736
ggaggugcuccugagucaa

SEQ ID NO: 1511005 - RNA, 19 nt, Artificial Sequence
  Description of Artificial Sequence: Synthetic oligonucleotide
  Antisense strand to SEQ ID NO: 1511004
uugacucaggagcaccucc

SEQ ID NO: 1511006 - RNA, 19 nt, Artificial Sequence
  Description of Artificial Sequence: Synthetic oligonucleotide
  Sense strand starting at position 2018 of SEQ ID NO: 1244736
gggcuuauaucagcugagu

SEQ ID NO: 1511007 - RNA, 19 nt, Artificial Sequence
  Description of Artificial Sequence: Synthetic oligonucleotide
  Antisense strand to SEQ ID NO: 1511006
acucagcugauauaagccc

SEQ ID NO: 1511008 - RNA, 19 nt, Artificial Sequence
  Description of Artificial Sequence: Synthetic oligonucleotide
  Sense strand starting at position 2290 of SEQ ID NO: 1244736
ccauguccuccagagaacu

SEQ ID NO: 1511009 - RNA, 19 nt, Artificial Sequence
  Description of Artificial Sequence: Synthetic oligonucleotide
  Antisense strand to SEQ ID NO: 1511008
aguucucuggaggacaugg

SEQ ID NO: 1511010 - RNA, 19 nt, Artificial Sequence
  Description of Artificial Sequence: Synthetic oligonucleotide
  Sense strand starting at position 2381 of SEQ ID NO: 1244736
gccuccaaaucuuucgauu

SEQ ID NO: 1511011 - RNA, 19 nt, Artificial Sequence
  Description of Artificial Sequence: Synthetic oligonucleotide
  Antisense strand to SEQ ID NO: 1511010
aaucgaaagauuuggaggc

SEQ ID NO: 1511012 - RNA, 19 nt, Artificial Sequence
  Description of Artificial Sequence: Synthetic oligonucleotide
  Sense strand starting at position 2393 of SEQ ID NO: 1244736
uucgauuccuacucgaauu

SEQ ID NO: 1511013 - RNA, 19 nt, Artificial Sequence
  Description of Artificial Sequence: Synthetic oligonucleotide
  Antisense strand to SEQ ID NO: 1511012
aauucgaguaggaaucgaa

SEQ ID NO: 1511014 - RNA, 19 nt, Artificial Sequence
  Description of Artificial Sequence: Synthetic oligonucleotide
  Sense strand starting at position 2499 of SEQ ID NO: 1244736
uucuccuaguaauucgaga

SEQ ID NO: 1511015 - RNA, 19 nt, Artificial Sequence
  Description of Artificial Sequence: Synthetic oligonucleotide
  Antisense strand to SEQ ID NO: 1511014
ucucgaauuacuaggagaa

SEQ ID NO: 1511016 - RNA, 19 nt, Artificial Sequence
  Description of Artificial Sequence: Synthetic oligonucleotide
  Sense strand starting at position 2504 of SEQ ID NO: 1244736
cuaguaauucgagaauguu

SEQ ID NO: 1511017 - RNA, 19 nt, Artificial Sequence
  Description of Artificial Sequence: Synthetic oligonucleotide
  Antisense strand to SEQ ID NO: 1511016
aacauucucgaauuacuag

SEQ ID NO: 1511018 - RNA, 19 nt, Artificial Sequence
  Description of Artificial Sequence: Synthetic oligonucleotide
  Sense strand starting at position 2640 of SEQ ID NO: 1244736
aagagaaacuguucuuugu

SEQ ID NO: 1511019 - RNA, 19 nt, Artificial Sequence
  Description of Artificial Sequence: Synthetic oligonucleotide
  Antisense strand to SEQ ID NO: 1511018
acaaagaacaguuucucuu

SEQ ID NO: 1511020 - RNA, 19 nt, Artificial Sequence
  Description of Artificial Sequence: Synthetic oligonucleotide
  Sense strand starting at position 2708 of SEQ ID NO: 1244736
gucagauuucaguguguuu

SEQ ID NO: 1511021 - RNA, 19 nt, Artificial Sequence
  Description of Artificial Sequence: Synthetic oligonucleotide
  Antisense strand to SEQ ID NO: 1511020
aaacacacugaaaucugac

SEQ ID NO: 1511022 - RNA, 19 nt, Artificial Sequence
  Description of Artificial Sequence: Synthetic oligonucleotide
  Sense strand starting at position 3051 of SEQ ID NO: 1244736
gugaguagauguuucucua

SEQ ID NO: 1511023 - RNA, 19 nt, Artificial Sequence
  Description of Artificial Sequence: Synthetic oligonucleotide
  Antisense strand to SEQ ID NO: 1511022
uagagaaacaucuacucac

SEQ ID NO: 1511024 - RNA, 19 nt, Artificial Sequence
  Description of Artificial Sequence: Synthetic oligonucleotide
  Sense strand starting at position 3054 of SEQ ID NO: 1244736
aguagauguuucucuaucu

SEQ ID NO: 1511025 - RNA, 19 nt, Artificial Sequence
  Description of Artificial Sequence: Synthetic oligonucleotide
  Antisense strand to SEQ ID NO: 1511024
agauagagaaacaucuacu

SEQ ID NO: 1511026 - RNA, 19 nt, Artificial Sequence
  Description of Artificial Sequence: Synthetic oligonucleotide
  Sense strand starting at position 3055 of SEQ ID NO: 1244736
guagauguuucucuaucuc

SEQ ID NO: 1511027 - RNA, 19 nt, Artificial Sequence
  Description of Artificial Sequence: Synthetic oligonucleotide
  Antisense strand to SEQ ID NO: 1511026
gagauagagaaacaucuac

SEQ ID NO: 1511028 - RNA, 19 nt, Artificial Sequence
  Description of Artificial Sequence: Synthetic oligonucleotide
  Sense strand starting at position 3163 of SEQ ID NO: 1244736
cgaggucucaguggacaga

SEQ ID NO: 1511029 - RNA, 19 nt, Artificial Sequence
  Description of Artificial Sequence: Synthetic oligonucleotide
  Antisense strand to SEQ ID NO: 1511028
ucuguccacugagaccucg

SEQ ID NO: 1511030 - RNA, 19 nt, Artificial Sequence
  Description of Artificial Sequence: Synthetic oligonucleotide
  Sense strand starting at position 3266 of SEQ ID NO: 1244736
cuggaagucuuacucacuu

SEQ ID NO: 1511031 - RNA, 19 nt, Artificial Sequence
  Description of Artificial Sequence: Synthetic oligonucleotide
  Antisense strand to SEQ ID NO: 1511030
aagugaguaagacuuccag

SEQ ID NO: 1511032 - RNA, 19 nt, Artificial Sequence
  Description of Artificial Sequence: Synthetic oligonucleotide
  Sense strand starting at position 3337 of SEQ ID NO: 1244736
aagcuuugagcucauggga

SEQ ID NO: 1511033 - RNA, 19 nt, Artificial Sequence
  Description of Artificial Sequence: Synthetic oligonucleotide
  Antisense strand to SEQ ID NO: 1511032
ucccaugagcucaaagcuu

SEQ ID NO: 1511034 - RNA, 19 nt, Artificial Sequence
  Description of Artificial Sequence: Synthetic oligonucleotide
  Sense strand starting at position 3526 of SEQ ID NO: 1244736
caaggaugguggccaguua

SEQ ID NO: 1511035 - RNA, 19 nt, Artificial Sequence
  Description of Artificial Sequence: Synthetic oligonucleotide
  Antisense strand to SEQ ID NO: 1511034
uaacuggccaccauccuug

SEQ ID NO: 1511036 - RNA, 19 nt, Artificial Sequence
  Description of Artificial Sequence: Synthetic oligonucleotide
  Sense strand starting at position 3787 of SEQ ID NO: 1244736
ccugauagccaguacaauu

SEQ ID NO: 1511037 - RNA, 19 nt, Artificial Sequence
  Description of Artificial Sequence: Synthetic oligonucleotide
  Antisense strand to SEQ ID NO: 1511036
aauuguacuggcuaucagg

SEQ ID NO: 1511038 - RNA, 19 nt, Artificial Sequence
  Description of Artificial Sequence: Synthetic oligonucleotide
  Sense strand starting at position 3861 of SEQ ID NO: 1244736
guuuaugucccucaucaac

SEQ ID NO: 1511039 - RNA, 19 nt, Artificial Sequence
  Description of Artificial Sequence: Synthetic oligonucleotide
  Antisense strand to SEQ ID NO: 1511038
guugaugagggacauaaac

SEQ ID NO: 1511040 - RNA, 19 nt, Artificial Sequence
  Description of Artificial Sequence: Synthetic oligonucleotide
  Sense strand starting at position 3898 of SEQ ID NO: 1244736
acauguauaugcguuuaag

SEQ ID NO: 1511041 - RNA, 19 nt, Artificial Sequence
  Description of Artificial Sequence: Synthetic oligonucleotide
  Antisense strand to SEQ ID NO: 1511040
cuuaaacgcauauacaugu

SEQ ID NO: 1511042 - RNA, 19 nt, Artificial Sequence
  Description of Artificial Sequence: Synthetic oligonucleotide
  Sense strand starting at position 3899 of SEQ ID NO: 1244736
cauguauaugcguuuaagc

SEQ ID NO: 1511043 - RNA, 19 nt, Artificial Sequence
  Description of Artificial Sequence: Synthetic oligonucleotide
  Antisense strand to SEQ ID NO: 1511042
gcuuaaacgcauauacaug

SEQ ID NO: 1511044 - RNA, 19 nt, Artificial Sequence
  Description of Artificial Sequence: Synthetic oligonucleotide
  Sense strand starting at position 3900 of SEQ ID NO: 1244736
auguauaugcguuuaagcu

SEQ ID NO: 1511045 - RNA, 19 nt, Artificial Sequence
  Description of Artificial Sequence: Synthetic oligonucleotide
  Antisense strand to SEQ ID NO: 1511044
agcuuaaacgcauauacau

SEQ ID NO: 1511046 - RNA, 19 nt, Artificial Sequence
  Description of Artificial Sequence: Synthetic oligonucleotide
  Sense strand starting at position 3948 of SEQ ID NO: 1244736
gcaguuacucacgacugua

SEQ ID NO: 1511047 - RNA, 19 nt, Artificial Sequence
  Description of Artificial Sequence: Synthetic oligonucleotide
  Antisense strand to SEQ ID NO: 1511046
uacagucgugaguaacugc

SEQ ID NO: 1511048 - RNA, 19 nt, Artificial Sequence
  Description of Artificial Sequence: Synthetic oligonucleotide
  Sense strand starting at position 3951 of SEQ ID NO: 1244736
guuacucacgacuguaauu

SEQ ID NO: 1511049 - RNA, 19 nt, Artificial Sequence
  Description of Artificial Sequence: Synthetic oligonucleotide
  Antisense strand to SEQ ID NO: 1511048
aauuacagucgugaguaac

SEQ ID NO: 1511050 - RNA, 19 nt, Artificial Sequence
  Description of Artificial Sequence: Synthetic oligonucleotide
  Sense strand starting at position 195 of SEQ ID NO: 1244737
aggucugucucugcccaua

SEQ ID NO: 1511051 - RNA, 19 nt, Artificial Sequence
  Description of Artificial Sequence: Synthetic oligonucleotide
  Antisense strand to SEQ ID NO: 1511050
uaugggcagagacagaccu

SEQ ID NO: 1511052 - RNA, 19 nt, Artificial Sequence
  Description of Artificial Sequence: Synthetic oligonucleotide
  Sense strand starting at position 276 of SEQ ID NO: 1244737
cagucacugucccuaguua

SEQ ID NO: 1511053 - RNA, 19 nt, Artificial Sequence
  Description of Artificial Sequence: Synthetic oligonucleotide
  Antisense strand to SEQ ID NO: 1511052
uaacuagggacagugacug

SEQ ID NO: 1511054 - RNA, 19 nt, Artificial Sequence
  Description of Artificial Sequence: Synthetic oligonucleotide
  Sense strand starting at position 277 of SEQ ID NO: 1244737
agucacugucccuaguuaa

SEQ ID NO: 1511055 - RNA, 19 nt, Artificial Sequence
  Description of Artificial Sequence: Synthetic oligonucleotide
  Antisense strand to SEQ ID NO: 1511054
uuaacuagggacagugacu

SEQ ID NO: 1511056 - RNA, 19 nt, Artificial Sequence
  Description of Artificial Sequence: Synthetic oligonucleotide
  Sense strand starting at position 338 of SEQ ID NO: 1244737
guguauacuccacgaggau

SEQ ID NO: 1511057 - RNA, 19 nt, Artificial Sequence
  Description of Artificial Sequence: Synthetic oligonucleotide
  Antisense strand to SEQ ID NO: 1511056
auccucguggaguauacac

SEQ ID NO: 1511058 - RNA, 19 nt, Artificial Sequence
  Description of Artificial Sequence: Synthetic oligonucleotide
  Sense strand starting at position 363 of SEQ ID NO: 1244737
ggaccucugccuggagaca

SEQ ID NO: 1511059 - RNA, 19 nt, Artificial Sequence
  Description of Artificial Sequence: Synthetic oligonucleotide
  Antisense strand to SEQ ID NO: 1511058
ugucuccaggcagaggucc

SEQ ID NO: 1511060 - RNA, 19 nt, Artificial Sequence
  Description of Artificial Sequence: Synthetic oligonucleotide
  Sense strand starting at position 364 of SEQ ID NO: 1244737
gaccucugccuggagacau

SEQ ID NO: 1511061 - RNA, 19 nt, Artificial Sequence
  Description of Artificial Sequence: Synthetic oligonucleotide
  Antisense strand to SEQ ID NO: 1511060
augucuccaggcagagguc

SEQ ID NO: 1511062 - RNA, 19 nt, Artificial Sequence
  Description of Artificial Sequence: Synthetic oligonucleotide
  Sense strand starting at position 424 of SEQ ID NO: 1244737
gcaagaagccagugucaaa

SEQ ID NO: 1511063 - RNA, 19 nt, Artificial Sequence
  Description of Artificial Sequence: Synthetic oligonucleotide
  Antisense strand to SEQ ID NO: 1511062
uuugacacuggcuucuugc

SEQ ID NO: 1511064 - RNA, 19 nt, Artificial Sequence
  Description of Artificial Sequence: Synthetic oligonucleotide
  Sense strand starting at position 436 of SEQ ID NO: 1244737
ugucaaaugcuugggcaca

SEQ ID NO: 1511065 - RNA, 19 nt, Artificial Sequence
  Description of Artificial Sequence: Synthetic oligonucleotide
  Antisense strand to SEQ ID NO: 1511064
ugugcccaagcauuugaca

SEQ ID NO: 1511066 - RNA, 19 nt, Artificial Sequence
  Description of Artificial Sequence: Synthetic oligonucleotide
  Sense strand starting at position 610 of SEQ ID NO: 1244737
agaagucgcugcuuugcaa

SEQ ID NO: 1511067 - RNA, 19 nt, Artificial Sequence
  Description of Artificial Sequence: Synthetic oligonucleotide
  Antisense strand to SEQ ID NO: 1511066
uugcaaagcagcgacuucu

SEQ ID NO: 1511068 - RNA, 19 nt, Artificial Sequence
  Description of Artificial Sequence: Synthetic oligonucleotide
  Sense strand starting at position 681 of SEQ ID NO: 1244737
acagcacucuuugaagcaa

SEQ ID NO: 1511069 - RNA, 19 nt, Artificial Sequence
  Description of Artificial Sequence: Synthetic oligonucleotide
  Antisense strand to SEQ ID NO: 1511068
uugcuucaaagagugcugu

SEQ ID NO: 1511070 - RNA, 19 nt, Artificial Sequence
  Description of Artificial Sequence: Synthetic oligonucleotide
  Sense strand starting at position 741 of SEQ ID NO: 1244737
ucugcacguccagacuaau

SEQ ID NO: 1511071 - RNA, 19 nt, Artificial Sequence
  Description of Artificial Sequence: Synthetic oligonucleotide
  Antisense strand to SEQ ID NO: 1511070
auuagucuggacgugcaga

SEQ ID NO: 1511072 - RNA, 19 nt, Artificial Sequence
  Description of Artificial Sequence: Synthetic oligonucleotide
  Sense strand starting at position 744 of SEQ ID NO: 1244737
gcacguccagacuaaucaa

SEQ ID NO: 1511073 - RNA, 19 nt, Artificial Sequence
  Description of Artificial Sequence: Synthetic oligonucleotide
  Antisense strand to SEQ ID NO: 1511072
uugauuagucuggacgugc

SEQ ID NO: 1511074 - RNA, 19 nt, Artificial Sequence
  Description of Artificial Sequence: Synthetic oligonucleotide
  Sense strand starting at position 1355 of SEQ ID NO: 1244737
cccggaguuccucaugcau

SEQ ID NO: 1511075 - RNA, 19 nt, Artificial Sequence
  Description of Artificial Sequence: Synthetic oligonucleotide
  Antisense strand to SEQ ID NO: 1511074
augcaugaggaacuccggg

SEQ ID NO: 1511076 - RNA, 19 nt, Artificial Sequence
  Description of Artificial Sequence: Synthetic oligonucleotide
  Sense strand starting at position 1764 of SEQ ID NO: 1244737
ccgggacuuggcgaucuua

SEQ ID NO: 1511077 - RNA, 19 nt, Artificial Sequence
  Description of Artificial Sequence: Synthetic oligonucleotide
  Antisense strand to SEQ ID NO: 1511076
uaagaucgccaagucccgg

SEQ ID NO: 1511078 - RNA, 19 nt, Artificial Sequence
  Description of Artificial Sequence: Synthetic oligonucleotide
  Sense strand starting at position 1836 of SEQ ID NO: 1244737
ucgcgaguuccucacagac

SEQ ID NO: 1511079 - RNA, 19 nt, Artificial Sequence
  Description of Artificial Sequence: Synthetic oligonucleotide
  Antisense strand to SEQ ID NO: 1511078
gucugugaggaacucgcga

SEQ ID NO: 1511080 - RNA, 19 nt, Artificial Sequence
  Description of Artificial Sequence: Synthetic oligonucleotide
  Sense strand starting at position 2041 of SEQ ID NO: 1244737
gcucgagugccuccucgaa

SEQ ID NO: 1511081 - RNA, 19 nt, Artificial Sequence
  Description of Artificial Sequence: Synthetic oligonucleotide
  Antisense strand to SEQ ID NO: 1511080
uucgaggaggcacucgagc

SEQ ID NO: 1511082 - RNA, 19 nt, Artificial Sequence
  Description of Artificial Sequence: Synthetic oligonucleotide
  Sense strand starting at position 2043 of SEQ ID NO: 1244737
ucgagugccuccucgaauc

SEQ ID NO: 1511083 - RNA, 19 nt, Artificial Sequence
  Description of Artificial Sequence: Synthetic oligonucleotide
  Antisense strand to SEQ ID NO: 1511082
gauucgaggaggcacucga

SEQ ID NO: 1511084 - RNA, 19 nt, Artificial Sequence
  Description of Artificial Sequence: Synthetic oligonucleotide
  Sense strand starting at position 2331 of SEQ ID NO: 1244737
cugcaucuucggcguuaaa

SEQ ID NO: 1511085 - RNA, 19 nt, Artificial Sequence
  Description of Artificial Sequence: Synthetic oligonucleotide
  Antisense strand to SEQ ID NO: 1511084
uuuaacgccgaagaugcag

SEQ ID NO: 1511086 - RNA, 19 nt, Artificial Sequence
  Description of Artificial Sequence: Synthetic oligonucleotide
  Sense strand starting at position 2332 of SEQ ID NO: 1244737
ugcaucuucggcguuaaag

SEQ ID NO: 1511087 - RNA, 19 nt, Artificial Sequence
  Description of Artificial Sequence: Synthetic oligonucleotide
  Antisense strand to SEQ ID NO: 1511086
cuuuaacgccgaagaugca

SEQ ID NO: 1511088 - RNA, 19 nt, Artificial Sequence
  Description of Artificial Sequence: Synthetic oligonucleotide
  Sense strand starting at position 2334 of SEQ ID NO: 1244737
caucuucggcguuaaagac

SEQ ID NO: 1511089 - RNA, 19 nt, Artificial Sequence
  Description of Artificial Sequence: Synthetic oligonucleotide
  Antisense strand to SEQ ID NO: 1511088
gucuuuaacgccgaagaug

SEQ ID NO: 1511090 - RNA, 19 nt, Artificial Sequence
  Description of Artificial Sequence: Synthetic oligonucleotide
  Sense strand starting at position 2846 of SEQ ID NO: 1244737
aaggaagccugguacuuua

SEQ ID NO: 1511091 - RNA, 19 nt, Artificial Sequence
  Description of Artificial Sequence: Synthetic oligonucleotide
  Antisense strand to SEQ ID NO: 1511090
uaaaguaccaggcuuccuu

SEQ ID NO: 1511092 - RNA, 19 nt, Artificial Sequence
  Description of Artificial Sequence: Synthetic oligonucleotide
  Sense strand starting at position 2932 of SEQ ID NO: 1244737
agaggucuuucuccaguau

SEQ ID NO: 1511093 - RNA, 19 nt, Artificial Sequence
  Description of Artificial Sequence: Synthetic oligonucleotide
  Antisense strand to SEQ ID NO: 1511092
auacuggagaaagaccucu

SEQ ID NO: 1511094 - RNA, 19 nt, Artificial Sequence
  Description of Artificial Sequence: Synthetic oligonucleotide
  Sense strand starting at position 2933 of SEQ ID NO: 1244737
gaggucuuucuccaguauu

SEQ ID NO: 1511095 - RNA, 19 nt, Artificial Sequence
  Description of Artificial Sequence: Synthetic oligonucleotide
  Antisense strand to SEQ ID NO: 1511094
aauacuggagaaagaccuc

SEQ ID NO: 1511096 - RNA, 19 nt, Artificial Sequence
  Description of Artificial Sequence: Synthetic oligonucleotide
  Sense strand starting at position 3060 of SEQ ID NO: 1244737
ggaucuccucgccgugaua

SEQ ID NO: 1511097 - RNA, 19 nt, Artificial Sequence
  Description of Artificial Sequence: Synthetic oligonucleotide
  Antisense strand to SEQ ID NO: 1511096
uaucacggcgaggagaucc

SEQ ID NO: 1511098 - RNA, 19 nt, Artificial Sequence
  Description of Artificial Sequence: Synthetic oligonucleotide
  Sense strand starting at position 3082 of SEQ ID NO: 1244737
accagugcugcuuaaacuu

SEQ ID NO: 1511099 - RNA, 19 nt, Artificial Sequence
  Description of Artificial Sequence: Synthetic oligonucleotide
  Antisense strand to SEQ ID NO: 1511098
aaguuuaagcagcacuggu

SEQ ID NO: 1511100 - RNA, 19 nt, Artificial Sequence
  Description of Artificial Sequence: Synthetic oligonucleotide
  Sense strand starting at position 3120 of SEQ ID NO: 1244737
acucgaggcucuuauuaaa

SEQ ID NO: 1511101 - RNA, 19 nt, Artificial Sequence
  Description of Artificial Sequence: Synthetic oligonucleotide
  Antisense strand to SEQ ID NO: 1511100
uuuaauaagagccucgagu

SEQ ID NO: 1511102 - RNA, 19 nt, Artificial Sequence
  Description of Artificial Sequence: Synthetic oligonucleotide
  Sense strand starting at position 3341 of SEQ ID NO: 1244737
aguauaguucuccagugcu

SEQ ID NO: 1511103 - RNA, 19 nt, Artificial Sequence
  Description of Artificial Sequence: Synthetic oligonucleotide
  Antisense strand to SEQ ID NO: 1511102
agcacuggagaacuauacu

SEQ ID NO: 1511104 - RNA, 19 nt, Artificial Sequence
  Description of Artificial Sequence: Synthetic oligonucleotide
  Sense strand starting at position 3376 of SEQ ID NO: 1244737
uccucaugccucuagugau

SEQ ID NO: 1511105 - RNA, 19 nt, Artificial Sequence
  Description of Artificial Sequence: Synthetic oligonucleotide
  Antisense strand to SEQ ID NO: 1511104
aucacuagaggcaugagga

SEQ ID NO: 1511106 - RNA, 19 nt, Artificial Sequence
  Description of Artificial Sequence: Synthetic oligonucleotide
  Sense strand starting at position 3478 of SEQ ID NO: 1244737
gggacuggccacuggaauu

SEQ ID NO: 1511107 - RNA, 19 nt, Artificial Sequence
  Description of Artificial Sequence: Synthetic oligonucleotide
  Antisense strand to SEQ ID NO: 1511106
aauuccaguggccaguccc

SEQ ID NO: 1511108 - RNA, 19 nt, Artificial Sequence
  Description of Artificial Sequence: Synthetic oligonucleotide
  Sense strand starting at position 3484 of SEQ ID NO: 1244737
ggccacuggaauuguuaaa

SEQ ID NO: 1511109 - RNA, 19 nt, Artificial Sequence
  Description of Artificial Sequence: Synthetic oligonucleotide
  Antisense strand to SEQ ID NO: 1511108
uuuaacaauuccaguggcc

SEQ ID NO: 1511110 - RNA, 19 nt, Artificial Sequence
  Description of Artificial Sequence: Synthetic oligonucleotide
  Sense strand starting at position 3495 of SEQ ID NO: 1244737
uuguuaaagucacugaauc

SEQ ID NO: 1511111 - RNA, 19 nt, Artificial Sequence
  Description of Artificial Sequence: Synthetic oligonucleotide
  Antisense strand to SEQ ID NO: 1511110
gauucagugacuuuaacaa

SEQ ID NO: 1511112 - RNA, 19 nt, Artificial Sequence
  Description of Artificial Sequence: Synthetic oligonucleotide
  Sense strand starting at position 3496 of SEQ ID NO: 1244737
uguuaaagucacugaauca

SEQ ID NO: 1511113 - RNA, 19 nt, Artificial Sequence
  Description of Artificial Sequence: Synthetic oligonucleotide
  Antisense strand to SEQ ID NO: 1511112
ugauucagugacuuuaaca

SEQ ID NO: 1511114 - RNA, 19 nt, Artificial Sequence
  Description of Artificial Sequence: Synthetic oligonucleotide
  Sense strand starting at position 3529 of SEQ ID NO: 1244737
ccuguaaaguggguuaaga

SEQ ID NO: 1511115 - RNA, 19 nt, Artificial Sequence
  Description of Artificial Sequence: Synthetic oligonucleotide
  Antisense strand to SEQ ID NO: 1511114
ucuuaacccacuuuacagg

SEQ ID NO: 1511116 - RNA, 19 nt, Artificial Sequence
  Description of Artificial Sequence: Synthetic oligonucleotide
  Sense strand starting at position 3531 of SEQ ID NO: 1244737
uguaaaguggguuaagagu

SEQ ID NO: 1511117 - RNA, 19 nt, Artificial Sequence
  Description of Artificial Sequence: Synthetic oligonucleotide
  Antisense strand to SEQ ID NO: 1511116
acucuuaacccacuuuaca

SEQ ID NO: 1511118 - RNA, 19 nt, Artificial Sequence
  Description of Artificial Sequence: Synthetic oligonucleotide
  Sense strand starting at position 3633 of SEQ ID NO: 1244737
gaaucagaguccucuggga

SEQ ID NO: 1511119 - RNA, 19 nt, Artificial Sequence
  Description of Artificial Sequence: Synthetic oligonucleotide
  Antisense strand to SEQ ID NO: 1511118
ucccagaggacucugauuc

SEQ ID NO: 1511120 - RNA, 19 nt, Artificial Sequence
  Description of Artificial Sequence: Synthetic oligonucleotide
  Sense strand starting at position 3635 of SEQ ID NO: 1244737
aucagaguccucugggaag

SEQ ID NO: 1511121 - RNA, 19 nt, Artificial Sequence
  Description of Artificial Sequence: Synthetic oligonucleotide
  Antisense strand to SEQ ID NO: 1511120
cuucccagaggacucugau

SEQ ID NO: 1511122 - RNA, 19 nt, Artificial Sequence
  Description of Artificial Sequence: Synthetic oligonucleotide
  Sense strand starting at position 3638 of SEQ ID NO: 1244737
agaguccucugggaagcua

SEQ ID NO: 1511123 - RNA, 19 nt, Artificial Sequence
  Description of Artificial Sequence: Synthetic oligonucleotide
  Antisense strand to SEQ ID NO: 1511122
uagcuucccagaggacucu

SEQ ID NO: 1511124 - RNA, 19 nt, Artificial Sequence
  Description of Artificial Sequence: Synthetic oligonucleotide
  Sense strand starting at position 3692 of SEQ ID NO: 1244737
aauggcucucaguauugua

SEQ ID NO: 1511125 - RNA, 19 nt, Artificial Sequence
  Description of Artificial Sequence: Synthetic oligonucleotide
  Antisense strand to SEQ ID NO: 1511124
uacaauacugagagccauu

SEQ ID NO: 1511126 - RNA, 19 nt, Artificial Sequence
  Description of Artificial Sequence: Synthetic oligonucleotide
  Sense strand starting at position 3697 of SEQ ID NO: 1244737
cucucaguauuguauuuga

SEQ ID NO: 1511127 - RNA, 19 nt, Artificial Sequence
  Description of Artificial Sequence: Synthetic oligonucleotide
  Antisense strand to SEQ ID NO: 1511126
ucaaauacaauacugagag

SEQ ID NO: 1511128 - RNA, 19 nt, Artificial Sequence
  Description of Artificial Sequence: Synthetic oligonucleotide
  Sense strand starting at position 3719 of SEQ ID NO: 1244737
auaagcuuccuagguaauu

SEQ ID NO: 1511129 - RNA, 19 nt, Artificial Sequence
  Description of Artificial Sequence: Synthetic oligonucleotide
  Antisense strand to SEQ ID NO: 1511128
aauuaccuaggaagcuuau

SEQ ID NO: 1511130 - RNA, 19 nt, Artificial Sequence
  Description of Artificial Sequence: Synthetic oligonucleotide
  Sense strand starting at position 41 of SEQ ID NO: 1244738
gcaagcauacgagaauguu

SEQ ID NO: 1511131 - RNA, 19 nt, Artificial Sequence
  Description of Artificial Sequence: Synthetic oligonucleotide
  Antisense strand to SEQ ID NO: 1511130
aacauucucguaugcuugc

SEQ ID NO: 1511132 - RNA, 19 nt, Artificial Sequence
  Description of Artificial Sequence: Synthetic oligonucleotide
  Sense strand starting at position 327 of SEQ ID NO: 1244738
agugauguauuaucagggu

SEQ ID NO: 1511133 - RNA, 19 nt, Artificial Sequence
  Description of Artificial Sequence: Synthetic oligonucleotide
  Antisense strand to SEQ ID NO: 1511132
acccugauaauacaucacu

SEQ ID NO: 1511134 - RNA, 19 nt, Artificial Sequence
  Description of Artificial Sequence: Synthetic oligonucleotide
  Sense strand starting at position 331 of SEQ ID NO: 1244738
auguauuaucaggguccaa

SEQ ID NO: 1511135 - RNA, 19 nt, Artificial Sequence
  Description of Artificial Sequence: Synthetic oligonucleotide
  Antisense strand to SEQ ID NO: 1511134
uuggacccugauaauacau

SEQ ID NO: 1511136 - RNA, 19 nt, Artificial Sequence
  Description of Artificial Sequence: Synthetic oligonucleotide
  Sense strand starting at position 464 of SEQ ID NO: 1244738
agguaauugguaugacaau

SEQ ID NO: 1511137 - RNA, 19 nt, Artificial Sequence
  Description of Artificial Sequence: Synthetic oligonucleotide
  Antisense strand to SEQ ID NO: 1511136
auugucauaccaauuaccu

SEQ ID NO: 1511138 - RNA, 19 nt, Artificial Sequence
  Description of Artificial Sequence: Synthetic oligonucleotide
  Sense strand starting at position 470 of SEQ ID NO: 1244738
uugguaugacaaugaacuu

SEQ ID NO: 1511139 - RNA, 19 nt, Artificial Sequence
  Description of Artificial Sequence: Synthetic oligonucleotide
  Antisense strand to SEQ ID NO: 1511138
aaguucauugucauaccaa

SEQ ID NO: 1511140 - RNA, 19 nt, Artificial Sequence
  Description of Artificial Sequence: Synthetic oligonucleotide
  Sense strand starting at position 516 of SEQ ID NO: 1244738
ucauaaaugcugggaauaa

SEQ ID NO: 1511141 - RNA, 19 nt, Artificial Sequence
  Description of Artificial Sequence: Synthetic oligonucleotide
  Antisense strand to SEQ ID NO: 1511140
uuauucccagcauuuauga

SEQ ID NO: 1511142 - RNA, 19 nt, Artificial Sequence
  Description of Artificial Sequence: Synthetic oligonucleotide
  Sense strand starting at position 615 of SEQ ID NO: 1244738
gauacauuaccugggcaga

SEQ ID NO: 1511143 - RNA, 19 nt, Artificial Sequence
  Description of Artificial Sequence: Synthetic oligonucleotide
  Antisense strand to SEQ ID NO: 1511142
ucugcccagguaauguauc

SEQ ID NO: 1511144 - RNA, 19 nt, Artificial Sequence
  Description of Artificial Sequence: Synthetic oligonucleotide
  Sense strand starting at position 616 of SEQ ID NO: 1244738
auacauuaccugggcagaa

SEQ ID NO: 1511145 - RNA, 19 nt, Artificial Sequence
  Description of Artificial Sequence: Synthetic oligonucleotide
  Antisense strand to SEQ ID NO: 1511144
uucugcccagguaauguau

SEQ ID NO: 1511146 - RNA, 19 nt, Artificial Sequence
  Description of Artificial Sequence: Synthetic oligonucleotide
  Sense strand starting at position 650 of SEQ ID NO: 1244738
ucuguauuccuauacaguu

SEQ ID NO: 1511147 - RNA, 19 nt, Artificial Sequence
  Description of Artificial Sequence: Synthetic oligonucleotide
  Antisense strand to SEQ ID NO: 1511146
aacuguauaggaauacaga

SEQ ID NO: 1511148 - RNA, 19 nt, Artificial Sequence
  Description of Artificial Sequence: Synthetic oligonucleotide
  Sense strand starting at position 704 of SEQ ID NO: 1244738
uuaucaauauggcuagauu

SEQ ID NO: 1511149 - RNA, 19 nt, Artificial Sequence
  Description of Artificial Sequence: Synthetic oligonucleotide
  Antisense strand to SEQ ID NO: 1511148
aaucuagccauauugauaa

SEQ ID NO: 1511150 - RNA, 19 nt, Artificial Sequence
  Description of Artificial Sequence: Synthetic oligonucleotide
  Sense strand starting at position 707 of SEQ ID NO: 1244738
ucaauauggcuagauugua

SEQ ID NO: 1511151 - RNA, 19 nt, Artificial Sequence
  Description of Artificial Sequence: Synthetic oligonucleotide
  Antisense strand to SEQ ID NO: 1511150
uacaaucuagccauauuga

SEQ ID NO: 1511152 - RNA, 19 nt, Artificial Sequence
  Description of Artificial Sequence: Synthetic oligonucleotide
  Sense strand starting at position 720 of SEQ ID NO: 1244738
auuguaugcuacuuggaaa

SEQ ID NO: 1511153 - RNA, 19 nt, Artificial Sequence
  Description of Artificial Sequence: Synthetic oligonucleotide
  Antisense strand to SEQ ID NO: 1511152
uuuccaaguagcauacaau

SEQ ID NO: 1511154 - RNA, 19 nt, Artificial Sequence
  Description of Artificial Sequence: Synthetic oligonucleotide
  Sense strand starting at position 721 of SEQ ID NO: 1244738
uuguaugcuacuuggaaag

SEQ ID NO: 1511155 - RNA, 19 nt, Artificial Sequence
  Description of Artificial Sequence: Synthetic oligonucleotide
  Antisense strand to SEQ ID NO: 1511154
cuuuccaaguagcauacaa

SEQ ID NO: 1511156 - RNA, 19 nt, Artificial Sequence
  Description of Artificial Sequence: Synthetic oligonucleotide
  Sense strand starting at position 757 of SEQ ID NO: 1244738
cuagcucaauucuuaggaa

SEQ ID NO: 1511157 - RNA, 19 nt, Artificial Sequence
  Description of Artificial Sequence: Synthetic oligonucleotide
  Antisense strand to SEQ ID NO: 1511156
uuccuaagaauugagcuag

SEQ ID NO: 1511158 - RNA, 19 nt, Artificial Sequence
  Description of Artificial Sequence: Synthetic oligonucleotide
  Sense strand starting at position 980 of SEQ ID NO: 1244738
aaggaaauucccuggagca

SEQ ID NO: 1511159 - RNA, 19 nt, Artificial Sequence
  Description of Artificial Sequence: Synthetic oligonucleotide
  Antisense strand to SEQ ID NO: 1511158
ugcuccagggaauuuccuu

SEQ ID NO: 1511160 - RNA, 19 nt, Artificial Sequence
  Description of Artificial Sequence: Synthetic oligonucleotide
  Sense strand starting at position 981 of SEQ ID NO: 1244738
aggaaauucccuggagcau

SEQ ID NO: 1511161 - RNA, 19 nt, Artificial Sequence
  Description of Artificial Sequence: Synthetic oligonucleotide
  Antisense strand to SEQ ID NO: 1511160
augcuccagggaauuuccu

SEQ ID NO: 1511162 - RNA, 19 nt, Artificial Sequence
  Description of Artificial Sequence: Synthetic oligonucleotide
  Sense strand starting at position 1008 of SEQ ID NO: 1244738
aguccugguguggaaagaa

SEQ ID NO: 1511163 - RNA, 19 nt, Artificial Sequence
  Description of Artificial Sequence: Synthetic oligonucleotide
  Antisense strand to SEQ ID NO: 1511162
uucuuuccacaccaggacu

SEQ ID NO: 1511164 - RNA, 19 nt, Artificial Sequence
  Description of Artificial Sequence: Synthetic oligonucleotide
  Sense strand starting at position 1084 of SEQ ID NO: 1244738
aaccuuugacucuggugua

SEQ ID NO: 1511165 - RNA, 19 nt, Artificial Sequence
  Description of Artificial Sequence: Synthetic oligonucleotide
  Antisense strand to SEQ ID NO: 1511164
uacaccagagucaaagguu

SEQ ID NO: 1511166 - RNA, 19 nt, Artificial Sequence
  Description of Artificial Sequence: Synthetic oligonucleotide
  Sense strand starting at position 1267 of SEQ ID NO: 1244738
acauuuguccaccguugga

SEQ ID NO: 1511167 - RNA, 19 nt, Artificial Sequence
  Description of Artificial Sequence: Synthetic oligonucleotide
  Antisense strand to SEQ ID NO: 1511166
uccaacgguggacaaaugu

SEQ ID NO: 1511168 - RNA, 19 nt, Artificial Sequence
  Description of Artificial Sequence: Synthetic oligonucleotide
  Sense strand starting at position 1385 of SEQ ID NO: 1244738
ucacaaguacuuuauaugu

SEQ ID NO: 1511169 - RNA, 19 nt, Artificial Sequence
  Description of Artificial Sequence: Synthetic oligonucleotide
  Antisense strand to SEQ ID NO: 1511168
acauauaaaguacuuguga

SEQ ID NO: 1511170 - RNA, 19 nt, Artificial Sequence
  Description of Artificial Sequence: Synthetic oligonucleotide
  Sense strand starting at position 1393 of SEQ ID NO: 1244738
acuuuauauguacagcuau

SEQ ID NO: 1511171 - RNA, 19 nt, Artificial Sequence
  Description of Artificial Sequence: Synthetic oligonucleotide
  Antisense strand to SEQ ID NO: 1511170
auagcuguacauauaaagu

SEQ ID NO: 1511172 - RNA, 19 nt, Artificial Sequence
  Description of Artificial Sequence: Synthetic oligonucleotide
  Sense strand starting at position 1631 of SEQ ID NO: 1244738
ucucuuugucuuggagaau

SEQ ID NO: 1511173 - RNA, 19 nt, Artificial Sequence
  Description of Artificial Sequence: Synthetic oligonucleotide
  Antisense strand to SEQ ID NO: 1511172
auucuccaagacaaagaga

SEQ ID NO: 1511174 - RNA, 19 nt, Artificial Sequence
  Description of Artificial Sequence: Synthetic oligonucleotide
  Sense strand starting at position 1637 of SEQ ID NO: 1244738
ugucuuggagaauguacuu

SEQ ID NO: 1511175 - RNA, 19 nt, Artificial Sequence
  Description of Artificial Sequence: Synthetic oligonucleotide
  Antisense strand to SEQ ID NO: 1511174
aaguacauucuccaagaca

SEQ ID NO: 1511176 - RNA, 19 nt, Artificial Sequence
  Description of Artificial Sequence: Synthetic oligonucleotide
  Sense strand starting at position 1642 of SEQ ID NO: 1244738
uggagaauguacuuuacua

SEQ ID NO: 1511177 - RNA, 19 nt, Artificial Sequence
  Description of Artificial Sequence: Synthetic oligonucleotide
  Antisense strand to SEQ ID NO: 1511176
uaguaaaguacauucucca

SEQ ID NO: 1511178 - RNA, 19 nt, Artificial Sequence
  Description of Artificial Sequence: Synthetic oligonucleotide
  Sense strand starting at position 2055 of SEQ ID NO: 1244738
acccgacccucuuuagaaa

SEQ ID NO: 1511179 - RNA, 19 nt, Artificial Sequence
  Description of Artificial Sequence: Synthetic oligonucleotide
  Antisense strand to SEQ ID NO: 1511178
uuucuaaagagggucgggu

SEQ ID NO: 1511180 - RNA, 19 nt, Artificial Sequence
  Description of Artificial Sequence: Synthetic oligonucleotide
  Sense strand starting at position 2227 of SEQ ID NO: 1244738
acagaauaggccuggguuu

SEQ ID NO: 1511181 - RNA, 19 nt, Artificial Sequence
  Description of Artificial Sequence: Synthetic oligonucleotide
  Antisense strand to SEQ ID NO: 1511180
aaacccaggccuauucugu

SEQ ID NO: 1511182 - RNA, 19 nt, Artificial Sequence
  Description of Artificial Sequence: Synthetic oligonucleotide
  Sense strand starting at position 2228 of SEQ ID NO: 1244738
cagaauaggccuggguuua

SEQ ID NO: 1511183 - RNA, 19 nt, Artificial Sequence
  Description of Artificial Sequence: Synthetic oligonucleotide
  Antisense strand to SEQ ID NO: 1511182
uaaacccaggccuauucug

SEQ ID NO: 1511184 - RNA, 19 nt, Artificial Sequence
  Description of Artificial Sequence: Synthetic oligonucleotide
  Sense strand starting at position 2894 of SEQ ID NO: 1244738
ugauaauaaugguuggagu

SEQ ID NO: 1511185 - RNA, 19 nt, Artificial Sequence
  Description of Artificial Sequence: Synthetic oligonucleotide
  Antisense strand to SEQ ID NO: 1511184
acuccaaccauuauuauca

SEQ ID NO: 1511186 - RNA, 19 nt, Artificial Sequence
  Description of Artificial Sequence: Synthetic oligonucleotide
  Sense strand starting at position 2939 of SEQ ID NO: 1244738
cguguuugucaucuccagu

SEQ ID NO: 1511187 - RNA, 19 nt, Artificial Sequence
  Description of Artificial Sequence: Synthetic oligonucleotide
  Antisense strand to SEQ ID NO: 1511186
acuggagaugacaaacacg

SEQ ID NO: 1511188 - RNA, 19 nt, Artificial Sequence
  Description of Artificial Sequence: Synthetic oligonucleotide
  Sense strand starting at position 2950 of SEQ ID NO: 1244738
ucuccagugcuuuaugaag

SEQ ID NO: 1511189 - RNA, 19 nt, Artificial Sequence
  Description of Artificial Sequence: Synthetic oligonucleotide
  Antisense strand to SEQ ID NO: 1511188
cuucauaaagcacuggaga

SEQ ID NO: 1511190 - RNA, 19 nt, Artificial Sequence
  Description of Artificial Sequence: Synthetic oligonucleotide
  Sense strand starting at position 2981 of SEQ ID NO: 1244738
agguucagccgucuguauu

SEQ ID NO: 1511191 - RNA, 19 nt, Artificial Sequence
  Description of Artificial Sequence: Synthetic oligonucleotide
  Antisense strand to SEQ ID NO: 1511190
aauacagacggcugaaccu

SEQ ID NO: 1511192 - RNA, 19 nt, Artificial Sequence
  Description of Artificial Sequence: Synthetic oligonucleotide
  Sense strand starting at position 3054 of SEQ ID NO: 1244738
cgcucaguaaguguguauu

SEQ ID NO: 1511193 - RNA, 19 nt, Artificial Sequence
  Description of Artificial Sequence: Synthetic oligonucleotide
  Antisense strand to SEQ ID NO: 1511192
aauacacacuuacugagcg

SEQ ID NO: 1511194 - RNA, 19 nt, Artificial Sequence
  Description of Artificial Sequence: Synthetic oligonucleotide
  Sense strand starting at position 3057 of SEQ ID NO: 1244738
ucaguaaguguguauugag

SEQ ID NO: 1511195 - RNA, 19 nt, Artificial Sequence
  Description of Artificial Sequence: Synthetic oligonucleotide
  Antisense strand to SEQ ID NO: 1511194
cucaauacacacuuacuga

SEQ ID NO: 1511196 - RNA, 19 nt, Artificial Sequence
  Description of Artificial Sequence: Synthetic oligonucleotide
  Sense strand starting at position 3108 of SEQ ID NO: 1244738
acuaaaucaugaguauguu

SEQ ID NO: 1511197 - RNA, 19 nt, Artificial Sequence
  Description of Artificial Sequence: Synthetic oligonucleotide
  Antisense strand to SEQ ID NO: 1511196
aacauacucaugauuuagu

SEQ ID NO: 1511198 - RNA, 19 nt, Artificial Sequence
  Description of Artificial Sequence: Synthetic oligonucleotide
  Sense strand starting at position 3124 of SEQ ID NO: 1244738
guugguuuaccagauggaa

SEQ ID NO: 1511199 - RNA, 19 nt, Artificial Sequence
  Description of Artificial Sequence: Synthetic oligonucleotide
  Antisense strand to SEQ ID NO: 1511198
uuccaucugguaaaccaac

SEQ ID NO: 1511200 - RNA, 19 nt, Artificial Sequence
  Description of Artificial Sequence: Synthetic oligonucleotide
  Sense strand starting at position 3126 of SEQ ID NO: 1244738
ugguuuaccagauggaaug

SEQ ID NO: 1511201 - RNA, 19 nt, Artificial Sequence
  Description of Artificial Sequence: Synthetic oligonucleotide
  Antisense strand to SEQ ID NO: 1511200
cauuccaucugguaaacca

SEQ ID NO: 1511202 - RNA, 19 nt, Artificial Sequence
  Description of Artificial Sequence: Synthetic oligonucleotide
  Sense strand starting at position 3177 of SEQ ID NO: 1244738
auggauauugugggucacu

SEQ ID NO: 1511203 - RNA, 19 nt, Artificial Sequence
  Description of Artificial Sequence: Synthetic oligonucleotide
  Antisense strand to SEQ ID NO: 1511202
agugacccacaauauccau

SEQ ID NO: 1511204 - RNA, 19 nt, Artificial Sequence
  Description of Artificial Sequence: Synthetic oligonucleotide
  Sense strand starting at position 3471 of SEQ ID NO: 1244738
uugaguggugcuugagaaa

SEQ ID NO: 1511205 - RNA, 19 nt, Artificial Sequence
  Description of Artificial Sequence: Synthetic oligonucleotide
  Antisense strand to SEQ ID NO: 1511204
uuucucaagcaccacucaa

SEQ ID NO: 1511206 - RNA, 19 nt, Artificial Sequence
  Description of Artificial Sequence: Synthetic oligonucleotide
  Sense strand starting at position 3494 of SEQ ID NO: 1244738
acaugaaauugcuuguuaa

SEQ ID NO: 1511207 - RNA, 19 nt, Artificial Sequence
  Description of Artificial Sequence: Synthetic oligonucleotide
  Antisense strand to SEQ ID NO: 1511206
uuaacaagcaauuucaugu

SEQ ID NO: 1511208 - RNA, 19 nt, Artificial Sequence
  Description of Artificial Sequence: Synthetic oligonucleotide
  Sense strand starting at position 3844 of SEQ ID NO: 1244738
aggauuaaaguacgauaca

SEQ ID NO: 1511209 - RNA, 19 nt, Artificial Sequence
  Description of Artificial Sequence: Synthetic oligonucleotide
  Antisense strand to SEQ ID NO: 1511208
uguaucguacuuuaauccu

SEQ ID NO: 1511210 - RNA, 19 nt, Artificial Sequence
  Description of Artificial Sequence: Synthetic oligonucleotide
  Sense strand starting at position 2101 of SEQ ID NO: 1244739
caagaaggaguccgauuaa

SEQ ID NO: 1511211 - RNA, 19 nt, Artificial Sequence
  Description of Artificial Sequence: Synthetic oligonucleotide
  Antisense strand to SEQ ID NO: 1511210
uuaaucggacuccuucuug

SEQ ID NO: 1511212 - RNA, 19 nt, Artificial Sequence
  Description of Artificial Sequence: Synthetic oligonucleotide
  Sense strand starting at position 2288 of SEQ ID NO: 1244739
gaaguuccacgccaagaua

SEQ ID NO: 1511213 - RNA, 19 nt, Artificial Sequence
  Description of Artificial Sequence: Synthetic oligonucleotide
  Antisense strand to SEQ ID NO: 1511212
uaucuuggcguggaacuuc

SEQ ID NO: 1511214 - RNA, 19 nt, Artificial Sequence
  Description of Artificial Sequence: Synthetic oligonucleotide
  Sense strand starting at position 2488 of SEQ ID NO: 1244739
gcgcgaggucugaggauga

SEQ ID NO: 1511215 - RNA, 19 nt, Artificial Sequence
  Description of Artificial Sequence: Synthetic oligonucleotide
  Antisense strand to SEQ ID NO: 1511214
ucauccucagaccucgcgc

SEQ ID NO: 1511216 - RNA, 19 nt, Artificial Sequence
  Description of Artificial Sequence: Synthetic oligonucleotide
  Sense strand starting at position 2492 of SEQ ID NO: 1244739
gaggucugaggaugaucuu

SEQ ID NO: 1511217 - RNA, 19 nt, Artificial Sequence
  Description of Artificial Sequence: Synthetic oligonucleotide
  Antisense strand to SEQ ID NO: 1511216
aagaucauccucagaccuc

SEQ ID NO: 1511218 - RNA, 19 nt, Artificial Sequence
  Description of Artificial Sequence: Synthetic oligonucleotide
  Sense strand starting at position 2498 of SEQ ID NO: 1244739
ugaggaugaucuuuccugu

SEQ ID NO: 1511219 - RNA, 19 nt, Artificial Sequence
  Description of Artificial Sequence: Synthetic oligonucleotide
  Antisense strand to SEQ ID NO: 1511218
acaggaaagaucauccuca

SEQ ID NO: 1511220 - RNA, 19 nt, Artificial Sequence
  Description of Artificial Sequence: Synthetic oligonucleotide
  Sense strand starting at position 2672 of SEQ ID NO: 1244739
gcaugaggcggguaagaaa

SEQ ID NO: 1511221 - RNA, 19 nt, Artificial Sequence
  Description of Artificial Sequence: Synthetic oligonucleotide
  Antisense strand to SEQ ID NO: 1511220
uuucuuacccgccucaugc

SEQ ID NO: 1511222 - RNA, 19 nt, Artificial Sequence
  Description of Artificial Sequence: Synthetic oligonucleotide
  Sense strand starting at position 2684 of SEQ ID NO: 1244739
uaagaaagcgcguuccgau

SEQ ID NO: 1511223 - RNA, 19 nt, Artificial Sequence
  Description of Artificial Sequence: Synthetic oligonucleotide
  Antisense strand to SEQ ID NO: 1511222
aucggaacgcgcuuucuua

SEQ ID NO: 1511224 - RNA, 19 nt, Artificial Sequence
  Description of Artificial Sequence: Synthetic oligonucleotide
  Sense strand starting at position 2742 of SEQ ID NO: 1244739
cguggugggcgccaagaau

SEQ ID NO: 1511225 - RNA, 19 nt, Artificial Sequence
  Description of Artificial Sequence: Synthetic oligonucleotide
  Antisense strand to SEQ ID NO: 1511224
auucuuggcgcccaccacg

SEQ ID NO: 1511226 - RNA, 19 nt, Artificial Sequence
  Description of Artificial Sequence: Synthetic oligonucleotide
  Sense strand starting at position 2760 of SEQ ID NO: 1244739
ucgagaugaaggcgauuau

SEQ ID NO: 1511227 - RNA, 19 nt, Artificial Sequence
  Description of Artificial Sequence: Synthetic oligonucleotide
  Antisense strand to SEQ ID NO: 1511226
auaaucgccuucaucucga

SEQ ID NO: 1511228 - RNA, 19 nt, Artificial Sequence
  Description of Artificial Sequence: Synthetic oligonucleotide
  Sense strand starting at position 2769 of SEQ ID NO: 1244739
aggcgauuaucucccauuu

SEQ ID NO: 1511229 - RNA, 19 nt, Artificial Sequence
  Description of Artificial Sequence: Synthetic oligonucleotide
  Antisense strand to SEQ ID NO: 1511228
aaaugggagauaaucgccu

SEQ ID NO: 1511230 - RNA, 19 nt, Artificial Sequence
  Description of Artificial Sequence: Synthetic oligonucleotide
  Sense strand starting at position 2771 of SEQ ID NO: 1244739
gcgauuaucucccauuucu

SEQ ID NO: 1511231 - RNA, 19 nt, Artificial Sequence
  Description of Artificial Sequence: Synthetic oligonucleotide
  Antisense strand to SEQ ID NO: 1511230
agaaaugggagauaaucgc

SEQ ID NO: 1511232 - RNA, 19 nt, Artificial Sequence
  Description of Artificial Sequence: Synthetic oligonucleotide
  Sense strand starting at position 2879 of SEQ ID NO: 1244739
ucacucauuugcguggaaa

SEQ ID NO: 1511233 - RNA, 19 nt, Artificial Sequence
  Description of Artificial Sequence: Synthetic oligonucleotide
  Antisense strand to SEQ ID NO: 1511232
uuuccacgcaaaugaguga

SEQ ID NO: 1511234 - RNA, 19 nt, Artificial Sequence
  Description of Artificial Sequence: Synthetic oligonucleotide
  Sense strand starting at position 2880 of SEQ ID NO: 1244739
cacucauuugcguggaaac

SEQ ID NO: 1511235 - RNA, 19 nt, Artificial Sequence
  Description of Artificial Sequence: Synthetic oligonucleotide
  Antisense strand to SEQ ID NO: 1511234
guuuccacgcaaaugagug

SEQ ID NO: 1511236 - RNA, 19 nt, Artificial Sequence
  Description of Artificial Sequence: Synthetic oligonucleotide
  Sense strand starting at position 2933 of SEQ ID NO: 1244739
cuugucugauucucggaau

SEQ ID NO: 1511237 - RNA, 19 nt, Artificial Sequence
  Description of Artificial Sequence: Synthetic oligonucleotide
  Antisense strand to SEQ ID NO: 1511236
auuccgagaaucagacaag

SEQ ID NO: 1511238 - RNA, 19 nt, Artificial Sequence
  Description of Artificial Sequence: Synthetic oligonucleotide
  Sense strand starting at position 3227 of SEQ ID NO: 1244739
cuguuccuacccgaaugaa

SEQ ID NO: 1511239 - RNA, 19 nt, Artificial Sequence
  Description of Artificial Sequence: Synthetic oligonucleotide
  Antisense strand to SEQ ID NO: 1511238
uucauucggguaggaacag

SEQ ID NO: 1511240 - RNA, 19 nt, Artificial Sequence
  Description of Artificial Sequence: Synthetic oligonucleotide
  Sense strand starting at position 3241 of SEQ ID NO: 1244739
augaacugauucugagaga

SEQ ID NO: 1511241 - RNA, 19 nt, Artificial Sequence
  Description of Artificial Sequence: Synthetic oligonucleotide
  Antisense strand to SEQ ID NO: 1511240
ucucucagaaucaguucau

SEQ ID NO: 1511242 - RNA, 19 nt, Artificial Sequence
  Description of Artificial Sequence: Synthetic oligonucleotide
  Sense strand starting at position 3242 of SEQ ID NO: 1244739
ugaacugauucugagagag

SEQ ID NO: 1511243 - RNA, 19 nt, Artificial Sequence
  Description of Artificial Sequence: Synthetic oligonucleotide
  Antisense strand to SEQ ID NO: 1511242
cucucucagaaucaguuca

SEQ ID NO: 1511244 - RNA, 19 nt, Artificial Sequence
  Description of Artificial Sequence: Synthetic oligonucleotide
  Sense strand starting at position 3244 of SEQ ID NO: 1244739
aacugauucugagagaggu

SEQ ID NO: 1511245 - RNA, 19 nt, Artificial Sequence
  Description of Artificial Sequence: Synthetic oligonucleotide
  Antisense strand to SEQ ID NO: 1511244
accucucucagaaucaguu

SEQ ID NO: 1511246 - RNA, 19 nt, Artificial Sequence
  Description of Artificial Sequence: Synthetic oligonucleotide
  Sense strand starting at position 3248 of SEQ ID NO: 1244739
gauucugagagagguaagu

SEQ ID NO: 1511247 - RNA, 19 nt, Artificial Sequence
  Description of Artificial Sequence: Synthetic oligonucleotide
  Antisense strand to SEQ ID NO: 1511246
acuuaccucucucagaauc

SEQ ID NO: 1511248 - RNA, 19 nt, Artificial Sequence
  Description of Artificial Sequence: Synthetic oligonucleotide
  Sense strand starting at position 3257 of SEQ ID NO: 1244739
agagguaagugguaagaau

SEQ ID NO: 1511249 - RNA, 19 nt, Artificial Sequence
  Description of Artificial Sequence: Synthetic oligonucleotide
  Antisense strand to SEQ ID NO: 1511248
auucuuaccacuuaccucu

SEQ ID NO: 1511250 - RNA, 19 nt, Artificial Sequence
  Description of Artificial Sequence: Synthetic oligonucleotide
  Sense strand starting at position 3265 of SEQ ID NO: 1244739
gugguaagaauguguucua

SEQ ID NO: 1511251 - RNA, 19 nt, Artificial Sequence
  Description of Artificial Sequence: Synthetic oligonucleotide
  Antisense strand to SEQ ID NO: 1511250
uagaacacauucuuaccac

SEQ ID NO: 1511252 - RNA, 19 nt, Artificial Sequence
  Description of Artificial Sequence: Synthetic oligonucleotide
  Sense strand starting at position 3266 of SEQ ID NO: 1244739
ugguaagaauguguucuac

SEQ ID NO: 1511253 - RNA, 19 nt, Artificial Sequence
  Description of Artificial Sequence: Synthetic oligonucleotide
  Antisense strand to SEQ ID NO: 1511252
guagaacacauucuuacca

SEQ ID NO: 1511254 - RNA, 19 nt, Artificial Sequence
  Description of Artificial Sequence: Synthetic oligonucleotide
  Sense strand starting at position 3268 of SEQ ID NO: 1244739
guaagaauguguucuacac

SEQ ID NO: 1511255 - RNA, 19 nt, Artificial Sequence
  Description of Artificial Sequence: Synthetic oligonucleotide
  Antisense strand to SEQ ID NO: 1511254
guguagaacacauucuuac

SEQ ID NO: 1511256 - RNA, 19 nt, Artificial Sequence
  Description of Artificial Sequence: Synthetic oligonucleotide
  Sense strand starting at position 3434 of SEQ ID NO: 1244739
gguggaaguucccugcuca

SEQ ID NO: 1511257 - RNA, 19 nt, Artificial Sequence
  Description of Artificial Sequence: Synthetic oligonucleotide
  Antisense strand to SEQ ID NO: 1511256
ugagcagggaacuuccacc

SEQ ID NO: 1511258 - RNA, 19 nt, Artificial Sequence
  Description of Artificial Sequence: Synthetic oligonucleotide
  Sense strand starting at position 3435 of SEQ ID NO: 1244739
guggaaguucccugcucau

SEQ ID NO: 1511259 - RNA, 19 nt, Artificial Sequence
  Description of Artificial Sequence: Synthetic oligonucleotide
  Antisense strand to SEQ ID NO: 1511258
augagcagggaacuuccac

SEQ ID NO: 1511260 - RNA, 19 nt, Artificial Sequence
  Description of Artificial Sequence: Synthetic oligonucleotide
  Sense strand starting at position 3485 of SEQ ID NO: 1244739
uuuccagaucaaggauagu

SEQ ID NO: 1511261 - RNA, 19 nt, Artificial Sequence
  Description of Artificial Sequence: Synthetic oligonucleotide
  Antisense strand to SEQ ID NO: 1511260
acuauccuugaucuggaaa

SEQ ID NO: 1511262 - RNA, 19 nt, Artificial Sequence
  Description of Artificial Sequence: Synthetic oligonucleotide
  Sense strand starting at position 3546 of SEQ ID NO: 1244739
accuguuuccagugcuaga

SEQ ID NO: 1511263 - RNA, 19 nt, Artificial Sequence
  Description of Artificial Sequence: Synthetic oligonucleotide
  Antisense strand to SEQ ID NO: 1511262
ucuagcacuggaaacaggu

SEQ ID NO: 1511264 - RNA, 19 nt, Artificial Sequence
  Description of Artificial Sequence: Synthetic oligonucleotide
  Sense strand starting at position 3585 of SEQ ID NO: 1244739
agguuugucuacuucuaga

SEQ ID NO: 1511265 - RNA, 19 nt, Artificial Sequence
  Description of Artificial Sequence: Synthetic oligonucleotide
  Antisense strand to SEQ ID NO: 1511264
ucuagaaguagacaaaccu

SEQ ID NO: 1511266 - RNA, 19 nt, Artificial Sequence
  Description of Artificial Sequence: Synthetic oligonucleotide
  Sense strand starting at position 3590 of SEQ ID NO: 1244739
ugucuacuucuagacaaug

SEQ ID NO: 1511267 - RNA, 19 nt, Artificial Sequence
  Description of Artificial Sequence: Synthetic oligonucleotide
  Antisense strand to SEQ ID NO: 1511266
cauugucuagaaguagaca

SEQ ID NO: 1511268 - RNA, 19 nt, Artificial Sequence
  Description of Artificial Sequence: Synthetic oligonucleotide
  Sense strand starting at position 3814 of SEQ ID NO: 1244739
guguacuucccucaaugga

SEQ ID NO: 1511269 - RNA, 19 nt, Artificial Sequence
  Description of Artificial Sequence: Synthetic oligonucleotide
  Antisense strand to SEQ ID NO: 1511268
uccauugagggaaguacac

SEQ ID NO: 1511270 - RNA, 19 nt, Artificial Sequence
  Description of Artificial Sequence: Synthetic oligonucleotide
  Sense strand starting at position 3906 of SEQ ID NO: 1244739
aggaaagaucuugguucuu

SEQ ID NO: 1511271 - RNA, 19 nt, Artificial Sequence
  Description of Artificial Sequence: Synthetic oligonucleotide
  Antisense strand to SEQ ID NO: 1511270
aagaaccaagaucuuuccu

SEQ ID NO: 1511272 - RNA, 19 nt, Artificial Sequence
  Description of Artificial Sequence: Synthetic oligonucleotide
  Sense strand starting at position 3908 of SEQ ID NO: 1244739
gaaagaucuugguucuuag

SEQ ID NO: 1511273 - RNA, 19 nt, Artificial Sequence
  Description of Artificial Sequence: Synthetic oligonucleotide
  Antisense strand to SEQ ID NO: 1511272
cuaagaaccaagaucuuuc

SEQ ID NO: 1511274 - RNA, 19 nt, Artificial Sequence
  Description of Artificial Sequence: Synthetic oligonucleotide
  Sense strand starting at position 3911 of SEQ ID NO: 1244739
agaucuugguucuuagagu

SEQ ID NO: 1511275 - RNA, 19 nt, Artificial Sequence
  Description of Artificial Sequence: Synthetic oligonucleotide
  Antisense strand to SEQ ID NO: 1511274
acucuaagaaccaagaucu

SEQ ID NO: 1511276 - RNA, 19 nt, Artificial Sequence
  Description of Artificial Sequence: Synthetic oligonucleotide
  Sense strand starting at position 3917 of SEQ ID NO: 1244739
ugguucuuagagugcuuaa

SEQ ID NO: 1511277 - RNA, 19 nt, Artificial Sequence
  Description of Artificial Sequence: Synthetic oligonucleotide
  Antisense strand to SEQ ID NO: 1511276
uuaagcacucuaagaacca

SEQ ID NO: 1511278 - RNA, 19 nt, Artificial Sequence
  Description of Artificial Sequence: Synthetic oligonucleotide
  Sense strand starting at position 3920 of SEQ ID NO: 1244739
uucuuagagugcuuaauau

SEQ ID NO: 1511279 - RNA, 19 nt, Artificial Sequence
  Description of Artificial Sequence: Synthetic oligonucleotide
  Antisense strand to SEQ ID NO: 1511278
auauuaagcacucuaagaa

SEQ ID NO: 1511280 - RNA, 19 nt, Artificial Sequence
  Description of Artificial Sequence: Synthetic oligonucleotide
  Sense strand starting at position 3929 of SEQ ID NO: 1244739
ugcuuaauaugcucaauag

SEQ ID NO: 1511281 - RNA, 19 nt, Artificial Sequence
  Description of Artificial Sequence: Synthetic oligonucleotide
  Antisense strand to SEQ ID NO: 1511280
cuauugagcauauuaagca

SEQ ID NO: 1511282 - RNA, 19 nt, Artificial Sequence
  Description of Artificial Sequence: Synthetic oligonucleotide
  Sense strand starting at position 3930 of SEQ ID NO: 1244739
gcuuaauaugcucaauaga

SEQ ID NO: 1511283 - RNA, 19 nt, Artificial Sequence
  Description of Artificial Sequence: Synthetic oligonucleotide
  Antisense strand to SEQ ID NO: 1511282
ucuauugagcauauuaagc

SEQ ID NO: 1511284 - RNA, 19 nt, Artificial Sequence
  Description of Artificial Sequence: Synthetic oligonucleotide
  Sense strand starting at position 3950 of SEQ ID NO: 1244739
acauuaauucuuugggcaa

SEQ ID NO: 1511285 - RNA, 19 nt, Artificial Sequence
  Description of Artificial Sequence: Synthetic oligonucleotide
  Antisense strand to SEQ ID NO: 1511284
uugcccaaagaauuaaugu

SEQ ID NO: 1511286 - RNA, 19 nt, Artificial Sequence
  Description of Artificial Sequence: Synthetic oligonucleotide
  Sense strand starting at position 3957 of SEQ ID NO: 1244739
uucuuugggcaagaaucua

SEQ ID NO: 1511287 - RNA, 19 nt, Artificial Sequence
  Description of Artificial Sequence: Synthetic oligonucleotide
  Antisense strand to SEQ ID NO: 1511286
uagauucuugcccaaagaa

SEQ ID NO: 1511288 - RNA, 19 nt, Artificial Sequence
  Description of Artificial Sequence: Synthetic oligonucleotide
  Sense strand starting at position 3965 of SEQ ID NO: 1244739
gcaagaaucuagcccuugu

SEQ ID NO: 1511289 - RNA, 19 nt, Artificial Sequence
  Description of Artificial Sequence: Synthetic oligonucleotide
  Antisense strand to SEQ ID NO: 1511288
acaagggcuagauucuugc

SEQ ID NO: 1511290 - RNA, 19 nt, Artificial Sequence
  Description of Artificial Sequence: Synthetic oligonucleotide
  Sense strand starting at position 127 of SEQ ID NO: 1244740
ucucuaaugccagaguucu

SEQ ID NO: 1511291 - RNA, 19 nt, Artificial Sequence
  Description of Artificial Sequence: Synthetic oligonucleotide
  Antisense strand to SEQ ID NO: 1511290
agaacucuggcauuagaga

SEQ ID NO: 1511292 - RNA, 19 nt, Artificial Sequence
  Description of Artificial Sequence: Synthetic oligonucleotide
  Sense strand starting at position 146 of SEQ ID NO: 1244740
ggcuuaagucgggauauca

SEQ ID NO: 1511293 - RNA, 19 nt, Artificial Sequence
  Description of Artificial Sequence: Synthetic oligonucleotide
  Antisense strand to SEQ ID NO: 1511292
ugauaucccgacuuaagcc

SEQ ID NO: 1511294 - RNA, 19 nt, Artificial Sequence
  Description of Artificial Sequence: Synthetic oligonucleotide
  Sense strand starting at position 192 of SEQ ID NO: 1244740
ucuuuacauuggcuuugaa

SEQ ID NO: 1511295 - RNA, 19 nt, Artificial Sequence
  Description of Artificial Sequence: Synthetic oligonucleotide
  Antisense strand to SEQ ID NO: 1511294
uucaaagccaauguaaaga

SEQ ID NO: 1511296 - RNA, 19 nt, Artificial Sequence
  Description of Artificial Sequence: Synthetic oligonucleotide
  Sense strand starting at position 195 of SEQ ID NO: 1244740
uuacauuggcuuugaacaa

SEQ ID NO: 1511297 - RNA, 19 nt, Artificial Sequence
  Description of Artificial Sequence: Synthetic oligonucleotide
  Antisense strand to SEQ ID NO: 1511296
uuguucaaagccaauguaa

SEQ ID NO: 1511298 - RNA, 19 nt, Artificial Sequence
  Description of Artificial Sequence: Synthetic oligonucleotide
  Sense strand starting at position 431 of SEQ ID NO: 1244740
agugacucauagcuauaau

SEQ ID NO: 1511299 - RNA, 19 nt, Artificial Sequence
  Description of Artificial Sequence: Synthetic oligonucleotide
  Antisense strand to SEQ ID NO: 1511298
auuauagcuaugagucacu

SEQ ID NO: 1511300 - RNA, 19 nt, Artificial Sequence
  Description of Artificial Sequence: Synthetic oligonucleotide
  Sense strand starting at position 791 of SEQ ID NO: 1244740
auuguuaaucccuaggcca

SEQ ID NO: 1511301 - RNA, 19 nt, Artificial Sequence
  Description of Artificial Sequence: Synthetic oligonucleotide
  Antisense strand to SEQ ID NO: 1511300
uggccuagggauuaacaau

SEQ ID NO: 1511302 - RNA, 19 nt, Artificial Sequence
  Description of Artificial Sequence: Synthetic oligonucleotide
  Sense strand starting at position 825 of SEQ ID NO: 1244740
caagucagguucucugaga

SEQ ID NO: 1511303 - RNA, 19 nt, Artificial Sequence
  Description of Artificial Sequence: Synthetic oligonucleotide
  Antisense strand to SEQ ID NO: 1511302
ucucagagaaccugacuug

SEQ ID NO: 1511304 - RNA, 19 nt, Artificial Sequence
  Description of Artificial Sequence: Synthetic oligonucleotide
  Sense strand starting at position 832 of SEQ ID NO: 1244740
gguucucugagaggaaaug

SEQ ID NO: 1511305 - RNA, 19 nt, Artificial Sequence
  Description of Artificial Sequence: Synthetic oligonucleotide
  Antisense strand to SEQ ID NO: 1511304
cauuuccucucagagaacc

SEQ ID NO: 1511306 - RNA, 19 nt, Artificial Sequence
  Description of Artificial Sequence: Synthetic oligonucleotide
  Sense strand starting at position 933 of SEQ ID NO: 1244740
ccaggaacuguuuggaagu

SEQ ID NO: 1511307 - RNA, 19 nt, Artificial Sequence
  Description of Artificial Sequence: Synthetic oligonucleotide
  Antisense strand to SEQ ID NO: 1511306
acuuccaaacaguuccugg

SEQ ID NO: 1511308 - RNA, 19 nt, Artificial Sequence
  Description of Artificial Sequence: Synthetic oligonucleotide
  Sense strand starting at position 1010 of SEQ ID NO: 1244740
aggucagaccugcauaaug

SEQ ID NO: 1511309 - RNA, 19 nt, Artificial Sequence
  Description of Artificial Sequence: Synthetic oligonucleotide
  Antisense strand to SEQ ID NO: 1511308
cauuaugcaggucugaccu

SEQ ID NO: 1511310 - RNA, 19 nt, Artificial Sequence
  Description of Artificial Sequence: Synthetic oligonucleotide
  Sense strand starting at position 1012 of SEQ ID NO: 1244740
gucagaccugcauaaugaa

SEQ ID NO: 1511311 - RNA, 19 nt, Artificial Sequence
  Description of Artificial Sequence: Synthetic oligonucleotide
  Antisense strand to SEQ ID NO: 1511310
uucauuaugcaggucugac

SEQ ID NO: 1511312 - RNA, 19 nt, Artificial Sequence
  Description of Artificial Sequence: Synthetic oligonucleotide
  Sense strand starting at position 1338 of SEQ ID NO: 1244740
gcgauaacauucucauuaa

SEQ ID NO: 1511313 - RNA, 19 nt, Artificial Sequence
  Description of Artificial Sequence: Synthetic oligonucleotide
  Antisense strand to SEQ ID NO: 1511312
uuaaugagaauguuaucgc

SEQ ID NO: 1511314 - RNA, 19 nt, Artificial Sequence
  Description of Artificial Sequence: Synthetic oligonucleotide
  Sense strand starting at position 1621 of SEQ ID NO: 1244740
uuuagagaugcugguuaaa

SEQ ID NO: 1511315 - RNA, 19 nt, Artificial Sequence
  Description of Artificial Sequence: Synthetic oligonucleotide
  Antisense strand to SEQ ID NO: 1511314
uuuaaccagcaucucuaaa

SEQ ID NO: 1511316 - RNA, 19 nt, Artificial Sequence
  Description of Artificial Sequence: Synthetic oligonucleotide
  Sense strand starting at position 1646 of SEQ ID NO: 1244740
ugugauggaguaugcuaua

SEQ ID NO: 1511317 - RNA, 19 nt, Artificial Sequence
  Description of Artificial Sequence: Synthetic oligonucleotide
  Antisense strand to SEQ ID NO: 1511316
uauagcauacuccaucaca

SEQ ID NO: 1511318 - RNA, 19 nt, Artificial Sequence
  Description of Artificial Sequence: Synthetic oligonucleotide
  Sense strand starting at position 1975 of SEQ ID NO: 1244740
ggaaauucugacggguauc

SEQ ID NO: 1511319 - RNA, 19 nt, Artificial Sequence
  Description of Artificial Sequence: Synthetic oligonucleotide
  Antisense strand to SEQ ID NO: 1511318
gauacccgucagaauuucc

SEQ ID NO: 1511320 - RNA, 19 nt, Artificial Sequence
  Description of Artificial Sequence: Synthetic oligonucleotide
  Sense strand starting at position 1999 of SEQ ID NO: 1244740
ccugacuuuccggauggua

SEQ ID NO: 1511321 - RNA, 19 nt, Artificial Sequence
  Description of Artificial Sequence: Synthetic oligonucleotide
  Antisense strand to SEQ ID NO: 1511320
uaccauccggaaagucagg

SEQ ID NO: 1511322 - RNA, 19 nt, Artificial Sequence
  Description of Artificial Sequence: Synthetic oligonucleotide
  Sense strand starting at position 2001 of SEQ ID NO: 1244740
ugacuuuccggaugguaac

SEQ ID NO: 1511323 - RNA, 19 nt, Artificial Sequence
  Description of Artificial Sequence: Synthetic oligonucleotide
  Antisense strand to SEQ ID NO: 1511322
guuaccauccggaaaguca

SEQ ID NO: 1511324 - RNA, 19 nt, Artificial Sequence
  Description of Artificial Sequence: Synthetic oligonucleotide
  Sense strand starting at position 2081 of SEQ ID NO: 1244740
acaggauaugcugguaauc

SEQ ID NO: 1511325 - RNA, 19 nt, Artificial Sequence
  Description of Artificial Sequence: Synthetic oligonucleotide
  Antisense strand to SEQ ID NO: 1511324
gauuaccagcauauccugu

SEQ ID NO: 1511326 - RNA, 19 nt, Artificial Sequence
  Description of Artificial Sequence: Synthetic oligonucleotide
  Sense strand starting at position 2208 of SEQ ID NO: 1244740
gaucucugucuacagcaga

SEQ ID NO: 1511327 - RNA, 19 nt, Artificial Sequence
  Description of Artificial Sequence: Synthetic oligonucleotide
  Antisense strand to SEQ ID NO: 1511326
ucugcuguagacagagauc

SEQ ID NO: 1511328 - RNA, 19 nt, Artificial Sequence
  Description of Artificial Sequence: Synthetic oligonucleotide
  Sense strand starting at position 2442 of SEQ ID NO: 1244740
agagaacucugcucuguua

SEQ ID NO: 1511329 - RNA, 19 nt, Artificial Sequence
  Description of Artificial Sequence: Synthetic oligonucleotide
  Antisense strand to SEQ ID NO: 1511328
uaacagagcagaguucucu

SEQ ID NO: 1511330 - RNA, 19 nt, Artificial Sequence
  Description of Artificial Sequence: Synthetic oligonucleotide
  Sense strand starting at position 2444 of SEQ ID NO: 1244740
agaacucugcucuguuaga

SEQ ID NO: 1511331 - RNA, 19 nt, Artificial Sequence
  Description of Artificial Sequence: Synthetic oligonucleotide
  Antisense strand to SEQ ID NO: 1511330
ucuaacagagcagaguucu

SEQ ID NO: 1511332 - RNA, 19 nt, Artificial Sequence
  Description of Artificial Sequence: Synthetic oligonucleotide
  Sense strand starting at position 2445 of SEQ ID NO: 1244740
gaacucugcucuguuagag

SEQ ID NO: 1511333 - RNA, 19 nt, Artificial Sequence
  Description of Artificial Sequence: Synthetic oligonucleotide
  Antisense strand to SEQ ID NO: 1511332
cucuaacagagcagaguuc

SEQ ID NO: 1511334 - RNA, 19 nt, Artificial Sequence
  Description of Artificial Sequence: Synthetic oligonucleotide
  Sense strand starting at position 2451 of SEQ ID NO: 1244740
ugcucuguuagaggaaaga

SEQ ID NO: 1511335 - RNA, 19 nt, Artificial Sequence
  Description of Artificial Sequence: Synthetic oligonucleotide
  Antisense strand to SEQ ID NO: 1511334
ucuuuccucuaacagagca

SEQ ID NO: 1511336 - RNA, 19 nt, Artificial Sequence
  Description of Artificial Sequence: Synthetic oligonucleotide
  Sense strand starting at position 2550 of SEQ ID NO: 1244740
gcauuaaggguuuauaggu

SEQ ID NO: 1511337 - RNA, 19 nt, Artificial Sequence
  Description of Artificial Sequence: Synthetic oligonucleotide
  Antisense strand to SEQ ID NO: 1511336
accuauaaacccuuaaugc

SEQ ID NO: 1511338 - RNA, 19 nt, Artificial Sequence
  Description of Artificial Sequence: Synthetic oligonucleotide
  Sense strand starting at position 2572 of SEQ ID NO: 1244740
gcugauguacuuugagaaa

SEQ ID NO: 1511339 - RNA, 19 nt, Artificial Sequence
  Description of Artificial Sequence: Synthetic oligonucleotide
  Antisense strand to SEQ ID NO: 1511338
uuucucaaaguacaucagc

SEQ ID NO: 1511340 - RNA, 19 nt, Artificial Sequence
  Description of Artificial Sequence: Synthetic oligonucleotide
  Sense strand starting at position 2614 of SEQ ID NO: 1244740
agacauuagccuuacaguc

SEQ ID NO: 1511341 - RNA, 19 nt, Artificial Sequence
  Description of Artificial Sequence: Synthetic oligonucleotide
  Antisense strand to SEQ ID NO: 1511340
gacuguaaggcuaaugucu

SEQ ID NO: 1511342 - RNA, 19 nt, Artificial Sequence
  Description of Artificial Sequence: Synthetic oligonucleotide
  Sense strand starting at position 2624 of SEQ ID NO: 1244740
cuuacaguccagcagugau

SEQ ID NO: 1511343 - RNA, 19 nt, Artificial Sequence
  Description of Artificial Sequence: Synthetic oligonucleotide
  Antisense strand to SEQ ID NO: 1511342
aucacugcuggacuguaag

SEQ ID NO: 1511344 - RNA, 19 nt, Artificial Sequence
  Description of Artificial Sequence: Synthetic oligonucleotide
  Sense strand starting at position 2632 of SEQ ID NO: 1244740
ccagcagugaucuggacaa

SEQ ID NO: 1511345 - RNA, 19 nt, Artificial Sequence
  Description of Artificial Sequence: Synthetic oligonucleotide
  Antisense strand to SEQ ID NO: 1511344
uuguccagaucacugcugg

SEQ ID NO: 1511346 - RNA, 19 nt, Artificial Sequence
  Description of Artificial Sequence: Synthetic oligonucleotide
  Sense strand starting at position 2733 of SEQ ID NO: 1244740
ucugaccuucuuugaggau

SEQ ID NO: 1511347 - RNA, 19 nt, Artificial Sequence
  Description of Artificial Sequence: Synthetic oligonucleotide
  Antisense strand to SEQ ID NO: 1511346
auccucaaagaaggucaga

SEQ ID NO: 1511348 - RNA, 19 nt, Artificial Sequence
  Description of Artificial Sequence: Synthetic oligonucleotide
  Sense strand starting at position 2796 of SEQ ID NO: 1244740
ugcuucuucccacagaaag

SEQ ID NO: 1511349 - RNA, 19 nt, Artificial Sequence
  Description of Artificial Sequence: Synthetic oligonucleotide
  Antisense strand to SEQ ID NO: 1511348
cuuucugugggaagaagca

SEQ ID NO: 1511350 - RNA, 19 nt, Artificial Sequence
  Description of Artificial Sequence: Synthetic oligonucleotide
  Sense strand starting at position 2889 of SEQ ID NO: 1244740
aagaguacagccugaggua

SEQ ID NO: 1511351 - RNA, 19 nt, Artificial Sequence
  Description of Artificial Sequence: Synthetic oligonucleotide
  Antisense strand to SEQ ID NO: 1511350
uaccucaggcuguacucuu

SEQ ID NO: 1511352 - RNA, 19 nt, Artificial Sequence
  Description of Artificial Sequence: Synthetic oligonucleotide
  Sense strand starting at position 2898 of SEQ ID NO: 1244740
gccugagguacauauugca

SEQ ID NO: 1511353 - RNA, 19 nt, Artificial Sequence
  Description of Artificial Sequence: Synthetic oligonucleotide
  Antisense strand to SEQ ID NO: 1511352
ugcaauauguaccucaggc

SEQ ID NO: 1511354 - RNA, 19 nt, Artificial Sequence
  Description of Artificial Sequence: Synthetic oligonucleotide
  Sense strand starting at position 3199 of SEQ ID NO: 1244740
ugucaaggcuagucaugaa

SEQ ID NO: 1511355 - RNA, 19 nt, Artificial Sequence
  Description of Artificial Sequence: Synthetic oligonucleotide
  Antisense strand to SEQ ID NO: 1511354
uucaugacuagccuugaca

SEQ ID NO: 1511356 - RNA, 19 nt, Artificial Sequence
  Description of Artificial Sequence: Synthetic oligonucleotide
  Sense strand starting at position 3309 of SEQ ID NO: 1244740
gagucuuuauauccaugag

SEQ ID NO: 1511357 - RNA, 19 nt, Artificial Sequence
  Description of Artificial Sequence: Synthetic oligonucleotide
  Antisense strand to SEQ ID NO: 1511356
cucauggauauaaagacuc

SEQ ID NO: 1511358 - RNA, 19 nt, Artificial Sequence
  Description of Artificial Sequence: Synthetic oligonucleotide
  Sense strand starting at position 3313 of SEQ ID NO: 1244740
cuuuauauccaugaggcca

SEQ ID NO: 1511359 - RNA, 19 nt, Artificial Sequence
  Description of Artificial Sequence: Synthetic oligonucleotide
  Antisense strand to SEQ ID NO: 1511358
uggccucauggauauaaag

SEQ ID NO: 1511360 - RNA, 19 nt, Artificial Sequence
  Description of Artificial Sequence: Synthetic oligonucleotide
  Sense strand starting at position 3347 of SEQ ID NO: 1244740
uuucucugucaugaugaua

SEQ ID NO: 1511361 - RNA, 19 nt, Artificial Sequence
  Description of Artificial Sequence: Synthetic oligonucleotide
  Antisense strand to SEQ ID NO: 1511360
uaucaucaugacagagaaa

SEQ ID NO: 1511362 - RNA, 19 nt, Artificial Sequence
  Description of Artificial Sequence: Synthetic oligonucleotide
  Sense strand starting at position 3379 of SEQ ID NO: 1244740
augaaauaacuggguuauc

SEQ ID NO: 1511363 - RNA, 19 nt, Artificial Sequence
  Description of Artificial Sequence: Synthetic oligonucleotide
  Antisense strand to SEQ ID NO: 1511362
gauaacccaguuauuucau

SEQ ID NO: 1511364 - RNA, 19 nt, Artificial Sequence
  Description of Artificial Sequence: Synthetic oligonucleotide
  Sense strand starting at position 3384 of SEQ ID NO: 1244740
auaacuggguuaucacaga

SEQ ID NO: 1511365 - RNA, 19 nt, Artificial Sequence
  Description of Artificial Sequence: Synthetic oligonucleotide
  Antisense strand to SEQ ID NO: 1511364
ucugugauaacccaguuau

SEQ ID NO: 1511366 - RNA, 19 nt, Artificial Sequence
  Description of Artificial Sequence: Synthetic oligonucleotide
  Sense strand starting at position 3465 of SEQ ID NO: 1244740
gcuugugcuauccagagag

SEQ ID NO: 1511367 - RNA, 19 nt, Artificial Sequence
  Description of Artificial Sequence: Synthetic oligonucleotide
  Antisense strand to SEQ ID NO: 1511366
cucucuggauagcacaagc

SEQ ID NO: 1511368 - RNA, 19 nt, Artificial Sequence
  Description of Artificial Sequence: Synthetic oligonucleotide
  Sense strand starting at position 3467 of SEQ ID NO: 1244740
uugugcuauccagagagaa

SEQ ID NO: 1511369 - RNA, 19 nt, Artificial Sequence
  Description of Artificial Sequence: Synthetic oligonucleotide
  Antisense strand to SEQ ID NO: 1511368
uucucucuggauagcacaa

SEQ ID NO: 1511370 - RNA, 19 nt, Artificial Sequence
  Description of Artificial Sequence: Synthetic oligonucleotide
  Sense strand starting at position 39 of SEQ ID NO: 1244741
aaaggcagguccuuuacau

SEQ ID NO: 1511371 - RNA, 19 nt, Artificial Sequence
  Description of Artificial Sequence: Synthetic oligonucleotide
  Antisense strand to SEQ ID NO: 1511370
auguaaaggaccugccuuu

SEQ ID NO: 1511372 - RNA, 19 nt, Artificial Sequence
  Description of Artificial Sequence: Synthetic oligonucleotide
  Sense strand starting at position 288 of SEQ ID NO: 1244741
guucucuucucccuggaaa

SEQ ID NO: 1511373 - RNA, 19 nt, Artificial Sequence
  Description of Artificial Sequence: Synthetic oligonucleotide
  Antisense strand to SEQ ID NO: 1511372
uuuccagggagaagagaac

SEQ ID NO: 1511374 - RNA, 19 nt, Artificial Sequence
  Description of Artificial Sequence: Synthetic oligonucleotide
  Sense strand starting at position 412 of SEQ ID NO: 1244741
ucacuuucugcugggaauu

SEQ ID NO: 1511375 - RNA, 19 nt, Artificial Sequence
  Description of Artificial Sequence: Synthetic oligonucleotide
  Antisense strand to SEQ ID NO: 1511374
aauucccagcagaaaguga

SEQ ID NO: 1511376 - RNA, 19 nt, Artificial Sequence
  Description of Artificial Sequence: Synthetic oligonucleotide
  Sense strand starting at position 424 of SEQ ID NO: 1244741
gggaauucuaaacgcugua

SEQ ID NO: 1511377 - RNA, 19 nt, Artificial Sequence
  Description of Artificial Sequence: Synthetic oligonucleotide
  Antisense strand to SEQ ID NO: 1511376
uacagcguuuagaauuccc

SEQ ID NO: 1511378 - RNA, 19 nt, Artificial Sequence
  Description of Artificial Sequence: Synthetic oligonucleotide
  Sense strand starting at position 518 of SEQ ID NO: 1244741
ugccuagucccagaaagau

SEQ ID NO: 1511379 - RNA, 19 nt, Artificial Sequence
  Description of Artificial Sequence: Synthetic oligonucleotide
  Antisense strand to SEQ ID NO: 1511378
aucuuucugggacuaggca

SEQ ID NO: 1511380 - RNA, 19 nt, Artificial Sequence
  Description of Artificial Sequence: Synthetic oligonucleotide
  Sense strand starting at position 753 of SEQ ID NO: 1244741
ggcauuucuugcccugaga

SEQ ID NO: 1511381 - RNA, 19 nt, Artificial Sequence
  Description of Artificial Sequence: Synthetic oligonucleotide
  Antisense strand to SEQ ID NO: 1511380
ucucagggcaagaaaugcc

SEQ ID NO: 1511382 - RNA, 19 nt, Artificial Sequence
  Description of Artificial Sequence: Synthetic oligonucleotide
  Sense strand starting at position 820 of SEQ ID NO: 1244741
ccaaauuacccuugcgaac

SEQ ID NO: 1511383 - RNA, 19 nt, Artificial Sequence
  Description of Artificial Sequence: Synthetic oligonucleotide
  Antisense strand to SEQ ID NO: 1511382
guucgcaaggguaauuugg

SEQ ID NO: 1511384 - RNA, 19 nt, Artificial Sequence
  Description of Artificial Sequence: Synthetic oligonucleotide
  Sense strand starting at position 853 of SEQ ID NO: 1244741
augucaucccuguacuaca

SEQ ID NO: 1511385 - RNA, 19 nt, Artificial Sequence
  Description of Artificial Sequence: Synthetic oligonucleotide
  Antisense strand to SEQ ID NO: 1511384
uguaguacagggaugacau

SEQ ID NO: 1511386 - RNA, 19 nt, Artificial Sequence
  Description of Artificial Sequence: Synthetic oligonucleotide
  Sense strand starting at position 962 of SEQ ID NO: 1244741
cccugaccuggucaucaga

SEQ ID NO: 1511387 - RNA, 19 nt, Artificial Sequence
  Description of Artificial Sequence: Synthetic oligonucleotide
  Antisense strand to SEQ ID NO: 1511386
ucugaugaccaggucaggg

SEQ ID NO: 1511388 - RNA, 19 nt, Artificial Sequence
  Description of Artificial Sequence: Synthetic oligonucleotide
  Sense strand starting at position 1076 of SEQ ID NO: 1244741
uagaaugcacacugguaua

SEQ ID NO: 1511389 - RNA, 19 nt, Artificial Sequence
  Description of Artificial Sequence: Synthetic oligonucleotide
  Antisense strand to SEQ ID NO: 1511388
uauaccagugugcauucua

SEQ ID NO: 1511390 - RNA, 19 nt, Artificial Sequence
  Description of Artificial Sequence: Synthetic oligonucleotide
  Sense strand starting at position 1087 of SEQ ID NO: 1244741
cugguauaauagcuaaauu

SEQ ID NO: 1511391 - RNA, 19 nt, Artificial Sequence
  Description of Artificial Sequence: Synthetic oligonucleotide
  Antisense strand to SEQ ID NO: 1511390
aauuuagcuauuauaccag

SEQ ID NO: 1511392 - RNA, 19 nt, Artificial Sequence
  Description of Artificial Sequence: Synthetic oligonucleotide
  Sense strand starting at position 1283 of SEQ ID NO: 1244741
uggucucugcaaugaaaca

SEQ ID NO: 1511393 - RNA, 19 nt, Artificial Sequence
  Description of Artificial Sequence: Synthetic oligonucleotide
  Antisense strand to SEQ ID NO: 1511392
uguuucauugcagagacca

SEQ ID NO: 1511394 - RNA, 19 nt, Artificial Sequence
  Description of Artificial Sequence: Synthetic oligonucleotide
  Sense strand starting at position 1310 of SEQ ID NO: 1244741
augccucucccuugggaga

SEQ ID NO: 1511395 - RNA, 19 nt, Artificial Sequence
  Description of Artificial Sequence: Synthetic oligonucleotide
  Antisense strand to SEQ ID NO: 1511394
ucucccaagggagaggcau

SEQ ID NO: 1511396 - RNA, 19 nt, Artificial Sequence
  Description of Artificial Sequence: Synthetic oligonucleotide
  Sense strand starting at position 1604 of SEQ ID NO: 1244741
aucugucuauauucuagau

SEQ ID NO: 1511397 - RNA, 19 nt, Artificial Sequence
  Description of Artificial Sequence: Synthetic oligonucleotide
  Antisense strand to SEQ ID NO: 1511396
aucuagaauauagacagau

SEQ ID NO: 1511398 - RNA, 19 nt, Artificial Sequence
  Description of Artificial Sequence: Synthetic oligonucleotide
  Sense strand starting at position 1657 of SEQ ID NO: 1244741
aguuguguacugcaaacau

SEQ ID NO: 1511399 - RNA, 19 nt, Artificial Sequence
  Description of Artificial Sequence: Synthetic oligonucleotide
  Antisense strand to SEQ ID NO: 1511398
auguuugcaguacacaacu

SEQ ID NO: 1511400 - RNA, 19 nt, Artificial Sequence
  Description of Artificial Sequence: Synthetic oligonucleotide
  Sense strand starting at position 1672 of SEQ ID NO: 1244741
acauauugauggucauaag

SEQ ID NO: 1511401 - RNA, 19 nt, Artificial Sequence
  Description of Artificial Sequence: Synthetic oligonucleotide
  Antisense strand to SEQ ID NO: 1511400
cuuaugaccaucaauaugu

SEQ ID NO: 1511402 - RNA, 19 nt, Artificial Sequence
  Description of Artificial Sequence: Synthetic oligonucleotide
  Sense strand starting at position 1700 of SEQ ID NO: 1244741
gcggguacuuccaauggga

SEQ ID NO: 1511403 - RNA, 19 nt, Artificial Sequence
  Description of Artificial Sequence: Synthetic oligonucleotide
  Antisense strand to SEQ ID NO: 1511402
ucccauuggaaguacccgc

SEQ ID NO: 1511404 - RNA, 19 nt, Artificial Sequence
  Description of Artificial Sequence: Synthetic oligonucleotide
  Sense strand starting at position 1702 of SEQ ID NO: 1244741
ggguacuuccaaugggaga

SEQ ID NO: 1511405 - RNA, 19 nt, Artificial Sequence
  Description of Artificial Sequence: Synthetic oligonucleotide
  Antisense strand to SEQ ID NO: 1511404
ucucccauuggaaguaccc

SEQ ID NO: 1511406 - RNA, 19 nt, Artificial Sequence
  Description of Artificial Sequence: Synthetic oligonucleotide
  Sense strand starting at position 1774 of SEQ ID NO: 1244741
cagggaaugucuccauccu

SEQ ID NO: 1511407 - RNA, 19 nt, Artificial Sequence
  Description of Artificial Sequence: Synthetic oligonucleotide
  Antisense strand to SEQ ID NO: 1511406
aggauggagacauucccug

SEQ ID NO: 1511408 - RNA, 19 nt, Artificial Sequence
  Description of Artificial Sequence: Synthetic oligonucleotide
  Sense strand starting at position 2173 of SEQ ID NO: 1244741
cccuaaacucucugguaug

SEQ ID NO: 1511409 - RNA, 19 nt, Artificial Sequence
  Description of Artificial Sequence: Synthetic oligonucleotide
  Antisense strand to SEQ ID NO: 1511408
cauaccagagaguuuaggg

SEQ ID NO: 1511410 - RNA, 19 nt, Artificial Sequence
  Description of Artificial Sequence: Synthetic oligonucleotide
  Sense strand starting at position 2509 of SEQ ID NO: 1244741
cugcacucggccuaaagau

SEQ ID NO: 1511411 - RNA, 19 nt, Artificial Sequence
  Description of Artificial Sequence: Synthetic oligonucleotide
  Antisense strand to SEQ ID NO: 1511410
aucuuuaggccgagugcag

SEQ ID NO: 1511412 - RNA, 19 nt, Artificial Sequence
  Description of Artificial Sequence: Synthetic oligonucleotide
  Sense strand starting at position 2537 of SEQ ID NO: 1244741
aagcguuuacuuuagguaa

SEQ ID NO: 1511413 - RNA, 19 nt, Artificial Sequence
  Description of Artificial Sequence: Synthetic oligonucleotide
  Antisense strand to SEQ ID NO: 1511412
uuaccuaaaguaaacgcuu

SEQ ID NO: 1511414 - RNA, 19 nt, Artificial Sequence
  Description of Artificial Sequence: Synthetic oligonucleotide
  Sense strand starting at position 2558 of SEQ ID NO: 1244741
agacauaguucugcuauug

SEQ ID NO: 1511415 - RNA, 19 nt, Artificial Sequence
  Description of Artificial Sequence: Synthetic oligonucleotide
  Antisense strand to SEQ ID NO: 1511414
caauagcagaacuaugucu

SEQ ID NO: 1511416 - RNA, 19 nt, Artificial Sequence
  Description of Artificial Sequence: Synthetic oligonucleotide
  Sense strand starting at position 2586 of SEQ ID NO: 1244741
guacuaucacacugacugu

SEQ ID NO: 1511417 - RNA, 19 nt, Artificial Sequence
  Description of Artificial Sequence: Synthetic oligonucleotide
  Antisense strand to SEQ ID NO: 1511416
acagucagugugauaguac

SEQ ID NO: 1511418 - RNA, 19 nt, Artificial Sequence
  Description of Artificial Sequence: Synthetic oligonucleotide
  Sense strand starting at position 2810 of SEQ ID NO: 1244741
gcagaaaucuagccaguga

SEQ ID NO: 1511419 - RNA, 19 nt, Artificial Sequence
  Description of Artificial Sequence: Synthetic oligonucleotide
  Antisense strand to SEQ ID NO: 1511418
ucacuggcuagauuucugc

SEQ ID NO: 1511420 - RNA, 19 nt, Artificial Sequence
  Description of Artificial Sequence: Synthetic oligonucleotide
  Sense strand starting at position 2836 of SEQ ID NO: 1244741
cuccuaaggagaggucauu

SEQ ID NO: 1511421 - RNA, 19 nt, Artificial Sequence
  Description of Artificial Sequence: Synthetic oligonucleotide
  Antisense strand to SEQ ID NO: 1511420
aaugaccucuccuuaggag

SEQ ID NO: 1511422 - RNA, 19 nt, Artificial Sequence
  Description of Artificial Sequence: Synthetic oligonucleotide
  Sense strand starting at position 3023 of SEQ ID NO: 1244741
aacaauucguggucaccaa

SEQ ID NO: 1511423 - RNA, 19 nt, Artificial Sequence
  Description of Artificial Sequence: Synthetic oligonucleotide
  Antisense strand to SEQ ID NO: 1511422
uuggugaccacgaauuguu

SEQ ID NO: 1511424 - RNA, 19 nt, Artificial Sequence
  Description of Artificial Sequence: Synthetic oligonucleotide
  Sense strand starting at position 3024 of SEQ ID NO: 1244741
acaauucguggucaccaaa

SEQ ID NO: 1511425 - RNA, 19 nt, Artificial Sequence
  Description of Artificial Sequence: Synthetic oligonucleotide
  Antisense strand to SEQ ID NO: 1511424
uuuggugaccacgaauugu

SEQ ID NO: 1511426 - RNA, 19 nt, Artificial Sequence
  Description of Artificial Sequence: Synthetic oligonucleotide
  Sense strand starting at position 3027 of SEQ ID NO: 1244741
auucguggucaccaaagua

SEQ ID NO: 1511427 - RNA, 19 nt, Artificial Sequence
  Description of Artificial Sequence: Synthetic oligonucleotide
  Antisense strand to SEQ ID NO: 1511426
uacuuuggugaccacgaau

SEQ ID NO: 1511428 - RNA, 19 nt, Artificial Sequence
  Description of Artificial Sequence: Synthetic oligonucleotide
  Sense strand starting at position 3192 of SEQ ID NO: 1244741
ucaaguucuagaggaaggu

SEQ ID NO: 1511429 - RNA, 19 nt, Artificial Sequence
  Description of Artificial Sequence: Synthetic oligonucleotide
  Antisense strand to SEQ ID NO: 1511428
accuuccucuagaacuuga

SEQ ID NO: 1511430 - RNA, 19 nt, Artificial Sequence
  Description of Artificial Sequence: Synthetic oligonucleotide
  Sense strand starting at position 3249 of SEQ ID NO: 1244741
aaguguccucccuggauua

SEQ ID NO: 1511431 - RNA, 19 nt, Artificial Sequence
  Description of Artificial Sequence: Synthetic oligonucleotide
  Antisense strand to SEQ ID NO: 1511430
uaauccagggaggacacuu

SEQ ID NO: 1511432 - RNA, 19 nt, Artificial Sequence
  Description of Artificial Sequence: Synthetic oligonucleotide
  Sense strand starting at position 3251 of SEQ ID NO: 1244741
guguccucccuggauuaga

SEQ ID NO: 1511433 - RNA, 19 nt, Artificial Sequence
  Description of Artificial Sequence: Synthetic oligonucleotide
  Antisense strand to SEQ ID NO: 1511432
ucuaauccagggaggacac

SEQ ID NO: 1511434 - RNA, 19 nt, Artificial Sequence
  Description of Artificial Sequence: Synthetic oligonucleotide
  Sense strand starting at position 3283 of SEQ ID NO: 1244741
ucuagaaucuuggcaaucu

SEQ ID NO: 1511435 - RNA, 19 nt, Artificial Sequence
  Description of Artificial Sequence: Synthetic oligonucleotide
  Antisense strand to SEQ ID NO: 1511434
agauugccaagauucuaga

SEQ ID NO: 1511436 - RNA, 19 nt, Artificial Sequence
  Description of Artificial Sequence: Synthetic oligonucleotide
  Sense strand starting at position 3320 of SEQ ID NO: 1244741
uggcaacucuuauuacuga

SEQ ID NO: 1511437 - RNA, 19 nt, Artificial Sequence
  Description of Artificial Sequence: Synthetic oligonucleotide
  Antisense strand to SEQ ID NO: 1511436
ucaguaauaagaguugcca

SEQ ID NO: 1511438 - RNA, 19 nt, Artificial Sequence
  Description of Artificial Sequence: Synthetic oligonucleotide
  Sense strand starting at position 3361 of SEQ ID NO: 1244741
gccacaguuaugggucaau

SEQ ID NO: 1511439 - RNA, 19 nt, Artificial Sequence
  Description of Artificial Sequence: Synthetic oligonucleotide
  Antisense strand to SEQ ID NO: 1511438
auugacccauaacuguggc

SEQ ID NO: 1511440 - RNA, 19 nt, Artificial Sequence
  Description of Artificial Sequence: Synthetic oligonucleotide
  Sense strand starting at position 3364 of SEQ ID NO: 1244741
acaguuaugggucaauuac

SEQ ID NO: 1511441 - RNA, 19 nt, Artificial Sequence
  Description of Artificial Sequence: Synthetic oligonucleotide
  Antisense strand to SEQ ID NO: 1511440
guaauugacccauaacugu

SEQ ID NO: 1511442 - RNA, 19 nt, Artificial Sequence
  Description of Artificial Sequence: Synthetic oligonucleotide
  Sense strand starting at position 3660 of SEQ ID NO: 1244741
acucuuucuggucagaggu

SEQ ID NO: 1511443 - RNA, 19 nt, Artificial Sequence
  Description of Artificial Sequence: Synthetic oligonucleotide
  Antisense strand to SEQ ID NO: 1511442
accucugaccagaaagagu

SEQ ID NO: 1511444 - RNA, 19 nt, Artificial Sequence
  Description of Artificial Sequence: Synthetic oligonucleotide
  Sense strand starting at position 3691 of SEQ ID NO: 1244741
agcacuucucguuacgaga

SEQ ID NO: 1511445 - RNA, 19 nt, Artificial Sequence
  Description of Artificial Sequence: Synthetic oligonucleotide
  Antisense strand to SEQ ID NO: 1511444
ucucguaacgagaagugcu

SEQ ID NO: 1511446 - RNA, 19 nt, Artificial Sequence
  Description of Artificial Sequence: Synthetic oligonucleotide
  Sense strand starting at position 3815 of SEQ ID NO: 1244741
agaagugucacgugggaca

SEQ ID NO: 1511447 - RNA, 19 nt, Artificial Sequence
  Description of Artificial Sequence: Synthetic oligonucleotide
  Antisense strand to SEQ ID NO: 1511446
ugucccacgugacacuucu

SEQ ID NO: 1511448 - RNA, 19 nt, Artificial Sequence
  Description of Artificial Sequence: Synthetic oligonucleotide
  Sense strand starting at position 3899 of SEQ ID NO: 1244741
uaacacucucugggucaga

SEQ ID NO: 1511449 - RNA, 19 nt, Artificial Sequence
  Description of Artificial Sequence: Synthetic oligonucleotide
  Antisense strand to SEQ ID NO: 1511448
ucugacccagagaguguua

SEQ ID NO: 1511450 - RNA, 19 nt, Artificial Sequence
  Description of Artificial Sequence: Synthetic oligonucleotide
  Sense strand starting at position 88 of SEQ ID NO: 1244742
cugagugcucaccaaggga

SEQ ID NO: 1511451 - RNA, 19 nt, Artificial Sequence
  Description of Artificial Sequence: Synthetic oligonucleotide
  Antisense strand to SEQ ID NO: 1511450
ucccuuggugagcacucag

SEQ ID NO: 1511452 - RNA, 19 nt, Artificial Sequence
  Description of Artificial Sequence: Synthetic oligonucleotide
  Sense strand starting at position 250 of SEQ ID NO: 1244742
cuuagugugaaaggaacuu

SEQ ID NO: 1511453 - RNA, 19 nt, Artificial Sequence
  Description of Artificial Sequence: Synthetic oligonucleotide
  Antisense strand to SEQ ID NO: 1511452
aaguuccuuucacacuaag

SEQ ID NO: 1511454 - RNA, 19 nt, Artificial Sequence
  Description of Artificial Sequence: Synthetic oligonucleotide
  Sense strand starting at position 304 of SEQ ID NO: 1244742
aaguacuaaccuggagacu

SEQ ID NO: 1511455 - RNA, 19 nt, Artificial Sequence
  Description of Artificial Sequence: Synthetic oligonucleotide
  Antisense strand to SEQ ID NO: 1511454
agucuccagguuaguacuu

SEQ ID NO: 1511456 - RNA, 19 nt, Artificial Sequence
  Description of Artificial Sequence: Synthetic oligonucleotide
  Sense strand starting at position 525 of SEQ ID NO: 1244742
ugacccauguucucuaaga

SEQ ID NO: 1511457 - RNA, 19 nt, Artificial Sequence
  Description of Artificial Sequence: Synthetic oligonucleotide
  Antisense strand to SEQ ID NO: 1511456
ucuuagagaacauggguca

SEQ ID NO: 1511458 - RNA, 19 nt, Artificial Sequence
  Description of Artificial Sequence: Synthetic oligonucleotide
  Sense strand starting at position 535 of SEQ ID NO: 1244742
ucucuaagacaguggaaau

SEQ ID NO: 1511459 - RNA, 19 nt, Artificial Sequence
  Description of Artificial Sequence: Synthetic oligonucleotide
  Antisense strand to SEQ ID NO: 1511458
auuuccacugucuuagaga

SEQ ID NO: 1511460 - RNA, 19 nt, Artificial Sequence
  Description of Artificial Sequence: Synthetic oligonucleotide
  Sense strand starting at position 719 of SEQ ID NO: 1244742
ccauuauaggcuggaaucu

SEQ ID NO: 1511461 - RNA, 19 nt, Artificial Sequence
  Description of Artificial Sequence: Synthetic oligonucleotide
  Antisense strand to SEQ ID NO: 1511460
agauuccagccuauaaugg

SEQ ID NO: 1511462 - RNA, 19 nt, Artificial Sequence
  Description of Artificial Sequence: Synthetic oligonucleotide
  Sense strand starting at position 769 of SEQ ID NO: 1244742
gagguugauguagaagguu

SEQ ID NO: 1511463 - RNA, 19 nt, Artificial Sequence
  Description of Artificial Sequence: Synthetic oligonucleotide
  Antisense strand to SEQ ID NO: 1511462
aaccuucuacaucaaccuc

SEQ ID NO: 1511464 - RNA, 19 nt, Artificial Sequence
  Description of Artificial Sequence: Synthetic oligonucleotide
  Sense strand starting at position 907 of SEQ ID NO: 1244742
guuccauugcguguauuca

SEQ ID NO: 1511465 - RNA, 19 nt, Artificial Sequence
  Description of Artificial Sequence: Synthetic oligonucleotide
  Antisense strand to SEQ ID NO: 1511464
ugaauacacgcaauggaac

SEQ ID NO: 1511466 - RNA, 19 nt, Artificial Sequence
  Description of Artificial Sequence: Synthetic oligonucleotide
  Sense strand starting at position 1046 of SEQ ID NO: 1244742
cucucacuugcauaggaaa

SEQ ID NO: 1511467 - RNA, 19 nt, Artificial Sequence
  Description of Artificial Sequence: Synthetic oligonucleotide
  Antisense strand to SEQ ID NO: 1511466
uuuccuaugcaagugagag

SEQ ID NO: 1511468 - RNA, 19 nt, Artificial Sequence
  Description of Artificial Sequence: Synthetic oligonucleotide
  Sense strand starting at position 1185 of SEQ ID NO: 1244742
cugcuugcacuauggagaa

SEQ ID NO: 1511469 - RNA, 19 nt, Artificial Sequence
  Description of Artificial Sequence: Synthetic oligonucleotide
  Antisense strand to SEQ ID NO: 1511468
uucuccauagugcaagcag

SEQ ID NO: 1511470 - RNA, 19 nt, Artificial Sequence
  Description of Artificial Sequence: Synthetic oligonucleotide
  Sense strand starting at position 1187 of SEQ ID NO: 1244742
gcuugcacuauggagaauu

SEQ ID NO: 1511471 - RNA, 19 nt, Artificial Sequence
  Description of Artificial Sequence: Synthetic oligonucleotide
  Antisense strand to SEQ ID NO: 1511470
aauucuccauagugcaagc

SEQ ID NO: 1511472 - RNA, 19 nt, Artificial Sequence
  Description of Artificial Sequence: Synthetic oligonucleotide
  Sense strand starting at position 1206 of SEQ ID NO: 1244742
auguaauggguccaggauu

SEQ ID NO: 1511473 - RNA, 19 nt, Artificial Sequence
  Description of Artificial Sequence: Synthetic oligonucleotide
  Antisense strand to SEQ ID NO: 1511472
aauccuggacccauuacau

SEQ ID NO: 1511474 - RNA, 19 nt, Artificial Sequence
  Description of Artificial Sequence: Synthetic oligonucleotide
  Sense strand starting at position 1425 of SEQ ID NO: 1244742
aggaguguugcugcugcua

SEQ ID NO: 1511475 - RNA, 19 nt, Artificial Sequence
  Description of Artificial Sequence: Synthetic oligonucleotide
  Antisense strand to SEQ ID NO: 1511474
uagcagcagcaacacuccu

SEQ ID NO: 1511476 - RNA, 19 nt, Artificial Sequence
  Description of Artificial Sequence: Synthetic oligonucleotide
  Sense strand starting at position 1460 of SEQ ID NO: 1244742
guaugcugcguggcuaaga

SEQ ID NO: 1511477 - RNA, 19 nt, Artificial Sequence
  Description of Artificial Sequence: Synthetic oligonucleotide
  Antisense strand to SEQ ID NO: 1511476
ucuuagccacgcagcauac

SEQ ID NO: 1511478 - RNA, 19 nt, Artificial Sequence
  Description of Artificial Sequence: Synthetic oligonucleotide
  Sense strand starting at position 1473 of SEQ ID NO: 1244742
cuaagaaagcaugguuucu

SEQ ID NO: 1511479 - RNA, 19 nt, Artificial Sequence
  Description of Artificial Sequence: Synthetic oligonucleotide
  Antisense strand to SEQ ID NO: 1511478
agaaaccaugcuuucuuag

SEQ ID NO: 1511480 - RNA, 19 nt, Artificial Sequence
  Description of Artificial Sequence: Synthetic oligonucleotide
  Sense strand starting at position 1617 of SEQ ID NO: 1244742
gugggaauugccuauucca

SEQ ID NO: 1511481 - RNA, 19 nt, Artificial Sequence
  Description of Artificial Sequence: Synthetic oligonucleotide
  Antisense strand to SEQ ID NO: 1511480
uggaauaggcaauucccac

SEQ ID NO: 1511482 - RNA, 19 nt, Artificial Sequence
  Description of Artificial Sequence: Synthetic oligonucleotide
  Sense strand starting at position 1625 of SEQ ID NO: 1244742
ugccuauuccauggacaca

SEQ ID NO: 1511483 - RNA, 19 nt, Artificial Sequence
  Description of Artificial Sequence: Synthetic oligonucleotide
  Antisense strand to SEQ ID NO: 1511482
uguguccauggaauaggca

SEQ ID NO: 1511484 - RNA, 19 nt, Artificial Sequence
  Description of Artificial Sequence: Synthetic oligonucleotide
  Sense strand starting at position 1732 of SEQ ID NO: 1244742
auuaguuccuucucuagga

SEQ ID NO: 1511485 - RNA, 19 nt, Artificial Sequence
  Description of Artificial Sequence: Synthetic oligonucleotide
  Antisense strand to SEQ ID NO: 1511484
uccuagagaaggaacuaau

SEQ ID NO: 1511486 - RNA, 19 nt, Artificial Sequence
  Description of Artificial Sequence: Synthetic oligonucleotide
  Sense strand starting at position 1755 of SEQ ID NO: 1244742
gacaacugcuggcugauau

SEQ ID NO: 1511487 - RNA, 19 nt, Artificial Sequence
  Description of Artificial Sequence: Synthetic oligonucleotide
  Antisense strand to SEQ ID NO: 1511486
auaucagccagcaguuguc

SEQ ID NO: 1511488 - RNA, 19 nt, Artificial Sequence
  Description of Artificial Sequence: Synthetic oligonucleotide
  Sense strand starting at position 1825 of SEQ ID NO: 1244742
aaaggauucuaccuguuug

SEQ ID NO: 1511489 - RNA, 19 nt, Artificial Sequence
  Description of Artificial Sequence: Synthetic oligonucleotide
  Antisense strand to SEQ ID NO: 1511488
caaacagguagaauccuuu

SEQ ID NO: 1511490 - RNA, 19 nt, Artificial Sequence
  Description of Artificial Sequence: Synthetic oligonucleotide
  Sense strand starting at position 1829 of SEQ ID NO: 1244742
gauucuaccuguuuggaga

SEQ ID NO: 1511491 - RNA, 19 nt, Artificial Sequence
  Description of Artificial Sequence: Synthetic oligonucleotide
  Antisense strand to SEQ ID NO: 1511490
ucuccaaacagguagaauc

SEQ ID NO: 1511492 - RNA, 19 nt, Artificial Sequence
  Description of Artificial Sequence: Synthetic oligonucleotide
  Sense strand starting at position 1847 of SEQ ID NO: 1244742
agagaaagguugucugucu

SEQ ID NO: 1511493 - RNA, 19 nt, Artificial Sequence
  Description of Artificial Sequence: Synthetic oligonucleotide
  Antisense strand to SEQ ID NO: 1511492
agacagacaaccuuucucu

SEQ ID NO: 1511494 - RNA, 19 nt, Artificial Sequence
  Description of Artificial Sequence: Synthetic oligonucleotide
  Sense strand starting at position 1905 of SEQ ID NO: 1244742
ggaggauggucaaagcugu

SEQ ID NO: 1511495 - RNA, 19 nt, Artificial Sequence
  Description of Artificial Sequence: Synthetic oligonucleotide
  Antisense strand to SEQ ID NO: 1511494
acagcuuugaccauccucc

SEQ ID NO: 1511496 - RNA, 19 nt, Artificial Sequence
  Description of Artificial Sequence: Synthetic oligonucleotide
  Sense strand starting at position 1956 of SEQ ID NO: 1244742
gucugagcucuuuaguaga

SEQ ID NO: 1511497 - RNA, 19 nt, Artificial Sequence
  Description of Artificial Sequence: Synthetic oligonucleotide
  Antisense strand to SEQ ID NO: 1511496
ucuacuaaagagcucagac

SEQ ID NO: 1511498 - RNA, 19 nt, Artificial Sequence
  Description of Artificial Sequence: Synthetic oligonucleotide
  Sense strand starting at position 1963 of SEQ ID NO: 1244742
cucuuuaguagauggagaa

SEQ ID NO: 1511499 - RNA, 19 nt, Artificial Sequence
  Description of Artificial Sequence: Synthetic oligonucleotide
  Antisense strand to SEQ ID NO: 1511498
uucuccaucuacuaaagag

SEQ ID NO: 1511500 - RNA, 19 nt, Artificial Sequence
  Description of Artificial Sequence: Synthetic oligonucleotide
  Sense strand starting at position 2021 of SEQ ID NO: 1244742
gagaaaccuucugucugua

SEQ ID NO: 1511501 - RNA, 19 nt, Artificial Sequence
  Description of Artificial Sequence: Synthetic oligonucleotide
  Antisense strand to SEQ ID NO: 1511500
uacagacagaagguuucuc

SEQ ID NO: 1511502 - RNA, 19 nt, Artificial Sequence
  Description of Artificial Sequence: Synthetic oligonucleotide
  Sense strand starting at position 2123 of SEQ ID NO: 1244742
gcuggaguucuguaggaga

SEQ ID NO: 1511503 - RNA, 19 nt, Artificial Sequence
  Description of Artificial Sequence: Synthetic oligonucleotide
  Antisense strand to SEQ ID NO: 1511502
ucuccuacagaacuccagc

SEQ ID NO: 1511504 - RNA, 19 nt, Artificial Sequence
  Description of Artificial Sequence: Synthetic oligonucleotide
  Sense strand starting at position 2125 of SEQ ID NO: 1244742
uggaguucuguaggagacu

SEQ ID NO: 1511505 - RNA, 19 nt, Artificial Sequence
  Description of Artificial Sequence: Synthetic oligonucleotide
  Antisense strand to SEQ ID NO: 1511504
agucuccuacagaacucca

SEQ ID NO: 1511506 - RNA, 19 nt, Artificial Sequence
  Description of Artificial Sequence: Synthetic oligonucleotide
  Sense strand starting at position 2145 of SEQ ID NO: 1244742
acgggaauauucuccuaga

SEQ ID NO: 1511507 - RNA, 19 nt, Artificial Sequence
  Description of Artificial Sequence: Synthetic oligonucleotide
  Antisense strand to SEQ ID NO: 1511506
ucuaggagaauauucccgu

SEQ ID NO: 1511508 - RNA, 19 nt, Artificial Sequence
  Description of Artificial Sequence: Synthetic oligonucleotide
  Sense strand starting at position 2146 of SEQ ID NO: 1244742
cgggaauauucuccuagac

SEQ ID NO: 1511509 - RNA, 19 nt, Artificial Sequence
  Description of Artificial Sequence: Synthetic oligonucleotide
  Antisense strand to SEQ ID NO: 1511508
gucuaggagaauauucccg

SEQ ID NO: 1511510 - RNA, 19 nt, Artificial Sequence
  Description of Artificial Sequence: Synthetic oligonucleotide
  Sense strand starting at position 2277 of SEQ ID NO: 1244742
ccaagaugaucuuugcuug

SEQ ID NO: 1511511 - RNA, 19 nt, Artificial Sequence
  Description of Artificial Sequence: Synthetic oligonucleotide
  Antisense strand to SEQ ID NO: 1511510
caagcaaagaucaucuugg

SEQ ID NO: 1511512 - RNA, 19 nt, Artificial Sequence
  Description of Artificial Sequence: Synthetic oligonucleotide
  Sense strand starting at position 2301 of SEQ ID NO: 1244742
ggaggacuuccugguagga

SEQ ID NO: 1511513 - RNA, 19 nt, Artificial Sequence
  Description of Artificial Sequence: Synthetic oligonucleotide
  Antisense strand to SEQ ID NO: 1511512
uccuaccaggaaguccucc

SEQ ID NO: 1511514 - RNA, 19 nt, Artificial Sequence
  Description of Artificial Sequence: Synthetic oligonucleotide
  Sense strand starting at position 2361 of SEQ ID NO: 1244742
ccagaugaagucugugaca

SEQ ID NO: 1511515 - RNA, 19 nt, Artificial Sequence
  Description of Artificial Sequence: Synthetic oligonucleotide
  Antisense strand to SEQ ID NO: 1511514
ugucacagacuucaucugg

SEQ ID NO: 1511516 - RNA, 19 nt, Artificial Sequence
  Description of Artificial Sequence: Synthetic oligonucleotide
  Sense strand starting at position 2363 of SEQ ID NO: 1244742
agaugaagucugugacauc

SEQ ID NO: 1511517 - RNA, 19 nt, Artificial Sequence
  Description of Artificial Sequence: Synthetic oligonucleotide
  Antisense strand to SEQ ID NO: 1511516
gaugucacagacuucaucu

SEQ ID NO: 1511518 - RNA, 19 nt, Artificial Sequence
  Description of Artificial Sequence: Synthetic oligonucleotide
  Sense strand starting at position 2690 of SEQ ID NO: 1244742
ugucaagaauucccaaguu

SEQ ID NO: 1511519 - RNA, 19 nt, Artificial Sequence
  Description of Artificial Sequence: Synthetic oligonucleotide
  Antisense strand to SEQ ID NO: 1511518
aacuugggaauucuugaca

SEQ ID NO: 1511520 - RNA, 19 nt, Artificial Sequence
  Description of Artificial Sequence: Synthetic oligonucleotide
  Sense strand starting at position 2972 of SEQ ID NO: 1244742
ggcucaguuccuuagagag

SEQ ID NO: 1511521 - RNA, 19 nt, Artificial Sequence
  Description of Artificial Sequence: Synthetic oligonucleotide
  Antisense strand to SEQ ID NO: 1511520
cucucuaaggaacugagcc

SEQ ID NO: 1511522 - RNA, 19 nt, Artificial Sequence
  Description of Artificial Sequence: Synthetic oligonucleotide
  Sense strand starting at position 3065 of SEQ ID NO: 1244742
aagagaguagacuggguua

SEQ ID NO: 1511523 - RNA, 19 nt, Artificial Sequence
  Description of Artificial Sequence: Synthetic oligonucleotide
  Antisense strand to SEQ ID NO: 1511522
uaacccagucuacucucuu

SEQ ID NO: 1511524 - RNA, 19 nt, Artificial Sequence
  Description of Artificial Sequence: Synthetic oligonucleotide
  Sense strand starting at position 3067 of SEQ ID NO: 1244742
gagaguagacuggguuacu

SEQ ID NO: 1511525 - RNA, 19 nt, Artificial Sequence
  Description of Artificial Sequence: Synthetic oligonucleotide
  Antisense strand to SEQ ID NO: 1511524
aguaacccagucuacucuc

SEQ ID NO: 1511526 - RNA, 19 nt, Artificial Sequence
  Description of Artificial Sequence: Synthetic oligonucleotide
  Sense strand starting at position 3873 of SEQ ID NO: 1244742
uuuggagaaaucggaguuu

SEQ ID NO: 1511527 - RNA, 19 nt, Artificial Sequence
  Description of Artificial Sequence: Synthetic oligonucleotide
  Antisense strand to SEQ ID NO: 1511526
aaacuccgauuucuccaaa

SEQ ID NO: 1511528 - RNA, 19 nt, Artificial Sequence
  Description of Artificial Sequence: Synthetic oligonucleotide
  Sense strand starting at position 3964 of SEQ ID NO: 1244742
agaacaaucacacggguuu

SEQ ID NO: 1511529 - RNA, 19 nt, Artificial Sequence
  Description of Artificial Sequence: Synthetic oligonucleotide
  Antisense strand to SEQ ID NO: 1511528
aaacccgugugauuguucu

SEQ ID NO: 1511530 - RNA, 19 nt, Artificial Sequence
  Description of Artificial Sequence: Synthetic oligonucleotide
  Sense strand starting at position 43 of SEQ ID NO: 1244743
gcggacagauacuuacuua

SEQ ID NO: 1511531 - RNA, 19 nt, Artificial Sequence
  Description of Artificial Sequence: Synthetic oligonucleotide
  Antisense strand to SEQ ID NO: 1511530
uaaguaaguaucuguccgc

SEQ ID NO: 1511532 - RNA, 19 nt, Artificial Sequence
  Description of Artificial Sequence: Synthetic oligonucleotide
  Sense strand starting at position 81 of SEQ ID NO: 1244743
aaguaucuguuaccguuau

SEQ ID NO: 1511533 - RNA, 19 nt, Artificial Sequence
  Description of Artificial Sequence: Synthetic oligonucleotide
  Antisense strand to SEQ ID NO: 1511532
auaacgguaacagauacuu

SEQ ID NO: 1511534 - RNA, 19 nt, Artificial Sequence
  Description of Artificial Sequence: Synthetic oligonucleotide
  Sense strand starting at position 85 of SEQ ID NO: 1244743
aucuguuaccguuaucaaa

SEQ ID NO: 1511535 - RNA, 19 nt, Artificial Sequence
  Description of Artificial Sequence: Synthetic oligonucleotide
  Antisense strand to SEQ ID NO: 1511534
uuugauaacgguaacagau

SEQ ID NO: 1511536 - RNA, 19 nt, Artificial Sequence
  Description of Artificial Sequence: Synthetic oligonucleotide
  Sense strand starting at position 132 of SEQ ID NO: 1244743
gugacagaauucgggagaa

SEQ ID NO: 1511537 - RNA, 19 nt, Artificial Sequence
  Description of Artificial Sequence: Synthetic oligonucleotide
  Antisense strand to SEQ ID NO: 1511536
uucucccgaauucugucac

SEQ ID NO: 1511538 - RNA, 19 nt, Artificial Sequence
  Description of Artificial Sequence: Synthetic oligonucleotide
  Sense strand starting at position 142 of SEQ ID NO: 1244743
ucgggagaauauuaucaag

SEQ ID NO: 1511539 - RNA, 19 nt, Artificial Sequence
  Description of Artificial Sequence: Synthetic oligonucleotide
  Antisense strand to SEQ ID NO: 1511538
cuugauaauauucucccga

SEQ ID NO: 1511540 - RNA, 19 nt, Artificial Sequence
  Description of Artificial Sequence: Synthetic oligonucleotide
  Sense strand starting at position 145 of SEQ ID NO: 1244743
ggagaauauuaucaaguac

SEQ ID NO: 1511541 - RNA, 19 nt, Artificial Sequence
  Description of Artificial Sequence: Synthetic oligonucleotide
  Antisense strand to SEQ ID NO: 1511540
guacuugauaauauucucc

SEQ ID NO: 1511542 - RNA, 19 nt, Artificial Sequence
  Description of Artificial Sequence: Synthetic oligonucleotide
  Sense strand starting at position 847 of SEQ ID NO: 1244743
ggaaucauaugcuccagca

SEQ ID NO: 1511543 - RNA, 19 nt, Artificial Sequence
  Description of Artificial Sequence: Synthetic oligonucleotide
  Antisense strand to SEQ ID NO: 1511542
ugcuggagcauaugauucc

SEQ ID NO: 1511544 - RNA, 19 nt, Artificial Sequence
  Description of Artificial Sequence: Synthetic oligonucleotide
  Sense strand starting at position 1214 of SEQ ID NO: 1244743
gugagacacuuagaaucuu

SEQ ID NO: 1511545 - RNA, 19 nt, Artificial Sequence
  Description of Artificial Sequence: Synthetic oligonucleotide
  Antisense strand to SEQ ID NO: 1511544
aagauucuaagugucucac

SEQ ID NO: 1511546 - RNA, 19 nt, Artificial Sequence
  Description of Artificial Sequence: Synthetic oligonucleotide
  Sense strand starting at position 1440 of SEQ ID NO: 1244743
ccuucucuccgacguuaaa

SEQ ID NO: 1511547 - RNA, 19 nt, Artificial Sequence
  Description of Artificial Sequence: Synthetic oligonucleotide
  Antisense strand to SEQ ID NO: 1511546
uuuaacgucggagagaagg

SEQ ID NO: 1511548 - RNA, 19 nt, Artificial Sequence
  Description of Artificial Sequence: Synthetic oligonucleotide
  Sense strand starting at position 1598 of SEQ ID NO: 1244743
ucaccuucgcggcgagaaa

SEQ ID NO: 1511549 - RNA, 19 nt, Artificial Sequence
  Description of Artificial Sequence: Synthetic oligonucleotide
  Antisense strand to SEQ ID NO: 1511548
uuucucgccgcgaagguga

SEQ ID NO: 1511550 - RNA, 19 nt, Artificial Sequence
  Description of Artificial Sequence: Synthetic oligonucleotide
  Sense strand starting at position 2428 of SEQ ID NO: 1244743
ggccauuacuugggaccuu

SEQ ID NO: 1511551 - RNA, 19 nt, Artificial Sequence
  Description of Artificial Sequence: Synthetic oligonucleotide
  Antisense strand to SEQ ID NO: 1511550
aaggucccaaguaauggcc

SEQ ID NO: 1511552 - RNA, 19 nt, Artificial Sequence
  Description of Artificial Sequence: Synthetic oligonucleotide
  Sense strand starting at position 2443 of SEQ ID NO: 1244743
ccuugaagaucugcuaaga

SEQ ID NO: 1511553 - RNA, 19 nt, Artificial Sequence
  Description of Artificial Sequence: Synthetic oligonucleotide
  Antisense strand to SEQ ID NO: 1511552
ucuuagcagaucuucaagg

SEQ ID NO: 1511554 - RNA, 19 nt, Artificial Sequence
  Description of Artificial Sequence: Synthetic oligonucleotide
  Sense strand starting at position 2448 of SEQ ID NO: 1244743
aagaucugcuaagaguagu

SEQ ID NO: 1511555 - RNA, 19 nt, Artificial Sequence
  Description of Artificial Sequence: Synthetic oligonucleotide
  Antisense strand to SEQ ID NO: 1511554
acuacucuuagcagaucuu

SEQ ID NO: 1511556 - RNA, 19 nt, Artificial Sequence
  Description of Artificial Sequence: Synthetic oligonucleotide
  Sense strand starting at position 2458 of SEQ ID NO: 1244743
aagaguaguuguuacuauu

SEQ ID NO: 1511557 - RNA, 19 nt, Artificial Sequence
  Description of Artificial Sequence: Synthetic oligonucleotide
  Antisense strand to SEQ ID NO: 1511556
aauaguaacaacuacucuu

SEQ ID NO: 1511558 - RNA, 19 nt, Artificial Sequence
  Description of Artificial Sequence: Synthetic oligonucleotide
  Sense strand starting at position 2791 of SEQ ID NO: 1244743
auacgauauaguuggaauc

SEQ ID NO: 1511559 - RNA, 19 nt, Artificial Sequence
  Description of Artificial Sequence: Synthetic oligonucleotide
  Antisense strand to SEQ ID NO: 1511558
gauuccaacuauaucguau

SEQ ID NO: 1511560 - RNA, 19 nt, Artificial Sequence
  Description of Artificial Sequence: Synthetic oligonucleotide
  Sense strand starting at position 2793 of SEQ ID NO: 1244743
acgauauaguuggaaucgu

SEQ ID NO: 1511561 - RNA, 19 nt, Artificial Sequence
  Description of Artificial Sequence: Synthetic oligonucleotide
  Antisense strand to SEQ ID NO: 1511560
acgauuccaacuauaucgu

SEQ ID NO: 1511562 - RNA, 19 nt, Artificial Sequence
  Description of Artificial Sequence: Synthetic oligonucleotide
  Sense strand starting at position 2802 of SEQ ID NO: 1244743
uuggaaucguguggaagga

SEQ ID NO: 1511563 - RNA, 19 nt, Artificial Sequence
  Description of Artificial Sequence: Synthetic oligonucleotide
  Antisense strand to SEQ ID NO: 1511562
uccuuccacacgauuccaa

SEQ ID NO: 1511564 - RNA, 19 nt, Artificial Sequence
  Description of Artificial Sequence: Synthetic oligonucleotide
  Sense strand starting at position 2821 of SEQ ID NO: 1244743
aguacaucaggaggcauau

SEQ ID NO: 1511565 - RNA, 19 nt, Artificial Sequence
  Description of Artificial Sequence: Synthetic oligonucleotide
  Antisense strand to SEQ ID NO: 1511564
auaugccuccugauguacu

SEQ ID NO: 1511566 - RNA, 19 nt, Artificial Sequence
  Description of Artificial Sequence: Synthetic oligonucleotide
  Sense strand starting at position 3271 of SEQ ID NO: 1244743
gccacaaccucugacagaa

SEQ ID NO: 1511567 - RNA, 19 nt, Artificial Sequence
  Description of Artificial Sequence: Synthetic oligonucleotide
  Antisense strand to SEQ ID NO: 1511566
uucugucagagguuguggc

SEQ ID NO: 1511568 - RNA, 19 nt, Artificial Sequence
  Description of Artificial Sequence: Synthetic oligonucleotide
  Sense strand starting at position 3311 of SEQ ID NO: 1244743
gacacuuugucaccggaag

SEQ ID NO: 1511569 - RNA, 19 nt, Artificial Sequence
  Description of Artificial Sequence: Synthetic oligonucleotide
  Antisense strand to SEQ ID NO: 1511568
cuuccggugacaaaguguc

SEQ ID NO: 1511570 - RNA, 19 nt, Artificial Sequence
  Description of Artificial Sequence: Synthetic oligonucleotide
  Sense strand starting at position 3313 of SEQ ID NO: 1244743
cacuuugucaccggaaggu

SEQ ID NO: 1511571 - RNA, 19 nt, Artificial Sequence
  Description of Artificial Sequence: Synthetic oligonucleotide
  Antisense strand to SEQ ID NO: 1511570
accuuccggugacaaagug

SEQ ID NO: 1511572 - RNA, 19 nt, Artificial Sequence
  Description of Artificial Sequence: Synthetic oligonucleotide
  Sense strand starting at position 3494 of SEQ ID NO: 1244743
gccauugcaugauuucuuu

SEQ ID NO: 1511573 - RNA, 19 nt, Artificial Sequence
  Description of Artificial Sequence: Synthetic oligonucleotide
  Antisense strand to SEQ ID NO: 1511572
aaagaaaucaugcaauggc

SEQ ID NO: 1511574 - RNA, 19 nt, Artificial Sequence
  Description of Artificial Sequence: Synthetic oligonucleotide
  Sense strand starting at position 3579 of SEQ ID NO: 1244743
gcaacagugucagugaacu

SEQ ID NO: 1511575 - RNA, 19 nt, Artificial Sequence
  Description of Artificial Sequence: Synthetic oligonucleotide
  Antisense strand to SEQ ID NO: 1511574
aguucacugacacuguugc

SEQ ID NO: 1511576 - RNA, 19 nt, Artificial Sequence
  Description of Artificial Sequence: Synthetic oligonucleotide
  Sense strand starting at position 3585 of SEQ ID NO: 1244743
gugucagugaacugcagau

SEQ ID NO: 1511577 - RNA, 19 nt, Artificial Sequence
  Description of Artificial Sequence: Synthetic oligonucleotide
  Antisense strand to SEQ ID NO: 1511576
aucugcaguucacugacac

SEQ ID NO: 1511578 - RNA, 19 nt, Artificial Sequence
  Description of Artificial Sequence: Synthetic oligonucleotide
  Sense strand starting at position 3587 of SEQ ID NO: 1244743
gucagugaacugcagauua

SEQ ID NO: 1511579 - RNA, 19 nt, Artificial Sequence
  Description of Artificial Sequence: Synthetic oligonucleotide
  Antisense strand to SEQ ID NO: 1511578
uaaucugcaguucacugac

SEQ ID NO: 1511580 - RNA, 19 nt, Artificial Sequence
  Description of Artificial Sequence: Synthetic oligonucleotide
  Sense strand starting at position 3797 of SEQ ID NO: 1244743
uuuacuacguugguggaaa

SEQ ID NO: 1511581 - RNA, 19 nt, Artificial Sequence
  Description of Artificial Sequence: Synthetic oligonucleotide
  Antisense strand to SEQ ID NO: 1511580
uuuccaccaacguaguaaa

SEQ ID NO: 1511582 - RNA, 19 nt, Artificial Sequence
  Description of Artificial Sequence: Synthetic oligonucleotide
  Sense strand starting at position 3798 of SEQ ID NO: 1244743
uuacuacguugguggaaau

SEQ ID NO: 1511583 - RNA, 19 nt, Artificial Sequence
  Description of Artificial Sequence: Synthetic oligonucleotide
  Antisense strand to SEQ ID NO: 1511582
auuuccaccaacguaguaa

SEQ ID NO: 1511584 - RNA, 19 nt, Artificial Sequence
  Description of Artificial Sequence: Synthetic oligonucleotide
  Sense strand starting at position 3903 of SEQ ID NO: 1244743
aaugaaagcugcugagauu

SEQ ID NO: 1511585 - RNA, 19 nt, Artificial Sequence
  Description of Artificial Sequence: Synthetic oligonucleotide
  Antisense strand to SEQ ID NO: 1511584
aaucucagcagcuuucauu

SEQ ID NO: 1511586 - RNA, 19 nt, Artificial Sequence
  Description of Artificial Sequence: Synthetic oligonucleotide
  Sense strand starting at position 2094 of SEQ ID NO: 1244744
ccuaguuuguuuccucaac

SEQ ID NO: 1511587 - RNA, 19 nt, Artificial Sequence
  Description of Artificial Sequence: Synthetic oligonucleotide
  Antisense strand to SEQ ID NO: 1511586
guugaggaaacaaacuagg

SEQ ID NO: 1511588 - RNA, 19 nt, Artificial Sequence
  Description of Artificial Sequence: Synthetic oligonucleotide
  Sense strand starting at position 2095 of SEQ ID NO: 1244744
cuaguuuguuuccucaacu

SEQ ID NO: 1511589 - RNA, 19 nt, Artificial Sequence
  Description of Artificial Sequence: Synthetic oligonucleotide
  Antisense strand to SEQ ID NO: 1511588
aguugaggaaacaaacuag

SEQ ID NO: 1511590 - RNA, 19 nt, Artificial Sequence
  Description of Artificial Sequence: Synthetic oligonucleotide
  Sense strand starting at position 2103 of SEQ ID NO: 1244744
uuuccucaacuguaggaau

SEQ ID NO: 1511591 - RNA, 19 nt, Artificial Sequence
  Description of Artificial Sequence: Synthetic oligonucleotide
  Antisense strand to SEQ ID NO: 1511590
auuccuacaguugaggaaa

SEQ ID NO: 1511592 - RNA, 19 nt, Artificial Sequence
  Description of Artificial Sequence: Synthetic oligonucleotide
  Sense strand starting at position 2639 of SEQ ID NO: 1244744
ugcgaaauaucuuuguaug

SEQ ID NO: 1511593 - RNA, 19 nt, Artificial Sequence
  Description of Artificial Sequence: Synthetic oligonucleotide
  Antisense strand to SEQ ID NO: 1511592
cauacaaagauauuucgca

SEQ ID NO: 1511594 - RNA, 19 nt, Artificial Sequence
  Description of Artificial Sequence: Synthetic oligonucleotide
  Sense strand starting at position 2640 of SEQ ID NO: 1244744
gcgaaauaucuuuguaugu

SEQ ID NO: 1511595 - RNA, 19 nt, Artificial Sequence
  Description of Artificial Sequence: Synthetic oligonucleotide
  Antisense strand to SEQ ID NO: 1511594
acauacaaagauauuucgc

SEQ ID NO: 1511596 - RNA, 19 nt, Artificial Sequence
  Description of Artificial Sequence: Synthetic oligonucleotide
  Sense strand starting at position 2641 of SEQ ID NO: 1244744
cgaaauaucuuuguaugua

SEQ ID NO: 1511597 - RNA, 19 nt, Artificial Sequence
  Description of Artificial Sequence: Synthetic oligonucleotide
  Antisense strand to SEQ ID NO: 1511596
uacauacaaagauauuucg

SEQ ID NO: 1511598 - RNA, 19 nt, Artificial Sequence
  Description of Artificial Sequence: Synthetic oligonucleotide
  Sense strand starting at position 2701 of SEQ ID NO: 1244744
acaaauagcugccaggaua

SEQ ID NO: 1511599 - RNA, 19 nt, Artificial Sequence
  Description of Artificial Sequence: Synthetic oligonucleotide
  Antisense strand to SEQ ID NO: 1511598
uauccuggcagcuauuugu

SEQ ID NO: 1511600 - RNA, 19 nt, Artificial Sequence
  Description of Artificial Sequence: Synthetic oligonucleotide
  Sense strand starting at position 2881 of SEQ ID NO: 1244744
guguauauacccuauaauu

SEQ ID NO: 1511601 - RNA, 19 nt, Artificial Sequence
  Description of Artificial Sequence: Synthetic oligonucleotide
  Antisense strand to SEQ ID NO: 1511600
aauuauaggguauauacac

SEQ ID NO: 1511602 - RNA, 19 nt, Artificial Sequence
  Description of Artificial Sequence: Synthetic oligonucleotide
  Sense strand starting at position 3046 of SEQ ID NO: 1244744
ggauuacaggugcgugaga

SEQ ID NO: 1511603 - RNA, 19 nt, Artificial Sequence
  Description of Artificial Sequence: Synthetic oligonucleotide
  Antisense strand to SEQ ID NO: 1511602
ucucacgcaccuguaaucc

SEQ ID NO: 1511604 - RNA, 19 nt, Artificial Sequence
  Description of Artificial Sequence: Synthetic oligonucleotide
  Sense strand starting at position 3286 of SEQ ID NO: 1244744
ggaaauauuuauuguacca

SEQ ID NO: 1511605 - RNA, 19 nt, Artificial Sequence
  Description of Artificial Sequence: Synthetic oligonucleotide
  Antisense strand to SEQ ID NO: 1511604
ugguacaauaaauauuucc

SEQ ID NO: 1511606 - RNA, 19 nt, Artificial Sequence
  Description of Artificial Sequence: Synthetic oligonucleotide
  Sense strand starting at position 3302 of SEQ ID NO: 1244744
ccaaguaggucagugauua

SEQ ID NO: 1511607 - RNA, 19 nt, Artificial Sequence
  Description of Artificial Sequence: Synthetic oligonucleotide
  Antisense strand to SEQ ID NO: 1511606
uaaucacugaccuacuugg

SEQ ID NO: 1511608 - RNA, 19 nt, Artificial Sequence
  Description of Artificial Sequence: Synthetic oligonucleotide
  Sense strand starting at position 3303 of SEQ ID NO: 1244744
caaguaggucagugauuac

SEQ ID NO: 1511609 - RNA, 19 nt, Artificial Sequence
  Description of Artificial Sequence: Synthetic oligonucleotide
  Antisense strand to SEQ ID NO: 1511608
guaaucacugaccuacuug

SEQ ID NO: 1511610 - RNA, 19 nt, Artificial Sequence
  Description of Artificial Sequence: Synthetic oligonucleotide
  Sense strand starting at position 3306 of SEQ ID NO: 1244744
guaggucagugauuacuua

SEQ ID NO: 1511611 - RNA, 19 nt, Artificial Sequence
  Description of Artificial Sequence: Synthetic oligonucleotide
  Antisense strand to SEQ ID NO: 1511610
uaaguaaucacugaccuac

SEQ ID NO: 1511612 - RNA, 19 nt, Artificial Sequence
  Description of Artificial Sequence: Synthetic oligonucleotide
  Sense strand starting at position 3310 of SEQ ID NO: 1244744
gucagugauuacuuaguga

SEQ ID NO: 1511613 - RNA, 19 nt, Artificial Sequence
  Description of Artificial Sequence: Synthetic oligonucleotide
  Antisense strand to SEQ ID NO: 1511612
ucacuaaguaaucacugac

SEQ ID NO: 1511614 - RNA, 19 nt, Artificial Sequence
  Description of Artificial Sequence: Synthetic oligonucleotide
  Sense strand starting at position 3314 of SEQ ID NO: 1244744
gugauuacuuagugaggga

SEQ ID NO: 1511615 - RNA, 19 nt, Artificial Sequence
  Description of Artificial Sequence: Synthetic oligonucleotide
  Antisense strand to SEQ ID NO: 1511614
ucccucacuaaguaaucac

SEQ ID NO: 1511616 - RNA, 19 nt, Artificial Sequence
  Description of Artificial Sequence: Synthetic oligonucleotide
  Sense strand starting at position 98 of SEQ ID NO: 1244745
gggcgucuugugagugaca

SEQ ID NO: 1511617 - RNA, 19 nt, Artificial Sequence
  Description of Artificial Sequence: Synthetic oligonucleotide
  Antisense strand to SEQ ID NO: 1511616
ugucacucacaagacgccc

SEQ ID NO: 1511618 - RNA, 19 nt, Artificial Sequence
  Description of Artificial Sequence: Synthetic oligonucleotide
  Sense strand starting at position 273 of SEQ ID NO: 1244745
guccuugguuuccacauuu

SEQ ID NO: 1511619 - RNA, 19 nt, Artificial Sequence
  Description of Artificial Sequence: Synthetic oligonucleotide
  Antisense strand to SEQ ID NO: 1511618
aaauguggaaaccaaggac

SEQ ID NO: 1511620 - RNA, 19 nt, Artificial Sequence
  Description of Artificial Sequence: Synthetic oligonucleotide
  Sense strand starting at position 328 of SEQ ID NO: 1244745
gcuuguuugcuuugaggaa

SEQ ID NO: 1511621 - RNA, 19 nt, Artificial Sequence
  Description of Artificial Sequence: Synthetic oligonucleotide
  Antisense strand to SEQ ID NO: 1511620
uuccucaaagcaaacaagc

SEQ ID NO: 1511622 - RNA, 19 nt, Artificial Sequence
  Description of Artificial Sequence: Synthetic oligonucleotide
  Sense strand starting at position 329 of SEQ ID NO: 1244745
cuuguuugcuuugaggaaa

SEQ ID NO: 1511623 - RNA, 19 nt, Artificial Sequence
  Description of Artificial Sequence: Synthetic oligonucleotide
  Antisense strand to SEQ ID NO: 1511622
uuuccucaaagcaaacaag

SEQ ID NO: 1511624 - RNA, 19 nt, Artificial Sequence
  Description of Artificial Sequence: Synthetic oligonucleotide
  Sense strand starting at position 364 of SEQ ID NO: 1244745
ggcuuuaacgcuggcuuga

SEQ ID NO: 1511625 - RNA, 19 nt, Artificial Sequence
  Description of Artificial Sequence: Synthetic oligonucleotide
  Antisense strand to SEQ ID NO: 1511624
ucaagccagcguuaaagcc

SEQ ID NO: 1511626 - RNA, 19 nt, Artificial Sequence
  Description of Artificial Sequence: Synthetic oligonucleotide
  Sense strand starting at position 562 of SEQ ID NO: 1244745
gccucacuucugugaccuu

SEQ ID NO: 1511627 - RNA, 19 nt, Artificial Sequence
  Description of Artificial Sequence: Synthetic oligonucleotide
  Antisense strand to SEQ ID NO: 1511626
aaggucacagaagugaggc

SEQ ID NO: 1511628 - RNA, 19 nt, Artificial Sequence
  Description of Artificial Sequence: Synthetic oligonucleotide
  Sense strand starting at position 587 of SEQ ID NO: 1244745
accugagccugaguugaaa

SEQ ID NO: 1511629 - RNA, 19 nt, Artificial Sequence
  Description of Artificial Sequence: Synthetic oligonucleotide
  Antisense strand to SEQ ID NO: 1511628
uuucaacucaggcucaggu

SEQ ID NO: 1511630 - RNA, 19 nt, Artificial Sequence
  Description of Artificial Sequence: Synthetic oligonucleotide
  Sense strand starting at position 589 of SEQ ID NO: 1244745
cugagccugaguugaaagu

SEQ ID NO: 1511631 - RNA, 19 nt, Artificial Sequence
  Description of Artificial Sequence: Synthetic oligonucleotide
  Antisense strand to SEQ ID NO: 1511630
acuuucaacucaggcucag

SEQ ID NO: 1511632 - RNA, 19 nt, Artificial Sequence
  Description of Artificial Sequence: Synthetic oligonucleotide
  Sense strand starting at position 602 of SEQ ID NO: 1244745
gaaagucaguccuccaggu

SEQ ID NO: 1511633 - RNA, 19 nt, Artificial Sequence
  Description of Artificial Sequence: Synthetic oligonucleotide
  Antisense strand to SEQ ID NO: 1511632
accuggaggacugacuuuc

SEQ ID NO: 1511634 - RNA, 19 nt, Artificial Sequence
  Description of Artificial Sequence: Synthetic oligonucleotide
  Sense strand starting at position 840 of SEQ ID NO: 1244745
cugcccuaauccugggaaa

SEQ ID NO: 1511635 - RNA, 19 nt, Artificial Sequence
  Description of Artificial Sequence: Synthetic oligonucleotide
  Antisense strand to SEQ ID NO: 1511634
uuucccaggauuagggcag

SEQ ID NO: 1511636 - RNA, 19 nt, Artificial Sequence
  Description of Artificial Sequence: Synthetic oligonucleotide
  Sense strand starting at position 1125 of SEQ ID NO: 1244745
cgaagaccucuccguguuu

SEQ ID NO: 1511637 - RNA, 19 nt, Artificial Sequence
  Description of Artificial Sequence: Synthetic oligonucleotide
  Antisense strand to SEQ ID NO: 1511636
aaacacggagaggucuucg

SEQ ID NO: 1511638 - RNA, 19 nt, Artificial Sequence
  Description of Artificial Sequence: Synthetic oligonucleotide
  Sense strand starting at position 1126 of SEQ ID NO: 1244745
gaagaccucuccguguuua

SEQ ID NO: 1511639 - RNA, 19 nt, Artificial Sequence
  Description of Artificial Sequence: Synthetic oligonucleotide
  Antisense strand to SEQ ID NO: 1511638
uaaacacggagaggucuuc

SEQ ID NO: 1511640 - RNA, 19 nt, Artificial Sequence
  Description of Artificial Sequence: Synthetic oligonucleotide
  Sense strand starting at position 1127 of SEQ ID NO: 1244745
aagaccucuccguguuuau

SEQ ID NO: 1511641 - RNA, 19 nt, Artificial Sequence
  Description of Artificial Sequence: Synthetic oligonucleotide
  Antisense strand to SEQ ID NO: 1511640
auaaacacggagaggucuu

SEQ ID NO: 1511642 - RNA, 19 nt, Artificial Sequence
  Description of Artificial Sequence: Synthetic oligonucleotide
  Sense strand starting at position 1137 of SEQ ID NO: 1244745
cguguuuaugguagacugu

SEQ ID NO: 1511643 - RNA, 19 nt, Artificial Sequence
  Description of Artificial Sequence: Synthetic oligonucleotide
  Antisense strand to SEQ ID NO: 1511642
acagucuaccauaaacacg

SEQ ID NO: 1511644 - RNA, 19 nt, Artificial Sequence
  Description of Artificial Sequence: Synthetic oligonucleotide
  Sense strand starting at position 2057 of SEQ ID NO: 1244745
cugugacauuugccugguu

SEQ ID NO: 1511645 - RNA, 19 nt, Artificial Sequence
  Description of Artificial Sequence: Synthetic oligonucleotide
  Antisense strand to SEQ ID NO: 1511644
aaccaggcaaaugucacag

SEQ ID NO: 1511646 - RNA, 19 nt, Artificial Sequence
  Description of Artificial Sequence: Synthetic oligonucleotide
  Sense strand starting at position 2059 of SEQ ID NO: 1244745
gugacauuugccugguugu

SEQ ID NO: 1511647 - RNA, 19 nt, Artificial Sequence
  Description of Artificial Sequence: Synthetic oligonucleotide
  Antisense strand to SEQ ID NO: 1511646
acaaccaggcaaaugucac

SEQ ID NO: 1511648 - RNA, 19 nt, Artificial Sequence
  Description of Artificial Sequence: Synthetic oligonucleotide
  Sense strand starting at position 2528 of SEQ ID NO: 1244745
aggaguucuaguuagagca

SEQ ID NO: 1511649 - RNA, 19 nt, Artificial Sequence
  Description of Artificial Sequence: Synthetic oligonucleotide
  Antisense strand to SEQ ID NO: 1511648
ugcucuaacuagaacuccu

SEQ ID NO: 1511650 - RNA, 19 nt, Artificial Sequence
  Description of Artificial Sequence: Synthetic oligonucleotide
  Sense strand starting at position 2558 of SEQ ID NO: 1244745
cuauucuugucccugggau

SEQ ID NO: 1511651 - RNA, 19 nt, Artificial Sequence
  Description of Artificial Sequence: Synthetic oligonucleotide
  Antisense strand to SEQ ID NO: 1511650
aucccagggacaagaauag

SEQ ID NO: 1511652 - RNA, 19 nt, Artificial Sequence
  Description of Artificial Sequence: Synthetic oligonucleotide
  Sense strand starting at position 2559 of SEQ ID NO: 1244745
uauucuugucccugggaug

SEQ ID NO: 1511653 - RNA, 19 nt, Artificial Sequence
  Description of Artificial Sequence: Synthetic oligonucleotide
  Antisense strand to SEQ ID NO: 1511652
caucccagggacaagaaua

SEQ ID NO: 1511654 - RNA, 19 nt, Artificial Sequence
  Description of Artificial Sequence: Synthetic oligonucleotide
  Sense strand starting at position 2560 of SEQ ID NO: 1244745
auucuugucccugggaugu

SEQ ID NO: 1511655 - RNA, 19 nt, Artificial Sequence
  Description of Artificial Sequence: Synthetic oligonucleotide
  Antisense strand to SEQ ID NO: 1511654
acaucccagggacaagaau

SEQ ID NO: 1511656 - RNA, 19 nt, Artificial Sequence
  Description of Artificial Sequence: Synthetic oligonucleotide
  Sense strand starting at position 2655 of SEQ ID NO: 1244745
aggaauggcuguuuauaag

SEQ ID NO: 1511657 - RNA, 19 nt, Artificial Sequence
  Description of Artificial Sequence: Synthetic oligonucleotide
  Antisense strand to SEQ ID NO: 1511656
cuuauaaacagccauuccu

SEQ ID NO: 1511658 - RNA, 19 nt, Artificial Sequence
  Description of Artificial Sequence: Synthetic oligonucleotide
  Sense strand starting at position 2886 of SEQ ID NO: 1244745
cugcgucucccuggcuaaa

SEQ ID NO: 1511659 - RNA, 19 nt, Artificial Sequence
  Description of Artificial Sequence: Synthetic oligonucleotide
  Antisense strand to SEQ ID NO: 1511658
uuuagccagggagacgcag

SEQ ID NO: 1511660 - RNA, 19 nt, Artificial Sequence
  Description of Artificial Sequence: Synthetic oligonucleotide
  Sense strand starting at position 2926 of SEQ ID NO: 1244745
acggguugaugaugggaca

SEQ ID NO: 1511661 - RNA, 19 nt, Artificial Sequence
  Description of Artificial Sequence: Synthetic oligonucleotide
  Antisense strand to SEQ ID NO: 1511660
ugucccaucaucaacccgu

SEQ ID NO: 1511662 - RNA, 19 nt, Artificial Sequence
  Description of Artificial Sequence: Synthetic oligonucleotide
  Sense strand starting at position 2929 of SEQ ID NO: 1244745
gguugaugaugggacauau

SEQ ID NO: 1511663 - RNA, 19 nt, Artificial Sequence
  Description of Artificial Sequence: Synthetic oligonucleotide
  Antisense strand to SEQ ID NO: 1511662
auaugucccaucaucaacc

SEQ ID NO: 1511664 - RNA, 19 nt, Artificial Sequence
  Description of Artificial Sequence: Synthetic oligonucleotide
  Sense strand starting at position 2939 of SEQ ID NO: 1244745
gggacauauuacuacacag

SEQ ID NO: 1511665 - RNA, 19 nt, Artificial Sequence
  Description of Artificial Sequence: Synthetic oligonucleotide
  Antisense strand to SEQ ID NO: 1511664
cuguguaguaauauguccc

SEQ ID NO: 1511666 - RNA, 19 nt, Artificial Sequence
  Description of Artificial Sequence: Synthetic oligonucleotide
  Sense strand starting at position 2964 of SEQ ID NO: 1244745
cugccuuagcaaugcaaau

SEQ ID NO: 1511667 - RNA, 19 nt, Artificial Sequence
  Description of Artificial Sequence: Synthetic oligonucleotide
  Antisense strand to SEQ ID NO: 1511666
auuugcauugcuaaggcag

SEQ ID NO: 1511668 - RNA, 19 nt, Artificial Sequence
  Description of Artificial Sequence: Synthetic oligonucleotide
  Sense strand starting at position 3012 of SEQ ID NO: 1244745
gcggucacagaguauacuu

SEQ ID NO: 1511669 - RNA, 19 nt, Artificial Sequence
  Description of Artificial Sequence: Synthetic oligonucleotide
  Antisense strand to SEQ ID NO: 1511668
aaguauacucugugaccgc

SEQ ID NO: 1511670 - RNA, 19 nt, Artificial Sequence
  Description of Artificial Sequence: Synthetic oligonucleotide
  Sense strand starting at position 3020 of SEQ ID NO: 1244745
agaguauacuuagggaaau

SEQ ID NO: 1511671 - RNA, 19 nt, Artificial Sequence
  Description of Artificial Sequence: Synthetic oligonucleotide
  Antisense strand to SEQ ID NO: 1511670
auuucccuaaguauacucu

SEQ ID NO: 1511672 - RNA, 19 nt, Artificial Sequence
  Description of Artificial Sequence: Synthetic oligonucleotide
  Sense strand starting at position 3021 of SEQ ID NO: 1244745
gaguauacuuagggaaauc

SEQ ID NO: 1511673 - RNA, 19 nt, Artificial Sequence
  Description of Artificial Sequence: Synthetic oligonucleotide
  Antisense strand to SEQ ID NO: 1511672
gauuucccuaaguauacuc

SEQ ID NO: 1511674 - RNA, 19 nt, Artificial Sequence
  Description of Artificial Sequence: Synthetic oligonucleotide
  Sense strand starting at position 3114 of SEQ ID NO: 1244745
acagcuuguugcuccuaga

SEQ ID NO: 1511675 - RNA, 19 nt, Artificial Sequence
  Description of Artificial Sequence: Synthetic oligonucleotide
  Antisense strand to SEQ ID NO: 1511674
ucuaggagcaacaagcugu

SEQ ID NO: 1511676 - RNA, 19 nt, Artificial Sequence
  Description of Artificial Sequence: Synthetic oligonucleotide
  Sense strand starting at position 3148 of SEQ ID NO: 1244745
ucacguuacuguccugagu

SEQ ID NO: 1511677 - RNA, 19 nt, Artificial Sequence
  Description of Artificial Sequence: Synthetic oligonucleotide
  Antisense strand to SEQ ID NO: 1511676
acucaggacaguaacguga

SEQ ID NO: 1511678 - RNA, 19 nt, Artificial Sequence
  Description of Artificial Sequence: Synthetic oligonucleotide
  Sense strand starting at position 3167 of SEQ ID NO: 1244745
accguaugcaguuguaaca

SEQ ID NO: 1511679 - RNA, 19 nt, Artificial Sequence
  Description of Artificial Sequence: Synthetic oligonucleotide
  Antisense strand to SEQ ID NO: 1511678
uguuacaacugcauacggu

SEQ ID NO: 1511680 - RNA, 19 nt, Artificial Sequence
  Description of Artificial Sequence: Synthetic oligonucleotide
  Sense strand starting at position 3233 of SEQ ID NO: 1244745
guagaaauacaguguuaga

SEQ ID NO: 1511681 - RNA, 19 nt, Artificial Sequence
  Description of Artificial Sequence: Synthetic oligonucleotide
  Antisense strand to SEQ ID NO: 1511680
ucuaacacuguauuucuac

SEQ ID NO: 1511682 - RNA, 19 nt, Artificial Sequence
  Description of Artificial Sequence: Synthetic oligonucleotide
  Sense strand starting at position 3236 of SEQ ID NO: 1244745
gaaauacaguguuagaauc

SEQ ID NO: 1511683 - RNA, 19 nt, Artificial Sequence
  Description of Artificial Sequence: Synthetic oligonucleotide
  Antisense strand to SEQ ID NO: 1511682
gauucuaacacuguauuuc

SEQ ID NO: 1511684 - RNA, 19 nt, Artificial Sequence
  Description of Artificial Sequence: Synthetic oligonucleotide
  Sense strand starting at position 3371 of SEQ ID NO: 1244745
ccaucuuacugacgggaau

SEQ ID NO: 1511685 - RNA, 19 nt, Artificial Sequence
  Description of Artificial Sequence: Synthetic oligonucleotide
  Antisense strand to SEQ ID NO: 1511684
auucccgucaguaagaugg

SEQ ID NO: 1511686 - RNA, 19 nt, Artificial Sequence
  Description of Artificial Sequence: Synthetic oligonucleotide
  Sense strand starting at position 3383 of SEQ ID NO: 1244745
cgggaaugcaugggcuuua

SEQ ID NO: 1511687 - RNA, 19 nt, Artificial Sequence
  Description of Artificial Sequence: Synthetic oligonucleotide
  Antisense strand to SEQ ID NO: 1511686
uaaagcccaugcauucccg

SEQ ID NO: 1511688 - RNA, 19 nt, Artificial Sequence
  Description of Artificial Sequence: Synthetic oligonucleotide
  Sense strand starting at position 3538 of SEQ ID NO: 1244745
ccauguguuacgugaccuu

SEQ ID NO: 1511689 - RNA, 19 nt, Artificial Sequence
  Description of Artificial Sequence: Synthetic oligonucleotide
  Antisense strand to SEQ ID NO: 1511688
aaggucacguaacacaugg

SEQ ID NO: 1511690 - RNA, 19 nt, Artificial Sequence
  Description of Artificial Sequence: Synthetic oligonucleotide
  Sense strand starting at position 3547 of SEQ ID NO: 1244745
acgugaccuugggaaaguu

SEQ ID NO: 1511691 - RNA, 19 nt, Artificial Sequence
  Description of Artificial Sequence: Synthetic oligonucleotide
  Antisense strand to SEQ ID NO: 1511690
aacuuucccaaggucacgu

SEQ ID NO: 1511692 - RNA, 19 nt, Artificial Sequence
  Description of Artificial Sequence: Synthetic oligonucleotide
  Sense strand starting at position 3556 of SEQ ID NO: 1244745
ugggaaaguugguucaccu

SEQ ID NO: 1511693 - RNA, 19 nt, Artificial Sequence
  Description of Artificial Sequence: Synthetic oligonucleotide
  Antisense strand to SEQ ID NO: 1511692
aggugaaccaacuuuccca

SEQ ID NO: 1511694 - RNA, 19 nt, Artificial Sequence
  Description of Artificial Sequence: Synthetic oligonucleotide
  Sense strand starting at position 3671 of SEQ ID NO: 1244745
ggcagugcucgcucagcua

SEQ ID NO: 1511695 - RNA, 19 nt, Artificial Sequence
  Description of Artificial Sequence: Synthetic oligonucleotide
  Antisense strand to SEQ ID NO: 1511694
uagcugagcgagcacugcc

SEQ ID NO: 1511696 - RNA, 19 nt, Artificial Sequence
  Description of Artificial Sequence: Synthetic oligonucleotide
  Sense strand starting at position 215 of SEQ ID NO: 1244746
uguaaaugguguuucgaga

SEQ ID NO: 1511697 - RNA, 19 nt, Artificial Sequence
  Description of Artificial Sequence: Synthetic oligonucleotide
  Antisense strand to SEQ ID NO: 1511696
ucucgaaacaccauuuaca

SEQ ID NO: 1511698 - RNA, 19 nt, Artificial Sequence
  Description of Artificial Sequence: Synthetic oligonucleotide
  Sense strand starting at position 252 of SEQ ID NO: 1244746
uacccuaauccuugagggu

SEQ ID NO: 1511699 - RNA, 19 nt, Artificial Sequence
  Description of Artificial Sequence: Synthetic oligonucleotide
  Antisense strand to SEQ ID NO: 1511698
acccucaaggauuagggua

SEQ ID NO: 1511700 - RNA, 19 nt, Artificial Sequence
  Description of Artificial Sequence: Synthetic oligonucleotide
  Sense strand starting at position 253 of SEQ ID NO: 1244746
acccuaauccuugaggguu

SEQ ID NO: 1511701 - RNA, 19 nt, Artificial Sequence
  Description of Artificial Sequence: Synthetic oligonucleotide
  Antisense strand to SEQ ID NO: 1511700
aacccucaaggauuagggu

SEQ ID NO: 1511702 - RNA, 19 nt, Artificial Sequence
  Description of Artificial Sequence: Synthetic oligonucleotide
  Sense strand starting at position 277 of SEQ ID NO: 1244746
agauuuaccugagggaguc

SEQ ID NO: 1511703 - RNA, 19 nt, Artificial Sequence
  Description of Artificial Sequence: Synthetic oligonucleotide
  Antisense strand to SEQ ID NO: 1511702
gacucccucagguaaaucu

SEQ ID NO: 1511704 - RNA, 19 nt, Artificial Sequence
  Description of Artificial Sequence: Synthetic oligonucleotide
  Sense strand starting at position 330 of SEQ ID NO: 1244746
cuaacuaggccauagagua

SEQ ID NO: 1511705 - RNA, 19 nt, Artificial Sequence
  Description of Artificial Sequence: Synthetic oligonucleotide
  Antisense strand to SEQ ID NO: 1511704
uacucuauggccuaguuag

SEQ ID NO: 1511706 - RNA, 19 nt, Artificial Sequence
  Description of Artificial Sequence: Synthetic oligonucleotide
  Sense strand starting at position 369 of SEQ ID NO: 1244746
caucccggucaaugagaau

SEQ ID NO: 1511707 - RNA, 19 nt, Artificial Sequence
  Description of Artificial Sequence: Synthetic oligonucleotide
  Antisense strand to SEQ ID NO: 1511706
auucucauugaccgggaug

SEQ ID NO: 1511708 - RNA, 19 nt, Artificial Sequence
  Description of Artificial Sequence: Synthetic oligonucleotide
  Sense strand starting at position 380 of SEQ ID NO: 1244746
augagaauagcaugugcaa

SEQ ID NO: 1511709 - RNA, 19 nt, Artificial Sequence
  Description of Artificial Sequence: Synthetic oligonucleotide
  Antisense strand to SEQ ID NO: 1511708
uugcacaugcuauucucau

SEQ ID NO: 1511710 - RNA, 19 nt, Artificial Sequence
  Description of Artificial Sequence: Synthetic oligonucleotide
  Sense strand starting at position 553 of SEQ ID NO: 1244746
gguggcucuaucuggauua

SEQ ID NO: 1511711 - RNA, 19 nt, Artificial Sequence
  Description of Artificial Sequence: Synthetic oligonucleotide
  Antisense strand to SEQ ID NO: 1511710
uaauccagauagagccacc

SEQ ID NO: 1511712 - RNA, 19 nt, Artificial Sequence
  Description of Artificial Sequence: Synthetic oligonucleotide
  Sense strand starting at position 555 of SEQ ID NO: 1244746
uggcucuaucuggauuaaa

SEQ ID NO: 1511713 - RNA, 19 nt, Artificial Sequence
  Description of Artificial Sequence: Synthetic oligonucleotide
  Antisense strand to SEQ ID NO: 1511712
uuuaauccagauagagcca

SEQ ID NO: 1511714 - RNA, 19 nt, Artificial Sequence
  Description of Artificial Sequence: Synthetic oligonucleotide
  Sense strand starting at position 1473 of SEQ ID NO: 1244746
cuucuuuccugaguagcaa

SEQ ID NO: 1511715 - RNA, 19 nt, Artificial Sequence
  Description of Artificial Sequence: Synthetic oligonucleotide
  Antisense strand to SEQ ID NO: 1511714
uugcuacucaggaaagaag

SEQ ID NO: 1511716 - RNA, 19 nt, Artificial Sequence
  Description of Artificial Sequence: Synthetic oligonucleotide
  Sense strand starting at position 1520 of SEQ ID NO: 1244746
gagaccuacuuggcuagaa

SEQ ID NO: 1511717 - RNA, 19 nt, Artificial Sequence
  Description of Artificial Sequence: Synthetic oligonucleotide
  Antisense strand to SEQ ID NO: 1511716
uucuagccaaguaggucuc

SEQ ID NO: 1511718 - RNA, 19 nt, Artificial Sequence
  Description of Artificial Sequence: Synthetic oligonucleotide
  Sense strand starting at position 1521 of SEQ ID NO: 1244746
agaccuacuuggcuagaau

SEQ ID NO: 1511719 - RNA, 19 nt, Artificial Sequence
  Description of Artificial Sequence: Synthetic oligonucleotide
  Antisense strand to SEQ ID NO: 1511718
auucuagccaaguaggucu

SEQ ID NO: 1511720 - RNA, 19 nt, Artificial Sequence
  Description of Artificial Sequence: Synthetic oligonucleotide
  Sense strand starting at position 1524 of SEQ ID NO: 1244746
ccuacuuggcuagaaucua

SEQ ID NO: 1511721 - RNA, 19 nt, Artificial Sequence
  Description of Artificial Sequence: Synthetic oligonucleotide
  Antisense strand to SEQ ID NO: 1511720
uagauucuagccaaguagg

SEQ ID NO: 1511722 - RNA, 19 nt, Artificial Sequence
  Description of Artificial Sequence: Synthetic oligonucleotide
  Sense strand starting at position 1552 of SEQ ID NO: 1244746
augauagagucucccuguu

SEQ ID NO: 1511723 - RNA, 19 nt, Artificial Sequence
  Description of Artificial Sequence: Synthetic oligonucleotide
  Antisense strand to SEQ ID NO: 1511722
aacagggagacucuaucau

SEQ ID NO: 1511724 - RNA, 19 nt, Artificial Sequence
  Description of Artificial Sequence: Synthetic oligonucleotide
  Sense strand starting at position 1688 of SEQ ID NO: 1244746
uuaggaguccucuagaagc

SEQ ID NO: 1511725 - RNA, 19 nt, Artificial Sequence
  Description of Artificial Sequence: Synthetic oligonucleotide
  Antisense strand to SEQ ID NO: 1511724
gcuucuagaggacuccuaa

SEQ ID NO: 1511726 - RNA, 19 nt, Artificial Sequence
  Description of Artificial Sequence: Synthetic oligonucleotide
  Sense strand starting at position 1771 of SEQ ID NO: 1244746
gagccauuaccugauucug

SEQ ID NO: 1511727 - RNA, 19 nt, Artificial Sequence
  Description of Artificial Sequence: Synthetic oligonucleotide
  Antisense strand to SEQ ID NO: 1511726
cagaaucagguaauggcuc

SEQ ID NO: 1511728 - RNA, 19 nt, Artificial Sequence
  Description of Artificial Sequence: Synthetic oligonucleotide
  Sense strand starting at position 2676 of SEQ ID NO: 1244746
gguaaagaucuaggagcuu

SEQ ID NO: 1511729 - RNA, 19 nt, Artificial Sequence
  Description of Artificial Sequence: Synthetic oligonucleotide
  Antisense strand to SEQ ID NO: 1511728
aagcuccuagaucuuuacc

SEQ ID NO: 1511730 - RNA, 19 nt, Artificial Sequence
  Description of Artificial Sequence: Synthetic oligonucleotide
  Sense strand starting at position 2818 of SEQ ID NO: 1244746
gaggcagauuuagaacagu

SEQ ID NO: 1511731 - RNA, 19 nt, Artificial Sequence
  Description of Artificial Sequence: Synthetic oligonucleotide
  Antisense strand to SEQ ID NO: 1511730
acuguucuaaaucugccuc

SEQ ID NO: 1511732 - RNA, 19 nt, Artificial Sequence
  Description of Artificial Sequence: Synthetic oligonucleotide
  Sense strand starting at position 2827 of SEQ ID NO: 1244746
uuagaacagucguucuuaa

SEQ ID NO: 1511733 - RNA, 19 nt, Artificial Sequence
  Description of Artificial Sequence: Synthetic oligonucleotide
  Antisense strand to SEQ ID NO: 1511732
uuaagaacgacuguucuaa

SEQ ID NO: 1511734 - RNA, 19 nt, Artificial Sequence
  Description of Artificial Sequence: Synthetic oligonucleotide
  Sense strand starting at position 2895 of SEQ ID NO: 1244746
gugugaaacuuacugacua

SEQ ID NO: 1511735 - RNA, 19 nt, Artificial Sequence
  Description of Artificial Sequence: Synthetic oligonucleotide
  Antisense strand to SEQ ID NO: 1511734
uagucaguaaguuucacac

SEQ ID NO: 1511736 - RNA, 19 nt, Artificial Sequence
  Description of Artificial Sequence: Synthetic oligonucleotide
  Sense strand starting at position 2971 of SEQ ID NO: 1244746
cgugcagcuccgucaguua

SEQ ID NO: 1511737 - RNA, 19 nt, Artificial Sequence
  Description of Artificial Sequence: Synthetic oligonucleotide
  Antisense strand to SEQ ID NO: 1511736
uaacugacggagcugcacg

SEQ ID NO: 1511738 - RNA, 19 nt, Artificial Sequence
  Description of Artificial Sequence: Synthetic oligonucleotide
  Sense strand starting at position 2989 of SEQ ID NO: 1244746
aagucagaugcuuaucaag

SEQ ID NO: 1511739 - RNA, 19 nt, Artificial Sequence
  Description of Artificial Sequence: Synthetic oligonucleotide
  Antisense strand to SEQ ID NO: 1511738
cuugauaagcaucugacuu

SEQ ID NO: 1511740 - RNA, 19 nt, Artificial Sequence
  Description of Artificial Sequence: Synthetic oligonucleotide
  Sense strand starting at position 2991 of SEQ ID NO: 1244746
gucagaugcuuaucaagag

SEQ ID NO: 1511741 - RNA, 19 nt, Artificial Sequence
  Description of Artificial Sequence: Synthetic oligonucleotide
  Antisense strand to SEQ ID NO: 1511740
cucuugauaagcaucugac

SEQ ID NO: 1511742 - RNA, 19 nt, Artificial Sequence
  Description of Artificial Sequence: Synthetic oligonucleotide
  Sense strand starting at position 2995 of SEQ ID NO: 1244746
gaugcuuaucaagagucaa

SEQ ID NO: 1511743 - RNA, 19 nt, Artificial Sequence
  Description of Artificial Sequence: Synthetic oligonucleotide
  Antisense strand to SEQ ID NO: 1511742
uugacucuugauaagcauc

SEQ ID NO: 1511744 - RNA, 19 nt, Artificial Sequence
  Description of Artificial Sequence: Synthetic oligonucleotide
  Sense strand starting at position 3145 of SEQ ID NO: 1244746
gguuaaauaacuuagccga

SEQ ID NO: 1511745 - RNA, 19 nt, Artificial Sequence
  Description of Artificial Sequence: Synthetic oligonucleotide
  Antisense strand to SEQ ID NO: 1511744
ucggcuaaguuauuuaacc

SEQ ID NO: 1511746 - RNA, 19 nt, Artificial Sequence
  Description of Artificial Sequence: Synthetic oligonucleotide
  Sense strand starting at position 3178 of SEQ ID NO: 1244746
aaguaacugaguuggaguu

SEQ ID NO: 1511747 - RNA, 19 nt, Artificial Sequence
  Description of Artificial Sequence: Synthetic oligonucleotide
  Antisense strand to SEQ ID NO: 1511746
aacuccaacucaguuacuu

SEQ ID NO: 1511748 - RNA, 19 nt, Artificial Sequence
  Description of Artificial Sequence: Synthetic oligonucleotide
  Sense strand starting at position 3282 of SEQ ID NO: 1244746
ccuauugacuacuuuggga

SEQ ID NO: 1511749 - RNA, 19 nt, Artificial Sequence
  Description of Artificial Sequence: Synthetic oligonucleotide
  Antisense strand to SEQ ID NO: 1511748
ucccaaaguagucaauagg

SEQ ID NO: 1511750 - RNA, 19 nt, Artificial Sequence
  Description of Artificial Sequence: Synthetic oligonucleotide
  Sense strand starting at position 3289 of SEQ ID NO: 1244746
acuacuuugggaugacuuu

SEQ ID NO: 1511751 - RNA, 19 nt, Artificial Sequence
  Description of Artificial Sequence: Synthetic oligonucleotide
  Antisense strand to SEQ ID NO: 1511750
aaagucaucccaaaguagu

SEQ ID NO: 1511752 - RNA, 19 nt, Artificial Sequence
  Description of Artificial Sequence: Synthetic oligonucleotide
  Sense strand starting at position 3315 of SEQ ID NO: 1244746
cucagauaauguuccuguu

SEQ ID NO: 1511753 - RNA, 19 nt, Artificial Sequence
  Description of Artificial Sequence: Synthetic oligonucleotide
  Antisense strand to SEQ ID NO: 1511752
aacaggaacauuaucugag

SEQ ID NO: 1511754 - RNA, 19 nt, Artificial Sequence
  Description of Artificial Sequence: Synthetic oligonucleotide
  Sense strand starting at position 3317 of SEQ ID NO: 1244746
cagauaauguuccuguuga

SEQ ID NO: 1511755 - RNA, 19 nt, Artificial Sequence
  Description of Artificial Sequence: Synthetic oligonucleotide
  Antisense strand to SEQ ID NO: 1511754
ucaacaggaacauuaucug

SEQ ID NO: 1511756 - RNA, 19 nt, Artificial Sequence
  Description of Artificial Sequence: Synthetic oligonucleotide
  Sense strand starting at position 3440 of SEQ ID NO: 1244746
uuuguucugcuuuaaagaa

SEQ ID NO: 1511757 - RNA, 19 nt, Artificial Sequence
  Description of Artificial Sequence: Synthetic oligonucleotide
  Antisense strand to SEQ ID NO: 1511756
uucuuuaaagcagaacaaa

SEQ ID NO: 1511758 - RNA, 19 nt, Artificial Sequence
  Description of Artificial Sequence: Synthetic oligonucleotide
  Sense strand starting at position 3594 of SEQ ID NO: 1244746
aaagguguauguuuccauu

SEQ ID NO: 1511759 - RNA, 19 nt, Artificial Sequence
  Description of Artificial Sequence: Synthetic oligonucleotide
  Antisense strand to SEQ ID NO: 1511758
aauggaaacauacaccuuu

SEQ ID NO: 1511760 - RNA, 19 nt, Artificial Sequence
  Description of Artificial Sequence: Synthetic oligonucleotide
  Sense strand starting at position 3596 of SEQ ID NO: 1244746
agguguauguuuccauuua

SEQ ID NO: 1511761 - RNA, 19 nt, Artificial Sequence
  Description of Artificial Sequence: Synthetic oligonucleotide
  Antisense strand to SEQ ID NO: 1511760
uaaauggaaacauacaccu

SEQ ID NO: 1511762 - RNA, 19 nt, Artificial Sequence
  Description of Artificial Sequence: Synthetic oligonucleotide
  Sense strand starting at position 3607 of SEQ ID NO: 1244746
uccauuuaaugugagauau

SEQ ID NO: 1511763 - RNA, 19 nt, Artificial Sequence
  Description of Artificial Sequence: Synthetic oligonucleotide
  Antisense strand to SEQ ID NO: 1511762
auaucucacauuaaaugga

SEQ ID NO: 1511764 - RNA, 19 nt, Artificial Sequence
  Description of Artificial Sequence: Synthetic oligonucleotide
  Sense strand starting at position 3632 of SEQ ID NO: 1244746
aaguaauagauguguagag

SEQ ID NO: 1511765 - RNA, 19 nt, Artificial Sequence
  Description of Artificial Sequence: Synthetic oligonucleotide
  Antisense strand to SEQ ID NO: 1511764
cucuacacaucuauuacuu

SEQ ID NO: 1511766 - RNA, 19 nt, Artificial Sequence
  Description of Artificial Sequence: Synthetic oligonucleotide
  Sense strand starting at position 3633 of SEQ ID NO: 1244746
aguaauagauguguagaga

SEQ ID NO: 1511767 - RNA, 19 nt, Artificial Sequence
  Description of Artificial Sequence: Synthetic oligonucleotide
  Antisense strand to SEQ ID NO: 1511766
ucucuacacaucuauuacu

SEQ ID NO: 1511768 - RNA, 19 nt, Artificial Sequence
  Description of Artificial Sequence: Synthetic oligonucleotide
  Sense strand starting at position 3647 of SEQ ID NO: 1244746
agagaacuuagguguucuu

SEQ ID NO: 1511769 - RNA, 19 nt, Artificial Sequence
  Description of Artificial Sequence: Synthetic oligonucleotide
  Antisense strand to SEQ ID NO: 1511768
aagaacaccuaaguucucu

SEQ ID NO: 1511770 - RNA, 19 nt, Artificial Sequence
  Description of Artificial Sequence: Synthetic oligonucleotide
  Sense strand starting at position 3650 of SEQ ID NO: 1244746
gaacuuagguguucuuuaa

SEQ ID NO: 1511771 - RNA, 19 nt, Artificial Sequence
  Description of Artificial Sequence: Synthetic oligonucleotide
  Antisense strand to SEQ ID NO: 1511770
uuaaagaacaccuaaguuc

SEQ ID NO: 1511772 - RNA, 19 nt, Artificial Sequence
  Description of Artificial Sequence: Synthetic oligonucleotide
  Sense strand starting at position 3654 of SEQ ID NO: 1244746
uuagguguucuuuaacaaa

SEQ ID NO: 1511773 - RNA, 19 nt, Artificial Sequence
  Description of Artificial Sequence: Synthetic oligonucleotide
  Antisense strand to SEQ ID NO: 1511772
uuuguuaaagaacaccuaa

SEQ ID NO: 1511774 - RNA, 19 nt, Artificial Sequence
  Description of Artificial Sequence: Synthetic oligonucleotide
  Sense strand starting at position 3933 of SEQ ID NO: 1244746
cuuguauccguggcuuuau

SEQ ID NO: 1511775 - RNA, 19 nt, Artificial Sequence
  Description of Artificial Sequence: Synthetic oligonucleotide
  Antisense strand to SEQ ID NO: 1511774
auaaagccacggauacaag

SEQ ID NO: 1511776 - RNA, 19 nt, Artificial Sequence
  Description of Artificial Sequence: Synthetic oligonucleotide
  Sense strand starting at position 22 of SEQ ID NO: 1244747
cucucuuuguguguacaca

SEQ ID NO: 1511777 - RNA, 19 nt, Artificial Sequence
  Description of Artificial Sequence: Synthetic oligonucleotide
  Antisense strand to SEQ ID NO: 1511776
uguguacacacaaagagag

SEQ ID NO: 1511778 - RNA, 19 nt, Artificial Sequence
  Description of Artificial Sequence: Synthetic oligonucleotide
  Sense strand starting at position 95 of SEQ ID NO: 1244747
cugcuaugagcagacaaau

SEQ ID NO: 1511779 - RNA, 19 nt, Artificial Sequence
  Description of Artificial Sequence: Synthetic oligonucleotide
  Antisense strand to SEQ ID NO: 1511778
auuugucugcucauagcag

SEQ ID NO: 1511780 - RNA, 19 nt, Artificial Sequence
  Description of Artificial Sequence: Synthetic oligonucleotide
  Sense strand starting at position 169 of SEQ ID NO: 1244747
gcacgugugagcucacagu

SEQ ID NO: 1511781 - RNA, 19 nt, Artificial Sequence
  Description of Artificial Sequence: Synthetic oligonucleotide
  Antisense strand to SEQ ID NO: 1511780
acugugagcucacacgugc

SEQ ID NO: 1511782 - RNA, 19 nt, Artificial Sequence
  Description of Artificial Sequence: Synthetic oligonucleotide
  Sense strand starting at position 175 of SEQ ID NO: 1244747
gugagcucacaguggugau

SEQ ID NO: 1511783 - RNA, 19 nt, Artificial Sequence
  Description of Artificial Sequence: Synthetic oligonucleotide
  Antisense strand to SEQ ID NO: 1511782
aucaccacugugagcucac

SEQ ID NO: 1511784 - RNA, 19 nt, Artificial Sequence
  Description of Artificial Sequence: Synthetic oligonucleotide
  Sense strand starting at position 176 of SEQ ID NO: 1244747
ugagcucacaguggugauu

SEQ ID NO: 1511785 - RNA, 19 nt, Artificial Sequence
  Description of Artificial Sequence: Synthetic oligonucleotide
  Antisense strand to SEQ ID NO: 1511784
aaucaccacugugagcuca

SEQ ID NO: 1511786 - RNA, 19 nt, Artificial Sequence
  Description of Artificial Sequence: Synthetic oligonucleotide
  Sense strand starting at position 209 of SEQ ID NO: 1244747
cguagagugucauguucau

SEQ ID NO: 1511787 - RNA, 19 nt, Artificial Sequence
  Description of Artificial Sequence: Synthetic oligonucleotide
  Antisense strand to SEQ ID NO: 1511786
augaacaugacacucuacg

SEQ ID NO: 1511788 - RNA, 19 nt, Artificial Sequence
  Description of Artificial Sequence: Synthetic oligonucleotide
  Sense strand starting at position 235 of SEQ ID NO: 1244747
acuuaaguguauccacauu

SEQ ID NO: 1511789 - RNA, 19 nt, Artificial Sequence
  Description of Artificial Sequence: Synthetic oligonucleotide
  Antisense strand to SEQ ID NO: 1511788
aauguggauacacuuaagu

SEQ ID NO: 1511790 - RNA, 19 nt, Artificial Sequence
  Description of Artificial Sequence: Synthetic oligonucleotide
  Sense strand starting at position 289 of SEQ ID NO: 1244747
ggguucugcuaccaugaca

SEQ ID NO: 1511791 - RNA, 19 nt, Artificial Sequence
  Description of Artificial Sequence: Synthetic oligonucleotide
  Antisense strand to SEQ ID NO: 1511790
ugucaugguagcagaaccc

SEQ ID NO: 1511792 - RNA, 19 nt, Artificial Sequence
  Description of Artificial Sequence: Synthetic oligonucleotide
  Sense strand starting at position 539 of SEQ ID NO: 1244747
gcuaacuacuguguuugga

SEQ ID NO: 1511793 - RNA, 19 nt, Artificial Sequence
  Description of Artificial Sequence: Synthetic oligonucleotide
  Antisense strand to SEQ ID NO: 1511792
uccaaacacaguaguuagc

SEQ ID NO: 1511794 - RNA, 19 nt, Artificial Sequence
  Description of Artificial Sequence: Synthetic oligonucleotide
  Sense strand starting at position 769 of SEQ ID NO: 1244747
gcacaugccugaucaggau

SEQ ID NO: 1511795 - RNA, 19 nt, Artificial Sequence
  Description of Artificial Sequence: Synthetic oligonucleotide
  Antisense strand to SEQ ID NO: 1511794
auccugaucaggcaugugc

SEQ ID NO: 1511796 - RNA, 19 nt, Artificial Sequence
  Description of Artificial Sequence: Synthetic oligonucleotide
  Sense strand starting at position 1066 of SEQ ID NO: 1244747
gggccugaguucucaaucu

SEQ ID NO: 1511797 - RNA, 19 nt, Artificial Sequence
  Description of Artificial Sequence: Synthetic oligonucleotide
  Antisense strand to SEQ ID NO: 1511796
agauugagaacucaggccc

SEQ ID NO: 1511798 - RNA, 19 nt, Artificial Sequence
  Description of Artificial Sequence: Synthetic oligonucleotide
  Sense strand starting at position 1073 of SEQ ID NO: 1244747
aguucucaaucugaguuaa

SEQ ID NO: 1511799 - RNA, 19 nt, Artificial Sequence
  Description of Artificial Sequence: Synthetic oligonucleotide
  Antisense strand to SEQ ID NO: 1511798
uuaacucagauugagaacu

SEQ ID NO: 1511800 - RNA, 19 nt, Artificial Sequence
  Description of Artificial Sequence: Synthetic oligonucleotide
  Sense strand starting at position 1104 of SEQ ID NO: 1244747
gccgucaggccucagugaa

SEQ ID NO: 1511801 - RNA, 19 nt, Artificial Sequence
  Description of Artificial Sequence: Synthetic oligonucleotide
  Antisense strand to SEQ ID NO: 1511800
uucacugaggccugacggc

SEQ ID NO: 1511802 - RNA, 19 nt, Artificial Sequence
  Description of Artificial Sequence: Synthetic oligonucleotide
  Sense strand starting at position 1247 of SEQ ID NO: 1244747
guugaugucaugggacaga

SEQ ID NO: 1511803 - RNA, 19 nt, Artificial Sequence
  Description of Artificial Sequence: Synthetic oligonucleotide
  Antisense strand to SEQ ID NO: 1511802
ucugucccaugacaucaac

SEQ ID NO: 1511804 - RNA, 19 nt, Artificial Sequence
  Description of Artificial Sequence: Synthetic oligonucleotide
  Sense strand starting at position 2335 of SEQ ID NO: 1244747
cggagacucccgggcuaau

SEQ ID NO: 1511805 - RNA, 19 nt, Artificial Sequence
  Description of Artificial Sequence: Synthetic oligonucleotide
  Antisense strand to SEQ ID NO: 1511804
auuagcccgggagucuccg

SEQ ID NO: 1511806 - RNA, 19 nt, Artificial Sequence
  Description of Artificial Sequence: Synthetic oligonucleotide
  Sense strand starting at position 2549 of SEQ ID NO: 1244747
aguccuacucuguauagca

SEQ ID NO: 1511807 - RNA, 19 nt, Artificial Sequence
  Description of Artificial Sequence: Synthetic oligonucleotide
  Antisense strand to SEQ ID NO: 1511806
ugcuauacagaguaggacu

SEQ ID NO: 1511808 - RNA, 19 nt, Artificial Sequence
  Description of Artificial Sequence: Synthetic oligonucleotide
  Sense strand starting at position 2565 of SEQ ID NO: 1244747
gcaagaucuucgugcccuu

SEQ ID NO: 1511809 - RNA, 19 nt, Artificial Sequence
  Description of Artificial Sequence: Synthetic oligonucleotide
  Antisense strand to SEQ ID NO: 1511808
aagggcacgaagaucuugc

SEQ ID NO: 1511810 - RNA, 19 nt, Artificial Sequence
  Description of Artificial Sequence: Synthetic oligonucleotide
  Sense strand starting at position 2584 of SEQ ID NO: 1244747
cccacuaguggucgguaga

SEQ ID NO: 1511811 - RNA, 19 nt, Artificial Sequence
  Description of Artificial Sequence: Synthetic oligonucleotide
  Antisense strand to SEQ ID NO: 1511810
ucuaccgaccacuaguggg

SEQ ID NO: 1511812 - RNA, 19 nt, Artificial Sequence
  Description of Artificial Sequence: Synthetic oligonucleotide
  Sense strand starting at position 2878 of SEQ ID NO: 1244747
ggaaacagguguugcuuua

SEQ ID NO: 1511813 - RNA, 19 nt, Artificial Sequence
  Description of Artificial Sequence: Synthetic oligonucleotide
  Antisense strand to SEQ ID NO: 1511812
uaaagcaacaccuguuucc

SEQ ID NO: 1511814 - RNA, 19 nt, Artificial Sequence
  Description of Artificial Sequence: Synthetic oligonucleotide
  Sense strand starting at position 2884 of SEQ ID NO: 1244747
agguguugcuuuaggacga

SEQ ID NO: 1511815 - RNA, 19 nt, Artificial Sequence
  Description of Artificial Sequence: Synthetic oligonucleotide
  Antisense strand to SEQ ID NO: 1511814
ucguccuaaagcaacaccu

SEQ ID NO: 1511816 - RNA, 19 nt, Artificial Sequence
  Description of Artificial Sequence: Synthetic oligonucleotide
  Sense strand starting at position 2885 of SEQ ID NO: 1244747
gguguugcuuuaggacgau

SEQ ID NO: 1511817 - RNA, 19 nt, Artificial Sequence
  Description of Artificial Sequence: Synthetic oligonucleotide
  Antisense strand to SEQ ID NO: 1511816
aucguccuaaagcaacacc

SEQ ID NO: 1511818 - RNA, 19 nt, Artificial Sequence
  Description of Artificial Sequence: Synthetic oligonucleotide
  Sense strand starting at position 2933 of SEQ ID NO: 1244747
uucgcuauaucauaaagcu

SEQ ID NO: 1511819 - RNA, 19 nt, Artificial Sequence
  Description of Artificial Sequence: Synthetic oligonucleotide
  Antisense strand to SEQ ID NO: 1511818
agcuuuaugauauagcgaa

SEQ ID NO: 1511820 - RNA, 19 nt, Artificial Sequence
  Description of Artificial Sequence: Synthetic oligonucleotide
  Sense strand starting at position 3274 of SEQ ID NO: 1244747
ggagccuuccagcaauuau

SEQ ID NO: 1511821 - RNA, 19 nt, Artificial Sequence
  Description of Artificial Sequence: Synthetic oligonucleotide
  Antisense strand to SEQ ID NO: 1511820
auaauugcuggaaggcucc

SEQ ID NO: 1511822 - RNA, 19 nt, Artificial Sequence
  Description of Artificial Sequence: Synthetic oligonucleotide
  Sense strand starting at position 3319 of SEQ ID NO: 1244747
gugugcaugcugcauauau

SEQ ID NO: 1511823 - RNA, 19 nt, Artificial Sequence
  Description of Artificial Sequence: Synthetic oligonucleotide
  Antisense strand to SEQ ID NO: 1511822
auauaugcagcaugcacac

SEQ ID NO: 1511824 - RNA, 19 nt, Artificial Sequence
  Description of Artificial Sequence: Synthetic oligonucleotide
  Sense strand starting at position 3329 of SEQ ID NO: 1244747
ugcauauaugugugagcau

SEQ ID NO: 1511825 - RNA, 19 nt, Artificial Sequence
  Description of Artificial Sequence: Synthetic oligonucleotide
  Antisense strand to SEQ ID NO: 1511824
augcucacacauauaugca

SEQ ID NO: 1511826 - RNA, 19 nt, Artificial Sequence
  Description of Artificial Sequence: Synthetic oligonucleotide
  Sense strand starting at position 3330 of SEQ ID NO: 1244747
gcauauaugugugagcaug

SEQ ID NO: 1511827 - RNA, 19 nt, Artificial Sequence
  Description of Artificial Sequence: Synthetic oligonucleotide
  Antisense strand to SEQ ID NO: 1511826
caugcucacacauauaugc

SEQ ID NO: 1511828 - RNA, 19 nt, Artificial Sequence
  Description of Artificial Sequence: Synthetic oligonucleotide
  Sense strand starting at position 3352 of SEQ ID NO: 1244747
gugcauuccagguagccau

SEQ ID NO: 1511829 - RNA, 19 nt, Artificial Sequence
  Description of Artificial Sequence: Synthetic oligonucleotide
  Antisense strand to SEQ ID NO: 1511828
auggcuaccuggaaugcac

SEQ ID NO: 1511830 - RNA, 19 nt, Artificial Sequence
  Description of Artificial Sequence: Synthetic oligonucleotide
  Sense strand starting at position 3403 of SEQ ID NO: 1244747
gcuuucuccagguggaauc

SEQ ID NO: 1511831 - RNA, 19 nt, Artificial Sequence
  Description of Artificial Sequence: Synthetic oligonucleotide
  Antisense strand to SEQ ID NO: 1511830
gauuccaccuggagaaagc

SEQ ID NO: 1511832 - RNA, 19 nt, Artificial Sequence
  Description of Artificial Sequence: Synthetic oligonucleotide
  Sense strand starting at position 3623 of SEQ ID NO: 1244747
ucuccauccuccgggagaa

SEQ ID NO: 1511833 - RNA, 19 nt, Artificial Sequence
  Description of Artificial Sequence: Synthetic oligonucleotide
  Antisense strand to SEQ ID NO: 1511832
uucucccggaggauggaga

SEQ ID NO: 1511834 - RNA, 19 nt, Artificial Sequence
  Description of Artificial Sequence: Synthetic oligonucleotide
  Sense strand starting at position 3763 of SEQ ID NO: 1244747
uccugagccacaugggaau

SEQ ID NO: 1511835 - RNA, 19 nt, Artificial Sequence
  Description of Artificial Sequence: Synthetic oligonucleotide
  Antisense strand to SEQ ID NO: 1511834
auucccauguggcucagga

SEQ ID NO: 1511836 - RNA, 19 nt, Artificial Sequence
  Description of Artificial Sequence: Synthetic oligonucleotide
  Sense strand starting at position 3926 of SEQ ID NO: 1244747
cagucagaucuccgaguca

SEQ ID NO: 1511837 - RNA, 19 nt, Artificial Sequence
  Description of Artificial Sequence: Synthetic oligonucleotide
  Antisense strand to SEQ ID NO: 1511836
ugacucggagaucugacug

SEQ ID NO: 1511838 - RNA, 19 nt, Artificial Sequence
  Description of Artificial Sequence: Synthetic oligonucleotide
  Sense strand starting at position 3938 of SEQ ID NO: 1244747
cgagucaguagcuggagau

SEQ ID NO: 1511839 - RNA, 19 nt, Artificial Sequence
  Description of Artificial Sequence: Synthetic oligonucleotide
  Antisense strand to SEQ ID NO: 1511838
aucuccagcuacugacucg

SEQ ID NO: 1511840 - RNA, 19 nt, Artificial Sequence
  Description of Artificial Sequence: Synthetic oligonucleotide
  Sense strand starting at position 211 of SEQ ID NO: 1244748
gcacaugccugaucaggau

SEQ ID NO: 1511841 - RNA, 19 nt, Artificial Sequence
  Description of Artificial Sequence: Synthetic oligonucleotide
  Antisense strand to SEQ ID NO: 1511840
auccugaucaggcaugugc

SEQ ID NO: 1511842 - RNA, 19 nt, Artificial Sequence
  Description of Artificial Sequence: Synthetic oligonucleotide
  Sense strand starting at position 508 of SEQ ID NO: 1244748
gggccugaguucucaaucu

SEQ ID NO: 1511843 - RNA, 19 nt, Artificial Sequence
  Description of Artificial Sequence: Synthetic oligonucleotide
  Antisense strand to SEQ ID NO: 1511842
agauugagaacucaggccc

SEQ ID NO: 1511844 - RNA, 19 nt, Artificial Sequence
  Description of Artificial Sequence: Synthetic oligonucleotide
  Sense strand starting at position 515 of SEQ ID NO: 1244748
aguucucaaucugaguuaa

SEQ ID NO: 1511845 - RNA, 19 nt, Artificial Sequence
  Description of Artificial Sequence: Synthetic oligonucleotide
  Antisense strand to SEQ ID NO: 1511844
uuaacucagauugagaacu

SEQ ID NO: 1511846 - RNA, 19 nt, Artificial Sequence
  Description of Artificial Sequence: Synthetic oligonucleotide
  Sense strand starting at position 546 of SEQ ID NO: 1244748
gccgucaggccucagugaa

SEQ ID NO: 1511847 - RNA, 19 nt, Artificial Sequence
  Description of Artificial Sequence: Synthetic oligonucleotide
  Antisense strand to SEQ ID NO: 1511846
uucacugaggccugacggc

SEQ ID NO: 1511848 - RNA, 19 nt, Artificial Sequence
  Description of Artificial Sequence: Synthetic oligonucleotide
  Sense strand starting at position 689 of SEQ ID NO: 1244748
guugaugucaugggacaga

SEQ ID NO: 1511849 - RNA, 19 nt, Artificial Sequence
  Description of Artificial Sequence: Synthetic oligonucleotide
  Antisense strand to SEQ ID NO: 1511848
ucugucccaugacaucaac

SEQ ID NO: 1511850 - RNA, 19 nt, Artificial Sequence
  Description of Artificial Sequence: Synthetic oligonucleotide
  Sense strand starting at position 1777 of SEQ ID NO: 1244748
cggagacucccgggcuaau

SEQ ID NO: 1511851 - RNA, 19 nt, Artificial Sequence
  Description of Artificial Sequence: Synthetic oligonucleotide
  Antisense strand to SEQ ID NO: 1511850
auuagcccgggagucuccg

SEQ ID NO: 1511852 - RNA, 19 nt, Artificial Sequence
  Description of Artificial Sequence: Synthetic oligonucleotide
  Sense strand starting at position 1991 of SEQ ID NO: 1244748
aguccuacucuguauagca

SEQ ID NO: 1511853 - RNA, 19 nt, Artificial Sequence
  Description of Artificial Sequence: Synthetic oligonucleotide
  Antisense strand to SEQ ID NO: 1511852
ugcuauacagaguaggacu

SEQ ID NO: 1511854 - RNA, 19 nt, Artificial Sequence
  Description of Artificial Sequence: Synthetic oligonucleotide
  Sense strand starting at position 2007 of SEQ ID NO: 1244748
gcaagaucuucgugcccuu

SEQ ID NO: 1511855 - RNA, 19 nt, Artificial Sequence
  Description of Artificial Sequence: Synthetic oligonucleotide
  Antisense strand to SEQ ID NO: 1511854
aagggcacgaagaucuugc

SEQ ID NO: 1511856 - RNA, 19 nt, Artificial Sequence
  Description of Artificial Sequence: Synthetic oligonucleotide
  Sense strand starting at position 2026 of SEQ ID NO: 1244748
cccacuaguggucgguaga

SEQ ID NO: 1511857 - RNA, 19 nt, Artificial Sequence
  Description of Artificial Sequence: Synthetic oligonucleotide
  Antisense strand to SEQ ID NO: 1511856
ucuaccgaccacuaguggg

SEQ ID NO: 1511858 - RNA, 19 nt, Artificial Sequence
  Description of Artificial Sequence: Synthetic oligonucleotide
  Sense strand starting at position 2320 of SEQ ID NO: 1244748
ggaaacagguguugcuuua

SEQ ID NO: 1511859 - RNA, 19 nt, Artificial Sequence
  Description of Artificial Sequence: Synthetic oligonucleotide
  Antisense strand to SEQ ID NO: 1511858
uaaagcaacaccuguuucc

SEQ ID NO: 1511860 - RNA, 19 nt, Artificial Sequence
  Description of Artificial Sequence: Synthetic oligonucleotide
  Sense strand starting at position 2326 of SEQ ID NO: 1244748
agguguugcuuuaggacga

SEQ ID NO: 1511861 - RNA, 19 nt, Artificial Sequence
  Description of Artificial Sequence: Synthetic oligonucleotide
  Antisense strand to SEQ ID NO: 1511860
ucguccuaaagcaacaccu

SEQ ID NO: 1511862 - RNA, 19 nt, Artificial Sequence
  Description of Artificial Sequence: Synthetic oligonucleotide
  Sense strand starting at position 2327 of SEQ ID NO: 1244748
gguguugcuuuaggacgau

SEQ ID NO: 1511863 - RNA, 19 nt, Artificial Sequence
  Description of Artificial Sequence: Synthetic oligonucleotide
  Antisense strand to SEQ ID NO: 1511862
aucguccuaaagcaacacc

SEQ ID NO: 1511864 - RNA, 19 nt, Artificial Sequence
  Description of Artificial Sequence: Synthetic oligonucleotide
  Sense strand starting at position 2375 of SEQ ID NO: 1244748
uucgcuauaucauaaagcu

SEQ ID NO: 1511865 - RNA, 19 nt, Artificial Sequence
  Description of Artificial Sequence: Synthetic oligonucleotide
  Antisense strand to SEQ ID NO: 1511864
agcuuuaugauauagcgaa

SEQ ID NO: 1511866 - RNA, 19 nt, Artificial Sequence
  Description of Artificial Sequence: Synthetic oligonucleotide
  Sense strand starting at position 2716 of SEQ ID NO: 1244748
ggagccuuccagcaauuau

SEQ ID NO: 1511867 - RNA, 19 nt, Artificial Sequence
  Description of Artificial Sequence: Synthetic oligonucleotide
  Antisense strand to SEQ ID NO: 1511866
auaauugcuggaaggcucc

SEQ ID NO: 1511868 - RNA, 19 nt, Artificial Sequence
  Description of Artificial Sequence: Synthetic oligonucleotide
  Sense strand starting at position 2761 of SEQ ID NO: 1244748
gugugcaugcugcauauau

SEQ ID NO: 1511869 - RNA, 19 nt, Artificial Sequence
  Description of Artificial Sequence: Synthetic oligonucleotide
  Antisense strand to SEQ ID NO: 1511868
auauaugcagcaugcacac

SEQ ID NO: 1511870 - RNA, 19 nt, Artificial Sequence
  Description of Artificial Sequence: Synthetic oligonucleotide
  Sense strand starting at position 2771 of SEQ ID NO: 1244748
ugcauauaugugugagcau

SEQ ID NO: 1511871 - RNA, 19 nt, Artificial Sequence
  Description of Artificial Sequence: Synthetic oligonucleotide
  Antisense strand to SEQ ID NO: 1511870
augcucacacauauaugca

SEQ ID NO: 1511872 - RNA, 19 nt, Artificial Sequence
  Description of Artificial Sequence: Synthetic oligonucleotide
  Sense strand starting at position 2772 of SEQ ID NO: 1244748
gcauauaugugugagcaug

SEQ ID NO: 1511873 - RNA, 19 nt, Artificial Sequence
  Description of Artificial Sequence: Synthetic oligonucleotide
  Antisense strand to SEQ ID NO: 1511872
caugcucacacauauaugc

SEQ ID NO: 1511874 - RNA, 19 nt, Artificial Sequence
  Description of Artificial Sequence: Synthetic oligonucleotide
  Sense strand starting at position 2794 of SEQ ID NO: 1244748
gugcauuccagguagccau

SEQ ID NO: 1511875 - RNA, 19 nt, Artificial Sequence
  Description of Artificial Sequence: Synthetic oligonucleotide
  Antisense strand to SEQ ID NO: 1511874
auggcuaccuggaaugcac

SEQ ID NO: 1511876 - RNA, 19 nt, Artificial Sequence
  Description of Artificial Sequence: Synthetic oligonucleotide
  Sense strand starting at position 2845 of SEQ ID NO: 1244748
gcuuucuccagguggaauc

SEQ ID NO: 1511877 - RNA, 19 nt, Artificial Sequence
  Description of Artificial Sequence: Synthetic oligonucleotide
  Antisense strand to SEQ ID NO: 1511876
gauuccaccuggagaaagc

SEQ ID NO: 1511878 - RNA, 19 nt, Artificial Sequence
  Description of Artificial Sequence: Synthetic oligonucleotide
  Sense strand starting at position 3065 of SEQ ID NO: 1244748
ucuccauccuccgggagaa

SEQ ID NO: 1511879 - RNA, 19 nt, Artificial Sequence
  Description of Artificial Sequence: Synthetic oligonucleotide
  Antisense strand to SEQ ID NO: 1511878
uucucccggaggauggaga

SEQ ID NO: 1511880 - RNA, 19 nt, Artificial Sequence
  Description of Artificial Sequence: Synthetic oligonucleotide
  Sense strand starting at position 3205 of SEQ ID NO: 1244748
uccugagccacaugggaau

SEQ ID NO: 1511881 - RNA, 19 nt, Artificial Sequence
  Description of Artificial Sequence: Synthetic oligonucleotide
  Antisense strand to SEQ ID NO: 1511880
auucccauguggcucagga

SEQ ID NO: 1511882 - RNA, 19 nt, Artificial Sequence
  Description of Artificial Sequence: Synthetic oligonucleotide
  Sense strand starting at position 3368 of SEQ ID NO: 1244748
cagucagaucuccgaguca

SEQ ID NO: 1511883 - RNA, 19 nt, Artificial Sequence
  Description of Artificial Sequence: Synthetic oligonucleotide
  Antisense strand to SEQ ID NO: 1511882
ugacucggagaucugacug

SEQ ID NO: 1511884 - RNA, 19 nt, Artificial Sequence
  Description of Artificial Sequence: Synthetic oligonucleotide
  Sense strand starting at position 3380 of SEQ ID NO: 1244748
cgagucaguagcuggagau

SEQ ID NO: 1511885 - RNA, 19 nt, Artificial Sequence
  Description of Artificial Sequence: Synthetic oligonucleotide
  Antisense strand to SEQ ID NO: 1511884
aucuccagcuacugacucg

SEQ ID NO: 1511886 - RNA, 19 nt, Artificial Sequence
  Description of Artificial Sequence: Synthetic oligonucleotide
  Sense strand starting at position 3671 of SEQ ID NO: 1244748
cccugaugucagcaagcaa

SEQ ID NO: 1511887 - RNA, 19 nt, Artificial Sequence
  Description of Artificial Sequence: Synthetic oligonucleotide
  Antisense strand to SEQ ID NO: 1511886
uugcuugcugacaucaggg

SEQ ID NO: 1511888 - RNA, 19 nt, Artificial Sequence
  Description of Artificial Sequence: Synthetic oligonucleotide
  Sense strand starting at position 3877 of SEQ ID NO: 1244748
uagggaaguuaccaucuuu

SEQ ID NO: 1511889 - RNA, 19 nt, Artificial Sequence
  Description of Artificial Sequence: Synthetic oligonucleotide
  Antisense strand to SEQ ID NO: 1511888
aaagaugguaacuucccua

SEQ ID NO: 1511890 - RNA, 19 nt, Artificial Sequence
  Description of Artificial Sequence: Synthetic oligonucleotide
  Sense strand starting at position 9 of SEQ ID NO: 1244749
uguucuuuccacgaucacu

SEQ ID NO: 1511891 - RNA, 19 nt, Artificial Sequence
  Description of Artificial Sequence: Synthetic oligonucleotide
  Antisense strand to SEQ ID NO: 1511890
agugaucguggaaagaaca

SEQ ID NO: 1511892 - RNA, 19 nt, Artificial Sequence
  Description of Artificial Sequence: Synthetic oligonucleotide
  Sense strand starting at position 184 of SEQ ID NO: 1244749
aguuaaugauucccugcaa

SEQ ID NO: 1511893 - RNA, 19 nt, Artificial Sequence
  Description of Artificial Sequence: Synthetic oligonucleotide
  Antisense strand to SEQ ID NO: 1511892
uugcagggaaucauuaacu

SEQ ID NO: 1511894 - RNA, 19 nt, Artificial Sequence
  Description of Artificial Sequence: Synthetic oligonucleotide
  Sense strand starting at position 185 of SEQ ID NO: 1244749
guuaaugauucccugcaau

SEQ ID NO: 1511895 - RNA, 19 nt, Artificial Sequence
  Description of Artificial Sequence: Synthetic oligonucleotide
  Antisense strand to SEQ ID NO: 1511894
auugcagggaaucauuaac

SEQ ID NO: 1511896 - RNA, 19 nt, Artificial Sequence
  Description of Artificial Sequence: Synthetic oligonucleotide
  Sense strand starting at position 397 of SEQ ID NO: 1244749
gggcaaacauaauuacagu

SEQ ID NO: 1511897 - RNA, 19 nt, Artificial Sequence
  Description of Artificial Sequence: Synthetic oligonucleotide
  Antisense strand to SEQ ID NO: 1511896
acuguaauuauguuugccc

SEQ ID NO: 1511898 - RNA, 19 nt, Artificial Sequence
  Description of Artificial Sequence: Synthetic oligonucleotide
  Sense strand starting at position 666 of SEQ ID NO: 1244749
ucauaaacacuuuguaagu

SEQ ID NO: 1511899 - RNA, 19 nt, Artificial Sequence
  Description of Artificial Sequence: Synthetic oligonucleotide
  Antisense strand to SEQ ID NO: 1511898
acuuacaaaguguuuauga

SEQ ID NO: 1511900 - RNA, 19 nt, Artificial Sequence
  Description of Artificial Sequence: Synthetic oligonucleotide
  Sense strand starting at position 759 of SEQ ID NO: 1244749
aacagaaaguuugcucgaa

SEQ ID NO: 1511901 - RNA, 19 nt, Artificial Sequence
  Description of Artificial Sequence: Synthetic oligonucleotide
  Antisense strand to SEQ ID NO: 1511900
uucgagcaaacuuucuguu

SEQ ID NO: 1511902 - RNA, 19 nt, Artificial Sequence
  Description of Artificial Sequence: Synthetic oligonucleotide
  Sense strand starting at position 760 of SEQ ID NO: 1244749
acagaaaguuugcucgaaa

SEQ ID NO: 1511903 - RNA, 19 nt, Artificial Sequence
  Description of Artificial Sequence: Synthetic oligonucleotide
  Antisense strand to SEQ ID NO: 1511902
uuucgagcaaacuuucugu

SEQ ID NO: 1511904 - RNA, 19 nt, Artificial Sequence
  Description of Artificial Sequence: Synthetic oligonucleotide
  Sense strand starting at position 761 of SEQ ID NO: 1244749
cagaaaguuugcucgaaag

SEQ ID NO: 1511905 - RNA, 19 nt, Artificial Sequence
  Description of Artificial Sequence: Synthetic oligonucleotide
  Antisense strand to SEQ ID NO: 1511904
cuuucgagcaaacuuucug

SEQ ID NO: 1511906 - RNA, 19 nt, Artificial Sequence
  Description of Artificial Sequence: Synthetic oligonucleotide
  Sense strand starting at position 763 of SEQ ID NO: 1244749
gaaaguuugcucgaaaguu

SEQ ID NO: 1511907 - RNA, 19 nt, Artificial Sequence
  Description of Artificial Sequence: Synthetic oligonucleotide
  Antisense strand to SEQ ID NO: 1511906
aacuuucgagcaaacuuuc

SEQ ID NO: 1511908 - RNA, 19 nt, Artificial Sequence
  Description of Artificial Sequence: Synthetic oligonucleotide
  Sense strand starting at position 771 of SEQ ID NO: 1244749
gcucgaaaguuuguaugag

SEQ ID NO: 1511909 - RNA, 19 nt, Artificial Sequence
  Description of Artificial Sequence: Synthetic oligonucleotide
  Antisense strand to SEQ ID NO: 1511908
cucauacaaacuuucgagc

SEQ ID NO: 1511910 - RNA, 19 nt, Artificial Sequence
  Description of Artificial Sequence: Synthetic oligonucleotide
  Sense strand starting at position 777 of SEQ ID NO: 1244749
aaguuuguaugagcacaua

SEQ ID NO: 1511911 - RNA, 19 nt, Artificial Sequence
  Description of Artificial Sequence: Synthetic oligonucleotide
  Antisense strand to SEQ ID NO: 1511910
uaugugcucauacaaacuu

SEQ ID NO: 1511912 - RNA, 19 nt, Artificial Sequence
  Description of Artificial Sequence: Synthetic oligonucleotide
  Sense strand starting at position 780 of SEQ ID NO: 1244749
uuuguaugagcacauacuu

SEQ ID NO: 1511913 - RNA, 19 nt, Artificial Sequence
  Description of Artificial Sequence: Synthetic oligonucleotide
  Antisense strand to SEQ ID NO: 1511912
aaguaugugcucauacaaa

SEQ ID NO: 1511914 - RNA, 19 nt, Artificial Sequence
  Description of Artificial Sequence: Synthetic oligonucleotide
  Sense strand starting at position 836 of SEQ ID NO: 1244749
caggucuggcguuagaagu

SEQ ID NO: 1511915 - RNA, 19 nt, Artificial Sequence
  Description of Artificial Sequence: Synthetic oligonucleotide
  Antisense strand to SEQ ID NO: 1511914
acuucuaacgccagaccug

SEQ ID NO: 1511916 - RNA, 19 nt, Artificial Sequence
  Description of Artificial Sequence: Synthetic oligonucleotide
  Sense strand starting at position 837 of SEQ ID NO: 1244749
aggucuggcguuagaaguu

SEQ ID NO: 1511917 - RNA, 19 nt, Artificial Sequence
  Description of Artificial Sequence: Synthetic oligonucleotide
  Antisense strand to SEQ ID NO: 1511916
aacuucuaacgccagaccu

SEQ ID NO: 1511918 - RNA, 19 nt, Artificial Sequence
  Description of Artificial Sequence: Synthetic oligonucleotide
  Sense strand starting at position 1122 of SEQ ID NO: 1244749
ccguuaagcgcuccaucuu

SEQ ID NO: 1511919 - RNA, 19 nt, Artificial Sequence
  Description of Artificial Sequence: Synthetic oligonucleotide
  Antisense strand to SEQ ID NO: 1511918
aagauggagcgcuuaacgg

SEQ ID NO: 1511920 - RNA, 19 nt, Artificial Sequence
  Description of Artificial Sequence: Synthetic oligonucleotide
  Sense strand starting at position 1136 of SEQ ID NO: 1244749
aucuuuaaggaguguuuac

SEQ ID NO: 1511921 - RNA, 19 nt, Artificial Sequence
  Description of Artificial Sequence: Synthetic oligonucleotide
  Antisense strand to SEQ ID NO: 1511920
guaaacacuccuuaaagau

SEQ ID NO: 1511922 - RNA, 19 nt, Artificial Sequence
  Description of Artificial Sequence: Synthetic oligonucleotide
  Sense strand starting at position 1312 of SEQ ID NO: 1244749
cgaugcgaaccgguguauu

SEQ ID NO: 1511923 - RNA, 19 nt, Artificial Sequence
  Description of Artificial Sequence: Synthetic oligonucleotide
  Antisense strand to SEQ ID NO: 1511922
aauacaccgguucgcaucg

SEQ ID NO: 1511924 - RNA, 19 nt, Artificial Sequence
  Description of Artificial Sequence: Synthetic oligonucleotide
  Sense strand starting at position 1751 of SEQ ID NO: 1244749
ccgagagucgucgccauga

SEQ ID NO: 1511925 - RNA, 19 nt, Artificial Sequence
  Description of Artificial Sequence: Synthetic oligonucleotide
  Antisense strand to SEQ ID NO: 1511924
ucauggcgacgacucucgg

SEQ ID NO: 1511926 - RNA, 19 nt, Artificial Sequence
  Description of Artificial Sequence: Synthetic oligonucleotide
  Sense strand starting at position 2603 of SEQ ID NO: 1244749
gggagaugauacgucuuaa

SEQ ID NO: 1511927 - RNA, 19 nt, Artificial Sequence
  Description of Artificial Sequence: Synthetic oligonucleotide
  Antisense strand to SEQ ID NO: 1511926
uuaagacguaucaucuccc

SEQ ID NO: 1511928 - RNA, 19 nt, Artificial Sequence
  Description of Artificial Sequence: Synthetic oligonucleotide
  Sense strand starting at position 2632 of SEQ ID NO: 1244749
agauaaaccuuggagagua

SEQ ID NO: 1511929 - RNA, 19 nt, Artificial Sequence
  Description of Artificial Sequence: Synthetic oligonucleotide
  Antisense strand to SEQ ID NO: 1511928
uacucuccaagguuuaucu

SEQ ID NO: 1511930 - RNA, 19 nt, Artificial Sequence
  Description of Artificial Sequence: Synthetic oligonucleotide
  Sense strand starting at position 2679 of SEQ ID NO: 1244749
guauuucguuaucucagga

SEQ ID NO: 1511931 - RNA, 19 nt, Artificial Sequence
  Description of Artificial Sequence: Synthetic oligonucleotide
  Antisense strand to SEQ ID NO: 1511930
uccugagauaacgaaauac

SEQ ID NO: 1511932 - RNA, 19 nt, Artificial Sequence
  Description of Artificial Sequence: Synthetic oligonucleotide
  Sense strand starting at position 2684 of SEQ ID NO: 1244749
ucguuaucucaggaggaga

SEQ ID NO: 1511933 - RNA, 19 nt, Artificial Sequence
  Description of Artificial Sequence: Synthetic oligonucleotide
  Antisense strand to SEQ ID NO: 1511932
ucuccuccugagauaacga

SEQ ID NO: 1511934 - RNA, 19 nt, Artificial Sequence
  Description of Artificial Sequence: Synthetic oligonucleotide
  Sense strand starting at position 2726 of SEQ ID NO: 1244749
uguaccuuauccuuugaca

SEQ ID NO: 1511935 - RNA, 19 nt, Artificial Sequence
  Description of Artificial Sequence: Synthetic oligonucleotide
  Antisense strand to SEQ ID NO: 1511934
ugucaaaggauaagguaca

SEQ ID NO: 1511936 - RNA, 19 nt, Artificial Sequence
  Description of Artificial Sequence: Synthetic oligonucleotide
  Sense strand starting at position 2948 of SEQ ID NO: 1244749
uuaguagagacauguuuag

SEQ ID NO: 1511937 - RNA, 19 nt, Artificial Sequence
  Description of Artificial Sequence: Synthetic oligonucleotide
  Antisense strand to SEQ ID NO: 1511936
cuaaacaugucucuacuaa

SEQ ID NO: 1511938 - RNA, 19 nt, Artificial Sequence
  Description of Artificial Sequence: Synthetic oligonucleotide
  Sense strand starting at position 2954 of SEQ ID NO: 1244749
gagacauguuuaguagaga

SEQ ID NO: 1511939 - RNA, 19 nt, Artificial Sequence
  Description of Artificial Sequence: Synthetic oligonucleotide
  Antisense strand to SEQ ID NO: 1511938
ucucuacuaaacaugucuc

SEQ ID NO: 1511940 - RNA, 19 nt, Artificial Sequence
  Description of Artificial Sequence: Synthetic oligonucleotide
  Sense strand starting at position 2957 of SEQ ID NO: 1244749
acauguuuaguagagacgu

SEQ ID NO: 1511941 - RNA, 19 nt, Artificial Sequence
  Description of Artificial Sequence: Synthetic oligonucleotide
  Antisense strand to SEQ ID NO: 1511940
acgucucuacuaaacaugu

SEQ ID NO: 1511942 - RNA, 19 nt, Artificial Sequence
  Description of Artificial Sequence: Synthetic oligonucleotide
  Sense strand starting at position 2965 of SEQ ID NO: 1244749
aguagagacguuuagguuu

SEQ ID NO: 1511943 - RNA, 19 nt, Artificial Sequence
  Description of Artificial Sequence: Synthetic oligonucleotide
  Antisense strand to SEQ ID NO: 1511942
aaaccuaaacgucucuacu

SEQ ID NO: 1511944 - RNA, 19 nt, Artificial Sequence
  Description of Artificial Sequence: Synthetic oligonucleotide
  Sense strand starting at position 3083 of SEQ ID NO: 1244749
ggcccuauucuugacaaau

SEQ ID NO: 1511945 - RNA, 19 nt, Artificial Sequence
  Description of Artificial Sequence: Synthetic oligonucleotide
  Antisense strand to SEQ ID NO: 1511944
auuugucaagaauagggcc

SEQ ID NO: 1511946 - RNA, 19 nt, Artificial Sequence
  Description of Artificial Sequence: Synthetic oligonucleotide
  Sense strand starting at position 3110 of SEQ ID NO: 1244749
agaagauguucuuugcuau

SEQ ID NO: 1511947 - RNA, 19 nt, Artificial Sequence
  Description of Artificial Sequence: Synthetic oligonucleotide
  Antisense strand to SEQ ID NO: 1511946
auagcaaagaacaucuucu

SEQ ID NO: 1511948 - RNA, 19 nt, Artificial Sequence
  Description of Artificial Sequence: Synthetic oligonucleotide
  Sense strand starting at position 3111 of SEQ ID NO: 1244749
gaagauguucuuugcuaua

SEQ ID NO: 1511949 - RNA, 19 nt, Artificial Sequence
  Description of Artificial Sequence: Synthetic oligonucleotide
  Antisense strand to SEQ ID NO: 1511948
uauagcaaagaacaucuuc

SEQ ID NO: 1511950 - RNA, 19 nt, Artificial Sequence
  Description of Artificial Sequence: Synthetic oligonucleotide
  Sense strand starting at position 3113 of SEQ ID NO: 1244749
agauguucuuugcuauauu

SEQ ID NO: 1511951 - RNA, 19 nt, Artificial Sequence
  Description of Artificial Sequence: Synthetic oligonucleotide
  Antisense strand to SEQ ID NO: 1511950
aauauagcaaagaacaucu

SEQ ID NO: 1511952 - RNA, 19 nt, Artificial Sequence
  Description of Artificial Sequence: Synthetic oligonucleotide
  Sense strand starting at position 3116 of SEQ ID NO: 1244749
uguucuuugcuauauucca

SEQ ID NO: 1511953 - RNA, 19 nt, Artificial Sequence
  Description of Artificial Sequence: Synthetic oligonucleotide
  Antisense strand to SEQ ID NO: 1511952
uggaauauagcaaagaaca

SEQ ID NO: 1511954 - RNA, 19 nt, Artificial Sequence
  Description of Artificial Sequence: Synthetic oligonucleotide
  Sense strand starting at position 3271 of SEQ ID NO: 1244749
auagaaguuguaugcauau

SEQ ID NO: 1511955 - RNA, 19 nt, Artificial Sequence
  Description of Artificial Sequence: Synthetic oligonucleotide
  Antisense strand to SEQ ID NO: 1511954
auaugcauacaacuucuau

SEQ ID NO: 1511956 - RNA, 19 nt, Artificial Sequence
  Description of Artificial Sequence: Synthetic oligonucleotide
  Sense strand starting at position 3293 of SEQ ID NO: 1244749
ugcgaaaguaucuagcaca

SEQ ID NO: 1511957 - RNA, 19 nt, Artificial Sequence
  Description of Artificial Sequence: Synthetic oligonucleotide
  Antisense strand to SEQ ID NO: 1511956
ugugcuagauacuuucgca

SEQ ID NO: 1511958 - RNA, 19 nt, Artificial Sequence
  Description of Artificial Sequence: Synthetic oligonucleotide
  Sense strand starting at position 3365 of SEQ ID NO: 1244749
uuugcuuuaggcuauuaua

SEQ ID NO: 1511959 - RNA, 19 nt, Artificial Sequence
  Description of Artificial Sequence: Synthetic oligonucleotide
  Antisense strand to SEQ ID NO: 1511958
uauaauagccuaaagcaaa

SEQ ID NO: 1511960 - RNA, 19 nt, Artificial Sequence
  Description of Artificial Sequence: Synthetic oligonucleotide
  Sense strand starting at position 3434 of SEQ ID NO: 1244749
ccaugccagucauuucuuu

SEQ ID NO: 1511961 - RNA, 19 nt, Artificial Sequence
  Description of Artificial Sequence: Synthetic oligonucleotide
  Antisense strand to SEQ ID NO: 1511960
aaagaaaugacuggcaugg

SEQ ID NO: 1511962 - RNA, 19 nt, Artificial Sequence
  Description of Artificial Sequence: Synthetic oligonucleotide
  Sense strand starting at position 3468 of SEQ ID NO: 1244749
cucacuucuccagauaguu

SEQ ID NO: 1511963 - RNA, 19 nt, Artificial Sequence
  Description of Artificial Sequence: Synthetic oligonucleotide
  Antisense strand to SEQ ID NO: 1511962
aacuaucuggagaagugag

SEQ ID NO: 1511964 - RNA, 19 nt, Artificial Sequence
  Description of Artificial Sequence: Synthetic oligonucleotide
  Sense strand starting at position 3480 of SEQ ID NO: 1244749
gauaguuaccugcgagaac

SEQ ID NO: 1511965 - RNA, 19 nt, Artificial Sequence
  Description of Artificial Sequence: Synthetic oligonucleotide
  Antisense strand to SEQ ID NO: 1511964
guucucgcagguaacuauc

SEQ ID NO: 1511966 - RNA, 19 nt, Artificial Sequence
  Description of Artificial Sequence: Synthetic oligonucleotide
  Sense strand starting at position 3483 of SEQ ID NO: 1244749
aguuaccugcgagaacauu

SEQ ID NO: 1511967 - RNA, 19 nt, Artificial Sequence
  Description of Artificial Sequence: Synthetic oligonucleotide
  Antisense strand to SEQ ID NO: 1511966
aauguucucgcagguaacu

SEQ ID NO: 1511968 - RNA, 19 nt, Artificial Sequence
  Description of Artificial Sequence: Synthetic oligonucleotide
  Sense strand starting at position 3511 of SEQ ID NO: 1244749
uggauacagcccuacaauu

SEQ ID NO: 1511969 - RNA, 19 nt, Artificial Sequence
  Description of Artificial Sequence: Synthetic oligonucleotide
  Antisense strand to SEQ ID NO: 1511968
aauuguagggcuguaucca

SEQ ID NO: 1511970 - RNA, 19 nt, Artificial Sequence
  Description of Artificial Sequence: Synthetic oligonucleotide
  Sense strand starting at position 27 of SEQ ID NO: 1244750
uguagaaauugugaccuga

SEQ ID NO: 1511971 - RNA, 19 nt, Artificial Sequence
  Description of Artificial Sequence: Synthetic oligonucleotide
  Antisense strand to SEQ ID NO: 1511970
ucaggucacaauuucuaca

SEQ ID NO: 1511972 - RNA, 19 nt, Artificial Sequence
  Description of Artificial Sequence: Synthetic oligonucleotide
  Sense strand starting at position 29 of SEQ ID NO: 1244750
uagaaauugugaccugaac

SEQ ID NO: 1511973 - RNA, 19 nt, Artificial Sequence
  Description of Artificial Sequence: Synthetic oligonucleotide
  Antisense strand to SEQ ID NO: 1511972
guucaggucacaauuucua

SEQ ID NO: 1511974 - RNA, 19 nt, Artificial Sequence
  Description of Artificial Sequence: Synthetic oligonucleotide
  Sense strand starting at position 551 of SEQ ID NO: 1244750
uaguuuauaugcuaaggaa

SEQ ID NO: 1511975 - RNA, 19 nt, Artificial Sequence
  Description of Artificial Sequence: Synthetic oligonucleotide
  Antisense strand to SEQ ID NO: 1511974
uuccuuagcauauaaacua

SEQ ID NO: 1511976 - RNA, 19 nt, Artificial Sequence
  Description of Artificial Sequence: Synthetic oligonucleotide
  Sense strand starting at position 626 of SEQ ID NO: 1244750
cugaaagacuacuuuguca

SEQ ID NO: 1511977 - RNA, 19 nt, Artificial Sequence
  Description of Artificial Sequence: Synthetic oligonucleotide
  Antisense strand to SEQ ID NO: 1511976
ugacaaaguagucuuucag

SEQ ID NO: 1511978 - RNA, 19 nt, Artificial Sequence
  Description of Artificial Sequence: Synthetic oligonucleotide
  Sense strand starting at position 652 of SEQ ID NO: 1244750
caugcaggugaugguuaua

SEQ ID NO: 1511979 - RNA, 19 nt, Artificial Sequence
  Description of Artificial Sequence: Synthetic oligonucleotide
  Antisense strand to SEQ ID NO: 1511978
uauaaccaucaccugcaug

SEQ ID NO: 1511980 - RNA, 19 nt, Artificial Sequence
  Description of Artificial Sequence: Synthetic oligonucleotide
  Sense strand starting at position 655 of SEQ ID NO: 1244750
gcaggugaugguuauacaa

SEQ ID NO: 1511981 - RNA, 19 nt, Artificial Sequence
  Description of Artificial Sequence: Synthetic oligonucleotide
  Antisense strand to SEQ ID NO: 1511980
uuguauaaccaucaccugc

SEQ ID NO: 1511982 - RNA, 19 nt, Artificial Sequence
  Description of Artificial Sequence: Synthetic oligonucleotide
  Sense strand starting at position 657 of SEQ ID NO: 1244750
aggugaugguuauacaaag

SEQ ID NO: 1511983 - RNA, 19 nt, Artificial Sequence
  Description of Artificial Sequence: Synthetic oligonucleotide
  Antisense strand to SEQ ID NO: 1511982
cuuuguauaaccaucaccu

SEQ ID NO: 1511984 - RNA, 19 nt, Artificial Sequence
  Description of Artificial Sequence: Synthetic oligonucleotide
  Sense strand starting at position 693 of SEQ ID NO: 1244750
gcuaccaucugugcucuua

SEQ ID NO: 1511985 - RNA, 19 nt, Artificial Sequence
  Description of Artificial Sequence: Synthetic oligonucleotide
  Antisense strand to SEQ ID NO: 1511984
uaagagcacagaugguagc

SEQ ID NO: 1511986 - RNA, 19 nt, Artificial Sequence
  Description of Artificial Sequence: Synthetic oligonucleotide
  Sense strand starting at position 1022 of SEQ ID NO: 1244750
cucucuaguuucucugaga

SEQ ID NO: 1511987 - RNA, 19 nt, Artificial Sequence
  Description of Artificial Sequence: Synthetic oligonucleotide
  Antisense strand to SEQ ID NO: 1511986
ucucagagaaacuagagag

SEQ ID NO: 1511988 - RNA, 19 nt, Artificial Sequence
  Description of Artificial Sequence: Synthetic oligonucleotide
  Sense strand starting at position 1023 of SEQ ID NO: 1244750
ucucuaguuucucugagac

SEQ ID NO: 1511989 - RNA, 19 nt, Artificial Sequence
  Description of Artificial Sequence: Synthetic oligonucleotide
  Antisense strand to SEQ ID NO: 1511988
gucucagagaaacuagaga

SEQ ID NO: 1511990 - RNA, 19 nt, Artificial Sequence
  Description of Artificial Sequence: Synthetic oligonucleotide
  Sense strand starting at position 1036 of SEQ ID NO: 1244750
ugagacacaucccagauuu

SEQ ID NO: 1511991 - RNA, 19 nt, Artificial Sequence
  Description of Artificial Sequence: Synthetic oligonucleotide
  Antisense strand to SEQ ID NO: 1511990
aaaucugggaugugucuca

SEQ ID NO: 1511992 - RNA, 19 nt, Artificial Sequence
  Description of Artificial Sequence: Synthetic oligonucleotide
  Sense strand starting at position 1148 of SEQ ID NO: 1244750
cuggcauucuuccuagagu

SEQ ID NO: 1511993 - RNA, 19 nt, Artificial Sequence
  Description of Artificial Sequence: Synthetic oligonucleotide
  Antisense strand to SEQ ID NO: 1511992
acucuaggaagaaugccag

SEQ ID NO: 1511994 - RNA, 19 nt, Artificial Sequence
  Description of Artificial Sequence: Synthetic oligonucleotide
  Sense strand starting at position 1151 of SEQ ID NO: 1244750
gcauucuuccuagaguguu

SEQ ID NO: 1511995 - RNA, 19 nt, Artificial Sequence
  Description of Artificial Sequence: Synthetic oligonucleotide
  Antisense strand to SEQ ID NO: 1511994
aacacucuaggaagaaugc

SEQ ID NO: 1511996 - RNA, 19 nt, Artificial Sequence
  Description of Artificial Sequence: Synthetic oligonucleotide
  Sense strand starting at position 1154 of SEQ ID NO: 1244750
uucuuccuagaguguuaua

SEQ ID NO: 1511997 - RNA, 19 nt, Artificial Sequence
  Description of Artificial Sequence: Synthetic oligonucleotide
  Antisense strand to SEQ ID NO: 1511996
uauaacacucuaggaagaa

SEQ ID NO: 1511998 - RNA, 19 nt, Artificial Sequence
  Description of Artificial Sequence: Synthetic oligonucleotide
  Sense strand starting at position 1159 of SEQ ID NO: 1244750
ccuagaguguuauaauuaa

SEQ ID NO: 1511999 - RNA, 19 nt, Artificial Sequence
  Description of Artificial Sequence: Synthetic oligonucleotide
  Antisense strand to SEQ ID NO: 1511998
uuaauuauaacacucuagg

SEQ ID NO: 1512000 - RNA, 19 nt, Artificial Sequence
  Description of Artificial Sequence: Synthetic oligonucleotide
  Sense strand starting at position 1237 of SEQ ID NO: 1244750
gucagugcucugcccuuaa

SEQ ID NO: 1512001 - RNA, 19 nt, Artificial Sequence
  Description of Artificial Sequence: Synthetic oligonucleotide
  Antisense strand to SEQ ID NO: 1512000
uuaagggcagagcacugac

SEQ ID NO: 1512002 - RNA, 19 nt, Artificial Sequence
  Description of Artificial Sequence: Synthetic oligonucleotide
  Sense strand starting at position 1241 of SEQ ID NO: 1244750
gugcucugcccuuaaauuc

SEQ ID NO: 1512003 - RNA, 19 nt, Artificial Sequence
  Description of Artificial Sequence: Synthetic oligonucleotide
  Antisense strand to SEQ ID NO: 1512002
gaauuuaagggcagagcac

SEQ ID NO: 1512004 - RNA, 19 nt, Artificial Sequence
  Description of Artificial Sequence: Synthetic oligonucleotide
  Sense strand starting at position 1307 of SEQ ID NO: 1244750
uuacuugacccuugucuga

SEQ ID NO: 1512005 - RNA, 19 nt, Artificial Sequence
  Description of Artificial Sequence: Synthetic oligonucleotide
  Antisense strand to SEQ ID NO: 1512004
ucagacaagggucaaguaa

SEQ ID NO: 1512006 - RNA, 19 nt, Artificial Sequence
  Description of Artificial Sequence: Synthetic oligonucleotide
  Sense strand starting at position 1314 of SEQ ID NO: 1244750
acccuugucugacuuucua

SEQ ID NO: 1512007 - RNA, 19 nt, Artificial Sequence
  Description of Artificial Sequence: Synthetic oligonucleotide
  Antisense strand to SEQ ID NO: 1512006
uagaaagucagacaagggu

SEQ ID NO: 1512008 - RNA, 19 nt, Artificial Sequence
  Description of Artificial Sequence: Synthetic oligonucleotide
  Sense strand starting at position 1343 of SEQ ID NO: 1244750
gucacuuacuccucugcau

SEQ ID NO: 1512009 - RNA, 19 nt, Artificial Sequence
  Description of Artificial Sequence: Synthetic oligonucleotide
  Antisense strand to SEQ ID NO: 1512008
augcagaggaguaagugac

SEQ ID NO: 1512010 - RNA, 19 nt, Artificial Sequence
  Description of Artificial Sequence: Synthetic oligonucleotide
  Sense strand starting at position 1765 of SEQ ID NO: 1244750
gacgaaucgggucacuacu

SEQ ID NO: 1512011 - RNA, 19 nt, Artificial Sequence
  Description of Artificial Sequence: Synthetic oligonucleotide
  Antisense strand to SEQ ID NO: 1512010
aguagugacccgauucguc

SEQ ID NO: 1512012 - RNA, 19 nt, Artificial Sequence
  Description of Artificial Sequence: Synthetic oligonucleotide
  Sense strand starting at position 1819 of SEQ ID NO: 1244750
gcuuuaaccuccucuggga

SEQ ID NO: 1512013 - RNA, 19 nt, Artificial Sequence
  Description of Artificial Sequence: Synthetic oligonucleotide
  Antisense strand to SEQ ID NO: 1512012
ucccagaggagguuaaagc

SEQ ID NO: 1512014 - RNA, 19 nt, Artificial Sequence
  Description of Artificial Sequence: Synthetic oligonucleotide
  Sense strand starting at position 1821 of SEQ ID NO: 1244750
uuuaaccuccucugggaua

SEQ ID NO: 1512015 - RNA, 19 nt, Artificial Sequence
  Description of Artificial Sequence: Synthetic oligonucleotide
  Antisense strand to SEQ ID NO: 1512014
uaucccagaggagguuaaa

SEQ ID NO: 1512016 - RNA, 19 nt, Artificial Sequence
  Description of Artificial Sequence: Synthetic oligonucleotide
  Sense strand starting at position 2417 of SEQ ID NO: 1244750
cucaaagcauucuuucgau

SEQ ID NO: 1512017 - RNA, 19 nt, Artificial Sequence
  Description of Artificial Sequence: Synthetic oligonucleotide
  Antisense strand to SEQ ID NO: 1512016
aucgaaagaaugcuuugag

SEQ ID NO: 1512018 - RNA, 19 nt, Artificial Sequence
  Description of Artificial Sequence: Synthetic oligonucleotide
  Sense strand starting at position 2423 of SEQ ID NO: 1244750
gcauucuuucgaucgucuu

SEQ ID NO: 1512019 - RNA, 19 nt, Artificial Sequence
  Description of Artificial Sequence: Synthetic oligonucleotide
  Antisense strand to SEQ ID NO: 1512018
aagacgaucgaaagaaugc

SEQ ID NO: 1512020 - RNA, 19 nt, Artificial Sequence
  Description of Artificial Sequence: Synthetic oligonucleotide
  Sense strand starting at position 2426 of SEQ ID NO: 1244750
uucuuucgaucgucuuuaa

SEQ ID NO: 1512021 - RNA, 19 nt, Artificial Sequence
  Description of Artificial Sequence: Synthetic oligonucleotide
  Antisense strand to SEQ ID NO: 1512020
uuaaagacgaucgaaagaa

SEQ ID NO: 1512022 - RNA, 19 nt, Artificial Sequence
  Description of Artificial Sequence: Synthetic oligonucleotide
  Sense strand starting at position 2625 of SEQ ID NO: 1244750
ucccuuugaucgcuguaga

SEQ ID NO: 1512023 - RNA, 19 nt, Artificial Sequence
  Description of Artificial Sequence: Synthetic oligonucleotide
  Antisense strand to SEQ ID NO: 1512022
ucuacagcgaucaaaggga

SEQ ID NO: 1512024 - RNA, 19 nt, Artificial Sequence
  Description of Artificial Sequence: Synthetic oligonucleotide
  Sense strand starting at position 2626 of SEQ ID NO: 1244750
cccuuugaucgcuguagaa

SEQ ID NO: 1512025 - RNA, 19 nt, Artificial Sequence
  Description of Artificial Sequence: Synthetic oligonucleotide
  Antisense strand to SEQ ID NO: 1512024
uucuacagcgaucaaaggg

SEQ ID NO: 1512026 - RNA, 19 nt, Artificial Sequence
  Description of Artificial Sequence: Synthetic oligonucleotide
  Sense strand starting at position 2712 of SEQ ID NO: 1244750
cugaguucucagcagcguu

SEQ ID NO: 1512027 - RNA, 19 nt, Artificial Sequence
  Description of Artificial Sequence: Synthetic oligonucleotide
  Antisense strand to SEQ ID NO: 1512026
aacgcugcugagaacucag

SEQ ID NO: 1512028 - RNA, 19 nt, Artificial Sequence
  Description of Artificial Sequence: Synthetic oligonucleotide
  Sense strand starting at position 2817 of SEQ ID NO: 1244750
guaagucccucuuuguaaa

SEQ ID NO: 1512029 - RNA, 19 nt, Artificial Sequence
  Description of Artificial Sequence: Synthetic oligonucleotide
  Antisense strand to SEQ ID NO: 1512028
uuuacaaagagggacuuac

SEQ ID NO: 1512030 - RNA, 19 nt, Artificial Sequence
  Description of Artificial Sequence: Synthetic oligonucleotide
  Sense strand starting at position 2868 of SEQ ID NO: 1244750
cuugacucccgaggcaauu

SEQ ID NO: 1512031 - RNA, 19 nt, Artificial Sequence
  Description of Artificial Sequence: Synthetic oligonucleotide
  Antisense strand to SEQ ID NO: 1512030
aauugccucgggagucaag

SEQ ID NO: 1512032 - RNA, 19 nt, Artificial Sequence
  Description of Artificial Sequence: Synthetic oligonucleotide
  Sense strand starting at position 3214 of SEQ ID NO: 1244750
auaugucaguugcucacaa

SEQ ID NO: 1512033 - RNA, 19 nt, Artificial Sequence
  Description of Artificial Sequence: Synthetic oligonucleotide
  Antisense strand to SEQ ID NO: 1512032
uugugagcaacugacauau

SEQ ID NO: 1512034 - RNA, 19 nt, Artificial Sequence
  Description of Artificial Sequence: Synthetic oligonucleotide
  Sense strand starting at position 3216 of SEQ ID NO: 1244750
augucaguugcucacaaau

SEQ ID NO: 1512035 - RNA, 19 nt, Artificial Sequence
  Description of Artificial Sequence: Synthetic oligonucleotide
  Antisense strand to SEQ ID NO: 1512034
auuugugagcaacugacau

SEQ ID NO: 1512036 - RNA, 19 nt, Artificial Sequence
  Description of Artificial Sequence: Synthetic oligonucleotide
  Sense strand starting at position 3218 of SEQ ID NO: 1244750
gucaguugcucacaaauuu

SEQ ID NO: 1512037 - RNA, 19 nt, Artificial Sequence
  Description of Artificial Sequence: Synthetic oligonucleotide
  Antisense strand to SEQ ID NO: 1512036
aaauuugugagcaacugac

SEQ ID NO: 1512038 - RNA, 19 nt, Artificial Sequence
  Description of Artificial Sequence: Synthetic oligonucleotide
  Sense strand starting at position 3265 of SEQ ID NO: 1244750
agacaaacuuccgucaucu

SEQ ID NO: 1512039 - RNA, 19 nt, Artificial Sequence
  Description of Artificial Sequence: Synthetic oligonucleotide
  Antisense strand to SEQ ID NO: 1512038
agaugacggaaguuugucu

SEQ ID NO: 1512040 - RNA, 19 nt, Artificial Sequence
  Description of Artificial Sequence: Synthetic oligonucleotide
  Sense strand starting at position 3411 of SEQ ID NO: 1244750
cagugcuaaccagaaauug

SEQ ID NO: 1512041 - RNA, 19 nt, Artificial Sequence
  Description of Artificial Sequence: Synthetic oligonucleotide
  Antisense strand to SEQ ID NO: 1512040
caauuucugguuagcacug

SEQ ID NO: 1512042 - RNA, 19 nt, Artificial Sequence
  Description of Artificial Sequence: Synthetic oligonucleotide
  Sense strand starting at position 3419 of SEQ ID NO: 1244750
accagaaauugagaaauca

SEQ ID NO: 1512043 - RNA, 19 nt, Artificial Sequence
  Description of Artificial Sequence: Synthetic oligonucleotide
  Antisense strand to SEQ ID NO: 1512042
ugauuucucaauuucuggu

SEQ ID NO: 1512044 - RNA, 19 nt, Artificial Sequence
  Description of Artificial Sequence: Synthetic oligonucleotide
  Sense strand starting at position 3496 of SEQ ID NO: 1244750
ugccucugcguagaucuau

SEQ ID NO: 1512045 - RNA, 19 nt, Artificial Sequence
  Description of Artificial Sequence: Synthetic oligonucleotide
  Antisense strand to SEQ ID NO: 1512044
auagaucuacgcagaggca

SEQ ID NO: 1512046 - RNA, 19 nt, Artificial Sequence
  Description of Artificial Sequence: Synthetic oligonucleotide
  Sense strand starting at position 3667 of SEQ ID NO: 1244750
uuagauuucugguauauuc

SEQ ID NO: 1512047 - RNA, 19 nt, Artificial Sequence
  Description of Artificial Sequence: Synthetic oligonucleotide
  Antisense strand to SEQ ID NO: 1512046
gaauauaccagaaaucuaa

SEQ ID NO: 1512048 - RNA, 19 nt, Artificial Sequence
  Description of Artificial Sequence: Synthetic oligonucleotide
  Sense strand starting at position 3676 of SEQ ID NO: 1244750
ugguauauuccauacuccu

SEQ ID NO: 1512049 - RNA, 19 nt, Artificial Sequence
  Description of Artificial Sequence: Synthetic oligonucleotide
  Antisense strand to SEQ ID NO: 1512048
aggaguauggaauauacca

SEQ ID NO: 1512050 - RNA, 19 nt, Artificial Sequence
  Description of Artificial Sequence: Synthetic oligonucleotide
  Sense strand starting at position 855 of SEQ ID NO: 1244751
ggguuccuuccuuauggga

SEQ ID NO: 1512051 - RNA, 19 nt, Artificial Sequence
  Description of Artificial Sequence: Synthetic oligonucleotide
  Antisense strand to SEQ ID NO: 1512050
ucccauaaggaaggaaccc

SEQ ID NO: 1512052 - RNA, 19 nt, Artificial Sequence
  Description of Artificial Sequence: Synthetic oligonucleotide
  Sense strand starting at position 863 of SEQ ID NO: 1244751
uccuuaugggacuguaaug

SEQ ID NO: 1512053 - RNA, 19 nt, Artificial Sequence
  Description of Artificial Sequence: Synthetic oligonucleotide
  Antisense strand to SEQ ID NO: 1512052
cauuacagucccauaagga

SEQ ID NO: 1512054 - RNA, 19 nt, Artificial Sequence
  Description of Artificial Sequence: Synthetic oligonucleotide
  Sense strand starting at position 868 of SEQ ID NO: 1244751
augggacuguaaugaggau

SEQ ID NO: 1512055 - RNA, 19 nt, Artificial Sequence
  Description of Artificial Sequence: Synthetic oligonucleotide
  Antisense strand to SEQ ID NO: 1512054
auccucauuacagucccau

SEQ ID NO: 1512056 - RNA, 19 nt, Artificial Sequence
  Description of Artificial Sequence: Synthetic oligonucleotide
  Sense strand starting at position 891 of SEQ ID NO: 1244751
caagacagucuauguaaag

SEQ ID NO: 1512057 - RNA, 19 nt, Artificial Sequence
  Description of Artificial Sequence: Synthetic oligonucleotide
  Antisense strand to SEQ ID NO: 1512056
cuuuacauagacugucuug

SEQ ID NO: 1512058 - RNA, 19 nt, Artificial Sequence
  Description of Artificial Sequence: Synthetic oligonucleotide
  Sense strand starting at position 916 of SEQ ID NO: 1244751
gacaaaugccugggacguu

SEQ ID NO: 1512059 - RNA, 19 nt, Artificial Sequence
  Description of Artificial Sequence: Synthetic oligonucleotide
  Antisense strand to SEQ ID NO: 1512058
aacgucccaggcauuuguc

SEQ ID NO: 1512060 - RNA, 19 nt, Artificial Sequence
  Description of Artificial Sequence: Synthetic oligonucleotide
  Sense strand starting at position 928 of SEQ ID NO: 1244751
ggacguuacaagcauguaa

SEQ ID NO: 1512061 - RNA, 19 nt, Artificial Sequence
  Description of Artificial Sequence: Synthetic oligonucleotide
  Antisense strand to SEQ ID NO: 1512060
uuacaugcuuguaacgucc

SEQ ID NO: 1512062 - RNA, 19 nt, Artificial Sequence
  Description of Artificial Sequence: Synthetic oligonucleotide
  Sense strand starting at position 930 of SEQ ID NO: 1244751
acguuacaagcauguaauc

SEQ ID NO: 1512063 - RNA, 19 nt, Artificial Sequence
  Description of Artificial Sequence: Synthetic oligonucleotide
  Antisense strand to SEQ ID NO: 1512062
gauuacaugcuuguaacgu

SEQ ID NO: 1512064 - RNA, 19 nt, Artificial Sequence
  Description of Artificial Sequence: Synthetic oligonucleotide
  Sense strand starting at position 956 of SEQ ID NO: 1244751
gauguuagccauuauuguu

SEQ ID NO: 1512065 - RNA, 19 nt, Artificial Sequence
  Description of Artificial Sequence: Synthetic oligonucleotide
  Antisense strand to SEQ ID NO: 1512064
aacaauaauggcuaacauc

SEQ ID NO: 1512066 - RNA, 19 nt, Artificial Sequence
  Description of Artificial Sequence: Synthetic oligonucleotide
  Sense strand starting at position 995 of SEQ ID NO: 1244751
aucucagcggcucagaaau

SEQ ID NO: 1512067 - RNA, 19 nt, Artificial Sequence
  Description of Artificial Sequence: Synthetic oligonucleotide
  Antisense strand to SEQ ID NO: 1512066
auuucugagccgcugagau

SEQ ID NO: 1512068 - RNA, 19 nt, Artificial Sequence
  Description of Artificial Sequence: Synthetic oligonucleotide
  Sense strand starting at position 1060 of SEQ ID NO: 1244751
guucguauccaaggugucu

SEQ ID NO: 1512069 - RNA, 19 nt, Artificial Sequence
  Description of Artificial Sequence: Synthetic oligonucleotide
  Antisense strand to SEQ ID NO: 1512068
agacaccuuggauacgaac

SEQ ID NO: 1512070 - RNA, 19 nt, Artificial Sequence
  Description of Artificial Sequence: Synthetic oligonucleotide
  Sense strand starting at position 1173 of SEQ ID NO: 1244751
uuauacuuggccugucaga

SEQ ID NO: 1512071 - RNA, 19 nt, Artificial Sequence
  Description of Artificial Sequence: Synthetic oligonucleotide
  Antisense strand to SEQ ID NO: 1512070
ucugacaggccaaguauaa

SEQ ID NO: 1512072 - RNA, 19 nt, Artificial Sequence
  Description of Artificial Sequence: Synthetic oligonucleotide
  Sense strand starting at position 1639 of SEQ ID NO: 1244751
aguagaaucgacgacugua

SEQ ID NO: 1512073 - RNA, 19 nt, Artificial Sequence
  Description of Artificial Sequence: Synthetic oligonucleotide
  Antisense strand to SEQ ID NO: 1512072
uacagucgucgauucuacu

SEQ ID NO: 1512074 - RNA, 19 nt, Artificial Sequence
  Description of Artificial Sequence: Synthetic oligonucleotide
  Sense strand starting at position 1642 of SEQ ID NO: 1244751
agaaucgacgacuguagau

SEQ ID NO: 1512075 - RNA, 19 nt, Artificial Sequence
  Description of Artificial Sequence: Synthetic oligonucleotide
  Antisense strand to SEQ ID NO: 1512074
aucuacagucgucgauucu

SEQ ID NO: 1512076 - RNA, 19 nt, Artificial Sequence
  Description of Artificial Sequence: Synthetic oligonucleotide
  Sense strand starting at position 1652 of SEQ ID NO: 1244751
acuguagauuugugaguag

SEQ ID NO: 1512077 - RNA, 19 nt, Artificial Sequence
  Description of Artificial Sequence: Synthetic oligonucleotide
  Antisense strand to SEQ ID NO: 1512076
cuacucacaaaucuacagu

SEQ ID NO: 1512078 - RNA, 19 nt, Artificial Sequence
  Description of Artificial Sequence: Synthetic oligonucleotide
  Sense strand starting at position 1664 of SEQ ID NO: 1244751
ugaguagaaucccauuugu

SEQ ID NO: 1512079 - RNA, 19 nt, Artificial Sequence
  Description of Artificial Sequence: Synthetic oligonucleotide
  Antisense strand to SEQ ID NO: 1512078
acaaaugggauucuacuca

SEQ ID NO: 1512080 - RNA, 19 nt, Artificial Sequence
  Description of Artificial Sequence: Synthetic oligonucleotide
  Sense strand starting at position 1680 of SEQ ID NO: 1244751
uguaguuaaacuuggguaa

SEQ ID NO: 1512081 - RNA, 19 nt, Artificial Sequence
  Description of Artificial Sequence: Synthetic oligonucleotide
  Antisense strand to SEQ ID NO: 1512080
uuacccaaguuuaacuaca

SEQ ID NO: 1512082 - RNA, 19 nt, Artificial Sequence
  Description of Artificial Sequence: Synthetic oligonucleotide
  Sense strand starting at position 1681 of SEQ ID NO: 1244751
guaguuaaacuuggguaaa

SEQ ID NO: 1512083 - RNA, 19 nt, Artificial Sequence
  Description of Artificial Sequence: Synthetic oligonucleotide
  Antisense strand to SEQ ID NO: 1512082
uuuacccaaguuuaacuac

SEQ ID NO: 1512084 - RNA, 19 nt, Artificial Sequence
  Description of Artificial Sequence: Synthetic oligonucleotide
  Sense strand starting at position 1782 of SEQ ID NO: 1244751
gucucagauucuguuggga

SEQ ID NO: 1512085 - RNA, 19 nt, Artificial Sequence
  Description of Artificial Sequence: Synthetic oligonucleotide
  Antisense strand to SEQ ID NO: 1512084
ucccaacagaaucugagac

SEQ ID NO: 1512086 - RNA, 19 nt, Artificial Sequence
  Description of Artificial Sequence: Synthetic oligonucleotide
  Sense strand starting at position 1791 of SEQ ID NO: 1244751
ucuguugggaggugauuaa

SEQ ID NO: 1512087 - RNA, 19 nt, Artificial Sequence
  Description of Artificial Sequence: Synthetic oligonucleotide
  Antisense strand to SEQ ID NO: 1512086
uuaaucaccucccaacaga

SEQ ID NO: 1512088 - RNA, 19 nt, Artificial Sequence
  Description of Artificial Sequence: Synthetic oligonucleotide
  Sense strand starting at position 1800 of SEQ ID NO: 1244751
aggugauuaacggguagga

SEQ ID NO: 1512089 - RNA, 19 nt, Artificial Sequence
  Description of Artificial Sequence: Synthetic oligonucleotide
  Antisense strand to SEQ ID NO: 1512088
uccuacccguuaaucaccu

SEQ ID NO: 1512090 - RNA, 19 nt, Artificial Sequence
  Description of Artificial Sequence: Synthetic oligonucleotide
  Sense strand starting at position 1802 of SEQ ID NO: 1244751
gugauuaacggguaggaca

SEQ ID NO: 1512091 - RNA, 19 nt, Artificial Sequence
  Description of Artificial Sequence: Synthetic oligonucleotide
  Antisense strand to SEQ ID NO: 1512090
uguccuacccguuaaucac

SEQ ID NO: 1512092 - RNA, 19 nt, Artificial Sequence
  Description of Artificial Sequence: Synthetic oligonucleotide
  Sense strand starting at position 1817 of SEQ ID NO: 1244751
gacacugcuccgggacaau

SEQ ID NO: 1512093 - RNA, 19 nt, Artificial Sequence
  Description of Artificial Sequence: Synthetic oligonucleotide
  Antisense strand to SEQ ID NO: 1512092
auugucccggagcaguguc

SEQ ID NO: 1512094 - RNA, 19 nt, Artificial Sequence
  Description of Artificial Sequence: Synthetic oligonucleotide
  Sense strand starting at position 1882 of SEQ ID NO: 1244751
ugcucaccucugcaaguuu

SEQ ID NO: 1512095 - RNA, 19 nt, Artificial Sequence
  Description of Artificial Sequence: Synthetic oligonucleotide
  Antisense strand to SEQ ID NO: 1512094
aaacuugcagaggugagca

SEQ ID NO: 1512096 - RNA, 19 nt, Artificial Sequence
  Description of Artificial Sequence: Synthetic oligonucleotide
  Sense strand starting at position 1893 of SEQ ID NO: 1244751
gcaaguuucuucuuggcga

SEQ ID NO: 1512097 - RNA, 19 nt, Artificial Sequence
  Description of Artificial Sequence: Synthetic oligonucleotide
  Antisense strand to SEQ ID NO: 1512096
ucgccaagaagaaacuugc

SEQ ID NO: 1512098 - RNA, 19 nt, Artificial Sequence
  Description of Artificial Sequence: Synthetic oligonucleotide
  Sense strand starting at position 2088 of SEQ ID NO: 1244751
ggcugagugucuccaguuc

SEQ ID NO: 1512099 - RNA, 19 nt, Artificial Sequence
  Description of Artificial Sequence: Synthetic oligonucleotide
  Antisense strand to SEQ ID NO: 1512098
gaacuggagacacucagcc

SEQ ID NO: 1512100 - RNA, 19 nt, Artificial Sequence
  Description of Artificial Sequence: Synthetic oligonucleotide
  Sense strand starting at position 2130 of SEQ ID NO: 1244751
uuagcuaguggccaagauu

SEQ ID NO: 1512101 - RNA, 19 nt, Artificial Sequence
  Description of Artificial Sequence: Synthetic oligonucleotide
  Antisense strand to SEQ ID NO: 1512100
aaucuuggccacuagcuaa

SEQ ID NO: 1512102 - RNA, 19 nt, Artificial Sequence
  Description of Artificial Sequence: Synthetic oligonucleotide
  Sense strand starting at position 2164 of SEQ ID NO: 1244751
cgaggaaagcacgaguauu

SEQ ID NO: 1512103 - RNA, 19 nt, Artificial Sequence
  Description of Artificial Sequence: Synthetic oligonucleotide
  Antisense strand to SEQ ID NO: 1512102
aauacucgugcuuuccucg

SEQ ID NO: 1512104 - RNA, 19 nt, Artificial Sequence
  Description of Artificial Sequence: Synthetic oligonucleotide
  Sense strand starting at position 2354 of SEQ ID NO: 1244751
cgcuguguuggccauccaa

SEQ ID NO: 1512105 - RNA, 19 nt, Artificial Sequence
  Description of Artificial Sequence: Synthetic oligonucleotide
  Antisense strand to SEQ ID NO: 1512104
uuggauggccaacacagcg

SEQ ID NO: 1512106 - RNA, 19 nt, Artificial Sequence
  Description of Artificial Sequence: Synthetic oligonucleotide
  Sense strand starting at position 2374 of SEQ ID NO: 1244751
guuccauauugagcauaaa

SEQ ID NO: 1512107 - RNA, 19 nt, Artificial Sequence
  Description of Artificial Sequence: Synthetic oligonucleotide
  Antisense strand to SEQ ID NO: 1512106
uuuaugcucaauauggaac

SEQ ID NO: 1512108 - RNA, 19 nt, Artificial Sequence
  Description of Artificial Sequence: Synthetic oligonucleotide
  Sense strand starting at position 2413 of SEQ ID NO: 1244751
aguuaaccuguuggaauca

SEQ ID NO: 1512109 - RNA, 19 nt, Artificial Sequence
  Description of Artificial Sequence: Synthetic oligonucleotide
  Antisense strand to SEQ ID NO: 1512108
ugauuccaacagguuaacu

SEQ ID NO: 1512110 - RNA, 19 nt, Artificial Sequence
  Description of Artificial Sequence: Synthetic oligonucleotide
  Sense strand starting at position 2482 of SEQ ID NO: 1244751
aagacagauugccuggcua

SEQ ID NO: 1512111 - RNA, 19 nt, Artificial Sequence
  Description of Artificial Sequence: Synthetic oligonucleotide
  Antisense strand to SEQ ID NO: 1512110
uagccaggcaaucugucuu

SEQ ID NO: 1512112 - RNA, 19 nt, Artificial Sequence
  Description of Artificial Sequence: Synthetic oligonucleotide
  Sense strand starting at position 2484 of SEQ ID NO: 1244751
gacagauugccuggcuaca

SEQ ID NO: 1512113 - RNA, 19 nt, Artificial Sequence
  Description of Artificial Sequence: Synthetic oligonucleotide
  Antisense strand to SEQ ID NO: 1512112
uguagccaggcaaucuguc

SEQ ID NO: 1512114 - RNA, 19 nt, Artificial Sequence
  Description of Artificial Sequence: Synthetic oligonucleotide
  Sense strand starting at position 2518 of SEQ ID NO: 1244751
acauaugguccaggaacuu

SEQ ID NO: 1512115 - RNA, 19 nt, Artificial Sequence
  Description of Artificial Sequence: Synthetic oligonucleotide
  Antisense strand to SEQ ID NO: 1512114
aaguuccuggaccauaugu

SEQ ID NO: 1512116 - RNA, 19 nt, Artificial Sequence
  Description of Artificial Sequence: Synthetic oligonucleotide
  Sense strand starting at position 2527 of SEQ ID NO: 1244751
ccaggaacuuaagacaaau

SEQ ID NO: 1512117 - RNA, 19 nt, Artificial Sequence
  Description of Artificial Sequence: Synthetic oligonucleotide
  Antisense strand to SEQ ID NO: 1512116
auuugucuuaaguuccugg

SEQ ID NO: 1512118 - RNA, 19 nt, Artificial Sequence
  Description of Artificial Sequence: Synthetic oligonucleotide
  Sense strand starting at position 2567 of SEQ ID NO: 1244751
cacuauccgcuguagugaa

SEQ ID NO: 1512119 - RNA, 19 nt, Artificial Sequence
  Description of Artificial Sequence: Synthetic oligonucleotide
  Antisense strand to SEQ ID NO: 1512118
uucacuacagcggauagug

SEQ ID NO: 1512120 - RNA, 19 nt, Artificial Sequence
  Description of Artificial Sequence: Synthetic oligonucleotide
  Sense strand starting at position 2575 of SEQ ID NO: 1244751
gcuguagugaaauagaaua

SEQ ID NO: 1512121 - RNA, 19 nt, Artificial Sequence
  Description of Artificial Sequence: Synthetic oligonucleotide
  Antisense strand to SEQ ID NO: 1512120
uauucuauuucacuacagc

SEQ ID NO: 1512122 - RNA, 19 nt, Artificial Sequence
  Description of Artificial Sequence: Synthetic oligonucleotide
  Sense strand starting at position 3178 of SEQ ID NO: 1244751
gaggcuguagcagagaauu

SEQ ID NO: 1512123 - RNA, 19 nt, Artificial Sequence
  Description of Artificial Sequence: Synthetic oligonucleotide
  Antisense strand to SEQ ID NO: 1512122
aauucucugcuacagccuc

SEQ ID NO: 1512124 - RNA, 19 nt, Artificial Sequence
  Description of Artificial Sequence: Synthetic oligonucleotide
  Sense strand starting at position 3186 of SEQ ID NO: 1244751
agcagagaauuccuugaac

SEQ ID NO: 1512125 - RNA, 19 nt, Artificial Sequence
  Description of Artificial Sequence: Synthetic oligonucleotide
  Antisense strand to SEQ ID NO: 1512124
guucaaggaauucucugcu

SEQ ID NO: 1512126 - RNA, 19 nt, Artificial Sequence
  Description of Artificial Sequence: Synthetic oligonucleotide
  Sense strand starting at position 3579 of SEQ ID NO: 1244751
gaggguguuccagguucuu

SEQ ID NO: 1512127 - RNA, 19 nt, Artificial Sequence
  Description of Artificial Sequence: Synthetic oligonucleotide
  Antisense strand to SEQ ID NO: 1512126
aagaaccuggaacacccuc

SEQ ID NO: 1512128 - RNA, 19 nt, Artificial Sequence
  Description of Artificial Sequence: Synthetic oligonucleotide
  Sense strand starting at position 3816 of SEQ ID NO: 1244751
acagauguguuggcucaca

SEQ ID NO: 1512129 - RNA, 19 nt, Artificial Sequence
  Description of Artificial Sequence: Synthetic oligonucleotide
  Antisense strand to SEQ ID NO: 1512128
ugugagccaacacaucugu

SEQ ID NO: 1512130 - RNA, 19 nt, Artificial Sequence
  Description of Artificial Sequence: Synthetic oligonucleotide
  Sense strand starting at position 330 of SEQ ID NO: 1244752
aguuguaacuguccuuaaa

SEQ ID NO: 1512131 - RNA, 19 nt, Artificial Sequence
  Description of Artificial Sequence: Synthetic oligonucleotide
  Antisense strand to SEQ ID NO: 1512130
uuuaaggacaguuacaacu

SEQ ID NO: 1512132 - RNA, 19 nt, Artificial Sequence
  Description of Artificial Sequence: Synthetic oligonucleotide
  Sense strand starting at position 685 of SEQ ID NO: 1244752
aguaguaauuucuagcaac

SEQ ID NO: 1512133 - RNA, 19 nt, Artificial Sequence
  Description of Artificial Sequence: Synthetic oligonucleotide
  Antisense strand to SEQ ID NO: 1512132
guugcuagaaauuacuacu

SEQ ID NO: 1512134 - RNA, 19 nt, Artificial Sequence
  Description of Artificial Sequence: Synthetic oligonucleotide
  Sense strand starting at position 784 of SEQ ID NO: 1244752
ggaaguuccuaacuuuagu

SEQ ID NO: 1512135 - RNA, 19 nt, Artificial Sequence
  Description of Artificial Sequence: Synthetic oligonucleotide
  Antisense strand to SEQ ID NO: 1512134
acuaaaguuaggaacuucc

SEQ ID NO: 1512136 - RNA, 19 nt, Artificial Sequence
  Description of Artificial Sequence: Synthetic oligonucleotide
  Sense strand starting at position 795 of SEQ ID NO: 1244752
acuuuaguucucugaucug

SEQ ID NO: 1512137 - RNA, 19 nt, Artificial Sequence
  Description of Artificial Sequence: Synthetic oligonucleotide
  Antisense strand to SEQ ID NO: 1512136
cagaucagagaacuaaagu

SEQ ID NO: 1512138 - RNA, 19 nt, Artificial Sequence
  Description of Artificial Sequence: Synthetic oligonucleotide
  Sense strand starting at position 798 of SEQ ID NO: 1244752
uuaguucucugaucuggga

SEQ ID NO: 1512139 - RNA, 19 nt, Artificial Sequence
  Description of Artificial Sequence: Synthetic oligonucleotide
  Antisense strand to SEQ ID NO: 1512138
ucccagaucagagaacuaa

SEQ ID NO: 1512140 - RNA, 19 nt, Artificial Sequence
  Description of Artificial Sequence: Synthetic oligonucleotide
  Sense strand starting at position 800 of SEQ ID NO: 1244752
aguucucugaucugggaga

SEQ ID NO: 1512141 - RNA, 19 nt, Artificial Sequence
  Description of Artificial Sequence: Synthetic oligonucleotide
  Antisense strand to SEQ ID NO: 1512140
ucucccagaucagagaacu

SEQ ID NO: 1512142 - RNA, 19 nt, Artificial Sequence
  Description of Artificial Sequence: Synthetic oligonucleotide
  Sense strand starting at position 802 of SEQ ID NO: 1244752
uucucugaucugggagaug

SEQ ID NO: 1512143 - RNA, 19 nt, Artificial Sequence
  Description of Artificial Sequence: Synthetic oligonucleotide
  Antisense strand to SEQ ID NO: 1512142
caucucccagaucagagaa

SEQ ID NO: 1512144 - RNA, 19 nt, Artificial Sequence
  Description of Artificial Sequence: Synthetic oligonucleotide
  Sense strand starting at position 813 of SEQ ID NO: 1244752
gggagauggaucuguacuu

SEQ ID NO: 1512145 - RNA, 19 nt, Artificial Sequence
  Description of Artificial Sequence: Synthetic oligonucleotide
  Antisense strand to SEQ ID NO: 1512144
aaguacagauccaucuccc

SEQ ID NO: 1512146 - RNA, 19 nt, Artificial Sequence
  Description of Artificial Sequence: Synthetic oligonucleotide
  Sense strand starting at position 844 of SEQ ID NO: 1244752
gcuagagucagugaccaua

SEQ ID NO: 1512147 - RNA, 19 nt, Artificial Sequence
  Description of Artificial Sequence: Synthetic oligonucleotide
  Antisense strand to SEQ ID NO: 1512146
uauggucacugacucuagc

SEQ ID NO: 1512148 - RNA, 19 nt, Artificial Sequence
  Description of Artificial Sequence: Synthetic oligonucleotide
  Sense strand starting at position 852 of SEQ ID NO: 1244752
cagugaccauagcuaguua

SEQ ID NO: 1512149 - RNA, 19 nt, Artificial Sequence
  Description of Artificial Sequence: Synthetic oligonucleotide
  Antisense strand to SEQ ID NO: 1512148
uaacuagcuauggucacug

SEQ ID NO: 1512150 - RNA, 19 nt, Artificial Sequence
  Description of Artificial Sequence: Synthetic oligonucleotide
  Sense strand starting at position 962 of SEQ ID NO: 1244752
uggugaguacccgauuguu

SEQ ID NO: 1512151 - RNA, 19 nt, Artificial Sequence
  Description of Artificial Sequence: Synthetic oligonucleotide
  Antisense strand to SEQ ID NO: 1512150
aacaaucggguacucacca

SEQ ID NO: 1512152 - RNA, 19 nt, Artificial Sequence
  Description of Artificial Sequence: Synthetic oligonucleotide
  Sense strand starting at position 975 of SEQ ID NO: 1244752
auuguuugcuguuuacaaa

SEQ ID NO: 1512153 - RNA, 19 nt, Artificial Sequence
  Description of Artificial Sequence: Synthetic oligonucleotide
  Antisense strand to SEQ ID NO: 1512152
uuuguaaacagcaaacaau

SEQ ID NO: 1512154 - RNA, 19 nt, Artificial Sequence
  Description of Artificial Sequence: Synthetic oligonucleotide
  Sense strand starting at position 1003 of SEQ ID NO: 1244752
ucguaaagcuuucuaauau

SEQ ID NO: 1512155 - RNA, 19 nt, Artificial Sequence
  Description of Artificial Sequence: Synthetic oligonucleotide
  Antisense strand to SEQ ID NO: 1512154
auauuagaaagcuuuacga

SEQ ID NO: 1512156 - RNA, 19 nt, Artificial Sequence
  Description of Artificial Sequence: Synthetic oligonucleotide
  Sense strand starting at position 1023 of SEQ ID NO: 1244752
guaacaaugcaaggcuuua

SEQ ID NO: 1512157 - RNA, 19 nt, Artificial Sequence
  Description of Artificial Sequence: Synthetic oligonucleotide
  Antisense strand to SEQ ID NO: 1512156
uaaagccuugcauuguuac

SEQ ID NO: 1512158 - RNA, 19 nt, Artificial Sequence
  Description of Artificial Sequence: Synthetic oligonucleotide
  Sense strand starting at position 1036 of SEQ ID NO: 1244752
gcuuuagucucaccauuua

SEQ ID NO: 1512159 - RNA, 19 nt, Artificial Sequence
  Description of Artificial Sequence: Synthetic oligonucleotide
  Antisense strand to SEQ ID NO: 1512158
uaaauggugagacuaaagc

SEQ ID NO: 1512160 - RNA, 19 nt, Artificial Sequence
  Description of Artificial Sequence: Synthetic oligonucleotide
  Sense strand starting at position 1082 of SEQ ID NO: 1244752
gagacagguuaagaaacaa

SEQ ID NO: 1512161 - RNA, 19 nt, Artificial Sequence
  Description of Artificial Sequence: Synthetic oligonucleotide
  Antisense strand to SEQ ID NO: 1512160
uuguuucuuaaccugucuc

SEQ ID NO: 1512162 - RNA, 19 nt, Artificial Sequence
  Description of Artificial Sequence: Synthetic oligonucleotide
  Sense strand starting at position 1093 of SEQ ID NO: 1244752
agaaacaaaucaggugaua

SEQ ID NO: 1512163 - RNA, 19 nt, Artificial Sequence
  Description of Artificial Sequence: Synthetic oligonucleotide
  Antisense strand to SEQ ID NO: 1512162
uaucaccugauuuguuucu

SEQ ID NO: 1512164 - RNA, 19 nt, Artificial Sequence
  Description of Artificial Sequence: Synthetic oligonucleotide
  Sense strand starting at position 1252 of SEQ ID NO: 1244752
ugaccaagcucugugugau

SEQ ID NO: 1512165 - RNA, 19 nt, Artificial Sequence
  Description of Artificial Sequence: Synthetic oligonucleotide
  Antisense strand to SEQ ID NO: 1512164
aucacacagagcuugguca

SEQ ID NO: 1512166 - RNA, 19 nt, Artificial Sequence
  Description of Artificial Sequence: Synthetic oligonucleotide
  Sense strand starting at position 1253 of SEQ ID NO: 1244752
gaccaagcucugugugauc

SEQ ID NO: 1512167 - RNA, 19 nt, Artificial Sequence
  Description of Artificial Sequence: Synthetic oligonucleotide
  Antisense strand to SEQ ID NO: 1512166
gaucacacagagcuugguc

SEQ ID NO: 1512168 - RNA, 19 nt, Artificial Sequence
  Description of Artificial Sequence: Synthetic oligonucleotide
  Sense strand starting at position 1258 of SEQ ID NO: 1244752
agcucugugugaucucaac

SEQ ID NO: 1512169 - RNA, 19 nt, Artificial Sequence
  Description of Artificial Sequence: Synthetic oligonucleotide
  Antisense strand to SEQ ID NO: 1512168
guugagaucacacagagcu

SEQ ID NO: 1512170 - RNA, 19 nt, Artificial Sequence
  Description of Artificial Sequence: Synthetic oligonucleotide
  Sense strand starting at position 1280 of SEQ ID NO: 1244752
gcaguuaugcuccaucuuu

SEQ ID NO: 1512171 - RNA, 19 nt, Artificial Sequence
  Description of Artificial Sequence: Synthetic oligonucleotide
  Antisense strand to SEQ ID NO: 1512170
aaagauggagcauaacugc

SEQ ID NO: 1512172 - RNA, 19 nt, Artificial Sequence
  Description of Artificial Sequence: Synthetic oligonucleotide
  Sense strand starting at position 1506 of SEQ ID NO: 1244752
uuucuuuccgauuaagcuu

SEQ ID NO: 1512173 - RNA, 19 nt, Artificial Sequence
  Description of Artificial Sequence: Synthetic oligonucleotide
  Antisense strand to SEQ ID NO: 1512172
aagcuuaaucggaaagaaa

SEQ ID NO: 1512174 - RNA, 19 nt, Artificial Sequence
  Description of Artificial Sequence: Synthetic oligonucleotide
  Sense strand starting at position 1541 of SEQ ID NO: 1244752
aagauacacuuugaaggua

SEQ ID NO: 1512175 - RNA, 19 nt, Artificial Sequence
  Description of Artificial Sequence: Synthetic oligonucleotide
  Antisense strand to SEQ ID NO: 1512174
uaccuucaaaguguaucuu

SEQ ID NO: 1512176 - RNA, 19 nt, Artificial Sequence
  Description of Artificial Sequence: Synthetic oligonucleotide
  Sense strand starting at position 1571 of SEQ ID NO: 1244752
cggguuuccuuucuuggau

SEQ ID NO: 1512177 - RNA, 19 nt, Artificial Sequence
  Description of Artificial Sequence: Synthetic oligonucleotide
  Antisense strand to SEQ ID NO: 1512176
auccaagaaaggaaacccg

SEQ ID NO: 1512178 - RNA, 19 nt, Artificial Sequence
  Description of Artificial Sequence: Synthetic oligonucleotide
  Sense strand starting at position 1621 of SEQ ID NO: 1244752
guaagagagucccucccua

SEQ ID NO: 1512179 - RNA, 19 nt, Artificial Sequence
  Description of Artificial Sequence: Synthetic oligonucleotide
  Antisense strand to SEQ ID NO: 1512178
uagggagggacucucuuac

SEQ ID NO: 1512180 - RNA, 19 nt, Artificial Sequence
  Description of Artificial Sequence: Synthetic oligonucleotide
  Sense strand starting at position 1625 of SEQ ID NO: 1244752
gagagucccucccuaggau

SEQ ID NO: 1512181 - RNA, 19 nt, Artificial Sequence
  Description of Artificial Sequence: Synthetic oligonucleotide
  Antisense strand to SEQ ID NO: 1512180
auccuagggagggacucuc

SEQ ID NO: 1512182 - RNA, 19 nt, Artificial Sequence
  Description of Artificial Sequence: Synthetic oligonucleotide
  Sense strand starting at position 1738 of SEQ ID NO: 1244752
gcccucucaccugagaaca

SEQ ID NO: 1512183 - RNA, 19 nt, Artificial Sequence
  Description of Artificial Sequence: Synthetic oligonucleotide
  Antisense strand to SEQ ID NO: 1512182
uguucucaggugagagggc

SEQ ID NO: 1512184 - RNA, 19 nt, Artificial Sequence
  Description of Artificial Sequence: Synthetic oligonucleotide
  Sense strand starting at position 2176 of SEQ ID NO: 1244752
gagggauagucugcagugu

SEQ ID NO: 1512185 - RNA, 19 nt, Artificial Sequence
  Description of Artificial Sequence: Synthetic oligonucleotide
  Antisense strand to SEQ ID NO: 1512184
acacugcagacuaucccuc

SEQ ID NO: 1512186 - RNA, 19 nt, Artificial Sequence
  Description of Artificial Sequence: Synthetic oligonucleotide
  Sense strand starting at position 2255 of SEQ ID NO: 1244752
ccauuugaaccucguaguu

SEQ ID NO: 1512187 - RNA, 19 nt, Artificial Sequence
  Description of Artificial Sequence: Synthetic oligonucleotide
  Antisense strand to SEQ ID NO: 1512186
aacuacgagguucaaaugg

SEQ ID NO: 1512188 - RNA, 19 nt, Artificial Sequence
  Description of Artificial Sequence: Synthetic oligonucleotide
  Sense strand starting at position 2334 of SEQ ID NO: 1244752
gauugucagagugaaaguc

SEQ ID NO: 1512189 - RNA, 19 nt, Artificial Sequence
  Description of Artificial Sequence: Synthetic oligonucleotide
  Antisense strand to SEQ ID NO: 1512188
gacuuucacucugacaauc

SEQ ID NO: 1512190 - RNA, 19 nt, Artificial Sequence
  Description of Artificial Sequence: Synthetic oligonucleotide
  Sense strand starting at position 3032 of SEQ ID NO: 1244752
acaagaucgcgccauuaca

SEQ ID NO: 1512191 - RNA, 19 nt, Artificial Sequence
  Description of Artificial Sequence: Synthetic oligonucleotide
  Antisense strand to SEQ ID NO: 1512190
uguaauggcgcgaucuugu

SEQ ID NO: 1512192 - RNA, 19 nt, Artificial Sequence
  Description of Artificial Sequence: Synthetic oligonucleotide
  Sense strand starting at position 3171 of SEQ ID NO: 1244752
agccuuauauagcuaugua

SEQ ID NO: 1512193 - RNA, 19 nt, Artificial Sequence
  Description of Artificial Sequence: Synthetic oligonucleotide
  Antisense strand to SEQ ID NO: 1512192
uacauagcuauauaaggcu

SEQ ID NO: 1512194 - RNA, 19 nt, Artificial Sequence
  Description of Artificial Sequence: Synthetic oligonucleotide
  Sense strand starting at position 3174 of SEQ ID NO: 1244752
cuuauauagcuauguaguu

SEQ ID NO: 1512195 - RNA, 19 nt, Artificial Sequence
  Description of Artificial Sequence: Synthetic oligonucleotide
  Antisense strand to SEQ ID NO: 1512194
aacuacauagcuauauaag

SEQ ID NO: 1512196 - RNA, 19 nt, Artificial Sequence
  Description of Artificial Sequence: Synthetic oligonucleotide
  Sense strand starting at position 3179 of SEQ ID NO: 1244752
auagcuauguaguugagaa

SEQ ID NO: 1512197 - RNA, 19 nt, Artificial Sequence
  Description of Artificial Sequence: Synthetic oligonucleotide
  Antisense strand to SEQ ID NO: 1512196
uucucaacuacauagcuau

SEQ ID NO: 1512198 - RNA, 19 nt, Artificial Sequence
  Description of Artificial Sequence: Synthetic oligonucleotide
  Sense strand starting at position 3514 of SEQ ID NO: 1244752
cgagacuggaaguguuuau

SEQ ID NO: 1512199 - RNA, 19 nt, Artificial Sequence
  Description of Artificial Sequence: Synthetic oligonucleotide
  Antisense strand to SEQ ID NO: 1512198
auaaacacuuccagucucg

SEQ ID NO: 1512200 - RNA, 19 nt, Artificial Sequence
  Description of Artificial Sequence: Synthetic oligonucleotide
  Sense strand starting at position 3567 of SEQ ID NO: 1244752
ggagucauuucuuaaaggu

SEQ ID NO: 1512201 - RNA, 19 nt, Artificial Sequence
  Description of Artificial Sequence: Synthetic oligonucleotide
  Antisense strand to SEQ ID NO: 1512200
accuuuaagaaaugacucc

SEQ ID NO: 1512202 - RNA, 19 nt, Artificial Sequence
  Description of Artificial Sequence: Synthetic oligonucleotide
  Sense strand starting at position 3577 of SEQ ID NO: 1244752
cuuaaagguuaagugugau

SEQ ID NO: 1512203 - RNA, 19 nt, Artificial Sequence
  Description of Artificial Sequence: Synthetic oligonucleotide
  Antisense strand to SEQ ID NO: 1512202
aucacacuuaaccuuuaag

SEQ ID NO: 1512204 - RNA, 19 nt, Artificial Sequence
  Description of Artificial Sequence: Synthetic oligonucleotide
  Sense strand starting at position 3637 of SEQ ID NO: 1244752
cagaucagccaauguugau

SEQ ID NO: 1512205 - RNA, 19 nt, Artificial Sequence
  Description of Artificial Sequence: Synthetic oligonucleotide
  Antisense strand to SEQ ID NO: 1512204
aucaacauuggcugaucug

SEQ ID NO: 1512206 - RNA, 19 nt, Artificial Sequence
  Description of Artificial Sequence: Synthetic oligonucleotide
  Sense strand starting at position 3710 of SEQ ID NO: 1244752
ucaggaaagucucaagaaa

SEQ ID NO: 1512207 - RNA, 19 nt, Artificial Sequence
  Description of Artificial Sequence: Synthetic oligonucleotide
  Antisense strand to SEQ ID NO: 1512206
uuucuugagacuuuccuga

SEQ ID NO: 1512208 - RNA, 19 nt, Artificial Sequence
  Description of Artificial Sequence: Synthetic oligonucleotide
  Sense strand starting at position 3721 of SEQ ID NO: 1244752
ucaagaaacugccuacuga

SEQ ID NO: 1512209 - RNA, 19 nt, Artificial Sequence
  Description of Artificial Sequence: Synthetic oligonucleotide
  Antisense strand to SEQ ID NO: 1512208
ucaguaggcaguuucuuga

SEQ ID NO: 1512210 - RNA, 19 nt, Artificial Sequence
  Description of Artificial Sequence: Synthetic oligonucleotide
  Sense strand starting at position 303 of SEQ ID NO: 1244753
aguuguaacuguccuuaaa

SEQ ID NO: 1512211 - RNA, 19 nt, Artificial Sequence
  Description of Artificial Sequence: Synthetic oligonucleotide
  Antisense strand to SEQ ID NO: 1512210
uuuaaggacaguuacaacu

SEQ ID NO: 1512212 - RNA, 19 nt, Artificial Sequence
  Description of Artificial Sequence: Synthetic oligonucleotide
  Sense strand starting at position 658 of SEQ ID NO: 1244753
aguaguaauuucuagcaac

SEQ ID NO: 1512213 - RNA, 19 nt, Artificial Sequence
  Description of Artificial Sequence: Synthetic oligonucleotide
  Antisense strand to SEQ ID NO: 1512212
guugcuagaaauuacuacu

SEQ ID NO: 1512214 - RNA, 19 nt, Artificial Sequence
  Description of Artificial Sequence: Synthetic oligonucleotide
  Sense strand starting at position 757 of SEQ ID NO: 1244753
ggaaguuccuaacuuuagu

SEQ ID NO: 1512215 - RNA, 19 nt, Artificial Sequence
  Description of Artificial Sequence: Synthetic oligonucleotide
  Antisense strand to SEQ ID NO: 1512214
acuaaaguuaggaacuucc

SEQ ID NO: 1512216 - RNA, 19 nt, Artificial Sequence
  Description of Artificial Sequence: Synthetic oligonucleotide
  Sense strand starting at position 768 of SEQ ID NO: 1244753
acuuuaguucucugaucug

SEQ ID NO: 1512217 - RNA, 19 nt, Artificial Sequence
  Description of Artificial Sequence: Synthetic oligonucleotide
  Antisense strand to SEQ ID NO: 1512216
cagaucagagaacuaaagu

SEQ ID NO: 1512218 - RNA, 19 nt, Artificial Sequence
  Description of Artificial Sequence: Synthetic oligonucleotide
  Sense strand starting at position 771 of SEQ ID NO: 1244753
uuaguucucugaucuggga

SEQ ID NO: 1512219 - RNA, 19 nt, Artificial Sequence
  Description of Artificial Sequence: Synthetic oligonucleotide
  Antisense strand to SEQ ID NO: 1512218
ucccagaucagagaacuaa

SEQ ID NO: 1512220 - RNA, 19 nt, Artificial Sequence
  Description of Artificial Sequence: Synthetic oligonucleotide
  Sense strand starting at position 773 of SEQ ID NO: 1244753
aguucucugaucugggaga

SEQ ID NO: 1512221 - RNA, 19 nt, Artificial Sequence
  Description of Artificial Sequence: Synthetic oligonucleotide
  Antisense strand to SEQ ID NO: 1512220
ucucccagaucagagaacu

SEQ ID NO: 1512222 - RNA, 19 nt, Artificial Sequence
  Description of Artificial Sequence: Synthetic oligonucleotide
  Sense strand starting at position 775 of SEQ ID NO: 1244753
uucucugaucugggagaug

SEQ ID NO: 1512223 - RNA, 19 nt, Artificial Sequence
  Description of Artificial Sequence: Synthetic oligonucleotide
  Antisense strand to SEQ ID NO: 1512222
caucucccagaucagagaa

SEQ ID NO: 1512224 - RNA, 19 nt, Artificial Sequence
  Description of Artificial Sequence: Synthetic oligonucleotide
  Sense strand starting at position 786 of SEQ ID NO: 1244753
gggagauggaucuguacuu

SEQ ID NO: 1512225 - RNA, 19 nt, Artificial Sequence
  Description of Artificial Sequence: Synthetic oligonucleotide
  Antisense strand to SEQ ID NO: 1512224
aaguacagauccaucuccc

SEQ ID NO: 1512226 - RNA, 19 nt, Artificial Sequence
  Description of Artificial Sequence: Synthetic oligonucleotide
  Sense strand starting at position 817 of SEQ ID NO: 1244753
gcuagagucagugaccaua

SEQ ID NO: 1512227 - RNA, 19 nt, Artificial Sequence
  Description of Artificial Sequence: Synthetic oligonucleotide
  Antisense strand to SEQ ID NO: 1512226
uauggucacugacucuagc

SEQ ID NO: 1512228 - RNA, 19 nt, Artificial Sequence
  Description of Artificial Sequence: Synthetic oligonucleotide
  Sense strand starting at position 825 of SEQ ID NO: 1244753
cagugaccauagcuaguua

SEQ ID NO: 1512229 - RNA, 19 nt, Artificial Sequence
  Description of Artificial Sequence: Synthetic oligonucleotide
  Antisense strand to SEQ ID NO: 1512228
uaacuagcuauggucacug

SEQ ID NO: 1512230 - RNA, 19 nt, Artificial Sequence
  Description of Artificial Sequence: Synthetic oligonucleotide
  Sense strand starting at position 935 of SEQ ID NO: 1244753
uggugaguacccgauuguu

SEQ ID NO: 1512231 - RNA, 19 nt, Artificial Sequence
  Description of Artificial Sequence: Synthetic oligonucleotide
  Antisense strand to SEQ ID NO: 1512230
aacaaucggguacucacca

SEQ ID NO: 1512232 - RNA, 19 nt, Artificial Sequence
  Description of Artificial Sequence: Synthetic oligonucleotide
  Sense strand starting at position 948 of SEQ ID NO: 1244753
auuguuugcuguuuacaaa

SEQ ID NO: 1512233 - RNA, 19 nt, Artificial Sequence
  Description of Artificial Sequence: Synthetic oligonucleotide
  Antisense strand to SEQ ID NO: 1512232
uuuguaaacagcaaacaau

SEQ ID NO: 1512234 - RNA, 19 nt, Artificial Sequence
  Description of Artificial Sequence: Synthetic oligonucleotide
  Sense strand starting at position 976 of SEQ ID NO: 1244753
ucguaaagcuuucuaauau

SEQ ID NO: 1512235 - RNA, 19 nt, Artificial Sequence
  Description of Artificial Sequence: Synthetic oligonucleotide
  Antisense strand to SEQ ID NO: 1512234
auauuagaaagcuuuacga

SEQ ID NO: 1512236 - RNA, 19 nt, Artificial Sequence
  Description of Artificial Sequence: Synthetic oligonucleotide
  Sense strand starting at position 996 of SEQ ID NO: 1244753
guaacaaugcaaggcuuua

SEQ ID NO: 1512237 - RNA, 19 nt, Artificial Sequence
  Description of Artificial Sequence: Synthetic oligonucleotide
  Antisense strand to SEQ ID NO: 1512236
uaaagccuugcauuguuac

SEQ ID NO: 1512238 - RNA, 19 nt, Artificial Sequence
  Description of Artificial Sequence: Synthetic oligonucleotide
  Sense strand starting at position 1009 of SEQ ID NO: 1244753
gcuuuagucucaccauuua

SEQ ID NO: 1512239 - RNA, 19 nt, Artificial Sequence
  Description of Artificial Sequence: Synthetic oligonucleotide
  Antisense strand to SEQ ID NO: 1512238
uaaauggugagacuaaagc

SEQ ID NO: 1512240 - RNA, 19 nt, Artificial Sequence
  Description of Artificial Sequence: Synthetic oligonucleotide
  Sense strand starting at position 1055 of SEQ ID NO: 1244753
gagacagguuaagaaacaa

SEQ ID NO: 1512241 - RNA, 19 nt, Artificial Sequence
  Description of Artificial Sequence: Synthetic oligonucleotide
  Antisense strand to SEQ ID NO: 1512240
uuguuucuuaaccugucuc

SEQ ID NO: 1512242 - RNA, 19 nt, Artificial Sequence
  Description of Artificial Sequence: Synthetic oligonucleotide
  Sense strand starting at position 1066 of SEQ ID NO: 1244753
agaaacaaaucaggugaua

SEQ ID NO: 1512243 - RNA, 19 nt, Artificial Sequence
  Description of Artificial Sequence: Synthetic oligonucleotide
  Antisense strand to SEQ ID NO: 1512242
uaucaccugauuuguuucu

SEQ ID NO: 1512244 - RNA, 19 nt, Artificial Sequence
  Description of Artificial Sequence: Synthetic oligonucleotide
  Sense strand starting at position 1225 of SEQ ID NO: 1244753
ugaccaagcucugugugau

SEQ ID NO: 1512245 - RNA, 19 nt, Artificial Sequence
  Description of Artificial Sequence: Synthetic oligonucleotide
  Antisense strand to SEQ ID NO: 1512244
aucacacagagcuugguca

SEQ ID NO: 1512246 - RNA, 19 nt, Artificial Sequence
  Description of Artificial Sequence: Synthetic oligonucleotide
  Sense strand starting at position 1226 of SEQ ID NO: 1244753
gaccaagcucugugugauc

SEQ ID NO: 1512247 - RNA, 19 nt, Artificial Sequence
  Description of Artificial Sequence: Synthetic oligonucleotide
  Antisense strand to SEQ ID NO: 1512246
gaucacacagagcuugguc

SEQ ID NO: 1512248 - RNA, 19 nt, Artificial Sequence
  Description of Artificial Sequence: Synthetic oligonucleotide
  Sense strand starting at position 1231 of SEQ ID NO: 1244753
agcucugugugaucucaac

SEQ ID NO: 1512249 - RNA, 19 nt, Artificial Sequence
  Description of Artificial Sequence: Synthetic oligonucleotide
  Antisense strand to SEQ ID NO: 1512248
guugagaucacacagagcu

SEQ ID NO: 1512250 - RNA, 19 nt, Artificial Sequence
  Description of Artificial Sequence: Synthetic oligonucleotide
  Sense strand starting at position 1253 of SEQ ID NO: 1244753
gcaguuaugcuccaucuuu

SEQ ID NO: 1512251 - RNA, 19 nt, Artificial Sequence
  Description of Artificial Sequence: Synthetic oligonucleotide
  Antisense strand to SEQ ID NO: 1512250
aaagauggagcauaacugc

SEQ ID NO: 1512252 - RNA, 19 nt, Artificial Sequence
  Description of Artificial Sequence: Synthetic oligonucleotide
  Sense strand starting at position 1479 of SEQ ID NO: 1244753
uuucuuuccgauuaagcuu

SEQ ID NO: 1512253 - RNA, 19 nt, Artificial Sequence
  Description of Artificial Sequence: Synthetic oligonucleotide
  Antisense strand to SEQ ID NO: 1512252
aagcuuaaucggaaagaaa

SEQ ID NO: 1512254 - RNA, 19 nt, Artificial Sequence
  Description of Artificial Sequence: Synthetic oligonucleotide
  Sense strand starting at position 1514 of SEQ ID NO: 1244753
aagauacacuuugaaggua

SEQ ID NO: 1512255 - RNA, 19 nt, Artificial Sequence
  Description of Artificial Sequence: Synthetic oligonucleotide
  Antisense strand to SEQ ID NO: 1512254
uaccuucaaaguguaucuu

SEQ ID NO: 1512256 - RNA, 19 nt, Artificial Sequence
  Description of Artificial Sequence: Synthetic oligonucleotide
  Sense strand starting at position 1544 of SEQ ID NO: 1244753
cggguuuccuuucuuggau

SEQ ID NO: 1512257 - RNA, 19 nt, Artificial Sequence
  Description of Artificial Sequence: Synthetic oligonucleotide
  Antisense strand to SEQ ID NO: 1512256
auccaagaaaggaaacccg

SEQ ID NO: 1512258 - RNA, 19 nt, Artificial Sequence
  Description of Artificial Sequence: Synthetic oligonucleotide
  Sense strand starting at position 1594 of SEQ ID NO: 1244753
guaagagagucccucccua

SEQ ID NO: 1512259 - RNA, 19 nt, Artificial Sequence
  Description of Artificial Sequence: Synthetic oligonucleotide
  Antisense strand to SEQ ID NO: 1512258
uagggagggacucucuuac

SEQ ID NO: 1512260 - RNA, 19 nt, Artificial Sequence
  Description of Artificial Sequence: Synthetic oligonucleotide
  Sense strand starting at position 1598 of SEQ ID NO: 1244753
gagagucccucccuaggau

SEQ ID NO: 1512261 - RNA, 19 nt, Artificial Sequence
  Description of Artificial Sequence: Synthetic oligonucleotide
  Antisense strand to SEQ ID NO: 1512260
auccuagggagggacucuc

SEQ ID NO: 1512262 - RNA, 19 nt, Artificial Sequence
  Description of Artificial Sequence: Synthetic oligonucleotide
  Sense strand starting at position 1711 of SEQ ID NO: 1244753
gcccucucaccugagaaca

SEQ ID NO: 1512263 - RNA, 19 nt, Artificial Sequence
  Description of Artificial Sequence: Synthetic oligonucleotide
  Antisense strand to SEQ ID NO: 1512262
uguucucaggugagagggc

SEQ ID NO: 1512264 - RNA, 19 nt, Artificial Sequence
  Description of Artificial Sequence: Synthetic oligonucleotide
  Sense strand starting at position 2149 of SEQ ID NO: 1244753
gagggauagucugcagugu

SEQ ID NO: 1512265 - RNA, 19 nt, Artificial Sequence
  Description of Artificial Sequence: Synthetic oligonucleotide
  Antisense strand to SEQ ID NO: 1512264
acacugcagacuaucccuc

SEQ ID NO: 1512266 - RNA, 19 nt, Artificial Sequence
  Description of Artificial Sequence: Synthetic oligonucleotide
  Sense strand starting at position 2228 of SEQ ID NO: 1244753
ccauuugaaccucguaguu

SEQ ID NO: 1512267 - RNA, 19 nt, Artificial Sequence
  Description of Artificial Sequence: Synthetic oligonucleotide
  Antisense strand to SEQ ID NO: 1512266
aacuacgagguucaaaugg

SEQ ID NO: 1512268 - RNA, 19 nt, Artificial Sequence
  Description of Artificial Sequence: Synthetic oligonucleotide
  Sense strand starting at position 2307 of SEQ ID NO: 1244753
gauugucagagugaaaguc

SEQ ID NO: 1512269 - RNA, 19 nt, Artificial Sequence
  Description of Artificial Sequence: Synthetic oligonucleotide
  Antisense strand to SEQ ID NO: 1512268
gacuuucacucugacaauc

SEQ ID NO: 1512270 - RNA, 19 nt, Artificial Sequence
  Description of Artificial Sequence: Synthetic oligonucleotide
  Sense strand starting at position 3005 of SEQ ID NO: 1244753
acaagaucgcgccauuaca

SEQ ID NO: 1512271 - RNA, 19 nt, Artificial Sequence
  Description of Artificial Sequence: Synthetic oligonucleotide
  Antisense strand to SEQ ID NO: 1512270
uguaauggcgcgaucuugu

SEQ ID NO: 1512272 - RNA, 19 nt, Artificial Sequence
  Description of Artificial Sequence: Synthetic oligonucleotide
  Sense strand starting at position 3144 of SEQ ID NO: 1244753
agccuuauauagcuaugua

SEQ ID NO: 1512273 - RNA, 19 nt, Artificial Sequence
  Description of Artificial Sequence: Synthetic oligonucleotide
  Antisense strand to SEQ ID NO: 1512272
uacauagcuauauaaggcu

SEQ ID NO: 1512274 - RNA, 19 nt, Artificial Sequence
  Description of Artificial Sequence: Synthetic oligonucleotide
  Sense strand starting at position 3147 of SEQ ID NO: 1244753
cuuauauagcuauguaguu

SEQ ID NO: 1512275 - RNA, 19 nt, Artificial Sequence
  Description of Artificial Sequence: Synthetic oligonucleotide
  Antisense strand to SEQ ID NO: 1512274
aacuacauagcuauauaag

SEQ ID NO: 1512276 - RNA, 19 nt, Artificial Sequence
  Description of Artificial Sequence: Synthetic oligonucleotide
  Sense strand starting at position 3152 of SEQ ID NO: 1244753
auagcuauguaguugagaa

SEQ ID NO: 1512277 - RNA, 19 nt, Artificial Sequence
  Description of Artificial Sequence: Synthetic oligonucleotide
  Antisense strand to SEQ ID NO: 1512276
uucucaacuacauagcuau

SEQ ID NO: 1512278 - RNA, 19 nt, Artificial Sequence
  Description of Artificial Sequence: Synthetic oligonucleotide
  Sense strand starting at position 3487 of SEQ ID NO: 1244753
cgagacuggaaguguuuau

SEQ ID NO: 1512279 - RNA, 19 nt, Artificial Sequence
  Description of Artificial Sequence: Synthetic oligonucleotide
  Antisense strand to SEQ ID NO: 1512278
auaaacacuuccagucucg

SEQ ID NO: 1512280 - RNA, 19 nt, Artificial Sequence
  Description of Artificial Sequence: Synthetic oligonucleotide
  Sense strand starting at position 3540 of SEQ ID NO: 1244753
ggagucauuucuuaaaggu

SEQ ID NO: 1512281 - RNA, 19 nt, Artificial Sequence
  Description of Artificial Sequence: Synthetic oligonucleotide
  Antisense strand to SEQ ID NO: 1512280
accuuuaagaaaugacucc

SEQ ID NO: 1512282 - RNA, 19 nt, Artificial Sequence
  Description of Artificial Sequence: Synthetic oligonucleotide
  Sense strand starting at position 3550 of SEQ ID NO: 1244753
cuuaaagguuaagugugau

SEQ ID NO: 1512283 - RNA, 19 nt, Artificial Sequence
  Description of Artificial Sequence: Synthetic oligonucleotide
  Antisense strand to SEQ ID NO: 1512282
aucacacuuaaccuuuaag

SEQ ID NO: 1512284 - RNA, 19 nt, Artificial Sequence
  Description of Artificial Sequence: Synthetic oligonucleotide
  Sense strand starting at position 3610 of SEQ ID NO: 1244753
cagaucagccaauguugau

SEQ ID NO: 1512285 - RNA, 19 nt, Artificial Sequence
  Description of Artificial Sequence: Synthetic oligonucleotide
  Antisense strand to SEQ ID NO: 1512284
aucaacauuggcugaucug

SEQ ID NO: 1512286 - RNA, 19 nt, Artificial Sequence
  Description of Artificial Sequence: Synthetic oligonucleotide
  Sense strand starting at position 3683 of SEQ ID NO: 1244753
ucaggaaagucucaagaaa

SEQ ID NO: 1512287 - RNA, 19 nt, Artificial Sequence
  Description of Artificial Sequence: Synthetic oligonucleotide
  Antisense strand to SEQ ID NO: 1512286
uuucuugagacuuuccuga

SEQ ID NO: 1512288 - RNA, 19 nt, Artificial Sequence
  Description of Artificial Sequence: Synthetic oligonucleotide
  Sense strand starting at position 3694 of SEQ ID NO: 1244753
ucaagaaacugccuacuga

SEQ ID NO: 1512289 - RNA, 19 nt, Artificial Sequence
  Description of Artificial Sequence: Synthetic oligonucleotide
  Antisense strand to SEQ ID NO: 1512288
ucaguaggcaguuucuuga

SEQ ID NO: 1512290 - RNA, 19 nt, Artificial Sequence
  Description of Artificial Sequence: Synthetic oligonucleotide
  Sense strand starting at position 62 of SEQ ID NO: 1244754
ggagaauccacuugugguu

SEQ ID NO: 1512291 - RNA, 19 nt, Artificial Sequence
  Description of Artificial Sequence: Synthetic oligonucleotide
  Antisense strand to SEQ ID NO: 1512290
aaccacaaguggauucucc

SEQ ID NO: 1512292 - RNA, 19 nt, Artificial Sequence
  Description of Artificial Sequence: Synthetic oligonucleotide
  Sense strand starting at position 392 of SEQ ID NO: 1244754
gggugacuuucucauagga

SEQ ID NO: 1512293 - RNA, 19 nt, Artificial Sequence
  Description of Artificial Sequence: Synthetic oligonucleotide
  Antisense strand to SEQ ID NO: 1512292
uccuaugagaaagucaccc

SEQ ID NO: 1512294 - RNA, 19 nt, Artificial Sequence
  Description of Artificial Sequence: Synthetic oligonucleotide
  Sense strand starting at position 394 of SEQ ID NO: 1244754
gugacuuucucauaggagu

SEQ ID NO: 1512295 - RNA, 19 nt, Artificial Sequence
  Description of Artificial Sequence: Synthetic oligonucleotide
  Antisense strand to SEQ ID NO: 1512294
acuccuaugagaaagucac

SEQ ID NO: 1512296 - RNA, 19 nt, Artificial Sequence
  Description of Artificial Sequence: Synthetic oligonucleotide
  Sense strand starting at position 427 of SEQ ID NO: 1244754
acggucuuccgacagagau

SEQ ID NO: 1512297 - RNA, 19 nt, Artificial Sequence
  Description of Artificial Sequence: Synthetic oligonucleotide
  Antisense strand to SEQ ID NO: 1512296
aucucugucggaagaccgu

SEQ ID NO: 1512298 - RNA, 19 nt, Artificial Sequence
  Description of Artificial Sequence: Synthetic oligonucleotide
  Sense strand starting at position 695 of SEQ ID NO: 1244754
gaucgcucugcagagagaa

SEQ ID NO: 1512299 - RNA, 19 nt, Artificial Sequence
  Description of Artificial Sequence: Synthetic oligonucleotide
  Antisense strand to SEQ ID NO: 1512298
uucucucugcagagcgauc

SEQ ID NO: 1512300 - RNA, 19 nt, Artificial Sequence
  Description of Artificial Sequence: Synthetic oligonucleotide
  Sense strand starting at position 737 of SEQ ID NO: 1244754
gcagguucuuggucccaga

SEQ ID NO: 1512301 - RNA, 19 nt, Artificial Sequence
  Description of Artificial Sequence: Synthetic oligonucleotide
  Antisense strand to SEQ ID NO: 1512300
ucugggaccaagaaccugc

SEQ ID NO: 1512302 - RNA, 19 nt, Artificial Sequence
  Description of Artificial Sequence: Synthetic oligonucleotide
  Sense strand starting at position 795 of SEQ ID NO: 1244754
cgagcugucgcggaucaga

SEQ ID NO: 1512303 - RNA, 19 nt, Artificial Sequence
  Description of Artificial Sequence: Synthetic oligonucleotide
  Antisense strand to SEQ ID NO: 1512302
ucugauccgcgacagcucg

SEQ ID NO: 1512304 - RNA, 19 nt, Artificial Sequence
  Description of Artificial Sequence: Synthetic oligonucleotide
  Sense strand starting at position 994 of SEQ ID NO: 1244754
ggaaacuugcuguggguga

SEQ ID NO: 1512305 - RNA, 19 nt, Artificial Sequence
  Description of Artificial Sequence: Synthetic oligonucleotide
  Antisense strand to SEQ ID NO: 1512304
ucacccacagcaaguuucc

SEQ ID NO: 1512306 - RNA, 19 nt, Artificial Sequence
  Description of Artificial Sequence: Synthetic oligonucleotide
  Sense strand starting at position 1353 of SEQ ID NO: 1244754
gaaguuaggucuccaggag

SEQ ID NO: 1512307 - RNA, 19 nt, Artificial Sequence
  Description of Artificial Sequence: Synthetic oligonucleotide
  Antisense strand to SEQ ID NO: 1512306
cuccuggagaccuaacuuc

SEQ ID NO: 1512308 - RNA, 19 nt, Artificial Sequence
  Description of Artificial Sequence: Synthetic oligonucleotide
  Sense strand starting at position 1354 of SEQ ID NO: 1244754
aaguuaggucuccaggagu

SEQ ID NO: 1512309 - RNA, 19 nt, Artificial Sequence
  Description of Artificial Sequence: Synthetic oligonucleotide
  Antisense strand to SEQ ID NO: 1512308
acuccuggagaccuaacuu

SEQ ID NO: 1512310 - RNA, 19 nt, Artificial Sequence
  Description of Artificial Sequence: Synthetic oligonucleotide
  Sense strand starting at position 1512 of SEQ ID NO: 1244754
gccggaguauuccgggaac

SEQ ID NO: 1512311 - RNA, 19 nt, Artificial Sequence
  Description of Artificial Sequence: Synthetic oligonucleotide
  Antisense strand to SEQ ID NO: 1512310
guucccggaauacuccggc

SEQ ID NO: 1512312 - RNA, 19 nt, Artificial Sequence
  Description of Artificial Sequence: Synthetic oligonucleotide
  Sense strand starting at position 1514 of SEQ ID NO: 1244754
cggaguauuccgggaaccu

SEQ ID NO: 1512313 - RNA, 19 nt, Artificial Sequence
  Description of Artificial Sequence: Synthetic oligonucleotide
  Antisense strand to SEQ ID NO: 1512312
agguucccggaauacuccg

SEQ ID NO: 1512314 - RNA, 19 nt, Artificial Sequence
  Description of Artificial Sequence: Synthetic oligonucleotide
  Sense strand starting at position 1515 of SEQ ID NO: 1244754
ggaguauuccgggaaccug

SEQ ID NO: 1512315 - RNA, 19 nt, Artificial Sequence
  Description of Artificial Sequence: Synthetic oligonucleotide
  Antisense strand to SEQ ID NO: 1512314
cagguucccggaauacucc

SEQ ID NO: 1512316 - RNA, 19 nt, Artificial Sequence
  Description of Artificial Sequence: Synthetic oligonucleotide
  Sense strand starting at position 1782 of SEQ ID NO: 1244754
ccgugaaguccacaaagga

SEQ ID NO: 1512317 - RNA, 19 nt, Artificial Sequence
  Description of Artificial Sequence: Synthetic oligonucleotide
  Antisense strand to SEQ ID NO: 1512316
uccuuuguggacuucacgg

SEQ ID NO: 1512318 - RNA, 19 nt, Artificial Sequence
  Description of Artificial Sequence: Synthetic oligonucleotide
  Sense strand starting at position 2009 of SEQ ID NO: 1244754
ccgcgcucgcggguauaua

SEQ ID NO: 1512319 - RNA, 19 nt, Artificial Sequence
  Description of Artificial Sequence: Synthetic oligonucleotide
  Antisense strand to SEQ ID NO: 1512318
uauauacccgcgagcgcgg

SEQ ID NO: 1512320 - RNA, 19 nt, Artificial Sequence
  Description of Artificial Sequence: Synthetic oligonucleotide
  Sense strand starting at position 2071 of SEQ ID NO: 1244754
ccggccuucuuguaauguu

SEQ ID NO: 1512321 - RNA, 19 nt, Artificial Sequence
  Description of Artificial Sequence: Synthetic oligonucleotide
  Antisense strand to SEQ ID NO: 1512320
aacauuacaagaaggccgg

SEQ ID NO: 1512322 - RNA, 19 nt, Artificial Sequence
  Description of Artificial Sequence: Synthetic oligonucleotide
  Sense strand starting at position 2080 of SEQ ID NO: 1244754
uuguaauguuuagucacua

SEQ ID NO: 1512323 - RNA, 19 nt, Artificial Sequence
  Description of Artificial Sequence: Synthetic oligonucleotide
  Antisense strand to SEQ ID NO: 1512322
uagugacuaaacauuacaa

SEQ ID NO: 1512324 - RNA, 19 nt, Artificial Sequence
  Description of Artificial Sequence: Synthetic oligonucleotide
  Sense strand starting at position 2081 of SEQ ID NO: 1244754
uguaauguuuagucacuac

SEQ ID NO: 1512325 - RNA, 19 nt, Artificial Sequence
  Description of Artificial Sequence: Synthetic oligonucleotide
  Antisense strand to SEQ ID NO: 1512324
guagugacuaaacauuaca

SEQ ID NO: 1512326 - RNA, 19 nt, Artificial Sequence
  Description of Artificial Sequence: Synthetic oligonucleotide
  Sense strand starting at position 2346 of SEQ ID NO: 1244754
aaggcugauuucuggcaga

SEQ ID NO: 1512327 - RNA, 19 nt, Artificial Sequence
  Description of Artificial Sequence: Synthetic oligonucleotide
  Antisense strand to SEQ ID NO: 1512326
ucugccagaaaucagccuu

SEQ ID NO: 1512328 - RNA, 19 nt, Artificial Sequence
  Description of Artificial Sequence: Synthetic oligonucleotide
  Sense strand starting at position 2688 of SEQ ID NO: 1244754
cugccagguucuuugccaa

SEQ ID NO: 1512329 - RNA, 19 nt, Artificial Sequence
  Description of Artificial Sequence: Synthetic oligonucleotide
  Antisense strand to SEQ ID NO: 1512328
uuggcaaagaaccuggcag

SEQ ID NO: 1512330 - RNA, 19 nt, Artificial Sequence
  Description of Artificial Sequence: Synthetic oligonucleotide
  Sense strand starting at position 3046 of SEQ ID NO: 1244754
gagagaauuuccggaaagc

SEQ ID NO: 1512331 - RNA, 19 nt, Artificial Sequence
  Description of Artificial Sequence: Synthetic oligonucleotide
  Antisense strand to SEQ ID NO: 1512330
gcuuuccggaaauucucuc

SEQ ID NO: 1512332 - RNA, 19 nt, Artificial Sequence
  Description of Artificial Sequence: Synthetic oligonucleotide
  Sense strand starting at position 3184 of SEQ ID NO: 1244754
ggaagugauugaggugaaa

SEQ ID NO: 1512333 - RNA, 19 nt, Artificial Sequence
  Description of Artificial Sequence: Synthetic oligonucleotide
  Antisense strand to SEQ ID NO: 1512332
uuucaccucaaucacuucc

SEQ ID NO: 1512334 - RNA, 19 nt, Artificial Sequence
  Description of Artificial Sequence: Synthetic oligonucleotide
  Sense strand starting at position 3196 of SEQ ID NO: 1244754
ggugaaagauugguuugcu

SEQ ID NO: 1512335 - RNA, 19 nt, Artificial Sequence
  Description of Artificial Sequence: Synthetic oligonucleotide
  Antisense strand to SEQ ID NO: 1512334
agcaaaccaaucuuucacc

SEQ ID NO: 1512336 - RNA, 19 nt, Artificial Sequence
  Description of Artificial Sequence: Synthetic oligonucleotide
  Sense strand starting at position 3197 of SEQ ID NO: 1244754
gugaaagauugguuugcug

SEQ ID NO: 1512337 - RNA, 19 nt, Artificial Sequence
  Description of Artificial Sequence: Synthetic oligonucleotide
  Antisense strand to SEQ ID NO: 1512336
cagcaaaccaaucuuucac

SEQ ID NO: 1512338 - RNA, 19 nt, Artificial Sequence
  Description of Artificial Sequence: Synthetic oligonucleotide
  Sense strand starting at position 3199 of SEQ ID NO: 1244754
gaaagauugguuugcugcu

SEQ ID NO: 1512339 - RNA, 19 nt, Artificial Sequence
  Description of Artificial Sequence: Synthetic oligonucleotide
  Antisense strand to SEQ ID NO: 1512338
agcagcaaaccaaucuuuc

SEQ ID NO: 1512340 - RNA, 19 nt, Artificial Sequence
  Description of Artificial Sequence: Synthetic oligonucleotide
  Sense strand starting at position 3227 of SEQ ID NO: 1244754
ggcacugacguagauaguu

SEQ ID NO: 1512341 - RNA, 19 nt, Artificial Sequence
  Description of Artificial Sequence: Synthetic oligonucleotide
  Antisense strand to SEQ ID NO: 1512340
aacuaucuacgucagugcc

SEQ ID NO: 1512342 - RNA, 19 nt, Artificial Sequence
  Description of Artificial Sequence: Synthetic oligonucleotide
  Sense strand starting at position 3402 of SEQ ID NO: 1244754
gcgcucuuccuagauacca

SEQ ID NO: 1512343 - RNA, 19 nt, Artificial Sequence
  Description of Artificial Sequence: Synthetic oligonucleotide
  Antisense strand to SEQ ID NO: 1512342
ugguaucuaggaagagcgc

SEQ ID NO: 1512344 - RNA, 19 nt, Artificial Sequence
  Description of Artificial Sequence: Synthetic oligonucleotide
  Sense strand starting at position 3420 of SEQ ID NO: 1244754
aggauaaugaggugcugaa

SEQ ID NO: 1512345 - RNA, 19 nt, Artificial Sequence
  Description of Artificial Sequence: Synthetic oligonucleotide
  Antisense strand to SEQ ID NO: 1512344
uucagcaccucauuauccu

SEQ ID NO: 1512346 - RNA, 19 nt, Artificial Sequence
  Description of Artificial Sequence: Synthetic oligonucleotide
  Sense strand starting at position 3595 of SEQ ID NO: 1244754
cagugagauuuggacaaga

SEQ ID NO: 1512347 - RNA, 19 nt, Artificial Sequence
  Description of Artificial Sequence: Synthetic oligonucleotide
  Antisense strand to SEQ ID NO: 1512346
ucuuguccaaaucucacug

SEQ ID NO: 1512348 - RNA, 19 nt, Artificial Sequence
  Description of Artificial Sequence: Synthetic oligonucleotide
  Sense strand starting at position 143 of SEQ ID NO: 1244755
ucuuacugguacuuagaau

SEQ ID NO: 1512349 - RNA, 19 nt, Artificial Sequence
  Description of Artificial Sequence: Synthetic oligonucleotide
  Antisense strand to SEQ ID NO: 1512348
auucuaaguaccaguaaga

SEQ ID NO: 1512350 - RNA, 19 nt, Artificial Sequence
  Description of Artificial Sequence: Synthetic oligonucleotide
  Sense strand starting at position 593 of SEQ ID NO: 1244755
uuugaauagagguguccaa

SEQ ID NO: 1512351 - RNA, 19 nt, Artificial Sequence
  Description of Artificial Sequence: Synthetic oligonucleotide
  Antisense strand to SEQ ID NO: 1512350
uuggacaccucuauucaaa

SEQ ID NO: 1512352 - RNA, 19 nt, Artificial Sequence
  Description of Artificial Sequence: Synthetic oligonucleotide
  Sense strand starting at position 611 of SEQ ID NO: 1244755
auugauugcuggccuacaa

SEQ ID NO: 1512353 - RNA, 19 nt, Artificial Sequence
  Description of Artificial Sequence: Synthetic oligonucleotide
  Antisense strand to SEQ ID NO: 1512352
uuguaggccagcaaucaau

SEQ ID NO: 1512354 - RNA, 19 nt, Artificial Sequence
  Description of Artificial Sequence: Synthetic oligonucleotide
  Sense strand starting at position 626 of SEQ ID NO: 1244755
acaauugcauuugaagauu

SEQ ID NO: 1512355 - RNA, 19 nt, Artificial Sequence
  Description of Artificial Sequence: Synthetic oligonucleotide
  Antisense strand to SEQ ID NO: 1512354
aaucuucaaaugcaauugu

SEQ ID NO: 1512356 - RNA, 19 nt, Artificial Sequence
  Description of Artificial Sequence: Synthetic oligonucleotide
  Sense strand starting at position 635 of SEQ ID NO: 1244755
uuugaagauucuccuguca

SEQ ID NO: 1512357 - RNA, 19 nt, Artificial Sequence
  Description of Artificial Sequence: Synthetic oligonucleotide
  Antisense strand to SEQ ID NO: 1512356
ugacaggagaaucuucaaa

SEQ ID NO: 1512358 - RNA, 19 nt, Artificial Sequence
  Description of Artificial Sequence: Synthetic oligonucleotide
  Sense strand starting at position 648 of SEQ ID NO: 1244755
cugucauuugcaugcauga

SEQ ID NO: 1512359 - RNA, 19 nt, Artificial Sequence
  Description of Artificial Sequence: Synthetic oligonucleotide
  Antisense strand to SEQ ID NO: 1512358
ucaugcaugcaaaugacag

SEQ ID NO: 1512360 - RNA, 19 nt, Artificial Sequence
  Description of Artificial Sequence: Synthetic oligonucleotide
  Sense strand starting at position 650 of SEQ ID NO: 1244755
gucauuugcaugcaugagu

SEQ ID NO: 1512361 - RNA, 19 nt, Artificial Sequence
  Description of Artificial Sequence: Synthetic oligonucleotide
  Antisense strand to SEQ ID NO: 1512360
acucaugcaugcaaaugac

SEQ ID NO: 1512362 - RNA, 19 nt, Artificial Sequence
  Description of Artificial Sequence: Synthetic oligonucleotide
  Sense strand starting at position 683 of SEQ ID NO: 1244755
ggugcugguacacagaaua

SEQ ID NO: 1512363 - RNA, 19 nt, Artificial Sequence
  Description of Artificial Sequence: Synthetic oligonucleotide
  Antisense strand to SEQ ID NO: 1512362
uauucuguguaccagcacc

SEQ ID NO: 1512364 - RNA, 19 nt, Artificial Sequence
  Description of Artificial Sequence: Synthetic oligonucleotide
  Sense strand starting at position 927 of SEQ ID NO: 1244755
acaauuagcgcugaccuua

SEQ ID NO: 1512365 - RNA, 19 nt, Artificial Sequence
  Description of Artificial Sequence: Synthetic oligonucleotide
  Antisense strand to SEQ ID NO: 1512364
uaaggucagcgcuaauugu

SEQ ID NO: 1512366 - RNA, 19 nt, Artificial Sequence
  Description of Artificial Sequence: Synthetic oligonucleotide
  Sense strand starting at position 939 of SEQ ID NO: 1244755
gaccuuaugcgagauguua

SEQ ID NO: 1512367 - RNA, 19 nt, Artificial Sequence
  Description of Artificial Sequence: Synthetic oligonucleotide
  Antisense strand to SEQ ID NO: 1512366
uaacaucucgcauaagguc

SEQ ID NO: 1512368 - RNA, 19 nt, Artificial Sequence
  Description of Artificial Sequence: Synthetic oligonucleotide
  Sense strand starting at position 1012 of SEQ ID NO: 1244755
ucaggaucgcgauagcaau

SEQ ID NO: 1512369 - RNA, 19 nt, Artificial Sequence
  Description of Artificial Sequence: Synthetic oligonucleotide
  Antisense strand to SEQ ID NO: 1512368
auugcuaucgcgauccuga

SEQ ID NO: 1512370 - RNA, 19 nt, Artificial Sequence
  Description of Artificial Sequence: Synthetic oligonucleotide
  Sense strand starting at position 1018 of SEQ ID NO: 1244755
ucgcgauagcaauagauaa

SEQ ID NO: 1512371 - RNA, 19 nt, Artificial Sequence
  Description of Artificial Sequence: Synthetic oligonucleotide
  Antisense strand to SEQ ID NO: 1512370
uuaucuauugcuaucgcga

SEQ ID NO: 1512372 - RNA, 19 nt, Artificial Sequence
  Description of Artificial Sequence: Synthetic oligonucleotide
  Sense strand starting at position 2188 of SEQ ID NO: 1244755
gcggccucugccucauaga

SEQ ID NO: 1512373 - RNA, 19 nt, Artificial Sequence
  Description of Artificial Sequence: Synthetic oligonucleotide
  Antisense strand to SEQ ID NO: 1512372
ucuaugaggcagaggccgc

SEQ ID NO: 1512374 - RNA, 19 nt, Artificial Sequence
  Description of Artificial Sequence: Synthetic oligonucleotide
  Sense strand starting at position 2625 of SEQ ID NO: 1244755
cccagugaauguuugugga

SEQ ID NO: 1512375 - RNA, 19 nt, Artificial Sequence
  Description of Artificial Sequence: Synthetic oligonucleotide
  Antisense strand to SEQ ID NO: 1512374
uccacaaacauucacuggg

SEQ ID NO: 1512376 - RNA, 19 nt, Artificial Sequence
  Description of Artificial Sequence: Synthetic oligonucleotide
  Sense strand starting at position 2667 of SEQ ID NO: 1244755
gacccagugcuguacugau

SEQ ID NO: 1512377 - RNA, 19 nt, Artificial Sequence
  Description of Artificial Sequence: Synthetic oligonucleotide
  Antisense strand to SEQ ID NO: 1512376
aucaguacagcacuggguc

SEQ ID NO: 1512378 - RNA, 19 nt, Artificial Sequence
  Description of Artificial Sequence: Synthetic oligonucleotide
  Sense strand starting at position 2680 of SEQ ID NO: 1244755
acugauaaauguguaacaa

SEQ ID NO: 1512379 - RNA, 19 nt, Artificial Sequence
  Description of Artificial Sequence: Synthetic oligonucleotide
  Antisense strand to SEQ ID NO: 1512378
uuguuacacauuuaucagu

SEQ ID NO: 1512380 - RNA, 19 nt, Artificial Sequence
  Description of Artificial Sequence: Synthetic oligonucleotide
  Sense strand starting at position 2718 of SEQ ID NO: 1244755
acgggaauguaugcacaua

SEQ ID NO: 1512381 - RNA, 19 nt, Artificial Sequence
  Description of Artificial Sequence: Synthetic oligonucleotide
  Antisense strand to SEQ ID NO: 1512380
uaugugcauacauucccgu

SEQ ID NO: 1512382 - RNA, 19 nt, Artificial Sequence
  Description of Artificial Sequence: Synthetic oligonucleotide
  Sense strand starting at position 2719 of SEQ ID NO: 1244755
cgggaauguaugcacauau

SEQ ID NO: 1512383 - RNA, 19 nt, Artificial Sequence
  Description of Artificial Sequence: Synthetic oligonucleotide
  Antisense strand to SEQ ID NO: 1512382
auaugugcauacauucccg

SEQ ID NO: 1512384 - RNA, 19 nt, Artificial Sequence
  Description of Artificial Sequence: Synthetic oligonucleotide
  Sense strand starting at position 2730 of SEQ ID NO: 1244755
gcacauauauagguacaaa

SEQ ID NO: 1512385 - RNA, 19 nt, Artificial Sequence
  Description of Artificial Sequence: Synthetic oligonucleotide
  Antisense strand to SEQ ID NO: 1512384
uuuguaccuauauaugugc

SEQ ID NO: 1512386 - RNA, 19 nt, Artificial Sequence
  Description of Artificial Sequence: Synthetic oligonucleotide
  Sense strand starting at position 2771 of SEQ ID NO: 1244755
acauaaaggauguguaguu

SEQ ID NO: 1512387 - RNA, 19 nt, Artificial Sequence
  Description of Artificial Sequence: Synthetic oligonucleotide
  Antisense strand to SEQ ID NO: 1512386
aacuacacauccuuuaugu

SEQ ID NO: 1512388 - RNA, 19 nt, Artificial Sequence
  Description of Artificial Sequence: Synthetic oligonucleotide
  Sense strand starting at position 2869 of SEQ ID NO: 1244755
cucuuauauggguagccaa

SEQ ID NO: 1512389 - RNA, 19 nt, Artificial Sequence
  Description of Artificial Sequence: Synthetic oligonucleotide
  Antisense strand to SEQ ID NO: 1512388
uuggcuacccauauaagag

SEQ ID NO: 1512390 - RNA, 19 nt, Artificial Sequence
  Description of Artificial Sequence: Synthetic oligonucleotide
  Sense strand starting at position 2901 of SEQ ID NO: 1244755
uugaccuaggaguguaauu

SEQ ID NO: 1512391 - RNA, 19 nt, Artificial Sequence
  Description of Artificial Sequence: Synthetic oligonucleotide
  Antisense strand to SEQ ID NO: 1512390
aauuacacuccuaggucaa

SEQ ID NO: 1512392 - RNA, 19 nt, Artificial Sequence
  Description of Artificial Sequence: Synthetic oligonucleotide
  Sense strand starting at position 2903 of SEQ ID NO: 1244755
gaccuaggaguguaauugu

SEQ ID NO: 1512393 - RNA, 19 nt, Artificial Sequence
  Description of Artificial Sequence: Synthetic oligonucleotide
  Antisense strand to SEQ ID NO: 1512392
acaauuacacuccuagguc

SEQ ID NO: 1512394 - RNA, 19 nt, Artificial Sequence
  Description of Artificial Sequence: Synthetic oligonucleotide
  Sense strand starting at position 2906 of SEQ ID NO: 1244755
cuaggaguguaauuguaaa

SEQ ID NO: 1512395 - RNA, 19 nt, Artificial Sequence
  Description of Artificial Sequence: Synthetic oligonucleotide
  Antisense strand to SEQ ID NO: 1512394
uuuacaauuacacuccuag

SEQ ID NO: 1512396 - RNA, 19 nt, Artificial Sequence
  Description of Artificial Sequence: Synthetic oligonucleotide
  Sense strand starting at position 2913 of SEQ ID NO: 1244755
uguaauuguaaaggugaau

SEQ ID NO: 1512397 - RNA, 19 nt, Artificial Sequence
  Description of Artificial Sequence: Synthetic oligonucleotide
  Antisense strand to SEQ ID NO: 1512396
auucaccuuuacaauuaca

SEQ ID NO: 1512398 - RNA, 19 nt, Artificial Sequence
  Description of Artificial Sequence: Synthetic oligonucleotide
  Sense strand starting at position 2924 of SEQ ID NO: 1244755
aggugaauguugguugaua

SEQ ID NO: 1512399 - RNA, 19 nt, Artificial Sequence
  Description of Artificial Sequence: Synthetic oligonucleotide
  Antisense strand to SEQ ID NO: 1512398
uaucaaccaacauucaccu

SEQ ID NO: 1512400 - RNA, 19 nt, Artificial Sequence
  Description of Artificial Sequence: Synthetic oligonucleotide
  Sense strand starting at position 2925 of SEQ ID NO: 1244755
ggugaauguugguugauaa

SEQ ID NO: 1512401 - RNA, 19 nt, Artificial Sequence
  Description of Artificial Sequence: Synthetic oligonucleotide
  Antisense strand to SEQ ID NO: 1512400
uuaucaaccaacauucacc

SEQ ID NO: 1512402 - RNA, 19 nt, Artificial Sequence
  Description of Artificial Sequence: Synthetic oligonucleotide
  Sense strand starting at position 2926 of SEQ ID NO: 1244755
gugaauguugguugauaaa

SEQ ID NO: 1512403 - RNA, 19 nt, Artificial Sequence
  Description of Artificial Sequence: Synthetic oligonucleotide
  Antisense strand to SEQ ID NO: 1512402
uuuaucaaccaacauucac

SEQ ID NO: 1512404 - RNA, 19 nt, Artificial Sequence
  Description of Artificial Sequence: Synthetic oligonucleotide
  Sense strand starting at position 2960 of SEQ ID NO: 1244755
acuuaauuggauugucaau

SEQ ID NO: 1512405 - RNA, 19 nt, Artificial Sequence
  Description of Artificial Sequence: Synthetic oligonucleotide
  Antisense strand to SEQ ID NO: 1512404
auugacaauccaauuaagu

SEQ ID NO: 1512406 - RNA, 19 nt, Artificial Sequence
  Description of Artificial Sequence: Synthetic oligonucleotide
  Sense strand starting at position 2962 of SEQ ID NO: 1244755
uuaauuggauugucaauga

SEQ ID NO: 1512407 - RNA, 19 nt, Artificial Sequence
  Description of Artificial Sequence: Synthetic oligonucleotide
  Antisense strand to SEQ ID NO: 1512406
ucauugacaauccaauuaa

SEQ ID NO: 1512408 - RNA, 19 nt, Artificial Sequence
  Description of Artificial Sequence: Synthetic oligonucleotide
  Sense strand starting at position 3400 of SEQ ID NO: 1244755
gcauguugugaggaucaaa

SEQ ID NO: 1512409 - RNA, 19 nt, Artificial Sequence
  Description of Artificial Sequence: Synthetic oligonucleotide
  Antisense strand to SEQ ID NO: 1512408
uuugauccucacaacaugc

SEQ ID NO: 1512410 - RNA, 19 nt, Artificial Sequence
  Description of Artificial Sequence: Synthetic oligonucleotide
  Sense strand starting at position 3459 of SEQ ID NO: 1244755
cagggagcccauugaaaua

SEQ ID NO: 1512411 - RNA, 19 nt, Artificial Sequence
  Description of Artificial Sequence: Synthetic oligonucleotide
  Antisense strand to SEQ ID NO: 1512410
uauuucaaugggcucccug

SEQ ID NO: 1512412 - RNA, 19 nt, Artificial Sequence
  Description of Artificial Sequence: Synthetic oligonucleotide
  Sense strand starting at position 3474 of SEQ ID NO: 1244755
aauagucccagugggagau

SEQ ID NO: 1512413 - RNA, 19 nt, Artificial Sequence
  Description of Artificial Sequence: Synthetic oligonucleotide
  Antisense strand to SEQ ID NO: 1512412
aucucccacugggacuauu

SEQ ID NO: 1512414 - RNA, 19 nt, Artificial Sequence
  Description of Artificial Sequence: Synthetic oligonucleotide
  Sense strand starting at position 3529 of SEQ ID NO: 1244755
ugcagaacucagugacuuc

SEQ ID NO: 1512415 - RNA, 19 nt, Artificial Sequence
  Description of Artificial Sequence: Synthetic oligonucleotide
  Antisense strand to SEQ ID NO: 1512414
gaagucacugaguucugca

SEQ ID NO: 1512416 - RNA, 19 nt, Artificial Sequence
  Description of Artificial Sequence: Synthetic oligonucleotide
  Sense strand starting at position 3585 of SEQ ID NO: 1244755
gguugaguccugcaaccag

SEQ ID NO: 1512417 - RNA, 19 nt, Artificial Sequence
  Description of Artificial Sequence: Synthetic oligonucleotide
  Antisense strand to SEQ ID NO: 1512416
cugguugcaggacucaacc

SEQ ID NO: 1512418 - RNA, 19 nt, Artificial Sequence
  Description of Artificial Sequence: Synthetic oligonucleotide
  Sense strand starting at position 3801 of SEQ ID NO: 1244755
ccauacaugugggcaagaa

SEQ ID NO: 1512419 - RNA, 19 nt, Artificial Sequence
  Description of Artificial Sequence: Synthetic oligonucleotide
  Antisense strand to SEQ ID NO: 1512418
uucuugcccacauguaugg

SEQ ID NO: 1512420 - RNA, 19 nt, Artificial Sequence
  Description of Artificial Sequence: Synthetic oligonucleotide
  Sense strand starting at position 3950 of SEQ ID NO: 1244755
cugagaucauuccuuuguu

SEQ ID NO: 1512421 - RNA, 19 nt, Artificial Sequence
  Description of Artificial Sequence: Synthetic oligonucleotide
  Antisense strand to SEQ ID NO: 1512420
aacaaaggaaugaucucag

SEQ ID NO: 1512422 - RNA, 19 nt, Artificial Sequence
  Description of Artificial Sequence: Synthetic oligonucleotide
  Sense strand starting at position 3951 of SEQ ID NO: 1244755
ugagaucauuccuuuguug

SEQ ID NO: 1512423 - RNA, 19 nt, Artificial Sequence
  Description of Artificial Sequence: Synthetic oligonucleotide
  Antisense strand to SEQ ID NO: 1512422
caacaaaggaaugaucuca

SEQ ID NO: 1512424 - RNA, 19 nt, Artificial Sequence
  Description of Artificial Sequence: Synthetic oligonucleotide
  Sense strand starting at position 3973 of SEQ ID NO: 1244755
uuacuugcgcagguguaau

SEQ ID NO: 1512425 - RNA, 19 nt, Artificial Sequence
  Description of Artificial Sequence: Synthetic oligonucleotide
  Antisense strand to SEQ ID NO: 1512424
auuacaccugcgcaaguaa

SEQ ID NO: 1512426 - RNA, 19 nt, Artificial Sequence
  Description of Artificial Sequence: Synthetic oligonucleotide
  Sense strand starting at position 3981 of SEQ ID NO: 1244755
gcagguguaauuugcaauc

SEQ ID NO: 1512427 - RNA, 19 nt, Artificial Sequence
  Description of Artificial Sequence: Synthetic oligonucleotide
  Antisense strand to SEQ ID NO: 1512426
gauugcaaauuacaccugc

SEQ ID NO: 1512428 - RNA, 19 nt, Artificial Sequence
  Description of Artificial Sequence: Synthetic oligonucleotide
  Sense strand starting at position 46 of SEQ ID NO: 1244756
ccaugucuccuauggugga

SEQ ID NO: 1512429 - RNA, 19 nt, Artificial Sequence
  Description of Artificial Sequence: Synthetic oligonucleotide
  Antisense strand to SEQ ID NO: 1512428
uccaccauaggagacaugg

SEQ ID NO: 1512430 - RNA, 19 nt, Artificial Sequence
  Description of Artificial Sequence: Synthetic oligonucleotide
  Sense strand starting at position 92 of SEQ ID NO: 1244756
gcuggucgucgugugagua

SEQ ID NO: 1512431 - RNA, 19 nt, Artificial Sequence
  Description of Artificial Sequence: Synthetic oligonucleotide
  Antisense strand to SEQ ID NO: 1512430
uacucacacgacgaccagc

SEQ ID NO: 1512432 - RNA, 19 nt, Artificial Sequence
  Description of Artificial Sequence: Synthetic oligonucleotide
  Sense strand starting at position 142 of SEQ ID NO: 1244756
guuccaaugugacaagaaa

SEQ ID NO: 1512433 - RNA, 19 nt, Artificial Sequence
  Description of Artificial Sequence: Synthetic oligonucleotide
  Antisense strand to SEQ ID NO: 1512432
uuucuugucacauuggaac

SEQ ID NO: 1512434 - RNA, 19 nt, Artificial Sequence
  Description of Artificial Sequence: Synthetic oligonucleotide
  Sense strand starting at position 404 of SEQ ID NO: 1244756
aggcacuuccucugcagau

SEQ ID NO: 1512435 - RNA, 19 nt, Artificial Sequence
  Description of Artificial Sequence: Synthetic oligonucleotide
  Antisense strand to SEQ ID NO: 1512434
aucugcagaggaagugccu

SEQ ID NO: 1512436 - RNA, 19 nt, Artificial Sequence
  Description of Artificial Sequence: Synthetic oligonucleotide
  Sense strand starting at position 406 of SEQ ID NO: 1244756
gcacuuccucugcagauca

SEQ ID NO: 1512437 - RNA, 19 nt, Artificial Sequence
  Description of Artificial Sequence: Synthetic oligonucleotide
  Antisense strand to SEQ ID NO: 1512436
ugaucugcagaggaagugc

SEQ ID NO: 1512438 - RNA, 19 nt, Artificial Sequence
  Description of Artificial Sequence: Synthetic oligonucleotide
  Sense strand starting at position 416 of SEQ ID NO: 1244756
ugcagaucaugacuuuguu

SEQ ID NO: 1512439 - RNA, 19 nt, Artificial Sequence
  Description of Artificial Sequence: Synthetic oligonucleotide
  Antisense strand to SEQ ID NO: 1512438
aacaaagucaugaucugca

SEQ ID NO: 1512440 - RNA, 19 nt, Artificial Sequence
  Description of Artificial Sequence: Synthetic oligonucleotide
  Sense strand starting at position 742 of SEQ ID NO: 1244756
ggaagcucuuagucugaag

SEQ ID NO: 1512441 - RNA, 19 nt, Artificial Sequence
  Description of Artificial Sequence: Synthetic oligonucleotide
  Antisense strand to SEQ ID NO: 1512440
cuucagacuaagagcuucc

SEQ ID NO: 1512442 - RNA, 19 nt, Artificial Sequence
  Description of Artificial Sequence: Synthetic oligonucleotide
  Sense strand starting at position 749 of SEQ ID NO: 1244756
cuuagucugaagugucauu

SEQ ID NO: 1512443 - RNA, 19 nt, Artificial Sequence
  Description of Artificial Sequence: Synthetic oligonucleotide
  Antisense strand to SEQ ID NO: 1512442
aaugacacuucagacuaag

SEQ ID NO: 1512444 - RNA, 19 nt, Artificial Sequence
  Description of Artificial Sequence: Synthetic oligonucleotide
  Sense strand starting at position 1105 of SEQ ID NO: 1244756
cugcuuuguggagaucugu

SEQ ID NO: 1512445 - RNA, 19 nt, Artificial Sequence
  Description of Artificial Sequence: Synthetic oligonucleotide
  Antisense strand to SEQ ID NO: 1512444
acagaucuccacaaagcag

SEQ ID NO: 1512446 - RNA, 19 nt, Artificial Sequence
  Description of Artificial Sequence: Synthetic oligonucleotide
  Sense strand starting at position 1331 of SEQ ID NO: 1244756
ugcuguucuguggauggga

SEQ ID NO: 1512447 - RNA, 19 nt, Artificial Sequence
  Description of Artificial Sequence: Synthetic oligonucleotide
  Antisense strand to SEQ ID NO: 1512446
ucccauccacagaacagca

SEQ ID NO: 1512448 - RNA, 19 nt, Artificial Sequence
  Description of Artificial Sequence: Synthetic oligonucleotide
  Sense strand starting at position 1448 of SEQ ID NO: 1244756
cccugagccuguucugaug

SEQ ID NO: 1512449 - RNA, 19 nt, Artificial Sequence
  Description of Artificial Sequence: Synthetic oligonucleotide
  Antisense strand to SEQ ID NO: 1512448
caucagaacaggcucaggg

SEQ ID NO: 1512450 - RNA, 19 nt, Artificial Sequence
  Description of Artificial Sequence: Synthetic oligonucleotide
  Sense strand starting at position 1596 of SEQ ID NO: 1244756
caagacuguuccucgacca

SEQ ID NO: 1512451 - RNA, 19 nt, Artificial Sequence
  Description of Artificial Sequence: Synthetic oligonucleotide
  Antisense strand to SEQ ID NO: 1512450
uggucgaggaacagucuug

SEQ ID NO: 1512452 - RNA, 19 nt, Artificial Sequence
  Description of Artificial Sequence: Synthetic oligonucleotide
  Sense strand starting at position 1620 of SEQ ID NO: 1244756
ggcagaggccagcaaucuu

SEQ ID NO: 1512453 - RNA, 19 nt, Artificial Sequence
  Description of Artificial Sequence: Synthetic oligonucleotide
  Antisense strand to SEQ ID NO: 1512452
aagauugcuggccucugcc

SEQ ID NO: 1512454 - RNA, 19 nt, Artificial Sequence
  Description of Artificial Sequence: Synthetic oligonucleotide
  Sense strand starting at position 1842 of SEQ ID NO: 1244756
ggaugauuuccguggcauc

SEQ ID NO: 1512455 - RNA, 19 nt, Artificial Sequence
  Description of Artificial Sequence: Synthetic oligonucleotide
  Antisense strand to SEQ ID NO: 1512454
gaugccacggaaaucaucc

SEQ ID NO: 1512456 - RNA, 19 nt, Artificial Sequence
  Description of Artificial Sequence: Synthetic oligonucleotide
  Sense strand starting at position 1843 of SEQ ID NO: 1244756
gaugauuuccguggcauca

SEQ ID NO: 1512457 - RNA, 19 nt, Artificial Sequence
  Description of Artificial Sequence: Synthetic oligonucleotide
  Antisense strand to SEQ ID NO: 1512456
ugaugccacggaaaucauc

SEQ ID NO: 1512458 - RNA, 19 nt, Artificial Sequence
  Description of Artificial Sequence: Synthetic oligonucleotide
  Sense strand starting at position 1845 of SEQ ID NO: 1244756
ugauuuccguggcaucauu

SEQ ID NO: 1512459 - RNA, 19 nt, Artificial Sequence
  Description of Artificial Sequence: Synthetic oligonucleotide
  Antisense strand to SEQ ID NO: 1512458
aaugaugccacggaaauca

SEQ ID NO: 1512460 - RNA, 19 nt, Artificial Sequence
  Description of Artificial Sequence: Synthetic oligonucleotide
  Sense strand starting at position 2571 of SEQ ID NO: 1244756
aagaaagccucucuuggua

SEQ ID NO: 1512461 - RNA, 19 nt, Artificial Sequence
  Description of Artificial Sequence: Synthetic oligonucleotide
  Antisense strand to SEQ ID NO: 1512460
uaccaagagaggcuuucuu

SEQ ID NO: 1512462 - RNA, 19 nt, Artificial Sequence
  Description of Artificial Sequence: Synthetic oligonucleotide
  Sense strand starting at position 2585 of SEQ ID NO: 1244756
ugguauucucuggaaggca

SEQ ID NO: 1512463 - RNA, 19 nt, Artificial Sequence
  Description of Artificial Sequence: Synthetic oligonucleotide
  Antisense strand to SEQ ID NO: 1512462
ugccuuccagagaauacca

SEQ ID NO: 1512464 - RNA, 19 nt, Artificial Sequence
  Description of Artificial Sequence: Synthetic oligonucleotide
  Sense strand starting at position 2653 of SEQ ID NO: 1244756
gcaggauucugguuacaaa

SEQ ID NO: 1512465 - RNA, 19 nt, Artificial Sequence
  Description of Artificial Sequence: Synthetic oligonucleotide
  Antisense strand to SEQ ID NO: 1512464
uuuguaaccagaauccugc

SEQ ID NO: 1512466 - RNA, 19 nt, Artificial Sequence
  Description of Artificial Sequence: Synthetic oligonucleotide
  Sense strand starting at position 2661 of SEQ ID NO: 1244756
cugguuacaaaucgaggau

SEQ ID NO: 1512467 - RNA, 19 nt, Artificial Sequence
  Description of Artificial Sequence: Synthetic oligonucleotide
  Antisense strand to SEQ ID NO: 1512466
auccucgauuuguaaccag

SEQ ID NO: 1512468 - RNA, 19 nt, Artificial Sequence
  Description of Artificial Sequence: Synthetic oligonucleotide
  Sense strand starting at position 2728 of SEQ ID NO: 1244756
gcucaugcuccucagggau

SEQ ID NO: 1512469 - RNA, 19 nt, Artificial Sequence
  Description of Artificial Sequence: Synthetic oligonucleotide
  Antisense strand to SEQ ID NO: 1512468
aucccugaggagcaugagc

SEQ ID NO: 1512470 - RNA, 19 nt, Artificial Sequence
  Description of Artificial Sequence: Synthetic oligonucleotide
  Sense strand starting at position 2744 of SEQ ID NO: 1244756
gauccugugcacugugaca

SEQ ID NO: 1512471 - RNA, 19 nt, Artificial Sequence
  Description of Artificial Sequence: Synthetic oligonucleotide
  Antisense strand to SEQ ID NO: 1512470
ugucacagugcacaggauc

SEQ ID NO: 1512472 - RNA, 19 nt, Artificial Sequence
  Description of Artificial Sequence: Synthetic oligonucleotide
  Sense strand starting at position 2955 of SEQ ID NO: 1244756
uugaguccuguauggaaag

SEQ ID NO: 1512473 - RNA, 19 nt, Artificial Sequence
  Description of Artificial Sequence: Synthetic oligonucleotide
  Antisense strand to SEQ ID NO: 1512472
cuuuccauacaggacucaa

SEQ ID NO: 1512474 - RNA, 19 nt, Artificial Sequence
  Description of Artificial Sequence: Synthetic oligonucleotide
  Sense strand starting at position 2992 of SEQ ID NO: 1244756
caggauguguuccaugaag

SEQ ID NO: 1512475 - RNA, 19 nt, Artificial Sequence
  Description of Artificial Sequence: Synthetic oligonucleotide
  Antisense strand to SEQ ID NO: 1512474
cuucauggaacacauccug

SEQ ID NO: 1512476 - RNA, 19 nt, Artificial Sequence
  Description of Artificial Sequence: Synthetic oligonucleotide
  Sense strand starting at position 2994 of SEQ ID NO: 1244756
ggauguguuccaugaagcc

SEQ ID NO: 1512477 - RNA, 19 nt, Artificial Sequence
  Description of Artificial Sequence: Synthetic oligonucleotide
  Antisense strand to SEQ ID NO: 1512476
ggcuucauggaacacaucc

SEQ ID NO: 1512478 - RNA, 19 nt, Artificial Sequence
  Description of Artificial Sequence: Synthetic oligonucleotide
  Sense strand starting at position 3018 of SEQ ID NO: 1244756
aggaccaaguggucacaaa

SEQ ID NO: 1512479 - RNA, 19 nt, Artificial Sequence
  Description of Artificial Sequence: Synthetic oligonucleotide
  Antisense strand to SEQ ID NO: 1512478
uuugugaccacuugguccu

SEQ ID NO: 1512480 - RNA, 19 nt, Artificial Sequence
  Description of Artificial Sequence: Synthetic oligonucleotide
  Sense strand starting at position 3189 of SEQ ID NO: 1244756
gacagauuguuugaggaca

SEQ ID NO: 1512481 - RNA, 19 nt, Artificial Sequence
  Description of Artificial Sequence: Synthetic oligonucleotide
  Antisense strand to SEQ ID NO: 1512480
uguccucaaacaaucuguc

SEQ ID NO: 1512482 - RNA, 19 nt, Artificial Sequence
  Description of Artificial Sequence: Synthetic oligonucleotide
  Sense strand starting at position 3191 of SEQ ID NO: 1244756
cagauuguuugaggacaag

SEQ ID NO: 1512483 - RNA, 19 nt, Artificial Sequence
  Description of Artificial Sequence: Synthetic oligonucleotide
  Antisense strand to SEQ ID NO: 1512482
cuuguccucaaacaaucug

SEQ ID NO: 1512484 - RNA, 19 nt, Artificial Sequence
  Description of Artificial Sequence: Synthetic oligonucleotide
  Sense strand starting at position 3230 of SEQ ID NO: 1244756
cccagauccucugguauuu

SEQ ID NO: 1512485 - RNA, 19 nt, Artificial Sequence
  Description of Artificial Sequence: Synthetic oligonucleotide
  Antisense strand to SEQ ID NO: 1512484
aaauaccagaggaucuggg

SEQ ID NO: 1512486 - RNA, 19 nt, Artificial Sequence
  Description of Artificial Sequence: Synthetic oligonucleotide
  Sense strand starting at position 3382 of SEQ ID NO: 1244756
gaaugcagcugcucugaca

SEQ ID NO: 1512487 - RNA, 19 nt, Artificial Sequence
  Description of Artificial Sequence: Synthetic oligonucleotide
  Antisense strand to SEQ ID NO: 1512486
ugucagagcagcugcauuc

SEQ ID NO: 1512488 - RNA, 19 nt, Artificial Sequence
  Description of Artificial Sequence: Synthetic oligonucleotide
  Sense strand starting at position 3534 of SEQ ID NO: 1244756
gguaguguugugagaagcu

SEQ ID NO: 1512489 - RNA, 19 nt, Artificial Sequence
  Description of Artificial Sequence: Synthetic oligonucleotide
  Antisense strand to SEQ ID NO: 1512488
agcuucucacaacacuacc

SEQ ID NO: 1512490 - RNA, 19 nt, Artificial Sequence
  Description of Artificial Sequence: Synthetic oligonucleotide
  Sense strand starting at position 3610 of SEQ ID NO: 1244756
uggaauguggacuguuaac

SEQ ID NO: 1512491 - RNA, 19 nt, Artificial Sequence
  Description of Artificial Sequence: Synthetic oligonucleotide
  Antisense strand to SEQ ID NO: 1512490
guuaacaguccacauucca

SEQ ID NO: 1512492 - RNA, 19 nt, Artificial Sequence
  Description of Artificial Sequence: Synthetic oligonucleotide
  Sense strand starting at position 3643 of SEQ ID NO: 1244756
acgacugccuucuugcaau

SEQ ID NO: 1512493 - RNA, 19 nt, Artificial Sequence
  Description of Artificial Sequence: Synthetic oligonucleotide
  Antisense strand to SEQ ID NO: 1512492
auugcaagaaggcagucgu

SEQ ID NO: 1512494 - RNA, 19 nt, Artificial Sequence
  Description of Artificial Sequence: Synthetic oligonucleotide
  Sense strand starting at position 3649 of SEQ ID NO: 1244756
gccuucuugcaauggacuu

SEQ ID NO: 1512495 - RNA, 19 nt, Artificial Sequence
  Description of Artificial Sequence: Synthetic oligonucleotide
  Antisense strand to SEQ ID NO: 1512494
aaguccauugcaagaaggc

SEQ ID NO: 1512496 - RNA, 19 nt, Artificial Sequence
  Description of Artificial Sequence: Synthetic oligonucleotide
  Sense strand starting at position 3655 of SEQ ID NO: 1244756
uugcaauggacuugggaga

SEQ ID NO: 1512497 - RNA, 19 nt, Artificial Sequence
  Description of Artificial Sequence: Synthetic oligonucleotide
  Antisense strand to SEQ ID NO: 1512496
ucucccaaguccauugcaa

SEQ ID NO: 1512498 - RNA, 19 nt, Artificial Sequence
  Description of Artificial Sequence: Synthetic oligonucleotide
  Sense strand starting at position 3746 of SEQ ID NO: 1244756
gcuggaccgucugcauuaa

SEQ ID NO: 1512499 - RNA, 19 nt, Artificial Sequence
  Description of Artificial Sequence: Synthetic oligonucleotide
  Antisense strand to SEQ ID NO: 1512498
uuaaugcagacgguccagc

SEQ ID NO: 1512500 - RNA, 19 nt, Artificial Sequence
  Description of Artificial Sequence: Synthetic oligonucleotide
  Sense strand starting at position 3747 of SEQ ID NO: 1244756
cuggaccgucugcauuaaa

SEQ ID NO: 1512501 - RNA, 19 nt, Artificial Sequence
  Description of Artificial Sequence: Synthetic oligonucleotide
  Antisense strand to SEQ ID NO: 1512500
uuuaaugcagacgguccag

SEQ ID NO: 1512502 - RNA, 19 nt, Artificial Sequence
  Description of Artificial Sequence: Synthetic oligonucleotide
  Sense strand starting at position 3776 of SEQ ID NO: 1244756
gggauucaucccuggaacg

SEQ ID NO: 1512503 - RNA, 19 nt, Artificial Sequence
  Description of Artificial Sequence: Synthetic oligonucleotide
  Antisense strand to SEQ ID NO: 1512502
cguuccagggaugaauccc

SEQ ID NO: 1512504 - RNA, 19 nt, Artificial Sequence
  Description of Artificial Sequence: Synthetic oligonucleotide
  Sense strand starting at position 3878 of SEQ ID NO: 1244756
uuuccuuauuuggaaguga

SEQ ID NO: 1512505 - RNA, 19 nt, Artificial Sequence
  Description of Artificial Sequence: Synthetic oligonucleotide
  Antisense strand to SEQ ID NO: 1512504
ucacuuccaaauaaggaaa

SEQ ID NO: 1512506 - RNA, 19 nt, Artificial Sequence
  Description of Artificial Sequence: Synthetic oligonucleotide
  Sense strand starting at position 3960 of SEQ ID NO: 1244756
cugaauggcucagcgagaa

SEQ ID NO: 1512507 - RNA, 19 nt, Artificial Sequence
  Description of Artificial Sequence: Synthetic oligonucleotide
  Antisense strand to SEQ ID NO: 1512506
uucucgcugagccauucag

SEQ ID NO: 1512508 - RNA, 19 nt, Artificial Sequence
  Description of Artificial Sequence: Synthetic oligonucleotide
  Sense strand starting at position 70 of SEQ ID NO: 1244757
uggcuaucaugggaggacu

SEQ ID NO: 1512509 - RNA, 19 nt, Artificial Sequence
  Description of Artificial Sequence: Synthetic oligonucleotide
  Antisense strand to SEQ ID NO: 1512508
aguccucccaugauagcca

SEQ ID NO: 1512510 - RNA, 19 nt, Artificial Sequence
  Description of Artificial Sequence: Synthetic oligonucleotide
  Sense strand starting at position 106 of SEQ ID NO: 1244757
uguaguccaacaggagaaa

SEQ ID NO: 1512511 - RNA, 19 nt, Artificial Sequence
  Description of Artificial Sequence: Synthetic oligonucleotide
  Antisense strand to SEQ ID NO: 1512510
uuucuccuguuggacuaca

SEQ ID NO: 1512512 - RNA, 19 nt, Artificial Sequence
  Description of Artificial Sequence: Synthetic oligonucleotide
  Sense strand starting at position 184 of SEQ ID NO: 1244757
ccgugaggucugcguccau

SEQ ID NO: 1512513 - RNA, 19 nt, Artificial Sequence
  Description of Artificial Sequence: Synthetic oligonucleotide
  Antisense strand to SEQ ID NO: 1512512
auggacgcagaccucacgg

SEQ ID NO: 1512514 - RNA, 19 nt, Artificial Sequence
  Description of Artificial Sequence: Synthetic oligonucleotide
  Sense strand starting at position 203 of SEQ ID NO: 1244757
gaggguuagagguggguua

SEQ ID NO: 1512515 - RNA, 19 nt, Artificial Sequence
  Description of Artificial Sequence: Synthetic oligonucleotide
  Antisense strand to SEQ ID NO: 1512514
uaacccaccucuaacccuc

SEQ ID NO: 1512516 - RNA, 19 nt, Artificial Sequence
  Description of Artificial Sequence: Synthetic oligonucleotide
  Sense strand starting at position 249 of SEQ ID NO: 1244757
gguuguauggagugggaga

SEQ ID NO: 1512517 - RNA, 19 nt, Artificial Sequence
  Description of Artificial Sequence: Synthetic oligonucleotide
  Antisense strand to SEQ ID NO: 1512516
ucucccacuccauacaacc

SEQ ID NO: 1512518 - RNA, 19 nt, Artificial Sequence
  Description of Artificial Sequence: Synthetic oligonucleotide
  Sense strand starting at position 357 of SEQ ID NO: 1244757
ccaguuugcagugggaaga

SEQ ID NO: 1512519 - RNA, 19 nt, Artificial Sequence
  Description of Artificial Sequence: Synthetic oligonucleotide
  Antisense strand to SEQ ID NO: 1512518
ucuucccacugcaaacugg

SEQ ID NO: 1512520 - RNA, 19 nt, Artificial Sequence
  Description of Artificial Sequence: Synthetic oligonucleotide
  Sense strand starting at position 987 of SEQ ID NO: 1244757
gcagguaggcugucgagua

SEQ ID NO: 1512521 - RNA, 19 nt, Artificial Sequence
  Description of Artificial Sequence: Synthetic oligonucleotide
  Antisense strand to SEQ ID NO: 1512520
uacucgacagccuaccugc

SEQ ID NO: 1512522 - RNA, 19 nt, Artificial Sequence
  Description of Artificial Sequence: Synthetic oligonucleotide
  Sense strand starting at position 1269 of SEQ ID NO: 1244757
agaucucggaguugugcau

SEQ ID NO: 1512523 - RNA, 19 nt, Artificial Sequence
  Description of Artificial Sequence: Synthetic oligonucleotide
  Antisense strand to SEQ ID NO: 1512522
augcacaacuccgagaucu

SEQ ID NO: 1512524 - RNA, 19 nt, Artificial Sequence
  Description of Artificial Sequence: Synthetic oligonucleotide
  Sense strand starting at position 1575 of SEQ ID NO: 1244757
auggaaaggucuucccagu

SEQ ID NO: 1512525 - RNA, 19 nt, Artificial Sequence
  Description of Artificial Sequence: Synthetic oligonucleotide
  Antisense strand to SEQ ID NO: 1512524
acugggaagaccuuuccau

SEQ ID NO: 1512526 - RNA, 19 nt, Artificial Sequence
  Description of Artificial Sequence: Synthetic oligonucleotide
  Sense strand starting at position 1595 of SEQ ID NO: 1244757
uggagucguugccgaggaa

SEQ ID NO: 1512527 - RNA, 19 nt, Artificial Sequence
  Description of Artificial Sequence: Synthetic oligonucleotide
  Antisense strand to SEQ ID NO: 1512526
uuccucggcaacgacucca

SEQ ID NO: 1512528 - RNA, 19 nt, Artificial Sequence
  Description of Artificial Sequence: Synthetic oligonucleotide
  Sense strand starting at position 1598 of SEQ ID NO: 1244757
agucguugccgaggaacuu

SEQ ID NO: 1512529 - RNA, 19 nt, Artificial Sequence
  Description of Artificial Sequence: Synthetic oligonucleotide
  Antisense strand to SEQ ID NO: 1512528
aaguuccucggcaacgacu

SEQ ID NO: 1512530 - RNA, 19 nt, Artificial Sequence
  Description of Artificial Sequence: Synthetic oligonucleotide
  Sense strand starting at position 1607 of SEQ ID NO: 1244757
cgaggaacuuggguccuua

SEQ ID NO: 1512531 - RNA, 19 nt, Artificial Sequence
  Description of Artificial Sequence: Synthetic oligonucleotide
  Antisense strand to SEQ ID NO: 1512530
uaaggacccaaguuccucg

SEQ ID NO: 1512532 - RNA, 19 nt, Artificial Sequence
  Description of Artificial Sequence: Synthetic oligonucleotide
  Sense strand starting at position 1846 of SEQ ID NO: 1244757
cuuuguggucuccggaguu

SEQ ID NO: 1512533 - RNA, 19 nt, Artificial Sequence
  Description of Artificial Sequence: Synthetic oligonucleotide
  Antisense strand to SEQ ID NO: 1512532
aacuccggagaccacaaag

SEQ ID NO: 1512534 - RNA, 19 nt, Artificial Sequence
  Description of Artificial Sequence: Synthetic oligonucleotide
  Sense strand starting at position 2175 of SEQ ID NO: 1244757
uuuccacaaugggaucaaa

SEQ ID NO: 1512535 - RNA, 19 nt, Artificial Sequence
  Description of Artificial Sequence: Synthetic oligonucleotide
  Antisense strand to SEQ ID NO: 1512534
uuugaucccauuguggaaa

SEQ ID NO: 1512536 - RNA, 19 nt, Artificial Sequence
  Description of Artificial Sequence: Synthetic oligonucleotide
  Sense strand starting at position 2218 of SEQ ID NO: 1244757
ggcccgaguugugcugaga

SEQ ID NO: 1512537 - RNA, 19 nt, Artificial Sequence
  Description of Artificial Sequence: Synthetic oligonucleotide
  Antisense strand to SEQ ID NO: 1512536
ucucagcacaacucgggcc

SEQ ID NO: 1512538 - RNA, 19 nt, Artificial Sequence
  Description of Artificial Sequence: Synthetic oligonucleotide
  Sense strand starting at position 2221 of SEQ ID NO: 1244757
ccgaguugugcugagagga

SEQ ID NO: 1512539 - RNA, 19 nt, Artificial Sequence
  Description of Artificial Sequence: Synthetic oligonucleotide
  Antisense strand to SEQ ID NO: 1512538
uccucucagcacaacucgg

SEQ ID NO: 1512540 - RNA, 19 nt, Artificial Sequence
  Description of Artificial Sequence: Synthetic oligonucleotide
  Sense strand starting at position 2281 of SEQ ID NO: 1244757
gugccuguugcuccucaaa

SEQ ID NO: 1512541 - RNA, 19 nt, Artificial Sequence
  Description of Artificial Sequence: Synthetic oligonucleotide
  Antisense strand to SEQ ID NO: 1512540
uuugaggagcaacaggcac

SEQ ID NO: 1512542 - RNA, 19 nt, Artificial Sequence
  Description of Artificial Sequence: Synthetic oligonucleotide
  Sense strand starting at position 2283 of SEQ ID NO: 1244757
gccuguugcuccucaaauc

SEQ ID NO: 1512543 - RNA, 19 nt, Artificial Sequence
  Description of Artificial Sequence: Synthetic oligonucleotide
  Antisense strand to SEQ ID NO: 1512542
gauuugaggagcaacaggc

SEQ ID NO: 1512544 - RNA, 19 nt, Artificial Sequence
  Description of Artificial Sequence: Synthetic oligonucleotide
  Sense strand starting at position 2347 of SEQ ID NO: 1244757
uuuguuuccugagucauuc

SEQ ID NO: 1512545 - RNA, 19 nt, Artificial Sequence
  Description of Artificial Sequence: Synthetic oligonucleotide
  Antisense strand to SEQ ID NO: 1512544
gaaugacucaggaaacaaa

SEQ ID NO: 1512546 - RNA, 19 nt, Artificial Sequence
  Description of Artificial Sequence: Synthetic oligonucleotide
  Sense strand starting at position 2372 of SEQ ID NO: 1244757
gugcuugggccgugauuca

SEQ ID NO: 1512547 - RNA, 19 nt, Artificial Sequence
  Description of Artificial Sequence: Synthetic oligonucleotide
  Antisense strand to SEQ ID NO: 1512546
ugaaucacggcccaagcac

SEQ ID NO: 1512548 - RNA, 19 nt, Artificial Sequence
  Description of Artificial Sequence: Synthetic oligonucleotide
  Sense strand starting at position 2461 of SEQ ID NO: 1244757
auugaauuauggcaaguuu

SEQ ID NO: 1512549 - RNA, 19 nt, Artificial Sequence
  Description of Artificial Sequence: Synthetic oligonucleotide
  Antisense strand to SEQ ID NO: 1512548
aaacuugccauaauucaau

SEQ ID NO: 1512550 - RNA, 19 nt, Artificial Sequence
  Description of Artificial Sequence: Synthetic oligonucleotide
  Sense strand starting at position 2537 of SEQ ID NO: 1244757
aguuaagaggucugugaug

SEQ ID NO: 1512551 - RNA, 19 nt, Artificial Sequence
  Description of Artificial Sequence: Synthetic oligonucleotide
  Antisense strand to SEQ ID NO: 1512550
caucacagaccucuuaacu

SEQ ID NO: 1512552 - RNA, 19 nt, Artificial Sequence
  Description of Artificial Sequence: Synthetic oligonucleotide
  Sense strand starting at position 2542 of SEQ ID NO: 1244757
agaggucugugaugcgcau

SEQ ID NO: 1512553 - RNA, 19 nt, Artificial Sequence
  Description of Artificial Sequence: Synthetic oligonucleotide
  Antisense strand to SEQ ID NO: 1512552
augcgcaucacagaccucu

SEQ ID NO: 1512554 - RNA, 19 nt, Artificial Sequence
  Description of Artificial Sequence: Synthetic oligonucleotide
  Sense strand starting at position 2683 of SEQ ID NO: 1244757
gccucagguaaucggauua

SEQ ID NO: 1512555 - RNA, 19 nt, Artificial Sequence
  Description of Artificial Sequence: Synthetic oligonucleotide
  Antisense strand to SEQ ID NO: 1512554
uaauccgauuaccugaggc

SEQ ID NO: 1512556 - RNA, 19 nt, Artificial Sequence
  Description of Artificial Sequence: Synthetic oligonucleotide
  Sense strand starting at position 2767 of SEQ ID NO: 1244757
ugugcugugacucagggua

SEQ ID NO: 1512557 - RNA, 19 nt, Artificial Sequence
  Description of Artificial Sequence: Synthetic oligonucleotide
  Antisense strand to SEQ ID NO: 1512556
uacccugagucacagcaca

SEQ ID NO: 1512558 - RNA, 19 nt, Artificial Sequence
  Description of Artificial Sequence: Synthetic oligonucleotide
  Sense strand starting at position 2769 of SEQ ID NO: 1244757
ugcugugacucaggguaua

SEQ ID NO: 1512559 - RNA, 19 nt, Artificial Sequence
  Description of Artificial Sequence: Synthetic oligonucleotide
  Antisense strand to SEQ ID NO: 1512558
uauacccugagucacagca

SEQ ID NO: 1512560 - RNA, 19 nt, Artificial Sequence
  Description of Artificial Sequence: Synthetic oligonucleotide
  Sense strand starting at position 2893 of SEQ ID NO: 1244757
uuaggaaugucaggaauuc

SEQ ID NO: 1512561 - RNA, 19 nt, Artificial Sequence
  Description of Artificial Sequence: Synthetic oligonucleotide
  Antisense strand to SEQ ID NO: 1512560
gaauuccugacauuccuaa

SEQ ID NO: 1512562 - RNA, 19 nt, Artificial Sequence
  Description of Artificial Sequence: Synthetic oligonucleotide
  Sense strand starting at position 2922 of SEQ ID NO: 1244757
gaccaucuuugggacaaga

SEQ ID NO: 1512563 - RNA, 19 nt, Artificial Sequence
  Description of Artificial Sequence: Synthetic oligonucleotide
  Antisense strand to SEQ ID NO: 1512562
ucuugucccaaagaugguc

SEQ ID NO: 1512564 - RNA, 19 nt, Artificial Sequence
  Description of Artificial Sequence: Synthetic oligonucleotide
  Sense strand starting at position 2996 of SEQ ID NO: 1244757
gcaggucaguccuagagaa

SEQ ID NO: 1512565 - RNA, 19 nt, Artificial Sequence
  Description of Artificial Sequence: Synthetic oligonucleotide
  Antisense strand to SEQ ID NO: 1512564
uucucuaggacugaccugc

SEQ ID NO: 1512566 - RNA, 19 nt, Artificial Sequence
  Description of Artificial Sequence: Synthetic oligonucleotide
  Sense strand starting at position 3243 of SEQ ID NO: 1244757
cgucuuccacagugaugag

SEQ ID NO: 1512567 - RNA, 19 nt, Artificial Sequence
  Description of Artificial Sequence: Synthetic oligonucleotide
  Antisense strand to SEQ ID NO: 1512566
cucaucacuguggaagacg

SEQ ID NO: 1512568 - RNA, 19 nt, Artificial Sequence
  Description of Artificial Sequence: Synthetic oligonucleotide
  Sense strand starting at position 3731 of SEQ ID NO: 1244757
uaggaagcuugcugacaga

SEQ ID NO: 1512569 - RNA, 19 nt, Artificial Sequence
  Description of Artificial Sequence: Synthetic oligonucleotide
  Antisense strand to SEQ ID NO: 1512568
ucugucagcaagcuuccua

SEQ ID NO: 1512570 - RNA, 19 nt, Artificial Sequence
  Description of Artificial Sequence: Synthetic oligonucleotide
  Sense strand starting at position 3787 of SEQ ID NO: 1244757
gcaagaagcggugaguaga

SEQ ID NO: 1512571 - RNA, 19 nt, Artificial Sequence
  Description of Artificial Sequence: Synthetic oligonucleotide
  Antisense strand to SEQ ID NO: 1512570
ucuacucaccgcuucuugc

SEQ ID NO: 1512572 - RNA, 19 nt, Artificial Sequence
  Description of Artificial Sequence: Synthetic oligonucleotide
  Sense strand starting at position 3790 of SEQ ID NO: 1244757
agaagcggugaguagaaau

SEQ ID NO: 1512573 - RNA, 19 nt, Artificial Sequence
  Description of Artificial Sequence: Synthetic oligonucleotide
  Antisense strand to SEQ ID NO: 1512572
auuucuacucaccgcuucu

SEQ ID NO: 1512574 - RNA, 19 nt, Artificial Sequence
  Description of Artificial Sequence: Synthetic oligonucleotide
  Sense strand starting at position 3800 of SEQ ID NO: 1244757
aguagaaauucagguggga

SEQ ID NO: 1512575 - RNA, 19 nt, Artificial Sequence
  Description of Artificial Sequence: Synthetic oligonucleotide
  Antisense strand to SEQ ID NO: 1512574
ucccaccugaauuucuacu

SEQ ID NO: 1512576 - RNA, 19 nt, Artificial Sequence
  Description of Artificial Sequence: Synthetic oligonucleotide
  Sense strand starting at position 3815 of SEQ ID NO: 1244757
gggagacauucccuaccau

SEQ ID NO: 1512577 - RNA, 19 nt, Artificial Sequence
  Description of Artificial Sequence: Synthetic oligonucleotide
  Antisense strand to SEQ ID NO: 1512576
augguagggaaugucuccc

SEQ ID NO: 1512578 - RNA, 19 nt, Artificial Sequence
  Description of Artificial Sequence: Synthetic oligonucleotide
  Sense strand starting at position 3852 of SEQ ID NO: 1244757
uggugauccagagguuggu

SEQ ID NO: 1512579 - RNA, 19 nt, Artificial Sequence
  Description of Artificial Sequence: Synthetic oligonucleotide
  Antisense strand to SEQ ID NO: 1512578
accaaccucuggaucacca

SEQ ID NO: 1512580 - RNA, 19 nt, Artificial Sequence
  Description of Artificial Sequence: Synthetic oligonucleotide
  Sense strand starting at position 3862 of SEQ ID NO: 1244757
gagguugguucccugaucu

SEQ ID NO: 1512581 - RNA, 19 nt, Artificial Sequence
  Description of Artificial Sequence: Synthetic oligonucleotide
  Antisense strand to SEQ ID NO: 1512580
agaucagggaaccaaccuc

SEQ ID NO: 1512582 - RNA, 19 nt, Artificial Sequence
  Description of Artificial Sequence: Synthetic oligonucleotide
  Sense strand starting at position 3892 of SEQ ID NO: 1244757
cucucuuacuugggaucca

SEQ ID NO: 1512583 - RNA, 19 nt, Artificial Sequence
  Description of Artificial Sequence: Synthetic oligonucleotide
  Antisense strand to SEQ ID NO: 1512582
uggaucccaaguaagagag

SEQ ID NO: 1512584 - RNA, 19 nt, Artificial Sequence
  Description of Artificial Sequence: Synthetic oligonucleotide
  Sense strand starting at position 3949 of SEQ ID NO: 1244757
aguuuacacuggucuaaac

SEQ ID NO: 1512585 - RNA, 19 nt, Artificial Sequence
  Description of Artificial Sequence: Synthetic oligonucleotide
  Antisense strand to SEQ ID NO: 1512584
guuuagaccaguguaaacu

SEQ ID NO: 1512586 - RNA, 19 nt, Artificial Sequence
  Description of Artificial Sequence: Synthetic oligonucleotide
  Sense strand starting at position 348 of SEQ ID NO: 1244758
gucagugaaauccgccaaa

SEQ ID NO: 1512587 - RNA, 19 nt, Artificial Sequence
  Description of Artificial Sequence: Synthetic oligonucleotide
  Antisense strand to SEQ ID NO: 1512586
uuuggcggauuucacugac

SEQ ID NO: 1512588 - RNA, 19 nt, Artificial Sequence
  Description of Artificial Sequence: Synthetic oligonucleotide
  Sense strand starting at position 351 of SEQ ID NO: 1244758
agugaaauccgccaaacug

SEQ ID NO: 1512589 - RNA, 19 nt, Artificial Sequence
  Description of Artificial Sequence: Synthetic oligonucleotide
  Antisense strand to SEQ ID NO: 1512588
caguuuggcggauuucacu

SEQ ID NO: 1512590 - RNA, 19 nt, Artificial Sequence
  Description of Artificial Sequence: Synthetic oligonucleotide
  Sense strand starting at position 1015 of SEQ ID NO: 1244758
gcccaagaacuuugucaaa

SEQ ID NO: 1512591 - RNA, 19 nt, Artificial Sequence
  Description of Artificial Sequence: Synthetic oligonucleotide
  Antisense strand to SEQ ID NO: 1512590
uuugacaaaguucuugggc

SEQ ID NO: 1512592 - RNA, 19 nt, Artificial Sequence
  Description of Artificial Sequence: Synthetic oligonucleotide
  Sense strand starting at position 2009 of SEQ ID NO: 1244758
agcccagggucucuuuaau

SEQ ID NO: 1512593 - RNA, 19 nt, Artificial Sequence
  Description of Artificial Sequence: Synthetic oligonucleotide
  Antisense strand to SEQ ID NO: 1512592
auuaaagagacccugggcu

SEQ ID NO: 1512594 - RNA, 19 nt, Artificial Sequence
  Description of Artificial Sequence: Synthetic oligonucleotide
  Sense strand starting at position 2244 of SEQ ID NO: 1244758
gggacuuccaaguguguaa

SEQ ID NO: 1512595 - RNA, 19 nt, Artificial Sequence
  Description of Artificial Sequence: Synthetic oligonucleotide
  Antisense strand to SEQ ID NO: 1512594
uuacacacuuggaaguccc

SEQ ID NO: 1512596 - RNA, 19 nt, Artificial Sequence
  Description of Artificial Sequence: Synthetic oligonucleotide
  Sense strand starting at position 2248 of SEQ ID NO: 1244758
cuuccaaguguguaaguuu

SEQ ID NO: 1512597 - RNA, 19 nt, Artificial Sequence
  Description of Artificial Sequence: Synthetic oligonucleotide
  Antisense strand to SEQ ID NO: 1512596
aaacuuacacacuuggaag

SEQ ID NO: 1512598 - RNA, 19 nt, Artificial Sequence
  Description of Artificial Sequence: Synthetic oligonucleotide
  Sense strand starting at position 2351 of SEQ ID NO: 1244758
gugucuagacuaggaucua

SEQ ID NO: 1512599 - RNA, 19 nt, Artificial Sequence
  Description of Artificial Sequence: Synthetic oligonucleotide
  Antisense strand to SEQ ID NO: 1512598
uagauccuagucuagacac

SEQ ID NO: 1512600 - RNA, 19 nt, Artificial Sequence
  Description of Artificial Sequence: Synthetic oligonucleotide
  Sense strand starting at position 2425 of SEQ ID NO: 1244758
uggaguuugcaguauucga

SEQ ID NO: 1512601 - RNA, 19 nt, Artificial Sequence
  Description of Artificial Sequence: Synthetic oligonucleotide
  Antisense strand to SEQ ID NO: 1512600
ucgaauacugcaaacucca

SEQ ID NO: 1512602 - RNA, 19 nt, Artificial Sequence
  Description of Artificial Sequence: Synthetic oligonucleotide
  Sense strand starting at position 2556 of SEQ ID NO: 1244758
cccgcuguuccuccguaau

SEQ ID NO: 1512603 - RNA, 19 nt, Artificial Sequence
  Description of Artificial Sequence: Synthetic oligonucleotide
  Antisense strand to SEQ ID NO: 1512602
auuacggaggaacagcggg

SEQ ID NO: 1512604 - RNA, 19 nt, Artificial Sequence
  Description of Artificial Sequence: Synthetic oligonucleotide
  Sense strand starting at position 2559 of SEQ ID NO: 1244758
gcuguuccuccguaauaau

SEQ ID NO: 1512605 - RNA, 19 nt, Artificial Sequence
  Description of Artificial Sequence: Synthetic oligonucleotide
  Antisense strand to SEQ ID NO: 1512604
auuauuacggaggaacagc

SEQ ID NO: 1512606 - RNA, 19 nt, Artificial Sequence
  Description of Artificial Sequence: Synthetic oligonucleotide
  Sense strand starting at position 2755 of SEQ ID NO: 1244758
gaccuugagcucugacaag

SEQ ID NO: 1512607 - RNA, 19 nt, Artificial Sequence
  Description of Artificial Sequence: Synthetic oligonucleotide
  Antisense strand to SEQ ID NO: 1512606
cuugucagagcucaagguc

SEQ ID NO: 1512608 - RNA, 19 nt, Artificial Sequence
  Description of Artificial Sequence: Synthetic oligonucleotide
  Sense strand starting at position 2913 of SEQ ID NO: 1244758
cugcucuggcuuugagaga

SEQ ID NO: 1512609 - RNA, 19 nt, Artificial Sequence
  Description of Artificial Sequence: Synthetic oligonucleotide
  Antisense strand to SEQ ID NO: 1512608
ucucucaaagccagagcag

SEQ ID NO: 1512610 - RNA, 19 nt, Artificial Sequence
  Description of Artificial Sequence: Synthetic oligonucleotide
  Sense strand starting at position 2928 of SEQ ID NO: 1244758
gagauagaaguuugccaau

SEQ ID NO: 1512611 - RNA, 19 nt, Artificial Sequence
  Description of Artificial Sequence: Synthetic oligonucleotide
  Antisense strand to SEQ ID NO: 1512610
auuggcaaacuucuaucuc

SEQ ID NO: 1512612 - RNA, 19 nt, Artificial Sequence
  Description of Artificial Sequence: Synthetic oligonucleotide
  Sense strand starting at position 3204 of SEQ ID NO: 1244758
agcacaaccuuuguguuua

SEQ ID NO: 1512613 - RNA, 19 nt, Artificial Sequence
  Description of Artificial Sequence: Synthetic oligonucleotide
  Antisense strand to SEQ ID NO: 1512612
uaaacacaaagguugugcu

SEQ ID NO: 1512614 - RNA, 19 nt, Artificial Sequence
  Description of Artificial Sequence: Synthetic oligonucleotide
  Sense strand starting at position 3245 of SEQ ID NO: 1244758
uggguaagugcggagcuau

SEQ ID NO: 1512615 - RNA, 19 nt, Artificial Sequence
  Description of Artificial Sequence: Synthetic oligonucleotide
  Antisense strand to SEQ ID NO: 1512614
auagcuccgcacuuaccca

SEQ ID NO: 1512616 - RNA, 19 nt, Artificial Sequence
  Description of Artificial Sequence: Synthetic oligonucleotide
  Sense strand starting at position 3246 of SEQ ID NO: 1244758
ggguaagugcggagcuauc

SEQ ID NO: 1512617 - RNA, 19 nt, Artificial Sequence
  Description of Artificial Sequence: Synthetic oligonucleotide
  Antisense strand to SEQ ID NO: 1512616
gauagcuccgcacuuaccc

SEQ ID NO: 1512618 - RNA, 19 nt, Artificial Sequence
  Description of Artificial Sequence: Synthetic oligonucleotide
  Sense strand starting at position 3256 of SEQ ID NO: 1244758
ggagcuaucugcucuggga

SEQ ID NO: 1512619 - RNA, 19 nt, Artificial Sequence
  Description of Artificial Sequence: Synthetic oligonucleotide
  Antisense strand to SEQ ID NO: 1512618
ucccagagcagauagcucc

SEQ ID NO: 1512620 - RNA, 19 nt, Artificial Sequence
  Description of Artificial Sequence: Synthetic oligonucleotide
  Sense strand starting at position 3258 of SEQ ID NO: 1244758
agcuaucugcucugggaua

SEQ ID NO: 1512621 - RNA, 19 nt, Artificial Sequence
  Description of Artificial Sequence: Synthetic oligonucleotide
  Antisense strand to SEQ ID NO: 1512620
uaucccagagcagauagcu

SEQ ID NO: 1512622 - RNA, 19 nt, Artificial Sequence
  Description of Artificial Sequence: Synthetic oligonucleotide
  Sense strand starting at position 3260 of SEQ ID NO: 1244758
cuaucugcucugggauaga

SEQ ID NO: 1512623 - RNA, 19 nt, Artificial Sequence
  Description of Artificial Sequence: Synthetic oligonucleotide
  Antisense strand to SEQ ID NO: 1512622
ucuaucccagagcagauag

SEQ ID NO: 1512624 - RNA, 19 nt, Artificial Sequence
  Description of Artificial Sequence: Synthetic oligonucleotide
  Sense strand starting at position 3425 of SEQ ID NO: 1244758
ggugaaucggcccacauca

SEQ ID NO: 1512625 - RNA, 19 nt, Artificial Sequence
  Description of Artificial Sequence: Synthetic oligonucleotide
  Antisense strand to SEQ ID NO: 1512624
ugaugugggccgauucacc

SEQ ID NO: 1512626 - RNA, 19 nt, Artificial Sequence
  Description of Artificial Sequence: Synthetic oligonucleotide
  Sense strand starting at position 3427 of SEQ ID NO: 1244758
ugaaucggcccacaucaua

SEQ ID NO: 1512627 - RNA, 19 nt, Artificial Sequence
  Description of Artificial Sequence: Synthetic oligonucleotide
  Antisense strand to SEQ ID NO: 1512626
uaugaugugggccgauuca

SEQ ID NO: 1512628 - RNA, 19 nt, Artificial Sequence
  Description of Artificial Sequence: Synthetic oligonucleotide
  Sense strand starting at position 3512 of SEQ ID NO: 1244758
aauguccuuccgggagaau

SEQ ID NO: 1512629 - RNA, 19 nt, Artificial Sequence
  Description of Artificial Sequence: Synthetic oligonucleotide
  Antisense strand to SEQ ID NO: 1512628
auucucccggaaggacauu

SEQ ID NO: 1512630 - RNA, 19 nt, Artificial Sequence
  Description of Artificial Sequence: Synthetic oligonucleotide
  Sense strand starting at position 3513 of SEQ ID NO: 1244758
auguccuuccgggagaauu

SEQ ID NO: 1512631 - RNA, 19 nt, Artificial Sequence
  Description of Artificial Sequence: Synthetic oligonucleotide
  Antisense strand to SEQ ID NO: 1512630
aauucucccggaaggacau

SEQ ID NO: 1512632 - RNA, 19 nt, Artificial Sequence
  Description of Artificial Sequence: Synthetic oligonucleotide
  Sense strand starting at position 3561 of SEQ ID NO: 1244758
ucggaagaagcccgacauu

SEQ ID NO: 1512633 - RNA, 19 nt, Artificial Sequence
  Description of Artificial Sequence: Synthetic oligonucleotide
  Antisense strand to SEQ ID NO: 1512632
aaugucgggcuucuuccga

SEQ ID NO: 1512634 - RNA, 19 nt, Artificial Sequence
  Description of Artificial Sequence: Synthetic oligonucleotide
  Sense strand starting at position 3571 of SEQ ID NO: 1244758
cccgacauuucuuauagga

SEQ ID NO: 1512635 - RNA, 19 nt, Artificial Sequence
  Description of Artificial Sequence: Synthetic oligonucleotide
  Antisense strand to SEQ ID NO: 1512634
uccuauaagaaaugucggg

SEQ ID NO: 1512636 - RNA, 19 nt, Artificial Sequence
  Description of Artificial Sequence: Synthetic oligonucleotide
  Sense strand starting at position 3573 of SEQ ID NO: 1244758
cgacauuucuuauaggaaa

SEQ ID NO: 1512637 - RNA, 19 nt, Artificial Sequence
  Description of Artificial Sequence: Synthetic oligonucleotide
  Antisense strand to SEQ ID NO: 1512636
uuuccuauaagaaaugucg

SEQ ID NO: 1512638 - RNA, 19 nt, Artificial Sequence
  Description of Artificial Sequence: Synthetic oligonucleotide
  Sense strand starting at position 3681 of SEQ ID NO: 1244758
gugcccuauagcucguuua

SEQ ID NO: 1512639 - RNA, 19 nt, Artificial Sequence
  Description of Artificial Sequence: Synthetic oligonucleotide
  Antisense strand to SEQ ID NO: 1512638
uaaacgagcuauagggcac

SEQ ID NO: 1512640 - RNA, 19 nt, Artificial Sequence
  Description of Artificial Sequence: Synthetic oligonucleotide
  Sense strand starting at position 3705 of SEQ ID NO: 1244758
uuaagagauuugcauacaa

SEQ ID NO: 1512641 - RNA, 19 nt, Artificial Sequence
  Description of Artificial Sequence: Synthetic oligonucleotide
  Antisense strand to SEQ ID NO: 1512640
uuguaugcaaaucucuuaa

SEQ ID NO: 1512642 - RNA, 19 nt, Artificial Sequence
  Description of Artificial Sequence: Synthetic oligonucleotide
  Sense strand starting at position 3732 of SEQ ID NO: 1244758
uauccagggcucugugauu

SEQ ID NO: 1512643 - RNA, 19 nt, Artificial Sequence
  Description of Artificial Sequence: Synthetic oligonucleotide
  Antisense strand to SEQ ID NO: 1512642
aaucacagagcccuggaua

SEQ ID NO: 1512644 - RNA, 19 nt, Artificial Sequence
  Description of Artificial Sequence: Synthetic oligonucleotide
  Sense strand starting at position 3737 of SEQ ID NO: 1244758
agggcucugugauuacuuu

SEQ ID NO: 1512645 - RNA, 19 nt, Artificial Sequence
  Description of Artificial Sequence: Synthetic oligonucleotide
  Antisense strand to SEQ ID NO: 1512644
aaaguaaucacagagcccu

SEQ ID NO: 1512646 - RNA, 19 nt, Artificial Sequence
  Description of Artificial Sequence: Synthetic oligonucleotide
  Sense strand starting at position 3777 of SEQ ID NO: 1244758
cguccuuuccuaggagaaa

SEQ ID NO: 1512647 - RNA, 19 nt, Artificial Sequence
  Description of Artificial Sequence: Synthetic oligonucleotide
  Antisense strand to SEQ ID NO: 1512646
uuucuccuaggaaaggacg

SEQ ID NO: 1512648 - RNA, 19 nt, Artificial Sequence
  Description of Artificial Sequence: Synthetic oligonucleotide
  Sense strand starting at position 3802 of SEQ ID NO: 1244758
cgcguaguguggaccuauu

SEQ ID NO: 1512649 - RNA, 19 nt, Artificial Sequence
  Description of Artificial Sequence: Synthetic oligonucleotide
  Antisense strand to SEQ ID NO: 1512648
aauagguccacacuacgcg

SEQ ID NO: 1512650 - RNA, 19 nt, Artificial Sequence
  Description of Artificial Sequence: Synthetic oligonucleotide
  Sense strand starting at position 3839 of SEQ ID NO: 1244758
gggcauuguguguacagua

SEQ ID NO: 1512651 - RNA, 19 nt, Artificial Sequence
  Description of Artificial Sequence: Synthetic oligonucleotide
  Antisense strand to SEQ ID NO: 1512650
uacuguacacacaaugccc

SEQ ID NO: 1512652 - RNA, 19 nt, Artificial Sequence
  Description of Artificial Sequence: Synthetic oligonucleotide
  Sense strand starting at position 3844 of SEQ ID NO: 1244758
uuguguguacaguauaacu

SEQ ID NO: 1512653 - RNA, 19 nt, Artificial Sequence
  Description of Artificial Sequence: Synthetic oligonucleotide
  Antisense strand to SEQ ID NO: 1512652
aguuauacuguacacacaa

SEQ ID NO: 1512654 - RNA, 19 nt, Artificial Sequence
  Description of Artificial Sequence: Synthetic oligonucleotide
  Sense strand starting at position 3852 of SEQ ID NO: 1244758
acaguauaacuguguaauu

SEQ ID NO: 1512655 - RNA, 19 nt, Artificial Sequence
  Description of Artificial Sequence: Synthetic oligonucleotide
  Antisense strand to SEQ ID NO: 1512654
aauuacacaguuauacugu

SEQ ID NO: 1512656 - RNA, 19 nt, Artificial Sequence
  Description of Artificial Sequence: Synthetic oligonucleotide
  Sense strand starting at position 3854 of SEQ ID NO: 1244758
aguauaacuguguaauucu

SEQ ID NO: 1512657 - RNA, 19 nt, Artificial Sequence
  Description of Artificial Sequence: Synthetic oligonucleotide
  Antisense strand to SEQ ID NO: 1512656
agaauuacacaguuauacu

SEQ ID NO: 1512658 - RNA, 19 nt, Artificial Sequence
  Description of Artificial Sequence: Synthetic oligonucleotide
  Sense strand starting at position 3929 of SEQ ID NO: 1244758
ucuguacuuaguuguauga

SEQ ID NO: 1512659 - RNA, 19 nt, Artificial Sequence
  Description of Artificial Sequence: Synthetic oligonucleotide
  Antisense strand to SEQ ID NO: 1512658
ucauacaacuaaguacaga

SEQ ID NO: 1512660 - RNA, 19 nt, Artificial Sequence
  Description of Artificial Sequence: Synthetic oligonucleotide
  Sense strand starting at position 3956 of SEQ ID NO: 1244758
uuaccauguuugcuggaau

SEQ ID NO: 1512661 - RNA, 19 nt, Artificial Sequence
  Description of Artificial Sequence: Synthetic oligonucleotide
  Antisense strand to SEQ ID NO: 1512660
auuccagcaaacaugguaa

SEQ ID NO: 1512662 - RNA, 19 nt, Artificial Sequence
  Description of Artificial Sequence: Synthetic oligonucleotide
  Sense strand starting at position 3959 of SEQ ID NO: 1244758
ccauguuugcuggaauaaa

SEQ ID NO: 1512663 - RNA, 19 nt, Artificial Sequence
  Description of Artificial Sequence: Synthetic oligonucleotide
  Antisense strand to SEQ ID NO: 1512662
uuuauuccagcaaacaugg

SEQ ID NO: 1512664 - RNA, 19 nt, Artificial Sequence
  Description of Artificial Sequence: Synthetic oligonucleotide
  Sense strand starting at position 3983 of SEQ ID NO: 1244758
ugaagagggcuaugacuuu

SEQ ID NO: 1512665 - RNA, 19 nt, Artificial Sequence
  Description of Artificial Sequence: Synthetic oligonucleotide
  Antisense strand to SEQ ID NO: 1512664
aaagucauagcccucuuca

SEQ ID NO: 1512666 - RNA, 19 nt, Artificial Sequence
  Description of Artificial Sequence: Synthetic oligonucleotide
  Sense strand starting at position 29 of SEQ ID NO: 1244759
ugggcagucaggugaggau

SEQ ID NO: 1512667 - RNA, 19 nt, Artificial Sequence
  Description of Artificial Sequence: Synthetic oligonucleotide
  Antisense strand to SEQ ID NO: 1512666
auccucaccugacugccca

SEQ ID NO: 1512668 - RNA, 19 nt, Artificial Sequence
  Description of Artificial Sequence: Synthetic oligonucleotide
  Sense strand starting at position 173 of SEQ ID NO: 1244759
agguuaagccucuguacaa

SEQ ID NO: 1512669 - RNA, 19 nt, Artificial Sequence
  Description of Artificial Sequence: Synthetic oligonucleotide
  Antisense strand to SEQ ID NO: 1512668
uuguacagaggcuuaaccu

SEQ ID NO: 1512670 - RNA, 19 nt, Artificial Sequence
  Description of Artificial Sequence: Synthetic oligonucleotide
  Sense strand starting at position 308 of SEQ ID NO: 1244759
auugauagguugucugaua

SEQ ID NO: 1512671 - RNA, 19 nt, Artificial Sequence
  Description of Artificial Sequence: Synthetic oligonucleotide
  Antisense strand to SEQ ID NO: 1512670
uaucagacaaccuaucaau

SEQ ID NO: 1512672 - RNA, 19 nt, Artificial Sequence
  Description of Artificial Sequence: Synthetic oligonucleotide
  Sense strand starting at position 309 of SEQ ID NO: 1244759
uugauagguugucugauag

SEQ ID NO: 1512673 - RNA, 19 nt, Artificial Sequence
  Description of Artificial Sequence: Synthetic oligonucleotide
  Antisense strand to SEQ ID NO: 1512672
cuaucagacaaccuaucaa

SEQ ID NO: 1512674 - RNA, 19 nt, Artificial Sequence
  Description of Artificial Sequence: Synthetic oligonucleotide
  Sense strand starting at position 539 of SEQ ID NO: 1244759
acagcccuccacugugaaa

SEQ ID NO: 1512675 - RNA, 19 nt, Artificial Sequence
  Description of Artificial Sequence: Synthetic oligonucleotide
  Antisense strand to SEQ ID NO: 1512674
uuucacaguggagggcugu

SEQ ID NO: 1512676 - RNA, 19 nt, Artificial Sequence
  Description of Artificial Sequence: Synthetic oligonucleotide
  Sense strand starting at position 622 of SEQ ID NO: 1244759
caguguccaucuguaauga

SEQ ID NO: 1512677 - RNA, 19 nt, Artificial Sequence
  Description of Artificial Sequence: Synthetic oligonucleotide
  Antisense strand to SEQ ID NO: 1512676
ucauuacagauggacacug

SEQ ID NO: 1512678 - RNA, 19 nt, Artificial Sequence
  Description of Artificial Sequence: Synthetic oligonucleotide
  Sense strand starting at position 623 of SEQ ID NO: 1244759
aguguccaucuguaaugaa

SEQ ID NO: 1512679 - RNA, 19 nt, Artificial Sequence
  Description of Artificial Sequence: Synthetic oligonucleotide
  Antisense strand to SEQ ID NO: 1512678
uucauuacagauggacacu

SEQ ID NO: 1512680 - RNA, 19 nt, Artificial Sequence
  Description of Artificial Sequence: Synthetic oligonucleotide
  Sense strand starting at position 651 of SEQ ID NO: 1244759
cgggaaacuugggccaauu

SEQ ID NO: 1512681 - RNA, 19 nt, Artificial Sequence
  Description of Artificial Sequence: Synthetic oligonucleotide
  Antisense strand to SEQ ID NO: 1512680
aauuggcccaaguuucccg

SEQ ID NO: 1512682 - RNA, 19 nt, Artificial Sequence
  Description of Artificial Sequence: Synthetic oligonucleotide
  Sense strand starting at position 748 of SEQ ID NO: 1244759
aaagaacuuugggagaaug

SEQ ID NO: 1512683 - RNA, 19 nt, Artificial Sequence
  Description of Artificial Sequence: Synthetic oligonucleotide
  Antisense strand to SEQ ID NO: 1512682
cauucucccaaaguucuuu

SEQ ID NO: 1512684 - RNA, 19 nt, Artificial Sequence
  Description of Artificial Sequence: Synthetic oligonucleotide
  Sense strand starting at position 858 of SEQ ID NO: 1244759
gaggacagguuucucaguu

SEQ ID NO: 1512685 - RNA, 19 nt, Artificial Sequence
  Description of Artificial Sequence: Synthetic oligonucleotide
  Antisense strand to SEQ ID NO: 1512684
aacugagaaaccuguccuc

SEQ ID NO: 1512686 - RNA, 19 nt, Artificial Sequence
  Description of Artificial Sequence: Synthetic oligonucleotide
  Sense strand starting at position 870 of SEQ ID NO: 1244759
cucaguugcccagaggaga

SEQ ID NO: 1512687 - RNA, 19 nt, Artificial Sequence
  Description of Artificial Sequence: Synthetic oligonucleotide
  Antisense strand to SEQ ID NO: 1512686
ucuccucugggcaacugag

SEQ ID NO: 1512688 - RNA, 19 nt, Artificial Sequence
  Description of Artificial Sequence: Synthetic oligonucleotide
  Sense strand starting at position 1049 of SEQ ID NO: 1244759
gauuguuugcgccugagcu

SEQ ID NO: 1512689 - RNA, 19 nt, Artificial Sequence
  Description of Artificial Sequence: Synthetic oligonucleotide
  Antisense strand to SEQ ID NO: 1512688
agcucaggcgcaaacaauc

SEQ ID NO: 1512690 - RNA, 19 nt, Artificial Sequence
  Description of Artificial Sequence: Synthetic oligonucleotide
  Sense strand starting at position 1166 of SEQ ID NO: 1244759
agauaucuagcuggaagau

SEQ ID NO: 1512691 - RNA, 19 nt, Artificial Sequence
  Description of Artificial Sequence: Synthetic oligonucleotide
  Antisense strand to SEQ ID NO: 1512690
aucuuccagcuagauaucu

SEQ ID NO: 1512692 - RNA, 19 nt, Artificial Sequence
  Description of Artificial Sequence: Synthetic oligonucleotide
  Sense strand starting at position 1254 of SEQ ID NO: 1244759
gagugcucucguguccuga

SEQ ID NO: 1512693 - RNA, 19 nt, Artificial Sequence
  Description of Artificial Sequence: Synthetic oligonucleotide
  Antisense strand to SEQ ID NO: 1512692
ucaggacacgagagcacuc

SEQ ID NO: 1512694 - RNA, 19 nt, Artificial Sequence
  Description of Artificial Sequence: Synthetic oligonucleotide
  Sense strand starting at position 1410 of SEQ ID NO: 1244759
ggcaucuacaguuaagagu

SEQ ID NO: 1512695 - RNA, 19 nt, Artificial Sequence
  Description of Artificial Sequence: Synthetic oligonucleotide
  Antisense strand to SEQ ID NO: 1512694
acucuuaacuguagaugcc

SEQ ID NO: 1512696 - RNA, 19 nt, Artificial Sequence
  Description of Artificial Sequence: Synthetic oligonucleotide
  Sense strand starting at position 2059 of SEQ ID NO: 1244759
gaccaauaggucugugcaa

SEQ ID NO: 1512697 - RNA, 19 nt, Artificial Sequence
  Description of Artificial Sequence: Synthetic oligonucleotide
  Antisense strand to SEQ ID NO: 1512696
uugcacagaccuauugguc

SEQ ID NO: 1512698 - RNA, 19 nt, Artificial Sequence
  Description of Artificial Sequence: Synthetic oligonucleotide
  Sense strand starting at position 2060 of SEQ ID NO: 1244759
accaauaggucugugcaau

SEQ ID NO: 1512699 - RNA, 19 nt, Artificial Sequence
  Description of Artificial Sequence: Synthetic oligonucleotide
  Antisense strand to SEQ ID NO: 1512698
auugcacagaccuauuggu

SEQ ID NO: 1512700 - RNA, 19 nt, Artificial Sequence
  Description of Artificial Sequence: Synthetic oligonucleotide
  Sense strand starting at position 2072 of SEQ ID NO: 1244759
gugcaaugucacugaugga

SEQ ID NO: 1512701 - RNA, 19 nt, Artificial Sequence
  Description of Artificial Sequence: Synthetic oligonucleotide
  Antisense strand to SEQ ID NO: 1512700
uccaucagugacauugcac

SEQ ID NO: 1512702 - RNA, 19 nt, Artificial Sequence
  Description of Artificial Sequence: Synthetic oligonucleotide
  Sense strand starting at position 2125 of SEQ ID NO: 1244759
augagugacaugugcauca

SEQ ID NO: 1512703 - RNA, 19 nt, Artificial Sequence
  Description of Artificial Sequence: Synthetic oligonucleotide
  Antisense strand to SEQ ID NO: 1512702
ugaugcacaugucacucau

SEQ ID NO: 1512704 - RNA, 19 nt, Artificial Sequence
  Description of Artificial Sequence: Synthetic oligonucleotide
  Sense strand starting at position 2130 of SEQ ID NO: 1244759
ugacaugugcaucagccaa

SEQ ID NO: 1512705 - RNA, 19 nt, Artificial Sequence
  Description of Artificial Sequence: Synthetic oligonucleotide
  Antisense strand to SEQ ID NO: 1512704
uuggcugaugcacauguca

SEQ ID NO: 1512706 - RNA, 19 nt, Artificial Sequence
  Description of Artificial Sequence: Synthetic oligonucleotide
  Sense strand starting at position 2277 of SEQ ID NO: 1244759
gaggaugaaugauagaucu

SEQ ID NO: 1512707 - RNA, 19 nt, Artificial Sequence
  Description of Artificial Sequence: Synthetic oligonucleotide
  Antisense strand to SEQ ID NO: 1512706
agaucuaucauucauccuc

SEQ ID NO: 1512708 - RNA, 19 nt, Artificial Sequence
  Description of Artificial Sequence: Synthetic oligonucleotide
  Sense strand starting at position 2453 of SEQ ID NO: 1244759
guggaaagccaucaaccuu

SEQ ID NO: 1512709 - RNA, 19 nt, Artificial Sequence
  Description of Artificial Sequence: Synthetic oligonucleotide
  Antisense strand to SEQ ID NO: 1512708
aagguugauggcuuuccac

SEQ ID NO: 1512710 - RNA, 19 nt, Artificial Sequence
  Description of Artificial Sequence: Synthetic oligonucleotide
  Sense strand starting at position 2510 of SEQ ID NO: 1244759
gacuuuguacagugaggca

SEQ ID NO: 1512711 - RNA, 19 nt, Artificial Sequence
  Description of Artificial Sequence: Synthetic oligonucleotide
  Antisense strand to SEQ ID NO: 1512710
ugccucacuguacaaaguc

SEQ ID NO: 1512712 - RNA, 19 nt, Artificial Sequence
  Description of Artificial Sequence: Synthetic oligonucleotide
  Sense strand starting at position 2676 of SEQ ID NO: 1244759
auccgaagcucuuucuaaa

SEQ ID NO: 1512713 - RNA, 19 nt, Artificial Sequence
  Description of Artificial Sequence: Synthetic oligonucleotide
  Antisense strand to SEQ ID NO: 1512712
uuuagaaagagcuucggau

SEQ ID NO: 1512714 - RNA, 19 nt, Artificial Sequence
  Description of Artificial Sequence: Synthetic oligonucleotide
  Sense strand starting at position 2793 of SEQ ID NO: 1244759
cacgcuugaguuugagaag

SEQ ID NO: 1512715 - RNA, 19 nt, Artificial Sequence
  Description of Artificial Sequence: Synthetic oligonucleotide
  Antisense strand to SEQ ID NO: 1512714
cuucucaaacucaagcgug

SEQ ID NO: 1512716 - RNA, 19 nt, Artificial Sequence
  Description of Artificial Sequence: Synthetic oligonucleotide
  Sense strand starting at position 2842 of SEQ ID NO: 1244759
accuucuugagaugaggua

SEQ ID NO: 1512717 - RNA, 19 nt, Artificial Sequence
  Description of Artificial Sequence: Synthetic oligonucleotide
  Antisense strand to SEQ ID NO: 1512716
uaccucaucucaagaaggu

SEQ ID NO: 1512718 - RNA, 19 nt, Artificial Sequence
  Description of Artificial Sequence: Synthetic oligonucleotide
  Sense strand starting at position 2901 of SEQ ID NO: 1244759
ucccaagucucuuccgaga

SEQ ID NO: 1512719 - RNA, 19 nt, Artificial Sequence
  Description of Artificial Sequence: Synthetic oligonucleotide
  Antisense strand to SEQ ID NO: 1512718
ucucggaagagacuuggga

SEQ ID NO: 1512720 - RNA, 19 nt, Artificial Sequence
  Description of Artificial Sequence: Synthetic oligonucleotide
  Sense strand starting at position 2906 of SEQ ID NO: 1244759
agucucuuccgagaacuug

SEQ ID NO: 1512721 - RNA, 19 nt, Artificial Sequence
  Description of Artificial Sequence: Synthetic oligonucleotide
  Antisense strand to SEQ ID NO: 1512720
caaguucucggaagagacu

SEQ ID NO: 1512722 - RNA, 19 nt, Artificial Sequence
  Description of Artificial Sequence: Synthetic oligonucleotide
  Sense strand starting at position 2966 of SEQ ID NO: 1244759
agaccagucuggguuugaa

SEQ ID NO: 1512723 - RNA, 19 nt, Artificial Sequence
  Description of Artificial Sequence: Synthetic oligonucleotide
  Antisense strand to SEQ ID NO: 1512722
uucaaacccagacuggucu

SEQ ID NO: 1512724 - RNA, 19 nt, Artificial Sequence
  Description of Artificial Sequence: Synthetic oligonucleotide
  Sense strand starting at position 3015 of SEQ ID NO: 1244759
accgaaacucccugagcuu

SEQ ID NO: 1512725 - RNA, 19 nt, Artificial Sequence
  Description of Artificial Sequence: Synthetic oligonucleotide
  Antisense strand to SEQ ID NO: 1512724
aagcucagggaguuucggu

SEQ ID NO: 1512726 - RNA, 19 nt, Artificial Sequence
  Description of Artificial Sequence: Synthetic oligonucleotide
  Sense strand starting at position 3033 of SEQ ID NO: 1244759
ucauguccucaucaguaaa

SEQ ID NO: 1512727 - RNA, 19 nt, Artificial Sequence
  Description of Artificial Sequence: Synthetic oligonucleotide
  Antisense strand to SEQ ID NO: 1512726
uuuacugaugaggacauga

SEQ ID NO: 1512728 - RNA, 19 nt, Artificial Sequence
  Description of Artificial Sequence: Synthetic oligonucleotide
  Sense strand starting at position 3157 of SEQ ID NO: 1244759
agaccaguacacugcuauu

SEQ ID NO: 1512729 - RNA, 19 nt, Artificial Sequence
  Description of Artificial Sequence: Synthetic oligonucleotide
  Antisense strand to SEQ ID NO: 1512728
aauagcaguguacuggucu

SEQ ID NO: 1512730 - RNA, 19 nt, Artificial Sequence
  Description of Artificial Sequence: Synthetic oligonucleotide
  Sense strand starting at position 3168 of SEQ ID NO: 1244759
cugcuauuuguaugagagu

SEQ ID NO: 1512731 - RNA, 19 nt, Artificial Sequence
  Description of Artificial Sequence: Synthetic oligonucleotide
  Antisense strand to SEQ ID NO: 1512730
acucucauacaaauagcag

SEQ ID NO: 1512732 - RNA, 19 nt, Artificial Sequence
  Description of Artificial Sequence: Synthetic oligonucleotide
  Sense strand starting at position 3174 of SEQ ID NO: 1244759
uuuguaugagagugucaua

SEQ ID NO: 1512733 - RNA, 19 nt, Artificial Sequence
  Description of Artificial Sequence: Synthetic oligonucleotide
  Antisense strand to SEQ ID NO: 1512732
uaugacacucucauacaaa

SEQ ID NO: 1512734 - RNA, 19 nt, Artificial Sequence
  Description of Artificial Sequence: Synthetic oligonucleotide
  Sense strand starting at position 3215 of SEQ ID NO: 1244759
cuacuugugacgcacugau

SEQ ID NO: 1512735 - RNA, 19 nt, Artificial Sequence
  Description of Artificial Sequence: Synthetic oligonucleotide
  Antisense strand to SEQ ID NO: 1512734
aucagugcgucacaaguag

SEQ ID NO: 1512736 - RNA, 19 nt, Artificial Sequence
  Description of Artificial Sequence: Synthetic oligonucleotide
  Sense strand starting at position 3234 of SEQ ID NO: 1244759
aguuucuaugcuuauccua

SEQ ID NO: 1512737 - RNA, 19 nt, Artificial Sequence
  Description of Artificial Sequence: Synthetic oligonucleotide
  Antisense strand to SEQ ID NO: 1512736
uaggauaagcauagaaacu

SEQ ID NO: 1512738 - RNA, 19 nt, Artificial Sequence
  Description of Artificial Sequence: Synthetic oligonucleotide
  Sense strand starting at position 3470 of SEQ ID NO: 1244759
ggauccguaucuccuagau

SEQ ID NO: 1512739 - RNA, 19 nt, Artificial Sequence
  Description of Artificial Sequence: Synthetic oligonucleotide
  Antisense strand to SEQ ID NO: 1512738
aucuaggagauacggaucc

SEQ ID NO: 1512740 - RNA, 19 nt, Artificial Sequence
  Description of Artificial Sequence: Synthetic oligonucleotide
  Sense strand starting at position 3474 of SEQ ID NO: 1244759
ccguaucuccuagauaaag

SEQ ID NO: 1512741 - RNA, 19 nt, Artificial Sequence
  Description of Artificial Sequence: Synthetic oligonucleotide
  Antisense strand to SEQ ID NO: 1512740
cuuuaucuaggagauacgg

SEQ ID NO: 1512742 - RNA, 19 nt, Artificial Sequence
  Description of Artificial Sequence: Synthetic oligonucleotide
  Sense strand starting at position 3498 of SEQ ID NO: 1244759
acuccuuucuaggcaaagu

SEQ ID NO: 1512743 - RNA, 19 nt, Artificial Sequence
  Description of Artificial Sequence: Synthetic oligonucleotide
  Antisense strand to SEQ ID NO: 1512742
acuuugccuagaaaggagu

SEQ ID NO: 1512744 - RNA, 19 nt, Artificial Sequence
  Description of Artificial Sequence: Synthetic oligonucleotide
  Sense strand starting at position 3766 of SEQ ID NO: 1244759
uuccuagugcuuugggaag

SEQ ID NO: 1512745 - RNA, 19 nt, Artificial Sequence
  Description of Artificial Sequence: Synthetic oligonucleotide
  Antisense strand to SEQ ID NO: 1512744
cuucccaaagcacuaggaa

SEQ ID NO: 1512746 - RNA, 19 nt, Artificial Sequence
  Description of Artificial Sequence: Synthetic oligonucleotide
  Sense strand starting at position 10 of SEQ ID NO: 1244760
cagcuuucuggccaccaga

SEQ ID NO: 1512747 - RNA, 19 nt, Artificial Sequence
  Description of Artificial Sequence: Synthetic oligonucleotide
  Antisense strand to SEQ ID NO: 1512746
ucugguggccagaaagcug

SEQ ID NO: 1512748 - RNA, 19 nt, Artificial Sequence
  Description of Artificial Sequence: Synthetic oligonucleotide
  Sense strand starting at position 198 of SEQ ID NO: 1244760
gacagcaagcucuggaaga

SEQ ID NO: 1512749 - RNA, 19 nt, Artificial Sequence
  Description of Artificial Sequence: Synthetic oligonucleotide
  Antisense strand to SEQ ID NO: 1512748
ucuuccagagcuugcuguc

SEQ ID NO: 1512750 - RNA, 19 nt, Artificial Sequence
  Description of Artificial Sequence: Synthetic oligonucleotide
  Sense strand starting at position 200 of SEQ ID NO: 1244760
cagcaagcucuggaagaua

SEQ ID NO: 1512751 - RNA, 19 nt, Artificial Sequence
  Description of Artificial Sequence: Synthetic oligonucleotide
  Antisense strand to SEQ ID NO: 1512750
uaucuuccagagcuugcug

SEQ ID NO: 1512752 - RNA, 19 nt, Artificial Sequence
  Description of Artificial Sequence: Synthetic oligonucleotide
  Sense strand starting at position 384 of SEQ ID NO: 1244760
agauucuuauaugcagcaa

SEQ ID NO: 1512753 - RNA, 19 nt, Artificial Sequence
  Description of Artificial Sequence: Synthetic oligonucleotide
  Antisense strand to SEQ ID NO: 1512752
uugcugcauauaagaaucu

SEQ ID NO: 1512754 - RNA, 19 nt, Artificial Sequence
  Description of Artificial Sequence: Synthetic oligonucleotide
  Sense strand starting at position 388 of SEQ ID NO: 1244760
ucuuauaugcagcaaaugu

SEQ ID NO: 1512755 - RNA, 19 nt, Artificial Sequence
  Description of Artificial Sequence: Synthetic oligonucleotide
  Antisense strand to SEQ ID NO: 1512754
acauuugcugcauauaaga

SEQ ID NO: 1512756 - RNA, 19 nt, Artificial Sequence
  Description of Artificial Sequence: Synthetic oligonucleotide
  Sense strand starting at position 470 of SEQ ID NO: 1244760
ggcacagugacuuggacaa

SEQ ID NO: 1512757 - RNA, 19 nt, Artificial Sequence
  Description of Artificial Sequence: Synthetic oligonucleotide
  Antisense strand to SEQ ID NO: 1512756
uuguccaagucacugugcc

SEQ ID NO: 1512758 - RNA, 19 nt, Artificial Sequence
  Description of Artificial Sequence: Synthetic oligonucleotide
  Sense strand starting at position 533 of SEQ ID NO: 1244760
ggacucucagucuguuacu

SEQ ID NO: 1512759 - RNA, 19 nt, Artificial Sequence
  Description of Artificial Sequence: Synthetic oligonucleotide
  Antisense strand to SEQ ID NO: 1512758
aguaacagacugagagucc

SEQ ID NO: 1512760 - RNA, 19 nt, Artificial Sequence
  Description of Artificial Sequence: Synthetic oligonucleotide
  Sense strand starting at position 542 of SEQ ID NO: 1244760
gucuguuacuuucuguaaa

SEQ ID NO: 1512761 - RNA, 19 nt, Artificial Sequence
  Description of Artificial Sequence: Synthetic oligonucleotide
  Antisense strand to SEQ ID NO: 1512760
uuuacagaaaguaacagac

SEQ ID NO: 1512762 - RNA, 19 nt, Artificial Sequence
  Description of Artificial Sequence: Synthetic oligonucleotide
  Sense strand starting at position 545 of SEQ ID NO: 1244760
uguuacuuucuguaaacca

SEQ ID NO: 1512763 - RNA, 19 nt, Artificial Sequence
  Description of Artificial Sequence: Synthetic oligonucleotide
  Antisense strand to SEQ ID NO: 1512762
ugguuuacagaaaguaaca

SEQ ID NO: 1512764 - RNA, 19 nt, Artificial Sequence
  Description of Artificial Sequence: Synthetic oligonucleotide
  Sense strand starting at position 617 of SEQ ID NO: 1244760
auaucuguggcuugaaguu

SEQ ID NO: 1512765 - RNA, 19 nt, Artificial Sequence
  Description of Artificial Sequence: Synthetic oligonucleotide
  Antisense strand to SEQ ID NO: 1512764
aacuucaagccacagauau

SEQ ID NO: 1512766 - RNA, 19 nt, Artificial Sequence
  Description of Artificial Sequence: Synthetic oligonucleotide
  Sense strand starting at position 1368 of SEQ ID NO: 1244760
guauguguccgguucacuu

SEQ ID NO: 1512767 - RNA, 19 nt, Artificial Sequence
  Description of Artificial Sequence: Synthetic oligonucleotide
  Antisense strand to SEQ ID NO: 1512766
aagugaaccggacacauac

SEQ ID NO: 1512768 - RNA, 19 nt, Artificial Sequence
  Description of Artificial Sequence: Synthetic oligonucleotide
  Sense strand starting at position 1644 of SEQ ID NO: 1244760
ccucucagauccuuuagga

SEQ ID NO: 1512769 - RNA, 19 nt, Artificial Sequence
  Description of Artificial Sequence: Synthetic oligonucleotide
  Antisense strand to SEQ ID NO: 1512768
uccuaaaggaucugagagg

SEQ ID NO: 1512770 - RNA, 19 nt, Artificial Sequence
  Description of Artificial Sequence: Synthetic oligonucleotide
  Sense strand starting at position 1843 of SEQ ID NO: 1244760
gcgagcucuccagcgguaa

SEQ ID NO: 1512771 - RNA, 19 nt, Artificial Sequence
  Description of Artificial Sequence: Synthetic oligonucleotide
  Antisense strand to SEQ ID NO: 1512770
uuaccgcuggagagcucgc

SEQ ID NO: 1512772 - RNA, 19 nt, Artificial Sequence
  Description of Artificial Sequence: Synthetic oligonucleotide
  Sense strand starting at position 2239 of SEQ ID NO: 1244760
gggugauucccagguucua

SEQ ID NO: 1512773 - RNA, 19 nt, Artificial Sequence
  Description of Artificial Sequence: Synthetic oligonucleotide
  Antisense strand to SEQ ID NO: 1512772
uagaaccugggaaucaccc

SEQ ID NO: 1512774 - RNA, 19 nt, Artificial Sequence
  Description of Artificial Sequence: Synthetic oligonucleotide
  Sense strand starting at position 2468 of SEQ ID NO: 1244760
aagauugagcgccaaguau

SEQ ID NO: 1512775 - RNA, 19 nt, Artificial Sequence
  Description of Artificial Sequence: Synthetic oligonucleotide
  Antisense strand to SEQ ID NO: 1512774
auacuuggcgcucaaucuu

SEQ ID NO: 1512776 - RNA, 19 nt, Artificial Sequence
  Description of Artificial Sequence: Synthetic oligonucleotide
  Sense strand starting at position 2483 of SEQ ID NO: 1244760
guauguuuccaguucgccu

SEQ ID NO: 1512777 - RNA, 19 nt, Artificial Sequence
  Description of Artificial Sequence: Synthetic oligonucleotide
  Antisense strand to SEQ ID NO: 1512776
aggcgaacuggaaacauac

SEQ ID NO: 1512778 - RNA, 19 nt, Artificial Sequence
  Description of Artificial Sequence: Synthetic oligonucleotide
  Sense strand starting at position 2516 of SEQ ID NO: 1244760
ugugaaauuugucuuggcu

SEQ ID NO: 1512779 - RNA, 19 nt, Artificial Sequence
  Description of Artificial Sequence: Synthetic oligonucleotide
  Antisense strand to SEQ ID NO: 1512778
agccaagacaaauuucaca

SEQ ID NO: 1512780 - RNA, 19 nt, Artificial Sequence
  Description of Artificial Sequence: Synthetic oligonucleotide
  Sense strand starting at position 2669 of SEQ ID NO: 1244760
ugaccuuucugggugacca

SEQ ID NO: 1512781 - RNA, 19 nt, Artificial Sequence
  Description of Artificial Sequence: Synthetic oligonucleotide
  Antisense strand to SEQ ID NO: 1512780
uggucacccagaaagguca

SEQ ID NO: 1512782 - RNA, 19 nt, Artificial Sequence
  Description of Artificial Sequence: Synthetic oligonucleotide
  Sense strand starting at position 2843 of SEQ ID NO: 1244760
ccuccuguccuucgggaaa

SEQ ID NO: 1512783 - RNA, 19 nt, Artificial Sequence
  Description of Artificial Sequence: Synthetic oligonucleotide
  Antisense strand to SEQ ID NO: 1512782
uuucccgaaggacaggagg

SEQ ID NO: 1512784 - RNA, 19 nt, Artificial Sequence
  Description of Artificial Sequence: Synthetic oligonucleotide
  Sense strand starting at position 2854 of SEQ ID NO: 1244760
ucgggaaaugcucagccua

SEQ ID NO: 1512785 - RNA, 19 nt, Artificial Sequence
  Description of Artificial Sequence: Synthetic oligonucleotide
  Antisense strand to SEQ ID NO: 1512784
uaggcugagcauuucccga

SEQ ID NO: 1512786 - RNA, 19 nt, Artificial Sequence
  Description of Artificial Sequence: Synthetic oligonucleotide
  Sense strand starting at position 2946 of SEQ ID NO: 1244760
ucuggaaggaauugagcua

SEQ ID NO: 1512787 - RNA, 19 nt, Artificial Sequence
  Description of Artificial Sequence: Synthetic oligonucleotide
  Antisense strand to SEQ ID NO: 1512786
uagcucaauuccuuccaga

SEQ ID NO: 1512788 - RNA, 19 nt, Artificial Sequence
  Description of Artificial Sequence: Synthetic oligonucleotide
  Sense strand starting at position 3037 of SEQ ID NO: 1244760
cuuggauuccuuugagaaa

SEQ ID NO: 1512789 - RNA, 19 nt, Artificial Sequence
  Description of Artificial Sequence: Synthetic oligonucleotide
  Antisense strand to SEQ ID NO: 1512788
uuucucaaaggaauccaag

SEQ ID NO: 1512790 - RNA, 19 nt, Artificial Sequence
  Description of Artificial Sequence: Synthetic oligonucleotide
  Sense strand starting at position 3059 of SEQ ID NO: 1244760
ucacaugcccagugcaaua

SEQ ID NO: 1512791 - RNA, 19 nt, Artificial Sequence
  Description of Artificial Sequence: Synthetic oligonucleotide
  Antisense strand to SEQ ID NO: 1512790
uauugcacugggcauguga

SEQ ID NO: 1512792 - RNA, 19 nt, Artificial Sequence
  Description of Artificial Sequence: Synthetic oligonucleotide
  Sense strand starting at position 3253 of SEQ ID NO: 1244760
uguugaucucuccauguga

SEQ ID NO: 1512793 - RNA, 19 nt, Artificial Sequence
  Description of Artificial Sequence: Synthetic oligonucleotide
  Antisense strand to SEQ ID NO: 1512792
ucacauggagagaucaaca

SEQ ID NO: 1512794 - RNA, 19 nt, Artificial Sequence
  Description of Artificial Sequence: Synthetic oligonucleotide
  Sense strand starting at position 3509 of SEQ ID NO: 1244760
agcuaaaccgagugcauaa

SEQ ID NO: 1512795 - RNA, 19 nt, Artificial Sequence
  Description of Artificial Sequence: Synthetic oligonucleotide
  Antisense strand to SEQ ID NO: 1512794
uuaugcacucgguuuagcu

SEQ ID NO: 1512796 - RNA, 19 nt, Artificial Sequence
  Description of Artificial Sequence: Synthetic oligonucleotide
  Sense strand starting at position 3587 of SEQ ID NO: 1244760
acacguucuuauccagaau

SEQ ID NO: 1512797 - RNA, 19 nt, Artificial Sequence
  Description of Artificial Sequence: Synthetic oligonucleotide
  Antisense strand to SEQ ID NO: 1512796
auucuggauaagaacgugu

SEQ ID NO: 1512798 - RNA, 19 nt, Artificial Sequence
  Description of Artificial Sequence: Synthetic oligonucleotide
  Sense strand starting at position 3590 of SEQ ID NO: 1244760
cguucuuauccagaaucga

SEQ ID NO: 1512799 - RNA, 19 nt, Artificial Sequence
  Description of Artificial Sequence: Synthetic oligonucleotide
  Antisense strand to SEQ ID NO: 1512798
ucgauucuggauaagaacg

SEQ ID NO: 1512800 - RNA, 19 nt, Artificial Sequence
  Description of Artificial Sequence: Synthetic oligonucleotide
  Sense strand starting at position 3762 of SEQ ID NO: 1244760
aauggaagauauccuuguu

SEQ ID NO: 1512801 - RNA, 19 nt, Artificial Sequence
  Description of Artificial Sequence: Synthetic oligonucleotide
  Antisense strand to SEQ ID NO: 1512800
aacaaggauaucuuccauu

SEQ ID NO: 1512802 - RNA, 19 nt, Artificial Sequence
  Description of Artificial Sequence: Synthetic oligonucleotide
  Sense strand starting at position 3765 of SEQ ID NO: 1244760
ggaagauauccuuguuaua

SEQ ID NO: 1512803 - RNA, 19 nt, Artificial Sequence
  Description of Artificial Sequence: Synthetic oligonucleotide
  Antisense strand to SEQ ID NO: 1512802
uauaacaaggauaucuucc

SEQ ID NO: 1512804 - RNA, 19 nt, Artificial Sequence
  Description of Artificial Sequence: Synthetic oligonucleotide
  Sense strand starting at position 3794 of SEQ ID NO: 1244760
aagucaguuccagguaaau

SEQ ID NO: 1512805 - RNA, 19 nt, Artificial Sequence
  Description of Artificial Sequence: Synthetic oligonucleotide
  Antisense strand to SEQ ID NO: 1512804
auuuaccuggaacugacuu

SEQ ID NO: 1512806 - RNA, 19 nt, Artificial Sequence
  Description of Artificial Sequence: Synthetic oligonucleotide
  Sense strand starting at position 3796 of SEQ ID NO: 1244760
gucaguuccagguaaauau

SEQ ID NO: 1512807 - RNA, 19 nt, Artificial Sequence
  Description of Artificial Sequence: Synthetic oligonucleotide
  Antisense strand to SEQ ID NO: 1512806
auauuuaccuggaacugac

SEQ ID NO: 1512808 - RNA, 19 nt, Artificial Sequence
  Description of Artificial Sequence: Synthetic oligonucleotide
  Sense strand starting at position 3805 of SEQ ID NO: 1244760
agguaaauauugguuggau

SEQ ID NO: 1512809 - RNA, 19 nt, Artificial Sequence
  Description of Artificial Sequence: Synthetic oligonucleotide
  Antisense strand to SEQ ID NO: 1512808
auccaaccaauauuuaccu

SEQ ID NO: 1512810 - RNA, 19 nt, Artificial Sequence
  Description of Artificial Sequence: Synthetic oligonucleotide
  Sense strand starting at position 3806 of SEQ ID NO: 1244760
gguaaauauugguuggauu

SEQ ID NO: 1512811 - RNA, 19 nt, Artificial Sequence
  Description of Artificial Sequence: Synthetic oligonucleotide
  Antisense strand to SEQ ID NO: 1512810
aauccaaccaauauuuacc

SEQ ID NO: 1512812 - RNA, 19 nt, Artificial Sequence
  Description of Artificial Sequence: Synthetic oligonucleotide
  Sense strand starting at position 3821 of SEQ ID NO: 1244760
gauuaagguguaugcacaa

SEQ ID NO: 1512813 - RNA, 19 nt, Artificial Sequence
  Description of Artificial Sequence: Synthetic oligonucleotide
  Antisense strand to SEQ ID NO: 1512812
uugugcauacaccuuaauc

SEQ ID NO: 1512814 - RNA, 19 nt, Artificial Sequence
  Description of Artificial Sequence: Synthetic oligonucleotide
  Sense strand starting at position 3835 of SEQ ID NO: 1244760
cacaaagaccuguggacua

SEQ ID NO: 1512815 - RNA, 19 nt, Artificial Sequence
  Description of Artificial Sequence: Synthetic oligonucleotide
  Antisense strand to SEQ ID NO: 1512814
uaguccacaggucuuugug

SEQ ID NO: 1512816 - RNA, 19 nt, Artificial Sequence
  Description of Artificial Sequence: Synthetic oligonucleotide
  Sense strand starting at position 3850 of SEQ ID NO: 1244760
acuagaaguugacggauuu

SEQ ID NO: 1512817 - RNA, 19 nt, Artificial Sequence
  Description of Artificial Sequence: Synthetic oligonucleotide
  Antisense strand to SEQ ID NO: 1512816
aaauccgucaacuucuagu

SEQ ID NO: 1512818 - RNA, 19 nt, Artificial Sequence
  Description of Artificial Sequence: Synthetic oligonucleotide
  Sense strand starting at position 3931 of SEQ ID NO: 1244760
ucaguuucuuccuugguga

SEQ ID NO: 1512819 - RNA, 19 nt, Artificial Sequence
  Description of Artificial Sequence: Synthetic oligonucleotide
  Antisense strand to SEQ ID NO: 1512818
ucaccaaggaagaaacuga

SEQ ID NO: 1512820 - RNA, 19 nt, Artificial Sequence
  Description of Artificial Sequence: Synthetic oligonucleotide
  Sense strand starting at position 3932 of SEQ ID NO: 1244760
caguuucuuccuuggugaa

SEQ ID NO: 1512821 - RNA, 19 nt, Artificial Sequence
  Description of Artificial Sequence: Synthetic oligonucleotide
  Antisense strand to SEQ ID NO: 1512820
uucaccaaggaagaaacug

SEQ ID NO: 1512822 - RNA, 19 nt, Artificial Sequence
  Description of Artificial Sequence: Synthetic oligonucleotide
  Sense strand starting at position 3933 of SEQ ID NO: 1244760
aguuucuuccuuggugaaa

SEQ ID NO: 1512823 - RNA, 19 nt, Artificial Sequence
  Description of Artificial Sequence: Synthetic oligonucleotide
  Antisense strand to SEQ ID NO: 1512822
uuucaccaaggaagaaacu

SEQ ID NO: 1512824 - RNA, 19 nt, Artificial Sequence
  Description of Artificial Sequence: Synthetic oligonucleotide
  Sense strand starting at position 3934 of SEQ ID NO: 1244760
guuucuuccuuggugaaau

SEQ ID NO: 1512825 - RNA, 19 nt, Artificial Sequence
  Description of Artificial Sequence: Synthetic oligonucleotide
  Antisense strand to SEQ ID NO: 1512824
auuucaccaaggaagaaac

SEQ ID NO: 1512826 - RNA, 19 nt, Artificial Sequence
  Description of Artificial Sequence: Synthetic oligonucleotide
  Sense strand starting at position 90 of SEQ ID NO: 1244761
gucugauguuaacuuaaug

SEQ ID NO: 1512827 - RNA, 19 nt, Artificial Sequence
  Description of Artificial Sequence: Synthetic oligonucleotide
  Antisense strand to SEQ ID NO: 1512826
cauuaaguuaacaucagac

SEQ ID NO: 1512828 - RNA, 19 nt, Artificial Sequence
  Description of Artificial Sequence: Synthetic oligonucleotide
  Sense strand starting at position 315 of SEQ ID NO: 1244761
aucuauagucagugaucca

SEQ ID NO: 1512829 - RNA, 19 nt, Artificial Sequence
  Description of Artificial Sequence: Synthetic oligonucleotide
  Antisense strand to SEQ ID NO: 1512828
uggaucacugacuauagau

SEQ ID NO: 1512830 - RNA, 19 nt, Artificial Sequence
  Description of Artificial Sequence: Synthetic oligonucleotide
  Sense strand starting at position 332 of SEQ ID NO: 1244761
cacuuuguaccuggagaaa

SEQ ID NO: 1512831 - RNA, 19 nt, Artificial Sequence
  Description of Artificial Sequence: Synthetic oligonucleotide
  Antisense strand to SEQ ID NO: 1512830
uuucuccagguacaaagug

SEQ ID NO: 1512832 - RNA, 19 nt, Artificial Sequence
  Description of Artificial Sequence: Synthetic oligonucleotide
  Sense strand starting at position 344 of SEQ ID NO: 1244761
ggagaaaucucauuagucu

SEQ ID NO: 1512833 - RNA, 19 nt, Artificial Sequence
  Description of Artificial Sequence: Synthetic oligonucleotide
  Antisense strand to SEQ ID NO: 1512832
agacuaaugagauuucucc

SEQ ID NO: 1512834 - RNA, 19 nt, Artificial Sequence
  Description of Artificial Sequence: Synthetic oligonucleotide
  Sense strand starting at position 355 of SEQ ID NO: 1244761
auuagucugcguguuuauc

SEQ ID NO: 1512835 - RNA, 19 nt, Artificial Sequence
  Description of Artificial Sequence: Synthetic oligonucleotide
  Antisense strand to SEQ ID NO: 1512834
gauaaacacgcagacuaau

SEQ ID NO: 1512836 - RNA, 19 nt, Artificial Sequence
  Description of Artificial Sequence: Synthetic oligonucleotide
  Sense strand starting at position 356 of SEQ ID NO: 1244761
uuagucugcguguuuauca

SEQ ID NO: 1512837 - RNA, 19 nt, Artificial Sequence
  Description of Artificial Sequence: Synthetic oligonucleotide
  Antisense strand to SEQ ID NO: 1512836
ugauaaacacgcagacuaa

SEQ ID NO: 1512838 - RNA, 19 nt, Artificial Sequence
  Description of Artificial Sequence: Synthetic oligonucleotide
  Sense strand starting at position 381 of SEQ ID NO: 1244761
gcauuuauuuacugagcac

SEQ ID NO: 1512839 - RNA, 19 nt, Artificial Sequence
  Description of Artificial Sequence: Synthetic oligonucleotide
  Antisense strand to SEQ ID NO: 1512838
gugcucaguaaauaaaugc

SEQ ID NO: 1512840 - RNA, 19 nt, Artificial Sequence
  Description of Artificial Sequence: Synthetic oligonucleotide
  Sense strand starting at position 450 of SEQ ID NO: 1244761
gcagcaaaguaauuauuau

SEQ ID NO: 1512841 - RNA, 19 nt, Artificial Sequence
  Description of Artificial Sequence: Synthetic oligonucleotide
  Antisense strand to SEQ ID NO: 1512840
auaauaauuacuuugcugc

SEQ ID NO: 1512842 - RNA, 19 nt, Artificial Sequence
  Description of Artificial Sequence: Synthetic oligonucleotide
  Sense strand starting at position 630 of SEQ ID NO: 1244761
aauugaugacccuggaagu

SEQ ID NO: 1512843 - RNA, 19 nt, Artificial Sequence
  Description of Artificial Sequence: Synthetic oligonucleotide
  Antisense strand to SEQ ID NO: 1512842
acuuccagggucaucaauu

SEQ ID NO: 1512844 - RNA, 19 nt, Artificial Sequence
  Description of Artificial Sequence: Synthetic oligonucleotide
  Sense strand starting at position 714 of SEQ ID NO: 1244761
aucuccuaucuugagucua

SEQ ID NO: 1512845 - RNA, 19 nt, Artificial Sequence
  Description of Artificial Sequence: Synthetic oligonucleotide
  Antisense strand to SEQ ID NO: 1512844
uagacucaagauaggagau

SEQ ID NO: 1512846 - RNA, 19 nt, Artificial Sequence
  Description of Artificial Sequence: Synthetic oligonucleotide
  Sense strand starting at position 803 of SEQ ID NO: 1244761
ucaacuguccuguagagau

SEQ ID NO: 1512847 - RNA, 19 nt, Artificial Sequence
  Description of Artificial Sequence: Synthetic oligonucleotide
  Antisense strand to SEQ ID NO: 1512846
aucucuacaggacaguuga

SEQ ID NO: 1512848 - RNA, 19 nt, Artificial Sequence
  Description of Artificial Sequence: Synthetic oligonucleotide
  Sense strand starting at position 810 of SEQ ID NO: 1244761
uccuguagagauugcacua

SEQ ID NO: 1512849 - RNA, 19 nt, Artificial Sequence
  Description of Artificial Sequence: Synthetic oligonucleotide
  Antisense strand to SEQ ID NO: 1512848
uagugcaaucucuacagga

SEQ ID NO: 1512850 - RNA, 19 nt, Artificial Sequence
  Description of Artificial Sequence: Synthetic oligonucleotide
  Sense strand starting at position 817 of SEQ ID NO: 1244761
gagauugcacuaugagaau

SEQ ID NO: 1512851 - RNA, 19 nt, Artificial Sequence
  Description of Artificial Sequence: Synthetic oligonucleotide
  Antisense strand to SEQ ID NO: 1512850
auucucauagugcaaucuc

SEQ ID NO: 1512852 - RNA, 19 nt, Artificial Sequence
  Description of Artificial Sequence: Synthetic oligonucleotide
  Sense strand starting at position 1178 of SEQ ID NO: 1244761
aacacuuaucgagggucua

SEQ ID NO: 1512853 - RNA, 19 nt, Artificial Sequence
  Description of Artificial Sequence: Synthetic oligonucleotide
  Antisense strand to SEQ ID NO: 1512852
uagacccucgauaaguguu

SEQ ID NO: 1512854 - RNA, 19 nt, Artificial Sequence
  Description of Artificial Sequence: Synthetic oligonucleotide
  Sense strand starting at position 1320 of SEQ ID NO: 1244761
uguguauaucuacaaaugu

SEQ ID NO: 1512855 - RNA, 19 nt, Artificial Sequence
  Description of Artificial Sequence: Synthetic oligonucleotide
  Antisense strand to SEQ ID NO: 1512854
acauuuguagauauacaca

SEQ ID NO: 1512856 - RNA, 19 nt, Artificial Sequence
  Description of Artificial Sequence: Synthetic oligonucleotide
  Sense strand starting at position 1328 of SEQ ID NO: 1244761
ucuacaaauguguguacau

SEQ ID NO: 1512857 - RNA, 19 nt, Artificial Sequence
  Description of Artificial Sequence: Synthetic oligonucleotide
  Antisense strand to SEQ ID NO: 1512856
auguacacacauuuguaga

SEQ ID NO: 1512858 - RNA, 19 nt, Artificial Sequence
  Description of Artificial Sequence: Synthetic oligonucleotide
  Sense strand starting at position 1329 of SEQ ID NO: 1244761
cuacaaauguguguacaua

SEQ ID NO: 1512859 - RNA, 19 nt, Artificial Sequence
  Description of Artificial Sequence: Synthetic oligonucleotide
  Antisense strand to SEQ ID NO: 1512858
uauguacacacauuuguag

SEQ ID NO: 1512860 - RNA, 19 nt, Artificial Sequence
  Description of Artificial Sequence: Synthetic oligonucleotide
  Sense strand starting at position 1485 of SEQ ID NO: 1244761
gugugugcccuguauuucu

SEQ ID NO: 1512861 - RNA, 19 nt, Artificial Sequence
  Description of Artificial Sequence: Synthetic oligonucleotide
  Antisense strand to SEQ ID NO: 1512860
agaaauacagggcacacac

SEQ ID NO: 1512862 - RNA, 19 nt, Artificial Sequence
  Description of Artificial Sequence: Synthetic oligonucleotide
  Sense strand starting at position 1612 of SEQ ID NO: 1244761
aagggaucccuuuaguucu

SEQ ID NO: 1512863 - RNA, 19 nt, Artificial Sequence
  Description of Artificial Sequence: Synthetic oligonucleotide
  Antisense strand to SEQ ID NO: 1512862
agaacuaaagggaucccuu

SEQ ID NO: 1512864 - RNA, 19 nt, Artificial Sequence
  Description of Artificial Sequence: Synthetic oligonucleotide
  Sense strand starting at position 1725 of SEQ ID NO: 1244761
accugauccucuuugugga

SEQ ID NO: 1512865 - RNA, 19 nt, Artificial Sequence
  Description of Artificial Sequence: Synthetic oligonucleotide
  Antisense strand to SEQ ID NO: 1512864
uccacaaagaggaucaggu

SEQ ID NO: 1512866 - RNA, 19 nt, Artificial Sequence
  Description of Artificial Sequence: Synthetic oligonucleotide
  Sense strand starting at position 2156 of SEQ ID NO: 1244761
gcuggaacucuccaaauuc

SEQ ID NO: 1512867 - RNA, 19 nt, Artificial Sequence
  Description of Artificial Sequence: Synthetic oligonucleotide
  Antisense strand to SEQ ID NO: 1512866
gaauuuggagaguuccagc

SEQ ID NO: 1512868 - RNA, 19 nt, Artificial Sequence
  Description of Artificial Sequence: Synthetic oligonucleotide
  Sense strand starting at position 2197 of SEQ ID NO: 1244761
cuccauggacuugguaaga

SEQ ID NO: 1512869 - RNA, 19 nt, Artificial Sequence
  Description of Artificial Sequence: Synthetic oligonucleotide
  Antisense strand to SEQ ID NO: 1512868
ucuuaccaaguccauggag

SEQ ID NO: 1512870 - RNA, 19 nt, Artificial Sequence
  Description of Artificial Sequence: Synthetic oligonucleotide
  Sense strand starting at position 2437 of SEQ ID NO: 1244761
ugggaucucucauugucaa

SEQ ID NO: 1512871 - RNA, 19 nt, Artificial Sequence
  Description of Artificial Sequence: Synthetic oligonucleotide
  Antisense strand to SEQ ID NO: 1512870
uugacaaugagagauccca

SEQ ID NO: 1512872 - RNA, 19 nt, Artificial Sequence
  Description of Artificial Sequence: Synthetic oligonucleotide
  Sense strand starting at position 2438 of SEQ ID NO: 1244761
gggaucucucauugucaaa

SEQ ID NO: 1512873 - RNA, 19 nt, Artificial Sequence
  Description of Artificial Sequence: Synthetic oligonucleotide
  Antisense strand to SEQ ID NO: 1512872
uuugacaaugagagauccc

SEQ ID NO: 1512874 - RNA, 19 nt, Artificial Sequence
  Description of Artificial Sequence: Synthetic oligonucleotide
  Sense strand starting at position 2445 of SEQ ID NO: 1244761
cucauugucaaaugggaag

SEQ ID NO: 1512875 - RNA, 19 nt, Artificial Sequence
  Description of Artificial Sequence: Synthetic oligonucleotide
  Antisense strand to SEQ ID NO: 1512874
cuucccauuugacaaugag

SEQ ID NO: 1512876 - RNA, 19 nt, Artificial Sequence
  Description of Artificial Sequence: Synthetic oligonucleotide
  Sense strand starting at position 2706 of SEQ ID NO: 1244761
uuguaaguuuagguauacu

SEQ ID NO: 1512877 - RNA, 19 nt, Artificial Sequence
  Description of Artificial Sequence: Synthetic oligonucleotide
  Antisense strand to SEQ ID NO: 1512876
aguauaccuaaacuuacaa

SEQ ID NO: 1512878 - RNA, 19 nt, Artificial Sequence
  Description of Artificial Sequence: Synthetic oligonucleotide
  Sense strand starting at position 2716 of SEQ ID NO: 1244761
agguauacuggcuaacaca

SEQ ID NO: 1512879 - RNA, 19 nt, Artificial Sequence
  Description of Artificial Sequence: Synthetic oligonucleotide
  Antisense strand to SEQ ID NO: 1512878
uguguuagccaguauaccu

SEQ ID NO: 1512880 - RNA, 19 nt, Artificial Sequence
  Description of Artificial Sequence: Synthetic oligonucleotide
  Sense strand starting at position 2734 of SEQ ID NO: 1244761
aaacaugucccagggcaga

SEQ ID NO: 1512881 - RNA, 19 nt, Artificial Sequence
  Description of Artificial Sequence: Synthetic oligonucleotide
  Antisense strand to SEQ ID NO: 1512880
ucugcccugggacauguuu

SEQ ID NO: 1512882 - RNA, 19 nt, Artificial Sequence
  Description of Artificial Sequence: Synthetic oligonucleotide
  Sense strand starting at position 2795 of SEQ ID NO: 1244761
gaguaagacuuguuuccca

SEQ ID NO: 1512883 - RNA, 19 nt, Artificial Sequence
  Description of Artificial Sequence: Synthetic oligonucleotide
  Antisense strand to SEQ ID NO: 1512882
ugggaaacaagucuuacuc

SEQ ID NO: 1512884 - RNA, 19 nt, Artificial Sequence
  Description of Artificial Sequence: Synthetic oligonucleotide
  Sense strand starting at position 2828 of SEQ ID NO: 1244761
ugugaacucugacccacau

SEQ ID NO: 1512885 - RNA, 19 nt, Artificial Sequence
  Description of Artificial Sequence: Synthetic oligonucleotide
  Antisense strand to SEQ ID NO: 1512884
augugggucagaguucaca

SEQ ID NO: 1512886 - RNA, 19 nt, Artificial Sequence
  Description of Artificial Sequence: Synthetic oligonucleotide
  Sense strand starting at position 2993 of SEQ ID NO: 1244761
ggaugagccagggagucuu

SEQ ID NO: 1512887 - RNA, 19 nt, Artificial Sequence
  Description of Artificial Sequence: Synthetic oligonucleotide
  Antisense strand to SEQ ID NO: 1512886
aagacucccuggcucaucc

SEQ ID NO: 1512888 - RNA, 19 nt, Artificial Sequence
  Description of Artificial Sequence: Synthetic oligonucleotide
  Sense strand starting at position 3096 of SEQ ID NO: 1244761
gcaauuaucccauaaaggc

SEQ ID NO: 1512889 - RNA, 19 nt, Artificial Sequence
  Description of Artificial Sequence: Synthetic oligonucleotide
  Antisense strand to SEQ ID NO: 1512888
gccuuuaugggauaauugc

SEQ ID NO: 1512890 - RNA, 19 nt, Artificial Sequence
  Description of Artificial Sequence: Synthetic oligonucleotide
  Sense strand starting at position 3432 of SEQ ID NO: 1244761
auguuaauacgggagcauu

SEQ ID NO: 1512891 - RNA, 19 nt, Artificial Sequence
  Description of Artificial Sequence: Synthetic oligonucleotide
  Antisense strand to SEQ ID NO: 1512890
aaugcucccguauuaacau

SEQ ID NO: 1512892 - RNA, 19 nt, Artificial Sequence
  Description of Artificial Sequence: Synthetic oligonucleotide
  Sense strand starting at position 3444 of SEQ ID NO: 1244761
gagcauuaucacuagggca

SEQ ID NO: 1512893 - RNA, 19 nt, Artificial Sequence
  Description of Artificial Sequence: Synthetic oligonucleotide
  Antisense strand to SEQ ID NO: 1512892
ugcccuagugauaaugcuc

SEQ ID NO: 1512894 - RNA, 19 nt, Artificial Sequence
  Description of Artificial Sequence: Synthetic oligonucleotide
  Sense strand starting at position 3446 of SEQ ID NO: 1244761
gcauuaucacuagggcauu

SEQ ID NO: 1512895 - RNA, 19 nt, Artificial Sequence
  Description of Artificial Sequence: Synthetic oligonucleotide
  Antisense strand to SEQ ID NO: 1512894
aaugcccuagugauaaugc

SEQ ID NO: 1512896 - RNA, 19 nt, Artificial Sequence
  Description of Artificial Sequence: Synthetic oligonucleotide
  Sense strand starting at position 3463 of SEQ ID NO: 1244761
uuuccucauggauaaaugu

SEQ ID NO: 1512897 - RNA, 19 nt, Artificial Sequence
  Description of Artificial Sequence: Synthetic oligonucleotide
  Antisense strand to SEQ ID NO: 1512896
acauuuauccaugaggaaa

SEQ ID NO: 1512898 - RNA, 19 nt, Artificial Sequence
  Description of Artificial Sequence: Synthetic oligonucleotide
  Sense strand starting at position 3522 of SEQ ID NO: 1244761
agaguugauuugcauaaau

SEQ ID NO: 1512899 - RNA, 19 nt, Artificial Sequence
  Description of Artificial Sequence: Synthetic oligonucleotide
  Antisense strand to SEQ ID NO: 1512898
auuuaugcaaaucaacucu

SEQ ID NO: 1512900 - RNA, 19 nt, Artificial Sequence
  Description of Artificial Sequence: Synthetic oligonucleotide
  Sense strand starting at position 3572 of SEQ ID NO: 1244761
guuccauaugcuuagguag

SEQ ID NO: 1512901 - RNA, 19 nt, Artificial Sequence
  Description of Artificial Sequence: Synthetic oligonucleotide
  Antisense strand to SEQ ID NO: 1512900
cuaccuaagcauauggaac

SEQ ID NO: 1512902 - RNA, 19 nt, Artificial Sequence
  Description of Artificial Sequence: Synthetic oligonucleotide
  Sense strand starting at position 3827 of SEQ ID NO: 1244761
cagugaugggcgggagaga

SEQ ID NO: 1512903 - RNA, 19 nt, Artificial Sequence
  Description of Artificial Sequence: Synthetic oligonucleotide
  Antisense strand to SEQ ID NO: 1512902
ucucucccgcccaucacug

SEQ ID NO: 1512904 - RNA, 19 nt, Artificial Sequence
  Description of Artificial Sequence: Synthetic oligonucleotide
  Sense strand starting at position 3925 of SEQ ID NO: 1244761
ggccuuuggagccagaaga

SEQ ID NO: 1512905 - RNA, 19 nt, Artificial Sequence
  Description of Artificial Sequence: Synthetic oligonucleotide
  Antisense strand to SEQ ID NO: 1512904
ucuucuggcuccaaaggcc

SEQ ID NO: 1512906 - RNA, 19 nt, Artificial Sequence
  Description of Artificial Sequence: Synthetic oligonucleotide
  Sense strand starting at position 389 of SEQ ID NO: 1244762
ggcugacucuccuccuuau

SEQ ID NO: 1512907 - RNA, 19 nt, Artificial Sequence
  Description of Artificial Sequence: Synthetic oligonucleotide
  Antisense strand to SEQ ID NO: 1512906
auaaggaggagagucagcc

SEQ ID NO: 1512908 - RNA, 19 nt, Artificial Sequence
  Description of Artificial Sequence: Synthetic oligonucleotide
  Sense strand starting at position 433 of SEQ ID NO: 1244762
ggccauaaacgcugauaug

SEQ ID NO: 1512909 - RNA, 19 nt, Artificial Sequence
  Description of Artificial Sequence: Synthetic oligonucleotide
  Antisense strand to SEQ ID NO: 1512908
cauaucagcguuuauggcc

SEQ ID NO: 1512910 - RNA, 19 nt, Artificial Sequence
  Description of Artificial Sequence: Synthetic oligonucleotide
  Sense strand starting at position 483 of SEQ ID NO: 1244762
ucucuuccacuuugaggaa

SEQ ID NO: 1512911 - RNA, 19 nt, Artificial Sequence
  Description of Artificial Sequence: Synthetic oligonucleotide
  Antisense strand to SEQ ID NO: 1512910
uuccucaaaguggaagaga

SEQ ID NO: 1512912 - RNA, 19 nt, Artificial Sequence
  Description of Artificial Sequence: Synthetic oligonucleotide
  Sense strand starting at position 677 of SEQ ID NO: 1244762
ccuugugacuuuccuuaug

SEQ ID NO: 1512913 - RNA, 19 nt, Artificial Sequence
  Description of Artificial Sequence: Synthetic oligonucleotide
  Antisense strand to SEQ ID NO: 1512912
cauaaggaaagucacaagg

SEQ ID NO: 1512914 - RNA, 19 nt, Artificial Sequence
  Description of Artificial Sequence: Synthetic oligonucleotide
  Sense strand starting at position 733 of SEQ ID NO: 1244762
uggaaauaugaaugucauu

SEQ ID NO: 1512915 - RNA, 19 nt, Artificial Sequence
  Description of Artificial Sequence: Synthetic oligonucleotide
  Antisense strand to SEQ ID NO: 1512914
aaugacauucauauuucca

SEQ ID NO: 1512916 - RNA, 19 nt, Artificial Sequence
  Description of Artificial Sequence: Synthetic oligonucleotide
  Sense strand starting at position 1109 of SEQ ID NO: 1244762
ugaccuugcuuucuagaac

SEQ ID NO: 1512917 - RNA, 19 nt, Artificial Sequence
  Description of Artificial Sequence: Synthetic oligonucleotide
  Antisense strand to SEQ ID NO: 1512916
guucuagaaagcaagguca

SEQ ID NO: 1512918 - RNA, 19 nt, Artificial Sequence
  Description of Artificial Sequence: Synthetic oligonucleotide
  Sense strand starting at position 1153 of SEQ ID NO: 1244762
gguuaacucugacucauac

SEQ ID NO: 1512919 - RNA, 19 nt, Artificial Sequence
  Description of Artificial Sequence: Synthetic oligonucleotide
  Antisense strand to SEQ ID NO: 1512918
guaugagucagaguuaacc

SEQ ID NO: 1512920 - RNA, 19 nt, Artificial Sequence
  Description of Artificial Sequence: Synthetic oligonucleotide
  Sense strand starting at position 1333 of SEQ ID NO: 1244762
uggucuuauuuaucugcau

SEQ ID NO: 1512921 - RNA, 19 nt, Artificial Sequence
  Description of Artificial Sequence: Synthetic oligonucleotide
  Antisense strand to SEQ ID NO: 1512920
augcagauaaauaagacca

SEQ ID NO: 1512922 - RNA, 19 nt, Artificial Sequence
  Description of Artificial Sequence: Synthetic oligonucleotide
  Sense strand starting at position 1334 of SEQ ID NO: 1244762
ggucuuauuuaucugcaug

SEQ ID NO: 1512923 - RNA, 19 nt, Artificial Sequence
  Description of Artificial Sequence: Synthetic oligonucleotide
  Antisense strand to SEQ ID NO: 1512922
caugcagauaaauaagacc

SEQ ID NO: 1512924 - RNA, 19 nt, Artificial Sequence
  Description of Artificial Sequence: Synthetic oligonucleotide
  Sense strand starting at position 1346 of SEQ ID NO: 1244762
cugcaugucuuauuuaucu

SEQ ID NO: 1512925 - RNA, 19 nt, Artificial Sequence
  Description of Artificial Sequence: Synthetic oligonucleotide
  Antisense strand to SEQ ID NO: 1512924
agauaaauaagacaugcag

SEQ ID NO: 1512926 - RNA, 19 nt, Artificial Sequence
  Description of Artificial Sequence: Synthetic oligonucleotide
  Sense strand starting at position 1351 of SEQ ID NO: 1244762
ugucuuauuuaucugcaga

SEQ ID NO: 1512927 - RNA, 19 nt, Artificial Sequence
  Description of Artificial Sequence: Synthetic oligonucleotide
  Antisense strand to SEQ ID NO: 1512926
ucugcagauaaauaagaca

SEQ ID NO: 1512928 - RNA, 19 nt, Artificial Sequence
  Description of Artificial Sequence: Synthetic oligonucleotide
  Sense strand starting at position 1353 of SEQ ID NO: 1244762
ucuuauuuaucugcagagu

SEQ ID NO: 1512929 - RNA, 19 nt, Artificial Sequence
  Description of Artificial Sequence: Synthetic oligonucleotide
  Antisense strand to SEQ ID NO: 1512928
acucugcagauaaauaaga

SEQ ID NO: 1512930 - RNA, 19 nt, Artificial Sequence
  Description of Artificial Sequence: Synthetic oligonucleotide
  Sense strand starting at position 1503 of SEQ ID NO: 1244762
uuugucaagucuuugaaca

SEQ ID NO: 1512931 - RNA, 19 nt, Artificial Sequence
  Description of Artificial Sequence: Synthetic oligonucleotide
  Antisense strand to SEQ ID NO: 1512930
uguucaaagacuugacaaa

SEQ ID NO: 1512932 - RNA, 19 nt, Artificial Sequence
  Description of Artificial Sequence: Synthetic oligonucleotide
  Sense strand starting at position 1504 of SEQ ID NO: 1244762
uugucaagucuuugaacac

SEQ ID NO: 1512933 - RNA, 19 nt, Artificial Sequence
  Description of Artificial Sequence: Synthetic oligonucleotide
  Antisense strand to SEQ ID NO: 1512932
guguucaaagacuugacaa

SEQ ID NO: 1512934 - RNA, 19 nt, Artificial Sequence
  Description of Artificial Sequence: Synthetic oligonucleotide
  Sense strand starting at position 1529 of SEQ ID NO: 1244762
aggccuuucccagagcuuu

SEQ ID NO: 1512935 - RNA, 19 nt, Artificial Sequence
  Description of Artificial Sequence: Synthetic oligonucleotide
  Antisense strand to SEQ ID NO: 1512934
aaagcucugggaaaggccu

SEQ ID NO: 1512936 - RNA, 19 nt, Artificial Sequence
  Description of Artificial Sequence: Synthetic oligonucleotide
  Sense strand starting at position 1592 of SEQ ID NO: 1244762
ggguuaauaucccuaaguu

SEQ ID NO: 1512937 - RNA, 19 nt, Artificial Sequence
  Description of Artificial Sequence: Synthetic oligonucleotide
  Antisense strand to SEQ ID NO: 1512936
aacuuagggauauuaaccc

SEQ ID NO: 1512938 - RNA, 19 nt, Artificial Sequence
  Description of Artificial Sequence: Synthetic oligonucleotide
  Sense strand starting at position 1593 of SEQ ID NO: 1244762
gguuaauaucccuaaguug

SEQ ID NO: 1512939 - RNA, 19 nt, Artificial Sequence
  Description of Artificial Sequence: Synthetic oligonucleotide
  Antisense strand to SEQ ID NO: 1512938
caacuuagggauauuaacc

SEQ ID NO: 1512940 - RNA, 19 nt, Artificial Sequence
  Description of Artificial Sequence: Synthetic oligonucleotide
  Sense strand starting at position 1604 of SEQ ID NO: 1244762
cuaaguuguagaggaggaa

SEQ ID NO: 1512941 - RNA, 19 nt, Artificial Sequence
  Description of Artificial Sequence: Synthetic oligonucleotide
  Antisense strand to SEQ ID NO: 1512940
uuccuccucuacaacuuag

SEQ ID NO: 1512942 - RNA, 19 nt, Artificial Sequence
  Description of Artificial Sequence: Synthetic oligonucleotide
  Sense strand starting at position 2080 of SEQ ID NO: 1244762
gugagcucaucuuccacaa

SEQ ID NO: 1512943 - RNA, 19 nt, Artificial Sequence
  Description of Artificial Sequence: Synthetic oligonucleotide
  Antisense strand to SEQ ID NO: 1512942
uuguggaagaugagcucac

SEQ ID NO: 1512944 - RNA, 19 nt, Artificial Sequence
  Description of Artificial Sequence: Synthetic oligonucleotide
  Sense strand starting at position 2344 of SEQ ID NO: 1244762
agggauggugauggaugua

SEQ ID NO: 1512945 - RNA, 19 nt, Artificial Sequence
  Description of Artificial Sequence: Synthetic oligonucleotide
  Antisense strand to SEQ ID NO: 1512944
uacauccaucaccaucccu

SEQ ID NO: 1512946 - RNA, 19 nt, Artificial Sequence
  Description of Artificial Sequence: Synthetic oligonucleotide
  Sense strand starting at position 2357 of SEQ ID NO: 1244762
gauguacagagauggugau

SEQ ID NO: 1512947 - RNA, 19 nt, Artificial Sequence
  Description of Artificial Sequence: Synthetic oligonucleotide
  Antisense strand to SEQ ID NO: 1512946
aucaccaucucuguacauc

SEQ ID NO: 1512948 - RNA, 19 nt, Artificial Sequence
  Description of Artificial Sequence: Synthetic oligonucleotide
  Sense strand starting at position 2375 of SEQ ID NO: 1244762
uggguacccagggauguua

SEQ ID NO: 1512949 - RNA, 19 nt, Artificial Sequence
  Description of Artificial Sequence: Synthetic oligonucleotide
  Antisense strand to SEQ ID NO: 1512948
uaacaucccuggguaccca

SEQ ID NO: 1512950 - RNA, 19 nt, Artificial Sequence
  Description of Artificial Sequence: Synthetic oligonucleotide
  Sense strand starting at position 2387 of SEQ ID NO: 1244762
gauguuaacaggugugcaa

SEQ ID NO: 1512951 - RNA, 19 nt, Artificial Sequence
  Description of Artificial Sequence: Synthetic oligonucleotide
  Antisense strand to SEQ ID NO: 1512950
uugcacaccuguuaacauc

SEQ ID NO: 1512952 - RNA, 19 nt, Artificial Sequence
  Description of Artificial Sequence: Synthetic oligonucleotide
  Sense strand starting at position 2511 of SEQ ID NO: 1244762
gugauagaugugcagggau

SEQ ID NO: 1512953 - RNA, 19 nt, Artificial Sequence
  Description of Artificial Sequence: Synthetic oligonucleotide
  Antisense strand to SEQ ID NO: 1512952
aucccugcacaucuaucac

SEQ ID NO: 1512954 - RNA, 19 nt, Artificial Sequence
  Description of Artificial Sequence: Synthetic oligonucleotide
  Sense strand starting at position 2531 of SEQ ID NO: 1244762
gugguuggugcccagaaau

SEQ ID NO: 1512955 - RNA, 19 nt, Artificial Sequence
  Description of Artificial Sequence: Synthetic oligonucleotide
  Antisense strand to SEQ ID NO: 1512954
auuucugggcaccaaccac

SEQ ID NO: 1512956 - RNA, 19 nt, Artificial Sequence
  Description of Artificial Sequence: Synthetic oligonucleotide
  Sense strand starting at position 2541 of SEQ ID NO: 1244762
cccagaaauagugguggau

SEQ ID NO: 1512957 - RNA, 19 nt, Artificial Sequence
  Description of Artificial Sequence: Synthetic oligonucleotide
  Antisense strand to SEQ ID NO: 1512956
auccaccacuauuucuggg

SEQ ID NO: 1512958 - RNA, 19 nt, Artificial Sequence
  Description of Artificial Sequence: Synthetic oligonucleotide
  Sense strand starting at position 2651 of SEQ ID NO: 1244762
guggcagauaugcagugau

SEQ ID NO: 1512959 - RNA, 19 nt, Artificial Sequence
  Description of Artificial Sequence: Synthetic oligonucleotide
  Antisense strand to SEQ ID NO: 1512958
aucacugcauaucugccac

SEQ ID NO: 1512960 - RNA, 19 nt, Artificial Sequence
  Description of Artificial Sequence: Synthetic oligonucleotide
  Sense strand starting at position 2870 of SEQ ID NO: 1244762
ggugguggguguucagaga

SEQ ID NO: 1512961 - RNA, 19 nt, Artificial Sequence
  Description of Artificial Sequence: Synthetic oligonucleotide
  Antisense strand to SEQ ID NO: 1512960
ucucugaacacccaccacc

SEQ ID NO: 1512962 - RNA, 19 nt, Artificial Sequence
  Description of Artificial Sequence: Synthetic oligonucleotide
  Sense strand starting at position 3013 of SEQ ID NO: 1244762
gugguaagugugcaaggau

SEQ ID NO: 1512963 - RNA, 19 nt, Artificial Sequence
  Description of Artificial Sequence: Synthetic oligonucleotide
  Antisense strand to SEQ ID NO: 1512962
auccuugcacacuuaccac

SEQ ID NO: 1512964 - RNA, 19 nt, Artificial Sequence
  Description of Artificial Sequence: Synthetic oligonucleotide
  Sense strand starting at position 3183 of SEQ ID NO: 1244762
cuuugagugccagaaaguu

SEQ ID NO: 1512965 - RNA, 19 nt, Artificial Sequence
  Description of Artificial Sequence: Synthetic oligonucleotide
  Antisense strand to SEQ ID NO: 1512964
aacuuucuggcacucaaag

SEQ ID NO: 1512966 - RNA, 19 nt, Artificial Sequence
  Description of Artificial Sequence: Synthetic oligonucleotide
  Sense strand starting at position 3191 of SEQ ID NO: 1244762
gccagaaaguucuuccuua

SEQ ID NO: 1512967 - RNA, 19 nt, Artificial Sequence
  Description of Artificial Sequence: Synthetic oligonucleotide
  Antisense strand to SEQ ID NO: 1512966
uaaggaagaacuuucuggc

SEQ ID NO: 1512968 - RNA, 19 nt, Artificial Sequence
  Description of Artificial Sequence: Synthetic oligonucleotide
  Sense strand starting at position 3205 of SEQ ID NO: 1244762
ccuuaaugcugagccacaa

SEQ ID NO: 1512969 - RNA, 19 nt, Artificial Sequence
  Description of Artificial Sequence: Synthetic oligonucleotide
  Antisense strand to SEQ ID NO: 1512968
uuguggcucagcauuaagg

SEQ ID NO: 1512970 - RNA, 19 nt, Artificial Sequence
  Description of Artificial Sequence: Synthetic oligonucleotide
  Sense strand starting at position 3274 of SEQ ID NO: 1244762
gggcaaagguuacccuauu

SEQ ID NO: 1512971 - RNA, 19 nt, Artificial Sequence
  Description of Artificial Sequence: Synthetic oligonucleotide
  Antisense strand to SEQ ID NO: 1512970
aauaggguaaccuuugccc

SEQ ID NO: 1512972 - RNA, 19 nt, Artificial Sequence
  Description of Artificial Sequence: Synthetic oligonucleotide
  Sense strand starting at position 3310 of SEQ ID NO: 1244762
gacagagaauuggaaggaa

SEQ ID NO: 1512973 - RNA, 19 nt, Artificial Sequence
  Description of Artificial Sequence: Synthetic oligonucleotide
  Antisense strand to SEQ ID NO: 1512972
uuccuuccaauucucuguc

SEQ ID NO: 1512974 - RNA, 19 nt, Artificial Sequence
  Description of Artificial Sequence: Synthetic oligonucleotide
  Sense strand starting at position 3436 of SEQ ID NO: 1244762
uagugacuuccagguggau

SEQ ID NO: 1512975 - RNA, 19 nt, Artificial Sequence
  Description of Artificial Sequence: Synthetic oligonucleotide
  Antisense strand to SEQ ID NO: 1512974
auccaccuggaagucacua

SEQ ID NO: 1512976 - RNA, 19 nt, Artificial Sequence
  Description of Artificial Sequence: Synthetic oligonucleotide
  Sense strand starting at position 3438 of SEQ ID NO: 1244762
gugacuuccagguggauga

SEQ ID NO: 1512977 - RNA, 19 nt, Artificial Sequence
  Description of Artificial Sequence: Synthetic oligonucleotide
  Antisense strand to SEQ ID NO: 1512976
ucauccaccuggaagucac

SEQ ID NO: 1512978 - RNA, 19 nt, Artificial Sequence
  Description of Artificial Sequence: Synthetic oligonucleotide
  Sense strand starting at position 3571 of SEQ ID NO: 1244762
ccaggugcucaauaaauaa

SEQ ID NO: 1512979 - RNA, 19 nt, Artificial Sequence
  Description of Artificial Sequence: Synthetic oligonucleotide
  Antisense strand to SEQ ID NO: 1512978
uuauuuauugagcaccugg

SEQ ID NO: 1512980 - RNA, 19 nt, Artificial Sequence
  Description of Artificial Sequence: Synthetic oligonucleotide
  Sense strand starting at position 3799 of SEQ ID NO: 1244762
uccauuauuguugacugua

SEQ ID NO: 1512981 - RNA, 19 nt, Artificial Sequence
  Description of Artificial Sequence: Synthetic oligonucleotide
  Antisense strand to SEQ ID NO: 1512980
uacagucaacaauaaugga

SEQ ID NO: 1512982 - RNA, 19 nt, Artificial Sequence
  Description of Artificial Sequence: Synthetic oligonucleotide
  Sense strand starting at position 3804 of SEQ ID NO: 1244762
uauuguugacuguagagga

SEQ ID NO: 1512983 - RNA, 19 nt, Artificial Sequence
  Description of Artificial Sequence: Synthetic oligonucleotide
  Antisense strand to SEQ ID NO: 1512982
uccucuacagucaacaaua

SEQ ID NO: 1512984 - RNA, 19 nt, Artificial Sequence
  Description of Artificial Sequence: Synthetic oligonucleotide
  Sense strand starting at position 3855 of SEQ ID NO: 1244762
caucuugccugacuggauu

SEQ ID NO: 1512985 - RNA, 19 nt, Artificial Sequence
  Description of Artificial Sequence: Synthetic oligonucleotide
  Antisense strand to SEQ ID NO: 1512984
aauccagucaggcaagaug

SEQ ID NO: 1512986 - RNA, 19 nt, Artificial Sequence
  Description of Artificial Sequence: Synthetic oligonucleotide
  Sense strand starting at position 428 of SEQ ID NO: 1244763
gcucaauaaccaugugacu

SEQ ID NO: 1512987 - RNA, 19 nt, Artificial Sequence
  Description of Artificial Sequence: Synthetic oligonucleotide
  Antisense strand to SEQ ID NO: 1512986
agucacaugguuauugagc

SEQ ID NO: 1512988 - RNA, 19 nt, Artificial Sequence
  Description of Artificial Sequence: Synthetic oligonucleotide
  Sense strand starting at position 434 of SEQ ID NO: 1244763
uaaccaugugacuaguagu

SEQ ID NO: 1512989 - RNA, 19 nt, Artificial Sequence
  Description of Artificial Sequence: Synthetic oligonucleotide
  Antisense strand to SEQ ID NO: 1512988
acuacuagucacaugguua

SEQ ID NO: 1512990 - RNA, 19 nt, Artificial Sequence
  Description of Artificial Sequence: Synthetic oligonucleotide
  Sense strand starting at position 440 of SEQ ID NO: 1244763
ugugacuaguaguuaccau

SEQ ID NO: 1512991 - RNA, 19 nt, Artificial Sequence
  Description of Artificial Sequence: Synthetic oligonucleotide
  Antisense strand to SEQ ID NO: 1512990
augguaacuacuagucaca

SEQ ID NO: 1512992 - RNA, 19 nt, Artificial Sequence
  Description of Artificial Sequence: Synthetic oligonucleotide
  Sense strand starting at position 566 of SEQ ID NO: 1244763
ucuguuacucaggauguca

SEQ ID NO: 1512993 - RNA, 19 nt, Artificial Sequence
  Description of Artificial Sequence: Synthetic oligonucleotide
  Antisense strand to SEQ ID NO: 1512992
ugacauccugaguaacaga

SEQ ID NO: 1512994 - RNA, 19 nt, Artificial Sequence
  Description of Artificial Sequence: Synthetic oligonucleotide
  Sense strand starting at position 579 of SEQ ID NO: 1244763
augucaucugucuauacac

SEQ ID NO: 1512995 - RNA, 19 nt, Artificial Sequence
  Description of Artificial Sequence: Synthetic oligonucleotide
  Antisense strand to SEQ ID NO: 1512994
guguauagacagaugacau

SEQ ID NO: 1512996 - RNA, 19 nt, Artificial Sequence
  Description of Artificial Sequence: Synthetic oligonucleotide
  Sense strand starting at position 774 of SEQ ID NO: 1244763
uugagcuuucuagaaggca

SEQ ID NO: 1512997 - RNA, 19 nt, Artificial Sequence
  Description of Artificial Sequence: Synthetic oligonucleotide
  Antisense strand to SEQ ID NO: 1512996
ugccuucuagaaagcucaa

SEQ ID NO: 1512998 - RNA, 19 nt, Artificial Sequence
  Description of Artificial Sequence: Synthetic oligonucleotide
  Sense strand starting at position 877 of SEQ ID NO: 1244763
ccaggcaguuaguccuaaa

SEQ ID NO: 1512999 - RNA, 19 nt, Artificial Sequence
  Description of Artificial Sequence: Synthetic oligonucleotide
  Antisense strand to SEQ ID NO: 1512998
uuuaggacuaacugccugg

SEQ ID NO: 1513000 - RNA, 19 nt, Artificial Sequence
  Description of Artificial Sequence: Synthetic oligonucleotide
  Sense strand starting at position 893 of SEQ ID NO: 1244763
aaagccuuucuuggaggaa

SEQ ID NO: 1513001 - RNA, 19 nt, Artificial Sequence
  Description of Artificial Sequence: Synthetic oligonucleotide
  Antisense strand to SEQ ID NO: 1513000
uuccuccaagaaaggcuuu

SEQ ID NO: 1513002 - RNA, 19 nt, Artificial Sequence
  Description of Artificial Sequence: Synthetic oligonucleotide
  Sense strand starting at position 896 of SEQ ID NO: 1244763
gccuuucuuggaggaaucu

SEQ ID NO: 1513003 - RNA, 19 nt, Artificial Sequence
  Description of Artificial Sequence: Synthetic oligonucleotide
  Antisense strand to SEQ ID NO: 1513002
agauuccuccaagaaaggc

SEQ ID NO: 1513004 - RNA, 19 nt, Artificial Sequence
  Description of Artificial Sequence: Synthetic oligonucleotide
  Sense strand starting at position 905 of SEQ ID NO: 1244763
ggaggaaucuuauacagga

SEQ ID NO: 1513005 - RNA, 19 nt, Artificial Sequence
  Description of Artificial Sequence: Synthetic oligonucleotide
  Antisense strand to SEQ ID NO: 1513004
uccuguauaagauuccucc

SEQ ID NO: 1513006 - RNA, 19 nt, Artificial Sequence
  Description of Artificial Sequence: Synthetic oligonucleotide
  Sense strand starting at position 928 of SEQ ID NO: 1244763
agcugcuuccuugacaagu

SEQ ID NO: 1513007 - RNA, 19 nt, Artificial Sequence
  Description of Artificial Sequence: Synthetic oligonucleotide
  Antisense strand to SEQ ID NO: 1513006
acuugucaaggaagcagcu

SEQ ID NO: 1513008 - RNA, 19 nt, Artificial Sequence
  Description of Artificial Sequence: Synthetic oligonucleotide
  Sense strand starting at position 1007 of SEQ ID NO: 1244763
guacaaaucagugagggca

SEQ ID NO: 1513009 - RNA, 19 nt, Artificial Sequence
  Description of Artificial Sequence: Synthetic oligonucleotide
  Antisense strand to SEQ ID NO: 1513008
ugcccucacugauuuguac

SEQ ID NO: 1513010 - RNA, 19 nt, Artificial Sequence
  Description of Artificial Sequence: Synthetic oligonucleotide
  Sense strand starting at position 1010 of SEQ ID NO: 1244763
caaaucagugagggcaauu

SEQ ID NO: 1513011 - RNA, 19 nt, Artificial Sequence
  Description of Artificial Sequence: Synthetic oligonucleotide
  Antisense strand to SEQ ID NO: 1513010
aauugcccucacugauuug

SEQ ID NO: 1513012 - RNA, 19 nt, Artificial Sequence
  Description of Artificial Sequence: Synthetic oligonucleotide
  Sense strand starting at position 1019 of SEQ ID NO: 1244763
gagggcaauucugcaagga

SEQ ID NO: 1513013 - RNA, 19 nt, Artificial Sequence
  Description of Artificial Sequence: Synthetic oligonucleotide
  Antisense strand to SEQ ID NO: 1513012
uccuugcagaauugcccuc

SEQ ID NO: 1513014 - RNA, 19 nt, Artificial Sequence
  Description of Artificial Sequence: Synthetic oligonucleotide
  Sense strand starting at position 1126 of SEQ ID NO: 1244763
uggauauugccucaaucuu

SEQ ID NO: 1513015 - RNA, 19 nt, Artificial Sequence
  Description of Artificial Sequence: Synthetic oligonucleotide
  Antisense strand to SEQ ID NO: 1513014
aagauugaggcaauaucca

SEQ ID NO: 1513016 - RNA, 19 nt, Artificial Sequence
  Description of Artificial Sequence: Synthetic oligonucleotide
  Sense strand starting at position 1136 of SEQ ID NO: 1244763
cucaaucuugcaggugacu

SEQ ID NO: 1513017 - RNA, 19 nt, Artificial Sequence
  Description of Artificial Sequence: Synthetic oligonucleotide
  Antisense strand to SEQ ID NO: 1513016
agucaccugcaagauugag

SEQ ID NO: 1513018 - RNA, 19 nt, Artificial Sequence
  Description of Artificial Sequence: Synthetic oligonucleotide
  Sense strand starting at position 1153 of SEQ ID NO: 1244763
cugaccuuuccguaaguga

SEQ ID NO: 1513019 - RNA, 19 nt, Artificial Sequence
  Description of Artificial Sequence: Synthetic oligonucleotide
  Antisense strand to SEQ ID NO: 1513018
ucacuuacggaaaggucag

SEQ ID NO: 1513020 - RNA, 19 nt, Artificial Sequence
  Description of Artificial Sequence: Synthetic oligonucleotide
  Sense strand starting at position 1189 of SEQ ID NO: 1244763
agcacuaaucaggguggua

SEQ ID NO: 1513021 - RNA, 19 nt, Artificial Sequence
  Description of Artificial Sequence: Synthetic oligonucleotide
  Antisense strand to SEQ ID NO: 1513020
uaccacccugauuagugcu

SEQ ID NO: 1513022 - RNA, 19 nt, Artificial Sequence
  Description of Artificial Sequence: Synthetic oligonucleotide
  Sense strand starting at position 1329 of SEQ ID NO: 1244763
uggccugaauagcuguaaa

SEQ ID NO: 1513023 - RNA, 19 nt, Artificial Sequence
  Description of Artificial Sequence: Synthetic oligonucleotide
  Antisense strand to SEQ ID NO: 1513022
uuuacagcuauucaggcca

SEQ ID NO: 1513024 - RNA, 19 nt, Artificial Sequence
  Description of Artificial Sequence: Synthetic oligonucleotide
  Sense strand starting at position 1346 of SEQ ID NO: 1244763
aauggaugucaccgacgua

SEQ ID NO: 1513025 - RNA, 19 nt, Artificial Sequence
  Description of Artificial Sequence: Synthetic oligonucleotide
  Antisense strand to SEQ ID NO: 1513024
uacgucggugacauccauu

SEQ ID NO: 1513026 - RNA, 19 nt, Artificial Sequence
  Description of Artificial Sequence: Synthetic oligonucleotide
  Sense strand starting at position 1349 of SEQ ID NO: 1244763
ggaugucaccgacguagaa

SEQ ID NO: 1513027 - RNA, 19 nt, Artificial Sequence
  Description of Artificial Sequence: Synthetic oligonucleotide
  Antisense strand to SEQ ID NO: 1513026
uucuacgucggugacaucc

SEQ ID NO: 1513028 - RNA, 19 nt, Artificial Sequence
  Description of Artificial Sequence: Synthetic oligonucleotide
  Sense strand starting at position 1575 of SEQ ID NO: 1244763
ggaguucucauagaugguu

SEQ ID NO: 1513029 - RNA, 19 nt, Artificial Sequence
  Description of Artificial Sequence: Synthetic oligonucleotide
  Antisense strand to SEQ ID NO: 1513028
aaccaucuaugagaacucc

SEQ ID NO: 1513030 - RNA, 19 nt, Artificial Sequence
  Description of Artificial Sequence: Synthetic oligonucleotide
  Sense strand starting at position 1772 of SEQ ID NO: 1244763
cccaacuuuccaggacagu

SEQ ID NO: 1513031 - RNA, 19 nt, Artificial Sequence
  Description of Artificial Sequence: Synthetic oligonucleotide
  Antisense strand to SEQ ID NO: 1513030
acuguccuggaaaguuggg

SEQ ID NO: 1513032 - RNA, 19 nt, Artificial Sequence
  Description of Artificial Sequence: Synthetic oligonucleotide
  Sense strand starting at position 1828 of SEQ ID NO: 1244763
aguucucuccgccagagau

SEQ ID NO: 1513033 - RNA, 19 nt, Artificial Sequence
  Description of Artificial Sequence: Synthetic oligonucleotide
  Antisense strand to SEQ ID NO: 1513032
aucucuggcggagagaacu

SEQ ID NO: 1513034 - RNA, 19 nt, Artificial Sequence
  Description of Artificial Sequence: Synthetic oligonucleotide
  Sense strand starting at position 2345 of SEQ ID NO: 1244763
gcagccuugacgggaaaga

SEQ ID NO: 1513035 - RNA, 19 nt, Artificial Sequence
  Description of Artificial Sequence: Synthetic oligonucleotide
  Antisense strand to SEQ ID NO: 1513034
ucuuucccgucaaggcugc

SEQ ID NO: 1513036 - RNA, 19 nt, Artificial Sequence
  Description of Artificial Sequence: Synthetic oligonucleotide
  Sense strand starting at position 2464 of SEQ ID NO: 1244763
cuguaaugucuccagaguu

SEQ ID NO: 1513037 - RNA, 19 nt, Artificial Sequence
  Description of Artificial Sequence: Synthetic oligonucleotide
  Antisense strand to SEQ ID NO: 1513036
aacucuggagacauuacag

SEQ ID NO: 1513038 - RNA, 19 nt, Artificial Sequence
  Description of Artificial Sequence: Synthetic oligonucleotide
  Sense strand starting at position 2544 of SEQ ID NO: 1244763
uguauugaacauugagugu

SEQ ID NO: 1513039 - RNA, 19 nt, Artificial Sequence
  Description of Artificial Sequence: Synthetic oligonucleotide
  Antisense strand to SEQ ID NO: 1513038
acacucaauguucaauaca

SEQ ID NO: 1513040 - RNA, 19 nt, Artificial Sequence
  Description of Artificial Sequence: Synthetic oligonucleotide
  Sense strand starting at position 2586 of SEQ ID NO: 1244763
cguguaguagcucauuuaa

SEQ ID NO: 1513041 - RNA, 19 nt, Artificial Sequence
  Description of Artificial Sequence: Synthetic oligonucleotide
  Antisense strand to SEQ ID NO: 1513040
uuaaaugagcuacuacacg

SEQ ID NO: 1513042 - RNA, 19 nt, Artificial Sequence
  Description of Artificial Sequence: Synthetic oligonucleotide
  Sense strand starting at position 2588 of SEQ ID NO: 1244763
uguaguagcucauuuaaug

SEQ ID NO: 1513043 - RNA, 19 nt, Artificial Sequence
  Description of Artificial Sequence: Synthetic oligonucleotide
  Antisense strand to SEQ ID NO: 1513042
cauuaaaugagcuacuaca

SEQ ID NO: 1513044 - RNA, 19 nt, Artificial Sequence
  Description of Artificial Sequence: Synthetic oligonucleotide
  Sense strand starting at position 2615 of SEQ ID NO: 1244763
gaccuacguagugagaaau

SEQ ID NO: 1513045 - RNA, 19 nt, Artificial Sequence
  Description of Artificial Sequence: Synthetic oligonucleotide
  Antisense strand to SEQ ID NO: 1513044
auuucucacuacguagguc

SEQ ID NO: 1513046 - RNA, 19 nt, Artificial Sequence
  Description of Artificial Sequence: Synthetic oligonucleotide
  Sense strand starting at position 2621 of SEQ ID NO: 1244763
cguagugagaaauacuaua

SEQ ID NO: 1513047 - RNA, 19 nt, Artificial Sequence
  Description of Artificial Sequence: Synthetic oligonucleotide
  Antisense strand to SEQ ID NO: 1513046
uauaguauuucucacuacg

SEQ ID NO: 1513048 - RNA, 19 nt, Artificial Sequence
  Description of Artificial Sequence: Synthetic oligonucleotide
  Sense strand starting at position 2810 of SEQ ID NO: 1244763
gccgaaaggucaguauuca

SEQ ID NO: 1513049 - RNA, 19 nt, Artificial Sequence
  Description of Artificial Sequence: Synthetic oligonucleotide
  Antisense strand to SEQ ID NO: 1513048
ugaauacugaccuuucggc

SEQ ID NO: 1513050 - RNA, 19 nt, Artificial Sequence
  Description of Artificial Sequence: Synthetic oligonucleotide
  Sense strand starting at position 2811 of SEQ ID NO: 1244763
ccgaaaggucaguauucag

SEQ ID NO: 1513051 - RNA, 19 nt, Artificial Sequence
  Description of Artificial Sequence: Synthetic oligonucleotide
  Antisense strand to SEQ ID NO: 1513050
cugaauacugaccuuucgg

SEQ ID NO: 1513052 - RNA, 19 nt, Artificial Sequence
  Description of Artificial Sequence: Synthetic oligonucleotide
  Sense strand starting at position 2827 of SEQ ID NO: 1244763
cagagugagccguuugcga

SEQ ID NO: 1513053 - RNA, 19 nt, Artificial Sequence
  Description of Artificial Sequence: Synthetic oligonucleotide
  Antisense strand to SEQ ID NO: 1513052
ucgcaaacggcucacucug

SEQ ID NO: 1513054 - RNA, 19 nt, Artificial Sequence
  Description of Artificial Sequence: Synthetic oligonucleotide
  Sense strand starting at position 2980 of SEQ ID NO: 1244763
uagcauuguguuguccagu

SEQ ID NO: 1513055 - RNA, 19 nt, Artificial Sequence
  Description of Artificial Sequence: Synthetic oligonucleotide
  Antisense strand to SEQ ID NO: 1513054
acuggacaacacaaugcua

SEQ ID NO: 1513056 - RNA, 19 nt, Artificial Sequence
  Description of Artificial Sequence: Synthetic oligonucleotide
  Sense strand starting at position 2985 of SEQ ID NO: 1244763
uuguguuguccaguacguu

SEQ ID NO: 1513057 - RNA, 19 nt, Artificial Sequence
  Description of Artificial Sequence: Synthetic oligonucleotide
  Antisense strand to SEQ ID NO: 1513056
aacguacuggacaacacaa

SEQ ID NO: 1513058 - RNA, 19 nt, Artificial Sequence
  Description of Artificial Sequence: Synthetic oligonucleotide
  Sense strand starting at position 3035 of SEQ ID NO: 1244763
agaugugacuagucccagu

SEQ ID NO: 1513059 - RNA, 19 nt, Artificial Sequence
  Description of Artificial Sequence: Synthetic oligonucleotide
  Antisense strand to SEQ ID NO: 1513058
acugggacuagucacaucu

SEQ ID NO: 1513060 - RNA, 19 nt, Artificial Sequence
  Description of Artificial Sequence: Synthetic oligonucleotide
  Sense strand starting at position 3054 of SEQ ID NO: 1244763
gggaaugugcuauaaaugu

SEQ ID NO: 1513061 - RNA, 19 nt, Artificial Sequence
  Description of Artificial Sequence: Synthetic oligonucleotide
  Antisense strand to SEQ ID NO: 1513060
acauuuauagcacauuccc

SEQ ID NO: 1513062 - RNA, 19 nt, Artificial Sequence
  Description of Artificial Sequence: Synthetic oligonucleotide
  Sense strand starting at position 3229 of SEQ ID NO: 1244763
uagugagaccuaugucuac

SEQ ID NO: 1513063 - RNA, 19 nt, Artificial Sequence
  Description of Artificial Sequence: Synthetic oligonucleotide
  Antisense strand to SEQ ID NO: 1513062
guagacauaggucucacua

SEQ ID NO: 1513064 - RNA, 19 nt, Artificial Sequence
  Description of Artificial Sequence: Synthetic oligonucleotide
  Sense strand starting at position 3232 of SEQ ID NO: 1244763
ugagaccuaugucuacaaa

SEQ ID NO: 1513065 - RNA, 19 nt, Artificial Sequence
  Description of Artificial Sequence: Synthetic oligonucleotide
  Antisense strand to SEQ ID NO: 1513064
uuuguagacauaggucuca

SEQ ID NO: 1513066 - RNA, 19 nt, Artificial Sequence
  Description of Artificial Sequence: Synthetic oligonucleotide
  Sense strand starting at position 406 of SEQ ID NO: 1244764
ggugguauuaaagguguga

SEQ ID NO: 1513067 - RNA, 19 nt, Artificial Sequence
  Description of Artificial Sequence: Synthetic oligonucleotide
  Antisense strand to SEQ ID NO: 1513066
ucacaccuuuaauaccacc

SEQ ID NO: 1513068 - RNA, 19 nt, Artificial Sequence
  Description of Artificial Sequence: Synthetic oligonucleotide
  Sense strand starting at position 410 of SEQ ID NO: 1244764
guauuaaaggugugagcua

SEQ ID NO: 1513069 - RNA, 19 nt, Artificial Sequence
  Description of Artificial Sequence: Synthetic oligonucleotide
  Antisense strand to SEQ ID NO: 1513068
uagcucacaccuuuaauac

SEQ ID NO: 1513070 - RNA, 19 nt, Artificial Sequence
  Description of Artificial Sequence: Synthetic oligonucleotide
  Sense strand starting at position 468 of SEQ ID NO: 1244764
gagucuucucugcaucuag

SEQ ID NO: 1513071 - RNA, 19 nt, Artificial Sequence
  Description of Artificial Sequence: Synthetic oligonucleotide
  Antisense strand to SEQ ID NO: 1513070
cuagaugcagagaagacuc

SEQ ID NO: 1513072 - RNA, 19 nt, Artificial Sequence
  Description of Artificial Sequence: Synthetic oligonucleotide
  Sense strand starting at position 586 of SEQ ID NO: 1244764
gcgagugacucauuuaagc

SEQ ID NO: 1513073 - RNA, 19 nt, Artificial Sequence
  Description of Artificial Sequence: Synthetic oligonucleotide
  Antisense strand to SEQ ID NO: 1513072
gcuuaaaugagucacucgc

SEQ ID NO: 1513074 - RNA, 19 nt, Artificial Sequence
  Description of Artificial Sequence: Synthetic oligonucleotide
  Sense strand starting at position 643 of SEQ ID NO: 1244764
cagucaucggagcauuaga

SEQ ID NO: 1513075 - RNA, 19 nt, Artificial Sequence
  Description of Artificial Sequence: Synthetic oligonucleotide
  Antisense strand to SEQ ID NO: 1513074
ucuaaugcuccgaugacug

SEQ ID NO: 1513076 - RNA, 19 nt, Artificial Sequence
  Description of Artificial Sequence: Synthetic oligonucleotide
  Sense strand starting at position 759 of SEQ ID NO: 1244764
ggaauuaccuguucugauc

SEQ ID NO: 1513077 - RNA, 19 nt, Artificial Sequence
  Description of Artificial Sequence: Synthetic oligonucleotide
  Antisense strand to SEQ ID NO: 1513076
gaucagaacagguaauucc

SEQ ID NO: 1513078 - RNA, 19 nt, Artificial Sequence
  Description of Artificial Sequence: Synthetic oligonucleotide
  Sense strand starting at position 844 of SEQ ID NO: 1244764
acuuaucaaguugguuauu

SEQ ID NO: 1513079 - RNA, 19 nt, Artificial Sequence
  Description of Artificial Sequence: Synthetic oligonucleotide
  Antisense strand to SEQ ID NO: 1513078
aauaaccaacuugauaagu

SEQ ID NO: 1513080 - RNA, 19 nt, Artificial Sequence
  Description of Artificial Sequence: Synthetic oligonucleotide
  Sense strand starting at position 845 of SEQ ID NO: 1244764
cuuaucaaguugguuauua

SEQ ID NO: 1513081 - RNA, 19 nt, Artificial Sequence
  Description of Artificial Sequence: Synthetic oligonucleotide
  Antisense strand to SEQ ID NO: 1513080
uaauaaccaacuugauaag

SEQ ID NO: 1513082 - RNA, 19 nt, Artificial Sequence
  Description of Artificial Sequence: Synthetic oligonucleotide
  Sense strand starting at position 849 of SEQ ID NO: 1244764
ucaaguugguuauuaaacu

SEQ ID NO: 1513083 - RNA, 19 nt, Artificial Sequence
  Description of Artificial Sequence: Synthetic oligonucleotide
  Antisense strand to SEQ ID NO: 1513082
aguuuaauaaccaacuuga

SEQ ID NO: 1513084 - RNA, 19 nt, Artificial Sequence
  Description of Artificial Sequence: Synthetic oligonucleotide
  Sense strand starting at position 856 of SEQ ID NO: 1244764
gguuauuaaacuuacgugu

SEQ ID NO: 1513085 - RNA, 19 nt, Artificial Sequence
  Description of Artificial Sequence: Synthetic oligonucleotide
  Antisense strand to SEQ ID NO: 1513084
acacguaaguuuaauaacc

SEQ ID NO: 1513086 - RNA, 19 nt, Artificial Sequence
  Description of Artificial Sequence: Synthetic oligonucleotide
  Sense strand starting at position 859 of SEQ ID NO: 1244764
uauuaaacuuacgugugau

SEQ ID NO: 1513087 - RNA, 19 nt, Artificial Sequence
  Description of Artificial Sequence: Synthetic oligonucleotide
  Antisense strand to SEQ ID NO: 1513086
aucacacguaaguuuaaua

SEQ ID NO: 1513088 - RNA, 19 nt, Artificial Sequence
  Description of Artificial Sequence: Synthetic oligonucleotide
  Sense strand starting at position 862 of SEQ ID NO: 1244764
uaaacuuacgugugaucac

SEQ ID NO: 1513089 - RNA, 19 nt, Artificial Sequence
  Description of Artificial Sequence: Synthetic oligonucleotide
  Antisense strand to SEQ ID NO: 1513088
gugaucacacguaaguuua

SEQ ID NO: 1513090 - RNA, 19 nt, Artificial Sequence
  Description of Artificial Sequence: Synthetic oligonucleotide
  Sense strand starting at position 871 of SEQ ID NO: 1244764
gugugaucacugcaucaau

SEQ ID NO: 1513091 - RNA, 19 nt, Artificial Sequence
  Description of Artificial Sequence: Synthetic oligonucleotide
  Antisense strand to SEQ ID NO: 1513090
auugaugcagugaucacac

SEQ ID NO: 1513092 - RNA, 19 nt, Artificial Sequence
  Description of Artificial Sequence: Synthetic oligonucleotide
  Sense strand starting at position 1098 of SEQ ID NO: 1244764
ugcguuccgccaguaucau

SEQ ID NO: 1513093 - RNA, 19 nt, Artificial Sequence
  Description of Artificial Sequence: Synthetic oligonucleotide
  Antisense strand to SEQ ID NO: 1513092
augauacuggcggaacgca

SEQ ID NO: 1513094 - RNA, 19 nt, Artificial Sequence
  Description of Artificial Sequence: Synthetic oligonucleotide
  Sense strand starting at position 1431 of SEQ ID NO: 1244764
ggugguuucgaaggaaggu

SEQ ID NO: 1513095 - RNA, 19 nt, Artificial Sequence
  Description of Artificial Sequence: Synthetic oligonucleotide
  Antisense strand to SEQ ID NO: 1513094
accuuccuucgaaaccacc

SEQ ID NO: 1513096 - RNA, 19 nt, Artificial Sequence
  Description of Artificial Sequence: Synthetic oligonucleotide
  Sense strand starting at position 1469 of SEQ ID NO: 1244764
agagcuuuaaguugagaua

SEQ ID NO: 1513097 - RNA, 19 nt, Artificial Sequence
  Description of Artificial Sequence: Synthetic oligonucleotide
  Antisense strand to SEQ ID NO: 1513096
uaucucaacuuaaagcucu

SEQ ID NO: 1513098 - RNA, 19 nt, Artificial Sequence
  Description of Artificial Sequence: Synthetic oligonucleotide
  Sense strand starting at position 1705 of SEQ ID NO: 1244764
caaucacuguccgcuaaga

SEQ ID NO: 1513099 - RNA, 19 nt, Artificial Sequence
  Description of Artificial Sequence: Synthetic oligonucleotide
  Antisense strand to SEQ ID NO: 1513098
ucuuagcggacagugauug

SEQ ID NO: 1513100 - RNA, 19 nt, Artificial Sequence
  Description of Artificial Sequence: Synthetic oligonucleotide
  Sense strand starting at position 1707 of SEQ ID NO: 1244764
aucacuguccgcuaagaac

SEQ ID NO: 1513101 - RNA, 19 nt, Artificial Sequence
  Description of Artificial Sequence: Synthetic oligonucleotide
  Antisense strand to SEQ ID NO: 1513100
guucuuagcggacagugau

SEQ ID NO: 1513102 - RNA, 19 nt, Artificial Sequence
  Description of Artificial Sequence: Synthetic oligonucleotide
  Sense strand starting at position 1823 of SEQ ID NO: 1244764
ggagaaguauggucccgag

SEQ ID NO: 1513103 - RNA, 19 nt, Artificial Sequence
  Description of Artificial Sequence: Synthetic oligonucleotide
  Antisense strand to SEQ ID NO: 1513102
cucgggaccauacuucucc

SEQ ID NO: 1513104 - RNA, 19 nt, Artificial Sequence
  Description of Artificial Sequence: Synthetic oligonucleotide
  Sense strand starting at position 1851 of SEQ ID NO: 1244764
aaggaaggcgguugugaau

SEQ ID NO: 1513105 - RNA, 19 nt, Artificial Sequence
  Description of Artificial Sequence: Synthetic oligonucleotide
  Antisense strand to SEQ ID NO: 1513104
auucacaaccgccuuccuu

SEQ ID NO: 1513106 - RNA, 19 nt, Artificial Sequence
  Description of Artificial Sequence: Synthetic oligonucleotide
  Sense strand starting at position 1964 of SEQ ID NO: 1244764
ccaucuugggagugacuga

SEQ ID NO: 1513107 - RNA, 19 nt, Artificial Sequence
  Description of Artificial Sequence: Synthetic oligonucleotide
  Antisense strand to SEQ ID NO: 1513106
ucagucacucccaagaugg

SEQ ID NO: 1513108 - RNA, 19 nt, Artificial Sequence
  Description of Artificial Sequence: Synthetic oligonucleotide
  Sense strand starting at position 2018 of SEQ ID NO: 1244764
gccuuuaaggccggaaaca

SEQ ID NO: 1513109 - RNA, 19 nt, Artificial Sequence
  Description of Artificial Sequence: Synthetic oligonucleotide
  Antisense strand to SEQ ID NO: 1513108
uguuuccggccuuaaaggc

SEQ ID NO: 1513110 - RNA, 19 nt, Artificial Sequence
  Description of Artificial Sequence: Synthetic oligonucleotide
  Sense strand starting at position 2178 of SEQ ID NO: 1244764
uggcaauucguauaaacca

SEQ ID NO: 1513111 - RNA, 19 nt, Artificial Sequence
  Description of Artificial Sequence: Synthetic oligonucleotide
  Antisense strand to SEQ ID NO: 1513110
ugguuuauacgaauugcca

SEQ ID NO: 1513112 - RNA, 19 nt, Artificial Sequence
  Description of Artificial Sequence: Synthetic oligonucleotide
  Sense strand starting at position 2308 of SEQ ID NO: 1244764
ucacuauacucuguauguu

SEQ ID NO: 1513113 - RNA, 19 nt, Artificial Sequence
  Description of Artificial Sequence: Synthetic oligonucleotide
  Antisense strand to SEQ ID NO: 1513112
aacauacagaguauaguga

SEQ ID NO: 1513114 - RNA, 19 nt, Artificial Sequence
  Description of Artificial Sequence: Synthetic oligonucleotide
  Sense strand starting at position 2311 of SEQ ID NO: 1244764
cuauacucuguauguuaca

SEQ ID NO: 1513115 - RNA, 19 nt, Artificial Sequence
  Description of Artificial Sequence: Synthetic oligonucleotide
  Antisense strand to SEQ ID NO: 1513114
uguaacauacagaguauag

SEQ ID NO: 1513116 - RNA, 19 nt, Artificial Sequence
  Description of Artificial Sequence: Synthetic oligonucleotide
  Sense strand starting at position 2497 of SEQ ID NO: 1244764
cacggucagcccugaaaca

SEQ ID NO: 1513117 - RNA, 19 nt, Artificial Sequence
  Description of Artificial Sequence: Synthetic oligonucleotide
  Antisense strand to SEQ ID NO: 1513116
uguuucagggcugaccgug

SEQ ID NO: 1513118 - RNA, 19 nt, Artificial Sequence
  Description of Artificial Sequence: Synthetic oligonucleotide
  Sense strand starting at position 2566 of SEQ ID NO: 1244764
cagagacgcgucgaacaaa

SEQ ID NO: 1513119 - RNA, 19 nt, Artificial Sequence
  Description of Artificial Sequence: Synthetic oligonucleotide
  Antisense strand to SEQ ID NO: 1513118
uuuguucgacgcgucucug

SEQ ID NO: 1513120 - RNA, 19 nt, Artificial Sequence
  Description of Artificial Sequence: Synthetic oligonucleotide
  Sense strand starting at position 2569 of SEQ ID NO: 1244764
agacgcgucgaacaaauaa

SEQ ID NO: 1513121 - RNA, 19 nt, Artificial Sequence
  Description of Artificial Sequence: Synthetic oligonucleotide
  Antisense strand to SEQ ID NO: 1513120
uuauuuguucgacgcgucu

SEQ ID NO: 1513122 - RNA, 19 nt, Artificial Sequence
  Description of Artificial Sequence: Synthetic oligonucleotide
  Sense strand starting at position 3118 of SEQ ID NO: 1244764
uccugcuucuuggugagaa

SEQ ID NO: 1513123 - RNA, 19 nt, Artificial Sequence
  Description of Artificial Sequence: Synthetic oligonucleotide
  Antisense strand to SEQ ID NO: 1513122
uucucaccaagaagcagga

SEQ ID NO: 1513124 - RNA, 19 nt, Artificial Sequence
  Description of Artificial Sequence: Synthetic oligonucleotide
  Sense strand starting at position 3120 of SEQ ID NO: 1244764
cugcuucuuggugagaaag

SEQ ID NO: 1513125 - RNA, 19 nt, Artificial Sequence
  Description of Artificial Sequence: Synthetic oligonucleotide
  Antisense strand to SEQ ID NO: 1513124
cuuucucaccaagaagcag

SEQ ID NO: 1513126 - RNA, 19 nt, Artificial Sequence
  Description of Artificial Sequence: Synthetic oligonucleotide
  Sense strand starting at position 3224 of SEQ ID NO: 1244764
ggcagugaggcaugaugau

SEQ ID NO: 1513127 - RNA, 19 nt, Artificial Sequence
  Description of Artificial Sequence: Synthetic oligonucleotide
  Antisense strand to SEQ ID NO: 1513126
aucaucaugccucacugcc

SEQ ID NO: 1513128 - RNA, 19 nt, Artificial Sequence
  Description of Artificial Sequence: Synthetic oligonucleotide
  Sense strand starting at position 3415 of SEQ ID NO: 1244764
ugcugaaaucgcuucuguu

SEQ ID NO: 1513129 - RNA, 19 nt, Artificial Sequence
  Description of Artificial Sequence: Synthetic oligonucleotide
  Antisense strand to SEQ ID NO: 1513128
aacagaagcgauuucagca

SEQ ID NO: 1513130 - RNA, 19 nt, Artificial Sequence
  Description of Artificial Sequence: Synthetic oligonucleotide
  Sense strand starting at position 3416 of SEQ ID NO: 1244764
gcugaaaucgcuucuguuc

SEQ ID NO: 1513131 - RNA, 19 nt, Artificial Sequence
  Description of Artificial Sequence: Synthetic oligonucleotide
  Antisense strand to SEQ ID NO: 1513130
gaacagaagcgauuucagc

SEQ ID NO: 1513132 - RNA, 19 nt, Artificial Sequence
  Description of Artificial Sequence: Synthetic oligonucleotide
  Sense strand starting at position 3443 of SEQ ID NO: 1244764
uucggaacuugcucuggau

SEQ ID NO: 1513133 - RNA, 19 nt, Artificial Sequence
  Description of Artificial Sequence: Synthetic oligonucleotide
  Antisense strand to SEQ ID NO: 1513132
auccagagcaaguuccgaa

SEQ ID NO: 1513134 - RNA, 19 nt, Artificial Sequence
  Description of Artificial Sequence: Synthetic oligonucleotide
  Sense strand starting at position 3445 of SEQ ID NO: 1244764
cggaacuugcucuggauca

SEQ ID NO: 1513135 - RNA, 19 nt, Artificial Sequence
  Description of Artificial Sequence: Synthetic oligonucleotide
  Antisense strand to SEQ ID NO: 1513134
ugauccagagcaaguuccg

SEQ ID NO: 1513136 - RNA, 19 nt, Artificial Sequence
  Description of Artificial Sequence: Synthetic oligonucleotide
  Sense strand starting at position 3475 of SEQ ID NO: 1244764
ugggucaucuucuuauaga

SEQ ID NO: 1513137 - RNA, 19 nt, Artificial Sequence
  Description of Artificial Sequence: Synthetic oligonucleotide
  Antisense strand to SEQ ID NO: 1513136
ucuauaagaagaugaccca

SEQ ID NO: 1513138 - RNA, 19 nt, Artificial Sequence
  Description of Artificial Sequence: Synthetic oligonucleotide
  Sense strand starting at position 3483 of SEQ ID NO: 1244764
cuucuuauagagugcaaac

SEQ ID NO: 1513139 - RNA, 19 nt, Artificial Sequence
  Description of Artificial Sequence: Synthetic oligonucleotide
  Antisense strand to SEQ ID NO: 1513138
guuugcacucuauaagaag

SEQ ID NO: 1513140 - RNA, 19 nt, Artificial Sequence
  Description of Artificial Sequence: Synthetic oligonucleotide
  Sense strand starting at position 3569 of SEQ ID NO: 1244764
ccaaguuaggcugaugcaa

SEQ ID NO: 1513141 - RNA, 19 nt, Artificial Sequence
  Description of Artificial Sequence: Synthetic oligonucleotide
  Antisense strand to SEQ ID NO: 1513140
uugcaucagccuaacuugg

SEQ ID NO: 1513142 - RNA, 19 nt, Artificial Sequence
  Description of Artificial Sequence: Synthetic oligonucleotide
  Sense strand starting at position 3582 of SEQ ID NO: 1244764
augcaagacucucuguaac

SEQ ID NO: 1513143 - RNA, 19 nt, Artificial Sequence
  Description of Artificial Sequence: Synthetic oligonucleotide
  Antisense strand to SEQ ID NO: 1513142
guuacagagagucuugcau

SEQ ID NO: 1513144 - RNA, 19 nt, Artificial Sequence
  Description of Artificial Sequence: Synthetic oligonucleotide
  Sense strand starting at position 3702 of SEQ ID NO: 1244764
gaguuagggcucuggcaac

SEQ ID NO: 1513145 - RNA, 19 nt, Artificial Sequence
  Description of Artificial Sequence: Synthetic oligonucleotide
  Antisense strand to SEQ ID NO: 1513144
guugccagagcccuaacuc

SEQ ID NO: 1513146 - RNA, 19 nt, Artificial Sequence
  Description of Artificial Sequence: Synthetic oligonucleotide
  Sense strand starting at position 48 of SEQ ID NO: 1244765
uguccuagcuccuuaggaa

SEQ ID NO: 1513147 - RNA, 19 nt, Artificial Sequence
  Description of Artificial Sequence: Synthetic oligonucleotide
  Antisense strand to SEQ ID NO: 1513146
uuccuaaggagcuaggaca

SEQ ID NO: 1513148 - RNA, 19 nt, Artificial Sequence
  Description of Artificial Sequence: Synthetic oligonucleotide
  Sense strand starting at position 211 of SEQ ID NO: 1244765
auagcauuccuuugagaaa

SEQ ID NO: 1513149 - RNA, 19 nt, Artificial Sequence
  Description of Artificial Sequence: Synthetic oligonucleotide
  Antisense strand to SEQ ID NO: 1513148
uuucucaaaggaaugcuau

SEQ ID NO: 1513150 - RNA, 19 nt, Artificial Sequence
  Description of Artificial Sequence: Synthetic oligonucleotide
  Sense strand starting at position 443 of SEQ ID NO: 1244765
uuaguuauuucgccuccuu

SEQ ID NO: 1513151 - RNA, 19 nt, Artificial Sequence
  Description of Artificial Sequence: Synthetic oligonucleotide
  Antisense strand to SEQ ID NO: 1513150
aaggaggcgaaauaacuaa

SEQ ID NO: 1513152 - RNA, 19 nt, Artificial Sequence
  Description of Artificial Sequence: Synthetic oligonucleotide
  Sense strand starting at position 456 of SEQ ID NO: 1244765
cuccuuugaucaccaugua

SEQ ID NO: 1513153 - RNA, 19 nt, Artificial Sequence
  Description of Artificial Sequence: Synthetic oligonucleotide
  Antisense strand to SEQ ID NO: 1513152
uacauggugaucaaaggag

SEQ ID NO: 1513154 - RNA, 19 nt, Artificial Sequence
  Description of Artificial Sequence: Synthetic oligonucleotide
  Sense strand starting at position 457 of SEQ ID NO: 1244765
uccuuugaucaccauguau

SEQ ID NO: 1513155 - RNA, 19 nt, Artificial Sequence
  Description of Artificial Sequence: Synthetic oligonucleotide
  Antisense strand to SEQ ID NO: 1513154
auacauggugaucaaagga

SEQ ID NO: 1513156 - RNA, 19 nt, Artificial Sequence
  Description of Artificial Sequence: Synthetic oligonucleotide
  Sense strand starting at position 680 of SEQ ID NO: 1244765
agaguuaacagguggccaa

SEQ ID NO: 1513157 - RNA, 19 nt, Artificial Sequence
  Description of Artificial Sequence: Synthetic oligonucleotide
  Antisense strand to SEQ ID NO: 1513156
uuggccaccuguuaacucu

SEQ ID NO: 1513158 - RNA, 19 nt, Artificial Sequence
  Description of Artificial Sequence: Synthetic oligonucleotide
  Sense strand starting at position 681 of SEQ ID NO: 1244765
gaguuaacagguggccaaa

SEQ ID NO: 1513159 - RNA, 19 nt, Artificial Sequence
  Description of Artificial Sequence: Synthetic oligonucleotide
  Antisense strand to SEQ ID NO: 1513158
uuuggccaccuguuaacuc

SEQ ID NO: 1513160 - RNA, 19 nt, Artificial Sequence
  Description of Artificial Sequence: Synthetic oligonucleotide
  Sense strand starting at position 723 of SEQ ID NO: 1244765
gaaggaaacucagacggaa

SEQ ID NO: 1513161 - RNA, 19 nt, Artificial Sequence
  Description of Artificial Sequence: Synthetic oligonucleotide
  Antisense strand to SEQ ID NO: 1513160
uuccgucugaguuuccuuc

SEQ ID NO: 1513162 - RNA, 19 nt, Artificial Sequence
  Description of Artificial Sequence: Synthetic oligonucleotide
  Sense strand starting at position 822 of SEQ ID NO: 1244765
ggaacuguccaagguuaca

SEQ ID NO: 1513163 - RNA, 19 nt, Artificial Sequence
  Description of Artificial Sequence: Synthetic oligonucleotide
  Antisense strand to SEQ ID NO: 1513162
uguaaccuuggacaguucc

SEQ ID NO: 1513164 - RNA, 19 nt, Artificial Sequence
  Description of Artificial Sequence: Synthetic oligonucleotide
  Sense strand starting at position 850 of SEQ ID NO: 1244765
ggaggaaugcuuugguuug

SEQ ID NO: 1513165 - RNA, 19 nt, Artificial Sequence
  Description of Artificial Sequence: Synthetic oligonucleotide
  Antisense strand to SEQ ID NO: 1513164
caaaccaaagcauuccucc

SEQ ID NO: 1513166 - RNA, 19 nt, Artificial Sequence
  Description of Artificial Sequence: Synthetic oligonucleotide
  Sense strand starting at position 855 of SEQ ID NO: 1244765
aaugcuuugguuugggaua

SEQ ID NO: 1513167 - RNA, 19 nt, Artificial Sequence
  Description of Artificial Sequence: Synthetic oligonucleotide
  Antisense strand to SEQ ID NO: 1513166
uaucccaaaccaaagcauu

SEQ ID NO: 1513168 - RNA, 19 nt, Artificial Sequence
  Description of Artificial Sequence: Synthetic oligonucleotide
  Sense strand starting at position 866 of SEQ ID NO: 1244765
uugggauaccaacgaaauu

SEQ ID NO: 1513169 - RNA, 19 nt, Artificial Sequence
  Description of Artificial Sequence: Synthetic oligonucleotide
  Antisense strand to SEQ ID NO: 1513168
aauuucguugguaucccaa

SEQ ID NO: 1513170 - RNA, 19 nt, Artificial Sequence
  Description of Artificial Sequence: Synthetic oligonucleotide
  Sense strand starting at position 899 of SEQ ID NO: 1244765
ugaguacugccacacaaca

SEQ ID NO: 1513171 - RNA, 19 nt, Artificial Sequence
  Description of Artificial Sequence: Synthetic oligonucleotide
  Antisense strand to SEQ ID NO: 1513170
uguuguguggcaguacuca

SEQ ID NO: 1513172 - RNA, 19 nt, Artificial Sequence
  Description of Artificial Sequence: Synthetic oligonucleotide
  Sense strand starting at position 968 of SEQ ID NO: 1244765
cgucuuucucaacaagauu

SEQ ID NO: 1513173 - RNA, 19 nt, Artificial Sequence
  Description of Artificial Sequence: Synthetic oligonucleotide
  Antisense strand to SEQ ID NO: 1513172
aaucuuguugagaaagacg

SEQ ID NO: 1513174 - RNA, 19 nt, Artificial Sequence
  Description of Artificial Sequence: Synthetic oligonucleotide
  Sense strand starting at position 1017 of SEQ ID NO: 1244765
ggagaucucuaacuuccca

SEQ ID NO: 1513175 - RNA, 19 nt, Artificial Sequence
  Description of Artificial Sequence: Synthetic oligonucleotide
  Antisense strand to SEQ ID NO: 1513174
ugggaaguuagagaucucc

SEQ ID NO: 1513176 - RNA, 19 nt, Artificial Sequence
  Description of Artificial Sequence: Synthetic oligonucleotide
  Sense strand starting at position 1071 of SEQ ID NO: 1244765
gcggaaguuacauauccag

SEQ ID NO: 1513177 - RNA, 19 nt, Artificial Sequence
  Description of Artificial Sequence: Synthetic oligonucleotide
  Antisense strand to SEQ ID NO: 1513176
cuggauauguaacuuccgc

SEQ ID NO: 1513178 - RNA, 19 nt, Artificial Sequence
  Description of Artificial Sequence: Synthetic oligonucleotide
  Sense strand starting at position 1077 of SEQ ID NO: 1244765
guuacauauccagggcaga

SEQ ID NO: 1513179 - RNA, 19 nt, Artificial Sequence
  Description of Artificial Sequence: Synthetic oligonucleotide
  Antisense strand to SEQ ID NO: 1513178
ucugcccuggauauguaac

SEQ ID NO: 1513180 - RNA, 19 nt, Artificial Sequence
  Description of Artificial Sequence: Synthetic oligonucleotide
  Sense strand starting at position 1078 of SEQ ID NO: 1244765
uuacauauccagggcagaa

SEQ ID NO: 1513181 - RNA, 19 nt, Artificial Sequence
  Description of Artificial Sequence: Synthetic oligonucleotide
  Antisense strand to SEQ ID NO: 1513180
uucugcccuggauauguaa

SEQ ID NO: 1513182 - RNA, 19 nt, Artificial Sequence
  Description of Artificial Sequence: Synthetic oligonucleotide
  Sense strand starting at position 1153 of SEQ ID NO: 1244765
ucggaaacuucccucaaca

SEQ ID NO: 1513183 - RNA, 19 nt, Artificial Sequence
  Description of Artificial Sequence: Synthetic oligonucleotide
  Antisense strand to SEQ ID NO: 1513182
uguugagggaaguuuccga

SEQ ID NO: 1513184 - RNA, 19 nt, Artificial Sequence
  Description of Artificial Sequence: Synthetic oligonucleotide
  Sense strand starting at position 1650 of SEQ ID NO: 1244765
ugaccaccuccucgucaua

SEQ ID NO: 1513185 - RNA, 19 nt, Artificial Sequence
  Description of Artificial Sequence: Synthetic oligonucleotide
  Antisense strand to SEQ ID NO: 1513184
uaugacgaggaggugguca

SEQ ID NO: 1513186 - RNA, 19 nt, Artificial Sequence
  Description of Artificial Sequence: Synthetic oligonucleotide
  Sense strand starting at position 1661 of SEQ ID NO: 1244765
ucgucauagcgcccgauaa

SEQ ID NO: 1513187 - RNA, 19 nt, Artificial Sequence
  Description of Artificial Sequence: Synthetic oligonucleotide
  Antisense strand to SEQ ID NO: 1513186
uuaucgggcgcuaugacga

SEQ ID NO: 1513188 - RNA, 19 nt, Artificial Sequence
  Description of Artificial Sequence: Synthetic oligonucleotide
  Sense strand starting at position 1673 of SEQ ID NO: 1244765
ccgauaagccgcucgaacu

SEQ ID NO: 1513189 - RNA, 19 nt, Artificial Sequence
  Description of Artificial Sequence: Synthetic oligonucleotide
  Antisense strand to SEQ ID NO: 1513188
aguucgagcggcuuaucgg

SEQ ID NO: 1513190 - RNA, 19 nt, Artificial Sequence
  Description of Artificial Sequence: Synthetic oligonucleotide
  Sense strand starting at position 2298 of SEQ ID NO: 1244765
cuggcauuucuauggcuuu

SEQ ID NO: 1513191 - RNA, 19 nt, Artificial Sequence
  Description of Artificial Sequence: Synthetic oligonucleotide
  Antisense strand to SEQ ID NO: 1513190
aaagccauagaaaugccag

SEQ ID NO: 1513192 - RNA, 19 nt, Artificial Sequence
  Description of Artificial Sequence: Synthetic oligonucleotide
  Sense strand starting at position 2358 of SEQ ID NO: 1244765
ggcguaaagagguagauau

SEQ ID NO: 1513193 - RNA, 19 nt, Artificial Sequence
  Description of Artificial Sequence: Synthetic oligonucleotide
  Antisense strand to SEQ ID NO: 1513192
auaucuaccucuuuacgcc

SEQ ID NO: 1513194 - RNA, 19 nt, Artificial Sequence
  Description of Artificial Sequence: Synthetic oligonucleotide
  Sense strand starting at position 2566 of SEQ ID NO: 1244765
guggaaagguggucucgaa

SEQ ID NO: 1513195 - RNA, 19 nt, Artificial Sequence
  Description of Artificial Sequence: Synthetic oligonucleotide
  Antisense strand to SEQ ID NO: 1513194
uucgagaccaccuuuccac

SEQ ID NO: 1513196 - RNA, 19 nt, Artificial Sequence
  Description of Artificial Sequence: Synthetic oligonucleotide
  Sense strand starting at position 2570 of SEQ ID NO: 1244765
aaagguggucucgaauaga

SEQ ID NO: 1513197 - RNA, 19 nt, Artificial Sequence
  Description of Artificial Sequence: Synthetic oligonucleotide
  Antisense strand to SEQ ID NO: 1513196
ucuauucgagaccaccuuu

SEQ ID NO: 1513198 - RNA, 19 nt, Artificial Sequence
  Description of Artificial Sequence: Synthetic oligonucleotide
  Sense strand starting at position 2746 of SEQ ID NO: 1244765
aacuuuacacguuaaguga

SEQ ID NO: 1513199 - RNA, 19 nt, Artificial Sequence
  Description of Artificial Sequence: Synthetic oligonucleotide
  Antisense strand to SEQ ID NO: 1513198
ucacuuaacguguaaaguu

SEQ ID NO: 1513200 - RNA, 19 nt, Artificial Sequence
  Description of Artificial Sequence: Synthetic oligonucleotide
  Sense strand starting at position 2754 of SEQ ID NO: 1244765
acguuaagugagugaauca

SEQ ID NO: 1513201 - RNA, 19 nt, Artificial Sequence
  Description of Artificial Sequence: Synthetic oligonucleotide
  Antisense strand to SEQ ID NO: 1513200
ugauucacucacuuaacgu

SEQ ID NO: 1513202 - RNA, 19 nt, Artificial Sequence
  Description of Artificial Sequence: Synthetic oligonucleotide
  Sense strand starting at position 2755 of SEQ ID NO: 1244765
cguuaagugagugaaucau

SEQ ID NO: 1513203 - RNA, 19 nt, Artificial Sequence
  Description of Artificial Sequence: Synthetic oligonucleotide
  Antisense strand to SEQ ID NO: 1513202
augauucacucacuuaacg

SEQ ID NO: 1513204 - RNA, 19 nt, Artificial Sequence
  Description of Artificial Sequence: Synthetic oligonucleotide
  Sense strand starting at position 2775 of SEQ ID NO: 1244765
uggcgugugaauuauaucu

SEQ ID NO: 1513205 - RNA, 19 nt, Artificial Sequence
  Description of Artificial Sequence: Synthetic oligonucleotide
  Antisense strand to SEQ ID NO: 1513204
agauauaauucacacgcca

SEQ ID NO: 1513206 - RNA, 19 nt, Artificial Sequence
  Description of Artificial Sequence: Synthetic oligonucleotide
  Sense strand starting at position 2825 of SEQ ID NO: 1244765
uagcauucuggagaagggu

SEQ ID NO: 1513207 - RNA, 19 nt, Artificial Sequence
  Description of Artificial Sequence: Synthetic oligonucleotide
  Antisense strand to SEQ ID NO: 1513206
acccuucuccagaaugcua

SEQ ID NO: 1513208 - RNA, 19 nt, Artificial Sequence
  Description of Artificial Sequence: Synthetic oligonucleotide
  Sense strand starting at position 2840 of SEQ ID NO: 1244765
gggugaaacuggaacguua

SEQ ID NO: 1513209 - RNA, 19 nt, Artificial Sequence
  Description of Artificial Sequence: Synthetic oligonucleotide
  Antisense strand to SEQ ID NO: 1513208
uaacguuccaguuucaccc

SEQ ID NO: 1513210 - RNA, 19 nt, Artificial Sequence
  Description of Artificial Sequence: Synthetic oligonucleotide
  Sense strand starting at position 3010 of SEQ ID NO: 1244765
gagucacuggagugaauaa

SEQ ID NO: 1513211 - RNA, 19 nt, Artificial Sequence
  Description of Artificial Sequence: Synthetic oligonucleotide
  Antisense strand to SEQ ID NO: 1513210
uuauucacuccagugacuc

SEQ ID NO: 1513212 - RNA, 19 nt, Artificial Sequence
  Description of Artificial Sequence: Synthetic oligonucleotide
  Sense strand starting at position 3030 of SEQ ID NO: 1244765
ucccaugacaagugagguu

SEQ ID NO: 1513213 - RNA, 19 nt, Artificial Sequence
  Description of Artificial Sequence: Synthetic oligonucleotide
  Antisense strand to SEQ ID NO: 1513212
aaccucacuugucauggga

SEQ ID NO: 1513214 - RNA, 19 nt, Artificial Sequence
  Description of Artificial Sequence: Synthetic oligonucleotide
  Sense strand starting at position 3124 of SEQ ID NO: 1244765
cggugugcucaucuaacgu

SEQ ID NO: 1513215 - RNA, 19 nt, Artificial Sequence
  Description of Artificial Sequence: Synthetic oligonucleotide
  Antisense strand to SEQ ID NO: 1513214
acguuagaugagcacaccg

SEQ ID NO: 1513216 - RNA, 19 nt, Artificial Sequence
  Description of Artificial Sequence: Synthetic oligonucleotide
  Sense strand starting at position 3209 of SEQ ID NO: 1244765
ucccgacucguuuaagaaa

SEQ ID NO: 1513217 - RNA, 19 nt, Artificial Sequence
  Description of Artificial Sequence: Synthetic oligonucleotide
  Antisense strand to SEQ ID NO: 1513216
uuucuuaaacgagucggga

SEQ ID NO: 1513218 - RNA, 19 nt, Artificial Sequence
  Description of Artificial Sequence: Synthetic oligonucleotide
  Sense strand starting at position 3322 of SEQ ID NO: 1244765
aguacuucccaccaaguau

SEQ ID NO: 1513219 - RNA, 19 nt, Artificial Sequence
  Description of Artificial Sequence: Synthetic oligonucleotide
  Antisense strand to SEQ ID NO: 1513218
auacuuggugggaaguacu

SEQ ID NO: 1513220 - RNA, 19 nt, Artificial Sequence
  Description of Artificial Sequence: Synthetic oligonucleotide
  Sense strand starting at position 3419 of SEQ ID NO: 1244765
accuauaaauuuggaagga

SEQ ID NO: 1513221 - RNA, 19 nt, Artificial Sequence
  Description of Artificial Sequence: Synthetic oligonucleotide
  Antisense strand to SEQ ID NO: 1513220
uccuuccaaauuuauaggu

SEQ ID NO: 1513222 - RNA, 19 nt, Artificial Sequence
  Description of Artificial Sequence: Synthetic oligonucleotide
  Sense strand starting at position 3455 of SEQ ID NO: 1244765
agucuuaugaagugccaga

SEQ ID NO: 1513223 - RNA, 19 nt, Artificial Sequence
  Description of Artificial Sequence: Synthetic oligonucleotide
  Antisense strand to SEQ ID NO: 1513222
ucuggcacuucauaagacu

SEQ ID NO: 1513224 - RNA, 19 nt, Artificial Sequence
  Description of Artificial Sequence: Synthetic oligonucleotide
  Sense strand starting at position 3695 of SEQ ID NO: 1244765
cuggucuaccuauaugcau

SEQ ID NO: 1513225 - RNA, 19 nt, Artificial Sequence
  Description of Artificial Sequence: Synthetic oligonucleotide
  Antisense strand to SEQ ID NO: 1513224
augcauauagguagaccag

SEQ ID NO: 1513226 - RNA, 19 nt, Artificial Sequence
  Description of Artificial Sequence: Synthetic oligonucleotide
  Sense strand starting at position 420 of SEQ ID NO: 1244766
guaguaagauuauucccaa

SEQ ID NO: 1513227 - RNA, 19 nt, Artificial Sequence
  Description of Artificial Sequence: Synthetic oligonucleotide
  Antisense strand to SEQ ID NO: 1513226
uugggaauaaucuuacuac

SEQ ID NO: 1513228 - RNA, 19 nt, Artificial Sequence
  Description of Artificial Sequence: Synthetic oligonucleotide
  Sense strand starting at position 568 of SEQ ID NO: 1244766
ggaaguuacuacuuuaauu

SEQ ID NO: 1513229 - RNA, 19 nt, Artificial Sequence
  Description of Artificial Sequence: Synthetic oligonucleotide
  Antisense strand to SEQ ID NO: 1513228
aauuaaaguaguaacuucc

SEQ ID NO: 1513230 - RNA, 19 nt, Artificial Sequence
  Description of Artificial Sequence: Synthetic oligonucleotide
  Sense strand starting at position 916 of SEQ ID NO: 1244766
gugaauaggcuuuguaaag

SEQ ID NO: 1513231 - RNA, 19 nt, Artificial Sequence
  Description of Artificial Sequence: Synthetic oligonucleotide
  Antisense strand to SEQ ID NO: 1513230
cuuuacaaagccuauucac

SEQ ID NO: 1513232 - RNA, 19 nt, Artificial Sequence
  Description of Artificial Sequence: Synthetic oligonucleotide
  Sense strand starting at position 1201 of SEQ ID NO: 1244766
aaaugcagagguuguauaa

SEQ ID NO: 1513233 - RNA, 19 nt, Artificial Sequence
  Description of Artificial Sequence: Synthetic oligonucleotide
  Antisense strand to SEQ ID NO: 1513232
uuauacaaccucugcauuu

SEQ ID NO: 1513234 - RNA, 19 nt, Artificial Sequence
  Description of Artificial Sequence: Synthetic oligonucleotide
  Sense strand starting at position 1363 of SEQ ID NO: 1244766
auccuaacugauggucuau

SEQ ID NO: 1513235 - RNA, 19 nt, Artificial Sequence
  Description of Artificial Sequence: Synthetic oligonucleotide
  Antisense strand to SEQ ID NO: 1513234
auagaccaucaguuaggau

SEQ ID NO: 1513236 - RNA, 19 nt, Artificial Sequence
  Description of Artificial Sequence: Synthetic oligonucleotide
  Sense strand starting at position 1365 of SEQ ID NO: 1244766
ccuaacugauggucuauaa

SEQ ID NO: 1513237 - RNA, 19 nt, Artificial Sequence
  Description of Artificial Sequence: Synthetic oligonucleotide
  Antisense strand to SEQ ID NO: 1513236
uuauagaccaucaguuagg

SEQ ID NO: 1513238 - RNA, 19 nt, Artificial Sequence
  Description of Artificial Sequence: Synthetic oligonucleotide
  Sense strand starting at position 1524 of SEQ ID NO: 1244766
gggaguaccugaguauccu

SEQ ID NO: 1513239 - RNA, 19 nt, Artificial Sequence
  Description of Artificial Sequence: Synthetic oligonucleotide
  Antisense strand to SEQ ID NO: 1513238
aggauacucagguacuccc

SEQ ID NO: 1513240 - RNA, 19 nt, Artificial Sequence
  Description of Artificial Sequence: Synthetic oligonucleotide
  Sense strand starting at position 1525 of SEQ ID NO: 1244766
ggaguaccugaguauccuu

SEQ ID NO: 1513241 - RNA, 19 nt, Artificial Sequence
  Description of Artificial Sequence: Synthetic oligonucleotide
  Antisense strand to SEQ ID NO: 1513240
aaggauacucagguacucc

SEQ ID NO: 1513242 - RNA, 19 nt, Artificial Sequence
  Description of Artificial Sequence: Synthetic oligonucleotide
  Sense strand starting at position 1530 of SEQ ID NO: 1244766
accugaguauccuugguag

SEQ ID NO: 1513243 - RNA, 19 nt, Artificial Sequence
  Description of Artificial Sequence: Synthetic oligonucleotide
  Antisense strand to SEQ ID NO: 1513242
cuaccaaggauacucaggu

SEQ ID NO: 1513244 - RNA, 19 nt, Artificial Sequence
  Description of Artificial Sequence: Synthetic oligonucleotide
  Sense strand starting at position 1563 of SEQ ID NO: 1244766
cuggcacaccgguagaaau

SEQ ID NO: 1513245 - RNA, 19 nt, Artificial Sequence
  Description of Artificial Sequence: Synthetic oligonucleotide
  Antisense strand to SEQ ID NO: 1513244
auuucuaccggugugccag

SEQ ID NO: 1513246 - RNA, 19 nt, Artificial Sequence
  Description of Artificial Sequence: Synthetic oligonucleotide
  Sense strand starting at position 1674 of SEQ ID NO: 1244766
gcaugcauccaggacucau

SEQ ID NO: 1513247 - RNA, 19 nt, Artificial Sequence
  Description of Artificial Sequence: Synthetic oligonucleotide
  Antisense strand to SEQ ID NO: 1513246
augaguccuggaugcaugc

SEQ ID NO: 1513248 - RNA, 19 nt, Artificial Sequence
  Description of Artificial Sequence: Synthetic oligonucleotide
  Sense strand starting at position 1762 of SEQ ID NO: 1244766
uagugaggaucugucauuc

SEQ ID NO: 1513249 - RNA, 19 nt, Artificial Sequence
  Description of Artificial Sequence: Synthetic oligonucleotide
  Antisense strand to SEQ ID NO: 1513248
gaaugacagauccucacua

SEQ ID NO: 1513250 - RNA, 19 nt, Artificial Sequence
  Description of Artificial Sequence: Synthetic oligonucleotide
  Sense strand starting at position 1980 of SEQ ID NO: 1244766
ggcuacaaugccugaagau

SEQ ID NO: 1513251 - RNA, 19 nt, Artificial Sequence
  Description of Artificial Sequence: Synthetic oligonucleotide
  Antisense strand to SEQ ID NO: 1513250
aucuucaggcauuguagcc

SEQ ID NO: 1513252 - RNA, 19 nt, Artificial Sequence
  Description of Artificial Sequence: Synthetic oligonucleotide
  Sense strand starting at position 1981 of SEQ ID NO: 1244766
gcuacaaugccugaagauc

SEQ ID NO: 1513253 - RNA, 19 nt, Artificial Sequence
  Description of Artificial Sequence: Synthetic oligonucleotide
  Antisense strand to SEQ ID NO: 1513252
gaucuucaggcauuguagc

SEQ ID NO: 1513254 - RNA, 19 nt, Artificial Sequence
  Description of Artificial Sequence: Synthetic oligonucleotide
  Sense strand starting at position 2199 of SEQ ID NO: 1244766
uuauauggauggcucauaa

SEQ ID NO: 1513255 - RNA, 19 nt, Artificial Sequence
  Description of Artificial Sequence: Synthetic oligonucleotide
  Antisense strand to SEQ ID NO: 1513254
uuaugagccauccauauaa

SEQ ID NO: 1513256 - RNA, 19 nt, Artificial Sequence
  Description of Artificial Sequence: Synthetic oligonucleotide
  Sense strand starting at position 2203 of SEQ ID NO: 1244766
auggauggcucauaauuua

SEQ ID NO: 1513257 - RNA, 19 nt, Artificial Sequence
  Description of Artificial Sequence: Synthetic oligonucleotide
  Antisense strand to SEQ ID NO: 1513256
uaaauuaugagccauccau

SEQ ID NO: 1513258 - RNA, 19 nt, Artificial Sequence
  Description of Artificial Sequence: Synthetic oligonucleotide
  Sense strand starting at position 2313 of SEQ ID NO: 1244766
acuauuguuccaggauuaa

SEQ ID NO: 1513259 - RNA, 19 nt, Artificial Sequence
  Description of Artificial Sequence: Synthetic oligonucleotide
  Antisense strand to SEQ ID NO: 1513258
uuaauccuggaacaauagu

SEQ ID NO: 1513260 - RNA, 19 nt, Artificial Sequence
  Description of Artificial Sequence: Synthetic oligonucleotide
  Sense strand starting at position 2416 of SEQ ID NO: 1244766
cuaugagcuguggauucua

SEQ ID NO: 1513261 - RNA, 19 nt, Artificial Sequence
  Description of Artificial Sequence: Synthetic oligonucleotide
  Antisense strand to SEQ ID NO: 1513260
uagaauccacagcucauag

SEQ ID NO: 1513262 - RNA, 19 nt, Artificial Sequence
  Description of Artificial Sequence: Synthetic oligonucleotide
  Sense strand starting at position 2424 of SEQ ID NO: 1244766
uguggauucuaguugauca

SEQ ID NO: 1513263 - RNA, 19 nt, Artificial Sequence
  Description of Artificial Sequence: Synthetic oligonucleotide
  Antisense strand to SEQ ID NO: 1513262
ugaucaacuagaauccaca

SEQ ID NO: 1513264 - RNA, 19 nt, Artificial Sequence
  Description of Artificial Sequence: Synthetic oligonucleotide
  Sense strand starting at position 2425 of SEQ ID NO: 1244766
guggauucuaguugaucac

SEQ ID NO: 1513265 - RNA, 19 nt, Artificial Sequence
  Description of Artificial Sequence: Synthetic oligonucleotide
  Antisense strand to SEQ ID NO: 1513264
gugaucaacuagaauccac

SEQ ID NO: 1513266 - RNA, 19 nt, Artificial Sequence
  Description of Artificial Sequence: Synthetic oligonucleotide
  Sense strand starting at position 2426 of SEQ ID NO: 1244766
uggauucuaguugaucacu

SEQ ID NO: 1513267 - RNA, 19 nt, Artificial Sequence
  Description of Artificial Sequence: Synthetic oligonucleotide
  Antisense strand to SEQ ID NO: 1513266
agugaucaacuagaaucca

SEQ ID NO: 1513268 - RNA, 19 nt, Artificial Sequence
  Description of Artificial Sequence: Synthetic oligonucleotide
  Sense strand starting at position 2435 of SEQ ID NO: 1244766
guugaucacucccugagag

SEQ ID NO: 1513269 - RNA, 19 nt, Artificial Sequence
  Description of Artificial Sequence: Synthetic oligonucleotide
  Antisense strand to SEQ ID NO: 1513268
cucucagggagugaucaac

SEQ ID NO: 1513270 - RNA, 19 nt, Artificial Sequence
  Description of Artificial Sequence: Synthetic oligonucleotide
  Sense strand starting at position 2437 of SEQ ID NO: 1244766
ugaucacucccugagagcu

SEQ ID NO: 1513271 - RNA, 19 nt, Artificial Sequence
  Description of Artificial Sequence: Synthetic oligonucleotide
  Antisense strand to SEQ ID NO: 1513270
agcucucagggagugauca

SEQ ID NO: 1513272 - RNA, 19 nt, Artificial Sequence
  Description of Artificial Sequence: Synthetic oligonucleotide
  Sense strand starting at position 2443 of SEQ ID NO: 1244766
cucccugagagcugaugaa

SEQ ID NO: 1513273 - RNA, 19 nt, Artificial Sequence
  Description of Artificial Sequence: Synthetic oligonucleotide
  Antisense strand to SEQ ID NO: 1513272
uucaucagcucucagggag

SEQ ID NO: 1513274 - RNA, 19 nt, Artificial Sequence
  Description of Artificial Sequence: Synthetic oligonucleotide
  Sense strand starting at position 2447 of SEQ ID NO: 1244766
cugagagcugaugaaguuu

SEQ ID NO: 1513275 - RNA, 19 nt, Artificial Sequence
  Description of Artificial Sequence: Synthetic oligonucleotide
  Antisense strand to SEQ ID NO: 1513274
aaacuucaucagcucucag

SEQ ID NO: 1513276 - RNA, 19 nt, Artificial Sequence
  Description of Artificial Sequence: Synthetic oligonucleotide
  Sense strand starting at position 2536 of SEQ ID NO: 1244766
aggcuaauaccuggaauaa

SEQ ID NO: 1513277 - RNA, 19 nt, Artificial Sequence
  Description of Artificial Sequence: Synthetic oligonucleotide
  Antisense strand to SEQ ID NO: 1513276
uuauuccagguauuagccu

SEQ ID NO: 1513278 - RNA, 19 nt, Artificial Sequence
  Description of Artificial Sequence: Synthetic oligonucleotide
  Sense strand starting at position 2602 of SEQ ID NO: 1244766
cuaucagacuacucgauuc

SEQ ID NO: 1513279 - RNA, 19 nt, Artificial Sequence
  Description of Artificial Sequence: Synthetic oligonucleotide
  Antisense strand to SEQ ID NO: 1513278
gaaucgaguagucugauag

SEQ ID NO: 1513280 - RNA, 19 nt, Artificial Sequence
  Description of Artificial Sequence: Synthetic oligonucleotide
  Sense strand starting at position 2658 of SEQ ID NO: 1244766
gggaaaguaauaugcaaau

SEQ ID NO: 1513281 - RNA, 19 nt, Artificial Sequence
  Description of Artificial Sequence: Synthetic oligonucleotide
  Antisense strand to SEQ ID NO: 1513280
auuugcauauuacuuuccc

SEQ ID NO: 1513282 - RNA, 19 nt, Artificial Sequence
  Description of Artificial Sequence: Synthetic oligonucleotide
  Sense strand starting at position 3086 of SEQ ID NO: 1244766
cugguaucauuacuuggua

SEQ ID NO: 1513283 - RNA, 19 nt, Artificial Sequence
  Description of Artificial Sequence: Synthetic oligonucleotide
  Antisense strand to SEQ ID NO: 1513282
uaccaaguaaugauaccag

SEQ ID NO: 1513284 - RNA, 19 nt, Artificial Sequence
  Description of Artificial Sequence: Synthetic oligonucleotide
  Sense strand starting at position 3089 of SEQ ID NO: 1244766
guaucauuacuugguauaa

SEQ ID NO: 1513285 - RNA, 19 nt, Artificial Sequence
  Description of Artificial Sequence: Synthetic oligonucleotide
  Antisense strand to SEQ ID NO: 1513284
uuauaccaaguaaugauac

SEQ ID NO: 1513286 - RNA, 19 nt, Artificial Sequence
  Description of Artificial Sequence: Synthetic oligonucleotide
  Sense strand starting at position 3300 of SEQ ID NO: 1244766
agccuaaauuuggaauuaa

SEQ ID NO: 1513287 - RNA, 19 nt, Artificial Sequence
  Description of Artificial Sequence: Synthetic oligonucleotide
  Antisense strand to SEQ ID NO: 1513286
uuaauuccaaauuuaggcu

SEQ ID NO: 1513288 - RNA, 19 nt, Artificial Sequence
  Description of Artificial Sequence: Synthetic oligonucleotide
  Sense strand starting at position 3333 of SEQ ID NO: 1244766
aggccuuugcuagagauac

SEQ ID NO: 1513289 - RNA, 19 nt, Artificial Sequence
  Description of Artificial Sequence: Synthetic oligonucleotide
  Antisense strand to SEQ ID NO: 1513288
guaucucuagcaaaggccu

SEQ ID NO: 1513290 - RNA, 19 nt, Artificial Sequence
  Description of Artificial Sequence: Synthetic oligonucleotide
  Sense strand starting at position 3392 of SEQ ID NO: 1244766
aagaaauaguguguuagua

SEQ ID NO: 1513291 - RNA, 19 nt, Artificial Sequence
  Description of Artificial Sequence: Synthetic oligonucleotide
  Antisense strand to SEQ ID NO: 1513290
uacuaacacacuauuucuu

SEQ ID NO: 1513292 - RNA, 19 nt, Artificial Sequence
  Description of Artificial Sequence: Synthetic oligonucleotide
  Sense strand starting at position 3400 of SEQ ID NO: 1244766
guguguuaguauuuaaagg

SEQ ID NO: 1513293 - RNA, 19 nt, Artificial Sequence
  Description of Artificial Sequence: Synthetic oligonucleotide
  Antisense strand to SEQ ID NO: 1513292
ccuuuaaauacuaacacac

SEQ ID NO: 1513294 - RNA, 19 nt, Artificial Sequence
  Description of Artificial Sequence: Synthetic oligonucleotide
  Sense strand starting at position 3448 of SEQ ID NO: 1244766
gaugucuuucuugggaaua

SEQ ID NO: 1513295 - RNA, 19 nt, Artificial Sequence
  Description of Artificial Sequence: Synthetic oligonucleotide
  Antisense strand to SEQ ID NO: 1513294
uauucccaagaaagacauc

SEQ ID NO: 1513296 - RNA, 19 nt, Artificial Sequence
  Description of Artificial Sequence: Synthetic oligonucleotide
  Sense strand starting at position 3544 of SEQ ID NO: 1244766
auagaauagcuuuggaagu

SEQ ID NO: 1513297 - RNA, 19 nt, Artificial Sequence
  Description of Artificial Sequence: Synthetic oligonucleotide
  Antisense strand to SEQ ID NO: 1513296
acuuccaaagcuauucuau

SEQ ID NO: 1513298 - RNA, 19 nt, Artificial Sequence
  Description of Artificial Sequence: Synthetic oligonucleotide
  Sense strand starting at position 3623 of SEQ ID NO: 1244766
guagcauauuaaguaacaa

SEQ ID NO: 1513299 - RNA, 19 nt, Artificial Sequence
  Description of Artificial Sequence: Synthetic oligonucleotide
  Antisense strand to SEQ ID NO: 1513298
uuguuacuuaauaugcuac

SEQ ID NO: 1513300 - RNA, 19 nt, Artificial Sequence
  Description of Artificial Sequence: Synthetic oligonucleotide
  Sense strand starting at position 3807 of SEQ ID NO: 1244766
accagacuguuccucaaug

SEQ ID NO: 1513301 - RNA, 19 nt, Artificial Sequence
  Description of Artificial Sequence: Synthetic oligonucleotide
  Antisense strand to SEQ ID NO: 1513300
cauugaggaacagucuggu

SEQ ID NO: 1513302 - RNA, 19 nt, Artificial Sequence
  Description of Artificial Sequence: Synthetic oligonucleotide
  Sense strand starting at position 3808 of SEQ ID NO: 1244766
ccagacuguuccucaauga

SEQ ID NO: 1513303 - RNA, 19 nt, Artificial Sequence
  Description of Artificial Sequence: Synthetic oligonucleotide
  Antisense strand to SEQ ID NO: 1513302
ucauugaggaacagucugg

SEQ ID NO: 1513304 - RNA, 19 nt, Artificial Sequence
  Description of Artificial Sequence: Synthetic oligonucleotide
  Sense strand starting at position 3812 of SEQ ID NO: 1244766
acuguuccucaaugaagac

SEQ ID NO: 1513305 - RNA, 19 nt, Artificial Sequence
  Description of Artificial Sequence: Synthetic oligonucleotide
  Antisense strand to SEQ ID NO: 1513304
gucuucauugaggaacagu

SEQ ID NO: 1513306 - RNA, 19 nt, Artificial Sequence
  Description of Artificial Sequence: Synthetic oligonucleotide
  Sense strand starting at position 370 of SEQ ID NO: 1244767
ggccucuagucuccuggaa

SEQ ID NO: 1513307 - RNA, 19 nt, Artificial Sequence
  Description of Artificial Sequence: Synthetic oligonucleotide
  Antisense strand to SEQ ID NO: 1513306
uuccaggagacuagaggcc

SEQ ID NO: 1513308 - RNA, 19 nt, Artificial Sequence
  Description of Artificial Sequence: Synthetic oligonucleotide
  Sense strand starting at position 459 of SEQ ID NO: 1244767
gugggagcauuaccugaga

SEQ ID NO: 1513309 - RNA, 19 nt, Artificial Sequence
  Description of Artificial Sequence: Synthetic oligonucleotide
  Antisense strand to SEQ ID NO: 1513308
ucucagguaaugcucccac

SEQ ID NO: 1513310 - RNA, 19 nt, Artificial Sequence
  Description of Artificial Sequence: Synthetic oligonucleotide
  Sense strand starting at position 464 of SEQ ID NO: 1244767
agcauuaccugagaggaaa

SEQ ID NO: 1513311 - RNA, 19 nt, Artificial Sequence
  Description of Artificial Sequence: Synthetic oligonucleotide
  Antisense strand to SEQ ID NO: 1513310
uuuccucucagguaaugcu

SEQ ID NO: 1513312 - RNA, 19 nt, Artificial Sequence
  Description of Artificial Sequence: Synthetic oligonucleotide
  Sense strand starting at position 1438 of SEQ ID NO: 1244767
agguccaugcagcaauaaa

SEQ ID NO: 1513313 - RNA, 19 nt, Artificial Sequence
  Description of Artificial Sequence: Synthetic oligonucleotide
  Antisense strand to SEQ ID NO: 1513312
uuuauugcugcauggaccu

SEQ ID NO: 1513314 - RNA, 19 nt, Artificial Sequence
  Description of Artificial Sequence: Synthetic oligonucleotide
  Sense strand starting at position 1449 of SEQ ID NO: 1244767
gcaauaaaggacugugaca

SEQ ID NO: 1513315 - RNA, 19 nt, Artificial Sequence
  Description of Artificial Sequence: Synthetic oligonucleotide
  Antisense strand to SEQ ID NO: 1513314
ugucacaguccuuuauugc

SEQ ID NO: 1513316 - RNA, 19 nt, Artificial Sequence
  Description of Artificial Sequence: Synthetic oligonucleotide
  Sense strand starting at position 1474 of SEQ ID NO: 1244767
aggguacuauuggagaaag

SEQ ID NO: 1513317 - RNA, 19 nt, Artificial Sequence
  Description of Artificial Sequence: Synthetic oligonucleotide
  Antisense strand to SEQ ID NO: 1513316
cuuucuccaauaguacccu

SEQ ID NO: 1513318 - RNA, 19 nt, Artificial Sequence
  Description of Artificial Sequence: Synthetic oligonucleotide
  Sense strand starting at position 1539 of SEQ ID NO: 1244767
gaagcagugucagaacagu

SEQ ID NO: 1513319 - RNA, 19 nt, Artificial Sequence
  Description of Artificial Sequence: Synthetic oligonucleotide
  Antisense strand to SEQ ID NO: 1513318
acuguucugacacugcuuc

SEQ ID NO: 1513320 - RNA, 19 nt, Artificial Sequence
  Description of Artificial Sequence: Synthetic oligonucleotide
  Sense strand starting at position 2069 of SEQ ID NO: 1244767
ggacccauucugugcauaa

SEQ ID NO: 1513321 - RNA, 19 nt, Artificial Sequence
  Description of Artificial Sequence: Synthetic oligonucleotide
  Antisense strand to SEQ ID NO: 1513320
uuaugcacagaaugggucc

SEQ ID NO: 1513322 - RNA, 19 nt, Artificial Sequence
  Description of Artificial Sequence: Synthetic oligonucleotide
  Sense strand starting at position 2118 of SEQ ID NO: 1244767
agcccuucucaagggaaua

SEQ ID NO: 1513323 - RNA, 19 nt, Artificial Sequence
  Description of Artificial Sequence: Synthetic oligonucleotide
  Antisense strand to SEQ ID NO: 1513322
uauucccuugagaagggcu

SEQ ID NO: 1513324 - RNA, 19 nt, Artificial Sequence
  Description of Artificial Sequence: Synthetic oligonucleotide
  Sense strand starting at position 2137 of SEQ ID NO: 1244767
gggagaguugugggaucua

SEQ ID NO: 1513325 - RNA, 19 nt, Artificial Sequence
  Description of Artificial Sequence: Synthetic oligonucleotide
  Antisense strand to SEQ ID NO: 1513324
uagaucccacaacucuccc

SEQ ID NO: 1513326 - RNA, 19 nt, Artificial Sequence
  Description of Artificial Sequence: Synthetic oligonucleotide
  Sense strand starting at position 2138 of SEQ ID NO: 1244767
ggagaguugugggaucuag

SEQ ID NO: 1513327 - RNA, 19 nt, Artificial Sequence
  Description of Artificial Sequence: Synthetic oligonucleotide
  Antisense strand to SEQ ID NO: 1513326
cuagaucccacaacucucc

SEQ ID NO: 1513328 - RNA, 19 nt, Artificial Sequence
  Description of Artificial Sequence: Synthetic oligonucleotide
  Sense strand starting at position 2308 of SEQ ID NO: 1244767
gucucuagguccuacucaa

SEQ ID NO: 1513329 - RNA, 19 nt, Artificial Sequence
  Description of Artificial Sequence: Synthetic oligonucleotide
  Antisense strand to SEQ ID NO: 1513328
uugaguaggaccuagagac

SEQ ID NO: 1513330 - RNA, 19 nt, Artificial Sequence
  Description of Artificial Sequence: Synthetic oligonucleotide
  Sense strand starting at position 2380 of SEQ ID NO: 1244767
ugucucauagguuacacau

SEQ ID NO: 1513331 - RNA, 19 nt, Artificial Sequence
  Description of Artificial Sequence: Synthetic oligonucleotide
  Antisense strand to SEQ ID NO: 1513330
auguguaaccuaugagaca

SEQ ID NO: 1513332 - RNA, 19 nt, Artificial Sequence
  Description of Artificial Sequence: Synthetic oligonucleotide
  Sense strand starting at position 2453 of SEQ ID NO: 1244767
cugcaaggcacugaguaua

SEQ ID NO: 1513333 - RNA, 19 nt, Artificial Sequence
  Description of Artificial Sequence: Synthetic oligonucleotide
  Antisense strand to SEQ ID NO: 1513332
uauacucagugccuugcag

SEQ ID NO: 1513334 - RNA, 19 nt, Artificial Sequence
  Description of Artificial Sequence: Synthetic oligonucleotide
  Sense strand starting at position 2512 of SEQ ID NO: 1244767
ggcucacagucuguugaga

SEQ ID NO: 1513335 - RNA, 19 nt, Artificial Sequence
  Description of Artificial Sequence: Synthetic oligonucleotide
  Antisense strand to SEQ ID NO: 1513334
ucucaacagacugugagcc

SEQ ID NO: 1513336 - RNA, 19 nt, Artificial Sequence
  Description of Artificial Sequence: Synthetic oligonucleotide
  Sense strand starting at position 2533 of SEQ ID NO: 1244767
ggcagaugcuaauucgaca

SEQ ID NO: 1513337 - RNA, 19 nt, Artificial Sequence
  Description of Artificial Sequence: Synthetic oligonucleotide
  Antisense strand to SEQ ID NO: 1513336
ugucgaauuagcaucugcc

SEQ ID NO: 1513338 - RNA, 19 nt, Artificial Sequence
  Description of Artificial Sequence: Synthetic oligonucleotide
  Sense strand starting at position 2538 of SEQ ID NO: 1244767
augcuaauucgacagccau

SEQ ID NO: 1513339 - RNA, 19 nt, Artificial Sequence
  Description of Artificial Sequence: Synthetic oligonucleotide
  Antisense strand to SEQ ID NO: 1513338
auggcugucgaauuagcau

SEQ ID NO: 1513340 - RNA, 19 nt, Artificial Sequence
  Description of Artificial Sequence: Synthetic oligonucleotide
  Sense strand starting at position 2573 of SEQ ID NO: 1244767
gugacaaguccgugagggu

SEQ ID NO: 1513341 - RNA, 19 nt, Artificial Sequence
  Description of Artificial Sequence: Synthetic oligonucleotide
  Antisense strand to SEQ ID NO: 1513340
acccucacggacuugucac

SEQ ID NO: 1513342 - RNA, 19 nt, Artificial Sequence
  Description of Artificial Sequence: Synthetic oligonucleotide
  Sense strand starting at position 2574 of SEQ ID NO: 1244767
ugacaaguccgugagggua

SEQ ID NO: 1513343 - RNA, 19 nt, Artificial Sequence
  Description of Artificial Sequence: Synthetic oligonucleotide
  Antisense strand to SEQ ID NO: 1513342
uacccucacggacuuguca

SEQ ID NO: 1513344 - RNA, 19 nt, Artificial Sequence
  Description of Artificial Sequence: Synthetic oligonucleotide
  Sense strand starting at position 2576 of SEQ ID NO: 1244767
acaaguccgugaggguaua

SEQ ID NO: 1513345 - RNA, 19 nt, Artificial Sequence
  Description of Artificial Sequence: Synthetic oligonucleotide
  Antisense strand to SEQ ID NO: 1513344
uauacccucacggacuugu

SEQ ID NO: 1513346 - RNA, 19 nt, Artificial Sequence
  Description of Artificial Sequence: Synthetic oligonucleotide
  Sense strand starting at position 2589 of SEQ ID NO: 1244767
gguauaacguaacaaguga

SEQ ID NO: 1513347 - RNA, 19 nt, Artificial Sequence
  Description of Artificial Sequence: Synthetic oligonucleotide
  Antisense strand to SEQ ID NO: 1513346
ucacuuguuacguuauacc

SEQ ID NO: 1513348 - RNA, 19 nt, Artificial Sequence
  Description of Artificial Sequence: Synthetic oligonucleotide
  Sense strand starting at position 2604 of SEQ ID NO: 1244767
gugaccugaucugguggaa

SEQ ID NO: 1513349 - RNA, 19 nt, Artificial Sequence
  Description of Artificial Sequence: Synthetic oligonucleotide
  Antisense strand to SEQ ID NO: 1513348
uuccaccagaucaggucac

SEQ ID NO: 1513350 - RNA, 19 nt, Artificial Sequence
  Description of Artificial Sequence: Synthetic oligonucleotide
  Sense strand starting at position 2729 of SEQ ID NO: 1244767
agagguacaguuugugcaa

SEQ ID NO: 1513351 - RNA, 19 nt, Artificial Sequence
  Description of Artificial Sequence: Synthetic oligonucleotide
  Antisense strand to SEQ ID NO: 1513350
uugcacaaacuguaccucu

SEQ ID NO: 1513352 - RNA, 19 nt, Artificial Sequence
  Description of Artificial Sequence: Synthetic oligonucleotide
  Sense strand starting at position 2730 of SEQ ID NO: 1244767
gagguacaguuugugcaaa

SEQ ID NO: 1513353 - RNA, 19 nt, Artificial Sequence
  Description of Artificial Sequence: Synthetic oligonucleotide
  Antisense strand to SEQ ID NO: 1513352
uuugcacaaacuguaccuc

SEQ ID NO: 1513354 - RNA, 19 nt, Artificial Sequence
  Description of Artificial Sequence: Synthetic oligonucleotide
  Sense strand starting at position 2834 of SEQ ID NO: 1244767
uggagacacucgugaacug

SEQ ID NO: 1513355 - RNA, 19 nt, Artificial Sequence
  Description of Artificial Sequence: Synthetic oligonucleotide
  Antisense strand to SEQ ID NO: 1513354
caguucacgagugucucca

SEQ ID NO: 1513356 - RNA, 19 nt, Artificial Sequence
  Description of Artificial Sequence: Synthetic oligonucleotide
  Sense strand starting at position 2835 of SEQ ID NO: 1244767
ggagacacucgugaacugu

SEQ ID NO: 1513357 - RNA, 19 nt, Artificial Sequence
  Description of Artificial Sequence: Synthetic oligonucleotide
  Antisense strand to SEQ ID NO: 1513356
acaguucacgagugucucc

SEQ ID NO: 1513358 - RNA, 19 nt, Artificial Sequence
  Description of Artificial Sequence: Synthetic oligonucleotide
  Sense strand starting at position 2839 of SEQ ID NO: 1244767
acacucgugaacuguaaga

SEQ ID NO: 1513359 - RNA, 19 nt, Artificial Sequence
  Description of Artificial Sequence: Synthetic oligonucleotide
  Antisense strand to SEQ ID NO: 1513358
ucuuacaguucacgagugu

SEQ ID NO: 1513360 - RNA, 19 nt, Artificial Sequence
  Description of Artificial Sequence: Synthetic oligonucleotide
  Sense strand starting at position 2841 of SEQ ID NO: 1244767
acucgugaacuguaagaag

SEQ ID NO: 1513361 - RNA, 19 nt, Artificial Sequence
  Description of Artificial Sequence: Synthetic oligonucleotide
  Antisense strand to SEQ ID NO: 1513360
cuucuuacaguucacgagu

SEQ ID NO: 1513362 - RNA, 19 nt, Artificial Sequence
  Description of Artificial Sequence: Synthetic oligonucleotide
  Sense strand starting at position 2953 of SEQ ID NO: 1244767
guucaaggcuggucucgaa

SEQ ID NO: 1513363 - RNA, 19 nt, Artificial Sequence
  Description of Artificial Sequence: Synthetic oligonucleotide
  Antisense strand to SEQ ID NO: 1513362
uucgagaccagccuugaac

SEQ ID NO: 1513364 - RNA, 19 nt, Artificial Sequence
  Description of Artificial Sequence: Synthetic oligonucleotide
  Sense strand starting at position 3360 of SEQ ID NO: 1244767
guagaagcaagcuauugaa

SEQ ID NO: 1513365 - RNA, 19 nt, Artificial Sequence
  Description of Artificial Sequence: Synthetic oligonucleotide
  Antisense strand to SEQ ID NO: 1513364
uucaauagcuugcuucuac

SEQ ID NO: 1513366 - RNA, 19 nt, Artificial Sequence
  Description of Artificial Sequence: Synthetic oligonucleotide
  Sense strand starting at position 3379 of SEQ ID NO: 1244767
aggcuuuagucaggagggu

SEQ ID NO: 1513367 - RNA, 19 nt, Artificial Sequence
  Description of Artificial Sequence: Synthetic oligonucleotide
  Antisense strand to SEQ ID NO: 1513366
acccuccugacuaaagccu

SEQ ID NO: 1513368 - RNA, 19 nt, Artificial Sequence
  Description of Artificial Sequence: Synthetic oligonucleotide
  Sense strand starting at position 3380 of SEQ ID NO: 1244767
ggcuuuagucaggaggguu

SEQ ID NO: 1513369 - RNA, 19 nt, Artificial Sequence
  Description of Artificial Sequence: Synthetic oligonucleotide
  Antisense strand to SEQ ID NO: 1513368
aacccuccugacuaaagcc

SEQ ID NO: 1513370 - RNA, 19 nt, Artificial Sequence
  Description of Artificial Sequence: Synthetic oligonucleotide
  Sense strand starting at position 3388 of SEQ ID NO: 1244767
ucaggaggguuaccaguua

SEQ ID NO: 1513371 - RNA, 19 nt, Artificial Sequence
  Description of Artificial Sequence: Synthetic oligonucleotide
  Antisense strand to SEQ ID NO: 1513370
uaacugguaacccuccuga

SEQ ID NO: 1513372 - RNA, 19 nt, Artificial Sequence
  Description of Artificial Sequence: Synthetic oligonucleotide
  Sense strand starting at position 3393 of SEQ ID NO: 1244767
aggguuaccaguuagaucu

SEQ ID NO: 1513373 - RNA, 19 nt, Artificial Sequence
  Description of Artificial Sequence: Synthetic oligonucleotide
  Antisense strand to SEQ ID NO: 1513372
agaucuaacugguaacccu

SEQ ID NO: 1513374 - RNA, 19 nt, Artificial Sequence
  Description of Artificial Sequence: Synthetic oligonucleotide
  Sense strand starting at position 3399 of SEQ ID NO: 1244767
accaguuagaucugcguuu

SEQ ID NO: 1513375 - RNA, 19 nt, Artificial Sequence
  Description of Artificial Sequence: Synthetic oligonucleotide
  Antisense strand to SEQ ID NO: 1513374
aaacgcagaucuaacuggu

SEQ ID NO: 1513376 - RNA, 19 nt, Artificial Sequence
  Description of Artificial Sequence: Synthetic oligonucleotide
  Sense strand starting at position 3565 of SEQ ID NO: 1244767
gaggaaacgucgucaggau

SEQ ID NO: 1513377 - RNA, 19 nt, Artificial Sequence
  Description of Artificial Sequence: Synthetic oligonucleotide
  Antisense strand to SEQ ID NO: 1513376
auccugacgacguuuccuc

SEQ ID NO: 1513378 - RNA, 19 nt, Artificial Sequence
  Description of Artificial Sequence: Synthetic oligonucleotide
  Sense strand starting at position 3698 of SEQ ID NO: 1244767
guggguuugagaugugcac

SEQ ID NO: 1513379 - RNA, 19 nt, Artificial Sequence
  Description of Artificial Sequence: Synthetic oligonucleotide
  Antisense strand to SEQ ID NO: 1513378
gugcacaucucaaacccac

SEQ ID NO: 1513380 - RNA, 19 nt, Artificial Sequence
  Description of Artificial Sequence: Synthetic oligonucleotide
  Sense strand starting at position 3700 of SEQ ID NO: 1244767
ggguuugagaugugcacau

SEQ ID NO: 1513381 - RNA, 19 nt, Artificial Sequence
  Description of Artificial Sequence: Synthetic oligonucleotide
  Antisense strand to SEQ ID NO: 1513380
augugcacaucucaaaccc

SEQ ID NO: 1513382 - RNA, 19 nt, Artificial Sequence
  Description of Artificial Sequence: Synthetic oligonucleotide
  Sense strand starting at position 16 of SEQ ID NO: 1244768
gacuaagucuuccugaggu

SEQ ID NO: 1513383 - RNA, 19 nt, Artificial Sequence
  Description of Artificial Sequence: Synthetic oligonucleotide
  Antisense strand to SEQ ID NO: 1513382
accucaggaagacuuaguc

SEQ ID NO: 1513384 - RNA, 19 nt, Artificial Sequence
  Description of Artificial Sequence: Synthetic oligonucleotide
  Sense strand starting at position 18 of SEQ ID NO: 1244768
cuaagucuuccugagguca

SEQ ID NO: 1513385 - RNA, 19 nt, Artificial Sequence
  Description of Artificial Sequence: Synthetic oligonucleotide
  Antisense strand to SEQ ID NO: 1513384
ugaccucaggaagacuuag

SEQ ID NO: 1513386 - RNA, 19 nt, Artificial Sequence
  Description of Artificial Sequence: Synthetic oligonucleotide
  Sense strand starting at position 289 of SEQ ID NO: 1244768
cuagaauaauuguaaugac

SEQ ID NO: 1513387 - RNA, 19 nt, Artificial Sequence
  Description of Artificial Sequence: Synthetic oligonucleotide
  Antisense strand to SEQ ID NO: 1513386
gucauuacaauuauucuag

SEQ ID NO: 1513388 - RNA, 19 nt, Artificial Sequence
  Description of Artificial Sequence: Synthetic oligonucleotide
  Sense strand starting at position 489 of SEQ ID NO: 1244768
gguaacuucuguuccaaau

SEQ ID NO: 1513389 - RNA, 19 nt, Artificial Sequence
  Description of Artificial Sequence: Synthetic oligonucleotide
  Antisense strand to SEQ ID NO: 1513388
auuuggaacagaaguuacc

SEQ ID NO: 1513390 - RNA, 19 nt, Artificial Sequence
  Description of Artificial Sequence: Synthetic oligonucleotide
  Sense strand starting at position 561 of SEQ ID NO: 1244768
aagucaggccgagguguua

SEQ ID NO: 1513391 - RNA, 19 nt, Artificial Sequence
  Description of Artificial Sequence: Synthetic oligonucleotide
  Antisense strand to SEQ ID NO: 1513390
uaacaccucggccugacuu

SEQ ID NO: 1513392 - RNA, 19 nt, Artificial Sequence
  Description of Artificial Sequence: Synthetic oligonucleotide
  Sense strand starting at position 965 of SEQ ID NO: 1244768
uccacaucuuaggcuugaa

SEQ ID NO: 1513393 - RNA, 19 nt, Artificial Sequence
  Description of Artificial Sequence: Synthetic oligonucleotide
  Antisense strand to SEQ ID NO: 1513392
uucaagccuaagaugugga

SEQ ID NO: 1513394 - RNA, 19 nt, Artificial Sequence
  Description of Artificial Sequence: Synthetic oligonucleotide
  Sense strand starting at position 968 of SEQ ID NO: 1244768
acaucuuaggcuugaagcu

SEQ ID NO: 1513395 - RNA, 19 nt, Artificial Sequence
  Description of Artificial Sequence: Synthetic oligonucleotide
  Antisense strand to SEQ ID NO: 1513394
agcuucaagccuaagaugu

SEQ ID NO: 1513396 - RNA, 19 nt, Artificial Sequence
  Description of Artificial Sequence: Synthetic oligonucleotide
  Sense strand starting at position 1471 of SEQ ID NO: 1244768
gggcuauuauguuucucag

SEQ ID NO: 1513397 - RNA, 19 nt, Artificial Sequence
  Description of Artificial Sequence: Synthetic oligonucleotide
  Antisense strand to SEQ ID NO: 1513396
cugagaaacauaauagccc

SEQ ID NO: 1513398 - RNA, 19 nt, Artificial Sequence
  Description of Artificial Sequence: Synthetic oligonucleotide
  Sense strand starting at position 1473 of SEQ ID NO: 1244768
gcuauuauguuucucagga

SEQ ID NO: 1513399 - RNA, 19 nt, Artificial Sequence
  Description of Artificial Sequence: Synthetic oligonucleotide
  Antisense strand to SEQ ID NO: 1513398
uccugagaaacauaauagc

SEQ ID NO: 1513400 - RNA, 19 nt, Artificial Sequence
  Description of Artificial Sequence: Synthetic oligonucleotide
  Sense strand starting at position 1474 of SEQ ID NO: 1244768
cuauuauguuucucaggau

SEQ ID NO: 1513401 - RNA, 19 nt, Artificial Sequence
  Description of Artificial Sequence: Synthetic oligonucleotide
  Antisense strand to SEQ ID NO: 1513400
auccugagaaacauaauag

SEQ ID NO: 1513402 - RNA, 19 nt, Artificial Sequence
  Description of Artificial Sequence: Synthetic oligonucleotide
  Sense strand starting at position 1766 of SEQ ID NO: 1244768
uugagacgcucuuccaaag

SEQ ID NO: 1513403 - RNA, 19 nt, Artificial Sequence
  Description of Artificial Sequence: Synthetic oligonucleotide
  Antisense strand to SEQ ID NO: 1513402
cuuuggaagagcgucucaa

SEQ ID NO: 1513404 - RNA, 19 nt, Artificial Sequence
  Description of Artificial Sequence: Synthetic oligonucleotide
  Sense strand starting at position 2121 of SEQ ID NO: 1244768
gcuccagcuccuuagaguu

SEQ ID NO: 1513405 - RNA, 19 nt, Artificial Sequence
  Description of Artificial Sequence: Synthetic oligonucleotide
  Antisense strand to SEQ ID NO: 1513404
aacucuaaggagcuggagc

SEQ ID NO: 1513406 - RNA, 19 nt, Artificial Sequence
  Description of Artificial Sequence: Synthetic oligonucleotide
  Sense strand starting at position 2162 of SEQ ID NO: 1244768
uguccugugacuggagaga

SEQ ID NO: 1513407 - RNA, 19 nt, Artificial Sequence
  Description of Artificial Sequence: Synthetic oligonucleotide
  Antisense strand to SEQ ID NO: 1513406
ucucuccagucacaggaca

SEQ ID NO: 1513408 - RNA, 19 nt, Artificial Sequence
  Description of Artificial Sequence: Synthetic oligonucleotide
  Sense strand starting at position 2259 of SEQ ID NO: 1244768
gcccuuaggguccagacau

SEQ ID NO: 1513409 - RNA, 19 nt, Artificial Sequence
  Description of Artificial Sequence: Synthetic oligonucleotide
  Antisense strand to SEQ ID NO: 1513408
augucuggacccuaagggc

SEQ ID NO: 1513410 - RNA, 19 nt, Artificial Sequence
  Description of Artificial Sequence: Synthetic oligonucleotide
  Sense strand starting at position 2267 of SEQ ID NO: 1244768
gguccagacauccguuugu

SEQ ID NO: 1513411 - RNA, 19 nt, Artificial Sequence
  Description of Artificial Sequence: Synthetic oligonucleotide
  Antisense strand to SEQ ID NO: 1513410
acaaacggaugucuggacc

SEQ ID NO: 1513412 - RNA, 19 nt, Artificial Sequence
  Description of Artificial Sequence: Synthetic oligonucleotide
  Sense strand starting at position 2271 of SEQ ID NO: 1244768
cagacauccguuuguuaga

SEQ ID NO: 1513413 - RNA, 19 nt, Artificial Sequence
  Description of Artificial Sequence: Synthetic oligonucleotide
  Antisense strand to SEQ ID NO: 1513412
ucuaacaaacggaugucug

SEQ ID NO: 1513414 - RNA, 19 nt, Artificial Sequence
  Description of Artificial Sequence: Synthetic oligonucleotide
  Sense strand starting at position 2272 of SEQ ID NO: 1244768
agacauccguuuguuagau

SEQ ID NO: 1513415 - RNA, 19 nt, Artificial Sequence
  Description of Artificial Sequence: Synthetic oligonucleotide
  Antisense strand to SEQ ID NO: 1513414
aucuaacaaacggaugucu

SEQ ID NO: 1513416 - RNA, 19 nt, Artificial Sequence
  Description of Artificial Sequence: Synthetic oligonucleotide
  Sense strand starting at position 2273 of SEQ ID NO: 1244768
gacauccguuuguuagaug

SEQ ID NO: 1513417 - RNA, 19 nt, Artificial Sequence
  Description of Artificial Sequence: Synthetic oligonucleotide
  Antisense strand to SEQ ID NO: 1513416
caucuaacaaacggauguc

SEQ ID NO: 1513418 - RNA, 19 nt, Artificial Sequence
  Description of Artificial Sequence: Synthetic oligonucleotide
  Sense strand starting at position 2338 of SEQ ID NO: 1244768
cgaggugucuggcucaauu

SEQ ID NO: 1513419 - RNA, 19 nt, Artificial Sequence
  Description of Artificial Sequence: Synthetic oligonucleotide
  Antisense strand to SEQ ID NO: 1513418
aauugagccagacaccucg

SEQ ID NO: 1513420 - RNA, 19 nt, Artificial Sequence
  Description of Artificial Sequence: Synthetic oligonucleotide
  Sense strand starting at position 2349 of SEQ ID NO: 1244768
gcucaauuucugggucgga

SEQ ID NO: 1513421 - RNA, 19 nt, Artificial Sequence
  Description of Artificial Sequence: Synthetic oligonucleotide
  Antisense strand to SEQ ID NO: 1513420
uccgacccagaaauugagc

SEQ ID NO: 1513422 - RNA, 19 nt, Artificial Sequence
  Description of Artificial Sequence: Synthetic oligonucleotide
  Sense strand starting at position 2613 of SEQ ID NO: 1244768
gggcaaguuacuuacugaa

SEQ ID NO: 1513423 - RNA, 19 nt, Artificial Sequence
  Description of Artificial Sequence: Synthetic oligonucleotide
  Antisense strand to SEQ ID NO: 1513422
uucaguaaguaacuugccc

SEQ ID NO: 1513424 - RNA, 19 nt, Artificial Sequence
  Description of Artificial Sequence: Synthetic oligonucleotide
  Sense strand starting at position 2615 of SEQ ID NO: 1244768
gcaaguuacuuacugaaca

SEQ ID NO: 1513425 - RNA, 19 nt, Artificial Sequence
  Description of Artificial Sequence: Synthetic oligonucleotide
  Antisense strand to SEQ ID NO: 1513424
uguucaguaaguaacuugc

SEQ ID NO: 1513426 - RNA, 19 nt, Artificial Sequence
  Description of Artificial Sequence: Synthetic oligonucleotide
  Sense strand starting at position 2717 of SEQ ID NO: 1244768
guaaaugcccaguaacugu

SEQ ID NO: 1513427 - RNA, 19 nt, Artificial Sequence
  Description of Artificial Sequence: Synthetic oligonucleotide
  Antisense strand to SEQ ID NO: 1513426
acaguuacugggcauuuac

SEQ ID NO: 1513428 - RNA, 19 nt, Artificial Sequence
  Description of Artificial Sequence: Synthetic oligonucleotide
  Sense strand starting at position 2766 of SEQ ID NO: 1244768
ugccauuuauccggaacuu

SEQ ID NO: 1513429 - RNA, 19 nt, Artificial Sequence
  Description of Artificial Sequence: Synthetic oligonucleotide
  Antisense strand to SEQ ID NO: 1513428
aaguuccggauaaauggca

SEQ ID NO: 1513430 - RNA, 19 nt, Artificial Sequence
  Description of Artificial Sequence: Synthetic oligonucleotide
  Sense strand starting at position 2802 of SEQ ID NO: 1244768
ggauucuagagcugucuga

SEQ ID NO: 1513431 - RNA, 19 nt, Artificial Sequence
  Description of Artificial Sequence: Synthetic oligonucleotide
  Antisense strand to SEQ ID NO: 1513430
ucagacagcucuagaaucc

SEQ ID NO: 1513432 - RNA, 19 nt, Artificial Sequence
  Description of Artificial Sequence: Synthetic oligonucleotide
  Sense strand starting at position 2806 of SEQ ID NO: 1244768
ucuagagcugucugaguuc

SEQ ID NO: 1513433 - RNA, 19 nt, Artificial Sequence
  Description of Artificial Sequence: Synthetic oligonucleotide
  Antisense strand to SEQ ID NO: 1513432
gaacucagacagcucuaga

SEQ ID NO: 1513434 - RNA, 19 nt, Artificial Sequence
  Description of Artificial Sequence: Synthetic oligonucleotide
  Sense strand starting at position 2840 of SEQ ID NO: 1244768
uuguuaccguaucuucuaa

SEQ ID NO: 1513435 - RNA, 19 nt, Artificial Sequence
  Description of Artificial Sequence: Synthetic oligonucleotide
  Antisense strand to SEQ ID NO: 1513434
uuagaagauacgguaacaa

SEQ ID NO: 1513436 - RNA, 19 nt, Artificial Sequence
  Description of Artificial Sequence: Synthetic oligonucleotide
  Sense strand starting at position 2897 of SEQ ID NO: 1244768
aaggaagauuguuaguaaa

SEQ ID NO: 1513437 - RNA, 19 nt, Artificial Sequence
  Description of Artificial Sequence: Synthetic oligonucleotide
  Antisense strand to SEQ ID NO: 1513436
uuuacuaacaaucuuccuu

SEQ ID NO: 1513438 - RNA, 19 nt, Artificial Sequence
  Description of Artificial Sequence: Synthetic oligonucleotide
  Sense strand starting at position 2914 of SEQ ID NO: 1244768
aaggccuaggccuauaaga

SEQ ID NO: 1513439 - RNA, 19 nt, Artificial Sequence
  Description of Artificial Sequence: Synthetic oligonucleotide
  Antisense strand to SEQ ID NO: 1513438
ucuuauaggccuaggccuu

SEQ ID NO: 1513440 - RNA, 19 nt, Artificial Sequence
  Description of Artificial Sequence: Synthetic oligonucleotide
  Sense strand starting at position 3117 of SEQ ID NO: 1244768
cuuguuauuuaucaugguu

SEQ ID NO: 1513441 - RNA, 19 nt, Artificial Sequence
  Description of Artificial Sequence: Synthetic oligonucleotide
  Antisense strand to SEQ ID NO: 1513440
aaccaugauaaauaacaag

SEQ ID NO: 1513442 - RNA, 19 nt, Artificial Sequence
  Description of Artificial Sequence: Synthetic oligonucleotide
  Sense strand starting at position 3125 of SEQ ID NO: 1244768
uuaucaugguuccagagag

SEQ ID NO: 1513443 - RNA, 19 nt, Artificial Sequence
  Description of Artificial Sequence: Synthetic oligonucleotide
  Antisense strand to SEQ ID NO: 1513442
cucucuggaaccaugauaa

SEQ ID NO: 1513444 - RNA, 19 nt, Artificial Sequence
  Description of Artificial Sequence: Synthetic oligonucleotide
  Sense strand starting at position 3290 of SEQ ID NO: 1244768
ccgauuacuucuguaggga

SEQ ID NO: 1513445 - RNA, 19 nt, Artificial Sequence
  Description of Artificial Sequence: Synthetic oligonucleotide
  Antisense strand to SEQ ID NO: 1513444
ucccuacagaaguaaucgg

SEQ ID NO: 1513446 - RNA, 19 nt, Artificial Sequence
  Description of Artificial Sequence: Synthetic oligonucleotide
  Sense strand starting at position 3291 of SEQ ID NO: 1244768
cgauuacuucuguagggac

SEQ ID NO: 1513447 - RNA, 19 nt, Artificial Sequence
  Description of Artificial Sequence: Synthetic oligonucleotide
  Antisense strand to SEQ ID NO: 1513446
gucccuacagaaguaaucg

SEQ ID NO: 1513448 - RNA, 19 nt, Artificial Sequence
  Description of Artificial Sequence: Synthetic oligonucleotide
  Sense strand starting at position 3310 of SEQ ID NO: 1244768
ugcagacaugagcaauaua

SEQ ID NO: 1513449 - RNA, 19 nt, Artificial Sequence
  Description of Artificial Sequence: Synthetic oligonucleotide
  Antisense strand to SEQ ID NO: 1513448
uauauugcucaugucugca

SEQ ID NO: 1513450 - RNA, 19 nt, Artificial Sequence
  Description of Artificial Sequence: Synthetic oligonucleotide
  Sense strand starting at position 3327 of SEQ ID NO: 1244768
uagaauauuugcuagcagu

SEQ ID NO: 1513451 - RNA, 19 nt, Artificial Sequence
  Description of Artificial Sequence: Synthetic oligonucleotide
  Antisense strand to SEQ ID NO: 1513450
acugcuagcaaauauucua

SEQ ID NO: 1513452 - RNA, 19 nt, Artificial Sequence
  Description of Artificial Sequence: Synthetic oligonucleotide
  Sense strand starting at position 3398 of SEQ ID NO: 1244768
cuggaaaguuggucaggau

SEQ ID NO: 1513453 - RNA, 19 nt, Artificial Sequence
  Description of Artificial Sequence: Synthetic oligonucleotide
  Antisense strand to SEQ ID NO: 1513452
auccugaccaacuuuccag

SEQ ID NO: 1513454 - RNA, 19 nt, Artificial Sequence
  Description of Artificial Sequence: Synthetic oligonucleotide
  Sense strand starting at position 3401 of SEQ ID NO: 1244768
gaaaguuggucaggaugga

SEQ ID NO: 1513455 - RNA, 19 nt, Artificial Sequence
  Description of Artificial Sequence: Synthetic oligonucleotide
  Antisense strand to SEQ ID NO: 1513454
uccauccugaccaacuuuc

SEQ ID NO: 1513456 - RNA, 19 nt, Artificial Sequence
  Description of Artificial Sequence: Synthetic oligonucleotide
  Sense strand starting at position 3479 of SEQ ID NO: 1244768
ucacauuauguaugagaca

SEQ ID NO: 1513457 - RNA, 19 nt, Artificial Sequence
  Description of Artificial Sequence: Synthetic oligonucleotide
  Antisense strand to SEQ ID NO: 1513456
ugucucauacauaauguga

SEQ ID NO: 1513458 - RNA, 19 nt, Artificial Sequence
  Description of Artificial Sequence: Synthetic oligonucleotide
  Sense strand starting at position 3491 of SEQ ID NO: 1244768
ugagacaucuuauguauaa

SEQ ID NO: 1513459 - RNA, 19 nt, Artificial Sequence
  Description of Artificial Sequence: Synthetic oligonucleotide
  Antisense strand to SEQ ID NO: 1513458
uuauacauaagaugucuca

SEQ ID NO: 1513460 - RNA, 19 nt, Artificial Sequence
  Description of Artificial Sequence: Synthetic oligonucleotide
  Sense strand starting at position 3610 of SEQ ID NO: 1244768
cagccaugacugugaagua

SEQ ID NO: 1513461 - RNA, 19 nt, Artificial Sequence
  Description of Artificial Sequence: Synthetic oligonucleotide
  Antisense strand to SEQ ID NO: 1513460
uacuucacagucauggcug

SEQ ID NO: 1513462 - RNA, 19 nt, Artificial Sequence
  Description of Artificial Sequence: Synthetic oligonucleotide
  Sense strand starting at position 1 of SEQ ID NO: 1244769
guuugaaaugccuggauua

SEQ ID NO: 1513463 - RNA, 19 nt, Artificial Sequence
  Description of Artificial Sequence: Synthetic oligonucleotide
  Antisense strand to SEQ ID NO: 1513462
uaauccaggcauuucaaac

SEQ ID NO: 1513464 - RNA, 19 nt, Artificial Sequence
  Description of Artificial Sequence: Synthetic oligonucleotide
  Sense strand starting at position 2 of SEQ ID NO: 1244769
uuugaaaugccuggauuau

SEQ ID NO: 1513465 - RNA, 19 nt, Artificial Sequence
  Description of Artificial Sequence: Synthetic oligonucleotide
  Antisense strand to SEQ ID NO: 1513464
auaauccaggcauuucaaa

SEQ ID NO: 1513466 - RNA, 19 nt, Artificial Sequence
  Description of Artificial Sequence: Synthetic oligonucleotide
  Sense strand starting at position 32 of SEQ ID NO: 1244769
gacuaagucuuccugaggu

SEQ ID NO: 1513467 - RNA, 19 nt, Artificial Sequence
  Description of Artificial Sequence: Synthetic oligonucleotide
  Antisense strand to SEQ ID NO: 1513466
accucaggaagacuuaguc

SEQ ID NO: 1513468 - RNA, 19 nt, Artificial Sequence
  Description of Artificial Sequence: Synthetic oligonucleotide
  Sense strand starting at position 34 of SEQ ID NO: 1244769
cuaagucuuccugagguca

SEQ ID NO: 1513469 - RNA, 19 nt, Artificial Sequence
  Description of Artificial Sequence: Synthetic oligonucleotide
  Antisense strand to SEQ ID NO: 1513468
ugaccucaggaagacuuag

SEQ ID NO: 1513470 - RNA, 19 nt, Artificial Sequence
  Description of Artificial Sequence: Synthetic oligonucleotide
  Sense strand starting at position 305 of SEQ ID NO: 1244769
cuagaauaauuguaaugac

SEQ ID NO: 1513471 - RNA, 19 nt, Artificial Sequence
  Description of Artificial Sequence: Synthetic oligonucleotide
  Antisense strand to SEQ ID NO: 1513470
gucauuacaauuauucuag

SEQ ID NO: 1513472 - RNA, 19 nt, Artificial Sequence
  Description of Artificial Sequence: Synthetic oligonucleotide
  Sense strand starting at position 505 of SEQ ID NO: 1244769
gguaacuucuguuccaaau

SEQ ID NO: 1513473 - RNA, 19 nt, Artificial Sequence
  Description of Artificial Sequence: Synthetic oligonucleotide
  Antisense strand to SEQ ID NO: 1513472
auuuggaacagaaguuacc

SEQ ID NO: 1513474 - RNA, 19 nt, Artificial Sequence
  Description of Artificial Sequence: Synthetic oligonucleotide
  Sense strand starting at position 577 of SEQ ID NO: 1244769
aagucaggccgagguguua

SEQ ID NO: 1513475 - RNA, 19 nt, Artificial Sequence
  Description of Artificial Sequence: Synthetic oligonucleotide
  Antisense strand to SEQ ID NO: 1513474
uaacaccucggccugacuu

SEQ ID NO: 1513476 - RNA, 19 nt, Artificial Sequence
  Description of Artificial Sequence: Synthetic oligonucleotide
  Sense strand starting at position 981 of SEQ ID NO: 1244769
uccacaucuuaggcuugaa

SEQ ID NO: 1513477 - RNA, 19 nt, Artificial Sequence
  Description of Artificial Sequence: Synthetic oligonucleotide
  Antisense strand to SEQ ID NO: 1513476
uucaagccuaagaugugga

SEQ ID NO: 1513478 - RNA, 19 nt, Artificial Sequence
  Description of Artificial Sequence: Synthetic oligonucleotide
  Sense strand starting at position 984 of SEQ ID NO: 1244769
acaucuuaggcuugaagcu

SEQ ID NO: 1513479 - RNA, 19 nt, Artificial Sequence
  Description of Artificial Sequence: Synthetic oligonucleotide
  Antisense strand to SEQ ID NO: 1513478
agcuucaagccuaagaugu

SEQ ID NO: 1513480 - RNA, 19 nt, Artificial Sequence
  Description of Artificial Sequence: Synthetic oligonucleotide
  Sense strand starting at position 1487 of SEQ ID NO: 1244769
gggcuauuauguuucucag

SEQ ID NO: 1513481 - RNA, 19 nt, Artificial Sequence
  Description of Artificial Sequence: Synthetic oligonucleotide
  Antisense strand to SEQ ID NO: 1513480
cugagaaacauaauagccc

SEQ ID NO: 1513482 - RNA, 19 nt, Artificial Sequence
  Description of Artificial Sequence: Synthetic oligonucleotide
  Sense strand starting at position 1489 of SEQ ID NO: 1244769
gcuauuauguuucucagga

SEQ ID NO: 1513483 - RNA, 19 nt, Artificial Sequence
  Description of Artificial Sequence: Synthetic oligonucleotide
  Antisense strand to SEQ ID NO: 1513482
uccugagaaacauaauagc

SEQ ID NO: 1513484 - RNA, 19 nt, Artificial Sequence
  Description of Artificial Sequence: Synthetic oligonucleotide
  Sense strand starting at position 1490 of SEQ ID NO: 1244769
cuauuauguuucucaggau

SEQ ID NO: 1513485 - RNA, 19 nt, Artificial Sequence
  Description of Artificial Sequence: Synthetic oligonucleotide
  Antisense strand to SEQ ID NO: 1513484
auccugagaaacauaauag

SEQ ID NO: 1513486 - RNA, 19 nt, Artificial Sequence
  Description of Artificial Sequence: Synthetic oligonucleotide
  Sense strand starting at position 1782 of SEQ ID NO: 1244769
uugagacgcucuuccaaag

SEQ ID NO: 1513487 - RNA, 19 nt, Artificial Sequence
  Description of Artificial Sequence: Synthetic oligonucleotide
  Antisense strand to SEQ ID NO: 1513486
cuuuggaagagcgucucaa

SEQ ID NO: 1513488 - RNA, 19 nt, Artificial Sequence
  Description of Artificial Sequence: Synthetic oligonucleotide
  Sense strand starting at position 2137 of SEQ ID NO: 1244769
gcuccagcuccuuagaguu

SEQ ID NO: 1513489 - RNA, 19 nt, Artificial Sequence
  Description of Artificial Sequence: Synthetic oligonucleotide
  Antisense strand to SEQ ID NO: 1513488
aacucuaaggagcuggagc

SEQ ID NO: 1513490 - RNA, 19 nt, Artificial Sequence
  Description of Artificial Sequence: Synthetic oligonucleotide
  Sense strand starting at position 2178 of SEQ ID NO: 1244769
uguccugugacuggagaga

SEQ ID NO: 1513491 - RNA, 19 nt, Artificial Sequence
  Description of Artificial Sequence: Synthetic oligonucleotide
  Antisense strand to SEQ ID NO: 1513490
ucucuccagucacaggaca

SEQ ID NO: 1513492 - RNA, 19 nt, Artificial Sequence
  Description of Artificial Sequence: Synthetic oligonucleotide
  Sense strand starting at position 2275 of SEQ ID NO: 1244769
gcccuuaggguccagacau

SEQ ID NO: 1513493 - RNA, 19 nt, Artificial Sequence
  Description of Artificial Sequence: Synthetic oligonucleotide
  Antisense strand to SEQ ID NO: 1513492
augucuggacccuaagggc

SEQ ID NO: 1513494 - RNA, 19 nt, Artificial Sequence
  Description of Artificial Sequence: Synthetic oligonucleotide
  Sense strand starting at position 2283 of SEQ ID NO: 1244769
gguccagacauccguuugu

SEQ ID NO: 1513495 - RNA, 19 nt, Artificial Sequence
  Description of Artificial Sequence: Synthetic oligonucleotide
  Antisense strand to SEQ ID NO: 1513494
acaaacggaugucuggacc

SEQ ID NO: 1513496 - RNA, 19 nt, Artificial Sequence
  Description of Artificial Sequence: Synthetic oligonucleotide
  Sense strand starting at position 2287 of SEQ ID NO: 1244769
cagacauccguuuguuaga

SEQ ID NO: 1513497 - RNA, 19 nt, Artificial Sequence
  Description of Artificial Sequence: Synthetic oligonucleotide
  Antisense strand to SEQ ID NO: 1513496
ucuaacaaacggaugucug

SEQ ID NO: 1513498 - RNA, 19 nt, Artificial Sequence
  Description of Artificial Sequence: Synthetic oligonucleotide
  Sense strand starting at position 2288 of SEQ ID NO: 1244769
agacauccguuuguuagau

SEQ ID NO: 1513499 - RNA, 19 nt, Artificial Sequence
  Description of Artificial Sequence: Synthetic oligonucleotide
  Antisense strand to SEQ ID NO: 1513498
aucuaacaaacggaugucu

SEQ ID NO: 1513500 - RNA, 19 nt, Artificial Sequence
  Description of Artificial Sequence: Synthetic oligonucleotide
  Sense strand starting at position 2289 of SEQ ID NO: 1244769
gacauccguuuguuagaug

SEQ ID NO: 1513501 - RNA, 19 nt, Artificial Sequence
  Description of Artificial Sequence: Synthetic oligonucleotide
  Antisense strand to SEQ ID NO: 1513500
caucuaacaaacggauguc

SEQ ID NO: 1513502 - RNA, 19 nt, Artificial Sequence
  Description of Artificial Sequence: Synthetic oligonucleotide
  Sense strand starting at position 2354 of SEQ ID NO: 1244769
cgaggugucuggcucaauu

SEQ ID NO: 1513503 - RNA, 19 nt, Artificial Sequence
  Description of Artificial Sequence: Synthetic oligonucleotide
  Antisense strand to SEQ ID NO: 1513502
aauugagccagacaccucg

SEQ ID NO: 1513504 - RNA, 19 nt, Artificial Sequence
  Description of Artificial Sequence: Synthetic oligonucleotide
  Sense strand starting at position 2365 of SEQ ID NO: 1244769
gcucaauuucugggucgga

SEQ ID NO: 1513505 - RNA, 19 nt, Artificial Sequence
  Description of Artificial Sequence: Synthetic oligonucleotide
  Antisense strand to SEQ ID NO: 1513504
uccgacccagaaauugagc

SEQ ID NO: 1513506 - RNA, 19 nt, Artificial Sequence
  Description of Artificial Sequence: Synthetic oligonucleotide
  Sense strand starting at position 2629 of SEQ ID NO: 1244769
gggcaaguuacuuacugaa

SEQ ID NO: 1513507 - RNA, 19 nt, Artificial Sequence
  Description of Artificial Sequence: Synthetic oligonucleotide
  Antisense strand to SEQ ID NO: 1513506
uucaguaaguaacuugccc

SEQ ID NO: 1513508 - RNA, 19 nt, Artificial Sequence
  Description of Artificial Sequence: Synthetic oligonucleotide
  Sense strand starting at position 2631 of SEQ ID NO: 1244769
gcaaguuacuuacugaaca

SEQ ID NO: 1513509 - RNA, 19 nt, Artificial Sequence
  Description of Artificial Sequence: Synthetic oligonucleotide
  Antisense strand to SEQ ID NO: 1513508
uguucaguaaguaacuugc

SEQ ID NO: 1513510 - RNA, 19 nt, Artificial Sequence
  Description of Artificial Sequence: Synthetic oligonucleotide
  Sense strand starting at position 2733 of SEQ ID NO: 1244769
guaaaugcccaguaacugu

SEQ ID NO: 1513511 - RNA, 19 nt, Artificial Sequence
  Description of Artificial Sequence: Synthetic oligonucleotide
  Antisense strand to SEQ ID NO: 1513510
acaguuacugggcauuuac

SEQ ID NO: 1513512 - RNA, 19 nt, Artificial Sequence
  Description of Artificial Sequence: Synthetic oligonucleotide
  Sense strand starting at position 2782 of SEQ ID NO: 1244769
ugccauuuauccggaacuu

SEQ ID NO: 1513513 - RNA, 19 nt, Artificial Sequence
  Description of Artificial Sequence: Synthetic oligonucleotide
  Antisense strand to SEQ ID NO: 1513512
aaguuccggauaaauggca

SEQ ID NO: 1513514 - RNA, 19 nt, Artificial Sequence
  Description of Artificial Sequence: Synthetic oligonucleotide
  Sense strand starting at position 2818 of SEQ ID NO: 1244769
ggauucuagagcugucuga

SEQ ID NO: 1513515 - RNA, 19 nt, Artificial Sequence
  Description of Artificial Sequence: Synthetic oligonucleotide
  Antisense strand to SEQ ID NO: 1513514
ucagacagcucuagaaucc

SEQ ID NO: 1513516 - RNA, 19 nt, Artificial Sequence
  Description of Artificial Sequence: Synthetic oligonucleotide
  Sense strand starting at position 2822 of SEQ ID NO: 1244769
ucuagagcugucugaguuc

SEQ ID NO: 1513517 - RNA, 19 nt, Artificial Sequence
  Description of Artificial Sequence: Synthetic oligonucleotide
  Antisense strand to SEQ ID NO: 1513516
gaacucagacagcucuaga

SEQ ID NO: 1513518 - RNA, 19 nt, Artificial Sequence
  Description of Artificial Sequence: Synthetic oligonucleotide
  Sense strand starting at position 2856 of SEQ ID NO: 1244769
uuguuaccguaucuucuaa

SEQ ID NO: 1513519 - RNA, 19 nt, Artificial Sequence
  Description of Artificial Sequence: Synthetic oligonucleotide
  Antisense strand to SEQ ID NO: 1513518
uuagaagauacgguaacaa

SEQ ID NO: 1513520 - RNA, 19 nt, Artificial Sequence
  Description of Artificial Sequence: Synthetic oligonucleotide
  Sense strand starting at position 2913 of SEQ ID NO: 1244769
aaggaagauuguuaguaaa

SEQ ID NO: 1513521 - RNA, 19 nt, Artificial Sequence
  Description of Artificial Sequence: Synthetic oligonucleotide
  Antisense strand to SEQ ID NO: 1513520
uuuacuaacaaucuuccuu

SEQ ID NO: 1513522 - RNA, 19 nt, Artificial Sequence
  Description of Artificial Sequence: Synthetic oligonucleotide
  Sense strand starting at position 2930 of SEQ ID NO: 1244769
aaggccuaggccuauaaga

SEQ ID NO: 1513523 - RNA, 19 nt, Artificial Sequence
  Description of Artificial Sequence: Synthetic oligonucleotide
  Antisense strand to SEQ ID NO: 1513522
ucuuauaggccuaggccuu

SEQ ID NO: 1513524 - RNA, 19 nt, Artificial Sequence
  Description of Artificial Sequence: Synthetic oligonucleotide
  Sense strand starting at position 3133 of SEQ ID NO: 1244769
cuuguuauuuaucaugguu

SEQ ID NO: 1513525 - RNA, 19 nt, Artificial Sequence
  Description of Artificial Sequence: Synthetic oligonucleotide
  Antisense strand to SEQ ID NO: 1513524
aaccaugauaaauaacaag

SEQ ID NO: 1513526 - RNA, 19 nt, Artificial Sequence
  Description of Artificial Sequence: Synthetic oligonucleotide
  Sense strand starting at position 3141 of SEQ ID NO: 1244769
uuaucaugguuccagagag

SEQ ID NO: 1513527 - RNA, 19 nt, Artificial Sequence
  Description of Artificial Sequence: Synthetic oligonucleotide
  Antisense strand to SEQ ID NO: 1513526
cucucuggaaccaugauaa

SEQ ID NO: 1513528 - RNA, 19 nt, Artificial Sequence
  Description of Artificial Sequence: Synthetic oligonucleotide
  Sense strand starting at position 3306 of SEQ ID NO: 1244769
ccgauuacuucuguaggga

SEQ ID NO: 1513529 - RNA, 19 nt, Artificial Sequence
  Description of Artificial Sequence: Synthetic oligonucleotide
  Antisense strand to SEQ ID NO: 1513528
ucccuacagaaguaaucgg

SEQ ID NO: 1513530 - RNA, 19 nt, Artificial Sequence
  Description of Artificial Sequence: Synthetic oligonucleotide
  Sense strand starting at position 3307 of SEQ ID NO: 1244769
cgauuacuucuguagggac

SEQ ID NO: 1513531 - RNA, 19 nt, Artificial Sequence
  Description of Artificial Sequence: Synthetic oligonucleotide
  Antisense strand to SEQ ID NO: 1513530
gucccuacagaaguaaucg

SEQ ID NO: 1513532 - RNA, 19 nt, Artificial Sequence
  Description of Artificial Sequence: Synthetic oligonucleotide
  Sense strand starting at position 3326 of SEQ ID NO: 1244769
ugcagacaugagcaauaua

SEQ ID NO: 1513533 - RNA, 19 nt, Artificial Sequence
  Description of Artificial Sequence: Synthetic oligonucleotide
  Antisense strand to SEQ ID NO: 1513532
uauauugcucaugucugca

SEQ ID NO: 1513534 - RNA, 19 nt, Artificial Sequence
  Description of Artificial Sequence: Synthetic oligonucleotide
  Sense strand starting at position 3343 of SEQ ID NO: 1244769
uagaauauuugcuagcagu

SEQ ID NO: 1513535 - RNA, 19 nt, Artificial Sequence
  Description of Artificial Sequence: Synthetic oligonucleotide
  Antisense strand to SEQ ID NO: 1513534
acugcuagcaaauauucua

SEQ ID NO: 1513536 - RNA, 19 nt, Artificial Sequence
  Description of Artificial Sequence: Synthetic oligonucleotide
  Sense strand starting at position 3414 of SEQ ID NO: 1244769
cuggaaaguuggucaggau

SEQ ID NO: 1513537 - RNA, 19 nt, Artificial Sequence
  Description of Artificial Sequence: Synthetic oligonucleotide
  Antisense strand to SEQ ID NO: 1513536
auccugaccaacuuuccag

SEQ ID NO: 1513538 - RNA, 19 nt, Artificial Sequence
  Description of Artificial Sequence: Synthetic oligonucleotide
  Sense strand starting at position 3495 of SEQ ID NO: 1244769
ucacauuauguaugagaca

SEQ ID NO: 1513539 - RNA, 19 nt, Artificial Sequence
  Description of Artificial Sequence: Synthetic oligonucleotide
  Antisense strand to SEQ ID NO: 1513538
ugucucauacauaauguga

SEQ ID NO: 1513540 - RNA, 19 nt, Artificial Sequence
  Description of Artificial Sequence: Synthetic oligonucleotide
  Sense strand starting at position 3626 of SEQ ID NO: 1244769
cagccaugacugugaagua

SEQ ID NO: 1513541 - RNA, 19 nt, Artificial Sequence
  Description of Artificial Sequence: Synthetic oligonucleotide
  Antisense strand to SEQ ID NO: 1513540
uacuucacagucauggcug

SEQ ID NO: 1513542 - RNA, 19 nt, Artificial Sequence
  Description of Artificial Sequence: Synthetic oligonucleotide
  Sense strand starting at position 16 of SEQ ID NO: 1244770
gccuuugcaucaguuugaa

SEQ ID NO: 1513543 - RNA, 19 nt, Artificial Sequence
  Description of Artificial Sequence: Synthetic oligonucleotide
  Antisense strand to SEQ ID NO: 1513542
uucaaacugaugcaaaggc

SEQ ID NO: 1513544 - RNA, 19 nt, Artificial Sequence
  Description of Artificial Sequence: Synthetic oligonucleotide
  Sense strand starting at position 19 of SEQ ID NO: 1244770
uuugcaucaguuugaaaug

SEQ ID NO: 1513545 - RNA, 19 nt, Artificial Sequence
  Description of Artificial Sequence: Synthetic oligonucleotide
  Antisense strand to SEQ ID NO: 1513544
cauuucaaacugaugcaaa

SEQ ID NO: 1513546 - RNA, 19 nt, Artificial Sequence
  Description of Artificial Sequence: Synthetic oligonucleotide
  Sense strand starting at position 28 of SEQ ID NO: 1244770
guuugaaaugccuggauua

SEQ ID NO: 1513547 - RNA, 19 nt, Artificial Sequence
  Description of Artificial Sequence: Synthetic oligonucleotide
  Antisense strand to SEQ ID NO: 1513546
uaauccaggcauuucaaac

SEQ ID NO: 1513548 - RNA, 19 nt, Artificial Sequence
  Description of Artificial Sequence: Synthetic oligonucleotide
  Sense strand starting at position 29 of SEQ ID NO: 1244770
uuugaaaugccuggauuau

SEQ ID NO: 1513549 - RNA, 19 nt, Artificial Sequence
  Description of Artificial Sequence: Synthetic oligonucleotide
  Antisense strand to SEQ ID NO: 1513548
auaauccaggcauuucaaa

SEQ ID NO: 1513550 - RNA, 19 nt, Artificial Sequence
  Description of Artificial Sequence: Synthetic oligonucleotide
  Sense strand starting at position 59 of SEQ ID NO: 1244770
gacuaagucuuccugaggu

SEQ ID NO: 1513551 - RNA, 19 nt, Artificial Sequence
  Description of Artificial Sequence: Synthetic oligonucleotide
  Antisense strand to SEQ ID NO: 1513550
accucaggaagacuuaguc

SEQ ID NO: 1513552 - RNA, 19 nt, Artificial Sequence
  Description of Artificial Sequence: Synthetic oligonucleotide
  Sense strand starting at position 61 of SEQ ID NO: 1244770
cuaagucuuccugagguca

SEQ ID NO: 1513553 - RNA, 19 nt, Artificial Sequence
  Description of Artificial Sequence: Synthetic oligonucleotide
  Antisense strand to SEQ ID NO: 1513552
ugaccucaggaagacuuag

SEQ ID NO: 1513554 - RNA, 19 nt, Artificial Sequence
  Description of Artificial Sequence: Synthetic oligonucleotide
  Sense strand starting at position 332 of SEQ ID NO: 1244770
cuagaauaauuguaaugac

SEQ ID NO: 1513555 - RNA, 19 nt, Artificial Sequence
  Description of Artificial Sequence: Synthetic oligonucleotide
  Antisense strand to SEQ ID NO: 1513554
gucauuacaauuauucuag

SEQ ID NO: 1513556 - RNA, 19 nt, Artificial Sequence
  Description of Artificial Sequence: Synthetic oligonucleotide
  Sense strand starting at position 532 of SEQ ID NO: 1244770
gguaacuucuguuccaaau

SEQ ID NO: 1513557 - RNA, 19 nt, Artificial Sequence
  Description of Artificial Sequence: Synthetic oligonucleotide
  Antisense strand to SEQ ID NO: 1513556
auuuggaacagaaguuacc

SEQ ID NO: 1513558 - RNA, 19 nt, Artificial Sequence
  Description of Artificial Sequence: Synthetic oligonucleotide
  Sense strand starting at position 604 of SEQ ID NO: 1244770
aagucaggccgagguguua

SEQ ID NO: 1513559 - RNA, 19 nt, Artificial Sequence
  Description of Artificial Sequence: Synthetic oligonucleotide
  Antisense strand to SEQ ID NO: 1513558
uaacaccucggccugacuu

SEQ ID NO: 1513560 - RNA, 19 nt, Artificial Sequence
  Description of Artificial Sequence: Synthetic oligonucleotide
  Sense strand starting at position 1008 of SEQ ID NO: 1244770
uccacaucuuaggcuugaa

SEQ ID NO: 1513561 - RNA, 19 nt, Artificial Sequence
  Description of Artificial Sequence: Synthetic oligonucleotide
  Antisense strand to SEQ ID NO: 1513560
uucaagccuaagaugugga

SEQ ID NO: 1513562 - RNA, 19 nt, Artificial Sequence
  Description of Artificial Sequence: Synthetic oligonucleotide
  Sense strand starting at position 1011 of SEQ ID NO: 1244770
acaucuuaggcuugaagcu

SEQ ID NO: 1513563 - RNA, 19 nt, Artificial Sequence
  Description of Artificial Sequence: Synthetic oligonucleotide
  Antisense strand to SEQ ID NO: 1513562
agcuucaagccuaagaugu

SEQ ID NO: 1513564 - RNA, 19 nt, Artificial Sequence
  Description of Artificial Sequence: Synthetic oligonucleotide
  Sense strand starting at position 1514 of SEQ ID NO: 1244770
gggcuauuauguuucucag

SEQ ID NO: 1513565 - RNA, 19 nt, Artificial Sequence
  Description of Artificial Sequence: Synthetic oligonucleotide
  Antisense strand to SEQ ID NO: 1513564
cugagaaacauaauagccc

SEQ ID NO: 1513566 - RNA, 19 nt, Artificial Sequence
  Description of Artificial Sequence: Synthetic oligonucleotide
  Sense strand starting at position 1516 of SEQ ID NO: 1244770
gcuauuauguuucucagga

SEQ ID NO: 1513567 - RNA, 19 nt, Artificial Sequence
  Description of Artificial Sequence: Synthetic oligonucleotide
  Antisense strand to SEQ ID NO: 1513566
uccugagaaacauaauagc

SEQ ID NO: 1513568 - RNA, 19 nt, Artificial Sequence
  Description of Artificial Sequence: Synthetic oligonucleotide
  Sense strand starting at position 1517 of SEQ ID NO: 1244770
cuauuauguuucucaggau

SEQ ID NO: 1513569 - RNA, 19 nt, Artificial Sequence
  Description of Artificial Sequence: Synthetic oligonucleotide
  Antisense strand to SEQ ID NO: 1513568
auccugagaaacauaauag

SEQ ID NO: 1513570 - RNA, 19 nt, Artificial Sequence
  Description of Artificial Sequence: Synthetic oligonucleotide
  Sense strand starting at position 1809 of SEQ ID NO: 1244770
uugagacgcucuuccaaag

SEQ ID NO: 1513571 - RNA, 19 nt, Artificial Sequence
  Description of Artificial Sequence: Synthetic oligonucleotide
  Antisense strand to SEQ ID NO: 1513570
cuuuggaagagcgucucaa

SEQ ID NO: 1513572 - RNA, 19 nt, Artificial Sequence
  Description of Artificial Sequence: Synthetic oligonucleotide
  Sense strand starting at position 2164 of SEQ ID NO: 1244770
gcuccagcuccuuagaguu

SEQ ID NO: 1513573 - RNA, 19 nt, Artificial Sequence
  Description of Artificial Sequence: Synthetic oligonucleotide
  Antisense strand to SEQ ID NO: 1513572
aacucuaaggagcuggagc

SEQ ID NO: 1513574 - RNA, 19 nt, Artificial Sequence
  Description of Artificial Sequence: Synthetic oligonucleotide
  Sense strand starting at position 2205 of SEQ ID NO: 1244770
uguccugugacuggagaga

SEQ ID NO: 1513575 - RNA, 19 nt, Artificial Sequence
  Description of Artificial Sequence: Synthetic oligonucleotide
  Antisense strand to SEQ ID NO: 1513574
ucucuccagucacaggaca

SEQ ID NO: 1513576 - RNA, 19 nt, Artificial Sequence
  Description of Artificial Sequence: Synthetic oligonucleotide
  Sense strand starting at position 2302 of SEQ ID NO: 1244770
gcccuuaggguccagacau

SEQ ID NO: 1513577 - RNA, 19 nt, Artificial Sequence
  Description of Artificial Sequence: Synthetic oligonucleotide
  Antisense strand to SEQ ID NO: 1513576
augucuggacccuaagggc

SEQ ID NO: 1513578 - RNA, 19 nt, Artificial Sequence
  Description of Artificial Sequence: Synthetic oligonucleotide
  Sense strand starting at position 2310 of SEQ ID NO: 1244770
gguccagacauccguuugu

SEQ ID NO: 1513579 - RNA, 19 nt, Artificial Sequence
  Description of Artificial Sequence: Synthetic oligonucleotide
  Antisense strand to SEQ ID NO: 1513578
acaaacggaugucuggacc

SEQ ID NO: 1513580 - RNA, 19 nt, Artificial Sequence
  Description of Artificial Sequence: Synthetic oligonucleotide
  Sense strand starting at position 2314 of SEQ ID NO: 1244770
cagacauccguuuguuaga

SEQ ID NO: 1513581 - RNA, 19 nt, Artificial Sequence
  Description of Artificial Sequence: Synthetic oligonucleotide
  Antisense strand to SEQ ID NO: 1513580
ucuaacaaacggaugucug

SEQ ID NO: 1513582 - RNA, 19 nt, Artificial Sequence
  Description of Artificial Sequence: Synthetic oligonucleotide
  Sense strand starting at position 2315 of SEQ ID NO: 1244770
agacauccguuuguuagau

SEQ ID NO: 1513583 - RNA, 19 nt, Artificial Sequence
  Description of Artificial Sequence: Synthetic oligonucleotide
  Antisense strand to SEQ ID NO: 1513582
aucuaacaaacggaugucu

SEQ ID NO: 1513584 - RNA, 19 nt, Artificial Sequence
  Description of Artificial Sequence: Synthetic oligonucleotide
  Sense strand starting at position 2316 of SEQ ID NO: 1244770
gacauccguuuguuagaug

SEQ ID NO: 1513585 - RNA, 19 nt, Artificial Sequence
  Description of Artificial Sequence: Synthetic oligonucleotide
  Antisense strand to SEQ ID NO: 1513584
caucuaacaaacggauguc

SEQ ID NO: 1513586 - RNA, 19 nt, Artificial Sequence
  Description of Artificial Sequence: Synthetic oligonucleotide
  Sense strand starting at position 2381 of SEQ ID NO: 1244770
cgaggugucuggcucaauu

SEQ ID NO: 1513587 - RNA, 19 nt, Artificial Sequence
  Description of Artificial Sequence: Synthetic oligonucleotide
  Antisense strand to SEQ ID NO: 1513586
aauugagccagacaccucg

SEQ ID NO: 1513588 - RNA, 19 nt, Artificial Sequence
  Description of Artificial Sequence: Synthetic oligonucleotide
  Sense strand starting at position 2392 of SEQ ID NO: 1244770
gcucaauuucugggucgga

SEQ ID NO: 1513589 - RNA, 19 nt, Artificial Sequence
  Description of Artificial Sequence: Synthetic oligonucleotide
  Antisense strand to SEQ ID NO: 1513588
uccgacccagaaauugagc

SEQ ID NO: 1513590 - RNA, 19 nt, Artificial Sequence
  Description of Artificial Sequence: Synthetic oligonucleotide
  Sense strand starting at position 2656 of SEQ ID NO: 1244770
gggcaaguuacuuacugaa

SEQ ID NO: 1513591 - RNA, 19 nt, Artificial Sequence
  Description of Artificial Sequence: Synthetic oligonucleotide
  Antisense strand to SEQ ID NO: 1513590
uucaguaaguaacuugccc

SEQ ID NO: 1513592 - RNA, 19 nt, Artificial Sequence
  Description of Artificial Sequence: Synthetic oligonucleotide
  Sense strand starting at position 2658 of SEQ ID NO: 1244770
gcaaguuacuuacugaaca

SEQ ID NO: 1513593 - RNA, 19 nt, Artificial Sequence
  Description of Artificial Sequence: Synthetic oligonucleotide
  Antisense strand to SEQ ID NO: 1513592
uguucaguaaguaacuugc

SEQ ID NO: 1513594 - RNA, 19 nt, Artificial Sequence
  Description of Artificial Sequence: Synthetic oligonucleotide
  Sense strand starting at position 2760 of SEQ ID NO: 1244770
guaaaugcccaguaacugu

SEQ ID NO: 1513595 - RNA, 19 nt, Artificial Sequence
  Description of Artificial Sequence: Synthetic oligonucleotide
  Antisense strand to SEQ ID NO: 1513594
acaguuacugggcauuuac

SEQ ID NO: 1513596 - RNA, 19 nt, Artificial Sequence
  Description of Artificial Sequence: Synthetic oligonucleotide
  Sense strand starting at position 2845 of SEQ ID NO: 1244770
ggauucuagagcugucuga

SEQ ID NO: 1513597 - RNA, 19 nt, Artificial Sequence
  Description of Artificial Sequence: Synthetic oligonucleotide
  Antisense strand to SEQ ID NO: 1513596
ucagacagcucuagaaucc

SEQ ID NO: 1513598 - RNA, 19 nt, Artificial Sequence
  Description of Artificial Sequence: Synthetic oligonucleotide
  Sense strand starting at position 2849 of SEQ ID NO: 1244770
ucuagagcugucugaguuc

SEQ ID NO: 1513599 - RNA, 19 nt, Artificial Sequence
  Description of Artificial Sequence: Synthetic oligonucleotide
  Antisense strand to SEQ ID NO: 1513598
gaacucagacagcucuaga

SEQ ID NO: 1513600 - RNA, 19 nt, Artificial Sequence
  Description of Artificial Sequence: Synthetic oligonucleotide
  Sense strand starting at position 2883 of SEQ ID NO: 1244770
uuguuaccguaucuucuaa

SEQ ID NO: 1513601 - RNA, 19 nt, Artificial Sequence
  Description of Artificial Sequence: Synthetic oligonucleotide
  Antisense strand to SEQ ID NO: 1513600
uuagaagauacgguaacaa

SEQ ID NO: 1513602 - RNA, 19 nt, Artificial Sequence
  Description of Artificial Sequence: Synthetic oligonucleotide
  Sense strand starting at position 2940 of SEQ ID NO: 1244770
aaggaagauuguuaguaaa

SEQ ID NO: 1513603 - RNA, 19 nt, Artificial Sequence
  Description of Artificial Sequence: Synthetic oligonucleotide
  Antisense strand to SEQ ID NO: 1513602
uuuacuaacaaucuuccuu

SEQ ID NO: 1513604 - RNA, 19 nt, Artificial Sequence
  Description of Artificial Sequence: Synthetic oligonucleotide
  Sense strand starting at position 2957 of SEQ ID NO: 1244770
aaggccuaggccuauaaga

SEQ ID NO: 1513605 - RNA, 19 nt, Artificial Sequence
  Description of Artificial Sequence: Synthetic oligonucleotide
  Antisense strand to SEQ ID NO: 1513604
ucuuauaggccuaggccuu

SEQ ID NO: 1513606 - RNA, 19 nt, Artificial Sequence
  Description of Artificial Sequence: Synthetic oligonucleotide
  Sense strand starting at position 3160 of SEQ ID NO: 1244770
cuuguuauuuaucaugguu

SEQ ID NO: 1513607 - RNA, 19 nt, Artificial Sequence
  Description of Artificial Sequence: Synthetic oligonucleotide
  Antisense strand to SEQ ID NO: 1513606
aaccaugauaaauaacaag

SEQ ID NO: 1513608 - RNA, 19 nt, Artificial Sequence
  Description of Artificial Sequence: Synthetic oligonucleotide
  Sense strand starting at position 3333 of SEQ ID NO: 1244770
ccgauuacuucuguaggga

SEQ ID NO: 1513609 - RNA, 19 nt, Artificial Sequence
  Description of Artificial Sequence: Synthetic oligonucleotide
  Antisense strand to SEQ ID NO: 1513608
ucccuacagaaguaaucgg

SEQ ID NO: 1513610 - RNA, 19 nt, Artificial Sequence
  Description of Artificial Sequence: Synthetic oligonucleotide
  Sense strand starting at position 3334 of SEQ ID NO: 1244770
cgauuacuucuguagggac

SEQ ID NO: 1513611 - RNA, 19 nt, Artificial Sequence
  Description of Artificial Sequence: Synthetic oligonucleotide
  Antisense strand to SEQ ID NO: 1513610
gucccuacagaaguaaucg

SEQ ID NO: 1513612 - RNA, 19 nt, Artificial Sequence
  Description of Artificial Sequence: Synthetic oligonucleotide
  Sense strand starting at position 3353 of SEQ ID NO: 1244770
ugcagacaugagcaauaua

SEQ ID NO: 1513613 - RNA, 19 nt, Artificial Sequence
  Description of Artificial Sequence: Synthetic oligonucleotide
  Antisense strand to SEQ ID NO: 1513612
uauauugcucaugucugca

SEQ ID NO: 1513614 - RNA, 19 nt, Artificial Sequence
  Description of Artificial Sequence: Synthetic oligonucleotide
  Sense strand starting at position 3370 of SEQ ID NO: 1244770
uagaauauuugcuagcagu

SEQ ID NO: 1513615 - RNA, 19 nt, Artificial Sequence
  Description of Artificial Sequence: Synthetic oligonucleotide
  Antisense strand to SEQ ID NO: 1513614
acugcuagcaaauauucua

SEQ ID NO: 1513616 - RNA, 19 nt, Artificial Sequence
  Description of Artificial Sequence: Synthetic oligonucleotide
  Sense strand starting at position 3441 of SEQ ID NO: 1244770
cuggaaaguuggucaggau

SEQ ID NO: 1513617 - RNA, 19 nt, Artificial Sequence
  Description of Artificial Sequence: Synthetic oligonucleotide
  Antisense strand to SEQ ID NO: 1513616
auccugaccaacuuuccag

SEQ ID NO: 1513618 - RNA, 19 nt, Artificial Sequence
  Description of Artificial Sequence: Synthetic oligonucleotide
  Sense strand starting at position 3522 of SEQ ID NO: 1244770
ucacauuauguaugagaca

SEQ ID NO: 1513619 - RNA, 19 nt, Artificial Sequence
  Description of Artificial Sequence: Synthetic oligonucleotide
  Antisense strand to SEQ ID NO: 1513618
ugucucauacauaauguga

SEQ ID NO: 1513620 - RNA, 19 nt, Artificial Sequence
  Description of Artificial Sequence: Synthetic oligonucleotide
  Sense strand starting at position 3653 of SEQ ID NO: 1244770
cagccaugacugugaagua

SEQ ID NO: 1513621 - RNA, 19 nt, Artificial Sequence
  Description of Artificial Sequence: Synthetic oligonucleotide
  Antisense strand to SEQ ID NO: 1513620
uacuucacagucauggcug

SEQ ID NO: 1513622 - RNA, 19 nt, Artificial Sequence
  Description of Artificial Sequence: Synthetic oligonucleotide
  Sense strand starting at position 48 of SEQ ID NO: 1244771
gccuuugcaucaguuugaa

SEQ ID NO: 1513623 - RNA, 19 nt, Artificial Sequence
  Description of Artificial Sequence: Synthetic oligonucleotide
  Antisense strand to SEQ ID NO: 1513622
uucaaacugaugcaaaggc

SEQ ID NO: 1513624 - RNA, 19 nt, Artificial Sequence
  Description of Artificial Sequence: Synthetic oligonucleotide
  Sense strand starting at position 51 of SEQ ID NO: 1244771
uuugcaucaguuugaaaug

SEQ ID NO: 1513625 - RNA, 19 nt, Artificial Sequence
  Description of Artificial Sequence: Synthetic oligonucleotide
  Antisense strand to SEQ ID NO: 1513624
cauuucaaacugaugcaaa

SEQ ID NO: 1513626 - RNA, 19 nt, Artificial Sequence
  Description of Artificial Sequence: Synthetic oligonucleotide
  Sense strand starting at position 60 of SEQ ID NO: 1244771
guuugaaaugccuggauua

SEQ ID NO: 1513627 - RNA, 19 nt, Artificial Sequence
  Description of Artificial Sequence: Synthetic oligonucleotide
  Antisense strand to SEQ ID NO: 1513626
uaauccaggcauuucaaac

SEQ ID NO: 1513628 - RNA, 19 nt, Artificial Sequence
  Description of Artificial Sequence: Synthetic oligonucleotide
  Sense strand starting at position 61 of SEQ ID NO: 1244771
uuugaaaugccuggauuau

SEQ ID NO: 1513629 - RNA, 19 nt, Artificial Sequence
  Description of Artificial Sequence: Synthetic oligonucleotide
  Antisense strand to SEQ ID NO: 1513628
auaauccaggcauuucaaa

SEQ ID NO: 1513630 - RNA, 19 nt, Artificial Sequence
  Description of Artificial Sequence: Synthetic oligonucleotide
  Sense strand starting at position 91 of SEQ ID NO: 1244771
gacuaagucuuccugaggu

SEQ ID NO: 1513631 - RNA, 19 nt, Artificial Sequence
  Description of Artificial Sequence: Synthetic oligonucleotide
  Antisense strand to SEQ ID NO: 1513630
accucaggaagacuuaguc

SEQ ID NO: 1513632 - RNA, 19 nt, Artificial Sequence
  Description of Artificial Sequence: Synthetic oligonucleotide
  Sense strand starting at position 93 of SEQ ID NO: 1244771
cuaagucuuccugagguca

SEQ ID NO: 1513633 - RNA, 19 nt, Artificial Sequence
  Description of Artificial Sequence: Synthetic oligonucleotide
  Antisense strand to SEQ ID NO: 1513632
ugaccucaggaagacuuag

SEQ ID NO: 1513634 - RNA, 19 nt, Artificial Sequence
  Description of Artificial Sequence: Synthetic oligonucleotide
  Sense strand starting at position 364 of SEQ ID NO: 1244771
cuagaauaauuguaaugac

SEQ ID NO: 1513635 - RNA, 19 nt, Artificial Sequence
  Description of Artificial Sequence: Synthetic oligonucleotide
  Antisense strand to SEQ ID NO: 1513634
gucauuacaauuauucuag

SEQ ID NO: 1513636 - RNA, 19 nt, Artificial Sequence
  Description of Artificial Sequence: Synthetic oligonucleotide
  Sense strand starting at position 564 of SEQ ID NO: 1244771
gguaacuucuguuccaaau

SEQ ID NO: 1513637 - RNA, 19 nt, Artificial Sequence
  Description of Artificial Sequence: Synthetic oligonucleotide
  Antisense strand to SEQ ID NO: 1513636
auuuggaacagaaguuacc

SEQ ID NO: 1513638 - RNA, 19 nt, Artificial Sequence
  Description of Artificial Sequence: Synthetic oligonucleotide
  Sense strand starting at position 636 of SEQ ID NO: 1244771
aagucaggccgagguguua

SEQ ID NO: 1513639 - RNA, 19 nt, Artificial Sequence
  Description of Artificial Sequence: Synthetic oligonucleotide
  Antisense strand to SEQ ID NO: 1513638
uaacaccucggccugacuu

SEQ ID NO: 1513640 - RNA, 19 nt, Artificial Sequence
  Description of Artificial Sequence: Synthetic oligonucleotide
  Sense strand starting at position 1040 of SEQ ID NO: 1244771
uccacaucuuaggcuugaa

SEQ ID NO: 1513641 - RNA, 19 nt, Artificial Sequence
  Description of Artificial Sequence: Synthetic oligonucleotide
  Antisense strand to SEQ ID NO: 1513640
uucaagccuaagaugugga

SEQ ID NO: 1513642 - RNA, 19 nt, Artificial Sequence
  Description of Artificial Sequence: Synthetic oligonucleotide
  Sense strand starting at position 1043 of SEQ ID NO: 1244771
acaucuuaggcuugaagcu

SEQ ID NO: 1513643 - RNA, 19 nt, Artificial Sequence
  Description of Artificial Sequence: Synthetic oligonucleotide
  Antisense strand to SEQ ID NO: 1513642
agcuucaagccuaagaugu

SEQ ID NO: 1513644 - RNA, 19 nt, Artificial Sequence
  Description of Artificial Sequence: Synthetic oligonucleotide
  Sense strand starting at position 1546 of SEQ ID NO: 1244771
gggcuauuauguuucucag

SEQ ID NO: 1513645 - RNA, 19 nt, Artificial Sequence
  Description of Artificial Sequence: Synthetic oligonucleotide
  Antisense strand to SEQ ID NO: 1513644
cugagaaacauaauagccc

SEQ ID NO: 1513646 - RNA, 19 nt, Artificial Sequence
  Description of Artificial Sequence: Synthetic oligonucleotide
  Sense strand starting at position 1548 of SEQ ID NO: 1244771
gcuauuauguuucucagga

SEQ ID NO: 1513647 - RNA, 19 nt, Artificial Sequence
  Description of Artificial Sequence: Synthetic oligonucleotide
  Antisense strand to SEQ ID NO: 1513646
uccugagaaacauaauagc

SEQ ID NO: 1513648 - RNA, 19 nt, Artificial Sequence
  Description of Artificial Sequence: Synthetic oligonucleotide
  Sense strand starting at position 1549 of SEQ ID NO: 1244771
cuauuauguuucucaggau

SEQ ID NO: 1513649 - RNA, 19 nt, Artificial Sequence
  Description of Artificial Sequence: Synthetic oligonucleotide
  Antisense strand to SEQ ID NO: 1513648
auccugagaaacauaauag

SEQ ID NO: 1513650 - RNA, 19 nt, Artificial Sequence
  Description of Artificial Sequence: Synthetic oligonucleotide
  Sense strand starting at position 1841 of SEQ ID NO: 1244771
uugagacgcucuuccaaag

SEQ ID NO: 1513651 - RNA, 19 nt, Artificial Sequence
  Description of Artificial Sequence: Synthetic oligonucleotide
  Antisense strand to SEQ ID NO: 1513650
cuuuggaagagcgucucaa

SEQ ID NO: 1513652 - RNA, 19 nt, Artificial Sequence
  Description of Artificial Sequence: Synthetic oligonucleotide
  Sense strand starting at position 2196 of SEQ ID NO: 1244771
gcuccagcuccuuagaguu

SEQ ID NO: 1513653 - RNA, 19 nt, Artificial Sequence
  Description of Artificial Sequence: Synthetic oligonucleotide
  Antisense strand to SEQ ID NO: 1513652
aacucuaaggagcuggagc

SEQ ID NO: 1513654 - RNA, 19 nt, Artificial Sequence
  Description of Artificial Sequence: Synthetic oligonucleotide
  Sense strand starting at position 2237 of SEQ ID NO: 1244771
uguccugugacuggagaga

SEQ ID NO: 1513655 - RNA, 19 nt, Artificial Sequence
  Description of Artificial Sequence: Synthetic oligonucleotide
  Antisense strand to SEQ ID NO: 1513654
ucucuccagucacaggaca

SEQ ID NO: 1513656 - RNA, 19 nt, Artificial Sequence
  Description of Artificial Sequence: Synthetic oligonucleotide
  Sense strand starting at position 2334 of SEQ ID NO: 1244771
gcccuuaggguccagacau

SEQ ID NO: 1513657 - RNA, 19 nt, Artificial Sequence
  Description of Artificial Sequence: Synthetic oligonucleotide
  Antisense strand to SEQ ID NO: 1513656
augucuggacccuaagggc

SEQ ID NO: 1513658 - RNA, 19 nt, Artificial Sequence
  Description of Artificial Sequence: Synthetic oligonucleotide
  Sense strand starting at position 2342 of SEQ ID NO: 1244771
gguccagacauccguuugu

SEQ ID NO: 1513659 - RNA, 19 nt, Artificial Sequence
  Description of Artificial Sequence: Synthetic oligonucleotide
  Antisense strand to SEQ ID NO: 1513658
acaaacggaugucuggacc

SEQ ID NO: 1513660 - RNA, 19 nt, Artificial Sequence
  Description of Artificial Sequence: Synthetic oligonucleotide
  Sense strand starting at position 2346 of SEQ ID NO: 1244771
cagacauccguuuguuaga

SEQ ID NO: 1513661 - RNA, 19 nt, Artificial Sequence
  Description of Artificial Sequence: Synthetic oligonucleotide
  Antisense strand to SEQ ID NO: 1513660
ucuaacaaacggaugucug

SEQ ID NO: 1513662 - RNA, 19 nt, Artificial Sequence
  Description of Artificial Sequence: Synthetic oligonucleotide
  Sense strand starting at position 2347 of SEQ ID NO: 1244771
agacauccguuuguuagau

SEQ ID NO: 1513663 - RNA, 19 nt, Artificial Sequence
  Description of Artificial Sequence: Synthetic oligonucleotide
  Antisense strand to SEQ ID NO: 1513662
aucuaacaaacggaugucu

SEQ ID NO: 1513664 - RNA, 19 nt, Artificial Sequence
  Description of Artificial Sequence: Synthetic oligonucleotide
  Sense strand starting at position 2348 of SEQ ID NO: 1244771
gacauccguuuguuagaug

SEQ ID NO: 1513665 - RNA, 19 nt, Artificial Sequence
  Description of Artificial Sequence: Synthetic oligonucleotide
  Antisense strand to SEQ ID NO: 1513664
caucuaacaaacggauguc

SEQ ID NO: 1513666 - RNA, 19 nt, Artificial Sequence
  Description of Artificial Sequence: Synthetic oligonucleotide
  Sense strand starting at position 2413 of SEQ ID NO: 1244771
cgaggugucuggcucaauu

SEQ ID NO: 1513667 - RNA, 19 nt, Artificial Sequence
  Description of Artificial Sequence: Synthetic oligonucleotide
  Antisense strand to SEQ ID NO: 1513666
aauugagccagacaccucg

SEQ ID NO: 1513668 - RNA, 19 nt, Artificial Sequence
  Description of Artificial Sequence: Synthetic oligonucleotide
  Sense strand starting at position 2424 of SEQ ID NO: 1244771
gcucaauuucugggucgga

SEQ ID NO: 1513669 - RNA, 19 nt, Artificial Sequence
  Description of Artificial Sequence: Synthetic oligonucleotide
  Antisense strand to SEQ ID NO: 1513668
uccgacccagaaauugagc

SEQ ID NO: 1513670 - RNA, 19 nt, Artificial Sequence
  Description of Artificial Sequence: Synthetic oligonucleotide
  Sense strand starting at position 2688 of SEQ ID NO: 1244771
gggcaaguuacuuacugaa

SEQ ID NO: 1513671 - RNA, 19 nt, Artificial Sequence
  Description of Artificial Sequence: Synthetic oligonucleotide
  Antisense strand to SEQ ID NO: 1513670
uucaguaaguaacuugccc

SEQ ID NO: 1513672 - RNA, 19 nt, Artificial Sequence
  Description of Artificial Sequence: Synthetic oligonucleotide
  Sense strand starting at position 2690 of SEQ ID NO: 1244771
gcaaguuacuuacugaaca

SEQ ID NO: 1513673 - RNA, 19 nt, Artificial Sequence
  Description of Artificial Sequence: Synthetic oligonucleotide
  Antisense strand to SEQ ID NO: 1513672
uguucaguaaguaacuugc

SEQ ID NO: 1513674 - RNA, 19 nt, Artificial Sequence
  Description of Artificial Sequence: Synthetic oligonucleotide
  Sense strand starting at position 2792 of SEQ ID NO: 1244771
guaaaugcccaguaacugu

SEQ ID NO: 1513675 - RNA, 19 nt, Artificial Sequence
  Description of Artificial Sequence: Synthetic oligonucleotide
  Antisense strand to SEQ ID NO: 1513674
acaguuacugggcauuuac

SEQ ID NO: 1513676 - RNA, 19 nt, Artificial Sequence
  Description of Artificial Sequence: Synthetic oligonucleotide
  Sense strand starting at position 2877 of SEQ ID NO: 1244771
ggauucuagagcugucuga

SEQ ID NO: 1513677 - RNA, 19 nt, Artificial Sequence
  Description of Artificial Sequence: Synthetic oligonucleotide
  Antisense strand to SEQ ID NO: 1513676
ucagacagcucuagaaucc

SEQ ID NO: 1513678 - RNA, 19 nt, Artificial Sequence
  Description of Artificial Sequence: Synthetic oligonucleotide
  Sense strand starting at position 2881 of SEQ ID NO: 1244771
ucuagagcugucugaguuc

SEQ ID NO: 1513679 - RNA, 19 nt, Artificial Sequence
  Description of Artificial Sequence: Synthetic oligonucleotide
  Antisense strand to SEQ ID NO: 1513678
gaacucagacagcucuaga

SEQ ID NO: 1513680 - RNA, 19 nt, Artificial Sequence
  Description of Artificial Sequence: Synthetic oligonucleotide
  Sense strand starting at position 2915 of SEQ ID NO: 1244771
uuguuaccguaucuucuaa

SEQ ID NO: 1513681 - RNA, 19 nt, Artificial Sequence
  Description of Artificial Sequence: Synthetic oligonucleotide
  Antisense strand to SEQ ID NO: 1513680
uuagaagauacgguaacaa

SEQ ID NO: 1513682 - RNA, 19 nt, Artificial Sequence
  Description of Artificial Sequence: Synthetic oligonucleotide
  Sense strand starting at position 2972 of SEQ ID NO: 1244771
aaggaagauuguuaguaaa

SEQ ID NO: 1513683 - RNA, 19 nt, Artificial Sequence
  Description of Artificial Sequence: Synthetic oligonucleotide
  Antisense strand to SEQ ID NO: 1513682
uuuacuaacaaucuuccuu

SEQ ID NO: 1513684 - RNA, 19 nt, Artificial Sequence
  Description of Artificial Sequence: Synthetic oligonucleotide
  Sense strand starting at position 2989 of SEQ ID NO: 1244771
aaggccuaggccuauaaga

SEQ ID NO: 1513685 - RNA, 19 nt, Artificial Sequence
  Description of Artificial Sequence: Synthetic oligonucleotide
  Antisense strand to SEQ ID NO: 1513684
ucuuauaggccuaggccuu

SEQ ID NO: 1513686 - RNA, 19 nt, Artificial Sequence
  Description of Artificial Sequence: Synthetic oligonucleotide
  Sense strand starting at position 3192 of SEQ ID NO: 1244771
cuuguuauuuaucaugguu

SEQ ID NO: 1513687 - RNA, 19 nt, Artificial Sequence
  Description of Artificial Sequence: Synthetic oligonucleotide
  Antisense strand to SEQ ID NO: 1513686
aaccaugauaaauaacaag

SEQ ID NO: 1513688 - RNA, 19 nt, Artificial Sequence
  Description of Artificial Sequence: Synthetic oligonucleotide
  Sense strand starting at position 3365 of SEQ ID NO: 1244771
ccgauuacuucuguaggga

SEQ ID NO: 1513689 - RNA, 19 nt, Artificial Sequence
  Description of Artificial Sequence: Synthetic oligonucleotide
  Antisense strand to SEQ ID NO: 1513688
ucccuacagaaguaaucgg

SEQ ID NO: 1513690 - RNA, 19 nt, Artificial Sequence
  Description of Artificial Sequence: Synthetic oligonucleotide
  Sense strand starting at position 3366 of SEQ ID NO: 1244771
cgauuacuucuguagggac

SEQ ID NO: 1513691 - RNA, 19 nt, Artificial Sequence
  Description of Artificial Sequence: Synthetic oligonucleotide
  Antisense strand to SEQ ID NO: 1513690
gucccuacagaaguaaucg

SEQ ID NO: 1513692 - RNA, 19 nt, Artificial Sequence
  Description of Artificial Sequence: Synthetic oligonucleotide
  Sense strand starting at position 3385 of SEQ ID NO: 1244771
ugcagacaugagcaauaua

SEQ ID NO: 1513693 - RNA, 19 nt, Artificial Sequence
  Description of Artificial Sequence: Synthetic oligonucleotide
  Antisense strand to SEQ ID NO: 1513692
uauauugcucaugucugca

SEQ ID NO: 1513694 - RNA, 19 nt, Artificial Sequence
  Description of Artificial Sequence: Synthetic oligonucleotide
  Sense strand starting at position 3402 of SEQ ID NO: 1244771
uagaauauuugcuagcagu

SEQ ID NO: 1513695 - RNA, 19 nt, Artificial Sequence
  Description of Artificial Sequence: Synthetic oligonucleotide
  Antisense strand to SEQ ID NO: 1513694
acugcuagcaaauauucua

SEQ ID NO: 1513696 - RNA, 19 nt, Artificial Sequence
  Description of Artificial Sequence: Synthetic oligonucleotide
  Sense strand starting at position 3473 of SEQ ID NO: 1244771
cuggaaaguuggucaggau

SEQ ID NO: 1513697 - RNA, 19 nt, Artificial Sequence
  Description of Artificial Sequence: Synthetic oligonucleotide
  Antisense strand to SEQ ID NO: 1513696
auccugaccaacuuuccag

SEQ ID NO: 1513698 - RNA, 19 nt, Artificial Sequence
  Description of Artificial Sequence: Synthetic oligonucleotide
  Sense strand starting at position 3554 of SEQ ID NO: 1244771
ucacauuauguaugagaca

SEQ ID NO: 1513699 - RNA, 19 nt, Artificial Sequence
  Description of Artificial Sequence: Synthetic oligonucleotide
  Antisense strand to SEQ ID NO: 1513698
ugucucauacauaauguga

SEQ ID NO: 1513700 - RNA, 19 nt, Artificial Sequence
  Description of Artificial Sequence: Synthetic oligonucleotide
  Sense strand starting at position 3685 of SEQ ID NO: 1244771
cagccaugacugugaagua

SEQ ID NO: 1513701 - RNA, 19 nt, Artificial Sequence
  Description of Artificial Sequence: Synthetic oligonucleotide
  Antisense strand to SEQ ID NO: 1513700
uacuucacagucauggcug

SEQ ID NO: 1513702 - RNA, 19 nt, Artificial Sequence
  Description of Artificial Sequence: Synthetic oligonucleotide
  Sense strand starting at position 74 of SEQ ID NO: 1244772
gccuuugcaucaguuugaa

SEQ ID NO: 1513703 - RNA, 19 nt, Artificial Sequence
  Description of Artificial Sequence: Synthetic oligonucleotide
  Antisense strand to SEQ ID NO: 1513702
uucaaacugaugcaaaggc

SEQ ID NO: 1513704 - RNA, 19 nt, Artificial Sequence
  Description of Artificial Sequence: Synthetic oligonucleotide
  Sense strand starting at position 77 of SEQ ID NO: 1244772
uuugcaucaguuugaaaug

SEQ ID NO: 1513705 - RNA, 19 nt, Artificial Sequence
  Description of Artificial Sequence: Synthetic oligonucleotide
  Antisense strand to SEQ ID NO: 1513704
cauuucaaacugaugcaaa

SEQ ID NO: 1513706 - RNA, 19 nt, Artificial Sequence
  Description of Artificial Sequence: Synthetic oligonucleotide
  Sense strand starting at position 86 of SEQ ID NO: 1244772
guuugaaaugccuggauua

SEQ ID NO: 1513707 - RNA, 19 nt, Artificial Sequence
  Description of Artificial Sequence: Synthetic oligonucleotide
  Antisense strand to SEQ ID NO: 1513706
uaauccaggcauuucaaac

SEQ ID NO: 1513708 - RNA, 19 nt, Artificial Sequence
  Description of Artificial Sequence: Synthetic oligonucleotide
  Sense strand starting at position 87 of SEQ ID NO: 1244772
uuugaaaugccuggauuau

SEQ ID NO: 1513709 - RNA, 19 nt, Artificial Sequence
  Description of Artificial Sequence: Synthetic oligonucleotide
  Antisense strand to SEQ ID NO: 1513708
auaauccaggcauuucaaa

SEQ ID NO: 1513710 - RNA, 19 nt, Artificial Sequence
  Description of Artificial Sequence: Synthetic oligonucleotide
  Sense strand starting at position 117 of SEQ ID NO: 1244772
gacuaagucuuccugaggu

SEQ ID NO: 1513711 - RNA, 19 nt, Artificial Sequence
  Description of Artificial Sequence: Synthetic oligonucleotide
  Antisense strand to SEQ ID NO: 1513710
accucaggaagacuuaguc

SEQ ID NO: 1513712 - RNA, 19 nt, Artificial Sequence
  Description of Artificial Sequence: Synthetic oligonucleotide
  Sense strand starting at position 119 of SEQ ID NO: 1244772
cuaagucuuccugagguca

SEQ ID NO: 1513713 - RNA, 19 nt, Artificial Sequence
  Description of Artificial Sequence: Synthetic oligonucleotide
  Antisense strand to SEQ ID NO: 1513712
ugaccucaggaagacuuag

SEQ ID NO: 1513714 - RNA, 19 nt, Artificial Sequence
  Description of Artificial Sequence: Synthetic oligonucleotide
  Sense strand starting at position 390 of SEQ ID NO: 1244772
cuagaauaauuguaaugac

SEQ ID NO: 1513715 - RNA, 19 nt, Artificial Sequence
  Description of Artificial Sequence: Synthetic oligonucleotide
  Antisense strand to SEQ ID NO: 1513714
gucauuacaauuauucuag

SEQ ID NO: 1513716 - RNA, 19 nt, Artificial Sequence
  Description of Artificial Sequence: Synthetic oligonucleotide
  Sense strand starting at position 590 of SEQ ID NO: 1244772
gguaacuucuguuccaaau

SEQ ID NO: 1513717 - RNA, 19 nt, Artificial Sequence
  Description of Artificial Sequence: Synthetic oligonucleotide
  Antisense strand to SEQ ID NO: 1513716
auuuggaacagaaguuacc

SEQ ID NO: 1513718 - RNA, 19 nt, Artificial Sequence
  Description of Artificial Sequence: Synthetic oligonucleotide
  Sense strand starting at position 662 of SEQ ID NO: 1244772
aagucaggccgagguguua

SEQ ID NO: 1513719 - RNA, 19 nt, Artificial Sequence
  Description of Artificial Sequence: Synthetic oligonucleotide
  Antisense strand to SEQ ID NO: 1513718
uaacaccucggccugacuu

SEQ ID NO: 1513720 - RNA, 19 nt, Artificial Sequence
  Description of Artificial Sequence: Synthetic oligonucleotide
  Sense strand starting at position 1066 of SEQ ID NO: 1244772
uccacaucuuaggcuugaa

SEQ ID NO: 1513721 - RNA, 19 nt, Artificial Sequence
  Description of Artificial Sequence: Synthetic oligonucleotide
  Antisense strand to SEQ ID NO: 1513720
uucaagccuaagaugugga

SEQ ID NO: 1513722 - RNA, 19 nt, Artificial Sequence
  Description of Artificial Sequence: Synthetic oligonucleotide
  Sense strand starting at position 1069 of SEQ ID NO: 1244772
acaucuuaggcuugaagcu

SEQ ID NO: 1513723 - RNA, 19 nt, Artificial Sequence
  Description of Artificial Sequence: Synthetic oligonucleotide
  Antisense strand to SEQ ID NO: 1513722
agcuucaagccuaagaugu

SEQ ID NO: 1513724 - RNA, 19 nt, Artificial Sequence
  Description of Artificial Sequence: Synthetic oligonucleotide
  Sense strand starting at position 1572 of SEQ ID NO: 1244772
gggcuauuauguuucucag

SEQ ID NO: 1513725 - RNA, 19 nt, Artificial Sequence
  Description of Artificial Sequence: Synthetic oligonucleotide
  Antisense strand to SEQ ID NO: 1513724
cugagaaacauaauagccc

SEQ ID NO: 1513726 - RNA, 19 nt, Artificial Sequence
  Description of Artificial Sequence: Synthetic oligonucleotide
  Sense strand starting at position 1574 of SEQ ID NO: 1244772
gcuauuauguuucucagga

SEQ ID NO: 1513727 - RNA, 19 nt, Artificial Sequence
  Description of Artificial Sequence: Synthetic oligonucleotide
  Antisense strand to SEQ ID NO: 1513726
uccugagaaacauaauagc

SEQ ID NO: 1513728 - RNA, 19 nt, Artificial Sequence
  Description of Artificial Sequence: Synthetic oligonucleotide
  Sense strand starting at position 1575 of SEQ ID NO: 1244772
cuauuauguuucucaggau

SEQ ID NO: 1513729 - RNA, 19 nt, Artificial Sequence
  Description of Artificial Sequence: Synthetic oligonucleotide
  Antisense strand to SEQ ID NO: 1513728
auccugagaaacauaauag

SEQ ID NO: 1513730 - RNA, 19 nt, Artificial Sequence
  Description of Artificial Sequence: Synthetic oligonucleotide
  Sense strand starting at position 1867 of SEQ ID NO: 1244772
uugagacgcucuuccaaag

SEQ ID NO: 1513731 - RNA, 19 nt, Artificial Sequence
  Description of Artificial Sequence: Synthetic oligonucleotide
  Antisense strand to SEQ ID NO: 1513730
cuuuggaagagcgucucaa

SEQ ID NO: 1513732 - RNA, 19 nt, Artificial Sequence
  Description of Artificial Sequence: Synthetic oligonucleotide
  Sense strand starting at position 2222 of SEQ ID NO: 1244772
gcuccagcuccuuagaguu

SEQ ID NO: 1513733 - RNA, 19 nt, Artificial Sequence
  Description of Artificial Sequence: Synthetic oligonucleotide
  Antisense strand to SEQ ID NO: 1513732
aacucuaaggagcuggagc

SEQ ID NO: 1513734 - RNA, 19 nt, Artificial Sequence
  Description of Artificial Sequence: Synthetic oligonucleotide
  Sense strand starting at position 2263 of SEQ ID NO: 1244772
uguccugugacuggagaga

SEQ ID NO: 1513735 - RNA, 19 nt, Artificial Sequence
  Description of Artificial Sequence: Synthetic oligonucleotide
  Antisense strand to SEQ ID NO: 1513734
ucucuccagucacaggaca

SEQ ID NO: 1513736 - RNA, 19 nt, Artificial Sequence
  Description of Artificial Sequence: Synthetic oligonucleotide
  Sense strand starting at position 2360 of SEQ ID NO: 1244772
gcccuuaggguccagacau

SEQ ID NO: 1513737 - RNA, 19 nt, Artificial Sequence
  Description of Artificial Sequence: Synthetic oligonucleotide
  Antisense strand to SEQ ID NO: 1513736
augucuggacccuaagggc

SEQ ID NO: 1513738 - RNA, 19 nt, Artificial Sequence
  Description of Artificial Sequence: Synthetic oligonucleotide
  Sense strand starting at position 2368 of SEQ ID NO: 1244772
gguccagacauccguuugu

SEQ ID NO: 1513739 - RNA, 19 nt, Artificial Sequence
  Description of Artificial Sequence: Synthetic oligonucleotide
  Antisense strand to SEQ ID NO: 1513738
acaaacggaugucuggacc

SEQ ID NO: 1513740 - RNA, 19 nt, Artificial Sequence
  Description of Artificial Sequence: Synthetic oligonucleotide
  Sense strand starting at position 2372 of SEQ ID NO: 1244772
cagacauccguuuguuaga

SEQ ID NO: 1513741 - RNA, 19 nt, Artificial Sequence
  Description of Artificial Sequence: Synthetic oligonucleotide
  Antisense strand to SEQ ID NO: 1513740
ucuaacaaacggaugucug

SEQ ID NO: 1513742 - RNA, 19 nt, Artificial Sequence
  Description of Artificial Sequence: Synthetic oligonucleotide
  Sense strand starting at position 2373 of SEQ ID NO: 1244772
agacauccguuuguuagau

SEQ ID NO: 1513743 - RNA, 19 nt, Artificial Sequence
  Description of Artificial Sequence: Synthetic oligonucleotide
  Antisense strand to SEQ ID NO: 1513742
aucuaacaaacggaugucu

SEQ ID NO: 1513744 - RNA, 19 nt, Artificial Sequence
  Description of Artificial Sequence: Synthetic oligonucleotide
  Sense strand starting at position 2374 of SEQ ID NO: 1244772
gacauccguuuguuagaug

SEQ ID NO: 1513745 - RNA, 19 nt, Artificial Sequence
  Description of Artificial Sequence: Synthetic oligonucleotide
  Antisense strand to SEQ ID NO: 1513744
caucuaacaaacggauguc

SEQ ID NO: 1513746 - RNA, 19 nt, Artificial Sequence
  Description of Artificial Sequence: Synthetic oligonucleotide
  Sense strand starting at position 2439 of SEQ ID NO: 1244772
cgaggugucuggcucaauu

SEQ ID NO: 1513747 - RNA, 19 nt, Artificial Sequence
  Description of Artificial Sequence: Synthetic oligonucleotide
  Antisense strand to SEQ ID NO: 1513746
aauugagccagacaccucg

SEQ ID NO: 1513748 - RNA, 19 nt, Artificial Sequence
  Description of Artificial Sequence: Synthetic oligonucleotide
  Sense strand starting at position 2450 of SEQ ID NO: 1244772
gcucaauuucugggucgga

SEQ ID NO: 1513749 - RNA, 19 nt, Artificial Sequence
  Description of Artificial Sequence: Synthetic oligonucleotide
  Antisense strand to SEQ ID NO: 1513748
uccgacccagaaauugagc

SEQ ID NO: 1513750 - RNA, 19 nt, Artificial Sequence
  Description of Artificial Sequence: Synthetic oligonucleotide
  Sense strand starting at position 2714 of SEQ ID NO: 1244772
gggcaaguuacuuacugaa

SEQ ID NO: 1513751 - RNA, 19 nt, Artificial Sequence
  Description of Artificial Sequence: Synthetic oligonucleotide
  Antisense strand to SEQ ID NO: 1513750
uucaguaaguaacuugccc

SEQ ID NO: 1513752 - RNA, 19 nt, Artificial Sequence
  Description of Artificial Sequence: Synthetic oligonucleotide
  Sense strand starting at position 2716 of SEQ ID NO: 1244772
gcaaguuacuuacugaaca

SEQ ID NO: 1513753 - RNA, 19 nt, Artificial Sequence
  Description of Artificial Sequence: Synthetic oligonucleotide
  Antisense strand to SEQ ID NO: 1513752
uguucaguaaguaacuugc

SEQ ID NO: 1513754 - RNA, 19 nt, Artificial Sequence
  Description of Artificial Sequence: Synthetic oligonucleotide
  Sense strand starting at position 2818 of SEQ ID NO: 1244772
guaaaugcccaguaacugu

SEQ ID NO: 1513755 - RNA, 19 nt, Artificial Sequence
  Description of Artificial Sequence: Synthetic oligonucleotide
  Antisense strand to SEQ ID NO: 1513754
acaguuacugggcauuuac

SEQ ID NO: 1513756 - RNA, 19 nt, Artificial Sequence
  Description of Artificial Sequence: Synthetic oligonucleotide
  Sense strand starting at position 2903 of SEQ ID NO: 1244772
ggauucuagagcugucuga

SEQ ID NO: 1513757 - RNA, 19 nt, Artificial Sequence
  Description of Artificial Sequence: Synthetic oligonucleotide
  Antisense strand to SEQ ID NO: 1513756
ucagacagcucuagaaucc

SEQ ID NO: 1513758 - RNA, 19 nt, Artificial Sequence
  Description of Artificial Sequence: Synthetic oligonucleotide
  Sense strand starting at position 2907 of SEQ ID NO: 1244772
ucuagagcugucugaguuc

SEQ ID NO: 1513759 - RNA, 19 nt, Artificial Sequence
  Description of Artificial Sequence: Synthetic oligonucleotide
  Antisense strand to SEQ ID NO: 1513758
gaacucagacagcucuaga

SEQ ID NO: 1513760 - RNA, 19 nt, Artificial Sequence
  Description of Artificial Sequence: Synthetic oligonucleotide
  Sense strand starting at position 2941 of SEQ ID NO: 1244772
uuguuaccguaucuucuaa

SEQ ID NO: 1513761 - RNA, 19 nt, Artificial Sequence
  Description of Artificial Sequence: Synthetic oligonucleotide
  Antisense strand to SEQ ID NO: 1513760
uuagaagauacgguaacaa

SEQ ID NO: 1513762 - RNA, 19 nt, Artificial Sequence
  Description of Artificial Sequence: Synthetic oligonucleotide
  Sense strand starting at position 2998 of SEQ ID NO: 1244772
aaggaagauuguuaguaaa

SEQ ID NO: 1513763 - RNA, 19 nt, Artificial Sequence
  Description of Artificial Sequence: Synthetic oligonucleotide
  Antisense strand to SEQ ID NO: 1513762
uuuacuaacaaucuuccuu

SEQ ID NO: 1513764 - RNA, 19 nt, Artificial Sequence
  Description of Artificial Sequence: Synthetic oligonucleotide
  Sense strand starting at position 3015 of SEQ ID NO: 1244772
aaggccuaggccuauaaga

SEQ ID NO: 1513765 - RNA, 19 nt, Artificial Sequence
  Description of Artificial Sequence: Synthetic oligonucleotide
  Antisense strand to SEQ ID NO: 1513764
ucuuauaggccuaggccuu

SEQ ID NO: 1513766 - RNA, 19 nt, Artificial Sequence
  Description of Artificial Sequence: Synthetic oligonucleotide
  Sense strand starting at position 3218 of SEQ ID NO: 1244772
cuuguuauuuaucaugguu

SEQ ID NO: 1513767 - RNA, 19 nt, Artificial Sequence
  Description of Artificial Sequence: Synthetic oligonucleotide
  Antisense strand to SEQ ID NO: 1513766
aaccaugauaaauaacaag

SEQ ID NO: 1513768 - RNA, 19 nt, Artificial Sequence
  Description of Artificial Sequence: Synthetic oligonucleotide
  Sense strand starting at position 3391 of SEQ ID NO: 1244772
ccgauuacuucuguaggga

SEQ ID NO: 1513769 - RNA, 19 nt, Artificial Sequence
  Description of Artificial Sequence: Synthetic oligonucleotide
  Antisense strand to SEQ ID NO: 1513768
ucccuacagaaguaaucgg

SEQ ID NO: 1513770 - RNA, 19 nt, Artificial Sequence
  Description of Artificial Sequence: Synthetic oligonucleotide
  Sense strand starting at position 3392 of SEQ ID NO: 1244772
cgauuacuucuguagggac

SEQ ID NO: 1513771 - RNA, 19 nt, Artificial Sequence
  Description of Artificial Sequence: Synthetic oligonucleotide
  Antisense strand to SEQ ID NO: 1513770
gucccuacagaaguaaucg

SEQ ID NO: 1513772 - RNA, 19 nt, Artificial Sequence
  Description of Artificial Sequence: Synthetic oligonucleotide
  Sense strand starting at position 3411 of SEQ ID NO: 1244772
ugcagacaugagcaauaua

SEQ ID NO: 1513773 - RNA, 19 nt, Artificial Sequence
  Description of Artificial Sequence: Synthetic oligonucleotide
  Antisense strand to SEQ ID NO: 1513772
uauauugcucaugucugca

SEQ ID NO: 1513774 - RNA, 19 nt, Artificial Sequence
  Description of Artificial Sequence: Synthetic oligonucleotide
  Sense strand starting at position 3428 of SEQ ID NO: 1244772
uagaauauuugcuagcagu

SEQ ID NO: 1513775 - RNA, 19 nt, Artificial Sequence
  Description of Artificial Sequence: Synthetic oligonucleotide
  Antisense strand to SEQ ID NO: 1513774
acugcuagcaaauauucua

SEQ ID NO: 1513776 - RNA, 19 nt, Artificial Sequence
  Description of Artificial Sequence: Synthetic oligonucleotide
  Sense strand starting at position 3499 of SEQ ID NO: 1244772
cuggaaaguuggucaggau

SEQ ID NO: 1513777 - RNA, 19 nt, Artificial Sequence
  Description of Artificial Sequence: Synthetic oligonucleotide
  Antisense strand to SEQ ID NO: 1513776
auccugaccaacuuuccag

SEQ ID NO: 1513778 - RNA, 19 nt, Artificial Sequence
  Description of Artificial Sequence: Synthetic oligonucleotide
  Sense strand starting at position 3580 of SEQ ID NO: 1244772
ucacauuauguaugagaca

SEQ ID NO: 1513779 - RNA, 19 nt, Artificial Sequence
  Description of Artificial Sequence: Synthetic oligonucleotide
  Antisense strand to SEQ ID NO: 1513778
ugucucauacauaauguga

SEQ ID NO: 1513780 - RNA, 19 nt, Artificial Sequence
  Description of Artificial Sequence: Synthetic oligonucleotide
  Sense strand starting at position 3711 of SEQ ID NO: 1244772
cagccaugacugugaagua

SEQ ID NO: 1513781 - RNA, 19 nt, Artificial Sequence
  Description of Artificial Sequence: Synthetic oligonucleotide
  Antisense strand to SEQ ID NO: 1513780
uacuucacagucauggcug

SEQ ID NO: 1513782 - RNA, 19 nt, Artificial Sequence
  Description of Artificial Sequence: Synthetic oligonucleotide
  Sense strand starting at position 148 of SEQ ID NO: 1244773
cuuguauguccagacucuu

SEQ ID NO: 1513783 - RNA, 19 nt, Artificial Sequence
  Description of Artificial Sequence: Synthetic oligonucleotide
  Antisense strand to SEQ ID NO: 1513782
aagagucuggacauacaag

SEQ ID NO: 1513784 - RNA, 19 nt, Artificial Sequence
  Description of Artificial Sequence: Synthetic oligonucleotide
  Sense strand starting at position 179 of SEQ ID NO: 1244773
cacgguucugccugucuga

SEQ ID NO: 1513785 - RNA, 19 nt, Artificial Sequence
  Description of Artificial Sequence: Synthetic oligonucleotide
  Antisense strand to SEQ ID NO: 1513784
ucagacaggcagaaccgug

SEQ ID NO: 1513786 - RNA, 19 nt, Artificial Sequence
  Description of Artificial Sequence: Synthetic oligonucleotide
  Sense strand starting at position 277 of SEQ ID NO: 1244773
augagaaaccugggucauu

SEQ ID NO: 1513787 - RNA, 19 nt, Artificial Sequence
  Description of Artificial Sequence: Synthetic oligonucleotide
  Antisense strand to SEQ ID NO: 1513786
aaugacccagguuucucau

SEQ ID NO: 1513788 - RNA, 19 nt, Artificial Sequence
  Description of Artificial Sequence: Synthetic oligonucleotide
  Sense strand starting at position 406 of SEQ ID NO: 1244773
ugcugagugcuuugcacau

SEQ ID NO: 1513789 - RNA, 19 nt, Artificial Sequence
  Description of Artificial Sequence: Synthetic oligonucleotide
  Antisense strand to SEQ ID NO: 1513788
augugcaaagcacucagca

SEQ ID NO: 1513790 - RNA, 19 nt, Artificial Sequence
  Description of Artificial Sequence: Synthetic oligonucleotide
  Sense strand starting at position 494 of SEQ ID NO: 1244773
aggucaugcagcuauuaag

SEQ ID NO: 1513791 - RNA, 19 nt, Artificial Sequence
  Description of Artificial Sequence: Synthetic oligonucleotide
  Antisense strand to SEQ ID NO: 1513790
cuuaauagcugcaugaccu

SEQ ID NO: 1513792 - RNA, 19 nt, Artificial Sequence
  Description of Artificial Sequence: Synthetic oligonucleotide
  Sense strand starting at position 547 of SEQ ID NO: 1244773
uccaaacucugggaugcua

SEQ ID NO: 1513793 - RNA, 19 nt, Artificial Sequence
  Description of Artificial Sequence: Synthetic oligonucleotide
  Antisense strand to SEQ ID NO: 1513792
uagcaucccagaguuugga

SEQ ID NO: 1513794 - RNA, 19 nt, Artificial Sequence
  Description of Artificial Sequence: Synthetic oligonucleotide
  Sense strand starting at position 576 of SEQ ID NO: 1244773
ugucuuaaaucucuuuagu

SEQ ID NO: 1513795 - RNA, 19 nt, Artificial Sequence
  Description of Artificial Sequence: Synthetic oligonucleotide
  Antisense strand to SEQ ID NO: 1513794
acuaaagagauuuaagaca

SEQ ID NO: 1513796 - RNA, 19 nt, Artificial Sequence
  Description of Artificial Sequence: Synthetic oligonucleotide
  Sense strand starting at position 669 of SEQ ID NO: 1244773
ucucacuugucuccgguua

SEQ ID NO: 1513797 - RNA, 19 nt, Artificial Sequence
  Description of Artificial Sequence: Synthetic oligonucleotide
  Antisense strand to SEQ ID NO: 1513796
uaaccggagacaagugaga

SEQ ID NO: 1513798 - RNA, 19 nt, Artificial Sequence
  Description of Artificial Sequence: Synthetic oligonucleotide
  Sense strand starting at position 903 of SEQ ID NO: 1244773
guguaauccucuccaugac

SEQ ID NO: 1513799 - RNA, 19 nt, Artificial Sequence
  Description of Artificial Sequence: Synthetic oligonucleotide
  Antisense strand to SEQ ID NO: 1513798
gucauggagaggauuacac

SEQ ID NO: 1513800 - RNA, 19 nt, Artificial Sequence
  Description of Artificial Sequence: Synthetic oligonucleotide
  Sense strand starting at position 919 of SEQ ID NO: 1244773
gacagaccuggcugucuaa

SEQ ID NO: 1513801 - RNA, 19 nt, Artificial Sequence
  Description of Artificial Sequence: Synthetic oligonucleotide
  Antisense strand to SEQ ID NO: 1513800
uuagacagccaggucuguc

SEQ ID NO: 1513802 - RNA, 19 nt, Artificial Sequence
  Description of Artificial Sequence: Synthetic oligonucleotide
  Sense strand starting at position 928 of SEQ ID NO: 1244773
ggcugucuaaucuacguuu

SEQ ID NO: 1513803 - RNA, 19 nt, Artificial Sequence
  Description of Artificial Sequence: Synthetic oligonucleotide
  Antisense strand to SEQ ID NO: 1513802
aaacguagauuagacagcc

SEQ ID NO: 1513804 - RNA, 19 nt, Artificial Sequence
  Description of Artificial Sequence: Synthetic oligonucleotide
  Sense strand starting at position 1140 of SEQ ID NO: 1244773
uuaaacauuuccuguagag

SEQ ID NO: 1513805 - RNA, 19 nt, Artificial Sequence
  Description of Artificial Sequence: Synthetic oligonucleotide
  Antisense strand to SEQ ID NO: 1513804
cucuacaggaaauguuuaa

SEQ ID NO: 1513806 - RNA, 19 nt, Artificial Sequence
  Description of Artificial Sequence: Synthetic oligonucleotide
  Sense strand starting at position 1395 of SEQ ID NO: 1244773
gggcaaacaucuuugcuca

SEQ ID NO: 1513807 - RNA, 19 nt, Artificial Sequence
  Description of Artificial Sequence: Synthetic oligonucleotide
  Antisense strand to SEQ ID NO: 1513806
ugagcaaagauguuugccc

SEQ ID NO: 1513808 - RNA, 19 nt, Artificial Sequence
  Description of Artificial Sequence: Synthetic oligonucleotide
  Sense strand starting at position 1396 of SEQ ID NO: 1244773
ggcaaacaucuuugcucau

SEQ ID NO: 1513809 - RNA, 19 nt, Artificial Sequence
  Description of Artificial Sequence: Synthetic oligonucleotide
  Antisense strand to SEQ ID NO: 1513808
augagcaaagauguuugcc

SEQ ID NO: 1513810 - RNA, 19 nt, Artificial Sequence
  Description of Artificial Sequence: Synthetic oligonucleotide
  Sense strand starting at position 1509 of SEQ ID NO: 1244773
gggacaacuggaugugauu

SEQ ID NO: 1513811 - RNA, 19 nt, Artificial Sequence
  Description of Artificial Sequence: Synthetic oligonucleotide
  Antisense strand to SEQ ID NO: 1513810
aaucacauccaguuguccc

SEQ ID NO: 1513812 - RNA, 19 nt, Artificial Sequence
  Description of Artificial Sequence: Synthetic oligonucleotide
  Sense strand starting at position 1532 of SEQ ID NO: 1244773
ggaucugcaguucaggaua

SEQ ID NO: 1513813 - RNA, 19 nt, Artificial Sequence
  Description of Artificial Sequence: Synthetic oligonucleotide
  Antisense strand to SEQ ID NO: 1513812
uauccugaacugcagaucc

SEQ ID NO: 1513814 - RNA, 19 nt, Artificial Sequence
  Description of Artificial Sequence: Synthetic oligonucleotide
  Sense strand starting at position 1545 of SEQ ID NO: 1244773
aggauaauucaugagucgu

SEQ ID NO: 1513815 - RNA, 19 nt, Artificial Sequence
  Description of Artificial Sequence: Synthetic oligonucleotide
  Antisense strand to SEQ ID NO: 1513814
acgacucaugaauuauccu

SEQ ID NO: 1513816 - RNA, 19 nt, Artificial Sequence
  Description of Artificial Sequence: Synthetic oligonucleotide
  Sense strand starting at position 1558 of SEQ ID NO: 1244773
agucguuuccugugcacaa

SEQ ID NO: 1513817 - RNA, 19 nt, Artificial Sequence
  Description of Artificial Sequence: Synthetic oligonucleotide
  Antisense strand to SEQ ID NO: 1513816
uugugcacaggaaacgacu

SEQ ID NO: 1513818 - RNA, 19 nt, Artificial Sequence
  Description of Artificial Sequence: Synthetic oligonucleotide
  Sense strand starting at position 1585 of SEQ ID NO: 1244773
cuccuucuguggucucaga

SEQ ID NO: 1513819 - RNA, 19 nt, Artificial Sequence
  Description of Artificial Sequence: Synthetic oligonucleotide
  Antisense strand to SEQ ID NO: 1513818
ucugagaccacagaaggag

SEQ ID NO: 1513820 - RNA, 19 nt, Artificial Sequence
  Description of Artificial Sequence: Synthetic oligonucleotide
  Sense strand starting at position 1966 of SEQ ID NO: 1244773
cagugugcucuuuggcuga

SEQ ID NO: 1513821 - RNA, 19 nt, Artificial Sequence
  Description of Artificial Sequence: Synthetic oligonucleotide
  Antisense strand to SEQ ID NO: 1513820
ucagccaaagagcacacug

SEQ ID NO: 1513822 - RNA, 19 nt, Artificial Sequence
  Description of Artificial Sequence: Synthetic oligonucleotide
  Sense strand starting at position 2556 of SEQ ID NO: 1244773
agcggaaaggguuaagagu

SEQ ID NO: 1513823 - RNA, 19 nt, Artificial Sequence
  Description of Artificial Sequence: Synthetic oligonucleotide
  Antisense strand to SEQ ID NO: 1513822
acucuuaacccuuuccgcu

SEQ ID NO: 1513824 - RNA, 19 nt, Artificial Sequence
  Description of Artificial Sequence: Synthetic oligonucleotide
  Sense strand starting at position 2799 of SEQ ID NO: 1244773
uugccuaacuggucugaau

SEQ ID NO: 1513825 - RNA, 19 nt, Artificial Sequence
  Description of Artificial Sequence: Synthetic oligonucleotide
  Antisense strand to SEQ ID NO: 1513824
auucagaccaguuaggcaa

SEQ ID NO: 1513826 - RNA, 19 nt, Artificial Sequence
  Description of Artificial Sequence: Synthetic oligonucleotide
  Sense strand starting at position 2801 of SEQ ID NO: 1244773
gccuaacuggucugaauga

SEQ ID NO: 1513827 - RNA, 19 nt, Artificial Sequence
  Description of Artificial Sequence: Synthetic oligonucleotide
  Antisense strand to SEQ ID NO: 1513826
ucauucagaccaguuaggc

SEQ ID NO: 1513828 - RNA, 19 nt, Artificial Sequence
  Description of Artificial Sequence: Synthetic oligonucleotide
  Sense strand starting at position 2888 of SEQ ID NO: 1244773
ugaaacaguccuuguccaa

SEQ ID NO: 1513829 - RNA, 19 nt, Artificial Sequence
  Description of Artificial Sequence: Synthetic oligonucleotide
  Antisense strand to SEQ ID NO: 1513828
uuggacaaggacuguuuca

SEQ ID NO: 1513830 - RNA, 19 nt, Artificial Sequence
  Description of Artificial Sequence: Synthetic oligonucleotide
  Sense strand starting at position 3001 of SEQ ID NO: 1244773
caccgauggccuggaaaca

SEQ ID NO: 1513831 - RNA, 19 nt, Artificial Sequence
  Description of Artificial Sequence: Synthetic oligonucleotide
  Antisense strand to SEQ ID NO: 1513830
uguuuccaggccaucggug

SEQ ID NO: 1513832 - RNA, 19 nt, Artificial Sequence
  Description of Artificial Sequence: Synthetic oligonucleotide
  Sense strand starting at position 3002 of SEQ ID NO: 1244773
accgauggccuggaaacau

SEQ ID NO: 1513833 - RNA, 19 nt, Artificial Sequence
  Description of Artificial Sequence: Synthetic oligonucleotide
  Antisense strand to SEQ ID NO: 1513832
auguuuccaggccaucggu

SEQ ID NO: 1513834 - RNA, 19 nt, Artificial Sequence
  Description of Artificial Sequence: Synthetic oligonucleotide
  Sense strand starting at position 3037 of SEQ ID NO: 1244773
cuuuauugcuuacaaagag

SEQ ID NO: 1513835 - RNA, 19 nt, Artificial Sequence
  Description of Artificial Sequence: Synthetic oligonucleotide
  Antisense strand to SEQ ID NO: 1513834
cucuuuguaagcaauaaag

SEQ ID NO: 1513836 - RNA, 19 nt, Artificial Sequence
  Description of Artificial Sequence: Synthetic oligonucleotide
  Sense strand starting at position 3129 of SEQ ID NO: 1244773
ggagcagucugacucaaug

SEQ ID NO: 1513837 - RNA, 19 nt, Artificial Sequence
  Description of Artificial Sequence: Synthetic oligonucleotide
  Antisense strand to SEQ ID NO: 1513836
cauugagucagacugcucc

SEQ ID NO: 1513838 - RNA, 19 nt, Artificial Sequence
  Description of Artificial Sequence: Synthetic oligonucleotide
  Sense strand starting at position 3162 of SEQ ID NO: 1244773
aaggcugucuuggcaagau

SEQ ID NO: 1513839 - RNA, 19 nt, Artificial Sequence
  Description of Artificial Sequence: Synthetic oligonucleotide
  Antisense strand to SEQ ID NO: 1513838
aucuugccaagacagccuu

SEQ ID NO: 1513840 - RNA, 19 nt, Artificial Sequence
  Description of Artificial Sequence: Synthetic oligonucleotide
  Sense strand starting at position 3170 of SEQ ID NO: 1244773
cuuggcaagaugugggaau

SEQ ID NO: 1513841 - RNA, 19 nt, Artificial Sequence
  Description of Artificial Sequence: Synthetic oligonucleotide
  Antisense strand to SEQ ID NO: 1513840
auucccacaucuugccaag

SEQ ID NO: 1513842 - RNA, 19 nt, Artificial Sequence
  Description of Artificial Sequence: Synthetic oligonucleotide
  Sense strand starting at position 3172 of SEQ ID NO: 1244773
uggcaagaugugggaauga

SEQ ID NO: 1513843 - RNA, 19 nt, Artificial Sequence
  Description of Artificial Sequence: Synthetic oligonucleotide
  Antisense strand to SEQ ID NO: 1513842
ucauucccacaucuugcca

SEQ ID NO: 1513844 - RNA, 19 nt, Artificial Sequence
  Description of Artificial Sequence: Synthetic oligonucleotide
  Sense strand starting at position 3265 of SEQ ID NO: 1244773
cugauuuaaugcuacguga

SEQ ID NO: 1513845 - RNA, 19 nt, Artificial Sequence
  Description of Artificial Sequence: Synthetic oligonucleotide
  Antisense strand to SEQ ID NO: 1513844
ucacguagcauuaaaucag

SEQ ID NO: 1513846 - RNA, 19 nt, Artificial Sequence
  Description of Artificial Sequence: Synthetic oligonucleotide
  Sense strand starting at position 3267 of SEQ ID NO: 1244773
gauuuaaugcuacgugagu

SEQ ID NO: 1513847 - RNA, 19 nt, Artificial Sequence
  Description of Artificial Sequence: Synthetic oligonucleotide
  Antisense strand to SEQ ID NO: 1513846
acucacguagcauuaaauc

SEQ ID NO: 1513848 - RNA, 19 nt, Artificial Sequence
  Description of Artificial Sequence: Synthetic oligonucleotide
  Sense strand starting at position 3336 of SEQ ID NO: 1244773
gggugcuauucuuagagaa

SEQ ID NO: 1513849 - RNA, 19 nt, Artificial Sequence
  Description of Artificial Sequence: Synthetic oligonucleotide
  Antisense strand to SEQ ID NO: 1513848
uucucuaagaauagcaccc

SEQ ID NO: 1513850 - RNA, 19 nt, Artificial Sequence
  Description of Artificial Sequence: Synthetic oligonucleotide
  Sense strand starting at position 3338 of SEQ ID NO: 1244773
gugcuauucuuagagaaau

SEQ ID NO: 1513851 - RNA, 19 nt, Artificial Sequence
  Description of Artificial Sequence: Synthetic oligonucleotide
  Antisense strand to SEQ ID NO: 1513850
auuucucuaagaauagcac

SEQ ID NO: 1513852 - RNA, 19 nt, Artificial Sequence
  Description of Artificial Sequence: Synthetic oligonucleotide
  Sense strand starting at position 3369 of SEQ ID NO: 1244773
ugaggagucacaugcaugu

SEQ ID NO: 1513853 - RNA, 19 nt, Artificial Sequence
  Description of Artificial Sequence: Synthetic oligonucleotide
  Antisense strand to SEQ ID NO: 1513852
acaugcaugugacuccuca

SEQ ID NO: 1513854 - RNA, 19 nt, Artificial Sequence
  Description of Artificial Sequence: Synthetic oligonucleotide
  Sense strand starting at position 3481 of SEQ ID NO: 1244773
augaaagugcuuugagguc

SEQ ID NO: 1513855 - RNA, 19 nt, Artificial Sequence
  Description of Artificial Sequence: Synthetic oligonucleotide
  Antisense strand to SEQ ID NO: 1513854
gaccucaaagcacuuucau

SEQ ID NO: 1513856 - RNA, 19 nt, Artificial Sequence
  Description of Artificial Sequence: Synthetic oligonucleotide
  Sense strand starting at position 3487 of SEQ ID NO: 1244773
gugcuuugaggucaucaga

SEQ ID NO: 1513857 - RNA, 19 nt, Artificial Sequence
  Description of Artificial Sequence: Synthetic oligonucleotide
  Antisense strand to SEQ ID NO: 1513856
ucugaugaccucaaagcac

SEQ ID NO: 1513858 - RNA, 19 nt, Artificial Sequence
  Description of Artificial Sequence: Synthetic oligonucleotide
  Sense strand starting at position 3550 of SEQ ID NO: 1244773
gggugagugucagugugau

SEQ ID NO: 1513859 - RNA, 19 nt, Artificial Sequence
  Description of Artificial Sequence: Synthetic oligonucleotide
  Antisense strand to SEQ ID NO: 1513858
aucacacugacacucaccc

SEQ ID NO: 1513860 - RNA, 19 nt, Artificial Sequence
  Description of Artificial Sequence: Synthetic oligonucleotide
  Sense strand starting at position 3926 of SEQ ID NO: 1244773
gguguauucuaccagggag

SEQ ID NO: 1513861 - RNA, 19 nt, Artificial Sequence
  Description of Artificial Sequence: Synthetic oligonucleotide
  Antisense strand to SEQ ID NO: 1513860
cucccugguagaauacacc

SEQ ID NO: 1513862 - RNA, 19 nt, Artificial Sequence
  Description of Artificial Sequence: Synthetic oligonucleotide
  Sense strand starting at position 106 of SEQ ID NO: 1244774
gaugaagagcugugaauaa

SEQ ID NO: 1513863 - RNA, 19 nt, Artificial Sequence
  Description of Artificial Sequence: Synthetic oligonucleotide
  Antisense strand to SEQ ID NO: 1513862
uuauucacagcucuucauc

SEQ ID NO: 1513864 - RNA, 19 nt, Artificial Sequence
  Description of Artificial Sequence: Synthetic oligonucleotide
  Sense strand starting at position 115 of SEQ ID NO: 1244774
cugugaauaagccaugaug

SEQ ID NO: 1513865 - RNA, 19 nt, Artificial Sequence
  Description of Artificial Sequence: Synthetic oligonucleotide
  Antisense strand to SEQ ID NO: 1513864
caucauggcuuauucacag

SEQ ID NO: 1513866 - RNA, 19 nt, Artificial Sequence
  Description of Artificial Sequence: Synthetic oligonucleotide
  Sense strand starting at position 117 of SEQ ID NO: 1244774
gugaauaagccaugauguc

SEQ ID NO: 1513867 - RNA, 19 nt, Artificial Sequence
  Description of Artificial Sequence: Synthetic oligonucleotide
  Antisense strand to SEQ ID NO: 1513866
gacaucauggcuuauucac

SEQ ID NO: 1513868 - RNA, 19 nt, Artificial Sequence
  Description of Artificial Sequence: Synthetic oligonucleotide
  Sense strand starting at position 361 of SEQ ID NO: 1244774
cagggucuuuccuugucaa

SEQ ID NO: 1513869 - RNA, 19 nt, Artificial Sequence
  Description of Artificial Sequence: Synthetic oligonucleotide
  Antisense strand to SEQ ID NO: 1513868
uugacaaggaaagacccug

SEQ ID NO: 1513870 - RNA, 19 nt, Artificial Sequence
  Description of Artificial Sequence: Synthetic oligonucleotide
  Sense strand starting at position 362 of SEQ ID NO: 1244774
agggucuuuccuugucaac

SEQ ID NO: 1513871 - RNA, 19 nt, Artificial Sequence
  Description of Artificial Sequence: Synthetic oligonucleotide
  Antisense strand to SEQ ID NO: 1513870
guugacaaggaaagacccu

SEQ ID NO: 1513872 - RNA, 19 nt, Artificial Sequence
  Description of Artificial Sequence: Synthetic oligonucleotide
  Sense strand starting at position 527 of SEQ ID NO: 1244774
agugcagaccuuuauuaag

SEQ ID NO: 1513873 - RNA, 19 nt, Artificial Sequence
  Description of Artificial Sequence: Synthetic oligonucleotide
  Antisense strand to SEQ ID NO: 1513872
cuuaauaaaggucugcacu

SEQ ID NO: 1513874 - RNA, 19 nt, Artificial Sequence
  Description of Artificial Sequence: Synthetic oligonucleotide
  Sense strand starting at position 606 of SEQ ID NO: 1244774
gagggcauauucuucuuau

SEQ ID NO: 1513875 - RNA, 19 nt, Artificial Sequence
  Description of Artificial Sequence: Synthetic oligonucleotide
  Antisense strand to SEQ ID NO: 1513874
auaagaagaauaugcccuc

SEQ ID NO: 1513876 - RNA, 19 nt, Artificial Sequence
  Description of Artificial Sequence: Synthetic oligonucleotide
  Sense strand starting at position 607 of SEQ ID NO: 1244774
agggcauauucuucuuauu

SEQ ID NO: 1513877 - RNA, 19 nt, Artificial Sequence
  Description of Artificial Sequence: Synthetic oligonucleotide
  Antisense strand to SEQ ID NO: 1513876
aauaagaagaauaugcccu

SEQ ID NO: 1513878 - RNA, 19 nt, Artificial Sequence
  Description of Artificial Sequence: Synthetic oligonucleotide
  Sense strand starting at position 612 of SEQ ID NO: 1244774
auauucuucuuauugggaa

SEQ ID NO: 1513879 - RNA, 19 nt, Artificial Sequence
  Description of Artificial Sequence: Synthetic oligonucleotide
  Antisense strand to SEQ ID NO: 1513878
uucccaauaagaagaauau

SEQ ID NO: 1513880 - RNA, 19 nt, Artificial Sequence
  Description of Artificial Sequence: Synthetic oligonucleotide
  Sense strand starting at position 626 of SEQ ID NO: 1244774
gggaaagugugauuauuga

SEQ ID NO: 1513881 - RNA, 19 nt, Artificial Sequence
  Description of Artificial Sequence: Synthetic oligonucleotide
  Antisense strand to SEQ ID NO: 1513880
ucaauaaucacacuuuccc

SEQ ID NO: 1513882 - RNA, 19 nt, Artificial Sequence
  Description of Artificial Sequence: Synthetic oligonucleotide
  Sense strand starting at position 969 of SEQ ID NO: 1244774
ugccauugaucaccuuaga

SEQ ID NO: 1513883 - RNA, 19 nt, Artificial Sequence
  Description of Artificial Sequence: Synthetic oligonucleotide
  Antisense strand to SEQ ID NO: 1513882
ucuaaggugaucaauggca

SEQ ID NO: 1513884 - RNA, 19 nt, Artificial Sequence
  Description of Artificial Sequence: Synthetic oligonucleotide
  Sense strand starting at position 2042 of SEQ ID NO: 1244774
gaugucaucggucauucca

SEQ ID NO: 1513885 - RNA, 19 nt, Artificial Sequence
  Description of Artificial Sequence: Synthetic oligonucleotide
  Antisense strand to SEQ ID NO: 1513884
uggaaugaccgaugacauc

SEQ ID NO: 1513886 - RNA, 19 nt, Artificial Sequence
  Description of Artificial Sequence: Synthetic oligonucleotide
  Sense strand starting at position 2064 of SEQ ID NO: 1244774
uggcaacuacuuugaagaa

SEQ ID NO: 1513887 - RNA, 19 nt, Artificial Sequence
  Description of Artificial Sequence: Synthetic oligonucleotide
  Antisense strand to SEQ ID NO: 1513886
uucuucaaaguaguugcca

SEQ ID NO: 1513888 - RNA, 19 nt, Artificial Sequence
  Description of Artificial Sequence: Synthetic oligonucleotide
  Sense strand starting at position 2089 of SEQ ID NO: 1244774
auguaacugccagacugau

SEQ ID NO: 1513889 - RNA, 19 nt, Artificial Sequence
  Description of Artificial Sequence: Synthetic oligonucleotide
  Antisense strand to SEQ ID NO: 1513888
aucagucuggcaguuacau

SEQ ID NO: 1513890 - RNA, 19 nt, Artificial Sequence
  Description of Artificial Sequence: Synthetic oligonucleotide
  Sense strand starting at position 2095 of SEQ ID NO: 1244774
cugccagacugaucucuuu

SEQ ID NO: 1513891 - RNA, 19 nt, Artificial Sequence
  Description of Artificial Sequence: Synthetic oligonucleotide
  Antisense strand to SEQ ID NO: 1513890
aaagagaucagucuggcag

SEQ ID NO: 1513892 - RNA, 19 nt, Artificial Sequence
  Description of Artificial Sequence: Synthetic oligonucleotide
  Sense strand starting at position 2157 of SEQ ID NO: 1244774
accucugagcauuguccaa

SEQ ID NO: 1513893 - RNA, 19 nt, Artificial Sequence
  Description of Artificial Sequence: Synthetic oligonucleotide
  Antisense strand to SEQ ID NO: 1513892
uuggacaaugcucagaggu

SEQ ID NO: 1513894 - RNA, 19 nt, Artificial Sequence
  Description of Artificial Sequence: Synthetic oligonucleotide
  Sense strand starting at position 2347 of SEQ ID NO: 1244774
aaugaugaguccuuccaag

SEQ ID NO: 1513895 - RNA, 19 nt, Artificial Sequence
  Description of Artificial Sequence: Synthetic oligonucleotide
  Antisense strand to SEQ ID NO: 1513894
cuuggaaggacucaucauu

SEQ ID NO: 1513896 - RNA, 19 nt, Artificial Sequence
  Description of Artificial Sequence: Synthetic oligonucleotide
  Sense strand starting at position 2356 of SEQ ID NO: 1244774
uccuuccaagagugagauu

SEQ ID NO: 1513897 - RNA, 19 nt, Artificial Sequence
  Description of Artificial Sequence: Synthetic oligonucleotide
  Antisense strand to SEQ ID NO: 1513896
aaucucacucuuggaagga

SEQ ID NO: 1513898 - RNA, 19 nt, Artificial Sequence
  Description of Artificial Sequence: Synthetic oligonucleotide
  Sense strand starting at position 2395 of SEQ ID NO: 1244774
gguaaauugacuuguugaa

SEQ ID NO: 1513899 - RNA, 19 nt, Artificial Sequence
  Description of Artificial Sequence: Synthetic oligonucleotide
  Antisense strand to SEQ ID NO: 1513898
uucaacaagucaauuuacc

SEQ ID NO: 1513900 - RNA, 19 nt, Artificial Sequence
  Description of Artificial Sequence: Synthetic oligonucleotide
  Sense strand starting at position 2402 of SEQ ID NO: 1244774
ugacuuguugaauggagac

SEQ ID NO: 1513901 - RNA, 19 nt, Artificial Sequence
  Description of Artificial Sequence: Synthetic oligonucleotide
  Antisense strand to SEQ ID NO: 1513900
gucuccauucaacaaguca

SEQ ID NO: 1513902 - RNA, 19 nt, Artificial Sequence
  Description of Artificial Sequence: Synthetic oligonucleotide
  Sense strand starting at position 2457 of SEQ ID NO: 1244774
gcugaauguuuacugauau

SEQ ID NO: 1513903 - RNA, 19 nt, Artificial Sequence
  Description of Artificial Sequence: Synthetic oligonucleotide
  Antisense strand to SEQ ID NO: 1513902
auaucaguaaacauucagc

SEQ ID NO: 1513904 - RNA, 19 nt, Artificial Sequence
  Description of Artificial Sequence: Synthetic oligonucleotide
  Sense strand starting at position 2660 of SEQ ID NO: 1244774
aaggaacucuggucuauau

SEQ ID NO: 1513905 - RNA, 19 nt, Artificial Sequence
  Description of Artificial Sequence: Synthetic oligonucleotide
  Antisense strand to SEQ ID NO: 1513904
auauagaccagaguuccuu

SEQ ID NO: 1513906 - RNA, 19 nt, Artificial Sequence
  Description of Artificial Sequence: Synthetic oligonucleotide
  Sense strand starting at position 2719 of SEQ ID NO: 1244774
uuugccuacuauuuaugua

SEQ ID NO: 1513907 - RNA, 19 nt, Artificial Sequence
  Description of Artificial Sequence: Synthetic oligonucleotide
  Antisense strand to SEQ ID NO: 1513906
uacauaaauaguaggcaaa

SEQ ID NO: 1513908 - RNA, 19 nt, Artificial Sequence
  Description of Artificial Sequence: Synthetic oligonucleotide
  Sense strand starting at position 2722 of SEQ ID NO: 1244774
gccuacuauuuauguauuu

SEQ ID NO: 1513909 - RNA, 19 nt, Artificial Sequence
  Description of Artificial Sequence: Synthetic oligonucleotide
  Antisense strand to SEQ ID NO: 1513908
aaauacauaaauaguaggc

SEQ ID NO: 1513910 - RNA, 19 nt, Artificial Sequence
  Description of Artificial Sequence: Synthetic oligonucleotide
  Sense strand starting at position 2915 of SEQ ID NO: 1244774
caaaguaaucaggaaucgu

SEQ ID NO: 1513911 - RNA, 19 nt, Artificial Sequence
  Description of Artificial Sequence: Synthetic oligonucleotide
  Antisense strand to SEQ ID NO: 1513910
acgauuccugauuacuuug

SEQ ID NO: 1513912 - RNA, 19 nt, Artificial Sequence
  Description of Artificial Sequence: Synthetic oligonucleotide
  Sense strand starting at position 3094 of SEQ ID NO: 1244774
aauguaagagcuggauacu

SEQ ID NO: 1513913 - RNA, 19 nt, Artificial Sequence
  Description of Artificial Sequence: Synthetic oligonucleotide
  Antisense strand to SEQ ID NO: 1513912
aguauccagcucuuacauu

SEQ ID NO: 1513914 - RNA, 19 nt, Artificial Sequence
  Description of Artificial Sequence: Synthetic oligonucleotide
  Sense strand starting at position 3097 of SEQ ID NO: 1244774
guaagagcuggauacuauc

SEQ ID NO: 1513915 - RNA, 19 nt, Artificial Sequence
  Description of Artificial Sequence: Synthetic oligonucleotide
  Antisense strand to SEQ ID NO: 1513914
gauaguauccagcucuuac

SEQ ID NO: 1513916 - RNA, 19 nt, Artificial Sequence
  Description of Artificial Sequence: Synthetic oligonucleotide
  Sense strand starting at position 3103 of SEQ ID NO: 1244774
gcuggauacuaucucagau

SEQ ID NO: 1513917 - RNA, 19 nt, Artificial Sequence
  Description of Artificial Sequence: Synthetic oligonucleotide
  Antisense strand to SEQ ID NO: 1513916
aucugagauaguauccagc

SEQ ID NO: 1513918 - RNA, 19 nt, Artificial Sequence
  Description of Artificial Sequence: Synthetic oligonucleotide
  Sense strand starting at position 3231 of SEQ ID NO: 1244774
gaaguccaauuguuaggaa

SEQ ID NO: 1513919 - RNA, 19 nt, Artificial Sequence
  Description of Artificial Sequence: Synthetic oligonucleotide
  Antisense strand to SEQ ID NO: 1513918
uuccuaacaauuggacuuc

SEQ ID NO: 1513920 - RNA, 19 nt, Artificial Sequence
  Description of Artificial Sequence: Synthetic oligonucleotide
  Sense strand starting at position 3243 of SEQ ID NO: 1244774
uuaggaaacucugcuuaca

SEQ ID NO: 1513921 - RNA, 19 nt, Artificial Sequence
  Description of Artificial Sequence: Synthetic oligonucleotide
  Antisense strand to SEQ ID NO: 1513920
uguaagcagaguuuccuaa

SEQ ID NO: 1513922 - RNA, 19 nt, Artificial Sequence
  Description of Artificial Sequence: Synthetic oligonucleotide
  Sense strand starting at position 3245 of SEQ ID NO: 1244774
aggaaacucugcuuacauu

SEQ ID NO: 1513923 - RNA, 19 nt, Artificial Sequence
  Description of Artificial Sequence: Synthetic oligonucleotide
  Antisense strand to SEQ ID NO: 1513922
aauguaagcagaguuuccu

SEQ ID NO: 1513924 - RNA, 19 nt, Artificial Sequence
  Description of Artificial Sequence: Synthetic oligonucleotide
  Sense strand starting at position 3408 of SEQ ID NO: 1244774
uucuguaccacguaaaguu

SEQ ID NO: 1513925 - RNA, 19 nt, Artificial Sequence
  Description of Artificial Sequence: Synthetic oligonucleotide
  Antisense strand to SEQ ID NO: 1513924
aacuuuacgugguacagaa

SEQ ID NO: 1513926 - RNA, 19 nt, Artificial Sequence
  Description of Artificial Sequence: Synthetic oligonucleotide
  Sense strand starting at position 3520 of SEQ ID NO: 1244774
augucaauacauuguccaa

SEQ ID NO: 1513927 - RNA, 19 nt, Artificial Sequence
  Description of Artificial Sequence: Synthetic oligonucleotide
  Antisense strand to SEQ ID NO: 1513926
uuggacaauguauugacau

SEQ ID NO: 1513928 - RNA, 19 nt, Artificial Sequence
  Description of Artificial Sequence: Synthetic oligonucleotide
  Sense strand starting at position 3620 of SEQ ID NO: 1244774
agugaugcagguuaauaca

SEQ ID NO: 1513929 - RNA, 19 nt, Artificial Sequence
  Description of Artificial Sequence: Synthetic oligonucleotide
  Antisense strand to SEQ ID NO: 1513928
uguauuaaccugcaucacu

SEQ ID NO: 1513930 - RNA, 19 nt, Artificial Sequence
  Description of Artificial Sequence: Synthetic oligonucleotide
  Sense strand starting at position 3648 of SEQ ID NO: 1244774
guagcuaugcaccaaagau

SEQ ID NO: 1513931 - RNA, 19 nt, Artificial Sequence
  Description of Artificial Sequence: Synthetic oligonucleotide
  Antisense strand to SEQ ID NO: 1513930
aucuuuggugcauagcuac

SEQ ID NO: 1513932 - RNA, 19 nt, Artificial Sequence
  Description of Artificial Sequence: Synthetic oligonucleotide
  Sense strand starting at position 3716 of SEQ ID NO: 1244774
gccugucaucccuacacuu

SEQ ID NO: 1513933 - RNA, 19 nt, Artificial Sequence
  Description of Artificial Sequence: Synthetic oligonucleotide
  Antisense strand to SEQ ID NO: 1513932
aaguguagggaugacaggc

SEQ ID NO: 1513934 - RNA, 19 nt, Artificial Sequence
  Description of Artificial Sequence: Synthetic oligonucleotide
  Sense strand starting at position 3774 of SEQ ID NO: 1244774
uggagaugagucugaguaa

SEQ ID NO: 1513935 - RNA, 19 nt, Artificial Sequence
  Description of Artificial Sequence: Synthetic oligonucleotide
  Antisense strand to SEQ ID NO: 1513934
uuacucagacucaucucca

SEQ ID NO: 1513936 - RNA, 19 nt, Artificial Sequence
  Description of Artificial Sequence: Synthetic oligonucleotide
  Sense strand starting at position 3777 of SEQ ID NO: 1244774
agaugagucugaguaacgu

SEQ ID NO: 1513937 - RNA, 19 nt, Artificial Sequence
  Description of Artificial Sequence: Synthetic oligonucleotide
  Antisense strand to SEQ ID NO: 1513936
acguuacucagacucaucu

SEQ ID NO: 1513938 - RNA, 19 nt, Artificial Sequence
  Description of Artificial Sequence: Synthetic oligonucleotide
  Sense strand starting at position 3875 of SEQ ID NO: 1244774
ggcugaguuuggaggagaa

SEQ ID NO: 1513939 - RNA, 19 nt, Artificial Sequence
  Description of Artificial Sequence: Synthetic oligonucleotide
  Antisense strand to SEQ ID NO: 1513938
uucuccuccaaacucagcc

SEQ ID NO: 1513940 - RNA, 19 nt, Artificial Sequence
  Description of Artificial Sequence: Synthetic oligonucleotide
  Sense strand starting at position 3891 of SEQ ID NO: 1244774
gaagaagugcuuugcaaau

SEQ ID NO: 1513941 - RNA, 19 nt, Artificial Sequence
  Description of Artificial Sequence: Synthetic oligonucleotide
  Antisense strand to SEQ ID NO: 1513940
auuugcaaagcacuucuuc

SEQ ID NO: 1513942 - RNA, 19 nt, Artificial Sequence
  Description of Artificial Sequence: Synthetic oligonucleotide
  Sense strand starting at position 354 of SEQ ID NO: 1244775
aggacucuucucugcacuu

SEQ ID NO: 1513943 - RNA, 19 nt, Artificial Sequence
  Description of Artificial Sequence: Synthetic oligonucleotide
  Antisense strand to SEQ ID NO: 1513942
aagugcagagaagaguccu

SEQ ID NO: 1513944 - RNA, 19 nt, Artificial Sequence
  Description of Artificial Sequence: Synthetic oligonucleotide
  Sense strand starting at position 417 of SEQ ID NO: 1244775
agggccucccuguaugaau

SEQ ID NO: 1513945 - RNA, 19 nt, Artificial Sequence
  Description of Artificial Sequence: Synthetic oligonucleotide
  Antisense strand to SEQ ID NO: 1513944
auucauacagggaggcccu

SEQ ID NO: 1513946 - RNA, 19 nt, Artificial Sequence
  Description of Artificial Sequence: Synthetic oligonucleotide
  Sense strand starting at position 526 of SEQ ID NO: 1244775
aaucgucucucuucuggaa

SEQ ID NO: 1513947 - RNA, 19 nt, Artificial Sequence
  Description of Artificial Sequence: Synthetic oligonucleotide
  Antisense strand to SEQ ID NO: 1513946
uuccagaagagagacgauu

SEQ ID NO: 1513948 - RNA, 19 nt, Artificial Sequence
  Description of Artificial Sequence: Synthetic oligonucleotide
  Sense strand starting at position 863 of SEQ ID NO: 1244775
gugaaagcccaaggucuuu

SEQ ID NO: 1513949 - RNA, 19 nt, Artificial Sequence
  Description of Artificial Sequence: Synthetic oligonucleotide
  Antisense strand to SEQ ID NO: 1513948
aaagaccuugggcuuucac

SEQ ID NO: 1513950 - RNA, 19 nt, Artificial Sequence
  Description of Artificial Sequence: Synthetic oligonucleotide
  Sense strand starting at position 1000 of SEQ ID NO: 1244775
gcuaguucccaaggaagag

SEQ ID NO: 1513951 - RNA, 19 nt, Artificial Sequence
  Description of Artificial Sequence: Synthetic oligonucleotide
  Antisense strand to SEQ ID NO: 1513950
cucuuccuugggaacuagc

SEQ ID NO: 1513952 - RNA, 19 nt, Artificial Sequence
  Description of Artificial Sequence: Synthetic oligonucleotide
  Sense strand starting at position 1104 of SEQ ID NO: 1244775
caaggugcuuccucuagga

SEQ ID NO: 1513953 - RNA, 19 nt, Artificial Sequence
  Description of Artificial Sequence: Synthetic oligonucleotide
  Antisense strand to SEQ ID NO: 1513952
uccuagaggaagcaccuug

SEQ ID NO: 1513954 - RNA, 19 nt, Artificial Sequence
  Description of Artificial Sequence: Synthetic oligonucleotide
  Sense strand starting at position 1130 of SEQ ID NO: 1244775
uucuuauacucucuagagu

SEQ ID NO: 1513955 - RNA, 19 nt, Artificial Sequence
  Description of Artificial Sequence: Synthetic oligonucleotide
  Antisense strand to SEQ ID NO: 1513954
acucuagagaguauaagaa

SEQ ID NO: 1513956 - RNA, 19 nt, Artificial Sequence
  Description of Artificial Sequence: Synthetic oligonucleotide
  Sense strand starting at position 1131 of SEQ ID NO: 1244775
ucuuauacucucuagagua

SEQ ID NO: 1513957 - RNA, 19 nt, Artificial Sequence
  Description of Artificial Sequence: Synthetic oligonucleotide
  Antisense strand to SEQ ID NO: 1513956
uacucuagagaguauaaga

SEQ ID NO: 1513958 - RNA, 19 nt, Artificial Sequence
  Description of Artificial Sequence: Synthetic oligonucleotide
  Sense strand starting at position 1208 of SEQ ID NO: 1244775
ugaagacucucacugccau

SEQ ID NO: 1513959 - RNA, 19 nt, Artificial Sequence
  Description of Artificial Sequence: Synthetic oligonucleotide
  Antisense strand to SEQ ID NO: 1513958
auggcagugagagucuuca

SEQ ID NO: 1513960 - RNA, 19 nt, Artificial Sequence
  Description of Artificial Sequence: Synthetic oligonucleotide
  Sense strand starting at position 1215 of SEQ ID NO: 1244775
ucucacugccaucgauuau

SEQ ID NO: 1513961 - RNA, 19 nt, Artificial Sequence
  Description of Artificial Sequence: Synthetic oligonucleotide
  Antisense strand to SEQ ID NO: 1513960
auaaucgauggcagugaga

SEQ ID NO: 1513962 - RNA, 19 nt, Artificial Sequence
  Description of Artificial Sequence: Synthetic oligonucleotide
  Sense strand starting at position 1281 of SEQ ID NO: 1244775
gggaagguccgugauagca

SEQ ID NO: 1513963 - RNA, 19 nt, Artificial Sequence
  Description of Artificial Sequence: Synthetic oligonucleotide
  Antisense strand to SEQ ID NO: 1513962
ugcuaucacggaccuuccc

SEQ ID NO: 1513964 - RNA, 19 nt, Artificial Sequence
  Description of Artificial Sequence: Synthetic oligonucleotide
  Sense strand starting at position 1327 of SEQ ID NO: 1244775
guguuccuggcacauaaua

SEQ ID NO: 1513965 - RNA, 19 nt, Artificial Sequence
  Description of Artificial Sequence: Synthetic oligonucleotide
  Antisense strand to SEQ ID NO: 1513964
uauuaugugccaggaacac

SEQ ID NO: 1513966 - RNA, 19 nt, Artificial Sequence
  Description of Artificial Sequence: Synthetic oligonucleotide
  Sense strand starting at position 1475 of SEQ ID NO: 1244775
aggagccacucacuaaaua

SEQ ID NO: 1513967 - RNA, 19 nt, Artificial Sequence
  Description of Artificial Sequence: Synthetic oligonucleotide
  Antisense strand to SEQ ID NO: 1513966
uauuuagugaguggcuccu

SEQ ID NO: 1513968 - RNA, 19 nt, Artificial Sequence
  Description of Artificial Sequence: Synthetic oligonucleotide
  Sense strand starting at position 1677 of SEQ ID NO: 1244775
caugcugauguguaagcau

SEQ ID NO: 1513969 - RNA, 19 nt, Artificial Sequence
  Description of Artificial Sequence: Synthetic oligonucleotide
  Antisense strand to SEQ ID NO: 1513968
augcuuacacaucagcaug

SEQ ID NO: 1513970 - RNA, 19 nt, Artificial Sequence
  Description of Artificial Sequence: Synthetic oligonucleotide
  Sense strand starting at position 1684 of SEQ ID NO: 1244775
auguguaagcaucaguguu

SEQ ID NO: 1513971 - RNA, 19 nt, Artificial Sequence
  Description of Artificial Sequence: Synthetic oligonucleotide
  Antisense strand to SEQ ID NO: 1513970
aacacugaugcuuacacau

SEQ ID NO: 1513972 - RNA, 19 nt, Artificial Sequence
  Description of Artificial Sequence: Synthetic oligonucleotide
  Sense strand starting at position 1725 of SEQ ID NO: 1244775
cacagucaugcuugagaaa

SEQ ID NO: 1513973 - RNA, 19 nt, Artificial Sequence
  Description of Artificial Sequence: Synthetic oligonucleotide
  Antisense strand to SEQ ID NO: 1513972
uuucucaagcaugacugug

SEQ ID NO: 1513974 - RNA, 19 nt, Artificial Sequence
  Description of Artificial Sequence: Synthetic oligonucleotide
  Sense strand starting at position 1726 of SEQ ID NO: 1244775
acagucaugcuugagaaau

SEQ ID NO: 1513975 - RNA, 19 nt, Artificial Sequence
  Description of Artificial Sequence: Synthetic oligonucleotide
  Antisense strand to SEQ ID NO: 1513974
auuucucaagcaugacugu

SEQ ID NO: 1513976 - RNA, 19 nt, Artificial Sequence
  Description of Artificial Sequence: Synthetic oligonucleotide
  Sense strand starting at position 1962 of SEQ ID NO: 1244775
gucugaguaccuuaucuuu

SEQ ID NO: 1513977 - RNA, 19 nt, Artificial Sequence
  Description of Artificial Sequence: Synthetic oligonucleotide
  Antisense strand to SEQ ID NO: 1513976
aaagauaagguacucagac

SEQ ID NO: 1513978 - RNA, 19 nt, Artificial Sequence
  Description of Artificial Sequence: Synthetic oligonucleotide
  Sense strand starting at position 2175 of SEQ ID NO: 1244775
cucugugugcucuaccaac

SEQ ID NO: 1513979 - RNA, 19 nt, Artificial Sequence
  Description of Artificial Sequence: Synthetic oligonucleotide
  Antisense strand to SEQ ID NO: 1513978
guugguagagcacacagag

SEQ ID NO: 1513980 - RNA, 19 nt, Artificial Sequence
  Description of Artificial Sequence: Synthetic oligonucleotide
  Sense strand starting at position 2502 of SEQ ID NO: 1244775
gccagagggugaucucaua

SEQ ID NO: 1513981 - RNA, 19 nt, Artificial Sequence
  Description of Artificial Sequence: Synthetic oligonucleotide
  Antisense strand to SEQ ID NO: 1513980
uaugagaucacccucuggc

SEQ ID NO: 1513982 - RNA, 19 nt, Artificial Sequence
  Description of Artificial Sequence: Synthetic oligonucleotide
  Sense strand starting at position 2676 of SEQ ID NO: 1244775
aagggucuccugggauaac

SEQ ID NO: 1513983 - RNA, 19 nt, Artificial Sequence
  Description of Artificial Sequence: Synthetic oligonucleotide
  Antisense strand to SEQ ID NO: 1513982
guuaucccaggagacccuu

SEQ ID NO: 1513984 - RNA, 19 nt, Artificial Sequence
  Description of Artificial Sequence: Synthetic oligonucleotide
  Sense strand starting at position 2686 of SEQ ID NO: 1244775
ugggauaacacuuggccua

SEQ ID NO: 1513985 - RNA, 19 nt, Artificial Sequence
  Description of Artificial Sequence: Synthetic oligonucleotide
  Antisense strand to SEQ ID NO: 1513984
uaggccaaguguuauccca

SEQ ID NO: 1513986 - RNA, 19 nt, Artificial Sequence
  Description of Artificial Sequence: Synthetic oligonucleotide
  Sense strand starting at position 2773 of SEQ ID NO: 1244775
uucugaggccuccaccaua

SEQ ID NO: 1513987 - RNA, 19 nt, Artificial Sequence
  Description of Artificial Sequence: Synthetic oligonucleotide
  Antisense strand to SEQ ID NO: 1513986
uaugguggaggccucagaa

SEQ ID NO: 1513988 - RNA, 19 nt, Artificial Sequence
  Description of Artificial Sequence: Synthetic oligonucleotide
  Sense strand starting at position 2813 of SEQ ID NO: 1244775
ugcugaagacuuggcacua

SEQ ID NO: 1513989 - RNA, 19 nt, Artificial Sequence
  Description of Artificial Sequence: Synthetic oligonucleotide
  Antisense strand to SEQ ID NO: 1513988
uagugccaagucuucagca

SEQ ID NO: 1513990 - RNA, 19 nt, Artificial Sequence
  Description of Artificial Sequence: Synthetic oligonucleotide
  Sense strand starting at position 2814 of SEQ ID NO: 1244775
gcugaagacuuggcacuau

SEQ ID NO: 1513991 - RNA, 19 nt, Artificial Sequence
  Description of Artificial Sequence: Synthetic oligonucleotide
  Antisense strand to SEQ ID NO: 1513990
auagugccaagucuucagc

SEQ ID NO: 1513992 - RNA, 19 nt, Artificial Sequence
  Description of Artificial Sequence: Synthetic oligonucleotide
  Sense strand starting at position 3270 of SEQ ID NO: 1244775
uugccagauuaaguuaaau

SEQ ID NO: 1513993 - RNA, 19 nt, Artificial Sequence
  Description of Artificial Sequence: Synthetic oligonucleotide
  Antisense strand to SEQ ID NO: 1513992
auuuaacuuaaucuggcaa

SEQ ID NO: 1513994 - RNA, 19 nt, Artificial Sequence
  Description of Artificial Sequence: Synthetic oligonucleotide
  Sense strand starting at position 3373 of SEQ ID NO: 1244775
gugccagcuggcuaaugaa

SEQ ID NO: 1513995 - RNA, 19 nt, Artificial Sequence
  Description of Artificial Sequence: Synthetic oligonucleotide
  Antisense strand to SEQ ID NO: 1513994
uucauuagccagcuggcac

SEQ ID NO: 1513996 - RNA, 19 nt, Artificial Sequence
  Description of Artificial Sequence: Synthetic oligonucleotide
  Sense strand starting at position 3432 of SEQ ID NO: 1244775
uggaauaugcccuauccuu

SEQ ID NO: 1513997 - RNA, 19 nt, Artificial Sequence
  Description of Artificial Sequence: Synthetic oligonucleotide
  Antisense strand to SEQ ID NO: 1513996
aaggauagggcauauucca

SEQ ID NO: 1513998 - RNA, 19 nt, Artificial Sequence
  Description of Artificial Sequence: Synthetic oligonucleotide
  Sense strand starting at position 3445 of SEQ ID NO: 1244775
auccuucgucagcaucaau

SEQ ID NO: 1513999 - RNA, 19 nt, Artificial Sequence
  Description of Artificial Sequence: Synthetic oligonucleotide
  Antisense strand to SEQ ID NO: 1513998
auugaugcugacgaaggau

SEQ ID NO: 1514000 - RNA, 19 nt, Artificial Sequence
  Description of Artificial Sequence: Synthetic oligonucleotide
  Sense strand starting at position 3499 of SEQ ID NO: 1244775
ccacaaauacgacggauaa

SEQ ID NO: 1514001 - RNA, 19 nt, Artificial Sequence
  Description of Artificial Sequence: Synthetic oligonucleotide
  Antisense strand to SEQ ID NO: 1514000
uuauccgucguauuugugg

SEQ ID NO: 1514002 - RNA, 19 nt, Artificial Sequence
  Description of Artificial Sequence: Synthetic oligonucleotide
  Sense strand starting at position 3500 of SEQ ID NO: 1244775
cacaaauacgacggauaau

SEQ ID NO: 1514003 - RNA, 19 nt, Artificial Sequence
  Description of Artificial Sequence: Synthetic oligonucleotide
  Antisense strand to SEQ ID NO: 1514002
auuauccgucguauuugug

SEQ ID NO: 1514004 - RNA, 19 nt, Artificial Sequence
  Description of Artificial Sequence: Synthetic oligonucleotide
  Sense strand starting at position 3523 of SEQ ID NO: 1244775
caggcugcuccugggauua

SEQ ID NO: 1514005 - RNA, 19 nt, Artificial Sequence
  Description of Artificial Sequence: Synthetic oligonucleotide
  Antisense strand to SEQ ID NO: 1514004
uaaucccaggagcagccug

SEQ ID NO: 1514006 - RNA, 19 nt, Artificial Sequence
  Description of Artificial Sequence: Synthetic oligonucleotide
  Sense strand starting at position 3533 of SEQ ID NO: 1244775
cugggauuaccuugucauu

SEQ ID NO: 1514007 - RNA, 19 nt, Artificial Sequence
  Description of Artificial Sequence: Synthetic oligonucleotide
  Antisense strand to SEQ ID NO: 1514006
aaugacaagguaaucccag

SEQ ID NO: 1514008 - RNA, 19 nt, Artificial Sequence
  Description of Artificial Sequence: Synthetic oligonucleotide
  Sense strand starting at position 3535 of SEQ ID NO: 1244775
gggauuaccuugucauuac

SEQ ID NO: 1514009 - RNA, 19 nt, Artificial Sequence
  Description of Artificial Sequence: Synthetic oligonucleotide
  Antisense strand to SEQ ID NO: 1514008
guaaugacaagguaauccc

SEQ ID NO: 1514010 - RNA, 19 nt, Artificial Sequence
  Description of Artificial Sequence: Synthetic oligonucleotide
  Sense strand starting at position 3556 of SEQ ID NO: 1244775
guuccuugcacaggaguaa

SEQ ID NO: 1514011 - RNA, 19 nt, Artificial Sequence
  Description of Artificial Sequence: Synthetic oligonucleotide
  Antisense strand to SEQ ID NO: 1514010
uuacuccugugcaaggaac

SEQ ID NO: 1514012 - RNA, 19 nt, Artificial Sequence
  Description of Artificial Sequence: Synthetic oligonucleotide
  Sense strand starting at position 3601 of SEQ ID NO: 1244775
acugcugugcgaucuguuu

SEQ ID NO: 1514013 - RNA, 19 nt, Artificial Sequence
  Description of Artificial Sequence: Synthetic oligonucleotide
  Antisense strand to SEQ ID NO: 1514012
aaacagaucgcacagcagu

SEQ ID NO: 1514014 - RNA, 19 nt, Artificial Sequence
  Description of Artificial Sequence: Synthetic oligonucleotide
  Sense strand starting at position 3672 of SEQ ID NO: 1244775
ggaugugcccuuuaugaca

SEQ ID NO: 1514015 - RNA, 19 nt, Artificial Sequence
  Description of Artificial Sequence: Synthetic oligonucleotide
  Antisense strand to SEQ ID NO: 1514014
ugucauaaagggcacaucc

SEQ ID NO: 1514016 - RNA, 19 nt, Artificial Sequence
  Description of Artificial Sequence: Synthetic oligonucleotide
  Sense strand starting at position 3781 of SEQ ID NO: 1244775
cuccucuuuguuggaggau

SEQ ID NO: 1514017 - RNA, 19 nt, Artificial Sequence
  Description of Artificial Sequence: Synthetic oligonucleotide
  Antisense strand to SEQ ID NO: 1514016
auccuccaacaaagaggag

SEQ ID NO: 1514018 - RNA, 19 nt, Artificial Sequence
  Description of Artificial Sequence: Synthetic oligonucleotide
  Sense strand starting at position 3784 of SEQ ID NO: 1244775
cucuuuguuggaggauaag

SEQ ID NO: 1514019 - RNA, 19 nt, Artificial Sequence
  Description of Artificial Sequence: Synthetic oligonucleotide
  Antisense strand to SEQ ID NO: 1514018
cuuauccuccaacaaagag

SEQ ID NO: 1514020 - RNA, 19 nt, Artificial Sequence
  Description of Artificial Sequence: Synthetic oligonucleotide
  Sense strand starting at position 3896 of SEQ ID NO: 1244775
cagggaugcugaguucuau

SEQ ID NO: 1514021 - RNA, 19 nt, Artificial Sequence
  Description of Artificial Sequence: Synthetic oligonucleotide
  Antisense strand to SEQ ID NO: 1514020
auagaacucagcaucccug

SEQ ID NO: 1514022 - RNA, 19 nt, Artificial Sequence
  Description of Artificial Sequence: Synthetic oligonucleotide
  Sense strand starting at position 22 of SEQ ID NO: 1244776
acgaauuucuagccaggca

SEQ ID NO: 1514023 - RNA, 19 nt, Artificial Sequence
  Description of Artificial Sequence: Synthetic oligonucleotide
  Antisense strand to SEQ ID NO: 1514022
ugccuggcuagaaauucgu

SEQ ID NO: 1514024 - RNA, 19 nt, Artificial Sequence
  Description of Artificial Sequence: Synthetic oligonucleotide
  Sense strand starting at position 157 of SEQ ID NO: 1244776
cccuaaauccgguaucuuc

SEQ ID NO: 1514025 - RNA, 19 nt, Artificial Sequence
  Description of Artificial Sequence: Synthetic oligonucleotide
  Antisense strand to SEQ ID NO: 1514024
gaagauaccggauuuaggg

SEQ ID NO: 1514026 - RNA, 19 nt, Artificial Sequence
  Description of Artificial Sequence: Synthetic oligonucleotide
  Sense strand starting at position 208 of SEQ ID NO: 1244776
ugauaugcauucuuugaaa

SEQ ID NO: 1514027 - RNA, 19 nt, Artificial Sequence
  Description of Artificial Sequence: Synthetic oligonucleotide
  Antisense strand to SEQ ID NO: 1514026
uuucaaagaaugcauauca

SEQ ID NO: 1514028 - RNA, 19 nt, Artificial Sequence
  Description of Artificial Sequence: Synthetic oligonucleotide
  Sense strand starting at position 325 of SEQ ID NO: 1244776
ggcauccaaucagucuuaa

SEQ ID NO: 1514029 - RNA, 19 nt, Artificial Sequence
  Description of Artificial Sequence: Synthetic oligonucleotide
  Antisense strand to SEQ ID NO: 1514028
uuaagacugauuggaugcc

SEQ ID NO: 1514030 - RNA, 19 nt, Artificial Sequence
  Description of Artificial Sequence: Synthetic oligonucleotide
  Sense strand starting at position 490 of SEQ ID NO: 1244776
caggguuauuuauaacaag

SEQ ID NO: 1514031 - RNA, 19 nt, Artificial Sequence
  Description of Artificial Sequence: Synthetic oligonucleotide
  Antisense strand to SEQ ID NO: 1514030
cuuguuauaaauaacccug

SEQ ID NO: 1514032 - RNA, 19 nt, Artificial Sequence
  Description of Artificial Sequence: Synthetic oligonucleotide
  Sense strand starting at position 546 of SEQ ID NO: 1244776
auaugcuuauuguugguua

SEQ ID NO: 1514033 - RNA, 19 nt, Artificial Sequence
  Description of Artificial Sequence: Synthetic oligonucleotide
  Antisense strand to SEQ ID NO: 1514032
uaaccaacaauaagcauau

SEQ ID NO: 1514034 - RNA, 19 nt, Artificial Sequence
  Description of Artificial Sequence: Synthetic oligonucleotide
  Sense strand starting at position 548 of SEQ ID NO: 1244776
augcuuauuguugguuauu

SEQ ID NO: 1514035 - RNA, 19 nt, Artificial Sequence
  Description of Artificial Sequence: Synthetic oligonucleotide
  Antisense strand to SEQ ID NO: 1514034
aauaaccaacaauaagcau

SEQ ID NO: 1514036 - RNA, 19 nt, Artificial Sequence
  Description of Artificial Sequence: Synthetic oligonucleotide
  Sense strand starting at position 557 of SEQ ID NO: 1244776
guugguuauucugcccaaa

SEQ ID NO: 1514037 - RNA, 19 nt, Artificial Sequence
  Description of Artificial Sequence: Synthetic oligonucleotide
  Antisense strand to SEQ ID NO: 1514036
uuugggcagaauaaccaac

SEQ ID NO: 1514038 - RNA, 19 nt, Artificial Sequence
  Description of Artificial Sequence: Synthetic oligonucleotide
  Sense strand starting at position 585 of SEQ ID NO: 1244776
gaacaagugcuguguaacu

SEQ ID NO: 1514039 - RNA, 19 nt, Artificial Sequence
  Description of Artificial Sequence: Synthetic oligonucleotide
  Antisense strand to SEQ ID NO: 1514038
aguuacacagcacuuguuc

SEQ ID NO: 1514040 - RNA, 19 nt, Artificial Sequence
  Description of Artificial Sequence: Synthetic oligonucleotide
  Sense strand starting at position 587 of SEQ ID NO: 1244776
acaagugcuguguaacuaa

SEQ ID NO: 1514041 - RNA, 19 nt, Artificial Sequence
  Description of Artificial Sequence: Synthetic oligonucleotide
  Antisense strand to SEQ ID NO: 1514040
uuaguuacacagcacuugu

SEQ ID NO: 1514042 - RNA, 19 nt, Artificial Sequence
  Description of Artificial Sequence: Synthetic oligonucleotide
  Sense strand starting at position 590 of SEQ ID NO: 1244776
agugcuguguaacuaaagu

SEQ ID NO: 1514043 - RNA, 19 nt, Artificial Sequence
  Description of Artificial Sequence: Synthetic oligonucleotide
  Antisense strand to SEQ ID NO: 1514042
acuuuaguuacacagcacu

SEQ ID NO: 1514044 - RNA, 19 nt, Artificial Sequence
  Description of Artificial Sequence: Synthetic oligonucleotide
  Sense strand starting at position 648 of SEQ ID NO: 1244776
auaguauuccugugaagaa

SEQ ID NO: 1514045 - RNA, 19 nt, Artificial Sequence
  Description of Artificial Sequence: Synthetic oligonucleotide
  Antisense strand to SEQ ID NO: 1514044
uucuucacaggaauacuau

SEQ ID NO: 1514046 - RNA, 19 nt, Artificial Sequence
  Description of Artificial Sequence: Synthetic oligonucleotide
  Sense strand starting at position 702 of SEQ ID NO: 1244776
gugguaccaguccaaugua

SEQ ID NO: 1514047 - RNA, 19 nt, Artificial Sequence
  Description of Artificial Sequence: Synthetic oligonucleotide
  Antisense strand to SEQ ID NO: 1514046
uacauuggacugguaccac

SEQ ID NO: 1514048 - RNA, 19 nt, Artificial Sequence
  Description of Artificial Sequence: Synthetic oligonucleotide
  Sense strand starting at position 1097 of SEQ ID NO: 1244776
cgugacaguccagaaaugu

SEQ ID NO: 1514049 - RNA, 19 nt, Artificial Sequence
  Description of Artificial Sequence: Synthetic oligonucleotide
  Antisense strand to SEQ ID NO: 1514048
acauuucuggacugucacg

SEQ ID NO: 1514050 - RNA, 19 nt, Artificial Sequence
  Description of Artificial Sequence: Synthetic oligonucleotide
  Sense strand starting at position 1139 of SEQ ID NO: 1244776
ccugcuuaucggcaucuaa

SEQ ID NO: 1514051 - RNA, 19 nt, Artificial Sequence
  Description of Artificial Sequence: Synthetic oligonucleotide
  Antisense strand to SEQ ID NO: 1514050
uuagaugccgauaagcagg

SEQ ID NO: 1514052 - RNA, 19 nt, Artificial Sequence
  Description of Artificial Sequence: Synthetic oligonucleotide
  Sense strand starting at position 1289 of SEQ ID NO: 1244776
ggacuauucuggguuagga

SEQ ID NO: 1514053 - RNA, 19 nt, Artificial Sequence
  Description of Artificial Sequence: Synthetic oligonucleotide
  Antisense strand to SEQ ID NO: 1514052
uccuaacccagaauagucc

SEQ ID NO: 1514054 - RNA, 19 nt, Artificial Sequence
  Description of Artificial Sequence: Synthetic oligonucleotide
  Sense strand starting at position 1612 of SEQ ID NO: 1244776
gcgcauuccaacgacaaga

SEQ ID NO: 1514055 - RNA, 19 nt, Artificial Sequence
  Description of Artificial Sequence: Synthetic oligonucleotide
  Antisense strand to SEQ ID NO: 1514054
ucuugucguuggaaugcgc

SEQ ID NO: 1514056 - RNA, 19 nt, Artificial Sequence
  Description of Artificial Sequence: Synthetic oligonucleotide
  Sense strand starting at position 1614 of SEQ ID NO: 1244776
gcauuccaacgacaagaau

SEQ ID NO: 1514057 - RNA, 19 nt, Artificial Sequence
  Description of Artificial Sequence: Synthetic oligonucleotide
  Antisense strand to SEQ ID NO: 1514056
auucuugucguuggaaugc

SEQ ID NO: 1514058 - RNA, 19 nt, Artificial Sequence
  Description of Artificial Sequence: Synthetic oligonucleotide
  Sense strand starting at position 2361 of SEQ ID NO: 1244776
aagcauuucuuugggugaa

SEQ ID NO: 1514059 - RNA, 19 nt, Artificial Sequence
  Description of Artificial Sequence: Synthetic oligonucleotide
  Antisense strand to SEQ ID NO: 1514058
uucacccaaagaaaugcuu

SEQ ID NO: 1514060 - RNA, 19 nt, Artificial Sequence
  Description of Artificial Sequence: Synthetic oligonucleotide
  Sense strand starting at position 2452 of SEQ ID NO: 1244776
ugaauacuauggcuaauaa

SEQ ID NO: 1514061 - RNA, 19 nt, Artificial Sequence
  Description of Artificial Sequence: Synthetic oligonucleotide
  Antisense strand to SEQ ID NO: 1514060
uuauuagccauaguauuca

SEQ ID NO: 1514062 - RNA, 19 nt, Artificial Sequence
  Description of Artificial Sequence: Synthetic oligonucleotide
  Sense strand starting at position 2481 of SEQ ID NO: 1244776
uaccaaucguaaguagaaa

SEQ ID NO: 1514063 - RNA, 19 nt, Artificial Sequence
  Description of Artificial Sequence: Synthetic oligonucleotide
  Antisense strand to SEQ ID NO: 1514062
uuucuacuuacgauuggua

SEQ ID NO: 1514064 - RNA, 19 nt, Artificial Sequence
  Description of Artificial Sequence: Synthetic oligonucleotide
  Sense strand starting at position 2510 of SEQ ID NO: 1244776
gcugucggaaauuacuaaa

SEQ ID NO: 1514065 - RNA, 19 nt, Artificial Sequence
  Description of Artificial Sequence: Synthetic oligonucleotide
  Antisense strand to SEQ ID NO: 1514064
uuuaguaauuuccgacagc

SEQ ID NO: 1514066 - RNA, 19 nt, Artificial Sequence
  Description of Artificial Sequence: Synthetic oligonucleotide
  Sense strand starting at position 2530 of SEQ ID NO: 1244776
uggaaauuacccugaacga

SEQ ID NO: 1514067 - RNA, 19 nt, Artificial Sequence
  Description of Artificial Sequence: Synthetic oligonucleotide
  Antisense strand to SEQ ID NO: 1514066
ucguucaggguaauuucca

SEQ ID NO: 1514068 - RNA, 19 nt, Artificial Sequence
  Description of Artificial Sequence: Synthetic oligonucleotide
  Sense strand starting at position 2630 of SEQ ID NO: 1244776
agugguaugacugguucua

SEQ ID NO: 1514069 - RNA, 19 nt, Artificial Sequence
  Description of Artificial Sequence: Synthetic oligonucleotide
  Antisense strand to SEQ ID NO: 1514068
uagaaccagucauaccacu

SEQ ID NO: 1514070 - RNA, 19 nt, Artificial Sequence
  Description of Artificial Sequence: Synthetic oligonucleotide
  Sense strand starting at position 2632 of SEQ ID NO: 1244776
ugguaugacugguucuauc

SEQ ID NO: 1514071 - RNA, 19 nt, Artificial Sequence
  Description of Artificial Sequence: Synthetic oligonucleotide
  Antisense strand to SEQ ID NO: 1514070
gauagaaccagucauacca

SEQ ID NO: 1514072 - RNA, 19 nt, Artificial Sequence
  Description of Artificial Sequence: Synthetic oligonucleotide
  Sense strand starting at position 2652 of SEQ ID NO: 1244776
cgugcaucacuugaacacu

SEQ ID NO: 1514073 - RNA, 19 nt, Artificial Sequence
  Description of Artificial Sequence: Synthetic oligonucleotide
  Antisense strand to SEQ ID NO: 1514072
aguguucaagugaugcacg

SEQ ID NO: 1514074 - RNA, 19 nt, Artificial Sequence
  Description of Artificial Sequence: Synthetic oligonucleotide
  Sense strand starting at position 2704 of SEQ ID NO: 1244776
guaggacaccacugauuac

SEQ ID NO: 1514075 - RNA, 19 nt, Artificial Sequence
  Description of Artificial Sequence: Synthetic oligonucleotide
  Antisense strand to SEQ ID NO: 1514074
guaaucagugguguccuac

SEQ ID NO: 1514076 - RNA, 19 nt, Artificial Sequence
  Description of Artificial Sequence: Synthetic oligonucleotide
  Sense strand starting at position 2821 of SEQ ID NO: 1244776
guugguuccuccucaucuu

SEQ ID NO: 1514077 - RNA, 19 nt, Artificial Sequence
  Description of Artificial Sequence: Synthetic oligonucleotide
  Antisense strand to SEQ ID NO: 1514076
aagaugaggaggaaccaac

SEQ ID NO: 1514078 - RNA, 19 nt, Artificial Sequence
  Description of Artificial Sequence: Synthetic oligonucleotide
  Sense strand starting at position 3063 of SEQ ID NO: 1244776
ccguucuuccagugacuca

SEQ ID NO: 1514079 - RNA, 19 nt, Artificial Sequence
  Description of Artificial Sequence: Synthetic oligonucleotide
  Antisense strand to SEQ ID NO: 1514078
ugagucacuggaagaacgg

SEQ ID NO: 1514080 - RNA, 19 nt, Artificial Sequence
  Description of Artificial Sequence: Synthetic oligonucleotide
  Sense strand starting at position 3133 of SEQ ID NO: 1244776
ccugucaguauguguauca

SEQ ID NO: 1514081 - RNA, 19 nt, Artificial Sequence
  Description of Artificial Sequence: Synthetic oligonucleotide
  Antisense strand to SEQ ID NO: 1514080
ugauacacauacugacagg

SEQ ID NO: 1514082 - RNA, 19 nt, Artificial Sequence
  Description of Artificial Sequence: Synthetic oligonucleotide
  Sense strand starting at position 3134 of SEQ ID NO: 1244776
cugucaguauguguaucau

SEQ ID NO: 1514083 - RNA, 19 nt, Artificial Sequence
  Description of Artificial Sequence: Synthetic oligonucleotide
  Antisense strand to SEQ ID NO: 1514082
augauacacauacugacag

SEQ ID NO: 1514084 - RNA, 19 nt, Artificial Sequence
  Description of Artificial Sequence: Synthetic oligonucleotide
  Sense strand starting at position 3316 of SEQ ID NO: 1244776
uucuaaagccuaggucaaa

SEQ ID NO: 1514085 - RNA, 19 nt, Artificial Sequence
  Description of Artificial Sequence: Synthetic oligonucleotide
  Antisense strand to SEQ ID NO: 1514084
uuugaccuaggcuuuagaa

SEQ ID NO: 1514086 - RNA, 19 nt, Artificial Sequence
  Description of Artificial Sequence: Synthetic oligonucleotide
  Sense strand starting at position 3317 of SEQ ID NO: 1244776
ucuaaagccuaggucaaau

SEQ ID NO: 1514087 - RNA, 19 nt, Artificial Sequence
  Description of Artificial Sequence: Synthetic oligonucleotide
  Antisense strand to SEQ ID NO: 1514086
auuugaccuaggcuuuaga

SEQ ID NO: 1514088 - RNA, 19 nt, Artificial Sequence
  Description of Artificial Sequence: Synthetic oligonucleotide
  Sense strand starting at position 3412 of SEQ ID NO: 1244776
ccuccaaggcccugaauaa

SEQ ID NO: 1514089 - RNA, 19 nt, Artificial Sequence
  Description of Artificial Sequence: Synthetic oligonucleotide
  Antisense strand to SEQ ID NO: 1514088
uuauucagggccuuggagg

SEQ ID NO: 1514090 - RNA, 19 nt, Artificial Sequence
  Description of Artificial Sequence: Synthetic oligonucleotide
  Sense strand starting at position 3413 of SEQ ID NO: 1244776
cuccaaggcccugaauaau

SEQ ID NO: 1514091 - RNA, 19 nt, Artificial Sequence
  Description of Artificial Sequence: Synthetic oligonucleotide
  Antisense strand to SEQ ID NO: 1514090
auuauucagggccuuggag

SEQ ID NO: 1514092 - RNA, 19 nt, Artificial Sequence
  Description of Artificial Sequence: Synthetic oligonucleotide
  Sense strand starting at position 3630 of SEQ ID NO: 1244776
ugggccuuugcucaaaugu

SEQ ID NO: 1514093 - RNA, 19 nt, Artificial Sequence
  Description of Artificial Sequence: Synthetic oligonucleotide
  Antisense strand to SEQ ID NO: 1514092
acauuugagcaaaggccca

SEQ ID NO: 1514094 - RNA, 19 nt, Artificial Sequence
  Description of Artificial Sequence: Synthetic oligonucleotide
  Sense strand starting at position 3736 of SEQ ID NO: 1244776
cugugacacugaucaccau

SEQ ID NO: 1514095 - RNA, 19 nt, Artificial Sequence
  Description of Artificial Sequence: Synthetic oligonucleotide
  Antisense strand to SEQ ID NO: 1514094
auggugaucagugucacag

SEQ ID NO: 1514096 - RNA, 19 nt, Artificial Sequence
  Description of Artificial Sequence: Synthetic oligonucleotide
  Sense strand starting at position 3788 of SEQ ID NO: 1244776
uccacuagaguguaaacuu

SEQ ID NO: 1514097 - RNA, 19 nt, Artificial Sequence
  Description of Artificial Sequence: Synthetic oligonucleotide
  Antisense strand to SEQ ID NO: 1514096
aaguuuacacucuagugga

SEQ ID NO: 1514098 - RNA, 19 nt, Artificial Sequence
  Description of Artificial Sequence: Synthetic oligonucleotide
  Sense strand starting at position 3813 of SEQ ID NO: 1244776
cacagagacucggaacaaa

SEQ ID NO: 1514099 - RNA, 19 nt, Artificial Sequence
  Description of Artificial Sequence: Synthetic oligonucleotide
  Antisense strand to SEQ ID NO: 1514098
uuuguuccgagucucugug

SEQ ID NO: 1514100 - RNA, 19 nt, Artificial Sequence
  Description of Artificial Sequence: Synthetic oligonucleotide
  Sense strand starting at position 3922 of SEQ ID NO: 1244776
aguauaguaccaugaguug

SEQ ID NO: 1514101 - RNA, 19 nt, Artificial Sequence
  Description of Artificial Sequence: Synthetic oligonucleotide
  Antisense strand to SEQ ID NO: 1514100
caacucaugguacuauacu

SEQ ID NO: 1514102 - RNA, 19 nt, Artificial Sequence
  Description of Artificial Sequence: Synthetic oligonucleotide
  Sense strand starting at position 166 of SEQ ID NO: 1244777
gauggaaaguuucccaauu

SEQ ID NO: 1514103 - RNA, 19 nt, Artificial Sequence
  Description of Artificial Sequence: Synthetic oligonucleotide
  Antisense strand to SEQ ID NO: 1514102
aauugggaaacuuuccauc

SEQ ID NO: 1514104 - RNA, 19 nt, Artificial Sequence
  Description of Artificial Sequence: Synthetic oligonucleotide
  Sense strand starting at position 168 of SEQ ID NO: 1244777
uggaaaguuucccaauuua

SEQ ID NO: 1514105 - RNA, 19 nt, Artificial Sequence
  Description of Artificial Sequence: Synthetic oligonucleotide
  Antisense strand to SEQ ID NO: 1514104
uaaauugggaaacuuucca

SEQ ID NO: 1514106 - RNA, 19 nt, Artificial Sequence
  Description of Artificial Sequence: Synthetic oligonucleotide
  Sense strand starting at position 197 of SEQ ID NO: 1244777
acagccugauccuuguuau

SEQ ID NO: 1514107 - RNA, 19 nt, Artificial Sequence
  Description of Artificial Sequence: Synthetic oligonucleotide
  Antisense strand to SEQ ID NO: 1514106
auaacaaggaucaggcugu

SEQ ID NO: 1514108 - RNA, 19 nt, Artificial Sequence
  Description of Artificial Sequence: Synthetic oligonucleotide
  Sense strand starting at position 198 of SEQ ID NO: 1244777
cagccugauccuuguuaug

SEQ ID NO: 1514109 - RNA, 19 nt, Artificial Sequence
  Description of Artificial Sequence: Synthetic oligonucleotide
  Antisense strand to SEQ ID NO: 1514108
cauaacaaggaucaggcug

SEQ ID NO: 1514110 - RNA, 19 nt, Artificial Sequence
  Description of Artificial Sequence: Synthetic oligonucleotide
  Sense strand starting at position 200 of SEQ ID NO: 1244777
gccugauccuuguuaugaa

SEQ ID NO: 1514111 - RNA, 19 nt, Artificial Sequence
  Description of Artificial Sequence: Synthetic oligonucleotide
  Antisense strand to SEQ ID NO: 1514110
uucauaacaaggaucaggc

SEQ ID NO: 1514112 - RNA, 19 nt, Artificial Sequence
  Description of Artificial Sequence: Synthetic oligonucleotide
  Sense strand starting at position 276 of SEQ ID NO: 1244777
gaugcuagcuuauugaugu

SEQ ID NO: 1514113 - RNA, 19 nt, Artificial Sequence
  Description of Artificial Sequence: Synthetic oligonucleotide
  Antisense strand to SEQ ID NO: 1514112
acaucaauaagcuagcauc

SEQ ID NO: 1514114 - RNA, 19 nt, Artificial Sequence
  Description of Artificial Sequence: Synthetic oligonucleotide
  Sense strand starting at position 314 of SEQ ID NO: 1244777
uuuaaauuagcccaggguu

SEQ ID NO: 1514115 - RNA, 19 nt, Artificial Sequence
  Description of Artificial Sequence: Synthetic oligonucleotide
  Antisense strand to SEQ ID NO: 1514114
aacccugggcuaauuuaaa

SEQ ID NO: 1514116 - RNA, 19 nt, Artificial Sequence
  Description of Artificial Sequence: Synthetic oligonucleotide
  Sense strand starting at position 472 of SEQ ID NO: 1244777
cuuaguaauuaggcauaaa

SEQ ID NO: 1514117 - RNA, 19 nt, Artificial Sequence
  Description of Artificial Sequence: Synthetic oligonucleotide
  Antisense strand to SEQ ID NO: 1514116
uuuaugccuaauuacuaag

SEQ ID NO: 1514118 - RNA, 19 nt, Artificial Sequence
  Description of Artificial Sequence: Synthetic oligonucleotide
  Sense strand starting at position 490 of SEQ ID NO: 1244777
acagaaauguacuuaaugu

SEQ ID NO: 1514119 - RNA, 19 nt, Artificial Sequence
  Description of Artificial Sequence: Synthetic oligonucleotide
  Antisense strand to SEQ ID NO: 1514118
acauuaaguacauuucugu

SEQ ID NO: 1514120 - RNA, 19 nt, Artificial Sequence
  Description of Artificial Sequence: Synthetic oligonucleotide
  Sense strand starting at position 510 of SEQ ID NO: 1244777
auagaauacacucggugaa

SEQ ID NO: 1514121 - RNA, 19 nt, Artificial Sequence
  Description of Artificial Sequence: Synthetic oligonucleotide
  Antisense strand to SEQ ID NO: 1514120
uucaccgaguguauucuau

SEQ ID NO: 1514122 - RNA, 19 nt, Artificial Sequence
  Description of Artificial Sequence: Synthetic oligonucleotide
  Sense strand starting at position 512 of SEQ ID NO: 1244777
agaauacacucggugaaga

SEQ ID NO: 1514123 - RNA, 19 nt, Artificial Sequence
  Description of Artificial Sequence: Synthetic oligonucleotide
  Antisense strand to SEQ ID NO: 1514122
ucuucaccgaguguauucu

SEQ ID NO: 1514124 - RNA, 19 nt, Artificial Sequence
  Description of Artificial Sequence: Synthetic oligonucleotide
  Sense strand starting at position 513 of SEQ ID NO: 1244777
gaauacacucggugaagau

SEQ ID NO: 1514125 - RNA, 19 nt, Artificial Sequence
  Description of Artificial Sequence: Synthetic oligonucleotide
  Antisense strand to SEQ ID NO: 1514124
aucuucaccgaguguauuc

SEQ ID NO: 1514126 - RNA, 19 nt, Artificial Sequence
  Description of Artificial Sequence: Synthetic oligonucleotide
  Sense strand starting at position 603 of SEQ ID NO: 1244777
gcgagaguaaucuauggaa

SEQ ID NO: 1514127 - RNA, 19 nt, Artificial Sequence
  Description of Artificial Sequence: Synthetic oligonucleotide
  Antisense strand to SEQ ID NO: 1514126
uuccauagauuacucucgc

SEQ ID NO: 1514128 - RNA, 19 nt, Artificial Sequence
  Description of Artificial Sequence: Synthetic oligonucleotide
  Sense strand starting at position 606 of SEQ ID NO: 1244777
agaguaaucuauggaagac

SEQ ID NO: 1514129 - RNA, 19 nt, Artificial Sequence
  Description of Artificial Sequence: Synthetic oligonucleotide
  Antisense strand to SEQ ID NO: 1514128
gucuuccauagauuacucu

SEQ ID NO: 1514130 - RNA, 19 nt, Artificial Sequence
  Description of Artificial Sequence: Synthetic oligonucleotide
  Sense strand starting at position 643 of SEQ ID NO: 1244777
augagagacaucuguuguu

SEQ ID NO: 1514131 - RNA, 19 nt, Artificial Sequence
  Description of Artificial Sequence: Synthetic oligonucleotide
  Antisense strand to SEQ ID NO: 1514130
aacaacagaugucucucau

SEQ ID NO: 1514132 - RNA, 19 nt, Artificial Sequence
  Description of Artificial Sequence: Synthetic oligonucleotide
  Sense strand starting at position 648 of SEQ ID NO: 1244777
agacaucuguuguuuaaca

SEQ ID NO: 1514133 - RNA, 19 nt, Artificial Sequence
  Description of Artificial Sequence: Synthetic oligonucleotide
  Antisense strand to SEQ ID NO: 1514132
uguuaaacaacagaugucu

SEQ ID NO: 1514134 - RNA, 19 nt, Artificial Sequence
  Description of Artificial Sequence: Synthetic oligonucleotide
  Sense strand starting at position 650 of SEQ ID NO: 1244777
acaucuguuguuuaacaga

SEQ ID NO: 1514135 - RNA, 19 nt, Artificial Sequence
  Description of Artificial Sequence: Synthetic oligonucleotide
  Antisense strand to SEQ ID NO: 1514134
ucuguuaaacaacagaugu

SEQ ID NO: 1514136 - RNA, 19 nt, Artificial Sequence
  Description of Artificial Sequence: Synthetic oligonucleotide
  Sense strand starting at position 760 of SEQ ID NO: 1244777
uguaguuugggcuaccaaa

SEQ ID NO: 1514137 - RNA, 19 nt, Artificial Sequence
  Description of Artificial Sequence: Synthetic oligonucleotide
  Antisense strand to SEQ ID NO: 1514136
uuugguagcccaaacuaca

SEQ ID NO: 1514138 - RNA, 19 nt, Artificial Sequence
  Description of Artificial Sequence: Synthetic oligonucleotide
  Sense strand starting at position 817 of SEQ ID NO: 1244777
aauuucuguugagguauua

SEQ ID NO: 1514139 - RNA, 19 nt, Artificial Sequence
  Description of Artificial Sequence: Synthetic oligonucleotide
  Antisense strand to SEQ ID NO: 1514138
uaauaccucaacagaaauu

SEQ ID NO: 1514140 - RNA, 19 nt, Artificial Sequence
  Description of Artificial Sequence: Synthetic oligonucleotide
  Sense strand starting at position 880 of SEQ ID NO: 1244777
cugaaauaacacgguguuu

SEQ ID NO: 1514141 - RNA, 19 nt, Artificial Sequence
  Description of Artificial Sequence: Synthetic oligonucleotide
  Antisense strand to SEQ ID NO: 1514140
aaacaccguguuauuucag

SEQ ID NO: 1514142 - RNA, 19 nt, Artificial Sequence
  Description of Artificial Sequence: Synthetic oligonucleotide
  Sense strand starting at position 892 of SEQ ID NO: 1244777
gguguuuggaacuggauaa

SEQ ID NO: 1514143 - RNA, 19 nt, Artificial Sequence
  Description of Artificial Sequence: Synthetic oligonucleotide
  Antisense strand to SEQ ID NO: 1514142
uuauccaguuccaaacacc

SEQ ID NO: 1514144 - RNA, 19 nt, Artificial Sequence
  Description of Artificial Sequence: Synthetic oligonucleotide
  Sense strand starting at position 1092 of SEQ ID NO: 1244777
cuguaugccgcuuauuaca

SEQ ID NO: 1514145 - RNA, 19 nt, Artificial Sequence
  Description of Artificial Sequence: Synthetic oligonucleotide
  Antisense strand to SEQ ID NO: 1514144
uguaauaagcggcauacag

SEQ ID NO: 1514146 - RNA, 19 nt, Artificial Sequence
  Description of Artificial Sequence: Synthetic oligonucleotide
  Sense strand starting at position 1113 of SEQ ID NO: 1244777
aacuuacgugcuggcaaau

SEQ ID NO: 1514147 - RNA, 19 nt, Artificial Sequence
  Description of Artificial Sequence: Synthetic oligonucleotide
  Antisense strand to SEQ ID NO: 1514146
auuugccagcacguaaguu

SEQ ID NO: 1514148 - RNA, 19 nt, Artificial Sequence
  Description of Artificial Sequence: Synthetic oligonucleotide
  Sense strand starting at position 1158 of SEQ ID NO: 1244777
gagucaaacuuccuuagga

SEQ ID NO: 1514149 - RNA, 19 nt, Artificial Sequence
  Description of Artificial Sequence: Synthetic oligonucleotide
  Antisense strand to SEQ ID NO: 1514148
uccuaaggaaguuugacuc

SEQ ID NO: 1514150 - RNA, 19 nt, Artificial Sequence
  Description of Artificial Sequence: Synthetic oligonucleotide
  Sense strand starting at position 1159 of SEQ ID NO: 1244777
agucaaacuuccuuaggaa

SEQ ID NO: 1514151 - RNA, 19 nt, Artificial Sequence
  Description of Artificial Sequence: Synthetic oligonucleotide
  Antisense strand to SEQ ID NO: 1514150
uuccuaaggaaguuugacu

SEQ ID NO: 1514152 - RNA, 19 nt, Artificial Sequence
  Description of Artificial Sequence: Synthetic oligonucleotide
  Sense strand starting at position 2411 of SEQ ID NO: 1244777
guuugagagcuaugcucac

SEQ ID NO: 1514153 - RNA, 19 nt, Artificial Sequence
  Description of Artificial Sequence: Synthetic oligonucleotide
  Antisense strand to SEQ ID NO: 1514152
gugagcauagcucucaaac

SEQ ID NO: 1514154 - RNA, 19 nt, Artificial Sequence
  Description of Artificial Sequence: Synthetic oligonucleotide
  Sense strand starting at position 2658 of SEQ ID NO: 1244777
gccacuguguuucuugaca

SEQ ID NO: 1514155 - RNA, 19 nt, Artificial Sequence
  Description of Artificial Sequence: Synthetic oligonucleotide
  Antisense strand to SEQ ID NO: 1514154
ugucaagaaacacaguggc

SEQ ID NO: 1514156 - RNA, 19 nt, Artificial Sequence
  Description of Artificial Sequence: Synthetic oligonucleotide
  Sense strand starting at position 2665 of SEQ ID NO: 1244777
uguuucuugacauggaagu

SEQ ID NO: 1514157 - RNA, 19 nt, Artificial Sequence
  Description of Artificial Sequence: Synthetic oligonucleotide
  Antisense strand to SEQ ID NO: 1514156
acuuccaugucaagaaaca

SEQ ID NO: 1514158 - RNA, 19 nt, Artificial Sequence
  Description of Artificial Sequence: Synthetic oligonucleotide
  Sense strand starting at position 2723 of SEQ ID NO: 1244777
agaaccuuuggucauacuu

SEQ ID NO: 1514159 - RNA, 19 nt, Artificial Sequence
  Description of Artificial Sequence: Synthetic oligonucleotide
  Antisense strand to SEQ ID NO: 1514158
aaguaugaccaaagguucu

SEQ ID NO: 1514160 - RNA, 19 nt, Artificial Sequence
  Description of Artificial Sequence: Synthetic oligonucleotide
  Sense strand starting at position 2744 of SEQ ID NO: 1244777
gggcgugaagcucaaauga

SEQ ID NO: 1514161 - RNA, 19 nt, Artificial Sequence
  Description of Artificial Sequence: Synthetic oligonucleotide
  Antisense strand to SEQ ID NO: 1514160
ucauuugagcuucacgccc

SEQ ID NO: 1514162 - RNA, 19 nt, Artificial Sequence
  Description of Artificial Sequence: Synthetic oligonucleotide
  Sense strand starting at position 3115 of SEQ ID NO: 1244777
ugguuugguagaggaaacu

SEQ ID NO: 1514163 - RNA, 19 nt, Artificial Sequence
  Description of Artificial Sequence: Synthetic oligonucleotide
  Antisense strand to SEQ ID NO: 1514162
aguuuccucuaccaaacca

SEQ ID NO: 1514164 - RNA, 19 nt, Artificial Sequence
  Description of Artificial Sequence: Synthetic oligonucleotide
  Sense strand starting at position 3170 of SEQ ID NO: 1244777
gagggagaugucuguaagg

SEQ ID NO: 1514165 - RNA, 19 nt, Artificial Sequence
  Description of Artificial Sequence: Synthetic oligonucleotide
  Antisense strand to SEQ ID NO: 1514164
ccuuacagacaucucccuc

SEQ ID NO: 1514166 - RNA, 19 nt, Artificial Sequence
  Description of Artificial Sequence: Synthetic oligonucleotide
  Sense strand starting at position 3313 of SEQ ID NO: 1244777
cuugauucuguuugcuaau

SEQ ID NO: 1514167 - RNA, 19 nt, Artificial Sequence
  Description of Artificial Sequence: Synthetic oligonucleotide
  Antisense strand to SEQ ID NO: 1514166
auuagcaaacagaaucaag

SEQ ID NO: 1514168 - RNA, 19 nt, Artificial Sequence
  Description of Artificial Sequence: Synthetic oligonucleotide
  Sense strand starting at position 3342 of SEQ ID NO: 1244777
caggcuuugcauugauaug

SEQ ID NO: 1514169 - RNA, 19 nt, Artificial Sequence
  Description of Artificial Sequence: Synthetic oligonucleotide
  Antisense strand to SEQ ID NO: 1514168
cauaucaaugcaaagccug

SEQ ID NO: 1514170 - RNA, 19 nt, Artificial Sequence
  Description of Artificial Sequence: Synthetic oligonucleotide
  Sense strand starting at position 3581 of SEQ ID NO: 1244777
ugaacaauuuaaggagcau

SEQ ID NO: 1514171 - RNA, 19 nt, Artificial Sequence
  Description of Artificial Sequence: Synthetic oligonucleotide
  Antisense strand to SEQ ID NO: 1514170
augcuccuuaaauuguuca

SEQ ID NO: 1514172 - RNA, 19 nt, Artificial Sequence
  Description of Artificial Sequence: Synthetic oligonucleotide
  Sense strand starting at position 3604 of SEQ ID NO: 1244777
auuaucuauucuuugaggu

SEQ ID NO: 1514173 - RNA, 19 nt, Artificial Sequence
  Description of Artificial Sequence: Synthetic oligonucleotide
  Antisense strand to SEQ ID NO: 1514172
accucaaagaauagauaau

SEQ ID NO: 1514174 - RNA, 19 nt, Artificial Sequence
  Description of Artificial Sequence: Synthetic oligonucleotide
  Sense strand starting at position 3605 of SEQ ID NO: 1244777
uuaucuauucuuugagguu

SEQ ID NO: 1514175 - RNA, 19 nt, Artificial Sequence
  Description of Artificial Sequence: Synthetic oligonucleotide
  Antisense strand to SEQ ID NO: 1514174
aaccucaaagaauagauaa

SEQ ID NO: 1514176 - RNA, 19 nt, Artificial Sequence
  Description of Artificial Sequence: Synthetic oligonucleotide
  Sense strand starting at position 3612 of SEQ ID NO: 1244777
uucuuugagguuugaucau

SEQ ID NO: 1514177 - RNA, 19 nt, Artificial Sequence
  Description of Artificial Sequence: Synthetic oligonucleotide
  Antisense strand to SEQ ID NO: 1514176
augaucaaaccucaaagaa

SEQ ID NO: 1514178 - RNA, 19 nt, Artificial Sequence
  Description of Artificial Sequence: Synthetic oligonucleotide
  Sense strand starting at position 3621 of SEQ ID NO: 1244777
guuugaucauuucccaguu

SEQ ID NO: 1514179 - RNA, 19 nt, Artificial Sequence
  Description of Artificial Sequence: Synthetic oligonucleotide
  Antisense strand to SEQ ID NO: 1514178
aacugggaaaugaucaaac

SEQ ID NO: 1514180 - RNA, 19 nt, Artificial Sequence
  Description of Artificial Sequence: Synthetic oligonucleotide
  Sense strand starting at position 3817 of SEQ ID NO: 1244777
uuugcauaaaguugaggaa

SEQ ID NO: 1514181 - RNA, 19 nt, Artificial Sequence
  Description of Artificial Sequence: Synthetic oligonucleotide
  Antisense strand to SEQ ID NO: 1514180
uuccucaacuuuaugcaaa

SEQ ID NO: 1514182 - RNA, 19 nt, Artificial Sequence
  Description of Artificial Sequence: Synthetic oligonucleotide
  Sense strand starting at position 1563 of SEQ ID NO: 1244778
acagcuauguugucugaga

SEQ ID NO: 1514183 - RNA, 19 nt, Artificial Sequence
  Description of Artificial Sequence: Synthetic oligonucleotide
  Antisense strand to SEQ ID NO: 1514182
ucucagacaacauagcugu

SEQ ID NO: 1514184 - RNA, 19 nt, Artificial Sequence
  Description of Artificial Sequence: Synthetic oligonucleotide
  Sense strand starting at position 1564 of SEQ ID NO: 1244778
cagcuauguugucugagag

SEQ ID NO: 1514185 - RNA, 19 nt, Artificial Sequence
  Description of Artificial Sequence: Synthetic oligonucleotide
  Antisense strand to SEQ ID NO: 1514184
cucucagacaacauagcug

SEQ ID NO: 1514186 - RNA, 19 nt, Artificial Sequence
  Description of Artificial Sequence: Synthetic oligonucleotide
  Sense strand starting at position 1829 of SEQ ID NO: 1244778
ugaccagggucacuauauu

SEQ ID NO: 1514187 - RNA, 19 nt, Artificial Sequence
  Description of Artificial Sequence: Synthetic oligonucleotide
  Antisense strand to SEQ ID NO: 1514186
aauauagugacccugguca

SEQ ID NO: 1514188 - RNA, 19 nt, Artificial Sequence
  Description of Artificial Sequence: Synthetic oligonucleotide
  Sense strand starting at position 2301 of SEQ ID NO: 1244778
gcuccagucucggcauaga

SEQ ID NO: 1514189 - RNA, 19 nt, Artificial Sequence
  Description of Artificial Sequence: Synthetic oligonucleotide
  Antisense strand to SEQ ID NO: 1514188
ucuaugccgagacuggagc

SEQ ID NO: 1514190 - RNA, 19 nt, Artificial Sequence
  Description of Artificial Sequence: Synthetic oligonucleotide
  Sense strand starting at position 2317 of SEQ ID NO: 1244778
agacacggguccugacauu

SEQ ID NO: 1514191 - RNA, 19 nt, Artificial Sequence
  Description of Artificial Sequence: Synthetic oligonucleotide
  Antisense strand to SEQ ID NO: 1514190
aaugucaggacccgugucu

SEQ ID NO: 1514192 - RNA, 19 nt, Artificial Sequence
  Description of Artificial Sequence: Synthetic oligonucleotide
  Sense strand starting at position 2403 of SEQ ID NO: 1244778
cucagagcuggucacugaa

SEQ ID NO: 1514193 - RNA, 19 nt, Artificial Sequence
  Description of Artificial Sequence: Synthetic oligonucleotide
  Antisense strand to SEQ ID NO: 1514192
uucagugaccagcucugag

SEQ ID NO: 1514194 - RNA, 19 nt, Artificial Sequence
  Description of Artificial Sequence: Synthetic oligonucleotide
  Sense strand starting at position 2449 of SEQ ID NO: 1244778
cagggcuuguuucuuuaga

SEQ ID NO: 1514195 - RNA, 19 nt, Artificial Sequence
  Description of Artificial Sequence: Synthetic oligonucleotide
  Antisense strand to SEQ ID NO: 1514194
ucuaaagaaacaagcccug

SEQ ID NO: 1514196 - RNA, 19 nt, Artificial Sequence
  Description of Artificial Sequence: Synthetic oligonucleotide
  Sense strand starting at position 2451 of SEQ ID NO: 1244778
gggcuuguuucuuuagaga

SEQ ID NO: 1514197 - RNA, 19 nt, Artificial Sequence
  Description of Artificial Sequence: Synthetic oligonucleotide
  Antisense strand to SEQ ID NO: 1514196
ucucuaaagaaacaagccc

SEQ ID NO: 1514198 - RNA, 19 nt, Artificial Sequence
  Description of Artificial Sequence: Synthetic oligonucleotide
  Sense strand starting at position 5 of SEQ ID NO: 1244779
uggaaaugaucucagccua

SEQ ID NO: 1514199 - RNA, 19 nt, Artificial Sequence
  Description of Artificial Sequence: Synthetic oligonucleotide
  Antisense strand to SEQ ID NO: 1514198
uaggcugagaucauuucca

SEQ ID NO: 1514200 - RNA, 19 nt, Artificial Sequence
  Description of Artificial Sequence: Synthetic oligonucleotide
  Sense strand starting at position 458 of SEQ ID NO: 1244779
ccgagagguacucaccagu

SEQ ID NO: 1514201 - RNA, 19 nt, Artificial Sequence
  Description of Artificial Sequence: Synthetic oligonucleotide
  Antisense strand to SEQ ID NO: 1514200
acuggugaguaccucucgg

SEQ ID NO: 1514202 - RNA, 19 nt, Artificial Sequence
  Description of Artificial Sequence: Synthetic oligonucleotide
  Sense strand starting at position 464 of SEQ ID NO: 1244779
gguacucaccagugagcau

SEQ ID NO: 1514203 - RNA, 19 nt, Artificial Sequence
  Description of Artificial Sequence: Synthetic oligonucleotide
  Antisense strand to SEQ ID NO: 1514202
augcucacuggugaguacc

SEQ ID NO: 1514204 - RNA, 19 nt, Artificial Sequence
  Description of Artificial Sequence: Synthetic oligonucleotide
  Sense strand starting at position 692 of SEQ ID NO: 1244779
ggcacuagugugggaacuu

SEQ ID NO: 1514205 - RNA, 19 nt, Artificial Sequence
  Description of Artificial Sequence: Synthetic oligonucleotide
  Antisense strand to SEQ ID NO: 1514204
aaguucccacacuagugcc

SEQ ID NO: 1514206 - RNA, 19 nt, Artificial Sequence
  Description of Artificial Sequence: Synthetic oligonucleotide
  Sense strand starting at position 705 of SEQ ID NO: 1244779
gaacuuggugcccgaaaca

SEQ ID NO: 1514207 - RNA, 19 nt, Artificial Sequence
  Description of Artificial Sequence: Synthetic oligonucleotide
  Antisense strand to SEQ ID NO: 1514206
uguuucgggcaccaaguuc

SEQ ID NO: 1514208 - RNA, 19 nt, Artificial Sequence
  Description of Artificial Sequence: Synthetic oligonucleotide
  Sense strand starting at position 729 of SEQ ID NO: 1244779
guaauugacccuggccaga

SEQ ID NO: 1514209 - RNA, 19 nt, Artificial Sequence
  Description of Artificial Sequence: Synthetic oligonucleotide
  Antisense strand to SEQ ID NO: 1514208
ucuggccagggucaauuac

SEQ ID NO: 1514210 - RNA, 19 nt, Artificial Sequence
  Description of Artificial Sequence: Synthetic oligonucleotide
  Sense strand starting at position 829 of SEQ ID NO: 1244779
cuggccucgugagggauaa

SEQ ID NO: 1514211 - RNA, 19 nt, Artificial Sequence
  Description of Artificial Sequence: Synthetic oligonucleotide
  Antisense strand to SEQ ID NO: 1514210
uuaucccucacgaggccag

SEQ ID NO: 1514212 - RNA, 19 nt, Artificial Sequence
  Description of Artificial Sequence: Synthetic oligonucleotide
  Sense strand starting at position 830 of SEQ ID NO: 1244779
uggccucgugagggauaau

SEQ ID NO: 1514213 - RNA, 19 nt, Artificial Sequence
  Description of Artificial Sequence: Synthetic oligonucleotide
  Antisense strand to SEQ ID NO: 1514212
auuaucccucacgaggcca

SEQ ID NO: 1514214 - RNA, 19 nt, Artificial Sequence
  Description of Artificial Sequence: Synthetic oligonucleotide
  Sense strand starting at position 833 of SEQ ID NO: 1244779
ccucgugagggauaauguu

SEQ ID NO: 1514215 - RNA, 19 nt, Artificial Sequence
  Description of Artificial Sequence: Synthetic oligonucleotide
  Antisense strand to SEQ ID NO: 1514214
aacauuaucccucacgagg

SEQ ID NO: 1514216 - RNA, 19 nt, Artificial Sequence
  Description of Artificial Sequence: Synthetic oligonucleotide
  Sense strand starting at position 841 of SEQ ID NO: 1244779
gggauaauguuucucccga

SEQ ID NO: 1514217 - RNA, 19 nt, Artificial Sequence
  Description of Artificial Sequence: Synthetic oligonucleotide
  Antisense strand to SEQ ID NO: 1514216
ucgggagaaacauuauccc

SEQ ID NO: 1514218 - RNA, 19 nt, Artificial Sequence
  Description of Artificial Sequence: Synthetic oligonucleotide
  Sense strand starting at position 842 of SEQ ID NO: 1244779
ggauaauguuucucccgau

SEQ ID NO: 1514219 - RNA, 19 nt, Artificial Sequence
  Description of Artificial Sequence: Synthetic oligonucleotide
  Antisense strand to SEQ ID NO: 1514218
aucgggagaaacauuaucc

SEQ ID NO: 1514220 - RNA, 19 nt, Artificial Sequence
  Description of Artificial Sequence: Synthetic oligonucleotide
  Sense strand starting at position 843 of SEQ ID NO: 1244779
gauaauguuucucccgauc

SEQ ID NO: 1514221 - RNA, 19 nt, Artificial Sequence
  Description of Artificial Sequence: Synthetic oligonucleotide
  Antisense strand to SEQ ID NO: 1514220
gaucgggagaaacauuauc

SEQ ID NO: 1514222 - RNA, 19 nt, Artificial Sequence
  Description of Artificial Sequence: Synthetic oligonucleotide
  Sense strand starting at position 845 of SEQ ID NO: 1244779
uaauguuucucccgaucgu

SEQ ID NO: 1514223 - RNA, 19 nt, Artificial Sequence
  Description of Artificial Sequence: Synthetic oligonucleotide
  Antisense strand to SEQ ID NO: 1514222
acgaucgggagaaacauua

SEQ ID NO: 1514224 - RNA, 19 nt, Artificial Sequence
  Description of Artificial Sequence: Synthetic oligonucleotide
  Sense strand starting at position 894 of SEQ ID NO: 1244779
caucauuccuggcgaggaa

SEQ ID NO: 1514225 - RNA, 19 nt, Artificial Sequence
  Description of Artificial Sequence: Synthetic oligonucleotide
  Antisense strand to SEQ ID NO: 1514224
uuccucgccaggaaugaug

SEQ ID NO: 1514226 - RNA, 19 nt, Artificial Sequence
  Description of Artificial Sequence: Synthetic oligonucleotide
  Sense strand starting at position 2704 of SEQ ID NO: 1244779
gaggcuugacaguguagau

SEQ ID NO: 1514227 - RNA, 19 nt, Artificial Sequence
  Description of Artificial Sequence: Synthetic oligonucleotide
  Antisense strand to SEQ ID NO: 1514226
aucuacacugucaagccuc

SEQ ID NO: 1514228 - RNA, 19 nt, Artificial Sequence
  Description of Artificial Sequence: Synthetic oligonucleotide
  Sense strand starting at position 2784 of SEQ ID NO: 1244779
ucuggcucagcgugaagaa

SEQ ID NO: 1514229 - RNA, 19 nt, Artificial Sequence
  Description of Artificial Sequence: Synthetic oligonucleotide
  Antisense strand to SEQ ID NO: 1514228
uucuucacgcugagccaga

SEQ ID NO: 1514230 - RNA, 19 nt, Artificial Sequence
  Description of Artificial Sequence: Synthetic oligonucleotide
  Sense strand starting at position 2817 of SEQ ID NO: 1244779
gcgcucagaaguugucacu

SEQ ID NO: 1514231 - RNA, 19 nt, Artificial Sequence
  Description of Artificial Sequence: Synthetic oligonucleotide
  Antisense strand to SEQ ID NO: 1514230
agugacaacuucugagcgc

SEQ ID NO: 1514232 - RNA, 19 nt, Artificial Sequence
  Description of Artificial Sequence: Synthetic oligonucleotide
  Sense strand starting at position 2855 of SEQ ID NO: 1244779
acgcguuugucaguguguu

SEQ ID NO: 1514233 - RNA, 19 nt, Artificial Sequence
  Description of Artificial Sequence: Synthetic oligonucleotide
  Antisense strand to SEQ ID NO: 1514232
aacacacugacaaacgcgu

SEQ ID NO: 1514234 - RNA, 19 nt, Artificial Sequence
  Description of Artificial Sequence: Synthetic oligonucleotide
  Sense strand starting at position 2856 of SEQ ID NO: 1244779
cgcguuugucaguguguuu

SEQ ID NO: 1514235 - RNA, 19 nt, Artificial Sequence
  Description of Artificial Sequence: Synthetic oligonucleotide
  Antisense strand to SEQ ID NO: 1514234
aaacacacugacaaacgcg

SEQ ID NO: 1514236 - RNA, 19 nt, Artificial Sequence
  Description of Artificial Sequence: Synthetic oligonucleotide
  Sense strand starting at position 2860 of SEQ ID NO: 1244779
uuugucaguguguuuguga

SEQ ID NO: 1514237 - RNA, 19 nt, Artificial Sequence
  Description of Artificial Sequence: Synthetic oligonucleotide
  Antisense strand to SEQ ID NO: 1514236
ucacaaacacacugacaaa

SEQ ID NO: 1514238 - RNA, 19 nt, Artificial Sequence
  Description of Artificial Sequence: Synthetic oligonucleotide
  Sense strand starting at position 2861 of SEQ ID NO: 1244779
uugucaguguguuugugau

SEQ ID NO: 1514239 - RNA, 19 nt, Artificial Sequence
  Description of Artificial Sequence: Synthetic oligonucleotide
  Antisense strand to SEQ ID NO: 1514238
aucacaaacacacugacaa

SEQ ID NO: 1514240 - RNA, 19 nt, Artificial Sequence
  Description of Artificial Sequence: Synthetic oligonucleotide
  Sense strand starting at position 2863 of SEQ ID NO: 1244779
gucaguguguuugugauac

SEQ ID NO: 1514241 - RNA, 19 nt, Artificial Sequence
  Description of Artificial Sequence: Synthetic oligonucleotide
  Antisense strand to SEQ ID NO: 1514240
guaucacaaacacacugac

SEQ ID NO: 1514242 - RNA, 19 nt, Artificial Sequence
  Description of Artificial Sequence: Synthetic oligonucleotide
  Sense strand starting at position 2865 of SEQ ID NO: 1244779
caguguguuugugauacac

SEQ ID NO: 1514243 - RNA, 19 nt, Artificial Sequence
  Description of Artificial Sequence: Synthetic oligonucleotide
  Antisense strand to SEQ ID NO: 1514242
guguaucacaaacacacug

SEQ ID NO: 1514244 - RNA, 19 nt, Artificial Sequence
  Description of Artificial Sequence: Synthetic oligonucleotide
  Sense strand starting at position 2867 of SEQ ID NO: 1244779
guguguuugugauacacuu

SEQ ID NO: 1514245 - RNA, 19 nt, Artificial Sequence
  Description of Artificial Sequence: Synthetic oligonucleotide
  Antisense strand to SEQ ID NO: 1514244
aaguguaucacaaacacac

SEQ ID NO: 1514246 - RNA, 19 nt, Artificial Sequence
  Description of Artificial Sequence: Synthetic oligonucleotide
  Sense strand starting at position 2869 of SEQ ID NO: 1244779
guguuugugauacacuuau

SEQ ID NO: 1514247 - RNA, 19 nt, Artificial Sequence
  Description of Artificial Sequence: Synthetic oligonucleotide
  Antisense strand to SEQ ID NO: 1514246
auaaguguaucacaaacac

SEQ ID NO: 1514248 - RNA, 19 nt, Artificial Sequence
  Description of Artificial Sequence: Synthetic oligonucleotide
  Sense strand starting at position 2910 of SEQ ID NO: 1244779
ccgcgagcaccucgaguua

SEQ ID NO: 1514249 - RNA, 19 nt, Artificial Sequence
  Description of Artificial Sequence: Synthetic oligonucleotide
  Antisense strand to SEQ ID NO: 1514248
uaacucgaggugcucgcgg

SEQ ID NO: 1514250 - RNA, 19 nt, Artificial Sequence
  Description of Artificial Sequence: Synthetic oligonucleotide
  Sense strand starting at position 2912 of SEQ ID NO: 1244779
gcgagcaccucgaguuaga

SEQ ID NO: 1514251 - RNA, 19 nt, Artificial Sequence
  Description of Artificial Sequence: Synthetic oligonucleotide
  Antisense strand to SEQ ID NO: 1514250
ucuaacucgaggugcucgc

SEQ ID NO: 1514252 - RNA, 19 nt, Artificial Sequence
  Description of Artificial Sequence: Synthetic oligonucleotide
  Sense strand starting at position 2998 of SEQ ID NO: 1244779
gggccagaguuaggagaaa

SEQ ID NO: 1514253 - RNA, 19 nt, Artificial Sequence
  Description of Artificial Sequence: Synthetic oligonucleotide
  Antisense strand to SEQ ID NO: 1514252
uuucuccuaacucuggccc

SEQ ID NO: 1514254 - RNA, 19 nt, Artificial Sequence
  Description of Artificial Sequence: Synthetic oligonucleotide
  Sense strand starting at position 3084 of SEQ ID NO: 1244779
ucucaucgcuucuuaaagu

SEQ ID NO: 1514255 - RNA, 19 nt, Artificial Sequence
  Description of Artificial Sequence: Synthetic oligonucleotide
  Antisense strand to SEQ ID NO: 1514254
acuuuaagaagcgaugaga

SEQ ID NO: 1514256 - RNA, 19 nt, Artificial Sequence
  Description of Artificial Sequence: Synthetic oligonucleotide
  Sense strand starting at position 3091 of SEQ ID NO: 1244779
gcuucuuaaagucgagaag

SEQ ID NO: 1514257 - RNA, 19 nt, Artificial Sequence
  Description of Artificial Sequence: Synthetic oligonucleotide
  Antisense strand to SEQ ID NO: 1514256
cuucucgacuuuaagaagc

SEQ ID NO: 1514258 - RNA, 19 nt, Artificial Sequence
  Description of Artificial Sequence: Synthetic oligonucleotide
  Sense strand starting at position 3179 of SEQ ID NO: 1244779
ugucuucucuuccggagga

SEQ ID NO: 1514259 - RNA, 19 nt, Artificial Sequence
  Description of Artificial Sequence: Synthetic oligonucleotide
  Antisense strand to SEQ ID NO: 1514258
uccuccggaagagaagaca

SEQ ID NO: 1514260 - RNA, 19 nt, Artificial Sequence
  Description of Artificial Sequence: Synthetic oligonucleotide
  Sense strand starting at position 3496 of SEQ ID NO: 1244779
cggcgcgugucggaaugau

SEQ ID NO: 1514261 - RNA, 19 nt, Artificial Sequence
  Description of Artificial Sequence: Synthetic oligonucleotide
  Antisense strand to SEQ ID NO: 1514260
aucauuccgacacgcgccg

SEQ ID NO: 1514262 - RNA, 19 nt, Artificial Sequence
  Description of Artificial Sequence: Synthetic oligonucleotide
  Sense strand starting at position 3726 of SEQ ID NO: 1244779
ggacuuuggugccuagaaa

SEQ ID NO: 1514263 - RNA, 19 nt, Artificial Sequence
  Description of Artificial Sequence: Synthetic oligonucleotide
  Antisense strand to SEQ ID NO: 1514262
uuucuaggcaccaaagucc

SEQ ID NO: 1514264 - RNA, 19 nt, Artificial Sequence
  Description of Artificial Sequence: Synthetic oligonucleotide
  Sense strand starting at position 3870 of SEQ ID NO: 1244779
cucugucauuagccauaga

SEQ ID NO: 1514265 - RNA, 19 nt, Artificial Sequence
  Description of Artificial Sequence: Synthetic oligonucleotide
  Antisense strand to SEQ ID NO: 1514264
ucuauggcuaaugacagag

SEQ ID NO: 1514266 - RNA, 19 nt, Artificial Sequence
  Description of Artificial Sequence: Synthetic oligonucleotide
  Sense strand starting at position 3873 of SEQ ID NO: 1244779
ugucauuagccauagaguc

SEQ ID NO: 1514267 - RNA, 19 nt, Artificial Sequence
  Description of Artificial Sequence: Synthetic oligonucleotide
  Antisense strand to SEQ ID NO: 1514266
gacucuauggcuaaugaca

SEQ ID NO: 1514268 - RNA, 19 nt, Artificial Sequence
  Description of Artificial Sequence: Synthetic oligonucleotide
  Sense strand starting at position 3923 of SEQ ID NO: 1244779
cugugaguucguggugaua

SEQ ID NO: 1514269 - RNA, 19 nt, Artificial Sequence
  Description of Artificial Sequence: Synthetic oligonucleotide
  Antisense strand to SEQ ID NO: 1514268
uaucaccacgaacucacag

SEQ ID NO: 1514270 - RNA, 19 nt, Artificial Sequence
  Description of Artificial Sequence: Synthetic oligonucleotide
  Sense strand starting at position 3925 of SEQ ID NO: 1244779
gugaguucguggugauaaa

SEQ ID NO: 1514271 - RNA, 19 nt, Artificial Sequence
  Description of Artificial Sequence: Synthetic oligonucleotide
  Antisense strand to SEQ ID NO: 1514270
uuuaucaccacgaacucac

SEQ ID NO: 1514272 - RNA, 19 nt, Artificial Sequence
  Description of Artificial Sequence: Synthetic oligonucleotide
  Sense strand starting at position 3926 of SEQ ID NO: 1244779
ugaguucguggugauaaag

SEQ ID NO: 1514273 - RNA, 19 nt, Artificial Sequence
  Description of Artificial Sequence: Synthetic oligonucleotide
  Antisense strand to SEQ ID NO: 1514272
cuuuaucaccacgaacuca

SEQ ID NO: 1514274 - RNA, 19 nt, Artificial Sequence
  Description of Artificial Sequence: Synthetic oligonucleotide
  Sense strand starting at position 517 of SEQ ID NO: 1244780
aggacugguaggugacaga

SEQ ID NO: 1514275 - RNA, 19 nt, Artificial Sequence
  Description of Artificial Sequence: Synthetic oligonucleotide
  Antisense strand to SEQ ID NO: 1514274
ucugucaccuaccaguccu

SEQ ID NO: 1514276 - RNA, 19 nt, Artificial Sequence
  Description of Artificial Sequence: Synthetic oligonucleotide
  Sense strand starting at position 604 of SEQ ID NO: 1244780
uggaaaugaucucagccua

SEQ ID NO: 1514277 - RNA, 19 nt, Artificial Sequence
  Description of Artificial Sequence: Synthetic oligonucleotide
  Antisense strand to SEQ ID NO: 1514276
uaggcugagaucauuucca

SEQ ID NO: 1514278 - RNA, 19 nt, Artificial Sequence
  Description of Artificial Sequence: Synthetic oligonucleotide
  Sense strand starting at position 1057 of SEQ ID NO: 1244780
ccgagagguacucaccagu

SEQ ID NO: 1514279 - RNA, 19 nt, Artificial Sequence
  Description of Artificial Sequence: Synthetic oligonucleotide
  Antisense strand to SEQ ID NO: 1514278
acuggugaguaccucucgg

SEQ ID NO: 1514280 - RNA, 19 nt, Artificial Sequence
  Description of Artificial Sequence: Synthetic oligonucleotide
  Sense strand starting at position 1063 of SEQ ID NO: 1244780
gguacucaccagugagcau

SEQ ID NO: 1514281 - RNA, 19 nt, Artificial Sequence
  Description of Artificial Sequence: Synthetic oligonucleotide
  Antisense strand to SEQ ID NO: 1514280
augcucacuggugaguacc

SEQ ID NO: 1514282 - RNA, 19 nt, Artificial Sequence
  Description of Artificial Sequence: Synthetic oligonucleotide
  Sense strand starting at position 1291 of SEQ ID NO: 1244780
ggcacuagugugggaacuu

SEQ ID NO: 1514283 - RNA, 19 nt, Artificial Sequence
  Description of Artificial Sequence: Synthetic oligonucleotide
  Antisense strand to SEQ ID NO: 1514282
aaguucccacacuagugcc

SEQ ID NO: 1514284 - RNA, 19 nt, Artificial Sequence
  Description of Artificial Sequence: Synthetic oligonucleotide
  Sense strand starting at position 1304 of SEQ ID NO: 1244780
gaacuuggugcccgaaaca

SEQ ID NO: 1514285 - RNA, 19 nt, Artificial Sequence
  Description of Artificial Sequence: Synthetic oligonucleotide
  Antisense strand to SEQ ID NO: 1514284
uguuucgggcaccaaguuc

SEQ ID NO: 1514286 - RNA, 19 nt, Artificial Sequence
  Description of Artificial Sequence: Synthetic oligonucleotide
  Sense strand starting at position 1328 of SEQ ID NO: 1244780
guaauugacccuggccaga

SEQ ID NO: 1514287 - RNA, 19 nt, Artificial Sequence
  Description of Artificial Sequence: Synthetic oligonucleotide
  Antisense strand to SEQ ID NO: 1514286
ucuggccagggucaauuac

SEQ ID NO: 1514288 - RNA, 19 nt, Artificial Sequence
  Description of Artificial Sequence: Synthetic oligonucleotide
  Sense strand starting at position 1428 of SEQ ID NO: 1244780
cuggccucgugagggauaa

SEQ ID NO: 1514289 - RNA, 19 nt, Artificial Sequence
  Description of Artificial Sequence: Synthetic oligonucleotide
  Antisense strand to SEQ ID NO: 1514288
uuaucccucacgaggccag

SEQ ID NO: 1514290 - RNA, 19 nt, Artificial Sequence
  Description of Artificial Sequence: Synthetic oligonucleotide
  Sense strand starting at position 1429 of SEQ ID NO: 1244780
uggccucgugagggauaau

SEQ ID NO: 1514291 - RNA, 19 nt, Artificial Sequence
  Description of Artificial Sequence: Synthetic oligonucleotide
  Antisense strand to SEQ ID NO: 1514290
auuaucccucacgaggcca

SEQ ID NO: 1514292 - RNA, 19 nt, Artificial Sequence
  Description of Artificial Sequence: Synthetic oligonucleotide
  Sense strand starting at position 1432 of SEQ ID NO: 1244780
ccucgugagggauaauguu

SEQ ID NO: 1514293 - RNA, 19 nt, Artificial Sequence
  Description of Artificial Sequence: Synthetic oligonucleotide
  Antisense strand to SEQ ID NO: 1514292
aacauuaucccucacgagg

SEQ ID NO: 1514294 - RNA, 19 nt, Artificial Sequence
  Description of Artificial Sequence: Synthetic oligonucleotide
  Sense strand starting at position 1440 of SEQ ID NO: 1244780
gggauaauguuucucccga

SEQ ID NO: 1514295 - RNA, 19 nt, Artificial Sequence
  Description of Artificial Sequence: Synthetic oligonucleotide
  Antisense strand to SEQ ID NO: 1514294
ucgggagaaacauuauccc

SEQ ID NO: 1514296 - RNA, 19 nt, Artificial Sequence
  Description of Artificial Sequence: Synthetic oligonucleotide
  Sense strand starting at position 1441 of SEQ ID NO: 1244780
ggauaauguuucucccgau

SEQ ID NO: 1514297 - RNA, 19 nt, Artificial Sequence
  Description of Artificial Sequence: Synthetic oligonucleotide
  Antisense strand to SEQ ID NO: 1514296
aucgggagaaacauuaucc

SEQ ID NO: 1514298 - RNA, 19 nt, Artificial Sequence
  Description of Artificial Sequence: Synthetic oligonucleotide
  Sense strand starting at position 1442 of SEQ ID NO: 1244780
gauaauguuucucccgauc

SEQ ID NO: 1514299 - RNA, 19 nt, Artificial Sequence
  Description of Artificial Sequence: Synthetic oligonucleotide
  Antisense strand to SEQ ID NO: 1514298
gaucgggagaaacauuauc

SEQ ID NO: 1514300 - RNA, 19 nt, Artificial Sequence
  Description of Artificial Sequence: Synthetic oligonucleotide
  Sense strand starting at position 1444 of SEQ ID NO: 1244780
uaauguuucucccgaucgu

SEQ ID NO: 1514301 - RNA, 19 nt, Artificial Sequence
  Description of Artificial Sequence: Synthetic oligonucleotide
  Antisense strand to SEQ ID NO: 1514300
acgaucgggagaaacauua

SEQ ID NO: 1514302 - RNA, 19 nt, Artificial Sequence
  Description of Artificial Sequence: Synthetic oligonucleotide
  Sense strand starting at position 1493 of SEQ ID NO: 1244780
caucauuccuggcgaggaa

SEQ ID NO: 1514303 - RNA, 19 nt, Artificial Sequence
  Description of Artificial Sequence: Synthetic oligonucleotide
  Antisense strand to SEQ ID NO: 1514302
uuccucgccaggaaugaug

SEQ ID NO: 1514304 - RNA, 19 nt, Artificial Sequence
  Description of Artificial Sequence: Synthetic oligonucleotide
  Sense strand starting at position 3303 of SEQ ID NO: 1244780
gaggcuugacaguguagau

SEQ ID NO: 1514305 - RNA, 19 nt, Artificial Sequence
  Description of Artificial Sequence: Synthetic oligonucleotide
  Antisense strand to SEQ ID NO: 1514304
aucuacacugucaagccuc

SEQ ID NO: 1514306 - RNA, 19 nt, Artificial Sequence
  Description of Artificial Sequence: Synthetic oligonucleotide
  Sense strand starting at position 3383 of SEQ ID NO: 1244780
ucuggcucagcgugaagaa

SEQ ID NO: 1514307 - RNA, 19 nt, Artificial Sequence
  Description of Artificial Sequence: Synthetic oligonucleotide
  Antisense strand to SEQ ID NO: 1514306
uucuucacgcugagccaga

SEQ ID NO: 1514308 - RNA, 19 nt, Artificial Sequence
  Description of Artificial Sequence: Synthetic oligonucleotide
  Sense strand starting at position 3416 of SEQ ID NO: 1244780
gcgcucagaaguugucacu

SEQ ID NO: 1514309 - RNA, 19 nt, Artificial Sequence
  Description of Artificial Sequence: Synthetic oligonucleotide
  Antisense strand to SEQ ID NO: 1514308
agugacaacuucugagcgc

SEQ ID NO: 1514310 - RNA, 19 nt, Artificial Sequence
  Description of Artificial Sequence: Synthetic oligonucleotide
  Sense strand starting at position 3454 of SEQ ID NO: 1244780
acgcguuugucaguguguu

SEQ ID NO: 1514311 - RNA, 19 nt, Artificial Sequence
  Description of Artificial Sequence: Synthetic oligonucleotide
  Antisense strand to SEQ ID NO: 1514310
aacacacugacaaacgcgu

SEQ ID NO: 1514312 - RNA, 19 nt, Artificial Sequence
  Description of Artificial Sequence: Synthetic oligonucleotide
  Sense strand starting at position 3455 of SEQ ID NO: 1244780
cgcguuugucaguguguuu

SEQ ID NO: 1514313 - RNA, 19 nt, Artificial Sequence
  Description of Artificial Sequence: Synthetic oligonucleotide
  Antisense strand to SEQ ID NO: 1514312
aaacacacugacaaacgcg

SEQ ID NO: 1514314 - RNA, 19 nt, Artificial Sequence
  Description of Artificial Sequence: Synthetic oligonucleotide
  Sense strand starting at position 3459 of SEQ ID NO: 1244780
uuugucaguguguuuguga

SEQ ID NO: 1514315 - RNA, 19 nt, Artificial Sequence
  Description of Artificial Sequence: Synthetic oligonucleotide
  Antisense strand to SEQ ID NO: 1514314
ucacaaacacacugacaaa

SEQ ID NO: 1514316 - RNA, 19 nt, Artificial Sequence
  Description of Artificial Sequence: Synthetic oligonucleotide
  Sense strand starting at position 3460 of SEQ ID NO: 1244780
uugucaguguguuugugau

SEQ ID NO: 1514317 - RNA, 19 nt, Artificial Sequence
  Description of Artificial Sequence: Synthetic oligonucleotide
  Antisense strand to SEQ ID NO: 1514316
aucacaaacacacugacaa

SEQ ID NO: 1514318 - RNA, 19 nt, Artificial Sequence
  Description of Artificial Sequence: Synthetic oligonucleotide
  Sense strand starting at position 3462 of SEQ ID NO: 1244780
gucaguguguuugugauac

SEQ ID NO: 1514319 - RNA, 19 nt, Artificial Sequence
  Description of Artificial Sequence: Synthetic oligonucleotide
  Antisense strand to SEQ ID NO: 1514318
guaucacaaacacacugac

SEQ ID NO: 1514320 - RNA, 19 nt, Artificial Sequence
  Description of Artificial Sequence: Synthetic oligonucleotide
  Sense strand starting at position 3464 of SEQ ID NO: 1244780
caguguguuugugauacac

SEQ ID NO: 1514321 - RNA, 19 nt, Artificial Sequence
  Description of Artificial Sequence: Synthetic oligonucleotide
  Antisense strand to SEQ ID NO: 1514320
guguaucacaaacacacug

SEQ ID NO: 1514322 - RNA, 19 nt, Artificial Sequence
  Description of Artificial Sequence: Synthetic oligonucleotide
  Sense strand starting at position 3466 of SEQ ID NO: 1244780
guguguuugugauacacuu

SEQ ID NO: 1514323 - RNA, 19 nt, Artificial Sequence
  Description of Artificial Sequence: Synthetic oligonucleotide
  Antisense strand to SEQ ID NO: 1514322
aaguguaucacaaacacac

SEQ ID NO: 1514324 - RNA, 19 nt, Artificial Sequence
  Description of Artificial Sequence: Synthetic oligonucleotide
  Sense strand starting at position 3468 of SEQ ID NO: 1244780
guguuugugauacacuuau

SEQ ID NO: 1514325 - RNA, 19 nt, Artificial Sequence
  Description of Artificial Sequence: Synthetic oligonucleotide
  Antisense strand to SEQ ID NO: 1514324
auaaguguaucacaaacac

SEQ ID NO: 1514326 - RNA, 19 nt, Artificial Sequence
  Description of Artificial Sequence: Synthetic oligonucleotide
  Sense strand starting at position 3509 of SEQ ID NO: 1244780
ccgcgagcaccucgaguua

SEQ ID NO: 1514327 - RNA, 19 nt, Artificial Sequence
  Description of Artificial Sequence: Synthetic oligonucleotide
  Antisense strand to SEQ ID NO: 1514326
uaacucgaggugcucgcgg

SEQ ID NO: 1514328 - RNA, 19 nt, Artificial Sequence
  Description of Artificial Sequence: Synthetic oligonucleotide
  Sense strand starting at position 3511 of SEQ ID NO: 1244780
gcgagcaccucgaguuaga

SEQ ID NO: 1514329 - RNA, 19 nt, Artificial Sequence
  Description of Artificial Sequence: Synthetic oligonucleotide
  Antisense strand to SEQ ID NO: 1514328
ucuaacucgaggugcucgc

SEQ ID NO: 1514330 - RNA, 19 nt, Artificial Sequence
  Description of Artificial Sequence: Synthetic oligonucleotide
  Sense strand starting at position 3597 of SEQ ID NO: 1244780
gggccagaguuaggagaaa

SEQ ID NO: 1514331 - RNA, 19 nt, Artificial Sequence
  Description of Artificial Sequence: Synthetic oligonucleotide
  Antisense strand to SEQ ID NO: 1514330
uuucuccuaacucuggccc

SEQ ID NO: 1514332 - RNA, 19 nt, Artificial Sequence
  Description of Artificial Sequence: Synthetic oligonucleotide
  Sense strand starting at position 3683 of SEQ ID NO: 1244780
ucucaucgcuucuuaaagu

SEQ ID NO: 1514333 - RNA, 19 nt, Artificial Sequence
  Description of Artificial Sequence: Synthetic oligonucleotide
  Antisense strand to SEQ ID NO: 1514332
acuuuaagaagcgaugaga

SEQ ID NO: 1514334 - RNA, 19 nt, Artificial Sequence
  Description of Artificial Sequence: Synthetic oligonucleotide
  Sense strand starting at position 3690 of SEQ ID NO: 1244780
gcuucuuaaagucgagaag

SEQ ID NO: 1514335 - RNA, 19 nt, Artificial Sequence
  Description of Artificial Sequence: Synthetic oligonucleotide
  Antisense strand to SEQ ID NO: 1514334
cuucucgacuuuaagaagc

SEQ ID NO: 1514336 - RNA, 19 nt, Artificial Sequence
  Description of Artificial Sequence: Synthetic oligonucleotide
  Sense strand starting at position 3778 of SEQ ID NO: 1244780
ugucuucucuuccggagga

SEQ ID NO: 1514337 - RNA, 19 nt, Artificial Sequence
  Description of Artificial Sequence: Synthetic oligonucleotide
  Antisense strand to SEQ ID NO: 1514336
uccuccggaagagaagaca

SEQ ID NO: 1514338 - RNA, 19 nt, Artificial Sequence
  Description of Artificial Sequence: Synthetic oligonucleotide
  Sense strand starting at position 152 of SEQ ID NO: 1244781
cgggcucucuucccucaau

SEQ ID NO: 1514339 - RNA, 19 nt, Artificial Sequence
  Description of Artificial Sequence: Synthetic oligonucleotide
  Antisense strand to SEQ ID NO: 1514338
auugagggaagagagcccg

SEQ ID NO: 1514340 - RNA, 19 nt, Artificial Sequence
  Description of Artificial Sequence: Synthetic oligonucleotide
  Sense strand starting at position 153 of SEQ ID NO: 1244781
gggcucucuucccucaauu

SEQ ID NO: 1514341 - RNA, 19 nt, Artificial Sequence
  Description of Artificial Sequence: Synthetic oligonucleotide
  Antisense strand to SEQ ID NO: 1514340
aauugagggaagagagccc

SEQ ID NO: 1514342 - RNA, 19 nt, Artificial Sequence
  Description of Artificial Sequence: Synthetic oligonucleotide
  Sense strand starting at position 164 of SEQ ID NO: 1244781
ccucaauugccgcaaaguu

SEQ ID NO: 1514343 - RNA, 19 nt, Artificial Sequence
  Description of Artificial Sequence: Synthetic oligonucleotide
  Antisense strand to SEQ ID NO: 1514342
aacuuugcggcaauugagg

SEQ ID NO: 1514344 - RNA, 19 nt, Artificial Sequence
  Description of Artificial Sequence: Synthetic oligonucleotide
  Sense strand starting at position 173 of SEQ ID NO: 1244781
ccgcaaaguucucuuuaga

SEQ ID NO: 1514345 - RNA, 19 nt, Artificial Sequence
  Description of Artificial Sequence: Synthetic oligonucleotide
  Antisense strand to SEQ ID NO: 1514344
ucuaaagagaacuuugcgg

SEQ ID NO: 1514346 - RNA, 19 nt, Artificial Sequence
  Description of Artificial Sequence: Synthetic oligonucleotide
  Sense strand starting at position 183 of SEQ ID NO: 1244781
cucuuuagagucuguccaa

SEQ ID NO: 1514347 - RNA, 19 nt, Artificial Sequence
  Description of Artificial Sequence: Synthetic oligonucleotide
  Antisense strand to SEQ ID NO: 1514346
uuggacagacucuaaagag

SEQ ID NO: 1514348 - RNA, 19 nt, Artificial Sequence
  Description of Artificial Sequence: Synthetic oligonucleotide
  Sense strand starting at position 184 of SEQ ID NO: 1244781
ucuuuagagucuguccaaa

SEQ ID NO: 1514349 - RNA, 19 nt, Artificial Sequence
  Description of Artificial Sequence: Synthetic oligonucleotide
  Antisense strand to SEQ ID NO: 1514348
uuuggacagacucuaaaga

SEQ ID NO: 1514350 - RNA, 19 nt, Artificial Sequence
  Description of Artificial Sequence: Synthetic oligonucleotide
  Sense strand starting at position 250 of SEQ ID NO: 1244781
uguguuugauagcuccaga

SEQ ID NO: 1514351 - RNA, 19 nt, Artificial Sequence
  Description of Artificial Sequence: Synthetic oligonucleotide
  Antisense strand to SEQ ID NO: 1514350
ucuggagcuaucaaacaca

SEQ ID NO: 1514352 - RNA, 19 nt, Artificial Sequence
  Description of Artificial Sequence: Synthetic oligonucleotide
  Sense strand starting at position 648 of SEQ ID NO: 1244781
caaggcugauucccagaga

SEQ ID NO: 1514353 - RNA, 19 nt, Artificial Sequence
  Description of Artificial Sequence: Synthetic oligonucleotide
  Antisense strand to SEQ ID NO: 1514352
ucucugggaaucagccuug

SEQ ID NO: 1514354 - RNA, 19 nt, Artificial Sequence
  Description of Artificial Sequence: Synthetic oligonucleotide
  Sense strand starting at position 651 of SEQ ID NO: 1244781
ggcugauucccagagaugc

SEQ ID NO: 1514355 - RNA, 19 nt, Artificial Sequence
  Description of Artificial Sequence: Synthetic oligonucleotide
  Antisense strand to SEQ ID NO: 1514354
gcaucucugggaaucagcc

SEQ ID NO: 1514356 - RNA, 19 nt, Artificial Sequence
  Description of Artificial Sequence: Synthetic oligonucleotide
  Sense strand starting at position 661 of SEQ ID NO: 1244781
cagagaugcucccugagga

SEQ ID NO: 1514357 - RNA, 19 nt, Artificial Sequence
  Description of Artificial Sequence: Synthetic oligonucleotide
  Antisense strand to SEQ ID NO: 1514356
uccucagggagcaucucug

SEQ ID NO: 1514358 - RNA, 19 nt, Artificial Sequence
  Description of Artificial Sequence: Synthetic oligonucleotide
  Sense strand starting at position 662 of SEQ ID NO: 1244781
agagaugcucccugaggau

SEQ ID NO: 1514359 - RNA, 19 nt, Artificial Sequence
  Description of Artificial Sequence: Synthetic oligonucleotide
  Antisense strand to SEQ ID NO: 1514358
auccucagggagcaucucu

SEQ ID NO: 1514360 - RNA, 19 nt, Artificial Sequence
  Description of Artificial Sequence: Synthetic oligonucleotide
  Sense strand starting at position 1264 of SEQ ID NO: 1244781
ccaguugugccugagcaga

SEQ ID NO: 1514361 - RNA, 19 nt, Artificial Sequence
  Description of Artificial Sequence: Synthetic oligonucleotide
  Antisense strand to SEQ ID NO: 1514360
ucugcucaggcacaacugg

SEQ ID NO: 1514362 - RNA, 19 nt, Artificial Sequence
  Description of Artificial Sequence: Synthetic oligonucleotide
  Sense strand starting at position 1299 of SEQ ID NO: 1244781
cacguagggccuggagaua

SEQ ID NO: 1514363 - RNA, 19 nt, Artificial Sequence
  Description of Artificial Sequence: Synthetic oligonucleotide
  Antisense strand to SEQ ID NO: 1514362
uaucuccaggcccuacgug

SEQ ID NO: 1514364 - RNA, 19 nt, Artificial Sequence
  Description of Artificial Sequence: Synthetic oligonucleotide
  Sense strand starting at position 2174 of SEQ ID NO: 1244781
gaggguuugcucuggcuac

SEQ ID NO: 1514365 - RNA, 19 nt, Artificial Sequence
  Description of Artificial Sequence: Synthetic oligonucleotide
  Antisense strand to SEQ ID NO: 1514364
guagccagagcaaacccuc

SEQ ID NO: 1514366 - RNA, 19 nt, Artificial Sequence
  Description of Artificial Sequence: Synthetic oligonucleotide
  Sense strand starting at position 2305 of SEQ ID NO: 1244781
gggcuugagccuagcguau

SEQ ID NO: 1514367 - RNA, 19 nt, Artificial Sequence
  Description of Artificial Sequence: Synthetic oligonucleotide
  Antisense strand to SEQ ID NO: 1514366
auacgcuaggcucaagccc

SEQ ID NO: 1514368 - RNA, 19 nt, Artificial Sequence
  Description of Artificial Sequence: Synthetic oligonucleotide
  Sense strand starting at position 2341 of SEQ ID NO: 1244781
aggagucucagauggcuaa

SEQ ID NO: 1514369 - RNA, 19 nt, Artificial Sequence
  Description of Artificial Sequence: Synthetic oligonucleotide
  Antisense strand to SEQ ID NO: 1514368
uuagccaucugagacuccu

SEQ ID NO: 1514370 - RNA, 19 nt, Artificial Sequence
  Description of Artificial Sequence: Synthetic oligonucleotide
  Sense strand starting at position 2342 of SEQ ID NO: 1244781
ggagucucagauggcuaaa

SEQ ID NO: 1514371 - RNA, 19 nt, Artificial Sequence
  Description of Artificial Sequence: Synthetic oligonucleotide
  Antisense strand to SEQ ID NO: 1514370
uuuagccaucugagacucc

SEQ ID NO: 1514372 - RNA, 19 nt, Artificial Sequence
  Description of Artificial Sequence: Synthetic oligonucleotide
  Sense strand starting at position 2345 of SEQ ID NO: 1244781
gucucagauggcuaaaguc

SEQ ID NO: 1514373 - RNA, 19 nt, Artificial Sequence
  Description of Artificial Sequence: Synthetic oligonucleotide
  Antisense strand to SEQ ID NO: 1514372
gacuuuagccaucugagac

SEQ ID NO: 1514374 - RNA, 19 nt, Artificial Sequence
  Description of Artificial Sequence: Synthetic oligonucleotide
  Sense strand starting at position 2589 of SEQ ID NO: 1244781
gagagcaagggcugugauu

SEQ ID NO: 1514375 - RNA, 19 nt, Artificial Sequence
  Description of Artificial Sequence: Synthetic oligonucleotide
  Antisense strand to SEQ ID NO: 1514374
aaucacagcccuugcucuc

SEQ ID NO: 1514376 - RNA, 19 nt, Artificial Sequence
  Description of Artificial Sequence: Synthetic oligonucleotide
  Sense strand starting at position 2655 of SEQ ID NO: 1244781
ggaccacaucuccaagcuu

SEQ ID NO: 1514377 - RNA, 19 nt, Artificial Sequence
  Description of Artificial Sequence: Synthetic oligonucleotide
  Antisense strand to SEQ ID NO: 1514376
aagcuuggagauguggucc

SEQ ID NO: 1514378 - RNA, 19 nt, Artificial Sequence
  Description of Artificial Sequence: Synthetic oligonucleotide
  Sense strand starting at position 2685 of SEQ ID NO: 1244781
guaugugcuagagagggua

SEQ ID NO: 1514379 - RNA, 19 nt, Artificial Sequence
  Description of Artificial Sequence: Synthetic oligonucleotide
  Antisense strand to SEQ ID NO: 1514378
uacccucucuagcacauac

SEQ ID NO: 1514380 - RNA, 19 nt, Artificial Sequence
  Description of Artificial Sequence: Synthetic oligonucleotide
  Sense strand starting at position 2830 of SEQ ID NO: 1244781
ugggauucagucuggaaau

SEQ ID NO: 1514381 - RNA, 19 nt, Artificial Sequence
  Description of Artificial Sequence: Synthetic oligonucleotide
  Antisense strand to SEQ ID NO: 1514380
auuuccagacugaauccca

SEQ ID NO: 1514382 - RNA, 19 nt, Artificial Sequence
  Description of Artificial Sequence: Synthetic oligonucleotide
  Sense strand starting at position 2917 of SEQ ID NO: 1244781
gcuucuguguuccugacau

SEQ ID NO: 1514383 - RNA, 19 nt, Artificial Sequence
  Description of Artificial Sequence: Synthetic oligonucleotide
  Antisense strand to SEQ ID NO: 1514382
augucaggaacacagaagc

SEQ ID NO: 1514384 - RNA, 19 nt, Artificial Sequence
  Description of Artificial Sequence: Synthetic oligonucleotide
  Sense strand starting at position 3056 of SEQ ID NO: 1244781
aggacagaauguuagaacu

SEQ ID NO: 1514385 - RNA, 19 nt, Artificial Sequence
  Description of Artificial Sequence: Synthetic oligonucleotide
  Antisense strand to SEQ ID NO: 1514384
aguucuaacauucuguccu

SEQ ID NO: 1514386 - RNA, 19 nt, Artificial Sequence
  Description of Artificial Sequence: Synthetic oligonucleotide
  Sense strand starting at position 3095 of SEQ ID NO: 1244781
guuaaucauucccuguguu

SEQ ID NO: 1514387 - RNA, 19 nt, Artificial Sequence
  Description of Artificial Sequence: Synthetic oligonucleotide
  Antisense strand to SEQ ID NO: 1514386
aacacagggaaugauuaac

SEQ ID NO: 1514388 - RNA, 19 nt, Artificial Sequence
  Description of Artificial Sequence: Synthetic oligonucleotide
  Sense strand starting at position 3096 of SEQ ID NO: 1244781
uuaaucauucccuguguuu

SEQ ID NO: 1514389 - RNA, 19 nt, Artificial Sequence
  Description of Artificial Sequence: Synthetic oligonucleotide
  Antisense strand to SEQ ID NO: 1514388
aaacacagggaaugauuaa

SEQ ID NO: 1514390 - RNA, 19 nt, Artificial Sequence
  Description of Artificial Sequence: Synthetic oligonucleotide
  Sense strand starting at position 3266 of SEQ ID NO: 1244781
ggugcaucuggugaagcuu

SEQ ID NO: 1514391 - RNA, 19 nt, Artificial Sequence
  Description of Artificial Sequence: Synthetic oligonucleotide
  Antisense strand to SEQ ID NO: 1514390
aagcuucaccagaugcacc

SEQ ID NO: 1514392 - RNA, 19 nt, Artificial Sequence
  Description of Artificial Sequence: Synthetic oligonucleotide
  Sense strand starting at position 3295 of SEQ ID NO: 1244781
ugagucauggcauagccaa

SEQ ID NO: 1514393 - RNA, 19 nt, Artificial Sequence
  Description of Artificial Sequence: Synthetic oligonucleotide
  Antisense strand to SEQ ID NO: 1514392
uuggcuaugccaugacuca

SEQ ID NO: 1514394 - RNA, 19 nt, Artificial Sequence
  Description of Artificial Sequence: Synthetic oligonucleotide
  Sense strand starting at position 3355 of SEQ ID NO: 1244781
ugucucuugugagcagagu

SEQ ID NO: 1514395 - RNA, 19 nt, Artificial Sequence
  Description of Artificial Sequence: Synthetic oligonucleotide
  Antisense strand to SEQ ID NO: 1514394
acucugcucacaagagaca

SEQ ID NO: 1514396 - RNA, 19 nt, Artificial Sequence
  Description of Artificial Sequence: Synthetic oligonucleotide
  Sense strand starting at position 3356 of SEQ ID NO: 1244781
gucucuugugagcagaguu

SEQ ID NO: 1514397 - RNA, 19 nt, Artificial Sequence
  Description of Artificial Sequence: Synthetic oligonucleotide
  Antisense strand to SEQ ID NO: 1514396
aacucugcucacaagagac

SEQ ID NO: 1514398 - RNA, 19 nt, Artificial Sequence
  Description of Artificial Sequence: Synthetic oligonucleotide
  Sense strand starting at position 3397 of SEQ ID NO: 1244781
ggcgccuucgagguguauu

SEQ ID NO: 1514399 - RNA, 19 nt, Artificial Sequence
  Description of Artificial Sequence: Synthetic oligonucleotide
  Antisense strand to SEQ ID NO: 1514398
aauacaccucgaaggcgcc

SEQ ID NO: 1514400 - RNA, 19 nt, Artificial Sequence
  Description of Artificial Sequence: Synthetic oligonucleotide
  Sense strand starting at position 3398 of SEQ ID NO: 1244781
gcgccuucgagguguauuu

SEQ ID NO: 1514401 - RNA, 19 nt, Artificial Sequence
  Description of Artificial Sequence: Synthetic oligonucleotide
  Antisense strand to SEQ ID NO: 1514400
aaauacaccucgaaggcgc

SEQ ID NO: 1514402 - RNA, 19 nt, Artificial Sequence
  Description of Artificial Sequence: Synthetic oligonucleotide
  Sense strand starting at position 3448 of SEQ ID NO: 1244781
cagcgugcuggguaugaau

SEQ ID NO: 1514403 - RNA, 19 nt, Artificial Sequence
  Description of Artificial Sequence: Synthetic oligonucleotide
  Antisense strand to SEQ ID NO: 1514402
auucauacccagcacgcug

SEQ ID NO: 1514404 - RNA, 19 nt, Artificial Sequence
  Description of Artificial Sequence: Synthetic oligonucleotide
  Sense strand starting at position 3582 of SEQ ID NO: 1244781
ccuggcaugacgggugauu

SEQ ID NO: 1514405 - RNA, 19 nt, Artificial Sequence
  Description of Artificial Sequence: Synthetic oligonucleotide
  Antisense strand to SEQ ID NO: 1514404
aaucacccgucaugccagg

SEQ ID NO: 1514406 - RNA, 19 nt, Artificial Sequence
  Description of Artificial Sequence: Synthetic oligonucleotide
  Sense strand starting at position 3584 of SEQ ID NO: 1244781
uggcaugacgggugauuaa

SEQ ID NO: 1514407 - RNA, 19 nt, Artificial Sequence
  Description of Artificial Sequence: Synthetic oligonucleotide
  Antisense strand to SEQ ID NO: 1514406
uuaaucacccgucaugcca

SEQ ID NO: 1514408 - RNA, 19 nt, Artificial Sequence
  Description of Artificial Sequence: Synthetic oligonucleotide
  Sense strand starting at position 3587 of SEQ ID NO: 1244781
caugacgggugauuaacaa

SEQ ID NO: 1514409 - RNA, 19 nt, Artificial Sequence
  Description of Artificial Sequence: Synthetic oligonucleotide
  Antisense strand to SEQ ID NO: 1514408
uuguuaaucacccgucaug

SEQ ID NO: 1514410 - RNA, 19 nt, Artificial Sequence
  Description of Artificial Sequence: Synthetic oligonucleotide
  Sense strand starting at position 3591 of SEQ ID NO: 1244781
acgggugauuaacaaacaa

SEQ ID NO: 1514411 - RNA, 19 nt, Artificial Sequence
  Description of Artificial Sequence: Synthetic oligonucleotide
  Antisense strand to SEQ ID NO: 1514410
uuguuuguuaaucacccgu

SEQ ID NO: 1514412 - RNA, 19 nt, Artificial Sequence
  Description of Artificial Sequence: Synthetic oligonucleotide
  Sense strand starting at position 3657 of SEQ ID NO: 1244781
ugaucucguaaguguguga

SEQ ID NO: 1514413 - RNA, 19 nt, Artificial Sequence
  Description of Artificial Sequence: Synthetic oligonucleotide
  Antisense strand to SEQ ID NO: 1514412
ucacacacuuacgagauca

SEQ ID NO: 1514414 - RNA, 19 nt, Artificial Sequence
  Description of Artificial Sequence: Synthetic oligonucleotide
  Sense strand starting at position 3840 of SEQ ID NO: 1244781
cacuuucggccuugacaga

SEQ ID NO: 1514415 - RNA, 19 nt, Artificial Sequence
  Description of Artificial Sequence: Synthetic oligonucleotide
  Antisense strand to SEQ ID NO: 1514414
ucugucaaggccgaaagug

SEQ ID NO: 1514416 - RNA, 19 nt, Artificial Sequence
  Description of Artificial Sequence: Synthetic oligonucleotide
  Sense strand starting at position 3863 of SEQ ID NO: 1244781
ggagcauucucuuucugcu

SEQ ID NO: 1514417 - RNA, 19 nt, Artificial Sequence
  Description of Artificial Sequence: Synthetic oligonucleotide
  Antisense strand to SEQ ID NO: 1514416
agcagaaagagaaugcucc

SEQ ID NO: 1514418 - RNA, 19 nt, Artificial Sequence
  Description of Artificial Sequence: Synthetic oligonucleotide
  Sense strand starting at position 141 of SEQ ID NO: 1244782
ccugaucagucuugaauga

SEQ ID NO: 1514419 - RNA, 19 nt, Artificial Sequence
  Description of Artificial Sequence: Synthetic oligonucleotide
  Antisense strand to SEQ ID NO: 1514418
ucauucaagacugaucagg

SEQ ID NO: 1514420 - RNA, 19 nt, Artificial Sequence
  Description of Artificial Sequence: Synthetic oligonucleotide
  Sense strand starting at position 145 of SEQ ID NO: 1244782
aucagucuugaaugaauga

SEQ ID NO: 1514421 - RNA, 19 nt, Artificial Sequence
  Description of Artificial Sequence: Synthetic oligonucleotide
  Antisense strand to SEQ ID NO: 1514420
ucauucauucaagacugau

SEQ ID NO: 1514422 - RNA, 19 nt, Artificial Sequence
  Description of Artificial Sequence: Synthetic oligonucleotide
  Sense strand starting at position 166 of SEQ ID NO: 1244782
gagugagugaguuagugaa

SEQ ID NO: 1514423 - RNA, 19 nt, Artificial Sequence
  Description of Artificial Sequence: Synthetic oligonucleotide
  Antisense strand to SEQ ID NO: 1514422
uucacuaacucacucacuc

SEQ ID NO: 1514424 - RNA, 19 nt, Artificial Sequence
  Description of Artificial Sequence: Synthetic oligonucleotide
  Sense strand starting at position 180 of SEQ ID NO: 1244782
gugaaugagugacagaaga

SEQ ID NO: 1514425 - RNA, 19 nt, Artificial Sequence
  Description of Artificial Sequence: Synthetic oligonucleotide
  Antisense strand to SEQ ID NO: 1514424
ucuucugucacucauucac

SEQ ID NO: 1514426 - RNA, 19 nt, Artificial Sequence
  Description of Artificial Sequence: Synthetic oligonucleotide
  Sense strand starting at position 258 of SEQ ID NO: 1244782
gcagccuguuguccuagaa

SEQ ID NO: 1514427 - RNA, 19 nt, Artificial Sequence
  Description of Artificial Sequence: Synthetic oligonucleotide
  Antisense strand to SEQ ID NO: 1514426
uucuaggacaacaggcugc

SEQ ID NO: 1514428 - RNA, 19 nt, Artificial Sequence
  Description of Artificial Sequence: Synthetic oligonucleotide
  Sense strand starting at position 262 of SEQ ID NO: 1244782
ccuguuguccuagaaacac

SEQ ID NO: 1514429 - RNA, 19 nt, Artificial Sequence
  Description of Artificial Sequence: Synthetic oligonucleotide
  Antisense strand to SEQ ID NO: 1514428
guguuucuaggacaacagg

SEQ ID NO: 1514430 - RNA, 19 nt, Artificial Sequence
  Description of Artificial Sequence: Synthetic oligonucleotide
  Sense strand starting at position 528 of SEQ ID NO: 1244782
gggaucuuggcucaauggu

SEQ ID NO: 1514431 - RNA, 19 nt, Artificial Sequence
  Description of Artificial Sequence: Synthetic oligonucleotide
  Antisense strand to SEQ ID NO: 1514430
accauugagccaagauccc

SEQ ID NO: 1514432 - RNA, 19 nt, Artificial Sequence
  Description of Artificial Sequence: Synthetic oligonucleotide
  Sense strand starting at position 1005 of SEQ ID NO: 1244782
ugagauaggaaucgcuuga

SEQ ID NO: 1514433 - RNA, 19 nt, Artificial Sequence
  Description of Artificial Sequence: Synthetic oligonucleotide
  Antisense strand to SEQ ID NO: 1514432
ucaagcgauuccuaucuca

SEQ ID NO: 1514434 - RNA, 19 nt, Artificial Sequence
  Description of Artificial Sequence: Synthetic oligonucleotide
  Sense strand starting at position 1205 of SEQ ID NO: 1244782
gccugacuagcaugguaaa

SEQ ID NO: 1514435 - RNA, 19 nt, Artificial Sequence
  Description of Artificial Sequence: Synthetic oligonucleotide
  Antisense strand to SEQ ID NO: 1514434
uuuaccaugcuagucaggc

SEQ ID NO: 1514436 - RNA, 19 nt, Artificial Sequence
  Description of Artificial Sequence: Synthetic oligonucleotide
  Sense strand starting at position 1545 of SEQ ID NO: 1244782
gccugugucccuucuuagu

SEQ ID NO: 1514437 - RNA, 19 nt, Artificial Sequence
  Description of Artificial Sequence: Synthetic oligonucleotide
  Antisense strand to SEQ ID NO: 1514436
acuaagaagggacacaggc

SEQ ID NO: 1514438 - RNA, 19 nt, Artificial Sequence
  Description of Artificial Sequence: Synthetic oligonucleotide
  Sense strand starting at position 2067 of SEQ ID NO: 1244782
cuaacuguugggcgucuua

SEQ ID NO: 1514439 - RNA, 19 nt, Artificial Sequence
  Description of Artificial Sequence: Synthetic oligonucleotide
  Antisense strand to SEQ ID NO: 1514438
uaagacgcccaacaguuag

SEQ ID NO: 1514440 - RNA, 19 nt, Artificial Sequence
  Description of Artificial Sequence: Synthetic oligonucleotide
  Sense strand starting at position 2076 of SEQ ID NO: 1244782
gggcgucuuaucgcagguu

SEQ ID NO: 1514441 - RNA, 19 nt, Artificial Sequence
  Description of Artificial Sequence: Synthetic oligonucleotide
  Antisense strand to SEQ ID NO: 1514440
aaccugcgauaagacgccc

SEQ ID NO: 1514442 - RNA, 19 nt, Artificial Sequence
  Description of Artificial Sequence: Synthetic oligonucleotide
  Sense strand starting at position 2294 of SEQ ID NO: 1244782
agugcugcuugcugugaga

SEQ ID NO: 1514443 - RNA, 19 nt, Artificial Sequence
  Description of Artificial Sequence: Synthetic oligonucleotide
  Antisense strand to SEQ ID NO: 1514442
ucucacagcaagcagcacu

SEQ ID NO: 1514444 - RNA, 19 nt, Artificial Sequence
  Description of Artificial Sequence: Synthetic oligonucleotide
  Sense strand starting at position 2296 of SEQ ID NO: 1244782
ugcugcuugcugugagaug

SEQ ID NO: 1514445 - RNA, 19 nt, Artificial Sequence
  Description of Artificial Sequence: Synthetic oligonucleotide
  Antisense strand to SEQ ID NO: 1514444
caucucacagcaagcagca

SEQ ID NO: 1514446 - RNA, 19 nt, Artificial Sequence
  Description of Artificial Sequence: Synthetic oligonucleotide
  Sense strand starting at position 2301 of SEQ ID NO: 1244782
cuugcugugagauggucua

SEQ ID NO: 1514447 - RNA, 19 nt, Artificial Sequence
  Description of Artificial Sequence: Synthetic oligonucleotide
  Antisense strand to SEQ ID NO: 1514446
uagaccaucucacagcaag

SEQ ID NO: 1514448 - RNA, 19 nt, Artificial Sequence
  Description of Artificial Sequence: Synthetic oligonucleotide
  Sense strand starting at position 2576 of SEQ ID NO: 1244782
cgaagcaucucuugauaga

SEQ ID NO: 1514449 - RNA, 19 nt, Artificial Sequence
  Description of Artificial Sequence: Synthetic oligonucleotide
  Antisense strand to SEQ ID NO: 1514448
ucuaucaagagaugcuucg

SEQ ID NO: 1514450 - RNA, 19 nt, Artificial Sequence
  Description of Artificial Sequence: Synthetic oligonucleotide
  Sense strand starting at position 2579 of SEQ ID NO: 1244782
agcaucucuugauagauug

SEQ ID NO: 1514451 - RNA, 19 nt, Artificial Sequence
  Description of Artificial Sequence: Synthetic oligonucleotide
  Antisense strand to SEQ ID NO: 1514450
caaucuaucaagagaugcu

SEQ ID NO: 1514452 - RNA, 19 nt, Artificial Sequence
  Description of Artificial Sequence: Synthetic oligonucleotide
  Sense strand starting at position 2586 of SEQ ID NO: 1244782
cuugauagauugcuuauua

SEQ ID NO: 1514453 - RNA, 19 nt, Artificial Sequence
  Description of Artificial Sequence: Synthetic oligonucleotide
  Antisense strand to SEQ ID NO: 1514452
uaauaagcaaucuaucaag

SEQ ID NO: 1514454 - RNA, 19 nt, Artificial Sequence
  Description of Artificial Sequence: Synthetic oligonucleotide
  Sense strand starting at position 2587 of SEQ ID NO: 1244782
uugauagauugcuuauuag

SEQ ID NO: 1514455 - RNA, 19 nt, Artificial Sequence
  Description of Artificial Sequence: Synthetic oligonucleotide
  Antisense strand to SEQ ID NO: 1514454
cuaauaagcaaucuaucaa

SEQ ID NO: 1514456 - RNA, 19 nt, Artificial Sequence
  Description of Artificial Sequence: Synthetic oligonucleotide
  Sense strand starting at position 2728 of SEQ ID NO: 1244782
aggucacagcaucaucuau

SEQ ID NO: 1514457 - RNA, 19 nt, Artificial Sequence
  Description of Artificial Sequence: Synthetic oligonucleotide
  Antisense strand to SEQ ID NO: 1514456
auagaugaugcugugaccu

SEQ ID NO: 1514458 - RNA, 19 nt, Artificial Sequence
  Description of Artificial Sequence: Synthetic oligonucleotide
  Sense strand starting at position 2772 of SEQ ID NO: 1244782
accggaaucucaucaugag

SEQ ID NO: 1514459 - RNA, 19 nt, Artificial Sequence
  Description of Artificial Sequence: Synthetic oligonucleotide
  Antisense strand to SEQ ID NO: 1514458
cucaugaugagauuccggu

SEQ ID NO: 1514460 - RNA, 19 nt, Artificial Sequence
  Description of Artificial Sequence: Synthetic oligonucleotide
  Sense strand starting at position 2775 of SEQ ID NO: 1244782
ggaaucucaucaugagaag

SEQ ID NO: 1514461 - RNA, 19 nt, Artificial Sequence
  Description of Artificial Sequence: Synthetic oligonucleotide
  Antisense strand to SEQ ID NO: 1514460
cuucucaugaugagauucc

SEQ ID NO: 1514462 - RNA, 19 nt, Artificial Sequence
  Description of Artificial Sequence: Synthetic oligonucleotide
  Sense strand starting at position 2778 of SEQ ID NO: 1244782
aucucaucaugagaagaca

SEQ ID NO: 1514463 - RNA, 19 nt, Artificial Sequence
  Description of Artificial Sequence: Synthetic oligonucleotide
  Antisense strand to SEQ ID NO: 1514462
ugucuucucaugaugagau

SEQ ID NO: 1514464 - RNA, 19 nt, Artificial Sequence
  Description of Artificial Sequence: Synthetic oligonucleotide
  Sense strand starting at position 3014 of SEQ ID NO: 1244782
ucgccuuagccugggaagu

SEQ ID NO: 1514465 - RNA, 19 nt, Artificial Sequence
  Description of Artificial Sequence: Synthetic oligonucleotide
  Antisense strand to SEQ ID NO: 1514464
acuucccaggcuaaggcga

SEQ ID NO: 1514466 - RNA, 19 nt, Artificial Sequence
  Description of Artificial Sequence: Synthetic oligonucleotide
  Sense strand starting at position 3174 of SEQ ID NO: 1244782
cuuuaaagggacuguauau

SEQ ID NO: 1514467 - RNA, 19 nt, Artificial Sequence
  Description of Artificial Sequence: Synthetic oligonucleotide
  Antisense strand to SEQ ID NO: 1514466
auauacagucccuuuaaag

SEQ ID NO: 1514468 - RNA, 19 nt, Artificial Sequence
  Description of Artificial Sequence: Synthetic oligonucleotide
  Sense strand starting at position 3527 of SEQ ID NO: 1244782
aaauauucugagggacugu

SEQ ID NO: 1514469 - RNA, 19 nt, Artificial Sequence
  Description of Artificial Sequence: Synthetic oligonucleotide
  Antisense strand to SEQ ID NO: 1514468
acagucccucagaauauuu

SEQ ID NO: 1514470 - RNA, 19 nt, Artificial Sequence
  Description of Artificial Sequence: Synthetic oligonucleotide
  Sense strand starting at position 3976 of SEQ ID NO: 1244782
auaucagcaucugugaacu

SEQ ID NO: 1514471 - RNA, 19 nt, Artificial Sequence
  Description of Artificial Sequence: Synthetic oligonucleotide
  Antisense strand to SEQ ID NO: 1514470
aguucacagaugcugauau

SEQ ID NO: 1514472 - RNA, 19 nt, Artificial Sequence
  Description of Artificial Sequence: Synthetic oligonucleotide
  Sense strand starting at position 3978 of SEQ ID NO: 1244782
aucagcaucugugaacuau

SEQ ID NO: 1514473 - RNA, 19 nt, Artificial Sequence
  Description of Artificial Sequence: Synthetic oligonucleotide
  Antisense strand to SEQ ID NO: 1514472
auaguucacagaugcugau

SEQ ID NO: 1514474 - RNA, 19 nt, Artificial Sequence
  Description of Artificial Sequence: Synthetic oligonucleotide
  Sense strand starting at position 3982 of SEQ ID NO: 1244782
gcaucugugaacuaugguu

SEQ ID NO: 1514475 - RNA, 19 nt, Artificial Sequence
  Description of Artificial Sequence: Synthetic oligonucleotide
  Antisense strand to SEQ ID NO: 1514474
aaccauaguucacagaugc

SEQ ID NO: 1514476 - RNA, 19 nt, Artificial Sequence
  Description of Artificial Sequence: Synthetic oligonucleotide
  Sense strand starting at position 139 of SEQ ID NO: 1244783
agcucuuucccaggaagau

SEQ ID NO: 1514477 - RNA, 19 nt, Artificial Sequence
  Description of Artificial Sequence: Synthetic oligonucleotide
  Antisense strand to SEQ ID NO: 1514476
aucuuccugggaaagagcu

SEQ ID NO: 1514478 - RNA, 19 nt, Artificial Sequence
  Description of Artificial Sequence: Synthetic oligonucleotide
  Sense strand starting at position 140 of SEQ ID NO: 1244783
gcucuuucccaggaagaua

SEQ ID NO: 1514479 - RNA, 19 nt, Artificial Sequence
  Description of Artificial Sequence: Synthetic oligonucleotide
  Antisense strand to SEQ ID NO: 1514478
uaucuuccugggaaagagc

SEQ ID NO: 1514480 - RNA, 19 nt, Artificial Sequence
  Description of Artificial Sequence: Synthetic oligonucleotide
  Sense strand starting at position 189 of SEQ ID NO: 1244783
ugucaucucuugguucuaa

SEQ ID NO: 1514481 - RNA, 19 nt, Artificial Sequence
  Description of Artificial Sequence: Synthetic oligonucleotide
  Antisense strand to SEQ ID NO: 1514480
uuagaaccaagagaugaca

SEQ ID NO: 1514482 - RNA, 19 nt, Artificial Sequence
  Description of Artificial Sequence: Synthetic oligonucleotide
  Sense strand starting at position 190 of SEQ ID NO: 1244783
gucaucucuugguucuaac

SEQ ID NO: 1514483 - RNA, 19 nt, Artificial Sequence
  Description of Artificial Sequence: Synthetic oligonucleotide
  Antisense strand to SEQ ID NO: 1514482
guuagaaccaagagaugac

SEQ ID NO: 1514484 - RNA, 19 nt, Artificial Sequence
  Description of Artificial Sequence: Synthetic oligonucleotide
  Sense strand starting at position 199 of SEQ ID NO: 1244783
ugguucuaacuguaaccau

SEQ ID NO: 1514485 - RNA, 19 nt, Artificial Sequence
  Description of Artificial Sequence: Synthetic oligonucleotide
  Antisense strand to SEQ ID NO: 1514484
augguuacaguuagaacca

SEQ ID NO: 1514486 - RNA, 19 nt, Artificial Sequence
  Description of Artificial Sequence: Synthetic oligonucleotide
  Sense strand starting at position 407 of SEQ ID NO: 1244783
auaguucccuucccaguua

SEQ ID NO: 1514487 - RNA, 19 nt, Artificial Sequence
  Description of Artificial Sequence: Synthetic oligonucleotide
  Antisense strand to SEQ ID NO: 1514486
uaacugggaagggaacuau

SEQ ID NO: 1514488 - RNA, 19 nt, Artificial Sequence
  Description of Artificial Sequence: Synthetic oligonucleotide
  Sense strand starting at position 624 of SEQ ID NO: 1244783
acauauaaucgcuaacuga

SEQ ID NO: 1514489 - RNA, 19 nt, Artificial Sequence
  Description of Artificial Sequence: Synthetic oligonucleotide
  Antisense strand to SEQ ID NO: 1514488
ucaguuagcgauuauaugu

SEQ ID NO: 1514490 - RNA, 19 nt, Artificial Sequence
  Description of Artificial Sequence: Synthetic oligonucleotide
  Sense strand starting at position 650 of SEQ ID NO: 1244783
gguccuagaucacugaaau

SEQ ID NO: 1514491 - RNA, 19 nt, Artificial Sequence
  Description of Artificial Sequence: Synthetic oligonucleotide
  Antisense strand to SEQ ID NO: 1514490
auuucagugaucuaggacc

SEQ ID NO: 1514492 - RNA, 19 nt, Artificial Sequence
  Description of Artificial Sequence: Synthetic oligonucleotide
  Sense strand starting at position 651 of SEQ ID NO: 1244783
guccuagaucacugaaaua

SEQ ID NO: 1514493 - RNA, 19 nt, Artificial Sequence
  Description of Artificial Sequence: Synthetic oligonucleotide
  Antisense strand to SEQ ID NO: 1514492
uauuucagugaucuaggac

SEQ ID NO: 1514494 - RNA, 19 nt, Artificial Sequence
  Description of Artificial Sequence: Synthetic oligonucleotide
  Sense strand starting at position 685 of SEQ ID NO: 1244783
guucguuauuuacauuucu

SEQ ID NO: 1514495 - RNA, 19 nt, Artificial Sequence
  Description of Artificial Sequence: Synthetic oligonucleotide
  Antisense strand to SEQ ID NO: 1514494
agaaauguaaauaacgaac

SEQ ID NO: 1514496 - RNA, 19 nt, Artificial Sequence
  Description of Artificial Sequence: Synthetic oligonucleotide
  Sense strand starting at position 754 of SEQ ID NO: 1244783
cugaauaaguuauugucca

SEQ ID NO: 1514497 - RNA, 19 nt, Artificial Sequence
  Description of Artificial Sequence: Synthetic oligonucleotide
  Antisense strand to SEQ ID NO: 1514496
uggacaauaacuuauucag

SEQ ID NO: 1514498 - RNA, 19 nt, Artificial Sequence
  Description of Artificial Sequence: Synthetic oligonucleotide
  Sense strand starting at position 758 of SEQ ID NO: 1244783
auaaguuauuguccaccaa

SEQ ID NO: 1514499 - RNA, 19 nt, Artificial Sequence
  Description of Artificial Sequence: Synthetic oligonucleotide
  Antisense strand to SEQ ID NO: 1514498
uugguggacaauaacuuau

SEQ ID NO: 1514500 - RNA, 19 nt, Artificial Sequence
  Description of Artificial Sequence: Synthetic oligonucleotide
  Sense strand starting at position 762 of SEQ ID NO: 1244783
guuauuguccaccaacagu

SEQ ID NO: 1514501 - RNA, 19 nt, Artificial Sequence
  Description of Artificial Sequence: Synthetic oligonucleotide
  Antisense strand to SEQ ID NO: 1514500
acuguugguggacaauaac

SEQ ID NO: 1514502 - RNA, 19 nt, Artificial Sequence
  Description of Artificial Sequence: Synthetic oligonucleotide
  Sense strand starting at position 782 of SEQ ID NO: 1244783
ucagauugcuuuccgauuu

SEQ ID NO: 1514503 - RNA, 19 nt, Artificial Sequence
  Description of Artificial Sequence: Synthetic oligonucleotide
  Antisense strand to SEQ ID NO: 1514502
aaaucggaaagcaaucuga

SEQ ID NO: 1514504 - RNA, 19 nt, Artificial Sequence
  Description of Artificial Sequence: Synthetic oligonucleotide
  Sense strand starting at position 929 of SEQ ID NO: 1244783
aguucugcgaauuaagaau

SEQ ID NO: 1514505 - RNA, 19 nt, Artificial Sequence
  Description of Artificial Sequence: Synthetic oligonucleotide
  Antisense strand to SEQ ID NO: 1514504
auucuuaauucgcagaacu

SEQ ID NO: 1514506 - RNA, 19 nt, Artificial Sequence
  Description of Artificial Sequence: Synthetic oligonucleotide
  Sense strand starting at position 958 of SEQ ID NO: 1244783
ugaaaugccucacuuaguu

SEQ ID NO: 1514507 - RNA, 19 nt, Artificial Sequence
  Description of Artificial Sequence: Synthetic oligonucleotide
  Antisense strand to SEQ ID NO: 1514506
aacuaagugaggcauuuca

SEQ ID NO: 1514508 - RNA, 19 nt, Artificial Sequence
  Description of Artificial Sequence: Synthetic oligonucleotide
  Sense strand starting at position 989 of SEQ ID NO: 1244783
cuuagucuucuuuagcaag

SEQ ID NO: 1514509 - RNA, 19 nt, Artificial Sequence
  Description of Artificial Sequence: Synthetic oligonucleotide
  Antisense strand to SEQ ID NO: 1514508
cuugcuaaagaagacuaag

SEQ ID NO: 1514510 - RNA, 19 nt, Artificial Sequence
  Description of Artificial Sequence: Synthetic oligonucleotide
  Sense strand starting at position 1064 of SEQ ID NO: 1244783
uaggguaaguugguacuaa

SEQ ID NO: 1514511 - RNA, 19 nt, Artificial Sequence
  Description of Artificial Sequence: Synthetic oligonucleotide
  Antisense strand to SEQ ID NO: 1514510
uuaguaccaacuuacccua

SEQ ID NO: 1514512 - RNA, 19 nt, Artificial Sequence
  Description of Artificial Sequence: Synthetic oligonucleotide
  Sense strand starting at position 1240 of SEQ ID NO: 1244783
gugcuuuguccguuaaguc

SEQ ID NO: 1514513 - RNA, 19 nt, Artificial Sequence
  Description of Artificial Sequence: Synthetic oligonucleotide
  Antisense strand to SEQ ID NO: 1514512
gacuuaacggacaaagcac

SEQ ID NO: 1514514 - RNA, 19 nt, Artificial Sequence
  Description of Artificial Sequence: Synthetic oligonucleotide
  Sense strand starting at position 1546 of SEQ ID NO: 1244783
cgcguuugugucuucugaa

SEQ ID NO: 1514515 - RNA, 19 nt, Artificial Sequence
  Description of Artificial Sequence: Synthetic oligonucleotide
  Antisense strand to SEQ ID NO: 1514514
uucagaagacacaaacgcg

SEQ ID NO: 1514516 - RNA, 19 nt, Artificial Sequence
  Description of Artificial Sequence: Synthetic oligonucleotide
  Sense strand starting at position 1556 of SEQ ID NO: 1244783
ucuucugaaugcuugagau

SEQ ID NO: 1514517 - RNA, 19 nt, Artificial Sequence
  Description of Artificial Sequence: Synthetic oligonucleotide
  Antisense strand to SEQ ID NO: 1514516
aucucaagcauucagaaga

SEQ ID NO: 1514518 - RNA, 19 nt, Artificial Sequence
  Description of Artificial Sequence: Synthetic oligonucleotide
  Sense strand starting at position 2065 of SEQ ID NO: 1244783
cuaucuuuccuagugcgca

SEQ ID NO: 1514519 - RNA, 19 nt, Artificial Sequence
  Description of Artificial Sequence: Synthetic oligonucleotide
  Antisense strand to SEQ ID NO: 1514518
ugcgcacuaggaaagauag

SEQ ID NO: 1514520 - RNA, 19 nt, Artificial Sequence
  Description of Artificial Sequence: Synthetic oligonucleotide
  Sense strand starting at position 2274 of SEQ ID NO: 1244783
cgauuuaggucugcaagca

SEQ ID NO: 1514521 - RNA, 19 nt, Artificial Sequence
  Description of Artificial Sequence: Synthetic oligonucleotide
  Antisense strand to SEQ ID NO: 1514520
ugcuugcagaccuaaaucg

SEQ ID NO: 1514522 - RNA, 19 nt, Artificial Sequence
  Description of Artificial Sequence: Synthetic oligonucleotide
  Sense strand starting at position 2309 of SEQ ID NO: 1244783
cgacucuuauauguauuaa

SEQ ID NO: 1514523 - RNA, 19 nt, Artificial Sequence
  Description of Artificial Sequence: Synthetic oligonucleotide
  Antisense strand to SEQ ID NO: 1514522
uuaauacauauaagagucg

SEQ ID NO: 1514524 - RNA, 19 nt, Artificial Sequence
  Description of Artificial Sequence: Synthetic oligonucleotide
  Sense strand starting at position 2464 of SEQ ID NO: 1244783
agauauaggugaucuaacu

SEQ ID NO: 1514525 - RNA, 19 nt, Artificial Sequence
  Description of Artificial Sequence: Synthetic oligonucleotide
  Antisense strand to SEQ ID NO: 1514524
aguuagaucaccuauaucu

SEQ ID NO: 1514526 - RNA, 19 nt, Artificial Sequence
  Description of Artificial Sequence: Synthetic oligonucleotide
  Sense strand starting at position 3453 of SEQ ID NO: 1244783
agugacaauuuguugucuu

SEQ ID NO: 1514527 - RNA, 19 nt, Artificial Sequence
  Description of Artificial Sequence: Synthetic oligonucleotide
  Antisense strand to SEQ ID NO: 1514526
aagacaacaaauugucacu

SEQ ID NO: 1514528 - RNA, 19 nt, Artificial Sequence
  Description of Artificial Sequence: Synthetic oligonucleotide
  Sense strand starting at position 3506 of SEQ ID NO: 1244783
gcuccaaugggccauaagu

SEQ ID NO: 1514529 - RNA, 19 nt, Artificial Sequence
  Description of Artificial Sequence: Synthetic oligonucleotide
  Antisense strand to SEQ ID NO: 1514528
acuuauggcccauuggagc

SEQ ID NO: 1514530 - RNA, 19 nt, Artificial Sequence
  Description of Artificial Sequence: Synthetic oligonucleotide
  Sense strand starting at position 3508 of SEQ ID NO: 1244783
uccaaugggccauaaguga

SEQ ID NO: 1514531 - RNA, 19 nt, Artificial Sequence
  Description of Artificial Sequence: Synthetic oligonucleotide
  Antisense strand to SEQ ID NO: 1514530
ucacuuauggcccauugga

SEQ ID NO: 1514532 - RNA, 19 nt, Artificial Sequence
  Description of Artificial Sequence: Synthetic oligonucleotide
  Sense strand starting at position 3515 of SEQ ID NO: 1244783
ggccauaagugauuccuga

SEQ ID NO: 1514533 - RNA, 19 nt, Artificial Sequence
  Description of Artificial Sequence: Synthetic oligonucleotide
  Antisense strand to SEQ ID NO: 1514532
ucaggaaucacuuauggcc

SEQ ID NO: 1514534 - RNA, 19 nt, Artificial Sequence
  Description of Artificial Sequence: Synthetic oligonucleotide
  Sense strand starting at position 3522 of SEQ ID NO: 1244783
agugauuccugaguugagu

SEQ ID NO: 1514535 - RNA, 19 nt, Artificial Sequence
  Description of Artificial Sequence: Synthetic oligonucleotide
  Antisense strand to SEQ ID NO: 1514534
acucaacucaggaaucacu

SEQ ID NO: 1514536 - RNA, 19 nt, Artificial Sequence
  Description of Artificial Sequence: Synthetic oligonucleotide
  Sense strand starting at position 3524 of SEQ ID NO: 1244783
ugauuccugaguugaguga

SEQ ID NO: 1514537 - RNA, 19 nt, Artificial Sequence
  Description of Artificial Sequence: Synthetic oligonucleotide
  Antisense strand to SEQ ID NO: 1514536
ucacucaacucaggaauca

SEQ ID NO: 1514538 - RNA, 19 nt, Artificial Sequence
  Description of Artificial Sequence: Synthetic oligonucleotide
  Sense strand starting at position 3525 of SEQ ID NO: 1244783
gauuccugaguugagugaa

SEQ ID NO: 1514539 - RNA, 19 nt, Artificial Sequence
  Description of Artificial Sequence: Synthetic oligonucleotide
  Antisense strand to SEQ ID NO: 1514538
uucacucaacucaggaauc

SEQ ID NO: 1514540 - RNA, 19 nt, Artificial Sequence
  Description of Artificial Sequence: Synthetic oligonucleotide
  Sense strand starting at position 3528 of SEQ ID NO: 1244783
uccugaguugagugaaaga

SEQ ID NO: 1514541 - RNA, 19 nt, Artificial Sequence
  Description of Artificial Sequence: Synthetic oligonucleotide
  Antisense strand to SEQ ID NO: 1514540
ucuuucacucaacucagga

SEQ ID NO: 1514542 - RNA, 19 nt, Artificial Sequence
  Description of Artificial Sequence: Synthetic oligonucleotide
  Sense strand starting at position 3584 of SEQ ID NO: 1244783
guugucucgguguuacagu

SEQ ID NO: 1514543 - RNA, 19 nt, Artificial Sequence
  Description of Artificial Sequence: Synthetic oligonucleotide
  Antisense strand to SEQ ID NO: 1514542
acuguaacaccgagacaac

SEQ ID NO: 1514544 - RNA, 19 nt, Artificial Sequence
  Description of Artificial Sequence: Synthetic oligonucleotide
  Sense strand starting at position 3609 of SEQ ID NO: 1244783
guuaguguuggguauuagu

SEQ ID NO: 1514545 - RNA, 19 nt, Artificial Sequence
  Description of Artificial Sequence: Synthetic oligonucleotide
  Antisense strand to SEQ ID NO: 1514544
acuaauacccaacacuaac

SEQ ID NO: 1514546 - RNA, 19 nt, Artificial Sequence
  Description of Artificial Sequence: Synthetic oligonucleotide
  Sense strand starting at position 3616 of SEQ ID NO: 1244783
uuggguauuaguuguuaug

SEQ ID NO: 1514547 - RNA, 19 nt, Artificial Sequence
  Description of Artificial Sequence: Synthetic oligonucleotide
  Antisense strand to SEQ ID NO: 1514546
cauaacaacuaauacccaa

SEQ ID NO: 1514548 - RNA, 19 nt, Artificial Sequence
  Description of Artificial Sequence: Synthetic oligonucleotide
  Sense strand starting at position 3618 of SEQ ID NO: 1244783
ggguauuaguuguuaugau

SEQ ID NO: 1514549 - RNA, 19 nt, Artificial Sequence
  Description of Artificial Sequence: Synthetic oligonucleotide
  Antisense strand to SEQ ID NO: 1514548
aucauaacaacuaauaccc

SEQ ID NO: 1514550 - RNA, 19 nt, Artificial Sequence
  Description of Artificial Sequence: Synthetic oligonucleotide
  Sense strand starting at position 3627 of SEQ ID NO: 1244783
uuguuaugauucuuuccuu

SEQ ID NO: 1514551 - RNA, 19 nt, Artificial Sequence
  Description of Artificial Sequence: Synthetic oligonucleotide
  Antisense strand to SEQ ID NO: 1514550
aaggaaagaaucauaacaa

SEQ ID NO: 1514552 - RNA, 19 nt, Artificial Sequence
  Description of Artificial Sequence: Synthetic oligonucleotide
  Sense strand starting at position 3628 of SEQ ID NO: 1244783
uguuaugauucuuuccuuu

SEQ ID NO: 1514553 - RNA, 19 nt, Artificial Sequence
  Description of Artificial Sequence: Synthetic oligonucleotide
  Antisense strand to SEQ ID NO: 1514552
aaaggaaagaaucauaaca

SEQ ID NO: 1514554 - RNA, 19 nt, Artificial Sequence
  Description of Artificial Sequence: Synthetic oligonucleotide
  Sense strand starting at position 3781 of SEQ ID NO: 1244783
aaagcaagacuccguucua

SEQ ID NO: 1514555 - RNA, 19 nt, Artificial Sequence
  Description of Artificial Sequence: Synthetic oligonucleotide
  Antisense strand to SEQ ID NO: 1514554
uagaacggagucuugcuuu

SEQ ID NO: 1514556 - RNA, 19 nt, Artificial Sequence
  Description of Artificial Sequence: Synthetic oligonucleotide
  Sense strand starting at position 2074 of SEQ ID NO: 1244784
ccaccuguccuggaaacca

SEQ ID NO: 1514557 - RNA, 19 nt, Artificial Sequence
  Description of Artificial Sequence: Synthetic oligonucleotide
  Antisense strand to SEQ ID NO: 1514556
ugguuuccaggacaggugg

SEQ ID NO: 1514558 - RNA, 19 nt, Artificial Sequence
  Description of Artificial Sequence: Synthetic oligonucleotide
  Sense strand starting at position 2240 of SEQ ID NO: 1244784
ggguuuagaccagguacuu

SEQ ID NO: 1514559 - RNA, 19 nt, Artificial Sequence
  Description of Artificial Sequence: Synthetic oligonucleotide
  Antisense strand to SEQ ID NO: 1514558
aaguaccuggucuaaaccc

SEQ ID NO: 1514560 - RNA, 19 nt, Artificial Sequence
  Description of Artificial Sequence: Synthetic oligonucleotide
  Sense strand starting at position 2245 of SEQ ID NO: 1244784
uagaccagguacuuugaaa

SEQ ID NO: 1514561 - RNA, 19 nt, Artificial Sequence
  Description of Artificial Sequence: Synthetic oligonucleotide
  Antisense strand to SEQ ID NO: 1514560
uuucaaaguaccuggucua

SEQ ID NO: 1514562 - RNA, 19 nt, Artificial Sequence
  Description of Artificial Sequence: Synthetic oligonucleotide
  Sense strand starting at position 2363 of SEQ ID NO: 1244784
ccuguuucuuuagcuguaa

SEQ ID NO: 1514563 - RNA, 19 nt, Artificial Sequence
  Description of Artificial Sequence: Synthetic oligonucleotide
  Antisense strand to SEQ ID NO: 1514562
uuacagcuaaagaaacagg

SEQ ID NO: 1514564 - RNA, 19 nt, Artificial Sequence
  Description of Artificial Sequence: Synthetic oligonucleotide
  Sense strand starting at position 2364 of SEQ ID NO: 1244784
cuguuucuuuagcuguaaa

SEQ ID NO: 1514565 - RNA, 19 nt, Artificial Sequence
  Description of Artificial Sequence: Synthetic oligonucleotide
  Antisense strand to SEQ ID NO: 1514564
uuuacagcuaaagaaacag

SEQ ID NO: 1514566 - RNA, 19 nt, Artificial Sequence
  Description of Artificial Sequence: Synthetic oligonucleotide
  Sense strand starting at position 2367 of SEQ ID NO: 1244784
uuucuuuagcuguaaagaa

SEQ ID NO: 1514567 - RNA, 19 nt, Artificial Sequence
  Description of Artificial Sequence: Synthetic oligonucleotide
  Antisense strand to SEQ ID NO: 1514566
uucuuuacagcuaaagaaa

SEQ ID NO: 1514568 - RNA, 19 nt, Artificial Sequence
  Description of Artificial Sequence: Synthetic oligonucleotide
  Sense strand starting at position 2391 of SEQ ID NO: 1244784
gacguugggccagagaguu

SEQ ID NO: 1514569 - RNA, 19 nt, Artificial Sequence
  Description of Artificial Sequence: Synthetic oligonucleotide
  Antisense strand to SEQ ID NO: 1514568
aacucucuggcccaacguc

SEQ ID NO: 1514570 - RNA, 19 nt, Artificial Sequence
  Description of Artificial Sequence: Synthetic oligonucleotide
  Sense strand starting at position 2399 of SEQ ID NO: 1244784
gccagagaguuucuaaggu

SEQ ID NO: 1514571 - RNA, 19 nt, Artificial Sequence
  Description of Artificial Sequence: Synthetic oligonucleotide
  Antisense strand to SEQ ID NO: 1514570
accuuagaaacucucuggc

SEQ ID NO: 1514572 - RNA, 19 nt, Artificial Sequence
  Description of Artificial Sequence: Synthetic oligonucleotide
  Sense strand starting at position 2427 of SEQ ID NO: 1244784
cucugagcucaguaacauu

SEQ ID NO: 1514573 - RNA, 19 nt, Artificial Sequence
  Description of Artificial Sequence: Synthetic oligonucleotide
  Antisense strand to SEQ ID NO: 1514572
aauguuacugagcucagag

SEQ ID NO: 1514574 - RNA, 19 nt, Artificial Sequence
  Description of Artificial Sequence: Synthetic oligonucleotide
  Sense strand starting at position 2504 of SEQ ID NO: 1244784
guugcaaggaggugucauu

SEQ ID NO: 1514575 - RNA, 19 nt, Artificial Sequence
  Description of Artificial Sequence: Synthetic oligonucleotide
  Antisense strand to SEQ ID NO: 1514574
aaugacaccuccuugcaac

SEQ ID NO: 1514576 - RNA, 19 nt, Artificial Sequence
  Description of Artificial Sequence: Synthetic oligonucleotide
  Sense strand starting at position 2515 of SEQ ID NO: 1244784
gugucauuauaucugcaca

SEQ ID NO: 1514577 - RNA, 19 nt, Artificial Sequence
  Description of Artificial Sequence: Synthetic oligonucleotide
  Antisense strand to SEQ ID NO: 1514576
ugugcagauauaaugacac

SEQ ID NO: 1514578 - RNA, 19 nt, Artificial Sequence
  Description of Artificial Sequence: Synthetic oligonucleotide
  Sense strand starting at position 2538 of SEQ ID NO: 1244784
gaggcugucccucaaaguu

SEQ ID NO: 1514579 - RNA, 19 nt, Artificial Sequence
  Description of Artificial Sequence: Synthetic oligonucleotide
  Antisense strand to SEQ ID NO: 1514578
aacuuugagggacagccuc

SEQ ID NO: 1514580 - RNA, 19 nt, Artificial Sequence
  Description of Artificial Sequence: Synthetic oligonucleotide
  Sense strand starting at position 2748 of SEQ ID NO: 1244784
gccugugaugugucugucu

SEQ ID NO: 1514581 - RNA, 19 nt, Artificial Sequence
  Description of Artificial Sequence: Synthetic oligonucleotide
  Antisense strand to SEQ ID NO: 1514580
agacagacacaucacaggc

SEQ ID NO: 1514582 - RNA, 19 nt, Artificial Sequence
  Description of Artificial Sequence: Synthetic oligonucleotide
  Sense strand starting at position 2750 of SEQ ID NO: 1244784
cugugaugugucugucuau

SEQ ID NO: 1514583 - RNA, 19 nt, Artificial Sequence
  Description of Artificial Sequence: Synthetic oligonucleotide
  Antisense strand to SEQ ID NO: 1514582
auagacagacacaucacag

SEQ ID NO: 1514584 - RNA, 19 nt, Artificial Sequence
  Description of Artificial Sequence: Synthetic oligonucleotide
  Sense strand starting at position 2751 of SEQ ID NO: 1244784
ugugaugugucugucuaug

SEQ ID NO: 1514585 - RNA, 19 nt, Artificial Sequence
  Description of Artificial Sequence: Synthetic oligonucleotide
  Antisense strand to SEQ ID NO: 1514584
cauagacagacacaucaca

SEQ ID NO: 1514586 - RNA, 19 nt, Artificial Sequence
  Description of Artificial Sequence: Synthetic oligonucleotide
  Sense strand starting at position 2753 of SEQ ID NO: 1244784
ugaugugucugucuaugac

SEQ ID NO: 1514587 - RNA, 19 nt, Artificial Sequence
  Description of Artificial Sequence: Synthetic oligonucleotide
  Antisense strand to SEQ ID NO: 1514586
gucauagacagacacauca

SEQ ID NO: 1514588 - RNA, 19 nt, Artificial Sequence
  Description of Artificial Sequence: Synthetic oligonucleotide
  Sense strand starting at position 2776 of SEQ ID NO: 1244784
aggacaauguccuaaggaa

SEQ ID NO: 1514589 - RNA, 19 nt, Artificial Sequence
  Description of Artificial Sequence: Synthetic oligonucleotide
  Antisense strand to SEQ ID NO: 1514588
uuccuuaggacauuguccu

SEQ ID NO: 1514590 - RNA, 19 nt, Artificial Sequence
  Description of Artificial Sequence: Synthetic oligonucleotide
  Sense strand starting at position 2827 of SEQ ID NO: 1244784
cuggauuccauguggaaca

SEQ ID NO: 1514591 - RNA, 19 nt, Artificial Sequence
  Description of Artificial Sequence: Synthetic oligonucleotide
  Antisense strand to SEQ ID NO: 1514590
uguuccacauggaauccag

SEQ ID NO: 1514592 - RNA, 19 nt, Artificial Sequence
  Description of Artificial Sequence: Synthetic oligonucleotide
  Sense strand starting at position 2859 of SEQ ID NO: 1244784
ugcacuauggacuguuaca

SEQ ID NO: 1514593 - RNA, 19 nt, Artificial Sequence
  Description of Artificial Sequence: Synthetic oligonucleotide
  Antisense strand to SEQ ID NO: 1514592
uguaacaguccauagugca

SEQ ID NO: 1514594 - RNA, 19 nt, Artificial Sequence
  Description of Artificial Sequence: Synthetic oligonucleotide
  Sense strand starting at position 2864 of SEQ ID NO: 1244784
uauggacuguuacaagaga

SEQ ID NO: 1514595 - RNA, 19 nt, Artificial Sequence
  Description of Artificial Sequence: Synthetic oligonucleotide
  Antisense strand to SEQ ID NO: 1514594
ucucuuguaacaguccaua

SEQ ID NO: 1514596 - RNA, 19 nt, Artificial Sequence
  Description of Artificial Sequence: Synthetic oligonucleotide
  Sense strand starting at position 2905 of SEQ ID NO: 1244784
auugauuugucaugagucu

SEQ ID NO: 1514597 - RNA, 19 nt, Artificial Sequence
  Description of Artificial Sequence: Synthetic oligonucleotide
  Antisense strand to SEQ ID NO: 1514596
agacucaugacaaaucaau

SEQ ID NO: 1514598 - RNA, 19 nt, Artificial Sequence
  Description of Artificial Sequence: Synthetic oligonucleotide
  Sense strand starting at position 2912 of SEQ ID NO: 1244784
ugucaugagucucuuuguu

SEQ ID NO: 1514599 - RNA, 19 nt, Artificial Sequence
  Description of Artificial Sequence: Synthetic oligonucleotide
  Antisense strand to SEQ ID NO: 1514598
aacaaagagacucaugaca

SEQ ID NO: 1514600 - RNA, 19 nt, Artificial Sequence
  Description of Artificial Sequence: Synthetic oligonucleotide
  Sense strand starting at position 2914 of SEQ ID NO: 1244784
ucaugagucucuuuguuau

SEQ ID NO: 1514601 - RNA, 19 nt, Artificial Sequence
  Description of Artificial Sequence: Synthetic oligonucleotide
  Antisense strand to SEQ ID NO: 1514600
auaacaaagagacucauga

SEQ ID NO: 1514602 - RNA, 19 nt, Artificial Sequence
  Description of Artificial Sequence: Synthetic oligonucleotide
  Sense strand starting at position 2916 of SEQ ID NO: 1244784
augagucucuuuguuauag

SEQ ID NO: 1514603 - RNA, 19 nt, Artificial Sequence
  Description of Artificial Sequence: Synthetic oligonucleotide
  Antisense strand to SEQ ID NO: 1514602
cuauaacaaagagacucau

SEQ ID NO: 1514604 - RNA, 19 nt, Artificial Sequence
  Description of Artificial Sequence: Synthetic oligonucleotide
  Sense strand starting at position 2934 of SEQ ID NO: 1244784
gccacuuaacguuaccuua

SEQ ID NO: 1514605 - RNA, 19 nt, Artificial Sequence
  Description of Artificial Sequence: Synthetic oligonucleotide
  Antisense strand to SEQ ID NO: 1514604
uaagguaacguuaaguggc

SEQ ID NO: 1514606 - RNA, 19 nt, Artificial Sequence
  Description of Artificial Sequence: Synthetic oligonucleotide
  Sense strand starting at position 3024 of SEQ ID NO: 1244784
ggcucuugugcugguuaaa

SEQ ID NO: 1514607 - RNA, 19 nt, Artificial Sequence
  Description of Artificial Sequence: Synthetic oligonucleotide
  Antisense strand to SEQ ID NO: 1514606
uuuaaccagcacaagagcc

SEQ ID NO: 1514608 - RNA, 19 nt, Artificial Sequence
  Description of Artificial Sequence: Synthetic oligonucleotide
  Sense strand starting at position 3044 of SEQ ID NO: 1244784
ggaccuugaugucuuccaa

SEQ ID NO: 1514609 - RNA, 19 nt, Artificial Sequence
  Description of Artificial Sequence: Synthetic oligonucleotide
  Antisense strand to SEQ ID NO: 1514608
uuggaagacaucaaggucc

SEQ ID NO: 1514610 - RNA, 19 nt, Artificial Sequence
  Description of Artificial Sequence: Synthetic oligonucleotide
  Sense strand starting at position 3115 of SEQ ID NO: 1244784
ggcagacuuuccgcuggaa

SEQ ID NO: 1514611 - RNA, 19 nt, Artificial Sequence
  Description of Artificial Sequence: Synthetic oligonucleotide
  Antisense strand to SEQ ID NO: 1514610
uuccagcggaaagucugcc

SEQ ID NO: 1514612 - RNA, 19 nt, Artificial Sequence
  Description of Artificial Sequence: Synthetic oligonucleotide
  Sense strand starting at position 3117 of SEQ ID NO: 1244784
cagacuuuccgcuggaaag

SEQ ID NO: 1514613 - RNA, 19 nt, Artificial Sequence
  Description of Artificial Sequence: Synthetic oligonucleotide
  Antisense strand to SEQ ID NO: 1514612
cuuuccagcggaaagucug

SEQ ID NO: 1514614 - RNA, 19 nt, Artificial Sequence
  Description of Artificial Sequence: Synthetic oligonucleotide
  Sense strand starting at position 3118 of SEQ ID NO: 1244784
agacuuuccgcuggaaaga

SEQ ID NO: 1514615 - RNA, 19 nt, Artificial Sequence
  Description of Artificial Sequence: Synthetic oligonucleotide
  Antisense strand to SEQ ID NO: 1514614
ucuuuccagcggaaagucu

SEQ ID NO: 1514616 - RNA, 19 nt, Artificial Sequence
  Description of Artificial Sequence: Synthetic oligonucleotide
  Sense strand starting at position 3216 of SEQ ID NO: 1244784
gguguaugcccucacaggu

SEQ ID NO: 1514617 - RNA, 19 nt, Artificial Sequence
  Description of Artificial Sequence: Synthetic oligonucleotide
  Antisense strand to SEQ ID NO: 1514616
accugugagggcauacacc

SEQ ID NO: 1514618 - RNA, 19 nt, Artificial Sequence
  Description of Artificial Sequence: Synthetic oligonucleotide
  Sense strand starting at position 3277 of SEQ ID NO: 1244784
uggaguagauuugaggaau

SEQ ID NO: 1514619 - RNA, 19 nt, Artificial Sequence
  Description of Artificial Sequence: Synthetic oligonucleotide
  Antisense strand to SEQ ID NO: 1514618
auuccucaaaucuacucca

SEQ ID NO: 1514620 - RNA, 19 nt, Artificial Sequence
  Description of Artificial Sequence: Synthetic oligonucleotide
  Sense strand starting at position 3310 of SEQ ID NO: 1244784
aguuagugugcgggagagu

SEQ ID NO: 1514621 - RNA, 19 nt, Artificial Sequence
  Description of Artificial Sequence: Synthetic oligonucleotide
  Antisense strand to SEQ ID NO: 1514620
acucucccgcacacuaacu

SEQ ID NO: 1514622 - RNA, 19 nt, Artificial Sequence
  Description of Artificial Sequence: Synthetic oligonucleotide
  Sense strand starting at position 3311 of SEQ ID NO: 1244784
guuagugugcgggagagua

SEQ ID NO: 1514623 - RNA, 19 nt, Artificial Sequence
  Description of Artificial Sequence: Synthetic oligonucleotide
  Antisense strand to SEQ ID NO: 1514622
uacucucccgcacacuaac

SEQ ID NO: 1514624 - RNA, 19 nt, Artificial Sequence
  Description of Artificial Sequence: Synthetic oligonucleotide
  Sense strand starting at position 3389 of SEQ ID NO: 1244784
guuccauuguccucauguu

SEQ ID NO: 1514625 - RNA, 19 nt, Artificial Sequence
  Description of Artificial Sequence: Synthetic oligonucleotide
  Antisense strand to SEQ ID NO: 1514624
aacaugaggacaauggaac

SEQ ID NO: 1514626 - RNA, 19 nt, Artificial Sequence
  Description of Artificial Sequence: Synthetic oligonucleotide
  Sense strand starting at position 3501 of SEQ ID NO: 1244784
aagacauaguuauaaugga

SEQ ID NO: 1514627 - RNA, 19 nt, Artificial Sequence
  Description of Artificial Sequence: Synthetic oligonucleotide
  Antisense strand to SEQ ID NO: 1514626
uccauuauaacuaugucuu

SEQ ID NO: 1514628 - RNA, 19 nt, Artificial Sequence
  Description of Artificial Sequence: Synthetic oligonucleotide
  Sense strand starting at position 3550 of SEQ ID NO: 1244784
cuugauuaugucugcaaac

SEQ ID NO: 1514629 - RNA, 19 nt, Artificial Sequence
  Description of Artificial Sequence: Synthetic oligonucleotide
  Antisense strand to SEQ ID NO: 1514628
guuugcagacauaaucaag

SEQ ID NO: 1514630 - RNA, 19 nt, Artificial Sequence
  Description of Artificial Sequence: Synthetic oligonucleotide
  Sense strand starting at position 3551 of SEQ ID NO: 1244784
uugauuaugucugcaaaca

SEQ ID NO: 1514631 - RNA, 19 nt, Artificial Sequence
  Description of Artificial Sequence: Synthetic oligonucleotide
  Antisense strand to SEQ ID NO: 1514630
uguuugcagacauaaucaa

SEQ ID NO: 1514632 - RNA, 19 nt, Artificial Sequence
  Description of Artificial Sequence: Synthetic oligonucleotide
  Sense strand starting at position 3552 of SEQ ID NO: 1244784
ugauuaugucugcaaacac

SEQ ID NO: 1514633 - RNA, 19 nt, Artificial Sequence
  Description of Artificial Sequence: Synthetic oligonucleotide
  Antisense strand to SEQ ID NO: 1514632
guguuugcagacauaauca

SEQ ID NO: 1514634 - RNA, 19 nt, Artificial Sequence
  Description of Artificial Sequence: Synthetic oligonucleotide
  Sense strand starting at position 3577 of SEQ ID NO: 1244784
uccaaauaaggucgcauua

SEQ ID NO: 1514635 - RNA, 19 nt, Artificial Sequence
  Description of Artificial Sequence: Synthetic oligonucleotide
  Antisense strand to SEQ ID NO: 1514634
uaaugcgaccuuauuugga

SEQ ID NO: 1514636 - RNA, 19 nt, Artificial Sequence
  Description of Artificial Sequence: Synthetic oligonucleotide
  Sense strand starting at position 230 of SEQ ID NO: 1244785
uaccaagagucgggaagaa

SEQ ID NO: 1514637 - RNA, 19 nt, Artificial Sequence
  Description of Artificial Sequence: Synthetic oligonucleotide
  Antisense strand to SEQ ID NO: 1514636
uucuucccgacucuuggua

SEQ ID NO: 1514638 - RNA, 19 nt, Artificial Sequence
  Description of Artificial Sequence: Synthetic oligonucleotide
  Sense strand starting at position 313 of SEQ ID NO: 1244785
cuggaagucuggucagcuu

SEQ ID NO: 1514639 - RNA, 19 nt, Artificial Sequence
  Description of Artificial Sequence: Synthetic oligonucleotide
  Antisense strand to SEQ ID NO: 1514638
aagcugaccagacuuccag

SEQ ID NO: 1514640 - RNA, 19 nt, Artificial Sequence
  Description of Artificial Sequence: Synthetic oligonucleotide
  Sense strand starting at position 1283 of SEQ ID NO: 1244785
gagggaggccuuugaugca

SEQ ID NO: 1514641 - RNA, 19 nt, Artificial Sequence
  Description of Artificial Sequence: Synthetic oligonucleotide
  Antisense strand to SEQ ID NO: 1514640
ugcaucaaaggccucccuc

SEQ ID NO: 1514642 - RNA, 19 nt, Artificial Sequence
  Description of Artificial Sequence: Synthetic oligonucleotide
  Sense strand starting at position 2265 of SEQ ID NO: 1244785
guagucuucgcgccacgau

SEQ ID NO: 1514643 - RNA, 19 nt, Artificial Sequence
  Description of Artificial Sequence: Synthetic oligonucleotide
  Antisense strand to SEQ ID NO: 1514642
aucguggcgcgaagacuac

SEQ ID NO: 1514644 - RNA, 19 nt, Artificial Sequence
  Description of Artificial Sequence: Synthetic oligonucleotide
  Sense strand starting at position 2266 of SEQ ID NO: 1244785
uagucuucgcgccacgaua

SEQ ID NO: 1514645 - RNA, 19 nt, Artificial Sequence
  Description of Artificial Sequence: Synthetic oligonucleotide
  Antisense strand to SEQ ID NO: 1514644
uaucguggcgcgaagacua

SEQ ID NO: 1514646 - RNA, 19 nt, Artificial Sequence
  Description of Artificial Sequence: Synthetic oligonucleotide
  Sense strand starting at position 2961 of SEQ ID NO: 1244785
caagcuuucuugcggagga

SEQ ID NO: 1514647 - RNA, 19 nt, Artificial Sequence
  Description of Artificial Sequence: Synthetic oligonucleotide
  Antisense strand to SEQ ID NO: 1514646
uccuccgcaagaaagcuug

SEQ ID NO: 1514648 - RNA, 19 nt, Artificial Sequence
  Description of Artificial Sequence: Synthetic oligonucleotide
  Sense strand starting at position 2963 of SEQ ID NO: 1244785
agcuuucuugcggaggaga

SEQ ID NO: 1514649 - RNA, 19 nt, Artificial Sequence
  Description of Artificial Sequence: Synthetic oligonucleotide
  Antisense strand to SEQ ID NO: 1514648
ucuccuccgcaagaaagcu

SEQ ID NO: 1514650 - RNA, 19 nt, Artificial Sequence
  Description of Artificial Sequence: Synthetic oligonucleotide
  Sense strand starting at position 3006 of SEQ ID NO: 1244785
uuuauuuacuucuggaguu

SEQ ID NO: 1514651 - RNA, 19 nt, Artificial Sequence
  Description of Artificial Sequence: Synthetic oligonucleotide
  Antisense strand to SEQ ID NO: 1514650
aacuccagaaguaaauaaa

SEQ ID NO: 1514652 - RNA, 19 nt, Artificial Sequence
  Description of Artificial Sequence: Synthetic oligonucleotide
  Sense strand starting at position 3007 of SEQ ID NO: 1244785
uuauuuacuucuggaguuu

SEQ ID NO: 1514653 - RNA, 19 nt, Artificial Sequence
  Description of Artificial Sequence: Synthetic oligonucleotide
  Antisense strand to SEQ ID NO: 1514652
aaacuccagaaguaaauaa

SEQ ID NO: 1514654 - RNA, 19 nt, Artificial Sequence
  Description of Artificial Sequence: Synthetic oligonucleotide
  Sense strand starting at position 3034 of SEQ ID NO: 1244785
aguuuaggugagcaagaga

SEQ ID NO: 1514655 - RNA, 19 nt, Artificial Sequence
  Description of Artificial Sequence: Synthetic oligonucleotide
  Antisense strand to SEQ ID NO: 1514654
ucucuugcucaccuaaacu

SEQ ID NO: 1514656 - RNA, 19 nt, Artificial Sequence
  Description of Artificial Sequence: Synthetic oligonucleotide
  Sense strand starting at position 3673 of SEQ ID NO: 1244785
gucgcuccuccguucagau

SEQ ID NO: 1514657 - RNA, 19 nt, Artificial Sequence
  Description of Artificial Sequence: Synthetic oligonucleotide
  Antisense strand to SEQ ID NO: 1514656
aucugaacggaggagcgac

SEQ ID NO: 1514658 - RNA, 19 nt, Artificial Sequence
  Description of Artificial Sequence: Synthetic oligonucleotide
  Sense strand starting at position 3840 of SEQ ID NO: 1244785
uuucgacagccugauggaa

SEQ ID NO: 1514659 - RNA, 19 nt, Artificial Sequence
  Description of Artificial Sequence: Synthetic oligonucleotide
  Antisense strand to SEQ ID NO: 1514658
uuccaucaggcugucgaaa

SEQ ID NO: 1514660 - RNA, 19 nt, Artificial Sequence
  Description of Artificial Sequence: Synthetic oligonucleotide
  Sense strand starting at position 3848 of SEQ ID NO: 1244785
gccugauggaagugagcau

SEQ ID NO: 1514661 - RNA, 19 nt, Artificial Sequence
  Description of Artificial Sequence: Synthetic oligonucleotide
  Antisense strand to SEQ ID NO: 1514660
augcucacuuccaucaggc

SEQ ID NO: 1514662 - RNA, 19 nt, Artificial Sequence
  Description of Artificial Sequence: Synthetic oligonucleotide
  Sense strand starting at position 3894 of SEQ ID NO: 1244785
ccaauugcccaauguaaga

SEQ ID NO: 1514663 - RNA, 19 nt, Artificial Sequence
  Description of Artificial Sequence: Synthetic oligonucleotide
  Antisense strand to SEQ ID NO: 1514662
ucuuacauugggcaauugg

SEQ ID NO: 1514664 - RNA, 19 nt, Artificial Sequence
  Description of Artificial Sequence: Synthetic oligonucleotide
  Sense strand starting at position 3935 of SEQ ID NO: 1244785
ccacaucugccuuauguca

SEQ ID NO: 1514665 - RNA, 19 nt, Artificial Sequence
  Description of Artificial Sequence: Synthetic oligonucleotide
  Antisense strand to SEQ ID NO: 1514664
ugacauaaggcagaugugg

SEQ ID NO: 1514666 - RNA, 19 nt, Artificial Sequence
  Description of Artificial Sequence: Synthetic oligonucleotide
  Sense strand starting at position 3950 of SEQ ID NO: 1244785
gucaaagcucccugccuuu

SEQ ID NO: 1514667 - RNA, 19 nt, Artificial Sequence
  Description of Artificial Sequence: Synthetic oligonucleotide
  Antisense strand to SEQ ID NO: 1514666
aaaggcagggagcuuugac

SEQ ID NO: 1514668 - RNA, 19 nt, Artificial Sequence
  Description of Artificial Sequence: Synthetic oligonucleotide
  Sense strand starting at position 22 of SEQ ID NO: 1244786
ggguucuguuguccaacuu

SEQ ID NO: 1514669 - RNA, 19 nt, Artificial Sequence
  Description of Artificial Sequence: Synthetic oligonucleotide
  Antisense strand to SEQ ID NO: 1514668
aaguuggacaacagaaccc

SEQ ID NO: 1514670 - RNA, 19 nt, Artificial Sequence
  Description of Artificial Sequence: Synthetic oligonucleotide
  Sense strand starting at position 48 of SEQ ID NO: 1244786
aagggaggguuugcaucau

SEQ ID NO: 1514671 - RNA, 19 nt, Artificial Sequence
  Description of Artificial Sequence: Synthetic oligonucleotide
  Antisense strand to SEQ ID NO: 1514670
augaugcaaacccucccuu

SEQ ID NO: 1514672 - RNA, 19 nt, Artificial Sequence
  Description of Artificial Sequence: Synthetic oligonucleotide
  Sense strand starting at position 85 of SEQ ID NO: 1244786
uaagguuuagagggugaga

SEQ ID NO: 1514673 - RNA, 19 nt, Artificial Sequence
  Description of Artificial Sequence: Synthetic oligonucleotide
  Antisense strand to SEQ ID NO: 1514672
ucucacccucuaaaccuua

SEQ ID NO: 1514674 - RNA, 19 nt, Artificial Sequence
  Description of Artificial Sequence: Synthetic oligonucleotide
  Sense strand starting at position 215 of SEQ ID NO: 1244786
ggcccagugauguggaacu

SEQ ID NO: 1514675 - RNA, 19 nt, Artificial Sequence
  Description of Artificial Sequence: Synthetic oligonucleotide
  Antisense strand to SEQ ID NO: 1514674
aguuccacaucacugggcc

SEQ ID NO: 1514676 - RNA, 19 nt, Artificial Sequence
  Description of Artificial Sequence: Synthetic oligonucleotide
  Sense strand starting at position 228 of SEQ ID NO: 1244786
ggaacugguaguugaguca

SEQ ID NO: 1514677 - RNA, 19 nt, Artificial Sequence
  Description of Artificial Sequence: Synthetic oligonucleotide
  Antisense strand to SEQ ID NO: 1514676
ugacucaacuaccaguucc

SEQ ID NO: 1514678 - RNA, 19 nt, Artificial Sequence
  Description of Artificial Sequence: Synthetic oligonucleotide
  Sense strand starting at position 480 of SEQ ID NO: 1244786
ggugguggcauagauauau

SEQ ID NO: 1514679 - RNA, 19 nt, Artificial Sequence
  Description of Artificial Sequence: Synthetic oligonucleotide
  Antisense strand to SEQ ID NO: 1514678
auauaucuaugccaccacc

SEQ ID NO: 1514680 - RNA, 19 nt, Artificial Sequence
  Description of Artificial Sequence: Synthetic oligonucleotide
  Sense strand starting at position 484 of SEQ ID NO: 1244786
guggcauagauauaucugu

SEQ ID NO: 1514681 - RNA, 19 nt, Artificial Sequence
  Description of Artificial Sequence: Synthetic oligonucleotide
  Antisense strand to SEQ ID NO: 1514680
acagauauaucuaugccac

SEQ ID NO: 1514682 - RNA, 19 nt, Artificial Sequence
  Description of Artificial Sequence: Synthetic oligonucleotide
  Sense strand starting at position 541 of SEQ ID NO: 1244786
guccauucaggcugugagu

SEQ ID NO: 1514683 - RNA, 19 nt, Artificial Sequence
  Description of Artificial Sequence: Synthetic oligonucleotide
  Antisense strand to SEQ ID NO: 1514682
acucacagccugaauggac

SEQ ID NO: 1514684 - RNA, 19 nt, Artificial Sequence
  Description of Artificial Sequence: Synthetic oligonucleotide
  Sense strand starting at position 552 of SEQ ID NO: 1244786
cugugagucuaggcaucuu

SEQ ID NO: 1514685 - RNA, 19 nt, Artificial Sequence
  Description of Artificial Sequence: Synthetic oligonucleotide
  Antisense strand to SEQ ID NO: 1514684
aagaugccuagacucacag

SEQ ID NO: 1514686 - RNA, 19 nt, Artificial Sequence
  Description of Artificial Sequence: Synthetic oligonucleotide
  Sense strand starting at position 615 of SEQ ID NO: 1244786
cuuagcuagugcugcuaaa

SEQ ID NO: 1514687 - RNA, 19 nt, Artificial Sequence
  Description of Artificial Sequence: Synthetic oligonucleotide
  Antisense strand to SEQ ID NO: 1514686
uuuagcagcacuagcuaag

SEQ ID NO: 1514688 - RNA, 19 nt, Artificial Sequence
  Description of Artificial Sequence: Synthetic oligonucleotide
  Sense strand starting at position 974 of SEQ ID NO: 1244786
caggucucagcuuagaagu

SEQ ID NO: 1514689 - RNA, 19 nt, Artificial Sequence
  Description of Artificial Sequence: Synthetic oligonucleotide
  Antisense strand to SEQ ID NO: 1514688
acuucuaagcugagaccug

SEQ ID NO: 1514690 - RNA, 19 nt, Artificial Sequence
  Description of Artificial Sequence: Synthetic oligonucleotide
  Sense strand starting at position 1070 of SEQ ID NO: 1244786
cguuugguuucccgggaga

SEQ ID NO: 1514691 - RNA, 19 nt, Artificial Sequence
  Description of Artificial Sequence: Synthetic oligonucleotide
  Antisense strand to SEQ ID NO: 1514690
ucucccgggaaaccaaacg

SEQ ID NO: 1514692 - RNA, 19 nt, Artificial Sequence
  Description of Artificial Sequence: Synthetic oligonucleotide
  Sense strand starting at position 1072 of SEQ ID NO: 1244786
uuugguuucccgggagauu

SEQ ID NO: 1514693 - RNA, 19 nt, Artificial Sequence
  Description of Artificial Sequence: Synthetic oligonucleotide
  Antisense strand to SEQ ID NO: 1514692
aaucucccgggaaaccaaa

SEQ ID NO: 1514694 - RNA, 19 nt, Artificial Sequence
  Description of Artificial Sequence: Synthetic oligonucleotide
  Sense strand starting at position 1164 of SEQ ID NO: 1244786
cgguggaugucagugaaug

SEQ ID NO: 1514695 - RNA, 19 nt, Artificial Sequence
  Description of Artificial Sequence: Synthetic oligonucleotide
  Antisense strand to SEQ ID NO: 1514694
cauucacugacauccaccg

SEQ ID NO: 1514696 - RNA, 19 nt, Artificial Sequence
  Description of Artificial Sequence: Synthetic oligonucleotide
  Sense strand starting at position 1165 of SEQ ID NO: 1244786
gguggaugucagugaauga

SEQ ID NO: 1514697 - RNA, 19 nt, Artificial Sequence
  Description of Artificial Sequence: Synthetic oligonucleotide
  Antisense strand to SEQ ID NO: 1514696
ucauucacugacauccacc

SEQ ID NO: 1514698 - RNA, 19 nt, Artificial Sequence
  Description of Artificial Sequence: Synthetic oligonucleotide
  Sense strand starting at position 1166 of SEQ ID NO: 1244786
guggaugucagugaaugag

SEQ ID NO: 1514699 - RNA, 19 nt, Artificial Sequence
  Description of Artificial Sequence: Synthetic oligonucleotide
  Antisense strand to SEQ ID NO: 1514698
cucauucacugacauccac

SEQ ID NO: 1514700 - RNA, 19 nt, Artificial Sequence
  Description of Artificial Sequence: Synthetic oligonucleotide
  Sense strand starting at position 1303 of SEQ ID NO: 1244786
agggaaugaccgugaguaa

SEQ ID NO: 1514701 - RNA, 19 nt, Artificial Sequence
  Description of Artificial Sequence: Synthetic oligonucleotide
  Antisense strand to SEQ ID NO: 1514700
uuacucacggucauucccu

SEQ ID NO: 1514702 - RNA, 19 nt, Artificial Sequence
  Description of Artificial Sequence: Synthetic oligonucleotide
  Sense strand starting at position 1304 of SEQ ID NO: 1244786
gggaaugaccgugaguaac

SEQ ID NO: 1514703 - RNA, 19 nt, Artificial Sequence
  Description of Artificial Sequence: Synthetic oligonucleotide
  Antisense strand to SEQ ID NO: 1514702
guuacucacggucauuccc

SEQ ID NO: 1514704 - RNA, 19 nt, Artificial Sequence
  Description of Artificial Sequence: Synthetic oligonucleotide
  Sense strand starting at position 1315 of SEQ ID NO: 1244786
ugaguaaccucgcaauuac

SEQ ID NO: 1514705 - RNA, 19 nt, Artificial Sequence
  Description of Artificial Sequence: Synthetic oligonucleotide
  Antisense strand to SEQ ID NO: 1514704
guaauugcgagguuacuca

SEQ ID NO: 1514706 - RNA, 19 nt, Artificial Sequence
  Description of Artificial Sequence: Synthetic oligonucleotide
  Sense strand starting at position 2096 of SEQ ID NO: 1244786
cccggucugcgccacaaau

SEQ ID NO: 1514707 - RNA, 19 nt, Artificial Sequence
  Description of Artificial Sequence: Synthetic oligonucleotide
  Antisense strand to SEQ ID NO: 1514706
auuuguggcgcagaccggg

SEQ ID NO: 1514708 - RNA, 19 nt, Artificial Sequence
  Description of Artificial Sequence: Synthetic oligonucleotide
  Sense strand starting at position 2392 of SEQ ID NO: 1244786
gugagcaggccugauguaa

SEQ ID NO: 1514709 - RNA, 19 nt, Artificial Sequence
  Description of Artificial Sequence: Synthetic oligonucleotide
  Antisense strand to SEQ ID NO: 1514708
uuacaucaggccugcucac

SEQ ID NO: 1514710 - RNA, 19 nt, Artificial Sequence
  Description of Artificial Sequence: Synthetic oligonucleotide
  Sense strand starting at position 2454 of SEQ ID NO: 1244786
guaacaugggccuaaugau

SEQ ID NO: 1514711 - RNA, 19 nt, Artificial Sequence
  Description of Artificial Sequence: Synthetic oligonucleotide
  Antisense strand to SEQ ID NO: 1514710
aucauuaggcccauguuac

SEQ ID NO: 1514712 - RNA, 19 nt, Artificial Sequence
  Description of Artificial Sequence: Synthetic oligonucleotide
  Sense strand starting at position 2463 of SEQ ID NO: 1244786
gccuaaugaugcuuucuca

SEQ ID NO: 1514713 - RNA, 19 nt, Artificial Sequence
  Description of Artificial Sequence: Synthetic oligonucleotide
  Antisense strand to SEQ ID NO: 1514712
ugagaaagcaucauuaggc

SEQ ID NO: 1514714 - RNA, 19 nt, Artificial Sequence
  Description of Artificial Sequence: Synthetic oligonucleotide
  Sense strand starting at position 2490 of SEQ ID NO: 1244786
cugggaggcuagugacaau

SEQ ID NO: 1514715 - RNA, 19 nt, Artificial Sequence
  Description of Artificial Sequence: Synthetic oligonucleotide
  Antisense strand to SEQ ID NO: 1514714
auugucacuagccucccag

SEQ ID NO: 1514716 - RNA, 19 nt, Artificial Sequence
  Description of Artificial Sequence: Synthetic oligonucleotide
  Sense strand starting at position 2515 of SEQ ID NO: 1244786
gggagcaugaccugugaga

SEQ ID NO: 1514717 - RNA, 19 nt, Artificial Sequence
  Description of Artificial Sequence: Synthetic oligonucleotide
  Antisense strand to SEQ ID NO: 1514716
ucucacaggucaugcuccc

SEQ ID NO: 1514718 - RNA, 19 nt, Artificial Sequence
  Description of Artificial Sequence: Synthetic oligonucleotide
  Sense strand starting at position 2517 of SEQ ID NO: 1244786
gagcaugaccugugagauc

SEQ ID NO: 1514719 - RNA, 19 nt, Artificial Sequence
  Description of Artificial Sequence: Synthetic oligonucleotide
  Antisense strand to SEQ ID NO: 1514718
gaucucacaggucaugcuc

SEQ ID NO: 1514720 - RNA, 19 nt, Artificial Sequence
  Description of Artificial Sequence: Synthetic oligonucleotide
  Sense strand starting at position 2605 of SEQ ID NO: 1244786
gcuggaauuucgucaucug

SEQ ID NO: 1514721 - RNA, 19 nt, Artificial Sequence
  Description of Artificial Sequence: Synthetic oligonucleotide
  Antisense strand to SEQ ID NO: 1514720
cagaugacgaaauuccagc

SEQ ID NO: 1514722 - RNA, 19 nt, Artificial Sequence
  Description of Artificial Sequence: Synthetic oligonucleotide
  Sense strand starting at position 2608 of SEQ ID NO: 1244786
ggaauuucgucaucugguu

SEQ ID NO: 1514723 - RNA, 19 nt, Artificial Sequence
  Description of Artificial Sequence: Synthetic oligonucleotide
  Antisense strand to SEQ ID NO: 1514722
aaccagaugacgaaauucc

SEQ ID NO: 1514724 - RNA, 19 nt, Artificial Sequence
  Description of Artificial Sequence: Synthetic oligonucleotide
  Sense strand starting at position 2741 of SEQ ID NO: 1244786
cacuuauucccaggagcag

SEQ ID NO: 1514725 - RNA, 19 nt, Artificial Sequence
  Description of Artificial Sequence: Synthetic oligonucleotide
  Antisense strand to SEQ ID NO: 1514724
cugcuccugggaauaagug

SEQ ID NO: 1514726 - RNA, 19 nt, Artificial Sequence
  Description of Artificial Sequence: Synthetic oligonucleotide
  Sense strand starting at position 2778 of SEQ ID NO: 1244786
ggaagagguagcugugcuu

SEQ ID NO: 1514727 - RNA, 19 nt, Artificial Sequence
  Description of Artificial Sequence: Synthetic oligonucleotide
  Antisense strand to SEQ ID NO: 1514726
aagcacagcuaccucuucc

SEQ ID NO: 1514728 - RNA, 19 nt, Artificial Sequence
  Description of Artificial Sequence: Synthetic oligonucleotide
  Sense strand starting at position 2785 of SEQ ID NO: 1244786
guagcugugcuuuagauca

SEQ ID NO: 1514729 - RNA, 19 nt, Artificial Sequence
  Description of Artificial Sequence: Synthetic oligonucleotide
  Antisense strand to SEQ ID NO: 1514728
ugaucuaaagcacagcuac

SEQ ID NO: 1514730 - RNA, 19 nt, Artificial Sequence
  Description of Artificial Sequence: Synthetic oligonucleotide
  Sense strand starting at position 2787 of SEQ ID NO: 1244786
agcugugcuuuagaucaga

SEQ ID NO: 1514731 - RNA, 19 nt, Artificial Sequence
  Description of Artificial Sequence: Synthetic oligonucleotide
  Antisense strand to SEQ ID NO: 1514730
ucugaucuaaagcacagcu

SEQ ID NO: 1514732 - RNA, 19 nt, Artificial Sequence
  Description of Artificial Sequence: Synthetic oligonucleotide
  Sense strand starting at position 2983 of SEQ ID NO: 1244786
aucugaaugugauaaggca

SEQ ID NO: 1514733 - RNA, 19 nt, Artificial Sequence
  Description of Artificial Sequence: Synthetic oligonucleotide
  Antisense strand to SEQ ID NO: 1514732
ugccuuaucacauucagau

SEQ ID NO: 1514734 - RNA, 19 nt, Artificial Sequence
  Description of Artificial Sequence: Synthetic oligonucleotide
  Sense strand starting at position 3131 of SEQ ID NO: 1244786
ugcagacugccuugcucaa

SEQ ID NO: 1514735 - RNA, 19 nt, Artificial Sequence
  Description of Artificial Sequence: Synthetic oligonucleotide
  Antisense strand to SEQ ID NO: 1514734
uugagcaaggcagucugca

SEQ ID NO: 1514736 - RNA, 19 nt, Artificial Sequence
  Description of Artificial Sequence: Synthetic oligonucleotide
  Sense strand starting at position 3499 of SEQ ID NO: 1244786
gcuggugacuucccugaaa

SEQ ID NO: 1514737 - RNA, 19 nt, Artificial Sequence
  Description of Artificial Sequence: Synthetic oligonucleotide
  Antisense strand to SEQ ID NO: 1514736
uuucagggaagucaccagc

SEQ ID NO: 1514738 - RNA, 19 nt, Artificial Sequence
  Description of Artificial Sequence: Synthetic oligonucleotide
  Sense strand starting at position 3625 of SEQ ID NO: 1244786
cugugugaccuggauccaa

SEQ ID NO: 1514739 - RNA, 19 nt, Artificial Sequence
  Description of Artificial Sequence: Synthetic oligonucleotide
  Antisense strand to SEQ ID NO: 1514738
uuggauccaggucacacag

SEQ ID NO: 1514740 - RNA, 19 nt, Artificial Sequence
  Description of Artificial Sequence: Synthetic oligonucleotide
  Sense strand starting at position 3747 of SEQ ID NO: 1244786
acagaucugccucacuguu

SEQ ID NO: 1514741 - RNA, 19 nt, Artificial Sequence
  Description of Artificial Sequence: Synthetic oligonucleotide
  Antisense strand to SEQ ID NO: 1514740
aacagugaggcagaucugu

SEQ ID NO: 1514742 - RNA, 19 nt, Artificial Sequence
  Description of Artificial Sequence: Synthetic oligonucleotide
  Sense strand starting at position 23 of SEQ ID NO: 1244787
ugugaaauauagccaggua

SEQ ID NO: 1514743 - RNA, 19 nt, Artificial Sequence
  Description of Artificial Sequence: Synthetic oligonucleotide
  Antisense strand to SEQ ID NO: 1514742
uaccuggcuauauuucaca

SEQ ID NO: 1514744 - RNA, 19 nt, Artificial Sequence
  Description of Artificial Sequence: Synthetic oligonucleotide
  Sense strand starting at position 24 of SEQ ID NO: 1244787
gugaaauauagccagguac

SEQ ID NO: 1514745 - RNA, 19 nt, Artificial Sequence
  Description of Artificial Sequence: Synthetic oligonucleotide
  Antisense strand to SEQ ID NO: 1514744
guaccuggcuauauuucac

SEQ ID NO: 1514746 - RNA, 19 nt, Artificial Sequence
  Description of Artificial Sequence: Synthetic oligonucleotide
  Sense strand starting at position 444 of SEQ ID NO: 1244787
aacugauugccugaacugu

SEQ ID NO: 1514747 - RNA, 19 nt, Artificial Sequence
  Description of Artificial Sequence: Synthetic oligonucleotide
  Antisense strand to SEQ ID NO: 1514746
acaguucaggcaaucaguu

SEQ ID NO: 1514748 - RNA, 19 nt, Artificial Sequence
  Description of Artificial Sequence: Synthetic oligonucleotide
  Sense strand starting at position 690 of SEQ ID NO: 1244787
agcugugaugcuuagagag

SEQ ID NO: 1514749 - RNA, 19 nt, Artificial Sequence
  Description of Artificial Sequence: Synthetic oligonucleotide
  Antisense strand to SEQ ID NO: 1514748
cucucuaagcaucacagcu

SEQ ID NO: 1514750 - RNA, 19 nt, Artificial Sequence
  Description of Artificial Sequence: Synthetic oligonucleotide
  Sense strand starting at position 704 of SEQ ID NO: 1244787
gagagucuaugauuagcac

SEQ ID NO: 1514751 - RNA, 19 nt, Artificial Sequence
  Description of Artificial Sequence: Synthetic oligonucleotide
  Antisense strand to SEQ ID NO: 1514750
gugcuaaucauagacucuc

SEQ ID NO: 1514752 - RNA, 19 nt, Artificial Sequence
  Description of Artificial Sequence: Synthetic oligonucleotide
  Sense strand starting at position 705 of SEQ ID NO: 1244787
agagucuaugauuagcaca

SEQ ID NO: 1514753 - RNA, 19 nt, Artificial Sequence
  Description of Artificial Sequence: Synthetic oligonucleotide
  Antisense strand to SEQ ID NO: 1514752
ugugcuaaucauagacucu

SEQ ID NO: 1514754 - RNA, 19 nt, Artificial Sequence
  Description of Artificial Sequence: Synthetic oligonucleotide
  Sense strand starting at position 710 of SEQ ID NO: 1244787
cuaugauuagcacauguca

SEQ ID NO: 1514755 - RNA, 19 nt, Artificial Sequence
  Description of Artificial Sequence: Synthetic oligonucleotide
  Antisense strand to SEQ ID NO: 1514754
ugacaugugcuaaucauag

SEQ ID NO: 1514756 - RNA, 19 nt, Artificial Sequence
  Description of Artificial Sequence: Synthetic oligonucleotide
  Sense strand starting at position 737 of SEQ ID NO: 1244787
aggcuacaguuugcauaaa

SEQ ID NO: 1514757 - RNA, 19 nt, Artificial Sequence
  Description of Artificial Sequence: Synthetic oligonucleotide
  Antisense strand to SEQ ID NO: 1514756
uuuaugcaaacuguagccu

SEQ ID NO: 1514758 - RNA, 19 nt, Artificial Sequence
  Description of Artificial Sequence: Synthetic oligonucleotide
  Sense strand starting at position 859 of SEQ ID NO: 1244787
ucaucuauauagguauagu

SEQ ID NO: 1514759 - RNA, 19 nt, Artificial Sequence
  Description of Artificial Sequence: Synthetic oligonucleotide
  Antisense strand to SEQ ID NO: 1514758
acuauaccuauauagauga

SEQ ID NO: 1514760 - RNA, 19 nt, Artificial Sequence
  Description of Artificial Sequence: Synthetic oligonucleotide
  Sense strand starting at position 1009 of SEQ ID NO: 1244787
uuggaacuauuaccaguaa

SEQ ID NO: 1514761 - RNA, 19 nt, Artificial Sequence
  Description of Artificial Sequence: Synthetic oligonucleotide
  Antisense strand to SEQ ID NO: 1514760
uuacugguaauaguuccaa

SEQ ID NO: 1514762 - RNA, 19 nt, Artificial Sequence
  Description of Artificial Sequence: Synthetic oligonucleotide
  Sense strand starting at position 1050 of SEQ ID NO: 1244787
gccugagaacuuuaagcac

SEQ ID NO: 1514763 - RNA, 19 nt, Artificial Sequence
  Description of Artificial Sequence: Synthetic oligonucleotide
  Antisense strand to SEQ ID NO: 1514762
gugcuuaaaguucucaggc

SEQ ID NO: 1514764 - RNA, 19 nt, Artificial Sequence
  Description of Artificial Sequence: Synthetic oligonucleotide
  Sense strand starting at position 1053 of SEQ ID NO: 1244787
ugagaacuuuaagcacauu

SEQ ID NO: 1514765 - RNA, 19 nt, Artificial Sequence
  Description of Artificial Sequence: Synthetic oligonucleotide
  Antisense strand to SEQ ID NO: 1514764
aaugugcuuaaaguucuca

SEQ ID NO: 1514766 - RNA, 19 nt, Artificial Sequence
  Description of Artificial Sequence: Synthetic oligonucleotide
  Sense strand starting at position 1159 of SEQ ID NO: 1244787
acaagcacuugguugagau

SEQ ID NO: 1514767 - RNA, 19 nt, Artificial Sequence
  Description of Artificial Sequence: Synthetic oligonucleotide
  Antisense strand to SEQ ID NO: 1514766
aucucaaccaagugcuugu

SEQ ID NO: 1514768 - RNA, 19 nt, Artificial Sequence
  Description of Artificial Sequence: Synthetic oligonucleotide
  Sense strand starting at position 1160 of SEQ ID NO: 1244787
caagcacuugguugagaua

SEQ ID NO: 1514769 - RNA, 19 nt, Artificial Sequence
  Description of Artificial Sequence: Synthetic oligonucleotide
  Antisense strand to SEQ ID NO: 1514768
uaucucaaccaagugcuug

SEQ ID NO: 1514770 - RNA, 19 nt, Artificial Sequence
  Description of Artificial Sequence: Synthetic oligonucleotide
  Sense strand starting at position 1211 of SEQ ID NO: 1244787
agcuuauaugaaugacugu

SEQ ID NO: 1514771 - RNA, 19 nt, Artificial Sequence
  Description of Artificial Sequence: Synthetic oligonucleotide
  Antisense strand to SEQ ID NO: 1514770
acagucauucauauaagcu

SEQ ID NO: 1514772 - RNA, 19 nt, Artificial Sequence
  Description of Artificial Sequence: Synthetic oligonucleotide
  Sense strand starting at position 1220 of SEQ ID NO: 1244787
gaaugacugucagcaagau

SEQ ID NO: 1514773 - RNA, 19 nt, Artificial Sequence
  Description of Artificial Sequence: Synthetic oligonucleotide
  Antisense strand to SEQ ID NO: 1514772
aucuugcugacagucauuc

SEQ ID NO: 1514774 - RNA, 19 nt, Artificial Sequence
  Description of Artificial Sequence: Synthetic oligonucleotide
  Sense strand starting at position 1275 of SEQ ID NO: 1244787
aucgauauuaacuacggua

SEQ ID NO: 1514775 - RNA, 19 nt, Artificial Sequence
  Description of Artificial Sequence: Synthetic oligonucleotide
  Antisense strand to SEQ ID NO: 1514774
uaccguaguuaauaucgau

SEQ ID NO: 1514776 - RNA, 19 nt, Artificial Sequence
  Description of Artificial Sequence: Synthetic oligonucleotide
  Sense strand starting at position 1277 of SEQ ID NO: 1244787
cgauauuaacuacgguaac

SEQ ID NO: 1514777 - RNA, 19 nt, Artificial Sequence
  Description of Artificial Sequence: Synthetic oligonucleotide
  Antisense strand to SEQ ID NO: 1514776
guuaccguaguuaauaucg

SEQ ID NO: 1514778 - RNA, 19 nt, Artificial Sequence
  Description of Artificial Sequence: Synthetic oligonucleotide
  Sense strand starting at position 1381 of SEQ ID NO: 1244787
gucuaugacgacugucaga

SEQ ID NO: 1514779 - RNA, 19 nt, Artificial Sequence
  Description of Artificial Sequence: Synthetic oligonucleotide
  Antisense strand to SEQ ID NO: 1514778
ucugacagucgucauagac

SEQ ID NO: 1514780 - RNA, 19 nt, Artificial Sequence
  Description of Artificial Sequence: Synthetic oligonucleotide
  Sense strand starting at position 1388 of SEQ ID NO: 1244787
acgacugucagacaagagu

SEQ ID NO: 1514781 - RNA, 19 nt, Artificial Sequence
  Description of Artificial Sequence: Synthetic oligonucleotide
  Antisense strand to SEQ ID NO: 1514780
acucuugucugacagucgu

SEQ ID NO: 1514782 - RNA, 19 nt, Artificial Sequence
  Description of Artificial Sequence: Synthetic oligonucleotide
  Sense strand starting at position 1412 of SEQ ID NO: 1244787
gccaaaugucaagacugca

SEQ ID NO: 1514783 - RNA, 19 nt, Artificial Sequence
  Description of Artificial Sequence: Synthetic oligonucleotide
  Antisense strand to SEQ ID NO: 1514782
ugcagucuugacauuuggc

SEQ ID NO: 1514784 - RNA, 19 nt, Artificial Sequence
  Description of Artificial Sequence: Synthetic oligonucleotide
  Sense strand starting at position 1480 of SEQ ID NO: 1244787
aggugucacuuggucacaa

SEQ ID NO: 1514785 - RNA, 19 nt, Artificial Sequence
  Description of Artificial Sequence: Synthetic oligonucleotide
  Antisense strand to SEQ ID NO: 1514784
uugugaccaagugacaccu

SEQ ID NO: 1514786 - RNA, 19 nt, Artificial Sequence
  Description of Artificial Sequence: Synthetic oligonucleotide
  Sense strand starting at position 1530 of SEQ ID NO: 1244787
gggaaaccugccugauauc

SEQ ID NO: 1514787 - RNA, 19 nt, Artificial Sequence
  Description of Artificial Sequence: Synthetic oligonucleotide
  Antisense strand to SEQ ID NO: 1514786
gauaucaggcagguuuccc

SEQ ID NO: 1514788 - RNA, 19 nt, Artificial Sequence
  Description of Artificial Sequence: Synthetic oligonucleotide
  Sense strand starting at position 1629 of SEQ ID NO: 1244787
ccggaauucugagcaccaa

SEQ ID NO: 1514789 - RNA, 19 nt, Artificial Sequence
  Description of Artificial Sequence: Synthetic oligonucleotide
  Antisense strand to SEQ ID NO: 1514788
uuggugcucagaauuccgg

SEQ ID NO: 1514790 - RNA, 19 nt, Artificial Sequence
  Description of Artificial Sequence: Synthetic oligonucleotide
  Sense strand starting at position 1630 of SEQ ID NO: 1244787
cggaauucugagcaccaaa

SEQ ID NO: 1514791 - RNA, 19 nt, Artificial Sequence
  Description of Artificial Sequence: Synthetic oligonucleotide
  Antisense strand to SEQ ID NO: 1514790
uuuggugcucagaauuccg

SEQ ID NO: 1514792 - RNA, 19 nt, Artificial Sequence
  Description of Artificial Sequence: Synthetic oligonucleotide
  Sense strand starting at position 1751 of SEQ ID NO: 1244787
uugcgaguuaggcccgauu

SEQ ID NO: 1514793 - RNA, 19 nt, Artificial Sequence
  Description of Artificial Sequence: Synthetic oligonucleotide
  Antisense strand to SEQ ID NO: 1514792
aaucgggccuaacucgcaa

SEQ ID NO: 1514794 - RNA, 19 nt, Artificial Sequence
  Description of Artificial Sequence: Synthetic oligonucleotide
  Sense strand starting at position 1762 of SEQ ID NO: 1244787
gcccgauuacucuaggaua

SEQ ID NO: 1514795 - RNA, 19 nt, Artificial Sequence
  Description of Artificial Sequence: Synthetic oligonucleotide
  Antisense strand to SEQ ID NO: 1514794
uauccuagaguaaucgggc

SEQ ID NO: 1514796 - RNA, 19 nt, Artificial Sequence
  Description of Artificial Sequence: Synthetic oligonucleotide
  Sense strand starting at position 1764 of SEQ ID NO: 1244787
ccgauuacucuaggauacu

SEQ ID NO: 1514797 - RNA, 19 nt, Artificial Sequence
  Description of Artificial Sequence: Synthetic oligonucleotide
  Antisense strand to SEQ ID NO: 1514796
aguauccuagaguaaucgg

SEQ ID NO: 1514798 - RNA, 19 nt, Artificial Sequence
  Description of Artificial Sequence: Synthetic oligonucleotide
  Sense strand starting at position 2571 of SEQ ID NO: 1244787
ggagaaguguugagacaug

SEQ ID NO: 1514799 - RNA, 19 nt, Artificial Sequence
  Description of Artificial Sequence: Synthetic oligonucleotide
  Antisense strand to SEQ ID NO: 1514798
caugucucaacacuucucc

SEQ ID NO: 1514800 - RNA, 19 nt, Artificial Sequence
  Description of Artificial Sequence: Synthetic oligonucleotide
  Sense strand starting at position 2576 of SEQ ID NO: 1244787
aguguugagacaugggaaa

SEQ ID NO: 1514801 - RNA, 19 nt, Artificial Sequence
  Description of Artificial Sequence: Synthetic oligonucleotide
  Antisense strand to SEQ ID NO: 1514800
uuucccaugucucaacacu

SEQ ID NO: 1514802 - RNA, 19 nt, Artificial Sequence
  Description of Artificial Sequence: Synthetic oligonucleotide
  Sense strand starting at position 2622 of SEQ ID NO: 1244787
gagucugagaccugggauu

SEQ ID NO: 1514803 - RNA, 19 nt, Artificial Sequence
  Description of Artificial Sequence: Synthetic oligonucleotide
  Antisense strand to SEQ ID NO: 1514802
aaucccaggucucagacuc

SEQ ID NO: 1514804 - RNA, 19 nt, Artificial Sequence
  Description of Artificial Sequence: Synthetic oligonucleotide
  Sense strand starting at position 2669 of SEQ ID NO: 1244787
ggacauguugggcacguaa

SEQ ID NO: 1514805 - RNA, 19 nt, Artificial Sequence
  Description of Artificial Sequence: Synthetic oligonucleotide
  Antisense strand to SEQ ID NO: 1514804
uuacgugcccaacaugucc

SEQ ID NO: 1514806 - RNA, 19 nt, Artificial Sequence
  Description of Artificial Sequence: Synthetic oligonucleotide
  Sense strand starting at position 2684 of SEQ ID NO: 1244787
guaacuuaaucucccugua

SEQ ID NO: 1514807 - RNA, 19 nt, Artificial Sequence
  Description of Artificial Sequence: Synthetic oligonucleotide
  Antisense strand to SEQ ID NO: 1514806
uacagggagauuaaguuac

SEQ ID NO: 1514808 - RNA, 19 nt, Artificial Sequence
  Description of Artificial Sequence: Synthetic oligonucleotide
  Sense strand starting at position 2756 of SEQ ID NO: 1244787
aagauuaaaugacggauuu

SEQ ID NO: 1514809 - RNA, 19 nt, Artificial Sequence
  Description of Artificial Sequence: Synthetic oligonucleotide
  Antisense strand to SEQ ID NO: 1514808
aaauccgucauuuaaucuu

SEQ ID NO: 1514810 - RNA, 19 nt, Artificial Sequence
  Description of Artificial Sequence: Synthetic oligonucleotide
  Sense strand starting at position 3088 of SEQ ID NO: 1244787
ccucaagguauacggaaua

SEQ ID NO: 1514811 - RNA, 19 nt, Artificial Sequence
  Description of Artificial Sequence: Synthetic oligonucleotide
  Antisense strand to SEQ ID NO: 1514810
uauuccguauaccuugagg

SEQ ID NO: 1514812 - RNA, 19 nt, Artificial Sequence
  Description of Artificial Sequence: Synthetic oligonucleotide
  Sense strand starting at position 3216 of SEQ ID NO: 1244787
ccuuguuacagcugaggaa

SEQ ID NO: 1514813 - RNA, 19 nt, Artificial Sequence
  Description of Artificial Sequence: Synthetic oligonucleotide
  Antisense strand to SEQ ID NO: 1514812
uuccucagcuguaacaagg

SEQ ID NO: 1514814 - RNA, 19 nt, Artificial Sequence
  Description of Artificial Sequence: Synthetic oligonucleotide
  Sense strand starting at position 3267 of SEQ ID NO: 1244787
acaauagaugcucaguaua

SEQ ID NO: 1514815 - RNA, 19 nt, Artificial Sequence
  Description of Artificial Sequence: Synthetic oligonucleotide
  Antisense strand to SEQ ID NO: 1514814
uauacugagcaucuauugu

SEQ ID NO: 1514816 - RNA, 19 nt, Artificial Sequence
  Description of Artificial Sequence: Synthetic oligonucleotide
  Sense strand starting at position 3270 of SEQ ID NO: 1244787
auagaugcucaguauauug

SEQ ID NO: 1514817 - RNA, 19 nt, Artificial Sequence
  Description of Artificial Sequence: Synthetic oligonucleotide
  Antisense strand to SEQ ID NO: 1514816
caauauacugagcaucuau

SEQ ID NO: 1514818 - RNA, 19 nt, Artificial Sequence
  Description of Artificial Sequence: Synthetic oligonucleotide
  Sense strand starting at position 3280 of SEQ ID NO: 1244787
aguauauuggauugaauug

SEQ ID NO: 1514819 - RNA, 19 nt, Artificial Sequence
  Description of Artificial Sequence: Synthetic oligonucleotide
  Antisense strand to SEQ ID NO: 1514818
caauucaauccaauauacu

SEQ ID NO: 1514820 - RNA, 19 nt, Artificial Sequence
  Description of Artificial Sequence: Synthetic oligonucleotide
  Sense strand starting at position 3307 of SEQ ID NO: 1244787
acguucaauggguaagaga

SEQ ID NO: 1514821 - RNA, 19 nt, Artificial Sequence
  Description of Artificial Sequence: Synthetic oligonucleotide
  Antisense strand to SEQ ID NO: 1514820
ucucuuacccauugaacgu

SEQ ID NO: 1514822 - RNA, 19 nt, Artificial Sequence
  Description of Artificial Sequence: Synthetic oligonucleotide
  Sense strand starting at position 61 of SEQ ID NO: 1244788
ucacuaacuugggaacgaa

SEQ ID NO: 1514823 - RNA, 19 nt, Artificial Sequence
  Description of Artificial Sequence: Synthetic oligonucleotide
  Antisense strand to SEQ ID NO: 1514822
uucguucccaaguuaguga

SEQ ID NO: 1514824 - RNA, 19 nt, Artificial Sequence
  Description of Artificial Sequence: Synthetic oligonucleotide
  Sense strand starting at position 213 of SEQ ID NO: 1244788
accugagcacucggaaguu

SEQ ID NO: 1514825 - RNA, 19 nt, Artificial Sequence
  Description of Artificial Sequence: Synthetic oligonucleotide
  Antisense strand to SEQ ID NO: 1514824
aacuuccgagugcucaggu

SEQ ID NO: 1514826 - RNA, 19 nt, Artificial Sequence
  Description of Artificial Sequence: Synthetic oligonucleotide
  Sense strand starting at position 631 of SEQ ID NO: 1244788
ccagguuggcaagauucuu

SEQ ID NO: 1514827 - RNA, 19 nt, Artificial Sequence
  Description of Artificial Sequence: Synthetic oligonucleotide
  Antisense strand to SEQ ID NO: 1514826
aagaaucuugccaaccugg

SEQ ID NO: 1514828 - RNA, 19 nt, Artificial Sequence
  Description of Artificial Sequence: Synthetic oligonucleotide
  Sense strand starting at position 636 of SEQ ID NO: 1244788
uuggcaagauucuuuagaa

SEQ ID NO: 1514829 - RNA, 19 nt, Artificial Sequence
  Description of Artificial Sequence: Synthetic oligonucleotide
  Antisense strand to SEQ ID NO: 1514828
uucuaaagaaucuugccaa

SEQ ID NO: 1514830 - RNA, 19 nt, Artificial Sequence
  Description of Artificial Sequence: Synthetic oligonucleotide
  Sense strand starting at position 637 of SEQ ID NO: 1244788
uggcaagauucuuuagaau

SEQ ID NO: 1514831 - RNA, 19 nt, Artificial Sequence
  Description of Artificial Sequence: Synthetic oligonucleotide
  Antisense strand to SEQ ID NO: 1514830
auucuaaagaaucuugcca

SEQ ID NO: 1514832 - RNA, 19 nt, Artificial Sequence
  Description of Artificial Sequence: Synthetic oligonucleotide
  Sense strand starting at position 649 of SEQ ID NO: 1244788
uuagaaucacuucgucaac

SEQ ID NO: 1514833 - RNA, 19 nt, Artificial Sequence
  Description of Artificial Sequence: Synthetic oligonucleotide
  Antisense strand to SEQ ID NO: 1514832
guugacgaagugauucuaa

SEQ ID NO: 1514834 - RNA, 19 nt, Artificial Sequence
  Description of Artificial Sequence: Synthetic oligonucleotide
  Sense strand starting at position 651 of SEQ ID NO: 1244788
agaaucacuucgucaaccu

SEQ ID NO: 1514835 - RNA, 19 nt, Artificial Sequence
  Description of Artificial Sequence: Synthetic oligonucleotide
  Antisense strand to SEQ ID NO: 1514834
agguugacgaagugauucu

SEQ ID NO: 1514836 - RNA, 19 nt, Artificial Sequence
  Description of Artificial Sequence: Synthetic oligonucleotide
  Sense strand starting at position 688 of SEQ ID NO: 1244788
aaguacaaaucuguggaau

SEQ ID NO: 1514837 - RNA, 19 nt, Artificial Sequence
  Description of Artificial Sequence: Synthetic oligonucleotide
  Antisense strand to SEQ ID NO: 1514836
auuccacagauuuguacuu

SEQ ID NO: 1514838 - RNA, 19 nt, Artificial Sequence
  Description of Artificial Sequence: Synthetic oligonucleotide
  Sense strand starting at position 689 of SEQ ID NO: 1244788
aguacaaaucuguggaaug

SEQ ID NO: 1514839 - RNA, 19 nt, Artificial Sequence
  Description of Artificial Sequence: Synthetic oligonucleotide
  Antisense strand to SEQ ID NO: 1514838
cauuccacagauuuguacu

SEQ ID NO: 1514840 - RNA, 19 nt, Artificial Sequence
  Description of Artificial Sequence: Synthetic oligonucleotide
  Sense strand starting at position 746 of SEQ ID NO: 1244788
auaagucuagagugcuuaa

SEQ ID NO: 1514841 - RNA, 19 nt, Artificial Sequence
  Description of Artificial Sequence: Synthetic oligonucleotide
  Antisense strand to SEQ ID NO: 1514840
uuaagcacucuagacuuau

SEQ ID NO: 1514842 - RNA, 19 nt, Artificial Sequence
  Description of Artificial Sequence: Synthetic oligonucleotide
  Sense strand starting at position 769 of SEQ ID NO: 1244788
ucgaguaagacaugugaau

SEQ ID NO: 1514843 - RNA, 19 nt, Artificial Sequence
  Description of Artificial Sequence: Synthetic oligonucleotide
  Antisense strand to SEQ ID NO: 1514842
auucacaugucuuacucga

SEQ ID NO: 1514844 - RNA, 19 nt, Artificial Sequence
  Description of Artificial Sequence: Synthetic oligonucleotide
  Sense strand starting at position 1493 of SEQ ID NO: 1244788
cagcuauuccaggaggcaa

SEQ ID NO: 1514845 - RNA, 19 nt, Artificial Sequence
  Description of Artificial Sequence: Synthetic oligonucleotide
  Antisense strand to SEQ ID NO: 1514844
uugccuccuggaauagcug

SEQ ID NO: 1514846 - RNA, 19 nt, Artificial Sequence
  Description of Artificial Sequence: Synthetic oligonucleotide
  Sense strand starting at position 1649 of SEQ ID NO: 1244788
gccacauucucagcagaaa

SEQ ID NO: 1514847 - RNA, 19 nt, Artificial Sequence
  Description of Artificial Sequence: Synthetic oligonucleotide
  Antisense strand to SEQ ID NO: 1514846
uuucugcugagaauguggc

SEQ ID NO: 1514848 - RNA, 19 nt, Artificial Sequence
  Description of Artificial Sequence: Synthetic oligonucleotide
  Sense strand starting at position 1739 of SEQ ID NO: 1244788
ggguuaagugguuggagca

SEQ ID NO: 1514849 - RNA, 19 nt, Artificial Sequence
  Description of Artificial Sequence: Synthetic oligonucleotide
  Antisense strand to SEQ ID NO: 1514848
ugcuccaaccacuuaaccc

SEQ ID NO: 1514850 - RNA, 19 nt, Artificial Sequence
  Description of Artificial Sequence: Synthetic oligonucleotide
  Sense strand starting at position 1740 of SEQ ID NO: 1244788
gguuaagugguuggagcaa

SEQ ID NO: 1514851 - RNA, 19 nt, Artificial Sequence
  Description of Artificial Sequence: Synthetic oligonucleotide
  Antisense strand to SEQ ID NO: 1514850
uugcuccaaccacuuaacc

SEQ ID NO: 1514852 - RNA, 19 nt, Artificial Sequence
  Description of Artificial Sequence: Synthetic oligonucleotide
  Sense strand starting at position 1945 of SEQ ID NO: 1244788
cuaaguucccacugggaau

SEQ ID NO: 1514853 - RNA, 19 nt, Artificial Sequence
  Description of Artificial Sequence: Synthetic oligonucleotide
  Antisense strand to SEQ ID NO: 1514852
auucccagugggaacuuag

SEQ ID NO: 1514854 - RNA, 19 nt, Artificial Sequence
  Description of Artificial Sequence: Synthetic oligonucleotide
  Sense strand starting at position 2067 of SEQ ID NO: 1244788
ccacuaaucucugaaggag

SEQ ID NO: 1514855 - RNA, 19 nt, Artificial Sequence
  Description of Artificial Sequence: Synthetic oligonucleotide
  Antisense strand to SEQ ID NO: 1514854
cuccuucagagauuagugg

SEQ ID NO: 1514856 - RNA, 19 nt, Artificial Sequence
  Description of Artificial Sequence: Synthetic oligonucleotide
  Sense strand starting at position 2092 of SEQ ID NO: 1244788
ucaugauucucccugggca

SEQ ID NO: 1514857 - RNA, 19 nt, Artificial Sequence
  Description of Artificial Sequence: Synthetic oligonucleotide
  Antisense strand to SEQ ID NO: 1514856
ugcccagggagaaucauga

SEQ ID NO: 1514858 - RNA, 19 nt, Artificial Sequence
  Description of Artificial Sequence: Synthetic oligonucleotide
  Sense strand starting at position 2186 of SEQ ID NO: 1244788
aggcuaagaugauuccuga

SEQ ID NO: 1514859 - RNA, 19 nt, Artificial Sequence
  Description of Artificial Sequence: Synthetic oligonucleotide
  Antisense strand to SEQ ID NO: 1514858
ucaggaaucaucuuagccu

SEQ ID NO: 1514860 - RNA, 19 nt, Artificial Sequence
  Description of Artificial Sequence: Synthetic oligonucleotide
  Sense strand starting at position 2190 of SEQ ID NO: 1244788
uaagaugauuccugaaagg

SEQ ID NO: 1514861 - RNA, 19 nt, Artificial Sequence
  Description of Artificial Sequence: Synthetic oligonucleotide
  Antisense strand to SEQ ID NO: 1514860
ccuuucaggaaucaucuua

SEQ ID NO: 1514862 - RNA, 19 nt, Artificial Sequence
  Description of Artificial Sequence: Synthetic oligonucleotide
  Sense strand starting at position 2296 of SEQ ID NO: 1244788
accagaacgugcucuuaaa

SEQ ID NO: 1514863 - RNA, 19 nt, Artificial Sequence
  Description of Artificial Sequence: Synthetic oligonucleotide
  Antisense strand to SEQ ID NO: 1514862
uuuaagagcacguucuggu

SEQ ID NO: 1514864 - RNA, 19 nt, Artificial Sequence
  Description of Artificial Sequence: Synthetic oligonucleotide
  Sense strand starting at position 2375 of SEQ ID NO: 1244788
ugccuaugacagugagaaa

SEQ ID NO: 1514865 - RNA, 19 nt, Artificial Sequence
  Description of Artificial Sequence: Synthetic oligonucleotide
  Antisense strand to SEQ ID NO: 1514864
uuucucacugucauaggca

SEQ ID NO: 1514866 - RNA, 19 nt, Artificial Sequence
  Description of Artificial Sequence: Synthetic oligonucleotide
  Sense strand starting at position 2378 of SEQ ID NO: 1244788
cuaugacagugagaaaucu

SEQ ID NO: 1514867 - RNA, 19 nt, Artificial Sequence
  Description of Artificial Sequence: Synthetic oligonucleotide
  Antisense strand to SEQ ID NO: 1514866
agauuucucacugucauag

SEQ ID NO: 1514868 - RNA, 19 nt, Artificial Sequence
  Description of Artificial Sequence: Synthetic oligonucleotide
  Sense strand starting at position 2393 of SEQ ID NO: 1244788
aucuuaagcccagaaguaa

SEQ ID NO: 1514869 - RNA, 19 nt, Artificial Sequence
  Description of Artificial Sequence: Synthetic oligonucleotide
  Antisense strand to SEQ ID NO: 1514868
uuacuucugggcuuaagau

SEQ ID NO: 1514870 - RNA, 19 nt, Artificial Sequence
  Description of Artificial Sequence: Synthetic oligonucleotide
  Sense strand starting at position 2414 of SEQ ID NO: 1244788
uguuacugauuaguccaaa

SEQ ID NO: 1514871 - RNA, 19 nt, Artificial Sequence
  Description of Artificial Sequence: Synthetic oligonucleotide
  Antisense strand to SEQ ID NO: 1514870
uuuggacuaaucaguaaca

SEQ ID NO: 1514872 - RNA, 19 nt, Artificial Sequence
  Description of Artificial Sequence: Synthetic oligonucleotide
  Sense strand starting at position 2415 of SEQ ID NO: 1244788
guuacugauuaguccaaau

SEQ ID NO: 1514873 - RNA, 19 nt, Artificial Sequence
  Description of Artificial Sequence: Synthetic oligonucleotide
  Antisense strand to SEQ ID NO: 1514872
auuuggacuaaucaguaac

SEQ ID NO: 1514874 - RNA, 19 nt, Artificial Sequence
  Description of Artificial Sequence: Synthetic oligonucleotide
  Sense strand starting at position 2531 of SEQ ID NO: 1244788
cugacuggugcggaggaaa

SEQ ID NO: 1514875 - RNA, 19 nt, Artificial Sequence
  Description of Artificial Sequence: Synthetic oligonucleotide
  Antisense strand to SEQ ID NO: 1514874
uuuccuccgcaccagucag

SEQ ID NO: 1514876 - RNA, 19 nt, Artificial Sequence
  Description of Artificial Sequence: Synthetic oligonucleotide
  Sense strand starting at position 2624 of SEQ ID NO: 1244788
auggaaauugcuggaaggu

SEQ ID NO: 1514877 - RNA, 19 nt, Artificial Sequence
  Description of Artificial Sequence: Synthetic oligonucleotide
  Antisense strand to SEQ ID NO: 1514876
accuuccagcaauuuccau

SEQ ID NO: 1514878 - RNA, 19 nt, Artificial Sequence
  Description of Artificial Sequence: Synthetic oligonucleotide
  Sense strand starting at position 2641 of SEQ ID NO: 1244788
gugguaguaugacuaagag

SEQ ID NO: 1514879 - RNA, 19 nt, Artificial Sequence
  Description of Artificial Sequence: Synthetic oligonucleotide
  Antisense strand to SEQ ID NO: 1514878
cucuuagucauacuaccac

SEQ ID NO: 1514880 - RNA, 19 nt, Artificial Sequence
  Description of Artificial Sequence: Synthetic oligonucleotide
  Sense strand starting at position 2667 of SEQ ID NO: 1244788
aggcaagucugaccacauu

SEQ ID NO: 1514881 - RNA, 19 nt, Artificial Sequence
  Description of Artificial Sequence: Synthetic oligonucleotide
  Antisense strand to SEQ ID NO: 1514880
aauguggucagacuugccu

SEQ ID NO: 1514882 - RNA, 19 nt, Artificial Sequence
  Description of Artificial Sequence: Synthetic oligonucleotide
  Sense strand starting at position 2777 of SEQ ID NO: 1244788
ggaaacaaaucucacuuga

SEQ ID NO: 1514883 - RNA, 19 nt, Artificial Sequence
  Description of Artificial Sequence: Synthetic oligonucleotide
  Antisense strand to SEQ ID NO: 1514882
ucaagugagauuuguuucc

SEQ ID NO: 1514884 - RNA, 19 nt, Artificial Sequence
  Description of Artificial Sequence: Synthetic oligonucleotide
  Sense strand starting at position 2881 of SEQ ID NO: 1244788
accauaacuugaggauaag

SEQ ID NO: 1514885 - RNA, 19 nt, Artificial Sequence
  Description of Artificial Sequence: Synthetic oligonucleotide
  Antisense strand to SEQ ID NO: 1514884
cuuauccucaaguuauggu

SEQ ID NO: 1514886 - RNA, 19 nt, Artificial Sequence
  Description of Artificial Sequence: Synthetic oligonucleotide
  Sense strand starting at position 3129 of SEQ ID NO: 1244788
ugcacaacgcguuaauaaa

SEQ ID NO: 1514887 - RNA, 19 nt, Artificial Sequence
  Description of Artificial Sequence: Synthetic oligonucleotide
  Antisense strand to SEQ ID NO: 1514886
uuuauuaacgcguugugca

SEQ ID NO: 1514888 - RNA, 19 nt, Artificial Sequence
  Description of Artificial Sequence: Synthetic oligonucleotide
  Sense strand starting at position 3156 of SEQ ID NO: 1244788
acagaacuguaucuuagua

SEQ ID NO: 1514889 - RNA, 19 nt, Artificial Sequence
  Description of Artificial Sequence: Synthetic oligonucleotide
  Antisense strand to SEQ ID NO: 1514888
uacuaagauacaguucugu

SEQ ID NO: 1514890 - RNA, 19 nt, Artificial Sequence
  Description of Artificial Sequence: Synthetic oligonucleotide
  Sense strand starting at position 3277 of SEQ ID NO: 1244788
gcauauaggaagugagaca

SEQ ID NO: 1514891 - RNA, 19 nt, Artificial Sequence
  Description of Artificial Sequence: Synthetic oligonucleotide
  Antisense strand to SEQ ID NO: 1514890
ugucucacuuccuauaugc

SEQ ID NO: 1514892 - RNA, 19 nt, Artificial Sequence
  Description of Artificial Sequence: Synthetic oligonucleotide
  Sense strand starting at position 3290 of SEQ ID NO: 1244788
gagacaauaggcugaucuu

SEQ ID NO: 1514893 - RNA, 19 nt, Artificial Sequence
  Description of Artificial Sequence: Synthetic oligonucleotide
  Antisense strand to SEQ ID NO: 1514892
aagaucagccuauugucuc

SEQ ID NO: 1514894 - RNA, 19 nt, Artificial Sequence
  Description of Artificial Sequence: Synthetic oligonucleotide
  Sense strand starting at position 3679 of SEQ ID NO: 1244788
uggauaaguucuucuaugg

SEQ ID NO: 1514895 - RNA, 19 nt, Artificial Sequence
  Description of Artificial Sequence: Synthetic oligonucleotide
  Antisense strand to SEQ ID NO: 1514894
ccauagaagaacuuaucca

SEQ ID NO: 1514896 - RNA, 19 nt, Artificial Sequence
  Description of Artificial Sequence: Synthetic oligonucleotide
  Sense strand starting at position 3683 of SEQ ID NO: 1244788
uaaguucuucuauggugau

SEQ ID NO: 1514897 - RNA, 19 nt, Artificial Sequence
  Description of Artificial Sequence: Synthetic oligonucleotide
  Antisense strand to SEQ ID NO: 1514896
aucaccauagaagaacuua

SEQ ID NO: 1514898 - RNA, 19 nt, Artificial Sequence
  Description of Artificial Sequence: Synthetic oligonucleotide
  Sense strand starting at position 3693 of SEQ ID NO: 1244788
uauggugauuucugagacu

SEQ ID NO: 1514899 - RNA, 19 nt, Artificial Sequence
  Description of Artificial Sequence: Synthetic oligonucleotide
  Antisense strand to SEQ ID NO: 1514898
agucucagaaaucaccaua

SEQ ID NO: 1514900 - RNA, 19 nt, Artificial Sequence
  Description of Artificial Sequence: Synthetic oligonucleotide
  Sense strand starting at position 3789 of SEQ ID NO: 1244788
ccaggcugaucuucuuaaa

SEQ ID NO: 1514901 - RNA, 19 nt, Artificial Sequence
  Description of Artificial Sequence: Synthetic oligonucleotide
  Antisense strand to SEQ ID NO: 1514900
uuuaagaagaucagccugg

SEQ ID NO: 1514902 - RNA, 19 nt, Artificial Sequence
  Description of Artificial Sequence: Synthetic oligonucleotide
  Sense strand starting at position 276 of SEQ ID NO: 1244789
uugugauacugacuuaaau

SEQ ID NO: 1514903 - RNA, 19 nt, Artificial Sequence
  Description of Artificial Sequence: Synthetic oligonucleotide
  Antisense strand to SEQ ID NO: 1514902
auuuaagucaguaucacaa

SEQ ID NO: 1514904 - RNA, 19 nt, Artificial Sequence
  Description of Artificial Sequence: Synthetic oligonucleotide
  Sense strand starting at position 288 of SEQ ID NO: 1244789
cuuaaauaugguugucuuu

SEQ ID NO: 1514905 - RNA, 19 nt, Artificial Sequence
  Description of Artificial Sequence: Synthetic oligonucleotide
  Antisense strand to SEQ ID NO: 1514904
aaagacaaccauauuuaag

SEQ ID NO: 1514906 - RNA, 19 nt, Artificial Sequence
  Description of Artificial Sequence: Synthetic oligonucleotide
  Sense strand starting at position 368 of SEQ ID NO: 1244789
ccaccaacguaguaaauuu

SEQ ID NO: 1514907 - RNA, 19 nt, Artificial Sequence
  Description of Artificial Sequence: Synthetic oligonucleotide
  Antisense strand to SEQ ID NO: 1514906
aaauuuacuacguuggugg

SEQ ID NO: 1514908 - RNA, 19 nt, Artificial Sequence
  Description of Artificial Sequence: Synthetic oligonucleotide
  Sense strand starting at position 400 of SEQ ID NO: 1244789
gauuauugcucuucugcag

SEQ ID NO: 1514909 - RNA, 19 nt, Artificial Sequence
  Description of Artificial Sequence: Synthetic oligonucleotide
  Antisense strand to SEQ ID NO: 1514908
cugcagaagagcaauaauc

SEQ ID NO: 1514910 - RNA, 19 nt, Artificial Sequence
  Description of Artificial Sequence: Synthetic oligonucleotide
  Sense strand starting at position 414 of SEQ ID NO: 1244789
ugcagucagcuguauuauc

SEQ ID NO: 1514911 - RNA, 19 nt, Artificial Sequence
  Description of Artificial Sequence: Synthetic oligonucleotide
  Antisense strand to SEQ ID NO: 1514910
gauaauacagcugacugca

SEQ ID NO: 1514912 - RNA, 19 nt, Artificial Sequence
  Description of Artificial Sequence: Synthetic oligonucleotide
  Sense strand starting at position 547 of SEQ ID NO: 1244789
cuugaacugguuuaacuuu

SEQ ID NO: 1514913 - RNA, 19 nt, Artificial Sequence
  Description of Artificial Sequence: Synthetic oligonucleotide
  Antisense strand to SEQ ID NO: 1514912
aaaguuaaaccaguucaag

SEQ ID NO: 1514914 - RNA, 19 nt, Artificial Sequence
  Description of Artificial Sequence: Synthetic oligonucleotide
  Sense strand starting at position 610 of SEQ ID NO: 1244789
gguggugccauuuguccua

SEQ ID NO: 1514915 - RNA, 19 nt, Artificial Sequence
  Description of Artificial Sequence: Synthetic oligonucleotide
  Antisense strand to SEQ ID NO: 1514914
uaggacaaauggcaccacc

SEQ ID NO: 1514916 - RNA, 19 nt, Artificial Sequence
  Description of Artificial Sequence: Synthetic oligonucleotide
  Sense strand starting at position 613 of SEQ ID NO: 1244789
ggugccauuuguccuaaga

SEQ ID NO: 1514917 - RNA, 19 nt, Artificial Sequence
  Description of Artificial Sequence: Synthetic oligonucleotide
  Antisense strand to SEQ ID NO: 1514916
ucuuaggacaaauggcacc

SEQ ID NO: 1514918 - RNA, 19 nt, Artificial Sequence
  Description of Artificial Sequence: Synthetic oligonucleotide
  Sense strand starting at position 615 of SEQ ID NO: 1244789
ugccauuuguccuaagaaa

SEQ ID NO: 1514919 - RNA, 19 nt, Artificial Sequence
  Description of Artificial Sequence: Synthetic oligonucleotide
  Antisense strand to SEQ ID NO: 1514918
uuucuuaggacaaauggca

SEQ ID NO: 1514920 - RNA, 19 nt, Artificial Sequence
  Description of Artificial Sequence: Synthetic oligonucleotide
  Sense strand starting at position 794 of SEQ ID NO: 1244789
uucugaacuguuggaucuu

SEQ ID NO: 1514921 - RNA, 19 nt, Artificial Sequence
  Description of Artificial Sequence: Synthetic oligonucleotide
  Antisense strand to SEQ ID NO: 1514920
aagauccaacaguucagaa

SEQ ID NO: 1514922 - RNA, 19 nt, Artificial Sequence
  Description of Artificial Sequence: Synthetic oligonucleotide
  Sense strand starting at position 846 of SEQ ID NO: 1244789
uuaaccuuccggugacaaa

SEQ ID NO: 1514923 - RNA, 19 nt, Artificial Sequence
  Description of Artificial Sequence: Synthetic oligonucleotide
  Antisense strand to SEQ ID NO: 1514922
uuugucaccggaagguuaa

SEQ ID NO: 1514924 - RNA, 19 nt, Artificial Sequence
  Description of Artificial Sequence: Synthetic oligonucleotide
  Sense strand starting at position 930 of SEQ ID NO: 1244789
aggaauaauugguaacuau

SEQ ID NO: 1514925 - RNA, 19 nt, Artificial Sequence
  Description of Artificial Sequence: Synthetic oligonucleotide
  Antisense strand to SEQ ID NO: 1514924
auaguuaccaauuauuccu

SEQ ID NO: 1514926 - RNA, 19 nt, Artificial Sequence
  Description of Artificial Sequence: Synthetic oligonucleotide
  Sense strand starting at position 937 of SEQ ID NO: 1244789
auugguaacuauucuguga

SEQ ID NO: 1514927 - RNA, 19 nt, Artificial Sequence
  Description of Artificial Sequence: Synthetic oligonucleotide
  Antisense strand to SEQ ID NO: 1514926
ucacagaauaguuaccaau

SEQ ID NO: 1514928 - RNA, 19 nt, Artificial Sequence
  Description of Artificial Sequence: Synthetic oligonucleotide
  Sense strand starting at position 1116 of SEQ ID NO: 1244789
accugagauccacagcagu

SEQ ID NO: 1514929 - RNA, 19 nt, Artificial Sequence
  Description of Artificial Sequence: Synthetic oligonucleotide
  Antisense strand to SEQ ID NO: 1514928
acugcuguggaucucaggu

SEQ ID NO: 1514930 - RNA, 19 nt, Artificial Sequence
  Description of Artificial Sequence: Synthetic oligonucleotide
  Sense strand starting at position 1119 of SEQ ID NO: 1244789
ugagauccacagcaguaau

SEQ ID NO: 1514931 - RNA, 19 nt, Artificial Sequence
  Description of Artificial Sequence: Synthetic oligonucleotide
  Antisense strand to SEQ ID NO: 1514930
auuacugcuguggaucuca

SEQ ID NO: 1514932 - RNA, 19 nt, Artificial Sequence
  Description of Artificial Sequence: Synthetic oligonucleotide
  Sense strand starting at position 1335 of SEQ ID NO: 1244789
ggacuuauaugccuccuga

SEQ ID NO: 1514933 - RNA, 19 nt, Artificial Sequence
  Description of Artificial Sequence: Synthetic oligonucleotide
  Antisense strand to SEQ ID NO: 1514932
ucaggaggcauauaagucc

SEQ ID NO: 1514934 - RNA, 19 nt, Artificial Sequence
  Description of Artificial Sequence: Synthetic oligonucleotide
  Sense strand starting at position 1351 of SEQ ID NO: 1244789
ugauguacuuccuuccaca

SEQ ID NO: 1514935 - RNA, 19 nt, Artificial Sequence
  Description of Artificial Sequence: Synthetic oligonucleotide
  Antisense strand to SEQ ID NO: 1514934
uguggaaggaaguacauca

SEQ ID NO: 1514936 - RNA, 19 nt, Artificial Sequence
  Description of Artificial Sequence: Synthetic oligonucleotide
  Sense strand starting at position 1370 of SEQ ID NO: 1244789
cgauuccaacuauaucgua

SEQ ID NO: 1514937 - RNA, 19 nt, Artificial Sequence
  Description of Artificial Sequence: Synthetic oligonucleotide
  Antisense strand to SEQ ID NO: 1514936
uacgauauaguuggaaucg

SEQ ID NO: 1514938 - RNA, 19 nt, Artificial Sequence
  Description of Artificial Sequence: Synthetic oligonucleotide
  Sense strand starting at position 1378 of SEQ ID NO: 1244789
acuauaucguaucuaguuu

SEQ ID NO: 1514939 - RNA, 19 nt, Artificial Sequence
  Description of Artificial Sequence: Synthetic oligonucleotide
  Antisense strand to SEQ ID NO: 1514938
aaacuagauacgauauagu

SEQ ID NO: 1514940 - RNA, 19 nt, Artificial Sequence
  Description of Artificial Sequence: Synthetic oligonucleotide
  Sense strand starting at position 1859 of SEQ ID NO: 1244789
cuugguguccacgacaaca

SEQ ID NO: 1514941 - RNA, 19 nt, Artificial Sequence
  Description of Artificial Sequence: Synthetic oligonucleotide
  Antisense strand to SEQ ID NO: 1514940
uguugucguggacaccaag

SEQ ID NO: 1514942 - RNA, 19 nt, Artificial Sequence
  Description of Artificial Sequence: Synthetic oligonucleotide
  Sense strand starting at position 2934 of SEQ ID NO: 1244789
ucaggaaaguaagaaagau

SEQ ID NO: 1514943 - RNA, 19 nt, Artificial Sequence
  Description of Artificial Sequence: Synthetic oligonucleotide
  Antisense strand to SEQ ID NO: 1514942
aucuuucuuacuuuccuga

SEQ ID NO: 1514944 - RNA, 19 nt, Artificial Sequence
  Description of Artificial Sequence: Synthetic oligonucleotide
  Sense strand starting at position 2946 of SEQ ID NO: 1244789
gaaagauucuaagugucuc

SEQ ID NO: 1514945 - RNA, 19 nt, Artificial Sequence
  Description of Artificial Sequence: Synthetic oligonucleotide
  Antisense strand to SEQ ID NO: 1514944
gagacacuuagaaucuuuc

SEQ ID NO: 1514946 - RNA, 19 nt, Artificial Sequence
  Description of Artificial Sequence: Synthetic oligonucleotide
  Sense strand starting at position 2973 of SEQ ID NO: 1244789
ugcguuaggcaauagaguu

SEQ ID NO: 1514947 - RNA, 19 nt, Artificial Sequence
  Description of Artificial Sequence: Synthetic oligonucleotide
  Antisense strand to SEQ ID NO: 1514946
aacucuauugccuaacgca

SEQ ID NO: 1514948 - RNA, 19 nt, Artificial Sequence
  Description of Artificial Sequence: Synthetic oligonucleotide
  Sense strand starting at position 2979 of SEQ ID NO: 1244789
aggcaauagaguuguguag

SEQ ID NO: 1514949 - RNA, 19 nt, Artificial Sequence
  Description of Artificial Sequence: Synthetic oligonucleotide
  Antisense strand to SEQ ID NO: 1514948
cuacacaacucuauugccu

SEQ ID NO: 1514950 - RNA, 19 nt, Artificial Sequence
  Description of Artificial Sequence: Synthetic oligonucleotide
  Sense strand starting at position 2983 of SEQ ID NO: 1244789
aauagaguuguguagaaug

SEQ ID NO: 1514951 - RNA, 19 nt, Artificial Sequence
  Description of Artificial Sequence: Synthetic oligonucleotide
  Antisense strand to SEQ ID NO: 1514950
cauucuacacaacucuauu

SEQ ID NO: 1514952 - RNA, 19 nt, Artificial Sequence
  Description of Artificial Sequence: Synthetic oligonucleotide
  Sense strand starting at position 2985 of SEQ ID NO: 1244789
uagaguuguguagaauggu

SEQ ID NO: 1514953 - RNA, 19 nt, Artificial Sequence
  Description of Artificial Sequence: Synthetic oligonucleotide
  Antisense strand to SEQ ID NO: 1514952
accauucuacacaacucua

SEQ ID NO: 1514954 - RNA, 19 nt, Artificial Sequence
  Description of Artificial Sequence: Synthetic oligonucleotide
  Sense strand starting at position 2986 of SEQ ID NO: 1244789
agaguuguguagaauggua

SEQ ID NO: 1514955 - RNA, 19 nt, Artificial Sequence
  Description of Artificial Sequence: Synthetic oligonucleotide
  Antisense strand to SEQ ID NO: 1514954
uaccauucuacacaacucu

SEQ ID NO: 1514956 - RNA, 19 nt, Artificial Sequence
  Description of Artificial Sequence: Synthetic oligonucleotide
  Sense strand starting at position 2994 of SEQ ID NO: 1244789
guagaaugguagcugugau

SEQ ID NO: 1514957 - RNA, 19 nt, Artificial Sequence
  Description of Artificial Sequence: Synthetic oligonucleotide
  Antisense strand to SEQ ID NO: 1514956
aucacagcuaccauucuac

SEQ ID NO: 1514958 - RNA, 19 nt, Artificial Sequence
  Description of Artificial Sequence: Synthetic oligonucleotide
  Sense strand starting at position 2995 of SEQ ID NO: 1244789
uagaaugguagcugugaua

SEQ ID NO: 1514959 - RNA, 19 nt, Artificial Sequence
  Description of Artificial Sequence: Synthetic oligonucleotide
  Antisense strand to SEQ ID NO: 1514958
uaucacagcuaccauucua

SEQ ID NO: 1514960 - RNA, 19 nt, Artificial Sequence
  Description of Artificial Sequence: Synthetic oligonucleotide
  Sense strand starting at position 3095 of SEQ ID NO: 1244789
cccgcugcucuagaaagua

SEQ ID NO: 1514961 - RNA, 19 nt, Artificial Sequence
  Description of Artificial Sequence: Synthetic oligonucleotide
  Antisense strand to SEQ ID NO: 1514960
uacuuucuagagcagcggg

SEQ ID NO: 1514962 - RNA, 19 nt, Artificial Sequence
  Description of Artificial Sequence: Synthetic oligonucleotide
  Sense strand starting at position 3170 of SEQ ID NO: 1244789
ugagcuauucuuggguuaa

SEQ ID NO: 1514963 - RNA, 19 nt, Artificial Sequence
  Description of Artificial Sequence: Synthetic oligonucleotide
  Antisense strand to SEQ ID NO: 1514962
uuaacccaagaauagcuca

SEQ ID NO: 1514964 - RNA, 19 nt, Artificial Sequence
  Description of Artificial Sequence: Synthetic oligonucleotide
  Sense strand starting at position 3172 of SEQ ID NO: 1244789
agcuauucuuggguuaaac

SEQ ID NO: 1514965 - RNA, 19 nt, Artificial Sequence
  Description of Artificial Sequence: Synthetic oligonucleotide
  Antisense strand to SEQ ID NO: 1514964
guuuaacccaagaauagcu

SEQ ID NO: 1514966 - RNA, 19 nt, Artificial Sequence
  Description of Artificial Sequence: Synthetic oligonucleotide
  Sense strand starting at position 3182 of SEQ ID NO: 1244789
ggguuaaacugcuuuaucu

SEQ ID NO: 1514967 - RNA, 19 nt, Artificial Sequence
  Description of Artificial Sequence: Synthetic oligonucleotide
  Antisense strand to SEQ ID NO: 1514966
agauaaagcaguuuaaccc

SEQ ID NO: 1514968 - RNA, 19 nt, Artificial Sequence
  Description of Artificial Sequence: Synthetic oligonucleotide
  Sense strand starting at position 3189 of SEQ ID NO: 1244789
acugcuuuaucuuugugga

SEQ ID NO: 1514969 - RNA, 19 nt, Artificial Sequence
  Description of Artificial Sequence: Synthetic oligonucleotide
  Antisense strand to SEQ ID NO: 1514968
uccacaaagauaaagcagu

SEQ ID NO: 1514970 - RNA, 19 nt, Artificial Sequence
  Description of Artificial Sequence: Synthetic oligonucleotide
  Sense strand starting at position 3191 of SEQ ID NO: 1244789
ugcuuuaucuuuguggaua

SEQ ID NO: 1514971 - RNA, 19 nt, Artificial Sequence
  Description of Artificial Sequence: Synthetic oligonucleotide
  Antisense strand to SEQ ID NO: 1514970
uauccacaaagauaaagca

SEQ ID NO: 1514972 - RNA, 19 nt, Artificial Sequence
  Description of Artificial Sequence: Synthetic oligonucleotide
  Sense strand starting at position 3303 of SEQ ID NO: 1244789
aguaaauguacuugcugga

SEQ ID NO: 1514973 - RNA, 19 nt, Artificial Sequence
  Description of Artificial Sequence: Synthetic oligonucleotide
  Antisense strand to SEQ ID NO: 1514972
uccagcaaguacauuuacu

SEQ ID NO: 1514974 - RNA, 19 nt, Artificial Sequence
  Description of Artificial Sequence: Synthetic oligonucleotide
  Sense strand starting at position 3307 of SEQ ID NO: 1244789
aauguacuugcuggagcau

SEQ ID NO: 1514975 - RNA, 19 nt, Artificial Sequence
  Description of Artificial Sequence: Synthetic oligonucleotide
  Antisense strand to SEQ ID NO: 1514974
augcuccagcaaguacauu

SEQ ID NO: 1514976 - RNA, 19 nt, Artificial Sequence
  Description of Artificial Sequence: Synthetic oligonucleotide
  Sense strand starting at position 3308 of SEQ ID NO: 1244789
auguacuugcuggagcaua

SEQ ID NO: 1514977 - RNA, 19 nt, Artificial Sequence
  Description of Artificial Sequence: Synthetic oligonucleotide
  Antisense strand to SEQ ID NO: 1514976
uaugcuccagcaaguacau

SEQ ID NO: 1514978 - RNA, 19 nt, Artificial Sequence
  Description of Artificial Sequence: Synthetic oligonucleotide
  Sense strand starting at position 3313 of SEQ ID NO: 1244789
cuugcuggagcauaugauu

SEQ ID NO: 1514979 - RNA, 19 nt, Artificial Sequence
  Description of Artificial Sequence: Synthetic oligonucleotide
  Antisense strand to SEQ ID NO: 1514978
aaucauaugcuccagcaag

SEQ ID NO: 1514980 - RNA, 19 nt, Artificial Sequence
  Description of Artificial Sequence: Synthetic oligonucleotide
  Sense strand starting at position 3338 of SEQ ID NO: 1244789
uugggcuuguuuccauuua

SEQ ID NO: 1514981 - RNA, 19 nt, Artificial Sequence
  Description of Artificial Sequence: Synthetic oligonucleotide
  Antisense strand to SEQ ID NO: 1514980
uaaauggaaacaagcccaa

SEQ ID NO: 1514982 - RNA, 19 nt, Artificial Sequence
  Description of Artificial Sequence: Synthetic oligonucleotide
  Sense strand starting at position 90 of SEQ ID NO: 1244790
gggagaauagcguggugau

SEQ ID NO: 1514983 - RNA, 19 nt, Artificial Sequence
  Description of Artificial Sequence: Synthetic oligonucleotide
  Antisense strand to SEQ ID NO: 1514982
aucaccacgcuauucuccc

SEQ ID NO: 1514984 - RNA, 19 nt, Artificial Sequence
  Description of Artificial Sequence: Synthetic oligonucleotide
  Sense strand starting at position 91 of SEQ ID NO: 1244790
ggagaauagcguggugauc

SEQ ID NO: 1514985 - RNA, 19 nt, Artificial Sequence
  Description of Artificial Sequence: Synthetic oligonucleotide
  Antisense strand to SEQ ID NO: 1514984
gaucaccacgcuauucucc

SEQ ID NO: 1514986 - RNA, 19 nt, Artificial Sequence
  Description of Artificial Sequence: Synthetic oligonucleotide
  Sense strand starting at position 190 of SEQ ID NO: 1244790
cgagaucuuccauaacuug

SEQ ID NO: 1514987 - RNA, 19 nt, Artificial Sequence
  Description of Artificial Sequence: Synthetic oligonucleotide
  Antisense strand to SEQ ID NO: 1514986
caaguuauggaagaucucg

SEQ ID NO: 1514988 - RNA, 19 nt, Artificial Sequence
  Description of Artificial Sequence: Synthetic oligonucleotide
  Sense strand starting at position 224 of SEQ ID NO: 1244790
caacuuuaacccggaugua

SEQ ID NO: 1514989 - RNA, 19 nt, Artificial Sequence
  Description of Artificial Sequence: Synthetic oligonucleotide
  Antisense strand to SEQ ID NO: 1514988
uacauccggguuaaaguug

SEQ ID NO: 1514990 - RNA, 19 nt, Artificial Sequence
  Description of Artificial Sequence: Synthetic oligonucleotide
  Sense strand starting at position 244 of SEQ ID NO: 1244790
gcaguuucucccuauugga

SEQ ID NO: 1514991 - RNA, 19 nt, Artificial Sequence
  Description of Artificial Sequence: Synthetic oligonucleotide
  Antisense strand to SEQ ID NO: 1514990
uccaauagggagaaacugc

SEQ ID NO: 1514992 - RNA, 19 nt, Artificial Sequence
  Description of Artificial Sequence: Synthetic oligonucleotide
  Sense strand starting at position 340 of SEQ ID NO: 1244790
ccagaaaucuggcaauuua

SEQ ID NO: 1514993 - RNA, 19 nt, Artificial Sequence
  Description of Artificial Sequence: Synthetic oligonucleotide
  Antisense strand to SEQ ID NO: 1514992
uaaauugccagauuucugg

SEQ ID NO: 1514994 - RNA, 19 nt, Artificial Sequence
  Description of Artificial Sequence: Synthetic oligonucleotide
  Sense strand starting at position 361 of SEQ ID NO: 1244790
uggacaaccuugccugaau

SEQ ID NO: 1514995 - RNA, 19 nt, Artificial Sequence
  Description of Artificial Sequence: Synthetic oligonucleotide
  Antisense strand to SEQ ID NO: 1514994
auucaggcaagguugucca

SEQ ID NO: 1514996 - RNA, 19 nt, Artificial Sequence
  Description of Artificial Sequence: Synthetic oligonucleotide
  Sense strand starting at position 387 of SEQ ID NO: 1244790
uugaaauuccacuguuaag

SEQ ID NO: 1514997 - RNA, 19 nt, Artificial Sequence
  Description of Artificial Sequence: Synthetic oligonucleotide
  Antisense strand to SEQ ID NO: 1514996
cuuaacaguggaauuucaa

SEQ ID NO: 1514998 - RNA, 19 nt, Artificial Sequence
  Description of Artificial Sequence: Synthetic oligonucleotide
  Sense strand starting at position 414 of SEQ ID NO: 1244790
auccaauucuggucaaaga

SEQ ID NO: 1514999 - RNA, 19 nt, Artificial Sequence
  Description of Artificial Sequence: Synthetic oligonucleotide
  Antisense strand to SEQ ID NO: 1514998
ucuuugaccagaauuggau

SEQ ID NO: 1515000 - RNA, 19 nt, Artificial Sequence
  Description of Artificial Sequence: Synthetic oligonucleotide
  Sense strand starting at position 433 of SEQ ID NO: 1244790
aaagaauacguguauaacc

SEQ ID NO: 1515001 - RNA, 19 nt, Artificial Sequence
  Description of Artificial Sequence: Synthetic oligonucleotide
  Antisense strand to SEQ ID NO: 1515000
gguuauacacguauucuuu

SEQ ID NO: 1515002 - RNA, 19 nt, Artificial Sequence
  Description of Artificial Sequence: Synthetic oligonucleotide
  Sense strand starting at position 435 of SEQ ID NO: 1244790
agaauacguguauaaccua

SEQ ID NO: 1515003 - RNA, 19 nt, Artificial Sequence
  Description of Artificial Sequence: Synthetic oligonucleotide
  Antisense strand to SEQ ID NO: 1515002
uagguuauacacguauucu

SEQ ID NO: 1515004 - RNA, 19 nt, Artificial Sequence
  Description of Artificial Sequence: Synthetic oligonucleotide
  Sense strand starting at position 488 of SEQ ID NO: 1244790
ucgaacugcauaggucaua

SEQ ID NO: 1515005 - RNA, 19 nt, Artificial Sequence
  Description of Artificial Sequence: Synthetic oligonucleotide
  Antisense strand to SEQ ID NO: 1515004
uaugaccuaugcaguucga

SEQ ID NO: 1515006 - RNA, 19 nt, Artificial Sequence
  Description of Artificial Sequence: Synthetic oligonucleotide
  Sense strand starting at position 537 of SEQ ID NO: 1244790
gugccaucucgguaaacau

SEQ ID NO: 1515007 - RNA, 19 nt, Artificial Sequence
  Description of Artificial Sequence: Synthetic oligonucleotide
  Antisense strand to SEQ ID NO: 1515006
auguuuaccgagauggcac

SEQ ID NO: 1515008 - RNA, 19 nt, Artificial Sequence
  Description of Artificial Sequence: Synthetic oligonucleotide
  Sense strand starting at position 544 of SEQ ID NO: 1244790
cucgguaaacaucagcaua

SEQ ID NO: 1515009 - RNA, 19 nt, Artificial Sequence
  Description of Artificial Sequence: Synthetic oligonucleotide
  Antisense strand to SEQ ID NO: 1515008
uaugcugauguuuaccgag

SEQ ID NO: 1515010 - RNA, 19 nt, Artificial Sequence
  Description of Artificial Sequence: Synthetic oligonucleotide
  Sense strand starting at position 729 of SEQ ID NO: 1244790
guguacuuaagugauacca

SEQ ID NO: 1515011 - RNA, 19 nt, Artificial Sequence
  Description of Artificial Sequence: Synthetic oligonucleotide
  Antisense strand to SEQ ID NO: 1515010
ugguaucacuuaaguacac

SEQ ID NO: 1515012 - RNA, 19 nt, Artificial Sequence
  Description of Artificial Sequence: Synthetic oligonucleotide
  Sense strand starting at position 849 of SEQ ID NO: 1244790
gcaauccucguuuauuaaa

SEQ ID NO: 1515013 - RNA, 19 nt, Artificial Sequence
  Description of Artificial Sequence: Synthetic oligonucleotide
  Antisense strand to SEQ ID NO: 1515012
uuuaauaaacgaggauugc

SEQ ID NO: 1515014 - RNA, 19 nt, Artificial Sequence
  Description of Artificial Sequence: Synthetic oligonucleotide
  Sense strand starting at position 1707 of SEQ ID NO: 1244790
uucggaugucuggagguaa

SEQ ID NO: 1515015 - RNA, 19 nt, Artificial Sequence
  Description of Artificial Sequence: Synthetic oligonucleotide
  Antisense strand to SEQ ID NO: 1515014
uuaccuccagacauccgaa

SEQ ID NO: 1515016 - RNA, 19 nt, Artificial Sequence
  Description of Artificial Sequence: Synthetic oligonucleotide
  Sense strand starting at position 1711 of SEQ ID NO: 1244790
gaugucuggagguaaguua

SEQ ID NO: 1515017 - RNA, 19 nt, Artificial Sequence
  Description of Artificial Sequence: Synthetic oligonucleotide
  Antisense strand to SEQ ID NO: 1515016
uaacuuaccuccagacauc

SEQ ID NO: 1515018 - RNA, 19 nt, Artificial Sequence
  Description of Artificial Sequence: Synthetic oligonucleotide
  Sense strand starting at position 1719 of SEQ ID NO: 1244790
gagguaaguuacccacgua

SEQ ID NO: 1515019 - RNA, 19 nt, Artificial Sequence
  Description of Artificial Sequence: Synthetic oligonucleotide
  Antisense strand to SEQ ID NO: 1515018
uacguggguaacuuaccuc

SEQ ID NO: 1515020 - RNA, 19 nt, Artificial Sequence
  Description of Artificial Sequence: Synthetic oligonucleotide
  Sense strand starting at position 1734 of SEQ ID NO: 1244790
cguagaugcggcaaucguu

SEQ ID NO: 1515021 - RNA, 19 nt, Artificial Sequence
  Description of Artificial Sequence: Synthetic oligonucleotide
  Antisense strand to SEQ ID NO: 1515020
aacgauugccgcaucuacg

SEQ ID NO: 1515022 - RNA, 19 nt, Artificial Sequence
  Description of Artificial Sequence: Synthetic oligonucleotide
  Sense strand starting at position 2142 of SEQ ID NO: 1244790
uaacgaacuuucguuaaag

SEQ ID NO: 1515023 - RNA, 19 nt, Artificial Sequence
  Description of Artificial Sequence: Synthetic oligonucleotide
  Antisense strand to SEQ ID NO: 1515022
cuuuaacgaaaguucguua

SEQ ID NO: 1515024 - RNA, 19 nt, Artificial Sequence
  Description of Artificial Sequence: Synthetic oligonucleotide
  Sense strand starting at position 2144 of SEQ ID NO: 1244790
acgaacuuucguuaaagga

SEQ ID NO: 1515025 - RNA, 19 nt, Artificial Sequence
  Description of Artificial Sequence: Synthetic oligonucleotide
  Antisense strand to SEQ ID NO: 1515024
uccuuuaacgaaaguucgu

SEQ ID NO: 1515026 - RNA, 19 nt, Artificial Sequence
  Description of Artificial Sequence: Synthetic oligonucleotide
  Sense strand starting at position 2153 of SEQ ID NO: 1244790
cguuaaaggagcuagucau

SEQ ID NO: 1515027 - RNA, 19 nt, Artificial Sequence
  Description of Artificial Sequence: Synthetic oligonucleotide
  Antisense strand to SEQ ID NO: 1515026
augacuagcuccuuuaacg

SEQ ID NO: 1515028 - RNA, 19 nt, Artificial Sequence
  Description of Artificial Sequence: Synthetic oligonucleotide
  Sense strand starting at position 2251 of SEQ ID NO: 1244790
ggugaaaccuagccuaaag

SEQ ID NO: 1515029 - RNA, 19 nt, Artificial Sequence
  Description of Artificial Sequence: Synthetic oligonucleotide
  Antisense strand to SEQ ID NO: 1515028
cuuuaggcuagguuucacc

SEQ ID NO: 1515030 - RNA, 19 nt, Artificial Sequence
  Description of Artificial Sequence: Synthetic oligonucleotide
  Sense strand starting at position 2280 of SEQ ID NO: 1244790
ccaugcucugcggcgauaa

SEQ ID NO: 1515031 - RNA, 19 nt, Artificial Sequence
  Description of Artificial Sequence: Synthetic oligonucleotide
  Antisense strand to SEQ ID NO: 1515030
uuaucgccgcagagcaugg

SEQ ID NO: 1515032 - RNA, 19 nt, Artificial Sequence
  Description of Artificial Sequence: Synthetic oligonucleotide
  Sense strand starting at position 2404 of SEQ ID NO: 1244790
ugaguugcgggugauugaa

SEQ ID NO: 1515033 - RNA, 19 nt, Artificial Sequence
  Description of Artificial Sequence: Synthetic oligonucleotide
  Antisense strand to SEQ ID NO: 1515032
uucaaucacccgcaacuca

SEQ ID NO: 1515034 - RNA, 19 nt, Artificial Sequence
  Description of Artificial Sequence: Synthetic oligonucleotide
  Sense strand starting at position 2481 of SEQ ID NO: 1244790
uuagacagaugugucuaau

SEQ ID NO: 1515035 - RNA, 19 nt, Artificial Sequence
  Description of Artificial Sequence: Synthetic oligonucleotide
  Antisense strand to SEQ ID NO: 1515034
auuagacacaucugucuaa

SEQ ID NO: 1515036 - RNA, 19 nt, Artificial Sequence
  Description of Artificial Sequence: Synthetic oligonucleotide
  Sense strand starting at position 2491 of SEQ ID NO: 1244790
gugucuaauuuagcgaaac

SEQ ID NO: 1515037 - RNA, 19 nt, Artificial Sequence
  Description of Artificial Sequence: Synthetic oligonucleotide
  Antisense strand to SEQ ID NO: 1515036
guuucgcuaaauuagacac

SEQ ID NO: 1515038 - RNA, 19 nt, Artificial Sequence
  Description of Artificial Sequence: Synthetic oligonucleotide
  Sense strand starting at position 2734 of SEQ ID NO: 1244790
cagaaugaaucguuucugu

SEQ ID NO: 1515039 - RNA, 19 nt, Artificial Sequence
  Description of Artificial Sequence: Synthetic oligonucleotide
  Antisense strand to SEQ ID NO: 1515038
acagaaacgauucauucug

SEQ ID NO: 1515040 - RNA, 19 nt, Artificial Sequence
  Description of Artificial Sequence: Synthetic oligonucleotide
  Sense strand starting at position 2928 of SEQ ID NO: 1244790
ucaggacugugauccuguu

SEQ ID NO: 1515041 - RNA, 19 nt, Artificial Sequence
  Description of Artificial Sequence: Synthetic oligonucleotide
  Antisense strand to SEQ ID NO: 1515040
aacaggaucacaguccuga

SEQ ID NO: 1515042 - RNA, 19 nt, Artificial Sequence
  Description of Artificial Sequence: Synthetic oligonucleotide
  Sense strand starting at position 2952 of SEQ ID NO: 1244790
gcggcauugggagauaaca

SEQ ID NO: 1515043 - RNA, 19 nt, Artificial Sequence
  Description of Artificial Sequence: Synthetic oligonucleotide
  Antisense strand to SEQ ID NO: 1515042
uguuaucucccaaugccgc

SEQ ID NO: 1515044 - RNA, 19 nt, Artificial Sequence
  Description of Artificial Sequence: Synthetic oligonucleotide
  Sense strand starting at position 3027 of SEQ ID NO: 1244790
uuuaaacgucgcuaaugaa

SEQ ID NO: 1515045 - RNA, 19 nt, Artificial Sequence
  Description of Artificial Sequence: Synthetic oligonucleotide
  Antisense strand to SEQ ID NO: 1515044
uucauuagcgacguuuaaa

SEQ ID NO: 1515046 - RNA, 19 nt, Artificial Sequence
  Description of Artificial Sequence: Synthetic oligonucleotide
  Sense strand starting at position 3459 of SEQ ID NO: 1244790
agucccuuuccgcaaggau

SEQ ID NO: 1515047 - RNA, 19 nt, Artificial Sequence
  Description of Artificial Sequence: Synthetic oligonucleotide
  Antisense strand to SEQ ID NO: 1515046
auccuugcggaaagggacu

SEQ ID NO: 1515048 - RNA, 19 nt, Artificial Sequence
  Description of Artificial Sequence: Synthetic oligonucleotide
  Sense strand starting at position 3900 of SEQ ID NO: 1244790
gugaaagcccguugaauuu

SEQ ID NO: 1515049 - RNA, 19 nt, Artificial Sequence
  Description of Artificial Sequence: Synthetic oligonucleotide
  Antisense strand to SEQ ID NO: 1515048
aaauucaacgggcuuucac

SEQ ID NO: 1515050 - RNA, 19 nt, Artificial Sequence
  Description of Artificial Sequence: Synthetic oligonucleotide
  Sense strand starting at position 3912 of SEQ ID NO: 1244790
ugaauuuguugagauagau

SEQ ID NO: 1515051 - RNA, 19 nt, Artificial Sequence
  Description of Artificial Sequence: Synthetic oligonucleotide
  Antisense strand to SEQ ID NO: 1515050
aucuaucucaacaaauuca

SEQ ID NO: 1515052 - RNA, 19 nt, Artificial Sequence
  Description of Artificial Sequence: Synthetic oligonucleotide
  Sense strand starting at position 3921 of SEQ ID NO: 1244790
ugagauagauugcaaauuu

SEQ ID NO: 1515053 - RNA, 19 nt, Artificial Sequence
  Description of Artificial Sequence: Synthetic oligonucleotide
  Antisense strand to SEQ ID NO: 1515052
aaauuugcaaucuaucuca

SEQ ID NO: 1515054 - RNA, 19 nt, Artificial Sequence
  Description of Artificial Sequence: Synthetic oligonucleotide
  Sense strand starting at position 3939 of SEQ ID NO: 1244790
uuacuuuagucuucccaga

SEQ ID NO: 1515055 - RNA, 19 nt, Artificial Sequence
  Description of Artificial Sequence: Synthetic oligonucleotide
  Antisense strand to SEQ ID NO: 1515054
ucugggaagacuaaaguaa

SEQ ID NO: 1515056 - RNA, 19 nt, Artificial Sequence
  Description of Artificial Sequence: Synthetic oligonucleotide
  Sense strand starting at position 3941 of SEQ ID NO: 1244790
acuuuagucuucccagaag

SEQ ID NO: 1515057 - RNA, 19 nt, Artificial Sequence
  Description of Artificial Sequence: Synthetic oligonucleotide
  Antisense strand to SEQ ID NO: 1515056
cuucugggaagacuaaagu

SEQ ID NO: 1515058 - RNA, 19 nt, Artificial Sequence
  Description of Artificial Sequence: Synthetic oligonucleotide
  Sense strand starting at position 3944 of SEQ ID NO: 1244790
uuagucuucccagaaguca

SEQ ID NO: 1515059 - RNA, 19 nt, Artificial Sequence
  Description of Artificial Sequence: Synthetic oligonucleotide
  Antisense strand to SEQ ID NO: 1515058
ugacuucugggaagacuaa

SEQ ID NO: 1515060 - RNA, 19 nt, Artificial Sequence
  Description of Artificial Sequence: Synthetic oligonucleotide
  Sense strand starting at position 3952 of SEQ ID NO: 1244790
cccagaagucacgguaaag

SEQ ID NO: 1515061 - RNA, 19 nt, Artificial Sequence
  Description of Artificial Sequence: Synthetic oligonucleotide
  Antisense strand to SEQ ID NO: 1515060
cuuuaccgugacuucuggg

SEQ ID NO: 1515062 - RNA, 19 nt, Artificial Sequence
  Description of Artificial Sequence: Synthetic oligonucleotide
  Sense strand starting at position 34 of SEQ ID NO: 1244791
aucagagaauuggucuaua

SEQ ID NO: 1515063 - RNA, 19 nt, Artificial Sequence
  Description of Artificial Sequence: Synthetic oligonucleotide
  Antisense strand to SEQ ID NO: 1515062
uauagaccaauucucugau

SEQ ID NO: 1515064 - RNA, 19 nt, Artificial Sequence
  Description of Artificial Sequence: Synthetic oligonucleotide
  Sense strand starting at position 78 of SEQ ID NO: 1244791
ugaaacauuugguaauuga

SEQ ID NO: 1515065 - RNA, 19 nt, Artificial Sequence
  Description of Artificial Sequence: Synthetic oligonucleotide
  Antisense strand to SEQ ID NO: 1515064
ucaauuaccaaauguuuca

SEQ ID NO: 1515066 - RNA, 19 nt, Artificial Sequence
  Description of Artificial Sequence: Synthetic oligonucleotide
  Sense strand starting at position 198 of SEQ ID NO: 1244791
gugcaauaccuguaacuuu

SEQ ID NO: 1515067 - RNA, 19 nt, Artificial Sequence
  Description of Artificial Sequence: Synthetic oligonucleotide
  Antisense strand to SEQ ID NO: 1515066
aaaguuacagguauugcac

SEQ ID NO: 1515068 - RNA, 19 nt, Artificial Sequence
  Description of Artificial Sequence: Synthetic oligonucleotide
  Sense strand starting at position 304 of SEQ ID NO: 1244791
aguugaacugauuguuucu

SEQ ID NO: 1515069 - RNA, 19 nt, Artificial Sequence
  Description of Artificial Sequence: Synthetic oligonucleotide
  Antisense strand to SEQ ID NO: 1515068
agaaacaaucaguucaacu

SEQ ID NO: 1515070 - RNA, 19 nt, Artificial Sequence
  Description of Artificial Sequence: Synthetic oligonucleotide
  Sense strand starting at position 310 of SEQ ID NO: 1244791
acugauuguuucucuaaga

SEQ ID NO: 1515071 - RNA, 19 nt, Artificial Sequence
  Description of Artificial Sequence: Synthetic oligonucleotide
  Antisense strand to SEQ ID NO: 1515070
ucuuagagaaacaaucagu

SEQ ID NO: 1515072 - RNA, 19 nt, Artificial Sequence
  Description of Artificial Sequence: Synthetic oligonucleotide
  Sense strand starting at position 311 of SEQ ID NO: 1244791
cugauuguuucucuaagag

SEQ ID NO: 1515073 - RNA, 19 nt, Artificial Sequence
  Description of Artificial Sequence: Synthetic oligonucleotide
  Antisense strand to SEQ ID NO: 1515072
cucuuagagaaacaaucag

SEQ ID NO: 1515074 - RNA, 19 nt, Artificial Sequence
  Description of Artificial Sequence: Synthetic oligonucleotide
  Sense strand starting at position 317 of SEQ ID NO: 1244791
guuucucuaagaggauagu

SEQ ID NO: 1515075 - RNA, 19 nt, Artificial Sequence
  Description of Artificial Sequence: Synthetic oligonucleotide
  Antisense strand to SEQ ID NO: 1515074
acuauccucuuagagaaac

SEQ ID NO: 1515076 - RNA, 19 nt, Artificial Sequence
  Description of Artificial Sequence: Synthetic oligonucleotide
  Sense strand starting at position 382 of SEQ ID NO: 1244791
gaaacuggucccuggagga

SEQ ID NO: 1515077 - RNA, 19 nt, Artificial Sequence
  Description of Artificial Sequence: Synthetic oligonucleotide
  Antisense strand to SEQ ID NO: 1515076
uccuccagggaccaguuuc

SEQ ID NO: 1515078 - RNA, 19 nt, Artificial Sequence
  Description of Artificial Sequence: Synthetic oligonucleotide
  Sense strand starting at position 392 of SEQ ID NO: 1244791
ccuggaggaucagccaaau

SEQ ID NO: 1515079 - RNA, 19 nt, Artificial Sequence
  Description of Artificial Sequence: Synthetic oligonucleotide
  Antisense strand to SEQ ID NO: 1515078
auuuggcugauccuccagg

SEQ ID NO: 1515080 - RNA, 19 nt, Artificial Sequence
  Description of Artificial Sequence: Synthetic oligonucleotide
  Sense strand starting at position 421 of SEQ ID NO: 1244791
cugcaauacuggccaauau

SEQ ID NO: 1515081 - RNA, 19 nt, Artificial Sequence
  Description of Artificial Sequence: Synthetic oligonucleotide
  Antisense strand to SEQ ID NO: 1515080
auauuggccaguauugcag

SEQ ID NO: 1515082 - RNA, 19 nt, Artificial Sequence
  Description of Artificial Sequence: Synthetic oligonucleotide
  Sense strand starting at position 422 of SEQ ID NO: 1244791
ugcaauacuggccaauauu

SEQ ID NO: 1515083 - RNA, 19 nt, Artificial Sequence
  Description of Artificial Sequence: Synthetic oligonucleotide
  Antisense strand to SEQ ID NO: 1515082
aauauuggccaguauugca

SEQ ID NO: 1515084 - RNA, 19 nt, Artificial Sequence
  Description of Artificial Sequence: Synthetic oligonucleotide
  Sense strand starting at position 478 of SEQ ID NO: 1244791
aaaugcagacguuggauaa

SEQ ID NO: 1515085 - RNA, 19 nt, Artificial Sequence
  Description of Artificial Sequence: Synthetic oligonucleotide
  Antisense strand to SEQ ID NO: 1515084
uuauccaacgucugcauuu

SEQ ID NO: 1515086 - RNA, 19 nt, Artificial Sequence
  Description of Artificial Sequence: Synthetic oligonucleotide
  Sense strand starting at position 479 of SEQ ID NO: 1244791
aaugcagacguuggauaaa

SEQ ID NO: 1515087 - RNA, 19 nt, Artificial Sequence
  Description of Artificial Sequence: Synthetic oligonucleotide
  Antisense strand to SEQ ID NO: 1515086
uuuauccaacgucugcauu

SEQ ID NO: 1515088 - RNA, 19 nt, Artificial Sequence
  Description of Artificial Sequence: Synthetic oligonucleotide
  Sense strand starting at position 704 of SEQ ID NO: 1244791
augaauuaggguuaugugu

SEQ ID NO: 1515089 - RNA, 19 nt, Artificial Sequence
  Description of Artificial Sequence: Synthetic oligonucleotide
  Antisense strand to SEQ ID NO: 1515088
acacauaacccuaauucau

SEQ ID NO: 1515090 - RNA, 19 nt, Artificial Sequence
  Description of Artificial Sequence: Synthetic oligonucleotide
  Sense strand starting at position 723 of SEQ ID NO: 1244791
cucggauucccagacauua

SEQ ID NO: 1515091 - RNA, 19 nt, Artificial Sequence
  Description of Artificial Sequence: Synthetic oligonucleotide
  Antisense strand to SEQ ID NO: 1515090
uaaugucugggaauccgag

SEQ ID NO: 1515092 - RNA, 19 nt, Artificial Sequence
  Description of Artificial Sequence: Synthetic oligonucleotide
  Sense strand starting at position 1689 of SEQ ID NO: 1244791
gguuguccaccuugaggga

SEQ ID NO: 1515093 - RNA, 19 nt, Artificial Sequence
  Description of Artificial Sequence: Synthetic oligonucleotide
  Antisense strand to SEQ ID NO: 1515092
ucccucaagguggacaacc

SEQ ID NO: 1515094 - RNA, 19 nt, Artificial Sequence
  Description of Artificial Sequence: Synthetic oligonucleotide
  Sense strand starting at position 1696 of SEQ ID NO: 1244791
caccuugagggaggucaua

SEQ ID NO: 1515095 - RNA, 19 nt, Artificial Sequence
  Description of Artificial Sequence: Synthetic oligonucleotide
  Antisense strand to SEQ ID NO: 1515094
uaugaccucccucaaggug

SEQ ID NO: 1515096 - RNA, 19 nt, Artificial Sequence
  Description of Artificial Sequence: Synthetic oligonucleotide
  Sense strand starting at position 3062 of SEQ ID NO: 1244791
cuuugaagugcccaucaua

SEQ ID NO: 1515097 - RNA, 19 nt, Artificial Sequence
  Description of Artificial Sequence: Synthetic oligonucleotide
  Antisense strand to SEQ ID NO: 1515096
uaugaugggcacuucaaag

SEQ ID NO: 1515098 - RNA, 19 nt, Artificial Sequence
  Description of Artificial Sequence: Synthetic oligonucleotide
  Sense strand starting at position 3065 of SEQ ID NO: 1244791
ugaagugcccaucauaaug

SEQ ID NO: 1515099 - RNA, 19 nt, Artificial Sequence
  Description of Artificial Sequence: Synthetic oligonucleotide
  Antisense strand to SEQ ID NO: 1515098
cauuaugaugggcacuuca

SEQ ID NO: 1515100 - RNA, 19 nt, Artificial Sequence
  Description of Artificial Sequence: Synthetic oligonucleotide
  Sense strand starting at position 3115 of SEQ ID NO: 1244791
aucuaauagcgcgcuuuaa

SEQ ID NO: 1515101 - RNA, 19 nt, Artificial Sequence
  Description of Artificial Sequence: Synthetic oligonucleotide
  Antisense strand to SEQ ID NO: 1515100
uuaaagcgcgcuauuagau

SEQ ID NO: 1515102 - RNA, 19 nt, Artificial Sequence
  Description of Artificial Sequence: Synthetic oligonucleotide
  Sense strand starting at position 3116 of SEQ ID NO: 1244791
ucuaauagcgcgcuuuaau

SEQ ID NO: 1515103 - RNA, 19 nt, Artificial Sequence
  Description of Artificial Sequence: Synthetic oligonucleotide
  Antisense strand to SEQ ID NO: 1515102
auuaaagcgcgcuauuaga

SEQ ID NO: 1515104 - RNA, 19 nt, Artificial Sequence
  Description of Artificial Sequence: Synthetic oligonucleotide
  Sense strand starting at position 3117 of SEQ ID NO: 1244791
cuaauagcgcgcuuuaauu

SEQ ID NO: 1515105 - RNA, 19 nt, Artificial Sequence
  Description of Artificial Sequence: Synthetic oligonucleotide
  Antisense strand to SEQ ID NO: 1515104
aauuaaagcgcgcuauuag

SEQ ID NO: 1515106 - RNA, 19 nt, Artificial Sequence
  Description of Artificial Sequence: Synthetic oligonucleotide
  Sense strand starting at position 3215 of SEQ ID NO: 1244791
gggcguuaagcauuaucgu

SEQ ID NO: 1515107 - RNA, 19 nt, Artificial Sequence
  Description of Artificial Sequence: Synthetic oligonucleotide
  Antisense strand to SEQ ID NO: 1515106
acgauaaugcuuaacgccc

SEQ ID NO: 1515108 - RNA, 19 nt, Artificial Sequence
  Description of Artificial Sequence: Synthetic oligonucleotide
  Sense strand starting at position 3223 of SEQ ID NO: 1244791
agcauuaucguuuaaucug

SEQ ID NO: 1515109 - RNA, 19 nt, Artificial Sequence
  Description of Artificial Sequence: Synthetic oligonucleotide
  Antisense strand to SEQ ID NO: 1515108
cagauuaaacgauaaugcu

SEQ ID NO: 1515110 - RNA, 19 nt, Artificial Sequence
  Description of Artificial Sequence: Synthetic oligonucleotide
  Sense strand starting at position 3258 of SEQ ID NO: 1244791
ggauguuaaccugguuauu

SEQ ID NO: 1515111 - RNA, 19 nt, Artificial Sequence
  Description of Artificial Sequence: Synthetic oligonucleotide
  Antisense strand to SEQ ID NO: 1515110
aauaaccagguuaacaucc

SEQ ID NO: 1515112 - RNA, 19 nt, Artificial Sequence
  Description of Artificial Sequence: Synthetic oligonucleotide
  Sense strand starting at position 3570 of SEQ ID NO: 1244791
guggauauaccagguauug

SEQ ID NO: 1515113 - RNA, 19 nt, Artificial Sequence
  Description of Artificial Sequence: Synthetic oligonucleotide
  Antisense strand to SEQ ID NO: 1515112
caauaccugguauauccac

SEQ ID NO: 1515114 - RNA, 19 nt, Artificial Sequence
  Description of Artificial Sequence: Synthetic oligonucleotide
  Sense strand starting at position 3582 of SEQ ID NO: 1244791
gguauuguaccguaugauu

SEQ ID NO: 1515115 - RNA, 19 nt, Artificial Sequence
  Description of Artificial Sequence: Synthetic oligonucleotide
  Antisense strand to SEQ ID NO: 1515114
aaucauacgguacaauacc

SEQ ID NO: 1515116 - RNA, 19 nt, Artificial Sequence
  Description of Artificial Sequence: Synthetic oligonucleotide
  Sense strand starting at position 3587 of SEQ ID NO: 1244791
uguaccguaugauugauuu

SEQ ID NO: 1515117 - RNA, 19 nt, Artificial Sequence
  Description of Artificial Sequence: Synthetic oligonucleotide
  Antisense strand to SEQ ID NO: 1515116
aaaucaaucauacgguaca

SEQ ID NO: 1515118 - RNA, 19 nt, Artificial Sequence
  Description of Artificial Sequence: Synthetic oligonucleotide
  Sense strand starting at position 3614 of SEQ ID NO: 1244791
auuugacaguaguugcuua

SEQ ID NO: 1515119 - RNA, 19 nt, Artificial Sequence
  Description of Artificial Sequence: Synthetic oligonucleotide
  Antisense strand to SEQ ID NO: 1515118
uaagcaacuacugucaaau

SEQ ID NO: 1515120 - RNA, 19 nt, Artificial Sequence
  Description of Artificial Sequence: Synthetic oligonucleotide
  Sense strand starting at position 3618 of SEQ ID NO: 1244791
gacaguaguugcuuaaauc

SEQ ID NO: 1515121 - RNA, 19 nt, Artificial Sequence
  Description of Artificial Sequence: Synthetic oligonucleotide
  Antisense strand to SEQ ID NO: 1515120
gauuuaagcaacuacuguc

SEQ ID NO: 1515122 - RNA, 19 nt, Artificial Sequence
  Description of Artificial Sequence: Synthetic oligonucleotide
  Sense strand starting at position 3619 of SEQ ID NO: 1244791
acaguaguugcuuaaaucu

SEQ ID NO: 1515123 - RNA, 19 nt, Artificial Sequence
  Description of Artificial Sequence: Synthetic oligonucleotide
  Antisense strand to SEQ ID NO: 1515122
agauuuaagcaacuacugu

SEQ ID NO: 1515124 - RNA, 19 nt, Artificial Sequence
  Description of Artificial Sequence: Synthetic oligonucleotide
  Sense strand starting at position 3667 of SEQ ID NO: 1244791
gauugaauaaguggugaug

SEQ ID NO: 1515125 - RNA, 19 nt, Artificial Sequence
  Description of Artificial Sequence: Synthetic oligonucleotide
  Antisense strand to SEQ ID NO: 1515124
caucaccacuuauucaauc

SEQ ID NO: 1515126 - RNA, 19 nt, Artificial Sequence
  Description of Artificial Sequence: Synthetic oligonucleotide
  Sense strand starting at position 3733 of SEQ ID NO: 1244791
agcugaugaguuuagguuu

SEQ ID NO: 1515127 - RNA, 19 nt, Artificial Sequence
  Description of Artificial Sequence: Synthetic oligonucleotide
  Antisense strand to SEQ ID NO: 1515126
aaaccuaaacucaucagcu

SEQ ID NO: 1515128 - RNA, 19 nt, Artificial Sequence
  Description of Artificial Sequence: Synthetic oligonucleotide
  Sense strand starting at position 3744 of SEQ ID NO: 1244791
uuagguuuccuguggaauu

SEQ ID NO: 1515129 - RNA, 19 nt, Artificial Sequence
  Description of Artificial Sequence: Synthetic oligonucleotide
  Antisense strand to SEQ ID NO: 1515128
aauuccacaggaaaccuaa

SEQ ID NO: 1515130 - RNA, 19 nt, Artificial Sequence
  Description of Artificial Sequence: Synthetic oligonucleotide
  Sense strand starting at position 3757 of SEQ ID NO: 1244791
ggaauuaggcacuagguuu

SEQ ID NO: 1515131 - RNA, 19 nt, Artificial Sequence
  Description of Artificial Sequence: Synthetic oligonucleotide
  Antisense strand to SEQ ID NO: 1515130
aaaccuagugccuaauucc

SEQ ID NO: 1515132 - RNA, 19 nt, Artificial Sequence
  Description of Artificial Sequence: Synthetic oligonucleotide
  Sense strand starting at position 3808 of SEQ ID NO: 1244791
uguuaucuuagguaagugu

SEQ ID NO: 1515133 - RNA, 19 nt, Artificial Sequence
  Description of Artificial Sequence: Synthetic oligonucleotide
  Antisense strand to SEQ ID NO: 1515132
acacuuaccuaagauaaca

SEQ ID NO: 1515134 - RNA, 19 nt, Artificial Sequence
  Description of Artificial Sequence: Synthetic oligonucleotide
  Sense strand starting at position 3829 of SEQ ID NO: 1244791
ccgugagccuaauuuccua

SEQ ID NO: 1515135 - RNA, 19 nt, Artificial Sequence
  Description of Artificial Sequence: Synthetic oligonucleotide
  Antisense strand to SEQ ID NO: 1515134
uaggaaauuaggcucacgg

SEQ ID NO: 1515136 - RNA, 19 nt, Artificial Sequence
  Description of Artificial Sequence: Synthetic oligonucleotide
  Sense strand starting at position 3879 of SEQ ID NO: 1244791
agugcauggcauugaauaa

SEQ ID NO: 1515137 - RNA, 19 nt, Artificial Sequence
  Description of Artificial Sequence: Synthetic oligonucleotide
  Antisense strand to SEQ ID NO: 1515136
uuauucaaugccaugcacu

SEQ ID NO: 1515138 - RNA, 19 nt, Artificial Sequence
  Description of Artificial Sequence: Synthetic oligonucleotide
  Sense strand starting at position 3900 of SEQ ID NO: 1244791
acucuaguauugucaugau

SEQ ID NO: 1515139 - RNA, 19 nt, Artificial Sequence
  Description of Artificial Sequence: Synthetic oligonucleotide
  Antisense strand to SEQ ID NO: 1515138
aucaugacaauacuagagu

SEQ ID NO: 1515140 - RNA, 19 nt, Artificial Sequence
  Description of Artificial Sequence: Synthetic oligonucleotide
  Sense strand starting at position 3904 of SEQ ID NO: 1244791
uaguauugucaugauuaga

SEQ ID NO: 1515141 - RNA, 19 nt, Artificial Sequence
  Description of Artificial Sequence: Synthetic oligonucleotide
  Antisense strand to SEQ ID NO: 1515140
ucuaaucaugacaauacua

SEQ ID NO: 1515142 - RNA, 19 nt, Artificial Sequence
  Description of Artificial Sequence: Synthetic oligonucleotide
  Sense strand starting at position 5 of SEQ ID NO: 1244792
guauguuaaugacuuucca

SEQ ID NO: 1515143 - RNA, 19 nt, Artificial Sequence
  Description of Artificial Sequence: Synthetic oligonucleotide
  Antisense strand to SEQ ID NO: 1515142
uggaaagucauuaacauac

SEQ ID NO: 1515144 - RNA, 19 nt, Artificial Sequence
  Description of Artificial Sequence: Synthetic oligonucleotide
  Sense strand starting at position 126 of SEQ ID NO: 1244792
guacaaguauucucaaauc

SEQ ID NO: 1515145 - RNA, 19 nt, Artificial Sequence
  Description of Artificial Sequence: Synthetic oligonucleotide
  Antisense strand to SEQ ID NO: 1515144
gauuugagaauacuuguac

SEQ ID NO: 1515146 - RNA, 19 nt, Artificial Sequence
  Description of Artificial Sequence: Synthetic oligonucleotide
  Sense strand starting at position 186 of SEQ ID NO: 1244792
gcaggaauucuuuauacca

SEQ ID NO: 1515147 - RNA, 19 nt, Artificial Sequence
  Description of Artificial Sequence: Synthetic oligonucleotide
  Antisense strand to SEQ ID NO: 1515146
ugguauaaagaauuccugc

SEQ ID NO: 1515148 - RNA, 19 nt, Artificial Sequence
  Description of Artificial Sequence: Synthetic oligonucleotide
  Sense strand starting at position 346 of SEQ ID NO: 1244792
aguucugcucucugaaaca

SEQ ID NO: 1515149 - RNA, 19 nt, Artificial Sequence
  Description of Artificial Sequence: Synthetic oligonucleotide
  Antisense strand to SEQ ID NO: 1515148
uguuucagagagcagaacu

SEQ ID NO: 1515150 - RNA, 19 nt, Artificial Sequence
  Description of Artificial Sequence: Synthetic oligonucleotide
  Sense strand starting at position 603 of SEQ ID NO: 1244792
ugguacaguguuuauuaaa

SEQ ID NO: 1515151 - RNA, 19 nt, Artificial Sequence
  Description of Artificial Sequence: Synthetic oligonucleotide
  Antisense strand to SEQ ID NO: 1515150
uuuaauaaacacuguacca

SEQ ID NO: 1515152 - RNA, 19 nt, Artificial Sequence
  Description of Artificial Sequence: Synthetic oligonucleotide
  Sense strand starting at position 672 of SEQ ID NO: 1244792
aauuacaguucuguaggaa

SEQ ID NO: 1515153 - RNA, 19 nt, Artificial Sequence
  Description of Artificial Sequence: Synthetic oligonucleotide
  Antisense strand to SEQ ID NO: 1515152
uuccuacagaacuguaauu

SEQ ID NO: 1515154 - RNA, 19 nt, Artificial Sequence
  Description of Artificial Sequence: Synthetic oligonucleotide
  Sense strand starting at position 675 of SEQ ID NO: 1244792
uacaguucuguaggaaguu

SEQ ID NO: 1515155 - RNA, 19 nt, Artificial Sequence
  Description of Artificial Sequence: Synthetic oligonucleotide
  Antisense strand to SEQ ID NO: 1515154
aacuuccuacagaacugua

SEQ ID NO: 1515156 - RNA, 19 nt, Artificial Sequence
  Description of Artificial Sequence: Synthetic oligonucleotide
  Sense strand starting at position 928 of SEQ ID NO: 1244792
cugagagcaugcuuuauug

SEQ ID NO: 1515157 - RNA, 19 nt, Artificial Sequence
  Description of Artificial Sequence: Synthetic oligonucleotide
  Antisense strand to SEQ ID NO: 1515156
caauaaagcaugcucucag

SEQ ID NO: 1515158 - RNA, 19 nt, Artificial Sequence
  Description of Artificial Sequence: Synthetic oligonucleotide
  Sense strand starting at position 946 of SEQ ID NO: 1244792
ggcauaggcaucugaggua

SEQ ID NO: 1515159 - RNA, 19 nt, Artificial Sequence
  Description of Artificial Sequence: Synthetic oligonucleotide
  Antisense strand to SEQ ID NO: 1515158
uaccucagaugccuaugcc

SEQ ID NO: 1515160 - RNA, 19 nt, Artificial Sequence
  Description of Artificial Sequence: Synthetic oligonucleotide
  Sense strand starting at position 1005 of SEQ ID NO: 1244792
gagcaaugaguguaaggca

SEQ ID NO: 1515161 - RNA, 19 nt, Artificial Sequence
  Description of Artificial Sequence: Synthetic oligonucleotide
  Antisense strand to SEQ ID NO: 1515160
ugccuuacacucauugcuc

SEQ ID NO: 1515162 - RNA, 19 nt, Artificial Sequence
  Description of Artificial Sequence: Synthetic oligonucleotide
  Sense strand starting at position 1010 of SEQ ID NO: 1244792
augaguguaaggcauaaau

SEQ ID NO: 1515163 - RNA, 19 nt, Artificial Sequence
  Description of Artificial Sequence: Synthetic oligonucleotide
  Antisense strand to SEQ ID NO: 1515162
auuuaugccuuacacucau

SEQ ID NO: 1515164 - RNA, 19 nt, Artificial Sequence
  Description of Artificial Sequence: Synthetic oligonucleotide
  Sense strand starting at position 1012 of SEQ ID NO: 1244792
gaguguaaggcauaaauau

SEQ ID NO: 1515165 - RNA, 19 nt, Artificial Sequence
  Description of Artificial Sequence: Synthetic oligonucleotide
  Antisense strand to SEQ ID NO: 1515164
auauuuaugccuuacacuc

SEQ ID NO: 1515166 - RNA, 19 nt, Artificial Sequence
  Description of Artificial Sequence: Synthetic oligonucleotide
  Sense strand starting at position 1021 of SEQ ID NO: 1244792
gcauaaauaucuguaagac

SEQ ID NO: 1515167 - RNA, 19 nt, Artificial Sequence
  Description of Artificial Sequence: Synthetic oligonucleotide
  Antisense strand to SEQ ID NO: 1515166
gucuuacagauauuuaugc

SEQ ID NO: 1515168 - RNA, 19 nt, Artificial Sequence
  Description of Artificial Sequence: Synthetic oligonucleotide
  Sense strand starting at position 1027 of SEQ ID NO: 1244792
auaucuguaagacggaaau

SEQ ID NO: 1515169 - RNA, 19 nt, Artificial Sequence
  Description of Artificial Sequence: Synthetic oligonucleotide
  Antisense strand to SEQ ID NO: 1515168
auuuccgucuuacagauau

SEQ ID NO: 1515170 - RNA, 19 nt, Artificial Sequence
  Description of Artificial Sequence: Synthetic oligonucleotide
  Sense strand starting at position 1300 of SEQ ID NO: 1244792
uaugaaaugguguggguaa

SEQ ID NO: 1515171 - RNA, 19 nt, Artificial Sequence
  Description of Artificial Sequence: Synthetic oligonucleotide
  Antisense strand to SEQ ID NO: 1515170
uuacccacaccauuucaua

SEQ ID NO: 1515172 - RNA, 19 nt, Artificial Sequence
  Description of Artificial Sequence: Synthetic oligonucleotide
  Sense strand starting at position 1302 of SEQ ID NO: 1244792
ugaaaugguguggguaaga

SEQ ID NO: 1515173 - RNA, 19 nt, Artificial Sequence
  Description of Artificial Sequence: Synthetic oligonucleotide
  Antisense strand to SEQ ID NO: 1515172
ucuuacccacaccauuuca

SEQ ID NO: 1515174 - RNA, 19 nt, Artificial Sequence
  Description of Artificial Sequence: Synthetic oligonucleotide
  Sense strand starting at position 1319 of SEQ ID NO: 1244792
gagauguggguguggguaa

SEQ ID NO: 1515175 - RNA, 19 nt, Artificial Sequence
  Description of Artificial Sequence: Synthetic oligonucleotide
  Antisense strand to SEQ ID NO: 1515174
uuacccacacccacaucuc

SEQ ID NO: 1515176 - RNA, 19 nt, Artificial Sequence
  Description of Artificial Sequence: Synthetic oligonucleotide
  Sense strand starting at position 2527 of SEQ ID NO: 1244792
uccguuugauacccuggaa

SEQ ID NO: 1515177 - RNA, 19 nt, Artificial Sequence
  Description of Artificial Sequence: Synthetic oligonucleotide
  Antisense strand to SEQ ID NO: 1515176
uuccaggguaucaaacgga

SEQ ID NO: 1515178 - RNA, 19 nt, Artificial Sequence
  Description of Artificial Sequence: Synthetic oligonucleotide
  Sense strand starting at position 2530 of SEQ ID NO: 1244792
guuugauacccuggaaagg

SEQ ID NO: 1515179 - RNA, 19 nt, Artificial Sequence
  Description of Artificial Sequence: Synthetic oligonucleotide
  Antisense strand to SEQ ID NO: 1515178
ccuuuccaggguaucaaac

SEQ ID NO: 1515180 - RNA, 19 nt, Artificial Sequence
  Description of Artificial Sequence: Synthetic oligonucleotide
  Sense strand starting at position 2539 of SEQ ID NO: 1244792
ccuggaaagguuuguggua

SEQ ID NO: 1515181 - RNA, 19 nt, Artificial Sequence
  Description of Artificial Sequence: Synthetic oligonucleotide
  Antisense strand to SEQ ID NO: 1515180
uaccacaaaccuuuccagg

SEQ ID NO: 1515182 - RNA, 19 nt, Artificial Sequence
  Description of Artificial Sequence: Synthetic oligonucleotide
  Sense strand starting at position 2571 of SEQ ID NO: 1244792
ucuauugccugucuaaaga

SEQ ID NO: 1515183 - RNA, 19 nt, Artificial Sequence
  Description of Artificial Sequence: Synthetic oligonucleotide
  Antisense strand to SEQ ID NO: 1515182
ucuuuagacaggcaauaga

SEQ ID NO: 1515184 - RNA, 19 nt, Artificial Sequence
  Description of Artificial Sequence: Synthetic oligonucleotide
  Sense strand starting at position 2720 of SEQ ID NO: 1244792
aggauuugcucguuaagcu

SEQ ID NO: 1515185 - RNA, 19 nt, Artificial Sequence
  Description of Artificial Sequence: Synthetic oligonucleotide
  Antisense strand to SEQ ID NO: 1515184
agcuuaacgagcaaauccu

SEQ ID NO: 1515186 - RNA, 19 nt, Artificial Sequence
  Description of Artificial Sequence: Synthetic oligonucleotide
  Sense strand starting at position 2721 of SEQ ID NO: 1244792
ggauuugcucguuaagcuu

SEQ ID NO: 1515187 - RNA, 19 nt, Artificial Sequence
  Description of Artificial Sequence: Synthetic oligonucleotide
  Antisense strand to SEQ ID NO: 1515186
aagcuuaacgagcaaaucc

SEQ ID NO: 1515188 - RNA, 19 nt, Artificial Sequence
  Description of Artificial Sequence: Synthetic oligonucleotide
  Sense strand starting at position 2828 of SEQ ID NO: 1244792
ggguaaauugucugcagaa

SEQ ID NO: 1515189 - RNA, 19 nt, Artificial Sequence
  Description of Artificial Sequence: Synthetic oligonucleotide
  Antisense strand to SEQ ID NO: 1515188
uucugcagacaauuuaccc

SEQ ID NO: 1515190 - RNA, 19 nt, Artificial Sequence
  Description of Artificial Sequence: Synthetic oligonucleotide
  Sense strand starting at position 2829 of SEQ ID NO: 1244792
gguaaauugucugcagaac

SEQ ID NO: 1515191 - RNA, 19 nt, Artificial Sequence
  Description of Artificial Sequence: Synthetic oligonucleotide
  Antisense strand to SEQ ID NO: 1515190
guucugcagacaauuuacc

SEQ ID NO: 1515192 - RNA, 19 nt, Artificial Sequence
  Description of Artificial Sequence: Synthetic oligonucleotide
  Sense strand starting at position 2830 of SEQ ID NO: 1244792
guaaauugucugcagaaca

SEQ ID NO: 1515193 - RNA, 19 nt, Artificial Sequence
  Description of Artificial Sequence: Synthetic oligonucleotide
  Antisense strand to SEQ ID NO: 1515192
uguucugcagacaauuuac

SEQ ID NO: 1515194 - RNA, 19 nt, Artificial Sequence
  Description of Artificial Sequence: Synthetic oligonucleotide
  Sense strand starting at position 2946 of SEQ ID NO: 1244792
ggcuauuucucagcuugag

SEQ ID NO: 1515195 - RNA, 19 nt, Artificial Sequence
  Description of Artificial Sequence: Synthetic oligonucleotide
  Antisense strand to SEQ ID NO: 1515194
cucaagcugagaaauagcc

SEQ ID NO: 1515196 - RNA, 19 nt, Artificial Sequence
  Description of Artificial Sequence: Synthetic oligonucleotide
  Sense strand starting at position 2963 of SEQ ID NO: 1244792
aguggaugagcugguaaau

SEQ ID NO: 1515197 - RNA, 19 nt, Artificial Sequence
  Description of Artificial Sequence: Synthetic oligonucleotide
  Antisense strand to SEQ ID NO: 1515196
auuuaccagcucauccacu

SEQ ID NO: 1515198 - RNA, 19 nt, Artificial Sequence
  Description of Artificial Sequence: Synthetic oligonucleotide
  Sense strand starting at position 2975 of SEQ ID NO: 1244792
gguaaauaccaccguacau

SEQ ID NO: 1515199 - RNA, 19 nt, Artificial Sequence
  Description of Artificial Sequence: Synthetic oligonucleotide
  Antisense strand to SEQ ID NO: 1515198
auguacggugguauuuacc

SEQ ID NO: 1515200 - RNA, 19 nt, Artificial Sequence
  Description of Artificial Sequence: Synthetic oligonucleotide
  Sense strand starting at position 3023 of SEQ ID NO: 1244792
ggaguuugcaguuauuaaa

SEQ ID NO: 1515201 - RNA, 19 nt, Artificial Sequence
  Description of Artificial Sequence: Synthetic oligonucleotide
  Antisense strand to SEQ ID NO: 1515200
uuuaauaacugcaaacucc

SEQ ID NO: 1515202 - RNA, 19 nt, Artificial Sequence
  Description of Artificial Sequence: Synthetic oligonucleotide
  Sense strand starting at position 3137 of SEQ ID NO: 1244792
gguuaaacgccacaagagu

SEQ ID NO: 1515203 - RNA, 19 nt, Artificial Sequence
  Description of Artificial Sequence: Synthetic oligonucleotide
  Antisense strand to SEQ ID NO: 1515202
acucuuguggcguuuaacc

SEQ ID NO: 1515204 - RNA, 19 nt, Artificial Sequence
  Description of Artificial Sequence: Synthetic oligonucleotide
  Sense strand starting at position 3187 of SEQ ID NO: 1244792
ggcccugugguugaaauaa

SEQ ID NO: 1515205 - RNA, 19 nt, Artificial Sequence
  Description of Artificial Sequence: Synthetic oligonucleotide
  Antisense strand to SEQ ID NO: 1515204
uuauuucaaccacagggcc

SEQ ID NO: 1515206 - RNA, 19 nt, Artificial Sequence
  Description of Artificial Sequence: Synthetic oligonucleotide
  Sense strand starting at position 3253 of SEQ ID NO: 1244792
uguacaguccuauguagag

SEQ ID NO: 1515207 - RNA, 19 nt, Artificial Sequence
  Description of Artificial Sequence: Synthetic oligonucleotide
  Antisense strand to SEQ ID NO: 1515206
cucuacauaggacuguaca

SEQ ID NO: 1515208 - RNA, 19 nt, Artificial Sequence
  Description of Artificial Sequence: Synthetic oligonucleotide
  Sense strand starting at position 3257 of SEQ ID NO: 1244792
caguccuauguagagugua

SEQ ID NO: 1515209 - RNA, 19 nt, Artificial Sequence
  Description of Artificial Sequence: Synthetic oligonucleotide
  Antisense strand to SEQ ID NO: 1515208
uacacucuacauaggacug

SEQ ID NO: 1515210 - RNA, 19 nt, Artificial Sequence
  Description of Artificial Sequence: Synthetic oligonucleotide
  Sense strand starting at position 3267 of SEQ ID NO: 1244792
uagaguguagugcagagaa

SEQ ID NO: 1515211 - RNA, 19 nt, Artificial Sequence
  Description of Artificial Sequence: Synthetic oligonucleotide
  Antisense strand to SEQ ID NO: 1515210
uucucugcacuacacucua

SEQ ID NO: 1515212 - RNA, 19 nt, Artificial Sequence
  Description of Artificial Sequence: Synthetic oligonucleotide
  Sense strand starting at position 3391 of SEQ ID NO: 1244792
cccagagcuccguaguaaa

SEQ ID NO: 1515213 - RNA, 19 nt, Artificial Sequence
  Description of Artificial Sequence: Synthetic oligonucleotide
  Antisense strand to SEQ ID NO: 1515212
uuuacuacggagcucuggg

SEQ ID NO: 1515214 - RNA, 19 nt, Artificial Sequence
  Description of Artificial Sequence: Synthetic oligonucleotide
  Sense strand starting at position 3537 of SEQ ID NO: 1244792
auauaugugcuuuaugaac

SEQ ID NO: 1515215 - RNA, 19 nt, Artificial Sequence
  Description of Artificial Sequence: Synthetic oligonucleotide
  Antisense strand to SEQ ID NO: 1515214
guucauaaagcacauauau

SEQ ID NO: 1515216 - RNA, 19 nt, Artificial Sequence
  Description of Artificial Sequence: Synthetic oligonucleotide
  Sense strand starting at position 3785 of SEQ ID NO: 1244792
augcaaauggcuugaacuu

SEQ ID NO: 1515217 - RNA, 19 nt, Artificial Sequence
  Description of Artificial Sequence: Synthetic oligonucleotide
  Antisense strand to SEQ ID NO: 1515216
aaguucaagccauuugcau

SEQ ID NO: 1515218 - RNA, 19 nt, Artificial Sequence
  Description of Artificial Sequence: Synthetic oligonucleotide
  Sense strand starting at position 3786 of SEQ ID NO: 1244792
ugcaaauggcuugaacuuu

SEQ ID NO: 1515219 - RNA, 19 nt, Artificial Sequence
  Description of Artificial Sequence: Synthetic oligonucleotide
  Antisense strand to SEQ ID NO: 1515218
aaaguucaagccauuugca

SEQ ID NO: 1515220 - RNA, 19 nt, Artificial Sequence
  Description of Artificial Sequence: Synthetic oligonucleotide
  Sense strand starting at position 3857 of SEQ ID NO: 1244792
ugagauaauguaugguaaa

SEQ ID NO: 1515221 - RNA, 19 nt, Artificial Sequence
  Description of Artificial Sequence: Synthetic oligonucleotide
  Antisense strand to SEQ ID NO: 1515220
uuuaccauacauuaucuca

SEQ ID NO: 1515222 - RNA, 19 nt, Artificial Sequence
  Description of Artificial Sequence: Synthetic oligonucleotide
  Sense strand starting at position 24 of SEQ ID NO: 1244793
uguacaguucuaggguauu

SEQ ID NO: 1515223 - RNA, 19 nt, Artificial Sequence
  Description of Artificial Sequence: Synthetic oligonucleotide
  Antisense strand to SEQ ID NO: 1515222
aauacccuagaacuguaca

SEQ ID NO: 1515224 - RNA, 19 nt, Artificial Sequence
  Description of Artificial Sequence: Synthetic oligonucleotide
  Sense strand starting at position 205 of SEQ ID NO: 1244793
auagauagguaccucauau

SEQ ID NO: 1515225 - RNA, 19 nt, Artificial Sequence
  Description of Artificial Sequence: Synthetic oligonucleotide
  Antisense strand to SEQ ID NO: 1515224
auaugagguaccuaucuau

SEQ ID NO: 1515226 - RNA, 19 nt, Artificial Sequence
  Description of Artificial Sequence: Synthetic oligonucleotide
  Sense strand starting at position 310 of SEQ ID NO: 1244793
augucagacuccuuccuua

SEQ ID NO: 1515227 - RNA, 19 nt, Artificial Sequence
  Description of Artificial Sequence: Synthetic oligonucleotide
  Antisense strand to SEQ ID NO: 1515226
uaaggaaggagucugacau

SEQ ID NO: 1515228 - RNA, 19 nt, Artificial Sequence
  Description of Artificial Sequence: Synthetic oligonucleotide
  Sense strand starting at position 450 of SEQ ID NO: 1244793
acugguuaucagugucaga

SEQ ID NO: 1515229 - RNA, 19 nt, Artificial Sequence
  Description of Artificial Sequence: Synthetic oligonucleotide
  Antisense strand to SEQ ID NO: 1515228
ucugacacugauaaccagu

SEQ ID NO: 1515230 - RNA, 19 nt, Artificial Sequence
  Description of Artificial Sequence: Synthetic oligonucleotide
  Sense strand starting at position 650 of SEQ ID NO: 1244793
aaacgaguuuaauucgauu

SEQ ID NO: 1515231 - RNA, 19 nt, Artificial Sequence
  Description of Artificial Sequence: Synthetic oligonucleotide
  Antisense strand to SEQ ID NO: 1515230
aaucgaauuaaacucguuu

SEQ ID NO: 1515232 - RNA, 19 nt, Artificial Sequence
  Description of Artificial Sequence: Synthetic oligonucleotide
  Sense strand starting at position 663 of SEQ ID NO: 1244793
ucgauuugguaggauagga

SEQ ID NO: 1515233 - RNA, 19 nt, Artificial Sequence
  Description of Artificial Sequence: Synthetic oligonucleotide
  Antisense strand to SEQ ID NO: 1515232
uccuauccuaccaaaucga

SEQ ID NO: 1515234 - RNA, 19 nt, Artificial Sequence
  Description of Artificial Sequence: Synthetic oligonucleotide
  Sense strand starting at position 713 of SEQ ID NO: 1244793
uugugagauuaucuagaaa

SEQ ID NO: 1515235 - RNA, 19 nt, Artificial Sequence
  Description of Artificial Sequence: Synthetic oligonucleotide
  Antisense strand to SEQ ID NO: 1515234
uuucuagauaaucucacaa

SEQ ID NO: 1515236 - RNA, 19 nt, Artificial Sequence
  Description of Artificial Sequence: Synthetic oligonucleotide
  Sense strand starting at position 777 of SEQ ID NO: 1244793
aaguuucuguuguuggaca

SEQ ID NO: 1515237 - RNA, 19 nt, Artificial Sequence
  Description of Artificial Sequence: Synthetic oligonucleotide
  Antisense strand to SEQ ID NO: 1515236
uguccaacaacagaaacuu

SEQ ID NO: 1515238 - RNA, 19 nt, Artificial Sequence
  Description of Artificial Sequence: Synthetic oligonucleotide
  Sense strand starting at position 782 of SEQ ID NO: 1244793
ucuguuguuggacauuaaa

SEQ ID NO: 1515239 - RNA, 19 nt, Artificial Sequence
  Description of Artificial Sequence: Synthetic oligonucleotide
  Antisense strand to SEQ ID NO: 1515238
uuuaauguccaacaacaga

SEQ ID NO: 1515240 - RNA, 19 nt, Artificial Sequence
  Description of Artificial Sequence: Synthetic oligonucleotide
  Sense strand starting at position 862 of SEQ ID NO: 1244793
gcaggugacuccucugaag

SEQ ID NO: 1515241 - RNA, 19 nt, Artificial Sequence
  Description of Artificial Sequence: Synthetic oligonucleotide
  Antisense strand to SEQ ID NO: 1515240
cuucagaggagucaccugc

SEQ ID NO: 1515242 - RNA, 19 nt, Artificial Sequence
  Description of Artificial Sequence: Synthetic oligonucleotide
  Sense strand starting at position 989 of SEQ ID NO: 1244793
ucuacuugauaacugugaa

SEQ ID NO: 1515243 - RNA, 19 nt, Artificial Sequence
  Description of Artificial Sequence: Synthetic oligonucleotide
  Antisense strand to SEQ ID NO: 1515242
uucacaguuaucaaguaga

SEQ ID NO: 1515244 - RNA, 19 nt, Artificial Sequence
  Description of Artificial Sequence: Synthetic oligonucleotide
  Sense strand starting at position 992 of SEQ ID NO: 1244793
acuugauaacugugaagug

SEQ ID NO: 1515245 - RNA, 19 nt, Artificial Sequence
  Description of Artificial Sequence: Synthetic oligonucleotide
  Antisense strand to SEQ ID NO: 1515244
cacuucacaguuaucaagu

SEQ ID NO: 1515246 - RNA, 19 nt, Artificial Sequence
  Description of Artificial Sequence: Synthetic oligonucleotide
  Sense strand starting at position 1267 of SEQ ID NO: 1244793
uuuguaaaugguuagcaau

SEQ ID NO: 1515247 - RNA, 19 nt, Artificial Sequence
  Description of Artificial Sequence: Synthetic oligonucleotide
  Antisense strand to SEQ ID NO: 1515246
auugcuaaccauuuacaaa

SEQ ID NO: 1515248 - RNA, 19 nt, Artificial Sequence
  Description of Artificial Sequence: Synthetic oligonucleotide
  Sense strand starting at position 1522 of SEQ ID NO: 1244793
acuuuccgccuccaugaau

SEQ ID NO: 1515249 - RNA, 19 nt, Artificial Sequence
  Description of Artificial Sequence: Synthetic oligonucleotide
  Antisense strand to SEQ ID NO: 1515248
auucauggaggcggaaagu

SEQ ID NO: 1515250 - RNA, 19 nt, Artificial Sequence
  Description of Artificial Sequence: Synthetic oligonucleotide
  Sense strand starting at position 1722 of SEQ ID NO: 1244793
gguugauggcguucugcga

SEQ ID NO: 1515251 - RNA, 19 nt, Artificial Sequence
  Description of Artificial Sequence: Synthetic oligonucleotide
  Antisense strand to SEQ ID NO: 1515250
ucgcagaacgccaucaacc

SEQ ID NO: 1515252 - RNA, 19 nt, Artificial Sequence
  Description of Artificial Sequence: Synthetic oligonucleotide
  Sense strand starting at position 1728 of SEQ ID NO: 1244793
uggcguucugcgagaugac

SEQ ID NO: 1515253 - RNA, 19 nt, Artificial Sequence
  Description of Artificial Sequence: Synthetic oligonucleotide
  Antisense strand to SEQ ID NO: 1515252
gucaucucgcagaacgcca

SEQ ID NO: 1515254 - RNA, 19 nt, Artificial Sequence
  Description of Artificial Sequence: Synthetic oligonucleotide
  Sense strand starting at position 1746 of SEQ ID NO: 1244793
ccgcguuggcggagaagua

SEQ ID NO: 1515255 - RNA, 19 nt, Artificial Sequence
  Description of Artificial Sequence: Synthetic oligonucleotide
  Antisense strand to SEQ ID NO: 1515254
uacuucuccgccaacgcgg

SEQ ID NO: 1515256 - RNA, 19 nt, Artificial Sequence
  Description of Artificial Sequence: Synthetic oligonucleotide
  Sense strand starting at position 2263 of SEQ ID NO: 1244793
ucuuaaagauuggcucuau

SEQ ID NO: 1515257 - RNA, 19 nt, Artificial Sequence
  Description of Artificial Sequence: Synthetic oligonucleotide
  Antisense strand to SEQ ID NO: 1515256
auagagccaaucuuuaaga

SEQ ID NO: 1515258 - RNA, 19 nt, Artificial Sequence
  Description of Artificial Sequence: Synthetic oligonucleotide
  Sense strand starting at position 2264 of SEQ ID NO: 1244793
cuuaaagauuggcucuaua

SEQ ID NO: 1515259 - RNA, 19 nt, Artificial Sequence
  Description of Artificial Sequence: Synthetic oligonucleotide
  Antisense strand to SEQ ID NO: 1515258
uauagagccaaucuuuaag

SEQ ID NO: 1515260 - RNA, 19 nt, Artificial Sequence
  Description of Artificial Sequence: Synthetic oligonucleotide
  Sense strand starting at position 2321 of SEQ ID NO: 1244793
auguaaaggccauaaauuc

SEQ ID NO: 1515261 - RNA, 19 nt, Artificial Sequence
  Description of Artificial Sequence: Synthetic oligonucleotide
  Antisense strand to SEQ ID NO: 1515260
gaauuuauggccuuuacau

SEQ ID NO: 1515262 - RNA, 19 nt, Artificial Sequence
  Description of Artificial Sequence: Synthetic oligonucleotide
  Sense strand starting at position 2362 of SEQ ID NO: 1244793
agagacuuccuaugugauu

SEQ ID NO: 1515263 - RNA, 19 nt, Artificial Sequence
  Description of Artificial Sequence: Synthetic oligonucleotide
  Antisense strand to SEQ ID NO: 1515262
aaucacauaggaagucucu

SEQ ID NO: 1515264 - RNA, 19 nt, Artificial Sequence
  Description of Artificial Sequence: Synthetic oligonucleotide
  Sense strand starting at position 2371 of SEQ ID NO: 1244793
cuaugugauuuggaaauuc

SEQ ID NO: 1515265 - RNA, 19 nt, Artificial Sequence
  Description of Artificial Sequence: Synthetic oligonucleotide
  Antisense strand to SEQ ID NO: 1515264
gaauuuccaaaucacauag

SEQ ID NO: 1515266 - RNA, 19 nt, Artificial Sequence
  Description of Artificial Sequence: Synthetic oligonucleotide
  Sense strand starting at position 2467 of SEQ ID NO: 1244793
gauggaguuucugcuauug

SEQ ID NO: 1515267 - RNA, 19 nt, Artificial Sequence
  Description of Artificial Sequence: Synthetic oligonucleotide
  Antisense strand to SEQ ID NO: 1515266
caauagcagaaacuccauc

SEQ ID NO: 1515268 - RNA, 19 nt, Artificial Sequence
  Description of Artificial Sequence: Synthetic oligonucleotide
  Sense strand starting at position 2735 of SEQ ID NO: 1244793
cagggcucccggcaagauu

SEQ ID NO: 1515269 - RNA, 19 nt, Artificial Sequence
  Description of Artificial Sequence: Synthetic oligonucleotide
  Antisense strand to SEQ ID NO: 1515268
aaucuugccgggagcccug

SEQ ID NO: 1515270 - RNA, 19 nt, Artificial Sequence
  Description of Artificial Sequence: Synthetic oligonucleotide
  Sense strand starting at position 2768 of SEQ ID NO: 1244793
aguugaaguaauggucaaa

SEQ ID NO: 1515271 - RNA, 19 nt, Artificial Sequence
  Description of Artificial Sequence: Synthetic oligonucleotide
  Antisense strand to SEQ ID NO: 1515270
uuugaccauuacuucaacu

SEQ ID NO: 1515272 - RNA, 19 nt, Artificial Sequence
  Description of Artificial Sequence: Synthetic oligonucleotide
  Sense strand starting at position 2802 of SEQ ID NO: 1244793
uuagauugucgauaacauc

SEQ ID NO: 1515273 - RNA, 19 nt, Artificial Sequence
  Description of Artificial Sequence: Synthetic oligonucleotide
  Antisense strand to SEQ ID NO: 1515272
gauguuaucgacaaucuaa

SEQ ID NO: 1515274 - RNA, 19 nt, Artificial Sequence
  Description of Artificial Sequence: Synthetic oligonucleotide
  Sense strand starting at position 2820 of SEQ ID NO: 1244793
cuacuaauguuuguaagua

SEQ ID NO: 1515275 - RNA, 19 nt, Artificial Sequence
  Description of Artificial Sequence: Synthetic oligonucleotide
  Antisense strand to SEQ ID NO: 1515274
uacuuacaaacauuaguag

SEQ ID NO: 1515276 - RNA, 19 nt, Artificial Sequence
  Description of Artificial Sequence: Synthetic oligonucleotide
  Sense strand starting at position 2963 of SEQ ID NO: 1244793
aucucuugaaggugggauu

SEQ ID NO: 1515277 - RNA, 19 nt, Artificial Sequence
  Description of Artificial Sequence: Synthetic oligonucleotide
  Antisense strand to SEQ ID NO: 1515276
aaucccaccuucaagagau

SEQ ID NO: 1515278 - RNA, 19 nt, Artificial Sequence
  Description of Artificial Sequence: Synthetic oligonucleotide
  Sense strand starting at position 3096 of SEQ ID NO: 1244793
gaugaccucguuuauaaau

SEQ ID NO: 1515279 - RNA, 19 nt, Artificial Sequence
  Description of Artificial Sequence: Synthetic oligonucleotide
  Antisense strand to SEQ ID NO: 1515278
auuuauaaacgaggucauc

SEQ ID NO: 1515280 - RNA, 19 nt, Artificial Sequence
  Description of Artificial Sequence: Synthetic oligonucleotide
  Sense strand starting at position 3253 of SEQ ID NO: 1244793
gggaccagcucuuuguaaa

SEQ ID NO: 1515281 - RNA, 19 nt, Artificial Sequence
  Description of Artificial Sequence: Synthetic oligonucleotide
  Antisense strand to SEQ ID NO: 1515280
uuuacaaagagcugguccc

SEQ ID NO: 1515282 - RNA, 19 nt, Artificial Sequence
  Description of Artificial Sequence: Synthetic oligonucleotide
  Sense strand starting at position 3669 of SEQ ID NO: 1244793
uuauaaggucuaugccuaa

SEQ ID NO: 1515283 - RNA, 19 nt, Artificial Sequence
  Description of Artificial Sequence: Synthetic oligonucleotide
  Antisense strand to SEQ ID NO: 1515282
uuaggcauagaccuuauaa

SEQ ID NO: 1515284 - RNA, 19 nt, Artificial Sequence
  Description of Artificial Sequence: Synthetic oligonucleotide
  Sense strand starting at position 3691 of SEQ ID NO: 1244793
cagaauuacucguuaguug

SEQ ID NO: 1515285 - RNA, 19 nt, Artificial Sequence
  Description of Artificial Sequence: Synthetic oligonucleotide
  Antisense strand to SEQ ID NO: 1515284
caacuaacgaguaauucug

SEQ ID NO: 1515286 - RNA, 19 nt, Artificial Sequence
  Description of Artificial Sequence: Synthetic oligonucleotide
  Sense strand starting at position 3692 of SEQ ID NO: 1244793
agaauuacucguuaguuga

SEQ ID NO: 1515287 - RNA, 19 nt, Artificial Sequence
  Description of Artificial Sequence: Synthetic oligonucleotide
  Antisense strand to SEQ ID NO: 1515286
ucaacuaacgaguaauucu

SEQ ID NO: 1515288 - RNA, 19 nt, Artificial Sequence
  Description of Artificial Sequence: Synthetic oligonucleotide
  Sense strand starting at position 3694 of SEQ ID NO: 1244793
aauuacucguuaguugauu

SEQ ID NO: 1515289 - RNA, 19 nt, Artificial Sequence
  Description of Artificial Sequence: Synthetic oligonucleotide
  Antisense strand to SEQ ID NO: 1515288
aaucaacuaacgaguaauu

SEQ ID NO: 1515290 - RNA, 19 nt, Artificial Sequence
  Description of Artificial Sequence: Synthetic oligonucleotide
  Sense strand starting at position 3702 of SEQ ID NO: 1244793
guuaguugauucuucuaua

SEQ ID NO: 1515291 - RNA, 19 nt, Artificial Sequence
  Description of Artificial Sequence: Synthetic oligonucleotide
  Antisense strand to SEQ ID NO: 1515290
uauagaagaaucaacuaac

SEQ ID NO: 1515292 - RNA, 19 nt, Artificial Sequence
  Description of Artificial Sequence: Synthetic oligonucleotide
  Sense strand starting at position 3778 of SEQ ID NO: 1244793
uguaaagaguuaucuaagu

SEQ ID NO: 1515293 - RNA, 19 nt, Artificial Sequence
  Description of Artificial Sequence: Synthetic oligonucleotide
  Antisense strand to SEQ ID NO: 1515292
acuuagauaacucuuuaca

SEQ ID NO: 1515294 - RNA, 19 nt, Artificial Sequence
  Description of Artificial Sequence: Synthetic oligonucleotide
  Sense strand starting at position 3783 of SEQ ID NO: 1244793
agaguuaucuaaguuucug

SEQ ID NO: 1515295 - RNA, 19 nt, Artificial Sequence
  Description of Artificial Sequence: Synthetic oligonucleotide
  Antisense strand to SEQ ID NO: 1515294
cagaaacuuagauaacucu

SEQ ID NO: 1515296 - RNA, 19 nt, Artificial Sequence
  Description of Artificial Sequence: Synthetic oligonucleotide
  Sense strand starting at position 3787 of SEQ ID NO: 1244793
uuaucuaaguuucugagau

SEQ ID NO: 1515297 - RNA, 19 nt, Artificial Sequence
  Description of Artificial Sequence: Synthetic oligonucleotide
  Antisense strand to SEQ ID NO: 1515296
aucucagaaacuuagauaa

SEQ ID NO: 1515298 - RNA, 19 nt, Artificial Sequence
  Description of Artificial Sequence: Synthetic oligonucleotide
  Sense strand starting at position 3829 of SEQ ID NO: 1244793
guggcaagugaagaguuaa

SEQ ID NO: 1515299 - RNA, 19 nt, Artificial Sequence
  Description of Artificial Sequence: Synthetic oligonucleotide
  Antisense strand to SEQ ID NO: 1515298
uuaacucuucacuugccac

SEQ ID NO: 1515300 - RNA, 19 nt, Artificial Sequence
  Description of Artificial Sequence: Synthetic oligonucleotide
  Sense strand starting at position 3837 of SEQ ID NO: 1244793
ugaagaguuaacggaaggu

SEQ ID NO: 1515301 - RNA, 19 nt, Artificial Sequence
  Description of Artificial Sequence: Synthetic oligonucleotide
  Antisense strand to SEQ ID NO: 1515300
accuuccguuaacucuuca

SEQ ID NO: 1515302 - RNA, 19 nt, Artificial Sequence
  Description of Artificial Sequence: Synthetic oligonucleotide
  Sense strand starting at position 86 of SEQ ID NO: 1244794
aguuuauuugcaugacucu

SEQ ID NO: 1515303 - RNA, 19 nt, Artificial Sequence
  Description of Artificial Sequence: Synthetic oligonucleotide
  Antisense strand to SEQ ID NO: 1515302
agagucaugcaaauaaacu

SEQ ID NO: 1515304 - RNA, 19 nt, Artificial Sequence
  Description of Artificial Sequence: Synthetic oligonucleotide
  Sense strand starting at position 157 of SEQ ID NO: 1244794
gaguuuacuaguggaguga

SEQ ID NO: 1515305 - RNA, 19 nt, Artificial Sequence
  Description of Artificial Sequence: Synthetic oligonucleotide
  Antisense strand to SEQ ID NO: 1515304
ucacuccacuaguaaacuc

SEQ ID NO: 1515306 - RNA, 19 nt, Artificial Sequence
  Description of Artificial Sequence: Synthetic oligonucleotide
  Sense strand starting at position 158 of SEQ ID NO: 1244794
aguuuacuaguggagugaa

SEQ ID NO: 1515307 - RNA, 19 nt, Artificial Sequence
  Description of Artificial Sequence: Synthetic oligonucleotide
  Antisense strand to SEQ ID NO: 1515306
uucacuccacuaguaaacu

SEQ ID NO: 1515308 - RNA, 19 nt, Artificial Sequence
  Description of Artificial Sequence: Synthetic oligonucleotide
  Sense strand starting at position 161 of SEQ ID NO: 1244794
uuacuaguggagugaauua

SEQ ID NO: 1515309 - RNA, 19 nt, Artificial Sequence
  Description of Artificial Sequence: Synthetic oligonucleotide
  Antisense strand to SEQ ID NO: 1515308
uaauucacuccacuaguaa

SEQ ID NO: 1515310 - RNA, 19 nt, Artificial Sequence
  Description of Artificial Sequence: Synthetic oligonucleotide
  Sense strand starting at position 172 of SEQ ID NO: 1244794
gugaauuaagaagguuuga

SEQ ID NO: 1515311 - RNA, 19 nt, Artificial Sequence
  Description of Artificial Sequence: Synthetic oligonucleotide
  Antisense strand to SEQ ID NO: 1515310
ucaaaccuucuuaauucac

SEQ ID NO: 1515312 - RNA, 19 nt, Artificial Sequence
  Description of Artificial Sequence: Synthetic oligonucleotide
  Sense strand starting at position 193 of SEQ ID NO: 1244794
guauguuaaugacuuucca

SEQ ID NO: 1515313 - RNA, 19 nt, Artificial Sequence
  Description of Artificial Sequence: Synthetic oligonucleotide
  Antisense strand to SEQ ID NO: 1515312
uggaaagucauuaacauac

SEQ ID NO: 1515314 - RNA, 19 nt, Artificial Sequence
  Description of Artificial Sequence: Synthetic oligonucleotide
  Sense strand starting at position 314 of SEQ ID NO: 1244794
guacaaguauucucaaauc

SEQ ID NO: 1515315 - RNA, 19 nt, Artificial Sequence
  Description of Artificial Sequence: Synthetic oligonucleotide
  Antisense strand to SEQ ID NO: 1515314
gauuugagaauacuuguac

SEQ ID NO: 1515316 - RNA, 19 nt, Artificial Sequence
  Description of Artificial Sequence: Synthetic oligonucleotide
  Sense strand starting at position 374 of SEQ ID NO: 1244794
gcaggaauucuuuauacca

SEQ ID NO: 1515317 - RNA, 19 nt, Artificial Sequence
  Description of Artificial Sequence: Synthetic oligonucleotide
  Antisense strand to SEQ ID NO: 1515316
ugguauaaagaauuccugc

SEQ ID NO: 1515318 - RNA, 19 nt, Artificial Sequence
  Description of Artificial Sequence: Synthetic oligonucleotide
  Sense strand starting at position 791 of SEQ ID NO: 1244794
ugguacaguguuuauuaaa

SEQ ID NO: 1515319 - RNA, 19 nt, Artificial Sequence
  Description of Artificial Sequence: Synthetic oligonucleotide
  Antisense strand to SEQ ID NO: 1515318
uuuaauaaacacuguacca

SEQ ID NO: 1515320 - RNA, 19 nt, Artificial Sequence
  Description of Artificial Sequence: Synthetic oligonucleotide
  Sense strand starting at position 860 of SEQ ID NO: 1244794
aauuacaguucuguaggaa

SEQ ID NO: 1515321 - RNA, 19 nt, Artificial Sequence
  Description of Artificial Sequence: Synthetic oligonucleotide
  Antisense strand to SEQ ID NO: 1515320
uuccuacagaacuguaauu

SEQ ID NO: 1515322 - RNA, 19 nt, Artificial Sequence
  Description of Artificial Sequence: Synthetic oligonucleotide
  Sense strand starting at position 863 of SEQ ID NO: 1244794
uacaguucuguaggaaguu

SEQ ID NO: 1515323 - RNA, 19 nt, Artificial Sequence
  Description of Artificial Sequence: Synthetic oligonucleotide
  Antisense strand to SEQ ID NO: 1515322
aacuuccuacagaacugua

SEQ ID NO: 1515324 - RNA, 19 nt, Artificial Sequence
  Description of Artificial Sequence: Synthetic oligonucleotide
  Sense strand starting at position 1193 of SEQ ID NO: 1244794
gagcaaugaguguaaggca

SEQ ID NO: 1515325 - RNA, 19 nt, Artificial Sequence
  Description of Artificial Sequence: Synthetic oligonucleotide
  Antisense strand to SEQ ID NO: 1515324
ugccuuacacucauugcuc

SEQ ID NO: 1515326 - RNA, 19 nt, Artificial Sequence
  Description of Artificial Sequence: Synthetic oligonucleotide
  Sense strand starting at position 1198 of SEQ ID NO: 1244794
augaguguaaggcauaaau

SEQ ID NO: 1515327 - RNA, 19 nt, Artificial Sequence
  Description of Artificial Sequence: Synthetic oligonucleotide
  Antisense strand to SEQ ID NO: 1515326
auuuaugccuuacacucau

SEQ ID NO: 1515328 - RNA, 19 nt, Artificial Sequence
  Description of Artificial Sequence: Synthetic oligonucleotide
  Sense strand starting at position 1200 of SEQ ID NO: 1244794
gaguguaaggcauaaauau

SEQ ID NO: 1515329 - RNA, 19 nt, Artificial Sequence
  Description of Artificial Sequence: Synthetic oligonucleotide
  Antisense strand to SEQ ID NO: 1515328
auauuuaugccuuacacuc

SEQ ID NO: 1515330 - RNA, 19 nt, Artificial Sequence
  Description of Artificial Sequence: Synthetic oligonucleotide
  Sense strand starting at position 1209 of SEQ ID NO: 1244794
gcauaaauaucuguaagac

SEQ ID NO: 1515331 - RNA, 19 nt, Artificial Sequence
  Description of Artificial Sequence: Synthetic oligonucleotide
  Antisense strand to SEQ ID NO: 1515330
gucuuacagauauuuaugc

SEQ ID NO: 1515332 - RNA, 19 nt, Artificial Sequence
  Description of Artificial Sequence: Synthetic oligonucleotide
  Sense strand starting at position 1215 of SEQ ID NO: 1244794
auaucuguaagacggaaau

SEQ ID NO: 1515333 - RNA, 19 nt, Artificial Sequence
  Description of Artificial Sequence: Synthetic oligonucleotide
  Antisense strand to SEQ ID NO: 1515332
auuuccgucuuacagauau

SEQ ID NO: 1515334 - RNA, 19 nt, Artificial Sequence
  Description of Artificial Sequence: Synthetic oligonucleotide
  Sense strand starting at position 1488 of SEQ ID NO: 1244794
uaugaaaugguguggguaa

SEQ ID NO: 1515335 - RNA, 19 nt, Artificial Sequence
  Description of Artificial Sequence: Synthetic oligonucleotide
  Antisense strand to SEQ ID NO: 1515334
uuacccacaccauuucaua

SEQ ID NO: 1515336 - RNA, 19 nt, Artificial Sequence
  Description of Artificial Sequence: Synthetic oligonucleotide
  Sense strand starting at position 1490 of SEQ ID NO: 1244794
ugaaaugguguggguaaga

SEQ ID NO: 1515337 - RNA, 19 nt, Artificial Sequence
  Description of Artificial Sequence: Synthetic oligonucleotide
  Antisense strand to SEQ ID NO: 1515336
ucuuacccacaccauuuca

SEQ ID NO: 1515338 - RNA, 19 nt, Artificial Sequence
  Description of Artificial Sequence: Synthetic oligonucleotide
  Sense strand starting at position 1507 of SEQ ID NO: 1244794
gagauguggguguggguaa

SEQ ID NO: 1515339 - RNA, 19 nt, Artificial Sequence
  Description of Artificial Sequence: Synthetic oligonucleotide
  Antisense strand to SEQ ID NO: 1515338
uuacccacacccacaucuc

SEQ ID NO: 1515340 - RNA, 19 nt, Artificial Sequence
  Description of Artificial Sequence: Synthetic oligonucleotide
  Sense strand starting at position 2715 of SEQ ID NO: 1244794
uccguuugauacccuggaa

SEQ ID NO: 1515341 - RNA, 19 nt, Artificial Sequence
  Description of Artificial Sequence: Synthetic oligonucleotide
  Antisense strand to SEQ ID NO: 1515340
uuccaggguaucaaacgga

SEQ ID NO: 1515342 - RNA, 19 nt, Artificial Sequence
  Description of Artificial Sequence: Synthetic oligonucleotide
  Sense strand starting at position 2718 of SEQ ID NO: 1244794
guuugauacccuggaaagg

SEQ ID NO: 1515343 - RNA, 19 nt, Artificial Sequence
  Description of Artificial Sequence: Synthetic oligonucleotide
  Antisense strand to SEQ ID NO: 1515342
ccuuuccaggguaucaaac

SEQ ID NO: 1515344 - RNA, 19 nt, Artificial Sequence
  Description of Artificial Sequence: Synthetic oligonucleotide
  Sense strand starting at position 2727 of SEQ ID NO: 1244794
ccuggaaagguuuguggua

SEQ ID NO: 1515345 - RNA, 19 nt, Artificial Sequence
  Description of Artificial Sequence: Synthetic oligonucleotide
  Antisense strand to SEQ ID NO: 1515344
uaccacaaaccuuuccagg

SEQ ID NO: 1515346 - RNA, 19 nt, Artificial Sequence
  Description of Artificial Sequence: Synthetic oligonucleotide
  Sense strand starting at position 2759 of SEQ ID NO: 1244794
ucuauugccugucuaaaga

SEQ ID NO: 1515347 - RNA, 19 nt, Artificial Sequence
  Description of Artificial Sequence: Synthetic oligonucleotide
  Antisense strand to SEQ ID NO: 1515346
ucuuuagacaggcaauaga

SEQ ID NO: 1515348 - RNA, 19 nt, Artificial Sequence
  Description of Artificial Sequence: Synthetic oligonucleotide
  Sense strand starting at position 2908 of SEQ ID NO: 1244794
aggauuugcucguuaagcu

SEQ ID NO: 1515349 - RNA, 19 nt, Artificial Sequence
  Description of Artificial Sequence: Synthetic oligonucleotide
  Antisense strand to SEQ ID NO: 1515348
agcuuaacgagcaaauccu

SEQ ID NO: 1515350 - RNA, 19 nt, Artificial Sequence
  Description of Artificial Sequence: Synthetic oligonucleotide
  Sense strand starting at position 2909 of SEQ ID NO: 1244794
ggauuugcucguuaagcuu

SEQ ID NO: 1515351 - RNA, 19 nt, Artificial Sequence
  Description of Artificial Sequence: Synthetic oligonucleotide
  Antisense strand to SEQ ID NO: 1515350
aagcuuaacgagcaaaucc

SEQ ID NO: 1515352 - RNA, 19 nt, Artificial Sequence
  Description of Artificial Sequence: Synthetic oligonucleotide
  Sense strand starting at position 3016 of SEQ ID NO: 1244794
ggguaaauugucugcagaa

SEQ ID NO: 1515353 - RNA, 19 nt, Artificial Sequence
  Description of Artificial Sequence: Synthetic oligonucleotide
  Antisense strand to SEQ ID NO: 1515352
uucugcagacaauuuaccc

SEQ ID NO: 1515354 - RNA, 19 nt, Artificial Sequence
  Description of Artificial Sequence: Synthetic oligonucleotide
  Sense strand starting at position 3017 of SEQ ID NO: 1244794
gguaaauugucugcagaac

SEQ ID NO: 1515355 - RNA, 19 nt, Artificial Sequence
  Description of Artificial Sequence: Synthetic oligonucleotide
  Antisense strand to SEQ ID NO: 1515354
guucugcagacaauuuacc

SEQ ID NO: 1515356 - RNA, 19 nt, Artificial Sequence
  Description of Artificial Sequence: Synthetic oligonucleotide
  Sense strand starting at position 3018 of SEQ ID NO: 1244794
guaaauugucugcagaaca

SEQ ID NO: 1515357 - RNA, 19 nt, Artificial Sequence
  Description of Artificial Sequence: Synthetic oligonucleotide
  Antisense strand to SEQ ID NO: 1515356
uguucugcagacaauuuac

SEQ ID NO: 1515358 - RNA, 19 nt, Artificial Sequence
  Description of Artificial Sequence: Synthetic oligonucleotide
  Sense strand starting at position 3134 of SEQ ID NO: 1244794
ggcuauuucucagcuugag

SEQ ID NO: 1515359 - RNA, 19 nt, Artificial Sequence
  Description of Artificial Sequence: Synthetic oligonucleotide
  Antisense strand to SEQ ID NO: 1515358
cucaagcugagaaauagcc

SEQ ID NO: 1515360 - RNA, 19 nt, Artificial Sequence
  Description of Artificial Sequence: Synthetic oligonucleotide
  Sense strand starting at position 3151 of SEQ ID NO: 1244794
aguggaugagcugguaaau

SEQ ID NO: 1515361 - RNA, 19 nt, Artificial Sequence
  Description of Artificial Sequence: Synthetic oligonucleotide
  Antisense strand to SEQ ID NO: 1515360
auuuaccagcucauccacu

SEQ ID NO: 1515362 - RNA, 19 nt, Artificial Sequence
  Description of Artificial Sequence: Synthetic oligonucleotide
  Sense strand starting at position 3163 of SEQ ID NO: 1244794
gguaaauaccaccguacau

SEQ ID NO: 1515363 - RNA, 19 nt, Artificial Sequence
  Description of Artificial Sequence: Synthetic oligonucleotide
  Antisense strand to SEQ ID NO: 1515362
auguacggugguauuuacc

SEQ ID NO: 1515364 - RNA, 19 nt, Artificial Sequence
  Description of Artificial Sequence: Synthetic oligonucleotide
  Sense strand starting at position 3211 of SEQ ID NO: 1244794
ggaguuugcaguuauuaaa

SEQ ID NO: 1515365 - RNA, 19 nt, Artificial Sequence
  Description of Artificial Sequence: Synthetic oligonucleotide
  Antisense strand to SEQ ID NO: 1515364
uuuaauaacugcaaacucc

SEQ ID NO: 1515366 - RNA, 19 nt, Artificial Sequence
  Description of Artificial Sequence: Synthetic oligonucleotide
  Sense strand starting at position 3325 of SEQ ID NO: 1244794
gguuaaacgccacaagagu

SEQ ID NO: 1515367 - RNA, 19 nt, Artificial Sequence
  Description of Artificial Sequence: Synthetic oligonucleotide
  Antisense strand to SEQ ID NO: 1515366
acucuuguggcguuuaacc

SEQ ID NO: 1515368 - RNA, 19 nt, Artificial Sequence
  Description of Artificial Sequence: Synthetic oligonucleotide
  Sense strand starting at position 3375 of SEQ ID NO: 1244794
ggcccugugguugaaauaa

SEQ ID NO: 1515369 - RNA, 19 nt, Artificial Sequence
  Description of Artificial Sequence: Synthetic oligonucleotide
  Antisense strand to SEQ ID NO: 1515368
uuauuucaaccacagggcc

SEQ ID NO: 1515370 - RNA, 19 nt, Artificial Sequence
  Description of Artificial Sequence: Synthetic oligonucleotide
  Sense strand starting at position 3445 of SEQ ID NO: 1244794
caguccuauguagagugua

SEQ ID NO: 1515371 - RNA, 19 nt, Artificial Sequence
  Description of Artificial Sequence: Synthetic oligonucleotide
  Antisense strand to SEQ ID NO: 1515370
uacacucuacauaggacug

SEQ ID NO: 1515372 - RNA, 19 nt, Artificial Sequence
  Description of Artificial Sequence: Synthetic oligonucleotide
  Sense strand starting at position 3455 of SEQ ID NO: 1244794
uagaguguagugcagagaa

SEQ ID NO: 1515373 - RNA, 19 nt, Artificial Sequence
  Description of Artificial Sequence: Synthetic oligonucleotide
  Antisense strand to SEQ ID NO: 1515372
uucucugcacuacacucua

SEQ ID NO: 1515374 - RNA, 19 nt, Artificial Sequence
  Description of Artificial Sequence: Synthetic oligonucleotide
  Sense strand starting at position 3579 of SEQ ID NO: 1244794
cccagagcuccguaguaaa

SEQ ID NO: 1515375 - RNA, 19 nt, Artificial Sequence
  Description of Artificial Sequence: Synthetic oligonucleotide
  Antisense strand to SEQ ID NO: 1515374
uuuacuacggagcucuggg

SEQ ID NO: 1515376 - RNA, 19 nt, Artificial Sequence
  Description of Artificial Sequence: Synthetic oligonucleotide
  Sense strand starting at position 3725 of SEQ ID NO: 1244794
auauaugugcuuuaugaac

SEQ ID NO: 1515377 - RNA, 19 nt, Artificial Sequence
  Description of Artificial Sequence: Synthetic oligonucleotide
  Antisense strand to SEQ ID NO: 1515376
guucauaaagcacauauau

SEQ ID NO: 1515378 - RNA, 19 nt, Artificial Sequence
  Description of Artificial Sequence: Synthetic oligonucleotide
  Sense strand starting at position 3973 of SEQ ID NO: 1244794
augcaaauggcuugaacuu

SEQ ID NO: 1515379 - RNA, 19 nt, Artificial Sequence
  Description of Artificial Sequence: Synthetic oligonucleotide
  Antisense strand to SEQ ID NO: 1515378
aaguucaagccauuugcau

SEQ ID NO: 1515380 - RNA, 19 nt, Artificial Sequence
  Description of Artificial Sequence: Synthetic oligonucleotide
  Sense strand starting at position 3974 of SEQ ID NO: 1244794
ugcaaauggcuugaacuuu

SEQ ID NO: 1515381 - RNA, 19 nt, Artificial Sequence
  Description of Artificial Sequence: Synthetic oligonucleotide
  Antisense strand to SEQ ID NO: 1515380
aaaguucaagccauuugca

SEQ ID NO: 1515382 - RNA, 19 nt, Artificial Sequence
  Description of Artificial Sequence: Synthetic oligonucleotide
  Sense strand starting at position 9 of SEQ ID NO: 1244795
uccaaugucugaguaacac

SEQ ID NO: 1515383 - RNA, 19 nt, Artificial Sequence
  Description of Artificial Sequence: Synthetic oligonucleotide
  Antisense strand to SEQ ID NO: 1515382
guguuacucagacauugga

SEQ ID NO: 1515384 - RNA, 19 nt, Artificial Sequence
  Description of Artificial Sequence: Synthetic oligonucleotide
  Sense strand starting at position 126 of SEQ ID NO: 1244795
agcccuaacucggucauuu

SEQ ID NO: 1515385 - RNA, 19 nt, Artificial Sequence
  Description of Artificial Sequence: Synthetic oligonucleotide
  Antisense strand to SEQ ID NO: 1515384
aaaugaccgaguuagggcu

SEQ ID NO: 1515386 - RNA, 19 nt, Artificial Sequence
  Description of Artificial Sequence: Synthetic oligonucleotide
  Sense strand starting at position 147 of SEQ ID NO: 1244795
acuggaguuugagucaaca

SEQ ID NO: 1515387 - RNA, 19 nt, Artificial Sequence
  Description of Artificial Sequence: Synthetic oligonucleotide
  Antisense strand to SEQ ID NO: 1515386
uguugacucaaacuccagu

SEQ ID NO: 1515388 - RNA, 19 nt, Artificial Sequence
  Description of Artificial Sequence: Synthetic oligonucleotide
  Sense strand starting at position 167 of SEQ ID NO: 1244795
gacagaauugcuuaauggu

SEQ ID NO: 1515389 - RNA, 19 nt, Artificial Sequence
  Description of Artificial Sequence: Synthetic oligonucleotide
  Antisense strand to SEQ ID NO: 1515388
accauuaagcaauucuguc

SEQ ID NO: 1515390 - RNA, 19 nt, Artificial Sequence
  Description of Artificial Sequence: Synthetic oligonucleotide
  Sense strand starting at position 322 of SEQ ID NO: 1244795
cgcuuaaggucuuccagag

SEQ ID NO: 1515391 - RNA, 19 nt, Artificial Sequence
  Description of Artificial Sequence: Synthetic oligonucleotide
  Antisense strand to SEQ ID NO: 1515390
cucuggaagaccuuaagcg

SEQ ID NO: 1515392 - RNA, 19 nt, Artificial Sequence
  Description of Artificial Sequence: Synthetic oligonucleotide
  Sense strand starting at position 386 of SEQ ID NO: 1244795
ggcagacaauucuagauga

SEQ ID NO: 1515393 - RNA, 19 nt, Artificial Sequence
  Description of Artificial Sequence: Synthetic oligonucleotide
  Antisense strand to SEQ ID NO: 1515392
ucaucuagaauugucugcc

SEQ ID NO: 1515394 - RNA, 19 nt, Artificial Sequence
  Description of Artificial Sequence: Synthetic oligonucleotide
  Sense strand starting at position 400 of SEQ ID NO: 1244795
gaugaauugugguuaaauu

SEQ ID NO: 1515395 - RNA, 19 nt, Artificial Sequence
  Description of Artificial Sequence: Synthetic oligonucleotide
  Antisense strand to SEQ ID NO: 1515394
aauuuaaccacaauucauc

SEQ ID NO: 1515396 - RNA, 19 nt, Artificial Sequence
  Description of Artificial Sequence: Synthetic oligonucleotide
  Sense strand starting at position 463 of SEQ ID NO: 1244795
gcccaagaauuguuagaug

SEQ ID NO: 1515397 - RNA, 19 nt, Artificial Sequence
  Description of Artificial Sequence: Synthetic oligonucleotide
  Antisense strand to SEQ ID NO: 1515396
caucuaacaauucuugggc

SEQ ID NO: 1515398 - RNA, 19 nt, Artificial Sequence
  Description of Artificial Sequence: Synthetic oligonucleotide
  Sense strand starting at position 468 of SEQ ID NO: 1244795
agaauuguuagaugcugga

SEQ ID NO: 1515399 - RNA, 19 nt, Artificial Sequence
  Description of Artificial Sequence: Synthetic oligonucleotide
  Antisense strand to SEQ ID NO: 1515398
uccagcaucuaacaauucu

SEQ ID NO: 1515400 - RNA, 19 nt, Artificial Sequence
  Description of Artificial Sequence: Synthetic oligonucleotide
  Sense strand starting at position 472 of SEQ ID NO: 1244795
uuguuagaugcuggaaaug

SEQ ID NO: 1515401 - RNA, 19 nt, Artificial Sequence
  Description of Artificial Sequence: Synthetic oligonucleotide
  Antisense strand to SEQ ID NO: 1515400
cauuuccagcaucuaacaa

SEQ ID NO: 1515402 - RNA, 19 nt, Artificial Sequence
  Description of Artificial Sequence: Synthetic oligonucleotide
  Sense strand starting at position 495 of SEQ ID NO: 1244795
gugguugguuuccucugaa

SEQ ID NO: 1515403 - RNA, 19 nt, Artificial Sequence
  Description of Artificial Sequence: Synthetic oligonucleotide
  Antisense strand to SEQ ID NO: 1515402
uucagaggaaaccaaccac

SEQ ID NO: 1515404 - RNA, 19 nt, Artificial Sequence
  Description of Artificial Sequence: Synthetic oligonucleotide
  Sense strand starting at position 498 of SEQ ID NO: 1244795
guugguuuccucugaacca

SEQ ID NO: 1515405 - RNA, 19 nt, Artificial Sequence
  Description of Artificial Sequence: Synthetic oligonucleotide
  Antisense strand to SEQ ID NO: 1515404
ugguucagaggaaaccaac

SEQ ID NO: 1515406 - RNA, 19 nt, Artificial Sequence
  Description of Artificial Sequence: Synthetic oligonucleotide
  Sense strand starting at position 684 of SEQ ID NO: 1244795
ccaucauguuucccgcauu

SEQ ID NO: 1515407 - RNA, 19 nt, Artificial Sequence
  Description of Artificial Sequence: Synthetic oligonucleotide
  Antisense strand to SEQ ID NO: 1515406
aaugcgggaaacaugaugg

SEQ ID NO: 1515408 - RNA, 19 nt, Artificial Sequence
  Description of Artificial Sequence: Synthetic oligonucleotide
  Sense strand starting at position 1408 of SEQ ID NO: 1244795
gucgcagcuaccugaaauc

SEQ ID NO: 1515409 - RNA, 19 nt, Artificial Sequence
  Description of Artificial Sequence: Synthetic oligonucleotide
  Antisense strand to SEQ ID NO: 1515408
gauuucagguagcugcgac

SEQ ID NO: 1515410 - RNA, 19 nt, Artificial Sequence
  Description of Artificial Sequence: Synthetic oligonucleotide
  Sense strand starting at position 1417 of SEQ ID NO: 1244795
accugaaaucucgggcuaa

SEQ ID NO: 1515411 - RNA, 19 nt, Artificial Sequence
  Description of Artificial Sequence: Synthetic oligonucleotide
  Antisense strand to SEQ ID NO: 1515410
uuagcccgagauuucaggu

SEQ ID NO: 1515412 - RNA, 19 nt, Artificial Sequence
  Description of Artificial Sequence: Synthetic oligonucleotide
  Sense strand starting at position 2237 of SEQ ID NO: 1244795
cggucuccucaagacucau

SEQ ID NO: 1515413 - RNA, 19 nt, Artificial Sequence
  Description of Artificial Sequence: Synthetic oligonucleotide
  Antisense strand to SEQ ID NO: 1515412
augagucuugaggagaccg

SEQ ID NO: 1515414 - RNA, 19 nt, Artificial Sequence
  Description of Artificial Sequence: Synthetic oligonucleotide
  Sense strand starting at position 2352 of SEQ ID NO: 1244795
gacuuauaccgggaccucu

SEQ ID NO: 1515415 - RNA, 19 nt, Artificial Sequence
  Description of Artificial Sequence: Synthetic oligonucleotide
  Antisense strand to SEQ ID NO: 1515414
agaggucccgguauaaguc

SEQ ID NO: 1515416 - RNA, 19 nt, Artificial Sequence
  Description of Artificial Sequence: Synthetic oligonucleotide
  Sense strand starting at position 2360 of SEQ ID NO: 1244795
ccgggaccucugugauuuc

SEQ ID NO: 1515417 - RNA, 19 nt, Artificial Sequence
  Description of Artificial Sequence: Synthetic oligonucleotide
  Antisense strand to SEQ ID NO: 1515416
gaaaucacagaggucccgg

SEQ ID NO: 1515418 - RNA, 19 nt, Artificial Sequence
  Description of Artificial Sequence: Synthetic oligonucleotide
  Sense strand starting at position 2393 of SEQ ID NO: 1244795
uuagcaaagcuguguuuac

SEQ ID NO: 1515419 - RNA, 19 nt, Artificial Sequence
  Description of Artificial Sequence: Synthetic oligonucleotide
  Antisense strand to SEQ ID NO: 1515418
guaaacacagcuuugcuaa

SEQ ID NO: 1515420 - RNA, 19 nt, Artificial Sequence
  Description of Artificial Sequence: Synthetic oligonucleotide
  Sense strand starting at position 2546 of SEQ ID NO: 1244795
aguccuaggagccaucaga

SEQ ID NO: 1515421 - RNA, 19 nt, Artificial Sequence
  Description of Artificial Sequence: Synthetic oligonucleotide
  Antisense strand to SEQ ID NO: 1515420
ucugauggcuccuaggacu

SEQ ID NO: 1515422 - RNA, 19 nt, Artificial Sequence
  Description of Artificial Sequence: Synthetic oligonucleotide
  Sense strand starting at position 2735 of SEQ ID NO: 1244795
gugggagucgcauggaguu

SEQ ID NO: 1515423 - RNA, 19 nt, Artificial Sequence
  Description of Artificial Sequence: Synthetic oligonucleotide
  Antisense strand to SEQ ID NO: 1515422
aacuccaugcgacucccac

SEQ ID NO: 1515424 - RNA, 19 nt, Artificial Sequence
  Description of Artificial Sequence: Synthetic oligonucleotide
  Sense strand starting at position 3065 of SEQ ID NO: 1244795
auagaugagugacauggaa

SEQ ID NO: 1515425 - RNA, 19 nt, Artificial Sequence
  Description of Artificial Sequence: Synthetic oligonucleotide
  Antisense strand to SEQ ID NO: 1515424
uuccaugucacucaucuau

SEQ ID NO: 1515426 - RNA, 19 nt, Artificial Sequence
  Description of Artificial Sequence: Synthetic oligonucleotide
  Sense strand starting at position 3187 of SEQ ID NO: 1244795
cucugagacguuggucaug

SEQ ID NO: 1515427 - RNA, 19 nt, Artificial Sequence
  Description of Artificial Sequence: Synthetic oligonucleotide
  Antisense strand to SEQ ID NO: 1515426
caugaccaacgucucagag

SEQ ID NO: 1515428 - RNA, 19 nt, Artificial Sequence
  Description of Artificial Sequence: Synthetic oligonucleotide
  Sense strand starting at position 3189 of SEQ ID NO: 1244795
cugagacguuggucaugau

SEQ ID NO: 1515429 - RNA, 19 nt, Artificial Sequence
  Description of Artificial Sequence: Synthetic oligonucleotide
  Antisense strand to SEQ ID NO: 1515428
aucaugaccaacgucucag

SEQ ID NO: 1515430 - RNA, 19 nt, Artificial Sequence
  Description of Artificial Sequence: Synthetic oligonucleotide
  Sense strand starting at position 3190 of SEQ ID NO: 1244795
ugagacguuggucaugaua

SEQ ID NO: 1515431 - RNA, 19 nt, Artificial Sequence
  Description of Artificial Sequence: Synthetic oligonucleotide
  Antisense strand to SEQ ID NO: 1515430
uaucaugaccaacgucuca

SEQ ID NO: 1515432 - RNA, 19 nt, Artificial Sequence
  Description of Artificial Sequence: Synthetic oligonucleotide
  Sense strand starting at position 3211 of SEQ ID NO: 1244795
gcuuaaaucuuggcauccu

SEQ ID NO: 1515433 - RNA, 19 nt, Artificial Sequence
  Description of Artificial Sequence: Synthetic oligonucleotide
  Antisense strand to SEQ ID NO: 1515432
aggaugccaagauuuaagc

SEQ ID NO: 1515434 - RNA, 19 nt, Artificial Sequence
  Description of Artificial Sequence: Synthetic oligonucleotide
  Sense strand starting at position 3257 of SEQ ID NO: 1244795
cugcaauugccuuaaguuc

SEQ ID NO: 1515435 - RNA, 19 nt, Artificial Sequence
  Description of Artificial Sequence: Synthetic oligonucleotide
  Antisense strand to SEQ ID NO: 1515434
gaacuuaaggcaauugcag

SEQ ID NO: 1515436 - RNA, 19 nt, Artificial Sequence
  Description of Artificial Sequence: Synthetic oligonucleotide
  Sense strand starting at position 3266 of SEQ ID NO: 1244795
ccuuaaguuccaggaguca

SEQ ID NO: 1515437 - RNA, 19 nt, Artificial Sequence
  Description of Artificial Sequence: Synthetic oligonucleotide
  Antisense strand to SEQ ID NO: 1515436
ugacuccuggaacuuaagg

SEQ ID NO: 1515438 - RNA, 19 nt, Artificial Sequence
  Description of Artificial Sequence: Synthetic oligonucleotide
  Sense strand starting at position 3305 of SEQ ID NO: 1244795
uuuagacauguguaugcaa

SEQ ID NO: 1515439 - RNA, 19 nt, Artificial Sequence
  Description of Artificial Sequence: Synthetic oligonucleotide
  Antisense strand to SEQ ID NO: 1515438
uugcauacacaugucuaaa

SEQ ID NO: 1515440 - RNA, 19 nt, Artificial Sequence
  Description of Artificial Sequence: Synthetic oligonucleotide
  Sense strand starting at position 3307 of SEQ ID NO: 1244795
uagacauguguaugcaagu

SEQ ID NO: 1515441 - RNA, 19 nt, Artificial Sequence
  Description of Artificial Sequence: Synthetic oligonucleotide
  Antisense strand to SEQ ID NO: 1515440
acuugcauacacaugucua

SEQ ID NO: 1515442 - RNA, 19 nt, Artificial Sequence
  Description of Artificial Sequence: Synthetic oligonucleotide
  Sense strand starting at position 3339 of SEQ ID NO: 1244795
uggcuagcucacuggaaga

SEQ ID NO: 1515443 - RNA, 19 nt, Artificial Sequence
  Description of Artificial Sequence: Synthetic oligonucleotide
  Antisense strand to SEQ ID NO: 1515442
ucuuccagugagcuagcca

SEQ ID NO: 1515444 - RNA, 19 nt, Artificial Sequence
  Description of Artificial Sequence: Synthetic oligonucleotide
  Sense strand starting at position 3420 of SEQ ID NO: 1244795
gagggcaucguggaauugu

SEQ ID NO: 1515445 - RNA, 19 nt, Artificial Sequence
  Description of Artificial Sequence: Synthetic oligonucleotide
  Antisense strand to SEQ ID NO: 1515444
acaauuccacgaugcccuc

SEQ ID NO: 1515446 - RNA, 19 nt, Artificial Sequence
  Description of Artificial Sequence: Synthetic oligonucleotide
  Sense strand starting at position 3508 of SEQ ID NO: 1244795
ccaguaaucugacugguuu

SEQ ID NO: 1515447 - RNA, 19 nt, Artificial Sequence
  Description of Artificial Sequence: Synthetic oligonucleotide
  Antisense strand to SEQ ID NO: 1515446
aaaccagucagauuacugg

SEQ ID NO: 1515448 - RNA, 19 nt, Artificial Sequence
  Description of Artificial Sequence: Synthetic oligonucleotide
  Sense strand starting at position 3509 of SEQ ID NO: 1244795
caguaaucugacugguuuc

SEQ ID NO: 1515449 - RNA, 19 nt, Artificial Sequence
  Description of Artificial Sequence: Synthetic oligonucleotide
  Antisense strand to SEQ ID NO: 1515448
gaaaccagucagauuacug

SEQ ID NO: 1515450 - RNA, 19 nt, Artificial Sequence
  Description of Artificial Sequence: Synthetic oligonucleotide
  Sense strand starting at position 3645 of SEQ ID NO: 1244795
agcagaguccgagaugaug

SEQ ID NO: 1515451 - RNA, 19 nt, Artificial Sequence
  Description of Artificial Sequence: Synthetic oligonucleotide
  Antisense strand to SEQ ID NO: 1515450
caucaucucggacucugcu

SEQ ID NO: 1515452 - RNA, 19 nt, Artificial Sequence
  Description of Artificial Sequence: Synthetic oligonucleotide
  Sense strand starting at position 3798 of SEQ ID NO: 1244795
gcugaaagaaguggaugau

SEQ ID NO: 1515453 - RNA, 19 nt, Artificial Sequence
  Description of Artificial Sequence: Synthetic oligonucleotide
  Antisense strand to SEQ ID NO: 1515452
aucauccacuucuuucagc

SEQ ID NO: 1515454 - RNA, 19 nt, Artificial Sequence
  Description of Artificial Sequence: Synthetic oligonucleotide
  Sense strand starting at position 3840 of SEQ ID NO: 1244795
ggaggauguugacucuacu

SEQ ID NO: 1515455 - RNA, 19 nt, Artificial Sequence
  Description of Artificial Sequence: Synthetic oligonucleotide
  Antisense strand to SEQ ID NO: 1515454
aguagagucaacauccucc

SEQ ID NO: 1515456 - RNA, 19 nt, Artificial Sequence
  Description of Artificial Sequence: Synthetic oligonucleotide
  Sense strand starting at position 3843 of SEQ ID NO: 1244795
ggauguugacucuacugca

SEQ ID NO: 1515457 - RNA, 19 nt, Artificial Sequence
  Description of Artificial Sequence: Synthetic oligonucleotide
  Antisense strand to SEQ ID NO: 1515456
ugcaguagagucaacaucc

SEQ ID NO: 1515458 - RNA, 19 nt, Artificial Sequence
  Description of Artificial Sequence: Synthetic oligonucleotide
  Sense strand starting at position 3861 of SEQ ID NO: 1244795
agagccauguccucaauga

SEQ ID NO: 1515459 - RNA, 19 nt, Artificial Sequence
  Description of Artificial Sequence: Synthetic oligonucleotide
  Antisense strand to SEQ ID NO: 1515458
ucauugaggacauggcucu

SEQ ID NO: 1515460 - RNA, 19 nt, Artificial Sequence
  Description of Artificial Sequence: Synthetic oligonucleotide
  Sense strand starting at position 3877 of SEQ ID NO: 1244795
ugagaaccuccuugugcuu

SEQ ID NO: 1515461 - RNA, 19 nt, Artificial Sequence
  Description of Artificial Sequence: Synthetic oligonucleotide
  Antisense strand to SEQ ID NO: 1515460
aagcacaaggagguucuca

SEQ ID NO: 1515462 - RNA, 19 nt, Artificial Sequence
  Description of Artificial Sequence: Synthetic oligonucleotide
  Sense strand starting at position 38 of SEQ ID NO: 1244796
caugauauagugugacuua

SEQ ID NO: 1515463 - RNA, 19 nt, Artificial Sequence
  Description of Artificial Sequence: Synthetic oligonucleotide
  Antisense strand to SEQ ID NO: 1515462
uaagucacacuauaucaug

SEQ ID NO: 1515464 - RNA, 19 nt, Artificial Sequence
  Description of Artificial Sequence: Synthetic oligonucleotide
  Sense strand starting at position 41 of SEQ ID NO: 1244796
gauauagugugacuuacaa

SEQ ID NO: 1515465 - RNA, 19 nt, Artificial Sequence
  Description of Artificial Sequence: Synthetic oligonucleotide
  Antisense strand to SEQ ID NO: 1515464
uuguaagucacacuauauc

SEQ ID NO: 1515466 - RNA, 19 nt, Artificial Sequence
  Description of Artificial Sequence: Synthetic oligonucleotide
  Sense strand starting at position 75 of SEQ ID NO: 1244796
caauauguagcaugagaua

SEQ ID NO: 1515467 - RNA, 19 nt, Artificial Sequence
  Description of Artificial Sequence: Synthetic oligonucleotide
  Antisense strand to SEQ ID NO: 1515466
uaucucaugcuacauauug

SEQ ID NO: 1515468 - RNA, 19 nt, Artificial Sequence
  Description of Artificial Sequence: Synthetic oligonucleotide
  Sense strand starting at position 552 of SEQ ID NO: 1244796
uaaugagaauuagugaguu

SEQ ID NO: 1515469 - RNA, 19 nt, Artificial Sequence
  Description of Artificial Sequence: Synthetic oligonucleotide
  Antisense strand to SEQ ID NO: 1515468
aacucacuaauucucauua

SEQ ID NO: 1515470 - RNA, 19 nt, Artificial Sequence
  Description of Artificial Sequence: Synthetic oligonucleotide
  Sense strand starting at position 558 of SEQ ID NO: 1244796
gaauuagugaguuaacgua

SEQ ID NO: 1515471 - RNA, 19 nt, Artificial Sequence
  Description of Artificial Sequence: Synthetic oligonucleotide
  Antisense strand to SEQ ID NO: 1515470
uacguuaacucacuaauuc

SEQ ID NO: 1515472 - RNA, 19 nt, Artificial Sequence
  Description of Artificial Sequence: Synthetic oligonucleotide
  Sense strand starting at position 565 of SEQ ID NO: 1244796
ugaguuaacguauaucaag

SEQ ID NO: 1515473 - RNA, 19 nt, Artificial Sequence
  Description of Artificial Sequence: Synthetic oligonucleotide
  Antisense strand to SEQ ID NO: 1515472
cuugauauacguuaacuca

SEQ ID NO: 1515474 - RNA, 19 nt, Artificial Sequence
  Description of Artificial Sequence: Synthetic oligonucleotide
  Sense strand starting at position 671 of SEQ ID NO: 1244796
aguggucaccuugaagagu

SEQ ID NO: 1515475 - RNA, 19 nt, Artificial Sequence
  Description of Artificial Sequence: Synthetic oligonucleotide
  Antisense strand to SEQ ID NO: 1515474
acucuucaaggugaccacu

SEQ ID NO: 1515476 - RNA, 19 nt, Artificial Sequence
  Description of Artificial Sequence: Synthetic oligonucleotide
  Sense strand starting at position 1119 of SEQ ID NO: 1244796
gcuggagauguguguauuu

SEQ ID NO: 1515477 - RNA, 19 nt, Artificial Sequence
  Description of Artificial Sequence: Synthetic oligonucleotide
  Antisense strand to SEQ ID NO: 1515476
aaauacacacaucuccagc

SEQ ID NO: 1515478 - RNA, 19 nt, Artificial Sequence
  Description of Artificial Sequence: Synthetic oligonucleotide
  Sense strand starting at position 1175 of SEQ ID NO: 1244796
uaacuuggcguccacaauu

SEQ ID NO: 1515479 - RNA, 19 nt, Artificial Sequence
  Description of Artificial Sequence: Synthetic oligonucleotide
  Antisense strand to SEQ ID NO: 1515478
aauuguggacgccaaguua

SEQ ID NO: 1515480 - RNA, 19 nt, Artificial Sequence
  Description of Artificial Sequence: Synthetic oligonucleotide
  Sense strand starting at position 1255 of SEQ ID NO: 1244796
gucugaaacaaguggaaca

SEQ ID NO: 1515481 - RNA, 19 nt, Artificial Sequence
  Description of Artificial Sequence: Synthetic oligonucleotide
  Antisense strand to SEQ ID NO: 1515480
uguuccacuuguuucagac

SEQ ID NO: 1515482 - RNA, 19 nt, Artificial Sequence
  Description of Artificial Sequence: Synthetic oligonucleotide
  Sense strand starting at position 1682 of SEQ ID NO: 1244796
guuugaggcuccuuaauaa

SEQ ID NO: 1515483 - RNA, 19 nt, Artificial Sequence
  Description of Artificial Sequence: Synthetic oligonucleotide
  Antisense strand to SEQ ID NO: 1515482
uuauuaaggagccucaaac

SEQ ID NO: 1515484 - RNA, 19 nt, Artificial Sequence
  Description of Artificial Sequence: Synthetic oligonucleotide
  Sense strand starting at position 1811 of SEQ ID NO: 1244796
cggguucuagaggaagguu

SEQ ID NO: 1515485 - RNA, 19 nt, Artificial Sequence
  Description of Artificial Sequence: Synthetic oligonucleotide
  Antisense strand to SEQ ID NO: 1515484
aaccuuccucuagaacccg

SEQ ID NO: 1515486 - RNA, 19 nt, Artificial Sequence
  Description of Artificial Sequence: Synthetic oligonucleotide
  Sense strand starting at position 1877 of SEQ ID NO: 1244796
cagguuuccuggccaggaa

SEQ ID NO: 1515487 - RNA, 19 nt, Artificial Sequence
  Description of Artificial Sequence: Synthetic oligonucleotide
  Antisense strand to SEQ ID NO: 1515486
uuccuggccaggaaaccug

SEQ ID NO: 1515488 - RNA, 19 nt, Artificial Sequence
  Description of Artificial Sequence: Synthetic oligonucleotide
  Sense strand starting at position 1907 of SEQ ID NO: 1244796
uugucuuaacaaugagcca

SEQ ID NO: 1515489 - RNA, 19 nt, Artificial Sequence
  Description of Artificial Sequence: Synthetic oligonucleotide
  Antisense strand to SEQ ID NO: 1515488
uggcucauuguuaagacaa

SEQ ID NO: 1515490 - RNA, 19 nt, Artificial Sequence
  Description of Artificial Sequence: Synthetic oligonucleotide
  Sense strand starting at position 2021 of SEQ ID NO: 1244796
aagggaaacuccuuguguu

SEQ ID NO: 1515491 - RNA, 19 nt, Artificial Sequence
  Description of Artificial Sequence: Synthetic oligonucleotide
  Antisense strand to SEQ ID NO: 1515490
aacacaaggaguuucccuu

SEQ ID NO: 1515492 - RNA, 19 nt, Artificial Sequence
  Description of Artificial Sequence: Synthetic oligonucleotide
  Sense strand starting at position 2022 of SEQ ID NO: 1244796
agggaaacuccuuguguuc

SEQ ID NO: 1515493 - RNA, 19 nt, Artificial Sequence
  Description of Artificial Sequence: Synthetic oligonucleotide
  Antisense strand to SEQ ID NO: 1515492
gaacacaaggaguuucccu

SEQ ID NO: 1515494 - RNA, 19 nt, Artificial Sequence
  Description of Artificial Sequence: Synthetic oligonucleotide
  Sense strand starting at position 2066 of SEQ ID NO: 1244796
cuuugaagccaauaucuga

SEQ ID NO: 1515495 - RNA, 19 nt, Artificial Sequence
  Description of Artificial Sequence: Synthetic oligonucleotide
  Antisense strand to SEQ ID NO: 1515494
ucagauauuggcuucaaag

SEQ ID NO: 1515496 - RNA, 19 nt, Artificial Sequence
  Description of Artificial Sequence: Synthetic oligonucleotide
  Sense strand starting at position 2125 of SEQ ID NO: 1244796
ucucaucuuggucagguua

SEQ ID NO: 1515497 - RNA, 19 nt, Artificial Sequence
  Description of Artificial Sequence: Synthetic oligonucleotide
  Antisense strand to SEQ ID NO: 1515496
uaaccugaccaagaugaga

SEQ ID NO: 1515498 - RNA, 19 nt, Artificial Sequence
  Description of Artificial Sequence: Synthetic oligonucleotide
  Sense strand starting at position 2701 of SEQ ID NO: 1244796
gagacauucucacucguug

SEQ ID NO: 1515499 - RNA, 19 nt, Artificial Sequence
  Description of Artificial Sequence: Synthetic oligonucleotide
  Antisense strand to SEQ ID NO: 1515498
caacgagugagaaugucuc

SEQ ID NO: 1515500 - RNA, 19 nt, Artificial Sequence
  Description of Artificial Sequence: Synthetic oligonucleotide
  Sense strand starting at position 2973 of SEQ ID NO: 1244796
ggccgauugcauucguauc

SEQ ID NO: 1515501 - RNA, 19 nt, Artificial Sequence
  Description of Artificial Sequence: Synthetic oligonucleotide
  Antisense strand to SEQ ID NO: 1515500
gauacgaaugcaaucggcc

SEQ ID NO: 1515502 - RNA, 19 nt, Artificial Sequence
  Description of Artificial Sequence: Synthetic oligonucleotide
  Sense strand starting at position 3140 of SEQ ID NO: 1244796
agcagcccuccauaaagua

SEQ ID NO: 1515503 - RNA, 19 nt, Artificial Sequence
  Description of Artificial Sequence: Synthetic oligonucleotide
  Antisense strand to SEQ ID NO: 1515502
uacuuuauggagggcugcu

SEQ ID NO: 1515504 - RNA, 19 nt, Artificial Sequence
  Description of Artificial Sequence: Synthetic oligonucleotide
  Sense strand starting at position 3150 of SEQ ID NO: 1244796
cauaaaguacugugaguua

SEQ ID NO: 1515505 - RNA, 19 nt, Artificial Sequence
  Description of Artificial Sequence: Synthetic oligonucleotide
  Antisense strand to SEQ ID NO: 1515504
uaacucacaguacuuuaug

SEQ ID NO: 1515506 - RNA, 19 nt, Artificial Sequence
  Description of Artificial Sequence: Synthetic oligonucleotide
  Sense strand starting at position 3194 of SEQ ID NO: 1244796
gguguugaacugugggaga

SEQ ID NO: 1515507 - RNA, 19 nt, Artificial Sequence
  Description of Artificial Sequence: Synthetic oligonucleotide
  Antisense strand to SEQ ID NO: 1515506
ucucccacaguucaacacc

SEQ ID NO: 1515508 - RNA, 19 nt, Artificial Sequence
  Description of Artificial Sequence: Synthetic oligonucleotide
  Sense strand starting at position 3366 of SEQ ID NO: 1244796
ggaacauacgucugagcag

SEQ ID NO: 1515509 - RNA, 19 nt, Artificial Sequence
  Description of Artificial Sequence: Synthetic oligonucleotide
  Antisense strand to SEQ ID NO: 1515508
cugcucagacguauguucc

SEQ ID NO: 1515510 - RNA, 19 nt, Artificial Sequence
  Description of Artificial Sequence: Synthetic oligonucleotide
  Sense strand starting at position 3389 of SEQ ID NO: 1244796
ggguaauacagacgacuga

SEQ ID NO: 1515511 - RNA, 19 nt, Artificial Sequence
  Description of Artificial Sequence: Synthetic oligonucleotide
  Antisense strand to SEQ ID NO: 1515510
ucagucgucuguauuaccc

SEQ ID NO: 1515512 - RNA, 19 nt, Artificial Sequence
  Description of Artificial Sequence: Synthetic oligonucleotide
  Sense strand starting at position 3402 of SEQ ID NO: 1244796
gacugaugguuuccuuuau

SEQ ID NO: 1515513 - RNA, 19 nt, Artificial Sequence
  Description of Artificial Sequence: Synthetic oligonucleotide
  Antisense strand to SEQ ID NO: 1515512
auaaaggaaaccaucaguc

SEQ ID NO: 1515514 - RNA, 19 nt, Artificial Sequence
  Description of Artificial Sequence: Synthetic oligonucleotide
  Sense strand starting at position 3471 of SEQ ID NO: 1244796
ggagaaacaucucuguuag

SEQ ID NO: 1515515 - RNA, 19 nt, Artificial Sequence
  Description of Artificial Sequence: Synthetic oligonucleotide
  Antisense strand to SEQ ID NO: 1515514
cuaacagagauguuucucc

SEQ ID NO: 1515516 - RNA, 19 nt, Artificial Sequence
  Description of Artificial Sequence: Synthetic oligonucleotide
  Sense strand starting at position 3472 of SEQ ID NO: 1244796
gagaaacaucucuguuagu

SEQ ID NO: 1515517 - RNA, 19 nt, Artificial Sequence
  Description of Artificial Sequence: Synthetic oligonucleotide
  Antisense strand to SEQ ID NO: 1515516
acuaacagagauguuucuc

SEQ ID NO: 1515518 - RNA, 19 nt, Artificial Sequence
  Description of Artificial Sequence: Synthetic oligonucleotide
  Sense strand starting at position 3473 of SEQ ID NO: 1244796
agaaacaucucuguuagua

SEQ ID NO: 1515519 - RNA, 19 nt, Artificial Sequence
  Description of Artificial Sequence: Synthetic oligonucleotide
  Antisense strand to SEQ ID NO: 1515518
uacuaacagagauguuucu

SEQ ID NO: 1515520 - RNA, 19 nt, Artificial Sequence
  Description of Artificial Sequence: Synthetic oligonucleotide
  Sense strand starting at position 3530 of SEQ ID NO: 1244796
ccuacagaugcucauaugu

SEQ ID NO: 1515521 - RNA, 19 nt, Artificial Sequence
  Description of Artificial Sequence: Synthetic oligonucleotide
  Antisense strand to SEQ ID NO: 1515520
acauaugagcaucuguagg

SEQ ID NO: 1515522 - RNA, 19 nt, Artificial Sequence
  Description of Artificial Sequence: Synthetic oligonucleotide
  Sense strand starting at position 3535 of SEQ ID NO: 1244796
agaugcucauauguuaacu

SEQ ID NO: 1515523 - RNA, 19 nt, Artificial Sequence
  Description of Artificial Sequence: Synthetic oligonucleotide
  Antisense strand to SEQ ID NO: 1515522
aguuaacauaugagcaucu

SEQ ID NO: 1515524 - RNA, 19 nt, Artificial Sequence
  Description of Artificial Sequence: Synthetic oligonucleotide
  Sense strand starting at position 3567 of SEQ ID NO: 1244796
cugaauugaucuguaucaa

SEQ ID NO: 1515525 - RNA, 19 nt, Artificial Sequence
  Description of Artificial Sequence: Synthetic oligonucleotide
  Antisense strand to SEQ ID NO: 1515524
uugauacagaucaauucag

SEQ ID NO: 1515526 - RNA, 19 nt, Artificial Sequence
  Description of Artificial Sequence: Synthetic oligonucleotide
  Sense strand starting at position 3644 of SEQ ID NO: 1244796
guacaauuauauuccugua

SEQ ID NO: 1515527 - RNA, 19 nt, Artificial Sequence
  Description of Artificial Sequence: Synthetic oligonucleotide
  Antisense strand to SEQ ID NO: 1515526
uacaggaauauaauuguac

SEQ ID NO: 1515528 - RNA, 19 nt, Artificial Sequence
  Description of Artificial Sequence: Synthetic oligonucleotide
  Sense strand starting at position 3689 of SEQ ID NO: 1244796
caaauaagugcacagugaa

SEQ ID NO: 1515529 - RNA, 19 nt, Artificial Sequence
  Description of Artificial Sequence: Synthetic oligonucleotide
  Antisense strand to SEQ ID NO: 1515528
uucacugugcacuuauuug

SEQ ID NO: 1515530 - RNA, 19 nt, Artificial Sequence
  Description of Artificial Sequence: Synthetic oligonucleotide
  Sense strand starting at position 3714 of SEQ ID NO: 1244796
uguucuuacccacaguacu

SEQ ID NO: 1515531 - RNA, 19 nt, Artificial Sequence
  Description of Artificial Sequence: Synthetic oligonucleotide
  Antisense strand to SEQ ID NO: 1515530
aguacuguggguaagaaca

SEQ ID NO: 1515532 - RNA, 19 nt, Artificial Sequence
  Description of Artificial Sequence: Synthetic oligonucleotide
  Sense strand starting at position 3725 of SEQ ID NO: 1244796
acaguacuagugugacuaa

SEQ ID NO: 1515533 - RNA, 19 nt, Artificial Sequence
  Description of Artificial Sequence: Synthetic oligonucleotide
  Antisense strand to SEQ ID NO: 1515532
uuagucacacuaguacugu

SEQ ID NO: 1515534 - RNA, 19 nt, Artificial Sequence
  Description of Artificial Sequence: Synthetic oligonucleotide
  Sense strand starting at position 3728 of SEQ ID NO: 1244796
guacuagugugacuaaaua

SEQ ID NO: 1515535 - RNA, 19 nt, Artificial Sequence
  Description of Artificial Sequence: Synthetic oligonucleotide
  Antisense strand to SEQ ID NO: 1515534
uauuuagucacacuaguac

SEQ ID NO: 1515536 - RNA, 19 nt, Artificial Sequence
  Description of Artificial Sequence: Synthetic oligonucleotide
  Sense strand starting at position 3768 of SEQ ID NO: 1244796
cuguguucugaagaaggca

SEQ ID NO: 1515537 - RNA, 19 nt, Artificial Sequence
  Description of Artificial Sequence: Synthetic oligonucleotide
  Antisense strand to SEQ ID NO: 1515536
ugccuucuucagaacacag

SEQ ID NO: 1515538 - RNA, 19 nt, Artificial Sequence
  Description of Artificial Sequence: Synthetic oligonucleotide
  Sense strand starting at position 3884 of SEQ ID NO: 1244796
acauuagaggcagguugaa

SEQ ID NO: 1515539 - RNA, 19 nt, Artificial Sequence
  Description of Artificial Sequence: Synthetic oligonucleotide
  Antisense strand to SEQ ID NO: 1515538
uucaaccugccucuaaugu

SEQ ID NO: 1515540 - RNA, 19 nt, Artificial Sequence
  Description of Artificial Sequence: Synthetic oligonucleotide
  Sense strand starting at position 3922 of SEQ ID NO: 1244796
acugguguggcaggauaau

SEQ ID NO: 1515541 - RNA, 19 nt, Artificial Sequence
  Description of Artificial Sequence: Synthetic oligonucleotide
  Antisense strand to SEQ ID NO: 1515540
auuauccugccacaccagu

SEQ ID NO: 1515542 - RNA, 19 nt, Artificial Sequence
  Description of Artificial Sequence: Synthetic oligonucleotide
  Sense strand starting at position 49 of SEQ ID NO: 1244797
ccggccacagugugauauu

SEQ ID NO: 1515543 - RNA, 19 nt, Artificial Sequence
  Description of Artificial Sequence: Synthetic oligonucleotide
  Antisense strand to SEQ ID NO: 1515542
aauaucacacuguggccgg

SEQ ID NO: 1515544 - RNA, 19 nt, Artificial Sequence
  Description of Artificial Sequence: Synthetic oligonucleotide
  Sense strand starting at position 50 of SEQ ID NO: 1244797
cggccacagugugauauuu

SEQ ID NO: 1515545 - RNA, 19 nt, Artificial Sequence
  Description of Artificial Sequence: Synthetic oligonucleotide
  Antisense strand to SEQ ID NO: 1515544
aaauaucacacuguggccg

SEQ ID NO: 1515546 - RNA, 19 nt, Artificial Sequence
  Description of Artificial Sequence: Synthetic oligonucleotide
  Sense strand starting at position 68 of SEQ ID NO: 1244797
ucaauacguguauguaaug

SEQ ID NO: 1515547 - RNA, 19 nt, Artificial Sequence
  Description of Artificial Sequence: Synthetic oligonucleotide
  Antisense strand to SEQ ID NO: 1515546
cauuacauacacguauuga

SEQ ID NO: 1515548 - RNA, 19 nt, Artificial Sequence
  Description of Artificial Sequence: Synthetic oligonucleotide
  Sense strand starting at position 75 of SEQ ID NO: 1244797
guguauguaauguguaaua

SEQ ID NO: 1515549 - RNA, 19 nt, Artificial Sequence
  Description of Artificial Sequence: Synthetic oligonucleotide
  Antisense strand to SEQ ID NO: 1515548
uauuacacauuacauacac

SEQ ID NO: 1515550 - RNA, 19 nt, Artificial Sequence
  Description of Artificial Sequence: Synthetic oligonucleotide
  Sense strand starting at position 229 of SEQ ID NO: 1244797
aagggaucuucuuggucag

SEQ ID NO: 1515551 - RNA, 19 nt, Artificial Sequence
  Description of Artificial Sequence: Synthetic oligonucleotide
  Antisense strand to SEQ ID NO: 1515550
cugaccaagaagaucccuu

SEQ ID NO: 1515552 - RNA, 19 nt, Artificial Sequence
  Description of Artificial Sequence: Synthetic oligonucleotide
  Sense strand starting at position 337 of SEQ ID NO: 1244797
ugcccaggcuuauaucaaa

SEQ ID NO: 1515553 - RNA, 19 nt, Artificial Sequence
  Description of Artificial Sequence: Synthetic oligonucleotide
  Antisense strand to SEQ ID NO: 1515552
uuugauauaagccugggca

SEQ ID NO: 1515554 - RNA, 19 nt, Artificial Sequence
  Description of Artificial Sequence: Synthetic oligonucleotide
  Sense strand starting at position 578 of SEQ ID NO: 1244797
gcaagcacccuuuguucua

SEQ ID NO: 1515555 - RNA, 19 nt, Artificial Sequence
  Description of Artificial Sequence: Synthetic oligonucleotide
  Antisense strand to SEQ ID NO: 1515554
uagaacaaagggugcuugc

SEQ ID NO: 1515556 - RNA, 19 nt, Artificial Sequence
  Description of Artificial Sequence: Synthetic oligonucleotide
  Sense strand starting at position 581 of SEQ ID NO: 1244797
agcacccuuuguucuaaga

SEQ ID NO: 1515557 - RNA, 19 nt, Artificial Sequence
  Description of Artificial Sequence: Synthetic oligonucleotide
  Antisense strand to SEQ ID NO: 1515556
ucuuagaacaaagggugcu

SEQ ID NO: 1515558 - RNA, 19 nt, Artificial Sequence
  Description of Artificial Sequence: Synthetic oligonucleotide
  Sense strand starting at position 649 of SEQ ID NO: 1244797
uuugguguauccuuugaca

SEQ ID NO: 1515559 - RNA, 19 nt, Artificial Sequence
  Description of Artificial Sequence: Synthetic oligonucleotide
  Antisense strand to SEQ ID NO: 1515558
ugucaaaggauacaccaaa

SEQ ID NO: 1515560 - RNA, 19 nt, Artificial Sequence
  Description of Artificial Sequence: Synthetic oligonucleotide
  Sense strand starting at position 849 of SEQ ID NO: 1244797
uucuuaagcuaagcgaaau

SEQ ID NO: 1515561 - RNA, 19 nt, Artificial Sequence
  Description of Artificial Sequence: Synthetic oligonucleotide
  Antisense strand to SEQ ID NO: 1515560
auuucgcuuagcuuaagaa

SEQ ID NO: 1515562 - RNA, 19 nt, Artificial Sequence
  Description of Artificial Sequence: Synthetic oligonucleotide
  Sense strand starting at position 920 of SEQ ID NO: 1244797
ccagguucuccucguggga

SEQ ID NO: 1515563 - RNA, 19 nt, Artificial Sequence
  Description of Artificial Sequence: Synthetic oligonucleotide
  Antisense strand to SEQ ID NO: 1515562
ucccacgaggagaaccugg

SEQ ID NO: 1515564 - RNA, 19 nt, Artificial Sequence
  Description of Artificial Sequence: Synthetic oligonucleotide
  Sense strand starting at position 1222 of SEQ ID NO: 1244797
aaagcagaaucugacguua

SEQ ID NO: 1515565 - RNA, 19 nt, Artificial Sequence
  Description of Artificial Sequence: Synthetic oligonucleotide
  Antisense strand to SEQ ID NO: 1515564
uaacgucagauucugcuuu

SEQ ID NO: 1515566 - RNA, 19 nt, Artificial Sequence
  Description of Artificial Sequence: Synthetic oligonucleotide
  Sense strand starting at position 1243 of SEQ ID NO: 1244797
gagggagaguucccgacaa

SEQ ID NO: 1515567 - RNA, 19 nt, Artificial Sequence
  Description of Artificial Sequence: Synthetic oligonucleotide
  Antisense strand to SEQ ID NO: 1515566
uugucgggaacucucccuc

SEQ ID NO: 1515568 - RNA, 19 nt, Artificial Sequence
  Description of Artificial Sequence: Synthetic oligonucleotide
  Sense strand starting at position 1291 of SEQ ID NO: 1244797
ccagccagauuucgacaau

SEQ ID NO: 1515569 - RNA, 19 nt, Artificial Sequence
  Description of Artificial Sequence: Synthetic oligonucleotide
  Antisense strand to SEQ ID NO: 1515568
auugucgaaaucuggcugg

SEQ ID NO: 1515570 - RNA, 19 nt, Artificial Sequence
  Description of Artificial Sequence: Synthetic oligonucleotide
  Sense strand starting at position 1309 of SEQ ID NO: 1244797
uagaaaguguacuuaucag

SEQ ID NO: 1515571 - RNA, 19 nt, Artificial Sequence
  Description of Artificial Sequence: Synthetic oligonucleotide
  Antisense strand to SEQ ID NO: 1515570
cugauaaguacacuuucua

SEQ ID NO: 1515572 - RNA, 19 nt, Artificial Sequence
  Description of Artificial Sequence: Synthetic oligonucleotide
  Sense strand starting at position 1448 of SEQ ID NO: 1244797
gaggguucuggcgacaaag

SEQ ID NO: 1515573 - RNA, 19 nt, Artificial Sequence
  Description of Artificial Sequence: Synthetic oligonucleotide
  Antisense strand to SEQ ID NO: 1515572
cuuugucgccagaacccuc

SEQ ID NO: 1515574 - RNA, 19 nt, Artificial Sequence
  Description of Artificial Sequence: Synthetic oligonucleotide
  Sense strand starting at position 1649 of SEQ ID NO: 1244797
gcugcaccgccgagaagua

SEQ ID NO: 1515575 - RNA, 19 nt, Artificial Sequence
  Description of Artificial Sequence: Synthetic oligonucleotide
  Antisense strand to SEQ ID NO: 1515574
uacuucucggcggugcagc

SEQ ID NO: 1515576 - RNA, 19 nt, Artificial Sequence
  Description of Artificial Sequence: Synthetic oligonucleotide
  Sense strand starting at position 1658 of SEQ ID NO: 1244797
ccgagaaguacagggcaaa

SEQ ID NO: 1515577 - RNA, 19 nt, Artificial Sequence
  Description of Artificial Sequence: Synthetic oligonucleotide
  Antisense strand to SEQ ID NO: 1515576
uuugcccuguacuucucgg

SEQ ID NO: 1515578 - RNA, 19 nt, Artificial Sequence
  Description of Artificial Sequence: Synthetic oligonucleotide
  Sense strand starting at position 2429 of SEQ ID NO: 1244797
gucagcgcuuauuugguaa

SEQ ID NO: 1515579 - RNA, 19 nt, Artificial Sequence
  Description of Artificial Sequence: Synthetic oligonucleotide
  Antisense strand to SEQ ID NO: 1515578
uuaccaaauaagcgcugac

SEQ ID NO: 1515580 - RNA, 19 nt, Artificial Sequence
  Description of Artificial Sequence: Synthetic oligonucleotide
  Sense strand starting at position 2432 of SEQ ID NO: 1244797
agcgcuuauuugguaacca

SEQ ID NO: 1515581 - RNA, 19 nt, Artificial Sequence
  Description of Artificial Sequence: Synthetic oligonucleotide
  Antisense strand to SEQ ID NO: 1515580
ugguuaccaaauaagcgcu

SEQ ID NO: 1515582 - RNA, 19 nt, Artificial Sequence
  Description of Artificial Sequence: Synthetic oligonucleotide
  Sense strand starting at position 2433 of SEQ ID NO: 1244797
gcgcuuauuugguaaccau

SEQ ID NO: 1515583 - RNA, 19 nt, Artificial Sequence
  Description of Artificial Sequence: Synthetic oligonucleotide
  Antisense strand to SEQ ID NO: 1515582
augguuaccaaauaagcgc

SEQ ID NO: 1515584 - RNA, 19 nt, Artificial Sequence
  Description of Artificial Sequence: Synthetic oligonucleotide
  Sense strand starting at position 2468 of SEQ ID NO: 1244797
ccucaaucgcauugaguuc

SEQ ID NO: 1515585 - RNA, 19 nt, Artificial Sequence
  Description of Artificial Sequence: Synthetic oligonucleotide
  Antisense strand to SEQ ID NO: 1515584
gaacucaaugcgauugagg

SEQ ID NO: 1515586 - RNA, 19 nt, Artificial Sequence
  Description of Artificial Sequence: Synthetic oligonucleotide
  Sense strand starting at position 2644 of SEQ ID NO: 1244797
aucaucaggcaugaguuaa

SEQ ID NO: 1515587 - RNA, 19 nt, Artificial Sequence
  Description of Artificial Sequence: Synthetic oligonucleotide
  Antisense strand to SEQ ID NO: 1515586
uuaacucaugccugaugau

SEQ ID NO: 1515588 - RNA, 19 nt, Artificial Sequence
  Description of Artificial Sequence: Synthetic oligonucleotide
  Sense strand starting at position 2656 of SEQ ID NO: 1244797
gaguuaagaugcucucaua

SEQ ID NO: 1515589 - RNA, 19 nt, Artificial Sequence
  Description of Artificial Sequence: Synthetic oligonucleotide
  Antisense strand to SEQ ID NO: 1515588
uaugagagcaucuuaacuc

SEQ ID NO: 1515590 - RNA, 19 nt, Artificial Sequence
  Description of Artificial Sequence: Synthetic oligonucleotide
  Sense strand starting at position 2659 of SEQ ID NO: 1244797
uuaagaugcucucauaagg

SEQ ID NO: 1515591 - RNA, 19 nt, Artificial Sequence
  Description of Artificial Sequence: Synthetic oligonucleotide
  Antisense strand to SEQ ID NO: 1515590
ccuuaugagagcaucuuaa

SEQ ID NO: 1515592 - RNA, 19 nt, Artificial Sequence
  Description of Artificial Sequence: Synthetic oligonucleotide
  Sense strand starting at position 2721 of SEQ ID NO: 1244797
uucgcacuccuuugagacu

SEQ ID NO: 1515593 - RNA, 19 nt, Artificial Sequence
  Description of Artificial Sequence: Synthetic oligonucleotide
  Antisense strand to SEQ ID NO: 1515592
agucucaaaggagugcgaa

SEQ ID NO: 1515594 - RNA, 19 nt, Artificial Sequence
  Description of Artificial Sequence: Synthetic oligonucleotide
  Sense strand starting at position 2724 of SEQ ID NO: 1244797
gcacuccuuugagacucua

SEQ ID NO: 1515595 - RNA, 19 nt, Artificial Sequence
  Description of Artificial Sequence: Synthetic oligonucleotide
  Antisense strand to SEQ ID NO: 1515594
uagagucucaaaggagugc

SEQ ID NO: 1515596 - RNA, 19 nt, Artificial Sequence
  Description of Artificial Sequence: Synthetic oligonucleotide
  Sense strand starting at position 2812 of SEQ ID NO: 1244797
cugcgaugcccuguuccua

SEQ ID NO: 1515597 - RNA, 19 nt, Artificial Sequence
  Description of Artificial Sequence: Synthetic oligonucleotide
  Antisense strand to SEQ ID NO: 1515596
uaggaacagggcaucgcag

SEQ ID NO: 1515598 - RNA, 19 nt, Artificial Sequence
  Description of Artificial Sequence: Synthetic oligonucleotide
  Sense strand starting at position 2813 of SEQ ID NO: 1244797
ugcgaugcccuguuccuaa

SEQ ID NO: 1515599 - RNA, 19 nt, Artificial Sequence
  Description of Artificial Sequence: Synthetic oligonucleotide
  Antisense strand to SEQ ID NO: 1515598
uuaggaacagggcaucgca

SEQ ID NO: 1515600 - RNA, 19 nt, Artificial Sequence
  Description of Artificial Sequence: Synthetic oligonucleotide
  Sense strand starting at position 2943 of SEQ ID NO: 1244797
gugagugauggaugagaug

SEQ ID NO: 1515601 - RNA, 19 nt, Artificial Sequence
  Description of Artificial Sequence: Synthetic oligonucleotide
  Antisense strand to SEQ ID NO: 1515600
caucucauccaucacucac

SEQ ID NO: 1515602 - RNA, 19 nt, Artificial Sequence
  Description of Artificial Sequence: Synthetic oligonucleotide
  Sense strand starting at position 2952 of SEQ ID NO: 1244797
ggaugagaugggugugcuu

SEQ ID NO: 1515603 - RNA, 19 nt, Artificial Sequence
  Description of Artificial Sequence: Synthetic oligonucleotide
  Antisense strand to SEQ ID NO: 1515602
aagcacacccaucucaucc

SEQ ID NO: 1515604 - RNA, 19 nt, Artificial Sequence
  Description of Artificial Sequence: Synthetic oligonucleotide
  Sense strand starting at position 2954 of SEQ ID NO: 1244797
augagaugggugugcuuca

SEQ ID NO: 1515605 - RNA, 19 nt, Artificial Sequence
  Description of Artificial Sequence: Synthetic oligonucleotide
  Antisense strand to SEQ ID NO: 1515604
ugaagcacacccaucucau

SEQ ID NO: 1515606 - RNA, 19 nt, Artificial Sequence
  Description of Artificial Sequence: Synthetic oligonucleotide
  Sense strand starting at position 3102 of SEQ ID NO: 1244797
cuucauguauccgaggaag

SEQ ID NO: 1515607 - RNA, 19 nt, Artificial Sequence
  Description of Artificial Sequence: Synthetic oligonucleotide
  Antisense strand to SEQ ID NO: 1515606
cuuccucggauacaugaag

SEQ ID NO: 1515608 - RNA, 19 nt, Artificial Sequence
  Description of Artificial Sequence: Synthetic oligonucleotide
  Sense strand starting at position 3104 of SEQ ID NO: 1244797
ucauguauccgaggaaguc

SEQ ID NO: 1515609 - RNA, 19 nt, Artificial Sequence
  Description of Artificial Sequence: Synthetic oligonucleotide
  Antisense strand to SEQ ID NO: 1515608
gacuuccucggauacauga

SEQ ID NO: 1515610 - RNA, 19 nt, Artificial Sequence
  Description of Artificial Sequence: Synthetic oligonucleotide
  Sense strand starting at position 3105 of SEQ ID NO: 1244797
cauguauccgaggaagucu

SEQ ID NO: 1515611 - RNA, 19 nt, Artificial Sequence
  Description of Artificial Sequence: Synthetic oligonucleotide
  Antisense strand to SEQ ID NO: 1515610
agacuuccucggauacaug

SEQ ID NO: 1515612 - RNA, 19 nt, Artificial Sequence
  Description of Artificial Sequence: Synthetic oligonucleotide
  Sense strand starting at position 3138 of SEQ ID NO: 1244797
guaccugucugauugcaag

SEQ ID NO: 1515613 - RNA, 19 nt, Artificial Sequence
  Description of Artificial Sequence: Synthetic oligonucleotide
  Antisense strand to SEQ ID NO: 1515612
cuugcaaucagacagguac

SEQ ID NO: 1515614 - RNA, 19 nt, Artificial Sequence
  Description of Artificial Sequence: Synthetic oligonucleotide
  Sense strand starting at position 3181 of SEQ ID NO: 1244797
ugggccuguggucaggaau

SEQ ID NO: 1515615 - RNA, 19 nt, Artificial Sequence
  Description of Artificial Sequence: Synthetic oligonucleotide
  Antisense strand to SEQ ID NO: 1515614
auuccugaccacaggccca

SEQ ID NO: 1515616 - RNA, 19 nt, Artificial Sequence
  Description of Artificial Sequence: Synthetic oligonucleotide
  Sense strand starting at position 3332 of SEQ ID NO: 1244797
gggcacuacuuggaauuua

SEQ ID NO: 1515617 - RNA, 19 nt, Artificial Sequence
  Description of Artificial Sequence: Synthetic oligonucleotide
  Antisense strand to SEQ ID NO: 1515616
uaaauuccaaguagugccc

SEQ ID NO: 1515618 - RNA, 19 nt, Artificial Sequence
  Description of Artificial Sequence: Synthetic oligonucleotide
  Sense strand starting at position 3340 of SEQ ID NO: 1244797
cuuggaauuuaugguguca

SEQ ID NO: 1515619 - RNA, 19 nt, Artificial Sequence
  Description of Artificial Sequence: Synthetic oligonucleotide
  Antisense strand to SEQ ID NO: 1515618
ugacaccauaaauuccaag

SEQ ID NO: 1515620 - RNA, 19 nt, Artificial Sequence
  Description of Artificial Sequence: Synthetic oligonucleotide
  Sense strand starting at position 3345 of SEQ ID NO: 1244797
aauuuauggugucacgacu

SEQ ID NO: 1515621 - RNA, 19 nt, Artificial Sequence
  Description of Artificial Sequence: Synthetic oligonucleotide
  Antisense strand to SEQ ID NO: 1515620
agucgugacaccauaaauu

SEQ ID NO: 1515622 - RNA, 19 nt, Artificial Sequence
  Description of Artificial Sequence: Synthetic oligonucleotide
  Sense strand starting at position 51 of SEQ ID NO: 1244798
agaccuucugcuugacaga

SEQ ID NO: 1515623 - RNA, 19 nt, Artificial Sequence
  Description of Artificial Sequence: Synthetic oligonucleotide
  Antisense strand to SEQ ID NO: 1515622
ucugucaagcagaaggucu

SEQ ID NO: 1515624 - RNA, 19 nt, Artificial Sequence
  Description of Artificial Sequence: Synthetic oligonucleotide
  Sense strand starting at position 54 of SEQ ID NO: 1244798
ccuucugcuugacagaagu

SEQ ID NO: 1515625 - RNA, 19 nt, Artificial Sequence
  Description of Artificial Sequence: Synthetic oligonucleotide
  Antisense strand to SEQ ID NO: 1515624
acuucugucaagcagaagg

SEQ ID NO: 1515626 - RNA, 19 nt, Artificial Sequence
  Description of Artificial Sequence: Synthetic oligonucleotide
  Sense strand starting at position 64 of SEQ ID NO: 1244798
gacagaaguugucacaaau

SEQ ID NO: 1515627 - RNA, 19 nt, Artificial Sequence
  Description of Artificial Sequence: Synthetic oligonucleotide
  Antisense strand to SEQ ID NO: 1515626
auuugugacaacuucuguc

SEQ ID NO: 1515628 - RNA, 19 nt, Artificial Sequence
  Description of Artificial Sequence: Synthetic oligonucleotide
  Sense strand starting at position 114 of SEQ ID NO: 1244798
uuaguccuuucccaggaga

SEQ ID NO: 1515629 - RNA, 19 nt, Artificial Sequence
  Description of Artificial Sequence: Synthetic oligonucleotide
  Antisense strand to SEQ ID NO: 1515628
ucuccugggaaaggacuaa

SEQ ID NO: 1515630 - RNA, 19 nt, Artificial Sequence
  Description of Artificial Sequence: Synthetic oligonucleotide
  Sense strand starting at position 116 of SEQ ID NO: 1244798
aguccuuucccaggagaga

SEQ ID NO: 1515631 - RNA, 19 nt, Artificial Sequence
  Description of Artificial Sequence: Synthetic oligonucleotide
  Antisense strand to SEQ ID NO: 1515630
ucucuccugggaaaggacu

SEQ ID NO: 1515632 - RNA, 19 nt, Artificial Sequence
  Description of Artificial Sequence: Synthetic oligonucleotide
  Sense strand starting at position 208 of SEQ ID NO: 1244798
gagagagucaggugugcau

SEQ ID NO: 1515633 - RNA, 19 nt, Artificial Sequence
  Description of Artificial Sequence: Synthetic oligonucleotide
  Antisense strand to SEQ ID NO: 1515632
augcacaccugacucucuc

SEQ ID NO: 1515634 - RNA, 19 nt, Artificial Sequence
  Description of Artificial Sequence: Synthetic oligonucleotide
  Sense strand starting at position 330 of SEQ ID NO: 1244798
cggucacucccuugaugac

SEQ ID NO: 1515635 - RNA, 19 nt, Artificial Sequence
  Description of Artificial Sequence: Synthetic oligonucleotide
  Antisense strand to SEQ ID NO: 1515634
gucaucaagggagugaccg

SEQ ID NO: 1515636 - RNA, 19 nt, Artificial Sequence
  Description of Artificial Sequence: Synthetic oligonucleotide
  Sense strand starting at position 339 of SEQ ID NO: 1244798
ccuugaugaccuugaccuu

SEQ ID NO: 1515637 - RNA, 19 nt, Artificial Sequence
  Description of Artificial Sequence: Synthetic oligonucleotide
  Antisense strand to SEQ ID NO: 1515636
aaggucaaggucaucaagg

SEQ ID NO: 1515638 - RNA, 19 nt, Artificial Sequence
  Description of Artificial Sequence: Synthetic oligonucleotide
  Sense strand starting at position 376 of SEQ ID NO: 1244798
gcgggauggucaagaugga

SEQ ID NO: 1515639 - RNA, 19 nt, Artificial Sequence
  Description of Artificial Sequence: Synthetic oligonucleotide
  Antisense strand to SEQ ID NO: 1515638
uccaucuugaccaucccgc

SEQ ID NO: 1515640 - RNA, 19 nt, Artificial Sequence
  Description of Artificial Sequence: Synthetic oligonucleotide
  Sense strand starting at position 485 of SEQ ID NO: 1244798
cccuuucgccucuggagaa

SEQ ID NO: 1515641 - RNA, 19 nt, Artificial Sequence
  Description of Artificial Sequence: Synthetic oligonucleotide
  Antisense strand to SEQ ID NO: 1515640
uucuccagaggcgaaaggg

SEQ ID NO: 1515642 - RNA, 19 nt, Artificial Sequence
  Description of Artificial Sequence: Synthetic oligonucleotide
  Sense strand starting at position 548 of SEQ ID NO: 1244798
gaggucuuggccugaaguc

SEQ ID NO: 1515643 - RNA, 19 nt, Artificial Sequence
  Description of Artificial Sequence: Synthetic oligonucleotide
  Antisense strand to SEQ ID NO: 1515642
gacuucaggccaagaccuc

SEQ ID NO: 1515644 - RNA, 19 nt, Artificial Sequence
  Description of Artificial Sequence: Synthetic oligonucleotide
  Sense strand starting at position 549 of SEQ ID NO: 1244798
aggucuuggccugaagucu

SEQ ID NO: 1515645 - RNA, 19 nt, Artificial Sequence
  Description of Artificial Sequence: Synthetic oligonucleotide
  Antisense strand to SEQ ID NO: 1515644
agacuucaggccaagaccu

SEQ ID NO: 1515646 - RNA, 19 nt, Artificial Sequence
  Description of Artificial Sequence: Synthetic oligonucleotide
  Sense strand starting at position 805 of SEQ ID NO: 1244798
uggugacucccucaggagu

SEQ ID NO: 1515647 - RNA, 19 nt, Artificial Sequence
  Description of Artificial Sequence: Synthetic oligonucleotide
  Antisense strand to SEQ ID NO: 1515646
acuccugagggagucacca

SEQ ID NO: 1515648 - RNA, 19 nt, Artificial Sequence
  Description of Artificial Sequence: Synthetic oligonucleotide
  Sense strand starting at position 831 of SEQ ID NO: 1244798
auccauaauuaggguuaau

SEQ ID NO: 1515649 - RNA, 19 nt, Artificial Sequence
  Description of Artificial Sequence: Synthetic oligonucleotide
  Antisense strand to SEQ ID NO: 1515648
auuaacccuaauuauggau

SEQ ID NO: 1515650 - RNA, 19 nt, Artificial Sequence
  Description of Artificial Sequence: Synthetic oligonucleotide
  Sense strand starting at position 840 of SEQ ID NO: 1244798
uaggguuaaugaugacauu

SEQ ID NO: 1515651 - RNA, 19 nt, Artificial Sequence
  Description of Artificial Sequence: Synthetic oligonucleotide
  Antisense strand to SEQ ID NO: 1515650
aaugucaucauuaacccua

SEQ ID NO: 1515652 - RNA, 19 nt, Artificial Sequence
  Description of Artificial Sequence: Synthetic oligonucleotide
  Sense strand starting at position 1205 of SEQ ID NO: 1244798
gcagguuguagagacaaau

SEQ ID NO: 1515653 - RNA, 19 nt, Artificial Sequence
  Description of Artificial Sequence: Synthetic oligonucleotide
  Antisense strand to SEQ ID NO: 1515652
auuugucucuacaaccugc

SEQ ID NO: 1515654 - RNA, 19 nt, Artificial Sequence
  Description of Artificial Sequence: Synthetic oligonucleotide
  Sense strand starting at position 1700 of SEQ ID NO: 1244798
cgcucaucucggucauggu

SEQ ID NO: 1515655 - RNA, 19 nt, Artificial Sequence
  Description of Artificial Sequence: Synthetic oligonucleotide
  Antisense strand to SEQ ID NO: 1515654
accaugaccgagaugagcg

SEQ ID NO: 1515656 - RNA, 19 nt, Artificial Sequence
  Description of Artificial Sequence: Synthetic oligonucleotide
  Sense strand starting at position 1701 of SEQ ID NO: 1244798
gcucaucucggucaugguu

SEQ ID NO: 1515657 - RNA, 19 nt, Artificial Sequence
  Description of Artificial Sequence: Synthetic oligonucleotide
  Antisense strand to SEQ ID NO: 1515656
aaccaugaccgagaugagc

SEQ ID NO: 1515658 - RNA, 19 nt, Artificial Sequence
  Description of Artificial Sequence: Synthetic oligonucleotide
  Sense strand starting at position 2457 of SEQ ID NO: 1244798
gagagugagaucgaagcua

SEQ ID NO: 1515659 - RNA, 19 nt, Artificial Sequence
  Description of Artificial Sequence: Synthetic oligonucleotide
  Antisense strand to SEQ ID NO: 1515658
uagcuucgaucucacucuc

SEQ ID NO: 1515660 - RNA, 19 nt, Artificial Sequence
  Description of Artificial Sequence: Synthetic oligonucleotide
  Sense strand starting at position 2508 of SEQ ID NO: 1244798
agagguuggugaaggaaga

SEQ ID NO: 1515661 - RNA, 19 nt, Artificial Sequence
  Description of Artificial Sequence: Synthetic oligonucleotide
  Antisense strand to SEQ ID NO: 1515660
ucuuccuucaccaaccucu

SEQ ID NO: 1515662 - RNA, 19 nt, Artificial Sequence
  Description of Artificial Sequence: Synthetic oligonucleotide
  Sense strand starting at position 2531 of SEQ ID NO: 1244798
ggacccaucugugccauua

SEQ ID NO: 1515663 - RNA, 19 nt, Artificial Sequence
  Description of Artificial Sequence: Synthetic oligonucleotide
  Antisense strand to SEQ ID NO: 1515662
uaauggcacagaugggucc

SEQ ID NO: 1515664 - RNA, 19 nt, Artificial Sequence
  Description of Artificial Sequence: Synthetic oligonucleotide
  Sense strand starting at position 2544 of SEQ ID NO: 1244798
ccauuaauuggaugccuuu

SEQ ID NO: 1515665 - RNA, 19 nt, Artificial Sequence
  Description of Artificial Sequence: Synthetic oligonucleotide
  Antisense strand to SEQ ID NO: 1515664
aaaggcauccaauuaaugg

SEQ ID NO: 1515666 - RNA, 19 nt, Artificial Sequence
  Description of Artificial Sequence: Synthetic oligonucleotide
  Sense strand starting at position 2547 of SEQ ID NO: 1244798
uuaauuggaugccuuuaua

SEQ ID NO: 1515667 - RNA, 19 nt, Artificial Sequence
  Description of Artificial Sequence: Synthetic oligonucleotide
  Antisense strand to SEQ ID NO: 1515666
uauaaaggcauccaauuaa

SEQ ID NO: 1515668 - RNA, 19 nt, Artificial Sequence
  Description of Artificial Sequence: Synthetic oligonucleotide
  Sense strand starting at position 2634 of SEQ ID NO: 1244798
acaauuccuccuugugaug

SEQ ID NO: 1515669 - RNA, 19 nt, Artificial Sequence
  Description of Artificial Sequence: Synthetic oligonucleotide
  Antisense strand to SEQ ID NO: 1515668
caucacaaggaggaauugu

SEQ ID NO: 1515670 - RNA, 19 nt, Artificial Sequence
  Description of Artificial Sequence: Synthetic oligonucleotide
  Sense strand starting at position 2636 of SEQ ID NO: 1244798
aauuccuccuugugaugga

SEQ ID NO: 1515671 - RNA, 19 nt, Artificial Sequence
  Description of Artificial Sequence: Synthetic oligonucleotide
  Antisense strand to SEQ ID NO: 1515670
uccaucacaaggaggaauu

SEQ ID NO: 1515672 - RNA, 19 nt, Artificial Sequence
  Description of Artificial Sequence: Synthetic oligonucleotide
  Sense strand starting at position 2637 of SEQ ID NO: 1244798
auuccuccuugugauggaa

SEQ ID NO: 1515673 - RNA, 19 nt, Artificial Sequence
  Description of Artificial Sequence: Synthetic oligonucleotide
  Antisense strand to SEQ ID NO: 1515672
uuccaucacaaggaggaau

SEQ ID NO: 1515674 - RNA, 19 nt, Artificial Sequence
  Description of Artificial Sequence: Synthetic oligonucleotide
  Sense strand starting at position 2680 of SEQ ID NO: 1244798
agucuuggcgucugaacuu

SEQ ID NO: 1515675 - RNA, 19 nt, Artificial Sequence
  Description of Artificial Sequence: Synthetic oligonucleotide
  Antisense strand to SEQ ID NO: 1515674
aaguucagacgccaagacu

SEQ ID NO: 1515676 - RNA, 19 nt, Artificial Sequence
  Description of Artificial Sequence: Synthetic oligonucleotide
  Sense strand starting at position 3533 of SEQ ID NO: 1244798
ucuucuaaugcauguugau

SEQ ID NO: 1515677 - RNA, 19 nt, Artificial Sequence
  Description of Artificial Sequence: Synthetic oligonucleotide
  Antisense strand to SEQ ID NO: 1515676
aucaacaugcauuagaaga

SEQ ID NO: 1515678 - RNA, 19 nt, Artificial Sequence
  Description of Artificial Sequence: Synthetic oligonucleotide
  Sense strand starting at position 3542 of SEQ ID NO: 1244798
gcauguugauuaucuggga

SEQ ID NO: 1515679 - RNA, 19 nt, Artificial Sequence
  Description of Artificial Sequence: Synthetic oligonucleotide
  Antisense strand to SEQ ID NO: 1515678
ucccagauaaucaacaugc

SEQ ID NO: 1515680 - RNA, 19 nt, Artificial Sequence
  Description of Artificial Sequence: Synthetic oligonucleotide
  Sense strand starting at position 3546 of SEQ ID NO: 1244798
guugauuaucugggaccca

SEQ ID NO: 1515681 - RNA, 19 nt, Artificial Sequence
  Description of Artificial Sequence: Synthetic oligonucleotide
  Antisense strand to SEQ ID NO: 1515680
ugggucccagauaaucaac

SEQ ID NO: 1515682 - RNA, 19 nt, Artificial Sequence
  Description of Artificial Sequence: Synthetic oligonucleotide
  Sense strand starting at position 3547 of SEQ ID NO: 1244798
uugauuaucugggacccau

SEQ ID NO: 1515683 - RNA, 19 nt, Artificial Sequence
  Description of Artificial Sequence: Synthetic oligonucleotide
  Antisense strand to SEQ ID NO: 1515682
augggucccagauaaucaa

SEQ ID NO: 1515684 - RNA, 19 nt, Artificial Sequence
  Description of Artificial Sequence: Synthetic oligonucleotide
  Sense strand starting at position 3672 of SEQ ID NO: 1244798
ugcacugguggcugagaga

SEQ ID NO: 1515685 - RNA, 19 nt, Artificial Sequence
  Description of Artificial Sequence: Synthetic oligonucleotide
  Antisense strand to SEQ ID NO: 1515684
ucucucagccaccagugca

SEQ ID NO: 1515686 - RNA, 19 nt, Artificial Sequence
  Description of Artificial Sequence: Synthetic oligonucleotide
  Sense strand starting at position 3709 of SEQ ID NO: 1244798
uggagagacuucuggguuu

SEQ ID NO: 1515687 - RNA, 19 nt, Artificial Sequence
  Description of Artificial Sequence: Synthetic oligonucleotide
  Antisense strand to SEQ ID NO: 1515686
aaacccagaagucucucca

SEQ ID NO: 1515688 - RNA, 19 nt, Artificial Sequence
  Description of Artificial Sequence: Synthetic oligonucleotide
  Sense strand starting at position 3711 of SEQ ID NO: 1244798
gagagacuucuggguuuaa

SEQ ID NO: 1515689 - RNA, 19 nt, Artificial Sequence
  Description of Artificial Sequence: Synthetic oligonucleotide
  Antisense strand to SEQ ID NO: 1515688
uuaaacccagaagucucuc

SEQ ID NO: 1515690 - RNA, 19 nt, Artificial Sequence
  Description of Artificial Sequence: Synthetic oligonucleotide
  Sense strand starting at position 3712 of SEQ ID NO: 1244798
agagacuucuggguuuaag

SEQ ID NO: 1515691 - RNA, 19 nt, Artificial Sequence
  Description of Artificial Sequence: Synthetic oligonucleotide
  Antisense strand to SEQ ID NO: 1515690
cuuaaacccagaagucucu

SEQ ID NO: 1515692 - RNA, 19 nt, Artificial Sequence
  Description of Artificial Sequence: Synthetic oligonucleotide
  Sense strand starting at position 3809 of SEQ ID NO: 1244798
cccuuaugcuagccugaaa

SEQ ID NO: 1515693 - RNA, 19 nt, Artificial Sequence
  Description of Artificial Sequence: Synthetic oligonucleotide
  Antisense strand to SEQ ID NO: 1515692
uuucaggcuagcauaaggg

SEQ ID NO: 1515694 - RNA, 19 nt, Artificial Sequence
  Description of Artificial Sequence: Synthetic oligonucleotide
  Sense strand starting at position 3812 of SEQ ID NO: 1244798
uuaugcuagccugaaaguu

SEQ ID NO: 1515695 - RNA, 19 nt, Artificial Sequence
  Description of Artificial Sequence: Synthetic oligonucleotide
  Antisense strand to SEQ ID NO: 1515694
aacuuucaggcuagcauaa

SEQ ID NO: 1515696 - RNA, 19 nt, Artificial Sequence
  Description of Artificial Sequence: Synthetic oligonucleotide
  Sense strand starting at position 3940 of SEQ ID NO: 1244798
gguuacccuguccaggaau

SEQ ID NO: 1515697 - RNA, 19 nt, Artificial Sequence
  Description of Artificial Sequence: Synthetic oligonucleotide
  Antisense strand to SEQ ID NO: 1515696
auuccuggacaggguaacc

SEQ ID NO: 1515698 - RNA, 19 nt, Artificial Sequence
  Description of Artificial Sequence: Synthetic oligonucleotide
  Sense strand starting at position 3964 of SEQ ID NO: 1244798
uuuauuugccaguggcaga

SEQ ID NO: 1515699 - RNA, 19 nt, Artificial Sequence
  Description of Artificial Sequence: Synthetic oligonucleotide
  Antisense strand to SEQ ID NO: 1515698
ucugccacuggcaaauaaa

SEQ ID NO: 1515700 - RNA, 19 nt, Artificial Sequence
  Description of Artificial Sequence: Synthetic oligonucleotide
  Sense strand starting at position 3965 of SEQ ID NO: 1244798
uuauuugccaguggcagaa

SEQ ID NO: 1515701 - RNA, 19 nt, Artificial Sequence
  Description of Artificial Sequence: Synthetic oligonucleotide
  Antisense strand to SEQ ID NO: 1515700
uucugccacuggcaaauaa

SEQ ID NO: 1515702 - RNA, 19 nt, Artificial Sequence
  Description of Artificial Sequence: Synthetic oligonucleotide
  Sense strand starting at position 19 of SEQ ID NO: 1244799
accauaucucguuguaacu

SEQ ID NO: 1515703 - RNA, 19 nt, Artificial Sequence
  Description of Artificial Sequence: Synthetic oligonucleotide
  Antisense strand to SEQ ID NO: 1515702
aguuacaacgagauauggu

SEQ ID NO: 1515704 - RNA, 19 nt, Artificial Sequence
  Description of Artificial Sequence: Synthetic oligonucleotide
  Sense strand starting at position 191 of SEQ ID NO: 1244799
aggauuaaugcaugagcca

SEQ ID NO: 1515705 - RNA, 19 nt, Artificial Sequence
  Description of Artificial Sequence: Synthetic oligonucleotide
  Antisense strand to SEQ ID NO: 1515704
uggcucaugcauuaauccu

SEQ ID NO: 1515706 - RNA, 19 nt, Artificial Sequence
  Description of Artificial Sequence: Synthetic oligonucleotide
  Sense strand starting at position 397 of SEQ ID NO: 1244799
ggcagucugauccaggagu

SEQ ID NO: 1515707 - RNA, 19 nt, Artificial Sequence
  Description of Artificial Sequence: Synthetic oligonucleotide
  Antisense strand to SEQ ID NO: 1515706
acuccuggaucagacugcc

SEQ ID NO: 1515708 - RNA, 19 nt, Artificial Sequence
  Description of Artificial Sequence: Synthetic oligonucleotide
  Sense strand starting at position 399 of SEQ ID NO: 1244799
cagucugauccaggagucu

SEQ ID NO: 1515709 - RNA, 19 nt, Artificial Sequence
  Description of Artificial Sequence: Synthetic oligonucleotide
  Antisense strand to SEQ ID NO: 1515708
agacuccuggaucagacug

SEQ ID NO: 1515710 - RNA, 19 nt, Artificial Sequence
  Description of Artificial Sequence: Synthetic oligonucleotide
  Sense strand starting at position 412 of SEQ ID NO: 1244799
gagucuguauucucagcua

SEQ ID NO: 1515711 - RNA, 19 nt, Artificial Sequence
  Description of Artificial Sequence: Synthetic oligonucleotide
  Antisense strand to SEQ ID NO: 1515710
uagcugagaauacagacuc

SEQ ID NO: 1515712 - RNA, 19 nt, Artificial Sequence
  Description of Artificial Sequence: Synthetic oligonucleotide
  Sense strand starting at position 415 of SEQ ID NO: 1244799
ucuguauucucagcuacua

SEQ ID NO: 1515713 - RNA, 19 nt, Artificial Sequence
  Description of Artificial Sequence: Synthetic oligonucleotide
  Antisense strand to SEQ ID NO: 1515712
uaguagcugagaauacaga

SEQ ID NO: 1515714 - RNA, 19 nt, Artificial Sequence
  Description of Artificial Sequence: Synthetic oligonucleotide
  Sense strand starting at position 577 of SEQ ID NO: 1244799
uggugugugcaaagucaug

SEQ ID NO: 1515715 - RNA, 19 nt, Artificial Sequence
  Description of Artificial Sequence: Synthetic oligonucleotide
  Antisense strand to SEQ ID NO: 1515714
caugacuuugcacacacca

SEQ ID NO: 1515716 - RNA, 19 nt, Artificial Sequence
  Description of Artificial Sequence: Synthetic oligonucleotide
  Sense strand starting at position 583 of SEQ ID NO: 1244799
gugcaaagucaugaagaua

SEQ ID NO: 1515717 - RNA, 19 nt, Artificial Sequence
  Description of Artificial Sequence: Synthetic oligonucleotide
  Antisense strand to SEQ ID NO: 1515716
uaucuucaugacuuugcac

SEQ ID NO: 1515718 - RNA, 19 nt, Artificial Sequence
  Description of Artificial Sequence: Synthetic oligonucleotide
  Sense strand starting at position 666 of SEQ ID NO: 1244799
aggagacugcuaggucaga

SEQ ID NO: 1515719 - RNA, 19 nt, Artificial Sequence
  Description of Artificial Sequence: Synthetic oligonucleotide
  Antisense strand to SEQ ID NO: 1515718
ucugaccuagcagucuccu

SEQ ID NO: 1515720 - RNA, 19 nt, Artificial Sequence
  Description of Artificial Sequence: Synthetic oligonucleotide
  Sense strand starting at position 667 of SEQ ID NO: 1244799
ggagacugcuaggucagau

SEQ ID NO: 1515721 - RNA, 19 nt, Artificial Sequence
  Description of Artificial Sequence: Synthetic oligonucleotide
  Antisense strand to SEQ ID NO: 1515720
aucugaccuagcagucucc

SEQ ID NO: 1515722 - RNA, 19 nt, Artificial Sequence
  Description of Artificial Sequence: Synthetic oligonucleotide
  Sense strand starting at position 684 of SEQ ID NO: 1244799
aucacagagagcuguguaa

SEQ ID NO: 1515723 - RNA, 19 nt, Artificial Sequence
  Description of Artificial Sequence: Synthetic oligonucleotide
  Antisense strand to SEQ ID NO: 1515722
uuacacagcucucugugau

SEQ ID NO: 1515724 - RNA, 19 nt, Artificial Sequence
  Description of Artificial Sequence: Synthetic oligonucleotide
  Sense strand starting at position 686 of SEQ ID NO: 1244799
cacagagagcuguguaaau

SEQ ID NO: 1515725 - RNA, 19 nt, Artificial Sequence
  Description of Artificial Sequence: Synthetic oligonucleotide
  Antisense strand to SEQ ID NO: 1515724
auuuacacagcucucugug

SEQ ID NO: 1515726 - RNA, 19 nt, Artificial Sequence
  Description of Artificial Sequence: Synthetic oligonucleotide
  Sense strand starting at position 688 of SEQ ID NO: 1244799
cagagagcuguguaaauug

SEQ ID NO: 1515727 - RNA, 19 nt, Artificial Sequence
  Description of Artificial Sequence: Synthetic oligonucleotide
  Antisense strand to SEQ ID NO: 1515726
caauuuacacagcucucug

SEQ ID NO: 1515728 - RNA, 19 nt, Artificial Sequence
  Description of Artificial Sequence: Synthetic oligonucleotide
  Sense strand starting at position 843 of SEQ ID NO: 1244799
acuguugggaauugacaau

SEQ ID NO: 1515729 - RNA, 19 nt, Artificial Sequence
  Description of Artificial Sequence: Synthetic oligonucleotide
  Antisense strand to SEQ ID NO: 1515728
auugucaauucccaacagu

SEQ ID NO: 1515730 - RNA, 19 nt, Artificial Sequence
  Description of Artificial Sequence: Synthetic oligonucleotide
  Sense strand starting at position 1058 of SEQ ID NO: 1244799
cccagugagcuccauguga

SEQ ID NO: 1515731 - RNA, 19 nt, Artificial Sequence
  Description of Artificial Sequence: Synthetic oligonucleotide
  Antisense strand to SEQ ID NO: 1515730
ucacauggagcucacuggg

SEQ ID NO: 1515732 - RNA, 19 nt, Artificial Sequence
  Description of Artificial Sequence: Synthetic oligonucleotide
  Sense strand starting at position 1060 of SEQ ID NO: 1244799
cagugagcuccaugugaag

SEQ ID NO: 1515733 - RNA, 19 nt, Artificial Sequence
  Description of Artificial Sequence: Synthetic oligonucleotide
  Antisense strand to SEQ ID NO: 1515732
cuucacauggagcucacug

SEQ ID NO: 1515734 - RNA, 19 nt, Artificial Sequence
  Description of Artificial Sequence: Synthetic oligonucleotide
  Sense strand starting at position 1062 of SEQ ID NO: 1244799
gugagcuccaugugaagca

SEQ ID NO: 1515735 - RNA, 19 nt, Artificial Sequence
  Description of Artificial Sequence: Synthetic oligonucleotide
  Antisense strand to SEQ ID NO: 1515734
ugcuucacauggagcucac

SEQ ID NO: 1515736 - RNA, 19 nt, Artificial Sequence
  Description of Artificial Sequence: Synthetic oligonucleotide
  Sense strand starting at position 1152 of SEQ ID NO: 1244799
uggguauuuaguuggugua

SEQ ID NO: 1515737 - RNA, 19 nt, Artificial Sequence
  Description of Artificial Sequence: Synthetic oligonucleotide
  Antisense strand to SEQ ID NO: 1515736
uacaccaacuaaauaccca

SEQ ID NO: 1515738 - RNA, 19 nt, Artificial Sequence
  Description of Artificial Sequence: Synthetic oligonucleotide
  Sense strand starting at position 1153 of SEQ ID NO: 1244799
ggguauuuaguugguguaa

SEQ ID NO: 1515739 - RNA, 19 nt, Artificial Sequence
  Description of Artificial Sequence: Synthetic oligonucleotide
  Antisense strand to SEQ ID NO: 1515738
uuacaccaacuaaauaccc

SEQ ID NO: 1515740 - RNA, 19 nt, Artificial Sequence
  Description of Artificial Sequence: Synthetic oligonucleotide
  Sense strand starting at position 1154 of SEQ ID NO: 1244799
gguauuuaguugguguaaa

SEQ ID NO: 1515741 - RNA, 19 nt, Artificial Sequence
  Description of Artificial Sequence: Synthetic oligonucleotide
  Antisense strand to SEQ ID NO: 1515740
uuuacaccaacuaaauacc

SEQ ID NO: 1515742 - RNA, 19 nt, Artificial Sequence
  Description of Artificial Sequence: Synthetic oligonucleotide
  Sense strand starting at position 1327 of SEQ ID NO: 1244799
gggaacgugucauuagaaa

SEQ ID NO: 1515743 - RNA, 19 nt, Artificial Sequence
  Description of Artificial Sequence: Synthetic oligonucleotide
  Antisense strand to SEQ ID NO: 1515742
uuucuaaugacacguuccc

SEQ ID NO: 1515744 - RNA, 19 nt, Artificial Sequence
  Description of Artificial Sequence: Synthetic oligonucleotide
  Sense strand starting at position 1334 of SEQ ID NO: 1244799
ugucauuagaaaugagugu

SEQ ID NO: 1515745 - RNA, 19 nt, Artificial Sequence
  Description of Artificial Sequence: Synthetic oligonucleotide
  Antisense strand to SEQ ID NO: 1515744
acacucauuucuaaugaca

SEQ ID NO: 1515746 - RNA, 19 nt, Artificial Sequence
  Description of Artificial Sequence: Synthetic oligonucleotide
  Sense strand starting at position 1338 of SEQ ID NO: 1244799
auuagaaaugagugucaau

SEQ ID NO: 1515747 - RNA, 19 nt, Artificial Sequence
  Description of Artificial Sequence: Synthetic oligonucleotide
  Antisense strand to SEQ ID NO: 1515746
auugacacucauuucuaau

SEQ ID NO: 1515748 - RNA, 19 nt, Artificial Sequence
  Description of Artificial Sequence: Synthetic oligonucleotide
  Sense strand starting at position 1345 of SEQ ID NO: 1244799
augagugucaaugguacua

SEQ ID NO: 1515749 - RNA, 19 nt, Artificial Sequence
  Description of Artificial Sequence: Synthetic oligonucleotide
  Antisense strand to SEQ ID NO: 1515748
uaguaccauugacacucau

SEQ ID NO: 1515750 - RNA, 19 nt, Artificial Sequence
  Description of Artificial Sequence: Synthetic oligonucleotide
  Sense strand starting at position 1426 of SEQ ID NO: 1244799
ggccguuucgaaaggaagu

SEQ ID NO: 1515751 - RNA, 19 nt, Artificial Sequence
  Description of Artificial Sequence: Synthetic oligonucleotide
  Antisense strand to SEQ ID NO: 1515750
acuuccuuucgaaacggcc

SEQ ID NO: 1515752 - RNA, 19 nt, Artificial Sequence
  Description of Artificial Sequence: Synthetic oligonucleotide
  Sense strand starting at position 1480 of SEQ ID NO: 1244799
accggaaugcguagauguu

SEQ ID NO: 1515753 - RNA, 19 nt, Artificial Sequence
  Description of Artificial Sequence: Synthetic oligonucleotide
  Antisense strand to SEQ ID NO: 1515752
aacaucuacgcauuccggu

SEQ ID NO: 1515754 - RNA, 19 nt, Artificial Sequence
  Description of Artificial Sequence: Synthetic oligonucleotide
  Sense strand starting at position 1481 of SEQ ID NO: 1244799
ccggaaugcguagauguuu

SEQ ID NO: 1515755 - RNA, 19 nt, Artificial Sequence
  Description of Artificial Sequence: Synthetic oligonucleotide
  Antisense strand to SEQ ID NO: 1515754
aaacaucuacgcauuccgg

SEQ ID NO: 1515756 - RNA, 19 nt, Artificial Sequence
  Description of Artificial Sequence: Synthetic oligonucleotide
  Sense strand starting at position 2192 of SEQ ID NO: 1244799
gggaaaucuuuggaggaau

SEQ ID NO: 1515757 - RNA, 19 nt, Artificial Sequence
  Description of Artificial Sequence: Synthetic oligonucleotide
  Antisense strand to SEQ ID NO: 1515756
auuccuccaaagauuuccc

SEQ ID NO: 1515758 - RNA, 19 nt, Artificial Sequence
  Description of Artificial Sequence: Synthetic oligonucleotide
  Sense strand starting at position 2206 of SEQ ID NO: 1244799
ggaauccaguuauucgaga

SEQ ID NO: 1515759 - RNA, 19 nt, Artificial Sequence
  Description of Artificial Sequence: Synthetic oligonucleotide
  Antisense strand to SEQ ID NO: 1515758
ucucgaauaacuggauucc

SEQ ID NO: 1515760 - RNA, 19 nt, Artificial Sequence
  Description of Artificial Sequence: Synthetic oligonucleotide
  Sense strand starting at position 2207 of SEQ ID NO: 1244799
gaauccaguuauucgagaa

SEQ ID NO: 1515761 - RNA, 19 nt, Artificial Sequence
  Description of Artificial Sequence: Synthetic oligonucleotide
  Antisense strand to SEQ ID NO: 1515760
uucucgaauaacuggauuc

SEQ ID NO: 1515762 - RNA, 19 nt, Artificial Sequence
  Description of Artificial Sequence: Synthetic oligonucleotide
  Sense strand starting at position 2271 of SEQ ID NO: 1244799
gcuagaacuucuguaguuc

SEQ ID NO: 1515763 - RNA, 19 nt, Artificial Sequence
  Description of Artificial Sequence: Synthetic oligonucleotide
  Antisense strand to SEQ ID NO: 1515762
gaacuacagaaguucuagc

SEQ ID NO: 1515764 - RNA, 19 nt, Artificial Sequence
  Description of Artificial Sequence: Synthetic oligonucleotide
  Sense strand starting at position 2272 of SEQ ID NO: 1244799
cuagaacuucuguaguucu

SEQ ID NO: 1515765 - RNA, 19 nt, Artificial Sequence
  Description of Artificial Sequence: Synthetic oligonucleotide
  Antisense strand to SEQ ID NO: 1515764
agaacuacagaaguucuag

SEQ ID NO: 1515766 - RNA, 19 nt, Artificial Sequence
  Description of Artificial Sequence: Synthetic oligonucleotide
  Sense strand starting at position 2311 of SEQ ID NO: 1244799
ugcugucugccagaaagac

SEQ ID NO: 1515767 - RNA, 19 nt, Artificial Sequence
  Description of Artificial Sequence: Synthetic oligonucleotide
  Antisense strand to SEQ ID NO: 1515766
gucuuucuggcagacagca

SEQ ID NO: 1515768 - RNA, 19 nt, Artificial Sequence
  Description of Artificial Sequence: Synthetic oligonucleotide
  Sense strand starting at position 2441 of SEQ ID NO: 1244799
agaggagucucagcaguua

SEQ ID NO: 1515769 - RNA, 19 nt, Artificial Sequence
  Description of Artificial Sequence: Synthetic oligonucleotide
  Antisense strand to SEQ ID NO: 1515768
uaacugcugagacuccucu

SEQ ID NO: 1515770 - RNA, 19 nt, Artificial Sequence
  Description of Artificial Sequence: Synthetic oligonucleotide
  Sense strand starting at position 2452 of SEQ ID NO: 1244799
agcaguuauuuacaaagau

SEQ ID NO: 1515771 - RNA, 19 nt, Artificial Sequence
  Description of Artificial Sequence: Synthetic oligonucleotide
  Antisense strand to SEQ ID NO: 1515770
aucuuuguaaauaacugcu

SEQ ID NO: 1515772 - RNA, 19 nt, Artificial Sequence
  Description of Artificial Sequence: Synthetic oligonucleotide
  Sense strand starting at position 3632 of SEQ ID NO: 1244799
agccauauggcuuacguaa

SEQ ID NO: 1515773 - RNA, 19 nt, Artificial Sequence
  Description of Artificial Sequence: Synthetic oligonucleotide
  Antisense strand to SEQ ID NO: 1515772
uuacguaagccauauggcu

SEQ ID NO: 1515774 - RNA, 19 nt, Artificial Sequence
  Description of Artificial Sequence: Synthetic oligonucleotide
  Sense strand starting at position 3643 of SEQ ID NO: 1244799
uuacguaagucaguuagua

SEQ ID NO: 1515775 - RNA, 19 nt, Artificial Sequence
  Description of Artificial Sequence: Synthetic oligonucleotide
  Antisense strand to SEQ ID NO: 1515774
uacuaacugacuuacguaa

SEQ ID NO: 1515776 - RNA, 19 nt, Artificial Sequence
  Description of Artificial Sequence: Synthetic oligonucleotide
  Sense strand starting at position 3691 of SEQ ID NO: 1244799
uuguguagauuaccuuaaa

SEQ ID NO: 1515777 - RNA, 19 nt, Artificial Sequence
  Description of Artificial Sequence: Synthetic oligonucleotide
  Antisense strand to SEQ ID NO: 1515776
uuuaagguaaucuacacaa

SEQ ID NO: 1515778 - RNA, 19 nt, Artificial Sequence
  Description of Artificial Sequence: Synthetic oligonucleotide
  Sense strand starting at position 3692 of SEQ ID NO: 1244799
uguguagauuaccuuaaac

SEQ ID NO: 1515779 - RNA, 19 nt, Artificial Sequence
  Description of Artificial Sequence: Synthetic oligonucleotide
  Antisense strand to SEQ ID NO: 1515778
guuuaagguaaucuacaca

SEQ ID NO: 1515780 - RNA, 19 nt, Artificial Sequence
  Description of Artificial Sequence: Synthetic oligonucleotide
  Sense strand starting at position 3777 of SEQ ID NO: 1244799
gguuuauauugcuccauca

SEQ ID NO: 1515781 - RNA, 19 nt, Artificial Sequence
  Description of Artificial Sequence: Synthetic oligonucleotide
  Antisense strand to SEQ ID NO: 1515780
ugauggagcaauauaaacc

SEQ ID NO: 1515782 - RNA, 19 nt, Artificial Sequence
  Description of Artificial Sequence: Synthetic oligonucleotide
  Sense strand starting at position 37 of SEQ ID NO: 1244800
ucuuaaagauggguucuca

SEQ ID NO: 1515783 - RNA, 19 nt, Artificial Sequence
  Description of Artificial Sequence: Synthetic oligonucleotide
  Antisense strand to SEQ ID NO: 1515782
ugagaacccaucuuuaaga

SEQ ID NO: 1515784 - RNA, 19 nt, Artificial Sequence
  Description of Artificial Sequence: Synthetic oligonucleotide
  Sense strand starting at position 54 of SEQ ID NO: 1244800
cauuauggugcuuagacua

SEQ ID NO: 1515785 - RNA, 19 nt, Artificial Sequence
  Description of Artificial Sequence: Synthetic oligonucleotide
  Antisense strand to SEQ ID NO: 1515784
uagucuaagcaccauaaug

SEQ ID NO: 1515786 - RNA, 19 nt, Artificial Sequence
  Description of Artificial Sequence: Synthetic oligonucleotide
  Sense strand starting at position 61 of SEQ ID NO: 1244800
gugcuuagacuagacucua

SEQ ID NO: 1515787 - RNA, 19 nt, Artificial Sequence
  Description of Artificial Sequence: Synthetic oligonucleotide
  Antisense strand to SEQ ID NO: 1515786
uagagucuagucuaagcac

SEQ ID NO: 1515788 - RNA, 19 nt, Artificial Sequence
  Description of Artificial Sequence: Synthetic oligonucleotide
  Sense strand starting at position 101 of SEQ ID NO: 1244800
ccauguugcccagaccaga

SEQ ID NO: 1515789 - RNA, 19 nt, Artificial Sequence
  Description of Artificial Sequence: Synthetic oligonucleotide
  Antisense strand to SEQ ID NO: 1515788
ucuggucugggcaacaugg

SEQ ID NO: 1515790 - RNA, 19 nt, Artificial Sequence
  Description of Artificial Sequence: Synthetic oligonucleotide
  Sense strand starting at position 259 of SEQ ID NO: 1244800
ucaugaauuuacuaauggu

SEQ ID NO: 1515791 - RNA, 19 nt, Artificial Sequence
  Description of Artificial Sequence: Synthetic oligonucleotide
  Antisense strand to SEQ ID NO: 1515790
accauuaguaaauucauga

SEQ ID NO: 1515792 - RNA, 19 nt, Artificial Sequence
  Description of Artificial Sequence: Synthetic oligonucleotide
  Sense strand starting at position 269 of SEQ ID NO: 1244800
acuaaugguucuuugugau

SEQ ID NO: 1515793 - RNA, 19 nt, Artificial Sequence
  Description of Artificial Sequence: Synthetic oligonucleotide
  Antisense strand to SEQ ID NO: 1515792
aucacaaagaaccauuagu

SEQ ID NO: 1515794 - RNA, 19 nt, Artificial Sequence
  Description of Artificial Sequence: Synthetic oligonucleotide
  Sense strand starting at position 404 of SEQ ID NO: 1244800
uccugucuggaacauguaa

SEQ ID NO: 1515795 - RNA, 19 nt, Artificial Sequence
  Description of Artificial Sequence: Synthetic oligonucleotide
  Antisense strand to SEQ ID NO: 1515794
uuacauguuccagacagga

SEQ ID NO: 1515796 - RNA, 19 nt, Artificial Sequence
  Description of Artificial Sequence: Synthetic oligonucleotide
  Sense strand starting at position 426 of SEQ ID NO: 1244800
ggaaauaaaugugcugacu

SEQ ID NO: 1515797 - RNA, 19 nt, Artificial Sequence
  Description of Artificial Sequence: Synthetic oligonucleotide
  Antisense strand to SEQ ID NO: 1515796
agucagcacauuuauuucc

SEQ ID NO: 1515798 - RNA, 19 nt, Artificial Sequence
  Description of Artificial Sequence: Synthetic oligonucleotide
  Sense strand starting at position 737 of SEQ ID NO: 1244800
cagagugauguguaccaaa

SEQ ID NO: 1515799 - RNA, 19 nt, Artificial Sequence
  Description of Artificial Sequence: Synthetic oligonucleotide
  Antisense strand to SEQ ID NO: 1515798
uuugguacacaucacucug

SEQ ID NO: 1515800 - RNA, 19 nt, Artificial Sequence
  Description of Artificial Sequence: Synthetic oligonucleotide
  Sense strand starting at position 896 of SEQ ID NO: 1244800
agaucuuggcucugagaca

SEQ ID NO: 1515801 - RNA, 19 nt, Artificial Sequence
  Description of Artificial Sequence: Synthetic oligonucleotide
  Antisense strand to SEQ ID NO: 1515800
ugucucagagccaagaucu

SEQ ID NO: 1515802 - RNA, 19 nt, Artificial Sequence
  Description of Artificial Sequence: Synthetic oligonucleotide
  Sense strand starting at position 1555 of SEQ ID NO: 1244800
uguuucuccgaagaacgaa

SEQ ID NO: 1515803 - RNA, 19 nt, Artificial Sequence
  Description of Artificial Sequence: Synthetic oligonucleotide
  Antisense strand to SEQ ID NO: 1515802
uucguucuucggagaaaca

SEQ ID NO: 1515804 - RNA, 19 nt, Artificial Sequence
  Description of Artificial Sequence: Synthetic oligonucleotide
  Sense strand starting at position 1612 of SEQ ID NO: 1244800
uccugucaucccgaagagu

SEQ ID NO: 1515805 - RNA, 19 nt, Artificial Sequence
  Description of Artificial Sequence: Synthetic oligonucleotide
  Antisense strand to SEQ ID NO: 1515804
acucuucgggaugacagga

SEQ ID NO: 1515806 - RNA, 19 nt, Artificial Sequence
  Description of Artificial Sequence: Synthetic oligonucleotide
  Sense strand starting at position 1615 of SEQ ID NO: 1244800
ugucaucccgaagagucuu

SEQ ID NO: 1515807 - RNA, 19 nt, Artificial Sequence
  Description of Artificial Sequence: Synthetic oligonucleotide
  Antisense strand to SEQ ID NO: 1515806
aagacucuucgggaugaca

SEQ ID NO: 1515808 - RNA, 19 nt, Artificial Sequence
  Description of Artificial Sequence: Synthetic oligonucleotide
  Sense strand starting at position 2456 of SEQ ID NO: 1244800
gcgggaaucagcuaguuag

SEQ ID NO: 1515809 - RNA, 19 nt, Artificial Sequence
  Description of Artificial Sequence: Synthetic oligonucleotide
  Antisense strand to SEQ ID NO: 1515808
cuaacuagcugauucccgc

SEQ ID NO: 1515810 - RNA, 19 nt, Artificial Sequence
  Description of Artificial Sequence: Synthetic oligonucleotide
  Sense strand starting at position 2459 of SEQ ID NO: 1244800
ggaaucagcuaguuagaua

SEQ ID NO: 1515811 - RNA, 19 nt, Artificial Sequence
  Description of Artificial Sequence: Synthetic oligonucleotide
  Antisense strand to SEQ ID NO: 1515810
uaucuaacuagcugauucc

SEQ ID NO: 1515812 - RNA, 19 nt, Artificial Sequence
  Description of Artificial Sequence: Synthetic oligonucleotide
  Sense strand starting at position 2550 of SEQ ID NO: 1244800
gggugacuccgccugcuuu

SEQ ID NO: 1515813 - RNA, 19 nt, Artificial Sequence
  Description of Artificial Sequence: Synthetic oligonucleotide
  Antisense strand to SEQ ID NO: 1515812
aaagcaggcggagucaccc

SEQ ID NO: 1515814 - RNA, 19 nt, Artificial Sequence
  Description of Artificial Sequence: Synthetic oligonucleotide
  Sense strand starting at position 2770 of SEQ ID NO: 1244800
cguguagggcuugacauuu

SEQ ID NO: 1515815 - RNA, 19 nt, Artificial Sequence
  Description of Artificial Sequence: Synthetic oligonucleotide
  Antisense strand to SEQ ID NO: 1515814
aaaugucaagcccuacacg

SEQ ID NO: 1515816 - RNA, 19 nt, Artificial Sequence
  Description of Artificial Sequence: Synthetic oligonucleotide
  Sense strand starting at position 2791 of SEQ ID NO: 1244800
augcgucugaauugaaaua

SEQ ID NO: 1515817 - RNA, 19 nt, Artificial Sequence
  Description of Artificial Sequence: Synthetic oligonucleotide
  Antisense strand to SEQ ID NO: 1515816
uauuucaauucagacgcau

SEQ ID NO: 1515818 - RNA, 19 nt, Artificial Sequence
  Description of Artificial Sequence: Synthetic oligonucleotide
  Sense strand starting at position 2869 of SEQ ID NO: 1244800
aauugaagccagugguuga

SEQ ID NO: 1515819 - RNA, 19 nt, Artificial Sequence
  Description of Artificial Sequence: Synthetic oligonucleotide
  Antisense strand to SEQ ID NO: 1515818
ucaaccacuggcuucaauu

SEQ ID NO: 1515820 - RNA, 19 nt, Artificial Sequence
  Description of Artificial Sequence: Synthetic oligonucleotide
  Sense strand starting at position 2920 of SEQ ID NO: 1244800
gaggaugaacuuugcauaa

SEQ ID NO: 1515821 - RNA, 19 nt, Artificial Sequence
  Description of Artificial Sequence: Synthetic oligonucleotide
  Antisense strand to SEQ ID NO: 1515820
uuaugcaaaguucauccuc

SEQ ID NO: 1515822 - RNA, 19 nt, Artificial Sequence
  Description of Artificial Sequence: Synthetic oligonucleotide
  Sense strand starting at position 2941 of SEQ ID NO: 1244800
gagugauuucuguguaugu

SEQ ID NO: 1515823 - RNA, 19 nt, Artificial Sequence
  Description of Artificial Sequence: Synthetic oligonucleotide
  Antisense strand to SEQ ID NO: 1515822
acauacacagaaaucacuc

SEQ ID NO: 1515824 - RNA, 19 nt, Artificial Sequence
  Description of Artificial Sequence: Synthetic oligonucleotide
  Sense strand starting at position 2942 of SEQ ID NO: 1244800
agugauuucuguguaugug

SEQ ID NO: 1515825 - RNA, 19 nt, Artificial Sequence
  Description of Artificial Sequence: Synthetic oligonucleotide
  Antisense strand to SEQ ID NO: 1515824
cacauacacagaaaucacu

SEQ ID NO: 1515826 - RNA, 19 nt, Artificial Sequence
  Description of Artificial Sequence: Synthetic oligonucleotide
  Sense strand starting at position 3031 of SEQ ID NO: 1244800
guuuaauacgaacagguau

SEQ ID NO: 1515827 - RNA, 19 nt, Artificial Sequence
  Description of Artificial Sequence: Synthetic oligonucleotide
  Antisense strand to SEQ ID NO: 1515826
auaccuguucguauuaaac

SEQ ID NO: 1515828 - RNA, 19 nt, Artificial Sequence
  Description of Artificial Sequence: Synthetic oligonucleotide
  Sense strand starting at position 3128 of SEQ ID NO: 1244800
acauguuccuguuuagaaa

SEQ ID NO: 1515829 - RNA, 19 nt, Artificial Sequence
  Description of Artificial Sequence: Synthetic oligonucleotide
  Antisense strand to SEQ ID NO: 1515828
uuucuaaacaggaacaugu

SEQ ID NO: 1515830 - RNA, 19 nt, Artificial Sequence
  Description of Artificial Sequence: Synthetic oligonucleotide
  Sense strand starting at position 3218 of SEQ ID NO: 1244800
aaggauagcuguucuuauu

SEQ ID NO: 1515831 - RNA, 19 nt, Artificial Sequence
  Description of Artificial Sequence: Synthetic oligonucleotide
  Antisense strand to SEQ ID NO: 1515830
aauaagaacagcuauccuu

SEQ ID NO: 1515832 - RNA, 19 nt, Artificial Sequence
  Description of Artificial Sequence: Synthetic oligonucleotide
  Sense strand starting at position 3364 of SEQ ID NO: 1244800
auaccugaagccugucuaa

SEQ ID NO: 1515833 - RNA, 19 nt, Artificial Sequence
  Description of Artificial Sequence: Synthetic oligonucleotide
  Antisense strand to SEQ ID NO: 1515832
uuagacaggcuucagguau

SEQ ID NO: 1515834 - RNA, 19 nt, Artificial Sequence
  Description of Artificial Sequence: Synthetic oligonucleotide
  Sense strand starting at position 3374 of SEQ ID NO: 1244800
ccugucuaagucuacagau

SEQ ID NO: 1515835 - RNA, 19 nt, Artificial Sequence
  Description of Artificial Sequence: Synthetic oligonucleotide
  Antisense strand to SEQ ID NO: 1515834
aucuguagacuuagacagg

SEQ ID NO: 1515836 - RNA, 19 nt, Artificial Sequence
  Description of Artificial Sequence: Synthetic oligonucleotide
  Sense strand starting at position 3376 of SEQ ID NO: 1244800
ugucuaagucuacagauuc

SEQ ID NO: 1515837 - RNA, 19 nt, Artificial Sequence
  Description of Artificial Sequence: Synthetic oligonucleotide
  Antisense strand to SEQ ID NO: 1515836
gaaucuguagacuuagaca

SEQ ID NO: 1515838 - RNA, 19 nt, Artificial Sequence
  Description of Artificial Sequence: Synthetic oligonucleotide
  Sense strand starting at position 3457 of SEQ ID NO: 1244800
gucacugguggugagaauu

SEQ ID NO: 1515839 - RNA, 19 nt, Artificial Sequence
  Description of Artificial Sequence: Synthetic oligonucleotide
  Antisense strand to SEQ ID NO: 1515838
aauucucaccaccagugac

SEQ ID NO: 1515840 - RNA, 19 nt, Artificial Sequence
  Description of Artificial Sequence: Synthetic oligonucleotide
  Sense strand starting at position 3463 of SEQ ID NO: 1244800
gguggugagaauugagaac

SEQ ID NO: 1515841 - RNA, 19 nt, Artificial Sequence
  Description of Artificial Sequence: Synthetic oligonucleotide
  Antisense strand to SEQ ID NO: 1515840
guucucaauucucaccacc

SEQ ID NO: 1515842 - RNA, 19 nt, Artificial Sequence
  Description of Artificial Sequence: Synthetic oligonucleotide
  Sense strand starting at position 3503 of SEQ ID NO: 1244800
cacagcucaguauggaaau

SEQ ID NO: 1515843 - RNA, 19 nt, Artificial Sequence
  Description of Artificial Sequence: Synthetic oligonucleotide
  Antisense strand to SEQ ID NO: 1515842
auuuccauacugagcugug

SEQ ID NO: 1515844 - RNA, 19 nt, Artificial Sequence
  Description of Artificial Sequence: Synthetic oligonucleotide
  Sense strand starting at position 3522 of SEQ ID NO: 1244800
ugcuguauuuaccuguaga

SEQ ID NO: 1515845 - RNA, 19 nt, Artificial Sequence
  Description of Artificial Sequence: Synthetic oligonucleotide
  Antisense strand to SEQ ID NO: 1515844
ucuacagguaaauacagca

SEQ ID NO: 1515846 - RNA, 19 nt, Artificial Sequence
  Description of Artificial Sequence: Synthetic oligonucleotide
  Sense strand starting at position 3523 of SEQ ID NO: 1244800
gcuguauuuaccuguagag

SEQ ID NO: 1515847 - RNA, 19 nt, Artificial Sequence
  Description of Artificial Sequence: Synthetic oligonucleotide
  Antisense strand to SEQ ID NO: 1515846
cucuacagguaaauacagc

SEQ ID NO: 1515848 - RNA, 19 nt, Artificial Sequence
  Description of Artificial Sequence: Synthetic oligonucleotide
  Sense strand starting at position 3560 of SEQ ID NO: 1244800
gcuguuuaucuacaccaca

SEQ ID NO: 1515849 - RNA, 19 nt, Artificial Sequence
  Description of Artificial Sequence: Synthetic oligonucleotide
  Antisense strand to SEQ ID NO: 1515848
ugugguguagauaaacagc

SEQ ID NO: 1515850 - RNA, 19 nt, Artificial Sequence
  Description of Artificial Sequence: Synthetic oligonucleotide
  Sense strand starting at position 3660 of SEQ ID NO: 1244800
ggucuaggauuuguuuagu

SEQ ID NO: 1515851 - RNA, 19 nt, Artificial Sequence
  Description of Artificial Sequence: Synthetic oligonucleotide
  Antisense strand to SEQ ID NO: 1515850
acuaaacaaauccuagacc

SEQ ID NO: 1515852 - RNA, 19 nt, Artificial Sequence
  Description of Artificial Sequence: Synthetic oligonucleotide
  Sense strand starting at position 3666 of SEQ ID NO: 1244800
ggauuuguuuagugauuua

SEQ ID NO: 1515853 - RNA, 19 nt, Artificial Sequence
  Description of Artificial Sequence: Synthetic oligonucleotide
  Antisense strand to SEQ ID NO: 1515852
uaaaucacuaaacaaaucc

SEQ ID NO: 1515854 - RNA, 19 nt, Artificial Sequence
  Description of Artificial Sequence: Synthetic oligonucleotide
  Sense strand starting at position 3673 of SEQ ID NO: 1244800
uuuagugauuuacugcuua

SEQ ID NO: 1515855 - RNA, 19 nt, Artificial Sequence
  Description of Artificial Sequence: Synthetic oligonucleotide
  Antisense strand to SEQ ID NO: 1515854
uaagcaguaaaucacuaaa

SEQ ID NO: 1515856 - RNA, 19 nt, Artificial Sequence
  Description of Artificial Sequence: Synthetic oligonucleotide
  Sense strand starting at position 3766 of SEQ ID NO: 1244800
cauauuauccgcugauaga

SEQ ID NO: 1515857 - RNA, 19 nt, Artificial Sequence
  Description of Artificial Sequence: Synthetic oligonucleotide
  Antisense strand to SEQ ID NO: 1515856
ucuaucagcggauaauaug

SEQ ID NO: 1515858 - RNA, 19 nt, Artificial Sequence
  Description of Artificial Sequence: Synthetic oligonucleotide
  Sense strand starting at position 3767 of SEQ ID NO: 1244800
auauuauccgcugauagaa

SEQ ID NO: 1515859 - RNA, 19 nt, Artificial Sequence
  Description of Artificial Sequence: Synthetic oligonucleotide
  Antisense strand to SEQ ID NO: 1515858
uucuaucagcggauaauau

SEQ ID NO: 1515860 - RNA, 19 nt, Artificial Sequence
  Description of Artificial Sequence: Synthetic oligonucleotide
  Sense strand starting at position 3911 of SEQ ID NO: 1244800
gcuucugacuucucaagag

SEQ ID NO: 1515861 - RNA, 19 nt, Artificial Sequence
  Description of Artificial Sequence: Synthetic oligonucleotide
  Antisense strand to SEQ ID NO: 1515860
cucuugagaagucagaagc

SEQ ID NO: 1515862 - RNA, 19 nt, Artificial Sequence
  Description of Artificial Sequence: Synthetic oligonucleotide
  Sense strand starting at position 25 of SEQ ID NO: 1244801
acgauauuaggguaauugu

SEQ ID NO: 1515863 - RNA, 19 nt, Artificial Sequence
  Description of Artificial Sequence: Synthetic oligonucleotide
  Antisense strand to SEQ ID NO: 1515862
acaauuacccuaauaucgu

SEQ ID NO: 1515864 - RNA, 19 nt, Artificial Sequence
  Description of Artificial Sequence: Synthetic oligonucleotide
  Sense strand starting at position 145 of SEQ ID NO: 1244801
ucuuaaagauggguucuca

SEQ ID NO: 1515865 - RNA, 19 nt, Artificial Sequence
  Description of Artificial Sequence: Synthetic oligonucleotide
  Antisense strand to SEQ ID NO: 1515864
ugagaacccaucuuuaaga

SEQ ID NO: 1515866 - RNA, 19 nt, Artificial Sequence
  Description of Artificial Sequence: Synthetic oligonucleotide
  Sense strand starting at position 162 of SEQ ID NO: 1244801
cauuauggugcuuagacua

SEQ ID NO: 1515867 - RNA, 19 nt, Artificial Sequence
  Description of Artificial Sequence: Synthetic oligonucleotide
  Antisense strand to SEQ ID NO: 1515866
uagucuaagcaccauaaug

SEQ ID NO: 1515868 - RNA, 19 nt, Artificial Sequence
  Description of Artificial Sequence: Synthetic oligonucleotide
  Sense strand starting at position 169 of SEQ ID NO: 1244801
gugcuuagacuagacucua

SEQ ID NO: 1515869 - RNA, 19 nt, Artificial Sequence
  Description of Artificial Sequence: Synthetic oligonucleotide
  Antisense strand to SEQ ID NO: 1515868
uagagucuagucuaagcac

SEQ ID NO: 1515870 - RNA, 19 nt, Artificial Sequence
  Description of Artificial Sequence: Synthetic oligonucleotide
  Sense strand starting at position 209 of SEQ ID NO: 1244801
ccauguugcccagaccaga

SEQ ID NO: 1515871 - RNA, 19 nt, Artificial Sequence
  Description of Artificial Sequence: Synthetic oligonucleotide
  Antisense strand to SEQ ID NO: 1515870
ucuggucugggcaacaugg

SEQ ID NO: 1515872 - RNA, 19 nt, Artificial Sequence
  Description of Artificial Sequence: Synthetic oligonucleotide
  Sense strand starting at position 367 of SEQ ID NO: 1244801
ucaugaauuuacuaauggu

SEQ ID NO: 1515873 - RNA, 19 nt, Artificial Sequence
  Description of Artificial Sequence: Synthetic oligonucleotide
  Antisense strand to SEQ ID NO: 1515872
accauuaguaaauucauga

SEQ ID NO: 1515874 - RNA, 19 nt, Artificial Sequence
  Description of Artificial Sequence: Synthetic oligonucleotide
  Sense strand starting at position 377 of SEQ ID NO: 1244801
acuaaugguucuuugugau

SEQ ID NO: 1515875 - RNA, 19 nt, Artificial Sequence
  Description of Artificial Sequence: Synthetic oligonucleotide
  Antisense strand to SEQ ID NO: 1515874
aucacaaagaaccauuagu

SEQ ID NO: 1515876 - RNA, 19 nt, Artificial Sequence
  Description of Artificial Sequence: Synthetic oligonucleotide
  Sense strand starting at position 512 of SEQ ID NO: 1244801
uccugucuggaacauguaa

SEQ ID NO: 1515877 - RNA, 19 nt, Artificial Sequence
  Description of Artificial Sequence: Synthetic oligonucleotide
  Antisense strand to SEQ ID NO: 1515876
uuacauguuccagacagga

SEQ ID NO: 1515878 - RNA, 19 nt, Artificial Sequence
  Description of Artificial Sequence: Synthetic oligonucleotide
  Sense strand starting at position 534 of SEQ ID NO: 1244801
ggaaauaaaugugcugacu

SEQ ID NO: 1515879 - RNA, 19 nt, Artificial Sequence
  Description of Artificial Sequence: Synthetic oligonucleotide
  Antisense strand to SEQ ID NO: 1515878
agucagcacauuuauuucc

SEQ ID NO: 1515880 - RNA, 19 nt, Artificial Sequence
  Description of Artificial Sequence: Synthetic oligonucleotide
  Sense strand starting at position 845 of SEQ ID NO: 1244801
cagagugauguguaccaaa

SEQ ID NO: 1515881 - RNA, 19 nt, Artificial Sequence
  Description of Artificial Sequence: Synthetic oligonucleotide
  Antisense strand to SEQ ID NO: 1515880
uuugguacacaucacucug

SEQ ID NO: 1515882 - RNA, 19 nt, Artificial Sequence
  Description of Artificial Sequence: Synthetic oligonucleotide
  Sense strand starting at position 1004 of SEQ ID NO: 1244801
agaucuuggcucugagaca

SEQ ID NO: 1515883 - RNA, 19 nt, Artificial Sequence
  Description of Artificial Sequence: Synthetic oligonucleotide
  Antisense strand to SEQ ID NO: 1515882
ugucucagagccaagaucu

SEQ ID NO: 1515884 - RNA, 19 nt, Artificial Sequence
  Description of Artificial Sequence: Synthetic oligonucleotide
  Sense strand starting at position 1663 of SEQ ID NO: 1244801
uguuucuccgaagaacgaa

SEQ ID NO: 1515885 - RNA, 19 nt, Artificial Sequence
  Description of Artificial Sequence: Synthetic oligonucleotide
  Antisense strand to SEQ ID NO: 1515884
uucguucuucggagaaaca

SEQ ID NO: 1515886 - RNA, 19 nt, Artificial Sequence
  Description of Artificial Sequence: Synthetic oligonucleotide
  Sense strand starting at position 1720 of SEQ ID NO: 1244801
uccugucaucccgaagagu

SEQ ID NO: 1515887 - RNA, 19 nt, Artificial Sequence
  Description of Artificial Sequence: Synthetic oligonucleotide
  Antisense strand to SEQ ID NO: 1515886
acucuucgggaugacagga

SEQ ID NO: 1515888 - RNA, 19 nt, Artificial Sequence
  Description of Artificial Sequence: Synthetic oligonucleotide
  Sense strand starting at position 1723 of SEQ ID NO: 1244801
ugucaucccgaagagucuu

SEQ ID NO: 1515889 - RNA, 19 nt, Artificial Sequence
  Description of Artificial Sequence: Synthetic oligonucleotide
  Antisense strand to SEQ ID NO: 1515888
aagacucuucgggaugaca

SEQ ID NO: 1515890 - RNA, 19 nt, Artificial Sequence
  Description of Artificial Sequence: Synthetic oligonucleotide
  Sense strand starting at position 2564 of SEQ ID NO: 1244801
gcgggaaucagcuaguuag

SEQ ID NO: 1515891 - RNA, 19 nt, Artificial Sequence
  Description of Artificial Sequence: Synthetic oligonucleotide
  Antisense strand to SEQ ID NO: 1515890
cuaacuagcugauucccgc

SEQ ID NO: 1515892 - RNA, 19 nt, Artificial Sequence
  Description of Artificial Sequence: Synthetic oligonucleotide
  Sense strand starting at position 2567 of SEQ ID NO: 1244801
ggaaucagcuaguuagaua

SEQ ID NO: 1515893 - RNA, 19 nt, Artificial Sequence
  Description of Artificial Sequence: Synthetic oligonucleotide
  Antisense strand to SEQ ID NO: 1515892
uaucuaacuagcugauucc

SEQ ID NO: 1515894 - RNA, 19 nt, Artificial Sequence
  Description of Artificial Sequence: Synthetic oligonucleotide
  Sense strand starting at position 2658 of SEQ ID NO: 1244801
gggugacuccgccugcuuu

SEQ ID NO: 1515895 - RNA, 19 nt, Artificial Sequence
  Description of Artificial Sequence: Synthetic oligonucleotide
  Antisense strand to SEQ ID NO: 1515894
aaagcaggcggagucaccc

SEQ ID NO: 1515896 - RNA, 19 nt, Artificial Sequence
  Description of Artificial Sequence: Synthetic oligonucleotide
  Sense strand starting at position 2878 of SEQ ID NO: 1244801
cguguagggcuugacauuu

SEQ ID NO: 1515897 - RNA, 19 nt, Artificial Sequence
  Description of Artificial Sequence: Synthetic oligonucleotide
  Antisense strand to SEQ ID NO: 1515896
aaaugucaagcccuacacg

SEQ ID NO: 1515898 - RNA, 19 nt, Artificial Sequence
  Description of Artificial Sequence: Synthetic oligonucleotide
  Sense strand starting at position 2899 of SEQ ID NO: 1244801
augcgucugaauugaaaua

SEQ ID NO: 1515899 - RNA, 19 nt, Artificial Sequence
  Description of Artificial Sequence: Synthetic oligonucleotide
  Antisense strand to SEQ ID NO: 1515898
uauuucaauucagacgcau

SEQ ID NO: 1515900 - RNA, 19 nt, Artificial Sequence
  Description of Artificial Sequence: Synthetic oligonucleotide
  Sense strand starting at position 2977 of SEQ ID NO: 1244801
aauugaagccagugguuga

SEQ ID NO: 1515901 - RNA, 19 nt, Artificial Sequence
  Description of Artificial Sequence: Synthetic oligonucleotide
  Antisense strand to SEQ ID NO: 1515900
ucaaccacuggcuucaauu

SEQ ID NO: 1515902 - RNA, 19 nt, Artificial Sequence
  Description of Artificial Sequence: Synthetic oligonucleotide
  Sense strand starting at position 3028 of SEQ ID NO: 1244801
gaggaugaacuuugcauaa

SEQ ID NO: 1515903 - RNA, 19 nt, Artificial Sequence
  Description of Artificial Sequence: Synthetic oligonucleotide
  Antisense strand to SEQ ID NO: 1515902
uuaugcaaaguucauccuc

SEQ ID NO: 1515904 - RNA, 19 nt, Artificial Sequence
  Description of Artificial Sequence: Synthetic oligonucleotide
  Sense strand starting at position 3049 of SEQ ID NO: 1244801
gagugauuucuguguaugu

SEQ ID NO: 1515905 - RNA, 19 nt, Artificial Sequence
  Description of Artificial Sequence: Synthetic oligonucleotide
  Antisense strand to SEQ ID NO: 1515904
acauacacagaaaucacuc

SEQ ID NO: 1515906 - RNA, 19 nt, Artificial Sequence
  Description of Artificial Sequence: Synthetic oligonucleotide
  Sense strand starting at position 3050 of SEQ ID NO: 1244801
agugauuucuguguaugug

SEQ ID NO: 1515907 - RNA, 19 nt, Artificial Sequence
  Description of Artificial Sequence: Synthetic oligonucleotide
  Antisense strand to SEQ ID NO: 1515906
cacauacacagaaaucacu

SEQ ID NO: 1515908 - RNA, 19 nt, Artificial Sequence
  Description of Artificial Sequence: Synthetic oligonucleotide
  Sense strand starting at position 3139 of SEQ ID NO: 1244801
guuuaauacgaacagguau

SEQ ID NO: 1515909 - RNA, 19 nt, Artificial Sequence
  Description of Artificial Sequence: Synthetic oligonucleotide
  Antisense strand to SEQ ID NO: 1515908
auaccuguucguauuaaac

SEQ ID NO: 1515910 - RNA, 19 nt, Artificial Sequence
  Description of Artificial Sequence: Synthetic oligonucleotide
  Sense strand starting at position 3236 of SEQ ID NO: 1244801
acauguuccuguuuagaaa

SEQ ID NO: 1515911 - RNA, 19 nt, Artificial Sequence
  Description of Artificial Sequence: Synthetic oligonucleotide
  Antisense strand to SEQ ID NO: 1515910
uuucuaaacaggaacaugu

SEQ ID NO: 1515912 - RNA, 19 nt, Artificial Sequence
  Description of Artificial Sequence: Synthetic oligonucleotide
  Sense strand starting at position 3326 of SEQ ID NO: 1244801
aaggauagcuguucuuauu

SEQ ID NO: 1515913 - RNA, 19 nt, Artificial Sequence
  Description of Artificial Sequence: Synthetic oligonucleotide
  Antisense strand to SEQ ID NO: 1515912
aauaagaacagcuauccuu

SEQ ID NO: 1515914 - RNA, 19 nt, Artificial Sequence
  Description of Artificial Sequence: Synthetic oligonucleotide
  Sense strand starting at position 3472 of SEQ ID NO: 1244801
auaccugaagccugucuaa

SEQ ID NO: 1515915 - RNA, 19 nt, Artificial Sequence
  Description of Artificial Sequence: Synthetic oligonucleotide
  Antisense strand to SEQ ID NO: 1515914
uuagacaggcuucagguau

SEQ ID NO: 1515916 - RNA, 19 nt, Artificial Sequence
  Description of Artificial Sequence: Synthetic oligonucleotide
  Sense strand starting at position 3482 of SEQ ID NO: 1244801
ccugucuaagucuacagau

SEQ ID NO: 1515917 - RNA, 19 nt, Artificial Sequence
  Description of Artificial Sequence: Synthetic oligonucleotide
  Antisense strand to SEQ ID NO: 1515916
aucuguagacuuagacagg

SEQ ID NO: 1515918 - RNA, 19 nt, Artificial Sequence
  Description of Artificial Sequence: Synthetic oligonucleotide
  Sense strand starting at position 3484 of SEQ ID NO: 1244801
ugucuaagucuacagauuc

SEQ ID NO: 1515919 - RNA, 19 nt, Artificial Sequence
  Description of Artificial Sequence: Synthetic oligonucleotide
  Antisense strand to SEQ ID NO: 1515918
gaaucuguagacuuagaca

SEQ ID NO: 1515920 - RNA, 19 nt, Artificial Sequence
  Description of Artificial Sequence: Synthetic oligonucleotide
  Sense strand starting at position 3565 of SEQ ID NO: 1244801
gucacugguggugagaauu

SEQ ID NO: 1515921 - RNA, 19 nt, Artificial Sequence
  Description of Artificial Sequence: Synthetic oligonucleotide
  Antisense strand to SEQ ID NO: 1515920
aauucucaccaccagugac

SEQ ID NO: 1515922 - RNA, 19 nt, Artificial Sequence
  Description of Artificial Sequence: Synthetic oligonucleotide
  Sense strand starting at position 3571 of SEQ ID NO: 1244801
gguggugagaauugagaac

SEQ ID NO: 1515923 - RNA, 19 nt, Artificial Sequence
  Description of Artificial Sequence: Synthetic oligonucleotide
  Antisense strand to SEQ ID NO: 1515922
guucucaauucucaccacc

SEQ ID NO: 1515924 - RNA, 19 nt, Artificial Sequence
  Description of Artificial Sequence: Synthetic oligonucleotide
  Sense strand starting at position 3611 of SEQ ID NO: 1244801
cacagcucaguauggaaau

SEQ ID NO: 1515925 - RNA, 19 nt, Artificial Sequence
  Description of Artificial Sequence: Synthetic oligonucleotide
  Antisense strand to SEQ ID NO: 1515924
auuuccauacugagcugug

SEQ ID NO: 1515926 - RNA, 19 nt, Artificial Sequence
  Description of Artificial Sequence: Synthetic oligonucleotide
  Sense strand starting at position 3630 of SEQ ID NO: 1244801
ugcuguauuuaccuguaga

SEQ ID NO: 1515927 - RNA, 19 nt, Artificial Sequence
  Description of Artificial Sequence: Synthetic oligonucleotide
  Antisense strand to SEQ ID NO: 1515926
ucuacagguaaauacagca

SEQ ID NO: 1515928 - RNA, 19 nt, Artificial Sequence
  Description of Artificial Sequence: Synthetic oligonucleotide
  Sense strand starting at position 3631 of SEQ ID NO: 1244801
gcuguauuuaccuguagag

SEQ ID NO: 1515929 - RNA, 19 nt, Artificial Sequence
  Description of Artificial Sequence: Synthetic oligonucleotide
  Antisense strand to SEQ ID NO: 1515928
cucuacagguaaauacagc

SEQ ID NO: 1515930 - RNA, 19 nt, Artificial Sequence
  Description of Artificial Sequence: Synthetic oligonucleotide
  Sense strand starting at position 3668 of SEQ ID NO: 1244801
gcuguuuaucuacaccaca

SEQ ID NO: 1515931 - RNA, 19 nt, Artificial Sequence
  Description of Artificial Sequence: Synthetic oligonucleotide
  Antisense strand to SEQ ID NO: 1515930
ugugguguagauaaacagc

SEQ ID NO: 1515932 - RNA, 19 nt, Artificial Sequence
  Description of Artificial Sequence: Synthetic oligonucleotide
  Sense strand starting at position 3768 of SEQ ID NO: 1244801
ggucuaggauuuguuuagu

SEQ ID NO: 1515933 - RNA, 19 nt, Artificial Sequence
  Description of Artificial Sequence: Synthetic oligonucleotide
  Antisense strand to SEQ ID NO: 1515932
acuaaacaaauccuagacc

SEQ ID NO: 1515934 - RNA, 19 nt, Artificial Sequence
  Description of Artificial Sequence: Synthetic oligonucleotide
  Sense strand starting at position 3774 of SEQ ID NO: 1244801
ggauuuguuuagugauuua

SEQ ID NO: 1515935 - RNA, 19 nt, Artificial Sequence
  Description of Artificial Sequence: Synthetic oligonucleotide
  Antisense strand to SEQ ID NO: 1515934
uaaaucacuaaacaaaucc

SEQ ID NO: 1515936 - RNA, 19 nt, Artificial Sequence
  Description of Artificial Sequence: Synthetic oligonucleotide
  Sense strand starting at position 3781 of SEQ ID NO: 1244801
uuuagugauuuacugcuua

SEQ ID NO: 1515937 - RNA, 19 nt, Artificial Sequence
  Description of Artificial Sequence: Synthetic oligonucleotide
  Antisense strand to SEQ ID NO: 1515936
uaagcaguaaaucacuaaa

SEQ ID NO: 1515938 - RNA, 19 nt, Artificial Sequence
  Description of Artificial Sequence: Synthetic oligonucleotide
  Sense strand starting at position 3874 of SEQ ID NO: 1244801
cauauuauccgcugauaga

SEQ ID NO: 1515939 - RNA, 19 nt, Artificial Sequence
  Description of Artificial Sequence: Synthetic oligonucleotide
  Antisense strand to SEQ ID NO: 1515938
ucuaucagcggauaauaug

SEQ ID NO: 1515940 - RNA, 19 nt, Artificial Sequence
  Description of Artificial Sequence: Synthetic oligonucleotide
  Sense strand starting at position 3875 of SEQ ID NO: 1244801
auauuauccgcugauagaa

SEQ ID NO: 1515941 - RNA, 19 nt, Artificial Sequence
  Description of Artificial Sequence: Synthetic oligonucleotide
  Antisense strand to SEQ ID NO: 1515940
uucuaucagcggauaauau

SEQ ID NO: 1515942 - RNA, 19 nt, Artificial Sequence
  Description of Artificial Sequence: Synthetic oligonucleotide
  Sense strand starting at position 591 of SEQ ID NO: 1244802
auagcuuuccugugcggga

SEQ ID NO: 1515943 - RNA, 19 nt, Artificial Sequence
  Description of Artificial Sequence: Synthetic oligonucleotide
  Antisense strand to SEQ ID NO: 1515942
ucccgcacaggaaagcuau

SEQ ID NO: 1515944 - RNA, 19 nt, Artificial Sequence
  Description of Artificial Sequence: Synthetic oligonucleotide
  Sense strand starting at position 592 of SEQ ID NO: 1244802
uagcuuuccugugcgggaa

SEQ ID NO: 1515945 - RNA, 19 nt, Artificial Sequence
  Description of Artificial Sequence: Synthetic oligonucleotide
  Antisense strand to SEQ ID NO: 1515944
uucccgcacaggaaagcua

SEQ ID NO: 1515946 - RNA, 19 nt, Artificial Sequence
  Description of Artificial Sequence: Synthetic oligonucleotide
  Sense strand starting at position 2025 of SEQ ID NO: 1244802
uggaaagaaucuuggcagu

SEQ ID NO: 1515947 - RNA, 19 nt, Artificial Sequence
  Description of Artificial Sequence: Synthetic oligonucleotide
  Antisense strand to SEQ ID NO: 1515946
acugccaagauucuuucca

SEQ ID NO: 1515948 - RNA, 19 nt, Artificial Sequence
  Description of Artificial Sequence: Synthetic oligonucleotide
  Sense strand starting at position 2027 of SEQ ID NO: 1244802
gaaagaaucuuggcaguca

SEQ ID NO: 1515949 - RNA, 19 nt, Artificial Sequence
  Description of Artificial Sequence: Synthetic oligonucleotide
  Antisense strand to SEQ ID NO: 1515948
ugacugccaagauucuuuc

SEQ ID NO: 1515950 - RNA, 19 nt, Artificial Sequence
  Description of Artificial Sequence: Synthetic oligonucleotide
  Sense strand starting at position 2028 of SEQ ID NO: 1244802
aaagaaucuuggcagucau

SEQ ID NO: 1515951 - RNA, 19 nt, Artificial Sequence
  Description of Artificial Sequence: Synthetic oligonucleotide
  Antisense strand to SEQ ID NO: 1515950
augacugccaagauucuuu

SEQ ID NO: 1515952 - RNA, 19 nt, Artificial Sequence
  Description of Artificial Sequence: Synthetic oligonucleotide
  Sense strand starting at position 2078 of SEQ ID NO: 1244802
gcagguaagaaauggaagu

SEQ ID NO: 1515953 - RNA, 19 nt, Artificial Sequence
  Description of Artificial Sequence: Synthetic oligonucleotide
  Antisense strand to SEQ ID NO: 1515952
acuuccauuucuuaccugc

SEQ ID NO: 1515954 - RNA, 19 nt, Artificial Sequence
  Description of Artificial Sequence: Synthetic oligonucleotide
  Sense strand starting at position 2161 of SEQ ID NO: 1244802
agccgacugugauccauaa

SEQ ID NO: 1515955 - RNA, 19 nt, Artificial Sequence
  Description of Artificial Sequence: Synthetic oligonucleotide
  Antisense strand to SEQ ID NO: 1515954
uuauggaucacagucggcu

SEQ ID NO: 1515956 - RNA, 19 nt, Artificial Sequence
  Description of Artificial Sequence: Synthetic oligonucleotide
  Sense strand starting at position 2206 of SEQ ID NO: 1244802
ccuaguuacuuaugaggcu

SEQ ID NO: 1515957 - RNA, 19 nt, Artificial Sequence
  Description of Artificial Sequence: Synthetic oligonucleotide
  Antisense strand to SEQ ID NO: 1515956
agccucauaaguaacuagg

SEQ ID NO: 1515958 - RNA, 19 nt, Artificial Sequence
  Description of Artificial Sequence: Synthetic oligonucleotide
  Sense strand starting at position 2213 of SEQ ID NO: 1244802
acuuaugaggcugguucua

SEQ ID NO: 1515959 - RNA, 19 nt, Artificial Sequence
  Description of Artificial Sequence: Synthetic oligonucleotide
  Antisense strand to SEQ ID NO: 1515958
uagaaccagccucauaagu

SEQ ID NO: 1515960 - RNA, 19 nt, Artificial Sequence
  Description of Artificial Sequence: Synthetic oligonucleotide
  Sense strand starting at position 2305 of SEQ ID NO: 1244802
cagugaauauccugucuag

SEQ ID NO: 1515961 - RNA, 19 nt, Artificial Sequence
  Description of Artificial Sequence: Synthetic oligonucleotide
  Antisense strand to SEQ ID NO: 1515960
cuagacaggauauucacug

SEQ ID NO: 1515962 - RNA, 19 nt, Artificial Sequence
  Description of Artificial Sequence: Synthetic oligonucleotide
  Sense strand starting at position 2308 of SEQ ID NO: 1244802
ugaauauccugucuagagc

SEQ ID NO: 1515963 - RNA, 19 nt, Artificial Sequence
  Description of Artificial Sequence: Synthetic oligonucleotide
  Antisense strand to SEQ ID NO: 1515962
gcucuagacaggauauuca

SEQ ID NO: 1515964 - RNA, 19 nt, Artificial Sequence
  Description of Artificial Sequence: Synthetic oligonucleotide
  Sense strand starting at position 2715 of SEQ ID NO: 1244802
uucucuguguggucacagu

SEQ ID NO: 1515965 - RNA, 19 nt, Artificial Sequence
  Description of Artificial Sequence: Synthetic oligonucleotide
  Antisense strand to SEQ ID NO: 1515964
acugugaccacacagagaa

SEQ ID NO: 1515966 - RNA, 19 nt, Artificial Sequence
  Description of Artificial Sequence: Synthetic oligonucleotide
  Sense strand starting at position 2732 of SEQ ID NO: 1244802
gugucuuaguuggcaggau

SEQ ID NO: 1515967 - RNA, 19 nt, Artificial Sequence
  Description of Artificial Sequence: Synthetic oligonucleotide
  Antisense strand to SEQ ID NO: 1515966
auccugccaacuaagacac

SEQ ID NO: 1515968 - RNA, 19 nt, Artificial Sequence
  Description of Artificial Sequence: Synthetic oligonucleotide
  Sense strand starting at position 3140 of SEQ ID NO: 1244802
ggagcagauuccucagguu

SEQ ID NO: 1515969 - RNA, 19 nt, Artificial Sequence
  Description of Artificial Sequence: Synthetic oligonucleotide
  Antisense strand to SEQ ID NO: 1515968
aaccugaggaaucugcucc

SEQ ID NO: 1515970 - RNA, 19 nt, Artificial Sequence
  Description of Artificial Sequence: Synthetic oligonucleotide
  Sense strand starting at position 3351 of SEQ ID NO: 1244802
ccaaacaucugucuugguu

SEQ ID NO: 1515971 - RNA, 19 nt, Artificial Sequence
  Description of Artificial Sequence: Synthetic oligonucleotide
  Antisense strand to SEQ ID NO: 1515970
aaccaagacagauguuugg

SEQ ID NO: 1515972 - RNA, 19 nt, Artificial Sequence
  Description of Artificial Sequence: Synthetic oligonucleotide
  Sense strand starting at position 3391 of SEQ ID NO: 1244802
uggguaguccuagguccua

SEQ ID NO: 1515973 - RNA, 19 nt, Artificial Sequence
  Description of Artificial Sequence: Synthetic oligonucleotide
  Antisense strand to SEQ ID NO: 1515972
uaggaccuaggacuaccca

SEQ ID NO: 1515974 - RNA, 19 nt, Artificial Sequence
  Description of Artificial Sequence: Synthetic oligonucleotide
  Sense strand starting at position 3415 of SEQ ID NO: 1244802
cuagcauugaggugccaga

SEQ ID NO: 1515975 - RNA, 19 nt, Artificial Sequence
  Description of Artificial Sequence: Synthetic oligonucleotide
  Antisense strand to SEQ ID NO: 1515974
ucuggcaccucaaugcuag

SEQ ID NO: 1515976 - RNA, 19 nt, Artificial Sequence
  Description of Artificial Sequence: Synthetic oligonucleotide
  Sense strand starting at position 3547 of SEQ ID NO: 1244802
ucauuuggucucugacugu

SEQ ID NO: 1515977 - RNA, 19 nt, Artificial Sequence
  Description of Artificial Sequence: Synthetic oligonucleotide
  Antisense strand to SEQ ID NO: 1515976
acagucagagaccaaauga

SEQ ID NO: 1515978 - RNA, 19 nt, Artificial Sequence
  Description of Artificial Sequence: Synthetic oligonucleotide
  Sense strand starting at position 3571 of SEQ ID NO: 1244802
cccgaauaucugugucuuu

SEQ ID NO: 1515979 - RNA, 19 nt, Artificial Sequence
  Description of Artificial Sequence: Synthetic oligonucleotide
  Antisense strand to SEQ ID NO: 1515978
aaagacacagauauucggg

SEQ ID NO: 1515980 - RNA, 19 nt, Artificial Sequence
  Description of Artificial Sequence: Synthetic oligonucleotide
  Sense strand starting at position 3817 of SEQ ID NO: 1244802
ggcgguguuucuccauguu

SEQ ID NO: 1515981 - RNA, 19 nt, Artificial Sequence
  Description of Artificial Sequence: Synthetic oligonucleotide
  Antisense strand to SEQ ID NO: 1515980
aacauggagaaacaccgcc

SEQ ID NO: 1515982 - RNA, 19 nt, Artificial Sequence
  Description of Artificial Sequence: Synthetic oligonucleotide
  Sense strand starting at position 3981 of SEQ ID NO: 1244802
uccaucugguucucugauu

SEQ ID NO: 1515983 - RNA, 19 nt, Artificial Sequence
  Description of Artificial Sequence: Synthetic oligonucleotide
  Antisense strand to SEQ ID NO: 1515982
aaucagagaaccagaugga

SEQ ID NO: 1515984 - RNA, 19 nt, Artificial Sequence
  Description of Artificial Sequence: Synthetic oligonucleotide
  Sense strand starting at position 780 of SEQ ID NO: 1244803
auagcuuuccugugcggga

SEQ ID NO: 1515985 - RNA, 19 nt, Artificial Sequence
  Description of Artificial Sequence: Synthetic oligonucleotide
  Antisense strand to SEQ ID NO: 1515984
ucccgcacaggaaagcuau

SEQ ID NO: 1515986 - RNA, 19 nt, Artificial Sequence
  Description of Artificial Sequence: Synthetic oligonucleotide
  Sense strand starting at position 781 of SEQ ID NO: 1244803
uagcuuuccugugcgggaa

SEQ ID NO: 1515987 - RNA, 19 nt, Artificial Sequence
  Description of Artificial Sequence: Synthetic oligonucleotide
  Antisense strand to SEQ ID NO: 1515986
uucccgcacaggaaagcua

SEQ ID NO: 1515988 - RNA, 19 nt, Artificial Sequence
  Description of Artificial Sequence: Synthetic oligonucleotide
  Sense strand starting at position 2214 of SEQ ID NO: 1244803
uggaaagaaucuuggcagu

SEQ ID NO: 1515989 - RNA, 19 nt, Artificial Sequence
  Description of Artificial Sequence: Synthetic oligonucleotide
  Antisense strand to SEQ ID NO: 1515988
acugccaagauucuuucca

SEQ ID NO: 1515990 - RNA, 19 nt, Artificial Sequence
  Description of Artificial Sequence: Synthetic oligonucleotide
  Sense strand starting at position 2216 of SEQ ID NO: 1244803
gaaagaaucuuggcaguca

SEQ ID NO: 1515991 - RNA, 19 nt, Artificial Sequence
  Description of Artificial Sequence: Synthetic oligonucleotide
  Antisense strand to SEQ ID NO: 1515990
ugacugccaagauucuuuc

SEQ ID NO: 1515992 - RNA, 19 nt, Artificial Sequence
  Description of Artificial Sequence: Synthetic oligonucleotide
  Sense strand starting at position 2217 of SEQ ID NO: 1244803
aaagaaucuuggcagucau

SEQ ID NO: 1515993 - RNA, 19 nt, Artificial Sequence
  Description of Artificial Sequence: Synthetic oligonucleotide
  Antisense strand to SEQ ID NO: 1515992
augacugccaagauucuuu

SEQ ID NO: 1515994 - RNA, 19 nt, Artificial Sequence
  Description of Artificial Sequence: Synthetic oligonucleotide
  Sense strand starting at position 2267 of SEQ ID NO: 1244803
gcagguaagaaauggaagu

SEQ ID NO: 1515995 - RNA, 19 nt, Artificial Sequence
  Description of Artificial Sequence: Synthetic oligonucleotide
  Antisense strand to SEQ ID NO: 1515994
acuuccauuucuuaccugc

SEQ ID NO: 1515996 - RNA, 19 nt, Artificial Sequence
  Description of Artificial Sequence: Synthetic oligonucleotide
  Sense strand starting at position 2350 of SEQ ID NO: 1244803
agccgacugugauccauaa

SEQ ID NO: 1515997 - RNA, 19 nt, Artificial Sequence
  Description of Artificial Sequence: Synthetic oligonucleotide
  Antisense strand to SEQ ID NO: 1515996
uuauggaucacagucggcu

SEQ ID NO: 1515998 - RNA, 19 nt, Artificial Sequence
  Description of Artificial Sequence: Synthetic oligonucleotide
  Sense strand starting at position 2395 of SEQ ID NO: 1244803
ccuaguuacuuaugaggcu

SEQ ID NO: 1515999 - RNA, 19 nt, Artificial Sequence
  Description of Artificial Sequence: Synthetic oligonucleotide
  Antisense strand to SEQ ID NO: 1515998
agccucauaaguaacuagg

SEQ ID NO: 1516000 - RNA, 19 nt, Artificial Sequence
  Description of Artificial Sequence: Synthetic oligonucleotide
  Sense strand starting at position 2402 of SEQ ID NO: 1244803
acuuaugaggcugguucua

SEQ ID NO: 1516001 - RNA, 19 nt, Artificial Sequence
  Description of Artificial Sequence: Synthetic oligonucleotide
  Antisense strand to SEQ ID NO: 1516000
uagaaccagccucauaagu

SEQ ID NO: 1516002 - RNA, 19 nt, Artificial Sequence
  Description of Artificial Sequence: Synthetic oligonucleotide
  Sense strand starting at position 2494 of SEQ ID NO: 1244803
cagugaauauccugucuag

SEQ ID NO: 1516003 - RNA, 19 nt, Artificial Sequence
  Description of Artificial Sequence: Synthetic oligonucleotide
  Antisense strand to SEQ ID NO: 1516002
cuagacaggauauucacug

SEQ ID NO: 1516004 - RNA, 19 nt, Artificial Sequence
  Description of Artificial Sequence: Synthetic oligonucleotide
  Sense strand starting at position 2497 of SEQ ID NO: 1244803
ugaauauccugucuagagc

SEQ ID NO: 1516005 - RNA, 19 nt, Artificial Sequence
  Description of Artificial Sequence: Synthetic oligonucleotide
  Antisense strand to SEQ ID NO: 1516004
gcucuagacaggauauuca

SEQ ID NO: 1516006 - RNA, 19 nt, Artificial Sequence
  Description of Artificial Sequence: Synthetic oligonucleotide
  Sense strand starting at position 2904 of SEQ ID NO: 1244803
uucucuguguggucacagu

SEQ ID NO: 1516007 - RNA, 19 nt, Artificial Sequence
  Description of Artificial Sequence: Synthetic oligonucleotide
  Antisense strand to SEQ ID NO: 1516006
acugugaccacacagagaa

SEQ ID NO: 1516008 - RNA, 19 nt, Artificial Sequence
  Description of Artificial Sequence: Synthetic oligonucleotide
  Sense strand starting at position 2921 of SEQ ID NO: 1244803
gugucuuaguuggcaggau

SEQ ID NO: 1516009 - RNA, 19 nt, Artificial Sequence
  Description of Artificial Sequence: Synthetic oligonucleotide
  Antisense strand to SEQ ID NO: 1516008
auccugccaacuaagacac

SEQ ID NO: 1516010 - RNA, 19 nt, Artificial Sequence
  Description of Artificial Sequence: Synthetic oligonucleotide
  Sense strand starting at position 3329 of SEQ ID NO: 1244803
ggagcagauuccucagguu

SEQ ID NO: 1516011 - RNA, 19 nt, Artificial Sequence
  Description of Artificial Sequence: Synthetic oligonucleotide
  Antisense strand to SEQ ID NO: 1516010
aaccugaggaaucugcucc

SEQ ID NO: 1516012 - RNA, 19 nt, Artificial Sequence
  Description of Artificial Sequence: Synthetic oligonucleotide
  Sense strand starting at position 3540 of SEQ ID NO: 1244803
ccaaacaucugucuugguu

SEQ ID NO: 1516013 - RNA, 19 nt, Artificial Sequence
  Description of Artificial Sequence: Synthetic oligonucleotide
  Antisense strand to SEQ ID NO: 1516012
aaccaagacagauguuugg

SEQ ID NO: 1516014 - RNA, 19 nt, Artificial Sequence
  Description of Artificial Sequence: Synthetic oligonucleotide
  Sense strand starting at position 3580 of SEQ ID NO: 1244803
uggguaguccuagguccua

SEQ ID NO: 1516015 - RNA, 19 nt, Artificial Sequence
  Description of Artificial Sequence: Synthetic oligonucleotide
  Antisense strand to SEQ ID NO: 1516014
uaggaccuaggacuaccca

SEQ ID NO: 1516016 - RNA, 19 nt, Artificial Sequence
  Description of Artificial Sequence: Synthetic oligonucleotide
  Sense strand starting at position 3604 of SEQ ID NO: 1244803
cuagcauugaggugccaga

SEQ ID NO: 1516017 - RNA, 19 nt, Artificial Sequence
  Description of Artificial Sequence: Synthetic oligonucleotide
  Antisense strand to SEQ ID NO: 1516016
ucuggcaccucaaugcuag

SEQ ID NO: 1516018 - RNA, 19 nt, Artificial Sequence
  Description of Artificial Sequence: Synthetic oligonucleotide
  Sense strand starting at position 3736 of SEQ ID NO: 1244803
ucauuuggucucugacugu

SEQ ID NO: 1516019 - RNA, 19 nt, Artificial Sequence
  Description of Artificial Sequence: Synthetic oligonucleotide
  Antisense strand to SEQ ID NO: 1516018
acagucagagaccaaauga

SEQ ID NO: 1516020 - RNA, 19 nt, Artificial Sequence
  Description of Artificial Sequence: Synthetic oligonucleotide
  Sense strand starting at position 3760 of SEQ ID NO: 1244803
cccgaauaucugugucuuu

SEQ ID NO: 1516021 - RNA, 19 nt, Artificial Sequence
  Description of Artificial Sequence: Synthetic oligonucleotide
  Antisense strand to SEQ ID NO: 1516020
aaagacacagauauucggg

SEQ ID NO: 1516022 - RNA, 19 nt, Artificial Sequence
  Description of Artificial Sequence: Synthetic oligonucleotide
  Sense strand starting at position 271 of SEQ ID NO: 1244804
auagcuuuccugugcggga

SEQ ID NO: 1516023 - RNA, 19 nt, Artificial Sequence
  Description of Artificial Sequence: Synthetic oligonucleotide
  Antisense strand to SEQ ID NO: 1516022
ucccgcacaggaaagcuau

SEQ ID NO: 1516024 - RNA, 19 nt, Artificial Sequence
  Description of Artificial Sequence: Synthetic oligonucleotide
  Sense strand starting at position 272 of SEQ ID NO: 1244804
uagcuuuccugugcgggaa

SEQ ID NO: 1516025 - RNA, 19 nt, Artificial Sequence
  Description of Artificial Sequence: Synthetic oligonucleotide
  Antisense strand to SEQ ID NO: 1516024
uucccgcacaggaaagcua

SEQ ID NO: 1516026 - RNA, 19 nt, Artificial Sequence
  Description of Artificial Sequence: Synthetic oligonucleotide
  Sense strand starting at position 1705 of SEQ ID NO: 1244804
uggaaagaaucuuggcagu

SEQ ID NO: 1516027 - RNA, 19 nt, Artificial Sequence
  Description of Artificial Sequence: Synthetic oligonucleotide
  Antisense strand to SEQ ID NO: 1516026
acugccaagauucuuucca

SEQ ID NO: 1516028 - RNA, 19 nt, Artificial Sequence
  Description of Artificial Sequence: Synthetic oligonucleotide
  Sense strand starting at position 1707 of SEQ ID NO: 1244804
gaaagaaucuuggcaguca

SEQ ID NO: 1516029 - RNA, 19 nt, Artificial Sequence
  Description of Artificial Sequence: Synthetic oligonucleotide
  Antisense strand to SEQ ID NO: 1516028
ugacugccaagauucuuuc

SEQ ID NO: 1516030 - RNA, 19 nt, Artificial Sequence
  Description of Artificial Sequence: Synthetic oligonucleotide
  Sense strand starting at position 1708 of SEQ ID NO: 1244804
aaagaaucuuggcagucau

SEQ ID NO: 1516031 - RNA, 19 nt, Artificial Sequence
  Description of Artificial Sequence: Synthetic oligonucleotide
  Antisense strand to SEQ ID NO: 1516030
augacugccaagauucuuu

SEQ ID NO: 1516032 - RNA, 19 nt, Artificial Sequence
  Description of Artificial Sequence: Synthetic oligonucleotide
  Sense strand starting at position 1758 of SEQ ID NO: 1244804
gcagguaagaaauggaagu

SEQ ID NO: 1516033 - RNA, 19 nt, Artificial Sequence
  Description of Artificial Sequence: Synthetic oligonucleotide
  Antisense strand to SEQ ID NO: 1516032
acuuccauuucuuaccugc

SEQ ID NO: 1516034 - RNA, 19 nt, Artificial Sequence
  Description of Artificial Sequence: Synthetic oligonucleotide
  Sense strand starting at position 1841 of SEQ ID NO: 1244804
agccgacugugauccauaa

SEQ ID NO: 1516035 - RNA, 19 nt, Artificial Sequence
  Description of Artificial Sequence: Synthetic oligonucleotide
  Antisense strand to SEQ ID NO: 1516034
uuauggaucacagucggcu

SEQ ID NO: 1516036 - RNA, 19 nt, Artificial Sequence
  Description of Artificial Sequence: Synthetic oligonucleotide
  Sense strand starting at position 1886 of SEQ ID NO: 1244804
ccuaguuacuuaugaggcu

SEQ ID NO: 1516037 - RNA, 19 nt, Artificial Sequence
  Description of Artificial Sequence: Synthetic oligonucleotide
  Antisense strand to SEQ ID NO: 1516036
agccucauaaguaacuagg

SEQ ID NO: 1516038 - RNA, 19 nt, Artificial Sequence
  Description of Artificial Sequence: Synthetic oligonucleotide
  Sense strand starting at position 1893 of SEQ ID NO: 1244804
acuuaugaggcugguucua

SEQ ID NO: 1516039 - RNA, 19 nt, Artificial Sequence
  Description of Artificial Sequence: Synthetic oligonucleotide
  Antisense strand to SEQ ID NO: 1516038
uagaaccagccucauaagu

SEQ ID NO: 1516040 - RNA, 19 nt, Artificial Sequence
  Description of Artificial Sequence: Synthetic oligonucleotide
  Sense strand starting at position 1985 of SEQ ID NO: 1244804
cagugaauauccugucuag

SEQ ID NO: 1516041 - RNA, 19 nt, Artificial Sequence
  Description of Artificial Sequence: Synthetic oligonucleotide
  Antisense strand to SEQ ID NO: 1516040
cuagacaggauauucacug

SEQ ID NO: 1516042 - RNA, 19 nt, Artificial Sequence
  Description of Artificial Sequence: Synthetic oligonucleotide
  Sense strand starting at position 1988 of SEQ ID NO: 1244804
ugaauauccugucuagagc

SEQ ID NO: 1516043 - RNA, 19 nt, Artificial Sequence
  Description of Artificial Sequence: Synthetic oligonucleotide
  Antisense strand to SEQ ID NO: 1516042
gcucuagacaggauauuca

SEQ ID NO: 1516044 - RNA, 19 nt, Artificial Sequence
  Description of Artificial Sequence: Synthetic oligonucleotide
  Sense strand starting at position 2395 of SEQ ID NO: 1244804
uucucuguguggucacagu

SEQ ID NO: 1516045 - RNA, 19 nt, Artificial Sequence
  Description of Artificial Sequence: Synthetic oligonucleotide
  Antisense strand to SEQ ID NO: 1516044
acugugaccacacagagaa

SEQ ID NO: 1516046 - RNA, 19 nt, Artificial Sequence
  Description of Artificial Sequence: Synthetic oligonucleotide
  Sense strand starting at position 2412 of SEQ ID NO: 1244804
gugucuuaguuggcaggau

SEQ ID NO: 1516047 - RNA, 19 nt, Artificial Sequence
  Description of Artificial Sequence: Synthetic oligonucleotide
  Antisense strand to SEQ ID NO: 1516046
auccugccaacuaagacac

SEQ ID NO: 1516048 - RNA, 19 nt, Artificial Sequence
  Description of Artificial Sequence: Synthetic oligonucleotide
  Sense strand starting at position 2820 of SEQ ID NO: 1244804
ggagcagauuccucagguu

SEQ ID NO: 1516049 - RNA, 19 nt, Artificial Sequence
  Description of Artificial Sequence: Synthetic oligonucleotide
  Antisense strand to SEQ ID NO: 1516048
aaccugaggaaucugcucc

SEQ ID NO: 1516050 - RNA, 19 nt, Artificial Sequence
  Description of Artificial Sequence: Synthetic oligonucleotide
  Sense strand starting at position 3031 of SEQ ID NO: 1244804
ccaaacaucugucuugguu

SEQ ID NO: 1516051 - RNA, 19 nt, Artificial Sequence
  Description of Artificial Sequence: Synthetic oligonucleotide
  Antisense strand to SEQ ID NO: 1516050
aaccaagacagauguuugg

SEQ ID NO: 1516052 - RNA, 19 nt, Artificial Sequence
  Description of Artificial Sequence: Synthetic oligonucleotide
  Sense strand starting at position 3071 of SEQ ID NO: 1244804
uggguaguccuagguccua

SEQ ID NO: 1516053 - RNA, 19 nt, Artificial Sequence
  Description of Artificial Sequence: Synthetic oligonucleotide
  Antisense strand to SEQ ID NO: 1516052
uaggaccuaggacuaccca

SEQ ID NO: 1516054 - RNA, 19 nt, Artificial Sequence
  Description of Artificial Sequence: Synthetic oligonucleotide
  Sense strand starting at position 3095 of SEQ ID NO: 1244804
cuagcauugaggugccaga

SEQ ID NO: 1516055 - RNA, 19 nt, Artificial Sequence
  Description of Artificial Sequence: Synthetic oligonucleotide
  Antisense strand to SEQ ID NO: 1516054
ucuggcaccucaaugcuag

SEQ ID NO: 1516056 - RNA, 19 nt, Artificial Sequence
  Description of Artificial Sequence: Synthetic oligonucleotide
  Sense strand starting at position 3227 of SEQ ID NO: 1244804
ucauuuggucucugacugu

SEQ ID NO: 1516057 - RNA, 19 nt, Artificial Sequence
  Description of Artificial Sequence: Synthetic oligonucleotide
  Antisense strand to SEQ ID NO: 1516056
acagucagagaccaaauga

SEQ ID NO: 1516058 - RNA, 19 nt, Artificial Sequence
  Description of Artificial Sequence: Synthetic oligonucleotide
  Sense strand starting at position 3251 of SEQ ID NO: 1244804
cccgaauaucugugucuuu

SEQ ID NO: 1516059 - RNA, 19 nt, Artificial Sequence
  Description of Artificial Sequence: Synthetic oligonucleotide
  Antisense strand to SEQ ID NO: 1516058
aaagacacagauauucggg

SEQ ID NO: 1516060 - RNA, 19 nt, Artificial Sequence
  Description of Artificial Sequence: Synthetic oligonucleotide
  Sense strand starting at position 3497 of SEQ ID NO: 1244804
ggcgguguuucuccauguu

SEQ ID NO: 1516061 - RNA, 19 nt, Artificial Sequence
  Description of Artificial Sequence: Synthetic oligonucleotide
  Antisense strand to SEQ ID NO: 1516060
aacauggagaaacaccgcc

SEQ ID NO: 1516062 - RNA, 19 nt, Artificial Sequence
  Description of Artificial Sequence: Synthetic oligonucleotide
  Sense strand starting at position 3661 of SEQ ID NO: 1244804
uccaucugguucucugauu

SEQ ID NO: 1516063 - RNA, 19 nt, Artificial Sequence
  Description of Artificial Sequence: Synthetic oligonucleotide
  Antisense strand to SEQ ID NO: 1516062
aaucagagaaccagaugga

SEQ ID NO: 1516064 - RNA, 19 nt, Artificial Sequence
  Description of Artificial Sequence: Synthetic oligonucleotide
  Sense strand starting at position 3672 of SEQ ID NO: 1244804
cucugauucugucuggguu

SEQ ID NO: 1516065 - RNA, 19 nt, Artificial Sequence
  Description of Artificial Sequence: Synthetic oligonucleotide
  Antisense strand to SEQ ID NO: 1516064
aacccagacagaaucagag

SEQ ID NO: 1516066 - RNA, 19 nt, Artificial Sequence
  Description of Artificial Sequence: Synthetic oligonucleotide
  Sense strand starting at position 3673 of SEQ ID NO: 1244804
ucugauucugucuggguuu

SEQ ID NO: 1516067 - RNA, 19 nt, Artificial Sequence
  Description of Artificial Sequence: Synthetic oligonucleotide
  Antisense strand to SEQ ID NO: 1516066
aaacccagacagaaucaga

SEQ ID NO: 1516068 - RNA, 19 nt, Artificial Sequence
  Description of Artificial Sequence: Synthetic oligonucleotide
  Sense strand starting at position 3710 of SEQ ID NO: 1244804
cuguucucccuuugagaug

SEQ ID NO: 1516069 - RNA, 19 nt, Artificial Sequence
  Description of Artificial Sequence: Synthetic oligonucleotide
  Antisense strand to SEQ ID NO: 1516068
caucucaaagggagaacag

SEQ ID NO: 1516070 - RNA, 19 nt, Artificial Sequence
  Description of Artificial Sequence: Synthetic oligonucleotide
  Sense strand starting at position 3793 of SEQ ID NO: 1244804
agggaagggugucagaguu

SEQ ID NO: 1516071 - RNA, 19 nt, Artificial Sequence
  Description of Artificial Sequence: Synthetic oligonucleotide
  Antisense strand to SEQ ID NO: 1516070
aacucugacacccuucccu

SEQ ID NO: 1516072 - RNA, 19 nt, Artificial Sequence
  Description of Artificial Sequence: Synthetic oligonucleotide
  Sense strand starting at position 3805 of SEQ ID NO: 1244804
cagaguuggguugggaaga

SEQ ID NO: 1516073 - RNA, 19 nt, Artificial Sequence
  Description of Artificial Sequence: Synthetic oligonucleotide
  Antisense strand to SEQ ID NO: 1516072
ucuucccaacccaacucug

SEQ ID NO: 1516074 - RNA, 19 nt, Artificial Sequence
  Description of Artificial Sequence: Synthetic oligonucleotide
  Sense strand starting at position 3935 of SEQ ID NO: 1244804
cacaaagugcccuggugau

SEQ ID NO: 1516075 - RNA, 19 nt, Artificial Sequence
  Description of Artificial Sequence: Synthetic oligonucleotide
  Antisense strand to SEQ ID NO: 1516074
aucaccagggcacuuugug

SEQ ID NO: 1516076 - RNA, 19 nt, Artificial Sequence
  Description of Artificial Sequence: Synthetic oligonucleotide
  Sense strand starting at position 11 of SEQ ID NO: 1244805
uguggacuuguuugaauua

SEQ ID NO: 1516077 - RNA, 19 nt, Artificial Sequence
  Description of Artificial Sequence: Synthetic oligonucleotide
  Antisense strand to SEQ ID NO: 1516076
uaauucaaacaaguccaca

SEQ ID NO: 1516078 - RNA, 19 nt, Artificial Sequence
  Description of Artificial Sequence: Synthetic oligonucleotide
  Sense strand starting at position 92 of SEQ ID NO: 1244805
cuuauuuagccauguccau

SEQ ID NO: 1516079 - RNA, 19 nt, Artificial Sequence
  Description of Artificial Sequence: Synthetic oligonucleotide
  Antisense strand to SEQ ID NO: 1516078
auggacauggcuaaauaag

SEQ ID NO: 1516080 - RNA, 19 nt, Artificial Sequence
  Description of Artificial Sequence: Synthetic oligonucleotide
  Sense strand starting at position 120 of SEQ ID NO: 1244805
ugugaucuuccaugagaug

SEQ ID NO: 1516081 - RNA, 19 nt, Artificial Sequence
  Description of Artificial Sequence: Synthetic oligonucleotide
  Antisense strand to SEQ ID NO: 1516080
caucucauggaagaucaca

SEQ ID NO: 1516082 - RNA, 19 nt, Artificial Sequence
  Description of Artificial Sequence: Synthetic oligonucleotide
  Sense strand starting at position 123 of SEQ ID NO: 1244805
gaucuuccaugagauggaa

SEQ ID NO: 1516083 - RNA, 19 nt, Artificial Sequence
  Description of Artificial Sequence: Synthetic oligonucleotide
  Antisense strand to SEQ ID NO: 1516082
uuccaucucauggaagauc

SEQ ID NO: 1516084 - RNA, 19 nt, Artificial Sequence
  Description of Artificial Sequence: Synthetic oligonucleotide
  Sense strand starting at position 535 of SEQ ID NO: 1244805
augacauaagcccaaguau

SEQ ID NO: 1516085 - RNA, 19 nt, Artificial Sequence
  Description of Artificial Sequence: Synthetic oligonucleotide
  Antisense strand to SEQ ID NO: 1516084
auacuugggcuuaugucau

SEQ ID NO: 1516086 - RNA, 19 nt, Artificial Sequence
  Description of Artificial Sequence: Synthetic oligonucleotide
  Sense strand starting at position 617 of SEQ ID NO: 1244805
auggaauuguaucuaggca

SEQ ID NO: 1516087 - RNA, 19 nt, Artificial Sequence
  Description of Artificial Sequence: Synthetic oligonucleotide
  Antisense strand to SEQ ID NO: 1516086
ugccuagauacaauuccau

SEQ ID NO: 1516088 - RNA, 19 nt, Artificial Sequence
  Description of Artificial Sequence: Synthetic oligonucleotide
  Sense strand starting at position 618 of SEQ ID NO: 1244805
uggaauuguaucuaggcaa

SEQ ID NO: 1516089 - RNA, 19 nt, Artificial Sequence
  Description of Artificial Sequence: Synthetic oligonucleotide
  Antisense strand to SEQ ID NO: 1516088
uugccuagauacaauucca

SEQ ID NO: 1516090 - RNA, 19 nt, Artificial Sequence
  Description of Artificial Sequence: Synthetic oligonucleotide
  Sense strand starting at position 621 of SEQ ID NO: 1244805
aauuguaucuaggcaaaga

SEQ ID NO: 1516091 - RNA, 19 nt, Artificial Sequence
  Description of Artificial Sequence: Synthetic oligonucleotide
  Antisense strand to SEQ ID NO: 1516090
ucuuugccuagauacaauu

SEQ ID NO: 1516092 - RNA, 19 nt, Artificial Sequence
  Description of Artificial Sequence: Synthetic oligonucleotide
  Sense strand starting at position 631 of SEQ ID NO: 1244805
aggcaaagaucuguauacu

SEQ ID NO: 1516093 - RNA, 19 nt, Artificial Sequence
  Description of Artificial Sequence: Synthetic oligonucleotide
  Antisense strand to SEQ ID NO: 1516092
aguauacagaucuuugccu

SEQ ID NO: 1516094 - RNA, 19 nt, Artificial Sequence
  Description of Artificial Sequence: Synthetic oligonucleotide
  Sense strand starting at position 632 of SEQ ID NO: 1244805
ggcaaagaucuguauacug

SEQ ID NO: 1516095 - RNA, 19 nt, Artificial Sequence
  Description of Artificial Sequence: Synthetic oligonucleotide
  Antisense strand to SEQ ID NO: 1516094
caguauacagaucuuugcc

SEQ ID NO: 1516096 - RNA, 19 nt, Artificial Sequence
  Description of Artificial Sequence: Synthetic oligonucleotide
  Sense strand starting at position 675 of SEQ ID NO: 1244805
aucucagaguccuugaagu

SEQ ID NO: 1516097 - RNA, 19 nt, Artificial Sequence
  Description of Artificial Sequence: Synthetic oligonucleotide
  Antisense strand to SEQ ID NO: 1516096
acuucaaggacucugagau

SEQ ID NO: 1516098 - RNA, 19 nt, Artificial Sequence
  Description of Artificial Sequence: Synthetic oligonucleotide
  Sense strand starting at position 677 of SEQ ID NO: 1244805
cucagaguccuugaaguuu

SEQ ID NO: 1516099 - RNA, 19 nt, Artificial Sequence
  Description of Artificial Sequence: Synthetic oligonucleotide
  Antisense strand to SEQ ID NO: 1516098
aaacuucaaggacucugag

SEQ ID NO: 1516100 - RNA, 19 nt, Artificial Sequence
  Description of Artificial Sequence: Synthetic oligonucleotide
  Sense strand starting at position 851 of SEQ ID NO: 1244805
uuuauuugauacgagguau

SEQ ID NO: 1516101 - RNA, 19 nt, Artificial Sequence
  Description of Artificial Sequence: Synthetic oligonucleotide
  Antisense strand to SEQ ID NO: 1516100
auaccucguaucaaauaaa

SEQ ID NO: 1516102 - RNA, 19 nt, Artificial Sequence
  Description of Artificial Sequence: Synthetic oligonucleotide
  Sense strand starting at position 863 of SEQ ID NO: 1244805
gagguauggcgggaucaca

SEQ ID NO: 1516103 - RNA, 19 nt, Artificial Sequence
  Description of Artificial Sequence: Synthetic oligonucleotide
  Antisense strand to SEQ ID NO: 1516102
ugugaucccgccauaccuc

SEQ ID NO: 1516104 - RNA, 19 nt, Artificial Sequence
  Description of Artificial Sequence: Synthetic oligonucleotide
  Sense strand starting at position 906 of SEQ ID NO: 1244805
ucuggcucuuuggcaaaga

SEQ ID NO: 1516105 - RNA, 19 nt, Artificial Sequence
  Description of Artificial Sequence: Synthetic oligonucleotide
  Antisense strand to SEQ ID NO: 1516104
ucuuugccaaagagccaga

SEQ ID NO: 1516106 - RNA, 19 nt, Artificial Sequence
  Description of Artificial Sequence: Synthetic oligonucleotide
  Sense strand starting at position 1065 of SEQ ID NO: 1244805
gugaguucuuuccucuuug

SEQ ID NO: 1516107 - RNA, 19 nt, Artificial Sequence
  Description of Artificial Sequence: Synthetic oligonucleotide
  Antisense strand to SEQ ID NO: 1516106
caaagaggaaagaacucac

SEQ ID NO: 1516108 - RNA, 19 nt, Artificial Sequence
  Description of Artificial Sequence: Synthetic oligonucleotide
  Sense strand starting at position 1066 of SEQ ID NO: 1244805
ugaguucuuuccucuuugu

SEQ ID NO: 1516109 - RNA, 19 nt, Artificial Sequence
  Description of Artificial Sequence: Synthetic oligonucleotide
  Antisense strand to SEQ ID NO: 1516108
acaaagaggaaagaacuca

SEQ ID NO: 1516110 - RNA, 19 nt, Artificial Sequence
  Description of Artificial Sequence: Synthetic oligonucleotide
  Sense strand starting at position 1090 of SEQ ID NO: 1244805
ccgaccaucuugccagauu

SEQ ID NO: 1516111 - RNA, 19 nt, Artificial Sequence
  Description of Artificial Sequence: Synthetic oligonucleotide
  Antisense strand to SEQ ID NO: 1516110
aaucuggcaagauggucgg

SEQ ID NO: 1516112 - RNA, 19 nt, Artificial Sequence
  Description of Artificial Sequence: Synthetic oligonucleotide
  Sense strand starting at position 1101 of SEQ ID NO: 1244805
gccagauuccuuuagccuc

SEQ ID NO: 1516113 - RNA, 19 nt, Artificial Sequence
  Description of Artificial Sequence: Synthetic oligonucleotide
  Antisense strand to SEQ ID NO: 1516112
gaggcuaaaggaaucuggc

SEQ ID NO: 1516114 - RNA, 19 nt, Artificial Sequence
  Description of Artificial Sequence: Synthetic oligonucleotide
  Sense strand starting at position 1104 of SEQ ID NO: 1244805
agauuccuuuagccucaga

SEQ ID NO: 1516115 - RNA, 19 nt, Artificial Sequence
  Description of Artificial Sequence: Synthetic oligonucleotide
  Antisense strand to SEQ ID NO: 1516114
ucugaggcuaaaggaaucu

SEQ ID NO: 1516116 - RNA, 19 nt, Artificial Sequence
  Description of Artificial Sequence: Synthetic oligonucleotide
  Sense strand starting at position 1286 of SEQ ID NO: 1244805
cccagagucuuaucgaaac

SEQ ID NO: 1516117 - RNA, 19 nt, Artificial Sequence
  Description of Artificial Sequence: Synthetic oligonucleotide
  Antisense strand to SEQ ID NO: 1516116
guuucgauaagacucuggg

SEQ ID NO: 1516118 - RNA, 19 nt, Artificial Sequence
  Description of Artificial Sequence: Synthetic oligonucleotide
  Sense strand starting at position 1288 of SEQ ID NO: 1244805
cagagucuuaucgaaacgu

SEQ ID NO: 1516119 - RNA, 19 nt, Artificial Sequence
  Description of Artificial Sequence: Synthetic oligonucleotide
  Antisense strand to SEQ ID NO: 1516118
acguuucgauaagacucug

SEQ ID NO: 1516120 - RNA, 19 nt, Artificial Sequence
  Description of Artificial Sequence: Synthetic oligonucleotide
  Sense strand starting at position 1292 of SEQ ID NO: 1244805
gucuuaucgaaacguucgu

SEQ ID NO: 1516121 - RNA, 19 nt, Artificial Sequence
  Description of Artificial Sequence: Synthetic oligonucleotide
  Antisense strand to SEQ ID NO: 1516120
acgaacguuucgauaagac

SEQ ID NO: 1516122 - RNA, 19 nt, Artificial Sequence
  Description of Artificial Sequence: Synthetic oligonucleotide
  Sense strand starting at position 1296 of SEQ ID NO: 1244805
uaucgaaacguucguauuu

SEQ ID NO: 1516123 - RNA, 19 nt, Artificial Sequence
  Description of Artificial Sequence: Synthetic oligonucleotide
  Antisense strand to SEQ ID NO: 1516122
aaauacgaacguuucgaua

SEQ ID NO: 1516124 - RNA, 19 nt, Artificial Sequence
  Description of Artificial Sequence: Synthetic oligonucleotide
  Sense strand starting at position 1307 of SEQ ID NO: 1244805
ucguauuuguugucuugau

SEQ ID NO: 1516125 - RNA, 19 nt, Artificial Sequence
  Description of Artificial Sequence: Synthetic oligonucleotide
  Antisense strand to SEQ ID NO: 1516124
aucaagacaacaaauacga

SEQ ID NO: 1516126 - RNA, 19 nt, Artificial Sequence
  Description of Artificial Sequence: Synthetic oligonucleotide
  Sense strand starting at position 1308 of SEQ ID NO: 1244805
cguauuuguugucuugauu

SEQ ID NO: 1516127 - RNA, 19 nt, Artificial Sequence
  Description of Artificial Sequence: Synthetic oligonucleotide
  Antisense strand to SEQ ID NO: 1516126
aaucaagacaacaaauacg

SEQ ID NO: 1516128 - RNA, 19 nt, Artificial Sequence
  Description of Artificial Sequence: Synthetic oligonucleotide
  Sense strand starting at position 1317 of SEQ ID NO: 1244805
ugucuugauuccuuauaag

SEQ ID NO: 1516129 - RNA, 19 nt, Artificial Sequence
  Description of Artificial Sequence: Synthetic oligonucleotide
  Antisense strand to SEQ ID NO: 1516128
cuuauaaggaaucaagaca

SEQ ID NO: 1516130 - RNA, 19 nt, Artificial Sequence
  Description of Artificial Sequence: Synthetic oligonucleotide
  Sense strand starting at position 1344 of SEQ ID NO: 1244805
ucuugaagcuuugcuaaua

SEQ ID NO: 1516131 - RNA, 19 nt, Artificial Sequence
  Description of Artificial Sequence: Synthetic oligonucleotide
  Antisense strand to SEQ ID NO: 1516130
uauuagcaaagcuucaaga

SEQ ID NO: 1516132 - RNA, 19 nt, Artificial Sequence
  Description of Artificial Sequence: Synthetic oligonucleotide
  Sense strand starting at position 1469 of SEQ ID NO: 1244805
ggaauugcaacgugaaggu

SEQ ID NO: 1516133 - RNA, 19 nt, Artificial Sequence
  Description of Artificial Sequence: Synthetic oligonucleotide
  Antisense strand to SEQ ID NO: 1516132
accuucacguugcaauucc

SEQ ID NO: 1516134 - RNA, 19 nt, Artificial Sequence
  Description of Artificial Sequence: Synthetic oligonucleotide
  Sense strand starting at position 2566 of SEQ ID NO: 1244805
guccgaguuccagggugaa

SEQ ID NO: 1516135 - RNA, 19 nt, Artificial Sequence
  Description of Artificial Sequence: Synthetic oligonucleotide
  Antisense strand to SEQ ID NO: 1516134
uucacccuggaacucggac

SEQ ID NO: 1516136 - RNA, 19 nt, Artificial Sequence
  Description of Artificial Sequence: Synthetic oligonucleotide
  Sense strand starting at position 2696 of SEQ ID NO: 1244805
cagggucaucuguaggauc

SEQ ID NO: 1516137 - RNA, 19 nt, Artificial Sequence
  Description of Artificial Sequence: Synthetic oligonucleotide
  Antisense strand to SEQ ID NO: 1516136
gauccuacagaugacccug

SEQ ID NO: 1516138 - RNA, 19 nt, Artificial Sequence
  Description of Artificial Sequence: Synthetic oligonucleotide
  Sense strand starting at position 3006 of SEQ ID NO: 1244805
agcugcaaguucucccaua

SEQ ID NO: 1516139 - RNA, 19 nt, Artificial Sequence
  Description of Artificial Sequence: Synthetic oligonucleotide
  Antisense strand to SEQ ID NO: 1516138
uaugggagaacuugcagcu

SEQ ID NO: 1516140 - RNA, 19 nt, Artificial Sequence
  Description of Artificial Sequence: Synthetic oligonucleotide
  Sense strand starting at position 3088 of SEQ ID NO: 1244805
aggucuccagcuggucaaa

SEQ ID NO: 1516141 - RNA, 19 nt, Artificial Sequence
  Description of Artificial Sequence: Synthetic oligonucleotide
  Antisense strand to SEQ ID NO: 1516140
uuugaccagcuggagaccu

SEQ ID NO: 1516142 - RNA, 19 nt, Artificial Sequence
  Description of Artificial Sequence: Synthetic oligonucleotide
  Sense strand starting at position 3259 of SEQ ID NO: 1244805
uggcaaucucccugacagu

SEQ ID NO: 1516143 - RNA, 19 nt, Artificial Sequence
  Description of Artificial Sequence: Synthetic oligonucleotide
  Antisense strand to SEQ ID NO: 1516142
acugucagggagauugcca

SEQ ID NO: 1516144 - RNA, 19 nt, Artificial Sequence
  Description of Artificial Sequence: Synthetic oligonucleotide
  Sense strand starting at position 3260 of SEQ ID NO: 1244805
ggcaaucucccugacaguu

SEQ ID NO: 1516145 - RNA, 19 nt, Artificial Sequence
  Description of Artificial Sequence: Synthetic oligonucleotide
  Antisense strand to SEQ ID NO: 1516144
aacugucagggagauugcc

SEQ ID NO: 1516146 - RNA, 19 nt, Artificial Sequence
  Description of Artificial Sequence: Synthetic oligonucleotide
  Sense strand starting at position 3272 of SEQ ID NO: 1244805
gacaguuacugcccaugau

SEQ ID NO: 1516147 - RNA, 19 nt, Artificial Sequence
  Description of Artificial Sequence: Synthetic oligonucleotide
  Antisense strand to SEQ ID NO: 1516146
aucaugggcaguaacuguc

SEQ ID NO: 1516148 - RNA, 19 nt, Artificial Sequence
  Description of Artificial Sequence: Synthetic oligonucleotide
  Sense strand starting at position 3276 of SEQ ID NO: 1244805
guuacugcccaugauguuu

SEQ ID NO: 1516149 - RNA, 19 nt, Artificial Sequence
  Description of Artificial Sequence: Synthetic oligonucleotide
  Antisense strand to SEQ ID NO: 1516148
aaacaucaugggcaguaac

SEQ ID NO: 1516150 - RNA, 19 nt, Artificial Sequence
  Description of Artificial Sequence: Synthetic oligonucleotide
  Sense strand starting at position 3306 of SEQ ID NO: 1244805
ugcuccauguucuccauau

SEQ ID NO: 1516151 - RNA, 19 nt, Artificial Sequence
  Description of Artificial Sequence: Synthetic oligonucleotide
  Antisense strand to SEQ ID NO: 1516150
auauggagaacauggagca

SEQ ID NO: 1516152 - RNA, 19 nt, Artificial Sequence
  Description of Artificial Sequence: Synthetic oligonucleotide
  Sense strand starting at position 3813 of SEQ ID NO: 1244805
ucuuguguugaaggacaau

SEQ ID NO: 1516153 - RNA, 19 nt, Artificial Sequence
  Description of Artificial Sequence: Synthetic oligonucleotide
  Antisense strand to SEQ ID NO: 1516152
auuguccuucaacacaaga

SEQ ID NO: 1516154 - RNA, 19 nt, Artificial Sequence
  Description of Artificial Sequence: Synthetic oligonucleotide
  Sense strand starting at position 3957 of SEQ ID NO: 1244805
augcucuaggaaugcaaau

SEQ ID NO: 1516155 - RNA, 19 nt, Artificial Sequence
  Description of Artificial Sequence: Synthetic oligonucleotide
  Antisense strand to SEQ ID NO: 1516154
auuugcauuccuagagcau

SEQ ID NO: 1516156 - RNA, 19 nt, Artificial Sequence
  Description of Artificial Sequence: Synthetic oligonucleotide
  Sense strand starting at position 52 of SEQ ID NO: 1244806
uggcguucaguggugugaa

SEQ ID NO: 1516157 - RNA, 19 nt, Artificial Sequence
  Description of Artificial Sequence: Synthetic oligonucleotide
  Antisense strand to SEQ ID NO: 1516156
uucacaccacugaacgcca

SEQ ID NO: 1516158 - RNA, 19 nt, Artificial Sequence
  Description of Artificial Sequence: Synthetic oligonucleotide
  Sense strand starting at position 53 of SEQ ID NO: 1244806
ggcguucaguggugugaac

SEQ ID NO: 1516159 - RNA, 19 nt, Artificial Sequence
  Description of Artificial Sequence: Synthetic oligonucleotide
  Antisense strand to SEQ ID NO: 1516158
guucacaccacugaacgcc

SEQ ID NO: 1516160 - RNA, 19 nt, Artificial Sequence
  Description of Artificial Sequence: Synthetic oligonucleotide
  Sense strand starting at position 54 of SEQ ID NO: 1244806
gcguucaguggugugaaca

SEQ ID NO: 1516161 - RNA, 19 nt, Artificial Sequence
  Description of Artificial Sequence: Synthetic oligonucleotide
  Antisense strand to SEQ ID NO: 1516160
uguucacaccacugaacgc

SEQ ID NO: 1516162 - RNA, 19 nt, Artificial Sequence
  Description of Artificial Sequence: Synthetic oligonucleotide
  Sense strand starting at position 55 of SEQ ID NO: 1244806
cguucaguggugugaacau

SEQ ID NO: 1516163 - RNA, 19 nt, Artificial Sequence
  Description of Artificial Sequence: Synthetic oligonucleotide
  Antisense strand to SEQ ID NO: 1516162
auguucacaccacugaacg

SEQ ID NO: 1516164 - RNA, 19 nt, Artificial Sequence
  Description of Artificial Sequence: Synthetic oligonucleotide
  Sense strand starting at position 548 of SEQ ID NO: 1244806
aggguaggugucagcagua

SEQ ID NO: 1516165 - RNA, 19 nt, Artificial Sequence
  Description of Artificial Sequence: Synthetic oligonucleotide
  Antisense strand to SEQ ID NO: 1516164
uacugcugacaccuacccu

SEQ ID NO: 1516166 - RNA, 19 nt, Artificial Sequence
  Description of Artificial Sequence: Synthetic oligonucleotide
  Sense strand starting at position 553 of SEQ ID NO: 1244806
aggugucagcaguaagaac

SEQ ID NO: 1516167 - RNA, 19 nt, Artificial Sequence
  Description of Artificial Sequence: Synthetic oligonucleotide
  Antisense strand to SEQ ID NO: 1516166
guucuuacugcugacaccu

SEQ ID NO: 1516168 - RNA, 19 nt, Artificial Sequence
  Description of Artificial Sequence: Synthetic oligonucleotide
  Sense strand starting at position 1005 of SEQ ID NO: 1244806
cccaaugauuugcagcaau

SEQ ID NO: 1516169 - RNA, 19 nt, Artificial Sequence
  Description of Artificial Sequence: Synthetic oligonucleotide
  Antisense strand to SEQ ID NO: 1516168
auugcugcaaaucauuggg

SEQ ID NO: 1516170 - RNA, 19 nt, Artificial Sequence
  Description of Artificial Sequence: Synthetic oligonucleotide
  Sense strand starting at position 1017 of SEQ ID NO: 1244806
cagcaaucugcggcaguuu

SEQ ID NO: 1516171 - RNA, 19 nt, Artificial Sequence
  Description of Artificial Sequence: Synthetic oligonucleotide
  Antisense strand to SEQ ID NO: 1516170
aaacugccgcagauugcug

SEQ ID NO: 1516172 - RNA, 19 nt, Artificial Sequence
  Description of Artificial Sequence: Synthetic oligonucleotide
  Sense strand starting at position 1209 of SEQ ID NO: 1244806
acccaaaggucucagcaaa

SEQ ID NO: 1516173 - RNA, 19 nt, Artificial Sequence
  Description of Artificial Sequence: Synthetic oligonucleotide
  Antisense strand to SEQ ID NO: 1516172
uuugcugagaccuuugggu

SEQ ID NO: 1516174 - RNA, 19 nt, Artificial Sequence
  Description of Artificial Sequence: Synthetic oligonucleotide
  Sense strand starting at position 1289 of SEQ ID NO: 1244806
uuuaaaggcucuugugcau

SEQ ID NO: 1516175 - RNA, 19 nt, Artificial Sequence
  Description of Artificial Sequence: Synthetic oligonucleotide
  Antisense strand to SEQ ID NO: 1516174
augcacaagagccuuuaaa

SEQ ID NO: 1516176 - RNA, 19 nt, Artificial Sequence
  Description of Artificial Sequence: Synthetic oligonucleotide
  Sense strand starting at position 1302 of SEQ ID NO: 1244806
gugcauggacccuguauga

SEQ ID NO: 1516177 - RNA, 19 nt, Artificial Sequence
  Description of Artificial Sequence: Synthetic oligonucleotide
  Antisense strand to SEQ ID NO: 1516176
ucauacaggguccaugcac

SEQ ID NO: 1516178 - RNA, 19 nt, Artificial Sequence
  Description of Artificial Sequence: Synthetic oligonucleotide
  Sense strand starting at position 1341 of SEQ ID NO: 1244806
ccuggagauucauguguug

SEQ ID NO: 1516179 - RNA, 19 nt, Artificial Sequence
  Description of Artificial Sequence: Synthetic oligonucleotide
  Antisense strand to SEQ ID NO: 1516178
caacacaugaaucuccagg

SEQ ID NO: 1516180 - RNA, 19 nt, Artificial Sequence
  Description of Artificial Sequence: Synthetic oligonucleotide
  Sense strand starting at position 1344 of SEQ ID NO: 1244806
ggagauucauguguugguc

SEQ ID NO: 1516181 - RNA, 19 nt, Artificial Sequence
  Description of Artificial Sequence: Synthetic oligonucleotide
  Antisense strand to SEQ ID NO: 1516180
gaccaacacaugaaucucc

SEQ ID NO: 1516182 - RNA, 19 nt, Artificial Sequence
  Description of Artificial Sequence: Synthetic oligonucleotide
  Sense strand starting at position 1352 of SEQ ID NO: 1244806
auguguuggucuuuguuau

SEQ ID NO: 1516183 - RNA, 19 nt, Artificial Sequence
  Description of Artificial Sequence: Synthetic oligonucleotide
  Antisense strand to SEQ ID NO: 1516182
auaacaaagaccaacacau

SEQ ID NO: 1516184 - RNA, 19 nt, Artificial Sequence
  Description of Artificial Sequence: Synthetic oligonucleotide
  Sense strand starting at position 1353 of SEQ ID NO: 1244806
uguguuggucuuuguuaug

SEQ ID NO: 1516185 - RNA, 19 nt, Artificial Sequence
  Description of Artificial Sequence: Synthetic oligonucleotide
  Antisense strand to SEQ ID NO: 1516184
cauaacaaagaccaacaca

SEQ ID NO: 1516186 - RNA, 19 nt, Artificial Sequence
  Description of Artificial Sequence: Synthetic oligonucleotide
  Sense strand starting at position 1358 of SEQ ID NO: 1244806
uggucuuuguuauggcuga

SEQ ID NO: 1516187 - RNA, 19 nt, Artificial Sequence
  Description of Artificial Sequence: Synthetic oligonucleotide
  Antisense strand to SEQ ID NO: 1516186
ucagccauaacaaagacca

SEQ ID NO: 1516188 - RNA, 19 nt, Artificial Sequence
  Description of Artificial Sequence: Synthetic oligonucleotide
  Sense strand starting at position 1362 of SEQ ID NO: 1244806
cuuuguuauggcugagguu

SEQ ID NO: 1516189 - RNA, 19 nt, Artificial Sequence
  Description of Artificial Sequence: Synthetic oligonucleotide
  Antisense strand to SEQ ID NO: 1516188
aaccucagccauaacaaag

SEQ ID NO: 1516190 - RNA, 19 nt, Artificial Sequence
  Description of Artificial Sequence: Synthetic oligonucleotide
  Sense strand starting at position 1363 of SEQ ID NO: 1244806
uuuguuauggcugagguuu

SEQ ID NO: 1516191 - RNA, 19 nt, Artificial Sequence
  Description of Artificial Sequence: Synthetic oligonucleotide
  Antisense strand to SEQ ID NO: 1516190
aaaccucagccauaacaaa

SEQ ID NO: 1516192 - RNA, 19 nt, Artificial Sequence
  Description of Artificial Sequence: Synthetic oligonucleotide
  Sense strand starting at position 1401 of SEQ ID NO: 1244806
aggcuuuccuggcauuuaa

SEQ ID NO: 1516193 - RNA, 19 nt, Artificial Sequence
  Description of Artificial Sequence: Synthetic oligonucleotide
  Antisense strand to SEQ ID NO: 1516192
uuaaaugccaggaaagccu

SEQ ID NO: 1516194 - RNA, 19 nt, Artificial Sequence
  Description of Artificial Sequence: Synthetic oligonucleotide
  Sense strand starting at position 1541 of SEQ ID NO: 1244806
ccagcauggugacgucaua

SEQ ID NO: 1516195 - RNA, 19 nt, Artificial Sequence
  Description of Artificial Sequence: Synthetic oligonucleotide
  Antisense strand to SEQ ID NO: 1516194
uaugacgucaccaugcugg

SEQ ID NO: 1516196 - RNA, 19 nt, Artificial Sequence
  Description of Artificial Sequence: Synthetic oligonucleotide
  Sense strand starting at position 1999 of SEQ ID NO: 1244806
ugcucaguguggucagagu

SEQ ID NO: 1516197 - RNA, 19 nt, Artificial Sequence
  Description of Artificial Sequence: Synthetic oligonucleotide
  Antisense strand to SEQ ID NO: 1516196
acucugaccacacugagca

SEQ ID NO: 1516198 - RNA, 19 nt, Artificial Sequence
  Description of Artificial Sequence: Synthetic oligonucleotide
  Sense strand starting at position 2067 of SEQ ID NO: 1244806
ggagauggcaacugaacuu

SEQ ID NO: 1516199 - RNA, 19 nt, Artificial Sequence
  Description of Artificial Sequence: Synthetic oligonucleotide
  Antisense strand to SEQ ID NO: 1516198
aaguucaguugccaucucc

SEQ ID NO: 1516200 - RNA, 19 nt, Artificial Sequence
  Description of Artificial Sequence: Synthetic oligonucleotide
  Sense strand starting at position 2245 of SEQ ID NO: 1244806
ggugcugcuuguuauguga

SEQ ID NO: 1516201 - RNA, 19 nt, Artificial Sequence
  Description of Artificial Sequence: Synthetic oligonucleotide
  Antisense strand to SEQ ID NO: 1516200
ucacauaacaagcagcacc

SEQ ID NO: 1516202 - RNA, 19 nt, Artificial Sequence
  Description of Artificial Sequence: Synthetic oligonucleotide
  Sense strand starting at position 2247 of SEQ ID NO: 1244806
ugcugcuuguuaugugacu

SEQ ID NO: 1516203 - RNA, 19 nt, Artificial Sequence
  Description of Artificial Sequence: Synthetic oligonucleotide
  Antisense strand to SEQ ID NO: 1516202
agucacauaacaagcagca

SEQ ID NO: 1516204 - RNA, 19 nt, Artificial Sequence
  Description of Artificial Sequence: Synthetic oligonucleotide
  Sense strand starting at position 2440 of SEQ ID NO: 1244806
ggcgacuuucgagaaccga

SEQ ID NO: 1516205 - RNA, 19 nt, Artificial Sequence
  Description of Artificial Sequence: Synthetic oligonucleotide
  Antisense strand to SEQ ID NO: 1516204
ucgguucucgaaagucgcc

SEQ ID NO: 1516206 - RNA, 19 nt, Artificial Sequence
  Description of Artificial Sequence: Synthetic oligonucleotide
  Sense strand starting at position 2551 of SEQ ID NO: 1244806
cugggucaccugugaguua

SEQ ID NO: 1516207 - RNA, 19 nt, Artificial Sequence
  Description of Artificial Sequence: Synthetic oligonucleotide
  Antisense strand to SEQ ID NO: 1516206
uaacucacaggugacccag

SEQ ID NO: 1516208 - RNA, 19 nt, Artificial Sequence
  Description of Artificial Sequence: Synthetic oligonucleotide
  Sense strand starting at position 2552 of SEQ ID NO: 1244806
ugggucaccugugaguuau

SEQ ID NO: 1516209 - RNA, 19 nt, Artificial Sequence
  Description of Artificial Sequence: Synthetic oligonucleotide
  Antisense strand to SEQ ID NO: 1516208
auaacucacaggugaccca

SEQ ID NO: 1516210 - RNA, 19 nt, Artificial Sequence
  Description of Artificial Sequence: Synthetic oligonucleotide
  Sense strand starting at position 2554 of SEQ ID NO: 1244806
ggucaccugugaguuauuu

SEQ ID NO: 1516211 - RNA, 19 nt, Artificial Sequence
  Description of Artificial Sequence: Synthetic oligonucleotide
  Antisense strand to SEQ ID NO: 1516210
aaauaacucacaggugacc

SEQ ID NO: 1516212 - RNA, 19 nt, Artificial Sequence
  Description of Artificial Sequence: Synthetic oligonucleotide
  Sense strand starting at position 2669 of SEQ ID NO: 1244806
uuaauuuaacccggaucgu

SEQ ID NO: 1516213 - RNA, 19 nt, Artificial Sequence
  Description of Artificial Sequence: Synthetic oligonucleotide
  Antisense strand to SEQ ID NO: 1516212
acgauccggguuaaauuaa

SEQ ID NO: 1516214 - RNA, 19 nt, Artificial Sequence
  Description of Artificial Sequence: Synthetic oligonucleotide
  Sense strand starting at position 2698 of SEQ ID NO: 1244806
gagggagauucugagaugu

SEQ ID NO: 1516215 - RNA, 19 nt, Artificial Sequence
  Description of Artificial Sequence: Synthetic oligonucleotide
  Antisense strand to SEQ ID NO: 1516214
acaucucagaaucucccuc

SEQ ID NO: 1516216 - RNA, 19 nt, Artificial Sequence
  Description of Artificial Sequence: Synthetic oligonucleotide
  Sense strand starting at position 2700 of SEQ ID NO: 1244806
gggagauucugagauguuc

SEQ ID NO: 1516217 - RNA, 19 nt, Artificial Sequence
  Description of Artificial Sequence: Synthetic oligonucleotide
  Antisense strand to SEQ ID NO: 1516216
gaacaucucagaaucuccc

SEQ ID NO: 1516218 - RNA, 19 nt, Artificial Sequence
  Description of Artificial Sequence: Synthetic oligonucleotide
  Sense strand starting at position 2790 of SEQ ID NO: 1244806
uguccuuuccucgaugaga

SEQ ID NO: 1516219 - RNA, 19 nt, Artificial Sequence
  Description of Artificial Sequence: Synthetic oligonucleotide
  Antisense strand to SEQ ID NO: 1516218
ucucaucgaggaaaggaca

SEQ ID NO: 1516220 - RNA, 19 nt, Artificial Sequence
  Description of Artificial Sequence: Synthetic oligonucleotide
  Sense strand starting at position 3371 of SEQ ID NO: 1244806
accuuagaaugugacucua

SEQ ID NO: 1516221 - RNA, 19 nt, Artificial Sequence
  Description of Artificial Sequence: Synthetic oligonucleotide
  Antisense strand to SEQ ID NO: 1516220
uagagucacauucuaaggu

SEQ ID NO: 1516222 - RNA, 19 nt, Artificial Sequence
  Description of Artificial Sequence: Synthetic oligonucleotide
  Sense strand starting at position 3403 of SEQ ID NO: 1244806
ccuuuagagaggugacuaa

SEQ ID NO: 1516223 - RNA, 19 nt, Artificial Sequence
  Description of Artificial Sequence: Synthetic oligonucleotide
  Antisense strand to SEQ ID NO: 1516222
uuagucaccucucuaaagg

SEQ ID NO: 1516224 - RNA, 19 nt, Artificial Sequence
  Description of Artificial Sequence: Synthetic oligonucleotide
  Sense strand starting at position 3771 of SEQ ID NO: 1244806
gcugccaugguguucuuau

SEQ ID NO: 1516225 - RNA, 19 nt, Artificial Sequence
  Description of Artificial Sequence: Synthetic oligonucleotide
  Antisense strand to SEQ ID NO: 1516224
auaagaacaccauggcagc

SEQ ID NO: 1516226 - RNA, 19 nt, Artificial Sequence
  Description of Artificial Sequence: Synthetic oligonucleotide
  Sense strand starting at position 3772 of SEQ ID NO: 1244806
cugccaugguguucuuaua

SEQ ID NO: 1516227 - RNA, 19 nt, Artificial Sequence
  Description of Artificial Sequence: Synthetic oligonucleotide
  Antisense strand to SEQ ID NO: 1516226
uauaagaacaccauggcag

SEQ ID NO: 1516228 - RNA, 19 nt, Artificial Sequence
  Description of Artificial Sequence: Synthetic oligonucleotide
  Sense strand starting at position 3924 of SEQ ID NO: 1244806
gaggcauacugcuguucuu

SEQ ID NO: 1516229 - RNA, 19 nt, Artificial Sequence
  Description of Artificial Sequence: Synthetic oligonucleotide
  Antisense strand to SEQ ID NO: 1516228
aagaacagcaguaugccuc

SEQ ID NO: 1516230 - RNA, 19 nt, Artificial Sequence
  Description of Artificial Sequence: Synthetic oligonucleotide
  Sense strand starting at position 3947 of SEQ ID NO: 1244806
uguggugcuuuguauguca

SEQ ID NO: 1516231 - RNA, 19 nt, Artificial Sequence
  Description of Artificial Sequence: Synthetic oligonucleotide
  Antisense strand to SEQ ID NO: 1516230
ugacauacaaagcaccaca

SEQ ID NO: 1516232 - RNA, 19 nt, Artificial Sequence
  Description of Artificial Sequence: Synthetic oligonucleotide
  Sense strand starting at position 3954 of SEQ ID NO: 1244806
cuuuguaugucagcccuaa

SEQ ID NO: 1516233 - RNA, 19 nt, Artificial Sequence
  Description of Artificial Sequence: Synthetic oligonucleotide
  Antisense strand to SEQ ID NO: 1516232
uuagggcugacauacaaag

SEQ ID NO: 1516234 - RNA, 19 nt, Artificial Sequence
  Description of Artificial Sequence: Synthetic oligonucleotide
  Sense strand starting at position 3958 of SEQ ID NO: 1244806
guaugucagcccuaacgca

SEQ ID NO: 1516235 - RNA, 19 nt, Artificial Sequence
  Description of Artificial Sequence: Synthetic oligonucleotide
  Antisense strand to SEQ ID NO: 1516234
ugcguuagggcugacauac

SEQ ID NO: 1516236 - RNA, 19 nt, Artificial Sequence
  Description of Artificial Sequence: Synthetic oligonucleotide
  Sense strand starting at position 555 of SEQ ID NO: 1244807
ccaggucugccucgacaau

SEQ ID NO: 1516237 - RNA, 19 nt, Artificial Sequence
  Description of Artificial Sequence: Synthetic oligonucleotide
  Antisense strand to SEQ ID NO: 1516236
auugucgaggcagaccugg

SEQ ID NO: 1516238 - RNA, 19 nt, Artificial Sequence
  Description of Artificial Sequence: Synthetic oligonucleotide
  Sense strand starting at position 712 of SEQ ID NO: 1244807
ccgucauucucacgcucau

SEQ ID NO: 1516239 - RNA, 19 nt, Artificial Sequence
  Description of Artificial Sequence: Synthetic oligonucleotide
  Antisense strand to SEQ ID NO: 1516238
augagcgugagaaugacgg

SEQ ID NO: 1516240 - RNA, 19 nt, Artificial Sequence
  Description of Artificial Sequence: Synthetic oligonucleotide
  Sense strand starting at position 713 of SEQ ID NO: 1244807
cgucauucucacgcucauu

SEQ ID NO: 1516241 - RNA, 19 nt, Artificial Sequence
  Description of Artificial Sequence: Synthetic oligonucleotide
  Antisense strand to SEQ ID NO: 1516240
aaugagcgugagaaugacg

SEQ ID NO: 1516242 - RNA, 19 nt, Artificial Sequence
  Description of Artificial Sequence: Synthetic oligonucleotide
  Sense strand starting at position 724 of SEQ ID NO: 1244807
cgcucauucucugcaauga

SEQ ID NO: 1516243 - RNA, 19 nt, Artificial Sequence
  Description of Artificial Sequence: Synthetic oligonucleotide
  Antisense strand to SEQ ID NO: 1516242
ucauugcagagaaugagcg

SEQ ID NO: 1516244 - RNA, 19 nt, Artificial Sequence
  Description of Artificial Sequence: Synthetic oligonucleotide
  Sense strand starting at position 778 of SEQ ID NO: 1244807
cuaguugucaggugggcuu

SEQ ID NO: 1516245 - RNA, 19 nt, Artificial Sequence
  Description of Artificial Sequence: Synthetic oligonucleotide
  Antisense strand to SEQ ID NO: 1516244
aagcccaccugacaacuag

SEQ ID NO: 1516246 - RNA, 19 nt, Artificial Sequence
  Description of Artificial Sequence: Synthetic oligonucleotide
  Sense strand starting at position 785 of SEQ ID NO: 1244807
ucaggugggcuugauagaa

SEQ ID NO: 1516247 - RNA, 19 nt, Artificial Sequence
  Description of Artificial Sequence: Synthetic oligonucleotide
  Antisense strand to SEQ ID NO: 1516246
uucuaucaagcccaccuga

SEQ ID NO: 1516248 - RNA, 19 nt, Artificial Sequence
  Description of Artificial Sequence: Synthetic oligonucleotide
  Sense strand starting at position 925 of SEQ ID NO: 1244807
ucugaauuccggcaagaau

SEQ ID NO: 1516249 - RNA, 19 nt, Artificial Sequence
  Description of Artificial Sequence: Synthetic oligonucleotide
  Antisense strand to SEQ ID NO: 1516248
auucuugccggaauucaga

SEQ ID NO: 1516250 - RNA, 19 nt, Artificial Sequence
  Description of Artificial Sequence: Synthetic oligonucleotide
  Sense strand starting at position 928 of SEQ ID NO: 1244807
gaauuccggcaagaaucuu

SEQ ID NO: 1516251 - RNA, 19 nt, Artificial Sequence
  Description of Artificial Sequence: Synthetic oligonucleotide
  Antisense strand to SEQ ID NO: 1516250
aagauucuugccggaauuc

SEQ ID NO: 1516252 - RNA, 19 nt, Artificial Sequence
  Description of Artificial Sequence: Synthetic oligonucleotide
  Sense strand starting at position 995 of SEQ ID NO: 1244807
ccugcugccuugggugaua

SEQ ID NO: 1516253 - RNA, 19 nt, Artificial Sequence
  Description of Artificial Sequence: Synthetic oligonucleotide
  Antisense strand to SEQ ID NO: 1516252
uaucacccaaggcagcagg

SEQ ID NO: 1516254 - RNA, 19 nt, Artificial Sequence
  Description of Artificial Sequence: Synthetic oligonucleotide
  Sense strand starting at position 997 of SEQ ID NO: 1244807
ugcugccuugggugauaaa

SEQ ID NO: 1516255 - RNA, 19 nt, Artificial Sequence
  Description of Artificial Sequence: Synthetic oligonucleotide
  Antisense strand to SEQ ID NO: 1516254
uuuaucacccaaggcagca

SEQ ID NO: 1516256 - RNA, 19 nt, Artificial Sequence
  Description of Artificial Sequence: Synthetic oligonucleotide
  Sense strand starting at position 1000 of SEQ ID NO: 1244807
ugccuugggugauaaagaa

SEQ ID NO: 1516257 - RNA, 19 nt, Artificial Sequence
  Description of Artificial Sequence: Synthetic oligonucleotide
  Antisense strand to SEQ ID NO: 1516256
uucuuuaucacccaaggca

SEQ ID NO: 1516258 - RNA, 19 nt, Artificial Sequence
  Description of Artificial Sequence: Synthetic oligonucleotide
  Sense strand starting at position 1019 of SEQ ID NO: 1244807
gggccugauucaggagaaa

SEQ ID NO: 1516259 - RNA, 19 nt, Artificial Sequence
  Description of Artificial Sequence: Synthetic oligonucleotide
  Antisense strand to SEQ ID NO: 1516258
uuucuccugaaucaggccc

SEQ ID NO: 1516260 - RNA, 19 nt, Artificial Sequence
  Description of Artificial Sequence: Synthetic oligonucleotide
  Sense strand starting at position 1390 of SEQ ID NO: 1244807
guuaaucccugucaagugu

SEQ ID NO: 1516261 - RNA, 19 nt, Artificial Sequence
  Description of Artificial Sequence: Synthetic oligonucleotide
  Antisense strand to SEQ ID NO: 1516260
acacuugacagggauuaac

SEQ ID NO: 1516262 - RNA, 19 nt, Artificial Sequence
  Description of Artificial Sequence: Synthetic oligonucleotide
  Sense strand starting at position 2302 of SEQ ID NO: 1244807
gccaguuccuuuguucuca

SEQ ID NO: 1516263 - RNA, 19 nt, Artificial Sequence
  Description of Artificial Sequence: Synthetic oligonucleotide
  Antisense strand to SEQ ID NO: 1516262
ugagaacaaaggaacuggc

SEQ ID NO: 1516264 - RNA, 19 nt, Artificial Sequence
  Description of Artificial Sequence: Synthetic oligonucleotide
  Sense strand starting at position 2392 of SEQ ID NO: 1244807
ccuuguucuuccuggauac

SEQ ID NO: 1516265 - RNA, 19 nt, Artificial Sequence
  Description of Artificial Sequence: Synthetic oligonucleotide
  Antisense strand to SEQ ID NO: 1516264
guauccaggaagaacaagg

SEQ ID NO: 1516266 - RNA, 19 nt, Artificial Sequence
  Description of Artificial Sequence: Synthetic oligonucleotide
  Sense strand starting at position 2393 of SEQ ID NO: 1244807
cuuguucuuccuggauacu

SEQ ID NO: 1516267 - RNA, 19 nt, Artificial Sequence
  Description of Artificial Sequence: Synthetic oligonucleotide
  Antisense strand to SEQ ID NO: 1516266
aguauccaggaagaacaag

SEQ ID NO: 1516268 - RNA, 19 nt, Artificial Sequence
  Description of Artificial Sequence: Synthetic oligonucleotide
  Sense strand starting at position 3043 of SEQ ID NO: 1244807
cuccaauuucugugccgua

SEQ ID NO: 1516269 - RNA, 19 nt, Artificial Sequence
  Description of Artificial Sequence: Synthetic oligonucleotide
  Antisense strand to SEQ ID NO: 1516268
uacggcacagaaauuggag

SEQ ID NO: 1516270 - RNA, 19 nt, Artificial Sequence
  Description of Artificial Sequence: Synthetic oligonucleotide
  Sense strand starting at position 3046 of SEQ ID NO: 1244807
caauuucugugccguaguu

SEQ ID NO: 1516271 - RNA, 19 nt, Artificial Sequence
  Description of Artificial Sequence: Synthetic oligonucleotide
  Antisense strand to SEQ ID NO: 1516270
aacuacggcacagaaauug

SEQ ID NO: 1516272 - RNA, 19 nt, Artificial Sequence
  Description of Artificial Sequence: Synthetic oligonucleotide
  Sense strand starting at position 3048 of SEQ ID NO: 1244807
auuucugugccguaguuaa

SEQ ID NO: 1516273 - RNA, 19 nt, Artificial Sequence
  Description of Artificial Sequence: Synthetic oligonucleotide
  Antisense strand to SEQ ID NO: 1516272
uuaacuacggcacagaaau

SEQ ID NO: 1516274 - RNA, 19 nt, Artificial Sequence
  Description of Artificial Sequence: Synthetic oligonucleotide
  Sense strand starting at position 3103 of SEQ ID NO: 1244807
gagggcaguuccucuguau

SEQ ID NO: 1516275 - RNA, 19 nt, Artificial Sequence
  Description of Artificial Sequence: Synthetic oligonucleotide
  Antisense strand to SEQ ID NO: 1516274
auacagaggaacugcccuc

SEQ ID NO: 1516276 - RNA, 19 nt, Artificial Sequence
  Description of Artificial Sequence: Synthetic oligonucleotide
  Sense strand starting at position 3106 of SEQ ID NO: 1244807
ggcaguuccucuguaugac

SEQ ID NO: 1516277 - RNA, 19 nt, Artificial Sequence
  Description of Artificial Sequence: Synthetic oligonucleotide
  Antisense strand to SEQ ID NO: 1516276
gucauacagaggaacugcc

SEQ ID NO: 1516278 - RNA, 19 nt, Artificial Sequence
  Description of Artificial Sequence: Synthetic oligonucleotide
  Sense strand starting at position 3136 of SEQ ID NO: 1244807
cuuaacauucgcggucuua

SEQ ID NO: 1516279 - RNA, 19 nt, Artificial Sequence
  Description of Artificial Sequence: Synthetic oligonucleotide
  Antisense strand to SEQ ID NO: 1516278
uaagaccgcgaauguuaag

SEQ ID NO: 1516280 - RNA, 19 nt, Artificial Sequence
  Description of Artificial Sequence: Synthetic oligonucleotide
  Sense strand starting at position 3215 of SEQ ID NO: 1244807
augacuucgcagcgagacu

SEQ ID NO: 1516281 - RNA, 19 nt, Artificial Sequence
  Description of Artificial Sequence: Synthetic oligonucleotide
  Antisense strand to SEQ ID NO: 1516280
agucucgcugcgaagucau

SEQ ID NO: 1516282 - RNA, 19 nt, Artificial Sequence
  Description of Artificial Sequence: Synthetic oligonucleotide
  Sense strand starting at position 3431 of SEQ ID NO: 1244807
gugagauaccugcacucuu

SEQ ID NO: 1516283 - RNA, 19 nt, Artificial Sequence
  Description of Artificial Sequence: Synthetic oligonucleotide
  Antisense strand to SEQ ID NO: 1516282
aagagugcagguaucucac

SEQ ID NO: 1516284 - RNA, 19 nt, Artificial Sequence
  Description of Artificial Sequence: Synthetic oligonucleotide
  Sense strand starting at position 3531 of SEQ ID NO: 1244807
cuggaagcugucugugagu

SEQ ID NO: 1516285 - RNA, 19 nt, Artificial Sequence
  Description of Artificial Sequence: Synthetic oligonucleotide
  Antisense strand to SEQ ID NO: 1516284
acucacagacagcuuccag

SEQ ID NO: 1516286 - RNA, 19 nt, Artificial Sequence
  Description of Artificial Sequence: Synthetic oligonucleotide
  Sense strand starting at position 3883 of SEQ ID NO: 1244807
gucucugugugguugagga

SEQ ID NO: 1516287 - RNA, 19 nt, Artificial Sequence
  Description of Artificial Sequence: Synthetic oligonucleotide
  Antisense strand to SEQ ID NO: 1516286
uccucaaccacacagagac

SEQ ID NO: 1516288 - RNA, 19 nt, Artificial Sequence
  Description of Artificial Sequence: Synthetic oligonucleotide
  Sense strand starting at position 3885 of SEQ ID NO: 1244807
cucugugugguugaggauu

SEQ ID NO: 1516289 - RNA, 19 nt, Artificial Sequence
  Description of Artificial Sequence: Synthetic oligonucleotide
  Antisense strand to SEQ ID NO: 1516288
aauccucaaccacacagag

SEQ ID NO: 1516290 - RNA, 19 nt, Artificial Sequence
  Description of Artificial Sequence: Synthetic oligonucleotide
  Sense strand starting at position 218 of SEQ ID NO: 1244808
aagcaauauuacuagugga

SEQ ID NO: 1516291 - RNA, 19 nt, Artificial Sequence
  Description of Artificial Sequence: Synthetic oligonucleotide
  Antisense strand to SEQ ID NO: 1516290
uccacuaguaauauugcuu

SEQ ID NO: 1516292 - RNA, 19 nt, Artificial Sequence
  Description of Artificial Sequence: Synthetic oligonucleotide
  Sense strand starting at position 338 of SEQ ID NO: 1244808
cagagaucggccugaccaa

SEQ ID NO: 1516293 - RNA, 19 nt, Artificial Sequence
  Description of Artificial Sequence: Synthetic oligonucleotide
  Antisense strand to SEQ ID NO: 1516292
uuggucaggccgaucucug

SEQ ID NO: 1516294 - RNA, 19 nt, Artificial Sequence
  Description of Artificial Sequence: Synthetic oligonucleotide
  Sense strand starting at position 448 of SEQ ID NO: 1244808
aggauaacugcuuguacca

SEQ ID NO: 1516295 - RNA, 19 nt, Artificial Sequence
  Description of Artificial Sequence: Synthetic oligonucleotide
  Antisense strand to SEQ ID NO: 1516294
ugguacaagcaguuauccu

SEQ ID NO: 1516296 - RNA, 19 nt, Artificial Sequence
  Description of Artificial Sequence: Synthetic oligonucleotide
  Sense strand starting at position 599 of SEQ ID NO: 1244808
gcaaacuuccuacguguca

SEQ ID NO: 1516297 - RNA, 19 nt, Artificial Sequence
  Description of Artificial Sequence: Synthetic oligonucleotide
  Antisense strand to SEQ ID NO: 1516296
ugacacguaggaaguuugc

SEQ ID NO: 1516298 - RNA, 19 nt, Artificial Sequence
  Description of Artificial Sequence: Synthetic oligonucleotide
  Sense strand starting at position 917 of SEQ ID NO: 1244808
uuuggcaggugaucaaauu

SEQ ID NO: 1516299 - RNA, 19 nt, Artificial Sequence
  Description of Artificial Sequence: Synthetic oligonucleotide
  Antisense strand to SEQ ID NO: 1516298
aauuugaucaccugccaaa

SEQ ID NO: 1516300 - RNA, 19 nt, Artificial Sequence
  Description of Artificial Sequence: Synthetic oligonucleotide
  Sense strand starting at position 975 of SEQ ID NO: 1244808
gggugucuucaggaaggua

SEQ ID NO: 1516301 - RNA, 19 nt, Artificial Sequence
  Description of Artificial Sequence: Synthetic oligonucleotide
  Antisense strand to SEQ ID NO: 1516300
uaccuuccugaagacaccc

SEQ ID NO: 1516302 - RNA, 19 nt, Artificial Sequence
  Description of Artificial Sequence: Synthetic oligonucleotide
  Sense strand starting at position 978 of SEQ ID NO: 1244808
ugucuucaggaagguauga

SEQ ID NO: 1516303 - RNA, 19 nt, Artificial Sequence
  Description of Artificial Sequence: Synthetic oligonucleotide
  Antisense strand to SEQ ID NO: 1516302
ucauaccuuccugaagaca

SEQ ID NO: 1516304 - RNA, 19 nt, Artificial Sequence
  Description of Artificial Sequence: Synthetic oligonucleotide
  Sense strand starting at position 1021 of SEQ ID NO: 1244808
gucgcauauacguauugga

SEQ ID NO: 1516305 - RNA, 19 nt, Artificial Sequence
  Description of Artificial Sequence: Synthetic oligonucleotide
  Antisense strand to SEQ ID NO: 1516304
uccaauacguauaugcgac

SEQ ID NO: 1516306 - RNA, 19 nt, Artificial Sequence
  Description of Artificial Sequence: Synthetic oligonucleotide
  Sense strand starting at position 1042 of SEQ ID NO: 1244808
augcuucuacuugaacaga

SEQ ID NO: 1516307 - RNA, 19 nt, Artificial Sequence
  Description of Artificial Sequence: Synthetic oligonucleotide
  Antisense strand to SEQ ID NO: 1516306
ucuguucaaguagaagcau

SEQ ID NO: 1516308 - RNA, 19 nt, Artificial Sequence
  Description of Artificial Sequence: Synthetic oligonucleotide
  Sense strand starting at position 1090 of SEQ ID NO: 1244808
cggcucuuucuccgggaaa

SEQ ID NO: 1516309 - RNA, 19 nt, Artificial Sequence
  Description of Artificial Sequence: Synthetic oligonucleotide
  Antisense strand to SEQ ID NO: 1516308
uuucccggagaaagagccg

SEQ ID NO: 1516310 - RNA, 19 nt, Artificial Sequence
  Description of Artificial Sequence: Synthetic oligonucleotide
  Sense strand starting at position 1092 of SEQ ID NO: 1244808
gcucuuucuccgggaaagu

SEQ ID NO: 1516311 - RNA, 19 nt, Artificial Sequence
  Description of Artificial Sequence: Synthetic oligonucleotide
  Antisense strand to SEQ ID NO: 1516310
acuuucccggagaaagagc

SEQ ID NO: 1516312 - RNA, 19 nt, Artificial Sequence
  Description of Artificial Sequence: Synthetic oligonucleotide
  Sense strand starting at position 1112 of SEQ ID NO: 1244808
aaguuaaaguauguuagga

SEQ ID NO: 1516313 - RNA, 19 nt, Artificial Sequence
  Description of Artificial Sequence: Synthetic oligonucleotide
  Antisense strand to SEQ ID NO: 1516312
uccuaacauacuuuaacuu

SEQ ID NO: 1516314 - RNA, 19 nt, Artificial Sequence
  Description of Artificial Sequence: Synthetic oligonucleotide
  Sense strand starting at position 1300 of SEQ ID NO: 1244808
caaugagcucuucguuuag

SEQ ID NO: 1516315 - RNA, 19 nt, Artificial Sequence
  Description of Artificial Sequence: Synthetic oligonucleotide
  Antisense strand to SEQ ID NO: 1516314
cuaaacgaagagcucauug

SEQ ID NO: 1516316 - RNA, 19 nt, Artificial Sequence
  Description of Artificial Sequence: Synthetic oligonucleotide
  Sense strand starting at position 1326 of SEQ ID NO: 1244808
cugggagucaucuggaucu

SEQ ID NO: 1516317 - RNA, 19 nt, Artificial Sequence
  Description of Artificial Sequence: Synthetic oligonucleotide
  Antisense strand to SEQ ID NO: 1516316
agauccagaugacucccag

SEQ ID NO: 1516318 - RNA, 19 nt, Artificial Sequence
  Description of Artificial Sequence: Synthetic oligonucleotide
  Sense strand starting at position 1336 of SEQ ID NO: 1244808
ucuggaucuuguguccuua

SEQ ID NO: 1516319 - RNA, 19 nt, Artificial Sequence
  Description of Artificial Sequence: Synthetic oligonucleotide
  Antisense strand to SEQ ID NO: 1516318
uaaggacacaagauccaga

SEQ ID NO: 1516320 - RNA, 19 nt, Artificial Sequence
  Description of Artificial Sequence: Synthetic oligonucleotide
  Sense strand starting at position 1340 of SEQ ID NO: 1244808
gaucuuguguccuuacgag

SEQ ID NO: 1516321 - RNA, 19 nt, Artificial Sequence
  Description of Artificial Sequence: Synthetic oligonucleotide
  Antisense strand to SEQ ID NO: 1516320
cucguaaggacacaagauc

SEQ ID NO: 1516322 - RNA, 19 nt, Artificial Sequence
  Description of Artificial Sequence: Synthetic oligonucleotide
  Sense strand starting at position 1347 of SEQ ID NO: 1244808
uguccuuacgaggacuuga

SEQ ID NO: 1516323 - RNA, 19 nt, Artificial Sequence
  Description of Artificial Sequence: Synthetic oligonucleotide
  Antisense strand to SEQ ID NO: 1516322
ucaaguccucguaaggaca

SEQ ID NO: 1516324 - RNA, 19 nt, Artificial Sequence
  Description of Artificial Sequence: Synthetic oligonucleotide
  Sense strand starting at position 1602 of SEQ ID NO: 1244808
gccucauugcgggagucga

SEQ ID NO: 1516325 - RNA, 19 nt, Artificial Sequence
  Description of Artificial Sequence: Synthetic oligonucleotide
  Antisense strand to SEQ ID NO: 1516324
ucgacucccgcaaugaggc

SEQ ID NO: 1516326 - RNA, 19 nt, Artificial Sequence
  Description of Artificial Sequence: Synthetic oligonucleotide
  Sense strand starting at position 1767 of SEQ ID NO: 1244808
guaccuguuccuggaguua

SEQ ID NO: 1516327 - RNA, 19 nt, Artificial Sequence
  Description of Artificial Sequence: Synthetic oligonucleotide
  Antisense strand to SEQ ID NO: 1516326
uaacuccaggaacagguac

SEQ ID NO: 1516328 - RNA, 19 nt, Artificial Sequence
  Description of Artificial Sequence: Synthetic oligonucleotide
  Sense strand starting at position 1997 of SEQ ID NO: 1244808
gccgagagcgguucucagu

SEQ ID NO: 1516329 - RNA, 19 nt, Artificial Sequence
  Description of Artificial Sequence: Synthetic oligonucleotide
  Antisense strand to SEQ ID NO: 1516328
acugagaaccgcucucggc

SEQ ID NO: 1516330 - RNA, 19 nt, Artificial Sequence
  Description of Artificial Sequence: Synthetic oligonucleotide
  Sense strand starting at position 2123 of SEQ ID NO: 1244808
uuggcuguuccugagaauu

SEQ ID NO: 1516331 - RNA, 19 nt, Artificial Sequence
  Description of Artificial Sequence: Synthetic oligonucleotide
  Antisense strand to SEQ ID NO: 1516330
aauucucaggaacagccaa

SEQ ID NO: 1516332 - RNA, 19 nt, Artificial Sequence
  Description of Artificial Sequence: Synthetic oligonucleotide
  Sense strand starting at position 2129 of SEQ ID NO: 1244808
guuccugagaauuguguuu

SEQ ID NO: 1516333 - RNA, 19 nt, Artificial Sequence
  Description of Artificial Sequence: Synthetic oligonucleotide
  Antisense strand to SEQ ID NO: 1516332
aaacacaauucucaggaac

SEQ ID NO: 1516334 - RNA, 19 nt, Artificial Sequence
  Description of Artificial Sequence: Synthetic oligonucleotide
  Sense strand starting at position 2384 of SEQ ID NO: 1244808
gcugaagccguuuguggaa

SEQ ID NO: 1516335 - RNA, 19 nt, Artificial Sequence
  Description of Artificial Sequence: Synthetic oligonucleotide
  Antisense strand to SEQ ID NO: 1516334
uuccacaaacggcuucagc

SEQ ID NO: 1516336 - RNA, 19 nt, Artificial Sequence
  Description of Artificial Sequence: Synthetic oligonucleotide
  Sense strand starting at position 2403 of SEQ ID NO: 1244808
accuaucagguuuguccaa

SEQ ID NO: 1516337 - RNA, 19 nt, Artificial Sequence
  Description of Artificial Sequence: Synthetic oligonucleotide
  Antisense strand to SEQ ID NO: 1516336
uuggacaaaccugauaggu

SEQ ID NO: 1516338 - RNA, 19 nt, Artificial Sequence
  Description of Artificial Sequence: Synthetic oligonucleotide
  Sense strand starting at position 2428 of SEQ ID NO: 1244808
uuaugcagagcuugagaaa

SEQ ID NO: 1516339 - RNA, 19 nt, Artificial Sequence
  Description of Artificial Sequence: Synthetic oligonucleotide
  Antisense strand to SEQ ID NO: 1516338
uuucucaagcucugcauaa

SEQ ID NO: 1516340 - RNA, 19 nt, Artificial Sequence
  Description of Artificial Sequence: Synthetic oligonucleotide
  Sense strand starting at position 2429 of SEQ ID NO: 1244808
uaugcagagcuugagaaau

SEQ ID NO: 1516341 - RNA, 19 nt, Artificial Sequence
  Description of Artificial Sequence: Synthetic oligonucleotide
  Antisense strand to SEQ ID NO: 1516340
auuucucaagcucugcaua

SEQ ID NO: 1516342 - RNA, 19 nt, Artificial Sequence
  Description of Artificial Sequence: Synthetic oligonucleotide
  Sense strand starting at position 2466 of SEQ ID NO: 1244808
gccucacuccugugagacu

SEQ ID NO: 1516343 - RNA, 19 nt, Artificial Sequence
  Description of Artificial Sequence: Synthetic oligonucleotide
  Antisense strand to SEQ ID NO: 1516342
agucucacaggagugaggc

SEQ ID NO: 1516344 - RNA, 19 nt, Artificial Sequence
  Description of Artificial Sequence: Synthetic oligonucleotide
  Sense strand starting at position 2576 of SEQ ID NO: 1244808
agcucugagcuuugacaca

SEQ ID NO: 1516345 - RNA, 19 nt, Artificial Sequence
  Description of Artificial Sequence: Synthetic oligonucleotide
  Antisense strand to SEQ ID NO: 1516344
ugugucaaagcucagagcu

SEQ ID NO: 1516346 - RNA, 19 nt, Artificial Sequence
  Description of Artificial Sequence: Synthetic oligonucleotide
  Sense strand starting at position 2626 of SEQ ID NO: 1244808
ggaggaguuuagcuacauc

SEQ ID NO: 1516347 - RNA, 19 nt, Artificial Sequence
  Description of Artificial Sequence: Synthetic oligonucleotide
  Antisense strand to SEQ ID NO: 1516346
gauguagcuaaacuccucc

SEQ ID NO: 1516348 - RNA, 19 nt, Artificial Sequence
  Description of Artificial Sequence: Synthetic oligonucleotide
  Sense strand starting at position 2629 of SEQ ID NO: 1244808
ggaguuuagcuacauccaa

SEQ ID NO: 1516349 - RNA, 19 nt, Artificial Sequence
  Description of Artificial Sequence: Synthetic oligonucleotide
  Antisense strand to SEQ ID NO: 1516348
uuggauguagcuaaacucc

SEQ ID NO: 1516350 - RNA, 19 nt, Artificial Sequence
  Description of Artificial Sequence: Synthetic oligonucleotide
  Sense strand starting at position 3009 of SEQ ID NO: 1244808
gugggaccuguaugcacau

SEQ ID NO: 1516351 - RNA, 19 nt, Artificial Sequence
  Description of Artificial Sequence: Synthetic oligonucleotide
  Antisense strand to SEQ ID NO: 1516350
augugcauacaggucccac

SEQ ID NO: 1516352 - RNA, 19 nt, Artificial Sequence
  Description of Artificial Sequence: Synthetic oligonucleotide
  Sense strand starting at position 3378 of SEQ ID NO: 1244808
uuuaucgagugcuuugaca

SEQ ID NO: 1516353 - RNA, 19 nt, Artificial Sequence
  Description of Artificial Sequence: Synthetic oligonucleotide
  Antisense strand to SEQ ID NO: 1516352
ugucaaagcacucgauaaa

SEQ ID NO: 1516354 - RNA, 19 nt, Artificial Sequence
  Description of Artificial Sequence: Synthetic oligonucleotide
  Sense strand starting at position 3380 of SEQ ID NO: 1244808
uaucgagugcuuugacauu

SEQ ID NO: 1516355 - RNA, 19 nt, Artificial Sequence
  Description of Artificial Sequence: Synthetic oligonucleotide
  Antisense strand to SEQ ID NO: 1516354
aaugucaaagcacucgaua

SEQ ID NO: 1516356 - RNA, 19 nt, Artificial Sequence
  Description of Artificial Sequence: Synthetic oligonucleotide
  Sense strand starting at position 3386 of SEQ ID NO: 1244808
gugcuuugacauugcuaag

SEQ ID NO: 1516357 - RNA, 19 nt, Artificial Sequence
  Description of Artificial Sequence: Synthetic oligonucleotide
  Antisense strand to SEQ ID NO: 1516356
cuuagcaaugucaaagcac

SEQ ID NO: 1516358 - RNA, 19 nt, Artificial Sequence
  Description of Artificial Sequence: Synthetic oligonucleotide
  Sense strand starting at position 3451 of SEQ ID NO: 1244808
ggagcaaacuugguaaacu

SEQ ID NO: 1516359 - RNA, 19 nt, Artificial Sequence
  Description of Artificial Sequence: Synthetic oligonucleotide
  Antisense strand to SEQ ID NO: 1516358
aguuuaccaaguuugcucc

SEQ ID NO: 1516360 - RNA, 19 nt, Artificial Sequence
  Description of Artificial Sequence: Synthetic oligonucleotide
  Sense strand starting at position 3511 of SEQ ID NO: 1244808
caguguucuacugaagggu

SEQ ID NO: 1516361 - RNA, 19 nt, Artificial Sequence
  Description of Artificial Sequence: Synthetic oligonucleotide
  Antisense strand to SEQ ID NO: 1516360
acccuucaguagaacacug

SEQ ID NO: 1516362 - RNA, 19 nt, Artificial Sequence
  Description of Artificial Sequence: Synthetic oligonucleotide
  Sense strand starting at position 3598 of SEQ ID NO: 1244808
gccauuacaaauggguaga

SEQ ID NO: 1516363 - RNA, 19 nt, Artificial Sequence
  Description of Artificial Sequence: Synthetic oligonucleotide
  Antisense strand to SEQ ID NO: 1516362
ucuacccauuuguaauggc

SEQ ID NO: 1516364 - RNA, 19 nt, Artificial Sequence
  Description of Artificial Sequence: Synthetic oligonucleotide
  Sense strand starting at position 3646 of SEQ ID NO: 1244808
uuuagcagucuguaacaga

SEQ ID NO: 1516365 - RNA, 19 nt, Artificial Sequence
  Description of Artificial Sequence: Synthetic oligonucleotide
  Antisense strand to SEQ ID NO: 1516364
ucuguuacagacugcuaaa

SEQ ID NO: 1516366 - RNA, 19 nt, Artificial Sequence
  Description of Artificial Sequence: Synthetic oligonucleotide
  Sense strand starting at position 3664 of SEQ ID NO: 1244808
aagacacuccuauggguau

SEQ ID NO: 1516367 - RNA, 19 nt, Artificial Sequence
  Description of Artificial Sequence: Synthetic oligonucleotide
  Antisense strand to SEQ ID NO: 1516366
auacccauaggagugucuu

SEQ ID NO: 1516368 - RNA, 19 nt, Artificial Sequence
  Description of Artificial Sequence: Synthetic oligonucleotide
  Sense strand starting at position 3710 of SEQ ID NO: 1244808
acggaagucuugcucuauu

SEQ ID NO: 1516369 - RNA, 19 nt, Artificial Sequence
  Description of Artificial Sequence: Synthetic oligonucleotide
  Antisense strand to SEQ ID NO: 1516368
aauagagcaagacuuccgu

SEQ ID NO: 1516370 - RNA, 19 nt, Artificial Sequence
  Description of Artificial Sequence: Synthetic oligonucleotide
  Sense strand starting at position 374 of SEQ ID NO: 1244809
gagaaaugcuguuuauauu

SEQ ID NO: 1516371 - RNA, 19 nt, Artificial Sequence
  Description of Artificial Sequence: Synthetic oligonucleotide
  Antisense strand to SEQ ID NO: 1516370
aauauaaacagcauuucuc

SEQ ID NO: 1516372 - RNA, 19 nt, Artificial Sequence
  Description of Artificial Sequence: Synthetic oligonucleotide
  Sense strand starting at position 542 of SEQ ID NO: 1244809
ggguguauauaacuguuaa

SEQ ID NO: 1516373 - RNA, 19 nt, Artificial Sequence
  Description of Artificial Sequence: Synthetic oligonucleotide
  Antisense strand to SEQ ID NO: 1516372
uuaacaguuauauacaccc

SEQ ID NO: 1516374 - RNA, 19 nt, Artificial Sequence
  Description of Artificial Sequence: Synthetic oligonucleotide
  Sense strand starting at position 948 of SEQ ID NO: 1244809
ucaacuuuguucuuggaau

SEQ ID NO: 1516375 - RNA, 19 nt, Artificial Sequence
  Description of Artificial Sequence: Synthetic oligonucleotide
  Antisense strand to SEQ ID NO: 1516374
auuccaagaacaaaguuga

SEQ ID NO: 1516376 - RNA, 19 nt, Artificial Sequence
  Description of Artificial Sequence: Synthetic oligonucleotide
  Sense strand starting at position 973 of SEQ ID NO: 1244809
uucuaauauccaggaugug

SEQ ID NO: 1516377 - RNA, 19 nt, Artificial Sequence
  Description of Artificial Sequence: Synthetic oligonucleotide
  Antisense strand to SEQ ID NO: 1516376
cacauccuggauauuagaa

SEQ ID NO: 1516378 - RNA, 19 nt, Artificial Sequence
  Description of Artificial Sequence: Synthetic oligonucleotide
  Sense strand starting at position 982 of SEQ ID NO: 1244809
ccaggaugugggcaacuua

SEQ ID NO: 1516379 - RNA, 19 nt, Artificial Sequence
  Description of Artificial Sequence: Synthetic oligonucleotide
  Antisense strand to SEQ ID NO: 1516378
uaaguugcccacauccugg

SEQ ID NO: 1516380 - RNA, 19 nt, Artificial Sequence
  Description of Artificial Sequence: Synthetic oligonucleotide
  Sense strand starting at position 1044 of SEQ ID NO: 1244809
uuccaacaagaacguuaua

SEQ ID NO: 1516381 - RNA, 19 nt, Artificial Sequence
  Description of Artificial Sequence: Synthetic oligonucleotide
  Antisense strand to SEQ ID NO: 1516380
uauaacguucuuguuggaa

SEQ ID NO: 1516382 - RNA, 19 nt, Artificial Sequence
  Description of Artificial Sequence: Synthetic oligonucleotide
  Sense strand starting at position 1057 of SEQ ID NO: 1244809
guuauagagcuguaauaug

SEQ ID NO: 1516383 - RNA, 19 nt, Artificial Sequence
  Description of Artificial Sequence: Synthetic oligonucleotide
  Antisense strand to SEQ ID NO: 1516382
cauauuacagcucuauaac

SEQ ID NO: 1516384 - RNA, 19 nt, Artificial Sequence
  Description of Artificial Sequence: Synthetic oligonucleotide
  Sense strand starting at position 1117 of SEQ ID NO: 1244809
acaauacguuccuugggau

SEQ ID NO: 1516385 - RNA, 19 nt, Artificial Sequence
  Description of Artificial Sequence: Synthetic oligonucleotide
  Antisense strand to SEQ ID NO: 1516384
aucccaaggaacguauugu

SEQ ID NO: 1516386 - RNA, 19 nt, Artificial Sequence
  Description of Artificial Sequence: Synthetic oligonucleotide
  Sense strand starting at position 1138 of SEQ ID NO: 1244809
aacaauauguuccuuggga

SEQ ID NO: 1516387 - RNA, 19 nt, Artificial Sequence
  Description of Artificial Sequence: Synthetic oligonucleotide
  Antisense strand to SEQ ID NO: 1516386
ucccaaggaacauauuguu

SEQ ID NO: 1516388 - RNA, 19 nt, Artificial Sequence
  Description of Artificial Sequence: Synthetic oligonucleotide
  Sense strand starting at position 1139 of SEQ ID NO: 1244809
acaauauguuccuugggau

SEQ ID NO: 1516389 - RNA, 19 nt, Artificial Sequence
  Description of Artificial Sequence: Synthetic oligonucleotide
  Antisense strand to SEQ ID NO: 1516388
aucccaaggaacauauugu

SEQ ID NO: 1516390 - RNA, 19 nt, Artificial Sequence
  Description of Artificial Sequence: Synthetic oligonucleotide
  Sense strand starting at position 1140 of SEQ ID NO: 1244809
caauauguuccuugggauc

SEQ ID NO: 1516391 - RNA, 19 nt, Artificial Sequence
  Description of Artificial Sequence: Synthetic oligonucleotide
  Antisense strand to SEQ ID NO: 1516390
gaucccaaggaacauauug

SEQ ID NO: 1516392 - RNA, 19 nt, Artificial Sequence
  Description of Artificial Sequence: Synthetic oligonucleotide
  Sense strand starting at position 1176 of SEQ ID NO: 1244809
ucaugcaguccuugggauu

SEQ ID NO: 1516393 - RNA, 19 nt, Artificial Sequence
  Description of Artificial Sequence: Synthetic oligonucleotide
  Antisense strand to SEQ ID NO: 1516392
aaucccaaggacugcauga

SEQ ID NO: 1516394 - RNA, 19 nt, Artificial Sequence
  Description of Artificial Sequence: Synthetic oligonucleotide
  Sense strand starting at position 1177 of SEQ ID NO: 1244809
caugcaguccuugggauua

SEQ ID NO: 1516395 - RNA, 19 nt, Artificial Sequence
  Description of Artificial Sequence: Synthetic oligonucleotide
  Antisense strand to SEQ ID NO: 1516394
uaaucccaaggacugcaug

SEQ ID NO: 1516396 - RNA, 19 nt, Artificial Sequence
  Description of Artificial Sequence: Synthetic oligonucleotide
  Sense strand starting at position 1746 of SEQ ID NO: 1244809
gcggcaaugcgaagugauu

SEQ ID NO: 1516397 - RNA, 19 nt, Artificial Sequence
  Description of Artificial Sequence: Synthetic oligonucleotide
  Antisense strand to SEQ ID NO: 1516396
aaucacuucgcauugccgc

SEQ ID NO: 1516398 - RNA, 19 nt, Artificial Sequence
  Description of Artificial Sequence: Synthetic oligonucleotide
  Sense strand starting at position 2197 of SEQ ID NO: 1244809
acuagauugcggugagacu

SEQ ID NO: 1516399 - RNA, 19 nt, Artificial Sequence
  Description of Artificial Sequence: Synthetic oligonucleotide
  Antisense strand to SEQ ID NO: 1516398
agucucaccgcaaucuagu

SEQ ID NO: 1516400 - RNA, 19 nt, Artificial Sequence
  Description of Artificial Sequence: Synthetic oligonucleotide
  Sense strand starting at position 2198 of SEQ ID NO: 1244809
cuagauugcggugagacuu

SEQ ID NO: 1516401 - RNA, 19 nt, Artificial Sequence
  Description of Artificial Sequence: Synthetic oligonucleotide
  Antisense strand to SEQ ID NO: 1516400
aagucucaccgcaaucuag

SEQ ID NO: 1516402 - RNA, 19 nt, Artificial Sequence
  Description of Artificial Sequence: Synthetic oligonucleotide
  Sense strand starting at position 2223 of SEQ ID NO: 1244809
ugcguaaacucacuacaac

SEQ ID NO: 1516403 - RNA, 19 nt, Artificial Sequence
  Description of Artificial Sequence: Synthetic oligonucleotide
  Antisense strand to SEQ ID NO: 1516402
guuguagugaguuuacgca

SEQ ID NO: 1516404 - RNA, 19 nt, Artificial Sequence
  Description of Artificial Sequence: Synthetic oligonucleotide
  Sense strand starting at position 2383 of SEQ ID NO: 1244809
uccuguacgccugauuaca

SEQ ID NO: 1516405 - RNA, 19 nt, Artificial Sequence
  Description of Artificial Sequence: Synthetic oligonucleotide
  Antisense strand to SEQ ID NO: 1516404
uguaaucaggcguacagga

SEQ ID NO: 1516406 - RNA, 19 nt, Artificial Sequence
  Description of Artificial Sequence: Synthetic oligonucleotide
  Sense strand starting at position 2983 of SEQ ID NO: 1244809
gagagucacuuccucgauc

SEQ ID NO: 1516407 - RNA, 19 nt, Artificial Sequence
  Description of Artificial Sequence: Synthetic oligonucleotide
  Antisense strand to SEQ ID NO: 1516406
gaucgaggaagugacucuc

SEQ ID NO: 1516408 - RNA, 19 nt, Artificial Sequence
  Description of Artificial Sequence: Synthetic oligonucleotide
  Sense strand starting at position 2985 of SEQ ID NO: 1244809
gagucacuuccucgaucca

SEQ ID NO: 1516409 - RNA, 19 nt, Artificial Sequence
  Description of Artificial Sequence: Synthetic oligonucleotide
  Antisense strand to SEQ ID NO: 1516408
uggaucgaggaagugacuc

SEQ ID NO: 1516410 - RNA, 19 nt, Artificial Sequence
  Description of Artificial Sequence: Synthetic oligonucleotide
  Sense strand starting at position 2986 of SEQ ID NO: 1244809
agucacuuccucgauccaa

SEQ ID NO: 1516411 - RNA, 19 nt, Artificial Sequence
  Description of Artificial Sequence: Synthetic oligonucleotide
  Antisense strand to SEQ ID NO: 1516410
uuggaucgaggaagugacu

SEQ ID NO: 1516412 - RNA, 19 nt, Artificial Sequence
  Description of Artificial Sequence: Synthetic oligonucleotide
  Sense strand starting at position 3275 of SEQ ID NO: 1244809
ggagggaacguguguuuga

SEQ ID NO: 1516413 - RNA, 19 nt, Artificial Sequence
  Description of Artificial Sequence: Synthetic oligonucleotide
  Antisense strand to SEQ ID NO: 1516412
ucaaacacacguucccucc

SEQ ID NO: 1516414 - RNA, 19 nt, Artificial Sequence
  Description of Artificial Sequence: Synthetic oligonucleotide
  Sense strand starting at position 3439 of SEQ ID NO: 1244809
ucuuauuugugacugccua

SEQ ID NO: 1516415 - RNA, 19 nt, Artificial Sequence
  Description of Artificial Sequence: Synthetic oligonucleotide
  Antisense strand to SEQ ID NO: 1516414
uaggcagucacaaauaaga

SEQ ID NO: 1516416 - RNA, 19 nt, Artificial Sequence
  Description of Artificial Sequence: Synthetic oligonucleotide
  Sense strand starting at position 3440 of SEQ ID NO: 1244809
cuuauuugugacugccuau

SEQ ID NO: 1516417 - RNA, 19 nt, Artificial Sequence
  Description of Artificial Sequence: Synthetic oligonucleotide
  Antisense strand to SEQ ID NO: 1516416
auaggcagucacaaauaag

SEQ ID NO: 1516418 - RNA, 19 nt, Artificial Sequence
  Description of Artificial Sequence: Synthetic oligonucleotide
  Sense strand starting at position 3464 of SEQ ID NO: 1244809
ugaagauucugggaagaaa

SEQ ID NO: 1516419 - RNA, 19 nt, Artificial Sequence
  Description of Artificial Sequence: Synthetic oligonucleotide
  Antisense strand to SEQ ID NO: 1516418
uuucuucccagaaucuuca

SEQ ID NO: 1516420 - RNA, 19 nt, Artificial Sequence
  Description of Artificial Sequence: Synthetic oligonucleotide
  Sense strand starting at position 3607 of SEQ ID NO: 1244809
uaagaauguggaugcagaa

SEQ ID NO: 1516421 - RNA, 19 nt, Artificial Sequence
  Description of Artificial Sequence: Synthetic oligonucleotide
  Antisense strand to SEQ ID NO: 1516420
uucugcauccacauucuua

SEQ ID NO: 1516422 - RNA, 19 nt, Artificial Sequence
  Description of Artificial Sequence: Synthetic oligonucleotide
  Sense strand starting at position 3620 of SEQ ID NO: 1244809
gcagaacaaucacugucua

SEQ ID NO: 1516423 - RNA, 19 nt, Artificial Sequence
  Description of Artificial Sequence: Synthetic oligonucleotide
  Antisense strand to SEQ ID NO: 1516422
uagacagugauuguucugc

SEQ ID NO: 1516424 - RNA, 19 nt, Artificial Sequence
  Description of Artificial Sequence: Synthetic oligonucleotide
  Sense strand starting at position 3625 of SEQ ID NO: 1244809
acaaucacugucuaaaguu

SEQ ID NO: 1516425 - RNA, 19 nt, Artificial Sequence
  Description of Artificial Sequence: Synthetic oligonucleotide
  Antisense strand to SEQ ID NO: 1516424
aacuuuagacagugauugu

SEQ ID NO: 1516426 - RNA, 19 nt, Artificial Sequence
  Description of Artificial Sequence: Synthetic oligonucleotide
  Sense strand starting at position 3667 of SEQ ID NO: 1244809
ucuugacucuugguuuaac

SEQ ID NO: 1516427 - RNA, 19 nt, Artificial Sequence
  Description of Artificial Sequence: Synthetic oligonucleotide
  Antisense strand to SEQ ID NO: 1516426
guuaaaccaagagucaaga

SEQ ID NO: 1516428 - RNA, 19 nt, Artificial Sequence
  Description of Artificial Sequence: Synthetic oligonucleotide
  Sense strand starting at position 3668 of SEQ ID NO: 1244809
cuugacucuugguuuaacu

SEQ ID NO: 1516429 - RNA, 19 nt, Artificial Sequence
  Description of Artificial Sequence: Synthetic oligonucleotide
  Antisense strand to SEQ ID NO: 1516428
aguuaaaccaagagucaag

SEQ ID NO: 1516430 - RNA, 19 nt, Artificial Sequence
  Description of Artificial Sequence: Synthetic oligonucleotide
  Sense strand starting at position 3670 of SEQ ID NO: 1244809
ugacucuugguuuaacuuu

SEQ ID NO: 1516431 - RNA, 19 nt, Artificial Sequence
  Description of Artificial Sequence: Synthetic oligonucleotide
  Antisense strand to SEQ ID NO: 1516430
aaaguuaaaccaagaguca

SEQ ID NO: 1516432 - RNA, 19 nt, Artificial Sequence
  Description of Artificial Sequence: Synthetic oligonucleotide
  Sense strand starting at position 3676 of SEQ ID NO: 1244809
uugguuuaacuuuaacagu

SEQ ID NO: 1516433 - RNA, 19 nt, Artificial Sequence
  Description of Artificial Sequence: Synthetic oligonucleotide
  Antisense strand to SEQ ID NO: 1516432
acuguuaaaguuaaaccaa

SEQ ID NO: 1516434 - RNA, 19 nt, Artificial Sequence
  Description of Artificial Sequence: Synthetic oligonucleotide
  Sense strand starting at position 3699 of SEQ ID NO: 1244809
aauagaaagugagugcuuu

SEQ ID NO: 1516435 - RNA, 19 nt, Artificial Sequence
  Description of Artificial Sequence: Synthetic oligonucleotide
  Antisense strand to SEQ ID NO: 1516434
aaagcacucacuuucuauu

SEQ ID NO: 1516436 - RNA, 19 nt, Artificial Sequence
  Description of Artificial Sequence: Synthetic oligonucleotide
  Sense strand starting at position 3700 of SEQ ID NO: 1244809
auagaaagugagugcuuua

SEQ ID NO: 1516437 - RNA, 19 nt, Artificial Sequence
  Description of Artificial Sequence: Synthetic oligonucleotide
  Antisense strand to SEQ ID NO: 1516436
uaaagcacucacuuucuau

SEQ ID NO: 1516438 - RNA, 19 nt, Artificial Sequence
  Description of Artificial Sequence: Synthetic oligonucleotide
  Sense strand starting at position 3703 of SEQ ID NO: 1244809
gaaagugagugcuuuauac

SEQ ID NO: 1516439 - RNA, 19 nt, Artificial Sequence
  Description of Artificial Sequence: Synthetic oligonucleotide
  Antisense strand to SEQ ID NO: 1516438
guauaaagcacucacuuuc

SEQ ID NO: 1516440 - RNA, 19 nt, Artificial Sequence
  Description of Artificial Sequence: Synthetic oligonucleotide
  Sense strand starting at position 3705 of SEQ ID NO: 1244809
aagugagugcuuuauacau

SEQ ID NO: 1516441 - RNA, 19 nt, Artificial Sequence
  Description of Artificial Sequence: Synthetic oligonucleotide
  Antisense strand to SEQ ID NO: 1516440
auguauaaagcacucacuu

SEQ ID NO: 1516442 - RNA, 19 nt, Artificial Sequence
  Description of Artificial Sequence: Synthetic oligonucleotide
  Sense strand starting at position 3716 of SEQ ID NO: 1244809
uuauacauuucggauauca

SEQ ID NO: 1516443 - RNA, 19 nt, Artificial Sequence
  Description of Artificial Sequence: Synthetic oligonucleotide
  Antisense strand to SEQ ID NO: 1516442
ugauauccgaaauguauaa

SEQ ID NO: 1516444 - RNA, 19 nt, Artificial Sequence
  Description of Artificial Sequence: Synthetic oligonucleotide
  Sense strand starting at position 3721 of SEQ ID NO: 1244809
cauuucggauaucagauau

SEQ ID NO: 1516445 - RNA, 19 nt, Artificial Sequence
  Description of Artificial Sequence: Synthetic oligonucleotide
  Antisense strand to SEQ ID NO: 1516444
auaucugauauccgaaaug

SEQ ID NO: 1516446 - RNA, 19 nt, Artificial Sequence
  Description of Artificial Sequence: Synthetic oligonucleotide
  Sense strand starting at position 3739 of SEQ ID NO: 1244809
ucuugagaguugguuacaa

SEQ ID NO: 1516447 - RNA, 19 nt, Artificial Sequence
  Description of Artificial Sequence: Synthetic oligonucleotide
  Antisense strand to SEQ ID NO: 1516446
uuguaaccaacucucaaga

SEQ ID NO: 1516448 - RNA, 19 nt, Artificial Sequence
  Description of Artificial Sequence: Synthetic oligonucleotide
  Sense strand starting at position 3782 of SEQ ID NO: 1244809
ccuacaguggguugcauaa

SEQ ID NO: 1516449 - RNA, 19 nt, Artificial Sequence
  Description of Artificial Sequence: Synthetic oligonucleotide
  Antisense strand to SEQ ID NO: 1516448
uuaugcaacccacuguagg

SEQ ID NO: 1516450 - RNA, 19 nt, Artificial Sequence
  Description of Artificial Sequence: Synthetic oligonucleotide
  Sense strand starting at position 51 of SEQ ID NO: 1244810
cagaauggugaguggaaau

SEQ ID NO: 1516451 - RNA, 19 nt, Artificial Sequence
  Description of Artificial Sequence: Synthetic oligonucleotide
  Antisense strand to SEQ ID NO: 1516450
auuuccacucaccauucug

SEQ ID NO: 1516452 - RNA, 19 nt, Artificial Sequence
  Description of Artificial Sequence: Synthetic oligonucleotide
  Sense strand starting at position 67 of SEQ ID NO: 1244810
aauguacuguugguaucaa

SEQ ID NO: 1516453 - RNA, 19 nt, Artificial Sequence
  Description of Artificial Sequence: Synthetic oligonucleotide
  Antisense strand to SEQ ID NO: 1516452
uugauaccaacaguacauu

SEQ ID NO: 1516454 - RNA, 19 nt, Artificial Sequence
  Description of Artificial Sequence: Synthetic oligonucleotide
  Sense strand starting at position 92 of SEQ ID NO: 1244810
cagucuaugcuguaagaaa

SEQ ID NO: 1516455 - RNA, 19 nt, Artificial Sequence
  Description of Artificial Sequence: Synthetic oligonucleotide
  Antisense strand to SEQ ID NO: 1516454
uuucuuacagcauagacug

SEQ ID NO: 1516456 - RNA, 19 nt, Artificial Sequence
  Description of Artificial Sequence: Synthetic oligonucleotide
  Sense strand starting at position 254 of SEQ ID NO: 1244810
gacaguaugccagaguaua

SEQ ID NO: 1516457 - RNA, 19 nt, Artificial Sequence
  Description of Artificial Sequence: Synthetic oligonucleotide
  Antisense strand to SEQ ID NO: 1516456
uauacucuggcauacuguc

SEQ ID NO: 1516458 - RNA, 19 nt, Artificial Sequence
  Description of Artificial Sequence: Synthetic oligonucleotide
  Sense strand starting at position 706 of SEQ ID NO: 1244810
cuggaauuguuauugagua

SEQ ID NO: 1516459 - RNA, 19 nt, Artificial Sequence
  Description of Artificial Sequence: Synthetic oligonucleotide
  Antisense strand to SEQ ID NO: 1516458
uacucaauaacaauuccag

SEQ ID NO: 1516460 - RNA, 19 nt, Artificial Sequence
  Description of Artificial Sequence: Synthetic oligonucleotide
  Sense strand starting at position 710 of SEQ ID NO: 1244810
aauuguuauugaguaggua

SEQ ID NO: 1516461 - RNA, 19 nt, Artificial Sequence
  Description of Artificial Sequence: Synthetic oligonucleotide
  Antisense strand to SEQ ID NO: 1516460
uaccuacucaauaacaauu

SEQ ID NO: 1516462 - RNA, 19 nt, Artificial Sequence
  Description of Artificial Sequence: Synthetic oligonucleotide
  Sense strand starting at position 711 of SEQ ID NO: 1244810
auuguuauugaguagguag

SEQ ID NO: 1516463 - RNA, 19 nt, Artificial Sequence
  Description of Artificial Sequence: Synthetic oligonucleotide
  Antisense strand to SEQ ID NO: 1516462
cuaccuacucaauaacaau

SEQ ID NO: 1516464 - RNA, 19 nt, Artificial Sequence
  Description of Artificial Sequence: Synthetic oligonucleotide
  Sense strand starting at position 844 of SEQ ID NO: 1244810
acugauuguuaucugaaau

SEQ ID NO: 1516465 - RNA, 19 nt, Artificial Sequence
  Description of Artificial Sequence: Synthetic oligonucleotide
  Antisense strand to SEQ ID NO: 1516464
auuucagauaacaaucagu

SEQ ID NO: 1516466 - RNA, 19 nt, Artificial Sequence
  Description of Artificial Sequence: Synthetic oligonucleotide
  Sense strand starting at position 874 of SEQ ID NO: 1244810
gguaacuguuacuugauua

SEQ ID NO: 1516467 - RNA, 19 nt, Artificial Sequence
  Description of Artificial Sequence: Synthetic oligonucleotide
  Antisense strand to SEQ ID NO: 1516466
uaaucaaguaacaguuacc

SEQ ID NO: 1516468 - RNA, 19 nt, Artificial Sequence
  Description of Artificial Sequence: Synthetic oligonucleotide
  Sense strand starting at position 895 of SEQ ID NO: 1244810
uucugagucccucagcaga

SEQ ID NO: 1516469 - RNA, 19 nt, Artificial Sequence
  Description of Artificial Sequence: Synthetic oligonucleotide
  Antisense strand to SEQ ID NO: 1516468
ucugcugagggacucagaa

SEQ ID NO: 1516470 - RNA, 19 nt, Artificial Sequence
  Description of Artificial Sequence: Synthetic oligonucleotide
  Sense strand starting at position 897 of SEQ ID NO: 1244810
cugagucccucagcagaaa

SEQ ID NO: 1516471 - RNA, 19 nt, Artificial Sequence
  Description of Artificial Sequence: Synthetic oligonucleotide
  Antisense strand to SEQ ID NO: 1516470
uuucugcugagggacucag

SEQ ID NO: 1516472 - RNA, 19 nt, Artificial Sequence
  Description of Artificial Sequence: Synthetic oligonucleotide
  Sense strand starting at position 932 of SEQ ID NO: 1244810
aagugaucucccgacuugu

SEQ ID NO: 1516473 - RNA, 19 nt, Artificial Sequence
  Description of Artificial Sequence: Synthetic oligonucleotide
  Antisense strand to SEQ ID NO: 1516472
acaagucgggagaucacuu

SEQ ID NO: 1516474 - RNA, 19 nt, Artificial Sequence
  Description of Artificial Sequence: Synthetic oligonucleotide
  Sense strand starting at position 990 of SEQ ID NO: 1244810
cacaguugagagggcaaua

SEQ ID NO: 1516475 - RNA, 19 nt, Artificial Sequence
  Description of Artificial Sequence: Synthetic oligonucleotide
  Antisense strand to SEQ ID NO: 1516474
uauugcccucucaacugug

SEQ ID NO: 1516476 - RNA, 19 nt, Artificial Sequence
  Description of Artificial Sequence: Synthetic oligonucleotide
  Sense strand starting at position 1076 of SEQ ID NO: 1244810
ggauaauuauaccugcucu

SEQ ID NO: 1516477 - RNA, 19 nt, Artificial Sequence
  Description of Artificial Sequence: Synthetic oligonucleotide
  Antisense strand to SEQ ID NO: 1516476
agagcagguauaauuaucc

SEQ ID NO: 1516478 - RNA, 19 nt, Artificial Sequence
  Description of Artificial Sequence: Synthetic oligonucleotide
  Sense strand starting at position 1086 of SEQ ID NO: 1244810
accugcucuggccauuaga

SEQ ID NO: 1516479 - RNA, 19 nt, Artificial Sequence
  Description of Artificial Sequence: Synthetic oligonucleotide
  Antisense strand to SEQ ID NO: 1516478
ucuaauggccagagcaggu

SEQ ID NO: 1516480 - RNA, 19 nt, Artificial Sequence
  Description of Artificial Sequence: Synthetic oligonucleotide
  Sense strand starting at position 1089 of SEQ ID NO: 1244810
ugcucuggccauuagaaau

SEQ ID NO: 1516481 - RNA, 19 nt, Artificial Sequence
  Description of Artificial Sequence: Synthetic oligonucleotide
  Antisense strand to SEQ ID NO: 1516480
auuucuaauggccagagca

SEQ ID NO: 1516482 - RNA, 19 nt, Artificial Sequence
  Description of Artificial Sequence: Synthetic oligonucleotide
  Sense strand starting at position 1110 of SEQ ID NO: 1244810
ccacguagcaaguagaaau

SEQ ID NO: 1516483 - RNA, 19 nt, Artificial Sequence
  Description of Artificial Sequence: Synthetic oligonucleotide
  Antisense strand to SEQ ID NO: 1516482
auuucuacuugcuacgugg

SEQ ID NO: 1516484 - RNA, 19 nt, Artificial Sequence
  Description of Artificial Sequence: Synthetic oligonucleotide
  Sense strand starting at position 1152 of SEQ ID NO: 1244810
cuuacuaugccucagucau

SEQ ID NO: 1516485 - RNA, 19 nt, Artificial Sequence
  Description of Artificial Sequence: Synthetic oligonucleotide
  Antisense strand to SEQ ID NO: 1516484
augacugaggcauaguaag

SEQ ID NO: 1516486 - RNA, 19 nt, Artificial Sequence
  Description of Artificial Sequence: Synthetic oligonucleotide
  Sense strand starting at position 1158 of SEQ ID NO: 1244810
augccucagucaucaugaa

SEQ ID NO: 1516487 - RNA, 19 nt, Artificial Sequence
  Description of Artificial Sequence: Synthetic oligonucleotide
  Antisense strand to SEQ ID NO: 1516486
uucaugaugacugaggcau

SEQ ID NO: 1516488 - RNA, 19 nt, Artificial Sequence
  Description of Artificial Sequence: Synthetic oligonucleotide
  Sense strand starting at position 1159 of SEQ ID NO: 1244810
ugccucagucaucaugaaa

SEQ ID NO: 1516489 - RNA, 19 nt, Artificial Sequence
  Description of Artificial Sequence: Synthetic oligonucleotide
  Antisense strand to SEQ ID NO: 1516488
uuucaugaugacugaggca

SEQ ID NO: 1516490 - RNA, 19 nt, Artificial Sequence
  Description of Artificial Sequence: Synthetic oligonucleotide
  Sense strand starting at position 1166 of SEQ ID NO: 1244810
gucaucaugaaagacguua

SEQ ID NO: 1516491 - RNA, 19 nt, Artificial Sequence
  Description of Artificial Sequence: Synthetic oligonucleotide
  Antisense strand to SEQ ID NO: 1516490
uaacgucuuucaugaugac

SEQ ID NO: 1516492 - RNA, 19 nt, Artificial Sequence
  Description of Artificial Sequence: Synthetic oligonucleotide
  Sense strand starting at position 1317 of SEQ ID NO: 1244810
cucagaaccugagcucuua

SEQ ID NO: 1516493 - RNA, 19 nt, Artificial Sequence
  Description of Artificial Sequence: Synthetic oligonucleotide
  Antisense strand to SEQ ID NO: 1516492
uaagagcucagguucugag

SEQ ID NO: 1516494 - RNA, 19 nt, Artificial Sequence
  Description of Artificial Sequence: Synthetic oligonucleotide
  Sense strand starting at position 1502 of SEQ ID NO: 1244810
ggucacucucuccagaaca

SEQ ID NO: 1516495 - RNA, 19 nt, Artificial Sequence
  Description of Artificial Sequence: Synthetic oligonucleotide
  Antisense strand to SEQ ID NO: 1516494
uguucuggagagagugacc

SEQ ID NO: 1516496 - RNA, 19 nt, Artificial Sequence
  Description of Artificial Sequence: Synthetic oligonucleotide
  Sense strand starting at position 1676 of SEQ ID NO: 1244810
cuuccugagagaggugaua

SEQ ID NO: 1516497 - RNA, 19 nt, Artificial Sequence
  Description of Artificial Sequence: Synthetic oligonucleotide
  Antisense strand to SEQ ID NO: 1516496
uaucaccucucucaggaag

SEQ ID NO: 1516498 - RNA, 19 nt, Artificial Sequence
  Description of Artificial Sequence: Synthetic oligonucleotide
  Sense strand starting at position 1799 of SEQ ID NO: 1244810
gcugguggaguuuaaauaa

SEQ ID NO: 1516499 - RNA, 19 nt, Artificial Sequence
  Description of Artificial Sequence: Synthetic oligonucleotide
  Antisense strand to SEQ ID NO: 1516498
uuauuuaaacuccaccagc

SEQ ID NO: 1516500 - RNA, 19 nt, Artificial Sequence
  Description of Artificial Sequence: Synthetic oligonucleotide
  Sense strand starting at position 1909 of SEQ ID NO: 1244810
gcgaagugggaguaacagu

SEQ ID NO: 1516501 - RNA, 19 nt, Artificial Sequence
  Description of Artificial Sequence: Synthetic oligonucleotide
  Antisense strand to SEQ ID NO: 1516500
acuguuacucccacuucgc

SEQ ID NO: 1516502 - RNA, 19 nt, Artificial Sequence
  Description of Artificial Sequence: Synthetic oligonucleotide
  Sense strand starting at position 2584 of SEQ ID NO: 1244810
agagguuuccgauauuauc

SEQ ID NO: 1516503 - RNA, 19 nt, Artificial Sequence
  Description of Artificial Sequence: Synthetic oligonucleotide
  Antisense strand to SEQ ID NO: 1516502
gauaauaucggaaaccucu

SEQ ID NO: 1516504 - RNA, 19 nt, Artificial Sequence
  Description of Artificial Sequence: Synthetic oligonucleotide
  Sense strand starting at position 2694 of SEQ ID NO: 1244810
agugauugugcuuauacca

SEQ ID NO: 1516505 - RNA, 19 nt, Artificial Sequence
  Description of Artificial Sequence: Synthetic oligonucleotide
  Antisense strand to SEQ ID NO: 1516504
ugguauaagcacaaucacu

SEQ ID NO: 1516506 - RNA, 19 nt, Artificial Sequence
  Description of Artificial Sequence: Synthetic oligonucleotide
  Sense strand starting at position 2921 of SEQ ID NO: 1244810
ugggcuuaaacugggauua

SEQ ID NO: 1516507 - RNA, 19 nt, Artificial Sequence
  Description of Artificial Sequence: Synthetic oligonucleotide
  Antisense strand to SEQ ID NO: 1516506
uaaucccaguuuaagccca

SEQ ID NO: 1516508 - RNA, 19 nt, Artificial Sequence
  Description of Artificial Sequence: Synthetic oligonucleotide
  Sense strand starting at position 2950 of SEQ ID NO: 1244810
cguacaaagaggcaugaau

SEQ ID NO: 1516509 - RNA, 19 nt, Artificial Sequence
  Description of Artificial Sequence: Synthetic oligonucleotide
  Antisense strand to SEQ ID NO: 1516508
auucaugccucuuuguacg

SEQ ID NO: 1516510 - RNA, 19 nt, Artificial Sequence
  Description of Artificial Sequence: Synthetic oligonucleotide
  Sense strand starting at position 3011 of SEQ ID NO: 1244810
acuguaauguacuuaaccu

SEQ ID NO: 1516511 - RNA, 19 nt, Artificial Sequence
  Description of Artificial Sequence: Synthetic oligonucleotide
  Antisense strand to SEQ ID NO: 1516510
agguuaaguacauuacagu

SEQ ID NO: 1516512 - RNA, 19 nt, Artificial Sequence
  Description of Artificial Sequence: Synthetic oligonucleotide
  Sense strand starting at position 3018 of SEQ ID NO: 1244810
uguacuuaaccuggaaacu

SEQ ID NO: 1516513 - RNA, 19 nt, Artificial Sequence
  Description of Artificial Sequence: Synthetic oligonucleotide
  Antisense strand to SEQ ID NO: 1516512
aguuuccagguuaaguaca

SEQ ID NO: 1516514 - RNA, 19 nt, Artificial Sequence
  Description of Artificial Sequence: Synthetic oligonucleotide
  Sense strand starting at position 3030 of SEQ ID NO: 1244810
ggaaacuguuaaguacauu

SEQ ID NO: 1516515 - RNA, 19 nt, Artificial Sequence
  Description of Artificial Sequence: Synthetic oligonucleotide
  Antisense strand to SEQ ID NO: 1516514
aauguacuuaacaguuucc

SEQ ID NO: 1516516 - RNA, 19 nt, Artificial Sequence
  Description of Artificial Sequence: Synthetic oligonucleotide
  Sense strand starting at position 3215 of SEQ ID NO: 1244810
aguuaaguccuguaguuga

SEQ ID NO: 1516517 - RNA, 19 nt, Artificial Sequence
  Description of Artificial Sequence: Synthetic oligonucleotide
  Antisense strand to SEQ ID NO: 1516516
ucaacuacaggacuuaacu

SEQ ID NO: 1516518 - RNA, 19 nt, Artificial Sequence
  Description of Artificial Sequence: Synthetic oligonucleotide
  Sense strand starting at position 3331 of SEQ ID NO: 1244810
ggccauuaggaucaccuau

SEQ ID NO: 1516519 - RNA, 19 nt, Artificial Sequence
  Description of Artificial Sequence: Synthetic oligonucleotide
  Antisense strand to SEQ ID NO: 1516518
auaggugauccuaauggcc

SEQ ID NO: 1516520 - RNA, 19 nt, Artificial Sequence
  Description of Artificial Sequence: Synthetic oligonucleotide
  Sense strand starting at position 3350 of SEQ ID NO: 1244810
ggagcuuaacguuaaauac

SEQ ID NO: 1516521 - RNA, 19 nt, Artificial Sequence
  Description of Artificial Sequence: Synthetic oligonucleotide
  Antisense strand to SEQ ID NO: 1516520
guauuuaacguuaagcucc

SEQ ID NO: 1516522 - RNA, 19 nt, Artificial Sequence
  Description of Artificial Sequence: Synthetic oligonucleotide
  Sense strand starting at position 3460 of SEQ ID NO: 1244810
ucaguaaguguuuaagaua

SEQ ID NO: 1516523 - RNA, 19 nt, Artificial Sequence
  Description of Artificial Sequence: Synthetic oligonucleotide
  Antisense strand to SEQ ID NO: 1516522
uaucuuaaacacuuacuga

SEQ ID NO: 1516524 - RNA, 19 nt, Artificial Sequence
  Description of Artificial Sequence: Synthetic oligonucleotide
  Sense strand starting at position 3582 of SEQ ID NO: 1244810
aggcaucaguaauugucaa

SEQ ID NO: 1516525 - RNA, 19 nt, Artificial Sequence
  Description of Artificial Sequence: Synthetic oligonucleotide
  Antisense strand to SEQ ID NO: 1516524
uugacaauuacugaugccu

SEQ ID NO: 1516526 - RNA, 19 nt, Artificial Sequence
  Description of Artificial Sequence: Synthetic oligonucleotide
  Sense strand starting at position 3731 of SEQ ID NO: 1244810
gcgcacguuuauuuauuua

SEQ ID NO: 1516527 - RNA, 19 nt, Artificial Sequence
  Description of Artificial Sequence: Synthetic oligonucleotide
  Antisense strand to SEQ ID NO: 1516526
uaaauaaauaaacgugcgc

SEQ ID NO: 1516528 - RNA, 19 nt, Artificial Sequence
  Description of Artificial Sequence: Synthetic oligonucleotide
  Sense strand starting at position 3962 of SEQ ID NO: 1244810
gggaaugugcaauaguuga

SEQ ID NO: 1516529 - RNA, 19 nt, Artificial Sequence
  Description of Artificial Sequence: Synthetic oligonucleotide
  Antisense strand to SEQ ID NO: 1516528
ucaacuauugcacauuccc

SEQ ID NO: 1516530 - RNA, 19 nt, Artificial Sequence
  Description of Artificial Sequence: Synthetic oligonucleotide
  Sense strand starting at position 205 of SEQ ID NO: 1244811
aguauaauuugggaaaugu

SEQ ID NO: 1516531 - RNA, 19 nt, Artificial Sequence
  Description of Artificial Sequence: Synthetic oligonucleotide
  Antisense strand to SEQ ID NO: 1516530
acauuucccaaauuauacu

SEQ ID NO: 1516532 - RNA, 19 nt, Artificial Sequence
  Description of Artificial Sequence: Synthetic oligonucleotide
  Sense strand starting at position 214 of SEQ ID NO: 1244811
ugggaaaugugaucaacga

SEQ ID NO: 1516533 - RNA, 19 nt, Artificial Sequence
  Description of Artificial Sequence: Synthetic oligonucleotide
  Antisense strand to SEQ ID NO: 1516532
ucguugaucacauuuccca

SEQ ID NO: 1516534 - RNA, 19 nt, Artificial Sequence
  Description of Artificial Sequence: Synthetic oligonucleotide
  Sense strand starting at position 326 of SEQ ID NO: 1244811
ugcugaaaucaaugugaaa

SEQ ID NO: 1516535 - RNA, 19 nt, Artificial Sequence
  Description of Artificial Sequence: Synthetic oligonucleotide
  Antisense strand to SEQ ID NO: 1516534
uuucacauugauuucagca

SEQ ID NO: 1516536 - RNA, 19 nt, Artificial Sequence
  Description of Artificial Sequence: Synthetic oligonucleotide
  Sense strand starting at position 367 of SEQ ID NO: 1244811
guauuagauagcugucaga

SEQ ID NO: 1516537 - RNA, 19 nt, Artificial Sequence
  Description of Artificial Sequence: Synthetic oligonucleotide
  Antisense strand to SEQ ID NO: 1516536
ucugacagcuaucuaauac

SEQ ID NO: 1516538 - RNA, 19 nt, Artificial Sequence
  Description of Artificial Sequence: Synthetic oligonucleotide
  Sense strand starting at position 374 of SEQ ID NO: 1244811
auagcugucagauacggaa

SEQ ID NO: 1516539 - RNA, 19 nt, Artificial Sequence
  Description of Artificial Sequence: Synthetic oligonucleotide
  Antisense strand to SEQ ID NO: 1516538
uuccguaucugacagcuau

SEQ ID NO: 1516540 - RNA, 19 nt, Artificial Sequence
  Description of Artificial Sequence: Synthetic oligonucleotide
  Sense strand starting at position 403 of SEQ ID NO: 1244811
gcaauacuaucaguagcaa

SEQ ID NO: 1516541 - RNA, 19 nt, Artificial Sequence
  Description of Artificial Sequence: Synthetic oligonucleotide
  Antisense strand to SEQ ID NO: 1516540
uugcuacugauaguauugc

SEQ ID NO: 1516542 - RNA, 19 nt, Artificial Sequence
  Description of Artificial Sequence: Synthetic oligonucleotide
  Sense strand starting at position 418 of SEQ ID NO: 1244811
gcaacaauauguuuaaagu

SEQ ID NO: 1516543 - RNA, 19 nt, Artificial Sequence
  Description of Artificial Sequence: Synthetic oligonucleotide
  Antisense strand to SEQ ID NO: 1516542
acuuuaaacauauuguugc

SEQ ID NO: 1516544 - RNA, 19 nt, Artificial Sequence
  Description of Artificial Sequence: Synthetic oligonucleotide
  Sense strand starting at position 428 of SEQ ID NO: 1244811
guuuaaaguuggguccuau

SEQ ID NO: 1516545 - RNA, 19 nt, Artificial Sequence
  Description of Artificial Sequence: Synthetic oligonucleotide
  Antisense strand to SEQ ID NO: 1516544
auaggacccaacuuuaaac

SEQ ID NO: 1516546 - RNA, 19 nt, Artificial Sequence
  Description of Artificial Sequence: Synthetic oligonucleotide
  Sense strand starting at position 458 of SEQ ID NO: 1244811
caacguucucuugaaguua

SEQ ID NO: 1516547 - RNA, 19 nt, Artificial Sequence
  Description of Artificial Sequence: Synthetic oligonucleotide
  Antisense strand to SEQ ID NO: 1516546
uaacuucaagagaacguug

SEQ ID NO: 1516548 - RNA, 19 nt, Artificial Sequence
  Description of Artificial Sequence: Synthetic oligonucleotide
  Sense strand starting at position 708 of SEQ ID NO: 1244811
aucgaagaauaucccgauu

SEQ ID NO: 1516549 - RNA, 19 nt, Artificial Sequence
  Description of Artificial Sequence: Synthetic oligonucleotide
  Antisense strand to SEQ ID NO: 1516548
aaucgggauauucuucgau

SEQ ID NO: 1516550 - RNA, 19 nt, Artificial Sequence
  Description of Artificial Sequence: Synthetic oligonucleotide
  Sense strand starting at position 731 of SEQ ID NO: 1244811
ccggaacagcgguaauacu

SEQ ID NO: 1516551 - RNA, 19 nt, Artificial Sequence
  Description of Artificial Sequence: Synthetic oligonucleotide
  Antisense strand to SEQ ID NO: 1516550
aguauuaccgcuguuccgg

SEQ ID NO: 1516552 - RNA, 19 nt, Artificial Sequence
  Description of Artificial Sequence: Synthetic oligonucleotide
  Sense strand starting at position 740 of SEQ ID NO: 1244811
cgguaauacucagucagga

SEQ ID NO: 1516553 - RNA, 19 nt, Artificial Sequence
  Description of Artificial Sequence: Synthetic oligonucleotide
  Antisense strand to SEQ ID NO: 1516552
uccugacugaguauuaccg

SEQ ID NO: 1516554 - RNA, 19 nt, Artificial Sequence
  Description of Artificial Sequence: Synthetic oligonucleotide
  Sense strand starting at position 801 of SEQ ID NO: 1244811
uucgguuaagagcacuuau

SEQ ID NO: 1516555 - RNA, 19 nt, Artificial Sequence
  Description of Artificial Sequence: Synthetic oligonucleotide
  Antisense strand to SEQ ID NO: 1516554
auaagugcucuuaaccgaa

SEQ ID NO: 1516556 - RNA, 19 nt, Artificial Sequence
  Description of Artificial Sequence: Synthetic oligonucleotide
  Sense strand starting at position 838 of SEQ ID NO: 1244811
guugucaugggucaaauac

SEQ ID NO: 1516557 - RNA, 19 nt, Artificial Sequence
  Description of Artificial Sequence: Synthetic oligonucleotide
  Antisense strand to SEQ ID NO: 1516556
guauuugacccaugacaac

SEQ ID NO: 1516558 - RNA, 19 nt, Artificial Sequence
  Description of Artificial Sequence: Synthetic oligonucleotide
  Sense strand starting at position 1032 of SEQ ID NO: 1244811
ccaaguccucccgggaagu

SEQ ID NO: 1516559 - RNA, 19 nt, Artificial Sequence
  Description of Artificial Sequence: Synthetic oligonucleotide
  Antisense strand to SEQ ID NO: 1516558
acuucccgggaggacuugg

SEQ ID NO: 1516560 - RNA, 19 nt, Artificial Sequence
  Description of Artificial Sequence: Synthetic oligonucleotide
  Sense strand starting at position 1209 of SEQ ID NO: 1244811
aggcuauuaaagugggaaa

SEQ ID NO: 1516561 - RNA, 19 nt, Artificial Sequence
  Description of Artificial Sequence: Synthetic oligonucleotide
  Antisense strand to SEQ ID NO: 1516560
uuucccacuuuaauagccu

SEQ ID NO: 1516562 - RNA, 19 nt, Artificial Sequence
  Description of Artificial Sequence: Synthetic oligonucleotide
  Sense strand starting at position 1210 of SEQ ID NO: 1244811
ggcuauuaaagugggaaau

SEQ ID NO: 1516563 - RNA, 19 nt, Artificial Sequence
  Description of Artificial Sequence: Synthetic oligonucleotide
  Antisense strand to SEQ ID NO: 1516562
auuucccacuuuaauagcc

SEQ ID NO: 1516564 - RNA, 19 nt, Artificial Sequence
  Description of Artificial Sequence: Synthetic oligonucleotide
  Sense strand starting at position 1211 of SEQ ID NO: 1244811
gcuauuaaagugggaaaua

SEQ ID NO: 1516565 - RNA, 19 nt, Artificial Sequence
  Description of Artificial Sequence: Synthetic oligonucleotide
  Antisense strand to SEQ ID NO: 1516564
uauuucccacuuuaauagc

SEQ ID NO: 1516566 - RNA, 19 nt, Artificial Sequence
  Description of Artificial Sequence: Synthetic oligonucleotide
  Sense strand starting at position 1224 of SEQ ID NO: 1244811
gaaauacuccacgggaauc

SEQ ID NO: 1516567 - RNA, 19 nt, Artificial Sequence
  Description of Artificial Sequence: Synthetic oligonucleotide
  Antisense strand to SEQ ID NO: 1516566
gauucccguggaguauuuc

SEQ ID NO: 1516568 - RNA, 19 nt, Artificial Sequence
  Description of Artificial Sequence: Synthetic oligonucleotide
  Sense strand starting at position 1371 of SEQ ID NO: 1244811
guuccuacccgagagguga

SEQ ID NO: 1516569 - RNA, 19 nt, Artificial Sequence
  Description of Artificial Sequence: Synthetic oligonucleotide
  Antisense strand to SEQ ID NO: 1516568
ucaccucucggguaggaac

SEQ ID NO: 1516570 - RNA, 19 nt, Artificial Sequence
  Description of Artificial Sequence: Synthetic oligonucleotide
  Sense strand starting at position 2202 of SEQ ID NO: 1244811
cgugguggagcauaaucaa

SEQ ID NO: 1516571 - RNA, 19 nt, Artificial Sequence
  Description of Artificial Sequence: Synthetic oligonucleotide
  Antisense strand to SEQ ID NO: 1516570
uugauuaugcuccaccacg

SEQ ID NO: 1516572 - RNA, 19 nt, Artificial Sequence
  Description of Artificial Sequence: Synthetic oligonucleotide
  Sense strand starting at position 2262 of SEQ ID NO: 1244811
aggcuuuagacguaagcca

SEQ ID NO: 1516573 - RNA, 19 nt, Artificial Sequence
  Description of Artificial Sequence: Synthetic oligonucleotide
  Antisense strand to SEQ ID NO: 1516572
uggcuuacgucuaaagccu

SEQ ID NO: 1516574 - RNA, 19 nt, Artificial Sequence
  Description of Artificial Sequence: Synthetic oligonucleotide
  Sense strand starting at position 2390 of SEQ ID NO: 1244811
augguuacuuccucucagu

SEQ ID NO: 1516575 - RNA, 19 nt, Artificial Sequence
  Description of Artificial Sequence: Synthetic oligonucleotide
  Antisense strand to SEQ ID NO: 1516574
acugagaggaaguaaccau

SEQ ID NO: 1516576 - RNA, 19 nt, Artificial Sequence
  Description of Artificial Sequence: Synthetic oligonucleotide
  Sense strand starting at position 2787 of SEQ ID NO: 1244811
ccuagacuuugacuagcua

SEQ ID NO: 1516577 - RNA, 19 nt, Artificial Sequence
  Description of Artificial Sequence: Synthetic oligonucleotide
  Antisense strand to SEQ ID NO: 1516576
uagcuagucaaagucuagg

SEQ ID NO: 1516578 - RNA, 19 nt, Artificial Sequence
  Description of Artificial Sequence: Synthetic oligonucleotide
  Sense strand starting at position 2870 of SEQ ID NO: 1244811
caguauccauaagcgagaa

SEQ ID NO: 1516579 - RNA, 19 nt, Artificial Sequence
  Description of Artificial Sequence: Synthetic oligonucleotide
  Antisense strand to SEQ ID NO: 1516578
uucucgcuuauggauacug

SEQ ID NO: 1516580 - RNA, 19 nt, Artificial Sequence
  Description of Artificial Sequence: Synthetic oligonucleotide
  Sense strand starting at position 2872 of SEQ ID NO: 1244811
guauccauaagcgagaacu

SEQ ID NO: 1516581 - RNA, 19 nt, Artificial Sequence
  Description of Artificial Sequence: Synthetic oligonucleotide
  Antisense strand to SEQ ID NO: 1516580
aguucucgcuuauggauac

SEQ ID NO: 1516582 - RNA, 19 nt, Artificial Sequence
  Description of Artificial Sequence: Synthetic oligonucleotide
  Sense strand starting at position 2959 of SEQ ID NO: 1244811
gucccuccugucugaagaa

SEQ ID NO: 1516583 - RNA, 19 nt, Artificial Sequence
  Description of Artificial Sequence: Synthetic oligonucleotide
  Antisense strand to SEQ ID NO: 1516582
uucuucagacaggagggac

SEQ ID NO: 1516584 - RNA, 19 nt, Artificial Sequence
  Description of Artificial Sequence: Synthetic oligonucleotide
  Sense strand starting at position 2974 of SEQ ID NO: 1244811
agaacaauccgaugugugu

SEQ ID NO: 1516585 - RNA, 19 nt, Artificial Sequence
  Description of Artificial Sequence: Synthetic oligonucleotide
  Antisense strand to SEQ ID NO: 1516584
acacacaucggauuguucu

SEQ ID NO: 1516586 - RNA, 19 nt, Artificial Sequence
  Description of Artificial Sequence: Synthetic oligonucleotide
  Sense strand starting at position 3265 of SEQ ID NO: 1244811
gcagacuucuuugcugaau

SEQ ID NO: 1516587 - RNA, 19 nt, Artificial Sequence
  Description of Artificial Sequence: Synthetic oligonucleotide
  Antisense strand to SEQ ID NO: 1516586
auucagcaaagaagucugc

SEQ ID NO: 1516588 - RNA, 19 nt, Artificial Sequence
  Description of Artificial Sequence: Synthetic oligonucleotide
  Sense strand starting at position 3276 of SEQ ID NO: 1244811
ugcugaauccaguaugcuu

SEQ ID NO: 1516589 - RNA, 19 nt, Artificial Sequence
  Description of Artificial Sequence: Synthetic oligonucleotide
  Antisense strand to SEQ ID NO: 1516588
aagcauacuggauucagca

SEQ ID NO: 1516590 - RNA, 19 nt, Artificial Sequence
  Description of Artificial Sequence: Synthetic oligonucleotide
  Sense strand starting at position 3313 of SEQ ID NO: 1244811
uugaacuuugcaggaggua

SEQ ID NO: 1516591 - RNA, 19 nt, Artificial Sequence
  Description of Artificial Sequence: Synthetic oligonucleotide
  Antisense strand to SEQ ID NO: 1516590
uaccuccugcaaaguucaa

SEQ ID NO: 1516592 - RNA, 19 nt, Artificial Sequence
  Description of Artificial Sequence: Synthetic oligonucleotide
  Sense strand starting at position 3400 of SEQ ID NO: 1244811
uuaacuguuccuuaggguu

SEQ ID NO: 1516593 - RNA, 19 nt, Artificial Sequence
  Description of Artificial Sequence: Synthetic oligonucleotide
  Antisense strand to SEQ ID NO: 1516592
aacccuaaggaacaguuaa

SEQ ID NO: 1516594 - RNA, 19 nt, Artificial Sequence
  Description of Artificial Sequence: Synthetic oligonucleotide
  Sense strand starting at position 3446 of SEQ ID NO: 1244811
ucccucuccgaggaugauu

SEQ ID NO: 1516595 - RNA, 19 nt, Artificial Sequence
  Description of Artificial Sequence: Synthetic oligonucleotide
  Antisense strand to SEQ ID NO: 1516594
aaucauccucggagaggga

SEQ ID NO: 1516596 - RNA, 19 nt, Artificial Sequence
  Description of Artificial Sequence: Synthetic oligonucleotide
  Sense strand starting at position 3454 of SEQ ID NO: 1244811
cgaggaugauuucaccgau

SEQ ID NO: 1516597 - RNA, 19 nt, Artificial Sequence
  Description of Artificial Sequence: Synthetic oligonucleotide
  Antisense strand to SEQ ID NO: 1516596
aucggugaaaucauccucg

SEQ ID NO: 1516598 - RNA, 19 nt, Artificial Sequence
  Description of Artificial Sequence: Synthetic oligonucleotide
  Sense strand starting at position 3660 of SEQ ID NO: 1244811
ucuuaaacugagugacaca

SEQ ID NO: 1516599 - RNA, 19 nt, Artificial Sequence
  Description of Artificial Sequence: Synthetic oligonucleotide
  Antisense strand to SEQ ID NO: 1516598
ugugucacucaguuuaaga

SEQ ID NO: 1516600 - RNA, 19 nt, Artificial Sequence
  Description of Artificial Sequence: Synthetic oligonucleotide
  Sense strand starting at position 3702 of SEQ ID NO: 1244811
uggaaaggccagcaacauu

SEQ ID NO: 1516601 - RNA, 19 nt, Artificial Sequence
  Description of Artificial Sequence: Synthetic oligonucleotide
  Antisense strand to SEQ ID NO: 1516600
aauguugcuggccuuucca

SEQ ID NO: 1516602 - RNA, 19 nt, Artificial Sequence
  Description of Artificial Sequence: Synthetic oligonucleotide
  Sense strand starting at position 3764 of SEQ ID NO: 1244811
ggccaaaucuugucuauuc

SEQ ID NO: 1516603 - RNA, 19 nt, Artificial Sequence
  Description of Artificial Sequence: Synthetic oligonucleotide
  Antisense strand to SEQ ID NO: 1516602
gaauagacaagauuuggcc

SEQ ID NO: 1516604 - RNA, 19 nt, Artificial Sequence
  Description of Artificial Sequence: Synthetic oligonucleotide
  Sense strand starting at position 3868 of SEQ ID NO: 1244811
ggcuuaagaccuuagaugu

SEQ ID NO: 1516605 - RNA, 19 nt, Artificial Sequence
  Description of Artificial Sequence: Synthetic oligonucleotide
  Antisense strand to SEQ ID NO: 1516604
acaucuaaggucuuaagcc

SEQ ID NO: 1516606 - RNA, 19 nt, Artificial Sequence
  Description of Artificial Sequence: Synthetic oligonucleotide
  Sense strand starting at position 3874 of SEQ ID NO: 1244811
agaccuuagaugugugaua

SEQ ID NO: 1516607 - RNA, 19 nt, Artificial Sequence
  Description of Artificial Sequence: Synthetic oligonucleotide
  Antisense strand to SEQ ID NO: 1516606
uaucacacaucuaaggucu

SEQ ID NO: 1516608 - RNA, 19 nt, Artificial Sequence
  Description of Artificial Sequence: Synthetic oligonucleotide
  Sense strand starting at position 3881 of SEQ ID NO: 1244811
agaugugugauaggccaaa

SEQ ID NO: 1516609 - RNA, 19 nt, Artificial Sequence
  Description of Artificial Sequence: Synthetic oligonucleotide
  Antisense strand to SEQ ID NO: 1516608
uuuggccuaucacacaucu

SEQ ID NO: 1516610 - RNA, 19 nt, Artificial Sequence
  Description of Artificial Sequence: Synthetic oligonucleotide
  Sense strand starting at position 821 of SEQ ID NO: 1244812
cguggauaguggucacugu

SEQ ID NO: 1516611 - RNA, 19 nt, Artificial Sequence
  Description of Artificial Sequence: Synthetic oligonucleotide
  Antisense strand to SEQ ID NO: 1516610
acagugaccacuauccacg

SEQ ID NO: 1516612 - RNA, 19 nt, Artificial Sequence
  Description of Artificial Sequence: Synthetic oligonucleotide
  Sense strand starting at position 822 of SEQ ID NO: 1244812
guggauaguggucacugua

SEQ ID NO: 1516613 - RNA, 19 nt, Artificial Sequence
  Description of Artificial Sequence: Synthetic oligonucleotide
  Antisense strand to SEQ ID NO: 1516612
uacagugaccacuauccac

SEQ ID NO: 1516614 - RNA, 19 nt, Artificial Sequence
  Description of Artificial Sequence: Synthetic oligonucleotide
  Sense strand starting at position 825 of SEQ ID NO: 1244812
gauaguggucacuguauua

SEQ ID NO: 1516615 - RNA, 19 nt, Artificial Sequence
  Description of Artificial Sequence: Synthetic oligonucleotide
  Antisense strand to SEQ ID NO: 1516614
uaauacagugaccacuauc

SEQ ID NO: 1516616 - RNA, 19 nt, Artificial Sequence
  Description of Artificial Sequence: Synthetic oligonucleotide
  Sense strand starting at position 838 of SEQ ID NO: 1244812
guauuagaugcauagcacu

SEQ ID NO: 1516617 - RNA, 19 nt, Artificial Sequence
  Description of Artificial Sequence: Synthetic oligonucleotide
  Antisense strand to SEQ ID NO: 1516616
agugcuaugcaucuaauac

SEQ ID NO: 1516618 - RNA, 19 nt, Artificial Sequence
  Description of Artificial Sequence: Synthetic oligonucleotide
  Sense strand starting at position 844 of SEQ ID NO: 1244812
gaugcauagcacuaguaug

SEQ ID NO: 1516619 - RNA, 19 nt, Artificial Sequence
  Description of Artificial Sequence: Synthetic oligonucleotide
  Antisense strand to SEQ ID NO: 1516618
cauacuagugcuaugcauc

SEQ ID NO: 1516620 - RNA, 19 nt, Artificial Sequence
  Description of Artificial Sequence: Synthetic oligonucleotide
  Sense strand starting at position 926 of SEQ ID NO: 1244812
guugaagucagaggaucau

SEQ ID NO: 1516621 - RNA, 19 nt, Artificial Sequence
  Description of Artificial Sequence: Synthetic oligonucleotide
  Antisense strand to SEQ ID NO: 1516620
augauccucugacuucaac

SEQ ID NO: 1516622 - RNA, 19 nt, Artificial Sequence
  Description of Artificial Sequence: Synthetic oligonucleotide
  Sense strand starting at position 1117 of SEQ ID NO: 1244812
cagguuggguaaugcagaa

SEQ ID NO: 1516623 - RNA, 19 nt, Artificial Sequence
  Description of Artificial Sequence: Synthetic oligonucleotide
  Antisense strand to SEQ ID NO: 1516622
uucugcauuacccaaccug

SEQ ID NO: 1516624 - RNA, 19 nt, Artificial Sequence
  Description of Artificial Sequence: Synthetic oligonucleotide
  Sense strand starting at position 1121 of SEQ ID NO: 1244812
uuggguaaugcagaaguga

SEQ ID NO: 1516625 - RNA, 19 nt, Artificial Sequence
  Description of Artificial Sequence: Synthetic oligonucleotide
  Antisense strand to SEQ ID NO: 1516624
ucacuucugcauuacccaa

SEQ ID NO: 1516626 - RNA, 19 nt, Artificial Sequence
  Description of Artificial Sequence: Synthetic oligonucleotide
  Sense strand starting at position 1129 of SEQ ID NO: 1244812
ugcagaagugaaugaugga

SEQ ID NO: 1516627 - RNA, 19 nt, Artificial Sequence
  Description of Artificial Sequence: Synthetic oligonucleotide
  Antisense strand to SEQ ID NO: 1516626
uccaucauucacuucugca

SEQ ID NO: 1516628 - RNA, 19 nt, Artificial Sequence
  Description of Artificial Sequence: Synthetic oligonucleotide
  Sense strand starting at position 1156 of SEQ ID NO: 1244812
cggcuuacccaucaaagga

SEQ ID NO: 1516629 - RNA, 19 nt, Artificial Sequence
  Description of Artificial Sequence: Synthetic oligonucleotide
  Antisense strand to SEQ ID NO: 1516628
uccuuugauggguaagccg

SEQ ID NO: 1516630 - RNA, 19 nt, Artificial Sequence
  Description of Artificial Sequence: Synthetic oligonucleotide
  Sense strand starting at position 1219 of SEQ ID NO: 1244812
guagauaugcaucacaauu

SEQ ID NO: 1516631 - RNA, 19 nt, Artificial Sequence
  Description of Artificial Sequence: Synthetic oligonucleotide
  Antisense strand to SEQ ID NO: 1516630
aauugugaugcauaucuac

SEQ ID NO: 1516632 - RNA, 19 nt, Artificial Sequence
  Description of Artificial Sequence: Synthetic oligonucleotide
  Sense strand starting at position 1221 of SEQ ID NO: 1244812
agauaugcaucacaauugu

SEQ ID NO: 1516633 - RNA, 19 nt, Artificial Sequence
  Description of Artificial Sequence: Synthetic oligonucleotide
  Antisense strand to SEQ ID NO: 1516632
acaauugugaugcauaucu

SEQ ID NO: 1516634 - RNA, 19 nt, Artificial Sequence
  Description of Artificial Sequence: Synthetic oligonucleotide
  Sense strand starting at position 1260 of SEQ ID NO: 1244812
uggucuauagucugggagu

SEQ ID NO: 1516635 - RNA, 19 nt, Artificial Sequence
  Description of Artificial Sequence: Synthetic oligonucleotide
  Antisense strand to SEQ ID NO: 1516634
acucccagacuauagacca

SEQ ID NO: 1516636 - RNA, 19 nt, Artificial Sequence
  Description of Artificial Sequence: Synthetic oligonucleotide
  Sense strand starting at position 1261 of SEQ ID NO: 1244812
ggucuauagucugggagug

SEQ ID NO: 1516637 - RNA, 19 nt, Artificial Sequence
  Description of Artificial Sequence: Synthetic oligonucleotide
  Antisense strand to SEQ ID NO: 1516636
cacucccagacuauagacc

SEQ ID NO: 1516638 - RNA, 19 nt, Artificial Sequence
  Description of Artificial Sequence: Synthetic oligonucleotide
  Sense strand starting at position 1262 of SEQ ID NO: 1244812
gucuauagucugggaguga

SEQ ID NO: 1516639 - RNA, 19 nt, Artificial Sequence
  Description of Artificial Sequence: Synthetic oligonucleotide
  Antisense strand to SEQ ID NO: 1516638
ucacucccagacuauagac

SEQ ID NO: 1516640 - RNA, 19 nt, Artificial Sequence
  Description of Artificial Sequence: Synthetic oligonucleotide
  Sense strand starting at position 1263 of SEQ ID NO: 1244812
ucuauagucugggagugaa

SEQ ID NO: 1516641 - RNA, 19 nt, Artificial Sequence
  Description of Artificial Sequence: Synthetic oligonucleotide
  Antisense strand to SEQ ID NO: 1516640
uucacucccagacuauaga

SEQ ID NO: 1516642 - RNA, 19 nt, Artificial Sequence
  Description of Artificial Sequence: Synthetic oligonucleotide
  Sense strand starting at position 1266 of SEQ ID NO: 1244812
auagucugggagugaaaga

SEQ ID NO: 1516643 - RNA, 19 nt, Artificial Sequence
  Description of Artificial Sequence: Synthetic oligonucleotide
  Antisense strand to SEQ ID NO: 1516642
ucuuucacucccagacuau

SEQ ID NO: 1516644 - RNA, 19 nt, Artificial Sequence
  Description of Artificial Sequence: Synthetic oligonucleotide
  Sense strand starting at position 1372 of SEQ ID NO: 1244812
ucccuauguugacugugua

SEQ ID NO: 1516645 - RNA, 19 nt, Artificial Sequence
  Description of Artificial Sequence: Synthetic oligonucleotide
  Antisense strand to SEQ ID NO: 1516644
uacacagucaacauaggga

SEQ ID NO: 1516646 - RNA, 19 nt, Artificial Sequence
  Description of Artificial Sequence: Synthetic oligonucleotide
  Sense strand starting at position 1373 of SEQ ID NO: 1244812
cccuauguugacuguguau

SEQ ID NO: 1516647 - RNA, 19 nt, Artificial Sequence
  Description of Artificial Sequence: Synthetic oligonucleotide
  Antisense strand to SEQ ID NO: 1516646
auacacagucaacauaggg

SEQ ID NO: 1516648 - RNA, 19 nt, Artificial Sequence
  Description of Artificial Sequence: Synthetic oligonucleotide
  Sense strand starting at position 1382 of SEQ ID NO: 1244812
gacuguguauccuaagguu

SEQ ID NO: 1516649 - RNA, 19 nt, Artificial Sequence
  Description of Artificial Sequence: Synthetic oligonucleotide
  Antisense strand to SEQ ID NO: 1516648
aaccuuaggauacacaguc

SEQ ID NO: 1516650 - RNA, 19 nt, Artificial Sequence
  Description of Artificial Sequence: Synthetic oligonucleotide
  Sense strand starting at position 1662 of SEQ ID NO: 1244812
ccgcgauccuacgagguaa

SEQ ID NO: 1516651 - RNA, 19 nt, Artificial Sequence
  Description of Artificial Sequence: Synthetic oligonucleotide
  Antisense strand to SEQ ID NO: 1516650
uuaccucguaggaucgcgg

SEQ ID NO: 1516652 - RNA, 19 nt, Artificial Sequence
  Description of Artificial Sequence: Synthetic oligonucleotide
  Sense strand starting at position 1716 of SEQ ID NO: 1244812
accucugaguucugagacu

SEQ ID NO: 1516653 - RNA, 19 nt, Artificial Sequence
  Description of Artificial Sequence: Synthetic oligonucleotide
  Antisense strand to SEQ ID NO: 1516652
agucucagaacucagaggu

SEQ ID NO: 1516654 - RNA, 19 nt, Artificial Sequence
  Description of Artificial Sequence: Synthetic oligonucleotide
  Sense strand starting at position 3495 of SEQ ID NO: 1244812
gcgucugucugguucagau

SEQ ID NO: 1516655 - RNA, 19 nt, Artificial Sequence
  Description of Artificial Sequence: Synthetic oligonucleotide
  Antisense strand to SEQ ID NO: 1516654
aucugaaccagacagacgc

SEQ ID NO: 1516656 - RNA, 19 nt, Artificial Sequence
  Description of Artificial Sequence: Synthetic oligonucleotide
  Sense strand starting at position 3513 of SEQ ID NO: 1244812
uauaaauacccaugugggu

SEQ ID NO: 1516657 - RNA, 19 nt, Artificial Sequence
  Description of Artificial Sequence: Synthetic oligonucleotide
  Antisense strand to SEQ ID NO: 1516656
acccacauggguauuuaua

SEQ ID NO: 1516658 - RNA, 19 nt, Artificial Sequence
  Description of Artificial Sequence: Synthetic oligonucleotide
  Sense strand starting at position 3663 of SEQ ID NO: 1244812
gggugaaugucacccugau

SEQ ID NO: 1516659 - RNA, 19 nt, Artificial Sequence
  Description of Artificial Sequence: Synthetic oligonucleotide
  Antisense strand to SEQ ID NO: 1516658
aucagggugacauucaccc

SEQ ID NO: 1516660 - RNA, 19 nt, Artificial Sequence
  Description of Artificial Sequence: Synthetic oligonucleotide
  Sense strand starting at position 3711 of SEQ ID NO: 1244812
aggccagacuugugcucua

SEQ ID NO: 1516661 - RNA, 19 nt, Artificial Sequence
  Description of Artificial Sequence: Synthetic oligonucleotide
  Antisense strand to SEQ ID NO: 1516660
uagagcacaagucuggccu

SEQ ID NO: 1516662 - RNA, 19 nt, Artificial Sequence
  Description of Artificial Sequence: Synthetic oligonucleotide
  Sense strand starting at position 3714 of SEQ ID NO: 1244812
ccagacuugugcucuaauc

SEQ ID NO: 1516663 - RNA, 19 nt, Artificial Sequence
  Description of Artificial Sequence: Synthetic oligonucleotide
  Antisense strand to SEQ ID NO: 1516662
gauuagagcacaagucugg

SEQ ID NO: 1516664 - RNA, 19 nt, Artificial Sequence
  Description of Artificial Sequence: Synthetic oligonucleotide
  Sense strand starting at position 3716 of SEQ ID NO: 1244812
agacuugugcucuaaucca

SEQ ID NO: 1516665 - RNA, 19 nt, Artificial Sequence
  Description of Artificial Sequence: Synthetic oligonucleotide
  Antisense strand to SEQ ID NO: 1516664
uggauuagagcacaagucu

SEQ ID NO: 1516666 - RNA, 19 nt, Artificial Sequence
  Description of Artificial Sequence: Synthetic oligonucleotide
  Sense strand starting at position 3873 of SEQ ID NO: 1244812
agaagaacucuuuguuguc

SEQ ID NO: 1516667 - RNA, 19 nt, Artificial Sequence
  Description of Artificial Sequence: Synthetic oligonucleotide
  Antisense strand to SEQ ID NO: 1516666
gacaacaaagaguucuucu

SEQ ID NO: 1516668 - RNA, 19 nt, Artificial Sequence
  Description of Artificial Sequence: Synthetic oligonucleotide
  Sense strand starting at position 100 of SEQ ID NO: 1244813
aaaugagacucagaaggaa

SEQ ID NO: 1516669 - RNA, 19 nt, Artificial Sequence
  Description of Artificial Sequence: Synthetic oligonucleotide
  Antisense strand to SEQ ID NO: 1516668
uuccuucugagucucauuu

SEQ ID NO: 1516670 - RNA, 19 nt, Artificial Sequence
  Description of Artificial Sequence: Synthetic oligonucleotide
  Sense strand starting at position 147 of SEQ ID NO: 1244813
gugaaaugucaauaaagcc

SEQ ID NO: 1516671 - RNA, 19 nt, Artificial Sequence
  Description of Artificial Sequence: Synthetic oligonucleotide
  Antisense strand to SEQ ID NO: 1516670
ggcuuuauugacauuucac

SEQ ID NO: 1516672 - RNA, 19 nt, Artificial Sequence
  Description of Artificial Sequence: Synthetic oligonucleotide
  Sense strand starting at position 185 of SEQ ID NO: 1244813
aggaguaacuauguugaau

SEQ ID NO: 1516673 - RNA, 19 nt, Artificial Sequence
  Description of Artificial Sequence: Synthetic oligonucleotide
  Antisense strand to SEQ ID NO: 1516672
auucaacauaguuacuccu

SEQ ID NO: 1516674 - RNA, 19 nt, Artificial Sequence
  Description of Artificial Sequence: Synthetic oligonucleotide
  Sense strand starting at position 215 of SEQ ID NO: 1244813
agaggaauaugagaacaaa

SEQ ID NO: 1516675 - RNA, 19 nt, Artificial Sequence
  Description of Artificial Sequence: Synthetic oligonucleotide
  Antisense strand to SEQ ID NO: 1516674
uuuguucucauauuccucu

SEQ ID NO: 1516676 - RNA, 19 nt, Artificial Sequence
  Description of Artificial Sequence: Synthetic oligonucleotide
  Sense strand starting at position 315 of SEQ ID NO: 1244813
guggcacuugauuacuaga

SEQ ID NO: 1516677 - RNA, 19 nt, Artificial Sequence
  Description of Artificial Sequence: Synthetic oligonucleotide
  Antisense strand to SEQ ID NO: 1516676
ucuaguaaucaagugccac

SEQ ID NO: 1516678 - RNA, 19 nt, Artificial Sequence
  Description of Artificial Sequence: Synthetic oligonucleotide
  Sense strand starting at position 317 of SEQ ID NO: 1244813
ggcacuugauuacuagaag

SEQ ID NO: 1516679 - RNA, 19 nt, Artificial Sequence
  Description of Artificial Sequence: Synthetic oligonucleotide
  Antisense strand to SEQ ID NO: 1516678
cuucuaguaaucaagugcc

SEQ ID NO: 1516680 - RNA, 19 nt, Artificial Sequence
  Description of Artificial Sequence: Synthetic oligonucleotide
  Sense strand starting at position 472 of SEQ ID NO: 1244813
agaagccagauugguauaa

SEQ ID NO: 1516681 - RNA, 19 nt, Artificial Sequence
  Description of Artificial Sequence: Synthetic oligonucleotide
  Antisense strand to SEQ ID NO: 1516680
uuauaccaaucuggcuucu

SEQ ID NO: 1516682 - RNA, 19 nt, Artificial Sequence
  Description of Artificial Sequence: Synthetic oligonucleotide
  Sense strand starting at position 473 of SEQ ID NO: 1244813
gaagccagauugguauaaa

SEQ ID NO: 1516683 - RNA, 19 nt, Artificial Sequence
  Description of Artificial Sequence: Synthetic oligonucleotide
  Antisense strand to SEQ ID NO: 1516682
uuuauaccaaucuggcuuc

SEQ ID NO: 1516684 - RNA, 19 nt, Artificial Sequence
  Description of Artificial Sequence: Synthetic oligonucleotide
  Sense strand starting at position 511 of SEQ ID NO: 1244813
ugagaaagcugaguuggua

SEQ ID NO: 1516685 - RNA, 19 nt, Artificial Sequence
  Description of Artificial Sequence: Synthetic oligonucleotide
  Antisense strand to SEQ ID NO: 1516684
uaccaacucagcuuucuca

SEQ ID NO: 1516686 - RNA, 19 nt, Artificial Sequence
  Description of Artificial Sequence: Synthetic oligonucleotide
  Sense strand starting at position 520 of SEQ ID NO: 1244813
ugaguugguacagguagaa

SEQ ID NO: 1516687 - RNA, 19 nt, Artificial Sequence
  Description of Artificial Sequence: Synthetic oligonucleotide
  Antisense strand to SEQ ID NO: 1516686
uucuaccuguaccaacuca

SEQ ID NO: 1516688 - RNA, 19 nt, Artificial Sequence
  Description of Artificial Sequence: Synthetic oligonucleotide
  Sense strand starting at position 563 of SEQ ID NO: 1244813
uuggcaugguaauuggaga

SEQ ID NO: 1516689 - RNA, 19 nt, Artificial Sequence
  Description of Artificial Sequence: Synthetic oligonucleotide
  Antisense strand to SEQ ID NO: 1516688
ucuccaauuaccaugccaa

SEQ ID NO: 1516690 - RNA, 19 nt, Artificial Sequence
  Description of Artificial Sequence: Synthetic oligonucleotide
  Sense strand starting at position 570 of SEQ ID NO: 1244813
gguaauuggagagggaugu

SEQ ID NO: 1516691 - RNA, 19 nt, Artificial Sequence
  Description of Artificial Sequence: Synthetic oligonucleotide
  Antisense strand to SEQ ID NO: 1516690
acaucccucuccaauuacc

SEQ ID NO: 1516692 - RNA, 19 nt, Artificial Sequence
  Description of Artificial Sequence: Synthetic oligonucleotide
  Sense strand starting at position 751 of SEQ ID NO: 1244813
gggcaaacguauuugccua

SEQ ID NO: 1516693 - RNA, 19 nt, Artificial Sequence
  Description of Artificial Sequence: Synthetic oligonucleotide
  Antisense strand to SEQ ID NO: 1516692
uaggcaaauacguuugccc

SEQ ID NO: 1516694 - RNA, 19 nt, Artificial Sequence
  Description of Artificial Sequence: Synthetic oligonucleotide
  Sense strand starting at position 860 of SEQ ID NO: 1244813
uguaauuaaucuccugaug

SEQ ID NO: 1516695 - RNA, 19 nt, Artificial Sequence
  Description of Artificial Sequence: Synthetic oligonucleotide
  Antisense strand to SEQ ID NO: 1516694
caucaggagauuaauuaca

SEQ ID NO: 1516696 - RNA, 19 nt, Artificial Sequence
  Description of Artificial Sequence: Synthetic oligonucleotide
  Sense strand starting at position 969 of SEQ ID NO: 1244813
aagggacauuacucguaaa

SEQ ID NO: 1516697 - RNA, 19 nt, Artificial Sequence
  Description of Artificial Sequence: Synthetic oligonucleotide
  Antisense strand to SEQ ID NO: 1516696
uuuacgaguaaugucccuu

SEQ ID NO: 1516698 - RNA, 19 nt, Artificial Sequence
  Description of Artificial Sequence: Synthetic oligonucleotide
  Sense strand starting at position 1399 of SEQ ID NO: 1244813
agagaauggacgggcuuua

SEQ ID NO: 1516699 - RNA, 19 nt, Artificial Sequence
  Description of Artificial Sequence: Synthetic oligonucleotide
  Antisense strand to SEQ ID NO: 1516698
uaaagcccguccauucucu

SEQ ID NO: 1516700 - RNA, 19 nt, Artificial Sequence
  Description of Artificial Sequence: Synthetic oligonucleotide
  Sense strand starting at position 1598 of SEQ ID NO: 1244813
accugauccuggcucagaa

SEQ ID NO: 1516701 - RNA, 19 nt, Artificial Sequence
  Description of Artificial Sequence: Synthetic oligonucleotide
  Antisense strand to SEQ ID NO: 1516700
uucugagccaggaucaggu

SEQ ID NO: 1516702 - RNA, 19 nt, Artificial Sequence
  Description of Artificial Sequence: Synthetic oligonucleotide
  Sense strand starting at position 2330 of SEQ ID NO: 1244813
gugguuucgccauuagcuu

SEQ ID NO: 1516703 - RNA, 19 nt, Artificial Sequence
  Description of Artificial Sequence: Synthetic oligonucleotide
  Antisense strand to SEQ ID NO: 1516702
aagcuaauggcgaaaccac

SEQ ID NO: 1516704 - RNA, 19 nt, Artificial Sequence
  Description of Artificial Sequence: Synthetic oligonucleotide
  Sense strand starting at position 2544 of SEQ ID NO: 1244813
gugcgcuaugggucaggua

SEQ ID NO: 1516705 - RNA, 19 nt, Artificial Sequence
  Description of Artificial Sequence: Synthetic oligonucleotide
  Antisense strand to SEQ ID NO: 1516704
uaccugacccauagcgcac

SEQ ID NO: 1516706 - RNA, 19 nt, Artificial Sequence
  Description of Artificial Sequence: Synthetic oligonucleotide
  Sense strand starting at position 2546 of SEQ ID NO: 1244813
gcgcuaugggucagguaau

SEQ ID NO: 1516707 - RNA, 19 nt, Artificial Sequence
  Description of Artificial Sequence: Synthetic oligonucleotide
  Antisense strand to SEQ ID NO: 1516706
auuaccugacccauagcgc

SEQ ID NO: 1516708 - RNA, 19 nt, Artificial Sequence
  Description of Artificial Sequence: Synthetic oligonucleotide
  Sense strand starting at position 2683 of SEQ ID NO: 1244813
ggucuagagagucggagaa

SEQ ID NO: 1516709 - RNA, 19 nt, Artificial Sequence
  Description of Artificial Sequence: Synthetic oligonucleotide
  Antisense strand to SEQ ID NO: 1516708
uucuccgacucucuagacc

SEQ ID NO: 1516710 - RNA, 19 nt, Artificial Sequence
  Description of Artificial Sequence: Synthetic oligonucleotide
  Sense strand starting at position 2696 of SEQ ID NO: 1244813
ggagaacugaauuguucua

SEQ ID NO: 1516711 - RNA, 19 nt, Artificial Sequence
  Description of Artificial Sequence: Synthetic oligonucleotide
  Antisense strand to SEQ ID NO: 1516710
uagaacaauucaguucucc

SEQ ID NO: 1516712 - RNA, 19 nt, Artificial Sequence
  Description of Artificial Sequence: Synthetic oligonucleotide
  Sense strand starting at position 2802 of SEQ ID NO: 1244813
uuguaagguggacaguauu

SEQ ID NO: 1516713 - RNA, 19 nt, Artificial Sequence
  Description of Artificial Sequence: Synthetic oligonucleotide
  Antisense strand to SEQ ID NO: 1516712
aauacuguccaccuuacaa

SEQ ID NO: 1516714 - RNA, 19 nt, Artificial Sequence
  Description of Artificial Sequence: Synthetic oligonucleotide
  Sense strand starting at position 2938 of SEQ ID NO: 1244813
gccugcuuuagagacaaga

SEQ ID NO: 1516715 - RNA, 19 nt, Artificial Sequence
  Description of Artificial Sequence: Synthetic oligonucleotide
  Antisense strand to SEQ ID NO: 1516714
ucuugucucuaaagcaggc

SEQ ID NO: 1516716 - RNA, 19 nt, Artificial Sequence
  Description of Artificial Sequence: Synthetic oligonucleotide
  Sense strand starting at position 3272 of SEQ ID NO: 1244813
cuacuacauggcuagaauu

SEQ ID NO: 1516717 - RNA, 19 nt, Artificial Sequence
  Description of Artificial Sequence: Synthetic oligonucleotide
  Antisense strand to SEQ ID NO: 1516716
aauucuagccauguaguag

SEQ ID NO: 1516718 - RNA, 19 nt, Artificial Sequence
  Description of Artificial Sequence: Synthetic oligonucleotide
  Sense strand starting at position 3274 of SEQ ID NO: 1244813
acuacauggcuagaauugu

SEQ ID NO: 1516719 - RNA, 19 nt, Artificial Sequence
  Description of Artificial Sequence: Synthetic oligonucleotide
  Antisense strand to SEQ ID NO: 1516718
acaauucuagccauguagu

SEQ ID NO: 1516720 - RNA, 19 nt, Artificial Sequence
  Description of Artificial Sequence: Synthetic oligonucleotide
  Sense strand starting at position 3302 of SEQ ID NO: 1244813
aggagauucgguggugaua

SEQ ID NO: 1516721 - RNA, 19 nt, Artificial Sequence
  Description of Artificial Sequence: Synthetic oligonucleotide
  Antisense strand to SEQ ID NO: 1516720
uaucaccaccgaaucuccu

SEQ ID NO: 1516722 - RNA, 19 nt, Artificial Sequence
  Description of Artificial Sequence: Synthetic oligonucleotide
  Sense strand starting at position 3311 of SEQ ID NO: 1244813
gguggugauaaucagucaa

SEQ ID NO: 1516723 - RNA, 19 nt, Artificial Sequence
  Description of Artificial Sequence: Synthetic oligonucleotide
  Antisense strand to SEQ ID NO: 1516722
uugacugauuaucaccacc

SEQ ID NO: 1516724 - RNA, 19 nt, Artificial Sequence
  Description of Artificial Sequence: Synthetic oligonucleotide
  Sense strand starting at position 3313 of SEQ ID NO: 1244813
uggugauaaucagucaaga

SEQ ID NO: 1516725 - RNA, 19 nt, Artificial Sequence
  Description of Artificial Sequence: Synthetic oligonucleotide
  Antisense strand to SEQ ID NO: 1516724
ucuugacugauuaucacca

SEQ ID NO: 1516726 - RNA, 19 nt, Artificial Sequence
  Description of Artificial Sequence: Synthetic oligonucleotide
  Sense strand starting at position 3442 of SEQ ID NO: 1244813
aucuaagauagcugguaga

SEQ ID NO: 1516727 - RNA, 19 nt, Artificial Sequence
  Description of Artificial Sequence: Synthetic oligonucleotide
  Antisense strand to SEQ ID NO: 1516726
ucuaccagcuaucuuagau

SEQ ID NO: 1516728 - RNA, 19 nt, Artificial Sequence
  Description of Artificial Sequence: Synthetic oligonucleotide
  Sense strand starting at position 3465 of SEQ ID NO: 1244813
ugucuugaaugacugauga

SEQ ID NO: 1516729 - RNA, 19 nt, Artificial Sequence
  Description of Artificial Sequence: Synthetic oligonucleotide
  Antisense strand to SEQ ID NO: 1516728
ucaucagucauucaagaca

SEQ ID NO: 1516730 - RNA, 19 nt, Artificial Sequence
  Description of Artificial Sequence: Synthetic oligonucleotide
  Sense strand starting at position 3486 of SEQ ID NO: 1244813
cuguuugcugagggaggaa

SEQ ID NO: 1516731 - RNA, 19 nt, Artificial Sequence
  Description of Artificial Sequence: Synthetic oligonucleotide
  Antisense strand to SEQ ID NO: 1516730
uuccucccucagcaaacag

SEQ ID NO: 1516732 - RNA, 19 nt, Artificial Sequence
  Description of Artificial Sequence: Synthetic oligonucleotide
  Sense strand starting at position 3574 of SEQ ID NO: 1244813
ggacaugaguuaucaucac

SEQ ID NO: 1516733 - RNA, 19 nt, Artificial Sequence
  Description of Artificial Sequence: Synthetic oligonucleotide
  Antisense strand to SEQ ID NO: 1516732
gugaugauaacucaugucc

SEQ ID NO: 1516734 - RNA, 19 nt, Artificial Sequence
  Description of Artificial Sequence: Synthetic oligonucleotide
  Sense strand starting at position 3857 of SEQ ID NO: 1244813
uacagacugugguugaaga

SEQ ID NO: 1516735 - RNA, 19 nt, Artificial Sequence
  Description of Artificial Sequence: Synthetic oligonucleotide
  Antisense strand to SEQ ID NO: 1516734
ucuucaaccacagucugua

SEQ ID NO: 1516736 - RNA, 19 nt, Artificial Sequence
  Description of Artificial Sequence: Synthetic oligonucleotide
  Sense strand starting at position 3858 of SEQ ID NO: 1244813
acagacugugguugaagau

SEQ ID NO: 1516737 - RNA, 19 nt, Artificial Sequence
  Description of Artificial Sequence: Synthetic oligonucleotide
  Antisense strand to SEQ ID NO: 1516736
aucuucaaccacagucugu

SEQ ID NO: 1516738 - RNA, 19 nt, Artificial Sequence
  Description of Artificial Sequence: Synthetic oligonucleotide
  Sense strand starting at position 3879 of SEQ ID NO: 1244813
caggguuguagaugaaauu

SEQ ID NO: 1516739 - RNA, 19 nt, Artificial Sequence
  Description of Artificial Sequence: Synthetic oligonucleotide
  Antisense strand to SEQ ID NO: 1516738
aauuucaucuacaacccug

SEQ ID NO: 1516740 - RNA, 19 nt, Artificial Sequence
  Description of Artificial Sequence: Synthetic oligonucleotide
  Sense strand starting at position 3901 of SEQ ID NO: 1244813
cagaaugaacugugauucu

SEQ ID NO: 1516741 - RNA, 19 nt, Artificial Sequence
  Description of Artificial Sequence: Synthetic oligonucleotide
  Antisense strand to SEQ ID NO: 1516740
agaaucacaguucauucug

SEQ ID NO: 1516742 - RNA, 19 nt, Artificial Sequence
  Description of Artificial Sequence: Synthetic oligonucleotide
  Sense strand starting at position 3912 of SEQ ID NO: 1244813
gugauucucuaucugggau

SEQ ID NO: 1516743 - RNA, 19 nt, Artificial Sequence
  Description of Artificial Sequence: Synthetic oligonucleotide
  Antisense strand to SEQ ID NO: 1516742
aucccagauagagaaucac

SEQ ID NO: 1516744 - RNA, 19 nt, Artificial Sequence
  Description of Artificial Sequence: Synthetic oligonucleotide
  Sense strand starting at position 3915 of SEQ ID NO: 1244813
auucucuaucugggauuaa

SEQ ID NO: 1516745 - RNA, 19 nt, Artificial Sequence
  Description of Artificial Sequence: Synthetic oligonucleotide
  Antisense strand to SEQ ID NO: 1516744
uuaaucccagauagagaau

SEQ ID NO: 1516746 - RNA, 19 nt, Artificial Sequence
  Description of Artificial Sequence: Synthetic oligonucleotide
  Sense strand starting at position 3925 of SEQ ID NO: 1244813
ugggauuaauuugaauaac

SEQ ID NO: 1516747 - RNA, 19 nt, Artificial Sequence
  Description of Artificial Sequence: Synthetic oligonucleotide
  Antisense strand to SEQ ID NO: 1516746
guuauucaaauuaauccca

SEQ ID NO: 1516748 - RNA, 19 nt, Artificial Sequence
  Description of Artificial Sequence: Synthetic oligonucleotide
  Sense strand starting at position 23 of SEQ ID NO: 1244814
cacguuaggucauuauaca

SEQ ID NO: 1516749 - RNA, 19 nt, Artificial Sequence
  Description of Artificial Sequence: Synthetic oligonucleotide
  Antisense strand to SEQ ID NO: 1516748
uguauaaugaccuaacgug

SEQ ID NO: 1516750 - RNA, 19 nt, Artificial Sequence
  Description of Artificial Sequence: Synthetic oligonucleotide
  Sense strand starting at position 24 of SEQ ID NO: 1244814
acguuaggucauuauacag

SEQ ID NO: 1516751 - RNA, 19 nt, Artificial Sequence
  Description of Artificial Sequence: Synthetic oligonucleotide
  Antisense strand to SEQ ID NO: 1516750
cuguauaaugaccuaacgu

SEQ ID NO: 1516752 - RNA, 19 nt, Artificial Sequence
  Description of Artificial Sequence: Synthetic oligonucleotide
  Sense strand starting at position 207 of SEQ ID NO: 1244814
cuuggaggaugugucuuaa

SEQ ID NO: 1516753 - RNA, 19 nt, Artificial Sequence
  Description of Artificial Sequence: Synthetic oligonucleotide
  Antisense strand to SEQ ID NO: 1516752
uuaagacacauccuccaag

SEQ ID NO: 1516754 - RNA, 19 nt, Artificial Sequence
  Description of Artificial Sequence: Synthetic oligonucleotide
  Sense strand starting at position 413 of SEQ ID NO: 1244814
acgugaauaaugugaaucu

SEQ ID NO: 1516755 - RNA, 19 nt, Artificial Sequence
  Description of Artificial Sequence: Synthetic oligonucleotide
  Antisense strand to SEQ ID NO: 1516754
agauucacauuauucacgu

SEQ ID NO: 1516756 - RNA, 19 nt, Artificial Sequence
  Description of Artificial Sequence: Synthetic oligonucleotide
  Sense strand starting at position 534 of SEQ ID NO: 1244814
gguauuaaacaacguaaua

SEQ ID NO: 1516757 - RNA, 19 nt, Artificial Sequence
  Description of Artificial Sequence: Synthetic oligonucleotide
  Antisense strand to SEQ ID NO: 1516756
uauuacguuguuuaauacc

SEQ ID NO: 1516758 - RNA, 19 nt, Artificial Sequence
  Description of Artificial Sequence: Synthetic oligonucleotide
  Sense strand starting at position 879 of SEQ ID NO: 1244814
uucuguaagccagguagaa

SEQ ID NO: 1516759 - RNA, 19 nt, Artificial Sequence
  Description of Artificial Sequence: Synthetic oligonucleotide
  Antisense strand to SEQ ID NO: 1516758
uucuaccuggcuuacagaa

SEQ ID NO: 1516760 - RNA, 19 nt, Artificial Sequence
  Description of Artificial Sequence: Synthetic oligonucleotide
  Sense strand starting at position 2273 of SEQ ID NO: 1244814
gcgguuuagcgagucuaga

SEQ ID NO: 1516761 - RNA, 19 nt, Artificial Sequence
  Description of Artificial Sequence: Synthetic oligonucleotide
  Antisense strand to SEQ ID NO: 1516760
ucuagacucgcuaaaccgc

SEQ ID NO: 1516762 - RNA, 19 nt, Artificial Sequence
  Description of Artificial Sequence: Synthetic oligonucleotide
  Sense strand starting at position 2284 of SEQ ID NO: 1244814
agucuagauccuuaguuug

SEQ ID NO: 1516763 - RNA, 19 nt, Artificial Sequence
  Description of Artificial Sequence: Synthetic oligonucleotide
  Antisense strand to SEQ ID NO: 1516762
caaacuaaggaucuagacu

SEQ ID NO: 1516764 - RNA, 19 nt, Artificial Sequence
  Description of Artificial Sequence: Synthetic oligonucleotide
  Sense strand starting at position 2314 of SEQ ID NO: 1244814
caccguaagaguggucaga

SEQ ID NO: 1516765 - RNA, 19 nt, Artificial Sequence
  Description of Artificial Sequence: Synthetic oligonucleotide
  Antisense strand to SEQ ID NO: 1516764
ucugaccacucuuacggug

SEQ ID NO: 1516766 - RNA, 19 nt, Artificial Sequence
  Description of Artificial Sequence: Synthetic oligonucleotide
  Sense strand starting at position 2316 of SEQ ID NO: 1244814
ccguaagaguggucagaga

SEQ ID NO: 1516767 - RNA, 19 nt, Artificial Sequence
  Description of Artificial Sequence: Synthetic oligonucleotide
  Antisense strand to SEQ ID NO: 1516766
ucucugaccacucuuacgg

SEQ ID NO: 1516768 - RNA, 19 nt, Artificial Sequence
  Description of Artificial Sequence: Synthetic oligonucleotide
  Sense strand starting at position 2496 of SEQ ID NO: 1244814
gcgcgacuucgucucccua

SEQ ID NO: 1516769 - RNA, 19 nt, Artificial Sequence
  Description of Artificial Sequence: Synthetic oligonucleotide
  Antisense strand to SEQ ID NO: 1516768
uagggagacgaagucgcgc

SEQ ID NO: 1516770 - RNA, 19 nt, Artificial Sequence
  Description of Artificial Sequence: Synthetic oligonucleotide
  Sense strand starting at position 2739 of SEQ ID NO: 1244814
ucuugcuuugaacgauaga

SEQ ID NO: 1516771 - RNA, 19 nt, Artificial Sequence
  Description of Artificial Sequence: Synthetic oligonucleotide
  Antisense strand to SEQ ID NO: 1516770
ucuaucguucaaagcaaga

SEQ ID NO: 1516772 - RNA, 19 nt, Artificial Sequence
  Description of Artificial Sequence: Synthetic oligonucleotide
  Sense strand starting at position 2740 of SEQ ID NO: 1244814
cuugcuuugaacgauagac

SEQ ID NO: 1516773 - RNA, 19 nt, Artificial Sequence
  Description of Artificial Sequence: Synthetic oligonucleotide
  Antisense strand to SEQ ID NO: 1516772
gucuaucguucaaagcaag

SEQ ID NO: 1516774 - RNA, 19 nt, Artificial Sequence
  Description of Artificial Sequence: Synthetic oligonucleotide
  Sense strand starting at position 2784 of SEQ ID NO: 1244814
cacagauugguuuggaguu

SEQ ID NO: 1516775 - RNA, 19 nt, Artificial Sequence
  Description of Artificial Sequence: Synthetic oligonucleotide
  Antisense strand to SEQ ID NO: 1516774
aacuccaaaccaaucugug

SEQ ID NO: 1516776 - RNA, 19 nt, Artificial Sequence
  Description of Artificial Sequence: Synthetic oligonucleotide
  Sense strand starting at position 2935 of SEQ ID NO: 1244814
uuaaaugucuacuuggguu

SEQ ID NO: 1516777 - RNA, 19 nt, Artificial Sequence
  Description of Artificial Sequence: Synthetic oligonucleotide
  Antisense strand to SEQ ID NO: 1516776
aacccaaguagacauuuaa

SEQ ID NO: 1516778 - RNA, 19 nt, Artificial Sequence
  Description of Artificial Sequence: Synthetic oligonucleotide
  Sense strand starting at position 2947 of SEQ ID NO: 1244814
uuggguucucuauaguuaa

SEQ ID NO: 1516779 - RNA, 19 nt, Artificial Sequence
  Description of Artificial Sequence: Synthetic oligonucleotide
  Antisense strand to SEQ ID NO: 1516778
uuaacuauagagaacccaa

SEQ ID NO: 1516780 - RNA, 19 nt, Artificial Sequence
  Description of Artificial Sequence: Synthetic oligonucleotide
  Sense strand starting at position 2985 of SEQ ID NO: 1244814
aaacaagugucucuggaau

SEQ ID NO: 1516781 - RNA, 19 nt, Artificial Sequence
  Description of Artificial Sequence: Synthetic oligonucleotide
  Antisense strand to SEQ ID NO: 1516780
auuccagagacacuuguuu

SEQ ID NO: 1516782 - RNA, 19 nt, Artificial Sequence
  Description of Artificial Sequence: Synthetic oligonucleotide
  Sense strand starting at position 2992 of SEQ ID NO: 1244814
ugucucuggaaugguuauu

SEQ ID NO: 1516783 - RNA, 19 nt, Artificial Sequence
  Description of Artificial Sequence: Synthetic oligonucleotide
  Antisense strand to SEQ ID NO: 1516782
aauaaccauuccagagaca

SEQ ID NO: 1516784 - RNA, 19 nt, Artificial Sequence
  Description of Artificial Sequence: Synthetic oligonucleotide
  Sense strand starting at position 3026 of SEQ ID NO: 1244814
acuaguuaucuuuguaaug

SEQ ID NO: 1516785 - RNA, 19 nt, Artificial Sequence
  Description of Artificial Sequence: Synthetic oligonucleotide
  Antisense strand to SEQ ID NO: 1516784
cauuacaaagauaacuagu

SEQ ID NO: 1516786 - RNA, 19 nt, Artificial Sequence
  Description of Artificial Sequence: Synthetic oligonucleotide
  Sense strand starting at position 3027 of SEQ ID NO: 1244814
cuaguuaucuuuguaauga

SEQ ID NO: 1516787 - RNA, 19 nt, Artificial Sequence
  Description of Artificial Sequence: Synthetic oligonucleotide
  Antisense strand to SEQ ID NO: 1516786
ucauuacaaagauaacuag

SEQ ID NO: 1516788 - RNA, 19 nt, Artificial Sequence
  Description of Artificial Sequence: Synthetic oligonucleotide
  Sense strand starting at position 3075 of SEQ ID NO: 1244814
agccuuugcuacuuaagaa

SEQ ID NO: 1516789 - RNA, 19 nt, Artificial Sequence
  Description of Artificial Sequence: Synthetic oligonucleotide
  Antisense strand to SEQ ID NO: 1516788
uucuuaaguagcaaaggcu

SEQ ID NO: 1516790 - RNA, 19 nt, Artificial Sequence
  Description of Artificial Sequence: Synthetic oligonucleotide
  Sense strand starting at position 3091 of SEQ ID NO: 1244814
gaaagugaucucugcaaau

SEQ ID NO: 1516791 - RNA, 19 nt, Artificial Sequence
  Description of Artificial Sequence: Synthetic oligonucleotide
  Antisense strand to SEQ ID NO: 1516790
auuugcagagaucacuuuc

SEQ ID NO: 1516792 - RNA, 19 nt, Artificial Sequence
  Description of Artificial Sequence: Synthetic oligonucleotide
  Sense strand starting at position 3093 of SEQ ID NO: 1244814
aagugaucucugcaaauga

SEQ ID NO: 1516793 - RNA, 19 nt, Artificial Sequence
  Description of Artificial Sequence: Synthetic oligonucleotide
  Antisense strand to SEQ ID NO: 1516792
ucauuugcagagaucacuu

SEQ ID NO: 1516794 - RNA, 19 nt, Artificial Sequence
  Description of Artificial Sequence: Synthetic oligonucleotide
  Sense strand starting at position 3102 of SEQ ID NO: 1244814
cugcaaaugacguauauag

SEQ ID NO: 1516795 - RNA, 19 nt, Artificial Sequence
  Description of Artificial Sequence: Synthetic oligonucleotide
  Antisense strand to SEQ ID NO: 1516794
cuauauacgucauuugcag

SEQ ID NO: 1516796 - RNA, 19 nt, Artificial Sequence
  Description of Artificial Sequence: Synthetic oligonucleotide
  Sense strand starting at position 3104 of SEQ ID NO: 1244814
gcaaaugacguauauagua

SEQ ID NO: 1516797 - RNA, 19 nt, Artificial Sequence
  Description of Artificial Sequence: Synthetic oligonucleotide
  Antisense strand to SEQ ID NO: 1516796
uacuauauacgucauuugc

SEQ ID NO: 1516798 - RNA, 19 nt, Artificial Sequence
  Description of Artificial Sequence: Synthetic oligonucleotide
  Sense strand starting at position 3112 of SEQ ID NO: 1244814
cguauauaguauuuggcau

SEQ ID NO: 1516799 - RNA, 19 nt, Artificial Sequence
  Description of Artificial Sequence: Synthetic oligonucleotide
  Antisense strand to SEQ ID NO: 1516798
augccaaauacuauauacg

SEQ ID NO: 1516800 - RNA, 19 nt, Artificial Sequence
  Description of Artificial Sequence: Synthetic oligonucleotide
  Sense strand starting at position 3178 of SEQ ID NO: 1244814
gaaugccuguuguuaagga

SEQ ID NO: 1516801 - RNA, 19 nt, Artificial Sequence
  Description of Artificial Sequence: Synthetic oligonucleotide
  Antisense strand to SEQ ID NO: 1516800
uccuuaacaacaggcauuc

SEQ ID NO: 1516802 - RNA, 19 nt, Artificial Sequence
  Description of Artificial Sequence: Synthetic oligonucleotide
  Sense strand starting at position 3344 of SEQ ID NO: 1244814
uuggccucccgagagaaau

SEQ ID NO: 1516803 - RNA, 19 nt, Artificial Sequence
  Description of Artificial Sequence: Synthetic oligonucleotide
  Antisense strand to SEQ ID NO: 1516802
auuucucucgggaggccaa

SEQ ID NO: 1516804 - RNA, 19 nt, Artificial Sequence
  Description of Artificial Sequence: Synthetic oligonucleotide
  Sense strand starting at position 3367 of SEQ ID NO: 1244814
guaaguucucuugguaaca

SEQ ID NO: 1516805 - RNA, 19 nt, Artificial Sequence
  Description of Artificial Sequence: Synthetic oligonucleotide
  Antisense strand to SEQ ID NO: 1516804
uguuaccaagagaacuuac

SEQ ID NO: 1516806 - RNA, 19 nt, Artificial Sequence
  Description of Artificial Sequence: Synthetic oligonucleotide
  Sense strand starting at position 3423 of SEQ ID NO: 1244814
ccuauuaguaguugaagga

SEQ ID NO: 1516807 - RNA, 19 nt, Artificial Sequence
  Description of Artificial Sequence: Synthetic oligonucleotide
  Antisense strand to SEQ ID NO: 1516806
uccuucaacuacuaauagg

SEQ ID NO: 1516808 - RNA, 19 nt, Artificial Sequence
  Description of Artificial Sequence: Synthetic oligonucleotide
  Sense strand starting at position 3432 of SEQ ID NO: 1244814
aguugaaggagaugcuaaa

SEQ ID NO: 1516809 - RNA, 19 nt, Artificial Sequence
  Description of Artificial Sequence: Synthetic oligonucleotide
  Antisense strand to SEQ ID NO: 1516808
uuuagcaucuccuucaacu

SEQ ID NO: 1516810 - RNA, 19 nt, Artificial Sequence
  Description of Artificial Sequence: Synthetic oligonucleotide
  Sense strand starting at position 3445 of SEQ ID NO: 1244814
gcuaaauucuagcuagagg

SEQ ID NO: 1516811 - RNA, 19 nt, Artificial Sequence
  Description of Artificial Sequence: Synthetic oligonucleotide
  Antisense strand to SEQ ID NO: 1516810
ccucuagcuagaauuuagc

SEQ ID NO: 1516812 - RNA, 19 nt, Artificial Sequence
  Description of Artificial Sequence: Synthetic oligonucleotide
  Sense strand starting at position 3448 of SEQ ID NO: 1244814
aaauucuagcuagagguua

SEQ ID NO: 1516813 - RNA, 19 nt, Artificial Sequence
  Description of Artificial Sequence: Synthetic oligonucleotide
  Antisense strand to SEQ ID NO: 1516812
uaaccucuagcuagaauuu

SEQ ID NO: 1516814 - RNA, 19 nt, Artificial Sequence
  Description of Artificial Sequence: Synthetic oligonucleotide
  Sense strand starting at position 3530 of SEQ ID NO: 1244814
uuaagaaccuuuguguuau

SEQ ID NO: 1516815 - RNA, 19 nt, Artificial Sequence
  Description of Artificial Sequence: Synthetic oligonucleotide
  Antisense strand to SEQ ID NO: 1516814
auaacacaaagguucuuaa

SEQ ID NO: 1516816 - RNA, 19 nt, Artificial Sequence
  Description of Artificial Sequence: Synthetic oligonucleotide
  Sense strand starting at position 3598 of SEQ ID NO: 1244814
gaugauggaugcuuuggua

SEQ ID NO: 1516817 - RNA, 19 nt, Artificial Sequence
  Description of Artificial Sequence: Synthetic oligonucleotide
  Antisense strand to SEQ ID NO: 1516816
uaccaaagcauccaucauc

SEQ ID NO: 1516818 - RNA, 19 nt, Artificial Sequence
  Description of Artificial Sequence: Synthetic oligonucleotide
  Sense strand starting at position 3616 of SEQ ID NO: 1244814
agcugaggugucuaucacu

SEQ ID NO: 1516819 - RNA, 19 nt, Artificial Sequence
  Description of Artificial Sequence: Synthetic oligonucleotide
  Antisense strand to SEQ ID NO: 1516818
agugauagacaccucagcu

SEQ ID NO: 1516820 - RNA, 19 nt, Artificial Sequence
  Description of Artificial Sequence: Synthetic oligonucleotide
  Sense strand starting at position 3716 of SEQ ID NO: 1244814
aauaaugacugagugcuua

SEQ ID NO: 1516821 - RNA, 19 nt, Artificial Sequence
  Description of Artificial Sequence: Synthetic oligonucleotide
  Antisense strand to SEQ ID NO: 1516820
uaagcacucagucauuauu

SEQ ID NO: 1516822 - RNA, 19 nt, Artificial Sequence
  Description of Artificial Sequence: Synthetic oligonucleotide
  Sense strand starting at position 3720 of SEQ ID NO: 1244814
augacugagugcuuacuau

SEQ ID NO: 1516823 - RNA, 19 nt, Artificial Sequence
  Description of Artificial Sequence: Synthetic oligonucleotide
  Antisense strand to SEQ ID NO: 1516822
auaguaagcacucagucau

SEQ ID NO: 1516824 - RNA, 19 nt, Artificial Sequence
  Description of Artificial Sequence: Synthetic oligonucleotide
  Sense strand starting at position 3786 of SEQ ID NO: 1244814
acaccaauccucugaggua

SEQ ID NO: 1516825 - RNA, 19 nt, Artificial Sequence
  Description of Artificial Sequence: Synthetic oligonucleotide
  Antisense strand to SEQ ID NO: 1516824
uaccucagaggauuggugu

SEQ ID NO: 1516826 - RNA, 19 nt, Artificial Sequence
  Description of Artificial Sequence: Synthetic oligonucleotide
  Sense strand starting at position 3855 of SEQ ID NO: 1244814
uguuaagaagcuugcacaa

SEQ ID NO: 1516827 - RNA, 19 nt, Artificial Sequence
  Description of Artificial Sequence: Synthetic oligonucleotide
  Antisense strand to SEQ ID NO: 1516826
uugugcaagcuucuuaaca

SEQ ID NO: 1516828 - RNA, 19 nt, Artificial Sequence
  Description of Artificial Sequence: Synthetic oligonucleotide
  Sense strand starting at position 186 of SEQ ID NO: 1244815
uuuggaggcugacaucuua

SEQ ID NO: 1516829 - RNA, 19 nt, Artificial Sequence
  Description of Artificial Sequence: Synthetic oligonucleotide
  Antisense strand to SEQ ID NO: 1516828
uaagaugucagccuccaaa

SEQ ID NO: 1516830 - RNA, 19 nt, Artificial Sequence
  Description of Artificial Sequence: Synthetic oligonucleotide
  Sense strand starting at position 234 of SEQ ID NO: 1244815
ugagcaaagugcuuccuga

SEQ ID NO: 1516831 - RNA, 19 nt, Artificial Sequence
  Description of Artificial Sequence: Synthetic oligonucleotide
  Antisense strand to SEQ ID NO: 1516830
ucaggaagcacuuugcuca

SEQ ID NO: 1516832 - RNA, 19 nt, Artificial Sequence
  Description of Artificial Sequence: Synthetic oligonucleotide
  Sense strand starting at position 238 of SEQ ID NO: 1244815
caaagugcuuccugaugca

SEQ ID NO: 1516833 - RNA, 19 nt, Artificial Sequence
  Description of Artificial Sequence: Synthetic oligonucleotide
  Antisense strand to SEQ ID NO: 1516832
ugcaucaggaagcacuuug

SEQ ID NO: 1516834 - RNA, 19 nt, Artificial Sequence
  Description of Artificial Sequence: Synthetic oligonucleotide
  Sense strand starting at position 381 of SEQ ID NO: 1244815
gaaucauucugcuuaggua

SEQ ID NO: 1516835 - RNA, 19 nt, Artificial Sequence
  Description of Artificial Sequence: Synthetic oligonucleotide
  Antisense strand to SEQ ID NO: 1516834
uaccuaagcagaaugauuc

SEQ ID NO: 1516836 - RNA, 19 nt, Artificial Sequence
  Description of Artificial Sequence: Synthetic oligonucleotide
  Sense strand starting at position 393 of SEQ ID NO: 1244815
uuagguaccugauggauga

SEQ ID NO: 1516837 - RNA, 19 nt, Artificial Sequence
  Description of Artificial Sequence: Synthetic oligonucleotide
  Antisense strand to SEQ ID NO: 1516836
ucauccaucagguaccuaa

SEQ ID NO: 1516838 - RNA, 19 nt, Artificial Sequence
  Description of Artificial Sequence: Synthetic oligonucleotide
  Sense strand starting at position 539 of SEQ ID NO: 1244815
gccugaacaccuuggugaa

SEQ ID NO: 1516839 - RNA, 19 nt, Artificial Sequence
  Description of Artificial Sequence: Synthetic oligonucleotide
  Antisense strand to SEQ ID NO: 1516838
uucaccaagguguucaggc

SEQ ID NO: 1516840 - RNA, 19 nt, Artificial Sequence
  Description of Artificial Sequence: Synthetic oligonucleotide
  Sense strand starting at position 645 of SEQ ID NO: 1244815
gccagcugucuccacacaa

SEQ ID NO: 1516841 - RNA, 19 nt, Artificial Sequence
  Description of Artificial Sequence: Synthetic oligonucleotide
  Antisense strand to SEQ ID NO: 1516840
uuguguggagacagcuggc

SEQ ID NO: 1516842 - RNA, 19 nt, Artificial Sequence
  Description of Artificial Sequence: Synthetic oligonucleotide
  Sense strand starting at position 768 of SEQ ID NO: 1244815
ggauacagcucugaacuca

SEQ ID NO: 1516843 - RNA, 19 nt, Artificial Sequence
  Description of Artificial Sequence: Synthetic oligonucleotide
  Antisense strand to SEQ ID NO: 1516842
ugaguucagagcuguaucc

SEQ ID NO: 1516844 - RNA, 19 nt, Artificial Sequence
  Description of Artificial Sequence: Synthetic oligonucleotide
  Sense strand starting at position 903 of SEQ ID NO: 1244815
gggacaggucugugagcau

SEQ ID NO: 1516845 - RNA, 19 nt, Artificial Sequence
  Description of Artificial Sequence: Synthetic oligonucleotide
  Antisense strand to SEQ ID NO: 1516844
augcucacagaccuguccc

SEQ ID NO: 1516846 - RNA, 19 nt, Artificial Sequence
  Description of Artificial Sequence: Synthetic oligonucleotide
  Sense strand starting at position 921 of SEQ ID NO: 1244815
ucaggaucccucugggaug

SEQ ID NO: 1516847 - RNA, 19 nt, Artificial Sequence
  Description of Artificial Sequence: Synthetic oligonucleotide
  Antisense strand to SEQ ID NO: 1516846
caucccagagggauccuga

SEQ ID NO: 1516848 - RNA, 19 nt, Artificial Sequence
  Description of Artificial Sequence: Synthetic oligonucleotide
  Sense strand starting at position 1043 of SEQ ID NO: 1244815
gccggaucuccgggaugau

SEQ ID NO: 1516849 - RNA, 19 nt, Artificial Sequence
  Description of Artificial Sequence: Synthetic oligonucleotide
  Antisense strand to SEQ ID NO: 1516848
aucaucccggagauccggc

SEQ ID NO: 1516850 - RNA, 19 nt, Artificial Sequence
  Description of Artificial Sequence: Synthetic oligonucleotide
  Sense strand starting at position 1044 of SEQ ID NO: 1244815
ccggaucuccgggaugaug

SEQ ID NO: 1516851 - RNA, 19 nt, Artificial Sequence
  Description of Artificial Sequence: Synthetic oligonucleotide
  Antisense strand to SEQ ID NO: 1516850
caucaucccggagauccgg

SEQ ID NO: 1516852 - RNA, 19 nt, Artificial Sequence
  Description of Artificial Sequence: Synthetic oligonucleotide
  Sense strand starting at position 1113 of SEQ ID NO: 1244815
ggcaccugauucuuggaca

SEQ ID NO: 1516853 - RNA, 19 nt, Artificial Sequence
  Description of Artificial Sequence: Synthetic oligonucleotide
  Antisense strand to SEQ ID NO: 1516852
uguccaagaaucaggugcc

SEQ ID NO: 1516854 - RNA, 19 nt, Artificial Sequence
  Description of Artificial Sequence: Synthetic oligonucleotide
  Sense strand starting at position 1116 of SEQ ID NO: 1244815
accugauucuuggacacag

SEQ ID NO: 1516855 - RNA, 19 nt, Artificial Sequence
  Description of Artificial Sequence: Synthetic oligonucleotide
  Antisense strand to SEQ ID NO: 1516854
cuguguccaagaaucaggu

SEQ ID NO: 1516856 - RNA, 19 nt, Artificial Sequence
  Description of Artificial Sequence: Synthetic oligonucleotide
  Sense strand starting at position 1347 of SEQ ID NO: 1244815
ggagguauugcccaccuua

SEQ ID NO: 1516857 - RNA, 19 nt, Artificial Sequence
  Description of Artificial Sequence: Synthetic oligonucleotide
  Antisense strand to SEQ ID NO: 1516856
uaaggugggcaauaccucc

SEQ ID NO: 1516858 - RNA, 19 nt, Artificial Sequence
  Description of Artificial Sequence: Synthetic oligonucleotide
  Sense strand starting at position 2117 of SEQ ID NO: 1244815
gcgggacugcgcuucuaga

SEQ ID NO: 1516859 - RNA, 19 nt, Artificial Sequence
  Description of Artificial Sequence: Synthetic oligonucleotide
  Antisense strand to SEQ ID NO: 1516858
ucuagaagcgcagucccgc

SEQ ID NO: 1516860 - RNA, 19 nt, Artificial Sequence
  Description of Artificial Sequence: Synthetic oligonucleotide
  Sense strand starting at position 2524 of SEQ ID NO: 1244815
uggcgucacacuuaagaug

SEQ ID NO: 1516861 - RNA, 19 nt, Artificial Sequence
  Description of Artificial Sequence: Synthetic oligonucleotide
  Antisense strand to SEQ ID NO: 1516860
caucuuaagugugacgcca

SEQ ID NO: 1516862 - RNA, 19 nt, Artificial Sequence
  Description of Artificial Sequence: Synthetic oligonucleotide
  Sense strand starting at position 2532 of SEQ ID NO: 1244815
cacuuaagauggugugcaa

SEQ ID NO: 1516863 - RNA, 19 nt, Artificial Sequence
  Description of Artificial Sequence: Synthetic oligonucleotide
  Antisense strand to SEQ ID NO: 1516862
uugcacaccaucuuaagug

SEQ ID NO: 1516864 - RNA, 19 nt, Artificial Sequence
  Description of Artificial Sequence: Synthetic oligonucleotide
  Sense strand starting at position 3029 of SEQ ID NO: 1244815
ugugguaagcgccuguaau

SEQ ID NO: 1516865 - RNA, 19 nt, Artificial Sequence
  Description of Artificial Sequence: Synthetic oligonucleotide
  Antisense strand to SEQ ID NO: 1516864
auuacaggcgcuuaccaca

SEQ ID NO: 1516866 - RNA, 19 nt, Artificial Sequence
  Description of Artificial Sequence: Synthetic oligonucleotide
  Sense strand starting at position 3104 of SEQ ID NO: 1244815
ggccgugugcugagaucga

SEQ ID NO: 1516867 - RNA, 19 nt, Artificial Sequence
  Description of Artificial Sequence: Synthetic oligonucleotide
  Antisense strand to SEQ ID NO: 1516866
ucgaucucagcacacggcc

SEQ ID NO: 1516868 - RNA, 19 nt, Artificial Sequence
  Description of Artificial Sequence: Synthetic oligonucleotide
  Sense strand starting at position 3724 of SEQ ID NO: 1244815
ggcaaaguuuaauccaguu

SEQ ID NO: 1516869 - RNA, 19 nt, Artificial Sequence
  Description of Artificial Sequence: Synthetic oligonucleotide
  Antisense strand to SEQ ID NO: 1516868
aacuggauuaaacuuugcc

SEQ ID NO: 1516870 - RNA, 19 nt, Artificial Sequence
  Description of Artificial Sequence: Synthetic oligonucleotide
  Sense strand starting at position 336 of SEQ ID NO: 1244816
acgagacucugucucaauc

SEQ ID NO: 1516871 - RNA, 19 nt, Artificial Sequence
  Description of Artificial Sequence: Synthetic oligonucleotide
  Antisense strand to SEQ ID NO: 1516870
gauugagacagagucucgu

SEQ ID NO: 1516872 - RNA, 19 nt, Artificial Sequence
  Description of Artificial Sequence: Synthetic oligonucleotide
  Sense strand starting at position 610 of SEQ ID NO: 1244816
acuggcuuacacgaaguau

SEQ ID NO: 1516873 - RNA, 19 nt, Artificial Sequence
  Description of Artificial Sequence: Synthetic oligonucleotide
  Antisense strand to SEQ ID NO: 1516872
auacuucguguaagccagu

SEQ ID NO: 1516874 - RNA, 19 nt, Artificial Sequence
  Description of Artificial Sequence: Synthetic oligonucleotide
  Sense strand starting at position 741 of SEQ ID NO: 1244816
acaggugguuuauugaaca

SEQ ID NO: 1516875 - RNA, 19 nt, Artificial Sequence
  Description of Artificial Sequence: Synthetic oligonucleotide
  Antisense strand to SEQ ID NO: 1516874
uguucaauaaaccaccugu

SEQ ID NO: 1516876 - RNA, 19 nt, Artificial Sequence
  Description of Artificial Sequence: Synthetic oligonucleotide
  Sense strand starting at position 763 of SEQ ID NO: 1244816
acugcucguuuccugacaa

SEQ ID NO: 1516877 - RNA, 19 nt, Artificial Sequence
  Description of Artificial Sequence: Synthetic oligonucleotide
  Antisense strand to SEQ ID NO: 1516876
uugucaggaaacgagcagu

SEQ ID NO: 1516878 - RNA, 19 nt, Artificial Sequence
  Description of Artificial Sequence: Synthetic oligonucleotide
  Sense strand starting at position 782 of SEQ ID NO: 1244816
gcaccugcaagaggugaua

SEQ ID NO: 1516879 - RNA, 19 nt, Artificial Sequence
  Description of Artificial Sequence: Synthetic oligonucleotide
  Antisense strand to SEQ ID NO: 1516878
uaucaccucuugcaggugc

SEQ ID NO: 1516880 - RNA, 19 nt, Artificial Sequence
  Description of Artificial Sequence: Synthetic oligonucleotide
  Sense strand starting at position 942 of SEQ ID NO: 1244816
ugcuguuguguguugguua

SEQ ID NO: 1516881 - RNA, 19 nt, Artificial Sequence
  Description of Artificial Sequence: Synthetic oligonucleotide
  Antisense strand to SEQ ID NO: 1516880
uaaccaacacacaacagca

SEQ ID NO: 1516882 - RNA, 19 nt, Artificial Sequence
  Description of Artificial Sequence: Synthetic oligonucleotide
  Sense strand starting at position 947 of SEQ ID NO: 1244816
uuguguguugguuaguaaa

SEQ ID NO: 1516883 - RNA, 19 nt, Artificial Sequence
  Description of Artificial Sequence: Synthetic oligonucleotide
  Antisense strand to SEQ ID NO: 1516882
uuuacuaaccaacacacaa

SEQ ID NO: 1516884 - RNA, 19 nt, Artificial Sequence
  Description of Artificial Sequence: Synthetic oligonucleotide
  Sense strand starting at position 973 of SEQ ID NO: 1244816
cagacuaggucauuauaga

SEQ ID NO: 1516885 - RNA, 19 nt, Artificial Sequence
  Description of Artificial Sequence: Synthetic oligonucleotide
  Antisense strand to SEQ ID NO: 1516884
ucuauaaugaccuagucug

SEQ ID NO: 1516886 - RNA, 19 nt, Artificial Sequence
  Description of Artificial Sequence: Synthetic oligonucleotide
  Sense strand starting at position 1070 of SEQ ID NO: 1244816
cuuaccauucuggguauaa

SEQ ID NO: 1516887 - RNA, 19 nt, Artificial Sequence
  Description of Artificial Sequence: Synthetic oligonucleotide
  Antisense strand to SEQ ID NO: 1516886
uuauacccagaaugguaag

SEQ ID NO: 1516888 - RNA, 19 nt, Artificial Sequence
  Description of Artificial Sequence: Synthetic oligonucleotide
  Sense strand starting at position 1071 of SEQ ID NO: 1244816
uuaccauucuggguauaag

SEQ ID NO: 1516889 - RNA, 19 nt, Artificial Sequence
  Description of Artificial Sequence: Synthetic oligonucleotide
  Antisense strand to SEQ ID NO: 1516888
cuuauacccagaaugguaa

SEQ ID NO: 1516890 - RNA, 19 nt, Artificial Sequence
  Description of Artificial Sequence: Synthetic oligonucleotide
  Sense strand starting at position 1096 of SEQ ID NO: 1244816
ggcaguucuuggcugaaau

SEQ ID NO: 1516891 - RNA, 19 nt, Artificial Sequence
  Description of Artificial Sequence: Synthetic oligonucleotide
  Antisense strand to SEQ ID NO: 1516890
auuucagccaagaacugcc

SEQ ID NO: 1516892 - RNA, 19 nt, Artificial Sequence
  Description of Artificial Sequence: Synthetic oligonucleotide
  Sense strand starting at position 1097 of SEQ ID NO: 1244816
gcaguucuuggcugaaaug

SEQ ID NO: 1516893 - RNA, 19 nt, Artificial Sequence
  Description of Artificial Sequence: Synthetic oligonucleotide
  Antisense strand to SEQ ID NO: 1516892
cauuucagccaagaacugc

SEQ ID NO: 1516894 - RNA, 19 nt, Artificial Sequence
  Description of Artificial Sequence: Synthetic oligonucleotide
  Sense strand starting at position 1098 of SEQ ID NO: 1244816
caguucuuggcugaaaugu

SEQ ID NO: 1516895 - RNA, 19 nt, Artificial Sequence
  Description of Artificial Sequence: Synthetic oligonucleotide
  Antisense strand to SEQ ID NO: 1516894
acauuucagccaagaacug

SEQ ID NO: 1516896 - RNA, 19 nt, Artificial Sequence
  Description of Artificial Sequence: Synthetic oligonucleotide
  Sense strand starting at position 1147 of SEQ ID NO: 1244816
ucuggaagcuuuguucuaa

SEQ ID NO: 1516897 - RNA, 19 nt, Artificial Sequence
  Description of Artificial Sequence: Synthetic oligonucleotide
  Antisense strand to SEQ ID NO: 1516896
uuagaacaaagcuuccaga

SEQ ID NO: 1516898 - RNA, 19 nt, Artificial Sequence
  Description of Artificial Sequence: Synthetic oligonucleotide
  Sense strand starting at position 1148 of SEQ ID NO: 1244816
cuggaagcuuuguucuaau

SEQ ID NO: 1516899 - RNA, 19 nt, Artificial Sequence
  Description of Artificial Sequence: Synthetic oligonucleotide
  Antisense strand to SEQ ID NO: 1516898
auuagaacaaagcuuccag

SEQ ID NO: 1516900 - RNA, 19 nt, Artificial Sequence
  Description of Artificial Sequence: Synthetic oligonucleotide
  Sense strand starting at position 1171 of SEQ ID NO: 1244816
gcgcaacugcuguuuaaca

SEQ ID NO: 1516901 - RNA, 19 nt, Artificial Sequence
  Description of Artificial Sequence: Synthetic oligonucleotide
  Antisense strand to SEQ ID NO: 1516900
uguuaaacagcaguugcgc

SEQ ID NO: 1516902 - RNA, 19 nt, Artificial Sequence
  Description of Artificial Sequence: Synthetic oligonucleotide
  Sense strand starting at position 1173 of SEQ ID NO: 1244816
gcaacugcuguuuaacagu

SEQ ID NO: 1516903 - RNA, 19 nt, Artificial Sequence
  Description of Artificial Sequence: Synthetic oligonucleotide
  Antisense strand to SEQ ID NO: 1516902
acuguuaaacagcaguugc

SEQ ID NO: 1516904 - RNA, 19 nt, Artificial Sequence
  Description of Artificial Sequence: Synthetic oligonucleotide
  Sense strand starting at position 1237 of SEQ ID NO: 1244816
agucuuaagaguuagugua

SEQ ID NO: 1516905 - RNA, 19 nt, Artificial Sequence
  Description of Artificial Sequence: Synthetic oligonucleotide
  Antisense strand to SEQ ID NO: 1516904
uacacuaacucuuaagacu

SEQ ID NO: 1516906 - RNA, 19 nt, Artificial Sequence
  Description of Artificial Sequence: Synthetic oligonucleotide
  Sense strand starting at position 1239 of SEQ ID NO: 1244816
ucuuaagaguuaguguaca

SEQ ID NO: 1516907 - RNA, 19 nt, Artificial Sequence
  Description of Artificial Sequence: Synthetic oligonucleotide
  Antisense strand to SEQ ID NO: 1516906
uguacacuaacucuuaaga

SEQ ID NO: 1516908 - RNA, 19 nt, Artificial Sequence
  Description of Artificial Sequence: Synthetic oligonucleotide
  Sense strand starting at position 1316 of SEQ ID NO: 1244816
guuugucgcggguuaagga

SEQ ID NO: 1516909 - RNA, 19 nt, Artificial Sequence
  Description of Artificial Sequence: Synthetic oligonucleotide
  Antisense strand to SEQ ID NO: 1516908
uccuuaacccgcgacaaac

SEQ ID NO: 1516910 - RNA, 19 nt, Artificial Sequence
  Description of Artificial Sequence: Synthetic oligonucleotide
  Sense strand starting at position 1446 of SEQ ID NO: 1244816
aacauauccgguuaagucu

SEQ ID NO: 1516911 - RNA, 19 nt, Artificial Sequence
  Description of Artificial Sequence: Synthetic oligonucleotide
  Antisense strand to SEQ ID NO: 1516910
agacuuaaccggauauguu

SEQ ID NO: 1516912 - RNA, 19 nt, Artificial Sequence
  Description of Artificial Sequence: Synthetic oligonucleotide
  Sense strand starting at position 1452 of SEQ ID NO: 1244816
uccgguuaagucuagaaag

SEQ ID NO: 1516913 - RNA, 19 nt, Artificial Sequence
  Description of Artificial Sequence: Synthetic oligonucleotide
  Antisense strand to SEQ ID NO: 1516912
cuuucuagacuuaaccgga

SEQ ID NO: 1516914 - RNA, 19 nt, Artificial Sequence
  Description of Artificial Sequence: Synthetic oligonucleotide
  Sense strand starting at position 1980 of SEQ ID NO: 1244816
cagccacuuccgggucaaa

SEQ ID NO: 1516915 - RNA, 19 nt, Artificial Sequence
  Description of Artificial Sequence: Synthetic oligonucleotide
  Antisense strand to SEQ ID NO: 1516914
uuugacccggaaguggcug

SEQ ID NO: 1516916 - RNA, 19 nt, Artificial Sequence
  Description of Artificial Sequence: Synthetic oligonucleotide
  Sense strand starting at position 2662 of SEQ ID NO: 1244816
gaagcuauuucggcauauu

SEQ ID NO: 1516917 - RNA, 19 nt, Artificial Sequence
  Description of Artificial Sequence: Synthetic oligonucleotide
  Antisense strand to SEQ ID NO: 1516916
aauaugccgaaauagcuuc

SEQ ID NO: 1516918 - RNA, 19 nt, Artificial Sequence
  Description of Artificial Sequence: Synthetic oligonucleotide
  Sense strand starting at position 3011 of SEQ ID NO: 1244816
caaacuacugucuggaagu

SEQ ID NO: 1516919 - RNA, 19 nt, Artificial Sequence
  Description of Artificial Sequence: Synthetic oligonucleotide
  Antisense strand to SEQ ID NO: 1516918
acuuccagacaguaguuug

SEQ ID NO: 1516920 - RNA, 19 nt, Artificial Sequence
  Description of Artificial Sequence: Synthetic oligonucleotide
  Sense strand starting at position 3062 of SEQ ID NO: 1244816
cguaguuugcuugcuaaca

SEQ ID NO: 1516921 - RNA, 19 nt, Artificial Sequence
  Description of Artificial Sequence: Synthetic oligonucleotide
  Antisense strand to SEQ ID NO: 1516920
uguuagcaagcaaacuacg

SEQ ID NO: 1516922 - RNA, 19 nt, Artificial Sequence
  Description of Artificial Sequence: Synthetic oligonucleotide
  Sense strand starting at position 3144 of SEQ ID NO: 1244816
uguaauaaguuauuaggca

SEQ ID NO: 1516923 - RNA, 19 nt, Artificial Sequence
  Description of Artificial Sequence: Synthetic oligonucleotide
  Antisense strand to SEQ ID NO: 1516922
ugccuaauaacuuauuaca

SEQ ID NO: 1516924 - RNA, 19 nt, Artificial Sequence
  Description of Artificial Sequence: Synthetic oligonucleotide
  Sense strand starting at position 3148 of SEQ ID NO: 1244816
auaaguuauuaggcacaaa

SEQ ID NO: 1516925 - RNA, 19 nt, Artificial Sequence
  Description of Artificial Sequence: Synthetic oligonucleotide
  Antisense strand to SEQ ID NO: 1516924
uuugugccuaauaacuuau

SEQ ID NO: 1516926 - RNA, 19 nt, Artificial Sequence
  Description of Artificial Sequence: Synthetic oligonucleotide
  Sense strand starting at position 3151 of SEQ ID NO: 1244816
aguuauuaggcacaaacca

SEQ ID NO: 1516927 - RNA, 19 nt, Artificial Sequence
  Description of Artificial Sequence: Synthetic oligonucleotide
  Antisense strand to SEQ ID NO: 1516926
ugguuugugccuaauaacu

SEQ ID NO: 1516928 - RNA, 19 nt, Artificial Sequence
  Description of Artificial Sequence: Synthetic oligonucleotide
  Sense strand starting at position 3216 of SEQ ID NO: 1244816
aggaguuacaauuggcauc

SEQ ID NO: 1516929 - RNA, 19 nt, Artificial Sequence
  Description of Artificial Sequence: Synthetic oligonucleotide
  Antisense strand to SEQ ID NO: 1516928
gaugccaauuguaacuccu

SEQ ID NO: 1516930 - RNA, 19 nt, Artificial Sequence
  Description of Artificial Sequence: Synthetic oligonucleotide
  Sense strand starting at position 3218 of SEQ ID NO: 1244816
gaguuacaauuggcaucuu

SEQ ID NO: 1516931 - RNA, 19 nt, Artificial Sequence
  Description of Artificial Sequence: Synthetic oligonucleotide
  Antisense strand to SEQ ID NO: 1516930
aagaugccaauuguaacuc

SEQ ID NO: 1516932 - RNA, 19 nt, Artificial Sequence
  Description of Artificial Sequence: Synthetic oligonucleotide
  Sense strand starting at position 3324 of SEQ ID NO: 1244816
aggccaguuugacucuaaa

SEQ ID NO: 1516933 - RNA, 19 nt, Artificial Sequence
  Description of Artificial Sequence: Synthetic oligonucleotide
  Antisense strand to SEQ ID NO: 1516932
uuuagagucaaacuggccu

SEQ ID NO: 1516934 - RNA, 19 nt, Artificial Sequence
  Description of Artificial Sequence: Synthetic oligonucleotide
  Sense strand starting at position 3327 of SEQ ID NO: 1244816
ccaguuugacucuaaaguc

SEQ ID NO: 1516935 - RNA, 19 nt, Artificial Sequence
  Description of Artificial Sequence: Synthetic oligonucleotide
  Antisense strand to SEQ ID NO: 1516934
gacuuuagagucaaacugg

SEQ ID NO: 1516936 - RNA, 19 nt, Artificial Sequence
  Description of Artificial Sequence: Synthetic oligonucleotide
  Sense strand starting at position 3516 of SEQ ID NO: 1244816
guugauacagguuacugua

SEQ ID NO: 1516937 - RNA, 19 nt, Artificial Sequence
  Description of Artificial Sequence: Synthetic oligonucleotide
  Antisense strand to SEQ ID NO: 1516936
uacaguaaccuguaucaac

SEQ ID NO: 1516938 - RNA, 19 nt, Artificial Sequence
  Description of Artificial Sequence: Synthetic oligonucleotide
  Sense strand starting at position 3523 of SEQ ID NO: 1244816
cagguuacuguagauacuu

SEQ ID NO: 1516939 - RNA, 19 nt, Artificial Sequence
  Description of Artificial Sequence: Synthetic oligonucleotide
  Antisense strand to SEQ ID NO: 1516938
aaguaucuacaguaaccug

SEQ ID NO: 1516940 - RNA, 19 nt, Artificial Sequence
  Description of Artificial Sequence: Synthetic oligonucleotide
  Sense strand starting at position 3564 of SEQ ID NO: 1244816
ggaucauagaugugaccuc

SEQ ID NO: 1516941 - RNA, 19 nt, Artificial Sequence
  Description of Artificial Sequence: Synthetic oligonucleotide
  Antisense strand to SEQ ID NO: 1516940
gaggucacaucuaugaucc

SEQ ID NO: 1516942 - RNA, 19 nt, Artificial Sequence
  Description of Artificial Sequence: Synthetic oligonucleotide
  Sense strand starting at position 3578 of SEQ ID NO: 1244816
accucaguuuguccuggaa

SEQ ID NO: 1516943 - RNA, 19 nt, Artificial Sequence
  Description of Artificial Sequence: Synthetic oligonucleotide
  Antisense strand to SEQ ID NO: 1516942
uuccaggacaaacugaggu

SEQ ID NO: 1516944 - RNA, 19 nt, Artificial Sequence
  Description of Artificial Sequence: Synthetic oligonucleotide
  Sense strand starting at position 3582 of SEQ ID NO: 1244816
caguuuguccuggaauccu

SEQ ID NO: 1516945 - RNA, 19 nt, Artificial Sequence
  Description of Artificial Sequence: Synthetic oligonucleotide
  Antisense strand to SEQ ID NO: 1516944
aggauuccaggacaaacug

SEQ ID NO: 1516946 - RNA, 19 nt, Artificial Sequence
  Description of Artificial Sequence: Synthetic oligonucleotide
  Sense strand starting at position 3712 of SEQ ID NO: 1244816
gcaucauggccuuacaucu

SEQ ID NO: 1516947 - RNA, 19 nt, Artificial Sequence
  Description of Artificial Sequence: Synthetic oligonucleotide
  Antisense strand to SEQ ID NO: 1516946
agauguaaggccaugaugc

SEQ ID NO: 1516948 - RNA, 19 nt, Artificial Sequence
  Description of Artificial Sequence: Synthetic oligonucleotide
  Sense strand starting at position 3796 of SEQ ID NO: 1244816
auacaauggugggaugaga

SEQ ID NO: 1516949 - RNA, 19 nt, Artificial Sequence
  Description of Artificial Sequence: Synthetic oligonucleotide
  Antisense strand to SEQ ID NO: 1516948
ucucaucccaccauuguau

SEQ ID NO: 1516950 - RNA, 19 nt, Artificial Sequence
  Description of Artificial Sequence: Synthetic oligonucleotide
  Sense strand starting at position 96 of SEQ ID NO: 1244817
cggagacauugguuuccca

SEQ ID NO: 1516951 - RNA, 19 nt, Artificial Sequence
  Description of Artificial Sequence: Synthetic oligonucleotide
  Antisense strand to SEQ ID NO: 1516950
ugggaaaccaaugucuccg

SEQ ID NO: 1516952 - RNA, 19 nt, Artificial Sequence
  Description of Artificial Sequence: Synthetic oligonucleotide
  Sense strand starting at position 223 of SEQ ID NO: 1244817
agguaagugaugcgaucau

SEQ ID NO: 1516953 - RNA, 19 nt, Artificial Sequence
  Description of Artificial Sequence: Synthetic oligonucleotide
  Antisense strand to SEQ ID NO: 1516952
augaucgcaucacuuaccu

SEQ ID NO: 1516954 - RNA, 19 nt, Artificial Sequence
  Description of Artificial Sequence: Synthetic oligonucleotide
  Sense strand starting at position 565 of SEQ ID NO: 1244817
uuauguuaugcuuagcauc

SEQ ID NO: 1516955 - RNA, 19 nt, Artificial Sequence
  Description of Artificial Sequence: Synthetic oligonucleotide
  Antisense strand to SEQ ID NO: 1516954
gaugcuaagcauaacauaa

SEQ ID NO: 1516956 - RNA, 19 nt, Artificial Sequence
  Description of Artificial Sequence: Synthetic oligonucleotide
  Sense strand starting at position 592 of SEQ ID NO: 1244817
uuuguaaguucuuccugac

SEQ ID NO: 1516957 - RNA, 19 nt, Artificial Sequence
  Description of Artificial Sequence: Synthetic oligonucleotide
  Antisense strand to SEQ ID NO: 1516956
gucaggaagaacuuacaaa

SEQ ID NO: 1516958 - RNA, 19 nt, Artificial Sequence
  Description of Artificial Sequence: Synthetic oligonucleotide
  Sense strand starting at position 654 of SEQ ID NO: 1244817
gaagcagagggaugugaua

SEQ ID NO: 1516959 - RNA, 19 nt, Artificial Sequence
  Description of Artificial Sequence: Synthetic oligonucleotide
  Antisense strand to SEQ ID NO: 1516958
uaucacaucccucugcuuc

SEQ ID NO: 1516960 - RNA, 19 nt, Artificial Sequence
  Description of Artificial Sequence: Synthetic oligonucleotide
  Sense strand starting at position 656 of SEQ ID NO: 1244817
agcagagggaugugauauu

SEQ ID NO: 1516961 - RNA, 19 nt, Artificial Sequence
  Description of Artificial Sequence: Synthetic oligonucleotide
  Antisense strand to SEQ ID NO: 1516960
aauaucacaucccucugcu

SEQ ID NO: 1516962 - RNA, 19 nt, Artificial Sequence
  Description of Artificial Sequence: Synthetic oligonucleotide
  Sense strand starting at position 666 of SEQ ID NO: 1244817
ugugauauuaaaggagagu

SEQ ID NO: 1516963 - RNA, 19 nt, Artificial Sequence
  Description of Artificial Sequence: Synthetic oligonucleotide
  Antisense strand to SEQ ID NO: 1516962
acucuccuuuaauaucaca

SEQ ID NO: 1516964 - RNA, 19 nt, Artificial Sequence
  Description of Artificial Sequence: Synthetic oligonucleotide
  Sense strand starting at position 744 of SEQ ID NO: 1244817
gcagcacuaguugaaguuu

SEQ ID NO: 1516965 - RNA, 19 nt, Artificial Sequence
  Description of Artificial Sequence: Synthetic oligonucleotide
  Antisense strand to SEQ ID NO: 1516964
aaacuucaacuagugcugc

SEQ ID NO: 1516966 - RNA, 19 nt, Artificial Sequence
  Description of Artificial Sequence: Synthetic oligonucleotide
  Sense strand starting at position 806 of SEQ ID NO: 1244817
caaggcuucugucucuaga

SEQ ID NO: 1516967 - RNA, 19 nt, Artificial Sequence
  Description of Artificial Sequence: Synthetic oligonucleotide
  Antisense strand to SEQ ID NO: 1516966
ucuagagacagaagccuug

SEQ ID NO: 1516968 - RNA, 19 nt, Artificial Sequence
  Description of Artificial Sequence: Synthetic oligonucleotide
  Sense strand starting at position 809 of SEQ ID NO: 1244817
ggcuucugucucuagacca

SEQ ID NO: 1516969 - RNA, 19 nt, Artificial Sequence
  Description of Artificial Sequence: Synthetic oligonucleotide
  Antisense strand to SEQ ID NO: 1516968
uggucuagagacagaagcc

SEQ ID NO: 1516970 - RNA, 19 nt, Artificial Sequence
  Description of Artificial Sequence: Synthetic oligonucleotide
  Sense strand starting at position 832 of SEQ ID NO: 1244817
cccugauguuuggcacuga

SEQ ID NO: 1516971 - RNA, 19 nt, Artificial Sequence
  Description of Artificial Sequence: Synthetic oligonucleotide
  Antisense strand to SEQ ID NO: 1516970
ucagugccaaacaucaggg

SEQ ID NO: 1516972 - RNA, 19 nt, Artificial Sequence
  Description of Artificial Sequence: Synthetic oligonucleotide
  Sense strand starting at position 836 of SEQ ID NO: 1244817
gauguuuggcacugacuau

SEQ ID NO: 1516973 - RNA, 19 nt, Artificial Sequence
  Description of Artificial Sequence: Synthetic oligonucleotide
  Antisense strand to SEQ ID NO: 1516972
auagucagugccaaacauc

SEQ ID NO: 1516974 - RNA, 19 nt, Artificial Sequence
  Description of Artificial Sequence: Synthetic oligonucleotide
  Sense strand starting at position 2894 of SEQ ID NO: 1244817
cacucaucggucuagaaca

SEQ ID NO: 1516975 - RNA, 19 nt, Artificial Sequence
  Description of Artificial Sequence: Synthetic oligonucleotide
  Antisense strand to SEQ ID NO: 1516974
uguucuagaccgaugagug

SEQ ID NO: 1516976 - RNA, 19 nt, Artificial Sequence
  Description of Artificial Sequence: Synthetic oligonucleotide
  Sense strand starting at position 2913 of SEQ ID NO: 1244817
agggcucuguggucacaga

SEQ ID NO: 1516977 - RNA, 19 nt, Artificial Sequence
  Description of Artificial Sequence: Synthetic oligonucleotide
  Antisense strand to SEQ ID NO: 1516976
ucugugaccacagagcccu

SEQ ID NO: 1516978 - RNA, 19 nt, Artificial Sequence
  Description of Artificial Sequence: Synthetic oligonucleotide
  Sense strand starting at position 2939 of SEQ ID NO: 1244817
auuccaaauaguuguguga

SEQ ID NO: 1516979 - RNA, 19 nt, Artificial Sequence
  Description of Artificial Sequence: Synthetic oligonucleotide
  Antisense strand to SEQ ID NO: 1516978
ucacacaacuauuuggaau

SEQ ID NO: 1516980 - RNA, 19 nt, Artificial Sequence
  Description of Artificial Sequence: Synthetic oligonucleotide
  Sense strand starting at position 2942 of SEQ ID NO: 1244817
ccaaauaguugugugacuu

SEQ ID NO: 1516981 - RNA, 19 nt, Artificial Sequence
  Description of Artificial Sequence: Synthetic oligonucleotide
  Antisense strand to SEQ ID NO: 1516980
aagucacacaacuauuugg

SEQ ID NO: 1516982 - RNA, 19 nt, Artificial Sequence
  Description of Artificial Sequence: Synthetic oligonucleotide
  Sense strand starting at position 2943 of SEQ ID NO: 1244817
caaauaguugugugacuuu

SEQ ID NO: 1516983 - RNA, 19 nt, Artificial Sequence
  Description of Artificial Sequence: Synthetic oligonucleotide
  Antisense strand to SEQ ID NO: 1516982
aaagucacacaacuauuug

SEQ ID NO: 1516984 - RNA, 19 nt, Artificial Sequence
  Description of Artificial Sequence: Synthetic oligonucleotide
  Sense strand starting at position 2971 of SEQ ID NO: 1244817
acuuaacucuucucgagaa

SEQ ID NO: 1516985 - RNA, 19 nt, Artificial Sequence
  Description of Artificial Sequence: Synthetic oligonucleotide
  Antisense strand to SEQ ID NO: 1516984
uucucgagaagaguuaagu

SEQ ID NO: 1516986 - RNA, 19 nt, Artificial Sequence
  Description of Artificial Sequence: Synthetic oligonucleotide
  Sense strand starting at position 2973 of SEQ ID NO: 1244817
uuaacucuucucgagaauc

SEQ ID NO: 1516987 - RNA, 19 nt, Artificial Sequence
  Description of Artificial Sequence: Synthetic oligonucleotide
  Antisense strand to SEQ ID NO: 1516986
gauucucgagaagaguuaa

SEQ ID NO: 1516988 - RNA, 19 nt, Artificial Sequence
  Description of Artificial Sequence: Synthetic oligonucleotide
  Sense strand starting at position 2984 of SEQ ID NO: 1244817
cgagaauccuugucuguaa

SEQ ID NO: 1516989 - RNA, 19 nt, Artificial Sequence
  Description of Artificial Sequence: Synthetic oligonucleotide
  Antisense strand to SEQ ID NO: 1516988
uuacagacaaggauucucg

SEQ ID NO: 1516990 - RNA, 19 nt, Artificial Sequence
  Description of Artificial Sequence: Synthetic oligonucleotide
  Sense strand starting at position 2985 of SEQ ID NO: 1244817
gagaauccuugucuguaaa

SEQ ID NO: 1516991 - RNA, 19 nt, Artificial Sequence
  Description of Artificial Sequence: Synthetic oligonucleotide
  Antisense strand to SEQ ID NO: 1516990
uuuacagacaaggauucuc

SEQ ID NO: 1516992 - RNA, 19 nt, Artificial Sequence
  Description of Artificial Sequence: Synthetic oligonucleotide
  Sense strand starting at position 3025 of SEQ ID NO: 1244817
guuaccaaaguuugaggau

SEQ ID NO: 1516993 - RNA, 19 nt, Artificial Sequence
  Description of Artificial Sequence: Synthetic oligonucleotide
  Antisense strand to SEQ ID NO: 1516992
auccucaaacuuugguaac

SEQ ID NO: 1516994 - RNA, 19 nt, Artificial Sequence
  Description of Artificial Sequence: Synthetic oligonucleotide
  Sense strand starting at position 3028 of SEQ ID NO: 1244817
accaaaguuugaggaugaa

SEQ ID NO: 1516995 - RNA, 19 nt, Artificial Sequence
  Description of Artificial Sequence: Synthetic oligonucleotide
  Antisense strand to SEQ ID NO: 1516994
uucauccucaaacuuuggu

SEQ ID NO: 1516996 - RNA, 19 nt, Artificial Sequence
  Description of Artificial Sequence: Synthetic oligonucleotide
  Sense strand starting at position 3049 of SEQ ID NO: 1244817
gagagaaugcccuggagca

SEQ ID NO: 1516997 - RNA, 19 nt, Artificial Sequence
  Description of Artificial Sequence: Synthetic oligonucleotide
  Antisense strand to SEQ ID NO: 1516996
ugcuccagggcauucucuc

SEQ ID NO: 1516998 - RNA, 19 nt, Artificial Sequence
  Description of Artificial Sequence: Synthetic oligonucleotide
  Sense strand starting at position 3077 of SEQ ID NO: 1244817
aagcgugauggucaauauu

SEQ ID NO: 1516999 - RNA, 19 nt, Artificial Sequence
  Description of Artificial Sequence: Synthetic oligonucleotide
  Antisense strand to SEQ ID NO: 1516998
aauauugaccaucacgcuu

SEQ ID NO: 1517000 - RNA, 19 nt, Artificial Sequence
  Description of Artificial Sequence: Synthetic oligonucleotide
  Sense strand starting at position 3410 of SEQ ID NO: 1244817
uggcuugaccauuauuacu

SEQ ID NO: 1517001 - RNA, 19 nt, Artificial Sequence
  Description of Artificial Sequence: Synthetic oligonucleotide
  Antisense strand to SEQ ID NO: 1517000
aguaauaauggucaagcca

SEQ ID NO: 1517002 - RNA, 19 nt, Artificial Sequence
  Description of Artificial Sequence: Synthetic oligonucleotide
  Sense strand starting at position 3460 of SEQ ID NO: 1244817
ggugguagaagaugaguaa

SEQ ID NO: 1517003 - RNA, 19 nt, Artificial Sequence
  Description of Artificial Sequence: Synthetic oligonucleotide
  Antisense strand to SEQ ID NO: 1517002
uuacucaucuucuaccacc

SEQ ID NO: 1517004 - RNA, 19 nt, Artificial Sequence
  Description of Artificial Sequence: Synthetic oligonucleotide
  Sense strand starting at position 3515 of SEQ ID NO: 1244817
gagaccucugguuggcaga

SEQ ID NO: 1517005 - RNA, 19 nt, Artificial Sequence
  Description of Artificial Sequence: Synthetic oligonucleotide
  Antisense strand to SEQ ID NO: 1517004
ucugccaaccagaggucuc

SEQ ID NO: 1517006 - RNA, 19 nt, Artificial Sequence
  Description of Artificial Sequence: Synthetic oligonucleotide
  Sense strand starting at position 3517 of SEQ ID NO: 1244817
gaccucugguuggcagaua

SEQ ID NO: 1517007 - RNA, 19 nt, Artificial Sequence
  Description of Artificial Sequence: Synthetic oligonucleotide
  Antisense strand to SEQ ID NO: 1517006
uaucugccaaccagagguc

SEQ ID NO: 1517008 - RNA, 19 nt, Artificial Sequence
  Description of Artificial Sequence: Synthetic oligonucleotide
  Sense strand starting at position 3522 of SEQ ID NO: 1244817
cugguuggcagauaagcua

SEQ ID NO: 1517009 - RNA, 19 nt, Artificial Sequence
  Description of Artificial Sequence: Synthetic oligonucleotide
  Antisense strand to SEQ ID NO: 1517008
uagcuuaucugccaaccag

SEQ ID NO: 1517010 - RNA, 19 nt, Artificial Sequence
  Description of Artificial Sequence: Synthetic oligonucleotide
  Sense strand starting at position 3536 of SEQ ID NO: 1244817
agcuacguuugguuugaca

SEQ ID NO: 1517011 - RNA, 19 nt, Artificial Sequence
  Description of Artificial Sequence: Synthetic oligonucleotide
  Antisense strand to SEQ ID NO: 1517010
ugucaaaccaaacguagcu

SEQ ID NO: 1517012 - RNA, 19 nt, Artificial Sequence
  Description of Artificial Sequence: Synthetic oligonucleotide
  Sense strand starting at position 3538 of SEQ ID NO: 1244817
cuacguuugguuugacaug

SEQ ID NO: 1517013 - RNA, 19 nt, Artificial Sequence
  Description of Artificial Sequence: Synthetic oligonucleotide
  Antisense strand to SEQ ID NO: 1517012
caugucaaaccaaacguag

SEQ ID NO: 1517014 - RNA, 19 nt, Artificial Sequence
  Description of Artificial Sequence: Synthetic oligonucleotide
  Sense strand starting at position 3543 of SEQ ID NO: 1244817
uuugguuugacaugugcca

SEQ ID NO: 1517015 - RNA, 19 nt, Artificial Sequence
  Description of Artificial Sequence: Synthetic oligonucleotide
  Antisense strand to SEQ ID NO: 1517014
uggcacaugucaaaccaaa

SEQ ID NO: 1517016 - RNA, 19 nt, Artificial Sequence
  Description of Artificial Sequence: Synthetic oligonucleotide
  Sense strand starting at position 3653 of SEQ ID NO: 1244817
cccuuuccgccuggugaau

SEQ ID NO: 1517017 - RNA, 19 nt, Artificial Sequence
  Description of Artificial Sequence: Synthetic oligonucleotide
  Antisense strand to SEQ ID NO: 1517016
auucaccaggcggaaaggg

SEQ ID NO: 1517018 - RNA, 19 nt, Artificial Sequence
  Description of Artificial Sequence: Synthetic oligonucleotide
  Sense strand starting at position 3704 of SEQ ID NO: 1244817
ucgccucuuccauagaauu

SEQ ID NO: 1517019 - RNA, 19 nt, Artificial Sequence
  Description of Artificial Sequence: Synthetic oligonucleotide
  Antisense strand to SEQ ID NO: 1517018
aauucuauggaagaggcga

SEQ ID NO: 1517020 - RNA, 19 nt, Artificial Sequence
  Description of Artificial Sequence: Synthetic oligonucleotide
  Sense strand starting at position 3739 of SEQ ID NO: 1244817
ugucucuagcaagaaguaa

SEQ ID NO: 1517021 - RNA, 19 nt, Artificial Sequence
  Description of Artificial Sequence: Synthetic oligonucleotide
  Antisense strand to SEQ ID NO: 1517020
uuacuucuugcuagagaca

SEQ ID NO: 1517022 - RNA, 19 nt, Artificial Sequence
  Description of Artificial Sequence: Synthetic oligonucleotide
  Sense strand starting at position 3750 of SEQ ID NO: 1244817
agaaguaauuggcuccuuu

SEQ ID NO: 1517023 - RNA, 19 nt, Artificial Sequence
  Description of Artificial Sequence: Synthetic oligonucleotide
  Antisense strand to SEQ ID NO: 1517022
aaaggagccaauuacuucu

SEQ ID NO: 1517024 - RNA, 19 nt, Artificial Sequence
  Description of Artificial Sequence: Synthetic oligonucleotide
  Sense strand starting at position 3806 of SEQ ID NO: 1244817
cgggccucuaugugaaguu

SEQ ID NO: 1517025 - RNA, 19 nt, Artificial Sequence
  Description of Artificial Sequence: Synthetic oligonucleotide
  Antisense strand to SEQ ID NO: 1517024
aacuucacauagaggcccg

SEQ ID NO: 1517026 - RNA, 19 nt, Artificial Sequence
  Description of Artificial Sequence: Synthetic oligonucleotide
  Sense strand starting at position 3815 of SEQ ID NO: 1244817
augugaaguugugcagguu

SEQ ID NO: 1517027 - RNA, 19 nt, Artificial Sequence
  Description of Artificial Sequence: Synthetic oligonucleotide
  Antisense strand to SEQ ID NO: 1517026
aaccugcacaacuucacau

SEQ ID NO: 1517028 - RNA, 19 nt, Artificial Sequence
  Description of Artificial Sequence: Synthetic oligonucleotide
  Sense strand starting at position 3827 of SEQ ID NO: 1244817
gcagguuguguccugcaca

SEQ ID NO: 1517029 - RNA, 19 nt, Artificial Sequence
  Description of Artificial Sequence: Synthetic oligonucleotide
  Antisense strand to SEQ ID NO: 1517028
ugugcaggacacaaccugc

SEQ ID NO: 1517030 - RNA, 19 nt, Artificial Sequence
  Description of Artificial Sequence: Synthetic oligonucleotide
  Sense strand starting at position 24 of SEQ ID NO: 1244818
acacaaguugguugaacuu

SEQ ID NO: 1517031 - RNA, 19 nt, Artificial Sequence
  Description of Artificial Sequence: Synthetic oligonucleotide
  Antisense strand to SEQ ID NO: 1517030
aaguucaaccaacuugugu

SEQ ID NO: 1517032 - RNA, 19 nt, Artificial Sequence
  Description of Artificial Sequence: Synthetic oligonucleotide
  Sense strand starting at position 33 of SEQ ID NO: 1244818
gguugaacuucauugggau

SEQ ID NO: 1517033 - RNA, 19 nt, Artificial Sequence
  Description of Artificial Sequence: Synthetic oligonucleotide
  Antisense strand to SEQ ID NO: 1517032
aucccaaugaaguucaacc

SEQ ID NO: 1517034 - RNA, 19 nt, Artificial Sequence
  Description of Artificial Sequence: Synthetic oligonucleotide
  Sense strand starting at position 34 of SEQ ID NO: 1244818
guugaacuucauugggaug

SEQ ID NO: 1517035 - RNA, 19 nt, Artificial Sequence
  Description of Artificial Sequence: Synthetic oligonucleotide
  Antisense strand to SEQ ID NO: 1517034
caucccaaugaaguucaac

SEQ ID NO: 1517036 - RNA, 19 nt, Artificial Sequence
  Description of Artificial Sequence: Synthetic oligonucleotide
  Sense strand starting at position 442 of SEQ ID NO: 1244818
acugaaugccuaugaugug

SEQ ID NO: 1517037 - RNA, 19 nt, Artificial Sequence
  Description of Artificial Sequence: Synthetic oligonucleotide
  Antisense strand to SEQ ID NO: 1517036
cacaucauaggcauucagu

SEQ ID NO: 1517038 - RNA, 19 nt, Artificial Sequence
  Description of Artificial Sequence: Synthetic oligonucleotide
  Sense strand starting at position 477 of SEQ ID NO: 1244818
accucaagguggguauuau

SEQ ID NO: 1517039 - RNA, 19 nt, Artificial Sequence
  Description of Artificial Sequence: Synthetic oligonucleotide
  Antisense strand to SEQ ID NO: 1517038
auaauacccaccuugaggu

SEQ ID NO: 1517040 - RNA, 19 nt, Artificial Sequence
  Description of Artificial Sequence: Synthetic oligonucleotide
  Sense strand starting at position 529 of SEQ ID NO: 1244818
guucaagguuagucaguga

SEQ ID NO: 1517041 - RNA, 19 nt, Artificial Sequence
  Description of Artificial Sequence: Synthetic oligonucleotide
  Antisense strand to SEQ ID NO: 1517040
ucacugacuaaccuugaac

SEQ ID NO: 1517042 - RNA, 19 nt, Artificial Sequence
  Description of Artificial Sequence: Synthetic oligonucleotide
  Sense strand starting at position 533 of SEQ ID NO: 1244818
aagguuagucagugacaga

SEQ ID NO: 1517043 - RNA, 19 nt, Artificial Sequence
  Description of Artificial Sequence: Synthetic oligonucleotide
  Antisense strand to SEQ ID NO: 1517042
ucugucacugacuaaccuu

SEQ ID NO: 1517044 - RNA, 19 nt, Artificial Sequence
  Description of Artificial Sequence: Synthetic oligonucleotide
  Sense strand starting at position 534 of SEQ ID NO: 1244818
agguuagucagugacagaa

SEQ ID NO: 1517045 - RNA, 19 nt, Artificial Sequence
  Description of Artificial Sequence: Synthetic oligonucleotide
  Antisense strand to SEQ ID NO: 1517044
uucugucacugacuaaccu

SEQ ID NO: 1517046 - RNA, 19 nt, Artificial Sequence
  Description of Artificial Sequence: Synthetic oligonucleotide
  Sense strand starting at position 907 of SEQ ID NO: 1244818
ccaugcuuucuacaggacu

SEQ ID NO: 1517047 - RNA, 19 nt, Artificial Sequence
  Description of Artificial Sequence: Synthetic oligonucleotide
  Antisense strand to SEQ ID NO: 1517046
aguccuguagaaagcaugg

SEQ ID NO: 1517048 - RNA, 19 nt, Artificial Sequence
  Description of Artificial Sequence: Synthetic oligonucleotide
  Sense strand starting at position 940 of SEQ ID NO: 1244818
acagaugucuggcccuaaa

SEQ ID NO: 1517049 - RNA, 19 nt, Artificial Sequence
  Description of Artificial Sequence: Synthetic oligonucleotide
  Antisense strand to SEQ ID NO: 1517048
uuuagggccagacaucugu

SEQ ID NO: 1517050 - RNA, 19 nt, Artificial Sequence
  Description of Artificial Sequence: Synthetic oligonucleotide
  Sense strand starting at position 1199 of SEQ ID NO: 1244818
uagggcuuguuucuauuaa

SEQ ID NO: 1517051 - RNA, 19 nt, Artificial Sequence
  Description of Artificial Sequence: Synthetic oligonucleotide
  Antisense strand to SEQ ID NO: 1517050
uuaauagaaacaagcccua

SEQ ID NO: 1517052 - RNA, 19 nt, Artificial Sequence
  Description of Artificial Sequence: Synthetic oligonucleotide
  Sense strand starting at position 1225 of SEQ ID NO: 1244818
gcuagauuaggaugaaguc

SEQ ID NO: 1517053 - RNA, 19 nt, Artificial Sequence
  Description of Artificial Sequence: Synthetic oligonucleotide
  Antisense strand to SEQ ID NO: 1517052
gacuucauccuaaucuagc

SEQ ID NO: 1517054 - RNA, 19 nt, Artificial Sequence
  Description of Artificial Sequence: Synthetic oligonucleotide
  Sense strand starting at position 1257 of SEQ ID NO: 1244818
cggcuuaucuucuuaagag

SEQ ID NO: 1517055 - RNA, 19 nt, Artificial Sequence
  Description of Artificial Sequence: Synthetic oligonucleotide
  Antisense strand to SEQ ID NO: 1517054
cucuuaagaagauaagccg

SEQ ID NO: 1517056 - RNA, 19 nt, Artificial Sequence
  Description of Artificial Sequence: Synthetic oligonucleotide
  Sense strand starting at position 1429 of SEQ ID NO: 1244818
gcccaauuccgagaggcaa

SEQ ID NO: 1517057 - RNA, 19 nt, Artificial Sequence
  Description of Artificial Sequence: Synthetic oligonucleotide
  Antisense strand to SEQ ID NO: 1517056
uugccucucggaauugggc

SEQ ID NO: 1517058 - RNA, 19 nt, Artificial Sequence
  Description of Artificial Sequence: Synthetic oligonucleotide
  Sense strand starting at position 2142 of SEQ ID NO: 1244818
cggacuuuguuucucauaa

SEQ ID NO: 1517059 - RNA, 19 nt, Artificial Sequence
  Description of Artificial Sequence: Synthetic oligonucleotide
  Antisense strand to SEQ ID NO: 1517058
uuaugagaaacaaaguccg

SEQ ID NO: 1517060 - RNA, 19 nt, Artificial Sequence
  Description of Artificial Sequence: Synthetic oligonucleotide
  Sense strand starting at position 2143 of SEQ ID NO: 1244818
ggacuuuguuucucauaau

SEQ ID NO: 1517061 - RNA, 19 nt, Artificial Sequence
  Description of Artificial Sequence: Synthetic oligonucleotide
  Antisense strand to SEQ ID NO: 1517060
auuaugagaaacaaagucc

SEQ ID NO: 1517062 - RNA, 19 nt, Artificial Sequence
  Description of Artificial Sequence: Synthetic oligonucleotide
  Sense strand starting at position 2172 of SEQ ID NO: 1244818
agacacaucugaguuauga

SEQ ID NO: 1517063 - RNA, 19 nt, Artificial Sequence
  Description of Artificial Sequence: Synthetic oligonucleotide
  Antisense strand to SEQ ID NO: 1517062
ucauaacucagaugugucu

SEQ ID NO: 1517064 - RNA, 19 nt, Artificial Sequence
  Description of Artificial Sequence: Synthetic oligonucleotide
  Sense strand starting at position 2215 of SEQ ID NO: 1244818
gccuaaaucugagcaaguc

SEQ ID NO: 1517065 - RNA, 19 nt, Artificial Sequence
  Description of Artificial Sequence: Synthetic oligonucleotide
  Antisense strand to SEQ ID NO: 1517064
gacuugcucagauuuaggc

SEQ ID NO: 1517066 - RNA, 19 nt, Artificial Sequence
  Description of Artificial Sequence: Synthetic oligonucleotide
  Sense strand starting at position 2227 of SEQ ID NO: 1244818
gcaaguccagaaugauauu

SEQ ID NO: 1517067 - RNA, 19 nt, Artificial Sequence
  Description of Artificial Sequence: Synthetic oligonucleotide
  Antisense strand to SEQ ID NO: 1517066
aauaucauucuggacuugc

SEQ ID NO: 1517068 - RNA, 19 nt, Artificial Sequence
  Description of Artificial Sequence: Synthetic oligonucleotide
  Sense strand starting at position 2255 of SEQ ID NO: 1244818
ccucauuguacugggaaag

SEQ ID NO: 1517069 - RNA, 19 nt, Artificial Sequence
  Description of Artificial Sequence: Synthetic oligonucleotide
  Antisense strand to SEQ ID NO: 1517068
cuuucccaguacaaugagg

SEQ ID NO: 1517070 - RNA, 19 nt, Artificial Sequence
  Description of Artificial Sequence: Synthetic oligonucleotide
  Sense strand starting at position 2256 of SEQ ID NO: 1244818
cucauuguacugggaaaga

SEQ ID NO: 1517071 - RNA, 19 nt, Artificial Sequence
  Description of Artificial Sequence: Synthetic oligonucleotide
  Antisense strand to SEQ ID NO: 1517070
ucuuucccaguacaaugag

SEQ ID NO: 1517072 - RNA, 19 nt, Artificial Sequence
  Description of Artificial Sequence: Synthetic oligonucleotide
  Sense strand starting at position 2285 of SEQ ID NO: 1244818
agagaagugaauugcccaa

SEQ ID NO: 1517073 - RNA, 19 nt, Artificial Sequence
  Description of Artificial Sequence: Synthetic oligonucleotide
  Antisense strand to SEQ ID NO: 1517072
uugggcaauucacuucucu

SEQ ID NO: 1517074 - RNA, 19 nt, Artificial Sequence
  Description of Artificial Sequence: Synthetic oligonucleotide
  Sense strand starting at position 2289 of SEQ ID NO: 1244818
aagugaauugcccaaaugu

SEQ ID NO: 1517075 - RNA, 19 nt, Artificial Sequence
  Description of Artificial Sequence: Synthetic oligonucleotide
  Antisense strand to SEQ ID NO: 1517074
acauuugggcaauucacuu

SEQ ID NO: 1517076 - RNA, 19 nt, Artificial Sequence
  Description of Artificial Sequence: Synthetic oligonucleotide
  Sense strand starting at position 2355 of SEQ ID NO: 1244818
uugcuuuaucaacauagga

SEQ ID NO: 1517077 - RNA, 19 nt, Artificial Sequence
  Description of Artificial Sequence: Synthetic oligonucleotide
  Antisense strand to SEQ ID NO: 1517076
uccuauguugauaaagcaa

SEQ ID NO: 1517078 - RNA, 19 nt, Artificial Sequence
  Description of Artificial Sequence: Synthetic oligonucleotide
  Sense strand starting at position 2395 of SEQ ID NO: 1244818
cccuuagagcuuuaaagua

SEQ ID NO: 1517079 - RNA, 19 nt, Artificial Sequence
  Description of Artificial Sequence: Synthetic oligonucleotide
  Antisense strand to SEQ ID NO: 1517078
uacuuuaaagcucuaaggg

SEQ ID NO: 1517080 - RNA, 19 nt, Artificial Sequence
  Description of Artificial Sequence: Synthetic oligonucleotide
  Sense strand starting at position 2484 of SEQ ID NO: 1244818
agaugagucacaggccuuu

SEQ ID NO: 1517081 - RNA, 19 nt, Artificial Sequence
  Description of Artificial Sequence: Synthetic oligonucleotide
  Antisense strand to SEQ ID NO: 1517080
aaaggccugugacucaucu

SEQ ID NO: 1517082 - RNA, 19 nt, Artificial Sequence
  Description of Artificial Sequence: Synthetic oligonucleotide
  Sense strand starting at position 2582 of SEQ ID NO: 1244818
aaccgaauccguuagaaga

SEQ ID NO: 1517083 - RNA, 19 nt, Artificial Sequence
  Description of Artificial Sequence: Synthetic oligonucleotide
  Antisense strand to SEQ ID NO: 1517082
ucuucuaacggauucgguu

SEQ ID NO: 1517084 - RNA, 19 nt, Artificial Sequence
  Description of Artificial Sequence: Synthetic oligonucleotide
  Sense strand starting at position 2645 of SEQ ID NO: 1244818
ucccaugcuggugagauua

SEQ ID NO: 1517085 - RNA, 19 nt, Artificial Sequence
  Description of Artificial Sequence: Synthetic oligonucleotide
  Antisense strand to SEQ ID NO: 1517084
uaaucucaccagcauggga

SEQ ID NO: 1517086 - RNA, 19 nt, Artificial Sequence
  Description of Artificial Sequence: Synthetic oligonucleotide
  Sense strand starting at position 2665 of SEQ ID NO: 1244818
guccaaagggcaugacaua

SEQ ID NO: 1517087 - RNA, 19 nt, Artificial Sequence
  Description of Artificial Sequence: Synthetic oligonucleotide
  Antisense strand to SEQ ID NO: 1517086
uaugucaugcccuuuggac

SEQ ID NO: 1517088 - RNA, 19 nt, Artificial Sequence
  Description of Artificial Sequence: Synthetic oligonucleotide
  Sense strand starting at position 3030 of SEQ ID NO: 1244818
cagugugaaguccaaguuu

SEQ ID NO: 1517089 - RNA, 19 nt, Artificial Sequence
  Description of Artificial Sequence: Synthetic oligonucleotide
  Antisense strand to SEQ ID NO: 1517088
aaacuuggacuucacacug

SEQ ID NO: 1517090 - RNA, 19 nt, Artificial Sequence
  Description of Artificial Sequence: Synthetic oligonucleotide
  Sense strand starting at position 3101 of SEQ ID NO: 1244818
uaguguauccuugggcaag

SEQ ID NO: 1517091 - RNA, 19 nt, Artificial Sequence
  Description of Artificial Sequence: Synthetic oligonucleotide
  Antisense strand to SEQ ID NO: 1517090
cuugcccaaggauacacua

SEQ ID NO: 1517092 - RNA, 19 nt, Artificial Sequence
  Description of Artificial Sequence: Synthetic oligonucleotide
  Sense strand starting at position 3138 of SEQ ID NO: 1244818
ucaguuuccuuaccauaga

SEQ ID NO: 1517093 - RNA, 19 nt, Artificial Sequence
  Description of Artificial Sequence: Synthetic oligonucleotide
  Antisense strand to SEQ ID NO: 1517092
ucuaugguaaggaaacuga

SEQ ID NO: 1517094 - RNA, 19 nt, Artificial Sequence
  Description of Artificial Sequence: Synthetic oligonucleotide
  Sense strand starting at position 3141 of SEQ ID NO: 1244818
guuuccuuaccauagaaug

SEQ ID NO: 1517095 - RNA, 19 nt, Artificial Sequence
  Description of Artificial Sequence: Synthetic oligonucleotide
  Antisense strand to SEQ ID NO: 1517094
cauucuaugguaaggaaac

SEQ ID NO: 1517096 - RNA, 19 nt, Artificial Sequence
  Description of Artificial Sequence: Synthetic oligonucleotide
  Sense strand starting at position 3152 of SEQ ID NO: 1244818
auagaauggccuugugagg

SEQ ID NO: 1517097 - RNA, 19 nt, Artificial Sequence
  Description of Artificial Sequence: Synthetic oligonucleotide
  Antisense strand to SEQ ID NO: 1517096
ccucacaaggccauucuau

SEQ ID NO: 1517098 - RNA, 19 nt, Artificial Sequence
  Description of Artificial Sequence: Synthetic oligonucleotide
  Sense strand starting at position 3158 of SEQ ID NO: 1244818
uggccuugugaggacuaaa

SEQ ID NO: 1517099 - RNA, 19 nt, Artificial Sequence
  Description of Artificial Sequence: Synthetic oligonucleotide
  Antisense strand to SEQ ID NO: 1517098
uuuaguccucacaaggcca

SEQ ID NO: 1517100 - RNA, 19 nt, Artificial Sequence
  Description of Artificial Sequence: Synthetic oligonucleotide
  Sense strand starting at position 3465 of SEQ ID NO: 1244818
cuguuucuaccguaauacu

SEQ ID NO: 1517101 - RNA, 19 nt, Artificial Sequence
  Description of Artificial Sequence: Synthetic oligonucleotide
  Antisense strand to SEQ ID NO: 1517100
aguauuacgguagaaacag

SEQ ID NO: 1517102 - RNA, 19 nt, Artificial Sequence
  Description of Artificial Sequence: Synthetic oligonucleotide
  Sense strand starting at position 3497 of SEQ ID NO: 1244818
guaggacuguacuuccuau

SEQ ID NO: 1517103 - RNA, 19 nt, Artificial Sequence
  Description of Artificial Sequence: Synthetic oligonucleotide
  Antisense strand to SEQ ID NO: 1517102
auaggaaguacaguccuac

SEQ ID NO: 1517104 - RNA, 19 nt, Artificial Sequence
  Description of Artificial Sequence: Synthetic oligonucleotide
  Sense strand starting at position 3615 of SEQ ID NO: 1244818
cagagcugugcacaauuga

SEQ ID NO: 1517105 - RNA, 19 nt, Artificial Sequence
  Description of Artificial Sequence: Synthetic oligonucleotide
  Antisense strand to SEQ ID NO: 1517104
ucaauugugcacagcucug

SEQ ID NO: 1517106 - RNA, 19 nt, Artificial Sequence
  Description of Artificial Sequence: Synthetic oligonucleotide
  Sense strand starting at position 3934 of SEQ ID NO: 1244818
aggcaauggacaugugguu

SEQ ID NO: 1517107 - RNA, 19 nt, Artificial Sequence
  Description of Artificial Sequence: Synthetic oligonucleotide
  Antisense strand to SEQ ID NO: 1517106
aaccacauguccauugccu

SEQ ID NO: 1517108 - RNA, 19 nt, Artificial Sequence
  Description of Artificial Sequence: Synthetic oligonucleotide
  Sense strand starting at position 3971 of SEQ ID NO: 1244818
gaauaaugaggcugugaac

SEQ ID NO: 1517109 - RNA, 19 nt, Artificial Sequence
  Description of Artificial Sequence: Synthetic oligonucleotide
  Antisense strand to SEQ ID NO: 1517108
guucacagccucauuauuc

SEQ ID NO: 1517110 - RNA, 19 nt, Artificial Sequence
  Description of Artificial Sequence: Synthetic oligonucleotide
  Sense strand starting at position 82 of SEQ ID NO: 1244819
aaaguugagcucugaagaa

SEQ ID NO: 1517111 - RNA, 19 nt, Artificial Sequence
  Description of Artificial Sequence: Synthetic oligonucleotide
  Antisense strand to SEQ ID NO: 1517110
uucuucagagcucaacuuu

SEQ ID NO: 1517112 - RNA, 19 nt, Artificial Sequence
  Description of Artificial Sequence: Synthetic oligonucleotide
  Sense strand starting at position 105 of SEQ ID NO: 1244819
gagucuagcaaggguguau

SEQ ID NO: 1517113 - RNA, 19 nt, Artificial Sequence
  Description of Artificial Sequence: Synthetic oligonucleotide
  Antisense strand to SEQ ID NO: 1517112
auacacccuugcuagacuc

SEQ ID NO: 1517114 - RNA, 19 nt, Artificial Sequence
  Description of Artificial Sequence: Synthetic oligonucleotide
  Sense strand starting at position 120 of SEQ ID NO: 1244819
guauuacgaacgcagcaau

SEQ ID NO: 1517115 - RNA, 19 nt, Artificial Sequence
  Description of Artificial Sequence: Synthetic oligonucleotide
  Antisense strand to SEQ ID NO: 1517114
auugcugcguucguaauac

SEQ ID NO: 1517116 - RNA, 19 nt, Artificial Sequence
  Description of Artificial Sequence: Synthetic oligonucleotide
  Sense strand starting at position 257 of SEQ ID NO: 1244819
gcaagcaagcucugaaaga

SEQ ID NO: 1517117 - RNA, 19 nt, Artificial Sequence
  Description of Artificial Sequence: Synthetic oligonucleotide
  Antisense strand to SEQ ID NO: 1517116
ucuuucagagcuugcuugc

SEQ ID NO: 1517118 - RNA, 19 nt, Artificial Sequence
  Description of Artificial Sequence: Synthetic oligonucleotide
  Sense strand starting at position 267 of SEQ ID NO: 1244819
ucugaaagaguauguuacu

SEQ ID NO: 1517119 - RNA, 19 nt, Artificial Sequence
  Description of Artificial Sequence: Synthetic oligonucleotide
  Antisense strand to SEQ ID NO: 1517118
aguaacauacucuuucaga

SEQ ID NO: 1517120 - RNA, 19 nt, Artificial Sequence
  Description of Artificial Sequence: Synthetic oligonucleotide
  Sense strand starting at position 268 of SEQ ID NO: 1244819
cugaaagaguauguuacuu

SEQ ID NO: 1517121 - RNA, 19 nt, Artificial Sequence
  Description of Artificial Sequence: Synthetic oligonucleotide
  Antisense strand to SEQ ID NO: 1517120
aaguaacauacucuuucag

SEQ ID NO: 1517122 - RNA, 19 nt, Artificial Sequence
  Description of Artificial Sequence: Synthetic oligonucleotide
  Sense strand starting at position 301 of SEQ ID NO: 1244819
aagggauagcugugucauu

SEQ ID NO: 1517123 - RNA, 19 nt, Artificial Sequence
  Description of Artificial Sequence: Synthetic oligonucleotide
  Antisense strand to SEQ ID NO: 1517122
aaugacacagcuaucccuu

SEQ ID NO: 1517124 - RNA, 19 nt, Artificial Sequence
  Description of Artificial Sequence: Synthetic oligonucleotide
  Sense strand starting at position 590 of SEQ ID NO: 1244819
cugagcaacaagugugaaa

SEQ ID NO: 1517125 - RNA, 19 nt, Artificial Sequence
  Description of Artificial Sequence: Synthetic oligonucleotide
  Antisense strand to SEQ ID NO: 1517124
uuucacacuuguugcucag

SEQ ID NO: 1517126 - RNA, 19 nt, Artificial Sequence
  Description of Artificial Sequence: Synthetic oligonucleotide
  Sense strand starting at position 592 of SEQ ID NO: 1244819
gagcaacaagugugaaacu

SEQ ID NO: 1517127 - RNA, 19 nt, Artificial Sequence
  Description of Artificial Sequence: Synthetic oligonucleotide
  Antisense strand to SEQ ID NO: 1517126
aguuucacacuuguugcuc

SEQ ID NO: 1517128 - RNA, 19 nt, Artificial Sequence
  Description of Artificial Sequence: Synthetic oligonucleotide
  Sense strand starting at position 913 of SEQ ID NO: 1244819
gcagaaguugcaguguguu

SEQ ID NO: 1517129 - RNA, 19 nt, Artificial Sequence
  Description of Artificial Sequence: Synthetic oligonucleotide
  Antisense strand to SEQ ID NO: 1517128
aacacacugcaacuucugc

SEQ ID NO: 1517130 - RNA, 19 nt, Artificial Sequence
  Description of Artificial Sequence: Synthetic oligonucleotide
  Sense strand starting at position 1268 of SEQ ID NO: 1244819
aauauugcagucugcagaa

SEQ ID NO: 1517131 - RNA, 19 nt, Artificial Sequence
  Description of Artificial Sequence: Synthetic oligonucleotide
  Antisense strand to SEQ ID NO: 1517130
uucugcagacugcaauauu

SEQ ID NO: 1517132 - RNA, 19 nt, Artificial Sequence
  Description of Artificial Sequence: Synthetic oligonucleotide
  Sense strand starting at position 1324 of SEQ ID NO: 1244819
acaccaacuuccguggaaa

SEQ ID NO: 1517133 - RNA, 19 nt, Artificial Sequence
  Description of Artificial Sequence: Synthetic oligonucleotide
  Antisense strand to SEQ ID NO: 1517132
uuuccacggaaguuggugu

SEQ ID NO: 1517134 - RNA, 19 nt, Artificial Sequence
  Description of Artificial Sequence: Synthetic oligonucleotide
  Sense strand starting at position 1380 of SEQ ID NO: 1244819
gaaucaguuaccgggagaa

SEQ ID NO: 1517135 - RNA, 19 nt, Artificial Sequence
  Description of Artificial Sequence: Synthetic oligonucleotide
  Antisense strand to SEQ ID NO: 1517134
uucucccgguaacugauuc

SEQ ID NO: 1517136 - RNA, 19 nt, Artificial Sequence
  Description of Artificial Sequence: Synthetic oligonucleotide
  Sense strand starting at position 2474 of SEQ ID NO: 1244819
ugaagagggugcguuucaa

SEQ ID NO: 1517137 - RNA, 19 nt, Artificial Sequence
  Description of Artificial Sequence: Synthetic oligonucleotide
  Antisense strand to SEQ ID NO: 1517136
uugaaacgcacccucuuca

SEQ ID NO: 1517138 - RNA, 19 nt, Artificial Sequence
  Description of Artificial Sequence: Synthetic oligonucleotide
  Sense strand starting at position 2513 of SEQ ID NO: 1244819
gaaauugucuucuuuggaa

SEQ ID NO: 1517139 - RNA, 19 nt, Artificial Sequence
  Description of Artificial Sequence: Synthetic oligonucleotide
  Antisense strand to SEQ ID NO: 1517138
uuccaaagaagacaauuuc

SEQ ID NO: 1517140 - RNA, 19 nt, Artificial Sequence
  Description of Artificial Sequence: Synthetic oligonucleotide
  Sense strand starting at position 2515 of SEQ ID NO: 1244819
aauugucuucuuuggaaag

SEQ ID NO: 1517141 - RNA, 19 nt, Artificial Sequence
  Description of Artificial Sequence: Synthetic oligonucleotide
  Antisense strand to SEQ ID NO: 1517140
cuuuccaaagaagacaauu

SEQ ID NO: 1517142 - RNA, 19 nt, Artificial Sequence
  Description of Artificial Sequence: Synthetic oligonucleotide
  Sense strand starting at position 2563 of SEQ ID NO: 1244819
caaauugaggcgcaaugau

SEQ ID NO: 1517143 - RNA, 19 nt, Artificial Sequence
  Description of Artificial Sequence: Synthetic oligonucleotide
  Antisense strand to SEQ ID NO: 1517142
aucauugcgccucaauuug

SEQ ID NO: 1517144 - RNA, 19 nt, Artificial Sequence
  Description of Artificial Sequence: Synthetic oligonucleotide
  Sense strand starting at position 2611 of SEQ ID NO: 1244819
aaucuugagggcuagguau

SEQ ID NO: 1517145 - RNA, 19 nt, Artificial Sequence
  Description of Artificial Sequence: Synthetic oligonucleotide
  Antisense strand to SEQ ID NO: 1517144
auaccuagcccucaagauu

SEQ ID NO: 1517146 - RNA, 19 nt, Artificial Sequence
  Description of Artificial Sequence: Synthetic oligonucleotide
  Sense strand starting at position 2651 of SEQ ID NO: 1244819
gcuguuaaugaugauucua

SEQ ID NO: 1517147 - RNA, 19 nt, Artificial Sequence
  Description of Artificial Sequence: Synthetic oligonucleotide
  Antisense strand to SEQ ID NO: 1517146
uagaaucaucauuaacagc

SEQ ID NO: 1517148 - RNA, 19 nt, Artificial Sequence
  Description of Artificial Sequence: Synthetic oligonucleotide
  Sense strand starting at position 2672 of SEQ ID NO: 1244819
agcuaccauuugucgagua

SEQ ID NO: 1517149 - RNA, 19 nt, Artificial Sequence
  Description of Artificial Sequence: Synthetic oligonucleotide
  Antisense strand to SEQ ID NO: 1517148
uacucgacaaaugguagcu

SEQ ID NO: 1517150 - RNA, 19 nt, Artificial Sequence
  Description of Artificial Sequence: Synthetic oligonucleotide
  Sense strand starting at position 2688 of SEQ ID NO: 1244819
guacuuauugcaugccaga

SEQ ID NO: 1517151 - RNA, 19 nt, Artificial Sequence
  Description of Artificial Sequence: Synthetic oligonucleotide
  Antisense strand to SEQ ID NO: 1517150
ucuggcaugcaauaaguac

SEQ ID NO: 1517152 - RNA, 19 nt, Artificial Sequence
  Description of Artificial Sequence: Synthetic oligonucleotide
  Sense strand starting at position 2761 of SEQ ID NO: 1244819
accuguuguuaucccuauu

SEQ ID NO: 1517153 - RNA, 19 nt, Artificial Sequence
  Description of Artificial Sequence: Synthetic oligonucleotide
  Antisense strand to SEQ ID NO: 1517152
aauagggauaacaacaggu

SEQ ID NO: 1517154 - RNA, 19 nt, Artificial Sequence
  Description of Artificial Sequence: Synthetic oligonucleotide
  Sense strand starting at position 2897 of SEQ ID NO: 1244819
uuagaagucugccuuugau

SEQ ID NO: 1517155 - RNA, 19 nt, Artificial Sequence
  Description of Artificial Sequence: Synthetic oligonucleotide
  Antisense strand to SEQ ID NO: 1517154
aucaaaggcagacuucuaa

SEQ ID NO: 1517156 - RNA, 19 nt, Artificial Sequence
  Description of Artificial Sequence: Synthetic oligonucleotide
  Sense strand starting at position 2900 of SEQ ID NO: 1244819
gaagucugccuuugauaaa

SEQ ID NO: 1517157 - RNA, 19 nt, Artificial Sequence
  Description of Artificial Sequence: Synthetic oligonucleotide
  Antisense strand to SEQ ID NO: 1517156
uuuaucaaaggcagacuuc

SEQ ID NO: 1517158 - RNA, 19 nt, Artificial Sequence
  Description of Artificial Sequence: Synthetic oligonucleotide
  Sense strand starting at position 2950 of SEQ ID NO: 1244819
acuuuaugccugugugaac

SEQ ID NO: 1517159 - RNA, 19 nt, Artificial Sequence
  Description of Artificial Sequence: Synthetic oligonucleotide
  Antisense strand to SEQ ID NO: 1517158
guucacacaggcauaaagu

SEQ ID NO: 1517160 - RNA, 19 nt, Artificial Sequence
  Description of Artificial Sequence: Synthetic oligonucleotide
  Sense strand starting at position 2983 of SEQ ID NO: 1244819
uugguauaugcauaauaca

SEQ ID NO: 1517161 - RNA, 19 nt, Artificial Sequence
  Description of Artificial Sequence: Synthetic oligonucleotide
  Antisense strand to SEQ ID NO: 1517160
uguauuaugcauauaccaa

SEQ ID NO: 1517162 - RNA, 19 nt, Artificial Sequence
  Description of Artificial Sequence: Synthetic oligonucleotide
  Sense strand starting at position 3477 of SEQ ID NO: 1244819
auguuuagugaguaggcuu

SEQ ID NO: 1517163 - RNA, 19 nt, Artificial Sequence
  Description of Artificial Sequence: Synthetic oligonucleotide
  Antisense strand to SEQ ID NO: 1517162
aagccuacucacuaaacau

SEQ ID NO: 1517164 - RNA, 19 nt, Artificial Sequence
  Description of Artificial Sequence: Synthetic oligonucleotide
  Sense strand starting at position 3541 of SEQ ID NO: 1244819
ccucauggagcucauauua

SEQ ID NO: 1517165 - RNA, 19 nt, Artificial Sequence
  Description of Artificial Sequence: Synthetic oligonucleotide
  Antisense strand to SEQ ID NO: 1517164
uaauaugagcuccaugagg

SEQ ID NO: 1517166 - RNA, 19 nt, Artificial Sequence
  Description of Artificial Sequence: Synthetic oligonucleotide
  Sense strand starting at position 3564 of SEQ ID NO: 1244819
agggaagacugucaauaag

SEQ ID NO: 1517167 - RNA, 19 nt, Artificial Sequence
  Description of Artificial Sequence: Synthetic oligonucleotide
  Antisense strand to SEQ ID NO: 1517166
cuuauugacagucuucccu

SEQ ID NO: 1517168 - RNA, 19 nt, Artificial Sequence
  Description of Artificial Sequence: Synthetic oligonucleotide
  Sense strand starting at position 3603 of SEQ ID NO: 1244819
gauagauaaugcccaguaa

SEQ ID NO: 1517169 - RNA, 19 nt, Artificial Sequence
  Description of Artificial Sequence: Synthetic oligonucleotide
  Antisense strand to SEQ ID NO: 1517168
uuacugggcauuaucuauc

SEQ ID NO: 1517170 - RNA, 19 nt, Artificial Sequence
  Description of Artificial Sequence: Synthetic oligonucleotide
  Sense strand starting at position 3604 of SEQ ID NO: 1244819
auagauaaugcccaguaau

SEQ ID NO: 1517171 - RNA, 19 nt, Artificial Sequence
  Description of Artificial Sequence: Synthetic oligonucleotide
  Antisense strand to SEQ ID NO: 1517170
auuacugggcauuaucuau

SEQ ID NO: 1517172 - RNA, 19 nt, Artificial Sequence
  Description of Artificial Sequence: Synthetic oligonucleotide
  Sense strand starting at position 3607 of SEQ ID NO: 1244819
gauaaugcccaguaaugug

SEQ ID NO: 1517173 - RNA, 19 nt, Artificial Sequence
  Description of Artificial Sequence: Synthetic oligonucleotide
  Antisense strand to SEQ ID NO: 1517172
cacauuacugggcauuauc

SEQ ID NO: 1517174 - RNA, 19 nt, Artificial Sequence
  Description of Artificial Sequence: Synthetic oligonucleotide
  Sense strand starting at position 3676 of SEQ ID NO: 1244819
ggauucucuuaguuagggu

SEQ ID NO: 1517175 - RNA, 19 nt, Artificial Sequence
  Description of Artificial Sequence: Synthetic oligonucleotide
  Antisense strand to SEQ ID NO: 1517174
acccuaacuaagagaaucc

SEQ ID NO: 1517176 - RNA, 19 nt, Artificial Sequence
  Description of Artificial Sequence: Synthetic oligonucleotide
  Sense strand starting at position 3735 of SEQ ID NO: 1244819
cugaucauuuaaugagaga

SEQ ID NO: 1517177 - RNA, 19 nt, Artificial Sequence
  Description of Artificial Sequence: Synthetic oligonucleotide
  Antisense strand to SEQ ID NO: 1517176
ucucucauuaaaugaucag

SEQ ID NO: 1517178 - RNA, 19 nt, Artificial Sequence
  Description of Artificial Sequence: Synthetic oligonucleotide
  Sense strand starting at position 3776 of SEQ ID NO: 1244819
gggaaacuauccuagaaga

SEQ ID NO: 1517179 - RNA, 19 nt, Artificial Sequence
  Description of Artificial Sequence: Synthetic oligonucleotide
  Antisense strand to SEQ ID NO: 1517178
ucuucuaggauaguuuccc

SEQ ID NO: 1517180 - RNA, 19 nt, Artificial Sequence
  Description of Artificial Sequence: Synthetic oligonucleotide
  Sense strand starting at position 3825 of SEQ ID NO: 1244819
ggauuuguuuggcauggag

SEQ ID NO: 1517181 - RNA, 19 nt, Artificial Sequence
  Description of Artificial Sequence: Synthetic oligonucleotide
  Antisense strand to SEQ ID NO: 1517180
cuccaugccaaacaaaucc

SEQ ID NO: 1517182 - RNA, 19 nt, Artificial Sequence
  Description of Artificial Sequence: Synthetic oligonucleotide
  Sense strand starting at position 3828 of SEQ ID NO: 1244819
uuuguuuggcauggagaaa

SEQ ID NO: 1517183 - RNA, 19 nt, Artificial Sequence
  Description of Artificial Sequence: Synthetic oligonucleotide
  Antisense strand to SEQ ID NO: 1517182
uuucuccaugccaaacaaa

SEQ ID NO: 1517184 - RNA, 19 nt, Artificial Sequence
  Description of Artificial Sequence: Synthetic oligonucleotide
  Sense strand starting at position 3829 of SEQ ID NO: 1244819
uuguuuggcauggagaaag

SEQ ID NO: 1517185 - RNA, 19 nt, Artificial Sequence
  Description of Artificial Sequence: Synthetic oligonucleotide
  Antisense strand to SEQ ID NO: 1517184
cuuucuccaugccaaacaa

SEQ ID NO: 1517186 - RNA, 19 nt, Artificial Sequence
  Description of Artificial Sequence: Synthetic oligonucleotide
  Sense strand starting at position 3907 of SEQ ID NO: 1244819
gaucauguaucaucuggua

SEQ ID NO: 1517187 - RNA, 19 nt, Artificial Sequence
  Description of Artificial Sequence: Synthetic oligonucleotide
  Antisense strand to SEQ ID NO: 1517186
uaccagaugauacaugauc

SEQ ID NO: 1517188 - RNA, 19 nt, Artificial Sequence
  Description of Artificial Sequence: Synthetic oligonucleotide
  Sense strand starting at position 3953 of SEQ ID NO: 1244819
gaauaugacgaaggguuga

SEQ ID NO: 1517189 - RNA, 19 nt, Artificial Sequence
  Description of Artificial Sequence: Synthetic oligonucleotide
  Antisense strand to SEQ ID NO: 1517188
ucaacccuucgucauauuc

SEQ ID NO: 1517190 - RNA, 19 nt, Artificial Sequence
  Description of Artificial Sequence: Synthetic oligonucleotide
  Sense strand starting at position 151 of SEQ ID NO: 1244820
gagacuauaucggauaccu

SEQ ID NO: 1517191 - RNA, 19 nt, Artificial Sequence
  Description of Artificial Sequence: Synthetic oligonucleotide
  Antisense strand to SEQ ID NO: 1517190
agguauccgauauagucuc

SEQ ID NO: 1517192 - RNA, 19 nt, Artificial Sequence
  Description of Artificial Sequence: Synthetic oligonucleotide
  Sense strand starting at position 338 of SEQ ID NO: 1244820
gggcaacauuucugcuaac

SEQ ID NO: 1517193 - RNA, 19 nt, Artificial Sequence
  Description of Artificial Sequence: Synthetic oligonucleotide
  Antisense strand to SEQ ID NO: 1517192
guuagcagaaauguugccc

SEQ ID NO: 1517194 - RNA, 19 nt, Artificial Sequence
  Description of Artificial Sequence: Synthetic oligonucleotide
  Sense strand starting at position 421 of SEQ ID NO: 1244820
aaaguugagcucugaagaa

SEQ ID NO: 1517195 - RNA, 19 nt, Artificial Sequence
  Description of Artificial Sequence: Synthetic oligonucleotide
  Antisense strand to SEQ ID NO: 1517194
uucuucagagcucaacuuu

SEQ ID NO: 1517196 - RNA, 19 nt, Artificial Sequence
  Description of Artificial Sequence: Synthetic oligonucleotide
  Sense strand starting at position 444 of SEQ ID NO: 1244820
gagucuagcaaggguguau

SEQ ID NO: 1517197 - RNA, 19 nt, Artificial Sequence
  Description of Artificial Sequence: Synthetic oligonucleotide
  Antisense strand to SEQ ID NO: 1517196
auacacccuugcuagacuc

SEQ ID NO: 1517198 - RNA, 19 nt, Artificial Sequence
  Description of Artificial Sequence: Synthetic oligonucleotide
  Sense strand starting at position 459 of SEQ ID NO: 1244820
guauuacgaacgcagcaau

SEQ ID NO: 1517199 - RNA, 19 nt, Artificial Sequence
  Description of Artificial Sequence: Synthetic oligonucleotide
  Antisense strand to SEQ ID NO: 1517198
auugcugcguucguaauac

SEQ ID NO: 1517200 - RNA, 19 nt, Artificial Sequence
  Description of Artificial Sequence: Synthetic oligonucleotide
  Sense strand starting at position 596 of SEQ ID NO: 1244820
gcaagcaagcucugaaaga

SEQ ID NO: 1517201 - RNA, 19 nt, Artificial Sequence
  Description of Artificial Sequence: Synthetic oligonucleotide
  Antisense strand to SEQ ID NO: 1517200
ucuuucagagcuugcuugc

SEQ ID NO: 1517202 - RNA, 19 nt, Artificial Sequence
  Description of Artificial Sequence: Synthetic oligonucleotide
  Sense strand starting at position 606 of SEQ ID NO: 1244820
ucugaaagaguauguuacu

SEQ ID NO: 1517203 - RNA, 19 nt, Artificial Sequence
  Description of Artificial Sequence: Synthetic oligonucleotide
  Antisense strand to SEQ ID NO: 1517202
aguaacauacucuuucaga

SEQ ID NO: 1517204 - RNA, 19 nt, Artificial Sequence
  Description of Artificial Sequence: Synthetic oligonucleotide
  Sense strand starting at position 607 of SEQ ID NO: 1244820
cugaaagaguauguuacuu

SEQ ID NO: 1517205 - RNA, 19 nt, Artificial Sequence
  Description of Artificial Sequence: Synthetic oligonucleotide
  Antisense strand to SEQ ID NO: 1517204
aaguaacauacucuuucag

SEQ ID NO: 1517206 - RNA, 19 nt, Artificial Sequence
  Description of Artificial Sequence: Synthetic oligonucleotide
  Sense strand starting at position 612 of SEQ ID NO: 1244820
agaguauguuacuugcgca

SEQ ID NO: 1517207 - RNA, 19 nt, Artificial Sequence
  Description of Artificial Sequence: Synthetic oligonucleotide
  Antisense strand to SEQ ID NO: 1517206
ugcgcaaguaacauacucu

SEQ ID NO: 1517208 - RNA, 19 nt, Artificial Sequence
  Description of Artificial Sequence: Synthetic oligonucleotide
  Sense strand starting at position 640 of SEQ ID NO: 1244820
aagggauagcugugucauu

SEQ ID NO: 1517209 - RNA, 19 nt, Artificial Sequence
  Description of Artificial Sequence: Synthetic oligonucleotide
  Antisense strand to SEQ ID NO: 1517208
aaugacacagcuaucccuu

SEQ ID NO: 1517210 - RNA, 19 nt, Artificial Sequence
  Description of Artificial Sequence: Synthetic oligonucleotide
  Sense strand starting at position 929 of SEQ ID NO: 1244820
cugagcaacaagugugaaa

SEQ ID NO: 1517211 - RNA, 19 nt, Artificial Sequence
  Description of Artificial Sequence: Synthetic oligonucleotide
  Antisense strand to SEQ ID NO: 1517210
uuucacacuuguugcucag

SEQ ID NO: 1517212 - RNA, 19 nt, Artificial Sequence
  Description of Artificial Sequence: Synthetic oligonucleotide
  Sense strand starting at position 931 of SEQ ID NO: 1244820
gagcaacaagugugaaacu

SEQ ID NO: 1517213 - RNA, 19 nt, Artificial Sequence
  Description of Artificial Sequence: Synthetic oligonucleotide
  Antisense strand to SEQ ID NO: 1517212
aguuucacacuuguugcuc

SEQ ID NO: 1517214 - RNA, 19 nt, Artificial Sequence
  Description of Artificial Sequence: Synthetic oligonucleotide
  Sense strand starting at position 1252 of SEQ ID NO: 1244820
gcagaaguugcaguguguu

SEQ ID NO: 1517215 - RNA, 19 nt, Artificial Sequence
  Description of Artificial Sequence: Synthetic oligonucleotide
  Antisense strand to SEQ ID NO: 1517214
aacacacugcaacuucugc

SEQ ID NO: 1517216 - RNA, 19 nt, Artificial Sequence
  Description of Artificial Sequence: Synthetic oligonucleotide
  Sense strand starting at position 1607 of SEQ ID NO: 1244820
aauauugcagucugcagaa

SEQ ID NO: 1517217 - RNA, 19 nt, Artificial Sequence
  Description of Artificial Sequence: Synthetic oligonucleotide
  Antisense strand to SEQ ID NO: 1517216
uucugcagacugcaauauu

SEQ ID NO: 1517218 - RNA, 19 nt, Artificial Sequence
  Description of Artificial Sequence: Synthetic oligonucleotide
  Sense strand starting at position 1663 of SEQ ID NO: 1244820
acaccaacuuccguggaaa

SEQ ID NO: 1517219 - RNA, 19 nt, Artificial Sequence
  Description of Artificial Sequence: Synthetic oligonucleotide
  Antisense strand to SEQ ID NO: 1517218
uuuccacggaaguuggugu

SEQ ID NO: 1517220 - RNA, 19 nt, Artificial Sequence
  Description of Artificial Sequence: Synthetic oligonucleotide
  Sense strand starting at position 1719 of SEQ ID NO: 1244820
gaaucaguuaccgggagaa

SEQ ID NO: 1517221 - RNA, 19 nt, Artificial Sequence
  Description of Artificial Sequence: Synthetic oligonucleotide
  Antisense strand to SEQ ID NO: 1517220
uucucccgguaacugauuc

SEQ ID NO: 1517222 - RNA, 19 nt, Artificial Sequence
  Description of Artificial Sequence: Synthetic oligonucleotide
  Sense strand starting at position 2813 of SEQ ID NO: 1244820
ugaagagggugcguuucaa

SEQ ID NO: 1517223 - RNA, 19 nt, Artificial Sequence
  Description of Artificial Sequence: Synthetic oligonucleotide
  Antisense strand to SEQ ID NO: 1517222
uugaaacgcacccucuuca

SEQ ID NO: 1517224 - RNA, 19 nt, Artificial Sequence
  Description of Artificial Sequence: Synthetic oligonucleotide
  Sense strand starting at position 2848 of SEQ ID NO: 1244820
cgucgaaauugucuucuuu

SEQ ID NO: 1517225 - RNA, 19 nt, Artificial Sequence
  Description of Artificial Sequence: Synthetic oligonucleotide
  Antisense strand to SEQ ID NO: 1517224
aaagaagacaauuucgacg

SEQ ID NO: 1517226 - RNA, 19 nt, Artificial Sequence
  Description of Artificial Sequence: Synthetic oligonucleotide
  Sense strand starting at position 2852 of SEQ ID NO: 1244820
gaaauugucuucuuuggaa

SEQ ID NO: 1517227 - RNA, 19 nt, Artificial Sequence
  Description of Artificial Sequence: Synthetic oligonucleotide
  Antisense strand to SEQ ID NO: 1517226
uuccaaagaagacaauuuc

SEQ ID NO: 1517228 - RNA, 19 nt, Artificial Sequence
  Description of Artificial Sequence: Synthetic oligonucleotide
  Sense strand starting at position 2854 of SEQ ID NO: 1244820
aauugucuucuuuggaaag

SEQ ID NO: 1517229 - RNA, 19 nt, Artificial Sequence
  Description of Artificial Sequence: Synthetic oligonucleotide
  Antisense strand to SEQ ID NO: 1517228
cuuuccaaagaagacaauu

SEQ ID NO: 1517230 - RNA, 19 nt, Artificial Sequence
  Description of Artificial Sequence: Synthetic oligonucleotide
  Sense strand starting at position 2856 of SEQ ID NO: 1244820
uugucuucuuuggaaagaa

SEQ ID NO: 1517231 - RNA, 19 nt, Artificial Sequence
  Description of Artificial Sequence: Synthetic oligonucleotide
  Antisense strand to SEQ ID NO: 1517230
uucuuuccaaagaagacaa

SEQ ID NO: 1517232 - RNA, 19 nt, Artificial Sequence
  Description of Artificial Sequence: Synthetic oligonucleotide
  Sense strand starting at position 2902 of SEQ ID NO: 1244820
caaauugaggcgcaaugau

SEQ ID NO: 1517233 - RNA, 19 nt, Artificial Sequence
  Description of Artificial Sequence: Synthetic oligonucleotide
  Antisense strand to SEQ ID NO: 1517232
aucauugcgccucaauuug

SEQ ID NO: 1517234 - RNA, 19 nt, Artificial Sequence
  Description of Artificial Sequence: Synthetic oligonucleotide
  Sense strand starting at position 2950 of SEQ ID NO: 1244820
aaucuugagggcuagguau

SEQ ID NO: 1517235 - RNA, 19 nt, Artificial Sequence
  Description of Artificial Sequence: Synthetic oligonucleotide
  Antisense strand to SEQ ID NO: 1517234
auaccuagcccucaagauu

SEQ ID NO: 1517236 - RNA, 19 nt, Artificial Sequence
  Description of Artificial Sequence: Synthetic oligonucleotide
  Sense strand starting at position 2990 of SEQ ID NO: 1244820
gcuguuaaugaugauucua

SEQ ID NO: 1517237 - RNA, 19 nt, Artificial Sequence
  Description of Artificial Sequence: Synthetic oligonucleotide
  Antisense strand to SEQ ID NO: 1517236
uagaaucaucauuaacagc

SEQ ID NO: 1517238 - RNA, 19 nt, Artificial Sequence
  Description of Artificial Sequence: Synthetic oligonucleotide
  Sense strand starting at position 3011 of SEQ ID NO: 1244820
agcuaccauuugucgagua

SEQ ID NO: 1517239 - RNA, 19 nt, Artificial Sequence
  Description of Artificial Sequence: Synthetic oligonucleotide
  Antisense strand to SEQ ID NO: 1517238
uacucgacaaaugguagcu

SEQ ID NO: 1517240 - RNA, 19 nt, Artificial Sequence
  Description of Artificial Sequence: Synthetic oligonucleotide
  Sense strand starting at position 3027 of SEQ ID NO: 1244820
guacuuauugcaugccaga

SEQ ID NO: 1517241 - RNA, 19 nt, Artificial Sequence
  Description of Artificial Sequence: Synthetic oligonucleotide
  Antisense strand to SEQ ID NO: 1517240
ucuggcaugcaauaaguac

SEQ ID NO: 1517242 - RNA, 19 nt, Artificial Sequence
  Description of Artificial Sequence: Synthetic oligonucleotide
  Sense strand starting at position 3100 of SEQ ID NO: 1244820
accuguuguuaucccuauu

SEQ ID NO: 1517243 - RNA, 19 nt, Artificial Sequence
  Description of Artificial Sequence: Synthetic oligonucleotide
  Antisense strand to SEQ ID NO: 1517242
aauagggauaacaacaggu

SEQ ID NO: 1517244 - RNA, 19 nt, Artificial Sequence
  Description of Artificial Sequence: Synthetic oligonucleotide
  Sense strand starting at position 3236 of SEQ ID NO: 1244820
uuagaagucugccuuugau

SEQ ID NO: 1517245 - RNA, 19 nt, Artificial Sequence
  Description of Artificial Sequence: Synthetic oligonucleotide
  Antisense strand to SEQ ID NO: 1517244
aucaaaggcagacuucuaa

SEQ ID NO: 1517246 - RNA, 19 nt, Artificial Sequence
  Description of Artificial Sequence: Synthetic oligonucleotide
  Sense strand starting at position 3239 of SEQ ID NO: 1244820
gaagucugccuuugauaaa

SEQ ID NO: 1517247 - RNA, 19 nt, Artificial Sequence
  Description of Artificial Sequence: Synthetic oligonucleotide
  Antisense strand to SEQ ID NO: 1517246
uuuaucaaaggcagacuuc

SEQ ID NO: 1517248 - RNA, 19 nt, Artificial Sequence
  Description of Artificial Sequence: Synthetic oligonucleotide
  Sense strand starting at position 3242 of SEQ ID NO: 1244820
gucugccuuugauaaauuu

SEQ ID NO: 1517249 - RNA, 19 nt, Artificial Sequence
  Description of Artificial Sequence: Synthetic oligonucleotide
  Antisense strand to SEQ ID NO: 1517248
aaauuuaucaaaggcagac

SEQ ID NO: 1517250 - RNA, 19 nt, Artificial Sequence
  Description of Artificial Sequence: Synthetic oligonucleotide
  Sense strand starting at position 3287 of SEQ ID NO: 1244820
acacuuuaugccuguguga

SEQ ID NO: 1517251 - RNA, 19 nt, Artificial Sequence
  Description of Artificial Sequence: Synthetic oligonucleotide
  Antisense strand to SEQ ID NO: 1517250
ucacacaggcauaaagugu

SEQ ID NO: 1517252 - RNA, 19 nt, Artificial Sequence
  Description of Artificial Sequence: Synthetic oligonucleotide
  Sense strand starting at position 3289 of SEQ ID NO: 1244820
acuuuaugccugugugaac

SEQ ID NO: 1517253 - RNA, 19 nt, Artificial Sequence
  Description of Artificial Sequence: Synthetic oligonucleotide
  Antisense strand to SEQ ID NO: 1517252
guucacacaggcauaaagu

SEQ ID NO: 1517254 - RNA, 19 nt, Artificial Sequence
  Description of Artificial Sequence: Synthetic oligonucleotide
  Sense strand starting at position 3322 of SEQ ID NO: 1244820
uugguauaugcauaauaca

SEQ ID NO: 1517255 - RNA, 19 nt, Artificial Sequence
  Description of Artificial Sequence: Synthetic oligonucleotide
  Antisense strand to SEQ ID NO: 1517254
uguauuaugcauauaccaa

SEQ ID NO: 1517256 - RNA, 19 nt, Artificial Sequence
  Description of Artificial Sequence: Synthetic oligonucleotide
  Sense strand starting at position 3816 of SEQ ID NO: 1244820
auguuuagugaguaggcuu

SEQ ID NO: 1517257 - RNA, 19 nt, Artificial Sequence
  Description of Artificial Sequence: Synthetic oligonucleotide
  Antisense strand to SEQ ID NO: 1517256
aagccuacucacuaaacau

SEQ ID NO: 1517258 - RNA, 19 nt, Artificial Sequence
  Description of Artificial Sequence: Synthetic oligonucleotide
  Sense strand starting at position 3880 of SEQ ID NO: 1244820
ccucauggagcucauauua

SEQ ID NO: 1517259 - RNA, 19 nt, Artificial Sequence
  Description of Artificial Sequence: Synthetic oligonucleotide
  Antisense strand to SEQ ID NO: 1517258
uaauaugagcuccaugagg

SEQ ID NO: 1517260 - RNA, 19 nt, Artificial Sequence
  Description of Artificial Sequence: Synthetic oligonucleotide
  Sense strand starting at position 3890 of SEQ ID NO: 1244820
cucauauuauaguagggaa

SEQ ID NO: 1517261 - RNA, 19 nt, Artificial Sequence
  Description of Artificial Sequence: Synthetic oligonucleotide
  Antisense strand to SEQ ID NO: 1517260
uucccuacuauaauaugag

SEQ ID NO: 1517262 - RNA, 19 nt, Artificial Sequence
  Description of Artificial Sequence: Synthetic oligonucleotide
  Sense strand starting at position 3903 of SEQ ID NO: 1244820
agggaagacugucaauaag

SEQ ID NO: 1517263 - RNA, 19 nt, Artificial Sequence
  Description of Artificial Sequence: Synthetic oligonucleotide
  Antisense strand to SEQ ID NO: 1517262
cuuauugacagucuucccu

SEQ ID NO: 1517264 - RNA, 19 nt, Artificial Sequence
  Description of Artificial Sequence: Synthetic oligonucleotide
  Sense strand starting at position 3942 of SEQ ID NO: 1244820
gauagauaaugcccaguaa

SEQ ID NO: 1517265 - RNA, 19 nt, Artificial Sequence
  Description of Artificial Sequence: Synthetic oligonucleotide
  Antisense strand to SEQ ID NO: 1517264
uuacugggcauuaucuauc

SEQ ID NO: 1517266 - RNA, 19 nt, Artificial Sequence
  Description of Artificial Sequence: Synthetic oligonucleotide
  Sense strand starting at position 3943 of SEQ ID NO: 1244820
auagauaaugcccaguaau

SEQ ID NO: 1517267 - RNA, 19 nt, Artificial Sequence
  Description of Artificial Sequence: Synthetic oligonucleotide
  Antisense strand to SEQ ID NO: 1517266
auuacugggcauuaucuau

SEQ ID NO: 1517268 - RNA, 19 nt, Artificial Sequence
  Description of Artificial Sequence: Synthetic oligonucleotide
  Sense strand starting at position 3946 of SEQ ID NO: 1244820
gauaaugcccaguaaugug

SEQ ID NO: 1517269 - RNA, 19 nt, Artificial Sequence
  Description of Artificial Sequence: Synthetic oligonucleotide
  Antisense strand to SEQ ID NO: 1517268
cacauuacugggcauuauc

SEQ ID NO: 1517270 - RNA, 19 nt, Artificial Sequence
  Description of Artificial Sequence: Synthetic oligonucleotide
  Sense strand starting at position 5 of SEQ ID NO: 1244821
agagucuagcuuuaauuaa

SEQ ID NO: 1517271 - RNA, 19 nt, Artificial Sequence
  Description of Artificial Sequence: Synthetic oligonucleotide
  Antisense strand to SEQ ID NO: 1517270
uuaauuaaagcuagacucu

SEQ ID NO: 1517272 - RNA, 19 nt, Artificial Sequence
  Description of Artificial Sequence: Synthetic oligonucleotide
  Sense strand starting at position 172 of SEQ ID NO: 1244821
agcuuauaugcuuauauga

SEQ ID NO: 1517273 - RNA, 19 nt, Artificial Sequence
  Description of Artificial Sequence: Synthetic oligonucleotide
  Antisense strand to SEQ ID NO: 1517272
ucauauaagcauauaagcu

SEQ ID NO: 1517274 - RNA, 19 nt, Artificial Sequence
  Description of Artificial Sequence: Synthetic oligonucleotide
  Sense strand starting at position 474 of SEQ ID NO: 1244821
accaaugucuacuuuggaa

SEQ ID NO: 1517275 - RNA, 19 nt, Artificial Sequence
  Description of Artificial Sequence: Synthetic oligonucleotide
  Antisense strand to SEQ ID NO: 1517274
uuccaaaguagacauuggu

SEQ ID NO: 1517276 - RNA, 19 nt, Artificial Sequence
  Description of Artificial Sequence: Synthetic oligonucleotide
  Sense strand starting at position 499 of SEQ ID NO: 1244821
auuauuucuuguuugagca

SEQ ID NO: 1517277 - RNA, 19 nt, Artificial Sequence
  Description of Artificial Sequence: Synthetic oligonucleotide
  Antisense strand to SEQ ID NO: 1517276
ugcucaaacaagaaauaau

SEQ ID NO: 1517278 - RNA, 19 nt, Artificial Sequence
  Description of Artificial Sequence: Synthetic oligonucleotide
  Sense strand starting at position 500 of SEQ ID NO: 1244821
uuauuucuuguuugagcaa

SEQ ID NO: 1517279 - RNA, 19 nt, Artificial Sequence
  Description of Artificial Sequence: Synthetic oligonucleotide
  Antisense strand to SEQ ID NO: 1517278
uugcucaaacaagaaauaa

SEQ ID NO: 1517280 - RNA, 19 nt, Artificial Sequence
  Description of Artificial Sequence: Synthetic oligonucleotide
  Sense strand starting at position 507 of SEQ ID NO: 1244821
uuguuugagcaaggauuaa

SEQ ID NO: 1517281 - RNA, 19 nt, Artificial Sequence
  Description of Artificial Sequence: Synthetic oligonucleotide
  Antisense strand to SEQ ID NO: 1517280
uuaauccuugcucaaacaa

SEQ ID NO: 1517282 - RNA, 19 nt, Artificial Sequence
  Description of Artificial Sequence: Synthetic oligonucleotide
  Sense strand starting at position 533 of SEQ ID NO: 1244821
cugaaagaagugcaguuua

SEQ ID NO: 1517283 - RNA, 19 nt, Artificial Sequence
  Description of Artificial Sequence: Synthetic oligonucleotide
  Antisense strand to SEQ ID NO: 1517282
uaaacugcacuucuuucag

SEQ ID NO: 1517284 - RNA, 19 nt, Artificial Sequence
  Description of Artificial Sequence: Synthetic oligonucleotide
  Sense strand starting at position 768 of SEQ ID NO: 1244821
cagguuuggccuuacucaa

SEQ ID NO: 1517285 - RNA, 19 nt, Artificial Sequence
  Description of Artificial Sequence: Synthetic oligonucleotide
  Antisense strand to SEQ ID NO: 1517284
uugaguaaggccaaaccug

SEQ ID NO: 1517286 - RNA, 19 nt, Artificial Sequence
  Description of Artificial Sequence: Synthetic oligonucleotide
  Sense strand starting at position 898 of SEQ ID NO: 1244821
gauagacaccugggucuuu

SEQ ID NO: 1517287 - RNA, 19 nt, Artificial Sequence
  Description of Artificial Sequence: Synthetic oligonucleotide
  Antisense strand to SEQ ID NO: 1517286
aaagacccaggugucuauc

SEQ ID NO: 1517288 - RNA, 19 nt, Artificial Sequence
  Description of Artificial Sequence: Synthetic oligonucleotide
  Sense strand starting at position 979 of SEQ ID NO: 1244821
agaggacauccauguucua

SEQ ID NO: 1517289 - RNA, 19 nt, Artificial Sequence
  Description of Artificial Sequence: Synthetic oligonucleotide
  Antisense strand to SEQ ID NO: 1517288
uagaacauggauguccucu

SEQ ID NO: 1517290 - RNA, 19 nt, Artificial Sequence
  Description of Artificial Sequence: Synthetic oligonucleotide
  Sense strand starting at position 1009 of SEQ ID NO: 1244821
cugguuuagcaggauccaa

SEQ ID NO: 1517291 - RNA, 19 nt, Artificial Sequence
  Description of Artificial Sequence: Synthetic oligonucleotide
  Antisense strand to SEQ ID NO: 1517290
uuggauccugcuaaaccag

SEQ ID NO: 1517292 - RNA, 19 nt, Artificial Sequence
  Description of Artificial Sequence: Synthetic oligonucleotide
  Sense strand starting at position 1028 of SEQ ID NO: 1244821
acugguuguccugaagaga

SEQ ID NO: 1517293 - RNA, 19 nt, Artificial Sequence
  Description of Artificial Sequence: Synthetic oligonucleotide
  Antisense strand to SEQ ID NO: 1517292
ucucuucaggacaaccagu

SEQ ID NO: 1517294 - RNA, 19 nt, Artificial Sequence
  Description of Artificial Sequence: Synthetic oligonucleotide
  Sense strand starting at position 1031 of SEQ ID NO: 1244821
gguuguccugaagagacua

SEQ ID NO: 1517295 - RNA, 19 nt, Artificial Sequence
  Description of Artificial Sequence: Synthetic oligonucleotide
  Antisense strand to SEQ ID NO: 1517294
uagucucuucaggacaacc

SEQ ID NO: 1517296 - RNA, 19 nt, Artificial Sequence
  Description of Artificial Sequence: Synthetic oligonucleotide
  Sense strand starting at position 1166 of SEQ ID NO: 1244821
ccuacaggagcuuaucaau

SEQ ID NO: 1517297 - RNA, 19 nt, Artificial Sequence
  Description of Artificial Sequence: Synthetic oligonucleotide
  Antisense strand to SEQ ID NO: 1517296
auugauaagcuccuguagg

SEQ ID NO: 1517298 - RNA, 19 nt, Artificial Sequence
  Description of Artificial Sequence: Synthetic oligonucleotide
  Sense strand starting at position 1292 of SEQ ID NO: 1244821
aacucaaauccaggugguu

SEQ ID NO: 1517299 - RNA, 19 nt, Artificial Sequence
  Description of Artificial Sequence: Synthetic oligonucleotide
  Antisense strand to SEQ ID NO: 1517298
aaccaccuggauuugaguu

SEQ ID NO: 1517300 - RNA, 19 nt, Artificial Sequence
  Description of Artificial Sequence: Synthetic oligonucleotide
  Sense strand starting at position 1334 of SEQ ID NO: 1244821
uacgauuucguguaaggca

SEQ ID NO: 1517301 - RNA, 19 nt, Artificial Sequence
  Description of Artificial Sequence: Synthetic oligonucleotide
  Antisense strand to SEQ ID NO: 1517300
ugccuuacacgaaaucgua

SEQ ID NO: 1517302 - RNA, 19 nt, Artificial Sequence
  Description of Artificial Sequence: Synthetic oligonucleotide
  Sense strand starting at position 1391 of SEQ ID NO: 1244821
accugaugaaugggugagu

SEQ ID NO: 1517303 - RNA, 19 nt, Artificial Sequence
  Description of Artificial Sequence: Synthetic oligonucleotide
  Antisense strand to SEQ ID NO: 1517302
acucacccauucaucaggu

SEQ ID NO: 1517304 - RNA, 19 nt, Artificial Sequence
  Description of Artificial Sequence: Synthetic oligonucleotide
  Sense strand starting at position 1472 of SEQ ID NO: 1244821
gcccgaggccucgcugaaa

SEQ ID NO: 1517305 - RNA, 19 nt, Artificial Sequence
  Description of Artificial Sequence: Synthetic oligonucleotide
  Antisense strand to SEQ ID NO: 1517304
uuucagcgaggccucgggc

SEQ ID NO: 1517306 - RNA, 19 nt, Artificial Sequence
  Description of Artificial Sequence: Synthetic oligonucleotide
  Sense strand starting at position 2213 of SEQ ID NO: 1244821
ugcuccgucuuauuuacaa

SEQ ID NO: 1517307 - RNA, 19 nt, Artificial Sequence
  Description of Artificial Sequence: Synthetic oligonucleotide
  Antisense strand to SEQ ID NO: 1517306
uuguaaauaagacggagca

SEQ ID NO: 1517308 - RNA, 19 nt, Artificial Sequence
  Description of Artificial Sequence: Synthetic oligonucleotide
  Sense strand starting at position 2529 of SEQ ID NO: 1244821
aacgaaaucguacacgaau

SEQ ID NO: 1517309 - RNA, 19 nt, Artificial Sequence
  Description of Artificial Sequence: Synthetic oligonucleotide
  Antisense strand to SEQ ID NO: 1517308
auucguguacgauuucguu

SEQ ID NO: 1517310 - RNA, 19 nt, Artificial Sequence
  Description of Artificial Sequence: Synthetic oligonucleotide
  Sense strand starting at position 2543 of SEQ ID NO: 1244821
cgaaucugacccugagaau

SEQ ID NO: 1517311 - RNA, 19 nt, Artificial Sequence
  Description of Artificial Sequence: Synthetic oligonucleotide
  Antisense strand to SEQ ID NO: 1517310
auucucagggucagauucg

SEQ ID NO: 1517312 - RNA, 19 nt, Artificial Sequence
  Description of Artificial Sequence: Synthetic oligonucleotide
  Sense strand starting at position 2682 of SEQ ID NO: 1244821
ccauguugcagaugagaag

SEQ ID NO: 1517313 - RNA, 19 nt, Artificial Sequence
  Description of Artificial Sequence: Synthetic oligonucleotide
  Antisense strand to SEQ ID NO: 1517312
cuucucaucugcaacaugg

SEQ ID NO: 1517314 - RNA, 19 nt, Artificial Sequence
  Description of Artificial Sequence: Synthetic oligonucleotide
  Sense strand starting at position 2708 of SEQ ID NO: 1244821
ucauuugaccuaggucgua

SEQ ID NO: 1517315 - RNA, 19 nt, Artificial Sequence
  Description of Artificial Sequence: Synthetic oligonucleotide
  Antisense strand to SEQ ID NO: 1517314
uacgaccuaggucaaauga

SEQ ID NO: 1517316 - RNA, 19 nt, Artificial Sequence
  Description of Artificial Sequence: Synthetic oligonucleotide
  Sense strand starting at position 2760 of SEQ ID NO: 1244821
cugguaacccaacgauaua

SEQ ID NO: 1517317 - RNA, 19 nt, Artificial Sequence
  Description of Artificial Sequence: Synthetic oligonucleotide
  Antisense strand to SEQ ID NO: 1517316
uauaucguuggguuaccag

SEQ ID NO: 1517318 - RNA, 19 nt, Artificial Sequence
  Description of Artificial Sequence: Synthetic oligonucleotide
  Sense strand starting at position 2772 of SEQ ID NO: 1244821
cgauauauugcauaugagu

SEQ ID NO: 1517319 - RNA, 19 nt, Artificial Sequence
  Description of Artificial Sequence: Synthetic oligonucleotide
  Antisense strand to SEQ ID NO: 1517318
acucauaugcaauauaucg

SEQ ID NO: 1517320 - RNA, 19 nt, Artificial Sequence
  Description of Artificial Sequence: Synthetic oligonucleotide
  Sense strand starting at position 2780 of SEQ ID NO: 1244821
ugcauaugaguuuaaccaa

SEQ ID NO: 1517321 - RNA, 19 nt, Artificial Sequence
  Description of Artificial Sequence: Synthetic oligonucleotide
  Antisense strand to SEQ ID NO: 1517320
uugguuaaacucauaugca

SEQ ID NO: 1517322 - RNA, 19 nt, Artificial Sequence
  Description of Artificial Sequence: Synthetic oligonucleotide
  Sense strand starting at position 2903 of SEQ ID NO: 1244821
caugguaucugagccaaac

SEQ ID NO: 1517323 - RNA, 19 nt, Artificial Sequence
  Description of Artificial Sequence: Synthetic oligonucleotide
  Antisense strand to SEQ ID NO: 1517322
guuuggcucagauaccaug

SEQ ID NO: 1517324 - RNA, 19 nt, Artificial Sequence
  Description of Artificial Sequence: Synthetic oligonucleotide
  Sense strand starting at position 2946 of SEQ ID NO: 1244821
cgaguaaagaagugagcaa

SEQ ID NO: 1517325 - RNA, 19 nt, Artificial Sequence
  Description of Artificial Sequence: Synthetic oligonucleotide
  Antisense strand to SEQ ID NO: 1517324
uugcucacuucuuuacucg

SEQ ID NO: 1517326 - RNA, 19 nt, Artificial Sequence
  Description of Artificial Sequence: Synthetic oligonucleotide
  Sense strand starting at position 2964 of SEQ ID NO: 1244821
aaguacuuugcagacuagu

SEQ ID NO: 1517327 - RNA, 19 nt, Artificial Sequence
  Description of Artificial Sequence: Synthetic oligonucleotide
  Antisense strand to SEQ ID NO: 1517326
acuagucugcaaaguacuu

SEQ ID NO: 1517328 - RNA, 19 nt, Artificial Sequence
  Description of Artificial Sequence: Synthetic oligonucleotide
  Sense strand starting at position 2974 of SEQ ID NO: 1244821
cagacuaguuguguaacaa

SEQ ID NO: 1517329 - RNA, 19 nt, Artificial Sequence
  Description of Artificial Sequence: Synthetic oligonucleotide
  Antisense strand to SEQ ID NO: 1517328
uuguuacacaacuagucug

SEQ ID NO: 1517330 - RNA, 19 nt, Artificial Sequence
  Description of Artificial Sequence: Synthetic oligonucleotide
  Sense strand starting at position 2975 of SEQ ID NO: 1244821
agacuaguuguguaacaag

SEQ ID NO: 1517331 - RNA, 19 nt, Artificial Sequence
  Description of Artificial Sequence: Synthetic oligonucleotide
  Antisense strand to SEQ ID NO: 1517330
cuuguuacacaacuagucu

SEQ ID NO: 1517332 - RNA, 19 nt, Artificial Sequence
  Description of Artificial Sequence: Synthetic oligonucleotide
  Sense strand starting at position 3061 of SEQ ID NO: 1244821
ugucaaaugcauuagaguu

SEQ ID NO: 1517333 - RNA, 19 nt, Artificial Sequence
  Description of Artificial Sequence: Synthetic oligonucleotide
  Antisense strand to SEQ ID NO: 1517332
aacucuaaugcauuugaca

SEQ ID NO: 1517334 - RNA, 19 nt, Artificial Sequence
  Description of Artificial Sequence: Synthetic oligonucleotide
  Sense strand starting at position 3081 of SEQ ID NO: 1244821
ccacuuuaucuuggaggaa

SEQ ID NO: 1517335 - RNA, 19 nt, Artificial Sequence
  Description of Artificial Sequence: Synthetic oligonucleotide
  Antisense strand to SEQ ID NO: 1517334
uuccuccaagauaaagugg

SEQ ID NO: 1517336 - RNA, 19 nt, Artificial Sequence
  Description of Artificial Sequence: Synthetic oligonucleotide
  Sense strand starting at position 3235 of SEQ ID NO: 1244821
uuuggugagagaugacagu

SEQ ID NO: 1517337 - RNA, 19 nt, Artificial Sequence
  Description of Artificial Sequence: Synthetic oligonucleotide
  Antisense strand to SEQ ID NO: 1517336
acugucaucucucaccaaa

SEQ ID NO: 1517338 - RNA, 19 nt, Artificial Sequence
  Description of Artificial Sequence: Synthetic oligonucleotide
  Sense strand starting at position 3428 of SEQ ID NO: 1244821
ugucauugacugugauagg

SEQ ID NO: 1517339 - RNA, 19 nt, Artificial Sequence
  Description of Artificial Sequence: Synthetic oligonucleotide
  Antisense strand to SEQ ID NO: 1517338
ccuaucacagucaaugaca

SEQ ID NO: 1517340 - RNA, 19 nt, Artificial Sequence
  Description of Artificial Sequence: Synthetic oligonucleotide
  Sense strand starting at position 3540 of SEQ ID NO: 1244821
ccauuauaccagcagugau

SEQ ID NO: 1517341 - RNA, 19 nt, Artificial Sequence
  Description of Artificial Sequence: Synthetic oligonucleotide
  Antisense strand to SEQ ID NO: 1517340
aucacugcugguauaaugg

SEQ ID NO: 1517342 - RNA, 19 nt, Artificial Sequence
  Description of Artificial Sequence: Synthetic oligonucleotide
  Sense strand starting at position 3589 of SEQ ID NO: 1244821
cagaacgcucuagauaagu

SEQ ID NO: 1517343 - RNA, 19 nt, Artificial Sequence
  Description of Artificial Sequence: Synthetic oligonucleotide
  Antisense strand to SEQ ID NO: 1517342
acuuaucuagagcguucug

SEQ ID NO: 1517344 - RNA, 19 nt, Artificial Sequence
  Description of Artificial Sequence: Synthetic oligonucleotide
  Sense strand starting at position 3700 of SEQ ID NO: 1244821
agaagaugggcauguccaa

SEQ ID NO: 1517345 - RNA, 19 nt, Artificial Sequence
  Description of Artificial Sequence: Synthetic oligonucleotide
  Antisense strand to SEQ ID NO: 1517344
uuggacaugcccaucuucu

SEQ ID NO: 1517346 - RNA, 19 nt, Artificial Sequence
  Description of Artificial Sequence: Synthetic oligonucleotide
  Sense strand starting at position 3921 of SEQ ID NO: 1244821
ggagguuuacuaugugaca

SEQ ID NO: 1517347 - RNA, 19 nt, Artificial Sequence
  Description of Artificial Sequence: Synthetic oligonucleotide
  Antisense strand to SEQ ID NO: 1517346
ugucacauaguaaaccucc

SEQ ID NO: 1517348 - RNA, 19 nt, Artificial Sequence
  Description of Artificial Sequence: Synthetic oligonucleotide
  Sense strand starting at position 3922 of SEQ ID NO: 1244821
gagguuuacuaugugacag

SEQ ID NO: 1517349 - RNA, 19 nt, Artificial Sequence
  Description of Artificial Sequence: Synthetic oligonucleotide
  Antisense strand to SEQ ID NO: 1517348
cugucacauaguaaaccuc

SEQ ID NO: 1517350 - RNA, 19 nt, Artificial Sequence
  Description of Artificial Sequence: Synthetic oligonucleotide
  Sense strand starting at position 64 of SEQ ID NO: 1244822
ugaaauguuugagugccau

SEQ ID NO: 1517351 - RNA, 19 nt, Artificial Sequence
  Description of Artificial Sequence: Synthetic oligonucleotide
  Antisense strand to SEQ ID NO: 1517350
auggcacucaaacauuuca

SEQ ID NO: 1517352 - RNA, 19 nt, Artificial Sequence
  Description of Artificial Sequence: Synthetic oligonucleotide
  Sense strand starting at position 273 of SEQ ID NO: 1244822
agaagcaugacguaguaaa

SEQ ID NO: 1517353 - RNA, 19 nt, Artificial Sequence
  Description of Artificial Sequence: Synthetic oligonucleotide
  Antisense strand to SEQ ID NO: 1517352
uuuacuacgucaugcuucu

SEQ ID NO: 1517354 - RNA, 19 nt, Artificial Sequence
  Description of Artificial Sequence: Synthetic oligonucleotide
  Sense strand starting at position 328 of SEQ ID NO: 1244822
acauauuugucucugcuca

SEQ ID NO: 1517355 - RNA, 19 nt, Artificial Sequence
  Description of Artificial Sequence: Synthetic oligonucleotide
  Antisense strand to SEQ ID NO: 1517354
ugagcagagacaaauaugu

SEQ ID NO: 1517356 - RNA, 19 nt, Artificial Sequence
  Description of Artificial Sequence: Synthetic oligonucleotide
  Sense strand starting at position 330 of SEQ ID NO: 1244822
auauuugucucugcucauu

SEQ ID NO: 1517357 - RNA, 19 nt, Artificial Sequence
  Description of Artificial Sequence: Synthetic oligonucleotide
  Antisense strand to SEQ ID NO: 1517356
aaugagcagagacaaauau

SEQ ID NO: 1517358 - RNA, 19 nt, Artificial Sequence
  Description of Artificial Sequence: Synthetic oligonucleotide
  Sense strand starting at position 405 of SEQ ID NO: 1244822
auaugcuaacgagacgaau

SEQ ID NO: 1517359 - RNA, 19 nt, Artificial Sequence
  Description of Artificial Sequence: Synthetic oligonucleotide
  Antisense strand to SEQ ID NO: 1517358
auucgucucguuagcauau

SEQ ID NO: 1517360 - RNA, 19 nt, Artificial Sequence
  Description of Artificial Sequence: Synthetic oligonucleotide
  Sense strand starting at position 503 of SEQ ID NO: 1244822
ccgucugauuucuagagag

SEQ ID NO: 1517361 - RNA, 19 nt, Artificial Sequence
  Description of Artificial Sequence: Synthetic oligonucleotide
  Antisense strand to SEQ ID NO: 1517360
cucucuagaaaucagacgg

SEQ ID NO: 1517362 - RNA, 19 nt, Artificial Sequence
  Description of Artificial Sequence: Synthetic oligonucleotide
  Sense strand starting at position 569 of SEQ ID NO: 1244822
aucauaugugcauaaugga

SEQ ID NO: 1517363 - RNA, 19 nt, Artificial Sequence
  Description of Artificial Sequence: Synthetic oligonucleotide
  Antisense strand to SEQ ID NO: 1517362
uccauuaugcacauaugau

SEQ ID NO: 1517364 - RNA, 19 nt, Artificial Sequence
  Description of Artificial Sequence: Synthetic oligonucleotide
  Sense strand starting at position 620 of SEQ ID NO: 1244822
augggauucuggguugaug

SEQ ID NO: 1517365 - RNA, 19 nt, Artificial Sequence
  Description of Artificial Sequence: Synthetic oligonucleotide
  Antisense strand to SEQ ID NO: 1517364
caucaacccagaaucccau

SEQ ID NO: 1517366 - RNA, 19 nt, Artificial Sequence
  Description of Artificial Sequence: Synthetic oligonucleotide
  Sense strand starting at position 622 of SEQ ID NO: 1244822
gggauucuggguugaugag

SEQ ID NO: 1517367 - RNA, 19 nt, Artificial Sequence
  Description of Artificial Sequence: Synthetic oligonucleotide
  Antisense strand to SEQ ID NO: 1517366
cucaucaacccagaauccc

SEQ ID NO: 1517368 - RNA, 19 nt, Artificial Sequence
  Description of Artificial Sequence: Synthetic oligonucleotide
  Sense strand starting at position 740 of SEQ ID NO: 1244822
guuccugaacuguauucuu

SEQ ID NO: 1517369 - RNA, 19 nt, Artificial Sequence
  Description of Artificial Sequence: Synthetic oligonucleotide
  Antisense strand to SEQ ID NO: 1517368
aagaauacaguucaggaac

SEQ ID NO: 1517370 - RNA, 19 nt, Artificial Sequence
  Description of Artificial Sequence: Synthetic oligonucleotide
  Sense strand starting at position 794 of SEQ ID NO: 1244822
augaguugugugcaccauu

SEQ ID NO: 1517371 - RNA, 19 nt, Artificial Sequence
  Description of Artificial Sequence: Synthetic oligonucleotide
  Antisense strand to SEQ ID NO: 1517370
aauggugcacacaacucau

SEQ ID NO: 1517372 - RNA, 19 nt, Artificial Sequence
  Description of Artificial Sequence: Synthetic oligonucleotide
  Sense strand starting at position 797 of SEQ ID NO: 1244822
aguugugugcaccauucua

SEQ ID NO: 1517373 - RNA, 19 nt, Artificial Sequence
  Description of Artificial Sequence: Synthetic oligonucleotide
  Antisense strand to SEQ ID NO: 1517372
uagaauggugcacacaacu

SEQ ID NO: 1517374 - RNA, 19 nt, Artificial Sequence
  Description of Artificial Sequence: Synthetic oligonucleotide
  Sense strand starting at position 844 of SEQ ID NO: 1244822
augggaaccuccgauuugu

SEQ ID NO: 1517375 - RNA, 19 nt, Artificial Sequence
  Description of Artificial Sequence: Synthetic oligonucleotide
  Antisense strand to SEQ ID NO: 1517374
acaaaucggagguucccau

SEQ ID NO: 1517376 - RNA, 19 nt, Artificial Sequence
  Description of Artificial Sequence: Synthetic oligonucleotide
  Sense strand starting at position 958 of SEQ ID NO: 1244822
cccauagggucugugcuaa

SEQ ID NO: 1517377 - RNA, 19 nt, Artificial Sequence
  Description of Artificial Sequence: Synthetic oligonucleotide
  Antisense strand to SEQ ID NO: 1517376
uuagcacagacccuauggg

SEQ ID NO: 1517378 - RNA, 19 nt, Artificial Sequence
  Description of Artificial Sequence: Synthetic oligonucleotide
  Sense strand starting at position 1020 of SEQ ID NO: 1244822
acaguuggugucuaccaga

SEQ ID NO: 1517379 - RNA, 19 nt, Artificial Sequence
  Description of Artificial Sequence: Synthetic oligonucleotide
  Antisense strand to SEQ ID NO: 1517378
ucugguagacaccaacugu

SEQ ID NO: 1517380 - RNA, 19 nt, Artificial Sequence
  Description of Artificial Sequence: Synthetic oligonucleotide
  Sense strand starting at position 1025 of SEQ ID NO: 1244822
uggugucuaccagagaacu

SEQ ID NO: 1517381 - RNA, 19 nt, Artificial Sequence
  Description of Artificial Sequence: Synthetic oligonucleotide
  Antisense strand to SEQ ID NO: 1517380
aguucucugguagacacca

SEQ ID NO: 1517382 - RNA, 19 nt, Artificial Sequence
  Description of Artificial Sequence: Synthetic oligonucleotide
  Sense strand starting at position 1091 of SEQ ID NO: 1244822
gccagaaauguugguguga

SEQ ID NO: 1517383 - RNA, 19 nt, Artificial Sequence
  Description of Artificial Sequence: Synthetic oligonucleotide
  Antisense strand to SEQ ID NO: 1517382
ucacaccaacauuucuggc

SEQ ID NO: 1517384 - RNA, 19 nt, Artificial Sequence
  Description of Artificial Sequence: Synthetic oligonucleotide
  Sense strand starting at position 1092 of SEQ ID NO: 1244822
ccagaaauguuggugugag

SEQ ID NO: 1517385 - RNA, 19 nt, Artificial Sequence
  Description of Artificial Sequence: Synthetic oligonucleotide
  Antisense strand to SEQ ID NO: 1517384
cucacaccaacauuucugg

SEQ ID NO: 1517386 - RNA, 19 nt, Artificial Sequence
  Description of Artificial Sequence: Synthetic oligonucleotide
  Sense strand starting at position 1149 of SEQ ID NO: 1244822
gggaguuuguucuuacaau

SEQ ID NO: 1517387 - RNA, 19 nt, Artificial Sequence
  Description of Artificial Sequence: Synthetic oligonucleotide
  Antisense strand to SEQ ID NO: 1517386
auuguaagaacaaacuccc

SEQ ID NO: 1517388 - RNA, 19 nt, Artificial Sequence
  Description of Artificial Sequence: Synthetic oligonucleotide
  Sense strand starting at position 1328 of SEQ ID NO: 1244822
ugagaagauuacgaagaau

SEQ ID NO: 1517389 - RNA, 19 nt, Artificial Sequence
  Description of Artificial Sequence: Synthetic oligonucleotide
  Antisense strand to SEQ ID NO: 1517388
auucuucguaaucuucuca

SEQ ID NO: 1517390 - RNA, 19 nt, Artificial Sequence
  Description of Artificial Sequence: Synthetic oligonucleotide
  Sense strand starting at position 1530 of SEQ ID NO: 1244822
cuguauaaaucuuugagga

SEQ ID NO: 1517391 - RNA, 19 nt, Artificial Sequence
  Description of Artificial Sequence: Synthetic oligonucleotide
  Antisense strand to SEQ ID NO: 1517390
uccucaaagauuuauacag

SEQ ID NO: 1517392 - RNA, 19 nt, Artificial Sequence
  Description of Artificial Sequence: Synthetic oligonucleotide
  Sense strand starting at position 1579 of SEQ ID NO: 1244822
agugccuaggauugcaaua

SEQ ID NO: 1517393 - RNA, 19 nt, Artificial Sequence
  Description of Artificial Sequence: Synthetic oligonucleotide
  Antisense strand to SEQ ID NO: 1517392
uauugcaauccuaggcacu

SEQ ID NO: 1517394 - RNA, 19 nt, Artificial Sequence
  Description of Artificial Sequence: Synthetic oligonucleotide
  Sense strand starting at position 1760 of SEQ ID NO: 1244822
cuuaauaaagcguaugaaa

SEQ ID NO: 1517395 - RNA, 19 nt, Artificial Sequence
  Description of Artificial Sequence: Synthetic oligonucleotide
  Antisense strand to SEQ ID NO: 1517394
uuucauacgcuuuauuaag

SEQ ID NO: 1517396 - RNA, 19 nt, Artificial Sequence
  Description of Artificial Sequence: Synthetic oligonucleotide
  Sense strand starting at position 1807 of SEQ ID NO: 1244822
guucuaaguuaagcauuaa

SEQ ID NO: 1517397 - RNA, 19 nt, Artificial Sequence
  Description of Artificial Sequence: Synthetic oligonucleotide
  Antisense strand to SEQ ID NO: 1517396
uuaaugcuuaacuuagaac

SEQ ID NO: 1517398 - RNA, 19 nt, Artificial Sequence
  Description of Artificial Sequence: Synthetic oligonucleotide
  Sense strand starting at position 1895 of SEQ ID NO: 1244822
guagcauagucacuuacca

SEQ ID NO: 1517399 - RNA, 19 nt, Artificial Sequence
  Description of Artificial Sequence: Synthetic oligonucleotide
  Antisense strand to SEQ ID NO: 1517398
ugguaagugacuaugcuac

SEQ ID NO: 1517400 - RNA, 19 nt, Artificial Sequence
  Description of Artificial Sequence: Synthetic oligonucleotide
  Sense strand starting at position 2051 of SEQ ID NO: 1244822
agcauaagagggugacuau

SEQ ID NO: 1517401 - RNA, 19 nt, Artificial Sequence
  Description of Artificial Sequence: Synthetic oligonucleotide
  Antisense strand to SEQ ID NO: 1517400
auagucacccucuuaugcu

SEQ ID NO: 1517402 - RNA, 19 nt, Artificial Sequence
  Description of Artificial Sequence: Synthetic oligonucleotide
  Sense strand starting at position 2134 of SEQ ID NO: 1244822
auaaaugauugagaggaca

SEQ ID NO: 1517403 - RNA, 19 nt, Artificial Sequence
  Description of Artificial Sequence: Synthetic oligonucleotide
  Antisense strand to SEQ ID NO: 1517402
uguccucucaaucauuuau

SEQ ID NO: 1517404 - RNA, 19 nt, Artificial Sequence
  Description of Artificial Sequence: Synthetic oligonucleotide
  Sense strand starting at position 2826 of SEQ ID NO: 1244822
cucugacugcuuuggauua

SEQ ID NO: 1517405 - RNA, 19 nt, Artificial Sequence
  Description of Artificial Sequence: Synthetic oligonucleotide
  Antisense strand to SEQ ID NO: 1517404
uaauccaaagcagucagag

SEQ ID NO: 1517406 - RNA, 19 nt, Artificial Sequence
  Description of Artificial Sequence: Synthetic oligonucleotide
  Sense strand starting at position 3077 of SEQ ID NO: 1244822
ugguguguccagcagauua

SEQ ID NO: 1517407 - RNA, 19 nt, Artificial Sequence
  Description of Artificial Sequence: Synthetic oligonucleotide
  Antisense strand to SEQ ID NO: 1517406
uaaucugcuggacacacca

SEQ ID NO: 1517408 - RNA, 19 nt, Artificial Sequence
  Description of Artificial Sequence: Synthetic oligonucleotide
  Sense strand starting at position 3079 of SEQ ID NO: 1244822
guguguccagcagauuaaa

SEQ ID NO: 1517409 - RNA, 19 nt, Artificial Sequence
  Description of Artificial Sequence: Synthetic oligonucleotide
  Antisense strand to SEQ ID NO: 1517408
uuuaaucugcuggacacac

SEQ ID NO: 1517410 - RNA, 19 nt, Artificial Sequence
  Description of Artificial Sequence: Synthetic oligonucleotide
  Sense strand starting at position 3214 of SEQ ID NO: 1244822
guucuaacauauguauaac

SEQ ID NO: 1517411 - RNA, 19 nt, Artificial Sequence
  Description of Artificial Sequence: Synthetic oligonucleotide
  Antisense strand to SEQ ID NO: 1517410
guuauacauauguuagaac

SEQ ID NO: 1517412 - RNA, 19 nt, Artificial Sequence
  Description of Artificial Sequence: Synthetic oligonucleotide
  Sense strand starting at position 3270 of SEQ ID NO: 1244822
auauaugaagugugagcaa

SEQ ID NO: 1517413 - RNA, 19 nt, Artificial Sequence
  Description of Artificial Sequence: Synthetic oligonucleotide
  Antisense strand to SEQ ID NO: 1517412
uugcucacacuucauauau

SEQ ID NO: 1517414 - RNA, 19 nt, Artificial Sequence
  Description of Artificial Sequence: Synthetic oligonucleotide
  Sense strand starting at position 3281 of SEQ ID NO: 1244822
gugagcaaccaagaauugu

SEQ ID NO: 1517415 - RNA, 19 nt, Artificial Sequence
  Description of Artificial Sequence: Synthetic oligonucleotide
  Antisense strand to SEQ ID NO: 1517414
acaauucuugguugcucac

SEQ ID NO: 1517416 - RNA, 19 nt, Artificial Sequence
  Description of Artificial Sequence: Synthetic oligonucleotide
  Sense strand starting at position 3330 of SEQ ID NO: 1244822
cugaaagaagcuugucaaa

SEQ ID NO: 1517417 - RNA, 19 nt, Artificial Sequence
  Description of Artificial Sequence: Synthetic oligonucleotide
  Antisense strand to SEQ ID NO: 1517416
uuugacaagcuucuuucag

SEQ ID NO: 1517418 - RNA, 19 nt, Artificial Sequence
  Description of Artificial Sequence: Synthetic oligonucleotide
  Sense strand starting at position 3701 of SEQ ID NO: 1244822
agccauaggaaggguaaau

SEQ ID NO: 1517419 - RNA, 19 nt, Artificial Sequence
  Description of Artificial Sequence: Synthetic oligonucleotide
  Antisense strand to SEQ ID NO: 1517418
auuuacccuuccuauggcu

SEQ ID NO: 1517420 - RNA, 19 nt, Artificial Sequence
  Description of Artificial Sequence: Synthetic oligonucleotide
  Sense strand starting at position 3710 of SEQ ID NO: 1244822
aaggguaaauauguucuua

SEQ ID NO: 1517421 - RNA, 19 nt, Artificial Sequence
  Description of Artificial Sequence: Synthetic oligonucleotide
  Antisense strand to SEQ ID NO: 1517420
uaagaacauauuuacccuu

SEQ ID NO: 1517422 - RNA, 19 nt, Artificial Sequence
  Description of Artificial Sequence: Synthetic oligonucleotide
  Sense strand starting at position 3712 of SEQ ID NO: 1244822
ggguaaauauguucuuaag

SEQ ID NO: 1517423 - RNA, 19 nt, Artificial Sequence
  Description of Artificial Sequence: Synthetic oligonucleotide
  Antisense strand to SEQ ID NO: 1517422
cuuaagaacauauuuaccc

SEQ ID NO: 1517424 - RNA, 19 nt, Artificial Sequence
  Description of Artificial Sequence: Synthetic oligonucleotide
  Sense strand starting at position 3758 of SEQ ID NO: 1244822
augauaggcuguucuuuaa

SEQ ID NO: 1517425 - RNA, 19 nt, Artificial Sequence
  Description of Artificial Sequence: Synthetic oligonucleotide
  Antisense strand to SEQ ID NO: 1517424
uuaaagaacagccuaucau

SEQ ID NO: 1517426 - RNA, 19 nt, Artificial Sequence
  Description of Artificial Sequence: Synthetic oligonucleotide
  Sense strand starting at position 3824 of SEQ ID NO: 1244822
ggguaauggaauugaaguu

SEQ ID NO: 1517427 - RNA, 19 nt, Artificial Sequence
  Description of Artificial Sequence: Synthetic oligonucleotide
  Antisense strand to SEQ ID NO: 1517426
aacuucaauuccauuaccc

SEQ ID NO: 1517428 - RNA, 19 nt, Artificial Sequence
  Description of Artificial Sequence: Synthetic oligonucleotide
  Sense strand starting at position 3913 of SEQ ID NO: 1244822
uguaguaaucucuaggaua

SEQ ID NO: 1517429 - RNA, 19 nt, Artificial Sequence
  Description of Artificial Sequence: Synthetic oligonucleotide
  Antisense strand to SEQ ID NO: 1517428
uauccuagagauuacuaca

SEQ ID NO: 1517430 - RNA, 19 nt, Artificial Sequence
  Description of Artificial Sequence: Synthetic oligonucleotide
  Sense strand starting at position 110 of SEQ ID NO: 1244823
aaauguagauggcauuuga

SEQ ID NO: 1517431 - RNA, 19 nt, Artificial Sequence
  Description of Artificial Sequence: Synthetic oligonucleotide
  Antisense strand to SEQ ID NO: 1517430
ucaaaugccaucuacauuu

SEQ ID NO: 1517432 - RNA, 19 nt, Artificial Sequence
  Description of Artificial Sequence: Synthetic oligonucleotide
  Sense strand starting at position 247 of SEQ ID NO: 1244823
uagucauauguggaauauu

SEQ ID NO: 1517433 - RNA, 19 nt, Artificial Sequence
  Description of Artificial Sequence: Synthetic oligonucleotide
  Antisense strand to SEQ ID NO: 1517432
aauauuccacauaugacua

SEQ ID NO: 1517434 - RNA, 19 nt, Artificial Sequence
  Description of Artificial Sequence: Synthetic oligonucleotide
  Sense strand starting at position 559 of SEQ ID NO: 1244823
gcagaaagguuuguaaccu

SEQ ID NO: 1517435 - RNA, 19 nt, Artificial Sequence
  Description of Artificial Sequence: Synthetic oligonucleotide
  Antisense strand to SEQ ID NO: 1517434
agguuacaaaccuuucugc

SEQ ID NO: 1517436 - RNA, 19 nt, Artificial Sequence
  Description of Artificial Sequence: Synthetic oligonucleotide
  Sense strand starting at position 648 of SEQ ID NO: 1244823
ggagaaaugcccugaauca

SEQ ID NO: 1517437 - RNA, 19 nt, Artificial Sequence
  Description of Artificial Sequence: Synthetic oligonucleotide
  Antisense strand to SEQ ID NO: 1517436
ugauucagggcauuucucc

SEQ ID NO: 1517438 - RNA, 19 nt, Artificial Sequence
  Description of Artificial Sequence: Synthetic oligonucleotide
  Sense strand starting at position 668 of SEQ ID NO: 1244823
acaggcugucuguauguaa

SEQ ID NO: 1517439 - RNA, 19 nt, Artificial Sequence
  Description of Artificial Sequence: Synthetic oligonucleotide
  Antisense strand to SEQ ID NO: 1517438
uuacauacagacagccugu

SEQ ID NO: 1517440 - RNA, 19 nt, Artificial Sequence
  Description of Artificial Sequence: Synthetic oligonucleotide
  Sense strand starting at position 671 of SEQ ID NO: 1244823
ggcugucuguauguaauaa

SEQ ID NO: 1517441 - RNA, 19 nt, Artificial Sequence
  Description of Artificial Sequence: Synthetic oligonucleotide
  Antisense strand to SEQ ID NO: 1517440
uuauuacauacagacagcc

SEQ ID NO: 1517442 - RNA, 19 nt, Artificial Sequence
  Description of Artificial Sequence: Synthetic oligonucleotide
  Sense strand starting at position 1250 of SEQ ID NO: 1244823
acgauacugucgucgauuu

SEQ ID NO: 1517443 - RNA, 19 nt, Artificial Sequence
  Description of Artificial Sequence: Synthetic oligonucleotide
  Antisense strand to SEQ ID NO: 1517442
aaaucgacgacaguaucgu

SEQ ID NO: 1517444 - RNA, 19 nt, Artificial Sequence
  Description of Artificial Sequence: Synthetic oligonucleotide
  Sense strand starting at position 1251 of SEQ ID NO: 1244823
cgauacugucgucgauuua

SEQ ID NO: 1517445 - RNA, 19 nt, Artificial Sequence
  Description of Artificial Sequence: Synthetic oligonucleotide
  Antisense strand to SEQ ID NO: 1517444
uaaaucgacgacaguaucg

SEQ ID NO: 1517446 - RNA, 19 nt, Artificial Sequence
  Description of Artificial Sequence: Synthetic oligonucleotide
  Sense strand starting at position 1333 of SEQ ID NO: 1244823
cucccuucuguguauacau

SEQ ID NO: 1517447 - RNA, 19 nt, Artificial Sequence
  Description of Artificial Sequence: Synthetic oligonucleotide
  Antisense strand to SEQ ID NO: 1517446
auguauacacagaagggag

SEQ ID NO: 1517448 - RNA, 19 nt, Artificial Sequence
  Description of Artificial Sequence: Synthetic oligonucleotide
  Sense strand starting at position 1351 of SEQ ID NO: 1244823
ugggucuguguaugaagaa

SEQ ID NO: 1517449 - RNA, 19 nt, Artificial Sequence
  Description of Artificial Sequence: Synthetic oligonucleotide
  Antisense strand to SEQ ID NO: 1517448
uucuucauacacagaccca

SEQ ID NO: 1517450 - RNA, 19 nt, Artificial Sequence
  Description of Artificial Sequence: Synthetic oligonucleotide
  Sense strand starting at position 1375 of SEQ ID NO: 1244823
cuuggacuucugcagcauu

SEQ ID NO: 1517451 - RNA, 19 nt, Artificial Sequence
  Description of Artificial Sequence: Synthetic oligonucleotide
  Antisense strand to SEQ ID NO: 1517450
aaugcugcagaaguccaag

SEQ ID NO: 1517452 - RNA, 19 nt, Artificial Sequence
  Description of Artificial Sequence: Synthetic oligonucleotide
  Sense strand starting at position 1378 of SEQ ID NO: 1244823
ggacuucugcagcauugca

SEQ ID NO: 1517453 - RNA, 19 nt, Artificial Sequence
  Description of Artificial Sequence: Synthetic oligonucleotide
  Antisense strand to SEQ ID NO: 1517452
ugcaaugcugcagaagucc

SEQ ID NO: 1517454 - RNA, 19 nt, Artificial Sequence
  Description of Artificial Sequence: Synthetic oligonucleotide
  Sense strand starting at position 1386 of SEQ ID NO: 1244823
gcagcauugcaguagacua

SEQ ID NO: 1517455 - RNA, 19 nt, Artificial Sequence
  Description of Artificial Sequence: Synthetic oligonucleotide
  Antisense strand to SEQ ID NO: 1517454
uagucuacugcaaugcugc

SEQ ID NO: 1517456 - RNA, 19 nt, Artificial Sequence
  Description of Artificial Sequence: Synthetic oligonucleotide
  Sense strand starting at position 1467 of SEQ ID NO: 1244823
gguauagauuuccugugcu

SEQ ID NO: 1517457 - RNA, 19 nt, Artificial Sequence
  Description of Artificial Sequence: Synthetic oligonucleotide
  Antisense strand to SEQ ID NO: 1517456
agcacaggaaaucuauacc

SEQ ID NO: 1517458 - RNA, 19 nt, Artificial Sequence
  Description of Artificial Sequence: Synthetic oligonucleotide
  Sense strand starting at position 1680 of SEQ ID NO: 1244823
uccggugacccucaggaaa

SEQ ID NO: 1517459 - RNA, 19 nt, Artificial Sequence
  Description of Artificial Sequence: Synthetic oligonucleotide
  Antisense strand to SEQ ID NO: 1517458
uuuccugagggucaccgga

SEQ ID NO: 1517460 - RNA, 19 nt, Artificial Sequence
  Description of Artificial Sequence: Synthetic oligonucleotide
  Sense strand starting at position 1835 of SEQ ID NO: 1244823
gcccgagugggccgaauuu

SEQ ID NO: 1517461 - RNA, 19 nt, Artificial Sequence
  Description of Artificial Sequence: Synthetic oligonucleotide
  Antisense strand to SEQ ID NO: 1517460
aaauucggcccacucgggc

SEQ ID NO: 1517462 - RNA, 19 nt, Artificial Sequence
  Description of Artificial Sequence: Synthetic oligonucleotide
  Sense strand starting at position 2135 of SEQ ID NO: 1244823
cagcgcuugggcucaguua

SEQ ID NO: 1517463 - RNA, 19 nt, Artificial Sequence
  Description of Artificial Sequence: Synthetic oligonucleotide
  Antisense strand to SEQ ID NO: 1517462
uaacugagcccaagcgcug

SEQ ID NO: 1517464 - RNA, 19 nt, Artificial Sequence
  Description of Artificial Sequence: Synthetic oligonucleotide
  Sense strand starting at position 2137 of SEQ ID NO: 1244823
gcgcuugggcucaguuaag

SEQ ID NO: 1517465 - RNA, 19 nt, Artificial Sequence
  Description of Artificial Sequence: Synthetic oligonucleotide
  Antisense strand to SEQ ID NO: 1517464
cuuaacugagcccaagcgc

SEQ ID NO: 1517466 - RNA, 19 nt, Artificial Sequence
  Description of Artificial Sequence: Synthetic oligonucleotide
  Sense strand starting at position 2406 of SEQ ID NO: 1244823
agauguucgcgagugccua

SEQ ID NO: 1517467 - RNA, 19 nt, Artificial Sequence
  Description of Artificial Sequence: Synthetic oligonucleotide
  Antisense strand to SEQ ID NO: 1517466
uaggcacucgcgaacaucu

SEQ ID NO: 1517468 - RNA, 19 nt, Artificial Sequence
  Description of Artificial Sequence: Synthetic oligonucleotide
  Sense strand starting at position 2424 of SEQ ID NO: 1244823
agugcuuucggcccgcgaa

SEQ ID NO: 1517469 - RNA, 19 nt, Artificial Sequence
  Description of Artificial Sequence: Synthetic oligonucleotide
  Antisense strand to SEQ ID NO: 1517468
uucgcgggccgaaagcacu

SEQ ID NO: 1517470 - RNA, 19 nt, Artificial Sequence
  Description of Artificial Sequence: Synthetic oligonucleotide
  Sense strand starting at position 2619 of SEQ ID NO: 1244823
cuccgaucucgcgagauuu

SEQ ID NO: 1517471 - RNA, 19 nt, Artificial Sequence
  Description of Artificial Sequence: Synthetic oligonucleotide
  Antisense strand to SEQ ID NO: 1517470
aaaucucgcgagaucggag

SEQ ID NO: 1517472 - RNA, 19 nt, Artificial Sequence
  Description of Artificial Sequence: Synthetic oligonucleotide
  Sense strand starting at position 2901 of SEQ ID NO: 1244823
ugauccugcgaauaaguuu

SEQ ID NO: 1517473 - RNA, 19 nt, Artificial Sequence
  Description of Artificial Sequence: Synthetic oligonucleotide
  Antisense strand to SEQ ID NO: 1517472
aaacuuauucgcaggauca

SEQ ID NO: 1517474 - RNA, 19 nt, Artificial Sequence
  Description of Artificial Sequence: Synthetic oligonucleotide
  Sense strand starting at position 2908 of SEQ ID NO: 1244823
gcgaauaaguuugcccuga

SEQ ID NO: 1517475 - RNA, 19 nt, Artificial Sequence
  Description of Artificial Sequence: Synthetic oligonucleotide
  Antisense strand to SEQ ID NO: 1517474
ucagggcaaacuuauucgc

SEQ ID NO: 1517476 - RNA, 19 nt, Artificial Sequence
  Description of Artificial Sequence: Synthetic oligonucleotide
  Sense strand starting at position 2909 of SEQ ID NO: 1244823
cgaauaaguuugcccugaa

SEQ ID NO: 1517477 - RNA, 19 nt, Artificial Sequence
  Description of Artificial Sequence: Synthetic oligonucleotide
  Antisense strand to SEQ ID NO: 1517476
uucagggcaaacuuauucg

SEQ ID NO: 1517478 - RNA, 19 nt, Artificial Sequence
  Description of Artificial Sequence: Synthetic oligonucleotide
  Sense strand starting at position 2910 of SEQ ID NO: 1244823
gaauaaguuugcccugaag

SEQ ID NO: 1517479 - RNA, 19 nt, Artificial Sequence
  Description of Artificial Sequence: Synthetic oligonucleotide
  Antisense strand to SEQ ID NO: 1517478
cuucagggcaaacuuauuc

SEQ ID NO: 1517480 - RNA, 19 nt, Artificial Sequence
  Description of Artificial Sequence: Synthetic oligonucleotide
  Sense strand starting at position 2912 of SEQ ID NO: 1244823
auaaguuugcccugaagug

SEQ ID NO: 1517481 - RNA, 19 nt, Artificial Sequence
  Description of Artificial Sequence: Synthetic oligonucleotide
  Antisense strand to SEQ ID NO: 1517480
cacuucagggcaaacuuau

SEQ ID NO: 1517482 - RNA, 19 nt, Artificial Sequence
  Description of Artificial Sequence: Synthetic oligonucleotide
  Sense strand starting at position 2913 of SEQ ID NO: 1244823
uaaguuugcccugaagugu

SEQ ID NO: 1517483 - RNA, 19 nt, Artificial Sequence
  Description of Artificial Sequence: Synthetic oligonucleotide
  Antisense strand to SEQ ID NO: 1517482
acacuucagggcaaacuua

SEQ ID NO: 1517484 - RNA, 19 nt, Artificial Sequence
  Description of Artificial Sequence: Synthetic oligonucleotide
  Sense strand starting at position 2919 of SEQ ID NO: 1244823
ugcccugaaguguggaaua

SEQ ID NO: 1517485 - RNA, 19 nt, Artificial Sequence
  Description of Artificial Sequence: Synthetic oligonucleotide
  Antisense strand to SEQ ID NO: 1517484
uauuccacacuucagggca

SEQ ID NO: 1517486 - RNA, 19 nt, Artificial Sequence
  Description of Artificial Sequence: Synthetic oligonucleotide
  Sense strand starting at position 2921 of SEQ ID NO: 1244823
cccugaaguguggaauauc

SEQ ID NO: 1517487 - RNA, 19 nt, Artificial Sequence
  Description of Artificial Sequence: Synthetic oligonucleotide
  Antisense strand to SEQ ID NO: 1517486
gauauuccacacuucaggg

SEQ ID NO: 1517488 - RNA, 19 nt, Artificial Sequence
  Description of Artificial Sequence: Synthetic oligonucleotide
  Sense strand starting at position 3045 of SEQ ID NO: 1244823
auacuaauucuuggaacga

SEQ ID NO: 1517489 - RNA, 19 nt, Artificial Sequence
  Description of Artificial Sequence: Synthetic oligonucleotide
  Antisense strand to SEQ ID NO: 1517488
ucguuccaagaauuaguau

SEQ ID NO: 1517490 - RNA, 19 nt, Artificial Sequence
  Description of Artificial Sequence: Synthetic oligonucleotide
  Sense strand starting at position 3049 of SEQ ID NO: 1244823
uaauucuuggaacgacagu

SEQ ID NO: 1517491 - RNA, 19 nt, Artificial Sequence
  Description of Artificial Sequence: Synthetic oligonucleotide
  Antisense strand to SEQ ID NO: 1517490
acugucguuccaagaauua

SEQ ID NO: 1517492 - RNA, 19 nt, Artificial Sequence
  Description of Artificial Sequence: Synthetic oligonucleotide
  Sense strand starting at position 3064 of SEQ ID NO: 1244823
caguaagacuuggaaauac

SEQ ID NO: 1517493 - RNA, 19 nt, Artificial Sequence
  Description of Artificial Sequence: Synthetic oligonucleotide
  Antisense strand to SEQ ID NO: 1517492
guauuuccaagucuuacug

SEQ ID NO: 1517494 - RNA, 19 nt, Artificial Sequence
  Description of Artificial Sequence: Synthetic oligonucleotide
  Sense strand starting at position 3097 of SEQ ID NO: 1244823
cuauauauuggugauguag

SEQ ID NO: 1517495 - RNA, 19 nt, Artificial Sequence
  Description of Artificial Sequence: Synthetic oligonucleotide
  Antisense strand to SEQ ID NO: 1517494
cuacaucaccaauauauag

SEQ ID NO: 1517496 - RNA, 19 nt, Artificial Sequence
  Description of Artificial Sequence: Synthetic oligonucleotide
  Sense strand starting at position 3147 of SEQ ID NO: 1244823
gguuuaguagguugaguaa

SEQ ID NO: 1517497 - RNA, 19 nt, Artificial Sequence
  Description of Artificial Sequence: Synthetic oligonucleotide
  Antisense strand to SEQ ID NO: 1517496
uuacucaaccuacuaaacc

SEQ ID NO: 1517498 - RNA, 19 nt, Artificial Sequence
  Description of Artificial Sequence: Synthetic oligonucleotide
  Sense strand starting at position 3150 of SEQ ID NO: 1244823
uuaguagguugaguaauga

SEQ ID NO: 1517499 - RNA, 19 nt, Artificial Sequence
  Description of Artificial Sequence: Synthetic oligonucleotide
  Antisense strand to SEQ ID NO: 1517498
ucauuacucaaccuacuaa

SEQ ID NO: 1517500 - RNA, 19 nt, Artificial Sequence
  Description of Artificial Sequence: Synthetic oligonucleotide
  Sense strand starting at position 3829 of SEQ ID NO: 1244823
auaguagaucugugcucca

SEQ ID NO: 1517501 - RNA, 19 nt, Artificial Sequence
  Description of Artificial Sequence: Synthetic oligonucleotide
  Antisense strand to SEQ ID NO: 1517500
uggagcacagaucuacuau

SEQ ID NO: 1517502 - RNA, 19 nt, Artificial Sequence
  Description of Artificial Sequence: Synthetic oligonucleotide
  Sense strand starting at position 3834 of SEQ ID NO: 1244823
agaucugugcuccaaggaa

SEQ ID NO: 1517503 - RNA, 19 nt, Artificial Sequence
  Description of Artificial Sequence: Synthetic oligonucleotide
  Antisense strand to SEQ ID NO: 1517502
uuccuuggagcacagaucu

SEQ ID NO: 1517504 - RNA, 19 nt, Artificial Sequence
  Description of Artificial Sequence: Synthetic oligonucleotide
  Sense strand starting at position 3871 of SEQ ID NO: 1244823
cuaagcaauccguguauac

SEQ ID NO: 1517505 - RNA, 19 nt, Artificial Sequence
  Description of Artificial Sequence: Synthetic oligonucleotide
  Antisense strand to SEQ ID NO: 1517504
guauacacggauugcuuag

SEQ ID NO: 1517506 - RNA, 19 nt, Artificial Sequence
  Description of Artificial Sequence: Synthetic oligonucleotide
  Sense strand starting at position 3873 of SEQ ID NO: 1244823
aagcaauccguguauacag

SEQ ID NO: 1517507 - RNA, 19 nt, Artificial Sequence
  Description of Artificial Sequence: Synthetic oligonucleotide
  Antisense strand to SEQ ID NO: 1517506
cuguauacacggauugcuu

SEQ ID NO: 1517508 - RNA, 19 nt, Artificial Sequence
  Description of Artificial Sequence: Synthetic oligonucleotide
  Sense strand starting at position 3884 of SEQ ID NO: 1244823
guauacaguguauguauga

SEQ ID NO: 1517509 - RNA, 19 nt, Artificial Sequence
  Description of Artificial Sequence: Synthetic oligonucleotide
  Antisense strand to SEQ ID NO: 1517508
ucauacauacacuguauac

SEQ ID NO: 1517510 - RNA, 19 nt, Artificial Sequence
  Description of Artificial Sequence: Synthetic oligonucleotide
  Sense strand starting at position 40 of SEQ ID NO: 1244824
aggcacguuccugguguua

SEQ ID NO: 1517511 - RNA, 19 nt, Artificial Sequence
  Description of Artificial Sequence: Synthetic oligonucleotide
  Antisense strand to SEQ ID NO: 1517510
uaacaccaggaacgugccu

SEQ ID NO: 1517512 - RNA, 19 nt, Artificial Sequence
  Description of Artificial Sequence: Synthetic oligonucleotide
  Sense strand starting at position 106 of SEQ ID NO: 1244824
ccaguuauggcgugaggga

SEQ ID NO: 1517513 - RNA, 19 nt, Artificial Sequence
  Description of Artificial Sequence: Synthetic oligonucleotide
  Antisense strand to SEQ ID NO: 1517512
ucccucacgccauaacugg

SEQ ID NO: 1517514 - RNA, 19 nt, Artificial Sequence
  Description of Artificial Sequence: Synthetic oligonucleotide
  Sense strand starting at position 199 of SEQ ID NO: 1244824
ccggcacggucagaagauu

SEQ ID NO: 1517515 - RNA, 19 nt, Artificial Sequence
  Description of Artificial Sequence: Synthetic oligonucleotide
  Antisense strand to SEQ ID NO: 1517514
aaucuucugaccgugccgg

SEQ ID NO: 1517516 - RNA, 19 nt, Artificial Sequence
  Description of Artificial Sequence: Synthetic oligonucleotide
  Sense strand starting at position 781 of SEQ ID NO: 1244824
ccucacuugucgccuuuau

SEQ ID NO: 1517517 - RNA, 19 nt, Artificial Sequence
  Description of Artificial Sequence: Synthetic oligonucleotide
  Antisense strand to SEQ ID NO: 1517516
auaaaggcgacaagugagg

SEQ ID NO: 1517518 - RNA, 19 nt, Artificial Sequence
  Description of Artificial Sequence: Synthetic oligonucleotide
  Sense strand starting at position 785 of SEQ ID NO: 1244824
acuugucgccuuuaucagu

SEQ ID NO: 1517519 - RNA, 19 nt, Artificial Sequence
  Description of Artificial Sequence: Synthetic oligonucleotide
  Antisense strand to SEQ ID NO: 1517518
acugauaaaggcgacaagu

SEQ ID NO: 1517520 - RNA, 19 nt, Artificial Sequence
  Description of Artificial Sequence: Synthetic oligonucleotide
  Sense strand starting at position 893 of SEQ ID NO: 1244824
gggacuuucgcuugaccua

SEQ ID NO: 1517521 - RNA, 19 nt, Artificial Sequence
  Description of Artificial Sequence: Synthetic oligonucleotide
  Antisense strand to SEQ ID NO: 1517520
uaggucaagcgaaaguccc

SEQ ID NO: 1517522 - RNA, 19 nt, Artificial Sequence
  Description of Artificial Sequence: Synthetic oligonucleotide
  Sense strand starting at position 923 of SEQ ID NO: 1244824
gcaggcauuucuucucauu

SEQ ID NO: 1517523 - RNA, 19 nt, Artificial Sequence
  Description of Artificial Sequence: Synthetic oligonucleotide
  Antisense strand to SEQ ID NO: 1517522
aaugagaagaaaugccugc

SEQ ID NO: 1517524 - RNA, 19 nt, Artificial Sequence
  Description of Artificial Sequence: Synthetic oligonucleotide
  Sense strand starting at position 970 of SEQ ID NO: 1244824
agaccugagucuuuccuga

SEQ ID NO: 1517525 - RNA, 19 nt, Artificial Sequence
  Description of Artificial Sequence: Synthetic oligonucleotide
  Antisense strand to SEQ ID NO: 1517524
ucaggaaagacucaggucu

SEQ ID NO: 1517526 - RNA, 19 nt, Artificial Sequence
  Description of Artificial Sequence: Synthetic oligonucleotide
  Sense strand starting at position 974 of SEQ ID NO: 1244824
cugagucuuuccugaggug

SEQ ID NO: 1517527 - RNA, 19 nt, Artificial Sequence
  Description of Artificial Sequence: Synthetic oligonucleotide
  Antisense strand to SEQ ID NO: 1517526
caccucaggaaagacucag

SEQ ID NO: 1517528 - RNA, 19 nt, Artificial Sequence
  Description of Artificial Sequence: Synthetic oligonucleotide
  Sense strand starting at position 1007 of SEQ ID NO: 1244824
agcacuucucucugggacu

SEQ ID NO: 1517529 - RNA, 19 nt, Artificial Sequence
  Description of Artificial Sequence: Synthetic oligonucleotide
  Antisense strand to SEQ ID NO: 1517528
agucccagagagaagugcu

SEQ ID NO: 1517530 - RNA, 19 nt, Artificial Sequence
  Description of Artificial Sequence: Synthetic oligonucleotide
  Sense strand starting at position 1028 of SEQ ID NO: 1244824
ccaccucugucauaggguu

SEQ ID NO: 1517531 - RNA, 19 nt, Artificial Sequence
  Description of Artificial Sequence: Synthetic oligonucleotide
  Antisense strand to SEQ ID NO: 1517530
aacccuaugacagaggugg

SEQ ID NO: 1517532 - RNA, 19 nt, Artificial Sequence
  Description of Artificial Sequence: Synthetic oligonucleotide
  Sense strand starting at position 1912 of SEQ ID NO: 1244824
gcccucgcugcuuaacaaa

SEQ ID NO: 1517533 - RNA, 19 nt, Artificial Sequence
  Description of Artificial Sequence: Synthetic oligonucleotide
  Antisense strand to SEQ ID NO: 1517532
uuuguuaagcagcgagggc

SEQ ID NO: 1517534 - RNA, 19 nt, Artificial Sequence
  Description of Artificial Sequence: Synthetic oligonucleotide
  Sense strand starting at position 2979 of SEQ ID NO: 1244824
gugagacacuuuguggagu

SEQ ID NO: 1517535 - RNA, 19 nt, Artificial Sequence
  Description of Artificial Sequence: Synthetic oligonucleotide
  Antisense strand to SEQ ID NO: 1517534
acuccacaaagugucucac

SEQ ID NO: 1517536 - RNA, 19 nt, Artificial Sequence
  Description of Artificial Sequence: Synthetic oligonucleotide
  Sense strand starting at position 2980 of SEQ ID NO: 1244824
ugagacacuuuguggaguu

SEQ ID NO: 1517537 - RNA, 19 nt, Artificial Sequence
  Description of Artificial Sequence: Synthetic oligonucleotide
  Antisense strand to SEQ ID NO: 1517536
aacuccacaaagugucuca

SEQ ID NO: 1517538 - RNA, 19 nt, Artificial Sequence
  Description of Artificial Sequence: Synthetic oligonucleotide
  Sense strand starting at position 2993 of SEQ ID NO: 1244824
ggaguucuuuccugcugua

SEQ ID NO: 1517539 - RNA, 19 nt, Artificial Sequence
  Description of Artificial Sequence: Synthetic oligonucleotide
  Antisense strand to SEQ ID NO: 1517538
uacagcaggaaagaacucc

SEQ ID NO: 1517540 - RNA, 19 nt, Artificial Sequence
  Description of Artificial Sequence: Synthetic oligonucleotide
  Sense strand starting at position 3071 of SEQ ID NO: 1244824
gggccauagccuuguguua

SEQ ID NO: 1517541 - RNA, 19 nt, Artificial Sequence
  Description of Artificial Sequence: Synthetic oligonucleotide
  Antisense strand to SEQ ID NO: 1517540
uaacacaaggcuauggccc

SEQ ID NO: 1517542 - RNA, 19 nt, Artificial Sequence
  Description of Artificial Sequence: Synthetic oligonucleotide
  Sense strand starting at position 3073 of SEQ ID NO: 1244824
gccauagccuuguguuaag

SEQ ID NO: 1517543 - RNA, 19 nt, Artificial Sequence
  Description of Artificial Sequence: Synthetic oligonucleotide
  Antisense strand to SEQ ID NO: 1517542
cuuaacacaaggcuauggc

SEQ ID NO: 1517544 - RNA, 19 nt, Artificial Sequence
  Description of Artificial Sequence: Synthetic oligonucleotide
  Sense strand starting at position 3083 of SEQ ID NO: 1244824
uguguuaaguccuuguauu

SEQ ID NO: 1517545 - RNA, 19 nt, Artificial Sequence
  Description of Artificial Sequence: Synthetic oligonucleotide
  Antisense strand to SEQ ID NO: 1517544
aauacaaggacuuaacaca

SEQ ID NO: 1517546 - RNA, 19 nt, Artificial Sequence
  Description of Artificial Sequence: Synthetic oligonucleotide
  Sense strand starting at position 3084 of SEQ ID NO: 1244824
guguuaaguccuuguauuu

SEQ ID NO: 1517547 - RNA, 19 nt, Artificial Sequence
  Description of Artificial Sequence: Synthetic oligonucleotide
  Antisense strand to SEQ ID NO: 1517546
aaauacaaggacuuaacac

SEQ ID NO: 1517548 - RNA, 19 nt, Artificial Sequence
  Description of Artificial Sequence: Synthetic oligonucleotide
  Sense strand starting at position 3181 of SEQ ID NO: 1244824
guuaauauguauuaagagc

SEQ ID NO: 1517549 - RNA, 19 nt, Artificial Sequence
  Description of Artificial Sequence: Synthetic oligonucleotide
  Antisense strand to SEQ ID NO: 1517548
gcucuuaauacauauuaac

SEQ ID NO: 1517550 - RNA, 19 nt, Artificial Sequence
  Description of Artificial Sequence: Synthetic oligonucleotide
  Sense strand starting at position 3481 of SEQ ID NO: 1244824
ccgucugucucucagggaa

SEQ ID NO: 1517551 - RNA, 19 nt, Artificial Sequence
  Description of Artificial Sequence: Synthetic oligonucleotide
  Antisense strand to SEQ ID NO: 1517550
uucccugagagacagacgg

SEQ ID NO: 1517552 - RNA, 19 nt, Artificial Sequence
  Description of Artificial Sequence: Synthetic oligonucleotide
  Sense strand starting at position 3512 of SEQ ID NO: 1244824
aagaguucccuauaugcug

SEQ ID NO: 1517553 - RNA, 19 nt, Artificial Sequence
  Description of Artificial Sequence: Synthetic oligonucleotide
  Antisense strand to SEQ ID NO: 1517552
cagcauauagggaacucuu

SEQ ID NO: 1517554 - RNA, 19 nt, Artificial Sequence
  Description of Artificial Sequence: Synthetic oligonucleotide
  Sense strand starting at position 3575 of SEQ ID NO: 1244824
gcaauaaccuuacagggua

SEQ ID NO: 1517555 - RNA, 19 nt, Artificial Sequence
  Description of Artificial Sequence: Synthetic oligonucleotide
  Antisense strand to SEQ ID NO: 1517554
uacccuguaagguuauugc

SEQ ID NO: 1517556 - RNA, 19 nt, Artificial Sequence
  Description of Artificial Sequence: Synthetic oligonucleotide
  Sense strand starting at position 3587 of SEQ ID NO: 1244824
caggguagauguuauuguu

SEQ ID NO: 1517557 - RNA, 19 nt, Artificial Sequence
  Description of Artificial Sequence: Synthetic oligonucleotide
  Antisense strand to SEQ ID NO: 1517556
aacaauaacaucuacccug

SEQ ID NO: 1517558 - RNA, 19 nt, Artificial Sequence
  Description of Artificial Sequence: Synthetic oligonucleotide
  Sense strand starting at position 3600 of SEQ ID NO: 1244824
auuguuagcucccucguaa

SEQ ID NO: 1517559 - RNA, 19 nt, Artificial Sequence
  Description of Artificial Sequence: Synthetic oligonucleotide
  Antisense strand to SEQ ID NO: 1517558
uuacgagggagcuaacaau

SEQ ID NO: 1517560 - RNA, 19 nt, Artificial Sequence
  Description of Artificial Sequence: Synthetic oligonucleotide
  Sense strand starting at position 3604 of SEQ ID NO: 1244824
uuagcucccucguaaggaa

SEQ ID NO: 1517561 - RNA, 19 nt, Artificial Sequence
  Description of Artificial Sequence: Synthetic oligonucleotide
  Antisense strand to SEQ ID NO: 1517560
uuccuuacgagggagcuaa

SEQ ID NO: 1517562 - RNA, 19 nt, Artificial Sequence
  Description of Artificial Sequence: Synthetic oligonucleotide
  Sense strand starting at position 3706 of SEQ ID NO: 1244824
uuaauuugcucuugauaug

SEQ ID NO: 1517563 - RNA, 19 nt, Artificial Sequence
  Description of Artificial Sequence: Synthetic oligonucleotide
  Antisense strand to SEQ ID NO: 1517562
cauaucaagagcaaauuaa

SEQ ID NO: 1517564 - RNA, 19 nt, Artificial Sequence
  Description of Artificial Sequence: Synthetic oligonucleotide
  Sense strand starting at position 3709 of SEQ ID NO: 1244824
auuugcucuugauauguuu

SEQ ID NO: 1517565 - RNA, 19 nt, Artificial Sequence
  Description of Artificial Sequence: Synthetic oligonucleotide
  Antisense strand to SEQ ID NO: 1517564
aaacauaucaagagcaaau

SEQ ID NO: 1517566 - RNA, 19 nt, Artificial Sequence
  Description of Artificial Sequence: Synthetic oligonucleotide
  Sense strand starting at position 3718 of SEQ ID NO: 1244824
ugauauguuugcugggugu

SEQ ID NO: 1517567 - RNA, 19 nt, Artificial Sequence
  Description of Artificial Sequence: Synthetic oligonucleotide
  Antisense strand to SEQ ID NO: 1517566
acacccagcaaacauauca

SEQ ID NO: 1517568 - RNA, 19 nt, Artificial Sequence
  Description of Artificial Sequence: Synthetic oligonucleotide
  Sense strand starting at position 3778 of SEQ ID NO: 1244824
ucagguauauaugguguca

SEQ ID NO: 1517569 - RNA, 19 nt, Artificial Sequence
  Description of Artificial Sequence: Synthetic oligonucleotide
  Antisense strand to SEQ ID NO: 1517568
ugacaccauauauaccuga

SEQ ID NO: 1517570 - RNA, 19 nt, Artificial Sequence
  Description of Artificial Sequence: Synthetic oligonucleotide
  Sense strand starting at position 3780 of SEQ ID NO: 1244824
agguauauauggugucauu

SEQ ID NO: 1517571 - RNA, 19 nt, Artificial Sequence
  Description of Artificial Sequence: Synthetic oligonucleotide
  Antisense strand to SEQ ID NO: 1517570
aaugacaccauauauaccu

SEQ ID NO: 1517572 - RNA, 19 nt, Artificial Sequence
  Description of Artificial Sequence: Synthetic oligonucleotide
  Sense strand starting at position 3861 of SEQ ID NO: 1244824
uuuagaauaugucuaggga

SEQ ID NO: 1517573 - RNA, 19 nt, Artificial Sequence
  Description of Artificial Sequence: Synthetic oligonucleotide
  Antisense strand to SEQ ID NO: 1517572
ucccuagacauauucuaaa

SEQ ID NO: 1517574 - RNA, 19 nt, Artificial Sequence
  Description of Artificial Sequence: Synthetic oligonucleotide
  Sense strand starting at position 3865 of SEQ ID NO: 1244824
gaauaugucuagggaagau

SEQ ID NO: 1517575 - RNA, 19 nt, Artificial Sequence
  Description of Artificial Sequence: Synthetic oligonucleotide
  Antisense strand to SEQ ID NO: 1517574
aucuucccuagacauauuc

SEQ ID NO: 1517576 - RNA, 19 nt, Artificial Sequence
  Description of Artificial Sequence: Synthetic oligonucleotide
  Sense strand starting at position 3882 of SEQ ID NO: 1244824
auuaaacauuguuuggaca

SEQ ID NO: 1517577 - RNA, 19 nt, Artificial Sequence
  Description of Artificial Sequence: Synthetic oligonucleotide
  Antisense strand to SEQ ID NO: 1517576
uguccaaacaauguuuaau

SEQ ID NO: 1517578 - RNA, 19 nt, Artificial Sequence
  Description of Artificial Sequence: Synthetic oligonucleotide
  Sense strand starting at position 3883 of SEQ ID NO: 1244824
uuaaacauuguuuggacau

SEQ ID NO: 1517579 - RNA, 19 nt, Artificial Sequence
  Description of Artificial Sequence: Synthetic oligonucleotide
  Antisense strand to SEQ ID NO: 1517578
auguccaaacaauguuuaa

SEQ ID NO: 1517580 - RNA, 19 nt, Artificial Sequence
  Description of Artificial Sequence: Synthetic oligonucleotide
  Sense strand starting at position 46 of SEQ ID NO: 1244825
cccggaagaacugguuguu

SEQ ID NO: 1517581 - RNA, 19 nt, Artificial Sequence
  Description of Artificial Sequence: Synthetic oligonucleotide
  Antisense strand to SEQ ID NO: 1517580
aacaaccaguucuuccggg

SEQ ID NO: 1517582 - RNA, 19 nt, Artificial Sequence
  Description of Artificial Sequence: Synthetic oligonucleotide
  Sense strand starting at position 82 of SEQ ID NO: 1244825
cgucuuuguccacagugaa

SEQ ID NO: 1517583 - RNA, 19 nt, Artificial Sequence
  Description of Artificial Sequence: Synthetic oligonucleotide
  Antisense strand to SEQ ID NO: 1517582
uucacuguggacaaagacg

SEQ ID NO: 1517584 - RNA, 19 nt, Artificial Sequence
  Description of Artificial Sequence: Synthetic oligonucleotide
  Sense strand starting at position 124 of SEQ ID NO: 1244825
ugugcuccucgggagucau

SEQ ID NO: 1517585 - RNA, 19 nt, Artificial Sequence
  Description of Artificial Sequence: Synthetic oligonucleotide
  Antisense strand to SEQ ID NO: 1517584
augacucccgaggagcaca

SEQ ID NO: 1517586 - RNA, 19 nt, Artificial Sequence
  Description of Artificial Sequence: Synthetic oligonucleotide
  Sense strand starting at position 589 of SEQ ID NO: 1244825
ggacgucagcgccuaguua

SEQ ID NO: 1517587 - RNA, 19 nt, Artificial Sequence
  Description of Artificial Sequence: Synthetic oligonucleotide
  Antisense strand to SEQ ID NO: 1517586
uaacuaggcgcugacgucc

SEQ ID NO: 1517588 - RNA, 19 nt, Artificial Sequence
  Description of Artificial Sequence: Synthetic oligonucleotide
  Sense strand starting at position 600 of SEQ ID NO: 1244825
ccuaguuaagucuguugaa

SEQ ID NO: 1517589 - RNA, 19 nt, Artificial Sequence
  Description of Artificial Sequence: Synthetic oligonucleotide
  Antisense strand to SEQ ID NO: 1517588
uucaacagacuuaacuagg

SEQ ID NO: 1517590 - RNA, 19 nt, Artificial Sequence
  Description of Artificial Sequence: Synthetic oligonucleotide
  Sense strand starting at position 601 of SEQ ID NO: 1244825
cuaguuaagucuguugaac

SEQ ID NO: 1517591 - RNA, 19 nt, Artificial Sequence
  Description of Artificial Sequence: Synthetic oligonucleotide
  Antisense strand to SEQ ID NO: 1517590
guucaacagacuuaacuag

SEQ ID NO: 1517592 - RNA, 19 nt, Artificial Sequence
  Description of Artificial Sequence: Synthetic oligonucleotide
  Sense strand starting at position 607 of SEQ ID NO: 1244825
aagucuguugaacgagaau

SEQ ID NO: 1517593 - RNA, 19 nt, Artificial Sequence
  Description of Artificial Sequence: Synthetic oligonucleotide
  Antisense strand to SEQ ID NO: 1517592
auucucguucaacagacuu

SEQ ID NO: 1517594 - RNA, 19 nt, Artificial Sequence
  Description of Artificial Sequence: Synthetic oligonucleotide
  Sense strand starting at position 610 of SEQ ID NO: 1244825
ucuguugaacgagaauucu

SEQ ID NO: 1517595 - RNA, 19 nt, Artificial Sequence
  Description of Artificial Sequence: Synthetic oligonucleotide
  Antisense strand to SEQ ID NO: 1517594
agaauucucguucaacaga

SEQ ID NO: 1517596 - RNA, 19 nt, Artificial Sequence
  Description of Artificial Sequence: Synthetic oligonucleotide
  Sense strand starting at position 674 of SEQ ID NO: 1244825
gagugcuugguuuaaugac

SEQ ID NO: 1517597 - RNA, 19 nt, Artificial Sequence
  Description of Artificial Sequence: Synthetic oligonucleotide
  Antisense strand to SEQ ID NO: 1517596
gucauuaaaccaagcacuc

SEQ ID NO: 1517598 - RNA, 19 nt, Artificial Sequence
  Description of Artificial Sequence: Synthetic oligonucleotide
  Sense strand starting at position 681 of SEQ ID NO: 1244825
ugguuuaaugacugcacuu

SEQ ID NO: 1517599 - RNA, 19 nt, Artificial Sequence
  Description of Artificial Sequence: Synthetic oligonucleotide
  Antisense strand to SEQ ID NO: 1517598
aagugcagucauuaaacca

SEQ ID NO: 1517600 - RNA, 19 nt, Artificial Sequence
  Description of Artificial Sequence: Synthetic oligonucleotide
  Sense strand starting at position 683 of SEQ ID NO: 1244825
guuuaaugacugcacuuau

SEQ ID NO: 1517601 - RNA, 19 nt, Artificial Sequence
  Description of Artificial Sequence: Synthetic oligonucleotide
  Antisense strand to SEQ ID NO: 1517600
auaagugcagucauuaaac

SEQ ID NO: 1517602 - RNA, 19 nt, Artificial Sequence
  Description of Artificial Sequence: Synthetic oligonucleotide
  Sense strand starting at position 925 of SEQ ID NO: 1244825
cguggacucguggcuguaa

SEQ ID NO: 1517603 - RNA, 19 nt, Artificial Sequence
  Description of Artificial Sequence: Synthetic oligonucleotide
  Antisense strand to SEQ ID NO: 1517602
uuacagccacgaguccacg

SEQ ID NO: 1517604 - RNA, 19 nt, Artificial Sequence
  Description of Artificial Sequence: Synthetic oligonucleotide
  Sense strand starting at position 927 of SEQ ID NO: 1244825
uggacucguggcuguaaua

SEQ ID NO: 1517605 - RNA, 19 nt, Artificial Sequence
  Description of Artificial Sequence: Synthetic oligonucleotide
  Antisense strand to SEQ ID NO: 1517604
uauuacagccacgagucca

SEQ ID NO: 1517606 - RNA, 19 nt, Artificial Sequence
  Description of Artificial Sequence: Synthetic oligonucleotide
  Sense strand starting at position 972 of SEQ ID NO: 1244825
cgcggauugacacaucaau

SEQ ID NO: 1517607 - RNA, 19 nt, Artificial Sequence
  Description of Artificial Sequence: Synthetic oligonucleotide
  Antisense strand to SEQ ID NO: 1517606
auugaugugucaauccgcg

SEQ ID NO: 1517608 - RNA, 19 nt, Artificial Sequence
  Description of Artificial Sequence: Synthetic oligonucleotide
  Sense strand starting at position 1377 of SEQ ID NO: 1244825
cuuugauugcuuuaucggu

SEQ ID NO: 1517609 - RNA, 19 nt, Artificial Sequence
  Description of Artificial Sequence: Synthetic oligonucleotide
  Antisense strand to SEQ ID NO: 1517608
accgauaaagcaaucaaag

SEQ ID NO: 1517610 - RNA, 19 nt, Artificial Sequence
  Description of Artificial Sequence: Synthetic oligonucleotide
  Sense strand starting at position 1384 of SEQ ID NO: 1244825
ugcuuuaucgguguguuca

SEQ ID NO: 1517611 - RNA, 19 nt, Artificial Sequence
  Description of Artificial Sequence: Synthetic oligonucleotide
  Antisense strand to SEQ ID NO: 1517610
ugaacacaccgauaaagca

SEQ ID NO: 1517612 - RNA, 19 nt, Artificial Sequence
  Description of Artificial Sequence: Synthetic oligonucleotide
  Sense strand starting at position 1683 of SEQ ID NO: 1244825
gauggagaacugcaugcau

SEQ ID NO: 1517613 - RNA, 19 nt, Artificial Sequence
  Description of Artificial Sequence: Synthetic oligonucleotide
  Antisense strand to SEQ ID NO: 1517612
augcaugcaguucuccauc

SEQ ID NO: 1517614 - RNA, 19 nt, Artificial Sequence
  Description of Artificial Sequence: Synthetic oligonucleotide
  Sense strand starting at position 1685 of SEQ ID NO: 1244825
uggagaacugcaugcaugu

SEQ ID NO: 1517615 - RNA, 19 nt, Artificial Sequence
  Description of Artificial Sequence: Synthetic oligonucleotide
  Antisense strand to SEQ ID NO: 1517614
acaugcaugcaguucucca

SEQ ID NO: 1517616 - RNA, 19 nt, Artificial Sequence
  Description of Artificial Sequence: Synthetic oligonucleotide
  Sense strand starting at position 1857 of SEQ ID NO: 1244825
cuaaauggcgaguguaauu

SEQ ID NO: 1517617 - RNA, 19 nt, Artificial Sequence
  Description of Artificial Sequence: Synthetic oligonucleotide
  Antisense strand to SEQ ID NO: 1517616
aauuacacucgccauuuag

SEQ ID NO: 1517618 - RNA, 19 nt, Artificial Sequence
  Description of Artificial Sequence: Synthetic oligonucleotide
  Sense strand starting at position 1869 of SEQ ID NO: 1244825
uguaauuaggcgcaauuaa

SEQ ID NO: 1517619 - RNA, 19 nt, Artificial Sequence
  Description of Artificial Sequence: Synthetic oligonucleotide
  Antisense strand to SEQ ID NO: 1517618
uuaauugcgccuaauuaca

SEQ ID NO: 1517620 - RNA, 19 nt, Artificial Sequence
  Description of Artificial Sequence: Synthetic oligonucleotide
  Sense strand starting at position 2031 of SEQ ID NO: 1244825
gagggccugcaaugaauua

SEQ ID NO: 1517621 - RNA, 19 nt, Artificial Sequence
  Description of Artificial Sequence: Synthetic oligonucleotide
  Antisense strand to SEQ ID NO: 1517620
uaauucauugcaggcccuc

SEQ ID NO: 1517622 - RNA, 19 nt, Artificial Sequence
  Description of Artificial Sequence: Synthetic oligonucleotide
  Sense strand starting at position 2049 of SEQ ID NO: 1244825
acaugugauuggccacaua

SEQ ID NO: 1517623 - RNA, 19 nt, Artificial Sequence
  Description of Artificial Sequence: Synthetic oligonucleotide
  Antisense strand to SEQ ID NO: 1517622
uauguggccaaucacaugu

SEQ ID NO: 1517624 - RNA, 19 nt, Artificial Sequence
  Description of Artificial Sequence: Synthetic oligonucleotide
  Sense strand starting at position 2052 of SEQ ID NO: 1244825
ugugauuggccacauacaa

SEQ ID NO: 1517625 - RNA, 19 nt, Artificial Sequence
  Description of Artificial Sequence: Synthetic oligonucleotide
  Antisense strand to SEQ ID NO: 1517624
uuguauguggccaaucaca

SEQ ID NO: 1517626 - RNA, 19 nt, Artificial Sequence
  Description of Artificial Sequence: Synthetic oligonucleotide
  Sense strand starting at position 2320 of SEQ ID NO: 1244825
cuuauuacauuuguacgua

SEQ ID NO: 1517627 - RNA, 19 nt, Artificial Sequence
  Description of Artificial Sequence: Synthetic oligonucleotide
  Antisense strand to SEQ ID NO: 1517626
uacguacaaauguaauaag

SEQ ID NO: 1517628 - RNA, 19 nt, Artificial Sequence
  Description of Artificial Sequence: Synthetic oligonucleotide
  Sense strand starting at position 2324 of SEQ ID NO: 1244825
uuacauuuguacguagauu

SEQ ID NO: 1517629 - RNA, 19 nt, Artificial Sequence
  Description of Artificial Sequence: Synthetic oligonucleotide
  Antisense strand to SEQ ID NO: 1517628
aaucuacguacaaauguaa

SEQ ID NO: 1517630 - RNA, 19 nt, Artificial Sequence
  Description of Artificial Sequence: Synthetic oligonucleotide
  Sense strand starting at position 2585 of SEQ ID NO: 1244825
ugggcuaccuggucuuuga

SEQ ID NO: 1517631 - RNA, 19 nt, Artificial Sequence
  Description of Artificial Sequence: Synthetic oligonucleotide
  Antisense strand to SEQ ID NO: 1517630
ucaaagaccagguagccca

SEQ ID NO: 1517632 - RNA, 19 nt, Artificial Sequence
  Description of Artificial Sequence: Synthetic oligonucleotide
  Sense strand starting at position 2765 of SEQ ID NO: 1244825
agggaagcccgaugaauau

SEQ ID NO: 1517633 - RNA, 19 nt, Artificial Sequence
  Description of Artificial Sequence: Synthetic oligonucleotide
  Antisense strand to SEQ ID NO: 1517632
auauucaucgggcuucccu

SEQ ID NO: 1517634 - RNA, 19 nt, Artificial Sequence
  Description of Artificial Sequence: Synthetic oligonucleotide
  Sense strand starting at position 2771 of SEQ ID NO: 1244825
gcccgaugaauauguaaac

SEQ ID NO: 1517635 - RNA, 19 nt, Artificial Sequence
  Description of Artificial Sequence: Synthetic oligonucleotide
  Antisense strand to SEQ ID NO: 1517634
guuuacauauucaucgggc

SEQ ID NO: 1517636 - RNA, 19 nt, Artificial Sequence
  Description of Artificial Sequence: Synthetic oligonucleotide
  Sense strand starting at position 2772 of SEQ ID NO: 1244825
cccgaugaauauguaaaca

SEQ ID NO: 1517637 - RNA, 19 nt, Artificial Sequence
  Description of Artificial Sequence: Synthetic oligonucleotide
  Antisense strand to SEQ ID NO: 1517636
uguuuacauauucaucggg

SEQ ID NO: 1517638 - RNA, 19 nt, Artificial Sequence
  Description of Artificial Sequence: Synthetic oligonucleotide
  Sense strand starting at position 3178 of SEQ ID NO: 1244825
ucaguaaacauccgucagu

SEQ ID NO: 1517639 - RNA, 19 nt, Artificial Sequence
  Description of Artificial Sequence: Synthetic oligonucleotide
  Antisense strand to SEQ ID NO: 1517638
acugacggauguuuacuga

SEQ ID NO: 1517640 - RNA, 19 nt, Artificial Sequence
  Description of Artificial Sequence: Synthetic oligonucleotide
  Sense strand starting at position 3224 of SEQ ID NO: 1244825
agaugaaaggcuggaaugu

SEQ ID NO: 1517641 - RNA, 19 nt, Artificial Sequence
  Description of Artificial Sequence: Synthetic oligonucleotide
  Antisense strand to SEQ ID NO: 1517640
acauuccagccuuucaucu

SEQ ID NO: 1517642 - RNA, 19 nt, Artificial Sequence
  Description of Artificial Sequence: Synthetic oligonucleotide
  Sense strand starting at position 3298 of SEQ ID NO: 1244825
cgggccucucauuggugau

SEQ ID NO: 1517643 - RNA, 19 nt, Artificial Sequence
  Description of Artificial Sequence: Synthetic oligonucleotide
  Antisense strand to SEQ ID NO: 1517642
aucaccaaugagaggcccg

SEQ ID NO: 1517644 - RNA, 19 nt, Artificial Sequence
  Description of Artificial Sequence: Synthetic oligonucleotide
  Sense strand starting at position 3299 of SEQ ID NO: 1244825
gggccucucauuggugaug

SEQ ID NO: 1517645 - RNA, 19 nt, Artificial Sequence
  Description of Artificial Sequence: Synthetic oligonucleotide
  Antisense strand to SEQ ID NO: 1517644
caucaccaaugagaggccc

SEQ ID NO: 1517646 - RNA, 19 nt, Artificial Sequence
  Description of Artificial Sequence: Synthetic oligonucleotide
  Sense strand starting at position 3581 of SEQ ID NO: 1244825
gagugaguucgguagcuca

SEQ ID NO: 1517647 - RNA, 19 nt, Artificial Sequence
  Description of Artificial Sequence: Synthetic oligonucleotide
  Antisense strand to SEQ ID NO: 1517646
ugagcuaccgaacucacuc

SEQ ID NO: 1517648 - RNA, 19 nt, Artificial Sequence
  Description of Artificial Sequence: Synthetic oligonucleotide
  Sense strand starting at position 3790 of SEQ ID NO: 1244825
ugcuuccuaccugaagaaa

SEQ ID NO: 1517649 - RNA, 19 nt, Artificial Sequence
  Description of Artificial Sequence: Synthetic oligonucleotide
  Antisense strand to SEQ ID NO: 1517648
uuucuucagguaggaagca

SEQ ID NO: 1517650 - RNA, 19 nt, Artificial Sequence
  Description of Artificial Sequence: Synthetic oligonucleotide
  Sense strand starting at position 3964 of SEQ ID NO: 1244825
gguggaacagguuauguga

SEQ ID NO: 1517651 - RNA, 19 nt, Artificial Sequence
  Description of Artificial Sequence: Synthetic oligonucleotide
  Antisense strand to SEQ ID NO: 1517650
ucacauaaccuguuccacc

SEQ ID NO: 1517652 - RNA, 19 nt, Artificial Sequence
  Description of Artificial Sequence: Synthetic oligonucleotide
  Sense strand starting at position 3967 of SEQ ID NO: 1244825
ggaacagguuaugugauga

SEQ ID NO: 1517653 - RNA, 19 nt, Artificial Sequence
  Description of Artificial Sequence: Synthetic oligonucleotide
  Antisense strand to SEQ ID NO: 1517652
ucaucacauaaccuguucc

SEQ ID NO: 1517654 - RNA, 19 nt, Artificial Sequence
  Description of Artificial Sequence: Synthetic oligonucleotide
  Sense strand starting at position 3975 of SEQ ID NO: 1244825
uuaugugaugaucgccaca

SEQ ID NO: 1517655 - RNA, 19 nt, Artificial Sequence
  Description of Artificial Sequence: Synthetic oligonucleotide
  Antisense strand to SEQ ID NO: 1517654
uguggcgaucaucacauaa

SEQ ID NO: 1517656 - RNA, 19 nt, Artificial Sequence
  Description of Artificial Sequence: Synthetic oligonucleotide
  Sense strand starting at position 3977 of SEQ ID NO: 1244825
augugaugaucgccacacu

SEQ ID NO: 1517657 - RNA, 19 nt, Artificial Sequence
  Description of Artificial Sequence: Synthetic oligonucleotide
  Antisense strand to SEQ ID NO: 1517656
aguguggcgaucaucacau

SEQ ID NO: 1517658 - RNA, 19 nt, Artificial Sequence
  Description of Artificial Sequence: Synthetic oligonucleotide
  Sense strand starting at position 3978 of SEQ ID NO: 1244825
ugugaugaucgccacacuu

SEQ ID NO: 1517659 - RNA, 19 nt, Artificial Sequence
  Description of Artificial Sequence: Synthetic oligonucleotide
  Antisense strand to SEQ ID NO: 1517658
aaguguggcgaucaucaca

SEQ ID NO: 1517660 - RNA, 19 nt, Artificial Sequence
  Description of Artificial Sequence: Synthetic oligonucleotide
  Sense strand starting at position 31 of SEQ ID NO: 1244826
uuggaagaauguuuguaua

SEQ ID NO: 1517661 - RNA, 19 nt, Artificial Sequence
  Description of Artificial Sequence: Synthetic oligonucleotide
  Antisense strand to SEQ ID NO: 1517660
uauacaaacauucuuccaa

SEQ ID NO: 1517662 - RNA, 19 nt, Artificial Sequence
  Description of Artificial Sequence: Synthetic oligonucleotide
  Sense strand starting at position 33 of SEQ ID NO: 1244826
ggaagaauguuuguauaug

SEQ ID NO: 1517663 - RNA, 19 nt, Artificial Sequence
  Description of Artificial Sequence: Synthetic oligonucleotide
  Antisense strand to SEQ ID NO: 1517662
cauauacaaacauucuucc

SEQ ID NO: 1517664 - RNA, 19 nt, Artificial Sequence
  Description of Artificial Sequence: Synthetic oligonucleotide
  Sense strand starting at position 56 of SEQ ID NO: 1244826
gugggcacccucuguaaga

SEQ ID NO: 1517665 - RNA, 19 nt, Artificial Sequence
  Description of Artificial Sequence: Synthetic oligonucleotide
  Antisense strand to SEQ ID NO: 1517664
ucuuacagagggugcccac

SEQ ID NO: 1517666 - RNA, 19 nt, Artificial Sequence
  Description of Artificial Sequence: Synthetic oligonucleotide
  Sense strand starting at position 160 of SEQ ID NO: 1244826
uugggaaguuacuucucua

SEQ ID NO: 1517667 - RNA, 19 nt, Artificial Sequence
  Description of Artificial Sequence: Synthetic oligonucleotide
  Antisense strand to SEQ ID NO: 1517666
uagagaaguaacuucccaa

SEQ ID NO: 1517668 - RNA, 19 nt, Artificial Sequence
  Description of Artificial Sequence: Synthetic oligonucleotide
  Sense strand starting at position 163 of SEQ ID NO: 1244826
ggaaguuacuucucuaagc

SEQ ID NO: 1517669 - RNA, 19 nt, Artificial Sequence
  Description of Artificial Sequence: Synthetic oligonucleotide
  Antisense strand to SEQ ID NO: 1517668
gcuuagagaaguaacuucc

SEQ ID NO: 1517670 - RNA, 19 nt, Artificial Sequence
  Description of Artificial Sequence: Synthetic oligonucleotide
  Sense strand starting at position 165 of SEQ ID NO: 1244826
aaguuacuucucuaagcgu

SEQ ID NO: 1517671 - RNA, 19 nt, Artificial Sequence
  Description of Artificial Sequence: Synthetic oligonucleotide
  Antisense strand to SEQ ID NO: 1517670
acgcuuagagaaguaacuu

SEQ ID NO: 1517672 - RNA, 19 nt, Artificial Sequence
  Description of Artificial Sequence: Synthetic oligonucleotide
  Sense strand starting at position 365 of SEQ ID NO: 1244826
auagaauguugcucuauca

SEQ ID NO: 1517673 - RNA, 19 nt, Artificial Sequence
  Description of Artificial Sequence: Synthetic oligonucleotide
  Antisense strand to SEQ ID NO: 1517672
ugauagagcaacauucuau

SEQ ID NO: 1517674 - RNA, 19 nt, Artificial Sequence
  Description of Artificial Sequence: Synthetic oligonucleotide
  Sense strand starting at position 758 of SEQ ID NO: 1244826
ugaacuuuguaguuaauac

SEQ ID NO: 1517675 - RNA, 19 nt, Artificial Sequence
  Description of Artificial Sequence: Synthetic oligonucleotide
  Antisense strand to SEQ ID NO: 1517674
guauuaacuacaaaguuca

SEQ ID NO: 1517676 - RNA, 19 nt, Artificial Sequence
  Description of Artificial Sequence: Synthetic oligonucleotide
  Sense strand starting at position 861 of SEQ ID NO: 1244826
agcguuucuaaugaggauu

SEQ ID NO: 1517677 - RNA, 19 nt, Artificial Sequence
  Description of Artificial Sequence: Synthetic oligonucleotide
  Antisense strand to SEQ ID NO: 1517676
aauccucauuagaaacgcu

SEQ ID NO: 1517678 - RNA, 19 nt, Artificial Sequence
  Description of Artificial Sequence: Synthetic oligonucleotide
  Sense strand starting at position 907 of SEQ ID NO: 1244826
aaguguucugaucaaucag

SEQ ID NO: 1517679 - RNA, 19 nt, Artificial Sequence
  Description of Artificial Sequence: Synthetic oligonucleotide
  Antisense strand to SEQ ID NO: 1517678
cugauugaucagaacacuu

SEQ ID NO: 1517680 - RNA, 19 nt, Artificial Sequence
  Description of Artificial Sequence: Synthetic oligonucleotide
  Sense strand starting at position 925 of SEQ ID NO: 1244826
guaacagauuuggaaugga

SEQ ID NO: 1517681 - RNA, 19 nt, Artificial Sequence
  Description of Artificial Sequence: Synthetic oligonucleotide
  Antisense strand to SEQ ID NO: 1517680
uccauuccaaaucuguuac

SEQ ID NO: 1517682 - RNA, 19 nt, Artificial Sequence
  Description of Artificial Sequence: Synthetic oligonucleotide
  Sense strand starting at position 993 of SEQ ID NO: 1244826
acgugagcaucuuuaagac

SEQ ID NO: 1517683 - RNA, 19 nt, Artificial Sequence
  Description of Artificial Sequence: Synthetic oligonucleotide
  Antisense strand to SEQ ID NO: 1517682
gucuuaaagaugcucacgu

SEQ ID NO: 1517684 - RNA, 19 nt, Artificial Sequence
  Description of Artificial Sequence: Synthetic oligonucleotide
  Sense strand starting at position 999 of SEQ ID NO: 1244826
gcaucuuuaagacggaguu

SEQ ID NO: 1517685 - RNA, 19 nt, Artificial Sequence
  Description of Artificial Sequence: Synthetic oligonucleotide
  Antisense strand to SEQ ID NO: 1517684
aacuccgucuuaaagaugc

SEQ ID NO: 1517686 - RNA, 19 nt, Artificial Sequence
  Description of Artificial Sequence: Synthetic oligonucleotide
  Sense strand starting at position 1220 of SEQ ID NO: 1244826
acuacuuuguggccaauau

SEQ ID NO: 1517687 - RNA, 19 nt, Artificial Sequence
  Description of Artificial Sequence: Synthetic oligonucleotide
  Antisense strand to SEQ ID NO: 1517686
auauuggccacaaaguagu

SEQ ID NO: 1517688 - RNA, 19 nt, Artificial Sequence
  Description of Artificial Sequence: Synthetic oligonucleotide
  Sense strand starting at position 1221 of SEQ ID NO: 1244826
cuacuuuguggccaauaua

SEQ ID NO: 1517689 - RNA, 19 nt, Artificial Sequence
  Description of Artificial Sequence: Synthetic oligonucleotide
  Antisense strand to SEQ ID NO: 1517688
uauauuggccacaaaguag

SEQ ID NO: 1517690 - RNA, 19 nt, Artificial Sequence
  Description of Artificial Sequence: Synthetic oligonucleotide
  Sense strand starting at position 1305 of SEQ ID NO: 1244826
cuagguuauguuuagcaau

SEQ ID NO: 1517691 - RNA, 19 nt, Artificial Sequence
  Description of Artificial Sequence: Synthetic oligonucleotide
  Antisense strand to SEQ ID NO: 1517690
auugcuaaacauaaccuag

SEQ ID NO: 1517692 - RNA, 19 nt, Artificial Sequence
  Description of Artificial Sequence: Synthetic oligonucleotide
  Sense strand starting at position 1307 of SEQ ID NO: 1244826
agguuauguuuagcaaucu

SEQ ID NO: 1517693 - RNA, 19 nt, Artificial Sequence
  Description of Artificial Sequence: Synthetic oligonucleotide
  Antisense strand to SEQ ID NO: 1517692
agauugcuaaacauaaccu

SEQ ID NO: 1517694 - RNA, 19 nt, Artificial Sequence
  Description of Artificial Sequence: Synthetic oligonucleotide
  Sense strand starting at position 1426 of SEQ ID NO: 1244826
ggaagugaguaucccgaca

SEQ ID NO: 1517695 - RNA, 19 nt, Artificial Sequence
  Description of Artificial Sequence: Synthetic oligonucleotide
  Antisense strand to SEQ ID NO: 1517694
ugucgggauacucacuucc

SEQ ID NO: 1517696 - RNA, 19 nt, Artificial Sequence
  Description of Artificial Sequence: Synthetic oligonucleotide
  Sense strand starting at position 2295 of SEQ ID NO: 1244826
ggagauuucuccuauuucg

SEQ ID NO: 1517697 - RNA, 19 nt, Artificial Sequence
  Description of Artificial Sequence: Synthetic oligonucleotide
  Antisense strand to SEQ ID NO: 1517696
cgaaauaggagaaaucucc

SEQ ID NO: 1517698 - RNA, 19 nt, Artificial Sequence
  Description of Artificial Sequence: Synthetic oligonucleotide
  Sense strand starting at position 2325 of SEQ ID NO: 1244826
gaagauacgcuccggaaga

SEQ ID NO: 1517699 - RNA, 19 nt, Artificial Sequence
  Description of Artificial Sequence: Synthetic oligonucleotide
  Antisense strand to SEQ ID NO: 1517698
ucuuccggagcguaucuuc

SEQ ID NO: 1517700 - RNA, 19 nt, Artificial Sequence
  Description of Artificial Sequence: Synthetic oligonucleotide
  Sense strand starting at position 2361 of SEQ ID NO: 1244826
caaggagucuccguaggac

SEQ ID NO: 1517701 - RNA, 19 nt, Artificial Sequence
  Description of Artificial Sequence: Synthetic oligonucleotide
  Antisense strand to SEQ ID NO: 1517700
guccuacggagacuccuug

SEQ ID NO: 1517702 - RNA, 19 nt, Artificial Sequence
  Description of Artificial Sequence: Synthetic oligonucleotide
  Sense strand starting at position 2563 of SEQ ID NO: 1244826
gccgcugucgcuuuacaga

SEQ ID NO: 1517703 - RNA, 19 nt, Artificial Sequence
  Description of Artificial Sequence: Synthetic oligonucleotide
  Antisense strand to SEQ ID NO: 1517702
ucuguaaagcgacagcggc

SEQ ID NO: 1517704 - RNA, 19 nt, Artificial Sequence
  Description of Artificial Sequence: Synthetic oligonucleotide
  Sense strand starting at position 2568 of SEQ ID NO: 1244826
ugucgcuuuacagaaauug

SEQ ID NO: 1517705 - RNA, 19 nt, Artificial Sequence
  Description of Artificial Sequence: Synthetic oligonucleotide
  Antisense strand to SEQ ID NO: 1517704
caauuucuguaaagcgaca

SEQ ID NO: 1517706 - RNA, 19 nt, Artificial Sequence
  Description of Artificial Sequence: Synthetic oligonucleotide
  Sense strand starting at position 2635 of SEQ ID NO: 1244826
auggucgugcucuaaucau

SEQ ID NO: 1517707 - RNA, 19 nt, Artificial Sequence
  Description of Artificial Sequence: Synthetic oligonucleotide
  Antisense strand to SEQ ID NO: 1517706
augauuagagcacgaccau

SEQ ID NO: 1517708 - RNA, 19 nt, Artificial Sequence
  Description of Artificial Sequence: Synthetic oligonucleotide
  Sense strand starting at position 2641 of SEQ ID NO: 1244826
gugcucuaaucauuacagu

SEQ ID NO: 1517709 - RNA, 19 nt, Artificial Sequence
  Description of Artificial Sequence: Synthetic oligonucleotide
  Antisense strand to SEQ ID NO: 1517708
acuguaaugauuagagcac

SEQ ID NO: 1517710 - RNA, 19 nt, Artificial Sequence
  Description of Artificial Sequence: Synthetic oligonucleotide
  Sense strand starting at position 3169 of SEQ ID NO: 1244826
gcgcgcaguccuccuaaga

SEQ ID NO: 1517711 - RNA, 19 nt, Artificial Sequence
  Description of Artificial Sequence: Synthetic oligonucleotide
  Antisense strand to SEQ ID NO: 1517710
ucuuaggaggacugcgcgc

SEQ ID NO: 1517712 - RNA, 19 nt, Artificial Sequence
  Description of Artificial Sequence: Synthetic oligonucleotide
  Sense strand starting at position 3520 of SEQ ID NO: 1244826
uagacacaucgguauuguu

SEQ ID NO: 1517713 - RNA, 19 nt, Artificial Sequence
  Description of Artificial Sequence: Synthetic oligonucleotide
  Antisense strand to SEQ ID NO: 1517712
aacaauaccgaugugucua

SEQ ID NO: 1517714 - RNA, 19 nt, Artificial Sequence
  Description of Artificial Sequence: Synthetic oligonucleotide
  Sense strand starting at position 3549 of SEQ ID NO: 1244826
aaaggugggucuguaugua

SEQ ID NO: 1517715 - RNA, 19 nt, Artificial Sequence
  Description of Artificial Sequence: Synthetic oligonucleotide
  Antisense strand to SEQ ID NO: 1517714
uacauacagacccaccuuu

SEQ ID NO: 1517716 - RNA, 19 nt, Artificial Sequence
  Description of Artificial Sequence: Synthetic oligonucleotide
  Sense strand starting at position 3553 of SEQ ID NO: 1244826
gugggucuguauguauuga

SEQ ID NO: 1517717 - RNA, 19 nt, Artificial Sequence
  Description of Artificial Sequence: Synthetic oligonucleotide
  Antisense strand to SEQ ID NO: 1517716
ucaauacauacagacccac

SEQ ID NO: 1517718 - RNA, 19 nt, Artificial Sequence
  Description of Artificial Sequence: Synthetic oligonucleotide
  Sense strand starting at position 3600 of SEQ ID NO: 1244826
aaacgauaggcauaaaugu

SEQ ID NO: 1517719 - RNA, 19 nt, Artificial Sequence
  Description of Artificial Sequence: Synthetic oligonucleotide
  Antisense strand to SEQ ID NO: 1517718
acauuuaugccuaucguuu

SEQ ID NO: 1517720 - RNA, 19 nt, Artificial Sequence
  Description of Artificial Sequence: Synthetic oligonucleotide
  Sense strand starting at position 3625 of SEQ ID NO: 1244826
guagguauacuaugaucuc

SEQ ID NO: 1517721 - RNA, 19 nt, Artificial Sequence
  Description of Artificial Sequence: Synthetic oligonucleotide
  Antisense strand to SEQ ID NO: 1517720
gagaucauaguauaccuac

SEQ ID NO: 1517722 - RNA, 19 nt, Artificial Sequence
  Description of Artificial Sequence: Synthetic oligonucleotide
  Sense strand starting at position 3628 of SEQ ID NO: 1244826
gguauacuaugaucucuaa

SEQ ID NO: 1517723 - RNA, 19 nt, Artificial Sequence
  Description of Artificial Sequence: Synthetic oligonucleotide
  Antisense strand to SEQ ID NO: 1517722
uuagagaucauaguauacc

SEQ ID NO: 1517724 - RNA, 19 nt, Artificial Sequence
  Description of Artificial Sequence: Synthetic oligonucleotide
  Sense strand starting at position 3687 of SEQ ID NO: 1244826
gaaagaaugugguccuaaa

SEQ ID NO: 1517725 - RNA, 19 nt, Artificial Sequence
  Description of Artificial Sequence: Synthetic oligonucleotide
  Antisense strand to SEQ ID NO: 1517724
uuuaggaccacauucuuuc

SEQ ID NO: 1517726 - RNA, 19 nt, Artificial Sequence
  Description of Artificial Sequence: Synthetic oligonucleotide
  Sense strand starting at position 3715 of SEQ ID NO: 1244826
ugauuaucuugggaaggaa

SEQ ID NO: 1517727 - RNA, 19 nt, Artificial Sequence
  Description of Artificial Sequence: Synthetic oligonucleotide
  Antisense strand to SEQ ID NO: 1517726
uuccuucccaagauaauca

SEQ ID NO: 1517728 - RNA, 19 nt, Artificial Sequence
  Description of Artificial Sequence: Synthetic oligonucleotide
  Sense strand starting at position 3747 of SEQ ID NO: 1244826
gggaacugucacugucugu

SEQ ID NO: 1517729 - RNA, 19 nt, Artificial Sequence
  Description of Artificial Sequence: Synthetic oligonucleotide
  Antisense strand to SEQ ID NO: 1517728
acagacagugacaguuccc

SEQ ID NO: 1517730 - RNA, 19 nt, Artificial Sequence
  Description of Artificial Sequence: Synthetic oligonucleotide
  Sense strand starting at position 3758 of SEQ ID NO: 1244826
cugucugucucuuugaaca

SEQ ID NO: 1517731 - RNA, 19 nt, Artificial Sequence
  Description of Artificial Sequence: Synthetic oligonucleotide
  Antisense strand to SEQ ID NO: 1517730
uguucaaagagacagacag

SEQ ID NO: 1517732 - RNA, 19 nt, Artificial Sequence
  Description of Artificial Sequence: Synthetic oligonucleotide
  Sense strand starting at position 3871 of SEQ ID NO: 1244826
uacguaaaucguggagaaa

SEQ ID NO: 1517733 - RNA, 19 nt, Artificial Sequence
  Description of Artificial Sequence: Synthetic oligonucleotide
  Antisense strand to SEQ ID NO: 1517732
uuucuccacgauuuacgua

SEQ ID NO: 1517734 - RNA, 19 nt, Artificial Sequence
  Description of Artificial Sequence: Synthetic oligonucleotide
  Sense strand starting at position 3872 of SEQ ID NO: 1244826
acguaaaucguggagaaac

SEQ ID NO: 1517735 - RNA, 19 nt, Artificial Sequence
  Description of Artificial Sequence: Synthetic oligonucleotide
  Antisense strand to SEQ ID NO: 1517734
guuucuccacgauuuacgu

SEQ ID NO: 1517736 - RNA, 19 nt, Artificial Sequence
  Description of Artificial Sequence: Synthetic oligonucleotide
  Sense strand starting at position 3965 of SEQ ID NO: 1244826
agacacaaguuauauuuga

SEQ ID NO: 1517737 - RNA, 19 nt, Artificial Sequence
  Description of Artificial Sequence: Synthetic oligonucleotide
  Antisense strand to SEQ ID NO: 1517736
ucaaauauaacuugugucu

SEQ ID NO: 1517738 - RNA, 19 nt, Artificial Sequence
  Description of Artificial Sequence: Synthetic oligonucleotide
  Sense strand starting at position 3970 of SEQ ID NO: 1244826
caaguuauauuugagguga

SEQ ID NO: 1517739 - RNA, 19 nt, Artificial Sequence
  Description of Artificial Sequence: Synthetic oligonucleotide
  Antisense strand to SEQ ID NO: 1517738
ucaccucaaauauaacuug

SEQ ID NO: 1517740 - RNA, 19 nt, Artificial Sequence
  Description of Artificial Sequence: Synthetic oligonucleotide
  Sense strand starting at position 45 of SEQ ID NO: 1244827
caaggaagauuuggaaucu

SEQ ID NO: 1517741 - RNA, 19 nt, Artificial Sequence
  Description of Artificial Sequence: Synthetic oligonucleotide
  Antisense strand to SEQ ID NO: 1517740
agauuccaaaucuuccuug

SEQ ID NO: 1517742 - RNA, 19 nt, Artificial Sequence
  Description of Artificial Sequence: Synthetic oligonucleotide
  Sense strand starting at position 181 of SEQ ID NO: 1244827
acaucucaccuguggaaug

SEQ ID NO: 1517743 - RNA, 19 nt, Artificial Sequence
  Description of Artificial Sequence: Synthetic oligonucleotide
  Antisense strand to SEQ ID NO: 1517742
cauuccacaggugagaugu

SEQ ID NO: 1517744 - RNA, 19 nt, Artificial Sequence
  Description of Artificial Sequence: Synthetic oligonucleotide
  Sense strand starting at position 229 of SEQ ID NO: 1244827
cagaguuucugugaggaca

SEQ ID NO: 1517745 - RNA, 19 nt, Artificial Sequence
  Description of Artificial Sequence: Synthetic oligonucleotide
  Antisense strand to SEQ ID NO: 1517744
uguccucacagaaacucug

SEQ ID NO: 1517746 - RNA, 19 nt, Artificial Sequence
  Description of Artificial Sequence: Synthetic oligonucleotide
  Sense strand starting at position 231 of SEQ ID NO: 1244827
gaguuucugugaggacaaa

SEQ ID NO: 1517747 - RNA, 19 nt, Artificial Sequence
  Description of Artificial Sequence: Synthetic oligonucleotide
  Antisense strand to SEQ ID NO: 1517746
uuuguccucacagaaacuc

SEQ ID NO: 1517748 - RNA, 19 nt, Artificial Sequence
  Description of Artificial Sequence: Synthetic oligonucleotide
  Sense strand starting at position 359 of SEQ ID NO: 1244827
cugugucucucacuuagaa

SEQ ID NO: 1517749 - RNA, 19 nt, Artificial Sequence
  Description of Artificial Sequence: Synthetic oligonucleotide
  Antisense strand to SEQ ID NO: 1517748
uucuaagugagagacacag

SEQ ID NO: 1517750 - RNA, 19 nt, Artificial Sequence
  Description of Artificial Sequence: Synthetic oligonucleotide
  Sense strand starting at position 601 of SEQ ID NO: 1244827
uacguuuaugugggugaac

SEQ ID NO: 1517751 - RNA, 19 nt, Artificial Sequence
  Description of Artificial Sequence: Synthetic oligonucleotide
  Antisense strand to SEQ ID NO: 1517750
guucacccacauaaacgua

SEQ ID NO: 1517752 - RNA, 19 nt, Artificial Sequence
  Description of Artificial Sequence: Synthetic oligonucleotide
  Sense strand starting at position 602 of SEQ ID NO: 1244827
acguuuaugugggugaaca

SEQ ID NO: 1517753 - RNA, 19 nt, Artificial Sequence
  Description of Artificial Sequence: Synthetic oligonucleotide
  Antisense strand to SEQ ID NO: 1517752
uguucacccacauaaacgu

SEQ ID NO: 1517754 - RNA, 19 nt, Artificial Sequence
  Description of Artificial Sequence: Synthetic oligonucleotide
  Sense strand starting at position 603 of SEQ ID NO: 1244827
cguuuaugugggugaacau

SEQ ID NO: 1517755 - RNA, 19 nt, Artificial Sequence
  Description of Artificial Sequence: Synthetic oligonucleotide
  Antisense strand to SEQ ID NO: 1517754
auguucacccacauaaacg

SEQ ID NO: 1517756 - RNA, 19 nt, Artificial Sequence
  Description of Artificial Sequence: Synthetic oligonucleotide
  Sense strand starting at position 604 of SEQ ID NO: 1244827
guuuaugugggugaacaug

SEQ ID NO: 1517757 - RNA, 19 nt, Artificial Sequence
  Description of Artificial Sequence: Synthetic oligonucleotide
  Antisense strand to SEQ ID NO: 1517756
cauguucacccacauaaac

SEQ ID NO: 1517758 - RNA, 19 nt, Artificial Sequence
  Description of Artificial Sequence: Synthetic oligonucleotide
  Sense strand starting at position 997 of SEQ ID NO: 1244827
gccugaggucaccaagcaa

SEQ ID NO: 1517759 - RNA, 19 nt, Artificial Sequence
  Description of Artificial Sequence: Synthetic oligonucleotide
  Antisense strand to SEQ ID NO: 1517758
uugcuuggugaccucaggc

SEQ ID NO: 1517760 - RNA, 19 nt, Artificial Sequence
  Description of Artificial Sequence: Synthetic oligonucleotide
  Sense strand starting at position 1093 of SEQ ID NO: 1244827
cugacuagguccucacuga

SEQ ID NO: 1517761 - RNA, 19 nt, Artificial Sequence
  Description of Artificial Sequence: Synthetic oligonucleotide
  Antisense strand to SEQ ID NO: 1517760
ucagugaggaccuagucag

SEQ ID NO: 1517762 - RNA, 19 nt, Artificial Sequence
  Description of Artificial Sequence: Synthetic oligonucleotide
  Sense strand starting at position 1094 of SEQ ID NO: 1244827
ugacuagguccucacugau

SEQ ID NO: 1517763 - RNA, 19 nt, Artificial Sequence
  Description of Artificial Sequence: Synthetic oligonucleotide
  Antisense strand to SEQ ID NO: 1517762
aucagugaggaccuaguca

SEQ ID NO: 1517764 - RNA, 19 nt, Artificial Sequence
  Description of Artificial Sequence: Synthetic oligonucleotide
  Sense strand starting at position 1427 of SEQ ID NO: 1244827
gcacgugaagucugaguug

SEQ ID NO: 1517765 - RNA, 19 nt, Artificial Sequence
  Description of Artificial Sequence: Synthetic oligonucleotide
  Antisense strand to SEQ ID NO: 1517764
caacucagacuucacgugc

SEQ ID NO: 1517766 - RNA, 19 nt, Artificial Sequence
  Description of Artificial Sequence: Synthetic oligonucleotide
  Sense strand starting at position 1429 of SEQ ID NO: 1244827
acgugaagucugaguuggu

SEQ ID NO: 1517767 - RNA, 19 nt, Artificial Sequence
  Description of Artificial Sequence: Synthetic oligonucleotide
  Antisense strand to SEQ ID NO: 1517766
accaacucagacuucacgu

SEQ ID NO: 1517768 - RNA, 19 nt, Artificial Sequence
  Description of Artificial Sequence: Synthetic oligonucleotide
  Sense strand starting at position 1430 of SEQ ID NO: 1244827
cgugaagucugaguuggug

SEQ ID NO: 1517769 - RNA, 19 nt, Artificial Sequence
  Description of Artificial Sequence: Synthetic oligonucleotide
  Antisense strand to SEQ ID NO: 1517768
caccaacucagacuucacg

SEQ ID NO: 1517770 - RNA, 19 nt, Artificial Sequence
  Description of Artificial Sequence: Synthetic oligonucleotide
  Sense strand starting at position 1433 of SEQ ID NO: 1244827
gaagucugaguuggugaga

SEQ ID NO: 1517771 - RNA, 19 nt, Artificial Sequence
  Description of Artificial Sequence: Synthetic oligonucleotide
  Antisense strand to SEQ ID NO: 1517770
ucucaccaacucagacuuc

SEQ ID NO: 1517772 - RNA, 19 nt, Artificial Sequence
  Description of Artificial Sequence: Synthetic oligonucleotide
  Sense strand starting at position 1890 of SEQ ID NO: 1244827
ucaccugagucaguugagu

SEQ ID NO: 1517773 - RNA, 19 nt, Artificial Sequence
  Description of Artificial Sequence: Synthetic oligonucleotide
  Antisense strand to SEQ ID NO: 1517772
acucaacugacucagguga

SEQ ID NO: 1517774 - RNA, 19 nt, Artificial Sequence
  Description of Artificial Sequence: Synthetic oligonucleotide
  Sense strand starting at position 2133 of SEQ ID NO: 1244827
ugcaguguuugugcaugua

SEQ ID NO: 1517775 - RNA, 19 nt, Artificial Sequence
  Description of Artificial Sequence: Synthetic oligonucleotide
  Antisense strand to SEQ ID NO: 1517774
uacaugcacaaacacugca

SEQ ID NO: 1517776 - RNA, 19 nt, Artificial Sequence
  Description of Artificial Sequence: Synthetic oligonucleotide
  Sense strand starting at position 2137 of SEQ ID NO: 1244827
guguuugugcauguaagca

SEQ ID NO: 1517777 - RNA, 19 nt, Artificial Sequence
  Description of Artificial Sequence: Synthetic oligonucleotide
  Antisense strand to SEQ ID NO: 1517776
ugcuuacaugcacaaacac

SEQ ID NO: 1517778 - RNA, 19 nt, Artificial Sequence
  Description of Artificial Sequence: Synthetic oligonucleotide
  Sense strand starting at position 2170 of SEQ ID NO: 1244827
ggugaacccaugugugcau

SEQ ID NO: 1517779 - RNA, 19 nt, Artificial Sequence
  Description of Artificial Sequence: Synthetic oligonucleotide
  Antisense strand to SEQ ID NO: 1517778
augcacacauggguucacc

SEQ ID NO: 1517780 - RNA, 19 nt, Artificial Sequence
  Description of Artificial Sequence: Synthetic oligonucleotide
  Sense strand starting at position 2249 of SEQ ID NO: 1244827
gggucacccuugucacuuu

SEQ ID NO: 1517781 - RNA, 19 nt, Artificial Sequence
  Description of Artificial Sequence: Synthetic oligonucleotide
  Antisense strand to SEQ ID NO: 1517780
aaagugacaagggugaccc

SEQ ID NO: 1517782 - RNA, 19 nt, Artificial Sequence
  Description of Artificial Sequence: Synthetic oligonucleotide
  Sense strand starting at position 2444 of SEQ ID NO: 1244827
uguaaagugcuagaucugu

SEQ ID NO: 1517783 - RNA, 19 nt, Artificial Sequence
  Description of Artificial Sequence: Synthetic oligonucleotide
  Antisense strand to SEQ ID NO: 1517782
acagaucuagcacuuuaca

SEQ ID NO: 1517784 - RNA, 19 nt, Artificial Sequence
  Description of Artificial Sequence: Synthetic oligonucleotide
  Sense strand starting at position 2933 of SEQ ID NO: 1244827
acaugaugucucggccuau

SEQ ID NO: 1517785 - RNA, 19 nt, Artificial Sequence
  Description of Artificial Sequence: Synthetic oligonucleotide
  Antisense strand to SEQ ID NO: 1517784
auaggccgagacaucaugu

SEQ ID NO: 1517786 - RNA, 19 nt, Artificial Sequence
  Description of Artificial Sequence: Synthetic oligonucleotide
  Sense strand starting at position 2934 of SEQ ID NO: 1244827
caugaugucucggccuauu

SEQ ID NO: 1517787 - RNA, 19 nt, Artificial Sequence
  Description of Artificial Sequence: Synthetic oligonucleotide
  Antisense strand to SEQ ID NO: 1517786
aauaggccgagacaucaug

SEQ ID NO: 1517788 - RNA, 19 nt, Artificial Sequence
  Description of Artificial Sequence: Synthetic oligonucleotide
  Sense strand starting at position 3138 of SEQ ID NO: 1244827
agaagacccuuugcuaauu

SEQ ID NO: 1517789 - RNA, 19 nt, Artificial Sequence
  Description of Artificial Sequence: Synthetic oligonucleotide
  Antisense strand to SEQ ID NO: 1517788
aauuagcaaagggucuucu

SEQ ID NO: 1517790 - RNA, 19 nt, Artificial Sequence
  Description of Artificial Sequence: Synthetic oligonucleotide
  Sense strand starting at position 3149 of SEQ ID NO: 1244827
ugcuaauuucccgguaccu

SEQ ID NO: 1517791 - RNA, 19 nt, Artificial Sequence
  Description of Artificial Sequence: Synthetic oligonucleotide
  Antisense strand to SEQ ID NO: 1517790
agguaccgggaaauuagca

SEQ ID NO: 1517792 - RNA, 19 nt, Artificial Sequence
  Description of Artificial Sequence: Synthetic oligonucleotide
  Sense strand starting at position 3361 of SEQ ID NO: 1244827
ggcaucacacagugcaaua

SEQ ID NO: 1517793 - RNA, 19 nt, Artificial Sequence
  Description of Artificial Sequence: Synthetic oligonucleotide
  Antisense strand to SEQ ID NO: 1517792
uauugcacugugugaugcc

SEQ ID NO: 1517794 - RNA, 19 nt, Artificial Sequence
  Description of Artificial Sequence: Synthetic oligonucleotide
  Sense strand starting at position 3411 of SEQ ID NO: 1244827
agacgucaucgagagcaca

SEQ ID NO: 1517795 - RNA, 19 nt, Artificial Sequence
  Description of Artificial Sequence: Synthetic oligonucleotide
  Antisense strand to SEQ ID NO: 1517794
ugugcucucgaugacgucu

SEQ ID NO: 1517796 - RNA, 19 nt, Artificial Sequence
  Description of Artificial Sequence: Synthetic oligonucleotide
  Sense strand starting at position 3528 of SEQ ID NO: 1244827
aaacgaauuucguagcaag

SEQ ID NO: 1517797 - RNA, 19 nt, Artificial Sequence
  Description of Artificial Sequence: Synthetic oligonucleotide
  Antisense strand to SEQ ID NO: 1517796
cuugcuacgaaauucguuu

SEQ ID NO: 1517798 - RNA, 19 nt, Artificial Sequence
  Description of Artificial Sequence: Synthetic oligonucleotide
  Sense strand starting at position 3609 of SEQ ID NO: 1244827
ugcugaucugcugacuuau

SEQ ID NO: 1517799 - RNA, 19 nt, Artificial Sequence
  Description of Artificial Sequence: Synthetic oligonucleotide
  Antisense strand to SEQ ID NO: 1517798
auaagucagcagaucagca

SEQ ID NO: 1517800 - RNA, 19 nt, Artificial Sequence
  Description of Artificial Sequence: Synthetic oligonucleotide
  Sense strand starting at position 3655 of SEQ ID NO: 1244827
cuguaauugcucugccuuu

SEQ ID NO: 1517801 - RNA, 19 nt, Artificial Sequence
  Description of Artificial Sequence: Synthetic oligonucleotide
  Antisense strand to SEQ ID NO: 1517800
aaaggcagagcaauuacag

SEQ ID NO: 1517802 - RNA, 19 nt, Artificial Sequence
  Description of Artificial Sequence: Synthetic oligonucleotide
  Sense strand starting at position 3707 of SEQ ID NO: 1244827
ggguuacuggccuguguuu

SEQ ID NO: 1517803 - RNA, 19 nt, Artificial Sequence
  Description of Artificial Sequence: Synthetic oligonucleotide
  Antisense strand to SEQ ID NO: 1517802
aaacacaggccaguaaccc

SEQ ID NO: 1517804 - RNA, 19 nt, Artificial Sequence
  Description of Artificial Sequence: Synthetic oligonucleotide
  Sense strand starting at position 3766 of SEQ ID NO: 1244827
ccagcucuugcucauggaa

SEQ ID NO: 1517805 - RNA, 19 nt, Artificial Sequence
  Description of Artificial Sequence: Synthetic oligonucleotide
  Antisense strand to SEQ ID NO: 1517804
uuccaugagcaagagcugg

SEQ ID NO: 1517806 - RNA, 19 nt, Artificial Sequence
  Description of Artificial Sequence: Synthetic oligonucleotide
  Sense strand starting at position 3803 of SEQ ID NO: 1244827
gcagucuucccuuguuuac

SEQ ID NO: 1517807 - RNA, 19 nt, Artificial Sequence
  Description of Artificial Sequence: Synthetic oligonucleotide
  Antisense strand to SEQ ID NO: 1517806
guaaacaagggaagacugc

SEQ ID NO: 1517808 - RNA, 19 nt, Artificial Sequence
  Description of Artificial Sequence: Synthetic oligonucleotide
  Sense strand starting at position 3850 of SEQ ID NO: 1244827
gagaaagauuuguagauac

SEQ ID NO: 1517809 - RNA, 19 nt, Artificial Sequence
  Description of Artificial Sequence: Synthetic oligonucleotide
  Antisense strand to SEQ ID NO: 1517808
guaucuacaaaucuuucuc

SEQ ID NO: 1517810 - RNA, 19 nt, Artificial Sequence
  Description of Artificial Sequence: Synthetic oligonucleotide
  Sense strand starting at position 3860 of SEQ ID NO: 1244827
uguagauacuguuuacuca

SEQ ID NO: 1517811 - RNA, 19 nt, Artificial Sequence
  Description of Artificial Sequence: Synthetic oligonucleotide
  Antisense strand to SEQ ID NO: 1517810
ugaguaaacaguaucuaca

SEQ ID NO: 1517812 - RNA, 19 nt, Artificial Sequence
  Description of Artificial Sequence: Synthetic oligonucleotide
  Sense strand starting at position 3929 of SEQ ID NO: 1244827
gggucauugcugggauccu

SEQ ID NO: 1517813 - RNA, 19 nt, Artificial Sequence
  Description of Artificial Sequence: Synthetic oligonucleotide
  Antisense strand to SEQ ID NO: 1517812
aggaucccagcaaugaccc

SEQ ID NO: 1517814 - RNA, 19 nt, Artificial Sequence
  Description of Artificial Sequence: Synthetic oligonucleotide
  Sense strand starting at position 3930 of SEQ ID NO: 1244827
ggucauugcugggauccua

SEQ ID NO: 1517815 - RNA, 19 nt, Artificial Sequence
  Description of Artificial Sequence: Synthetic oligonucleotide
  Antisense strand to SEQ ID NO: 1517814
uaggaucccagcaaugacc

SEQ ID NO: 1517816 - RNA, 19 nt, Artificial Sequence
  Description of Artificial Sequence: Synthetic oligonucleotide
  Sense strand starting at position 3938 of SEQ ID NO: 1244827
cugggauccuaggaaucaa

SEQ ID NO: 1517817 - RNA, 19 nt, Artificial Sequence
  Description of Artificial Sequence: Synthetic oligonucleotide
  Antisense strand to SEQ ID NO: 1517816
uugauuccuaggaucccag

SEQ ID NO: 1517818 - RNA, 19 nt, Artificial Sequence
  Description of Artificial Sequence: Synthetic oligonucleotide
  Sense strand starting at position 3953 of SEQ ID NO: 1244827
ucaagugccuugucuugau

SEQ ID NO: 1517819 - RNA, 19 nt, Artificial Sequence
  Description of Artificial Sequence: Synthetic oligonucleotide
  Antisense strand to SEQ ID NO: 1517818
aucaagacaaggcacuuga

SEQ ID NO: 1517820 - RNA, 19 nt, Artificial Sequence
  Description of Artificial Sequence: Synthetic oligonucleotide
  Sense strand starting at position 14 of SEQ ID NO: 1244828
caaggaagauuuggaaucu

SEQ ID NO: 1517821 - RNA, 19 nt, Artificial Sequence
  Description of Artificial Sequence: Synthetic oligonucleotide
  Antisense strand to SEQ ID NO: 1517820
agauuccaaaucuuccuug

SEQ ID NO: 1517822 - RNA, 19 nt, Artificial Sequence
  Description of Artificial Sequence: Synthetic oligonucleotide
  Sense strand starting at position 247 of SEQ ID NO: 1244828
gaacauguacccggugagu

SEQ ID NO: 1517823 - RNA, 19 nt, Artificial Sequence
  Description of Artificial Sequence: Synthetic oligonucleotide
  Antisense strand to SEQ ID NO: 1517822
acucaccggguacauguuc

SEQ ID NO: 1517824 - RNA, 19 nt, Artificial Sequence
  Description of Artificial Sequence: Synthetic oligonucleotide
  Sense strand starting at position 328 of SEQ ID NO: 1244828
cugugucucucgcuuagaa

SEQ ID NO: 1517825 - RNA, 19 nt, Artificial Sequence
  Description of Artificial Sequence: Synthetic oligonucleotide
  Antisense strand to SEQ ID NO: 1517824
uucuaagcgagagacacag

SEQ ID NO: 1517826 - RNA, 19 nt, Artificial Sequence
  Description of Artificial Sequence: Synthetic oligonucleotide
  Sense strand starting at position 570 of SEQ ID NO: 1244828
uauguuuaugugggugaac

SEQ ID NO: 1517827 - RNA, 19 nt, Artificial Sequence
  Description of Artificial Sequence: Synthetic oligonucleotide
  Antisense strand to SEQ ID NO: 1517826
guucacccacauaaacaua

SEQ ID NO: 1517828 - RNA, 19 nt, Artificial Sequence
  Description of Artificial Sequence: Synthetic oligonucleotide
  Sense strand starting at position 571 of SEQ ID NO: 1244828
auguuuaugugggugaaca

SEQ ID NO: 1517829 - RNA, 19 nt, Artificial Sequence
  Description of Artificial Sequence: Synthetic oligonucleotide
  Antisense strand to SEQ ID NO: 1517828
uguucacccacauaaacau

SEQ ID NO: 1517830 - RNA, 19 nt, Artificial Sequence
  Description of Artificial Sequence: Synthetic oligonucleotide
  Sense strand starting at position 572 of SEQ ID NO: 1244828
uguuuaugugggugaacau

SEQ ID NO: 1517831 - RNA, 19 nt, Artificial Sequence
  Description of Artificial Sequence: Synthetic oligonucleotide
  Antisense strand to SEQ ID NO: 1517830
auguucacccacauaaaca

SEQ ID NO: 1517832 - RNA, 19 nt, Artificial Sequence
  Description of Artificial Sequence: Synthetic oligonucleotide
  Sense strand starting at position 573 of SEQ ID NO: 1244828
guuuaugugggugaacaug

SEQ ID NO: 1517833 - RNA, 19 nt, Artificial Sequence
  Description of Artificial Sequence: Synthetic oligonucleotide
  Antisense strand to SEQ ID NO: 1517832
cauguucacccacauaaac

SEQ ID NO: 1517834 - RNA, 19 nt, Artificial Sequence
  Description of Artificial Sequence: Synthetic oligonucleotide
  Sense strand starting at position 915 of SEQ ID NO: 1244828
acucauuucugcuauggac

SEQ ID NO: 1517835 - RNA, 19 nt, Artificial Sequence
  Description of Artificial Sequence: Synthetic oligonucleotide
  Antisense strand to SEQ ID NO: 1517834
guccauagcagaaaugagu

SEQ ID NO: 1517836 - RNA, 19 nt, Artificial Sequence
  Description of Artificial Sequence: Synthetic oligonucleotide
  Sense strand starting at position 966 of SEQ ID NO: 1244828
gccugaggucaccaagcaa

SEQ ID NO: 1517837 - RNA, 19 nt, Artificial Sequence
  Description of Artificial Sequence: Synthetic oligonucleotide
  Antisense strand to SEQ ID NO: 1517836
uugcuuggugaccucaggc

SEQ ID NO: 1517838 - RNA, 19 nt, Artificial Sequence
  Description of Artificial Sequence: Synthetic oligonucleotide
  Sense strand starting at position 1062 of SEQ ID NO: 1244828
cugacuagguccucacuga

SEQ ID NO: 1517839 - RNA, 19 nt, Artificial Sequence
  Description of Artificial Sequence: Synthetic oligonucleotide
  Antisense strand to SEQ ID NO: 1517838
ucagugaggaccuagucag

SEQ ID NO: 1517840 - RNA, 19 nt, Artificial Sequence
  Description of Artificial Sequence: Synthetic oligonucleotide
  Sense strand starting at position 1063 of SEQ ID NO: 1244828
ugacuagguccucacugau

SEQ ID NO: 1517841 - RNA, 19 nt, Artificial Sequence
  Description of Artificial Sequence: Synthetic oligonucleotide
  Antisense strand to SEQ ID NO: 1517840
aucagugaggaccuaguca

SEQ ID NO: 1517842 - RNA, 19 nt, Artificial Sequence
  Description of Artificial Sequence: Synthetic oligonucleotide
  Sense strand starting at position 1396 of SEQ ID NO: 1244828
gcacgugaagucugaguug

SEQ ID NO: 1517843 - RNA, 19 nt, Artificial Sequence
  Description of Artificial Sequence: Synthetic oligonucleotide
  Antisense strand to SEQ ID NO: 1517842
caacucagacuucacgugc

SEQ ID NO: 1517844 - RNA, 19 nt, Artificial Sequence
  Description of Artificial Sequence: Synthetic oligonucleotide
  Sense strand starting at position 1398 of SEQ ID NO: 1244828
acgugaagucugaguuggu

SEQ ID NO: 1517845 - RNA, 19 nt, Artificial Sequence
  Description of Artificial Sequence: Synthetic oligonucleotide
  Antisense strand to SEQ ID NO: 1517844
accaacucagacuucacgu

SEQ ID NO: 1517846 - RNA, 19 nt, Artificial Sequence
  Description of Artificial Sequence: Synthetic oligonucleotide
  Sense strand starting at position 1399 of SEQ ID NO: 1244828
cgugaagucugaguuggug

SEQ ID NO: 1517847 - RNA, 19 nt, Artificial Sequence
  Description of Artificial Sequence: Synthetic oligonucleotide
  Antisense strand to SEQ ID NO: 1517846
caccaacucagacuucacg

SEQ ID NO: 1517848 - RNA, 19 nt, Artificial Sequence
  Description of Artificial Sequence: Synthetic oligonucleotide
  Sense strand starting at position 1554 of SEQ ID NO: 1244828
ugggcagauuuggaaucua

SEQ ID NO: 1517849 - RNA, 19 nt, Artificial Sequence
  Description of Artificial Sequence: Synthetic oligonucleotide
  Antisense strand to SEQ ID NO: 1517848
uagauuccaaaucugccca

SEQ ID NO: 1517850 - RNA, 19 nt, Artificial Sequence
  Description of Artificial Sequence: Synthetic oligonucleotide
  Sense strand starting at position 1859 of SEQ ID NO: 1244828
ucaccugagucaguugagu

SEQ ID NO: 1517851 - RNA, 19 nt, Artificial Sequence
  Description of Artificial Sequence: Synthetic oligonucleotide
  Antisense strand to SEQ ID NO: 1517850
acucaacugacucagguga

SEQ ID NO: 1517852 - RNA, 19 nt, Artificial Sequence
  Description of Artificial Sequence: Synthetic oligonucleotide
  Sense strand starting at position 1861 of SEQ ID NO: 1244828
accugagucaguugaguca

SEQ ID NO: 1517853 - RNA, 19 nt, Artificial Sequence
  Description of Artificial Sequence: Synthetic oligonucleotide
  Antisense strand to SEQ ID NO: 1517852
ugacucaacugacucaggu

SEQ ID NO: 1517854 - RNA, 19 nt, Artificial Sequence
  Description of Artificial Sequence: Synthetic oligonucleotide
  Sense strand starting at position 1877 of SEQ ID NO: 1244828
ucaguugugucucucacuu

SEQ ID NO: 1517855 - RNA, 19 nt, Artificial Sequence
  Description of Artificial Sequence: Synthetic oligonucleotide
  Antisense strand to SEQ ID NO: 1517854
aagugagagacacaacuga

SEQ ID NO: 1517856 - RNA, 19 nt, Artificial Sequence
  Description of Artificial Sequence: Synthetic oligonucleotide
  Sense strand starting at position 1931 of SEQ ID NO: 1244828
augucuuaucucuaagagc

SEQ ID NO: 1517857 - RNA, 19 nt, Artificial Sequence
  Description of Artificial Sequence: Synthetic oligonucleotide
  Antisense strand to SEQ ID NO: 1517856
gcucuuagagauaagacau

SEQ ID NO: 1517858 - RNA, 19 nt, Artificial Sequence
  Description of Artificial Sequence: Synthetic oligonucleotide
  Sense strand starting at position 1940 of SEQ ID NO: 1244828
cucuaagagcuccagacau

SEQ ID NO: 1517859 - RNA, 19 nt, Artificial Sequence
  Description of Artificial Sequence: Synthetic oligonucleotide
  Antisense strand to SEQ ID NO: 1517858
augucuggagcucuuagag

SEQ ID NO: 1517860 - RNA, 19 nt, Artificial Sequence
  Description of Artificial Sequence: Synthetic oligonucleotide
  Sense strand starting at position 2128 of SEQ ID NO: 1244828
acguguaugugggugaaca

SEQ ID NO: 1517861 - RNA, 19 nt, Artificial Sequence
  Description of Artificial Sequence: Synthetic oligonucleotide
  Antisense strand to SEQ ID NO: 1517860
uguucacccacauacacgu

SEQ ID NO: 1517862 - RNA, 19 nt, Artificial Sequence
  Description of Artificial Sequence: Synthetic oligonucleotide
  Sense strand starting at position 2398 of SEQ ID NO: 1244828
gggacucaucuaggcugua

SEQ ID NO: 1517863 - RNA, 19 nt, Artificial Sequence
  Description of Artificial Sequence: Synthetic oligonucleotide
  Antisense strand to SEQ ID NO: 1517862
uacagccuagaugaguccc

SEQ ID NO: 1517864 - RNA, 19 nt, Artificial Sequence
  Description of Artificial Sequence: Synthetic oligonucleotide
  Sense strand starting at position 2399 of SEQ ID NO: 1244828
ggacucaucuaggcuguaa

SEQ ID NO: 1517865 - RNA, 19 nt, Artificial Sequence
  Description of Artificial Sequence: Synthetic oligonucleotide
  Antisense strand to SEQ ID NO: 1517864
uuacagccuagaugagucc

SEQ ID NO: 1517866 - RNA, 19 nt, Artificial Sequence
  Description of Artificial Sequence: Synthetic oligonucleotide
  Sense strand starting at position 2413 of SEQ ID NO: 1244828
uguaaagugcuagaucugu

SEQ ID NO: 1517867 - RNA, 19 nt, Artificial Sequence
  Description of Artificial Sequence: Synthetic oligonucleotide
  Antisense strand to SEQ ID NO: 1517866
acagaucuagcacuuuaca

SEQ ID NO: 1517868 - RNA, 19 nt, Artificial Sequence
  Description of Artificial Sequence: Synthetic oligonucleotide
  Sense strand starting at position 2497 of SEQ ID NO: 1244828
acucguucccacuacagau

SEQ ID NO: 1517869 - RNA, 19 nt, Artificial Sequence
  Description of Artificial Sequence: Synthetic oligonucleotide
  Antisense strand to SEQ ID NO: 1517868
aucuguagugggaacgagu

SEQ ID NO: 1517870 - RNA, 19 nt, Artificial Sequence
  Description of Artificial Sequence: Synthetic oligonucleotide
  Sense strand starting at position 2903 of SEQ ID NO: 1244828
acaugaugucucggccuau

SEQ ID NO: 1517871 - RNA, 19 nt, Artificial Sequence
  Description of Artificial Sequence: Synthetic oligonucleotide
  Antisense strand to SEQ ID NO: 1517870
auaggccgagacaucaugu

SEQ ID NO: 1517872 - RNA, 19 nt, Artificial Sequence
  Description of Artificial Sequence: Synthetic oligonucleotide
  Sense strand starting at position 2904 of SEQ ID NO: 1244828
caugaugucucggccuauu

SEQ ID NO: 1517873 - RNA, 19 nt, Artificial Sequence
  Description of Artificial Sequence: Synthetic oligonucleotide
  Antisense strand to SEQ ID NO: 1517872
aauaggccgagacaucaug

SEQ ID NO: 1517874 - RNA, 19 nt, Artificial Sequence
  Description of Artificial Sequence: Synthetic oligonucleotide
  Sense strand starting at position 3108 of SEQ ID NO: 1244828
agaagacccuuugcuaauu

SEQ ID NO: 1517875 - RNA, 19 nt, Artificial Sequence
  Description of Artificial Sequence: Synthetic oligonucleotide
  Antisense strand to SEQ ID NO: 1517874
aauuagcaaagggucuucu

SEQ ID NO: 1517876 - RNA, 19 nt, Artificial Sequence
  Description of Artificial Sequence: Synthetic oligonucleotide
  Sense strand starting at position 3119 of SEQ ID NO: 1244828
ugcuaauuuccugguagcu

SEQ ID NO: 1517877 - RNA, 19 nt, Artificial Sequence
  Description of Artificial Sequence: Synthetic oligonucleotide
  Antisense strand to SEQ ID NO: 1517876
agcuaccaggaaauuagca

SEQ ID NO: 1517878 - RNA, 19 nt, Artificial Sequence
  Description of Artificial Sequence: Synthetic oligonucleotide
  Sense strand starting at position 3121 of SEQ ID NO: 1244828
cuaauuuccugguagcuca

SEQ ID NO: 1517879 - RNA, 19 nt, Artificial Sequence
  Description of Artificial Sequence: Synthetic oligonucleotide
  Antisense strand to SEQ ID NO: 1517878
ugagcuaccaggaaauuag

SEQ ID NO: 1517880 - RNA, 19 nt, Artificial Sequence
  Description of Artificial Sequence: Synthetic oligonucleotide
  Sense strand starting at position 3200 of SEQ ID NO: 1244828
ggaagauggucacagaauc

SEQ ID NO: 1517881 - RNA, 19 nt, Artificial Sequence
  Description of Artificial Sequence: Synthetic oligonucleotide
  Antisense strand to SEQ ID NO: 1517880
gauucugugaccaucuucc

SEQ ID NO: 1517882 - RNA, 19 nt, Artificial Sequence
  Description of Artificial Sequence: Synthetic oligonucleotide
  Sense strand starting at position 3331 of SEQ ID NO: 1244828
ggcaucacacagugcaaua

SEQ ID NO: 1517883 - RNA, 19 nt, Artificial Sequence
  Description of Artificial Sequence: Synthetic oligonucleotide
  Antisense strand to SEQ ID NO: 1517882
uauugcacugugugaugcc

SEQ ID NO: 1517884 - RNA, 19 nt, Artificial Sequence
  Description of Artificial Sequence: Synthetic oligonucleotide
  Sense strand starting at position 3498 of SEQ ID NO: 1244828
aaacgaauuucguagcaag

SEQ ID NO: 1517885 - RNA, 19 nt, Artificial Sequence
  Description of Artificial Sequence: Synthetic oligonucleotide
  Antisense strand to SEQ ID NO: 1517884
cuugcuacgaaauucguuu

SEQ ID NO: 1517886 - RNA, 19 nt, Artificial Sequence
  Description of Artificial Sequence: Synthetic oligonucleotide
  Sense strand starting at position 3585 of SEQ ID NO: 1244828
ugcugaucugcugacuuau

SEQ ID NO: 1517887 - RNA, 19 nt, Artificial Sequence
  Description of Artificial Sequence: Synthetic oligonucleotide
  Antisense strand to SEQ ID NO: 1517886
auaagucagcagaucagca

SEQ ID NO: 1517888 - RNA, 19 nt, Artificial Sequence
  Description of Artificial Sequence: Synthetic oligonucleotide
  Sense strand starting at position 3620 of SEQ ID NO: 1244828
agcagcuaagccuguaauu

SEQ ID NO: 1517889 - RNA, 19 nt, Artificial Sequence
  Description of Artificial Sequence: Synthetic oligonucleotide
  Antisense strand to SEQ ID NO: 1517888
aauuacaggcuuagcugcu

SEQ ID NO: 1517890 - RNA, 19 nt, Artificial Sequence
  Description of Artificial Sequence: Synthetic oligonucleotide
  Sense strand starting at position 3742 of SEQ ID NO: 1244828
ccagcucuugcucauggaa

SEQ ID NO: 1517891 - RNA, 19 nt, Artificial Sequence
  Description of Artificial Sequence: Synthetic oligonucleotide
  Antisense strand to SEQ ID NO: 1517890
uuccaugagcaagagcugg

SEQ ID NO: 1517892 - RNA, 19 nt, Artificial Sequence
  Description of Artificial Sequence: Synthetic oligonucleotide
  Sense strand starting at position 3826 of SEQ ID NO: 1244828
gagaaagauuuguagauac

SEQ ID NO: 1517893 - RNA, 19 nt, Artificial Sequence
  Description of Artificial Sequence: Synthetic oligonucleotide
  Antisense strand to SEQ ID NO: 1517892
guaucuacaaaucuuucuc

SEQ ID NO: 1517894 - RNA, 19 nt, Artificial Sequence
  Description of Artificial Sequence: Synthetic oligonucleotide
  Sense strand starting at position 3836 of SEQ ID NO: 1244828
uguagauacuguuuacuca

SEQ ID NO: 1517895 - RNA, 19 nt, Artificial Sequence
  Description of Artificial Sequence: Synthetic oligonucleotide
  Antisense strand to SEQ ID NO: 1517894
ugaguaaacaguaucuaca

SEQ ID NO: 1517896 - RNA, 19 nt, Artificial Sequence
  Description of Artificial Sequence: Synthetic oligonucleotide
  Sense strand starting at position 3914 of SEQ ID NO: 1244828
cugggauccuaggaaucaa

SEQ ID NO: 1517897 - RNA, 19 nt, Artificial Sequence
  Description of Artificial Sequence: Synthetic oligonucleotide
  Antisense strand to SEQ ID NO: 1517896
uugauuccuaggaucccag

SEQ ID NO: 1517898 - RNA, 19 nt, Artificial Sequence
  Description of Artificial Sequence: Synthetic oligonucleotide
  Sense strand starting at position 3929 of SEQ ID NO: 1244828
ucaagugccuugucuugau

SEQ ID NO: 1517899 - RNA, 19 nt, Artificial Sequence
  Description of Artificial Sequence: Synthetic oligonucleotide
  Antisense strand to SEQ ID NO: 1517898
aucaagacaaggcacuuga

SEQ ID NO: 1517900 - RNA, 19 nt, Artificial Sequence
  Description of Artificial Sequence: Synthetic oligonucleotide
  Sense strand starting at position 390 of SEQ ID NO: 1244829
agaacagugucaucaucca

SEQ ID NO: 1517901 - RNA, 19 nt, Artificial Sequence
  Description of Artificial Sequence: Synthetic oligonucleotide
  Antisense strand to SEQ ID NO: 1517900
uggaugaugacacuguucu

SEQ ID NO: 1517902 - RNA, 19 nt, Artificial Sequence
  Description of Artificial Sequence: Synthetic oligonucleotide
  Sense strand starting at position 842 of SEQ ID NO: 1244829
uggacuuacuccuuugaac

SEQ ID NO: 1517903 - RNA, 19 nt, Artificial Sequence
  Description of Artificial Sequence: Synthetic oligonucleotide
  Antisense strand to SEQ ID NO: 1517902
guucaaaggaguaagucca

SEQ ID NO: 1517904 - RNA, 19 nt, Artificial Sequence
  Description of Artificial Sequence: Synthetic oligonucleotide
  Sense strand starting at position 2557 of SEQ ID NO: 1244829
gaaggugccuuggcugaaa

SEQ ID NO: 1517905 - RNA, 19 nt, Artificial Sequence
  Description of Artificial Sequence: Synthetic oligonucleotide
  Antisense strand to SEQ ID NO: 1517904
uuucagccaaggcaccuuc

SEQ ID NO: 1517906 - RNA, 19 nt, Artificial Sequence
  Description of Artificial Sequence: Synthetic oligonucleotide
  Sense strand starting at position 2780 of SEQ ID NO: 1244829
cagagucaccguggaagua

SEQ ID NO: 1517907 - RNA, 19 nt, Artificial Sequence
  Description of Artificial Sequence: Synthetic oligonucleotide
  Antisense strand to SEQ ID NO: 1517906
uacuuccacggugacucug

SEQ ID NO: 1517908 - RNA, 19 nt, Artificial Sequence
  Description of Artificial Sequence: Synthetic oligonucleotide
  Sense strand starting at position 2781 of SEQ ID NO: 1244829
agagucaccguggaaguaa

SEQ ID NO: 1517909 - RNA, 19 nt, Artificial Sequence
  Description of Artificial Sequence: Synthetic oligonucleotide
  Antisense strand to SEQ ID NO: 1517908
uuacuuccacggugacucu

SEQ ID NO: 1517910 - RNA, 19 nt, Artificial Sequence
  Description of Artificial Sequence: Synthetic oligonucleotide
  Sense strand starting at position 2792 of SEQ ID NO: 1244829
ggaaguaagucacuuggga

SEQ ID NO: 1517911 - RNA, 19 nt, Artificial Sequence
  Description of Artificial Sequence: Synthetic oligonucleotide
  Antisense strand to SEQ ID NO: 1517910
ucccaagugacuuacuucc

SEQ ID NO: 1517912 - RNA, 19 nt, Artificial Sequence
  Description of Artificial Sequence: Synthetic oligonucleotide
  Sense strand starting at position 2830 of SEQ ID NO: 1244829
ggacucaugucaucggaga

SEQ ID NO: 1517913 - RNA, 19 nt, Artificial Sequence
  Description of Artificial Sequence: Synthetic oligonucleotide
  Antisense strand to SEQ ID NO: 1517912
ucuccgaugacaugagucc

SEQ ID NO: 1517914 - RNA, 19 nt, Artificial Sequence
  Description of Artificial Sequence: Synthetic oligonucleotide
  Sense strand starting at position 2831 of SEQ ID NO: 1244829
gacucaugucaucggagag

SEQ ID NO: 1517915 - RNA, 19 nt, Artificial Sequence
  Description of Artificial Sequence: Synthetic oligonucleotide
  Antisense strand to SEQ ID NO: 1517914
cucuccgaugacaugaguc

SEQ ID NO: 1517916 - RNA, 19 nt, Artificial Sequence
  Description of Artificial Sequence: Synthetic oligonucleotide
  Sense strand starting at position 2862 of SEQ ID NO: 1244829
ugggaaggcuuccucugaa

SEQ ID NO: 1517917 - RNA, 19 nt, Artificial Sequence
  Description of Artificial Sequence: Synthetic oligonucleotide
  Antisense strand to SEQ ID NO: 1517916
uucagaggaagccuuccca

SEQ ID NO: 1517918 - RNA, 19 nt, Artificial Sequence
  Description of Artificial Sequence: Synthetic oligonucleotide
  Sense strand starting at position 2865 of SEQ ID NO: 1244829
gaaggcuuccucugaagaa

SEQ ID NO: 1517919 - RNA, 19 nt, Artificial Sequence
  Description of Artificial Sequence: Synthetic oligonucleotide
  Antisense strand to SEQ ID NO: 1517918
uucuucagaggaagccuuc

SEQ ID NO: 1517920 - RNA, 19 nt, Artificial Sequence
  Description of Artificial Sequence: Synthetic oligonucleotide
  Sense strand starting at position 2866 of SEQ ID NO: 1244829
aaggcuuccucugaagaag

SEQ ID NO: 1517921 - RNA, 19 nt, Artificial Sequence
  Description of Artificial Sequence: Synthetic oligonucleotide
  Antisense strand to SEQ ID NO: 1517920
cuucuucagaggaagccuu

SEQ ID NO: 1517922 - RNA, 19 nt, Artificial Sequence
  Description of Artificial Sequence: Synthetic oligonucleotide
  Sense strand starting at position 2884 of SEQ ID NO: 1244829
gagacuuccucaggaugca

SEQ ID NO: 1517923 - RNA, 19 nt, Artificial Sequence
  Description of Artificial Sequence: Synthetic oligonucleotide
  Antisense strand to SEQ ID NO: 1517922
ugcauccugaggaagucuc

SEQ ID NO: 1517924 - RNA, 19 nt, Artificial Sequence
  Description of Artificial Sequence: Synthetic oligonucleotide
  Sense strand starting at position 3274 of SEQ ID NO: 1244829
caggaauacucacuggguu

SEQ ID NO: 1517925 - RNA, 19 nt, Artificial Sequence
  Description of Artificial Sequence: Synthetic oligonucleotide
  Antisense strand to SEQ ID NO: 1517924
aacccagugaguauuccug

SEQ ID NO: 1517926 - RNA, 19 nt, Artificial Sequence
  Description of Artificial Sequence: Synthetic oligonucleotide
  Sense strand starting at position 3275 of SEQ ID NO: 1244829
aggaauacucacuggguua

SEQ ID NO: 1517927 - RNA, 19 nt, Artificial Sequence
  Description of Artificial Sequence: Synthetic oligonucleotide
  Antisense strand to SEQ ID NO: 1517926
uaacccagugaguauuccu

SEQ ID NO: 1517928 - RNA, 19 nt, Artificial Sequence
  Description of Artificial Sequence: Synthetic oligonucleotide
  Sense strand starting at position 3287 of SEQ ID NO: 1244829
uggguuauacuucgaauau

SEQ ID NO: 1517929 - RNA, 19 nt, Artificial Sequence
  Description of Artificial Sequence: Synthetic oligonucleotide
  Antisense strand to SEQ ID NO: 1517928
auauucgaaguauaaccca

SEQ ID NO: 1517930 - RNA, 19 nt, Artificial Sequence
  Description of Artificial Sequence: Synthetic oligonucleotide
  Sense strand starting at position 3288 of SEQ ID NO: 1244829
ggguuauacuucgaauaug

SEQ ID NO: 1517931 - RNA, 19 nt, Artificial Sequence
  Description of Artificial Sequence: Synthetic oligonucleotide
  Antisense strand to SEQ ID NO: 1517930
cauauucgaaguauaaccc

SEQ ID NO: 1517932 - RNA, 19 nt, Artificial Sequence
  Description of Artificial Sequence: Synthetic oligonucleotide
  Sense strand starting at position 3291 of SEQ ID NO: 1244829
uuauacuucgaauaugcca

SEQ ID NO: 1517933 - RNA, 19 nt, Artificial Sequence
  Description of Artificial Sequence: Synthetic oligonucleotide
  Antisense strand to SEQ ID NO: 1517932
uggcauauucgaaguauaa

SEQ ID NO: 1517934 - RNA, 19 nt, Artificial Sequence
  Description of Artificial Sequence: Synthetic oligonucleotide
  Sense strand starting at position 3298 of SEQ ID NO: 1244829
ucgaauaugccaggaggau

SEQ ID NO: 1517935 - RNA, 19 nt, Artificial Sequence
  Description of Artificial Sequence: Synthetic oligonucleotide
  Antisense strand to SEQ ID NO: 1517934
auccuccuggcauauucga

SEQ ID NO: 1517936 - RNA, 19 nt, Artificial Sequence
  Description of Artificial Sequence: Synthetic oligonucleotide
  Sense strand starting at position 3359 of SEQ ID NO: 1244829
uugguuuguguugugcaga

SEQ ID NO: 1517937 - RNA, 19 nt, Artificial Sequence
  Description of Artificial Sequence: Synthetic oligonucleotide
  Antisense strand to SEQ ID NO: 1517936
ucugcacaacacaaaccaa

SEQ ID NO: 1517938 - RNA, 19 nt, Artificial Sequence
  Description of Artificial Sequence: Synthetic oligonucleotide
  Sense strand starting at position 3360 of SEQ ID NO: 1244829
ugguuuguguugugcagau

SEQ ID NO: 1517939 - RNA, 19 nt, Artificial Sequence
  Description of Artificial Sequence: Synthetic oligonucleotide
  Antisense strand to SEQ ID NO: 1517938
aucugcacaacacaaacca

SEQ ID NO: 1517940 - RNA, 19 nt, Artificial Sequence
  Description of Artificial Sequence: Synthetic oligonucleotide
  Sense strand starting at position 3454 of SEQ ID NO: 1244829
gugagcucuucagggacuu

SEQ ID NO: 1517941 - RNA, 19 nt, Artificial Sequence
  Description of Artificial Sequence: Synthetic oligonucleotide
  Antisense strand to SEQ ID NO: 1517940
aagucccugaagagcucac

SEQ ID NO: 1517942 - RNA, 19 nt, Artificial Sequence
  Description of Artificial Sequence: Synthetic oligonucleotide
  Sense strand starting at position 3465 of SEQ ID NO: 1244829
agggacuuugacuguugaa

SEQ ID NO: 1517943 - RNA, 19 nt, Artificial Sequence
  Description of Artificial Sequence: Synthetic oligonucleotide
  Antisense strand to SEQ ID NO: 1517942
uucaacagucaaagucccu

SEQ ID NO: 1517944 - RNA, 19 nt, Artificial Sequence
  Description of Artificial Sequence: Synthetic oligonucleotide
  Sense strand starting at position 3468 of SEQ ID NO: 1244829
gacuuugacuguugaagaa

SEQ ID NO: 1517945 - RNA, 19 nt, Artificial Sequence
  Description of Artificial Sequence: Synthetic oligonucleotide
  Antisense strand to SEQ ID NO: 1517944
uucuucaacagucaaaguc

SEQ ID NO: 1517946 - RNA, 19 nt, Artificial Sequence
  Description of Artificial Sequence: Synthetic oligonucleotide
  Sense strand starting at position 3619 of SEQ ID NO: 1244829
gguccuccaugguucuaaa

SEQ ID NO: 1517947 - RNA, 19 nt, Artificial Sequence
  Description of Artificial Sequence: Synthetic oligonucleotide
  Antisense strand to SEQ ID NO: 1517946
uuuagaaccauggaggacc

SEQ ID NO: 1517948 - RNA, 19 nt, Artificial Sequence
  Description of Artificial Sequence: Synthetic oligonucleotide
  Sense strand starting at position 3813 of SEQ ID NO: 1244829
ugggaauccuacuuuggua

SEQ ID NO: 1517949 - RNA, 19 nt, Artificial Sequence
  Description of Artificial Sequence: Synthetic oligonucleotide
  Antisense strand to SEQ ID NO: 1517948
uaccaaaguaggauuccca

SEQ ID NO: 1517950 - RNA, 19 nt, Artificial Sequence
  Description of Artificial Sequence: Synthetic oligonucleotide
  Sense strand starting at position 3009 of SEQ ID NO: 1244830
uaaauaaucuaguaacggu

SEQ ID NO: 1517951 - RNA, 19 nt, Artificial Sequence
  Description of Artificial Sequence: Synthetic oligonucleotide
  Antisense strand to SEQ ID NO: 1517950
accguuacuagauuauuua

SEQ ID NO: 1517952 - RNA, 19 nt, Artificial Sequence
  Description of Artificial Sequence: Synthetic oligonucleotide
  Sense strand starting at position 3017 of SEQ ID NO: 1244830
cuaguaacggucuaacgua

SEQ ID NO: 1517953 - RNA, 19 nt, Artificial Sequence
  Description of Artificial Sequence: Synthetic oligonucleotide
  Antisense strand to SEQ ID NO: 1517952
uacguuagaccguuacuag

SEQ ID NO: 1517954 - RNA, 19 nt, Artificial Sequence
  Description of Artificial Sequence: Synthetic oligonucleotide
  Sense strand starting at position 3040 of SEQ ID NO: 1244830
ggaggaugcgcauagcuua

SEQ ID NO: 1517955 - RNA, 19 nt, Artificial Sequence
  Description of Artificial Sequence: Synthetic oligonucleotide
  Antisense strand to SEQ ID NO: 1517954
uaagcuaugcgcauccucc

SEQ ID NO: 1517956 - RNA, 19 nt, Artificial Sequence
  Description of Artificial Sequence: Synthetic oligonucleotide
  Sense strand starting at position 3047 of SEQ ID NO: 1244830
gcgcauagcuuauacguaa

SEQ ID NO: 1517957 - RNA, 19 nt, Artificial Sequence
  Description of Artificial Sequence: Synthetic oligonucleotide
  Antisense strand to SEQ ID NO: 1517956
uuacguauaagcuaugcgc

SEQ ID NO: 1517958 - RNA, 19 nt, Artificial Sequence
  Description of Artificial Sequence: Synthetic oligonucleotide
  Sense strand starting at position 3065 of SEQ ID NO: 1244830
aauacuaggccacguuaua

SEQ ID NO: 1517959 - RNA, 19 nt, Artificial Sequence
  Description of Artificial Sequence: Synthetic oligonucleotide
  Antisense strand to SEQ ID NO: 1517958
uauaacguggccuaguauu

SEQ ID NO: 1517960 - RNA, 19 nt, Artificial Sequence
  Description of Artificial Sequence: Synthetic oligonucleotide
  Sense strand starting at position 3075 of SEQ ID NO: 1244830
cacguuauaucagagacuu

SEQ ID NO: 1517961 - RNA, 19 nt, Artificial Sequence
  Description of Artificial Sequence: Synthetic oligonucleotide
  Antisense strand to SEQ ID NO: 1517960
aagucucugauauaacgug

SEQ ID NO: 1517962 - RNA, 19 nt, Artificial Sequence
  Description of Artificial Sequence: Synthetic oligonucleotide
  Sense strand starting at position 3077 of SEQ ID NO: 1244830
cguuauaucagagacuuga

SEQ ID NO: 1517963 - RNA, 19 nt, Artificial Sequence
  Description of Artificial Sequence: Synthetic oligonucleotide
  Antisense strand to SEQ ID NO: 1517962
ucaagucucugauauaacg

SEQ ID NO: 1517964 - RNA, 19 nt, Artificial Sequence
  Description of Artificial Sequence: Synthetic oligonucleotide
  Sense strand starting at position 3221 of SEQ ID NO: 1244830
gggacaucaucccuggacu

SEQ ID NO: 1517965 - RNA, 19 nt, Artificial Sequence
  Description of Artificial Sequence: Synthetic oligonucleotide
  Antisense strand to SEQ ID NO: 1517964
aguccagggaugauguccc

SEQ ID NO: 1517966 - RNA, 19 nt, Artificial Sequence
  Description of Artificial Sequence: Synthetic oligonucleotide
  Sense strand starting at position 3222 of SEQ ID NO: 1244830
ggacaucaucccuggacua

SEQ ID NO: 1517967 - RNA, 19 nt, Artificial Sequence
  Description of Artificial Sequence: Synthetic oligonucleotide
  Antisense strand to SEQ ID NO: 1517966
uaguccagggaugaugucc

SEQ ID NO: 1517968 - RNA, 19 nt, Artificial Sequence
  Description of Artificial Sequence: Synthetic oligonucleotide
  Sense strand starting at position 3344 of SEQ ID NO: 1244830
cuuugaggucuuggaagau

SEQ ID NO: 1517969 - RNA, 19 nt, Artificial Sequence
  Description of Artificial Sequence: Synthetic oligonucleotide
  Antisense strand to SEQ ID NO: 1517968
aucuuccaagaccucaaag

SEQ ID NO: 1517970 - RNA, 19 nt, Artificial Sequence
  Description of Artificial Sequence: Synthetic oligonucleotide
  Sense strand starting at position 3385 of SEQ ID NO: 1244830
gggucaguuuccuccagga

SEQ ID NO: 1517971 - RNA, 19 nt, Artificial Sequence
  Description of Artificial Sequence: Synthetic oligonucleotide
  Antisense strand to SEQ ID NO: 1517970
uccuggaggaaacugaccc

SEQ ID NO: 1517972 - RNA, 19 nt, Artificial Sequence
  Description of Artificial Sequence: Synthetic oligonucleotide
  Sense strand starting at position 3387 of SEQ ID NO: 1244830
gucaguuuccuccaggauc

SEQ ID NO: 1517973 - RNA, 19 nt, Artificial Sequence
  Description of Artificial Sequence: Synthetic oligonucleotide
  Antisense strand to SEQ ID NO: 1517972
gauccuggaggaaacugac

SEQ ID NO: 1517974 - RNA, 19 nt, Artificial Sequence
  Description of Artificial Sequence: Synthetic oligonucleotide
  Sense strand starting at position 1618 of SEQ ID NO: 1244831
ucaggaucauguccggauu

SEQ ID NO: 1517975 - RNA, 19 nt, Artificial Sequence
  Description of Artificial Sequence: Synthetic oligonucleotide
  Antisense strand to SEQ ID NO: 1517974
aauccggacaugauccuga

SEQ ID NO: 1517976 - RNA, 19 nt, Artificial Sequence
  Description of Artificial Sequence: Synthetic oligonucleotide
  Sense strand starting at position 2966 of SEQ ID NO: 1244831
guaucacgaucauuuaugu

SEQ ID NO: 1517977 - RNA, 19 nt, Artificial Sequence
  Description of Artificial Sequence: Synthetic oligonucleotide
  Antisense strand to SEQ ID NO: 1517976
acauaaaugaucgugauac

SEQ ID NO: 1517978 - RNA, 19 nt, Artificial Sequence
  Description of Artificial Sequence: Synthetic oligonucleotide
  Sense strand starting at position 2970 of SEQ ID NO: 1244831
cacgaucauuuauguagca

SEQ ID NO: 1517979 - RNA, 19 nt, Artificial Sequence
  Description of Artificial Sequence: Synthetic oligonucleotide
  Antisense strand to SEQ ID NO: 1517978
ugcuacauaaaugaucgug

SEQ ID NO: 1517980 - RNA, 19 nt, Artificial Sequence
  Description of Artificial Sequence: Synthetic oligonucleotide
  Sense strand starting at position 3969 of SEQ ID NO: 1244833
ucggauuauaggcauauca

SEQ ID NO: 1517981 - RNA, 19 nt, Artificial Sequence
  Description of Artificial Sequence: Synthetic oligonucleotide
  Antisense strand to SEQ ID NO: 1517980
ugauaugccuauaauccga

SEQ ID NO: 1517982 - RNA, 19 nt, Artificial Sequence
  Description of Artificial Sequence: Synthetic oligonucleotide
  Sense strand starting at position 3859 of SEQ ID NO: 1244834
agguuccucccuugacaaa

SEQ ID NO: 1517983 - RNA, 19 nt, Artificial Sequence
  Description of Artificial Sequence: Synthetic oligonucleotide
  Antisense strand to SEQ ID NO: 1517982
uuugucaagggaggaaccu

SEQ ID NO: 1517984 - RNA, 19 nt, Artificial Sequence
  Description of Artificial Sequence: Synthetic oligonucleotide
  Sense strand starting at position 3927 of SEQ ID NO: 1244834
cugugagggucucaaucua

SEQ ID NO: 1517985 - RNA, 19 nt, Artificial Sequence
  Description of Artificial Sequence: Synthetic oligonucleotide
  Antisense strand to SEQ ID NO: 1517984
uagauugagacccucacag

SEQ ID NO: 1517986 - RNA, 19 nt, Artificial Sequence
  Description of Artificial Sequence: Synthetic oligonucleotide
  Sense strand starting at position 1007 of SEQ ID NO: 1244835
aaagaucuauuguacgcau

SEQ ID NO: 1517987 - RNA, 19 nt, Artificial Sequence
  Description of Artificial Sequence: Synthetic oligonucleotide
  Antisense strand to SEQ ID NO: 1517986
augcguacaauagaucuuu

SEQ ID NO: 1517988 - RNA, 19 nt, Artificial Sequence
  Description of Artificial Sequence: Synthetic oligonucleotide
  Sense strand starting at position 3736 of SEQ ID NO: 1244835
gggagauugugcaguggca

SEQ ID NO: 1517989 - RNA, 19 nt, Artificial Sequence
  Description of Artificial Sequence: Synthetic oligonucleotide
  Antisense strand to SEQ ID NO: 1517988
ugccacugcacaaucuccc

SEQ ID NO: 1517990 - RNA, 19 nt, Artificial Sequence
  Description of Artificial Sequence: Synthetic oligonucleotide
  Sense strand starting at position 3941 of SEQ ID NO: 1244837
ucggauuauaggcauauca

SEQ ID NO: 1517991 - RNA, 19 nt, Artificial Sequence
  Description of Artificial Sequence: Synthetic oligonucleotide
  Antisense strand to SEQ ID NO: 1517990
ugauaugccuauaauccga

SEQ ID NO: 1517992 - RNA, 19 nt, Artificial Sequence
  Description of Artificial Sequence: Synthetic oligonucleotide
  Sense strand starting at position 2330 of SEQ ID NO: 1244838
ccaggguggucgugggaua

SEQ ID NO: 1517993 - RNA, 19 nt, Artificial Sequence
  Description of Artificial Sequence: Synthetic oligonucleotide
  Antisense strand to SEQ ID NO: 1517992
uaucccacgaccacccugg

SEQ ID NO: 1517994 - RNA, 19 nt, Artificial Sequence
  Description of Artificial Sequence: Synthetic oligonucleotide
  Sense strand starting at position 2335 of SEQ ID NO: 1244838
guggucgugggauacacau

SEQ ID NO: 1517995 - RNA, 19 nt, Artificial Sequence
  Description of Artificial Sequence: Synthetic oligonucleotide
  Antisense strand to SEQ ID NO: 1517994
auguguaucccacgaccac

SEQ ID NO: 1517996 - RNA, 19 nt, Artificial Sequence
  Description of Artificial Sequence: Synthetic oligonucleotide
  Sense strand starting at position 1616 of SEQ ID NO: 1244839
ucaggaucauguccggauu

SEQ ID NO: 1517997 - RNA, 19 nt, Artificial Sequence
  Description of Artificial Sequence: Synthetic oligonucleotide
  Antisense strand to SEQ ID NO: 1517996
aauccggacaugauccuga

SEQ ID NO: 1517998 - RNA, 19 nt, Artificial Sequence
  Description of Artificial Sequence: Synthetic oligonucleotide
  Sense strand starting at position 2964 of SEQ ID NO: 1244839
guaucacgaucauuuaugu

SEQ ID NO: 1517999 - RNA, 19 nt, Artificial Sequence
  Description of Artificial Sequence: Synthetic oligonucleotide
  Antisense strand to SEQ ID NO: 1517998
acauaaaugaucgugauac

SEQ ID NO: 1518000 - RNA, 19 nt, Artificial Sequence
  Description of Artificial Sequence: Synthetic oligonucleotide
  Sense strand starting at position 2968 of SEQ ID NO: 1244839
cacgaucauuuauguagca

SEQ ID NO: 1518001 - RNA, 19 nt, Artificial Sequence
  Description of Artificial Sequence: Synthetic oligonucleotide
  Antisense strand to SEQ ID NO: 1518000
ugcuacauaaaugaucgug

SEQ ID NO: 1518002 - RNA, 19 nt, Artificial Sequence
  Description of Artificial Sequence: Synthetic oligonucleotide
  Sense strand starting at position 3891 of SEQ ID NO: 1244840
agguuccucccuugacaaa

SEQ ID NO: 1518003 - RNA, 19 nt, Artificial Sequence
  Description of Artificial Sequence: Synthetic oligonucleotide
  Antisense strand to SEQ ID NO: 1518002
uuugucaagggaggaaccu

SEQ ID NO: 1518004 - RNA, 19 nt, Artificial Sequence
  Description of Artificial Sequence: Synthetic oligonucleotide
  Sense strand starting at position 3959 of SEQ ID NO: 1244840
cugugagggucucaaucua

SEQ ID NO: 1518005 - RNA, 19 nt, Artificial Sequence
  Description of Artificial Sequence: Synthetic oligonucleotide
  Antisense strand to SEQ ID NO: 1518004
uagauugagacccucacag

SEQ ID NO: 1518006 - RNA, 19 nt, Artificial Sequence
  Description of Artificial Sequence: Synthetic oligonucleotide
  Sense strand starting at position 1009 of SEQ ID NO: 1244842
ggguguuggguuuggagga

SEQ ID NO: 1518007 - RNA, 19 nt, Artificial Sequence
  Description of Artificial Sequence: Synthetic oligonucleotide
  Antisense strand to SEQ ID NO: 1518006
uccuccaaacccaacaccc

SEQ ID NO: 1518008 - RNA, 19 nt, Artificial Sequence
  Description of Artificial Sequence: Synthetic oligonucleotide
  Sense strand starting at position 2166 of SEQ ID NO: 1244842
auguguauguggguauaca

SEQ ID NO: 1518009 - RNA, 19 nt, Artificial Sequence
  Description of Artificial Sequence: Synthetic oligonucleotide
  Antisense strand to SEQ ID NO: 1518008
uguauacccacauacacau

SEQ ID NO: 1518010 - RNA, 19 nt, Artificial Sequence
  Description of Artificial Sequence: Synthetic oligonucleotide
  Sense strand starting at position 2581 of SEQ ID NO: 1244842
gcucaucuguccuuccaca

SEQ ID NO: 1518011 - RNA, 19 nt, Artificial Sequence
  Description of Artificial Sequence: Synthetic oligonucleotide
  Antisense strand to SEQ ID NO: 1518010
uguggaaggacagaugagc

SEQ ID NO: 1518012 - RNA, 19 nt, Artificial Sequence
  Description of Artificial Sequence: Synthetic oligonucleotide
  Sense strand starting at position 476 of SEQ ID NO: 1244844
gucuaaaggucacacugua

SEQ ID NO: 1518013 - RNA, 19 nt, Artificial Sequence
  Description of Artificial Sequence: Synthetic oligonucleotide
  Antisense strand to SEQ ID NO: 1518012
uacagugugaccuuuagac

SEQ ID NO: 1518014 - RNA, 19 nt, Artificial Sequence
  Description of Artificial Sequence: Synthetic oligonucleotide
  Sense strand starting at position 2377 of SEQ ID NO: 1244843
gcuauuggaucucagaaua

SEQ ID NO: 1518015 - RNA, 19 nt, Artificial Sequence
  Description of Artificial Sequence: Synthetic oligonucleotide
  Antisense strand to SEQ ID NO: 1518014
uauucugagauccaauagc

SEQ ID NO: 1518016 - RNA, 19 nt, Artificial Sequence
  Description of Artificial Sequence: Synthetic oligonucleotide
  Sense strand starting at position 3006 of SEQ ID NO: 1244843
uaaauaaucuaguaacggu

SEQ ID NO: 1518017 - RNA, 19 nt, Artificial Sequence
  Description of Artificial Sequence: Synthetic oligonucleotide
  Antisense strand to SEQ ID NO: 1518016
accguuacuagauuauuua

SEQ ID NO: 1518018 - RNA, 19 nt, Artificial Sequence
  Description of Artificial Sequence: Synthetic oligonucleotide
  Sense strand starting at position 3062 of SEQ ID NO: 1244843
aauacuaggccacguuaua

SEQ ID NO: 1518019 - RNA, 19 nt, Artificial Sequence
  Description of Artificial Sequence: Synthetic oligonucleotide
  Antisense strand to SEQ ID NO: 1518018
uauaacguggccuaguauu

SEQ ID NO: 1518020 - RNA, 19 nt, Artificial Sequence
  Description of Artificial Sequence: Synthetic oligonucleotide
  Sense strand starting at position 3072 of SEQ ID NO: 1244843
cacguuauaucagagacuu

SEQ ID NO: 1518021 - RNA, 19 nt, Artificial Sequence
  Description of Artificial Sequence: Synthetic oligonucleotide
  Antisense strand to SEQ ID NO: 1518020
aagucucugauauaacgug

SEQ ID NO: 1518022 - RNA, 19 nt, Artificial Sequence
  Description of Artificial Sequence: Synthetic oligonucleotide
  Sense strand starting at position 3074 of SEQ ID NO: 1244843
cguuauaucagagacuuga

SEQ ID NO: 1518023 - RNA, 19 nt, Artificial Sequence
  Description of Artificial Sequence: Synthetic oligonucleotide
  Antisense strand to SEQ ID NO: 1518022
ucaagucucugauauaacg

SEQ ID NO: 1518024 - RNA, 19 nt, Artificial Sequence
  Description of Artificial Sequence: Synthetic oligonucleotide
  Sense strand starting at position 321 of SEQ ID NO: 1244845
uggcuucuacuccagggaa

SEQ ID NO: 1518025 - RNA, 19 nt, Artificial Sequence
  Description of Artificial Sequence: Synthetic oligonucleotide
  Antisense strand to SEQ ID NO: 1518024
uucccuggaguagaagcca

SEQ ID NO: 1518026 - RNA, 19 nt, Artificial Sequence
  Description of Artificial Sequence: Synthetic oligonucleotide
  Sense strand starting at position 464 of SEQ ID NO: 1244845
ugugguggauguguucaga

SEQ ID NO: 1518027 - RNA, 19 nt, Artificial Sequence
  Description of Artificial Sequence: Synthetic oligonucleotide
  Antisense strand to SEQ ID NO: 1518026
ucugaacacauccaccaca

SEQ ID NO: 1518028 - RNA, 19 nt, Artificial Sequence
  Description of Artificial Sequence: Synthetic oligonucleotide
  Sense strand starting at position 467 of SEQ ID NO: 1244845
gguggauguguucagauga

SEQ ID NO: 1518029 - RNA, 19 nt, Artificial Sequence
  Description of Artificial Sequence: Synthetic oligonucleotide
  Antisense strand to SEQ ID NO: 1518028
ucaucugaacacauccacc

SEQ ID NO: 1518030 - RNA, 19 nt, Artificial Sequence
  Description of Artificial Sequence: Synthetic oligonucleotide
  Sense strand starting at position 618 of SEQ ID NO: 1244845
gaagguuucuuugugcaga

SEQ ID NO: 1518031 - RNA, 19 nt, Artificial Sequence
  Description of Artificial Sequence: Synthetic oligonucleotide
  Antisense strand to SEQ ID NO: 1518030
ucugcacaaagaaaccuuc

SEQ ID NO: 1518032 - RNA, 19 nt, Artificial Sequence
  Description of Artificial Sequence: Synthetic oligonucleotide
  Sense strand starting at position 620 of SEQ ID NO: 1244845
agguuucuuugugcagaaa

SEQ ID NO: 1518033 - RNA, 19 nt, Artificial Sequence
  Description of Artificial Sequence: Synthetic oligonucleotide
  Antisense strand to SEQ ID NO: 1518032
uuucugcacaaagaaaccu

SEQ ID NO: 1518034 - RNA, 19 nt, Artificial Sequence
  Description of Artificial Sequence: Synthetic oligonucleotide
  Sense strand starting at position 621 of SEQ ID NO: 1244845
gguuucuuugugcagaaag

SEQ ID NO: 1518035 - RNA, 19 nt, Artificial Sequence
  Description of Artificial Sequence: Synthetic oligonucleotide
  Antisense strand to SEQ ID NO: 1518034
cuuucugcacaaagaaacc

SEQ ID NO: 1518036 - RNA, 19 nt, Artificial Sequence
  Description of Artificial Sequence: Synthetic oligonucleotide
  Sense strand starting at position 623 of SEQ ID NO: 1244845
uuucuuugugcagaaagcu

SEQ ID NO: 1518037 - RNA, 19 nt, Artificial Sequence
  Description of Artificial Sequence: Synthetic oligonucleotide
  Antisense strand to SEQ ID NO: 1518036
agcuuucugcacaaagaaa

SEQ ID NO: 1518038 - RNA, 19 nt, Artificial Sequence
  Description of Artificial Sequence: Synthetic oligonucleotide
  Sense strand starting at position 683 of SEQ ID NO: 1244845
cccaguuugucugugguga

SEQ ID NO: 1518039 - RNA, 19 nt, Artificial Sequence
  Description of Artificial Sequence: Synthetic oligonucleotide
  Antisense strand to SEQ ID NO: 1518038
ucaccacagacaaacuggg

SEQ ID NO: 1518040 - RNA, 19 nt, Artificial Sequence
  Description of Artificial Sequence: Synthetic oligonucleotide
  Sense strand starting at position 804 of SEQ ID NO: 1244845
cggccuguccuguuuguua

SEQ ID NO: 1518041 - RNA, 19 nt, Artificial Sequence
  Description of Artificial Sequence: Synthetic oligonucleotide
  Antisense strand to SEQ ID NO: 1518040
uaacaaacaggacaggccg

SEQ ID NO: 1518042 - RNA, 19 nt, Artificial Sequence
  Description of Artificial Sequence: Synthetic oligonucleotide
  Sense strand starting at position 831 of SEQ ID NO: 1244845
cugagcguaccuuguauuu

SEQ ID NO: 1518043 - RNA, 19 nt, Artificial Sequence
  Description of Artificial Sequence: Synthetic oligonucleotide
  Antisense strand to SEQ ID NO: 1518042
aaauacaagguacgcucag

SEQ ID NO: 1518044 - RNA, 19 nt, Artificial Sequence
  Description of Artificial Sequence: Synthetic oligonucleotide
  Sense strand starting at position 918 of SEQ ID NO: 1244845
ugggaaugcccuuguacac

SEQ ID NO: 1518045 - RNA, 19 nt, Artificial Sequence
  Description of Artificial Sequence: Synthetic oligonucleotide
  Antisense strand to SEQ ID NO: 1518044
guguacaagggcauuccca

SEQ ID NO: 1518046 - RNA, 19 nt, Artificial Sequence
  Description of Artificial Sequence: Synthetic oligonucleotide
  Sense strand starting at position 927 of SEQ ID NO: 1244845
ccuuguacacuagaucuau

SEQ ID NO: 1518047 - RNA, 19 nt, Artificial Sequence
  Description of Artificial Sequence: Synthetic oligonucleotide
  Antisense strand to SEQ ID NO: 1518046
auagaucuaguguacaagg

SEQ ID NO: 1518048 - RNA, 19 nt, Artificial Sequence
  Description of Artificial Sequence: Synthetic oligonucleotide
  Sense strand starting at position 941 of SEQ ID NO: 1244845
ucuaucagcugugugcaaa

SEQ ID NO: 1518049 - RNA, 19 nt, Artificial Sequence
  Description of Artificial Sequence: Synthetic oligonucleotide
  Antisense strand to SEQ ID NO: 1518048
uuugcacacagcugauaga

SEQ ID NO: 1518050 - RNA, 19 nt, Artificial Sequence
  Description of Artificial Sequence: Synthetic oligonucleotide
  Sense strand starting at position 1041 of SEQ ID NO: 1244845
ccaugauuccucgguagag

SEQ ID NO: 1518051 - RNA, 19 nt, Artificial Sequence
  Description of Artificial Sequence: Synthetic oligonucleotide
  Antisense strand to SEQ ID NO: 1518050
cucuaccgaggaaucaugg

SEQ ID NO: 1518052 - RNA, 19 nt, Artificial Sequence
  Description of Artificial Sequence: Synthetic oligonucleotide
  Sense strand starting at position 1042 of SEQ ID NO: 1244845
caugauuccucgguagagg

SEQ ID NO: 1518053 - RNA, 19 nt, Artificial Sequence
  Description of Artificial Sequence: Synthetic oligonucleotide
  Antisense strand to SEQ ID NO: 1518052
ccucuaccgaggaaucaug

SEQ ID NO: 1518054 - RNA, 19 nt, Artificial Sequence
  Description of Artificial Sequence: Synthetic oligonucleotide
  Sense strand starting at position 1043 of SEQ ID NO: 1244845
augauuccucgguagaggu

SEQ ID NO: 1518055 - RNA, 19 nt, Artificial Sequence
  Description of Artificial Sequence: Synthetic oligonucleotide
  Antisense strand to SEQ ID NO: 1518054
accucuaccgaggaaucau

SEQ ID NO: 1518056 - RNA, 19 nt, Artificial Sequence
  Description of Artificial Sequence: Synthetic oligonucleotide
  Sense strand starting at position 1106 of SEQ ID NO: 1244845
gauggacacucagagucaa

SEQ ID NO: 1518057 - RNA, 19 nt, Artificial Sequence
  Description of Artificial Sequence: Synthetic oligonucleotide
  Antisense strand to SEQ ID NO: 1518056
uugacucugaguguccauc

SEQ ID NO: 1518058 - RNA, 19 nt, Artificial Sequence
  Description of Artificial Sequence: Synthetic oligonucleotide
  Sense strand starting at position 1400 of SEQ ID NO: 1244845
uugguacuguucuuauaug

SEQ ID NO: 1518059 - RNA, 19 nt, Artificial Sequence
  Description of Artificial Sequence: Synthetic oligonucleotide
  Antisense strand to SEQ ID NO: 1518058
cauauaagaacaguaccaa

SEQ ID NO: 1518060 - RNA, 19 nt, Artificial Sequence
  Description of Artificial Sequence: Synthetic oligonucleotide
  Sense strand starting at position 1408 of SEQ ID NO: 1244845
guucuuauaugucucccau

SEQ ID NO: 1518061 - RNA, 19 nt, Artificial Sequence
  Description of Artificial Sequence: Synthetic oligonucleotide
  Antisense strand to SEQ ID NO: 1518060
augggagacauauaagaac

SEQ ID NO: 1518062 - RNA, 19 nt, Artificial Sequence
  Description of Artificial Sequence: Synthetic oligonucleotide
  Sense strand starting at position 1476 of SEQ ID NO: 1244845
uuugcugucaaaugaggua

SEQ ID NO: 1518063 - RNA, 19 nt, Artificial Sequence
  Description of Artificial Sequence: Synthetic oligonucleotide
  Antisense strand to SEQ ID NO: 1518062
uaccucauuugacagcaaa

SEQ ID NO: 1518064 - RNA, 19 nt, Artificial Sequence
  Description of Artificial Sequence: Synthetic oligonucleotide
  Sense strand starting at position 1481 of SEQ ID NO: 1244845
ugucaaaugagguauguug

SEQ ID NO: 1518065 - RNA, 19 nt, Artificial Sequence
  Description of Artificial Sequence: Synthetic oligonucleotide
  Antisense strand to SEQ ID NO: 1518064
caacauaccucauuugaca

SEQ ID NO: 1518066 - RNA, 19 nt, Artificial Sequence
  Description of Artificial Sequence: Synthetic oligonucleotide
  Sense strand starting at position 1483 of SEQ ID NO: 1244845
ucaaaugagguauguugga

SEQ ID NO: 1518067 - RNA, 19 nt, Artificial Sequence
  Description of Artificial Sequence: Synthetic oligonucleotide
  Antisense strand to SEQ ID NO: 1518066
uccaacauaccucauuuga

SEQ ID NO: 1518068 - RNA, 19 nt, Artificial Sequence
  Description of Artificial Sequence: Synthetic oligonucleotide
  Sense strand starting at position 1492 of SEQ ID NO: 1244845
guauguuggaguuagugga

SEQ ID NO: 1518069 - RNA, 19 nt, Artificial Sequence
  Description of Artificial Sequence: Synthetic oligonucleotide
  Antisense strand to SEQ ID NO: 1518068
uccacuaacuccaacauac

SEQ ID NO: 1518070 - RNA, 19 nt, Artificial Sequence
  Description of Artificial Sequence: Synthetic oligonucleotide
  Sense strand starting at position 1992 of SEQ ID NO: 1244845
uccgucucacuguaagaca

SEQ ID NO: 1518071 - RNA, 19 nt, Artificial Sequence
  Description of Artificial Sequence: Synthetic oligonucleotide
  Antisense strand to SEQ ID NO: 1518070
ugucuuacagugagacgga

SEQ ID NO: 1518072 - RNA, 19 nt, Artificial Sequence
  Description of Artificial Sequence: Synthetic oligonucleotide
  Sense strand starting at position 2641 of SEQ ID NO: 1244845
cgauccggucucuacuaaa

SEQ ID NO: 1518073 - RNA, 19 nt, Artificial Sequence
  Description of Artificial Sequence: Synthetic oligonucleotide
  Antisense strand to SEQ ID NO: 1518072
uuuaguagagaccggaucg

SEQ ID NO: 1518074 - RNA, 19 nt, Artificial Sequence
  Description of Artificial Sequence: Synthetic oligonucleotide
  Sense strand starting at position 3326 of SEQ ID NO: 1244845
ugguguguggucucugcua

SEQ ID NO: 1518075 - RNA, 19 nt, Artificial Sequence
  Description of Artificial Sequence: Synthetic oligonucleotide
  Antisense strand to SEQ ID NO: 1518074
uagcagagaccacacacca

SEQ ID NO: 1518076 - RNA, 19 nt, Artificial Sequence
  Description of Artificial Sequence: Synthetic oligonucleotide
  Sense strand starting at position 3363 of SEQ ID NO: 1244845
aucuuuacuuaguugaagu

SEQ ID NO: 1518077 - RNA, 19 nt, Artificial Sequence
  Description of Artificial Sequence: Synthetic oligonucleotide
  Antisense strand to SEQ ID NO: 1518076
acuucaacuaaguaaagau

SEQ ID NO: 1518078 - RNA, 19 nt, Artificial Sequence
  Description of Artificial Sequence: Synthetic oligonucleotide
  Sense strand starting at position 3503 of SEQ ID NO: 1244845
agggauucguuccuguguu

SEQ ID NO: 1518079 - RNA, 19 nt, Artificial Sequence
  Description of Artificial Sequence: Synthetic oligonucleotide
  Antisense strand to SEQ ID NO: 1518078
aacacaggaacgaaucccu

SEQ ID NO: 1518080 - RNA, 19 nt, Artificial Sequence
  Description of Artificial Sequence: Synthetic oligonucleotide
  Sense strand starting at position 3505 of SEQ ID NO: 1244845
ggauucguuccuguguugu

SEQ ID NO: 1518081 - RNA, 19 nt, Artificial Sequence
  Description of Artificial Sequence: Synthetic oligonucleotide
  Antisense strand to SEQ ID NO: 1518080
acaacacaggaacgaaucc

SEQ ID NO: 1518082 - RNA, 19 nt, Artificial Sequence
  Description of Artificial Sequence: Synthetic oligonucleotide
  Sense strand starting at position 3515 of SEQ ID NO: 1244845
cuguguuguacuugacaug

SEQ ID NO: 1518083 - RNA, 19 nt, Artificial Sequence
  Description of Artificial Sequence: Synthetic oligonucleotide
  Antisense strand to SEQ ID NO: 1518082
caugucaaguacaacacag

SEQ ID NO: 1518084 - RNA, 19 nt, Artificial Sequence
  Description of Artificial Sequence: Synthetic oligonucleotide
  Sense strand starting at position 3516 of SEQ ID NO: 1244845
uguguuguacuugacaugu

SEQ ID NO: 1518085 - RNA, 19 nt, Artificial Sequence
  Description of Artificial Sequence: Synthetic oligonucleotide
  Antisense strand to SEQ ID NO: 1518084
acaugucaaguacaacaca

SEQ ID NO: 1518086 - RNA, 19 nt, Artificial Sequence
  Description of Artificial Sequence: Synthetic oligonucleotide
  Sense strand starting at position 3545 of SEQ ID NO: 1244845
caguguugguuucuccaaa

SEQ ID NO: 1518087 - RNA, 19 nt, Artificial Sequence
  Description of Artificial Sequence: Synthetic oligonucleotide
  Antisense strand to SEQ ID NO: 1518086
uuuggagaaaccaacacug

SEQ ID NO: 1518088 - RNA, 19 nt, Artificial Sequence
  Description of Artificial Sequence: Synthetic oligonucleotide
  Sense strand starting at position 3546 of SEQ ID NO: 1244845
aguguugguuucuccaaag

SEQ ID NO: 1518089 - RNA, 19 nt, Artificial Sequence
  Description of Artificial Sequence: Synthetic oligonucleotide
  Antisense strand to SEQ ID NO: 1518088
cuuuggagaaaccaacacu

SEQ ID NO: 1518090 - RNA, 19 nt, Artificial Sequence
  Description of Artificial Sequence: Synthetic oligonucleotide
  Sense strand starting at position 3609 of SEQ ID NO: 1244845
ggccuuaagccauggugga

SEQ ID NO: 1518091 - RNA, 19 nt, Artificial Sequence
  Description of Artificial Sequence: Synthetic oligonucleotide
  Antisense strand to SEQ ID NO: 1518090
uccaccauggcuuaaggcc

SEQ ID NO: 1518092 - RNA, 19 nt, Artificial Sequence
  Description of Artificial Sequence: Synthetic oligonucleotide
  Sense strand starting at position 3610 of SEQ ID NO: 1244845
gccuuaagccaugguggau

SEQ ID NO: 1518093 - RNA, 19 nt, Artificial Sequence
  Description of Artificial Sequence: Synthetic oligonucleotide
  Antisense strand to SEQ ID NO: 1518092
auccaccauggcuuaaggc

SEQ ID NO: 1518094 - RNA, 19 nt, Artificial Sequence
  Description of Artificial Sequence: Synthetic oligonucleotide
  Sense strand starting at position 3655 of SEQ ID NO: 1244845
uuccuugagcuacagacau

SEQ ID NO: 1518095 - RNA, 19 nt, Artificial Sequence
  Description of Artificial Sequence: Synthetic oligonucleotide
  Antisense strand to SEQ ID NO: 1518094
augucuguagcucaaggaa

SEQ ID NO: 1518096 - RNA, 19 nt, Artificial Sequence
  Description of Artificial Sequence: Synthetic oligonucleotide
  Sense strand starting at position 3695 of SEQ ID NO: 1244845
ccuuguuucugcuccacau

SEQ ID NO: 1518097 - RNA, 19 nt, Artificial Sequence
  Description of Artificial Sequence: Synthetic oligonucleotide
  Antisense strand to SEQ ID NO: 1518096
auguggagcagaaacaagg

SEQ ID NO: 1518098 - RNA, 19 nt, Artificial Sequence
  Description of Artificial Sequence: Synthetic oligonucleotide
  Sense strand starting at position 3748 of SEQ ID NO: 1244845
ggcauuaucuggucuacaa

SEQ ID NO: 1518099 - RNA, 19 nt, Artificial Sequence
  Description of Artificial Sequence: Synthetic oligonucleotide
  Antisense strand to SEQ ID NO: 1518098
uuguagaccagauaaugcc

SEQ ID NO: 1518100 - RNA, 19 nt, Artificial Sequence
  Description of Artificial Sequence: Synthetic oligonucleotide
  Sense strand starting at position 3831 of SEQ ID NO: 1244845
cugggaaucccaugugacu

SEQ ID NO: 1518101 - RNA, 19 nt, Artificial Sequence
  Description of Artificial Sequence: Synthetic oligonucleotide
  Antisense strand to SEQ ID NO: 1518100
agucacaugggauucccag

SEQ ID NO: 1518102 - RNA, 19 nt, Artificial Sequence
  Description of Artificial Sequence: Synthetic oligonucleotide
  Sense strand starting at position 3926 of SEQ ID NO: 1244845
agguuucugacuugagguu

SEQ ID NO: 1518103 - RNA, 19 nt, Artificial Sequence
  Description of Artificial Sequence: Synthetic oligonucleotide
  Antisense strand to SEQ ID NO: 1518102
aaccucaagucagaaaccu

SEQ ID NO: 1518104 - RNA, 19 nt, Artificial Sequence
  Description of Artificial Sequence: Synthetic oligonucleotide
  Sense strand starting at position 3762 of SEQ ID NO: 1244841
gggagauugugcaguggca

SEQ ID NO: 1518105 - RNA, 19 nt, Artificial Sequence
  Description of Artificial Sequence: Synthetic oligonucleotide
  Antisense strand to SEQ ID NO: 1518104
ugccacugcacaaucuccc

SEQ ID NO: 1518106 - RNA, 19 nt, Artificial Sequence
  Description of Artificial Sequence: Synthetic oligonucleotide
  Sense strand starting at position 1616 of SEQ ID NO: 1244847
ucaggaucauguccggauu

SEQ ID NO: 1518107 - RNA, 19 nt, Artificial Sequence
  Description of Artificial Sequence: Synthetic oligonucleotide
  Antisense strand to SEQ ID NO: 1518106
aauccggacaugauccuga

SEQ ID NO: 1518108 - RNA, 19 nt, Artificial Sequence
  Description of Artificial Sequence: Synthetic oligonucleotide
  Sense strand starting at position 2964 of SEQ ID NO: 1244847
guaucacgaucauuuaugu

SEQ ID NO: 1518109 - RNA, 19 nt, Artificial Sequence
  Description of Artificial Sequence: Synthetic oligonucleotide
  Antisense strand to SEQ ID NO: 1518108
acauaaaugaucgugauac

SEQ ID NO: 1518110 - RNA, 19 nt, Artificial Sequence
  Description of Artificial Sequence: Synthetic oligonucleotide
  Sense strand starting at position 2968 of SEQ ID NO: 1244847
cacgaucauuuauguagca

SEQ ID NO: 1518111 - RNA, 19 nt, Artificial Sequence
  Description of Artificial Sequence: Synthetic oligonucleotide
  Antisense strand to SEQ ID NO: 1518110
ugcuacauaaaugaucgug

SEQ ID NO: 1518112 - RNA, 19 nt, Artificial Sequence
  Description of Artificial Sequence: Synthetic oligonucleotide
  Sense strand starting at position 2344 of SEQ ID NO: 1244848
ccaggguggucgugggaua

SEQ ID NO: 1518113 - RNA, 19 nt, Artificial Sequence
  Description of Artificial Sequence: Synthetic oligonucleotide
  Antisense strand to SEQ ID NO: 1518112
uaucccacgaccacccugg

SEQ ID NO: 1518114 - RNA, 19 nt, Artificial Sequence
  Description of Artificial Sequence: Synthetic oligonucleotide
  Sense strand starting at position 2349 of SEQ ID NO: 1244848
guggucgugggauacacau

SEQ ID NO: 1518115 - RNA, 19 nt, Artificial Sequence
  Description of Artificial Sequence: Synthetic oligonucleotide
  Antisense strand to SEQ ID NO: 1518114
auguguaucccacgaccac

SEQ ID NO: 1518116 - RNA, 19 nt, Artificial Sequence
  Description of Artificial Sequence: Synthetic oligonucleotide
  Sense strand starting at position 3021 of SEQ ID NO: 1244849
uaaauaaucuaguaacggu

SEQ ID NO: 1518117 - RNA, 19 nt, Artificial Sequence
  Description of Artificial Sequence: Synthetic oligonucleotide
  Antisense strand to SEQ ID NO: 1518116
accguuacuagauuauuua

SEQ ID NO: 1518118 - RNA, 19 nt, Artificial Sequence
  Description of Artificial Sequence: Synthetic oligonucleotide
  Sense strand starting at position 3029 of SEQ ID NO: 1244849
cuaguaacggucuaacgua

SEQ ID NO: 1518119 - RNA, 19 nt, Artificial Sequence
  Description of Artificial Sequence: Synthetic oligonucleotide
  Antisense strand to SEQ ID NO: 1518118
uacguuagaccguuacuag

SEQ ID NO: 1518120 - RNA, 19 nt, Artificial Sequence
  Description of Artificial Sequence: Synthetic oligonucleotide
  Sense strand starting at position 3052 of SEQ ID NO: 1244849
ggaggaugcgcauagcuua

SEQ ID NO: 1518121 - RNA, 19 nt, Artificial Sequence
  Description of Artificial Sequence: Synthetic oligonucleotide
  Antisense strand to SEQ ID NO: 1518120
uaagcuaugcgcauccucc

SEQ ID NO: 1518122 - RNA, 19 nt, Artificial Sequence
  Description of Artificial Sequence: Synthetic oligonucleotide
  Sense strand starting at position 3059 of SEQ ID NO: 1244849
gcgcauagcuuauacguaa

SEQ ID NO: 1518123 - RNA, 19 nt, Artificial Sequence
  Description of Artificial Sequence: Synthetic oligonucleotide
  Antisense strand to SEQ ID NO: 1518122
uuacguauaagcuaugcgc

SEQ ID NO: 1518124 - RNA, 19 nt, Artificial Sequence
  Description of Artificial Sequence: Synthetic oligonucleotide
  Sense strand starting at position 3077 of SEQ ID NO: 1244849
aauacuaggccacguuaua

SEQ ID NO: 1518125 - RNA, 19 nt, Artificial Sequence
  Description of Artificial Sequence: Synthetic oligonucleotide
  Antisense strand to SEQ ID NO: 1518124
uauaacguggccuaguauu

SEQ ID NO: 1518126 - RNA, 19 nt, Artificial Sequence
  Description of Artificial Sequence: Synthetic oligonucleotide
  Sense strand starting at position 3087 of SEQ ID NO: 1244849
cacguuauaucagagacuu

SEQ ID NO: 1518127 - RNA, 19 nt, Artificial Sequence
  Description of Artificial Sequence: Synthetic oligonucleotide
  Antisense strand to SEQ ID NO: 1518126
aagucucugauauaacgug

SEQ ID NO: 1518128 - RNA, 19 nt, Artificial Sequence
  Description of Artificial Sequence: Synthetic oligonucleotide
  Sense strand starting at position 3089 of SEQ ID NO: 1244849
cguuauaucagagacuuga

SEQ ID NO: 1518129 - RNA, 19 nt, Artificial Sequence
  Description of Artificial Sequence: Synthetic oligonucleotide
  Antisense strand to SEQ ID NO: 1518128
ucaagucucugauauaacg

SEQ ID NO: 1518130 - RNA, 19 nt, Artificial Sequence
  Description of Artificial Sequence: Synthetic oligonucleotide
  Sense strand starting at position 3233 of SEQ ID NO: 1244849
gggacaucaucccuggacu

SEQ ID NO: 1518131 - RNA, 19 nt, Artificial Sequence
  Description of Artificial Sequence: Synthetic oligonucleotide
  Antisense strand to SEQ ID NO: 1518130
aguccagggaugauguccc

SEQ ID NO: 1518132 - RNA, 19 nt, Artificial Sequence
  Description of Artificial Sequence: Synthetic oligonucleotide
  Sense strand starting at position 3234 of SEQ ID NO: 1244849
ggacaucaucccuggacua

SEQ ID NO: 1518133 - RNA, 19 nt, Artificial Sequence
  Description of Artificial Sequence: Synthetic oligonucleotide
  Antisense strand to SEQ ID NO: 1518132
uaguccagggaugaugucc

SEQ ID NO: 1518134 - RNA, 19 nt, Artificial Sequence
  Description of Artificial Sequence: Synthetic oligonucleotide
  Sense strand starting at position 3356 of SEQ ID NO: 1244849
cuuugaggucuuggaagau

SEQ ID NO: 1518135 - RNA, 19 nt, Artificial Sequence
  Description of Artificial Sequence: Synthetic oligonucleotide
  Antisense strand to SEQ ID NO: 1518134
aucuuccaagaccucaaag

SEQ ID NO: 1518136 - RNA, 19 nt, Artificial Sequence
  Description of Artificial Sequence: Synthetic oligonucleotide
  Sense strand starting at position 3397 of SEQ ID NO: 1244849
gggucaguuuccuccagga

SEQ ID NO: 1518137 - RNA, 19 nt, Artificial Sequence
  Description of Artificial Sequence: Synthetic oligonucleotide
  Antisense strand to SEQ ID NO: 1518136
uccuggaggaaacugaccc

SEQ ID NO: 1518138 - RNA, 19 nt, Artificial Sequence
  Description of Artificial Sequence: Synthetic oligonucleotide
  Sense strand starting at position 3399 of SEQ ID NO: 1244849
gucaguuuccuccaggauc

SEQ ID NO: 1518139 - RNA, 19 nt, Artificial Sequence
  Description of Artificial Sequence: Synthetic oligonucleotide
  Antisense strand to SEQ ID NO: 1518138
gauccuggaggaaacugac

SEQ ID NO: 1518140 - RNA, 19 nt, Artificial Sequence
  Description of Artificial Sequence: Synthetic oligonucleotide
  Sense strand starting at position 1630 of SEQ ID NO: 1244850
ucaggaucauguccggauu

SEQ ID NO: 1518141 - RNA, 19 nt, Artificial Sequence
  Description of Artificial Sequence: Synthetic oligonucleotide
  Antisense strand to SEQ ID NO: 1518140
aauccggacaugauccuga

SEQ ID NO: 1518142 - RNA, 19 nt, Artificial Sequence
  Description of Artificial Sequence: Synthetic oligonucleotide
  Sense strand starting at position 2978 of SEQ ID NO: 1244850
guaucacgaucauuuaugu

SEQ ID NO: 1518143 - RNA, 19 nt, Artificial Sequence
  Description of Artificial Sequence: Synthetic oligonucleotide
  Antisense strand to SEQ ID NO: 1518142
acauaaaugaucgugauac

SEQ ID NO: 1518144 - RNA, 19 nt, Artificial Sequence
  Description of Artificial Sequence: Synthetic oligonucleotide
  Sense strand starting at position 2982 of SEQ ID NO: 1244850
cacgaucauuuauguagca

SEQ ID NO: 1518145 - RNA, 19 nt, Artificial Sequence
  Description of Artificial Sequence: Synthetic oligonucleotide
  Antisense strand to SEQ ID NO: 1518144
ugcuacauaaaugaucgug

SEQ ID NO: 1518146 - RNA, 19 nt, Artificial Sequence
  Description of Artificial Sequence: Synthetic oligonucleotide
  Sense strand starting at position 3981 of SEQ ID NO: 1244851
ucggauuauaggcauauca

SEQ ID NO: 1518147 - RNA, 19 nt, Artificial Sequence
  Description of Artificial Sequence: Synthetic oligonucleotide
  Antisense strand to SEQ ID NO: 1518146
ugauaugccuauaauccga

SEQ ID NO: 1518148 - RNA, 19 nt, Artificial Sequence
  Description of Artificial Sequence: Synthetic oligonucleotide
  Sense strand starting at position 3891 of SEQ ID NO: 1244852
agguuccucccuugacaaa

SEQ ID NO: 1518149 - RNA, 19 nt, Artificial Sequence
  Description of Artificial Sequence: Synthetic oligonucleotide
  Antisense strand to SEQ ID NO: 1518148
uuugucaagggaggaaccu

SEQ ID NO: 1518150 - RNA, 19 nt, Artificial Sequence
  Description of Artificial Sequence: Synthetic oligonucleotide
  Sense strand starting at position 3959 of SEQ ID NO: 1244852
cugugagggucucaaucua

SEQ ID NO: 1518151 - RNA, 19 nt, Artificial Sequence
  Description of Artificial Sequence: Synthetic oligonucleotide
  Antisense strand to SEQ ID NO: 1518150
uagauugagacccucacag

SEQ ID NO: 1518152 - RNA, 19 nt, Artificial Sequence
  Description of Artificial Sequence: Synthetic oligonucleotide
  Sense strand starting at position 3762 of SEQ ID NO: 1244853
gggagauugugcaguggca

SEQ ID NO: 1518153 - RNA, 19 nt, Artificial Sequence
  Description of Artificial Sequence: Synthetic oligonucleotide
  Antisense strand to SEQ ID NO: 1518152
ugccacugcacaaucuccc

SEQ ID NO: 1518154 - RNA, 19 nt, Artificial Sequence
  Description of Artificial Sequence: Synthetic oligonucleotide
  Sense strand starting at position 1616 of SEQ ID NO: 1244855
ucaggaucauguccggauu

SEQ ID NO: 1518155 - RNA, 19 nt, Artificial Sequence
  Description of Artificial Sequence: Synthetic oligonucleotide
  Antisense strand to SEQ ID NO: 1518154
aauccggacaugauccuga

SEQ ID NO: 1518156 - RNA, 19 nt, Artificial Sequence
  Description of Artificial Sequence: Synthetic oligonucleotide
  Sense strand starting at position 2964 of SEQ ID NO: 1244855
guaucacgaucauuuaugu

SEQ ID NO: 1518157 - RNA, 19 nt, Artificial Sequence
  Description of Artificial Sequence: Synthetic oligonucleotide
  Antisense strand to SEQ ID NO: 1518156
acauaaaugaucgugauac

SEQ ID NO: 1518158 - RNA, 19 nt, Artificial Sequence
  Description of Artificial Sequence: Synthetic oligonucleotide
  Sense strand starting at position 2968 of SEQ ID NO: 1244855
cacgaucauuuauguagca

SEQ ID NO: 1518159 - RNA, 19 nt, Artificial Sequence
  Description of Artificial Sequence: Synthetic oligonucleotide
  Antisense strand to SEQ ID NO: 1518158
ugcuacauaaaugaucgug

SEQ ID NO: 1518160 - RNA, 19 nt, Artificial Sequence
  Description of Artificial Sequence: Synthetic oligonucleotide
  Sense strand starting at position 220 of SEQ ID NO: 1244856
accggcucugcgugaacua

SEQ ID NO: 1518161 - RNA, 19 nt, Artificial Sequence
  Description of Artificial Sequence: Synthetic oligonucleotide
  Antisense strand to SEQ ID NO: 1518160
uaguucacgcagagccggu

SEQ ID NO: 1518162 - RNA, 19 nt, Artificial Sequence
  Description of Artificial Sequence: Synthetic oligonucleotide
  Sense strand starting at position 221 of SEQ ID NO: 1244856
ccggcucugcgugaacuaa

SEQ ID NO: 1518163 - RNA, 19 nt, Artificial Sequence
  Description of Artificial Sequence: Synthetic oligonucleotide
  Antisense strand to SEQ ID NO: 1518162
uuaguucacgcagagccgg

SEQ ID NO: 1518164 - RNA, 19 nt, Artificial Sequence
  Description of Artificial Sequence: Synthetic oligonucleotide
  Sense strand starting at position 623 of SEQ ID NO: 1244856
aagccauugggcuguuaca

SEQ ID NO: 1518165 - RNA, 19 nt, Artificial Sequence
  Description of Artificial Sequence: Synthetic oligonucleotide
  Antisense strand to SEQ ID NO: 1518164
uguaacagcccaauggcuu

SEQ ID NO: 1518166 - RNA, 19 nt, Artificial Sequence
  Description of Artificial Sequence: Synthetic oligonucleotide
  Sense strand starting at position 633 of SEQ ID NO: 1244856
gcuguuacaccaggaacaa

SEQ ID NO: 1518167 - RNA, 19 nt, Artificial Sequence
  Description of Artificial Sequence: Synthetic oligonucleotide
  Antisense strand to SEQ ID NO: 1518166
uuguuccugguguaacagc

SEQ ID NO: 1518168 - RNA, 19 nt, Artificial Sequence
  Description of Artificial Sequence: Synthetic oligonucleotide
  Sense strand starting at position 696 of SEQ ID NO: 1244856
agaacaguucugcacgaga

SEQ ID NO: 1518169 - RNA, 19 nt, Artificial Sequence
  Description of Artificial Sequence: Synthetic oligonucleotide
  Antisense strand to SEQ ID NO: 1518168
ucucgugcagaacuguucu

SEQ ID NO: 1518170 - RNA, 19 nt, Artificial Sequence
  Description of Artificial Sequence: Synthetic oligonucleotide
  Sense strand starting at position 861 of SEQ ID NO: 1244856
aaaucaaagcgcugucauu

SEQ ID NO: 1518171 - RNA, 19 nt, Artificial Sequence
  Description of Artificial Sequence: Synthetic oligonucleotide
  Antisense strand to SEQ ID NO: 1518170
aaugacagcgcuuugauuu

SEQ ID NO: 1518172 - RNA, 19 nt, Artificial Sequence
  Description of Artificial Sequence: Synthetic oligonucleotide
  Sense strand starting at position 965 of SEQ ID NO: 1244856
uguaacuacuuagcuauga

SEQ ID NO: 1518173 - RNA, 19 nt, Artificial Sequence
  Description of Artificial Sequence: Synthetic oligonucleotide
  Antisense strand to SEQ ID NO: 1518172
ucauagcuaaguaguuaca

SEQ ID NO: 1518174 - RNA, 19 nt, Artificial Sequence
  Description of Artificial Sequence: Synthetic oligonucleotide
  Sense strand starting at position 989 of SEQ ID NO: 1244856
uaaggacuuguuuggaaau

SEQ ID NO: 1518175 - RNA, 19 nt, Artificial Sequence
  Description of Artificial Sequence: Synthetic oligonucleotide
  Antisense strand to SEQ ID NO: 1518174
auuuccaaacaaguccuua

SEQ ID NO: 1518176 - RNA, 19 nt, Artificial Sequence
  Description of Artificial Sequence: Synthetic oligonucleotide
  Sense strand starting at position 990 of SEQ ID NO: 1244856
aaggacuuguuuggaaaua

SEQ ID NO: 1518177 - RNA, 19 nt, Artificial Sequence
  Description of Artificial Sequence: Synthetic oligonucleotide
  Antisense strand to SEQ ID NO: 1518176
uauuuccaaacaaguccuu

SEQ ID NO: 1518178 - RNA, 19 nt, Artificial Sequence
  Description of Artificial Sequence: Synthetic oligonucleotide
  Sense strand starting at position 991 of SEQ ID NO: 1244856
aggacuuguuuggaaauaa

SEQ ID NO: 1518179 - RNA, 19 nt, Artificial Sequence
  Description of Artificial Sequence: Synthetic oligonucleotide
  Antisense strand to SEQ ID NO: 1518178
uuauuuccaaacaaguccu

SEQ ID NO: 1518180 - RNA, 19 nt, Artificial Sequence
  Description of Artificial Sequence: Synthetic oligonucleotide
  Sense strand starting at position 1012 of SEQ ID NO: 1244856
cauuauagacagcgguaaa

SEQ ID NO: 1518181 - RNA, 19 nt, Artificial Sequence
  Description of Artificial Sequence: Synthetic oligonucleotide
  Antisense strand to SEQ ID NO: 1518180
uuuaccgcugucuauaaug

SEQ ID NO: 1518182 - RNA, 19 nt, Artificial Sequence
  Description of Artificial Sequence: Synthetic oligonucleotide
  Sense strand starting at position 1024 of SEQ ID NO: 1244856
cgguaaaggugggucugaa

SEQ ID NO: 1518183 - RNA, 19 nt, Artificial Sequence
  Description of Artificial Sequence: Synthetic oligonucleotide
  Antisense strand to SEQ ID NO: 1518182
uucagacccaccuuuaccg

SEQ ID NO: 1518184 - RNA, 19 nt, Artificial Sequence
  Description of Artificial Sequence: Synthetic oligonucleotide
  Sense strand starting at position 1033 of SEQ ID NO: 1244856
ugggucugaacucggagaa

SEQ ID NO: 1518185 - RNA, 19 nt, Artificial Sequence
  Description of Artificial Sequence: Synthetic oligonucleotide
  Antisense strand to SEQ ID NO: 1518184
uucuccgaguucagaccca

SEQ ID NO: 1518186 - RNA, 19 nt, Artificial Sequence
  Description of Artificial Sequence: Synthetic oligonucleotide
  Sense strand starting at position 1034 of SEQ ID NO: 1244856
gggucugaacucggagaau

SEQ ID NO: 1518187 - RNA, 19 nt, Artificial Sequence
  Description of Artificial Sequence: Synthetic oligonucleotide
  Antisense strand to SEQ ID NO: 1518186
auucuccgaguucagaccc

SEQ ID NO: 1518188 - RNA, 19 nt, Artificial Sequence
  Description of Artificial Sequence: Synthetic oligonucleotide
  Sense strand starting at position 2112 of SEQ ID NO: 1244856
ucccaaaggcucuggaaga

SEQ ID NO: 1518189 - RNA, 19 nt, Artificial Sequence
  Description of Artificial Sequence: Synthetic oligonucleotide
  Antisense strand to SEQ ID NO: 1518188
ucuuccagagccuuuggga

SEQ ID NO: 1518190 - RNA, 19 nt, Artificial Sequence
  Description of Artificial Sequence: Synthetic oligonucleotide
  Sense strand starting at position 3636 of SEQ ID NO: 1244856
ccgggaucuucaccuacga

SEQ ID NO: 1518191 - RNA, 19 nt, Artificial Sequence
  Description of Artificial Sequence: Synthetic oligonucleotide
  Antisense strand to SEQ ID NO: 1518190
ucguaggugaagaucccgg

SEQ ID NO: 1518192 - RNA, 19 nt, Artificial Sequence
  Description of Artificial Sequence: Synthetic oligonucleotide
  Sense strand starting at position 3666 of SEQ ID NO: 1244856
gcaguuaucgcuggccucu

SEQ ID NO: 1518193 - RNA, 19 nt, Artificial Sequence
  Description of Artificial Sequence: Synthetic oligonucleotide
  Antisense strand to SEQ ID NO: 1518192
agaggccagcgauaacugc

SEQ ID NO: 1518194 - RNA, 19 nt, Artificial Sequence
  Description of Artificial Sequence: Synthetic oligonucleotide
  Sense strand starting at position 3700 of SEQ ID NO: 1244856
aucaccucguucuuggaaa

SEQ ID NO: 1518195 - RNA, 19 nt, Artificial Sequence
  Description of Artificial Sequence: Synthetic oligonucleotide
  Antisense strand to SEQ ID NO: 1518194
uuuccaagaacgaggugau

SEQ ID NO: 1518196 - RNA, 19 nt, Artificial Sequence
  Description of Artificial Sequence: Synthetic oligonucleotide
  Sense strand starting at position 3701 of SEQ ID NO: 1244856
ucaccucguucuuggaaau

SEQ ID NO: 1518197 - RNA, 19 nt, Artificial Sequence
  Description of Artificial Sequence: Synthetic oligonucleotide
  Antisense strand to SEQ ID NO: 1518196
auuuccaagaacgagguga

SEQ ID NO: 1518198 - RNA, 19 nt, Artificial Sequence
  Description of Artificial Sequence: Synthetic oligonucleotide
  Sense strand starting at position 3702 of SEQ ID NO: 1244856
caccucguucuuggaaaua

SEQ ID NO: 1518199 - RNA, 19 nt, Artificial Sequence
  Description of Artificial Sequence: Synthetic oligonucleotide
  Antisense strand to SEQ ID NO: 1518198
uauuuccaagaacgaggug

SEQ ID NO: 1518200 - RNA, 19 nt, Artificial Sequence
  Description of Artificial Sequence: Synthetic oligonucleotide
  Sense strand starting at position 3806 of SEQ ID NO: 1244856
ggagucuagcuuugucuaa

SEQ ID NO: 1518201 - RNA, 19 nt, Artificial Sequence
  Description of Artificial Sequence: Synthetic oligonucleotide
  Antisense strand to SEQ ID NO: 1518200
uuagacaaagcuagacucc

SEQ ID NO: 1518202 - RNA, 19 nt, Artificial Sequence
  Description of Artificial Sequence: Synthetic oligonucleotide
  Sense strand starting at position 3807 of SEQ ID NO: 1244856
gagucuagcuuugucuaac

SEQ ID NO: 1518203 - RNA, 19 nt, Artificial Sequence
  Description of Artificial Sequence: Synthetic oligonucleotide
  Antisense strand to SEQ ID NO: 1518202
guuagacaaagcuagacuc

SEQ ID NO: 1518204 - RNA, 19 nt, Artificial Sequence
  Description of Artificial Sequence: Synthetic oligonucleotide
  Sense strand starting at position 3808 of SEQ ID NO: 1244856
agucuagcuuugucuaacu

SEQ ID NO: 1518205 - RNA, 19 nt, Artificial Sequence
  Description of Artificial Sequence: Synthetic oligonucleotide
  Antisense strand to SEQ ID NO: 1518204
aguuagacaaagcuagacu

SEQ ID NO: 1518206 - RNA, 19 nt, Artificial Sequence
  Description of Artificial Sequence: Synthetic oligonucleotide
  Sense strand starting at position 3813 of SEQ ID NO: 1244856
agcuuugucuaacuuagga

SEQ ID NO: 1518207 - RNA, 19 nt, Artificial Sequence
  Description of Artificial Sequence: Synthetic oligonucleotide
  Antisense strand to SEQ ID NO: 1518206
uccuaaguuagacaaagcu

SEQ ID NO: 1518208 - RNA, 19 nt, Artificial Sequence
  Description of Artificial Sequence: Synthetic oligonucleotide
  Sense strand starting at position 3867 of SEQ ID NO: 1244856
uggagaaccucugagguua

SEQ ID NO: 1518209 - RNA, 19 nt, Artificial Sequence
  Description of Artificial Sequence: Synthetic oligonucleotide
  Antisense strand to SEQ ID NO: 1518208
uaaccucagagguucucca

SEQ ID NO: 1518210 - RNA, 19 nt, Artificial Sequence
  Description of Artificial Sequence: Synthetic oligonucleotide
  Sense strand starting at position 3869 of SEQ ID NO: 1244856
gagaaccucugagguuaua

SEQ ID NO: 1518211 - RNA, 19 nt, Artificial Sequence
  Description of Artificial Sequence: Synthetic oligonucleotide
  Antisense strand to SEQ ID NO: 1518210
uauaaccucagagguucuc

SEQ ID NO: 1518212 - RNA, 19 nt, Artificial Sequence
  Description of Artificial Sequence: Synthetic oligonucleotide
  Sense strand starting at position 3872 of SEQ ID NO: 1244856
aaccucugagguuauaguu

SEQ ID NO: 1518213 - RNA, 19 nt, Artificial Sequence
  Description of Artificial Sequence: Synthetic oligonucleotide
  Antisense strand to SEQ ID NO: 1518212
aacuauaaccucagagguu

SEQ ID NO: 1518214 - RNA, 19 nt, Artificial Sequence
  Description of Artificial Sequence: Synthetic oligonucleotide
  Sense strand starting at position 3961 of SEQ ID NO: 1244856
cacauauaugucugcaggu

SEQ ID NO: 1518215 - RNA, 19 nt, Artificial Sequence
  Description of Artificial Sequence: Synthetic oligonucleotide
  Antisense strand to SEQ ID NO: 1518214
accugcagacauauaugug

SEQ ID NO: 1518216 - RNA, 19 nt, Artificial Sequence
  Description of Artificial Sequence: Synthetic oligonucleotide
  Sense strand starting at position 3962 of SEQ ID NO: 1244856
acauauaugucugcagguu

SEQ ID NO: 1518217 - RNA, 19 nt, Artificial Sequence
  Description of Artificial Sequence: Synthetic oligonucleotide
  Antisense strand to SEQ ID NO: 1518216
aaccugcagacauauaugu

SEQ ID NO: 1518218 - RNA, 19 nt, Artificial Sequence
  Description of Artificial Sequence: Synthetic oligonucleotide
  Sense strand starting at position 3963 of SEQ ID NO: 1244856
cauauaugucugcagguuu

SEQ ID NO: 1518219 - RNA, 19 nt, Artificial Sequence
  Description of Artificial Sequence: Synthetic oligonucleotide
  Antisense strand to SEQ ID NO: 1518218
aaaccugcagacauauaug

SEQ ID NO: 1518220 - RNA, 19 nt, Artificial Sequence
  Description of Artificial Sequence: Synthetic oligonucleotide
  Sense strand starting at position 565 of SEQ ID NO: 1244857
gguggagcuucaggagagu

SEQ ID NO: 1518221 - RNA, 19 nt, Artificial Sequence
  Description of Artificial Sequence: Synthetic oligonucleotide
  Antisense strand to SEQ ID NO: 1518220
acucuccugaagcuccacc

SEQ ID NO: 1518222 - RNA, 19 nt, Artificial Sequence
  Description of Artificial Sequence: Synthetic oligonucleotide
  Sense strand starting at position 787 of SEQ ID NO: 1244857
ccacgucucucaugggaga

SEQ ID NO: 1518223 - RNA, 19 nt, Artificial Sequence
  Description of Artificial Sequence: Synthetic oligonucleotide
  Antisense strand to SEQ ID NO: 1518222
ucucccaugagagacgugg

SEQ ID NO: 1518224 - RNA, 19 nt, Artificial Sequence
  Description of Artificial Sequence: Synthetic oligonucleotide
  Sense strand starting at position 806 of SEQ ID NO: 1244857
cccucaaguucccaagagu

SEQ ID NO: 1518225 - RNA, 19 nt, Artificial Sequence
  Description of Artificial Sequence: Synthetic oligonucleotide
  Antisense strand to SEQ ID NO: 1518224
acucuugggaacuugaggg

SEQ ID NO: 1518226 - RNA, 19 nt, Artificial Sequence
  Description of Artificial Sequence: Synthetic oligonucleotide
  Sense strand starting at position 851 of SEQ ID NO: 1244857
ccugguaucuaccagauuc

SEQ ID NO: 1518227 - RNA, 19 nt, Artificial Sequence
  Description of Artificial Sequence: Synthetic oligonucleotide
  Antisense strand to SEQ ID NO: 1518226
gaaucugguagauaccagg

SEQ ID NO: 1518228 - RNA, 19 nt, Artificial Sequence
  Description of Artificial Sequence: Synthetic oligonucleotide
  Sense strand starting at position 2043 of SEQ ID NO: 1244857
ggagugugcgucugugaau

SEQ ID NO: 1518229 - RNA, 19 nt, Artificial Sequence
  Description of Artificial Sequence: Synthetic oligonucleotide
  Antisense strand to SEQ ID NO: 1518228
auucacagacgcacacucc

SEQ ID NO: 1518230 - RNA, 19 nt, Artificial Sequence
  Description of Artificial Sequence: Synthetic oligonucleotide
  Sense strand starting at position 2044 of SEQ ID NO: 1244857
gagugugcgucugugaaug

SEQ ID NO: 1518231 - RNA, 19 nt, Artificial Sequence
  Description of Artificial Sequence: Synthetic oligonucleotide
  Antisense strand to SEQ ID NO: 1518230
cauucacagacgcacacuc

SEQ ID NO: 1518232 - RNA, 19 nt, Artificial Sequence
  Description of Artificial Sequence: Synthetic oligonucleotide
  Sense strand starting at position 2050 of SEQ ID NO: 1244857
gcgucugugaaugagugua

SEQ ID NO: 1518233 - RNA, 19 nt, Artificial Sequence
  Description of Artificial Sequence: Synthetic oligonucleotide
  Antisense strand to SEQ ID NO: 1518232
uacacucauucacagacgc

SEQ ID NO: 1518234 - RNA, 19 nt, Artificial Sequence
  Description of Artificial Sequence: Synthetic oligonucleotide
  Sense strand starting at position 2061 of SEQ ID NO: 1244857
ugaguguaggugugucagu

SEQ ID NO: 1518235 - RNA, 19 nt, Artificial Sequence
  Description of Artificial Sequence: Synthetic oligonucleotide
  Antisense strand to SEQ ID NO: 1518234
acugacacaccuacacuca

SEQ ID NO: 1518236 - RNA, 19 nt, Artificial Sequence
  Description of Artificial Sequence: Synthetic oligonucleotide
  Sense strand starting at position 2066 of SEQ ID NO: 1244857
guaggugugucagucaaug

SEQ ID NO: 1518237 - RNA, 19 nt, Artificial Sequence
  Description of Artificial Sequence: Synthetic oligonucleotide
  Antisense strand to SEQ ID NO: 1518236
cauugacugacacaccuac

SEQ ID NO: 1518238 - RNA, 19 nt, Artificial Sequence
  Description of Artificial Sequence: Synthetic oligonucleotide
  Sense strand starting at position 2068 of SEQ ID NO: 1244857
aggugugucagucaaugag

SEQ ID NO: 1518239 - RNA, 19 nt, Artificial Sequence
  Description of Artificial Sequence: Synthetic oligonucleotide
  Antisense strand to SEQ ID NO: 1518238
cucauugacugacacaccu

SEQ ID NO: 1518240 - RNA, 19 nt, Artificial Sequence
  Description of Artificial Sequence: Synthetic oligonucleotide
  Sense strand starting at position 2070 of SEQ ID NO: 1244857
gugugucagucaaugagug

SEQ ID NO: 1518241 - RNA, 19 nt, Artificial Sequence
  Description of Artificial Sequence: Synthetic oligonucleotide
  Antisense strand to SEQ ID NO: 1518240
cacucauugacugacacac

SEQ ID NO: 1518242 - RNA, 19 nt, Artificial Sequence
  Description of Artificial Sequence: Synthetic oligonucleotide
  Sense strand starting at position 2417 of SEQ ID NO: 1244857
agugacugggucugaguaa

SEQ ID NO: 1518243 - RNA, 19 nt, Artificial Sequence
  Description of Artificial Sequence: Synthetic oligonucleotide
  Antisense strand to SEQ ID NO: 1518242
uuacucagacccagucacu

SEQ ID NO: 1518244 - RNA, 19 nt, Artificial Sequence
  Description of Artificial Sequence: Synthetic oligonucleotide
  Sense strand starting at position 2745 of SEQ ID NO: 1244857
ucgcucggccgacagaaau

SEQ ID NO: 1518245 - RNA, 19 nt, Artificial Sequence
  Description of Artificial Sequence: Synthetic oligonucleotide
  Antisense strand to SEQ ID NO: 1518244
auuucugucggccgagcga

SEQ ID NO: 1518246 - RNA, 19 nt, Artificial Sequence
  Description of Artificial Sequence: Synthetic oligonucleotide
  Sense strand starting at position 3078 of SEQ ID NO: 1244857
gccgguuccugcuuguaau

SEQ ID NO: 1518247 - RNA, 19 nt, Artificial Sequence
  Description of Artificial Sequence: Synthetic oligonucleotide
  Antisense strand to SEQ ID NO: 1518246
auuacaagcaggaaccggc

SEQ ID NO: 1518248 - RNA, 19 nt, Artificial Sequence
  Description of Artificial Sequence: Synthetic oligonucleotide
  Sense strand starting at position 3079 of SEQ ID NO: 1244857
ccgguuccugcuuguaauc

SEQ ID NO: 1518249 - RNA, 19 nt, Artificial Sequence
  Description of Artificial Sequence: Synthetic oligonucleotide
  Antisense strand to SEQ ID NO: 1518248
gauuacaagcaggaaccgg

SEQ ID NO: 1518250 - RNA, 19 nt, Artificial Sequence
  Description of Artificial Sequence: Synthetic oligonucleotide
  Sense strand starting at position 3547 of SEQ ID NO: 1244857
uguuuaguuaugggcugua

SEQ ID NO: 1518251 - RNA, 19 nt, Artificial Sequence
  Description of Artificial Sequence: Synthetic oligonucleotide
  Antisense strand to SEQ ID NO: 1518250
uacagcccauaacuaaaca

SEQ ID NO: 1518252 - RNA, 19 nt, Artificial Sequence
  Description of Artificial Sequence: Synthetic oligonucleotide
  Sense strand starting at position 3583 of SEQ ID NO: 1244857
gggcuauuuaucuggcuuu

SEQ ID NO: 1518253 - RNA, 19 nt, Artificial Sequence
  Description of Artificial Sequence: Synthetic oligonucleotide
  Antisense strand to SEQ ID NO: 1518252
aaagccagauaaauagccc

SEQ ID NO: 1518254 - RNA, 19 nt, Artificial Sequence
  Description of Artificial Sequence: Synthetic oligonucleotide
  Sense strand starting at position 3655 of SEQ ID NO: 1244857
cuucguugcucuugguaaa

SEQ ID NO: 1518255 - RNA, 19 nt, Artificial Sequence
  Description of Artificial Sequence: Synthetic oligonucleotide
  Antisense strand to SEQ ID NO: 1518254
uuuaccaagagcaacgaag

SEQ ID NO: 1518256 - RNA, 19 nt, Artificial Sequence
  Description of Artificial Sequence: Synthetic oligonucleotide
  Sense strand starting at position 3676 of SEQ ID NO: 1244857
gggcauugcugcgauaaau

SEQ ID NO: 1518257 - RNA, 19 nt, Artificial Sequence
  Description of Artificial Sequence: Synthetic oligonucleotide
  Antisense strand to SEQ ID NO: 1518256
auuuaucgcagcaaugccc

SEQ ID NO: 1518258 - RNA, 19 nt, Artificial Sequence
  Description of Artificial Sequence: Synthetic oligonucleotide
  Sense strand starting at position 3717 of SEQ ID NO: 1244857
agauuaaagcuguaacuuc

SEQ ID NO: 1518259 - RNA, 19 nt, Artificial Sequence
  Description of Artificial Sequence: Synthetic oligonucleotide
  Antisense strand to SEQ ID NO: 1518258
gaaguuacagcuuuaaucu

SEQ ID NO: 1518260 - RNA, 19 nt, Artificial Sequence
  Description of Artificial Sequence: Synthetic oligonucleotide
  Sense strand starting at position 3724 of SEQ ID NO: 1244857
agcuguaacuucuuuggaa

SEQ ID NO: 1518261 - RNA, 19 nt, Artificial Sequence
  Description of Artificial Sequence: Synthetic oligonucleotide
  Antisense strand to SEQ ID NO: 1518260
uuccaaagaaguuacagcu

SEQ ID NO: 1518262 - RNA, 19 nt, Artificial Sequence
  Description of Artificial Sequence: Synthetic oligonucleotide
  Sense strand starting at position 3725 of SEQ ID NO: 1244857
gcuguaacuucuuuggaag

SEQ ID NO: 1518263 - RNA, 19 nt, Artificial Sequence
  Description of Artificial Sequence: Synthetic oligonucleotide
  Antisense strand to SEQ ID NO: 1518262
cuuccaaagaaguuacagc

SEQ ID NO: 1518264 - RNA, 19 nt, Artificial Sequence
  Description of Artificial Sequence: Synthetic oligonucleotide
  Sense strand starting at position 3726 of SEQ ID NO: 1244857
cuguaacuucuuuggaagu

SEQ ID NO: 1518265 - RNA, 19 nt, Artificial Sequence
  Description of Artificial Sequence: Synthetic oligonucleotide
  Antisense strand to SEQ ID NO: 1518264
acuuccaaagaaguuacag

SEQ ID NO: 1518266 - RNA, 19 nt, Artificial Sequence
  Description of Artificial Sequence: Synthetic oligonucleotide
  Sense strand starting at position 3728 of SEQ ID NO: 1244857
guaacuucuuuggaaguga

SEQ ID NO: 1518267 - RNA, 19 nt, Artificial Sequence
  Description of Artificial Sequence: Synthetic oligonucleotide
  Antisense strand to SEQ ID NO: 1518266
ucacuuccaaagaaguuac

SEQ ID NO: 1518268 - RNA, 19 nt, Artificial Sequence
  Description of Artificial Sequence: Synthetic oligonucleotide
  Sense strand starting at position 3732 of SEQ ID NO: 1244857
cuucuuuggaagugagagu

SEQ ID NO: 1518269 - RNA, 19 nt, Artificial Sequence
  Description of Artificial Sequence: Synthetic oligonucleotide
  Antisense strand to SEQ ID NO: 1518268
acucucacuuccaaagaag

SEQ ID NO: 1518270 - RNA, 19 nt, Artificial Sequence
  Description of Artificial Sequence: Synthetic oligonucleotide
  Sense strand starting at position 3733 of SEQ ID NO: 1244857
uucuuuggaagugagagua

SEQ ID NO: 1518271 - RNA, 19 nt, Artificial Sequence
  Description of Artificial Sequence: Synthetic oligonucleotide
  Antisense strand to SEQ ID NO: 1518270
uacucucacuuccaaagaa

SEQ ID NO: 1518272 - RNA, 19 nt, Artificial Sequence
  Description of Artificial Sequence: Synthetic oligonucleotide
  Sense strand starting at position 3864 of SEQ ID NO: 1244857
gaugucacccugugcacaa

SEQ ID NO: 1518273 - RNA, 19 nt, Artificial Sequence
  Description of Artificial Sequence: Synthetic oligonucleotide
  Antisense strand to SEQ ID NO: 1518272
uugugcacagggugacauc

SEQ ID NO: 1518274 - RNA, 19 nt, Artificial Sequence
  Description of Artificial Sequence: Synthetic oligonucleotide
  Sense strand starting at position 3934 of SEQ ID NO: 1244857
cuacuuuccugcuguguga

SEQ ID NO: 1518275 - RNA, 19 nt, Artificial Sequence
  Description of Artificial Sequence: Synthetic oligonucleotide
  Antisense strand to SEQ ID NO: 1518274
ucacacagcaggaaaguag

SEQ ID NO: 1518276 - RNA, 19 nt, Artificial Sequence
  Description of Artificial Sequence: Synthetic oligonucleotide
  Sense strand starting at position 3974 of SEQ ID NO: 1244857
cuuucuaagcuggagauca

SEQ ID NO: 1518277 - RNA, 19 nt, Artificial Sequence
  Description of Artificial Sequence: Synthetic oligonucleotide
  Antisense strand to SEQ ID NO: 1518276
ugaucuccagcuuagaaag

SEQ ID NO: 1518278 - RNA, 19 nt, Artificial Sequence
  Description of Artificial Sequence: Synthetic oligonucleotide
  Sense strand starting at position 384 of SEQ ID NO: 1244858
gguuguugcucccaggaga

SEQ ID NO: 1518279 - RNA, 19 nt, Artificial Sequence
  Description of Artificial Sequence: Synthetic oligonucleotide
  Antisense strand to SEQ ID NO: 1518278
ucuccugggagcaacaacc

SEQ ID NO: 1518280 - RNA, 19 nt, Artificial Sequence
  Description of Artificial Sequence: Synthetic oligonucleotide
  Sense strand starting at position 446 of SEQ ID NO: 1244858
aggccuugugcucagaucu

SEQ ID NO: 1518281 - RNA, 19 nt, Artificial Sequence
  Description of Artificial Sequence: Synthetic oligonucleotide
  Antisense strand to SEQ ID NO: 1518280
agaucugagcacaaggccu

SEQ ID NO: 1518282 - RNA, 19 nt, Artificial Sequence
  Description of Artificial Sequence: Synthetic oligonucleotide
  Sense strand starting at position 474 of SEQ ID NO: 1244858
cuuucucccugaucugaga

SEQ ID NO: 1518283 - RNA, 19 nt, Artificial Sequence
  Description of Artificial Sequence: Synthetic oligonucleotide
  Antisense strand to SEQ ID NO: 1518282
ucucagaucagggagaaag

SEQ ID NO: 1518284 - RNA, 19 nt, Artificial Sequence
  Description of Artificial Sequence: Synthetic oligonucleotide
  Sense strand starting at position 497 of SEQ ID NO: 1244858
agcugaugcccaggagaga

SEQ ID NO: 1518285 - RNA, 19 nt, Artificial Sequence
  Description of Artificial Sequence: Synthetic oligonucleotide
  Antisense strand to SEQ ID NO: 1518284
ucucuccugggcaucagcu

SEQ ID NO: 1518286 - RNA, 19 nt, Artificial Sequence
  Description of Artificial Sequence: Synthetic oligonucleotide
  Sense strand starting at position 519 of SEQ ID NO: 1244858
cuaggcccucuagaaauau

SEQ ID NO: 1518287 - RNA, 19 nt, Artificial Sequence
  Description of Artificial Sequence: Synthetic oligonucleotide
  Antisense strand to SEQ ID NO: 1518286
auauuucuagagggccuag

SEQ ID NO: 1518288 - RNA, 19 nt, Artificial Sequence
  Description of Artificial Sequence: Synthetic oligonucleotide
  Sense strand starting at position 528 of SEQ ID NO: 1244858
cuagaaauauucucgcuuc

SEQ ID NO: 1518289 - RNA, 19 nt, Artificial Sequence
  Description of Artificial Sequence: Synthetic oligonucleotide
  Antisense strand to SEQ ID NO: 1518288
gaagcgagaauauuucuag

SEQ ID NO: 1518290 - RNA, 19 nt, Artificial Sequence
  Description of Artificial Sequence: Synthetic oligonucleotide
  Sense strand starting at position 591 of SEQ ID NO: 1244858
gacggaagcucccagaaau

SEQ ID NO: 1518291 - RNA, 19 nt, Artificial Sequence
  Description of Artificial Sequence: Synthetic oligonucleotide
  Antisense strand to SEQ ID NO: 1518290
auuucugggagcuuccguc

SEQ ID NO: 1518292 - RNA, 19 nt, Artificial Sequence
  Description of Artificial Sequence: Synthetic oligonucleotide
  Sense strand starting at position 604 of SEQ ID NO: 1244858
agaaauaaaucuggagggu

SEQ ID NO: 1518293 - RNA, 19 nt, Artificial Sequence
  Description of Artificial Sequence: Synthetic oligonucleotide
  Antisense strand to SEQ ID NO: 1518292
acccuccagauuuauuucu

SEQ ID NO: 1518294 - RNA, 19 nt, Artificial Sequence
  Description of Artificial Sequence: Synthetic oligonucleotide
  Sense strand starting at position 607 of SEQ ID NO: 1244858
aauaaaucuggaggguguu

SEQ ID NO: 1518295 - RNA, 19 nt, Artificial Sequence
  Description of Artificial Sequence: Synthetic oligonucleotide
  Antisense strand to SEQ ID NO: 1518294
aacacccuccagauuuauu

SEQ ID NO: 1518296 - RNA, 19 nt, Artificial Sequence
  Description of Artificial Sequence: Synthetic oligonucleotide
  Sense strand starting at position 613 of SEQ ID NO: 1244858
ucuggaggguguuuguauu

SEQ ID NO: 1518297 - RNA, 19 nt, Artificial Sequence
  Description of Artificial Sequence: Synthetic oligonucleotide
  Antisense strand to SEQ ID NO: 1518296
aauacaaacacccuccaga

SEQ ID NO: 1518298 - RNA, 19 nt, Artificial Sequence
  Description of Artificial Sequence: Synthetic oligonucleotide
  Sense strand starting at position 619 of SEQ ID NO: 1244858
ggguguuuguauugggaac

SEQ ID NO: 1518299 - RNA, 19 nt, Artificial Sequence
  Description of Artificial Sequence: Synthetic oligonucleotide
  Antisense strand to SEQ ID NO: 1518298
guucccaauacaaacaccc

SEQ ID NO: 1518300 - RNA, 19 nt, Artificial Sequence
  Description of Artificial Sequence: Synthetic oligonucleotide
  Sense strand starting at position 620 of SEQ ID NO: 1244858
gguguuuguauugggaacu

SEQ ID NO: 1518301 - RNA, 19 nt, Artificial Sequence
  Description of Artificial Sequence: Synthetic oligonucleotide
  Antisense strand to SEQ ID NO: 1518300
aguucccaauacaaacacc

SEQ ID NO: 1518302 - RNA, 19 nt, Artificial Sequence
  Description of Artificial Sequence: Synthetic oligonucleotide
  Sense strand starting at position 641 of SEQ ID NO: 1244858
gcuacagagccugauaaga

SEQ ID NO: 1518303 - RNA, 19 nt, Artificial Sequence
  Description of Artificial Sequence: Synthetic oligonucleotide
  Antisense strand to SEQ ID NO: 1518302
ucuuaucaggcucuguagc

SEQ ID NO: 1518304 - RNA, 19 nt, Artificial Sequence
  Description of Artificial Sequence: Synthetic oligonucleotide
  Sense strand starting at position 703 of SEQ ID NO: 1244858
cuggauucucgguggcuga

SEQ ID NO: 1518305 - RNA, 19 nt, Artificial Sequence
  Description of Artificial Sequence: Synthetic oligonucleotide
  Antisense strand to SEQ ID NO: 1518304
ucagccaccgagaauccag

SEQ ID NO: 1518306 - RNA, 19 nt, Artificial Sequence
  Description of Artificial Sequence: Synthetic oligonucleotide
  Sense strand starting at position 1070 of SEQ ID NO: 1244858
ggcuauucuuuagcaguau

SEQ ID NO: 1518307 - RNA, 19 nt, Artificial Sequence
  Description of Artificial Sequence: Synthetic oligonucleotide
  Antisense strand to SEQ ID NO: 1518306
auacugcuaaagaauagcc

SEQ ID NO: 1518308 - RNA, 19 nt, Artificial Sequence
  Description of Artificial Sequence: Synthetic oligonucleotide
  Sense strand starting at position 1074 of SEQ ID NO: 1244858
auucuuuagcaguauguuu

SEQ ID NO: 1518309 - RNA, 19 nt, Artificial Sequence
  Description of Artificial Sequence: Synthetic oligonucleotide
  Antisense strand to SEQ ID NO: 1518308
aaacauacugcuaaagaau

SEQ ID NO: 1518310 - RNA, 19 nt, Artificial Sequence
  Description of Artificial Sequence: Synthetic oligonucleotide
  Sense strand starting at position 2764 of SEQ ID NO: 1244858
ccggaagacucggaaggaa

SEQ ID NO: 1518311 - RNA, 19 nt, Artificial Sequence
  Description of Artificial Sequence: Synthetic oligonucleotide
  Antisense strand to SEQ ID NO: 1518310
uuccuuccgagucuuccgg

SEQ ID NO: 1518312 - RNA, 19 nt, Artificial Sequence
  Description of Artificial Sequence: Synthetic oligonucleotide
  Sense strand starting at position 2867 of SEQ ID NO: 1244858
gcaccuuucgcugagcaca

SEQ ID NO: 1518313 - RNA, 19 nt, Artificial Sequence
  Description of Artificial Sequence: Synthetic oligonucleotide
  Antisense strand to SEQ ID NO: 1518312
ugugcucagcgaaaggugc

SEQ ID NO: 1518314 - RNA, 19 nt, Artificial Sequence
  Description of Artificial Sequence: Synthetic oligonucleotide
  Sense strand starting at position 2959 of SEQ ID NO: 1244858
agacgaaagucuccuucuu

SEQ ID NO: 1518315 - RNA, 19 nt, Artificial Sequence
  Description of Artificial Sequence: Synthetic oligonucleotide
  Antisense strand to SEQ ID NO: 1518314
aagaaggagacuuucgucu

SEQ ID NO: 1518316 - RNA, 19 nt, Artificial Sequence
  Description of Artificial Sequence: Synthetic oligonucleotide
  Sense strand starting at position 2967 of SEQ ID NO: 1244858
gucuccuucuuccgaaaua

SEQ ID NO: 1518317 - RNA, 19 nt, Artificial Sequence
  Description of Artificial Sequence: Synthetic oligonucleotide
  Antisense strand to SEQ ID NO: 1518316
uauuucggaagaaggagac

SEQ ID NO: 1518318 - RNA, 19 nt, Artificial Sequence
  Description of Artificial Sequence: Synthetic oligonucleotide
  Sense strand starting at position 3044 of SEQ ID NO: 1244858
gcgcacgucuccuaaguua

SEQ ID NO: 1518319 - RNA, 19 nt, Artificial Sequence
  Description of Artificial Sequence: Synthetic oligonucleotide
  Antisense strand to SEQ ID NO: 1518318
uaacuuaggagacgugcgc

SEQ ID NO: 1518320 - RNA, 19 nt, Artificial Sequence
  Description of Artificial Sequence: Synthetic oligonucleotide
  Sense strand starting at position 3070 of SEQ ID NO: 1244858
cugaguaacgcgugaggga

SEQ ID NO: 1518321 - RNA, 19 nt, Artificial Sequence
  Description of Artificial Sequence: Synthetic oligonucleotide
  Antisense strand to SEQ ID NO: 1518320
ucccucacgcguuacucag

SEQ ID NO: 1518322 - RNA, 19 nt, Artificial Sequence
  Description of Artificial Sequence: Synthetic oligonucleotide
  Sense strand starting at position 3101 of SEQ ID NO: 1244858
gcgagcaccugugauugaa

SEQ ID NO: 1518323 - RNA, 19 nt, Artificial Sequence
  Description of Artificial Sequence: Synthetic oligonucleotide
  Antisense strand to SEQ ID NO: 1518322
uucaaucacaggugcucgc

SEQ ID NO: 1518324 - RNA, 19 nt, Artificial Sequence
  Description of Artificial Sequence: Synthetic oligonucleotide
  Sense strand starting at position 3124 of SEQ ID NO: 1244858
ccucuucugugaucagucu

SEQ ID NO: 1518325 - RNA, 19 nt, Artificial Sequence
  Description of Artificial Sequence: Synthetic oligonucleotide
  Antisense strand to SEQ ID NO: 1518324
agacugaucacagaagagg

SEQ ID NO: 1518326 - RNA, 19 nt, Artificial Sequence
  Description of Artificial Sequence: Synthetic oligonucleotide
  Sense strand starting at position 3178 of SEQ ID NO: 1244858
ccaugaagugauggugugu

SEQ ID NO: 1518327 - RNA, 19 nt, Artificial Sequence
  Description of Artificial Sequence: Synthetic oligonucleotide
  Antisense strand to SEQ ID NO: 1518326
acacaccaucacuucaugg

SEQ ID NO: 1518328 - RNA, 19 nt, Artificial Sequence
  Description of Artificial Sequence: Synthetic oligonucleotide
  Sense strand starting at position 3264 of SEQ ID NO: 1244858
cagcgagagcuauaacuca

SEQ ID NO: 1518329 - RNA, 19 nt, Artificial Sequence
  Description of Artificial Sequence: Synthetic oligonucleotide
  Antisense strand to SEQ ID NO: 1518328
ugaguuauagcucucgcug

SEQ ID NO: 1518330 - RNA, 19 nt, Artificial Sequence
  Description of Artificial Sequence: Synthetic oligonucleotide
  Sense strand starting at position 3348 of SEQ ID NO: 1244858
caggcugauuccugaaggu

SEQ ID NO: 1518331 - RNA, 19 nt, Artificial Sequence
  Description of Artificial Sequence: Synthetic oligonucleotide
  Antisense strand to SEQ ID NO: 1518330
accuucaggaaucagccug

SEQ ID NO: 1518332 - RNA, 19 nt, Artificial Sequence
  Description of Artificial Sequence: Synthetic oligonucleotide
  Sense strand starting at position 3496 of SEQ ID NO: 1244858
agggcacuucguuguugaa

SEQ ID NO: 1518333 - RNA, 19 nt, Artificial Sequence
  Description of Artificial Sequence: Synthetic oligonucleotide
  Antisense strand to SEQ ID NO: 1518332
uucaacaacgaagugcccu

SEQ ID NO: 1518334 - RNA, 19 nt, Artificial Sequence
  Description of Artificial Sequence: Synthetic oligonucleotide
  Sense strand starting at position 3576 of SEQ ID NO: 1244858
agcaguauggccucugcga

SEQ ID NO: 1518335 - RNA, 19 nt, Artificial Sequence
  Description of Artificial Sequence: Synthetic oligonucleotide
  Antisense strand to SEQ ID NO: 1518334
ucgcagaggccauacugcu

SEQ ID NO: 1518336 - RNA, 19 nt, Artificial Sequence
  Description of Artificial Sequence: Synthetic oligonucleotide
  Sense strand starting at position 3704 of SEQ ID NO: 1244858
ggucgcaccucucuuagua

SEQ ID NO: 1518337 - RNA, 19 nt, Artificial Sequence
  Description of Artificial Sequence: Synthetic oligonucleotide
  Antisense strand to SEQ ID NO: 1518336
uacuaagagaggugcgacc

SEQ ID NO: 1518338 - RNA, 19 nt, Artificial Sequence
  Description of Artificial Sequence: Synthetic oligonucleotide
  Sense strand starting at position 3884 of SEQ ID NO: 1244858
cggugaggugaccagauaa

SEQ ID NO: 1518339 - RNA, 19 nt, Artificial Sequence
  Description of Artificial Sequence: Synthetic oligonucleotide
  Antisense strand to SEQ ID NO: 1518338
uuaucuggucaccucaccg

SEQ ID NO: 1518340 - RNA, 19 nt, Artificial Sequence
  Description of Artificial Sequence: Synthetic oligonucleotide
  Sense strand starting at position 3942 of SEQ ID NO: 1244858
ggccuaggaauccgugaau

SEQ ID NO: 1518341 - RNA, 19 nt, Artificial Sequence
  Description of Artificial Sequence: Synthetic oligonucleotide
  Antisense strand to SEQ ID NO: 1518340
auucacggauuccuaggcc

SEQ ID NO: 1518342 - RNA, 19 nt, Artificial Sequence
  Description of Artificial Sequence: Synthetic oligonucleotide
  Sense strand starting at position 3954 of SEQ ID NO: 1244858
cgugaauacauucgcaaag

SEQ ID NO: 1518343 - RNA, 19 nt, Artificial Sequence
  Description of Artificial Sequence: Synthetic oligonucleotide
  Antisense strand to SEQ ID NO: 1518342
cuuugcgaauguauucacg

SEQ ID NO: 1518344 - RNA, 19 nt, Artificial Sequence
  Description of Artificial Sequence: Synthetic oligonucleotide
  Sense strand starting at position 3955 of SEQ ID NO: 1244858
gugaauacauucgcaaagu

SEQ ID NO: 1518345 - RNA, 19 nt, Artificial Sequence
  Description of Artificial Sequence: Synthetic oligonucleotide
  Antisense strand to SEQ ID NO: 1518344
acuuugcgaauguauucac

SEQ ID NO: 1518346 - RNA, 19 nt, Artificial Sequence
  Description of Artificial Sequence: Synthetic oligonucleotide
  Sense strand starting at position 3956 of SEQ ID NO: 1244858
ugaauacauucgcaaaguc

SEQ ID NO: 1518347 - RNA, 19 nt, Artificial Sequence
  Description of Artificial Sequence: Synthetic oligonucleotide
  Antisense strand to SEQ ID NO: 1518346
gacuuugcgaauguauuca

SEQ ID NO: 1518348 - RNA, 19 nt, Artificial Sequence
  Description of Artificial Sequence: Synthetic oligonucleotide
  Sense strand starting at position 14 of SEQ ID NO: 1244859
ggaagaauguuccagcaau

SEQ ID NO: 1518349 - RNA, 19 nt, Artificial Sequence
  Description of Artificial Sequence: Synthetic oligonucleotide
  Antisense strand to SEQ ID NO: 1518348
auugcuggaacauucuucc

SEQ ID NO: 1518350 - RNA, 19 nt, Artificial Sequence
  Description of Artificial Sequence: Synthetic oligonucleotide
  Sense strand starting at position 26 of SEQ ID NO: 1244859
cagcaaugcccagaucgaa

SEQ ID NO: 1518351 - RNA, 19 nt, Artificial Sequence
  Description of Artificial Sequence: Synthetic oligonucleotide
  Antisense strand to SEQ ID NO: 1518350
uucgaucugggcauugcug

SEQ ID NO: 1518352 - RNA, 19 nt, Artificial Sequence
  Description of Artificial Sequence: Synthetic oligonucleotide
  Sense strand starting at position 416 of SEQ ID NO: 1244859
cccacuucuccaggcugaa

SEQ ID NO: 1518353 - RNA, 19 nt, Artificial Sequence
  Description of Artificial Sequence: Synthetic oligonucleotide
  Antisense strand to SEQ ID NO: 1518352
uucagccuggagaaguggg

SEQ ID NO: 1518354 - RNA, 19 nt, Artificial Sequence
  Description of Artificial Sequence: Synthetic oligonucleotide
  Sense strand starting at position 553 of SEQ ID NO: 1244859
gggcauuugugccuggaag

SEQ ID NO: 1518355 - RNA, 19 nt, Artificial Sequence
  Description of Artificial Sequence: Synthetic oligonucleotide
  Antisense strand to SEQ ID NO: 1518354
cuuccaggcacaaaugccc

SEQ ID NO: 1518356 - RNA, 19 nt, Artificial Sequence
  Description of Artificial Sequence: Synthetic oligonucleotide
  Sense strand starting at position 963 of SEQ ID NO: 1244859
cugcgacuccucuacagua

SEQ ID NO: 1518357 - RNA, 19 nt, Artificial Sequence
  Description of Artificial Sequence: Synthetic oligonucleotide
  Antisense strand to SEQ ID NO: 1518356
uacuguagaggagucgcag

SEQ ID NO: 1518358 - RNA, 19 nt, Artificial Sequence
  Description of Artificial Sequence: Synthetic oligonucleotide
  Sense strand starting at position 965 of SEQ ID NO: 1244859
gcgacuccucuacaguaga

SEQ ID NO: 1518359 - RNA, 19 nt, Artificial Sequence
  Description of Artificial Sequence: Synthetic oligonucleotide
  Antisense strand to SEQ ID NO: 1518358
ucuacuguagaggagucgc

SEQ ID NO: 1518360 - RNA, 19 nt, Artificial Sequence
  Description of Artificial Sequence: Synthetic oligonucleotide
  Sense strand starting at position 1001 of SEQ ID NO: 1244859
acaccaauucuaggugaag

SEQ ID NO: 1518361 - RNA, 19 nt, Artificial Sequence
  Description of Artificial Sequence: Synthetic oligonucleotide
  Antisense strand to SEQ ID NO: 1518360
cuucaccuagaauuggugu

SEQ ID NO: 1518362 - RNA, 19 nt, Artificial Sequence
  Description of Artificial Sequence: Synthetic oligonucleotide
  Sense strand starting at position 1043 of SEQ ID NO: 1244859
caaggugacuucucacugu

SEQ ID NO: 1518363 - RNA, 19 nt, Artificial Sequence
  Description of Artificial Sequence: Synthetic oligonucleotide
  Antisense strand to SEQ ID NO: 1518362
acagugagaagucaccuug

SEQ ID NO: 1518364 - RNA, 19 nt, Artificial Sequence
  Description of Artificial Sequence: Synthetic oligonucleotide
  Sense strand starting at position 1082 of SEQ ID NO: 1244859
uugugaguccucuggcugu

SEQ ID NO: 1518365 - RNA, 19 nt, Artificial Sequence
  Description of Artificial Sequence: Synthetic oligonucleotide
  Antisense strand to SEQ ID NO: 1518364
acagccagaggacucacaa

SEQ ID NO: 1518366 - RNA, 19 nt, Artificial Sequence
  Description of Artificial Sequence: Synthetic oligonucleotide
  Sense strand starting at position 2098 of SEQ ID NO: 1244859
cgcccucucguggcuaaua

SEQ ID NO: 1518367 - RNA, 19 nt, Artificial Sequence
  Description of Artificial Sequence: Synthetic oligonucleotide
  Antisense strand to SEQ ID NO: 1518366
uauuagccacgagagggcg

SEQ ID NO: 1518368 - RNA, 19 nt, Artificial Sequence
  Description of Artificial Sequence: Synthetic oligonucleotide
  Sense strand starting at position 2108 of SEQ ID NO: 1244859
uggcuaauacuaggcaaau

SEQ ID NO: 1518369 - RNA, 19 nt, Artificial Sequence
  Description of Artificial Sequence: Synthetic oligonucleotide
  Antisense strand to SEQ ID NO: 1518368
auuugccuaguauuagcca

SEQ ID NO: 1518370 - RNA, 19 nt, Artificial Sequence
  Description of Artificial Sequence: Synthetic oligonucleotide
  Sense strand starting at position 2109 of SEQ ID NO: 1244859
ggcuaauacuaggcaaauu

SEQ ID NO: 1518371 - RNA, 19 nt, Artificial Sequence
  Description of Artificial Sequence: Synthetic oligonucleotide
  Antisense strand to SEQ ID NO: 1518370
aauuugccuaguauuagcc

SEQ ID NO: 1518372 - RNA, 19 nt, Artificial Sequence
  Description of Artificial Sequence: Synthetic oligonucleotide
  Sense strand starting at position 2119 of SEQ ID NO: 1244859
aggcaaauucuacgcucuu

SEQ ID NO: 1518373 - RNA, 19 nt, Artificial Sequence
  Description of Artificial Sequence: Synthetic oligonucleotide
  Antisense strand to SEQ ID NO: 1518372
aagagcguagaauuugccu

SEQ ID NO: 1518374 - RNA, 19 nt, Artificial Sequence
  Description of Artificial Sequence: Synthetic oligonucleotide
  Sense strand starting at position 2188 of SEQ ID NO: 1244859
cacccuguaguucgaagau

SEQ ID NO: 1518375 - RNA, 19 nt, Artificial Sequence
  Description of Artificial Sequence: Synthetic oligonucleotide
  Antisense strand to SEQ ID NO: 1518374
aucuucgaacuacagggug

SEQ ID NO: 1518376 - RNA, 19 nt, Artificial Sequence
  Description of Artificial Sequence: Synthetic oligonucleotide
  Sense strand starting at position 2426 of SEQ ID NO: 1244859
ucaaucgaucuuuauugau

SEQ ID NO: 1518377 - RNA, 19 nt, Artificial Sequence
  Description of Artificial Sequence: Synthetic oligonucleotide
  Antisense strand to SEQ ID NO: 1518376
aucaauaaagaucgauuga

SEQ ID NO: 1518378 - RNA, 19 nt, Artificial Sequence
  Description of Artificial Sequence: Synthetic oligonucleotide
  Sense strand starting at position 2455 of SEQ ID NO: 1244859
ugcccagacucugugcuaa

SEQ ID NO: 1518379 - RNA, 19 nt, Artificial Sequence
  Description of Artificial Sequence: Synthetic oligonucleotide
  Antisense strand to SEQ ID NO: 1518378
uuagcacagagucugggca

SEQ ID NO: 1518380 - RNA, 19 nt, Artificial Sequence
  Description of Artificial Sequence: Synthetic oligonucleotide
  Sense strand starting at position 2457 of SEQ ID NO: 1244859
cccagacucugugcuaagu

SEQ ID NO: 1518381 - RNA, 19 nt, Artificial Sequence
  Description of Artificial Sequence: Synthetic oligonucleotide
  Antisense strand to SEQ ID NO: 1518380
acuuagcacagagucuggg

SEQ ID NO: 1518382 - RNA, 19 nt, Artificial Sequence
  Description of Artificial Sequence: Synthetic oligonucleotide
  Sense strand starting at position 2459 of SEQ ID NO: 1244859
cagacucugugcuaaguga

SEQ ID NO: 1518383 - RNA, 19 nt, Artificial Sequence
  Description of Artificial Sequence: Synthetic oligonucleotide
  Antisense strand to SEQ ID NO: 1518382
ucacuuagcacagagucug

SEQ ID NO: 1518384 - RNA, 19 nt, Artificial Sequence
  Description of Artificial Sequence: Synthetic oligonucleotide
  Sense strand starting at position 2582 of SEQ ID NO: 1244859
caggaaauguuccuuaaag

SEQ ID NO: 1518385 - RNA, 19 nt, Artificial Sequence
  Description of Artificial Sequence: Synthetic oligonucleotide
  Antisense strand to SEQ ID NO: 1518384
cuuuaaggaacauuuccug

SEQ ID NO: 1518386 - RNA, 19 nt, Artificial Sequence
  Description of Artificial Sequence: Synthetic oligonucleotide
  Sense strand starting at position 2583 of SEQ ID NO: 1244859
aggaaauguuccuuaaagc

SEQ ID NO: 1518387 - RNA, 19 nt, Artificial Sequence
  Description of Artificial Sequence: Synthetic oligonucleotide
  Antisense strand to SEQ ID NO: 1518386
gcuuuaaggaacauuuccu

SEQ ID NO: 1518388 - RNA, 19 nt, Artificial Sequence
  Description of Artificial Sequence: Synthetic oligonucleotide
  Sense strand starting at position 2584 of SEQ ID NO: 1244859
ggaaauguuccuuaaagcg

SEQ ID NO: 1518389 - RNA, 19 nt, Artificial Sequence
  Description of Artificial Sequence: Synthetic oligonucleotide
  Antisense strand to SEQ ID NO: 1518388
cgcuuuaaggaacauuucc

SEQ ID NO: 1518390 - RNA, 19 nt, Artificial Sequence
  Description of Artificial Sequence: Synthetic oligonucleotide
  Sense strand starting at position 2704 of SEQ ID NO: 1244859
guagcauugggcugccagu

SEQ ID NO: 1518391 - RNA, 19 nt, Artificial Sequence
  Description of Artificial Sequence: Synthetic oligonucleotide
  Antisense strand to SEQ ID NO: 1518390
acuggcagcccaaugcuac

SEQ ID NO: 1518392 - RNA, 19 nt, Artificial Sequence
  Description of Artificial Sequence: Synthetic oligonucleotide
  Sense strand starting at position 2756 of SEQ ID NO: 1244859
guauaugugacccaggcaa

SEQ ID NO: 1518393 - RNA, 19 nt, Artificial Sequence
  Description of Artificial Sequence: Synthetic oligonucleotide
  Antisense strand to SEQ ID NO: 1518392
uugccugggucacauauac

SEQ ID NO: 1518394 - RNA, 19 nt, Artificial Sequence
  Description of Artificial Sequence: Synthetic oligonucleotide
  Sense strand starting at position 2855 of SEQ ID NO: 1244859
ggcugcaagccuuacauga

SEQ ID NO: 1518395 - RNA, 19 nt, Artificial Sequence
  Description of Artificial Sequence: Synthetic oligonucleotide
  Antisense strand to SEQ ID NO: 1518394
ucauguaaggcuugcagcc

SEQ ID NO: 1518396 - RNA, 19 nt, Artificial Sequence
  Description of Artificial Sequence: Synthetic oligonucleotide
  Sense strand starting at position 2857 of SEQ ID NO: 1244859
cugcaagccuuacaugaga

SEQ ID NO: 1518397 - RNA, 19 nt, Artificial Sequence
  Description of Artificial Sequence: Synthetic oligonucleotide
  Antisense strand to SEQ ID NO: 1518396
ucucauguaaggcuugcag

SEQ ID NO: 1518398 - RNA, 19 nt, Artificial Sequence
  Description of Artificial Sequence: Synthetic oligonucleotide
  Sense strand starting at position 2984 of SEQ ID NO: 1244859
aagggcugccucggagaua

SEQ ID NO: 1518399 - RNA, 19 nt, Artificial Sequence
  Description of Artificial Sequence: Synthetic oligonucleotide
  Antisense strand to SEQ ID NO: 1518398
uaucuccgaggcagcccuu

SEQ ID NO: 1518400 - RNA, 19 nt, Artificial Sequence
  Description of Artificial Sequence: Synthetic oligonucleotide
  Sense strand starting at position 3343 of SEQ ID NO: 1244859
gcuuuauaauguguacuuu

SEQ ID NO: 1518401 - RNA, 19 nt, Artificial Sequence
  Description of Artificial Sequence: Synthetic oligonucleotide
  Antisense strand to SEQ ID NO: 1518400
aaaguacacauuauaaagc

SEQ ID NO: 1518402 - RNA, 19 nt, Artificial Sequence
  Description of Artificial Sequence: Synthetic oligonucleotide
  Sense strand starting at position 3392 of SEQ ID NO: 1244859
uuugcauaucaguauauag

SEQ ID NO: 1518403 - RNA, 19 nt, Artificial Sequence
  Description of Artificial Sequence: Synthetic oligonucleotide
  Antisense strand to SEQ ID NO: 1518402
cuauauacugauaugcaaa

SEQ ID NO: 1518404 - RNA, 19 nt, Artificial Sequence
  Description of Artificial Sequence: Synthetic oligonucleotide
  Sense strand starting at position 3394 of SEQ ID NO: 1244859
ugcauaucaguauauagau

SEQ ID NO: 1518405 - RNA, 19 nt, Artificial Sequence
  Description of Artificial Sequence: Synthetic oligonucleotide
  Antisense strand to SEQ ID NO: 1518404
aucuauauacugauaugca

SEQ ID NO: 1518406 - RNA, 19 nt, Artificial Sequence
  Description of Artificial Sequence: Synthetic oligonucleotide
  Sense strand starting at position 3589 of SEQ ID NO: 1244859
gggacucucugcucccaaa

SEQ ID NO: 1518407 - RNA, 19 nt, Artificial Sequence
  Description of Artificial Sequence: Synthetic oligonucleotide
  Antisense strand to SEQ ID NO: 1518406
uuugggagcagagaguccc

SEQ ID NO: 1518408 - RNA, 19 nt, Artificial Sequence
  Description of Artificial Sequence: Synthetic oligonucleotide
  Sense strand starting at position 3808 of SEQ ID NO: 1244859
agggaaguuucugccugau

SEQ ID NO: 1518409 - RNA, 19 nt, Artificial Sequence
  Description of Artificial Sequence: Synthetic oligonucleotide
  Antisense strand to SEQ ID NO: 1518408
aucaggcagaaacuucccu

SEQ ID NO: 1518410 - RNA, 19 nt, Artificial Sequence
  Description of Artificial Sequence: Synthetic oligonucleotide
  Sense strand starting at position 3810 of SEQ ID NO: 1244859
ggaaguuucugccugaugu

SEQ ID NO: 1518411 - RNA, 19 nt, Artificial Sequence
  Description of Artificial Sequence: Synthetic oligonucleotide
  Antisense strand to SEQ ID NO: 1518410
acaucaggcagaaacuucc

SEQ ID NO: 1518412 - RNA, 19 nt, Artificial Sequence
  Description of Artificial Sequence: Synthetic oligonucleotide
  Sense strand starting at position 3811 of SEQ ID NO: 1244859
gaaguuucugccugauguu

SEQ ID NO: 1518413 - RNA, 19 nt, Artificial Sequence
  Description of Artificial Sequence: Synthetic oligonucleotide
  Antisense strand to SEQ ID NO: 1518412
aacaucaggcagaaacuuc

SEQ ID NO: 1518414 - RNA, 19 nt, Artificial Sequence
  Description of Artificial Sequence: Synthetic oligonucleotide
  Sense strand starting at position 3838 of SEQ ID NO: 1244859
ggcagcauugcuuggaaga

SEQ ID NO: 1518415 - RNA, 19 nt, Artificial Sequence
  Description of Artificial Sequence: Synthetic oligonucleotide
  Antisense strand to SEQ ID NO: 1518414
ucuuccaagcaaugcugcc

SEQ ID NO: 1518416 - RNA, 19 nt, Artificial Sequence
  Description of Artificial Sequence: Synthetic oligonucleotide
  Sense strand starting at position 3839 of SEQ ID NO: 1244859
gcagcauugcuuggaagag

SEQ ID NO: 1518417 - RNA, 19 nt, Artificial Sequence
  Description of Artificial Sequence: Synthetic oligonucleotide
  Antisense strand to SEQ ID NO: 1518416
cucuuccaagcaaugcugc

SEQ ID NO: 1518418 - RNA, 19 nt, Artificial Sequence
  Description of Artificial Sequence: Synthetic oligonucleotide
  Sense strand starting at position 3840 of SEQ ID NO: 1244859
cagcauugcuuggaagaga

SEQ ID NO: 1518419 - RNA, 19 nt, Artificial Sequence
  Description of Artificial Sequence: Synthetic oligonucleotide
  Antisense strand to SEQ ID NO: 1518418
ucucuuccaagcaaugcug

SEQ ID NO: 1518420 - RNA, 19 nt, Artificial Sequence
  Description of Artificial Sequence: Synthetic oligonucleotide
  Sense strand starting at position 3909 of SEQ ID NO: 1244859
guaagacccuccugaauga

SEQ ID NO: 1518421 - RNA, 19 nt, Artificial Sequence
  Description of Artificial Sequence: Synthetic oligonucleotide
  Antisense strand to SEQ ID NO: 1518420
ucauucaggagggucuuac

SEQ ID NO: 1518422 - RNA, 19 nt, Artificial Sequence
  Description of Artificial Sequence: Synthetic oligonucleotide
  Sense strand starting at position 3920 of SEQ ID NO: 1244859
cugaaugacugauucccua

SEQ ID NO: 1518423 - RNA, 19 nt, Artificial Sequence
  Description of Artificial Sequence: Synthetic oligonucleotide
  Antisense strand to SEQ ID NO: 1518422
uagggaaucagucauucag

SEQ ID NO: 1518424 - RNA, 19 nt, Artificial Sequence
  Description of Artificial Sequence: Synthetic oligonucleotide
  Sense strand starting at position 3928 of SEQ ID NO: 1244859
cugauucccuaggagaugu

SEQ ID NO: 1518425 - RNA, 19 nt, Artificial Sequence
  Description of Artificial Sequence: Synthetic oligonucleotide
  Antisense strand to SEQ ID NO: 1518424
acaucuccuagggaaucag

SEQ ID NO: 1518426 - RNA, 19 nt, Artificial Sequence
  Description of Artificial Sequence: Synthetic oligonucleotide
  Sense strand starting at position 3932 of SEQ ID NO: 1244859
uucccuaggagaugugaga

SEQ ID NO: 1518427 - RNA, 19 nt, Artificial Sequence
  Description of Artificial Sequence: Synthetic oligonucleotide
  Antisense strand to SEQ ID NO: 1518426
ucucacaucuccuagggaa

SEQ ID NO: 1518428 - RNA, 19 nt, Artificial Sequence
  Description of Artificial Sequence: Synthetic oligonucleotide
  Sense strand starting at position 47 of SEQ ID NO: 1244860
cgucucugucuacagcaau

SEQ ID NO: 1518429 - RNA, 19 nt, Artificial Sequence
  Description of Artificial Sequence: Synthetic oligonucleotide
  Antisense strand to SEQ ID NO: 1518428
auugcuguagacagagacg

SEQ ID NO: 1518430 - RNA, 19 nt, Artificial Sequence
  Description of Artificial Sequence: Synthetic oligonucleotide
  Sense strand starting at position 368 of SEQ ID NO: 1244860
guucgagucacucacgaaa

SEQ ID NO: 1518431 - RNA, 19 nt, Artificial Sequence
  Description of Artificial Sequence: Synthetic oligonucleotide
  Antisense strand to SEQ ID NO: 1518430
uuucgugagugacucgaac

SEQ ID NO: 1518432 - RNA, 19 nt, Artificial Sequence
  Description of Artificial Sequence: Synthetic oligonucleotide
  Sense strand starting at position 457 of SEQ ID NO: 1244860
aucaaugcauuccugagaa

SEQ ID NO: 1518433 - RNA, 19 nt, Artificial Sequence
  Description of Artificial Sequence: Synthetic oligonucleotide
  Antisense strand to SEQ ID NO: 1518432
uucucaggaaugcauugau

SEQ ID NO: 1518434 - RNA, 19 nt, Artificial Sequence
  Description of Artificial Sequence: Synthetic oligonucleotide
  Sense strand starting at position 461 of SEQ ID NO: 1244860
augcauuccugagaaaccu

SEQ ID NO: 1518435 - RNA, 19 nt, Artificial Sequence
  Description of Artificial Sequence: Synthetic oligonucleotide
  Antisense strand to SEQ ID NO: 1518434
agguuucucaggaaugcau

SEQ ID NO: 1518436 - RNA, 19 nt, Artificial Sequence
  Description of Artificial Sequence: Synthetic oligonucleotide
  Sense strand starting at position 470 of SEQ ID NO: 1244860
ugagaaaccuccucagguc

SEQ ID NO: 1518437 - RNA, 19 nt, Artificial Sequence
  Description of Artificial Sequence: Synthetic oligonucleotide
  Antisense strand to SEQ ID NO: 1518436
gaccugaggagguuucuca

SEQ ID NO: 1518438 - RNA, 19 nt, Artificial Sequence
  Description of Artificial Sequence: Synthetic oligonucleotide
  Sense strand starting at position 557 of SEQ ID NO: 1244860
cgcgaucccuguuuggauu

SEQ ID NO: 1518439 - RNA, 19 nt, Artificial Sequence
  Description of Artificial Sequence: Synthetic oligonucleotide
  Antisense strand to SEQ ID NO: 1518438
aauccaaacagggaucgcg

SEQ ID NO: 1518440 - RNA, 19 nt, Artificial Sequence
  Description of Artificial Sequence: Synthetic oligonucleotide
  Sense strand starting at position 923 of SEQ ID NO: 1244860
gggagagaaacuugugucu

SEQ ID NO: 1518441 - RNA, 19 nt, Artificial Sequence
  Description of Artificial Sequence: Synthetic oligonucleotide
  Antisense strand to SEQ ID NO: 1518440
agacacaaguuucucuccc

SEQ ID NO: 1518442 - RNA, 19 nt, Artificial Sequence
  Description of Artificial Sequence: Synthetic oligonucleotide
  Sense strand starting at position 1056 of SEQ ID NO: 1244860
uuugaacuauucgugaaua

SEQ ID NO: 1518443 - RNA, 19 nt, Artificial Sequence
  Description of Artificial Sequence: Synthetic oligonucleotide
  Antisense strand to SEQ ID NO: 1518442
uauucacgaauaguucaaa

SEQ ID NO: 1518444 - RNA, 19 nt, Artificial Sequence
  Description of Artificial Sequence: Synthetic oligonucleotide
  Sense strand starting at position 1057 of SEQ ID NO: 1244860
uugaacuauucgugaauau

SEQ ID NO: 1518445 - RNA, 19 nt, Artificial Sequence
  Description of Artificial Sequence: Synthetic oligonucleotide
  Antisense strand to SEQ ID NO: 1518444
auauucacgaauaguucaa

SEQ ID NO: 1518446 - RNA, 19 nt, Artificial Sequence
  Description of Artificial Sequence: Synthetic oligonucleotide
  Sense strand starting at position 1058 of SEQ ID NO: 1244860
ugaacuauucgugaauaua

SEQ ID NO: 1518447 - RNA, 19 nt, Artificial Sequence
  Description of Artificial Sequence: Synthetic oligonucleotide
  Antisense strand to SEQ ID NO: 1518446
uauauucacgaauaguuca

SEQ ID NO: 1518448 - RNA, 19 nt, Artificial Sequence
  Description of Artificial Sequence: Synthetic oligonucleotide
  Sense strand starting at position 1078 of SEQ ID NO: 1244860
aagaauuaaucgguggcua

SEQ ID NO: 1518449 - RNA, 19 nt, Artificial Sequence
  Description of Artificial Sequence: Synthetic oligonucleotide
  Antisense strand to SEQ ID NO: 1518448
uagccaccgauuaauucuu

SEQ ID NO: 1518450 - RNA, 19 nt, Artificial Sequence
  Description of Artificial Sequence: Synthetic oligonucleotide
  Sense strand starting at position 1079 of SEQ ID NO: 1244860
agaauuaaucgguggcuaa

SEQ ID NO: 1518451 - RNA, 19 nt, Artificial Sequence
  Description of Artificial Sequence: Synthetic oligonucleotide
  Antisense strand to SEQ ID NO: 1518450
uuagccaccgauuaauucu

SEQ ID NO: 1518452 - RNA, 19 nt, Artificial Sequence
  Description of Artificial Sequence: Synthetic oligonucleotide
  Sense strand starting at position 1080 of SEQ ID NO: 1244860
gaauuaaucgguggcuaaa

SEQ ID NO: 1518453 - RNA, 19 nt, Artificial Sequence
  Description of Artificial Sequence: Synthetic oligonucleotide
  Antisense strand to SEQ ID NO: 1518452
uuuagccaccgauuaauuc

SEQ ID NO: 1518454 - RNA, 19 nt, Artificial Sequence
  Description of Artificial Sequence: Synthetic oligonucleotide
  Sense strand starting at position 1279 of SEQ ID NO: 1244860
gcagauagugcacacagau

SEQ ID NO: 1518455 - RNA, 19 nt, Artificial Sequence
  Description of Artificial Sequence: Synthetic oligonucleotide
  Antisense strand to SEQ ID NO: 1518454
aucugugugcacuaucugc

SEQ ID NO: 1518456 - RNA, 19 nt, Artificial Sequence
  Description of Artificial Sequence: Synthetic oligonucleotide
  Sense strand starting at position 1316 of SEQ ID NO: 1244860
gcgcugugaucguccgauu

SEQ ID NO: 1518457 - RNA, 19 nt, Artificial Sequence
  Description of Artificial Sequence: Synthetic oligonucleotide
  Antisense strand to SEQ ID NO: 1518456
aaucggacgaucacagcgc

SEQ ID NO: 1518458 - RNA, 19 nt, Artificial Sequence
  Description of Artificial Sequence: Synthetic oligonucleotide
  Sense strand starting at position 1317 of SEQ ID NO: 1244860
cgcugugaucguccgauua

SEQ ID NO: 1518459 - RNA, 19 nt, Artificial Sequence
  Description of Artificial Sequence: Synthetic oligonucleotide
  Antisense strand to SEQ ID NO: 1518458
uaaucggacgaucacagcg

SEQ ID NO: 1518460 - RNA, 19 nt, Artificial Sequence
  Description of Artificial Sequence: Synthetic oligonucleotide
  Sense strand starting at position 1319 of SEQ ID NO: 1244860
cugugaucguccgauuauc

SEQ ID NO: 1518461 - RNA, 19 nt, Artificial Sequence
  Description of Artificial Sequence: Synthetic oligonucleotide
  Antisense strand to SEQ ID NO: 1518460
gauaaucggacgaucacag

SEQ ID NO: 1518462 - RNA, 19 nt, Artificial Sequence
  Description of Artificial Sequence: Synthetic oligonucleotide
  Sense strand starting at position 1327 of SEQ ID NO: 1244860
guccgauuaucacugugaa

SEQ ID NO: 1518463 - RNA, 19 nt, Artificial Sequence
  Description of Artificial Sequence: Synthetic oligonucleotide
  Antisense strand to SEQ ID NO: 1518462
uucacagugauaaucggac

SEQ ID NO: 1518464 - RNA, 19 nt, Artificial Sequence
  Description of Artificial Sequence: Synthetic oligonucleotide
  Sense strand starting at position 1328 of SEQ ID NO: 1244860
uccgauuaucacugugaag

SEQ ID NO: 1518465 - RNA, 19 nt, Artificial Sequence
  Description of Artificial Sequence: Synthetic oligonucleotide
  Antisense strand to SEQ ID NO: 1518464
cuucacagugauaaucgga

SEQ ID NO: 1518466 - RNA, 19 nt, Artificial Sequence
  Description of Artificial Sequence: Synthetic oligonucleotide
  Sense strand starting at position 1544 of SEQ ID NO: 1244860
agcucuugcuugucccaga

SEQ ID NO: 1518467 - RNA, 19 nt, Artificial Sequence
  Description of Artificial Sequence: Synthetic oligonucleotide
  Antisense strand to SEQ ID NO: 1518466
ucugggacaagcaagagcu

SEQ ID NO: 1518468 - RNA, 19 nt, Artificial Sequence
  Description of Artificial Sequence: Synthetic oligonucleotide
  Sense strand starting at position 1547 of SEQ ID NO: 1244860
ucuugcuugucccagagua

SEQ ID NO: 1518469 - RNA, 19 nt, Artificial Sequence
  Description of Artificial Sequence: Synthetic oligonucleotide
  Antisense strand to SEQ ID NO: 1518468
uacucugggacaagcaaga

SEQ ID NO: 1518470 - RNA, 19 nt, Artificial Sequence
  Description of Artificial Sequence: Synthetic oligonucleotide
  Sense strand starting at position 1613 of SEQ ID NO: 1244860
agccauguccaguggagaa

SEQ ID NO: 1518471 - RNA, 19 nt, Artificial Sequence
  Description of Artificial Sequence: Synthetic oligonucleotide
  Antisense strand to SEQ ID NO: 1518470
uucuccacuggacauggcu

SEQ ID NO: 1518472 - RNA, 19 nt, Artificial Sequence
  Description of Artificial Sequence: Synthetic oligonucleotide
  Sense strand starting at position 1675 of SEQ ID NO: 1244860
gcgaguccugccgacaauc

SEQ ID NO: 1518473 - RNA, 19 nt, Artificial Sequence
  Description of Artificial Sequence: Synthetic oligonucleotide
  Antisense strand to SEQ ID NO: 1518472
gauugucggcaggacucgc

SEQ ID NO: 1518474 - RNA, 19 nt, Artificial Sequence
  Description of Artificial Sequence: Synthetic oligonucleotide
  Sense strand starting at position 2587 of SEQ ID NO: 1244860
cccguucuggcacagacau

SEQ ID NO: 1518475 - RNA, 19 nt, Artificial Sequence
  Description of Artificial Sequence: Synthetic oligonucleotide
  Antisense strand to SEQ ID NO: 1518474
augucugugccagaacggg

SEQ ID NO: 1518476 - RNA, 19 nt, Artificial Sequence
  Description of Artificial Sequence: Synthetic oligonucleotide
  Sense strand starting at position 2792 of SEQ ID NO: 1244860
cacccuucccagugaagga

SEQ ID NO: 1518477 - RNA, 19 nt, Artificial Sequence
  Description of Artificial Sequence: Synthetic oligonucleotide
  Antisense strand to SEQ ID NO: 1518476
uccuucacugggaagggug

SEQ ID NO: 1518478 - RNA, 19 nt, Artificial Sequence
  Description of Artificial Sequence: Synthetic oligonucleotide
  Sense strand starting at position 2876 of SEQ ID NO: 1244860
ucggcugucuuggcugauu

SEQ ID NO: 1518479 - RNA, 19 nt, Artificial Sequence
  Description of Artificial Sequence: Synthetic oligonucleotide
  Antisense strand to SEQ ID NO: 1518478
aaucagccaagacagccga

SEQ ID NO: 1518480 - RNA, 19 nt, Artificial Sequence
  Description of Artificial Sequence: Synthetic oligonucleotide
  Sense strand starting at position 3071 of SEQ ID NO: 1244860
gagcuuucuguaggucuga

SEQ ID NO: 1518481 - RNA, 19 nt, Artificial Sequence
  Description of Artificial Sequence: Synthetic oligonucleotide
  Antisense strand to SEQ ID NO: 1518480
ucagaccuacagaaagcuc

SEQ ID NO: 1518482 - RNA, 19 nt, Artificial Sequence
  Description of Artificial Sequence: Synthetic oligonucleotide
  Sense strand starting at position 3260 of SEQ ID NO: 1244860
aagugcaacccaggagaua

SEQ ID NO: 1518483 - RNA, 19 nt, Artificial Sequence
  Description of Artificial Sequence: Synthetic oligonucleotide
  Antisense strand to SEQ ID NO: 1518482
uaucuccuggguugcacuu

SEQ ID NO: 1518484 - RNA, 19 nt, Artificial Sequence
  Description of Artificial Sequence: Synthetic oligonucleotide
  Sense strand starting at position 3292 of SEQ ID NO: 1244860
gccagucuggguugggaaa

SEQ ID NO: 1518485 - RNA, 19 nt, Artificial Sequence
  Description of Artificial Sequence: Synthetic oligonucleotide
  Antisense strand to SEQ ID NO: 1518484
uuucccaacccagacuggc

SEQ ID NO: 1518486 - RNA, 19 nt, Artificial Sequence
  Description of Artificial Sequence: Synthetic oligonucleotide
  Sense strand starting at position 3365 of SEQ ID NO: 1244860
gagugagacucgcuggaca

SEQ ID NO: 1518487 - RNA, 19 nt, Artificial Sequence
  Description of Artificial Sequence: Synthetic oligonucleotide
  Antisense strand to SEQ ID NO: 1518486
uguccagcgagucucacuc

SEQ ID NO: 1518488 - RNA, 19 nt, Artificial Sequence
  Description of Artificial Sequence: Synthetic oligonucleotide
  Sense strand starting at position 3367 of SEQ ID NO: 1244860
gugagacucgcuggacaug

SEQ ID NO: 1518489 - RNA, 19 nt, Artificial Sequence
  Description of Artificial Sequence: Synthetic oligonucleotide
  Antisense strand to SEQ ID NO: 1518488
cauguccagcgagucucac

SEQ ID NO: 1518490 - RNA, 19 nt, Artificial Sequence
  Description of Artificial Sequence: Synthetic oligonucleotide
  Sense strand starting at position 3 of SEQ ID NO: 1244861
ccagguucuggcugucaaa

SEQ ID NO: 1518491 - RNA, 19 nt, Artificial Sequence
  Description of Artificial Sequence: Synthetic oligonucleotide
  Antisense strand to SEQ ID NO: 1518490
uuugacagccagaaccugg

SEQ ID NO: 1518492 - RNA, 19 nt, Artificial Sequence
  Description of Artificial Sequence: Synthetic oligonucleotide
  Sense strand starting at position 58 of SEQ ID NO: 1244861
gccaauucugccuguggca

SEQ ID NO: 1518493 - RNA, 19 nt, Artificial Sequence
  Description of Artificial Sequence: Synthetic oligonucleotide
  Antisense strand to SEQ ID NO: 1518492
ugccacaggcagaauuggc

SEQ ID NO: 1518494 - RNA, 19 nt, Artificial Sequence
  Description of Artificial Sequence: Synthetic oligonucleotide
  Sense strand starting at position 71 of SEQ ID NO: 1244861
guggcaucuccguggucuu

SEQ ID NO: 1518495 - RNA, 19 nt, Artificial Sequence
  Description of Artificial Sequence: Synthetic oligonucleotide
  Antisense strand to SEQ ID NO: 1518494
aagaccacggagaugccac

SEQ ID NO: 1518496 - RNA, 19 nt, Artificial Sequence
  Description of Artificial Sequence: Synthetic oligonucleotide
  Sense strand starting at position 234 of SEQ ID NO: 1244861
gggaaagucuccuugggag

SEQ ID NO: 1518497 - RNA, 19 nt, Artificial Sequence
  Description of Artificial Sequence: Synthetic oligonucleotide
  Antisense strand to SEQ ID NO: 1518496
cucccaaggagacuuuccc

SEQ ID NO: 1518498 - RNA, 19 nt, Artificial Sequence
  Description of Artificial Sequence: Synthetic oligonucleotide
  Sense strand starting at position 236 of SEQ ID NO: 1244861
gaaagucuccuugggagag

SEQ ID NO: 1518499 - RNA, 19 nt, Artificial Sequence
  Description of Artificial Sequence: Synthetic oligonucleotide
  Antisense strand to SEQ ID NO: 1518498
cucucccaaggagacuuuc

SEQ ID NO: 1518500 - RNA, 19 nt, Artificial Sequence
  Description of Artificial Sequence: Synthetic oligonucleotide
  Sense strand starting at position 267 of SEQ ID NO: 1244861
ggacaugagucaccacaac

SEQ ID NO: 1518501 - RNA, 19 nt, Artificial Sequence
  Description of Artificial Sequence: Synthetic oligonucleotide
  Antisense strand to SEQ ID NO: 1518500
guuguggugacucaugucc

SEQ ID NO: 1518502 - RNA, 19 nt, Artificial Sequence
  Description of Artificial Sequence: Synthetic oligonucleotide
  Sense strand starting at position 378 of SEQ ID NO: 1244861
aggauugauucugucugga

SEQ ID NO: 1518503 - RNA, 19 nt, Artificial Sequence
  Description of Artificial Sequence: Synthetic oligonucleotide
  Antisense strand to SEQ ID NO: 1518502
uccagacagaaucaauccu

SEQ ID NO: 1518504 - RNA, 19 nt, Artificial Sequence
  Description of Artificial Sequence: Synthetic oligonucleotide
  Sense strand starting at position 380 of SEQ ID NO: 1244861
gauugauucugucuggauu

SEQ ID NO: 1518505 - RNA, 19 nt, Artificial Sequence
  Description of Artificial Sequence: Synthetic oligonucleotide
  Antisense strand to SEQ ID NO: 1518504
aauccagacagaaucaauc

SEQ ID NO: 1518506 - RNA, 19 nt, Artificial Sequence
  Description of Artificial Sequence: Synthetic oligonucleotide
  Sense strand starting at position 381 of SEQ ID NO: 1244861
auugauucugucuggauuc

SEQ ID NO: 1518507 - RNA, 19 nt, Artificial Sequence
  Description of Artificial Sequence: Synthetic oligonucleotide
  Antisense strand to SEQ ID NO: 1518506
gaauccagacagaaucaau

SEQ ID NO: 1518508 - RNA, 19 nt, Artificial Sequence
  Description of Artificial Sequence: Synthetic oligonucleotide
  Sense strand starting at position 485 of SEQ ID NO: 1244861
cuccauauucuccacgaga

SEQ ID NO: 1518509 - RNA, 19 nt, Artificial Sequence
  Description of Artificial Sequence: Synthetic oligonucleotide
  Antisense strand to SEQ ID NO: 1518508
ucucguggagaauauggag

SEQ ID NO: 1518510 - RNA, 19 nt, Artificial Sequence
  Description of Artificial Sequence: Synthetic oligonucleotide
  Sense strand starting at position 487 of SEQ ID NO: 1244861
ccauauucuccacgagaca

SEQ ID NO: 1518511 - RNA, 19 nt, Artificial Sequence
  Description of Artificial Sequence: Synthetic oligonucleotide
  Antisense strand to SEQ ID NO: 1518510
ugucucguggagaauaugg

SEQ ID NO: 1518512 - RNA, 19 nt, Artificial Sequence
  Description of Artificial Sequence: Synthetic oligonucleotide
  Sense strand starting at position 716 of SEQ ID NO: 1244861
ggagccuggucccagaagu

SEQ ID NO: 1518513 - RNA, 19 nt, Artificial Sequence
  Description of Artificial Sequence: Synthetic oligonucleotide
  Antisense strand to SEQ ID NO: 1518512
acuucugggaccaggcucc

SEQ ID NO: 1518514 - RNA, 19 nt, Artificial Sequence
  Description of Artificial Sequence: Synthetic oligonucleotide
  Sense strand starting at position 788 of SEQ ID NO: 1244861
gcaacucuggcacaugauu

SEQ ID NO: 1518515 - RNA, 19 nt, Artificial Sequence
  Description of Artificial Sequence: Synthetic oligonucleotide
  Antisense strand to SEQ ID NO: 1518514
aaucaugugccagaguugc

SEQ ID NO: 1518516 - RNA, 19 nt, Artificial Sequence
  Description of Artificial Sequence: Synthetic oligonucleotide
  Sense strand starting at position 2070 of SEQ ID NO: 1244861
ucuggugucagaugcuaua

SEQ ID NO: 1518517 - RNA, 19 nt, Artificial Sequence
  Description of Artificial Sequence: Synthetic oligonucleotide
  Antisense strand to SEQ ID NO: 1518516
uauagcaucugacaccaga

SEQ ID NO: 1518518 - RNA, 19 nt, Artificial Sequence
  Description of Artificial Sequence: Synthetic oligonucleotide
  Sense strand starting at position 2073 of SEQ ID NO: 1244861
ggugucagaugcuauaagu

SEQ ID NO: 1518519 - RNA, 19 nt, Artificial Sequence
  Description of Artificial Sequence: Synthetic oligonucleotide
  Antisense strand to SEQ ID NO: 1518518
acuuauagcaucugacacc

SEQ ID NO: 1518520 - RNA, 19 nt, Artificial Sequence
  Description of Artificial Sequence: Synthetic oligonucleotide
  Sense strand starting at position 2204 of SEQ ID NO: 1244861
ccuccaggugccugacauu

SEQ ID NO: 1518521 - RNA, 19 nt, Artificial Sequence
  Description of Artificial Sequence: Synthetic oligonucleotide
  Antisense strand to SEQ ID NO: 1518520
aaugucaggcaccuggagg

SEQ ID NO: 1518522 - RNA, 19 nt, Artificial Sequence
  Description of Artificial Sequence: Synthetic oligonucleotide
  Sense strand starting at position 2207 of SEQ ID NO: 1244861
ccaggugccugacauuacu

SEQ ID NO: 1518523 - RNA, 19 nt, Artificial Sequence
  Description of Artificial Sequence: Synthetic oligonucleotide
  Antisense strand to SEQ ID NO: 1518522
aguaaugucaggcaccugg

SEQ ID NO: 1518524 - RNA, 19 nt, Artificial Sequence
  Description of Artificial Sequence: Synthetic oligonucleotide
  Sense strand starting at position 2213 of SEQ ID NO: 1244861
gccugacauuacucagaca

SEQ ID NO: 1518525 - RNA, 19 nt, Artificial Sequence
  Description of Artificial Sequence: Synthetic oligonucleotide
  Antisense strand to SEQ ID NO: 1518524
ugucugaguaaugucaggc

SEQ ID NO: 1518526 - RNA, 19 nt, Artificial Sequence
  Description of Artificial Sequence: Synthetic oligonucleotide
  Sense strand starting at position 2313 of SEQ ID NO: 1244861
gacagcagcuugucuguaa

SEQ ID NO: 1518527 - RNA, 19 nt, Artificial Sequence
  Description of Artificial Sequence: Synthetic oligonucleotide
  Antisense strand to SEQ ID NO: 1518526
uuacagacaagcugcuguc

SEQ ID NO: 1518528 - RNA, 19 nt, Artificial Sequence
  Description of Artificial Sequence: Synthetic oligonucleotide
  Sense strand starting at position 2314 of SEQ ID NO: 1244861
acagcagcuugucuguaaa

SEQ ID NO: 1518529 - RNA, 19 nt, Artificial Sequence
  Description of Artificial Sequence: Synthetic oligonucleotide
  Antisense strand to SEQ ID NO: 1518528
uuuacagacaagcugcugu

SEQ ID NO: 1518530 - RNA, 19 nt, Artificial Sequence
  Description of Artificial Sequence: Synthetic oligonucleotide
  Sense strand starting at position 2316 of SEQ ID NO: 1244861
agcagcuugucuguaaaca

SEQ ID NO: 1518531 - RNA, 19 nt, Artificial Sequence
  Description of Artificial Sequence: Synthetic oligonucleotide
  Antisense strand to SEQ ID NO: 1518530
uguuuacagacaagcugcu

SEQ ID NO: 1518532 - RNA, 19 nt, Artificial Sequence
  Description of Artificial Sequence: Synthetic oligonucleotide
  Sense strand starting at position 2317 of SEQ ID NO: 1244861
gcagcuugucuguaaacag

SEQ ID NO: 1518533 - RNA, 19 nt, Artificial Sequence
  Description of Artificial Sequence: Synthetic oligonucleotide
  Antisense strand to SEQ ID NO: 1518532
cuguuuacagacaagcugc

SEQ ID NO: 1518534 - RNA, 19 nt, Artificial Sequence
  Description of Artificial Sequence: Synthetic oligonucleotide
  Sense strand starting at position 2565 of SEQ ID NO: 1244861
gagccuuggccagguguuu

SEQ ID NO: 1518535 - RNA, 19 nt, Artificial Sequence
  Description of Artificial Sequence: Synthetic oligonucleotide
  Antisense strand to SEQ ID NO: 1518534
aaacaccuggccaaggcuc

SEQ ID NO: 1518536 - RNA, 19 nt, Artificial Sequence
  Description of Artificial Sequence: Synthetic oligonucleotide
  Sense strand starting at position 2621 of SEQ ID NO: 1244861
ggagacaggucucaggaga

SEQ ID NO: 1518537 - RNA, 19 nt, Artificial Sequence
  Description of Artificial Sequence: Synthetic oligonucleotide
  Antisense strand to SEQ ID NO: 1518536
ucuccugagaccugucucc

SEQ ID NO: 1518538 - RNA, 19 nt, Artificial Sequence
  Description of Artificial Sequence: Synthetic oligonucleotide
  Sense strand starting at position 2682 of SEQ ID NO: 1244861
acaccuguguugggugaaa

SEQ ID NO: 1518539 - RNA, 19 nt, Artificial Sequence
  Description of Artificial Sequence: Synthetic oligonucleotide
  Antisense strand to SEQ ID NO: 1518538
uuucacccaacacaggugu

SEQ ID NO: 1518540 - RNA, 19 nt, Artificial Sequence
  Description of Artificial Sequence: Synthetic oligonucleotide
  Sense strand starting at position 2684 of SEQ ID NO: 1244861
accuguguugggugaaaug

SEQ ID NO: 1518541 - RNA, 19 nt, Artificial Sequence
  Description of Artificial Sequence: Synthetic oligonucleotide
  Antisense strand to SEQ ID NO: 1518540
cauuucacccaacacaggu

SEQ ID NO: 1518542 - RNA, 19 nt, Artificial Sequence
  Description of Artificial Sequence: Synthetic oligonucleotide
  Sense strand starting at position 2713 of SEQ ID NO: 1244861
ggcucugaugggugauagu

SEQ ID NO: 1518543 - RNA, 19 nt, Artificial Sequence
  Description of Artificial Sequence: Synthetic oligonucleotide
  Antisense strand to SEQ ID NO: 1518542
acuaucacccaucagagcc

SEQ ID NO: 1518544 - RNA, 19 nt, Artificial Sequence
  Description of Artificial Sequence: Synthetic oligonucleotide
  Sense strand starting at position 2755 of SEQ ID NO: 1244861
ccauaaauaggcuguguga

SEQ ID NO: 1518545 - RNA, 19 nt, Artificial Sequence
  Description of Artificial Sequence: Synthetic oligonucleotide
  Antisense strand to SEQ ID NO: 1518544
ucacacagccuauuuaugg

SEQ ID NO: 1518546 - RNA, 19 nt, Artificial Sequence
  Description of Artificial Sequence: Synthetic oligonucleotide
  Sense strand starting at position 2951 of SEQ ID NO: 1244861
guagcaacucauggugcaa

SEQ ID NO: 1518547 - RNA, 19 nt, Artificial Sequence
  Description of Artificial Sequence: Synthetic oligonucleotide
  Antisense strand to SEQ ID NO: 1518546
uugcaccaugaguugcuac

SEQ ID NO: 1518548 - RNA, 19 nt, Artificial Sequence
  Description of Artificial Sequence: Synthetic oligonucleotide
  Sense strand starting at position 3110 of SEQ ID NO: 1244861
ugcagaacugcagacuauu

SEQ ID NO: 1518549 - RNA, 19 nt, Artificial Sequence
  Description of Artificial Sequence: Synthetic oligonucleotide
  Antisense strand to SEQ ID NO: 1518548
aauagucugcaguucugca

SEQ ID NO: 1518550 - RNA, 19 nt, Artificial Sequence
  Description of Artificial Sequence: Synthetic oligonucleotide
  Sense strand starting at position 3119 of SEQ ID NO: 1244861
gcagacuauugauuacuga

SEQ ID NO: 1518551 - RNA, 19 nt, Artificial Sequence
  Description of Artificial Sequence: Synthetic oligonucleotide
  Antisense strand to SEQ ID NO: 1518550
ucaguaaucaauagucugc

SEQ ID NO: 1518552 - RNA, 19 nt, Artificial Sequence
  Description of Artificial Sequence: Synthetic oligonucleotide
  Sense strand starting at position 3122 of SEQ ID NO: 1244861
gacuauugauuacugagca

SEQ ID NO: 1518553 - RNA, 19 nt, Artificial Sequence
  Description of Artificial Sequence: Synthetic oligonucleotide
  Antisense strand to SEQ ID NO: 1518552
ugcucaguaaucaauaguc

SEQ ID NO: 1518554 - RNA, 19 nt, Artificial Sequence
  Description of Artificial Sequence: Synthetic oligonucleotide
  Sense strand starting at position 36 of SEQ ID NO: 1244862
ucaaguucuuuaguagaug

SEQ ID NO: 1518555 - RNA, 19 nt, Artificial Sequence
  Description of Artificial Sequence: Synthetic oligonucleotide
  Antisense strand to SEQ ID NO: 1518554
caucuacuaaagaacuuga

SEQ ID NO: 1518556 - RNA, 19 nt, Artificial Sequence
  Description of Artificial Sequence: Synthetic oligonucleotide
  Sense strand starting at position 204 of SEQ ID NO: 1244862
uuauguaaggcccaguaca

SEQ ID NO: 1518557 - RNA, 19 nt, Artificial Sequence
  Description of Artificial Sequence: Synthetic oligonucleotide
  Antisense strand to SEQ ID NO: 1518556
uguacugggccuuacauaa

SEQ ID NO: 1518558 - RNA, 19 nt, Artificial Sequence
  Description of Artificial Sequence: Synthetic oligonucleotide
  Sense strand starting at position 283 of SEQ ID NO: 1244862
auauaaguuggauguccua

SEQ ID NO: 1518559 - RNA, 19 nt, Artificial Sequence
  Description of Artificial Sequence: Synthetic oligonucleotide
  Antisense strand to SEQ ID NO: 1518558
uaggacauccaacuuauau

SEQ ID NO: 1518560 - RNA, 19 nt, Artificial Sequence
  Description of Artificial Sequence: Synthetic oligonucleotide
  Sense strand starting at position 326 of SEQ ID NO: 1244862
uugacuagauccuuugcaa

SEQ ID NO: 1518561 - RNA, 19 nt, Artificial Sequence
  Description of Artificial Sequence: Synthetic oligonucleotide
  Antisense strand to SEQ ID NO: 1518560
uugcaaaggaucuagucaa

SEQ ID NO: 1518562 - RNA, 19 nt, Artificial Sequence
  Description of Artificial Sequence: Synthetic oligonucleotide
  Sense strand starting at position 329 of SEQ ID NO: 1244862
acuagauccuuugcaaagu

SEQ ID NO: 1518563 - RNA, 19 nt, Artificial Sequence
  Description of Artificial Sequence: Synthetic oligonucleotide
  Antisense strand to SEQ ID NO: 1518562
acuuugcaaaggaucuagu

SEQ ID NO: 1518564 - RNA, 19 nt, Artificial Sequence
  Description of Artificial Sequence: Synthetic oligonucleotide
  Sense strand starting at position 360 of SEQ ID NO: 1244862
ccuggaauuuaagaacuaa

SEQ ID NO: 1518565 - RNA, 19 nt, Artificial Sequence
  Description of Artificial Sequence: Synthetic oligonucleotide
  Antisense strand to SEQ ID NO: 1518564
uuaguucuuaaauuccagg

SEQ ID NO: 1518566 - RNA, 19 nt, Artificial Sequence
  Description of Artificial Sequence: Synthetic oligonucleotide
  Sense strand starting at position 388 of SEQ ID NO: 1244862
auauuaaauugucuuggag

SEQ ID NO: 1518567 - RNA, 19 nt, Artificial Sequence
  Description of Artificial Sequence: Synthetic oligonucleotide
  Antisense strand to SEQ ID NO: 1518566
cuccaagacaauuuaauau

SEQ ID NO: 1518568 - RNA, 19 nt, Artificial Sequence
  Description of Artificial Sequence: Synthetic oligonucleotide
  Sense strand starting at position 391 of SEQ ID NO: 1244862
uuaaauugucuuggagaau

SEQ ID NO: 1518569 - RNA, 19 nt, Artificial Sequence
  Description of Artificial Sequence: Synthetic oligonucleotide
  Antisense strand to SEQ ID NO: 1518568
auucuccaagacaauuuaa

SEQ ID NO: 1518570 - RNA, 19 nt, Artificial Sequence
  Description of Artificial Sequence: Synthetic oligonucleotide
  Sense strand starting at position 707 of SEQ ID NO: 1244862
gcccgagaaucaucuuuaa

SEQ ID NO: 1518571 - RNA, 19 nt, Artificial Sequence
  Description of Artificial Sequence: Synthetic oligonucleotide
  Antisense strand to SEQ ID NO: 1518570
uuaaagaugauucucgggc

SEQ ID NO: 1518572 - RNA, 19 nt, Artificial Sequence
  Description of Artificial Sequence: Synthetic oligonucleotide
  Sense strand starting at position 803 of SEQ ID NO: 1244862
ucccgauauuuauggauca

SEQ ID NO: 1518573 - RNA, 19 nt, Artificial Sequence
  Description of Artificial Sequence: Synthetic oligonucleotide
  Antisense strand to SEQ ID NO: 1518572
ugauccauaaauaucggga

SEQ ID NO: 1518574 - RNA, 19 nt, Artificial Sequence
  Description of Artificial Sequence: Synthetic oligonucleotide
  Sense strand starting at position 813 of SEQ ID NO: 1244862
uauggaucaguccgaaguu

SEQ ID NO: 1518575 - RNA, 19 nt, Artificial Sequence
  Description of Artificial Sequence: Synthetic oligonucleotide
  Antisense strand to SEQ ID NO: 1518574
aacuucggacugauccaua

SEQ ID NO: 1518576 - RNA, 19 nt, Artificial Sequence
  Description of Artificial Sequence: Synthetic oligonucleotide
  Sense strand starting at position 866 of SEQ ID NO: 1244862
ggaagcaaguaguugaaau

SEQ ID NO: 1518577 - RNA, 19 nt, Artificial Sequence
  Description of Artificial Sequence: Synthetic oligonucleotide
  Antisense strand to SEQ ID NO: 1518576
auuucaacuacuugcuucc

SEQ ID NO: 1518578 - RNA, 19 nt, Artificial Sequence
  Description of Artificial Sequence: Synthetic oligonucleotide
  Sense strand starting at position 897 of SEQ ID NO: 1244862
ugcuuaaaguuucugauau

SEQ ID NO: 1518579 - RNA, 19 nt, Artificial Sequence
  Description of Artificial Sequence: Synthetic oligonucleotide
  Antisense strand to SEQ ID NO: 1518578
auaucagaaacuuuaagca

SEQ ID NO: 1518580 - RNA, 19 nt, Artificial Sequence
  Description of Artificial Sequence: Synthetic oligonucleotide
  Sense strand starting at position 1304 of SEQ ID NO: 1244862
aucucaucugguggaacua

SEQ ID NO: 1518581 - RNA, 19 nt, Artificial Sequence
  Description of Artificial Sequence: Synthetic oligonucleotide
  Antisense strand to SEQ ID NO: 1518580
uaguuccaccagaugagau

SEQ ID NO: 1518582 - RNA, 19 nt, Artificial Sequence
  Description of Artificial Sequence: Synthetic oligonucleotide
  Sense strand starting at position 1359 of SEQ ID NO: 1244862
ucagcuaagugauagauuu

SEQ ID NO: 1518583 - RNA, 19 nt, Artificial Sequence
  Description of Artificial Sequence: Synthetic oligonucleotide
  Antisense strand to SEQ ID NO: 1518582
aaaucuaucacuuagcuga

SEQ ID NO: 1518584 - RNA, 19 nt, Artificial Sequence
  Description of Artificial Sequence: Synthetic oligonucleotide
  Sense strand starting at position 1510 of SEQ ID NO: 1244862
aaguaauguggccagaggu

SEQ ID NO: 1518585 - RNA, 19 nt, Artificial Sequence
  Description of Artificial Sequence: Synthetic oligonucleotide
  Antisense strand to SEQ ID NO: 1518584
accucuggccacauuacuu

SEQ ID NO: 1518586 - RNA, 19 nt, Artificial Sequence
  Description of Artificial Sequence: Synthetic oligonucleotide
  Sense strand starting at position 1824 of SEQ ID NO: 1244862
cgccguauuccauuagccu

SEQ ID NO: 1518587 - RNA, 19 nt, Artificial Sequence
  Description of Artificial Sequence: Synthetic oligonucleotide
  Antisense strand to SEQ ID NO: 1518586
aggcuaauggaauacggcg

SEQ ID NO: 1518588 - RNA, 19 nt, Artificial Sequence
  Description of Artificial Sequence: Synthetic oligonucleotide
  Sense strand starting at position 1855 of SEQ ID NO: 1244862
gcuaaugacagacgggaaa

SEQ ID NO: 1518589 - RNA, 19 nt, Artificial Sequence
  Description of Artificial Sequence: Synthetic oligonucleotide
  Antisense strand to SEQ ID NO: 1518588
uuucccgucugucauuagc

SEQ ID NO: 1518590 - RNA, 19 nt, Artificial Sequence
  Description of Artificial Sequence: Synthetic oligonucleotide
  Sense strand starting at position 1949 of SEQ ID NO: 1244862
gguccagucuuccuccauu

SEQ ID NO: 1518591 - RNA, 19 nt, Artificial Sequence
  Description of Artificial Sequence: Synthetic oligonucleotide
  Antisense strand to SEQ ID NO: 1518590
aauggaggaagacuggacc

SEQ ID NO: 1518592 - RNA, 19 nt, Artificial Sequence
  Description of Artificial Sequence: Synthetic oligonucleotide
  Sense strand starting at position 2262 of SEQ ID NO: 1244862
uuagucuguaguggguaaa

SEQ ID NO: 1518593 - RNA, 19 nt, Artificial Sequence
  Description of Artificial Sequence: Synthetic oligonucleotide
  Antisense strand to SEQ ID NO: 1518592
uuuacccacuacagacuaa

SEQ ID NO: 1518594 - RNA, 19 nt, Artificial Sequence
  Description of Artificial Sequence: Synthetic oligonucleotide
  Sense strand starting at position 2305 of SEQ ID NO: 1244862
ggguuucuccuagacacuu

SEQ ID NO: 1518595 - RNA, 19 nt, Artificial Sequence
  Description of Artificial Sequence: Synthetic oligonucleotide
  Antisense strand to SEQ ID NO: 1518594
aagugucuaggagaaaccc

SEQ ID NO: 1518596 - RNA, 19 nt, Artificial Sequence
  Description of Artificial Sequence: Synthetic oligonucleotide
  Sense strand starting at position 2440 of SEQ ID NO: 1244862
agagaugcgaaguguuuga

SEQ ID NO: 1518597 - RNA, 19 nt, Artificial Sequence
  Description of Artificial Sequence: Synthetic oligonucleotide
  Antisense strand to SEQ ID NO: 1518596
ucaaacacuucgcaucucu

SEQ ID NO: 1518598 - RNA, 19 nt, Artificial Sequence
  Description of Artificial Sequence: Synthetic oligonucleotide
  Sense strand starting at position 2567 of SEQ ID NO: 1244862
gaauguagcgccgaauuua

SEQ ID NO: 1518599 - RNA, 19 nt, Artificial Sequence
  Description of Artificial Sequence: Synthetic oligonucleotide
  Antisense strand to SEQ ID NO: 1518598
uaaauucggcgcuacauuc

SEQ ID NO: 1518600 - RNA, 19 nt, Artificial Sequence
  Description of Artificial Sequence: Synthetic oligonucleotide
  Sense strand starting at position 2596 of SEQ ID NO: 1244862
gaauaauggguggagcagu

SEQ ID NO: 1518601 - RNA, 19 nt, Artificial Sequence
  Description of Artificial Sequence: Synthetic oligonucleotide
  Antisense strand to SEQ ID NO: 1518600
acugcuccacccauuauuc

SEQ ID NO: 1518602 - RNA, 19 nt, Artificial Sequence
  Description of Artificial Sequence: Synthetic oligonucleotide
  Sense strand starting at position 2652 of SEQ ID NO: 1244862
gguuuaugauuugcaguca

SEQ ID NO: 1518603 - RNA, 19 nt, Artificial Sequence
  Description of Artificial Sequence: Synthetic oligonucleotide
  Antisense strand to SEQ ID NO: 1518602
ugacugcaaaucauaaacc

SEQ ID NO: 1518604 - RNA, 19 nt, Artificial Sequence
  Description of Artificial Sequence: Synthetic oligonucleotide
  Sense strand starting at position 2672 of SEQ ID NO: 1244862
acuggagaguguuccuaga

SEQ ID NO: 1518605 - RNA, 19 nt, Artificial Sequence
  Description of Artificial Sequence: Synthetic oligonucleotide
  Antisense strand to SEQ ID NO: 1518604
ucuaggaacacucuccagu

SEQ ID NO: 1518606 - RNA, 19 nt, Artificial Sequence
  Description of Artificial Sequence: Synthetic oligonucleotide
  Sense strand starting at position 2674 of SEQ ID NO: 1244862
uggagaguguuccuagaaa

SEQ ID NO: 1518607 - RNA, 19 nt, Artificial Sequence
  Description of Artificial Sequence: Synthetic oligonucleotide
  Antisense strand to SEQ ID NO: 1518606
uuucuaggaacacucucca

SEQ ID NO: 1518608 - RNA, 19 nt, Artificial Sequence
  Description of Artificial Sequence: Synthetic oligonucleotide
  Sense strand starting at position 2698 of SEQ ID NO: 1244862
ccauauacuguauagcgaa

SEQ ID NO: 1518609 - RNA, 19 nt, Artificial Sequence
  Description of Artificial Sequence: Synthetic oligonucleotide
  Antisense strand to SEQ ID NO: 1518608
uucgcuauacaguauaugg

SEQ ID NO: 1518610 - RNA, 19 nt, Artificial Sequence
  Description of Artificial Sequence: Synthetic oligonucleotide
  Sense strand starting at position 2753 of SEQ ID NO: 1244862
augagaagucgcgaagaga

SEQ ID NO: 1518611 - RNA, 19 nt, Artificial Sequence
  Description of Artificial Sequence: Synthetic oligonucleotide
  Antisense strand to SEQ ID NO: 1518610
ucucuucgcgacuucucau

SEQ ID NO: 1518612 - RNA, 19 nt, Artificial Sequence
  Description of Artificial Sequence: Synthetic oligonucleotide
  Sense strand starting at position 2773 of SEQ ID NO: 1244862
uguaucuucccaggugaga

SEQ ID NO: 1518613 - RNA, 19 nt, Artificial Sequence
  Description of Artificial Sequence: Synthetic oligonucleotide
  Antisense strand to SEQ ID NO: 1518612
ucucaccugggaagauaca

SEQ ID NO: 1518614 - RNA, 19 nt, Artificial Sequence
  Description of Artificial Sequence: Synthetic oligonucleotide
  Sense strand starting at position 3242 of SEQ ID NO: 1244862
uugauuguuugugucugga

SEQ ID NO: 1518615 - RNA, 19 nt, Artificial Sequence
  Description of Artificial Sequence: Synthetic oligonucleotide
  Antisense strand to SEQ ID NO: 1518614
uccagacacaaacaaucaa

SEQ ID NO: 1518616 - RNA, 19 nt, Artificial Sequence
  Description of Artificial Sequence: Synthetic oligonucleotide
  Sense strand starting at position 3244 of SEQ ID NO: 1244862
gauuguuugugucuggaag

SEQ ID NO: 1518617 - RNA, 19 nt, Artificial Sequence
  Description of Artificial Sequence: Synthetic oligonucleotide
  Antisense strand to SEQ ID NO: 1518616
cuuccagacacaaacaauc

SEQ ID NO: 1518618 - RNA, 19 nt, Artificial Sequence
  Description of Artificial Sequence: Synthetic oligonucleotide
  Sense strand starting at position 3613 of SEQ ID NO: 1244862
ucuagaaaccuuggcaguu

SEQ ID NO: 1518619 - RNA, 19 nt, Artificial Sequence
  Description of Artificial Sequence: Synthetic oligonucleotide
  Antisense strand to SEQ ID NO: 1518618
aacugccaagguuucuaga

SEQ ID NO: 1518620 - RNA, 19 nt, Artificial Sequence
  Description of Artificial Sequence: Synthetic oligonucleotide
  Sense strand starting at position 3614 of SEQ ID NO: 1244862
cuagaaaccuuggcaguuu

SEQ ID NO: 1518621 - RNA, 19 nt, Artificial Sequence
  Description of Artificial Sequence: Synthetic oligonucleotide
  Antisense strand to SEQ ID NO: 1518620
aaacugccaagguuucuag

SEQ ID NO: 1518622 - RNA, 19 nt, Artificial Sequence
  Description of Artificial Sequence: Synthetic oligonucleotide
  Sense strand starting at position 3642 of SEQ ID NO: 1244862
uuaggaaucuaacaagaaa

SEQ ID NO: 1518623 - RNA, 19 nt, Artificial Sequence
  Description of Artificial Sequence: Synthetic oligonucleotide
  Antisense strand to SEQ ID NO: 1518622
uuucuuguuagauuccuaa

SEQ ID NO: 1518624 - RNA, 19 nt, Artificial Sequence
  Description of Artificial Sequence: Synthetic oligonucleotide
  Sense strand starting at position 3732 of SEQ ID NO: 1244862
aguuuacugagauguuaug

SEQ ID NO: 1518625 - RNA, 19 nt, Artificial Sequence
  Description of Artificial Sequence: Synthetic oligonucleotide
  Antisense strand to SEQ ID NO: 1518624
cauaacaucucaguaaacu

SEQ ID NO: 1518626 - RNA, 19 nt, Artificial Sequence
  Description of Artificial Sequence: Synthetic oligonucleotide
  Sense strand starting at position 3741 of SEQ ID NO: 1244862
agauguuaugauugaauug

SEQ ID NO: 1518627 - RNA, 19 nt, Artificial Sequence
  Description of Artificial Sequence: Synthetic oligonucleotide
  Antisense strand to SEQ ID NO: 1518626
caauucaaucauaacaucu

SEQ ID NO: 1518628 - RNA, 19 nt, Artificial Sequence
  Description of Artificial Sequence: Synthetic oligonucleotide
  Sense strand starting at position 3811 of SEQ ID NO: 1244862
uccaaauaaggucauugua

SEQ ID NO: 1518629 - RNA, 19 nt, Artificial Sequence
  Description of Artificial Sequence: Synthetic oligonucleotide
  Antisense strand to SEQ ID NO: 1518628
uacaaugaccuuauuugga

SEQ ID NO: 1518630 - RNA, 19 nt, Artificial Sequence
  Description of Artificial Sequence: Synthetic oligonucleotide
  Sense strand starting at position 3813 of SEQ ID NO: 1244862
caaauaaggucauuguaga

SEQ ID NO: 1518631 - RNA, 19 nt, Artificial Sequence
  Description of Artificial Sequence: Synthetic oligonucleotide
  Antisense strand to SEQ ID NO: 1518630
ucuacaaugaccuuauuug

SEQ ID NO: 1518632 - RNA, 19 nt, Artificial Sequence
  Description of Artificial Sequence: Synthetic oligonucleotide
  Sense strand starting at position 3820 of SEQ ID NO: 1244862
ggucauuguagauguaacu

SEQ ID NO: 1518633 - RNA, 19 nt, Artificial Sequence
  Description of Artificial Sequence: Synthetic oligonucleotide
  Antisense strand to SEQ ID NO: 1518632
aguuacaucuacaaugacc

SEQ ID NO: 1518634 - RNA, 19 nt, Artificial Sequence
  Description of Artificial Sequence: Synthetic oligonucleotide
  Sense strand starting at position 61 of SEQ ID NO: 1244863
ggcugaacccauggauaca

SEQ ID NO: 1518635 - RNA, 19 nt, Artificial Sequence
  Description of Artificial Sequence: Synthetic oligonucleotide
  Antisense strand to SEQ ID NO: 1518634
uguauccauggguucagcc

SEQ ID NO: 1518636 - RNA, 19 nt, Artificial Sequence
  Description of Artificial Sequence: Synthetic oligonucleotide
  Sense strand starting at position 89 of SEQ ID NO: 1244863
cuguauucugaugauuaau

SEQ ID NO: 1518637 - RNA, 19 nt, Artificial Sequence
  Description of Artificial Sequence: Synthetic oligonucleotide
  Antisense strand to SEQ ID NO: 1518636
auuaaucaucagaauacag

SEQ ID NO: 1518638 - RNA, 19 nt, Artificial Sequence
  Description of Artificial Sequence: Synthetic oligonucleotide
  Sense strand starting at position 158 of SEQ ID NO: 1244863
cugaucauucccugugaua

SEQ ID NO: 1518639 - RNA, 19 nt, Artificial Sequence
  Description of Artificial Sequence: Synthetic oligonucleotide
  Antisense strand to SEQ ID NO: 1518638
uaucacagggaaugaucag

SEQ ID NO: 1518640 - RNA, 19 nt, Artificial Sequence
  Description of Artificial Sequence: Synthetic oligonucleotide
  Sense strand starting at position 160 of SEQ ID NO: 1244863
gaucauucccugugauaug

SEQ ID NO: 1518641 - RNA, 19 nt, Artificial Sequence
  Description of Artificial Sequence: Synthetic oligonucleotide
  Antisense strand to SEQ ID NO: 1518640
cauaucacagggaaugauc

SEQ ID NO: 1518642 - RNA, 19 nt, Artificial Sequence
  Description of Artificial Sequence: Synthetic oligonucleotide
  Sense strand starting at position 181 of SEQ ID NO: 1244863
uaguguguaguacauagau

SEQ ID NO: 1518643 - RNA, 19 nt, Artificial Sequence
  Description of Artificial Sequence: Synthetic oligonucleotide
  Antisense strand to SEQ ID NO: 1518642
aucuauguacuacacacua

SEQ ID NO: 1518644 - RNA, 19 nt, Artificial Sequence
  Description of Artificial Sequence: Synthetic oligonucleotide
  Sense strand starting at position 190 of SEQ ID NO: 1244863
guacauagaugcccauaga

SEQ ID NO: 1518645 - RNA, 19 nt, Artificial Sequence
  Description of Artificial Sequence: Synthetic oligonucleotide
  Antisense strand to SEQ ID NO: 1518644
ucuaugggcaucuauguac

SEQ ID NO: 1518646 - RNA, 19 nt, Artificial Sequence
  Description of Artificial Sequence: Synthetic oligonucleotide
  Sense strand starting at position 200 of SEQ ID NO: 1244863
gcccauagaugcucaauaa

SEQ ID NO: 1518647 - RNA, 19 nt, Artificial Sequence
  Description of Artificial Sequence: Synthetic oligonucleotide
  Antisense strand to SEQ ID NO: 1518646
uuauugagcaucuaugggc

SEQ ID NO: 1518648 - RNA, 19 nt, Artificial Sequence
  Description of Artificial Sequence: Synthetic oligonucleotide
  Sense strand starting at position 284 of SEQ ID NO: 1244863
ucuaucuuagggcagugaa

SEQ ID NO: 1518649 - RNA, 19 nt, Artificial Sequence
  Description of Artificial Sequence: Synthetic oligonucleotide
  Antisense strand to SEQ ID NO: 1518648
uucacugcccuaagauaga

SEQ ID NO: 1518650 - RNA, 19 nt, Artificial Sequence
  Description of Artificial Sequence: Synthetic oligonucleotide
  Sense strand starting at position 619 of SEQ ID NO: 1244863
uguaauaguuuagccauuu

SEQ ID NO: 1518651 - RNA, 19 nt, Artificial Sequence
  Description of Artificial Sequence: Synthetic oligonucleotide
  Antisense strand to SEQ ID NO: 1518650
aaauggcuaaacuauuaca

SEQ ID NO: 1518652 - RNA, 19 nt, Artificial Sequence
  Description of Artificial Sequence: Synthetic oligonucleotide
  Sense strand starting at position 620 of SEQ ID NO: 1244863
guaauaguuuagccauuug

SEQ ID NO: 1518653 - RNA, 19 nt, Artificial Sequence
  Description of Artificial Sequence: Synthetic oligonucleotide
  Antisense strand to SEQ ID NO: 1518652
caaauggcuaaacuauuac

SEQ ID NO: 1518654 - RNA, 19 nt, Artificial Sequence
  Description of Artificial Sequence: Synthetic oligonucleotide
  Sense strand starting at position 625 of SEQ ID NO: 1244863
aguuuagccauuugagguu

SEQ ID NO: 1518655 - RNA, 19 nt, Artificial Sequence
  Description of Artificial Sequence: Synthetic oligonucleotide
  Antisense strand to SEQ ID NO: 1518654
aaccucaaauggcuaaacu

SEQ ID NO: 1518656 - RNA, 19 nt, Artificial Sequence
  Description of Artificial Sequence: Synthetic oligonucleotide
  Sense strand starting at position 998 of SEQ ID NO: 1244863
ccauauugucuauaugauu

SEQ ID NO: 1518657 - RNA, 19 nt, Artificial Sequence
  Description of Artificial Sequence: Synthetic oligonucleotide
  Antisense strand to SEQ ID NO: 1518656
aaucauauagacaauaugg

SEQ ID NO: 1518658 - RNA, 19 nt, Artificial Sequence
  Description of Artificial Sequence: Synthetic oligonucleotide
  Sense strand starting at position 1039 of SEQ ID NO: 1244863
uguguaggugccguuauau

SEQ ID NO: 1518659 - RNA, 19 nt, Artificial Sequence
  Description of Artificial Sequence: Synthetic oligonucleotide
  Antisense strand to SEQ ID NO: 1518658
auauaacggcaccuacaca

SEQ ID NO: 1518660 - RNA, 19 nt, Artificial Sequence
  Description of Artificial Sequence: Synthetic oligonucleotide
  Sense strand starting at position 1119 of SEQ ID NO: 1244863
ccauaaugagaaugcuauu

SEQ ID NO: 1518661 - RNA, 19 nt, Artificial Sequence
  Description of Artificial Sequence: Synthetic oligonucleotide
  Antisense strand to SEQ ID NO: 1518660
aauagcauucucauuaugg

SEQ ID NO: 1518662 - RNA, 19 nt, Artificial Sequence
  Description of Artificial Sequence: Synthetic oligonucleotide
  Sense strand starting at position 1201 of SEQ ID NO: 1244863
ugggucauggaguaauguu

SEQ ID NO: 1518663 - RNA, 19 nt, Artificial Sequence
  Description of Artificial Sequence: Synthetic oligonucleotide
  Antisense strand to SEQ ID NO: 1518662
aacauuacuccaugaccca

SEQ ID NO: 1518664 - RNA, 19 nt, Artificial Sequence
  Description of Artificial Sequence: Synthetic oligonucleotide
  Sense strand starting at position 1637 of SEQ ID NO: 1244863
gaucuugacuaggcugaga

SEQ ID NO: 1518665 - RNA, 19 nt, Artificial Sequence
  Description of Artificial Sequence: Synthetic oligonucleotide
  Antisense strand to SEQ ID NO: 1518664
ucucagccuagucaagauc

SEQ ID NO: 1518666 - RNA, 19 nt, Artificial Sequence
  Description of Artificial Sequence: Synthetic oligonucleotide
  Sense strand starting at position 1777 of SEQ ID NO: 1244863
ccuggauaagucugaauag

SEQ ID NO: 1518667 - RNA, 19 nt, Artificial Sequence
  Description of Artificial Sequence: Synthetic oligonucleotide
  Antisense strand to SEQ ID NO: 1518666
cuauucagacuuauccagg

SEQ ID NO: 1518668 - RNA, 19 nt, Artificial Sequence
  Description of Artificial Sequence: Synthetic oligonucleotide
  Sense strand starting at position 1973 of SEQ ID NO: 1244863
ccagcucuugcagaacaga

SEQ ID NO: 1518669 - RNA, 19 nt, Artificial Sequence
  Description of Artificial Sequence: Synthetic oligonucleotide
  Antisense strand to SEQ ID NO: 1518668
ucuguucugcaagagcugg

SEQ ID NO: 1518670 - RNA, 19 nt, Artificial Sequence
  Description of Artificial Sequence: Synthetic oligonucleotide
  Sense strand starting at position 2369 of SEQ ID NO: 1244863
ggcgaaauugaggguuaaa

SEQ ID NO: 1518671 - RNA, 19 nt, Artificial Sequence
  Description of Artificial Sequence: Synthetic oligonucleotide
  Antisense strand to SEQ ID NO: 1518670
uuuaacccucaauuucgcc

SEQ ID NO: 1518672 - RNA, 19 nt, Artificial Sequence
  Description of Artificial Sequence: Synthetic oligonucleotide
  Sense strand starting at position 2423 of SEQ ID NO: 1244863
caaugaguuuccuccagag

SEQ ID NO: 1518673 - RNA, 19 nt, Artificial Sequence
  Description of Artificial Sequence: Synthetic oligonucleotide
  Antisense strand to SEQ ID NO: 1518672
cucuggaggaaacucauug

SEQ ID NO: 1518674 - RNA, 19 nt, Artificial Sequence
  Description of Artificial Sequence: Synthetic oligonucleotide
  Sense strand starting at position 2425 of SEQ ID NO: 1244863
augaguuuccuccagaguu

SEQ ID NO: 1518675 - RNA, 19 nt, Artificial Sequence
  Description of Artificial Sequence: Synthetic oligonucleotide
  Antisense strand to SEQ ID NO: 1518674
aacucuggaggaaacucau

SEQ ID NO: 1518676 - RNA, 19 nt, Artificial Sequence
  Description of Artificial Sequence: Synthetic oligonucleotide
  Sense strand starting at position 2719 of SEQ ID NO: 1244863
agacucaagucuuuagauu

SEQ ID NO: 1518677 - RNA, 19 nt, Artificial Sequence
  Description of Artificial Sequence: Synthetic oligonucleotide
  Antisense strand to SEQ ID NO: 1518676
aaucuaaagacuugagucu

SEQ ID NO: 1518678 - RNA, 19 nt, Artificial Sequence
  Description of Artificial Sequence: Synthetic oligonucleotide
  Sense strand starting at position 2792 of SEQ ID NO: 1244863
guggauuaugcauauaauc

SEQ ID NO: 1518679 - RNA, 19 nt, Artificial Sequence
  Description of Artificial Sequence: Synthetic oligonucleotide
  Antisense strand to SEQ ID NO: 1518678
gauuauaugcauaauccac

SEQ ID NO: 1518680 - RNA, 19 nt, Artificial Sequence
  Description of Artificial Sequence: Synthetic oligonucleotide
  Sense strand starting at position 2801 of SEQ ID NO: 1244863
gcauauaauccauagagug

SEQ ID NO: 1518681 - RNA, 19 nt, Artificial Sequence
  Description of Artificial Sequence: Synthetic oligonucleotide
  Antisense strand to SEQ ID NO: 1518680
cacucuauggauuauaugc

SEQ ID NO: 1518682 - RNA, 19 nt, Artificial Sequence
  Description of Artificial Sequence: Synthetic oligonucleotide
  Sense strand starting at position 2816 of SEQ ID NO: 1244863
agugauuagcuccaggauc

SEQ ID NO: 1518683 - RNA, 19 nt, Artificial Sequence
  Description of Artificial Sequence: Synthetic oligonucleotide
  Antisense strand to SEQ ID NO: 1518682
gauccuggagcuaaucacu

SEQ ID NO: 1518684 - RNA, 19 nt, Artificial Sequence
  Description of Artificial Sequence: Synthetic oligonucleotide
  Sense strand starting at position 2846 of SEQ ID NO: 1244863
cugaaaucugcagauucuc

SEQ ID NO: 1518685 - RNA, 19 nt, Artificial Sequence
  Description of Artificial Sequence: Synthetic oligonucleotide
  Antisense strand to SEQ ID NO: 1518684
gagaaucugcagauuucag

SEQ ID NO: 1518686 - RNA, 19 nt, Artificial Sequence
  Description of Artificial Sequence: Synthetic oligonucleotide
  Sense strand starting at position 2880 of SEQ ID NO: 1244863
ugguguagcauuuguauau

SEQ ID NO: 1518687 - RNA, 19 nt, Artificial Sequence
  Description of Artificial Sequence: Synthetic oligonucleotide
  Antisense strand to SEQ ID NO: 1518686
auauacaaaugcuacacca

SEQ ID NO: 1518688 - RNA, 19 nt, Artificial Sequence
  Description of Artificial Sequence: Synthetic oligonucleotide
  Sense strand starting at position 2881 of SEQ ID NO: 1244863
gguguagcauuuguauaua

SEQ ID NO: 1518689 - RNA, 19 nt, Artificial Sequence
  Description of Artificial Sequence: Synthetic oligonucleotide
  Antisense strand to SEQ ID NO: 1518688
uauauacaaaugcuacacc

SEQ ID NO: 1518690 - RNA, 19 nt, Artificial Sequence
  Description of Artificial Sequence: Synthetic oligonucleotide
  Sense strand starting at position 2913 of SEQ ID NO: 1244863
ccuagauaggcauacuuua

SEQ ID NO: 1518691 - RNA, 19 nt, Artificial Sequence
  Description of Artificial Sequence: Synthetic oligonucleotide
  Antisense strand to SEQ ID NO: 1518690
uaaaguaugccuaucuagg

SEQ ID NO: 1518692 - RNA, 19 nt, Artificial Sequence
  Description of Artificial Sequence: Synthetic oligonucleotide
  Sense strand starting at position 2929 of SEQ ID NO: 1244863
uuacgucaucucuagauug

SEQ ID NO: 1518693 - RNA, 19 nt, Artificial Sequence
  Description of Artificial Sequence: Synthetic oligonucleotide
  Antisense strand to SEQ ID NO: 1518692
caaucuagagaugacguaa

SEQ ID NO: 1518694 - RNA, 19 nt, Artificial Sequence
  Description of Artificial Sequence: Synthetic oligonucleotide
  Sense strand starting at position 3213 of SEQ ID NO: 1244863
uugugugucaucgcaucca

SEQ ID NO: 1518695 - RNA, 19 nt, Artificial Sequence
  Description of Artificial Sequence: Synthetic oligonucleotide
  Antisense strand to SEQ ID NO: 1518694
uggaugcgaugacacacaa

SEQ ID NO: 1518696 - RNA, 19 nt, Artificial Sequence
  Description of Artificial Sequence: Synthetic oligonucleotide
  Sense strand starting at position 3358 of SEQ ID NO: 1244863
agaaaugaugguugcuaga

SEQ ID NO: 1518697 - RNA, 19 nt, Artificial Sequence
  Description of Artificial Sequence: Synthetic oligonucleotide
  Antisense strand to SEQ ID NO: 1518696
ucuagcaaccaucauuucu

SEQ ID NO: 1518698 - RNA, 19 nt, Artificial Sequence
  Description of Artificial Sequence: Synthetic oligonucleotide
  Sense strand starting at position 3360 of SEQ ID NO: 1244863
aaaugaugguugcuagaaa

SEQ ID NO: 1518699 - RNA, 19 nt, Artificial Sequence
  Description of Artificial Sequence: Synthetic oligonucleotide
  Antisense strand to SEQ ID NO: 1518698
uuucuagcaaccaucauuu

SEQ ID NO: 1518700 - RNA, 19 nt, Artificial Sequence
  Description of Artificial Sequence: Synthetic oligonucleotide
  Sense strand starting at position 3368 of SEQ ID NO: 1244863
guugcuagaaaugaugcua

SEQ ID NO: 1518701 - RNA, 19 nt, Artificial Sequence
  Description of Artificial Sequence: Synthetic oligonucleotide
  Antisense strand to SEQ ID NO: 1518700
uagcaucauuucuagcaac

SEQ ID NO: 1518702 - RNA, 19 nt, Artificial Sequence
  Description of Artificial Sequence: Synthetic oligonucleotide
  Sense strand starting at position 3485 of SEQ ID NO: 1244863
uggacaugccaguacucaa

SEQ ID NO: 1518703 - RNA, 19 nt, Artificial Sequence
  Description of Artificial Sequence: Synthetic oligonucleotide
  Antisense strand to SEQ ID NO: 1518702
uugaguacuggcaugucca

SEQ ID NO: 1518704 - RNA, 19 nt, Artificial Sequence
  Description of Artificial Sequence: Synthetic oligonucleotide
  Sense strand starting at position 3512 of SEQ ID NO: 1244863
gcguacauucuuuauggaa

SEQ ID NO: 1518705 - RNA, 19 nt, Artificial Sequence
  Description of Artificial Sequence: Synthetic oligonucleotide
  Antisense strand to SEQ ID NO: 1518704
uuccauaaagaauguacgc

SEQ ID NO: 1518706 - RNA, 19 nt, Artificial Sequence
  Description of Artificial Sequence: Synthetic oligonucleotide
  Sense strand starting at position 3749 of SEQ ID NO: 1244863
accacauggugaguugaaa

SEQ ID NO: 1518707 - RNA, 19 nt, Artificial Sequence
  Description of Artificial Sequence: Synthetic oligonucleotide
  Antisense strand to SEQ ID NO: 1518706
uuucaacucaccauguggu

SEQ ID NO: 1518708 - RNA, 19 nt, Artificial Sequence
  Description of Artificial Sequence: Synthetic oligonucleotide
  Sense strand starting at position 3757 of SEQ ID NO: 1244863
gugaguugaaauuaugucu

SEQ ID NO: 1518709 - RNA, 19 nt, Artificial Sequence
  Description of Artificial Sequence: Synthetic oligonucleotide
  Antisense strand to SEQ ID NO: 1518708
agacauaauuucaacucac

SEQ ID NO: 1518710 - RNA, 19 nt, Artificial Sequence
  Description of Artificial Sequence: Synthetic oligonucleotide
  Sense strand starting at position 3842 of SEQ ID NO: 1244863
uuggaaugccugggaggua

SEQ ID NO: 1518711 - RNA, 19 nt, Artificial Sequence
  Description of Artificial Sequence: Synthetic oligonucleotide
  Antisense strand to SEQ ID NO: 1518710
uaccucccaggcauuccaa

SEQ ID NO: 1518712 - RNA, 19 nt, Artificial Sequence
  Description of Artificial Sequence: Synthetic oligonucleotide
  Sense strand starting at position 3855 of SEQ ID NO: 1244863
gagguauggcuugagcuca

SEQ ID NO: 1518713 - RNA, 19 nt, Artificial Sequence
  Description of Artificial Sequence: Synthetic oligonucleotide
  Antisense strand to SEQ ID NO: 1518712
ugagcucaagccauaccuc

SEQ ID NO: 1518714 - RNA, 19 nt, Artificial Sequence
  Description of Artificial Sequence: Synthetic oligonucleotide
  Sense strand starting at position 142 of SEQ ID NO: 1244864
ucuaaauaggagcggaaau

SEQ ID NO: 1518715 - RNA, 19 nt, Artificial Sequence
  Description of Artificial Sequence: Synthetic oligonucleotide
  Antisense strand to SEQ ID NO: 1518714
auuuccgcuccuauuuaga

SEQ ID NO: 1518716 - RNA, 19 nt, Artificial Sequence
  Description of Artificial Sequence: Synthetic oligonucleotide
  Sense strand starting at position 143 of SEQ ID NO: 1244864
cuaaauaggagcggaaaua

SEQ ID NO: 1518717 - RNA, 19 nt, Artificial Sequence
  Description of Artificial Sequence: Synthetic oligonucleotide
  Antisense strand to SEQ ID NO: 1518716
uauuuccgcuccuauuuag

SEQ ID NO: 1518718 - RNA, 19 nt, Artificial Sequence
  Description of Artificial Sequence: Synthetic oligonucleotide
  Sense strand starting at position 350 of SEQ ID NO: 1244864
gauggugguauccaguaaa

SEQ ID NO: 1518719 - RNA, 19 nt, Artificial Sequence
  Description of Artificial Sequence: Synthetic oligonucleotide
  Antisense strand to SEQ ID NO: 1518718
uuuacuggauaccaccauc

SEQ ID NO: 1518720 - RNA, 19 nt, Artificial Sequence
  Description of Artificial Sequence: Synthetic oligonucleotide
  Sense strand starting at position 353 of SEQ ID NO: 1244864
ggugguauccaguaaaguu

SEQ ID NO: 1518721 - RNA, 19 nt, Artificial Sequence
  Description of Artificial Sequence: Synthetic oligonucleotide
  Antisense strand to SEQ ID NO: 1518720
aacuuuacuggauaccacc

SEQ ID NO: 1518722 - RNA, 19 nt, Artificial Sequence
  Description of Artificial Sequence: Synthetic oligonucleotide
  Sense strand starting at position 378 of SEQ ID NO: 1244864
gcaaauuaccugugacuca

SEQ ID NO: 1518723 - RNA, 19 nt, Artificial Sequence
  Description of Artificial Sequence: Synthetic oligonucleotide
  Antisense strand to SEQ ID NO: 1518722
ugagucacagguaauuugc

SEQ ID NO: 1518724 - RNA, 19 nt, Artificial Sequence
  Description of Artificial Sequence: Synthetic oligonucleotide
  Sense strand starting at position 409 of SEQ ID NO: 1244864
cuugguauguaccuagaga

SEQ ID NO: 1518725 - RNA, 19 nt, Artificial Sequence
  Description of Artificial Sequence: Synthetic oligonucleotide
  Antisense strand to SEQ ID NO: 1518724
ucucuagguacauaccaag

SEQ ID NO: 1518726 - RNA, 19 nt, Artificial Sequence
  Description of Artificial Sequence: Synthetic oligonucleotide
  Sense strand starting at position 915 of SEQ ID NO: 1244864
aguauacauugguuuagga

SEQ ID NO: 1518727 - RNA, 19 nt, Artificial Sequence
  Description of Artificial Sequence: Synthetic oligonucleotide
  Antisense strand to SEQ ID NO: 1518726
uccuaaaccaauguauacu

SEQ ID NO: 1518728 - RNA, 19 nt, Artificial Sequence
  Description of Artificial Sequence: Synthetic oligonucleotide
  Sense strand starting at position 965 of SEQ ID NO: 1244864
ugcagaauauaaguaaaug

SEQ ID NO: 1518729 - RNA, 19 nt, Artificial Sequence
  Description of Artificial Sequence: Synthetic oligonucleotide
  Antisense strand to SEQ ID NO: 1518728
cauuuacuuauauucugca

SEQ ID NO: 1518730 - RNA, 19 nt, Artificial Sequence
  Description of Artificial Sequence: Synthetic oligonucleotide
  Sense strand starting at position 986 of SEQ ID NO: 1244864
aaauucuguugguuaauag

SEQ ID NO: 1518731 - RNA, 19 nt, Artificial Sequence
  Description of Artificial Sequence: Synthetic oligonucleotide
  Antisense strand to SEQ ID NO: 1518730
cuauuaaccaacagaauuu

SEQ ID NO: 1518732 - RNA, 19 nt, Artificial Sequence
  Description of Artificial Sequence: Synthetic oligonucleotide
  Sense strand starting at position 1061 of SEQ ID NO: 1244864
uugugccuguaaucgauuu

SEQ ID NO: 1518733 - RNA, 19 nt, Artificial Sequence
  Description of Artificial Sequence: Synthetic oligonucleotide
  Antisense strand to SEQ ID NO: 1518732
aaaucgauuacaggcacaa

SEQ ID NO: 1518734 - RNA, 19 nt, Artificial Sequence
  Description of Artificial Sequence: Synthetic oligonucleotide
  Sense strand starting at position 1380 of SEQ ID NO: 1244864
gacuuugggcggugagaga

SEQ ID NO: 1518735 - RNA, 19 nt, Artificial Sequence
  Description of Artificial Sequence: Synthetic oligonucleotide
  Antisense strand to SEQ ID NO: 1518734
ucucucaccgcccaaaguc

SEQ ID NO: 1518736 - RNA, 19 nt, Artificial Sequence
  Description of Artificial Sequence: Synthetic oligonucleotide
  Sense strand starting at position 1419 of SEQ ID NO: 1244864
aggagcucggucuacaaga

SEQ ID NO: 1518737 - RNA, 19 nt, Artificial Sequence
  Description of Artificial Sequence: Synthetic oligonucleotide
  Antisense strand to SEQ ID NO: 1518736
ucuuguagaccgagcuccu

SEQ ID NO: 1518738 - RNA, 19 nt, Artificial Sequence
  Description of Artificial Sequence: Synthetic oligonucleotide
  Sense strand starting at position 1429 of SEQ ID NO: 1244864
ucuacaagaccaggugauu

SEQ ID NO: 1518739 - RNA, 19 nt, Artificial Sequence
  Description of Artificial Sequence: Synthetic oligonucleotide
  Antisense strand to SEQ ID NO: 1518738
aaucaccuggucuuguaga

SEQ ID NO: 1518740 - RNA, 19 nt, Artificial Sequence
  Description of Artificial Sequence: Synthetic oligonucleotide
  Sense strand starting at position 2130 of SEQ ID NO: 1244864
acgcgcucacgcuuaguaa

SEQ ID NO: 1518741 - RNA, 19 nt, Artificial Sequence
  Description of Artificial Sequence: Synthetic oligonucleotide
  Antisense strand to SEQ ID NO: 1518740
uuacuaagcgugagcgcgu

SEQ ID NO: 1518742 - RNA, 19 nt, Artificial Sequence
  Description of Artificial Sequence: Synthetic oligonucleotide
  Sense strand starting at position 2168 of SEQ ID NO: 1244864
gggagaccuccuugguuug

SEQ ID NO: 1518743 - RNA, 19 nt, Artificial Sequence
  Description of Artificial Sequence: Synthetic oligonucleotide
  Antisense strand to SEQ ID NO: 1518742
caaaccaaggaggucuccc

SEQ ID NO: 1518744 - RNA, 19 nt, Artificial Sequence
  Description of Artificial Sequence: Synthetic oligonucleotide
  Sense strand starting at position 2178 of SEQ ID NO: 1244864
cuugguuugggaggugaaa

SEQ ID NO: 1518745 - RNA, 19 nt, Artificial Sequence
  Description of Artificial Sequence: Synthetic oligonucleotide
  Antisense strand to SEQ ID NO: 1518744
uuucaccucccaaaccaag

SEQ ID NO: 1518746 - RNA, 19 nt, Artificial Sequence
  Description of Artificial Sequence: Synthetic oligonucleotide
  Sense strand starting at position 2227 of SEQ ID NO: 1244864
cggugauuucccgaccucu

SEQ ID NO: 1518747 - RNA, 19 nt, Artificial Sequence
  Description of Artificial Sequence: Synthetic oligonucleotide
  Antisense strand to SEQ ID NO: 1518746
agaggucgggaaaucaccg

SEQ ID NO: 1518748 - RNA, 19 nt, Artificial Sequence
  Description of Artificial Sequence: Synthetic oligonucleotide
  Sense strand starting at position 2281 of SEQ ID NO: 1244864
aagaacuuggccgauucua

SEQ ID NO: 1518749 - RNA, 19 nt, Artificial Sequence
  Description of Artificial Sequence: Synthetic oligonucleotide
  Antisense strand to SEQ ID NO: 1518748
uagaaucggccaaguucuu

SEQ ID NO: 1518750 - RNA, 19 nt, Artificial Sequence
  Description of Artificial Sequence: Synthetic oligonucleotide
  Sense strand starting at position 2400 of SEQ ID NO: 1244864
gugacagaauuaucuagug

SEQ ID NO: 1518751 - RNA, 19 nt, Artificial Sequence
  Description of Artificial Sequence: Synthetic oligonucleotide
  Antisense strand to SEQ ID NO: 1518750
cacuagauaauucugucac

SEQ ID NO: 1518752 - RNA, 19 nt, Artificial Sequence
  Description of Artificial Sequence: Synthetic oligonucleotide
  Sense strand starting at position 2614 of SEQ ID NO: 1244864
acugaaguucgagaaguua

SEQ ID NO: 1518753 - RNA, 19 nt, Artificial Sequence
  Description of Artificial Sequence: Synthetic oligonucleotide
  Antisense strand to SEQ ID NO: 1518752
uaacuucucgaacuucagu

SEQ ID NO: 1518754 - RNA, 19 nt, Artificial Sequence
  Description of Artificial Sequence: Synthetic oligonucleotide
  Sense strand starting at position 2622 of SEQ ID NO: 1244864
ucgagaaguuaauugacuu

SEQ ID NO: 1518755 - RNA, 19 nt, Artificial Sequence
  Description of Artificial Sequence: Synthetic oligonucleotide
  Antisense strand to SEQ ID NO: 1518754
aagucaauuaacuucucga

SEQ ID NO: 1518756 - RNA, 19 nt, Artificial Sequence
  Description of Artificial Sequence: Synthetic oligonucleotide
  Sense strand starting at position 2623 of SEQ ID NO: 1244864
cgagaaguuaauugacuua

SEQ ID NO: 1518757 - RNA, 19 nt, Artificial Sequence
  Description of Artificial Sequence: Synthetic oligonucleotide
  Antisense strand to SEQ ID NO: 1518756
uaagucaauuaacuucucg

SEQ ID NO: 1518758 - RNA, 19 nt, Artificial Sequence
  Description of Artificial Sequence: Synthetic oligonucleotide
  Sense strand starting at position 2635 of SEQ ID NO: 1244864
ugacuuagacaaugugacu

SEQ ID NO: 1518759 - RNA, 19 nt, Artificial Sequence
  Description of Artificial Sequence: Synthetic oligonucleotide
  Antisense strand to SEQ ID NO: 1518758
agucacauugucuaaguca

SEQ ID NO: 1518760 - RNA, 19 nt, Artificial Sequence
  Description of Artificial Sequence: Synthetic oligonucleotide
  Sense strand starting at position 2755 of SEQ ID NO: 1244864
uuacuuugguaacuaguaa

SEQ ID NO: 1518761 - RNA, 19 nt, Artificial Sequence
  Description of Artificial Sequence: Synthetic oligonucleotide
  Antisense strand to SEQ ID NO: 1518760
uuacuaguuaccaaaguaa

SEQ ID NO: 1518762 - RNA, 19 nt, Artificial Sequence
  Description of Artificial Sequence: Synthetic oligonucleotide
  Sense strand starting at position 2980 of SEQ ID NO: 1244864
uuuauuagaggcugacuca

SEQ ID NO: 1518763 - RNA, 19 nt, Artificial Sequence
  Description of Artificial Sequence: Synthetic oligonucleotide
  Antisense strand to SEQ ID NO: 1518762
ugagucagccucuaauaaa

SEQ ID NO: 1518764 - RNA, 19 nt, Artificial Sequence
  Description of Artificial Sequence: Synthetic oligonucleotide
  Sense strand starting at position 3207 of SEQ ID NO: 1244864
acugcaaauccugacuagu

SEQ ID NO: 1518765 - RNA, 19 nt, Artificial Sequence
  Description of Artificial Sequence: Synthetic oligonucleotide
  Antisense strand to SEQ ID NO: 1518764
acuagucaggauuugcagu

SEQ ID NO: 1518766 - RNA, 19 nt, Artificial Sequence
  Description of Artificial Sequence: Synthetic oligonucleotide
  Sense strand starting at position 3230 of SEQ ID NO: 1244864
ccacuauguuccuuaucag

SEQ ID NO: 1518767 - RNA, 19 nt, Artificial Sequence
  Description of Artificial Sequence: Synthetic oligonucleotide
  Antisense strand to SEQ ID NO: 1518766
cugauaaggaacauagugg

SEQ ID NO: 1518768 - RNA, 19 nt, Artificial Sequence
  Description of Artificial Sequence: Synthetic oligonucleotide
  Sense strand starting at position 3258 of SEQ ID NO: 1244864
cuacauucggccuaagaaa

SEQ ID NO: 1518769 - RNA, 19 nt, Artificial Sequence
  Description of Artificial Sequence: Synthetic oligonucleotide
  Antisense strand to SEQ ID NO: 1518768
uuucuuaggccgaauguag

SEQ ID NO: 1518770 - RNA, 19 nt, Artificial Sequence
  Description of Artificial Sequence: Synthetic oligonucleotide
  Sense strand starting at position 3438 of SEQ ID NO: 1244864
uguucuaaaguagaucuga

SEQ ID NO: 1518771 - RNA, 19 nt, Artificial Sequence
  Description of Artificial Sequence: Synthetic oligonucleotide
  Antisense strand to SEQ ID NO: 1518770
ucagaucuacuuuagaaca

SEQ ID NO: 1518772 - RNA, 19 nt, Artificial Sequence
  Description of Artificial Sequence: Synthetic oligonucleotide
  Sense strand starting at position 3485 of SEQ ID NO: 1244864
gcagucuuugugcuuugca

SEQ ID NO: 1518773 - RNA, 19 nt, Artificial Sequence
  Description of Artificial Sequence: Synthetic oligonucleotide
  Antisense strand to SEQ ID NO: 1518772
ugcaaagcacaaagacugc

SEQ ID NO: 1518774 - RNA, 19 nt, Artificial Sequence
  Description of Artificial Sequence: Synthetic oligonucleotide
  Sense strand starting at position 3487 of SEQ ID NO: 1244864
agucuuugugcuuugcaca

SEQ ID NO: 1518775 - RNA, 19 nt, Artificial Sequence
  Description of Artificial Sequence: Synthetic oligonucleotide
  Antisense strand to SEQ ID NO: 1518774
ugugcaaagcacaaagacu

SEQ ID NO: 1518776 - RNA, 19 nt, Artificial Sequence
  Description of Artificial Sequence: Synthetic oligonucleotide
  Sense strand starting at position 3509 of SEQ ID NO: 1244864
cuagaugcccaauagcauu

SEQ ID NO: 1518777 - RNA, 19 nt, Artificial Sequence
  Description of Artificial Sequence: Synthetic oligonucleotide
  Antisense strand to SEQ ID NO: 1518776
aaugcuauugggcaucuag

SEQ ID NO: 1518778 - RNA, 19 nt, Artificial Sequence
  Description of Artificial Sequence: Synthetic oligonucleotide
  Sense strand starting at position 3610 of SEQ ID NO: 1244864
uacauugagucagugaauu

SEQ ID NO: 1518779 - RNA, 19 nt, Artificial Sequence
  Description of Artificial Sequence: Synthetic oligonucleotide
  Antisense strand to SEQ ID NO: 1518778
aauucacugacucaaugua

SEQ ID NO: 1518780 - RNA, 19 nt, Artificial Sequence
  Description of Artificial Sequence: Synthetic oligonucleotide
  Sense strand starting at position 3654 of SEQ ID NO: 1244864
agguuaaauugaucaacuc

SEQ ID NO: 1518781 - RNA, 19 nt, Artificial Sequence
  Description of Artificial Sequence: Synthetic oligonucleotide
  Antisense strand to SEQ ID NO: 1518780
gaguugaucaauuuaaccu

SEQ ID NO: 1518782 - RNA, 19 nt, Artificial Sequence
  Description of Artificial Sequence: Synthetic oligonucleotide
  Sense strand starting at position 3670 of SEQ ID NO: 1244864
cucuguucuccauagaaag

SEQ ID NO: 1518783 - RNA, 19 nt, Artificial Sequence
  Description of Artificial Sequence: Synthetic oligonucleotide
  Antisense strand to SEQ ID NO: 1518782
cuuucuauggagaacagag

SEQ ID NO: 1518784 - RNA, 19 nt, Artificial Sequence
  Description of Artificial Sequence: Synthetic oligonucleotide
  Sense strand starting at position 3736 of SEQ ID NO: 1244864
uugucucaugauuaucaag

SEQ ID NO: 1518785 - RNA, 19 nt, Artificial Sequence
  Description of Artificial Sequence: Synthetic oligonucleotide
  Antisense strand to SEQ ID NO: 1518784
cuugauaaucaugagacaa

SEQ ID NO: 1518786 - RNA, 19 nt, Artificial Sequence
  Description of Artificial Sequence: Synthetic oligonucleotide
  Sense strand starting at position 3738 of SEQ ID NO: 1244864
gucucaugauuaucaaguc

SEQ ID NO: 1518787 - RNA, 19 nt, Artificial Sequence
  Description of Artificial Sequence: Synthetic oligonucleotide
  Antisense strand to SEQ ID NO: 1518786
gacuugauaaucaugagac

SEQ ID NO: 1518788 - RNA, 19 nt, Artificial Sequence
  Description of Artificial Sequence: Synthetic oligonucleotide
  Sense strand starting at position 3752 of SEQ ID NO: 1244864
aagucuuugccagaauuga

SEQ ID NO: 1518789 - RNA, 19 nt, Artificial Sequence
  Description of Artificial Sequence: Synthetic oligonucleotide
  Antisense strand to SEQ ID NO: 1518788
ucaauucuggcaaagacuu

SEQ ID NO: 1518790 - RNA, 19 nt, Artificial Sequence
  Description of Artificial Sequence: Synthetic oligonucleotide
  Sense strand starting at position 3944 of SEQ ID NO: 1244864
uccuaccugccaugaaaga

SEQ ID NO: 1518791 - RNA, 19 nt, Artificial Sequence
  Description of Artificial Sequence: Synthetic oligonucleotide
  Antisense strand to SEQ ID NO: 1518790
ucuuucauggcagguagga

SEQ ID NO: 1518792 - RNA, 19 nt, Artificial Sequence
  Description of Artificial Sequence: Synthetic oligonucleotide
  Sense strand starting at position 3970 of SEQ ID NO: 1244864
agucaauguuuguuaaaug

SEQ ID NO: 1518793 - RNA, 19 nt, Artificial Sequence
  Description of Artificial Sequence: Synthetic oligonucleotide
  Antisense strand to SEQ ID NO: 1518792
cauuuaacaaacauugacu

SEQ ID NO: 1518794 - RNA, 19 nt, Artificial Sequence
  Description of Artificial Sequence: Synthetic oligonucleotide
  Sense strand starting at position 182 of SEQ ID NO: 1244865
aagagcaauugguuuccua

SEQ ID NO: 1518795 - RNA, 19 nt, Artificial Sequence
  Description of Artificial Sequence: Synthetic oligonucleotide
  Antisense strand to SEQ ID NO: 1518794
uaggaaaccaauugcucuu

SEQ ID NO: 1518796 - RNA, 19 nt, Artificial Sequence
  Description of Artificial Sequence: Synthetic oligonucleotide
  Sense strand starting at position 185 of SEQ ID NO: 1244865
agcaauugguuuccuagaa

SEQ ID NO: 1518797 - RNA, 19 nt, Artificial Sequence
  Description of Artificial Sequence: Synthetic oligonucleotide
  Antisense strand to SEQ ID NO: 1518796
uucuaggaaaccaauugcu

SEQ ID NO: 1518798 - RNA, 19 nt, Artificial Sequence
  Description of Artificial Sequence: Synthetic oligonucleotide
  Sense strand starting at position 186 of SEQ ID NO: 1244865
gcaauugguuuccuagaau

SEQ ID NO: 1518799 - RNA, 19 nt, Artificial Sequence
  Description of Artificial Sequence: Synthetic oligonucleotide
  Antisense strand to SEQ ID NO: 1518798
auucuaggaaaccaauugc

SEQ ID NO: 1518800 - RNA, 19 nt, Artificial Sequence
  Description of Artificial Sequence: Synthetic oligonucleotide
  Sense strand starting at position 189 of SEQ ID NO: 1244865
auugguuuccuagaauauu

SEQ ID NO: 1518801 - RNA, 19 nt, Artificial Sequence
  Description of Artificial Sequence: Synthetic oligonucleotide
  Antisense strand to SEQ ID NO: 1518800
aauauucuaggaaaccaau

SEQ ID NO: 1518802 - RNA, 19 nt, Artificial Sequence
  Description of Artificial Sequence: Synthetic oligonucleotide
  Sense strand starting at position 288 of SEQ ID NO: 1244865
gugccagguacagagaaua

SEQ ID NO: 1518803 - RNA, 19 nt, Artificial Sequence
  Description of Artificial Sequence: Synthetic oligonucleotide
  Antisense strand to SEQ ID NO: 1518802
uauucucuguaccuggcac

SEQ ID NO: 1518804 - RNA, 19 nt, Artificial Sequence
  Description of Artificial Sequence: Synthetic oligonucleotide
  Sense strand starting at position 336 of SEQ ID NO: 1244865
gccugagaucagcagcuua

SEQ ID NO: 1518805 - RNA, 19 nt, Artificial Sequence
  Description of Artificial Sequence: Synthetic oligonucleotide
  Antisense strand to SEQ ID NO: 1518804
uaagcugcugaucucaggc

SEQ ID NO: 1518806 - RNA, 19 nt, Artificial Sequence
  Description of Artificial Sequence: Synthetic oligonucleotide
  Sense strand starting at position 385 of SEQ ID NO: 1244865
ggguuaagaguguguauua

SEQ ID NO: 1518807 - RNA, 19 nt, Artificial Sequence
  Description of Artificial Sequence: Synthetic oligonucleotide
  Antisense strand to SEQ ID NO: 1518806
uaauacacacucuuaaccc

SEQ ID NO: 1518808 - RNA, 19 nt, Artificial Sequence
  Description of Artificial Sequence: Synthetic oligonucleotide
  Sense strand starting at position 386 of SEQ ID NO: 1244865
gguuaagaguguguauuau

SEQ ID NO: 1518809 - RNA, 19 nt, Artificial Sequence
  Description of Artificial Sequence: Synthetic oligonucleotide
  Antisense strand to SEQ ID NO: 1518808
auaauacacacucuuaacc

SEQ ID NO: 1518810 - RNA, 19 nt, Artificial Sequence
  Description of Artificial Sequence: Synthetic oligonucleotide
  Sense strand starting at position 907 of SEQ ID NO: 1244865
gauggagugcaaugucaca

SEQ ID NO: 1518811 - RNA, 19 nt, Artificial Sequence
  Description of Artificial Sequence: Synthetic oligonucleotide
  Antisense strand to SEQ ID NO: 1518810
ugugacauugcacuccauc

SEQ ID NO: 1518812 - RNA, 19 nt, Artificial Sequence
  Description of Artificial Sequence: Synthetic oligonucleotide
  Sense strand starting at position 2082 of SEQ ID NO: 1244865
gcggauuuagauugucacu

SEQ ID NO: 1518813 - RNA, 19 nt, Artificial Sequence
  Description of Artificial Sequence: Synthetic oligonucleotide
  Antisense strand to SEQ ID NO: 1518812
agugacaaucuaaauccgc

SEQ ID NO: 1518814 - RNA, 19 nt, Artificial Sequence
  Description of Artificial Sequence: Synthetic oligonucleotide
  Sense strand starting at position 2428 of SEQ ID NO: 1244865
guguguccgcgacucugaa

SEQ ID NO: 1518815 - RNA, 19 nt, Artificial Sequence
  Description of Artificial Sequence: Synthetic oligonucleotide
  Antisense strand to SEQ ID NO: 1518814
uucagagucgcggacacac

SEQ ID NO: 1518816 - RNA, 19 nt, Artificial Sequence
  Description of Artificial Sequence: Synthetic oligonucleotide
  Sense strand starting at position 2649 of SEQ ID NO: 1244865
caucgcugacccugaugaa

SEQ ID NO: 1518817 - RNA, 19 nt, Artificial Sequence
  Description of Artificial Sequence: Synthetic oligonucleotide
  Antisense strand to SEQ ID NO: 1518816
uucaucagggucagcgaug

SEQ ID NO: 1518818 - RNA, 19 nt, Artificial Sequence
  Description of Artificial Sequence: Synthetic oligonucleotide
  Sense strand starting at position 2650 of SEQ ID NO: 1244865
aucgcugacccugaugaaa

SEQ ID NO: 1518819 - RNA, 19 nt, Artificial Sequence
  Description of Artificial Sequence: Synthetic oligonucleotide
  Antisense strand to SEQ ID NO: 1518818
uuucaucagggucagcgau

SEQ ID NO: 1518820 - RNA, 19 nt, Artificial Sequence
  Description of Artificial Sequence: Synthetic oligonucleotide
  Sense strand starting at position 2661 of SEQ ID NO: 1244865
ugaugaaauuaugugguuu

SEQ ID NO: 1518821 - RNA, 19 nt, Artificial Sequence
  Description of Artificial Sequence: Synthetic oligonucleotide
  Antisense strand to SEQ ID NO: 1518820
aaaccacauaauuucauca

SEQ ID NO: 1518822 - RNA, 19 nt, Artificial Sequence
  Description of Artificial Sequence: Synthetic oligonucleotide
  Sense strand starting at position 2685 of SEQ ID NO: 1244865
guagguaugccuuagaaca

SEQ ID NO: 1518823 - RNA, 19 nt, Artificial Sequence
  Description of Artificial Sequence: Synthetic oligonucleotide
  Antisense strand to SEQ ID NO: 1518822
uguucuaaggcauaccuac

SEQ ID NO: 1518824 - RNA, 19 nt, Artificial Sequence
  Description of Artificial Sequence: Synthetic oligonucleotide
  Sense strand starting at position 2708 of SEQ ID NO: 1244865
aaguguuguuaagccuaaa

SEQ ID NO: 1518825 - RNA, 19 nt, Artificial Sequence
  Description of Artificial Sequence: Synthetic oligonucleotide
  Antisense strand to SEQ ID NO: 1518824
uuuaggcuuaacaacacuu

SEQ ID NO: 1518826 - RNA, 19 nt, Artificial Sequence
  Description of Artificial Sequence: Synthetic oligonucleotide
  Sense strand starting at position 2711 of SEQ ID NO: 1244865
uguuguuaagccuaaacuu

SEQ ID NO: 1518827 - RNA, 19 nt, Artificial Sequence
  Description of Artificial Sequence: Synthetic oligonucleotide
  Antisense strand to SEQ ID NO: 1518826
aaguuuaggcuuaacaaca

SEQ ID NO: 1518828 - RNA, 19 nt, Artificial Sequence
  Description of Artificial Sequence: Synthetic oligonucleotide
  Sense strand starting at position 2762 of SEQ ID NO: 1244865
cgugcuugguguuugaaga

SEQ ID NO: 1518829 - RNA, 19 nt, Artificial Sequence
  Description of Artificial Sequence: Synthetic oligonucleotide
  Antisense strand to SEQ ID NO: 1518828
ucuucaaacaccaagcacg

SEQ ID NO: 1518830 - RNA, 19 nt, Artificial Sequence
  Description of Artificial Sequence: Synthetic oligonucleotide
  Sense strand starting at position 2763 of SEQ ID NO: 1244865
gugcuugguguuugaagau

SEQ ID NO: 1518831 - RNA, 19 nt, Artificial Sequence
  Description of Artificial Sequence: Synthetic oligonucleotide
  Antisense strand to SEQ ID NO: 1518830
aucuucaaacaccaagcac

SEQ ID NO: 1518832 - RNA, 19 nt, Artificial Sequence
  Description of Artificial Sequence: Synthetic oligonucleotide
  Sense strand starting at position 2769 of SEQ ID NO: 1244865
gguguuugaagaugcaaac

SEQ ID NO: 1518833 - RNA, 19 nt, Artificial Sequence
  Description of Artificial Sequence: Synthetic oligonucleotide
  Antisense strand to SEQ ID NO: 1518832
guuugcaucuucaaacacc

SEQ ID NO: 1518834 - RNA, 19 nt, Artificial Sequence
  Description of Artificial Sequence: Synthetic oligonucleotide
  Sense strand starting at position 3012 of SEQ ID NO: 1244865
aggagaauagcgugaacua

SEQ ID NO: 1518835 - RNA, 19 nt, Artificial Sequence
  Description of Artificial Sequence: Synthetic oligonucleotide
  Antisense strand to SEQ ID NO: 1518834
uaguucacgcuauucuccu

SEQ ID NO: 1518836 - RNA, 19 nt, Artificial Sequence
  Description of Artificial Sequence: Synthetic oligonucleotide
  Sense strand starting at position 3013 of SEQ ID NO: 1244865
ggagaauagcgugaacuag

SEQ ID NO: 1518837 - RNA, 19 nt, Artificial Sequence
  Description of Artificial Sequence: Synthetic oligonucleotide
  Antisense strand to SEQ ID NO: 1518836
cuaguucacgcuauucucc

SEQ ID NO: 1518838 - RNA, 19 nt, Artificial Sequence
  Description of Artificial Sequence: Synthetic oligonucleotide
  Sense strand starting at position 3187 of SEQ ID NO: 1244865
gggaugacguguuuguaga

SEQ ID NO: 1518839 - RNA, 19 nt, Artificial Sequence
  Description of Artificial Sequence: Synthetic oligonucleotide
  Antisense strand to SEQ ID NO: 1518838
ucuacaaacacgucauccc

SEQ ID NO: 1518840 - RNA, 19 nt, Artificial Sequence
  Description of Artificial Sequence: Synthetic oligonucleotide
  Sense strand starting at position 3188 of SEQ ID NO: 1244865
ggaugacguguuuguagaa

SEQ ID NO: 1518841 - RNA, 19 nt, Artificial Sequence
  Description of Artificial Sequence: Synthetic oligonucleotide
  Antisense strand to SEQ ID NO: 1518840
uucuacaaacacgucaucc

SEQ ID NO: 1518842 - RNA, 19 nt, Artificial Sequence
  Description of Artificial Sequence: Synthetic oligonucleotide
  Sense strand starting at position 3189 of SEQ ID NO: 1244865
gaugacguguuuguagaau

SEQ ID NO: 1518843 - RNA, 19 nt, Artificial Sequence
  Description of Artificial Sequence: Synthetic oligonucleotide
  Antisense strand to SEQ ID NO: 1518842
auucuacaaacacgucauc

SEQ ID NO: 1518844 - RNA, 19 nt, Artificial Sequence
  Description of Artificial Sequence: Synthetic oligonucleotide
  Sense strand starting at position 3195 of SEQ ID NO: 1244865
guguuuguagaaugcugau

SEQ ID NO: 1518845 - RNA, 19 nt, Artificial Sequence
  Description of Artificial Sequence: Synthetic oligonucleotide
  Antisense strand to SEQ ID NO: 1518844
aucagcauucuacaaacac

SEQ ID NO: 1518846 - RNA, 19 nt, Artificial Sequence
  Description of Artificial Sequence: Synthetic oligonucleotide
  Sense strand starting at position 3201 of SEQ ID NO: 1244865
guagaaugcugauaauaaa

SEQ ID NO: 1518847 - RNA, 19 nt, Artificial Sequence
  Description of Artificial Sequence: Synthetic oligonucleotide
  Antisense strand to SEQ ID NO: 1518846
uuuauuaucagcauucuac

SEQ ID NO: 1518848 - RNA, 19 nt, Artificial Sequence
  Description of Artificial Sequence: Synthetic oligonucleotide
  Sense strand starting at position 3218 of SEQ ID NO: 1244865
aauggaaaugcaggaguuu

SEQ ID NO: 1518849 - RNA, 19 nt, Artificial Sequence
  Description of Artificial Sequence: Synthetic oligonucleotide
  Antisense strand to SEQ ID NO: 1518848
aaacuccugcauuuccauu

SEQ ID NO: 1518850 - RNA, 19 nt, Artificial Sequence
  Description of Artificial Sequence: Synthetic oligonucleotide
  Sense strand starting at position 3238 of SEQ ID NO: 1244865
uguucucaagaguacaguu

SEQ ID NO: 1518851 - RNA, 19 nt, Artificial Sequence
  Description of Artificial Sequence: Synthetic oligonucleotide
  Antisense strand to SEQ ID NO: 1518850
aacuguacucuugagaaca

SEQ ID NO: 1518852 - RNA, 19 nt, Artificial Sequence
  Description of Artificial Sequence: Synthetic oligonucleotide
  Sense strand starting at position 3411 of SEQ ID NO: 1244865
gcaauagcagauuauauua

SEQ ID NO: 1518853 - RNA, 19 nt, Artificial Sequence
  Description of Artificial Sequence: Synthetic oligonucleotide
  Antisense strand to SEQ ID NO: 1518852
uaauauaaucugcuauugc

SEQ ID NO: 1518854 - RNA, 19 nt, Artificial Sequence
  Description of Artificial Sequence: Synthetic oligonucleotide
  Sense strand starting at position 3435 of SEQ ID NO: 1244865
uaguguggaccuggaugaa

SEQ ID NO: 1518855 - RNA, 19 nt, Artificial Sequence
  Description of Artificial Sequence: Synthetic oligonucleotide
  Antisense strand to SEQ ID NO: 1518854
uucauccagguccacacua

SEQ ID NO: 1518856 - RNA, 19 nt, Artificial Sequence
  Description of Artificial Sequence: Synthetic oligonucleotide
  Sense strand starting at position 3450 of SEQ ID NO: 1244865
ugaagaaugaucugugacg

SEQ ID NO: 1518857 - RNA, 19 nt, Artificial Sequence
  Description of Artificial Sequence: Synthetic oligonucleotide
  Antisense strand to SEQ ID NO: 1518856
cgucacagaucauucuuca

SEQ ID NO: 1518858 - RNA, 19 nt, Artificial Sequence
  Description of Artificial Sequence: Synthetic oligonucleotide
  Sense strand starting at position 3461 of SEQ ID NO: 1244865
cugugacgccucugaauga

SEQ ID NO: 1518859 - RNA, 19 nt, Artificial Sequence
  Description of Artificial Sequence: Synthetic oligonucleotide
  Antisense strand to SEQ ID NO: 1518858
ucauucagaggcgucacag

SEQ ID NO: 1518860 - RNA, 19 nt, Artificial Sequence
  Description of Artificial Sequence: Synthetic oligonucleotide
  Sense strand starting at position 3489 of SEQ ID NO: 1244865
cuaagaacccaguaguucu

SEQ ID NO: 1518861 - RNA, 19 nt, Artificial Sequence
  Description of Artificial Sequence: Synthetic oligonucleotide
  Antisense strand to SEQ ID NO: 1518860
agaacuacuggguucuuag

SEQ ID NO: 1518862 - RNA, 19 nt, Artificial Sequence
  Description of Artificial Sequence: Synthetic oligonucleotide
  Sense strand starting at position 3512 of SEQ ID NO: 1244865
ccaugacagugcuugaaug

SEQ ID NO: 1518863 - RNA, 19 nt, Artificial Sequence
  Description of Artificial Sequence: Synthetic oligonucleotide
  Antisense strand to SEQ ID NO: 1518862
cauucaagcacugucaugg

SEQ ID NO: 1518864 - RNA, 19 nt, Artificial Sequence
  Description of Artificial Sequence: Synthetic oligonucleotide
  Sense strand starting at position 3530 of SEQ ID NO: 1244865
gguugucuugugcauauga

SEQ ID NO: 1518865 - RNA, 19 nt, Artificial Sequence
  Description of Artificial Sequence: Synthetic oligonucleotide
  Antisense strand to SEQ ID NO: 1518864
ucauaugcacaagacaacc

SEQ ID NO: 1518866 - RNA, 19 nt, Artificial Sequence
  Description of Artificial Sequence: Synthetic oligonucleotide
  Sense strand starting at position 3532 of SEQ ID NO: 1244865
uugucuugugcauaugaga

SEQ ID NO: 1518867 - RNA, 19 nt, Artificial Sequence
  Description of Artificial Sequence: Synthetic oligonucleotide
  Antisense strand to SEQ ID NO: 1518866
ucucauaugcacaagacaa

SEQ ID NO: 1518868 - RNA, 19 nt, Artificial Sequence
  Description of Artificial Sequence: Synthetic oligonucleotide
  Sense strand starting at position 3572 of SEQ ID NO: 1244865
uugguucuaguguggaaga

SEQ ID NO: 1518869 - RNA, 19 nt, Artificial Sequence
  Description of Artificial Sequence: Synthetic oligonucleotide
  Antisense strand to SEQ ID NO: 1518868
ucuuccacacuagaaccaa

SEQ ID NO: 1518870 - RNA, 19 nt, Artificial Sequence
  Description of Artificial Sequence: Synthetic oligonucleotide
  Sense strand starting at position 3574 of SEQ ID NO: 1244865
gguucuaguguggaagaga

SEQ ID NO: 1518871 - RNA, 19 nt, Artificial Sequence
  Description of Artificial Sequence: Synthetic oligonucleotide
  Antisense strand to SEQ ID NO: 1518870
ucucuuccacacuagaacc

SEQ ID NO: 1518872 - RNA, 19 nt, Artificial Sequence
  Description of Artificial Sequence: Synthetic oligonucleotide
  Sense strand starting at position 3577 of SEQ ID NO: 1244865
ucuaguguggaagagagua

SEQ ID NO: 1518873 - RNA, 19 nt, Artificial Sequence
  Description of Artificial Sequence: Synthetic oligonucleotide
  Antisense strand to SEQ ID NO: 1518872
uacucucuuccacacuaga

SEQ ID NO: 1518874 - RNA, 19 nt, Artificial Sequence
  Description of Artificial Sequence: Synthetic oligonucleotide
  Sense strand starting at position 26 of SEQ ID NO: 1244866
ccuugugaucugcagaaga

SEQ ID NO: 1518875 - RNA, 19 nt, Artificial Sequence
  Description of Artificial Sequence: Synthetic oligonucleotide
  Antisense strand to SEQ ID NO: 1518874
ucuucugcagaucacaagg

SEQ ID NO: 1518876 - RNA, 19 nt, Artificial Sequence
  Description of Artificial Sequence: Synthetic oligonucleotide
  Sense strand starting at position 28 of SEQ ID NO: 1244866
uugugaucugcagaagaua

SEQ ID NO: 1518877 - RNA, 19 nt, Artificial Sequence
  Description of Artificial Sequence: Synthetic oligonucleotide
  Antisense strand to SEQ ID NO: 1518876
uaucuucugcagaucacaa

SEQ ID NO: 1518878 - RNA, 19 nt, Artificial Sequence
  Description of Artificial Sequence: Synthetic oligonucleotide
  Sense strand starting at position 152 of SEQ ID NO: 1244866
cccagauuggaguggaguu

SEQ ID NO: 1518879 - RNA, 19 nt, Artificial Sequence
  Description of Artificial Sequence: Synthetic oligonucleotide
  Antisense strand to SEQ ID NO: 1518878
aacuccacuccaaucuggg

SEQ ID NO: 1518880 - RNA, 19 nt, Artificial Sequence
  Description of Artificial Sequence: Synthetic oligonucleotide
  Sense strand starting at position 153 of SEQ ID NO: 1244866
ccagauuggaguggaguua

SEQ ID NO: 1518881 - RNA, 19 nt, Artificial Sequence
  Description of Artificial Sequence: Synthetic oligonucleotide
  Antisense strand to SEQ ID NO: 1518880
uaacuccacuccaaucugg

SEQ ID NO: 1518882 - RNA, 19 nt, Artificial Sequence
  Description of Artificial Sequence: Synthetic oligonucleotide
  Sense strand starting at position 427 of SEQ ID NO: 1244866
uuccacugucaacgaaaga

SEQ ID NO: 1518883 - RNA, 19 nt, Artificial Sequence
  Description of Artificial Sequence: Synthetic oligonucleotide
  Antisense strand to SEQ ID NO: 1518882
ucuuucguugacaguggaa

SEQ ID NO: 1518884 - RNA, 19 nt, Artificial Sequence
  Description of Artificial Sequence: Synthetic oligonucleotide
  Sense strand starting at position 458 of SEQ ID NO: 1244866
gacugauuccacugaguuu

SEQ ID NO: 1518885 - RNA, 19 nt, Artificial Sequence
  Description of Artificial Sequence: Synthetic oligonucleotide
  Antisense strand to SEQ ID NO: 1518884
aaacucaguggaaucaguc

SEQ ID NO: 1518886 - RNA, 19 nt, Artificial Sequence
  Description of Artificial Sequence: Synthetic oligonucleotide
  Sense strand starting at position 490 of SEQ ID NO: 1244866
gaagacuuauuguugaaug

SEQ ID NO: 1518887 - RNA, 19 nt, Artificial Sequence
  Description of Artificial Sequence: Synthetic oligonucleotide
  Antisense strand to SEQ ID NO: 1518886
cauucaacaauaagucuuc

SEQ ID NO: 1518888 - RNA, 19 nt, Artificial Sequence
  Description of Artificial Sequence: Synthetic oligonucleotide
  Sense strand starting at position 534 of SEQ ID NO: 1244866
ccaagaaucugggugcuuu

SEQ ID NO: 1518889 - RNA, 19 nt, Artificial Sequence
  Description of Artificial Sequence: Synthetic oligonucleotide
  Antisense strand to SEQ ID NO: 1518888
aaagcacccagauucuugg

SEQ ID NO: 1518890 - RNA, 19 nt, Artificial Sequence
  Description of Artificial Sequence: Synthetic oligonucleotide
  Sense strand starting at position 535 of SEQ ID NO: 1244866
caagaaucugggugcuuua

SEQ ID NO: 1518891 - RNA, 19 nt, Artificial Sequence
  Description of Artificial Sequence: Synthetic oligonucleotide
  Antisense strand to SEQ ID NO: 1518890
uaaagcacccagauucuug

SEQ ID NO: 1518892 - RNA, 19 nt, Artificial Sequence
  Description of Artificial Sequence: Synthetic oligonucleotide
  Sense strand starting at position 548 of SEQ ID NO: 1244866
gcuuuauaagcauaagcau

SEQ ID NO: 1518893 - RNA, 19 nt, Artificial Sequence
  Description of Artificial Sequence: Synthetic oligonucleotide
  Antisense strand to SEQ ID NO: 1518892
augcuuaugcuuauaaagc

SEQ ID NO: 1518894 - RNA, 19 nt, Artificial Sequence
  Description of Artificial Sequence: Synthetic oligonucleotide
  Sense strand starting at position 574 of SEQ ID NO: 1244866
cccugaagauaguauuuau

SEQ ID NO: 1518895 - RNA, 19 nt, Artificial Sequence
  Description of Artificial Sequence: Synthetic oligonucleotide
  Antisense strand to SEQ ID NO: 1518894
auaaauacuaucuucaggg

SEQ ID NO: 1518896 - RNA, 19 nt, Artificial Sequence
  Description of Artificial Sequence: Synthetic oligonucleotide
  Sense strand starting at position 663 of SEQ ID NO: 1244866
uggccaguccuacaagacu

SEQ ID NO: 1518897 - RNA, 19 nt, Artificial Sequence
  Description of Artificial Sequence: Synthetic oligonucleotide
  Antisense strand to SEQ ID NO: 1518896
agucuuguaggacuggcca

SEQ ID NO: 1518898 - RNA, 19 nt, Artificial Sequence
  Description of Artificial Sequence: Synthetic oligonucleotide
  Sense strand starting at position 769 of SEQ ID NO: 1244866
aaaggaugcuagguuugaa

SEQ ID NO: 1518899 - RNA, 19 nt, Artificial Sequence
  Description of Artificial Sequence: Synthetic oligonucleotide
  Antisense strand to SEQ ID NO: 1518898
uucaaaccuagcauccuuu

SEQ ID NO: 1518900 - RNA, 19 nt, Artificial Sequence
  Description of Artificial Sequence: Synthetic oligonucleotide
  Sense strand starting at position 772 of SEQ ID NO: 1244866
ggaugcuagguuugaaucu

SEQ ID NO: 1518901 - RNA, 19 nt, Artificial Sequence
  Description of Artificial Sequence: Synthetic oligonucleotide
  Antisense strand to SEQ ID NO: 1518900
agauucaaaccuagcaucc

SEQ ID NO: 1518902 - RNA, 19 nt, Artificial Sequence
  Description of Artificial Sequence: Synthetic oligonucleotide
  Sense strand starting at position 1204 of SEQ ID NO: 1244866
ugcuaaagugcucaacaua

SEQ ID NO: 1518903 - RNA, 19 nt, Artificial Sequence
  Description of Artificial Sequence: Synthetic oligonucleotide
  Antisense strand to SEQ ID NO: 1518902
uauguugagcacuuuagca

SEQ ID NO: 1518904 - RNA, 19 nt, Artificial Sequence
  Description of Artificial Sequence: Synthetic oligonucleotide
  Sense strand starting at position 1274 of SEQ ID NO: 1244866
uuuagaaaguucuucuaag

SEQ ID NO: 1518905 - RNA, 19 nt, Artificial Sequence
  Description of Artificial Sequence: Synthetic oligonucleotide
  Antisense strand to SEQ ID NO: 1518904
cuuagaagaacuuucuaaa

SEQ ID NO: 1518906 - RNA, 19 nt, Artificial Sequence
  Description of Artificial Sequence: Synthetic oligonucleotide
  Sense strand starting at position 1275 of SEQ ID NO: 1244866
uuagaaaguucuucuaagc

SEQ ID NO: 1518907 - RNA, 19 nt, Artificial Sequence
  Description of Artificial Sequence: Synthetic oligonucleotide
  Antisense strand to SEQ ID NO: 1518906
gcuuagaagaacuuucuaa

SEQ ID NO: 1518908 - RNA, 19 nt, Artificial Sequence
  Description of Artificial Sequence: Synthetic oligonucleotide
  Sense strand starting at position 1284 of SEQ ID NO: 1244866
ucuucuaagcugggaagaa

SEQ ID NO: 1518909 - RNA, 19 nt, Artificial Sequence
  Description of Artificial Sequence: Synthetic oligonucleotide
  Antisense strand to SEQ ID NO: 1518908
uucuucccagcuuagaaga

SEQ ID NO: 1518910 - RNA, 19 nt, Artificial Sequence
  Description of Artificial Sequence: Synthetic oligonucleotide
  Sense strand starting at position 1632 of SEQ ID NO: 1244866
cgccaauagguagggaaua

SEQ ID NO: 1518911 - RNA, 19 nt, Artificial Sequence
  Description of Artificial Sequence: Synthetic oligonucleotide
  Antisense strand to SEQ ID NO: 1518910
uauucccuaccuauuggcg

SEQ ID NO: 1518912 - RNA, 19 nt, Artificial Sequence
  Description of Artificial Sequence: Synthetic oligonucleotide
  Sense strand starting at position 1916 of SEQ ID NO: 1244866
ugaagaaauaacggucuca

SEQ ID NO: 1518913 - RNA, 19 nt, Artificial Sequence
  Description of Artificial Sequence: Synthetic oligonucleotide
  Antisense strand to SEQ ID NO: 1518912
ugagaccguuauuucuuca

SEQ ID NO: 1518914 - RNA, 19 nt, Artificial Sequence
  Description of Artificial Sequence: Synthetic oligonucleotide
  Sense strand starting at position 2152 of SEQ ID NO: 1244866
ucuaaugauuguucccuga

SEQ ID NO: 1518915 - RNA, 19 nt, Artificial Sequence
  Description of Artificial Sequence: Synthetic oligonucleotide
  Antisense strand to SEQ ID NO: 1518914
ucagggaacaaucauuaga

SEQ ID NO: 1518916 - RNA, 19 nt, Artificial Sequence
  Description of Artificial Sequence: Synthetic oligonucleotide
  Sense strand starting at position 2225 of SEQ ID NO: 1244866
acucccacucgagaucauu

SEQ ID NO: 1518917 - RNA, 19 nt, Artificial Sequence
  Description of Artificial Sequence: Synthetic oligonucleotide
  Antisense strand to SEQ ID NO: 1518916
aaugaucucgagugggagu

SEQ ID NO: 1518918 - RNA, 19 nt, Artificial Sequence
  Description of Artificial Sequence: Synthetic oligonucleotide
  Sense strand starting at position 2233 of SEQ ID NO: 1244866
ucgagaucauuccuauuaa

SEQ ID NO: 1518919 - RNA, 19 nt, Artificial Sequence
  Description of Artificial Sequence: Synthetic oligonucleotide
  Antisense strand to SEQ ID NO: 1518918
uuaauaggaaugaucucga

SEQ ID NO: 1518920 - RNA, 19 nt, Artificial Sequence
  Description of Artificial Sequence: Synthetic oligonucleotide
  Sense strand starting at position 2292 of SEQ ID NO: 1244866
ggaaauguggcguggagaa

SEQ ID NO: 1518921 - RNA, 19 nt, Artificial Sequence
  Description of Artificial Sequence: Synthetic oligonucleotide
  Antisense strand to SEQ ID NO: 1518920
uucuccacgccacauuucc

SEQ ID NO: 1518922 - RNA, 19 nt, Artificial Sequence
  Description of Artificial Sequence: Synthetic oligonucleotide
  Sense strand starting at position 2412 of SEQ ID NO: 1244866
aacggaauggugcauaagu

SEQ ID NO: 1518923 - RNA, 19 nt, Artificial Sequence
  Description of Artificial Sequence: Synthetic oligonucleotide
  Antisense strand to SEQ ID NO: 1518922
acuuaugcaccauuccguu

SEQ ID NO: 1518924 - RNA, 19 nt, Artificial Sequence
  Description of Artificial Sequence: Synthetic oligonucleotide
  Sense strand starting at position 2885 of SEQ ID NO: 1244866
acuuacaaguugucugaau

SEQ ID NO: 1518925 - RNA, 19 nt, Artificial Sequence
  Description of Artificial Sequence: Synthetic oligonucleotide
  Antisense strand to SEQ ID NO: 1518924
auucagacaacuuguaagu

SEQ ID NO: 1518926 - RNA, 19 nt, Artificial Sequence
  Description of Artificial Sequence: Synthetic oligonucleotide
  Sense strand starting at position 2886 of SEQ ID NO: 1244866
cuuacaaguugucugaaug

SEQ ID NO: 1518927 - RNA, 19 nt, Artificial Sequence
  Description of Artificial Sequence: Synthetic oligonucleotide
  Antisense strand to SEQ ID NO: 1518926
cauucagacaacuuguaag

SEQ ID NO: 1518928 - RNA, 19 nt, Artificial Sequence
  Description of Artificial Sequence: Synthetic oligonucleotide
  Sense strand starting at position 2909 of SEQ ID NO: 1244866
ggagaacuguggucgugaa

SEQ ID NO: 1518929 - RNA, 19 nt, Artificial Sequence
  Description of Artificial Sequence: Synthetic oligonucleotide
  Antisense strand to SEQ ID NO: 1518928
uucacgaccacaguucucc

SEQ ID NO: 1518930 - RNA, 19 nt, Artificial Sequence
  Description of Artificial Sequence: Synthetic oligonucleotide
  Sense strand starting at position 2910 of SEQ ID NO: 1244866
gagaacuguggucgugaaa

SEQ ID NO: 1518931 - RNA, 19 nt, Artificial Sequence
  Description of Artificial Sequence: Synthetic oligonucleotide
  Antisense strand to SEQ ID NO: 1518930
uuucacgaccacaguucuc

SEQ ID NO: 1518932 - RNA, 19 nt, Artificial Sequence
  Description of Artificial Sequence: Synthetic oligonucleotide
  Sense strand starting at position 2971 of SEQ ID NO: 1244866
cuuugaggauugucucauu

SEQ ID NO: 1518933 - RNA, 19 nt, Artificial Sequence
  Description of Artificial Sequence: Synthetic oligonucleotide
  Antisense strand to SEQ ID NO: 1518932
aaugagacaauccucaaag

SEQ ID NO: 1518934 - RNA, 19 nt, Artificial Sequence
  Description of Artificial Sequence: Synthetic oligonucleotide
  Sense strand starting at position 3003 of SEQ ID NO: 1244866
gcuuacguagauuauuaua

SEQ ID NO: 1518935 - RNA, 19 nt, Artificial Sequence
  Description of Artificial Sequence: Synthetic oligonucleotide
  Antisense strand to SEQ ID NO: 1518934
uauaauaaucuacguaagc

SEQ ID NO: 1518936 - RNA, 19 nt, Artificial Sequence
  Description of Artificial Sequence: Synthetic oligonucleotide
  Sense strand starting at position 3103 of SEQ ID NO: 1244866
cagaauugguugucuaauu

SEQ ID NO: 1518937 - RNA, 19 nt, Artificial Sequence
  Description of Artificial Sequence: Synthetic oligonucleotide
  Antisense strand to SEQ ID NO: 1518936
aauuagacaaccaauucug

SEQ ID NO: 1518938 - RNA, 19 nt, Artificial Sequence
  Description of Artificial Sequence: Synthetic oligonucleotide
  Sense strand starting at position 3289 of SEQ ID NO: 1244866
auuccagagcauugcagau

SEQ ID NO: 1518939 - RNA, 19 nt, Artificial Sequence
  Description of Artificial Sequence: Synthetic oligonucleotide
  Antisense strand to SEQ ID NO: 1518938
aucugcaaugcucuggaau

SEQ ID NO: 1518940 - RNA, 19 nt, Artificial Sequence
  Description of Artificial Sequence: Synthetic oligonucleotide
  Sense strand starting at position 3295 of SEQ ID NO: 1244866
gagcauugcagaugggaac

SEQ ID NO: 1518941 - RNA, 19 nt, Artificial Sequence
  Description of Artificial Sequence: Synthetic oligonucleotide
  Antisense strand to SEQ ID NO: 1518940
guucccaucugcaaugcuc

SEQ ID NO: 1518942 - RNA, 19 nt, Artificial Sequence
  Description of Artificial Sequence: Synthetic oligonucleotide
  Sense strand starting at position 3464 of SEQ ID NO: 1244866
ucaauucgccucuaaagaa

SEQ ID NO: 1518943 - RNA, 19 nt, Artificial Sequence
  Description of Artificial Sequence: Synthetic oligonucleotide
  Antisense strand to SEQ ID NO: 1518942
uucuuuagaggcgaauuga

SEQ ID NO: 1518944 - RNA, 19 nt, Artificial Sequence
  Description of Artificial Sequence: Synthetic oligonucleotide
  Sense strand starting at position 3500 of SEQ ID NO: 1244866
gccuuaacuguuuaaguca

SEQ ID NO: 1518945 - RNA, 19 nt, Artificial Sequence
  Description of Artificial Sequence: Synthetic oligonucleotide
  Antisense strand to SEQ ID NO: 1518944
ugacuuaaacaguuaaggc

SEQ ID NO: 1518946 - RNA, 19 nt, Artificial Sequence
  Description of Artificial Sequence: Synthetic oligonucleotide
  Sense strand starting at position 3513 of SEQ ID NO: 1244866
aagucauaccgcgcgcaga

SEQ ID NO: 1518947 - RNA, 19 nt, Artificial Sequence
  Description of Artificial Sequence: Synthetic oligonucleotide
  Antisense strand to SEQ ID NO: 1518946
ucugcgcgcgguaugacuu

SEQ ID NO: 1518948 - RNA, 19 nt, Artificial Sequence
  Description of Artificial Sequence: Synthetic oligonucleotide
  Sense strand starting at position 3636 of SEQ ID NO: 1244866
uacuuuagauggucuugau

SEQ ID NO: 1518949 - RNA, 19 nt, Artificial Sequence
  Description of Artificial Sequence: Synthetic oligonucleotide
  Antisense strand to SEQ ID NO: 1518948
aucaagaccaucuaaagua

SEQ ID NO: 1518950 - RNA, 19 nt, Artificial Sequence
  Description of Artificial Sequence: Synthetic oligonucleotide
  Sense strand starting at position 3640 of SEQ ID NO: 1244866
uuagauggucuugauauuc

SEQ ID NO: 1518951 - RNA, 19 nt, Artificial Sequence
  Description of Artificial Sequence: Synthetic oligonucleotide
  Antisense strand to SEQ ID NO: 1518950
gaauaucaagaccaucuaa

SEQ ID NO: 1518952 - RNA, 19 nt, Artificial Sequence
  Description of Artificial Sequence: Synthetic oligonucleotide
  Sense strand starting at position 3645 of SEQ ID NO: 1244866
uggucuugauauucuacca

SEQ ID NO: 1518953 - RNA, 19 nt, Artificial Sequence
  Description of Artificial Sequence: Synthetic oligonucleotide
  Antisense strand to SEQ ID NO: 1518952
ugguagaauaucaagacca

SEQ ID NO: 1518954 - RNA, 19 nt, Artificial Sequence
  Description of Artificial Sequence: Synthetic oligonucleotide
  Sense strand starting at position 1784 of SEQ ID NO: 1244867
agggaaauuugagggaacu

SEQ ID NO: 1518955 - RNA, 19 nt, Artificial Sequence
  Description of Artificial Sequence: Synthetic oligonucleotide
  Antisense strand to SEQ ID NO: 1518954
aguucccucaaauuucccu

SEQ ID NO: 1518956 - RNA, 19 nt, Artificial Sequence
  Description of Artificial Sequence: Synthetic oligonucleotide
  Sense strand starting at position 2064 of SEQ ID NO: 1244867
gcauaucucccaugagccu

SEQ ID NO: 1518957 - RNA, 19 nt, Artificial Sequence
  Description of Artificial Sequence: Synthetic oligonucleotide
  Antisense strand to SEQ ID NO: 1518956
aggcucaugggagauaugc

SEQ ID NO: 1518958 - RNA, 19 nt, Artificial Sequence
  Description of Artificial Sequence: Synthetic oligonucleotide
  Sense strand starting at position 2078 of SEQ ID NO: 1244867
agccucaguuuccaggaaa

SEQ ID NO: 1518959 - RNA, 19 nt, Artificial Sequence
  Description of Artificial Sequence: Synthetic oligonucleotide
  Antisense strand to SEQ ID NO: 1518958
uuuccuggaaacugaggcu

SEQ ID NO: 1518960 - RNA, 19 nt, Artificial Sequence
  Description of Artificial Sequence: Synthetic oligonucleotide
  Sense strand starting at position 2085 of SEQ ID NO: 1244867
guuuccaggaaaugaaagu

SEQ ID NO: 1518961 - RNA, 19 nt, Artificial Sequence
  Description of Artificial Sequence: Synthetic oligonucleotide
  Antisense strand to SEQ ID NO: 1518960
acuuucauuuccuggaaac

SEQ ID NO: 1518962 - RNA, 19 nt, Artificial Sequence
  Description of Artificial Sequence: Synthetic oligonucleotide
  Sense strand starting at position 2094 of SEQ ID NO: 1244867
aaaugaaagugcugaguca

SEQ ID NO: 1518963 - RNA, 19 nt, Artificial Sequence
  Description of Artificial Sequence: Synthetic oligonucleotide
  Antisense strand to SEQ ID NO: 1518962
ugacucagcacuuucauuu

SEQ ID NO: 1518964 - RNA, 19 nt, Artificial Sequence
  Description of Artificial Sequence: Synthetic oligonucleotide
  Sense strand starting at position 2283 of SEQ ID NO: 1244867
gguccugccgcguuuguaa

SEQ ID NO: 1518965 - RNA, 19 nt, Artificial Sequence
  Description of Artificial Sequence: Synthetic oligonucleotide
  Antisense strand to SEQ ID NO: 1518964
uuacaaacgcggcaggacc

SEQ ID NO: 1518966 - RNA, 19 nt, Artificial Sequence
  Description of Artificial Sequence: Synthetic oligonucleotide
  Sense strand starting at position 2303 of SEQ ID NO: 1244867
acgugaucccugcuuugcu

SEQ ID NO: 1518967 - RNA, 19 nt, Artificial Sequence
  Description of Artificial Sequence: Synthetic oligonucleotide
  Antisense strand to SEQ ID NO: 1518966
agcaaagcagggaucacgu

SEQ ID NO: 1518968 - RNA, 19 nt, Artificial Sequence
  Description of Artificial Sequence: Synthetic oligonucleotide
  Sense strand starting at position 2316 of SEQ ID NO: 1244867
uuugcugucucugucuuaa

SEQ ID NO: 1518969 - RNA, 19 nt, Artificial Sequence
  Description of Artificial Sequence: Synthetic oligonucleotide
  Antisense strand to SEQ ID NO: 1518968
uuaagacagagacagcaaa

SEQ ID NO: 1518970 - RNA, 19 nt, Artificial Sequence
  Description of Artificial Sequence: Synthetic oligonucleotide
  Sense strand starting at position 2318 of SEQ ID NO: 1244867
ugcugucucugucuuaaag

SEQ ID NO: 1518971 - RNA, 19 nt, Artificial Sequence
  Description of Artificial Sequence: Synthetic oligonucleotide
  Antisense strand to SEQ ID NO: 1518970
cuuuaagacagagacagca

SEQ ID NO: 1518972 - RNA, 19 nt, Artificial Sequence
  Description of Artificial Sequence: Synthetic oligonucleotide
  Sense strand starting at position 2320 of SEQ ID NO: 1244867
cugucucugucuuaaaguu

SEQ ID NO: 1518973 - RNA, 19 nt, Artificial Sequence
  Description of Artificial Sequence: Synthetic oligonucleotide
  Antisense strand to SEQ ID NO: 1518972
aacuuuaagacagagacag

SEQ ID NO: 1518974 - RNA, 19 nt, Artificial Sequence
  Description of Artificial Sequence: Synthetic oligonucleotide
  Sense strand starting at position 2328 of SEQ ID NO: 1244867
gucuuaaaguucucugaau

SEQ ID NO: 1518975 - RNA, 19 nt, Artificial Sequence
  Description of Artificial Sequence: Synthetic oligonucleotide
  Antisense strand to SEQ ID NO: 1518974
auucagagaacuuuaagac

SEQ ID NO: 1518976 - RNA, 19 nt, Artificial Sequence
  Description of Artificial Sequence: Synthetic oligonucleotide
  Sense strand starting at position 2425 of SEQ ID NO: 1244867
acaagacgcuuauaaauua

SEQ ID NO: 1518977 - RNA, 19 nt, Artificial Sequence
  Description of Artificial Sequence: Synthetic oligonucleotide
  Antisense strand to SEQ ID NO: 1518976
uaauuuauaagcgucuugu

SEQ ID NO: 1518978 - RNA, 19 nt, Artificial Sequence
  Description of Artificial Sequence: Synthetic oligonucleotide
  Sense strand starting at position 2583 of SEQ ID NO: 1244867
uuuguuacacguuguuauu

SEQ ID NO: 1518979 - RNA, 19 nt, Artificial Sequence
  Description of Artificial Sequence: Synthetic oligonucleotide
  Antisense strand to SEQ ID NO: 1518978
aauaacaacguguaacaaa

SEQ ID NO: 1518980 - RNA, 19 nt, Artificial Sequence
  Description of Artificial Sequence: Synthetic oligonucleotide
  Sense strand starting at position 2585 of SEQ ID NO: 1244867
uguuacacguuguuauuau

SEQ ID NO: 1518981 - RNA, 19 nt, Artificial Sequence
  Description of Artificial Sequence: Synthetic oligonucleotide
  Antisense strand to SEQ ID NO: 1518980
auaauaacaacguguaaca

SEQ ID NO: 1518982 - RNA, 19 nt, Artificial Sequence
  Description of Artificial Sequence: Synthetic oligonucleotide
  Sense strand starting at position 3371 of SEQ ID NO: 1244867
ggugucuguagacauaagu

SEQ ID NO: 1518983 - RNA, 19 nt, Artificial Sequence
  Description of Artificial Sequence: Synthetic oligonucleotide
  Antisense strand to SEQ ID NO: 1518982
acuuaugucuacagacacc

SEQ ID NO: 1518984 - RNA, 19 nt, Artificial Sequence
  Description of Artificial Sequence: Synthetic oligonucleotide
  Sense strand starting at position 3404 of SEQ ID NO: 1244867
gguaaacucuaaggaguga

SEQ ID NO: 1518985 - RNA, 19 nt, Artificial Sequence
  Description of Artificial Sequence: Synthetic oligonucleotide
  Antisense strand to SEQ ID NO: 1518984
ucacuccuuagaguuuacc

SEQ ID NO: 1518986 - RNA, 19 nt, Artificial Sequence
  Description of Artificial Sequence: Synthetic oligonucleotide
  Sense strand starting at position 3419 of SEQ ID NO: 1244867
gugagauugcuggaugcug

SEQ ID NO: 1518987 - RNA, 19 nt, Artificial Sequence
  Description of Artificial Sequence: Synthetic oligonucleotide
  Antisense strand to SEQ ID NO: 1518986
cagcauccagcaaucucac

SEQ ID NO: 1518988 - RNA, 19 nt, Artificial Sequence
  Description of Artificial Sequence: Synthetic oligonucleotide
  Sense strand starting at position 3427 of SEQ ID NO: 1244867
gcuggaugcuguggucaga

SEQ ID NO: 1518989 - RNA, 19 nt, Artificial Sequence
  Description of Artificial Sequence: Synthetic oligonucleotide
  Antisense strand to SEQ ID NO: 1518988
ucugaccacagcauccagc

SEQ ID NO: 1518990 - RNA, 19 nt, Artificial Sequence
  Description of Artificial Sequence: Synthetic oligonucleotide
  Sense strand starting at position 3440 of SEQ ID NO: 1244867
gucagaguguguuuaguuu

SEQ ID NO: 1518991 - RNA, 19 nt, Artificial Sequence
  Description of Artificial Sequence: Synthetic oligonucleotide
  Antisense strand to SEQ ID NO: 1518990
aaacuaaacacacucugac

SEQ ID NO: 1518992 - RNA, 19 nt, Artificial Sequence
  Description of Artificial Sequence: Synthetic oligonucleotide
  Sense strand starting at position 3460 of SEQ ID NO: 1244867
guaagaaagugacaaauug

SEQ ID NO: 1518993 - RNA, 19 nt, Artificial Sequence
  Description of Artificial Sequence: Synthetic oligonucleotide
  Antisense strand to SEQ ID NO: 1518992
caauuugucacuuucuuac

SEQ ID NO: 1518994 - RNA, 19 nt, Artificial Sequence
  Description of Artificial Sequence: Synthetic oligonucleotide
  Sense strand starting at position 3467 of SEQ ID NO: 1244867
agugacaaauugucucaca

SEQ ID NO: 1518995 - RNA, 19 nt, Artificial Sequence
  Description of Artificial Sequence: Synthetic oligonucleotide
  Antisense strand to SEQ ID NO: 1518994
ugugagacaauuugucacu

SEQ ID NO: 1518996 - RNA, 19 nt, Artificial Sequence
  Description of Artificial Sequence: Synthetic oligonucleotide
  Sense strand starting at position 3468 of SEQ ID NO: 1244867
gugacaaauugucucacac

SEQ ID NO: 1518997 - RNA, 19 nt, Artificial Sequence
  Description of Artificial Sequence: Synthetic oligonucleotide
  Antisense strand to SEQ ID NO: 1518996
gugugagacaauuugucac

SEQ ID NO: 1518998 - RNA, 19 nt, Artificial Sequence
  Description of Artificial Sequence: Synthetic oligonucleotide
  Sense strand starting at position 3615 of SEQ ID NO: 1244867
cagguuagggcucagauca

SEQ ID NO: 1518999 - RNA, 19 nt, Artificial Sequence
  Description of Artificial Sequence: Synthetic oligonucleotide
  Antisense strand to SEQ ID NO: 1518998
ugaucugagcccuaaccug

SEQ ID NO: 1519000 - RNA, 19 nt, Artificial Sequence
  Description of Artificial Sequence: Synthetic oligonucleotide
  Sense strand starting at position 3660 of SEQ ID NO: 1244867
ucgucccaguccugggaua

SEQ ID NO: 1519001 - RNA, 19 nt, Artificial Sequence
  Description of Artificial Sequence: Synthetic oligonucleotide
  Antisense strand to SEQ ID NO: 1519000
uaucccaggacugggacga

SEQ ID NO: 1519002 - RNA, 19 nt, Artificial Sequence
  Description of Artificial Sequence: Synthetic oligonucleotide
  Sense strand starting at position 3734 of SEQ ID NO: 1244867
ugagcucauucccuaaaga

SEQ ID NO: 1519003 - RNA, 19 nt, Artificial Sequence
  Description of Artificial Sequence: Synthetic oligonucleotide
  Antisense strand to SEQ ID NO: 1519002
ucuuuagggaaugagcuca

SEQ ID NO: 1519004 - RNA, 19 nt, Artificial Sequence
  Description of Artificial Sequence: Synthetic oligonucleotide
  Sense strand starting at position 3791 of SEQ ID NO: 1244867
agaggaaaguagugguuga

SEQ ID NO: 1519005 - RNA, 19 nt, Artificial Sequence
  Description of Artificial Sequence: Synthetic oligonucleotide
  Antisense strand to SEQ ID NO: 1519004
ucaaccacuacuuuccucu

SEQ ID NO: 1519006 - RNA, 19 nt, Artificial Sequence
  Description of Artificial Sequence: Synthetic oligonucleotide
  Sense strand starting at position 3795 of SEQ ID NO: 1244867
gaaaguagugguugaggga

SEQ ID NO: 1519007 - RNA, 19 nt, Artificial Sequence
  Description of Artificial Sequence: Synthetic oligonucleotide
  Antisense strand to SEQ ID NO: 1519006
ucccucaaccacuacuuuc

SEQ ID NO: 1519008 - RNA, 19 nt, Artificial Sequence
  Description of Artificial Sequence: Synthetic oligonucleotide
  Sense strand starting at position 3817 of SEQ ID NO: 1244867
cacagagaagccuguuuau

SEQ ID NO: 1519009 - RNA, 19 nt, Artificial Sequence
  Description of Artificial Sequence: Synthetic oligonucleotide
  Antisense strand to SEQ ID NO: 1519008
auaaacaggcuucucugug

SEQ ID NO: 1519010 - RNA, 19 nt, Artificial Sequence
  Description of Artificial Sequence: Synthetic oligonucleotide
  Sense strand starting at position 55 of SEQ ID NO: 1244868
ccugcuucuucuccagaag

SEQ ID NO: 1519011 - RNA, 19 nt, Artificial Sequence
  Description of Artificial Sequence: Synthetic oligonucleotide
  Antisense strand to SEQ ID NO: 1519010
cuucuggagaagaagcagg

SEQ ID NO: 1519012 - RNA, 19 nt, Artificial Sequence
  Description of Artificial Sequence: Synthetic oligonucleotide
  Sense strand starting at position 58 of SEQ ID NO: 1244868
gcuucuucuccagaagcau

SEQ ID NO: 1519013 - RNA, 19 nt, Artificial Sequence
  Description of Artificial Sequence: Synthetic oligonucleotide
  Antisense strand to SEQ ID NO: 1519012
augcuucuggagaagaagc

SEQ ID NO: 1519014 - RNA, 19 nt, Artificial Sequence
  Description of Artificial Sequence: Synthetic oligonucleotide
  Sense strand starting at position 97 of SEQ ID NO: 1244868
ugaacauuauguuugguau

SEQ ID NO: 1519015 - RNA, 19 nt, Artificial Sequence
  Description of Artificial Sequence: Synthetic oligonucleotide
  Antisense strand to SEQ ID NO: 1519014
auaccaaacauaauguuca

SEQ ID NO: 1519016 - RNA, 19 nt, Artificial Sequence
  Description of Artificial Sequence: Synthetic oligonucleotide
  Sense strand starting at position 98 of SEQ ID NO: 1244868
gaacauuauguuugguaua

SEQ ID NO: 1519017 - RNA, 19 nt, Artificial Sequence
  Description of Artificial Sequence: Synthetic oligonucleotide
  Antisense strand to SEQ ID NO: 1519016
uauaccaaacauaauguuc

SEQ ID NO: 1519018 - RNA, 19 nt, Artificial Sequence
  Description of Artificial Sequence: Synthetic oligonucleotide
  Sense strand starting at position 100 of SEQ ID NO: 1244868
acauuauguuugguauaug

SEQ ID NO: 1519019 - RNA, 19 nt, Artificial Sequence
  Description of Artificial Sequence: Synthetic oligonucleotide
  Antisense strand to SEQ ID NO: 1519018
cauauaccaaacauaaugu

SEQ ID NO: 1519020 - RNA, 19 nt, Artificial Sequence
  Description of Artificial Sequence: Synthetic oligonucleotide
  Sense strand starting at position 128 of SEQ ID NO: 1244868
aucuucucucacgaugaca

SEQ ID NO: 1519021 - RNA, 19 nt, Artificial Sequence
  Description of Artificial Sequence: Synthetic oligonucleotide
  Antisense strand to SEQ ID NO: 1519020
ugucaucgugagagaagau

SEQ ID NO: 1519022 - RNA, 19 nt, Artificial Sequence
  Description of Artificial Sequence: Synthetic oligonucleotide
  Sense strand starting at position 130 of SEQ ID NO: 1244868
cuucucucacgaugacaua

SEQ ID NO: 1519023 - RNA, 19 nt, Artificial Sequence
  Description of Artificial Sequence: Synthetic oligonucleotide
  Antisense strand to SEQ ID NO: 1519022
uaugucaucgugagagaag

SEQ ID NO: 1519024 - RNA, 19 nt, Artificial Sequence
  Description of Artificial Sequence: Synthetic oligonucleotide
  Sense strand starting at position 518 of SEQ ID NO: 1244868
uuguuuaugggcuagguaa

SEQ ID NO: 1519025 - RNA, 19 nt, Artificial Sequence
  Description of Artificial Sequence: Synthetic oligonucleotide
  Antisense strand to SEQ ID NO: 1519024
uuaccuagcccauaaacaa

SEQ ID NO: 1519026 - RNA, 19 nt, Artificial Sequence
  Description of Artificial Sequence: Synthetic oligonucleotide
  Sense strand starting at position 520 of SEQ ID NO: 1244868
guuuaugggcuagguaaga

SEQ ID NO: 1519027 - RNA, 19 nt, Artificial Sequence
  Description of Artificial Sequence: Synthetic oligonucleotide
  Antisense strand to SEQ ID NO: 1519026
ucuuaccuagcccauaaac

SEQ ID NO: 1519028 - RNA, 19 nt, Artificial Sequence
  Description of Artificial Sequence: Synthetic oligonucleotide
  Sense strand starting at position 743 of SEQ ID NO: 1244868
uccucugaauccucugaga

SEQ ID NO: 1519029 - RNA, 19 nt, Artificial Sequence
  Description of Artificial Sequence: Synthetic oligonucleotide
  Antisense strand to SEQ ID NO: 1519028
ucucagaggauucagagga

SEQ ID NO: 1519030 - RNA, 19 nt, Artificial Sequence
  Description of Artificial Sequence: Synthetic oligonucleotide
  Sense strand starting at position 745 of SEQ ID NO: 1244868
cucugaauccucugagaau

SEQ ID NO: 1519031 - RNA, 19 nt, Artificial Sequence
  Description of Artificial Sequence: Synthetic oligonucleotide
  Antisense strand to SEQ ID NO: 1519030
auucucagaggauucagag

SEQ ID NO: 1519032 - RNA, 19 nt, Artificial Sequence
  Description of Artificial Sequence: Synthetic oligonucleotide
  Sense strand starting at position 1015 of SEQ ID NO: 1244868
cauaacaaccgaugguuua

SEQ ID NO: 1519033 - RNA, 19 nt, Artificial Sequence
  Description of Artificial Sequence: Synthetic oligonucleotide
  Antisense strand to SEQ ID NO: 1519032
uaaaccaucgguuguuaug

SEQ ID NO: 1519034 - RNA, 19 nt, Artificial Sequence
  Description of Artificial Sequence: Synthetic oligonucleotide
  Sense strand starting at position 1016 of SEQ ID NO: 1244868
auaacaaccgaugguuuaa

SEQ ID NO: 1519035 - RNA, 19 nt, Artificial Sequence
  Description of Artificial Sequence: Synthetic oligonucleotide
  Antisense strand to SEQ ID NO: 1519034
uuaaaccaucgguuguuau

SEQ ID NO: 1519036 - RNA, 19 nt, Artificial Sequence
  Description of Artificial Sequence: Synthetic oligonucleotide
  Sense strand starting at position 1027 of SEQ ID NO: 1244868
ugguuuaaguaacuaucaa

SEQ ID NO: 1519037 - RNA, 19 nt, Artificial Sequence
  Description of Artificial Sequence: Synthetic oligonucleotide
  Antisense strand to SEQ ID NO: 1519036
uugauaguuacuuaaacca

SEQ ID NO: 1519038 - RNA, 19 nt, Artificial Sequence
  Description of Artificial Sequence: Synthetic oligonucleotide
  Sense strand starting at position 1395 of SEQ ID NO: 1244868
gcauacaaccucugacaga

SEQ ID NO: 1519039 - RNA, 19 nt, Artificial Sequence
  Description of Artificial Sequence: Synthetic oligonucleotide
  Antisense strand to SEQ ID NO: 1519038
ucugucagagguuguaugc

SEQ ID NO: 1519040 - RNA, 19 nt, Artificial Sequence
  Description of Artificial Sequence: Synthetic oligonucleotide
  Sense strand starting at position 1404 of SEQ ID NO: 1244868
cucugacagauucgaguaa

SEQ ID NO: 1519041 - RNA, 19 nt, Artificial Sequence
  Description of Artificial Sequence: Synthetic oligonucleotide
  Antisense strand to SEQ ID NO: 1519040
uuacucgaaucugucagag

SEQ ID NO: 1519042 - RNA, 19 nt, Artificial Sequence
  Description of Artificial Sequence: Synthetic oligonucleotide
  Sense strand starting at position 1832 of SEQ ID NO: 1244868
ugagacugcucacccaaga

SEQ ID NO: 1519043 - RNA, 19 nt, Artificial Sequence
  Description of Artificial Sequence: Synthetic oligonucleotide
  Antisense strand to SEQ ID NO: 1519042
ucuugggugagcagucuca

SEQ ID NO: 1519044 - RNA, 19 nt, Artificial Sequence
  Description of Artificial Sequence: Synthetic oligonucleotide
  Sense strand starting at position 2398 of SEQ ID NO: 1244868
ggccaucagacguaucuau

SEQ ID NO: 1519045 - RNA, 19 nt, Artificial Sequence
  Description of Artificial Sequence: Synthetic oligonucleotide
  Antisense strand to SEQ ID NO: 1519044
auagauacgucugauggcc

SEQ ID NO: 1519046 - RNA, 19 nt, Artificial Sequence
  Description of Artificial Sequence: Synthetic oligonucleotide
  Sense strand starting at position 2829 of SEQ ID NO: 1244868
guucuuagagcuuagaacu

SEQ ID NO: 1519047 - RNA, 19 nt, Artificial Sequence
  Description of Artificial Sequence: Synthetic oligonucleotide
  Antisense strand to SEQ ID NO: 1519046
aguucuaagcucuaagaac

SEQ ID NO: 1519048 - RNA, 19 nt, Artificial Sequence
  Description of Artificial Sequence: Synthetic oligonucleotide
  Sense strand starting at position 2902 of SEQ ID NO: 1244868
uaaagugacuucucgaggu

SEQ ID NO: 1519049 - RNA, 19 nt, Artificial Sequence
  Description of Artificial Sequence: Synthetic oligonucleotide
  Antisense strand to SEQ ID NO: 1519048
accucgagaagucacuuua

SEQ ID NO: 1519050 - RNA, 19 nt, Artificial Sequence
  Description of Artificial Sequence: Synthetic oligonucleotide
  Sense strand starting at position 2904 of SEQ ID NO: 1244868
aagugacuucucgagguaa

SEQ ID NO: 1519051 - RNA, 19 nt, Artificial Sequence
  Description of Artificial Sequence: Synthetic oligonucleotide
  Antisense strand to SEQ ID NO: 1519050
uuaccucgagaagucacuu

SEQ ID NO: 1519052 - RNA, 19 nt, Artificial Sequence
  Description of Artificial Sequence: Synthetic oligonucleotide
  Sense strand starting at position 2906 of SEQ ID NO: 1244868
gugacuucucgagguaaau

SEQ ID NO: 1519053 - RNA, 19 nt, Artificial Sequence
  Description of Artificial Sequence: Synthetic oligonucleotide
  Antisense strand to SEQ ID NO: 1519052
auuuaccucgagaagucac

SEQ ID NO: 1519054 - RNA, 19 nt, Artificial Sequence
  Description of Artificial Sequence: Synthetic oligonucleotide
  Sense strand starting at position 2915 of SEQ ID NO: 1244868
cgagguaaauucucacuua

SEQ ID NO: 1519055 - RNA, 19 nt, Artificial Sequence
  Description of Artificial Sequence: Synthetic oligonucleotide
  Antisense strand to SEQ ID NO: 1519054
uaagugagaauuuaccucg

SEQ ID NO: 1519056 - RNA, 19 nt, Artificial Sequence
  Description of Artificial Sequence: Synthetic oligonucleotide
  Sense strand starting at position 2918 of SEQ ID NO: 1244868
gguaaauucucacuuagaa

SEQ ID NO: 1519057 - RNA, 19 nt, Artificial Sequence
  Description of Artificial Sequence: Synthetic oligonucleotide
  Antisense strand to SEQ ID NO: 1519056
uucuaagugagaauuuacc

SEQ ID NO: 1519058 - RNA, 19 nt, Artificial Sequence
  Description of Artificial Sequence: Synthetic oligonucleotide
  Sense strand starting at position 2965 of SEQ ID NO: 1244868
gugcauuuaucuucugcga

SEQ ID NO: 1519059 - RNA, 19 nt, Artificial Sequence
  Description of Artificial Sequence: Synthetic oligonucleotide
  Antisense strand to SEQ ID NO: 1519058
ucgcagaagauaaaugcac

SEQ ID NO: 1519060 - RNA, 19 nt, Artificial Sequence
  Description of Artificial Sequence: Synthetic oligonucleotide
  Sense strand starting at position 2969 of SEQ ID NO: 1244868
auuuaucuucugcgaaccu

SEQ ID NO: 1519061 - RNA, 19 nt, Artificial Sequence
  Description of Artificial Sequence: Synthetic oligonucleotide
  Antisense strand to SEQ ID NO: 1519060
agguucgcagaagauaaau

SEQ ID NO: 1519062 - RNA, 19 nt, Artificial Sequence
  Description of Artificial Sequence: Synthetic oligonucleotide
  Sense strand starting at position 3123 of SEQ ID NO: 1244868
gugggucccaaaugucaga

SEQ ID NO: 1519063 - RNA, 19 nt, Artificial Sequence
  Description of Artificial Sequence: Synthetic oligonucleotide
  Antisense strand to SEQ ID NO: 1519062
ucugacauuugggacccac

SEQ ID NO: 1519064 - RNA, 19 nt, Artificial Sequence
  Description of Artificial Sequence: Synthetic oligonucleotide
  Sense strand starting at position 3174 of SEQ ID NO: 1244868
acaugaagaucucuaaguc

SEQ ID NO: 1519065 - RNA, 19 nt, Artificial Sequence
  Description of Artificial Sequence: Synthetic oligonucleotide
  Antisense strand to SEQ ID NO: 1519064
gacuuagagaucuucaugu

SEQ ID NO: 1519066 - RNA, 19 nt, Artificial Sequence
  Description of Artificial Sequence: Synthetic oligonucleotide
  Sense strand starting at position 3301 of SEQ ID NO: 1244868
agucuaucauagucaugaa

SEQ ID NO: 1519067 - RNA, 19 nt, Artificial Sequence
  Description of Artificial Sequence: Synthetic oligonucleotide
  Antisense strand to SEQ ID NO: 1519066
uucaugacuaugauagacu

SEQ ID NO: 1519068 - RNA, 19 nt, Artificial Sequence
  Description of Artificial Sequence: Synthetic oligonucleotide
  Sense strand starting at position 3370 of SEQ ID NO: 1244868
uuaguaauaugguugggag

SEQ ID NO: 1519069 - RNA, 19 nt, Artificial Sequence
  Description of Artificial Sequence: Synthetic oligonucleotide
  Antisense strand to SEQ ID NO: 1519068
cucccaaccauauuacuaa

SEQ ID NO: 1519070 - RNA, 19 nt, Artificial Sequence
  Description of Artificial Sequence: Synthetic oligonucleotide
  Sense strand starting at position 3371 of SEQ ID NO: 1244868
uaguaauaugguugggaga

SEQ ID NO: 1519071 - RNA, 19 nt, Artificial Sequence
  Description of Artificial Sequence: Synthetic oligonucleotide
  Antisense strand to SEQ ID NO: 1519070
ucucccaaccauauuacua

SEQ ID NO: 1519072 - RNA, 19 nt, Artificial Sequence
  Description of Artificial Sequence: Synthetic oligonucleotide
  Sense strand starting at position 3382 of SEQ ID NO: 1244868
uugggagacuugcuaguaa

SEQ ID NO: 1519073 - RNA, 19 nt, Artificial Sequence
  Description of Artificial Sequence: Synthetic oligonucleotide
  Antisense strand to SEQ ID NO: 1519072
uuacuagcaagucucccaa

SEQ ID NO: 1519074 - RNA, 19 nt, Artificial Sequence
  Description of Artificial Sequence: Synthetic oligonucleotide
  Sense strand starting at position 3446 of SEQ ID NO: 1244868
ccaagaacugaguguagaa

SEQ ID NO: 1519075 - RNA, 19 nt, Artificial Sequence
  Description of Artificial Sequence: Synthetic oligonucleotide
  Antisense strand to SEQ ID NO: 1519074
uucuacacucaguucuugg

SEQ ID NO: 1519076 - RNA, 19 nt, Artificial Sequence
  Description of Artificial Sequence: Synthetic oligonucleotide
  Sense strand starting at position 3558 of SEQ ID NO: 1244868
uucucugacccgugagaca

SEQ ID NO: 1519077 - RNA, 19 nt, Artificial Sequence
  Description of Artificial Sequence: Synthetic oligonucleotide
  Antisense strand to SEQ ID NO: 1519076
ugucucacgggucagagaa

SEQ ID NO: 1519078 - RNA, 19 nt, Artificial Sequence
  Description of Artificial Sequence: Synthetic oligonucleotide
  Sense strand starting at position 3577 of SEQ ID NO: 1244868
gugcauaaauaucuuaaug

SEQ ID NO: 1519079 - RNA, 19 nt, Artificial Sequence
  Description of Artificial Sequence: Synthetic oligonucleotide
  Antisense strand to SEQ ID NO: 1519078
cauuaagauauuuaugcac

SEQ ID NO: 1519080 - RNA, 19 nt, Artificial Sequence
  Description of Artificial Sequence: Synthetic oligonucleotide
  Sense strand starting at position 3638 of SEQ ID NO: 1244868
agaagaaugcccugcuacu

SEQ ID NO: 1519081 - RNA, 19 nt, Artificial Sequence
  Description of Artificial Sequence: Synthetic oligonucleotide
  Antisense strand to SEQ ID NO: 1519080
aguagcagggcauucuucu

SEQ ID NO: 1519082 - RNA, 19 nt, Artificial Sequence
  Description of Artificial Sequence: Synthetic oligonucleotide
  Sense strand starting at position 3748 of SEQ ID NO: 1244868
agaagucauuguccucaga

SEQ ID NO: 1519083 - RNA, 19 nt, Artificial Sequence
  Description of Artificial Sequence: Synthetic oligonucleotide
  Antisense strand to SEQ ID NO: 1519082
ucugaggacaaugacuucu

SEQ ID NO: 1519084 - RNA, 19 nt, Artificial Sequence
  Description of Artificial Sequence: Synthetic oligonucleotide
  Sense strand starting at position 3751 of SEQ ID NO: 1244868
agucauuguccucagacuu

SEQ ID NO: 1519085 - RNA, 19 nt, Artificial Sequence
  Description of Artificial Sequence: Synthetic oligonucleotide
  Antisense strand to SEQ ID NO: 1519084
aagucugaggacaaugacu

SEQ ID NO: 1519086 - RNA, 19 nt, Artificial Sequence
  Description of Artificial Sequence: Synthetic oligonucleotide
  Sense strand starting at position 3847 of SEQ ID NO: 1244868
acacaauaacccuguuugu

SEQ ID NO: 1519087 - RNA, 19 nt, Artificial Sequence
  Description of Artificial Sequence: Synthetic oligonucleotide
  Antisense strand to SEQ ID NO: 1519086
acaaacaggguuauugugu

SEQ ID NO: 1519088 - RNA, 19 nt, Artificial Sequence
  Description of Artificial Sequence: Synthetic oligonucleotide
  Sense strand starting at position 3953 of SEQ ID NO: 1244868
aggcauuacugccugggau

SEQ ID NO: 1519089 - RNA, 19 nt, Artificial Sequence
  Description of Artificial Sequence: Synthetic oligonucleotide
  Antisense strand to SEQ ID NO: 1519088
aucccaggcaguaaugccu

SEQ ID NO: 1519090 - RNA, 19 nt, Artificial Sequence
  Description of Artificial Sequence: Synthetic oligonucleotide
  Sense strand starting at position 493 of SEQ ID NO: 1244869
ccuggucaagacugaauau

SEQ ID NO: 1519091 - RNA, 19 nt, Artificial Sequence
  Description of Artificial Sequence: Synthetic oligonucleotide
  Antisense strand to SEQ ID NO: 1519090
auauucagucuugaccagg

SEQ ID NO: 1519092 - RNA, 19 nt, Artificial Sequence
  Description of Artificial Sequence: Synthetic oligonucleotide
  Sense strand starting at position 654 of SEQ ID NO: 1244869
cuucuuuaucaaggauagu

SEQ ID NO: 1519093 - RNA, 19 nt, Artificial Sequence
  Description of Artificial Sequence: Synthetic oligonucleotide
  Antisense strand to SEQ ID NO: 1519092
acuauccuugauaaagaag

SEQ ID NO: 1519094 - RNA, 19 nt, Artificial Sequence
  Description of Artificial Sequence: Synthetic oligonucleotide
  Sense strand starting at position 1109 of SEQ ID NO: 1244869
agcuucucaaugugaggaa

SEQ ID NO: 1519095 - RNA, 19 nt, Artificial Sequence
  Description of Artificial Sequence: Synthetic oligonucleotide
  Antisense strand to SEQ ID NO: 1519094
uuccucacauugagaagcu

SEQ ID NO: 1519096 - RNA, 19 nt, Artificial Sequence
  Description of Artificial Sequence: Synthetic oligonucleotide
  Sense strand starting at position 1113 of SEQ ID NO: 1244869
ucucaaugugaggaacgua

SEQ ID NO: 1519097 - RNA, 19 nt, Artificial Sequence
  Description of Artificial Sequence: Synthetic oligonucleotide
  Antisense strand to SEQ ID NO: 1519096
uacguuccucacauugaga

SEQ ID NO: 1519098 - RNA, 19 nt, Artificial Sequence
  Description of Artificial Sequence: Synthetic oligonucleotide
  Sense strand starting at position 1252 of SEQ ID NO: 1244869
ggcaguaaauuugcuaagu

SEQ ID NO: 1519099 - RNA, 19 nt, Artificial Sequence
  Description of Artificial Sequence: Synthetic oligonucleotide
  Antisense strand to SEQ ID NO: 1519098
acuuagcaaauuuacugcc

SEQ ID NO: 1519100 - RNA, 19 nt, Artificial Sequence
  Description of Artificial Sequence: Synthetic oligonucleotide
  Sense strand starting at position 1457 of SEQ ID NO: 1244869
augagaaggcaugguggaa

SEQ ID NO: 1519101 - RNA, 19 nt, Artificial Sequence
  Description of Artificial Sequence: Synthetic oligonucleotide
  Antisense strand to SEQ ID NO: 1519100
uuccaccaugccuucucau

SEQ ID NO: 1519102 - RNA, 19 nt, Artificial Sequence
  Description of Artificial Sequence: Synthetic oligonucleotide
  Sense strand starting at position 1591 of SEQ ID NO: 1244869
gcaagaaacccagagccau

SEQ ID NO: 1519103 - RNA, 19 nt, Artificial Sequence
  Description of Artificial Sequence: Synthetic oligonucleotide
  Antisense strand to SEQ ID NO: 1519102
auggcucuggguuucuugc

SEQ ID NO: 1519104 - RNA, 19 nt, Artificial Sequence
  Description of Artificial Sequence: Synthetic oligonucleotide
  Sense strand starting at position 1681 of SEQ ID NO: 1244869
ccucaugguucccugagga

SEQ ID NO: 1519105 - RNA, 19 nt, Artificial Sequence
  Description of Artificial Sequence: Synthetic oligonucleotide
  Antisense strand to SEQ ID NO: 1519104
uccucagggaaccaugagg

SEQ ID NO: 1519106 - RNA, 19 nt, Artificial Sequence
  Description of Artificial Sequence: Synthetic oligonucleotide
  Sense strand starting at position 1979 of SEQ ID NO: 1244869
gagggaagcuuccuccauu

SEQ ID NO: 1519107 - RNA, 19 nt, Artificial Sequence
  Description of Artificial Sequence: Synthetic oligonucleotide
  Antisense strand to SEQ ID NO: 1519106
aauggaggaagcuucccuc

SEQ ID NO: 1519108 - RNA, 19 nt, Artificial Sequence
  Description of Artificial Sequence: Synthetic oligonucleotide
  Sense strand starting at position 2013 of SEQ ID NO: 1244869
uccagaaggcucuaaauuc

SEQ ID NO: 1519109 - RNA, 19 nt, Artificial Sequence
  Description of Artificial Sequence: Synthetic oligonucleotide
  Antisense strand to SEQ ID NO: 1519108
gaauuuagagccuucugga

SEQ ID NO: 1519110 - RNA, 19 nt, Artificial Sequence
  Description of Artificial Sequence: Synthetic oligonucleotide
  Sense strand starting at position 2042 of SEQ ID NO: 1244869
ugacucaauuuccauggaa

SEQ ID NO: 1519111 - RNA, 19 nt, Artificial Sequence
  Description of Artificial Sequence: Synthetic oligonucleotide
  Antisense strand to SEQ ID NO: 1519110
uuccauggaaauugaguca

SEQ ID NO: 1519112 - RNA, 19 nt, Artificial Sequence
  Description of Artificial Sequence: Synthetic oligonucleotide
  Sense strand starting at position 2100 of SEQ ID NO: 1244869
agagaaauucuuggcaacu

SEQ ID NO: 1519113 - RNA, 19 nt, Artificial Sequence
  Description of Artificial Sequence: Synthetic oligonucleotide
  Antisense strand to SEQ ID NO: 1519112
aguugccaagaauuucucu

SEQ ID NO: 1519114 - RNA, 19 nt, Artificial Sequence
  Description of Artificial Sequence: Synthetic oligonucleotide
  Sense strand starting at position 2101 of SEQ ID NO: 1244869
gagaaauucuuggcaacug

SEQ ID NO: 1519115 - RNA, 19 nt, Artificial Sequence
  Description of Artificial Sequence: Synthetic oligonucleotide
  Antisense strand to SEQ ID NO: 1519114
caguugccaagaauuucuc

SEQ ID NO: 1519116 - RNA, 19 nt, Artificial Sequence
  Description of Artificial Sequence: Synthetic oligonucleotide
  Sense strand starting at position 2146 of SEQ ID NO: 1244869
ugcacaucagcugacuaau

SEQ ID NO: 1519117 - RNA, 19 nt, Artificial Sequence
  Description of Artificial Sequence: Synthetic oligonucleotide
  Antisense strand to SEQ ID NO: 1519116
auuagucagcugaugugca

SEQ ID NO: 1519118 - RNA, 19 nt, Artificial Sequence
  Description of Artificial Sequence: Synthetic oligonucleotide
  Sense strand starting at position 2158 of SEQ ID NO: 1244869
gacuaaugugccuaaggca

SEQ ID NO: 1519119 - RNA, 19 nt, Artificial Sequence
  Description of Artificial Sequence: Synthetic oligonucleotide
  Antisense strand to SEQ ID NO: 1519118
ugccuuaggcacauuaguc

SEQ ID NO: 1519120 - RNA, 19 nt, Artificial Sequence
  Description of Artificial Sequence: Synthetic oligonucleotide
  Sense strand starting at position 2238 of SEQ ID NO: 1244869
cuagacuuuccagacuugu

SEQ ID NO: 1519121 - RNA, 19 nt, Artificial Sequence
  Description of Artificial Sequence: Synthetic oligonucleotide
  Antisense strand to SEQ ID NO: 1519120
acaagucuggaaagucuag

SEQ ID NO: 1519122 - RNA, 19 nt, Artificial Sequence
  Description of Artificial Sequence: Synthetic oligonucleotide
  Sense strand starting at position 2275 of SEQ ID NO: 1244869
agaaacaucccuuaugugu

SEQ ID NO: 1519123 - RNA, 19 nt, Artificial Sequence
  Description of Artificial Sequence: Synthetic oligonucleotide
  Antisense strand to SEQ ID NO: 1519122
acacauaagggauguuucu

SEQ ID NO: 1519124 - RNA, 19 nt, Artificial Sequence
  Description of Artificial Sequence: Synthetic oligonucleotide
  Sense strand starting at position 2297 of SEQ ID NO: 1244869
ggccauuagguggagaguu

SEQ ID NO: 1519125 - RNA, 19 nt, Artificial Sequence
  Description of Artificial Sequence: Synthetic oligonucleotide
  Antisense strand to SEQ ID NO: 1519124
aacucuccaccuaauggcc

SEQ ID NO: 1519126 - RNA, 19 nt, Artificial Sequence
  Description of Artificial Sequence: Synthetic oligonucleotide
  Sense strand starting at position 2313 of SEQ ID NO: 1244869
guuuccaaccuaugagaau

SEQ ID NO: 1519127 - RNA, 19 nt, Artificial Sequence
  Description of Artificial Sequence: Synthetic oligonucleotide
  Antisense strand to SEQ ID NO: 1519126
auucucauagguuggaaac

SEQ ID NO: 1519128 - RNA, 19 nt, Artificial Sequence
  Description of Artificial Sequence: Synthetic oligonucleotide
  Sense strand starting at position 2324 of SEQ ID NO: 1244869
augagaaugagcugcagau

SEQ ID NO: 1519129 - RNA, 19 nt, Artificial Sequence
  Description of Artificial Sequence: Synthetic oligonucleotide
  Antisense strand to SEQ ID NO: 1519128
aucugcagcucauucucau

SEQ ID NO: 1519130 - RNA, 19 nt, Artificial Sequence
  Description of Artificial Sequence: Synthetic oligonucleotide
  Sense strand starting at position 2520 of SEQ ID NO: 1244869
guucuuacucuguacaaac

SEQ ID NO: 1519131 - RNA, 19 nt, Artificial Sequence
  Description of Artificial Sequence: Synthetic oligonucleotide
  Antisense strand to SEQ ID NO: 1519130
guuuguacagaguaagaac

SEQ ID NO: 1519132 - RNA, 19 nt, Artificial Sequence
  Description of Artificial Sequence: Synthetic oligonucleotide
  Sense strand starting at position 2716 of SEQ ID NO: 1244869
accacucugcucuaggaaa

SEQ ID NO: 1519133 - RNA, 19 nt, Artificial Sequence
  Description of Artificial Sequence: Synthetic oligonucleotide
  Antisense strand to SEQ ID NO: 1519132
uuuccuagagcagaguggu

SEQ ID NO: 1519134 - RNA, 19 nt, Artificial Sequence
  Description of Artificial Sequence: Synthetic oligonucleotide
  Sense strand starting at position 2866 of SEQ ID NO: 1244869
gguggaaggugguuagauu

SEQ ID NO: 1519135 - RNA, 19 nt, Artificial Sequence
  Description of Artificial Sequence: Synthetic oligonucleotide
  Antisense strand to SEQ ID NO: 1519134
aaucuaaccaccuuccacc

SEQ ID NO: 1519136 - RNA, 19 nt, Artificial Sequence
  Description of Artificial Sequence: Synthetic oligonucleotide
  Sense strand starting at position 2877 of SEQ ID NO: 1244869
guuagauucugaagggagg

SEQ ID NO: 1519137 - RNA, 19 nt, Artificial Sequence
  Description of Artificial Sequence: Synthetic oligonucleotide
  Antisense strand to SEQ ID NO: 1519136
ccucccuucagaaucuaac

SEQ ID NO: 1519138 - RNA, 19 nt, Artificial Sequence
  Description of Artificial Sequence: Synthetic oligonucleotide
  Sense strand starting at position 3206 of SEQ ID NO: 1244869
cauguuauccgggaucaga

SEQ ID NO: 1519139 - RNA, 19 nt, Artificial Sequence
  Description of Artificial Sequence: Synthetic oligonucleotide
  Antisense strand to SEQ ID NO: 1519138
ucugaucccggauaacaug

SEQ ID NO: 1519140 - RNA, 19 nt, Artificial Sequence
  Description of Artificial Sequence: Synthetic oligonucleotide
  Sense strand starting at position 3299 of SEQ ID NO: 1244869
agcugugaccauuaagaau

SEQ ID NO: 1519141 - RNA, 19 nt, Artificial Sequence
  Description of Artificial Sequence: Synthetic oligonucleotide
  Antisense strand to SEQ ID NO: 1519140
auucuuaauggucacagcu

SEQ ID NO: 1519142 - RNA, 19 nt, Artificial Sequence
  Description of Artificial Sequence: Synthetic oligonucleotide
  Sense strand starting at position 3377 of SEQ ID NO: 1244869
ggcagaauuuaggaugaug

SEQ ID NO: 1519143 - RNA, 19 nt, Artificial Sequence
  Description of Artificial Sequence: Synthetic oligonucleotide
  Antisense strand to SEQ ID NO: 1519142
caucauccuaaauucugcc

SEQ ID NO: 1519144 - RNA, 19 nt, Artificial Sequence
  Description of Artificial Sequence: Synthetic oligonucleotide
  Sense strand starting at position 3395 of SEQ ID NO: 1244869
guacaucaccuagguaaau

SEQ ID NO: 1519145 - RNA, 19 nt, Artificial Sequence
  Description of Artificial Sequence: Synthetic oligonucleotide
  Antisense strand to SEQ ID NO: 1519144
auuuaccuaggugauguac

SEQ ID NO: 1519146 - RNA, 19 nt, Artificial Sequence
  Description of Artificial Sequence: Synthetic oligonucleotide
  Sense strand starting at position 3436 of SEQ ID NO: 1244869
gcuuauagagacuaaguau

SEQ ID NO: 1519147 - RNA, 19 nt, Artificial Sequence
  Description of Artificial Sequence: Synthetic oligonucleotide
  Antisense strand to SEQ ID NO: 1519146
auacuuagucucuauaagc

SEQ ID NO: 1519148 - RNA, 19 nt, Artificial Sequence
  Description of Artificial Sequence: Synthetic oligonucleotide
  Sense strand starting at position 3472 of SEQ ID NO: 1244869
uggugaaagaguuauuggu

SEQ ID NO: 1519149 - RNA, 19 nt, Artificial Sequence
  Description of Artificial Sequence: Synthetic oligonucleotide
  Antisense strand to SEQ ID NO: 1519148
accaauaacucuuucacca

SEQ ID NO: 1519150 - RNA, 19 nt, Artificial Sequence
  Description of Artificial Sequence: Synthetic oligonucleotide
  Sense strand starting at position 3530 of SEQ ID NO: 1244869
uuaaaugagagcuguggau

SEQ ID NO: 1519151 - RNA, 19 nt, Artificial Sequence
  Description of Artificial Sequence: Synthetic oligonucleotide
  Antisense strand to SEQ ID NO: 1519150
auccacagcucucauuuaa

SEQ ID NO: 1519152 - RNA, 19 nt, Artificial Sequence
  Description of Artificial Sequence: Synthetic oligonucleotide
  Sense strand starting at position 3532 of SEQ ID NO: 1244869
aaaugagagcuguggauaa

SEQ ID NO: 1519153 - RNA, 19 nt, Artificial Sequence
  Description of Artificial Sequence: Synthetic oligonucleotide
  Antisense strand to SEQ ID NO: 1519152
uuauccacagcucucauuu

SEQ ID NO: 1519154 - RNA, 19 nt, Artificial Sequence
  Description of Artificial Sequence: Synthetic oligonucleotide
  Sense strand starting at position 3544 of SEQ ID NO: 1244869
uggauaagaucuguaguuu

SEQ ID NO: 1519155 - RNA, 19 nt, Artificial Sequence
  Description of Artificial Sequence: Synthetic oligonucleotide
  Antisense strand to SEQ ID NO: 1519154
aaacuacagaucuuaucca

SEQ ID NO: 1519156 - RNA, 19 nt, Artificial Sequence
  Description of Artificial Sequence: Synthetic oligonucleotide
  Sense strand starting at position 3545 of SEQ ID NO: 1244869
ggauaagaucuguaguuuc

SEQ ID NO: 1519157 - RNA, 19 nt, Artificial Sequence
  Description of Artificial Sequence: Synthetic oligonucleotide
  Antisense strand to SEQ ID NO: 1519156
gaaacuacagaucuuaucc

SEQ ID NO: 1519158 - RNA, 19 nt, Artificial Sequence
  Description of Artificial Sequence: Synthetic oligonucleotide
  Sense strand starting at position 3625 of SEQ ID NO: 1244869
auuguuuaccaguaaacug

SEQ ID NO: 1519159 - RNA, 19 nt, Artificial Sequence
  Description of Artificial Sequence: Synthetic oligonucleotide
  Antisense strand to SEQ ID NO: 1519158
caguuuacugguaaacaau

SEQ ID NO: 1519160 - RNA, 19 nt, Artificial Sequence
  Description of Artificial Sequence: Synthetic oligonucleotide
  Sense strand starting at position 3653 of SEQ ID NO: 1244869
guguauuauucuuccauuu

SEQ ID NO: 1519161 - RNA, 19 nt, Artificial Sequence
  Description of Artificial Sequence: Synthetic oligonucleotide
  Antisense strand to SEQ ID NO: 1519160
aaauggaagaauaauacac

SEQ ID NO: 1519162 - RNA, 19 nt, Artificial Sequence
  Description of Artificial Sequence: Synthetic oligonucleotide
  Sense strand starting at position 3758 of SEQ ID NO: 1244869
ugauaauaagcauagcuga

SEQ ID NO: 1519163 - RNA, 19 nt, Artificial Sequence
  Description of Artificial Sequence: Synthetic oligonucleotide
  Antisense strand to SEQ ID NO: 1519162
ucagcuaugcuuauuauca

SEQ ID NO: 1519164 - RNA, 19 nt, Artificial Sequence
  Description of Artificial Sequence: Synthetic oligonucleotide
  Sense strand starting at position 3902 of SEQ ID NO: 1244869
agaccaauccugugucaga

SEQ ID NO: 1519165 - RNA, 19 nt, Artificial Sequence
  Description of Artificial Sequence: Synthetic oligonucleotide
  Antisense strand to SEQ ID NO: 1519164
ucugacacaggauuggucu

SEQ ID NO: 1519166 - RNA, 19 nt, Artificial Sequence
  Description of Artificial Sequence: Synthetic oligonucleotide
  Sense strand starting at position 3903 of SEQ ID NO: 1244869
gaccaauccugugucagaa

SEQ ID NO: 1519167 - RNA, 19 nt, Artificial Sequence
  Description of Artificial Sequence: Synthetic oligonucleotide
  Antisense strand to SEQ ID NO: 1519166
uucugacacaggauugguc

SEQ ID NO: 1519168 - RNA, 19 nt, Artificial Sequence
  Description of Artificial Sequence: Synthetic oligonucleotide
  Sense strand starting at position 3925 of SEQ ID NO: 1244869
ccuauuaugucauccacag

SEQ ID NO: 1519169 - RNA, 19 nt, Artificial Sequence
  Description of Artificial Sequence: Synthetic oligonucleotide
  Antisense strand to SEQ ID NO: 1519168
cuguggaugacauaauagg

SEQ ID NO: 1519170 - RNA, 19 nt, Artificial Sequence
  Description of Artificial Sequence: Synthetic oligonucleotide
  Sense strand starting at position 91 of SEQ ID NO: 1244870
uuaagugauucucccaggu

SEQ ID NO: 1519171 - RNA, 19 nt, Artificial Sequence
  Description of Artificial Sequence: Synthetic oligonucleotide
  Antisense strand to SEQ ID NO: 1519170
accugggagaaucacuuaa

SEQ ID NO: 1519172 - RNA, 19 nt, Artificial Sequence
  Description of Artificial Sequence: Synthetic oligonucleotide
  Sense strand starting at position 136 of SEQ ID NO: 1244870
ugguaucucaagcgauaga

SEQ ID NO: 1519173 - RNA, 19 nt, Artificial Sequence
  Description of Artificial Sequence: Synthetic oligonucleotide
  Antisense strand to SEQ ID NO: 1519172
ucuaucgcuugagauacca

SEQ ID NO: 1519174 - RNA, 19 nt, Artificial Sequence
  Description of Artificial Sequence: Synthetic oligonucleotide
  Sense strand starting at position 224 of SEQ ID NO: 1244870
auuuaauauucuugggagc

SEQ ID NO: 1519175 - RNA, 19 nt, Artificial Sequence
  Description of Artificial Sequence: Synthetic oligonucleotide
  Antisense strand to SEQ ID NO: 1519174
gcucccaagaauauuaaau

SEQ ID NO: 1519176 - RNA, 19 nt, Artificial Sequence
  Description of Artificial Sequence: Synthetic oligonucleotide
  Sense strand starting at position 225 of SEQ ID NO: 1244870
uuuaauauucuugggagca

SEQ ID NO: 1519177 - RNA, 19 nt, Artificial Sequence
  Description of Artificial Sequence: Synthetic oligonucleotide
  Antisense strand to SEQ ID NO: 1519176
ugcucccaagaauauuaaa

SEQ ID NO: 1519178 - RNA, 19 nt, Artificial Sequence
  Description of Artificial Sequence: Synthetic oligonucleotide
  Sense strand starting at position 266 of SEQ ID NO: 1244870
cucagagcuccacaguaaa

SEQ ID NO: 1519179 - RNA, 19 nt, Artificial Sequence
  Description of Artificial Sequence: Synthetic oligonucleotide
  Antisense strand to SEQ ID NO: 1519178
uuuacuguggagcucugag

SEQ ID NO: 1519180 - RNA, 19 nt, Artificial Sequence
  Description of Artificial Sequence: Synthetic oligonucleotide
  Sense strand starting at position 300 of SEQ ID NO: 1244870
cuuguugcuaaguugugua

SEQ ID NO: 1519181 - RNA, 19 nt, Artificial Sequence
  Description of Artificial Sequence: Synthetic oligonucleotide
  Antisense strand to SEQ ID NO: 1519180
uacacaacuuagcaacaag

SEQ ID NO: 1519182 - RNA, 19 nt, Artificial Sequence
  Description of Artificial Sequence: Synthetic oligonucleotide
  Sense strand starting at position 304 of SEQ ID NO: 1244870
uugcuaaguuguguauaca

SEQ ID NO: 1519183 - RNA, 19 nt, Artificial Sequence
  Description of Artificial Sequence: Synthetic oligonucleotide
  Antisense strand to SEQ ID NO: 1519182
uguauacacaacuuagcaa

SEQ ID NO: 1519184 - RNA, 19 nt, Artificial Sequence
  Description of Artificial Sequence: Synthetic oligonucleotide
  Sense strand starting at position 305 of SEQ ID NO: 1244870
ugcuaaguuguguauacau

SEQ ID NO: 1519185 - RNA, 19 nt, Artificial Sequence
  Description of Artificial Sequence: Synthetic oligonucleotide
  Antisense strand to SEQ ID NO: 1519184
auguauacacaacuuagca

SEQ ID NO: 1519186 - RNA, 19 nt, Artificial Sequence
  Description of Artificial Sequence: Synthetic oligonucleotide
  Sense strand starting at position 307 of SEQ ID NO: 1244870
cuaaguuguguauacaugu

SEQ ID NO: 1519187 - RNA, 19 nt, Artificial Sequence
  Description of Artificial Sequence: Synthetic oligonucleotide
  Antisense strand to SEQ ID NO: 1519186
acauguauacacaacuuag

SEQ ID NO: 1519188 - RNA, 19 nt, Artificial Sequence
  Description of Artificial Sequence: Synthetic oligonucleotide
  Sense strand starting at position 318 of SEQ ID NO: 1244870
auacauguguuggugugua

SEQ ID NO: 1519189 - RNA, 19 nt, Artificial Sequence
  Description of Artificial Sequence: Synthetic oligonucleotide
  Antisense strand to SEQ ID NO: 1519188
uacacaccaacacauguau

SEQ ID NO: 1519190 - RNA, 19 nt, Artificial Sequence
  Description of Artificial Sequence: Synthetic oligonucleotide
  Sense strand starting at position 331 of SEQ ID NO: 1244870
uguguaacuguguuugcau

SEQ ID NO: 1519191 - RNA, 19 nt, Artificial Sequence
  Description of Artificial Sequence: Synthetic oligonucleotide
  Antisense strand to SEQ ID NO: 1519190
augcaaacacaguuacaca

SEQ ID NO: 1519192 - RNA, 19 nt, Artificial Sequence
  Description of Artificial Sequence: Synthetic oligonucleotide
  Sense strand starting at position 339 of SEQ ID NO: 1244870
uguguuugcaucugacuga

SEQ ID NO: 1519193 - RNA, 19 nt, Artificial Sequence
  Description of Artificial Sequence: Synthetic oligonucleotide
  Antisense strand to SEQ ID NO: 1519192
ucagucagaugcaaacaca

SEQ ID NO: 1519194 - RNA, 19 nt, Artificial Sequence
  Description of Artificial Sequence: Synthetic oligonucleotide
  Sense strand starting at position 343 of SEQ ID NO: 1244870
uuugcaucugacugaguga

SEQ ID NO: 1519195 - RNA, 19 nt, Artificial Sequence
  Description of Artificial Sequence: Synthetic oligonucleotide
  Antisense strand to SEQ ID NO: 1519194
ucacucagucagaugcaaa

SEQ ID NO: 1519196 - RNA, 19 nt, Artificial Sequence
  Description of Artificial Sequence: Synthetic oligonucleotide
  Sense strand starting at position 379 of SEQ ID NO: 1244870
agcaaugaugucuguguga

SEQ ID NO: 1519197 - RNA, 19 nt, Artificial Sequence
  Description of Artificial Sequence: Synthetic oligonucleotide
  Antisense strand to SEQ ID NO: 1519196
ucacacagacaucauugcu

SEQ ID NO: 1519198 - RNA, 19 nt, Artificial Sequence
  Description of Artificial Sequence: Synthetic oligonucleotide
  Sense strand starting at position 381 of SEQ ID NO: 1244870
caaugaugucugugugacu

SEQ ID NO: 1519199 - RNA, 19 nt, Artificial Sequence
  Description of Artificial Sequence: Synthetic oligonucleotide
  Antisense strand to SEQ ID NO: 1519198
agucacacagacaucauug

SEQ ID NO: 1519200 - RNA, 19 nt, Artificial Sequence
  Description of Artificial Sequence: Synthetic oligonucleotide
  Sense strand starting at position 602 of SEQ ID NO: 1244870
cuuggucucccauggguau

SEQ ID NO: 1519201 - RNA, 19 nt, Artificial Sequence
  Description of Artificial Sequence: Synthetic oligonucleotide
  Antisense strand to SEQ ID NO: 1519200
auacccaugggagaccaag

SEQ ID NO: 1519202 - RNA, 19 nt, Artificial Sequence
  Description of Artificial Sequence: Synthetic oligonucleotide
  Sense strand starting at position 603 of SEQ ID NO: 1244870
uuggucucccauggguaua

SEQ ID NO: 1519203 - RNA, 19 nt, Artificial Sequence
  Description of Artificial Sequence: Synthetic oligonucleotide
  Antisense strand to SEQ ID NO: 1519202
uauacccaugggagaccaa

SEQ ID NO: 1519204 - RNA, 19 nt, Artificial Sequence
  Description of Artificial Sequence: Synthetic oligonucleotide
  Sense strand starting at position 604 of SEQ ID NO: 1244870
uggucucccauggguauau

SEQ ID NO: 1519205 - RNA, 19 nt, Artificial Sequence
  Description of Artificial Sequence: Synthetic oligonucleotide
  Antisense strand to SEQ ID NO: 1519204
auauacccaugggagacca

SEQ ID NO: 1519206 - RNA, 19 nt, Artificial Sequence
  Description of Artificial Sequence: Synthetic oligonucleotide
  Sense strand starting at position 740 of SEQ ID NO: 1244870
gcugucuguguggacauau

SEQ ID NO: 1519207 - RNA, 19 nt, Artificial Sequence
  Description of Artificial Sequence: Synthetic oligonucleotide
  Antisense strand to SEQ ID NO: 1519206
auauguccacacagacagc

SEQ ID NO: 1519208 - RNA, 19 nt, Artificial Sequence
  Description of Artificial Sequence: Synthetic oligonucleotide
  Sense strand starting at position 750 of SEQ ID NO: 1244870
uggacauaucucugugucu

SEQ ID NO: 1519209 - RNA, 19 nt, Artificial Sequence
  Description of Artificial Sequence: Synthetic oligonucleotide
  Antisense strand to SEQ ID NO: 1519208
agacacagagauaugucca

SEQ ID NO: 1519210 - RNA, 19 nt, Artificial Sequence
  Description of Artificial Sequence: Synthetic oligonucleotide
  Sense strand starting at position 1658 of SEQ ID NO: 1244870
cgcggcuuugcauaaucaa

SEQ ID NO: 1519211 - RNA, 19 nt, Artificial Sequence
  Description of Artificial Sequence: Synthetic oligonucleotide
  Antisense strand to SEQ ID NO: 1519210
uugauuaugcaaagccgcg

SEQ ID NO: 1519212 - RNA, 19 nt, Artificial Sequence
  Description of Artificial Sequence: Synthetic oligonucleotide
  Sense strand starting at position 1677 of SEQ ID NO: 1244870
ucgcaaggcauuugcauau

SEQ ID NO: 1519213 - RNA, 19 nt, Artificial Sequence
  Description of Artificial Sequence: Synthetic oligonucleotide
  Antisense strand to SEQ ID NO: 1519212
auaugcaaaugccuugcga

SEQ ID NO: 1519214 - RNA, 19 nt, Artificial Sequence
  Description of Artificial Sequence: Synthetic oligonucleotide
  Sense strand starting at position 2140 of SEQ ID NO: 1244870
uggguacuuggugacauau

SEQ ID NO: 1519215 - RNA, 19 nt, Artificial Sequence
  Description of Artificial Sequence: Synthetic oligonucleotide
  Antisense strand to SEQ ID NO: 1519214
auaugucaccaaguaccca

SEQ ID NO: 1519216 - RNA, 19 nt, Artificial Sequence
  Description of Artificial Sequence: Synthetic oligonucleotide
  Sense strand starting at position 2142 of SEQ ID NO: 1244870
gguacuuggugacauauuu

SEQ ID NO: 1519217 - RNA, 19 nt, Artificial Sequence
  Description of Artificial Sequence: Synthetic oligonucleotide
  Antisense strand to SEQ ID NO: 1519216
aaauaugucaccaaguacc

SEQ ID NO: 1519218 - RNA, 19 nt, Artificial Sequence
  Description of Artificial Sequence: Synthetic oligonucleotide
  Sense strand starting at position 2187 of SEQ ID NO: 1244870
cuuugcuugccgggagaau

SEQ ID NO: 1519219 - RNA, 19 nt, Artificial Sequence
  Description of Artificial Sequence: Synthetic oligonucleotide
  Antisense strand to SEQ ID NO: 1519218
auucucccggcaagcaaag

SEQ ID NO: 1519220 - RNA, 19 nt, Artificial Sequence
  Description of Artificial Sequence: Synthetic oligonucleotide
  Sense strand starting at position 2188 of SEQ ID NO: 1244870
uuugcuugccgggagaauu

SEQ ID NO: 1519221 - RNA, 19 nt, Artificial Sequence
  Description of Artificial Sequence: Synthetic oligonucleotide
  Antisense strand to SEQ ID NO: 1519220
aauucucccggcaagcaaa

SEQ ID NO: 1519222 - RNA, 19 nt, Artificial Sequence
  Description of Artificial Sequence: Synthetic oligonucleotide
  Sense strand starting at position 2308 of SEQ ID NO: 1244870
agguguaguuuguuuggga

SEQ ID NO: 1519223 - RNA, 19 nt, Artificial Sequence
  Description of Artificial Sequence: Synthetic oligonucleotide
  Antisense strand to SEQ ID NO: 1519222
ucccaaacaaacuacaccu

SEQ ID NO: 1519224 - RNA, 19 nt, Artificial Sequence
  Description of Artificial Sequence: Synthetic oligonucleotide
  Sense strand starting at position 2309 of SEQ ID NO: 1244870
gguguaguuuguuugggag

SEQ ID NO: 1519225 - RNA, 19 nt, Artificial Sequence
  Description of Artificial Sequence: Synthetic oligonucleotide
  Antisense strand to SEQ ID NO: 1519224
cucccaaacaaacuacacc

SEQ ID NO: 1519226 - RNA, 19 nt, Artificial Sequence
  Description of Artificial Sequence: Synthetic oligonucleotide
  Sense strand starting at position 2345 of SEQ ID NO: 1244870
ccgguaacucacuguguga

SEQ ID NO: 1519227 - RNA, 19 nt, Artificial Sequence
  Description of Artificial Sequence: Synthetic oligonucleotide
  Antisense strand to SEQ ID NO: 1519226
ucacacagugaguuaccgg

SEQ ID NO: 1519228 - RNA, 19 nt, Artificial Sequence
  Description of Artificial Sequence: Synthetic oligonucleotide
  Sense strand starting at position 2737 of SEQ ID NO: 1244870
gagucaaucuaaggaagac

SEQ ID NO: 1519229 - RNA, 19 nt, Artificial Sequence
  Description of Artificial Sequence: Synthetic oligonucleotide
  Antisense strand to SEQ ID NO: 1519228
gucuuccuuagauugacuc

SEQ ID NO: 1519230 - RNA, 19 nt, Artificial Sequence
  Description of Artificial Sequence: Synthetic oligonucleotide
  Sense strand starting at position 3120 of SEQ ID NO: 1244870
cggcuaaucgcccaguuua

SEQ ID NO: 1519231 - RNA, 19 nt, Artificial Sequence
  Description of Artificial Sequence: Synthetic oligonucleotide
  Antisense strand to SEQ ID NO: 1519230
uaaacugggcgauuagccg

SEQ ID NO: 1519232 - RNA, 19 nt, Artificial Sequence
  Description of Artificial Sequence: Synthetic oligonucleotide
  Sense strand starting at position 3131 of SEQ ID NO: 1244870
ccaguuuauacugggcaga

SEQ ID NO: 1519233 - RNA, 19 nt, Artificial Sequence
  Description of Artificial Sequence: Synthetic oligonucleotide
  Antisense strand to SEQ ID NO: 1519232
ucugcccaguauaaacugg

SEQ ID NO: 1519234 - RNA, 19 nt, Artificial Sequence
  Description of Artificial Sequence: Synthetic oligonucleotide
  Sense strand starting at position 3133 of SEQ ID NO: 1244870
aguuuauacugggcagagu

SEQ ID NO: 1519235 - RNA, 19 nt, Artificial Sequence
  Description of Artificial Sequence: Synthetic oligonucleotide
  Antisense strand to SEQ ID NO: 1519234
acucugcccaguauaaacu

SEQ ID NO: 1519236 - RNA, 19 nt, Artificial Sequence
  Description of Artificial Sequence: Synthetic oligonucleotide
  Sense strand starting at position 3168 of SEQ ID NO: 1244870
gauucugagccacagcuua

SEQ ID NO: 1519237 - RNA, 19 nt, Artificial Sequence
  Description of Artificial Sequence: Synthetic oligonucleotide
  Antisense strand to SEQ ID NO: 1519236
uaagcuguggcucagaauc

SEQ ID NO: 1519238 - RNA, 19 nt, Artificial Sequence
  Description of Artificial Sequence: Synthetic oligonucleotide
  Sense strand starting at position 3704 of SEQ ID NO: 1244870
gaacuagucccuugggauu

SEQ ID NO: 1519239 - RNA, 19 nt, Artificial Sequence
  Description of Artificial Sequence: Synthetic oligonucleotide
  Antisense strand to SEQ ID NO: 1519238
aaucccaagggacuaguuc

SEQ ID NO: 1519240 - RNA, 19 nt, Artificial Sequence
  Description of Artificial Sequence: Synthetic oligonucleotide
  Sense strand starting at position 3715 of SEQ ID NO: 1244870
uugggauugggcugcucaa

SEQ ID NO: 1519241 - RNA, 19 nt, Artificial Sequence
  Description of Artificial Sequence: Synthetic oligonucleotide
  Antisense strand to SEQ ID NO: 1519240
uugagcagcccaaucccaa

SEQ ID NO: 1519242 - RNA, 19 nt, Artificial Sequence
  Description of Artificial Sequence: Synthetic oligonucleotide
  Sense strand starting at position 3743 of SEQ ID NO: 1244870
agggaaucccaaugcauga

SEQ ID NO: 1519243 - RNA, 19 nt, Artificial Sequence
  Description of Artificial Sequence: Synthetic oligonucleotide
  Antisense strand to SEQ ID NO: 1519242
ucaugcauugggauucccu

SEQ ID NO: 1519244 - RNA, 19 nt, Artificial Sequence
  Description of Artificial Sequence: Synthetic oligonucleotide
  Sense strand starting at position 3925 of SEQ ID NO: 1244870
gaugcaaggcccuauaaug

SEQ ID NO: 1519245 - RNA, 19 nt, Artificial Sequence
  Description of Artificial Sequence: Synthetic oligonucleotide
  Antisense strand to SEQ ID NO: 1519244
cauuauagggccuugcauc

SEQ ID NO: 1519246 - RNA, 19 nt, Artificial Sequence
  Description of Artificial Sequence: Synthetic oligonucleotide
  Sense strand starting at position 3936 of SEQ ID NO: 1244870
cuauaauguugggugguga

SEQ ID NO: 1519247 - RNA, 19 nt, Artificial Sequence
  Description of Artificial Sequence: Synthetic oligonucleotide
  Antisense strand to SEQ ID NO: 1519246
ucaccacccaacauuauag

SEQ ID NO: 1519248 - RNA, 19 nt, Artificial Sequence
  Description of Artificial Sequence: Synthetic oligonucleotide
  Sense strand starting at position 3950 of SEQ ID NO: 1244870
ggugacgacuuucugaaau

SEQ ID NO: 1519249 - RNA, 19 nt, Artificial Sequence
  Description of Artificial Sequence: Synthetic oligonucleotide
  Antisense strand to SEQ ID NO: 1519248
auuucagaaagucgucacc

SEQ ID NO: 1519250 - RNA, 19 nt, Artificial Sequence
  Description of Artificial Sequence: Synthetic oligonucleotide
  Sense strand starting at position 117 of SEQ ID NO: 1244871
ggcugucuguguggacaua

SEQ ID NO: 1519251 - RNA, 19 nt, Artificial Sequence
  Description of Artificial Sequence: Synthetic oligonucleotide
  Antisense strand to SEQ ID NO: 1519250
uauguccacacagacagcc

SEQ ID NO: 1519252 - RNA, 19 nt, Artificial Sequence
  Description of Artificial Sequence: Synthetic oligonucleotide
  Sense strand starting at position 118 of SEQ ID NO: 1244871
gcugucuguguggacauau

SEQ ID NO: 1519253 - RNA, 19 nt, Artificial Sequence
  Description of Artificial Sequence: Synthetic oligonucleotide
  Antisense strand to SEQ ID NO: 1519252
auauguccacacagacagc

SEQ ID NO: 1519254 - RNA, 19 nt, Artificial Sequence
  Description of Artificial Sequence: Synthetic oligonucleotide
  Sense strand starting at position 128 of SEQ ID NO: 1244871
uggacauaucucugugucu

SEQ ID NO: 1519255 - RNA, 19 nt, Artificial Sequence
  Description of Artificial Sequence: Synthetic oligonucleotide
  Antisense strand to SEQ ID NO: 1519254
agacacagagauaugucca

SEQ ID NO: 1519256 - RNA, 19 nt, Artificial Sequence
  Description of Artificial Sequence: Synthetic oligonucleotide
  Sense strand starting at position 528 of SEQ ID NO: 1244871
ugcaauuagcaguguugca

SEQ ID NO: 1519257 - RNA, 19 nt, Artificial Sequence
  Description of Artificial Sequence: Synthetic oligonucleotide
  Antisense strand to SEQ ID NO: 1519256
ugcaacacugcuaauugca

SEQ ID NO: 1519258 - RNA, 19 nt, Artificial Sequence
  Description of Artificial Sequence: Synthetic oligonucleotide
  Sense strand starting at position 1036 of SEQ ID NO: 1244871
cgcggcuuugcauaaucaa

SEQ ID NO: 1519259 - RNA, 19 nt, Artificial Sequence
  Description of Artificial Sequence: Synthetic oligonucleotide
  Antisense strand to SEQ ID NO: 1519258
uugauuaugcaaagccgcg

SEQ ID NO: 1519260 - RNA, 19 nt, Artificial Sequence
  Description of Artificial Sequence: Synthetic oligonucleotide
  Sense strand starting at position 1055 of SEQ ID NO: 1244871
ucgcaaggcauuugcauau

SEQ ID NO: 1519261 - RNA, 19 nt, Artificial Sequence
  Description of Artificial Sequence: Synthetic oligonucleotide
  Antisense strand to SEQ ID NO: 1519260
auaugcaaaugccuugcga

SEQ ID NO: 1519262 - RNA, 19 nt, Artificial Sequence
  Description of Artificial Sequence: Synthetic oligonucleotide
  Sense strand starting at position 1517 of SEQ ID NO: 1244871
guggguacuuggugacaua

SEQ ID NO: 1519263 - RNA, 19 nt, Artificial Sequence
  Description of Artificial Sequence: Synthetic oligonucleotide
  Antisense strand to SEQ ID NO: 1519262
uaugucaccaaguacccac

SEQ ID NO: 1519264 - RNA, 19 nt, Artificial Sequence
  Description of Artificial Sequence: Synthetic oligonucleotide
  Sense strand starting at position 1518 of SEQ ID NO: 1244871
uggguacuuggugacauau

SEQ ID NO: 1519265 - RNA, 19 nt, Artificial Sequence
  Description of Artificial Sequence: Synthetic oligonucleotide
  Antisense strand to SEQ ID NO: 1519264
auaugucaccaaguaccca

SEQ ID NO: 1519266 - RNA, 19 nt, Artificial Sequence
  Description of Artificial Sequence: Synthetic oligonucleotide
  Sense strand starting at position 1520 of SEQ ID NO: 1244871
gguacuuggugacauauuu

SEQ ID NO: 1519267 - RNA, 19 nt, Artificial Sequence
  Description of Artificial Sequence: Synthetic oligonucleotide
  Antisense strand to SEQ ID NO: 1519266
aaauaugucaccaaguacc

SEQ ID NO: 1519268 - RNA, 19 nt, Artificial Sequence
  Description of Artificial Sequence: Synthetic oligonucleotide
  Sense strand starting at position 1565 of SEQ ID NO: 1244871
cuuugcuugccgggagaau

SEQ ID NO: 1519269 - RNA, 19 nt, Artificial Sequence
  Description of Artificial Sequence: Synthetic oligonucleotide
  Antisense strand to SEQ ID NO: 1519268
auucucccggcaagcaaag

SEQ ID NO: 1519270 - RNA, 19 nt, Artificial Sequence
  Description of Artificial Sequence: Synthetic oligonucleotide
  Sense strand starting at position 1566 of SEQ ID NO: 1244871
uuugcuugccgggagaauu

SEQ ID NO: 1519271 - RNA, 19 nt, Artificial Sequence
  Description of Artificial Sequence: Synthetic oligonucleotide
  Antisense strand to SEQ ID NO: 1519270
aauucucccggcaagcaaa

SEQ ID NO: 1519272 - RNA, 19 nt, Artificial Sequence
  Description of Artificial Sequence: Synthetic oligonucleotide
  Sense strand starting at position 1686 of SEQ ID NO: 1244871
agguguaguuuguuuggga

SEQ ID NO: 1519273 - RNA, 19 nt, Artificial Sequence
  Description of Artificial Sequence: Synthetic oligonucleotide
  Antisense strand to SEQ ID NO: 1519272
ucccaaacaaacuacaccu

SEQ ID NO: 1519274 - RNA, 19 nt, Artificial Sequence
  Description of Artificial Sequence: Synthetic oligonucleotide
  Sense strand starting at position 1687 of SEQ ID NO: 1244871
gguguaguuuguuugggag

SEQ ID NO: 1519275 - RNA, 19 nt, Artificial Sequence
  Description of Artificial Sequence: Synthetic oligonucleotide
  Antisense strand to SEQ ID NO: 1519274
cucccaaacaaacuacacc

SEQ ID NO: 1519276 - RNA, 19 nt, Artificial Sequence
  Description of Artificial Sequence: Synthetic oligonucleotide
  Sense strand starting at position 1688 of SEQ ID NO: 1244871
guguaguuuguuugggagu

SEQ ID NO: 1519277 - RNA, 19 nt, Artificial Sequence
  Description of Artificial Sequence: Synthetic oligonucleotide
  Antisense strand to SEQ ID NO: 1519276
acucccaaacaaacuacac

SEQ ID NO: 1519278 - RNA, 19 nt, Artificial Sequence
  Description of Artificial Sequence: Synthetic oligonucleotide
  Sense strand starting at position 1689 of SEQ ID NO: 1244871
uguaguuuguuugggaguu

SEQ ID NO: 1519279 - RNA, 19 nt, Artificial Sequence
  Description of Artificial Sequence: Synthetic oligonucleotide
  Antisense strand to SEQ ID NO: 1519278
aacucccaaacaaacuaca

SEQ ID NO: 1519280 - RNA, 19 nt, Artificial Sequence
  Description of Artificial Sequence: Synthetic oligonucleotide
  Sense strand starting at position 1690 of SEQ ID NO: 1244871
guaguuuguuugggaguuc

SEQ ID NO: 1519281 - RNA, 19 nt, Artificial Sequence
  Description of Artificial Sequence: Synthetic oligonucleotide
  Antisense strand to SEQ ID NO: 1519280
gaacucccaaacaaacuac

SEQ ID NO: 1519282 - RNA, 19 nt, Artificial Sequence
  Description of Artificial Sequence: Synthetic oligonucleotide
  Sense strand starting at position 1723 of SEQ ID NO: 1244871
ccgguaacucacuguguga

SEQ ID NO: 1519283 - RNA, 19 nt, Artificial Sequence
  Description of Artificial Sequence: Synthetic oligonucleotide
  Antisense strand to SEQ ID NO: 1519282
ucacacagugaguuaccgg

SEQ ID NO: 1519284 - RNA, 19 nt, Artificial Sequence
  Description of Artificial Sequence: Synthetic oligonucleotide
  Sense strand starting at position 2115 of SEQ ID NO: 1244871
gagucaaucuaaggaagac

SEQ ID NO: 1519285 - RNA, 19 nt, Artificial Sequence
  Description of Artificial Sequence: Synthetic oligonucleotide
  Antisense strand to SEQ ID NO: 1519284
gucuuccuuagauugacuc

SEQ ID NO: 1519286 - RNA, 19 nt, Artificial Sequence
  Description of Artificial Sequence: Synthetic oligonucleotide
  Sense strand starting at position 2498 of SEQ ID NO: 1244871
cggcuaaucgcccaguuua

SEQ ID NO: 1519287 - RNA, 19 nt, Artificial Sequence
  Description of Artificial Sequence: Synthetic oligonucleotide
  Antisense strand to SEQ ID NO: 1519286
uaaacugggcgauuagccg

SEQ ID NO: 1519288 - RNA, 19 nt, Artificial Sequence
  Description of Artificial Sequence: Synthetic oligonucleotide
  Sense strand starting at position 2509 of SEQ ID NO: 1244871
ccaguuuauacugggcaga

SEQ ID NO: 1519289 - RNA, 19 nt, Artificial Sequence
  Description of Artificial Sequence: Synthetic oligonucleotide
  Antisense strand to SEQ ID NO: 1519288
ucugcccaguauaaacugg

SEQ ID NO: 1519290 - RNA, 19 nt, Artificial Sequence
  Description of Artificial Sequence: Synthetic oligonucleotide
  Sense strand starting at position 2511 of SEQ ID NO: 1244871
aguuuauacugggcagagu

SEQ ID NO: 1519291 - RNA, 19 nt, Artificial Sequence
  Description of Artificial Sequence: Synthetic oligonucleotide
  Antisense strand to SEQ ID NO: 1519290
acucugcccaguauaaacu

SEQ ID NO: 1519292 - RNA, 19 nt, Artificial Sequence
  Description of Artificial Sequence: Synthetic oligonucleotide
  Sense strand starting at position 2546 of SEQ ID NO: 1244871
gauucugagccacagcuua

SEQ ID NO: 1519293 - RNA, 19 nt, Artificial Sequence
  Description of Artificial Sequence: Synthetic oligonucleotide
  Antisense strand to SEQ ID NO: 1519292
uaagcuguggcucagaauc

SEQ ID NO: 1519294 - RNA, 19 nt, Artificial Sequence
  Description of Artificial Sequence: Synthetic oligonucleotide
  Sense strand starting at position 2577 of SEQ ID NO: 1244871
ugcccuugcucaugucuua

SEQ ID NO: 1519295 - RNA, 19 nt, Artificial Sequence
  Description of Artificial Sequence: Synthetic oligonucleotide
  Antisense strand to SEQ ID NO: 1519294
uaagacaugagcaagggca

SEQ ID NO: 1519296 - RNA, 19 nt, Artificial Sequence
  Description of Artificial Sequence: Synthetic oligonucleotide
  Sense strand starting at position 2656 of SEQ ID NO: 1244871
guucguaaugcuuggcgga

SEQ ID NO: 1519297 - RNA, 19 nt, Artificial Sequence
  Description of Artificial Sequence: Synthetic oligonucleotide
  Antisense strand to SEQ ID NO: 1519296
uccgccaagcauuacgaac

SEQ ID NO: 1519298 - RNA, 19 nt, Artificial Sequence
  Description of Artificial Sequence: Synthetic oligonucleotide
  Sense strand starting at position 3082 of SEQ ID NO: 1244871
gaacuagucccuugggauu

SEQ ID NO: 1519299 - RNA, 19 nt, Artificial Sequence
  Description of Artificial Sequence: Synthetic oligonucleotide
  Antisense strand to SEQ ID NO: 1519298
aaucccaagggacuaguuc

SEQ ID NO: 1519300 - RNA, 19 nt, Artificial Sequence
  Description of Artificial Sequence: Synthetic oligonucleotide
  Sense strand starting at position 3093 of SEQ ID NO: 1244871
uugggauugggcugcucaa

SEQ ID NO: 1519301 - RNA, 19 nt, Artificial Sequence
  Description of Artificial Sequence: Synthetic oligonucleotide
  Antisense strand to SEQ ID NO: 1519300
uugagcagcccaaucccaa

SEQ ID NO: 1519302 - RNA, 19 nt, Artificial Sequence
  Description of Artificial Sequence: Synthetic oligonucleotide
  Sense strand starting at position 3121 of SEQ ID NO: 1244871
agggaaucccaaugcauga

SEQ ID NO: 1519303 - RNA, 19 nt, Artificial Sequence
  Description of Artificial Sequence: Synthetic oligonucleotide
  Antisense strand to SEQ ID NO: 1519302
ucaugcauugggauucccu

SEQ ID NO: 1519304 - RNA, 19 nt, Artificial Sequence
  Description of Artificial Sequence: Synthetic oligonucleotide
  Sense strand starting at position 3128 of SEQ ID NO: 1244871
cccaaugcaugagauacau

SEQ ID NO: 1519305 - RNA, 19 nt, Artificial Sequence
  Description of Artificial Sequence: Synthetic oligonucleotide
  Antisense strand to SEQ ID NO: 1519304
auguaucucaugcauuggg

SEQ ID NO: 1519306 - RNA, 19 nt, Artificial Sequence
  Description of Artificial Sequence: Synthetic oligonucleotide
  Sense strand starting at position 3303 of SEQ ID NO: 1244871
gaugcaaggcccuauaaug

SEQ ID NO: 1519307 - RNA, 19 nt, Artificial Sequence
  Description of Artificial Sequence: Synthetic oligonucleotide
  Antisense strand to SEQ ID NO: 1519306
cauuauagggccuugcauc

SEQ ID NO: 1519308 - RNA, 19 nt, Artificial Sequence
  Description of Artificial Sequence: Synthetic oligonucleotide
  Sense strand starting at position 3314 of SEQ ID NO: 1244871
cuauaauguugggugguga

SEQ ID NO: 1519309 - RNA, 19 nt, Artificial Sequence
  Description of Artificial Sequence: Synthetic oligonucleotide
  Antisense strand to SEQ ID NO: 1519308
ucaccacccaacauuauag

SEQ ID NO: 1519310 - RNA, 19 nt, Artificial Sequence
  Description of Artificial Sequence: Synthetic oligonucleotide
  Sense strand starting at position 3328 of SEQ ID NO: 1244871
ggugacgacuuucugaaau

SEQ ID NO: 1519311 - RNA, 19 nt, Artificial Sequence
  Description of Artificial Sequence: Synthetic oligonucleotide
  Antisense strand to SEQ ID NO: 1519310
auuucagaaagucgucacc

SEQ ID NO: 1519312 - RNA, 19 nt, Artificial Sequence
  Description of Artificial Sequence: Synthetic oligonucleotide
  Sense strand starting at position 3833 of SEQ ID NO: 1244871
ccaguauggacuggugaca

SEQ ID NO: 1519313 - RNA, 19 nt, Artificial Sequence
  Description of Artificial Sequence: Synthetic oligonucleotide
  Antisense strand to SEQ ID NO: 1519312
ugucaccaguccauacugg

SEQ ID NO: 1519314 - RNA, 19 nt, Artificial Sequence
  Description of Artificial Sequence: Synthetic oligonucleotide
  Sense strand starting at position 3921 of SEQ ID NO: 1244871
gcccgugucugggcguaua

SEQ ID NO: 1519315 - RNA, 19 nt, Artificial Sequence
  Description of Artificial Sequence: Synthetic oligonucleotide
  Antisense strand to SEQ ID NO: 1519314
uauacgcccagacacgggc

SEQ ID NO: 1519316 - RNA, 19 nt, Artificial Sequence
  Description of Artificial Sequence: Synthetic oligonucleotide
  Sense strand starting at position 53 of SEQ ID NO: 1244872
uggaguucucagggauaac

SEQ ID NO: 1519317 - RNA, 19 nt, Artificial Sequence
  Description of Artificial Sequence: Synthetic oligonucleotide
  Antisense strand to SEQ ID NO: 1519316
guuaucccugagaacucca

SEQ ID NO: 1519318 - RNA, 19 nt, Artificial Sequence
  Description of Artificial Sequence: Synthetic oligonucleotide
  Sense strand starting at position 179 of SEQ ID NO: 1244872
gaggacucaugucuaauga

SEQ ID NO: 1519319 - RNA, 19 nt, Artificial Sequence
  Description of Artificial Sequence: Synthetic oligonucleotide
  Antisense strand to SEQ ID NO: 1519318
ucauuagacaugaguccuc

SEQ ID NO: 1519320 - RNA, 19 nt, Artificial Sequence
  Description of Artificial Sequence: Synthetic oligonucleotide
  Sense strand starting at position 268 of SEQ ID NO: 1244872
uugaguuuaugguccagac

SEQ ID NO: 1519321 - RNA, 19 nt, Artificial Sequence
  Description of Artificial Sequence: Synthetic oligonucleotide
  Antisense strand to SEQ ID NO: 1519320
gucuggaccauaaacucaa

SEQ ID NO: 1519322 - RNA, 19 nt, Artificial Sequence
  Description of Artificial Sequence: Synthetic oligonucleotide
  Sense strand starting at position 270 of SEQ ID NO: 1244872
gaguuuaugguccagacca

SEQ ID NO: 1519323 - RNA, 19 nt, Artificial Sequence
  Description of Artificial Sequence: Synthetic oligonucleotide
  Antisense strand to SEQ ID NO: 1519322
uggucuggaccauaaacuc

SEQ ID NO: 1519324 - RNA, 19 nt, Artificial Sequence
  Description of Artificial Sequence: Synthetic oligonucleotide
  Sense strand starting at position 337 of SEQ ID NO: 1244872
uguaguuggaauggguuua

SEQ ID NO: 1519325 - RNA, 19 nt, Artificial Sequence
  Description of Artificial Sequence: Synthetic oligonucleotide
  Antisense strand to SEQ ID NO: 1519324
uaaacccauuccaacuaca

SEQ ID NO: 1519326 - RNA, 19 nt, Artificial Sequence
  Description of Artificial Sequence: Synthetic oligonucleotide
  Sense strand starting at position 356 of SEQ ID NO: 1244872
ccuuaaauaggucauugca

SEQ ID NO: 1519327 - RNA, 19 nt, Artificial Sequence
  Description of Artificial Sequence: Synthetic oligonucleotide
  Antisense strand to SEQ ID NO: 1519326
ugcaaugaccuauuuaagg

SEQ ID NO: 1519328 - RNA, 19 nt, Artificial Sequence
  Description of Artificial Sequence: Synthetic oligonucleotide
  Sense strand starting at position 358 of SEQ ID NO: 1244872
uuaaauaggucauugcaca

SEQ ID NO: 1519329 - RNA, 19 nt, Artificial Sequence
  Description of Artificial Sequence: Synthetic oligonucleotide
  Antisense strand to SEQ ID NO: 1519328
ugugcaaugaccuauuuaa

SEQ ID NO: 1519330 - RNA, 19 nt, Artificial Sequence
  Description of Artificial Sequence: Synthetic oligonucleotide
  Sense strand starting at position 490 of SEQ ID NO: 1244872
cgcaccucauucuuaagaa

SEQ ID NO: 1519331 - RNA, 19 nt, Artificial Sequence
  Description of Artificial Sequence: Synthetic oligonucleotide
  Antisense strand to SEQ ID NO: 1519330
uucuuaagaaugaggugcg

SEQ ID NO: 1519332 - RNA, 19 nt, Artificial Sequence
  Description of Artificial Sequence: Synthetic oligonucleotide
  Sense strand starting at position 658 of SEQ ID NO: 1244872
gauggagagguuggguauu

SEQ ID NO: 1519333 - RNA, 19 nt, Artificial Sequence
  Description of Artificial Sequence: Synthetic oligonucleotide
  Antisense strand to SEQ ID NO: 1519332
aauacccaaccucuccauc

SEQ ID NO: 1519334 - RNA, 19 nt, Artificial Sequence
  Description of Artificial Sequence: Synthetic oligonucleotide
  Sense strand starting at position 1000 of SEQ ID NO: 1244872
cacccauagccuggaaagu

SEQ ID NO: 1519335 - RNA, 19 nt, Artificial Sequence
  Description of Artificial Sequence: Synthetic oligonucleotide
  Antisense strand to SEQ ID NO: 1519334
acuuuccaggcuaugggug

SEQ ID NO: 1519336 - RNA, 19 nt, Artificial Sequence
  Description of Artificial Sequence: Synthetic oligonucleotide
  Sense strand starting at position 1029 of SEQ ID NO: 1244872
gaagaaggucaggguguuu

SEQ ID NO: 1519337 - RNA, 19 nt, Artificial Sequence
  Description of Artificial Sequence: Synthetic oligonucleotide
  Antisense strand to SEQ ID NO: 1519336
aaacacccugaccuucuuc

SEQ ID NO: 1519338 - RNA, 19 nt, Artificial Sequence
  Description of Artificial Sequence: Synthetic oligonucleotide
  Sense strand starting at position 1204 of SEQ ID NO: 1244872
cucagauaacugugggagu

SEQ ID NO: 1519339 - RNA, 19 nt, Artificial Sequence
  Description of Artificial Sequence: Synthetic oligonucleotide
  Antisense strand to SEQ ID NO: 1519338
acucccacaguuaucugag

SEQ ID NO: 1519340 - RNA, 19 nt, Artificial Sequence
  Description of Artificial Sequence: Synthetic oligonucleotide
  Sense strand starting at position 1206 of SEQ ID NO: 1244872
cagauaacugugggaguau

SEQ ID NO: 1519341 - RNA, 19 nt, Artificial Sequence
  Description of Artificial Sequence: Synthetic oligonucleotide
  Antisense strand to SEQ ID NO: 1519340
auacucccacaguuaucug

SEQ ID NO: 1519342 - RNA, 19 nt, Artificial Sequence
  Description of Artificial Sequence: Synthetic oligonucleotide
  Sense strand starting at position 1413 of SEQ ID NO: 1244872
agccaaacauuguuaagua

SEQ ID NO: 1519343 - RNA, 19 nt, Artificial Sequence
  Description of Artificial Sequence: Synthetic oligonucleotide
  Antisense strand to SEQ ID NO: 1519342
uacuuaacaauguuuggcu

SEQ ID NO: 1519344 - RNA, 19 nt, Artificial Sequence
  Description of Artificial Sequence: Synthetic oligonucleotide
  Sense strand starting at position 1438 of SEQ ID NO: 1244872
uuccuuggcuuacuuagaa

SEQ ID NO: 1519345 - RNA, 19 nt, Artificial Sequence
  Description of Artificial Sequence: Synthetic oligonucleotide
  Antisense strand to SEQ ID NO: 1519344
uucuaaguaagccaaggaa

SEQ ID NO: 1519346 - RNA, 19 nt, Artificial Sequence
  Description of Artificial Sequence: Synthetic oligonucleotide
  Sense strand starting at position 1539 of SEQ ID NO: 1244872
gacucaagcgugcauaaga

SEQ ID NO: 1519347 - RNA, 19 nt, Artificial Sequence
  Description of Artificial Sequence: Synthetic oligonucleotide
  Antisense strand to SEQ ID NO: 1519346
ucuuaugcacgcuugaguc

SEQ ID NO: 1519348 - RNA, 19 nt, Artificial Sequence
  Description of Artificial Sequence: Synthetic oligonucleotide
  Sense strand starting at position 1614 of SEQ ID NO: 1244872
gguacaacccaguaauucu

SEQ ID NO: 1519349 - RNA, 19 nt, Artificial Sequence
  Description of Artificial Sequence: Synthetic oligonucleotide
  Antisense strand to SEQ ID NO: 1519348
agaauuacuggguuguacc

SEQ ID NO: 1519350 - RNA, 19 nt, Artificial Sequence
  Description of Artificial Sequence: Synthetic oligonucleotide
  Sense strand starting at position 1649 of SEQ ID NO: 1244872
cccagaaggcucugaagca

SEQ ID NO: 1519351 - RNA, 19 nt, Artificial Sequence
  Description of Artificial Sequence: Synthetic oligonucleotide
  Antisense strand to SEQ ID NO: 1519350
ugcuucagagccuucuggg

SEQ ID NO: 1519352 - RNA, 19 nt, Artificial Sequence
  Description of Artificial Sequence: Synthetic oligonucleotide
  Sense strand starting at position 1681 of SEQ ID NO: 1244872
ccacauuggcuuggagacu

SEQ ID NO: 1519353 - RNA, 19 nt, Artificial Sequence
  Description of Artificial Sequence: Synthetic oligonucleotide
  Antisense strand to SEQ ID NO: 1519352
agucuccaagccaaugugg

SEQ ID NO: 1519354 - RNA, 19 nt, Artificial Sequence
  Description of Artificial Sequence: Synthetic oligonucleotide
  Sense strand starting at position 1713 of SEQ ID NO: 1244872
guacaacuugucuagggua

SEQ ID NO: 1519355 - RNA, 19 nt, Artificial Sequence
  Description of Artificial Sequence: Synthetic oligonucleotide
  Antisense strand to SEQ ID NO: 1519354
uacccuagacaaguuguac

SEQ ID NO: 1519356 - RNA, 19 nt, Artificial Sequence
  Description of Artificial Sequence: Synthetic oligonucleotide
  Sense strand starting at position 1781 of SEQ ID NO: 1244872
ggcgcuuucccugucaaau

SEQ ID NO: 1519357 - RNA, 19 nt, Artificial Sequence
  Description of Artificial Sequence: Synthetic oligonucleotide
  Antisense strand to SEQ ID NO: 1519356
auuugacagggaaagcgcc

SEQ ID NO: 1519358 - RNA, 19 nt, Artificial Sequence
  Description of Artificial Sequence: Synthetic oligonucleotide
  Sense strand starting at position 1836 of SEQ ID NO: 1244872
cccugaggccugugagaau

SEQ ID NO: 1519359 - RNA, 19 nt, Artificial Sequence
  Description of Artificial Sequence: Synthetic oligonucleotide
  Antisense strand to SEQ ID NO: 1519358
auucucacaggccucaggg

SEQ ID NO: 1519360 - RNA, 19 nt, Artificial Sequence
  Description of Artificial Sequence: Synthetic oligonucleotide
  Sense strand starting at position 2014 of SEQ ID NO: 1244872
ccagcuaucccagauguga

SEQ ID NO: 1519361 - RNA, 19 nt, Artificial Sequence
  Description of Artificial Sequence: Synthetic oligonucleotide
  Antisense strand to SEQ ID NO: 1519360
ucacaucugggauagcugg

SEQ ID NO: 1519362 - RNA, 19 nt, Artificial Sequence
  Description of Artificial Sequence: Synthetic oligonucleotide
  Sense strand starting at position 2016 of SEQ ID NO: 1244872
agcuaucccagaugugaag

SEQ ID NO: 1519363 - RNA, 19 nt, Artificial Sequence
  Description of Artificial Sequence: Synthetic oligonucleotide
  Antisense strand to SEQ ID NO: 1519362
cuucacaucugggauagcu

SEQ ID NO: 1519364 - RNA, 19 nt, Artificial Sequence
  Description of Artificial Sequence: Synthetic oligonucleotide
  Sense strand starting at position 2370 of SEQ ID NO: 1244872
aagggaccuuuguuuacua

SEQ ID NO: 1519365 - RNA, 19 nt, Artificial Sequence
  Description of Artificial Sequence: Synthetic oligonucleotide
  Antisense strand to SEQ ID NO: 1519364
uaguaaacaaaggucccuu

SEQ ID NO: 1519366 - RNA, 19 nt, Artificial Sequence
  Description of Artificial Sequence: Synthetic oligonucleotide
  Sense strand starting at position 2430 of SEQ ID NO: 1244872
cagcguucugcggcaagaa

SEQ ID NO: 1519367 - RNA, 19 nt, Artificial Sequence
  Description of Artificial Sequence: Synthetic oligonucleotide
  Antisense strand to SEQ ID NO: 1519366
uucuugccgcagaacgcug

SEQ ID NO: 1519368 - RNA, 19 nt, Artificial Sequence
  Description of Artificial Sequence: Synthetic oligonucleotide
  Sense strand starting at position 2468 of SEQ ID NO: 1244872
caagguggcagugagagau

SEQ ID NO: 1519369 - RNA, 19 nt, Artificial Sequence
  Description of Artificial Sequence: Synthetic oligonucleotide
  Antisense strand to SEQ ID NO: 1519368
aucucucacugccaccuug

SEQ ID NO: 1519370 - RNA, 19 nt, Artificial Sequence
  Description of Artificial Sequence: Synthetic oligonucleotide
  Sense strand starting at position 2511 of SEQ ID NO: 1244872
aguacuccuauguguaaga

SEQ ID NO: 1519371 - RNA, 19 nt, Artificial Sequence
  Description of Artificial Sequence: Synthetic oligonucleotide
  Antisense strand to SEQ ID NO: 1519370
ucuuacacauaggaguacu

SEQ ID NO: 1519372 - RNA, 19 nt, Artificial Sequence
  Description of Artificial Sequence: Synthetic oligonucleotide
  Sense strand starting at position 2538 of SEQ ID NO: 1244872
aggcaugugagauaggcua

SEQ ID NO: 1519373 - RNA, 19 nt, Artificial Sequence
  Description of Artificial Sequence: Synthetic oligonucleotide
  Antisense strand to SEQ ID NO: 1519372
uagccuaucucacaugccu

SEQ ID NO: 1519374 - RNA, 19 nt, Artificial Sequence
  Description of Artificial Sequence: Synthetic oligonucleotide
  Sense strand starting at position 2546 of SEQ ID NO: 1244872
gagauaggcuaucuuacuc

SEQ ID NO: 1519375 - RNA, 19 nt, Artificial Sequence
  Description of Artificial Sequence: Synthetic oligonucleotide
  Antisense strand to SEQ ID NO: 1519374
gaguaagauagccuaucuc

SEQ ID NO: 1519376 - RNA, 19 nt, Artificial Sequence
  Description of Artificial Sequence: Synthetic oligonucleotide
  Sense strand starting at position 2704 of SEQ ID NO: 1244872
acucgauugguugaccuga

SEQ ID NO: 1519377 - RNA, 19 nt, Artificial Sequence
  Description of Artificial Sequence: Synthetic oligonucleotide
  Antisense strand to SEQ ID NO: 1519376
ucaggucaaccaaucgagu

SEQ ID NO: 1519378 - RNA, 19 nt, Artificial Sequence
  Description of Artificial Sequence: Synthetic oligonucleotide
  Sense strand starting at position 2706 of SEQ ID NO: 1244872
ucgauugguugaccugaga

SEQ ID NO: 1519379 - RNA, 19 nt, Artificial Sequence
  Description of Artificial Sequence: Synthetic oligonucleotide
  Antisense strand to SEQ ID NO: 1519378
ucucaggucaaccaaucga

SEQ ID NO: 1519380 - RNA, 19 nt, Artificial Sequence
  Description of Artificial Sequence: Synthetic oligonucleotide
  Sense strand starting at position 2800 of SEQ ID NO: 1244872
aaagaaaggucggucucua

SEQ ID NO: 1519381 - RNA, 19 nt, Artificial Sequence
  Description of Artificial Sequence: Synthetic oligonucleotide
  Antisense strand to SEQ ID NO: 1519380
uagagaccgaccuuucuuu

SEQ ID NO: 1519382 - RNA, 19 nt, Artificial Sequence
  Description of Artificial Sequence: Synthetic oligonucleotide
  Sense strand starting at position 3050 of SEQ ID NO: 1244872
uuauaaagcucacugauga

SEQ ID NO: 1519383 - RNA, 19 nt, Artificial Sequence
  Description of Artificial Sequence: Synthetic oligonucleotide
  Antisense strand to SEQ ID NO: 1519382
ucaucagugagcuuuauaa

SEQ ID NO: 1519384 - RNA, 19 nt, Artificial Sequence
  Description of Artificial Sequence: Synthetic oligonucleotide
  Sense strand starting at position 3058 of SEQ ID NO: 1244872
cucacugaugacuaugcaa

SEQ ID NO: 1519385 - RNA, 19 nt, Artificial Sequence
  Description of Artificial Sequence: Synthetic oligonucleotide
  Antisense strand to SEQ ID NO: 1519384
uugcauagucaucagugag

SEQ ID NO: 1519386 - RNA, 19 nt, Artificial Sequence
  Description of Artificial Sequence: Synthetic oligonucleotide
  Sense strand starting at position 3061 of SEQ ID NO: 1244872
acugaugacuaugcaauau

SEQ ID NO: 1519387 - RNA, 19 nt, Artificial Sequence
  Description of Artificial Sequence: Synthetic oligonucleotide
  Antisense strand to SEQ ID NO: 1519386
auauugcauagucaucagu

SEQ ID NO: 1519388 - RNA, 19 nt, Artificial Sequence
  Description of Artificial Sequence: Synthetic oligonucleotide
  Sense strand starting at position 3146 of SEQ ID NO: 1244872
gguucucauucuuuacaua

SEQ ID NO: 1519389 - RNA, 19 nt, Artificial Sequence
  Description of Artificial Sequence: Synthetic oligonucleotide
  Antisense strand to SEQ ID NO: 1519388
uauguaaagaaugagaacc

SEQ ID NO: 1519390 - RNA, 19 nt, Artificial Sequence
  Description of Artificial Sequence: Synthetic oligonucleotide
  Sense strand starting at position 3324 of SEQ ID NO: 1244872
cuguaaauugcugaaucag

SEQ ID NO: 1519391 - RNA, 19 nt, Artificial Sequence
  Description of Artificial Sequence: Synthetic oligonucleotide
  Antisense strand to SEQ ID NO: 1519390
cugauucagcaauuuacag

SEQ ID NO: 1519392 - RNA, 19 nt, Artificial Sequence
  Description of Artificial Sequence: Synthetic oligonucleotide
  Sense strand starting at position 3571 of SEQ ID NO: 1244872
uugggugaucuuuagccau

SEQ ID NO: 1519393 - RNA, 19 nt, Artificial Sequence
  Description of Artificial Sequence: Synthetic oligonucleotide
  Antisense strand to SEQ ID NO: 1519392
auggcuaaagaucacccaa

SEQ ID NO: 1519394 - RNA, 19 nt, Artificial Sequence
  Description of Artificial Sequence: Synthetic oligonucleotide
  Sense strand starting at position 3832 of SEQ ID NO: 1244872
ugcguuccuguugcaaauu

SEQ ID NO: 1519395 - RNA, 19 nt, Artificial Sequence
  Description of Artificial Sequence: Synthetic oligonucleotide
  Antisense strand to SEQ ID NO: 1519394
aauuugcaacaggaacgca

SEQ ID NO: 1519396 - RNA, 19 nt, Artificial Sequence
  Description of Artificial Sequence: Synthetic oligonucleotide
  Sense strand starting at position 23 of SEQ ID NO: 1244873
ugaugcuucugauuugcuu

SEQ ID NO: 1519397 - RNA, 19 nt, Artificial Sequence
  Description of Artificial Sequence: Synthetic oligonucleotide
  Antisense strand to SEQ ID NO: 1519396
aagcaaaucagaagcauca

SEQ ID NO: 1519398 - RNA, 19 nt, Artificial Sequence
  Description of Artificial Sequence: Synthetic oligonucleotide
  Sense strand starting at position 27 of SEQ ID NO: 1244873
gcuucugauuugcuuucua

SEQ ID NO: 1519399 - RNA, 19 nt, Artificial Sequence
  Description of Artificial Sequence: Synthetic oligonucleotide
  Antisense strand to SEQ ID NO: 1519398
uagaaagcaaaucagaagc

SEQ ID NO: 1519400 - RNA, 19 nt, Artificial Sequence
  Description of Artificial Sequence: Synthetic oligonucleotide
  Sense strand starting at position 31 of SEQ ID NO: 1244873
cugauuugcuuucuaguaa

SEQ ID NO: 1519401 - RNA, 19 nt, Artificial Sequence
  Description of Artificial Sequence: Synthetic oligonucleotide
  Antisense strand to SEQ ID NO: 1519400
uuacuagaaagcaaaucag

SEQ ID NO: 1519402 - RNA, 19 nt, Artificial Sequence
  Description of Artificial Sequence: Synthetic oligonucleotide
  Sense strand starting at position 113 of SEQ ID NO: 1244873
aaggauuucuuagaaggca

SEQ ID NO: 1519403 - RNA, 19 nt, Artificial Sequence
  Description of Artificial Sequence: Synthetic oligonucleotide
  Antisense strand to SEQ ID NO: 1519402
ugccuucuaagaaauccuu

SEQ ID NO: 1519404 - RNA, 19 nt, Artificial Sequence
  Description of Artificial Sequence: Synthetic oligonucleotide
  Sense strand starting at position 353 of SEQ ID NO: 1244873
cagagaugaaggugucuuu

SEQ ID NO: 1519405 - RNA, 19 nt, Artificial Sequence
  Description of Artificial Sequence: Synthetic oligonucleotide
  Antisense strand to SEQ ID NO: 1519404
aaagacaccuucaucucug

SEQ ID NO: 1519406 - RNA, 19 nt, Artificial Sequence
  Description of Artificial Sequence: Synthetic oligonucleotide
  Sense strand starting at position 489 of SEQ ID NO: 1244873
cuugcaauccagggucuau

SEQ ID NO: 1519407 - RNA, 19 nt, Artificial Sequence
  Description of Artificial Sequence: Synthetic oligonucleotide
  Antisense strand to SEQ ID NO: 1519406
auagacccuggauugcaag

SEQ ID NO: 1519408 - RNA, 19 nt, Artificial Sequence
  Description of Artificial Sequence: Synthetic oligonucleotide
  Sense strand starting at position 493 of SEQ ID NO: 1244873
caauccagggucuauguua

SEQ ID NO: 1519409 - RNA, 19 nt, Artificial Sequence
  Description of Artificial Sequence: Synthetic oligonucleotide
  Antisense strand to SEQ ID NO: 1519408
uaacauagacccuggauug

SEQ ID NO: 1519410 - RNA, 19 nt, Artificial Sequence
  Description of Artificial Sequence: Synthetic oligonucleotide
  Sense strand starting at position 500 of SEQ ID NO: 1244873
gggucuauguuacugacau

SEQ ID NO: 1519411 - RNA, 19 nt, Artificial Sequence
  Description of Artificial Sequence: Synthetic oligonucleotide
  Antisense strand to SEQ ID NO: 1519410
augucaguaacauagaccc

SEQ ID NO: 1519412 - RNA, 19 nt, Artificial Sequence
  Description of Artificial Sequence: Synthetic oligonucleotide
  Sense strand starting at position 521 of SEQ ID NO: 1244873
ucuucuccgucucuaagau

SEQ ID NO: 1519413 - RNA, 19 nt, Artificial Sequence
  Description of Artificial Sequence: Synthetic oligonucleotide
  Antisense strand to SEQ ID NO: 1519412
aucuuagagacggagaaga

SEQ ID NO: 1519414 - RNA, 19 nt, Artificial Sequence
  Description of Artificial Sequence: Synthetic oligonucleotide
  Sense strand starting at position 522 of SEQ ID NO: 1244873
cuucuccgucucuaagauu

SEQ ID NO: 1519415 - RNA, 19 nt, Artificial Sequence
  Description of Artificial Sequence: Synthetic oligonucleotide
  Antisense strand to SEQ ID NO: 1519414
aaucuuagagacggagaag

SEQ ID NO: 1519416 - RNA, 19 nt, Artificial Sequence
  Description of Artificial Sequence: Synthetic oligonucleotide
  Sense strand starting at position 683 of SEQ ID NO: 1244873
acaguaaugcuuuacugag

SEQ ID NO: 1519417 - RNA, 19 nt, Artificial Sequence
  Description of Artificial Sequence: Synthetic oligonucleotide
  Antisense strand to SEQ ID NO: 1519416
cucaguaaagcauuacugu

SEQ ID NO: 1519418 - RNA, 19 nt, Artificial Sequence
  Description of Artificial Sequence: Synthetic oligonucleotide
  Sense strand starting at position 744 of SEQ ID NO: 1244873
uccagugagacagaugcua

SEQ ID NO: 1519419 - RNA, 19 nt, Artificial Sequence
  Description of Artificial Sequence: Synthetic oligonucleotide
  Antisense strand to SEQ ID NO: 1519418
uagcaucugucucacugga

SEQ ID NO: 1519420 - RNA, 19 nt, Artificial Sequence
  Description of Artificial Sequence: Synthetic oligonucleotide
  Sense strand starting at position 906 of SEQ ID NO: 1244873
ucaugaccucauggucaau

SEQ ID NO: 1519421 - RNA, 19 nt, Artificial Sequence
  Description of Artificial Sequence: Synthetic oligonucleotide
  Antisense strand to SEQ ID NO: 1519420
auugaccaugaggucauga

SEQ ID NO: 1519422 - RNA, 19 nt, Artificial Sequence
  Description of Artificial Sequence: Synthetic oligonucleotide
  Sense strand starting at position 908 of SEQ ID NO: 1244873
augaccucauggucaauau

SEQ ID NO: 1519423 - RNA, 19 nt, Artificial Sequence
  Description of Artificial Sequence: Synthetic oligonucleotide
  Antisense strand to SEQ ID NO: 1519422
auauugaccaugaggucau

SEQ ID NO: 1519424 - RNA, 19 nt, Artificial Sequence
  Description of Artificial Sequence: Synthetic oligonucleotide
  Sense strand starting at position 912 of SEQ ID NO: 1244873
ccucauggucaauaugagu

SEQ ID NO: 1519425 - RNA, 19 nt, Artificial Sequence
  Description of Artificial Sequence: Synthetic oligonucleotide
  Antisense strand to SEQ ID NO: 1519424
acucauauugaccaugagg

SEQ ID NO: 1519426 - RNA, 19 nt, Artificial Sequence
  Description of Artificial Sequence: Synthetic oligonucleotide
  Sense strand starting at position 917 of SEQ ID NO: 1244873
uggucaauaugaguuuaau

SEQ ID NO: 1519427 - RNA, 19 nt, Artificial Sequence
  Description of Artificial Sequence: Synthetic oligonucleotide
  Antisense strand to SEQ ID NO: 1519426
auuaaacucauauugacca

SEQ ID NO: 1519428 - RNA, 19 nt, Artificial Sequence
  Description of Artificial Sequence: Synthetic oligonucleotide
  Sense strand starting at position 1081 of SEQ ID NO: 1244873
ugugcauuuccauaugucu

SEQ ID NO: 1519429 - RNA, 19 nt, Artificial Sequence
  Description of Artificial Sequence: Synthetic oligonucleotide
  Antisense strand to SEQ ID NO: 1519428
agacauauggaaaugcaca

SEQ ID NO: 1519430 - RNA, 19 nt, Artificial Sequence
  Description of Artificial Sequence: Synthetic oligonucleotide
  Sense strand starting at position 1089 of SEQ ID NO: 1244873
uccauaugucugcauccuu

SEQ ID NO: 1519431 - RNA, 19 nt, Artificial Sequence
  Description of Artificial Sequence: Synthetic oligonucleotide
  Antisense strand to SEQ ID NO: 1519430
aaggaugcagacauaugga

SEQ ID NO: 1519432 - RNA, 19 nt, Artificial Sequence
  Description of Artificial Sequence: Synthetic oligonucleotide
  Sense strand starting at position 1112 of SEQ ID NO: 1244873
ugcaguguuccugcucaac

SEQ ID NO: 1519433 - RNA, 19 nt, Artificial Sequence
  Description of Artificial Sequence: Synthetic oligonucleotide
  Antisense strand to SEQ ID NO: 1519432
guugagcaggaacacugca

SEQ ID NO: 1519434 - RNA, 19 nt, Artificial Sequence
  Description of Artificial Sequence: Synthetic oligonucleotide
  Sense strand starting at position 1115 of SEQ ID NO: 1244873
aguguuccugcucaacauu

SEQ ID NO: 1519435 - RNA, 19 nt, Artificial Sequence
  Description of Artificial Sequence: Synthetic oligonucleotide
  Antisense strand to SEQ ID NO: 1519434
aauguugagcaggaacacu

SEQ ID NO: 1519436 - RNA, 19 nt, Artificial Sequence
  Description of Artificial Sequence: Synthetic oligonucleotide
  Sense strand starting at position 1195 of SEQ ID NO: 1244873
acgugauauugcuuaggaa

SEQ ID NO: 1519437 - RNA, 19 nt, Artificial Sequence
  Description of Artificial Sequence: Synthetic oligonucleotide
  Antisense strand to SEQ ID NO: 1519436
uuccuaagcaauaucacgu

SEQ ID NO: 1519438 - RNA, 19 nt, Artificial Sequence
  Description of Artificial Sequence: Synthetic oligonucleotide
  Sense strand starting at position 1196 of SEQ ID NO: 1244873
cgugauauugcuuaggaac

SEQ ID NO: 1519439 - RNA, 19 nt, Artificial Sequence
  Description of Artificial Sequence: Synthetic oligonucleotide
  Antisense strand to SEQ ID NO: 1519438
guuccuaagcaauaucacg

SEQ ID NO: 1519440 - RNA, 19 nt, Artificial Sequence
  Description of Artificial Sequence: Synthetic oligonucleotide
  Sense strand starting at position 1210 of SEQ ID NO: 1244873
ggaacaauuuguugaaaga

SEQ ID NO: 1519441 - RNA, 19 nt, Artificial Sequence
  Description of Artificial Sequence: Synthetic oligonucleotide
  Antisense strand to SEQ ID NO: 1519440
ucuuucaacaaauuguucc

SEQ ID NO: 1519442 - RNA, 19 nt, Artificial Sequence
  Description of Artificial Sequence: Synthetic oligonucleotide
  Sense strand starting at position 1240 of SEQ ID NO: 1244873
gaaugaauuuaagggaaug

SEQ ID NO: 1519443 - RNA, 19 nt, Artificial Sequence
  Description of Artificial Sequence: Synthetic oligonucleotide
  Antisense strand to SEQ ID NO: 1519442
cauucccuuaaauucauuc

SEQ ID NO: 1519444 - RNA, 19 nt, Artificial Sequence
  Description of Artificial Sequence: Synthetic oligonucleotide
  Sense strand starting at position 1269 of SEQ ID NO: 1244873
ugaagucacccacguaaua

SEQ ID NO: 1519445 - RNA, 19 nt, Artificial Sequence
  Description of Artificial Sequence: Synthetic oligonucleotide
  Antisense strand to SEQ ID NO: 1519444
uauuacgugggugacuuca

SEQ ID NO: 1519446 - RNA, 19 nt, Artificial Sequence
  Description of Artificial Sequence: Synthetic oligonucleotide
  Sense strand starting at position 1665 of SEQ ID NO: 1244873
uggucuucucggcagagau

SEQ ID NO: 1519447 - RNA, 19 nt, Artificial Sequence
  Description of Artificial Sequence: Synthetic oligonucleotide
  Antisense strand to SEQ ID NO: 1519446
aucucugccgagaagacca

SEQ ID NO: 1519448 - RNA, 19 nt, Artificial Sequence
  Description of Artificial Sequence: Synthetic oligonucleotide
  Sense strand starting at position 2050 of SEQ ID NO: 1244873
gagacuagccacugugaug

SEQ ID NO: 1519449 - RNA, 19 nt, Artificial Sequence
  Description of Artificial Sequence: Synthetic oligonucleotide
  Antisense strand to SEQ ID NO: 1519448
caucacaguggcuagucuc

SEQ ID NO: 1519450 - RNA, 19 nt, Artificial Sequence
  Description of Artificial Sequence: Synthetic oligonucleotide
  Sense strand starting at position 2126 of SEQ ID NO: 1244873
cagcgagaccgcuaucaug

SEQ ID NO: 1519451 - RNA, 19 nt, Artificial Sequence
  Description of Artificial Sequence: Synthetic oligonucleotide
  Antisense strand to SEQ ID NO: 1519450
caugauagcggucucgcug

SEQ ID NO: 1519452 - RNA, 19 nt, Artificial Sequence
  Description of Artificial Sequence: Synthetic oligonucleotide
  Sense strand starting at position 2128 of SEQ ID NO: 1244873
gcgagaccgcuaucauguu

SEQ ID NO: 1519453 - RNA, 19 nt, Artificial Sequence
  Description of Artificial Sequence: Synthetic oligonucleotide
  Antisense strand to SEQ ID NO: 1519452
aacaugauagcggucucgc

SEQ ID NO: 1519454 - RNA, 19 nt, Artificial Sequence
  Description of Artificial Sequence: Synthetic oligonucleotide
  Sense strand starting at position 2283 of SEQ ID NO: 1244873
guucuaauccgacacccaa

SEQ ID NO: 1519455 - RNA, 19 nt, Artificial Sequence
  Description of Artificial Sequence: Synthetic oligonucleotide
  Antisense strand to SEQ ID NO: 1519454
uugggugucggauuagaac

SEQ ID NO: 1519456 - RNA, 19 nt, Artificial Sequence
  Description of Artificial Sequence: Synthetic oligonucleotide
  Sense strand starting at position 2477 of SEQ ID NO: 1244873
ggcggugaggcguuaaauc

SEQ ID NO: 1519457 - RNA, 19 nt, Artificial Sequence
  Description of Artificial Sequence: Synthetic oligonucleotide
  Antisense strand to SEQ ID NO: 1519456
gauuuaacgccucaccgcc

SEQ ID NO: 1519458 - RNA, 19 nt, Artificial Sequence
  Description of Artificial Sequence: Synthetic oligonucleotide
  Sense strand starting at position 2522 of SEQ ID NO: 1244873
gguggaugcuuuguagaua

SEQ ID NO: 1519459 - RNA, 19 nt, Artificial Sequence
  Description of Artificial Sequence: Synthetic oligonucleotide
  Antisense strand to SEQ ID NO: 1519458
uaucuacaaagcauccacc

SEQ ID NO: 1519460 - RNA, 19 nt, Artificial Sequence
  Description of Artificial Sequence: Synthetic oligonucleotide
  Sense strand starting at position 2533 of SEQ ID NO: 1244873
uguagauaagcgugaacuu

SEQ ID NO: 1519461 - RNA, 19 nt, Artificial Sequence
  Description of Artificial Sequence: Synthetic oligonucleotide
  Antisense strand to SEQ ID NO: 1519460
aaguucacgcuuaucuaca

SEQ ID NO: 1519462 - RNA, 19 nt, Artificial Sequence
  Description of Artificial Sequence: Synthetic oligonucleotide
  Sense strand starting at position 3088 of SEQ ID NO: 1244873
guuacaugguguuucuauc

SEQ ID NO: 1519463 - RNA, 19 nt, Artificial Sequence
  Description of Artificial Sequence: Synthetic oligonucleotide
  Antisense strand to SEQ ID NO: 1519462
gauagaaacaccauguaac

SEQ ID NO: 1519464 - RNA, 19 nt, Artificial Sequence
  Description of Artificial Sequence: Synthetic oligonucleotide
  Sense strand starting at position 3146 of SEQ ID NO: 1244873
auaggaguacaguguagua

SEQ ID NO: 1519465 - RNA, 19 nt, Artificial Sequence
  Description of Artificial Sequence: Synthetic oligonucleotide
  Antisense strand to SEQ ID NO: 1519464
uacuacacuguacuccuau

SEQ ID NO: 1519466 - RNA, 19 nt, Artificial Sequence
  Description of Artificial Sequence: Synthetic oligonucleotide
  Sense strand starting at position 3148 of SEQ ID NO: 1244873
aggaguacaguguaguaaa

SEQ ID NO: 1519467 - RNA, 19 nt, Artificial Sequence
  Description of Artificial Sequence: Synthetic oligonucleotide
  Antisense strand to SEQ ID NO: 1519466
uuuacuacacuguacuccu

SEQ ID NO: 1519468 - RNA, 19 nt, Artificial Sequence
  Description of Artificial Sequence: Synthetic oligonucleotide
  Sense strand starting at position 3686 of SEQ ID NO: 1244873
cuuccuccucuuugaggaa

SEQ ID NO: 1519469 - RNA, 19 nt, Artificial Sequence
  Description of Artificial Sequence: Synthetic oligonucleotide
  Antisense strand to SEQ ID NO: 1519468
uuccucaaagaggaggaag

SEQ ID NO: 1519470 - RNA, 19 nt, Artificial Sequence
  Description of Artificial Sequence: Synthetic oligonucleotide
  Sense strand starting at position 3726 of SEQ ID NO: 1244873
cagagaaauugggaaugga

SEQ ID NO: 1519471 - RNA, 19 nt, Artificial Sequence
  Description of Artificial Sequence: Synthetic oligonucleotide
  Antisense strand to SEQ ID NO: 1519470
uccauucccaauuucucug

SEQ ID NO: 1519472 - RNA, 19 nt, Artificial Sequence
  Description of Artificial Sequence: Synthetic oligonucleotide
  Sense strand starting at position 3829 of SEQ ID NO: 1244873
guacuccucguaugaacaa

SEQ ID NO: 1519473 - RNA, 19 nt, Artificial Sequence
  Description of Artificial Sequence: Synthetic oligonucleotide
  Antisense strand to SEQ ID NO: 1519472
uuguucauacgaggaguac

SEQ ID NO: 1519474 - RNA, 19 nt, Artificial Sequence
  Description of Artificial Sequence: Synthetic oligonucleotide
  Sense strand starting at position 3939 of SEQ ID NO: 1244873
cagggacucucagaagaug

SEQ ID NO: 1519475 - RNA, 19 nt, Artificial Sequence
  Description of Artificial Sequence: Synthetic oligonucleotide
  Antisense strand to SEQ ID NO: 1519474
caucuucugagagucccug

SEQ ID NO: 1519476 - RNA, 19 nt, Artificial Sequence
  Description of Artificial Sequence: Synthetic oligonucleotide
  Sense strand starting at position 220 of SEQ ID NO: 1244874
ccacaaaucuugcugagca

SEQ ID NO: 1519477 - RNA, 19 nt, Artificial Sequence
  Description of Artificial Sequence: Synthetic oligonucleotide
  Antisense strand to SEQ ID NO: 1519476
ugcucagcaagauuugugg

SEQ ID NO: 1519478 - RNA, 19 nt, Artificial Sequence
  Description of Artificial Sequence: Synthetic oligonucleotide
  Sense strand starting at position 339 of SEQ ID NO: 1244874
accugagaccugugaucuc

SEQ ID NO: 1519479 - RNA, 19 nt, Artificial Sequence
  Description of Artificial Sequence: Synthetic oligonucleotide
  Antisense strand to SEQ ID NO: 1519478
gagaucacaggucucaggu

SEQ ID NO: 1519480 - RNA, 19 nt, Artificial Sequence
  Description of Artificial Sequence: Synthetic oligonucleotide
  Sense strand starting at position 342 of SEQ ID NO: 1244874
ugagaccugugaucucaau

SEQ ID NO: 1519481 - RNA, 19 nt, Artificial Sequence
  Description of Artificial Sequence: Synthetic oligonucleotide
  Antisense strand to SEQ ID NO: 1519480
auugagaucacaggucuca

SEQ ID NO: 1519482 - RNA, 19 nt, Artificial Sequence
  Description of Artificial Sequence: Synthetic oligonucleotide
  Sense strand starting at position 356 of SEQ ID NO: 1244874
ucaauagauuggugcaacu

SEQ ID NO: 1519483 - RNA, 19 nt, Artificial Sequence
  Description of Artificial Sequence: Synthetic oligonucleotide
  Antisense strand to SEQ ID NO: 1519482
aguugcaccaaucuauuga

SEQ ID NO: 1519484 - RNA, 19 nt, Artificial Sequence
  Description of Artificial Sequence: Synthetic oligonucleotide
  Sense strand starting at position 541 of SEQ ID NO: 1244874
aggucacucgacugagacu

SEQ ID NO: 1519485 - RNA, 19 nt, Artificial Sequence
  Description of Artificial Sequence: Synthetic oligonucleotide
  Antisense strand to SEQ ID NO: 1519484
agucucagucgagugaccu

SEQ ID NO: 1519486 - RNA, 19 nt, Artificial Sequence
  Description of Artificial Sequence: Synthetic oligonucleotide
  Sense strand starting at position 730 of SEQ ID NO: 1244874
cuccauggaucagaacaaa

SEQ ID NO: 1519487 - RNA, 19 nt, Artificial Sequence
  Description of Artificial Sequence: Synthetic oligonucleotide
  Antisense strand to SEQ ID NO: 1519486
uuuguucugauccauggag

SEQ ID NO: 1519488 - RNA, 19 nt, Artificial Sequence
  Description of Artificial Sequence: Synthetic oligonucleotide
  Sense strand starting at position 802 of SEQ ID NO: 1244874
guccggaggucauggguau

SEQ ID NO: 1519489 - RNA, 19 nt, Artificial Sequence
  Description of Artificial Sequence: Synthetic oligonucleotide
  Antisense strand to SEQ ID NO: 1519488
auacccaugaccuccggac

SEQ ID NO: 1519490 - RNA, 19 nt, Artificial Sequence
  Description of Artificial Sequence: Synthetic oligonucleotide
  Sense strand starting at position 803 of SEQ ID NO: 1244874
uccggaggucauggguauu

SEQ ID NO: 1519491 - RNA, 19 nt, Artificial Sequence
  Description of Artificial Sequence: Synthetic oligonucleotide
  Antisense strand to SEQ ID NO: 1519490
aauacccaugaccuccgga

SEQ ID NO: 1519492 - RNA, 19 nt, Artificial Sequence
  Description of Artificial Sequence: Synthetic oligonucleotide
  Sense strand starting at position 1162 of SEQ ID NO: 1244874
ccaccuuaucugcgaaagu

SEQ ID NO: 1519493 - RNA, 19 nt, Artificial Sequence
  Description of Artificial Sequence: Synthetic oligonucleotide
  Antisense strand to SEQ ID NO: 1519492
acuuucgcagauaaggugg

SEQ ID NO: 1519494 - RNA, 19 nt, Artificial Sequence
  Description of Artificial Sequence: Synthetic oligonucleotide
  Sense strand starting at position 1163 of SEQ ID NO: 1244874
caccuuaucugcgaaaguu

SEQ ID NO: 1519495 - RNA, 19 nt, Artificial Sequence
  Description of Artificial Sequence: Synthetic oligonucleotide
  Antisense strand to SEQ ID NO: 1519494
aacuuucgcagauaaggug

SEQ ID NO: 1519496 - RNA, 19 nt, Artificial Sequence
  Description of Artificial Sequence: Synthetic oligonucleotide
  Sense strand starting at position 1318 of SEQ ID NO: 1244874
cggcggaauuucgguggaa

SEQ ID NO: 1519497 - RNA, 19 nt, Artificial Sequence
  Description of Artificial Sequence: Synthetic oligonucleotide
  Antisense strand to SEQ ID NO: 1519496
uuccaccgaaauuccgccg

SEQ ID NO: 1519498 - RNA, 19 nt, Artificial Sequence
  Description of Artificial Sequence: Synthetic oligonucleotide
  Sense strand starting at position 1319 of SEQ ID NO: 1244874
ggcggaauuucgguggaau

SEQ ID NO: 1519499 - RNA, 19 nt, Artificial Sequence
  Description of Artificial Sequence: Synthetic oligonucleotide
  Antisense strand to SEQ ID NO: 1519498
auuccaccgaaauuccgcc

SEQ ID NO: 1519500 - RNA, 19 nt, Artificial Sequence
  Description of Artificial Sequence: Synthetic oligonucleotide
  Sense strand starting at position 1320 of SEQ ID NO: 1244874
gcggaauuucgguggaauu

SEQ ID NO: 1519501 - RNA, 19 nt, Artificial Sequence
  Description of Artificial Sequence: Synthetic oligonucleotide
  Antisense strand to SEQ ID NO: 1519500
aauuccaccgaaauuccgc

SEQ ID NO: 1519502 - RNA, 19 nt, Artificial Sequence
  Description of Artificial Sequence: Synthetic oligonucleotide
  Sense strand starting at position 1348 of SEQ ID NO: 1244874
agacgcaucucggcaaaga

SEQ ID NO: 1519503 - RNA, 19 nt, Artificial Sequence
  Description of Artificial Sequence: Synthetic oligonucleotide
  Antisense strand to SEQ ID NO: 1519502
ucuuugccgagaugcgucu

SEQ ID NO: 1519504 - RNA, 19 nt, Artificial Sequence
  Description of Artificial Sequence: Synthetic oligonucleotide
  Sense strand starting at position 1976 of SEQ ID NO: 1244874
gccuucuacggauguguuu

SEQ ID NO: 1519505 - RNA, 19 nt, Artificial Sequence
  Description of Artificial Sequence: Synthetic oligonucleotide
  Antisense strand to SEQ ID NO: 1519504
aaacacauccguagaaggc

SEQ ID NO: 1519506 - RNA, 19 nt, Artificial Sequence
  Description of Artificial Sequence: Synthetic oligonucleotide
  Sense strand starting at position 2021 of SEQ ID NO: 1244874
uuuauugcgcucggaggau

SEQ ID NO: 1519507 - RNA, 19 nt, Artificial Sequence
  Description of Artificial Sequence: Synthetic oligonucleotide
  Antisense strand to SEQ ID NO: 1519506
auccuccgagcgcaauaaa

SEQ ID NO: 1519508 - RNA, 19 nt, Artificial Sequence
  Description of Artificial Sequence: Synthetic oligonucleotide
  Sense strand starting at position 2580 of SEQ ID NO: 1244874
gggugugguuacugugaac

SEQ ID NO: 1519509 - RNA, 19 nt, Artificial Sequence
  Description of Artificial Sequence: Synthetic oligonucleotide
  Antisense strand to SEQ ID NO: 1519508
guucacaguaaccacaccc

SEQ ID NO: 1519510 - RNA, 19 nt, Artificial Sequence
  Description of Artificial Sequence: Synthetic oligonucleotide
  Sense strand starting at position 2583 of SEQ ID NO: 1244874
ugugguuacugugaacaaa

SEQ ID NO: 1519511 - RNA, 19 nt, Artificial Sequence
  Description of Artificial Sequence: Synthetic oligonucleotide
  Antisense strand to SEQ ID NO: 1519510
uuuguucacaguaaccaca

SEQ ID NO: 1519512 - RNA, 19 nt, Artificial Sequence
  Description of Artificial Sequence: Synthetic oligonucleotide
  Sense strand starting at position 2725 of SEQ ID NO: 1244874
ucucuuaguccacaaaugu

SEQ ID NO: 1519513 - RNA, 19 nt, Artificial Sequence
  Description of Artificial Sequence: Synthetic oligonucleotide
  Antisense strand to SEQ ID NO: 1519512
acauuuguggacuaagaga

SEQ ID NO: 1519514 - RNA, 19 nt, Artificial Sequence
  Description of Artificial Sequence: Synthetic oligonucleotide
  Sense strand starting at position 2803 of SEQ ID NO: 1244874
aagggaugaacauguguag

SEQ ID NO: 1519515 - RNA, 19 nt, Artificial Sequence
  Description of Artificial Sequence: Synthetic oligonucleotide
  Antisense strand to SEQ ID NO: 1519514
cuacacauguucaucccuu

SEQ ID NO: 1519516 - RNA, 19 nt, Artificial Sequence
  Description of Artificial Sequence: Synthetic oligonucleotide
  Sense strand starting at position 2953 of SEQ ID NO: 1244874
gucagcauuccagaguguu

SEQ ID NO: 1519517 - RNA, 19 nt, Artificial Sequence
  Description of Artificial Sequence: Synthetic oligonucleotide
  Antisense strand to SEQ ID NO: 1519516
aacacucuggaaugcugac

SEQ ID NO: 1519518 - RNA, 19 nt, Artificial Sequence
  Description of Artificial Sequence: Synthetic oligonucleotide
  Sense strand starting at position 2959 of SEQ ID NO: 1244874
auuccagaguguuugcagu

SEQ ID NO: 1519519 - RNA, 19 nt, Artificial Sequence
  Description of Artificial Sequence: Synthetic oligonucleotide
  Antisense strand to SEQ ID NO: 1519518
acugcaaacacucuggaau

SEQ ID NO: 1519520 - RNA, 19 nt, Artificial Sequence
  Description of Artificial Sequence: Synthetic oligonucleotide
  Sense strand starting at position 2965 of SEQ ID NO: 1244874
gaguguuugcaguccagcu

SEQ ID NO: 1519521 - RNA, 19 nt, Artificial Sequence
  Description of Artificial Sequence: Synthetic oligonucleotide
  Antisense strand to SEQ ID NO: 1519520
agcuggacugcaaacacuc

SEQ ID NO: 1519522 - RNA, 19 nt, Artificial Sequence
  Description of Artificial Sequence: Synthetic oligonucleotide
  Sense strand starting at position 2966 of SEQ ID NO: 1244874
aguguuugcaguccagcua

SEQ ID NO: 1519523 - RNA, 19 nt, Artificial Sequence
  Description of Artificial Sequence: Synthetic oligonucleotide
  Antisense strand to SEQ ID NO: 1519522
uagcuggacugcaaacacu

SEQ ID NO: 1519524 - RNA, 19 nt, Artificial Sequence
  Description of Artificial Sequence: Synthetic oligonucleotide
  Sense strand starting at position 3678 of SEQ ID NO: 1244874
cggugcugacuugagguau

SEQ ID NO: 1519525 - RNA, 19 nt, Artificial Sequence
  Description of Artificial Sequence: Synthetic oligonucleotide
  Antisense strand to SEQ ID NO: 1519524
auaccucaagucagcaccg

SEQ ID NO: 1519526 - RNA, 19 nt, Artificial Sequence
  Description of Artificial Sequence: Synthetic oligonucleotide
  Sense strand starting at position 3679 of SEQ ID NO: 1244874
ggugcugacuugagguaug

SEQ ID NO: 1519527 - RNA, 19 nt, Artificial Sequence
  Description of Artificial Sequence: Synthetic oligonucleotide
  Antisense strand to SEQ ID NO: 1519526
cauaccucaagucagcacc

SEQ ID NO: 1519528 - RNA, 19 nt, Artificial Sequence
  Description of Artificial Sequence: Synthetic oligonucleotide
  Sense strand starting at position 3684 of SEQ ID NO: 1244874
ugacuugagguaugaaacu

SEQ ID NO: 1519529 - RNA, 19 nt, Artificial Sequence
  Description of Artificial Sequence: Synthetic oligonucleotide
  Antisense strand to SEQ ID NO: 1519528
aguuucauaccucaaguca

SEQ ID NO: 1519530 - RNA, 19 nt, Artificial Sequence
  Description of Artificial Sequence: Synthetic oligonucleotide
  Sense strand starting at position 3732 of SEQ ID NO: 1244874
gcuucuuucuguuugugua

SEQ ID NO: 1519531 - RNA, 19 nt, Artificial Sequence
  Description of Artificial Sequence: Synthetic oligonucleotide
  Antisense strand to SEQ ID NO: 1519530
uacacaaacagaaagaagc

SEQ ID NO: 1519532 - RNA, 19 nt, Artificial Sequence
  Description of Artificial Sequence: Synthetic oligonucleotide
  Sense strand starting at position 3733 of SEQ ID NO: 1244874
cuucuuucuguuuguguau

SEQ ID NO: 1519533 - RNA, 19 nt, Artificial Sequence
  Description of Artificial Sequence: Synthetic oligonucleotide
  Antisense strand to SEQ ID NO: 1519532
auacacaaacagaaagaag

SEQ ID NO: 1519534 - RNA, 19 nt, Artificial Sequence
  Description of Artificial Sequence: Synthetic oligonucleotide
  Sense strand starting at position 3843 of SEQ ID NO: 1244874
guuagcgugaaauagaguu

SEQ ID NO: 1519535 - RNA, 19 nt, Artificial Sequence
  Description of Artificial Sequence: Synthetic oligonucleotide
  Antisense strand to SEQ ID NO: 1519534
aacucuauuucacgcuaac

SEQ ID NO: 1519536 - RNA, 19 nt, Artificial Sequence
  Description of Artificial Sequence: Synthetic oligonucleotide
  Sense strand starting at position 3851 of SEQ ID NO: 1244874
gaaauagaguugggucguu

SEQ ID NO: 1519537 - RNA, 19 nt, Artificial Sequence
  Description of Artificial Sequence: Synthetic oligonucleotide
  Antisense strand to SEQ ID NO: 1519536
aacgacccaacucuauuuc

SEQ ID NO: 1519538 - RNA, 19 nt, Artificial Sequence
  Description of Artificial Sequence: Synthetic oligonucleotide
  Sense strand starting at position 3856 of SEQ ID NO: 1244874
agaguugggucguucacaa

SEQ ID NO: 1519539 - RNA, 19 nt, Artificial Sequence
  Description of Artificial Sequence: Synthetic oligonucleotide
  Antisense strand to SEQ ID NO: 1519538
uugugaacgacccaacucu

SEQ ID NO: 1519540 - RNA, 19 nt, Artificial Sequence
  Description of Artificial Sequence: Synthetic oligonucleotide
  Sense strand starting at position 3881 of SEQ ID NO: 1244874
guuugaagcuaacguuuaa

SEQ ID NO: 1519541 - RNA, 19 nt, Artificial Sequence
  Description of Artificial Sequence: Synthetic oligonucleotide
  Antisense strand to SEQ ID NO: 1519540
uuaaacguuagcuucaaac

SEQ ID NO: 1519542 - RNA, 19 nt, Artificial Sequence
  Description of Artificial Sequence: Synthetic oligonucleotide
  Sense strand starting at position 108 of SEQ ID NO: 1244875
aggguauaauaucccuaca

SEQ ID NO: 1519543 - RNA, 19 nt, Artificial Sequence
  Description of Artificial Sequence: Synthetic oligonucleotide
  Antisense strand to SEQ ID NO: 1519542
uguagggauauuauacccu

SEQ ID NO: 1519544 - RNA, 19 nt, Artificial Sequence
  Description of Artificial Sequence: Synthetic oligonucleotide
  Sense strand starting at position 192 of SEQ ID NO: 1244875
ggaagugugggaggaguaa

SEQ ID NO: 1519545 - RNA, 19 nt, Artificial Sequence
  Description of Artificial Sequence: Synthetic oligonucleotide
  Antisense strand to SEQ ID NO: 1519544
uuacuccucccacacuucc

SEQ ID NO: 1519546 - RNA, 19 nt, Artificial Sequence
  Description of Artificial Sequence: Synthetic oligonucleotide
  Sense strand starting at position 204 of SEQ ID NO: 1244875
ggaguaaccuucuccaaga

SEQ ID NO: 1519547 - RNA, 19 nt, Artificial Sequence
  Description of Artificial Sequence: Synthetic oligonucleotide
  Antisense strand to SEQ ID NO: 1519546
ucuuggagaagguuacucc

SEQ ID NO: 1519548 - RNA, 19 nt, Artificial Sequence
  Description of Artificial Sequence: Synthetic oligonucleotide
  Sense strand starting at position 284 of SEQ ID NO: 1244875
guaaccucaucccagaguu

SEQ ID NO: 1519549 - RNA, 19 nt, Artificial Sequence
  Description of Artificial Sequence: Synthetic oligonucleotide
  Antisense strand to SEQ ID NO: 1519548
aacucugggaugagguuac

SEQ ID NO: 1519550 - RNA, 19 nt, Artificial Sequence
  Description of Artificial Sequence: Synthetic oligonucleotide
  Sense strand starting at position 656 of SEQ ID NO: 1244875
cuuugugugcagcgucaaa

SEQ ID NO: 1519551 - RNA, 19 nt, Artificial Sequence
  Description of Artificial Sequence: Synthetic oligonucleotide
  Antisense strand to SEQ ID NO: 1519550
uuugacgcugcacacaaag

SEQ ID NO: 1519552 - RNA, 19 nt, Artificial Sequence
  Description of Artificial Sequence: Synthetic oligonucleotide
  Sense strand starting at position 1018 of SEQ ID NO: 1244875
gcaagauccuaccucuaga

SEQ ID NO: 1519553 - RNA, 19 nt, Artificial Sequence
  Description of Artificial Sequence: Synthetic oligonucleotide
  Antisense strand to SEQ ID NO: 1519552
ucuagagguaggaucuugc

SEQ ID NO: 1519554 - RNA, 19 nt, Artificial Sequence
  Description of Artificial Sequence: Synthetic oligonucleotide
  Sense strand starting at position 1055 of SEQ ID NO: 1244875
aaagaauggugcgugggua

SEQ ID NO: 1519555 - RNA, 19 nt, Artificial Sequence
  Description of Artificial Sequence: Synthetic oligonucleotide
  Antisense strand to SEQ ID NO: 1519554
uacccacgcaccauucuuu

SEQ ID NO: 1519556 - RNA, 19 nt, Artificial Sequence
  Description of Artificial Sequence: Synthetic oligonucleotide
  Sense strand starting at position 1067 of SEQ ID NO: 1244875
guggguaguuuacucaaga

SEQ ID NO: 1519557 - RNA, 19 nt, Artificial Sequence
  Description of Artificial Sequence: Synthetic oligonucleotide
  Antisense strand to SEQ ID NO: 1519556
ucuugaguaaacuacccac

SEQ ID NO: 1519558 - RNA, 19 nt, Artificial Sequence
  Description of Artificial Sequence: Synthetic oligonucleotide
  Sense strand starting at position 1068 of SEQ ID NO: 1244875
uggguaguuuacucaagaa

SEQ ID NO: 1519559 - RNA, 19 nt, Artificial Sequence
  Description of Artificial Sequence: Synthetic oligonucleotide
  Antisense strand to SEQ ID NO: 1519558
uucuugaguaaacuaccca

SEQ ID NO: 1519560 - RNA, 19 nt, Artificial Sequence
  Description of Artificial Sequence: Synthetic oligonucleotide
  Sense strand starting at position 1104 of SEQ ID NO: 1244875
gggucagggaaugguucua

SEQ ID NO: 1519561 - RNA, 19 nt, Artificial Sequence
  Description of Artificial Sequence: Synthetic oligonucleotide
  Antisense strand to SEQ ID NO: 1519560
uagaaccauucccugaccc

SEQ ID NO: 1519562 - RNA, 19 nt, Artificial Sequence
  Description of Artificial Sequence: Synthetic oligonucleotide
  Sense strand starting at position 1153 of SEQ ID NO: 1244875
ucagacuccuugguuuaga

SEQ ID NO: 1519563 - RNA, 19 nt, Artificial Sequence
  Description of Artificial Sequence: Synthetic oligonucleotide
  Antisense strand to SEQ ID NO: 1519562
ucuaaaccaaggagucuga

SEQ ID NO: 1519564 - RNA, 19 nt, Artificial Sequence
  Description of Artificial Sequence: Synthetic oligonucleotide
  Sense strand starting at position 1154 of SEQ ID NO: 1244875
cagacuccuugguuuagaa

SEQ ID NO: 1519565 - RNA, 19 nt, Artificial Sequence
  Description of Artificial Sequence: Synthetic oligonucleotide
  Antisense strand to SEQ ID NO: 1519564
uucuaaaccaaggagucug

SEQ ID NO: 1519566 - RNA, 19 nt, Artificial Sequence
  Description of Artificial Sequence: Synthetic oligonucleotide
  Sense strand starting at position 1167 of SEQ ID NO: 1244875
uuagaaagcgacuacguuu

SEQ ID NO: 1519567 - RNA, 19 nt, Artificial Sequence
  Description of Artificial Sequence: Synthetic oligonucleotide
  Antisense strand to SEQ ID NO: 1519566
aaacguagucgcuuucuaa

SEQ ID NO: 1519568 - RNA, 19 nt, Artificial Sequence
  Description of Artificial Sequence: Synthetic oligonucleotide
  Sense strand starting at position 1178 of SEQ ID NO: 1244875
cuacguuuccuuggccuua

SEQ ID NO: 1519569 - RNA, 19 nt, Artificial Sequence
  Description of Artificial Sequence: Synthetic oligonucleotide
  Antisense strand to SEQ ID NO: 1519568
uaaggccaaggaaacguag

SEQ ID NO: 1519570 - RNA, 19 nt, Artificial Sequence
  Description of Artificial Sequence: Synthetic oligonucleotide
  Sense strand starting at position 1180 of SEQ ID NO: 1244875
acguuuccuuggccuuaga

SEQ ID NO: 1519571 - RNA, 19 nt, Artificial Sequence
  Description of Artificial Sequence: Synthetic oligonucleotide
  Antisense strand to SEQ ID NO: 1519570
ucuaaggccaaggaaacgu

SEQ ID NO: 1519572 - RNA, 19 nt, Artificial Sequence
  Description of Artificial Sequence: Synthetic oligonucleotide
  Sense strand starting at position 1263 of SEQ ID NO: 1244875
gccaccuucucagaggacu

SEQ ID NO: 1519573 - RNA, 19 nt, Artificial Sequence
  Description of Artificial Sequence: Synthetic oligonucleotide
  Antisense strand to SEQ ID NO: 1519572
aguccucugagaagguggc

SEQ ID NO: 1519574 - RNA, 19 nt, Artificial Sequence
  Description of Artificial Sequence: Synthetic oligonucleotide
  Sense strand starting at position 1593 of SEQ ID NO: 1244875
agaacaucggcccgagaau

SEQ ID NO: 1519575 - RNA, 19 nt, Artificial Sequence
  Description of Artificial Sequence: Synthetic oligonucleotide
  Antisense strand to SEQ ID NO: 1519574
auucucgggccgauguucu

SEQ ID NO: 1519576 - RNA, 19 nt, Artificial Sequence
  Description of Artificial Sequence: Synthetic oligonucleotide
  Sense strand starting at position 1607 of SEQ ID NO: 1244875
agaaucaccuaggagagaa

SEQ ID NO: 1519577 - RNA, 19 nt, Artificial Sequence
  Description of Artificial Sequence: Synthetic oligonucleotide
  Antisense strand to SEQ ID NO: 1519576
uucucuccuaggugauucu

SEQ ID NO: 1519578 - RNA, 19 nt, Artificial Sequence
  Description of Artificial Sequence: Synthetic oligonucleotide
  Sense strand starting at position 1619 of SEQ ID NO: 1244875
gagagaaggugaggucauu

SEQ ID NO: 1519579 - RNA, 19 nt, Artificial Sequence
  Description of Artificial Sequence: Synthetic oligonucleotide
  Antisense strand to SEQ ID NO: 1519578
aaugaccucaccuucucuc

SEQ ID NO: 1519580 - RNA, 19 nt, Artificial Sequence
  Description of Artificial Sequence: Synthetic oligonucleotide
  Sense strand starting at position 2274 of SEQ ID NO: 1244875
gcucauuuauuagauugga

SEQ ID NO: 1519581 - RNA, 19 nt, Artificial Sequence
  Description of Artificial Sequence: Synthetic oligonucleotide
  Antisense strand to SEQ ID NO: 1519580
uccaaucuaauaaaugagc

SEQ ID NO: 1519582 - RNA, 19 nt, Artificial Sequence
  Description of Artificial Sequence: Synthetic oligonucleotide
  Sense strand starting at position 2373 of SEQ ID NO: 1244875
gcuugagcaccauggugua

SEQ ID NO: 1519583 - RNA, 19 nt, Artificial Sequence
  Description of Artificial Sequence: Synthetic oligonucleotide
  Antisense strand to SEQ ID NO: 1519582
uacaccauggugcucaagc

SEQ ID NO: 1519584 - RNA, 19 nt, Artificial Sequence
  Description of Artificial Sequence: Synthetic oligonucleotide
  Sense strand starting at position 2445 of SEQ ID NO: 1244875
ugaaguccugacuaugcua

SEQ ID NO: 1519585 - RNA, 19 nt, Artificial Sequence
  Description of Artificial Sequence: Synthetic oligonucleotide
  Antisense strand to SEQ ID NO: 1519584
uagcauagucaggacuuca

SEQ ID NO: 1519586 - RNA, 19 nt, Artificial Sequence
  Description of Artificial Sequence: Synthetic oligonucleotide
  Sense strand starting at position 2448 of SEQ ID NO: 1244875
aguccugacuaugcuaaua

SEQ ID NO: 1519587 - RNA, 19 nt, Artificial Sequence
  Description of Artificial Sequence: Synthetic oligonucleotide
  Antisense strand to SEQ ID NO: 1519586
uauuagcauagucaggacu

SEQ ID NO: 1519588 - RNA, 19 nt, Artificial Sequence
  Description of Artificial Sequence: Synthetic oligonucleotide
  Sense strand starting at position 2459 of SEQ ID NO: 1244875
ugcuaauaauauccguaga

SEQ ID NO: 1519589 - RNA, 19 nt, Artificial Sequence
  Description of Artificial Sequence: Synthetic oligonucleotide
  Antisense strand to SEQ ID NO: 1519588
ucuacggauauuauuagca

SEQ ID NO: 1519590 - RNA, 19 nt, Artificial Sequence
  Description of Artificial Sequence: Synthetic oligonucleotide
  Sense strand starting at position 2695 of SEQ ID NO: 1244875
ccgagaucaugccauuugu

SEQ ID NO: 1519591 - RNA, 19 nt, Artificial Sequence
  Description of Artificial Sequence: Synthetic oligonucleotide
  Antisense strand to SEQ ID NO: 1519590
acaaauggcaugaucucgg

SEQ ID NO: 1519592 - RNA, 19 nt, Artificial Sequence
  Description of Artificial Sequence: Synthetic oligonucleotide
  Sense strand starting at position 2810 of SEQ ID NO: 1244875
ggacaaaguucuggaccuu

SEQ ID NO: 1519593 - RNA, 19 nt, Artificial Sequence
  Description of Artificial Sequence: Synthetic oligonucleotide
  Antisense strand to SEQ ID NO: 1519592
aagguccagaacuuugucc

SEQ ID NO: 1519594 - RNA, 19 nt, Artificial Sequence
  Description of Artificial Sequence: Synthetic oligonucleotide
  Sense strand starting at position 2821 of SEQ ID NO: 1244875
uggaccuugaucugagguu

SEQ ID NO: 1519595 - RNA, 19 nt, Artificial Sequence
  Description of Artificial Sequence: Synthetic oligonucleotide
  Antisense strand to SEQ ID NO: 1519594
aaccucagaucaaggucca

SEQ ID NO: 1519596 - RNA, 19 nt, Artificial Sequence
  Description of Artificial Sequence: Synthetic oligonucleotide
  Sense strand starting at position 2822 of SEQ ID NO: 1244875
ggaccuugaucugagguua

SEQ ID NO: 1519597 - RNA, 19 nt, Artificial Sequence
  Description of Artificial Sequence: Synthetic oligonucleotide
  Antisense strand to SEQ ID NO: 1519596
uaaccucagaucaaggucc

SEQ ID NO: 1519598 - RNA, 19 nt, Artificial Sequence
  Description of Artificial Sequence: Synthetic oligonucleotide
  Sense strand starting at position 2911 of SEQ ID NO: 1244875
gguugugaagguuagaaac

SEQ ID NO: 1519599 - RNA, 19 nt, Artificial Sequence
  Description of Artificial Sequence: Synthetic oligonucleotide
  Antisense strand to SEQ ID NO: 1519598
guuucuaaccuucacaacc

SEQ ID NO: 1519600 - RNA, 19 nt, Artificial Sequence
  Description of Artificial Sequence: Synthetic oligonucleotide
  Sense strand starting at position 2913 of SEQ ID NO: 1244875
uugugaagguuagaaacau

SEQ ID NO: 1519601 - RNA, 19 nt, Artificial Sequence
  Description of Artificial Sequence: Synthetic oligonucleotide
  Antisense strand to SEQ ID NO: 1519600
auguuucuaaccuucacaa

SEQ ID NO: 1519602 - RNA, 19 nt, Artificial Sequence
  Description of Artificial Sequence: Synthetic oligonucleotide
  Sense strand starting at position 3015 of SEQ ID NO: 1244875
caaagauggugguagugau

SEQ ID NO: 1519603 - RNA, 19 nt, Artificial Sequence
  Description of Artificial Sequence: Synthetic oligonucleotide
  Antisense strand to SEQ ID NO: 1519602
aucacuaccaccaucuuug

SEQ ID NO: 1519604 - RNA, 19 nt, Artificial Sequence
  Description of Artificial Sequence: Synthetic oligonucleotide
  Sense strand starting at position 3019 of SEQ ID NO: 1244875
gauggugguagugaucaca

SEQ ID NO: 1519605 - RNA, 19 nt, Artificial Sequence
  Description of Artificial Sequence: Synthetic oligonucleotide
  Antisense strand to SEQ ID NO: 1519604
ugugaucacuaccaccauc

SEQ ID NO: 1519606 - RNA, 19 nt, Artificial Sequence
  Description of Artificial Sequence: Synthetic oligonucleotide
  Sense strand starting at position 3022 of SEQ ID NO: 1244875
ggugguagugaucacagag

SEQ ID NO: 1519607 - RNA, 19 nt, Artificial Sequence
  Description of Artificial Sequence: Synthetic oligonucleotide
  Antisense strand to SEQ ID NO: 1519606
cucugugaucacuaccacc

SEQ ID NO: 1519608 - RNA, 19 nt, Artificial Sequence
  Description of Artificial Sequence: Synthetic oligonucleotide
  Sense strand starting at position 3072 of SEQ ID NO: 1244875
guaauaaccuuuccaggua

SEQ ID NO: 1519609 - RNA, 19 nt, Artificial Sequence
  Description of Artificial Sequence: Synthetic oligonucleotide
  Antisense strand to SEQ ID NO: 1519608
uaccuggaaagguuauuac

SEQ ID NO: 1519610 - RNA, 19 nt, Artificial Sequence
  Description of Artificial Sequence: Synthetic oligonucleotide
  Sense strand starting at position 3202 of SEQ ID NO: 1244875
ccuugugauuuggauacau

SEQ ID NO: 1519611 - RNA, 19 nt, Artificial Sequence
  Description of Artificial Sequence: Synthetic oligonucleotide
  Antisense strand to SEQ ID NO: 1519610
auguauccaaaucacaagg

SEQ ID NO: 1519612 - RNA, 19 nt, Artificial Sequence
  Description of Artificial Sequence: Synthetic oligonucleotide
  Sense strand starting at position 3373 of SEQ ID NO: 1244875
guacuacaugccuggcuaa

SEQ ID NO: 1519613 - RNA, 19 nt, Artificial Sequence
  Description of Artificial Sequence: Synthetic oligonucleotide
  Antisense strand to SEQ ID NO: 1519612
uuagccaggcauguaguac

SEQ ID NO: 1519614 - RNA, 19 nt, Artificial Sequence
  Description of Artificial Sequence: Synthetic oligonucleotide
  Sense strand starting at position 3831 of SEQ ID NO: 1244875
auagauaccuucuaccagu

SEQ ID NO: 1519615 - RNA, 19 nt, Artificial Sequence
  Description of Artificial Sequence: Synthetic oligonucleotide
  Antisense strand to SEQ ID NO: 1519614
acugguagaagguaucuau

SEQ ID NO: 1519616 - RNA, 19 nt, Artificial Sequence
  Description of Artificial Sequence: Synthetic oligonucleotide
  Sense strand starting at position 3871 of SEQ ID NO: 1244875
cuaaguaacuuguugagga

SEQ ID NO: 1519617 - RNA, 19 nt, Artificial Sequence
  Description of Artificial Sequence: Synthetic oligonucleotide
  Antisense strand to SEQ ID NO: 1519616
uccucaacaaguuacuuag

SEQ ID NO: 1519618 - RNA, 19 nt, Artificial Sequence
  Description of Artificial Sequence: Synthetic oligonucleotide
  Sense strand starting at position 3875 of SEQ ID NO: 1244875
guaacuuguugaggauaaa

SEQ ID NO: 1519619 - RNA, 19 nt, Artificial Sequence
  Description of Artificial Sequence: Synthetic oligonucleotide
  Antisense strand to SEQ ID NO: 1519618
uuuauccucaacaaguuac

SEQ ID NO: 1519620 - RNA, 19 nt, Artificial Sequence
  Description of Artificial Sequence: Synthetic oligonucleotide
  Sense strand starting at position 3961 of SEQ ID NO: 1244875
ucccauuucucaugauggu

SEQ ID NO: 1519621 - RNA, 19 nt, Artificial Sequence
  Description of Artificial Sequence: Synthetic oligonucleotide
  Antisense strand to SEQ ID NO: 1519620
accaucaugagaaauggga

SEQ ID NO: 1519622 - RNA, 19 nt, Artificial Sequence
  Description of Artificial Sequence: Synthetic oligonucleotide
  Sense strand starting at position 3 of SEQ ID NO: 1244876
agacgcuuuccuggaaguu

SEQ ID NO: 1519623 - RNA, 19 nt, Artificial Sequence
  Description of Artificial Sequence: Synthetic oligonucleotide
  Antisense strand to SEQ ID NO: 1519622
aacuuccaggaaagcgucu

SEQ ID NO: 1519624 - RNA, 19 nt, Artificial Sequence
  Description of Artificial Sequence: Synthetic oligonucleotide
  Sense strand starting at position 4 of SEQ ID NO: 1244876
gacgcuuuccuggaaguuu

SEQ ID NO: 1519625 - RNA, 19 nt, Artificial Sequence
  Description of Artificial Sequence: Synthetic oligonucleotide
  Antisense strand to SEQ ID NO: 1519624
aaacuuccaggaaagcguc

SEQ ID NO: 1519626 - RNA, 19 nt, Artificial Sequence
  Description of Artificial Sequence: Synthetic oligonucleotide
  Sense strand starting at position 71 of SEQ ID NO: 1244876
cuggaauaauaguuuauag

SEQ ID NO: 1519627 - RNA, 19 nt, Artificial Sequence
  Description of Artificial Sequence: Synthetic oligonucleotide
  Antisense strand to SEQ ID NO: 1519626
cuauaaacuauuauuccag

SEQ ID NO: 1519628 - RNA, 19 nt, Artificial Sequence
  Description of Artificial Sequence: Synthetic oligonucleotide
  Sense strand starting at position 80 of SEQ ID NO: 1244876
uaguuuauaguggguaaga

SEQ ID NO: 1519629 - RNA, 19 nt, Artificial Sequence
  Description of Artificial Sequence: Synthetic oligonucleotide
  Antisense strand to SEQ ID NO: 1519628
ucuuacccacuauaaacua

SEQ ID NO: 1519630 - RNA, 19 nt, Artificial Sequence
  Description of Artificial Sequence: Synthetic oligonucleotide
  Sense strand starting at position 81 of SEQ ID NO: 1244876
aguuuauaguggguaagau

SEQ ID NO: 1519631 - RNA, 19 nt, Artificial Sequence
  Description of Artificial Sequence: Synthetic oligonucleotide
  Antisense strand to SEQ ID NO: 1519630
aucuuacccacuauaaacu

SEQ ID NO: 1519632 - RNA, 19 nt, Artificial Sequence
  Description of Artificial Sequence: Synthetic oligonucleotide
  Sense strand starting at position 82 of SEQ ID NO: 1244876
guuuauaguggguaagaug

SEQ ID NO: 1519633 - RNA, 19 nt, Artificial Sequence
  Description of Artificial Sequence: Synthetic oligonucleotide
  Antisense strand to SEQ ID NO: 1519632
caucuuacccacuauaaac

SEQ ID NO: 1519634 - RNA, 19 nt, Artificial Sequence
  Description of Artificial Sequence: Synthetic oligonucleotide
  Sense strand starting at position 90 of SEQ ID NO: 1244876
uggguaagaugcuuuguuu

SEQ ID NO: 1519635 - RNA, 19 nt, Artificial Sequence
  Description of Artificial Sequence: Synthetic oligonucleotide
  Antisense strand to SEQ ID NO: 1519634
aaacaaagcaucuuaccca

SEQ ID NO: 1519636 - RNA, 19 nt, Artificial Sequence
  Description of Artificial Sequence: Synthetic oligonucleotide
  Sense strand starting at position 157 of SEQ ID NO: 1244876
gggugauguucagucuaaa

SEQ ID NO: 1519637 - RNA, 19 nt, Artificial Sequence
  Description of Artificial Sequence: Synthetic oligonucleotide
  Antisense strand to SEQ ID NO: 1519636
uuuagacugaacaucaccc

SEQ ID NO: 1519638 - RNA, 19 nt, Artificial Sequence
  Description of Artificial Sequence: Synthetic oligonucleotide
  Sense strand starting at position 193 of SEQ ID NO: 1244876
gguugcuggccucagugaa

SEQ ID NO: 1519639 - RNA, 19 nt, Artificial Sequence
  Description of Artificial Sequence: Synthetic oligonucleotide
  Antisense strand to SEQ ID NO: 1519638
uucacugaggccagcaacc

SEQ ID NO: 1519640 - RNA, 19 nt, Artificial Sequence
  Description of Artificial Sequence: Synthetic oligonucleotide
  Sense strand starting at position 232 of SEQ ID NO: 1244876
ccagcauccuagcauaaga

SEQ ID NO: 1519641 - RNA, 19 nt, Artificial Sequence
  Description of Artificial Sequence: Synthetic oligonucleotide
  Antisense strand to SEQ ID NO: 1519640
ucuuaugcuaggaugcugg

SEQ ID NO: 1519642 - RNA, 19 nt, Artificial Sequence
  Description of Artificial Sequence: Synthetic oligonucleotide
  Sense strand starting at position 353 of SEQ ID NO: 1244876
auagucugcuucucucuua

SEQ ID NO: 1519643 - RNA, 19 nt, Artificial Sequence
  Description of Artificial Sequence: Synthetic oligonucleotide
  Antisense strand to SEQ ID NO: 1519642
uaagagagaagcagacuau

SEQ ID NO: 1519644 - RNA, 19 nt, Artificial Sequence
  Description of Artificial Sequence: Synthetic oligonucleotide
  Sense strand starting at position 375 of SEQ ID NO: 1244876
ugacgugauggacaaggua

SEQ ID NO: 1519645 - RNA, 19 nt, Artificial Sequence
  Description of Artificial Sequence: Synthetic oligonucleotide
  Antisense strand to SEQ ID NO: 1519644
uaccuuguccaucacguca

SEQ ID NO: 1519646 - RNA, 19 nt, Artificial Sequence
  Description of Artificial Sequence: Synthetic oligonucleotide
  Sense strand starting at position 433 of SEQ ID NO: 1244876
caccguaucguggaugaaa

SEQ ID NO: 1519647 - RNA, 19 nt, Artificial Sequence
  Description of Artificial Sequence: Synthetic oligonucleotide
  Antisense strand to SEQ ID NO: 1519646
uuucauccacgauacggug

SEQ ID NO: 1519648 - RNA, 19 nt, Artificial Sequence
  Description of Artificial Sequence: Synthetic oligonucleotide
  Sense strand starting at position 435 of SEQ ID NO: 1244876
ccguaucguggaugaaaua

SEQ ID NO: 1519649 - RNA, 19 nt, Artificial Sequence
  Description of Artificial Sequence: Synthetic oligonucleotide
  Antisense strand to SEQ ID NO: 1519648
uauuucauccacgauacgg

SEQ ID NO: 1519650 - RNA, 19 nt, Artificial Sequence
  Description of Artificial Sequence: Synthetic oligonucleotide
  Sense strand starting at position 583 of SEQ ID NO: 1244876
gugaccacgccgucucaau

SEQ ID NO: 1519651 - RNA, 19 nt, Artificial Sequence
  Description of Artificial Sequence: Synthetic oligonucleotide
  Antisense strand to SEQ ID NO: 1519650
auugagacggcguggucac

SEQ ID NO: 1519652 - RNA, 19 nt, Artificial Sequence
  Description of Artificial Sequence: Synthetic oligonucleotide
  Sense strand starting at position 604 of SEQ ID NO: 1244876
ccacuaacaugucaggagu

SEQ ID NO: 1519653 - RNA, 19 nt, Artificial Sequence
  Description of Artificial Sequence: Synthetic oligonucleotide
  Antisense strand to SEQ ID NO: 1519652
acuccugacauguuagugg

SEQ ID NO: 1519654 - RNA, 19 nt, Artificial Sequence
  Description of Artificial Sequence: Synthetic oligonucleotide
  Sense strand starting at position 612 of SEQ ID NO: 1244876
augucaggagucugccaua

SEQ ID NO: 1519655 - RNA, 19 nt, Artificial Sequence
  Description of Artificial Sequence: Synthetic oligonucleotide
  Antisense strand to SEQ ID NO: 1519654
uauggcagacuccugacau

SEQ ID NO: 1519656 - RNA, 19 nt, Artificial Sequence
  Description of Artificial Sequence: Synthetic oligonucleotide
  Sense strand starting at position 615 of SEQ ID NO: 1244876
ucaggagucugccauacac

SEQ ID NO: 1519657 - RNA, 19 nt, Artificial Sequence
  Description of Artificial Sequence: Synthetic oligonucleotide
  Antisense strand to SEQ ID NO: 1519656
guguauggcagacuccuga

SEQ ID NO: 1519658 - RNA, 19 nt, Artificial Sequence
  Description of Artificial Sequence: Synthetic oligonucleotide
  Sense strand starting at position 679 of SEQ ID NO: 1244876
accaucaacuucucgguua

SEQ ID NO: 1519659 - RNA, 19 nt, Artificial Sequence
  Description of Artificial Sequence: Synthetic oligonucleotide
  Antisense strand to SEQ ID NO: 1519658
uaaccgagaaguugauggu

SEQ ID NO: 1519660 - RNA, 19 nt, Artificial Sequence
  Description of Artificial Sequence: Synthetic oligonucleotide
  Sense strand starting at position 750 of SEQ ID NO: 1244876
cuaagaguggcugggcaaa

SEQ ID NO: 1519661 - RNA, 19 nt, Artificial Sequence
  Description of Artificial Sequence: Synthetic oligonucleotide
  Antisense strand to SEQ ID NO: 1519660
uuugcccagccacucuuag

SEQ ID NO: 1519662 - RNA, 19 nt, Artificial Sequence
  Description of Artificial Sequence: Synthetic oligonucleotide
  Sense strand starting at position 1571 of SEQ ID NO: 1244876
gcucgccuggccucauuaa

SEQ ID NO: 1519663 - RNA, 19 nt, Artificial Sequence
  Description of Artificial Sequence: Synthetic oligonucleotide
  Antisense strand to SEQ ID NO: 1519662
uuaaugaggccaggcgagc

SEQ ID NO: 1519664 - RNA, 19 nt, Artificial Sequence
  Description of Artificial Sequence: Synthetic oligonucleotide
  Sense strand starting at position 1795 of SEQ ID NO: 1244876
gcagucuucuggccggagu

SEQ ID NO: 1519665 - RNA, 19 nt, Artificial Sequence
  Description of Artificial Sequence: Synthetic oligonucleotide
  Antisense strand to SEQ ID NO: 1519664
acuccggccagaagacugc

SEQ ID NO: 1519666 - RNA, 19 nt, Artificial Sequence
  Description of Artificial Sequence: Synthetic oligonucleotide
  Sense strand starting at position 1805 of SEQ ID NO: 1244876
ggccggagucccguguuua

SEQ ID NO: 1519667 - RNA, 19 nt, Artificial Sequence
  Description of Artificial Sequence: Synthetic oligonucleotide
  Antisense strand to SEQ ID NO: 1519666
uaaacacgggacuccggcc

SEQ ID NO: 1519668 - RNA, 19 nt, Artificial Sequence
  Description of Artificial Sequence: Synthetic oligonucleotide
  Sense strand starting at position 2148 of SEQ ID NO: 1244876
guauaaacucugggcgaaa

SEQ ID NO: 1519669 - RNA, 19 nt, Artificial Sequence
  Description of Artificial Sequence: Synthetic oligonucleotide
  Antisense strand to SEQ ID NO: 1519668
uuucgcccagaguuuauac

SEQ ID NO: 1519670 - RNA, 19 nt, Artificial Sequence
  Description of Artificial Sequence: Synthetic oligonucleotide
  Sense strand starting at position 2223 of SEQ ID NO: 1244876
agaagaggguaguaauaga

SEQ ID NO: 1519671 - RNA, 19 nt, Artificial Sequence
  Description of Artificial Sequence: Synthetic oligonucleotide
  Antisense strand to SEQ ID NO: 1519670
ucuauuacuacccucuucu

SEQ ID NO: 1519672 - RNA, 19 nt, Artificial Sequence
  Description of Artificial Sequence: Synthetic oligonucleotide
  Sense strand starting at position 2413 of SEQ ID NO: 1244876
gucgguuucuaggugagaa

SEQ ID NO: 1519673 - RNA, 19 nt, Artificial Sequence
  Description of Artificial Sequence: Synthetic oligonucleotide
  Antisense strand to SEQ ID NO: 1519672
uucucaccuagaaaccgac

SEQ ID NO: 1519674 - RNA, 19 nt, Artificial Sequence
  Description of Artificial Sequence: Synthetic oligonucleotide
  Sense strand starting at position 2414 of SEQ ID NO: 1244876
ucgguuucuaggugagaac

SEQ ID NO: 1519675 - RNA, 19 nt, Artificial Sequence
  Description of Artificial Sequence: Synthetic oligonucleotide
  Antisense strand to SEQ ID NO: 1519674
guucucaccuagaaaccga

SEQ ID NO: 1519676 - RNA, 19 nt, Artificial Sequence
  Description of Artificial Sequence: Synthetic oligonucleotide
  Sense strand starting at position 2415 of SEQ ID NO: 1244876
cgguuucuaggugagaaca

SEQ ID NO: 1519677 - RNA, 19 nt, Artificial Sequence
  Description of Artificial Sequence: Synthetic oligonucleotide
  Antisense strand to SEQ ID NO: 1519676
uguucucaccuagaaaccg

SEQ ID NO: 1519678 - RNA, 19 nt, Artificial Sequence
  Description of Artificial Sequence: Synthetic oligonucleotide
  Sense strand starting at position 2530 of SEQ ID NO: 1244876
gcagucauuccacgugggu

SEQ ID NO: 1519679 - RNA, 19 nt, Artificial Sequence
  Description of Artificial Sequence: Synthetic oligonucleotide
  Antisense strand to SEQ ID NO: 1519678
acccacguggaaugacugc

SEQ ID NO: 1519680 - RNA, 19 nt, Artificial Sequence
  Description of Artificial Sequence: Synthetic oligonucleotide
  Sense strand starting at position 2552 of SEQ ID NO: 1244876
uuuggauacccuugcgaga

SEQ ID NO: 1519681 - RNA, 19 nt, Artificial Sequence
  Description of Artificial Sequence: Synthetic oligonucleotide
  Antisense strand to SEQ ID NO: 1519680
ucucgcaaggguauccaaa

SEQ ID NO: 1519682 - RNA, 19 nt, Artificial Sequence
  Description of Artificial Sequence: Synthetic oligonucleotide
  Sense strand starting at position 3115 of SEQ ID NO: 1244876
gagcucauuucggcgaaac

SEQ ID NO: 1519683 - RNA, 19 nt, Artificial Sequence
  Description of Artificial Sequence: Synthetic oligonucleotide
  Antisense strand to SEQ ID NO: 1519682
guuucgccgaaaugagcuc

SEQ ID NO: 1519684 - RNA, 19 nt, Artificial Sequence
  Description of Artificial Sequence: Synthetic oligonucleotide
  Sense strand starting at position 3325 of SEQ ID NO: 1244876
ggugaaucaacuugcacga

SEQ ID NO: 1519685 - RNA, 19 nt, Artificial Sequence
  Description of Artificial Sequence: Synthetic oligonucleotide
  Antisense strand to SEQ ID NO: 1519684
ucgugcaaguugauucacc

SEQ ID NO: 1519686 - RNA, 19 nt, Artificial Sequence
  Description of Artificial Sequence: Synthetic oligonucleotide
  Sense strand starting at position 3426 of SEQ ID NO: 1244876
uuggguguguuuaucguuu

SEQ ID NO: 1519687 - RNA, 19 nt, Artificial Sequence
  Description of Artificial Sequence: Synthetic oligonucleotide
  Antisense strand to SEQ ID NO: 1519686
aaacgauaaacacacccaa

SEQ ID NO: 1519688 - RNA, 19 nt, Artificial Sequence
  Description of Artificial Sequence: Synthetic oligonucleotide
  Sense strand starting at position 3441 of SEQ ID NO: 1244876
guuugcgugccaaggagaa

SEQ ID NO: 1519689 - RNA, 19 nt, Artificial Sequence
  Description of Artificial Sequence: Synthetic oligonucleotide
  Antisense strand to SEQ ID NO: 1519688
uucuccuuggcacgcaaac

SEQ ID NO: 1519690 - RNA, 19 nt, Artificial Sequence
  Description of Artificial Sequence: Synthetic oligonucleotide
  Sense strand starting at position 3461 of SEQ ID NO: 1244876
ccgcuuucuccugaaauag

SEQ ID NO: 1519691 - RNA, 19 nt, Artificial Sequence
  Description of Artificial Sequence: Synthetic oligonucleotide
  Antisense strand to SEQ ID NO: 1519690
cuauuucaggagaaagcgg

SEQ ID NO: 1519692 - RNA, 19 nt, Artificial Sequence
  Description of Artificial Sequence: Synthetic oligonucleotide
  Sense strand starting at position 3471 of SEQ ID NO: 1244876
cugaaauagcgucacucgu

SEQ ID NO: 1519693 - RNA, 19 nt, Artificial Sequence
  Description of Artificial Sequence: Synthetic oligonucleotide
  Antisense strand to SEQ ID NO: 1519692
acgagugacgcuauuucag

SEQ ID NO: 1519694 - RNA, 19 nt, Artificial Sequence
  Description of Artificial Sequence: Synthetic oligonucleotide
  Sense strand starting at position 3479 of SEQ ID NO: 1244876
gcgucacucgugggcaaga

SEQ ID NO: 1519695 - RNA, 19 nt, Artificial Sequence
  Description of Artificial Sequence: Synthetic oligonucleotide
  Antisense strand to SEQ ID NO: 1519694
ucuugcccacgagugacgc

SEQ ID NO: 1519696 - RNA, 19 nt, Artificial Sequence
  Description of Artificial Sequence: Synthetic oligonucleotide
  Sense strand starting at position 3480 of SEQ ID NO: 1244876
cgucacucgugggcaagaa

SEQ ID NO: 1519697 - RNA, 19 nt, Artificial Sequence
  Description of Artificial Sequence: Synthetic oligonucleotide
  Antisense strand to SEQ ID NO: 1519696
uucuugcccacgagugacg

SEQ ID NO: 1519698 - RNA, 19 nt, Artificial Sequence
  Description of Artificial Sequence: Synthetic oligonucleotide
  Sense strand starting at position 3654 of SEQ ID NO: 1244876
ugcccuauucuuggacacu

SEQ ID NO: 1519699 - RNA, 19 nt, Artificial Sequence
  Description of Artificial Sequence: Synthetic oligonucleotide
  Antisense strand to SEQ ID NO: 1519698
aguguccaagaauagggca

SEQ ID NO: 1519700 - RNA, 19 nt, Artificial Sequence
  Description of Artificial Sequence: Synthetic oligonucleotide
  Sense strand starting at position 3863 of SEQ ID NO: 1244876
gugaaacucuaagaaauga

SEQ ID NO: 1519701 - RNA, 19 nt, Artificial Sequence
  Description of Artificial Sequence: Synthetic oligonucleotide
  Antisense strand to SEQ ID NO: 1519700
ucauuucuuagaguuucac

SEQ ID NO: 1519702 - RNA, 19 nt, Artificial Sequence
  Description of Artificial Sequence: Synthetic oligonucleotide
  Sense strand starting at position 308 of SEQ ID NO: 1244877
aagaacuugucuuuguguu

SEQ ID NO: 1519703 - RNA, 19 nt, Artificial Sequence
  Description of Artificial Sequence: Synthetic oligonucleotide
  Antisense strand to SEQ ID NO: 1519702
aacacaaagacaaguucuu

SEQ ID NO: 1519704 - RNA, 19 nt, Artificial Sequence
  Description of Artificial Sequence: Synthetic oligonucleotide
  Sense strand starting at position 336 of SEQ ID NO: 1244877
ggacaugcucagggcagaa

SEQ ID NO: 1519705 - RNA, 19 nt, Artificial Sequence
  Description of Artificial Sequence: Synthetic oligonucleotide
  Antisense strand to SEQ ID NO: 1519704
uucugcccugagcaugucc

SEQ ID NO: 1519706 - RNA, 19 nt, Artificial Sequence
  Description of Artificial Sequence: Synthetic oligonucleotide
  Sense strand starting at position 378 of SEQ ID NO: 1244877
aguagauuaugaucaucac

SEQ ID NO: 1519707 - RNA, 19 nt, Artificial Sequence
  Description of Artificial Sequence: Synthetic oligonucleotide
  Antisense strand to SEQ ID NO: 1519706
gugaugaucauaaucuacu

SEQ ID NO: 1519708 - RNA, 19 nt, Artificial Sequence
  Description of Artificial Sequence: Synthetic oligonucleotide
  Sense strand starting at position 525 of SEQ ID NO: 1244877
acuuguuaacccgguagag

SEQ ID NO: 1519709 - RNA, 19 nt, Artificial Sequence
  Description of Artificial Sequence: Synthetic oligonucleotide
  Antisense strand to SEQ ID NO: 1519708
cucuaccggguuaacaagu

SEQ ID NO: 1519710 - RNA, 19 nt, Artificial Sequence
  Description of Artificial Sequence: Synthetic oligonucleotide
  Sense strand starting at position 527 of SEQ ID NO: 1244877
uuguuaacccgguagagga

SEQ ID NO: 1519711 - RNA, 19 nt, Artificial Sequence
  Description of Artificial Sequence: Synthetic oligonucleotide
  Antisense strand to SEQ ID NO: 1519710
uccucuaccggguuaacaa

SEQ ID NO: 1519712 - RNA, 19 nt, Artificial Sequence
  Description of Artificial Sequence: Synthetic oligonucleotide
  Sense strand starting at position 542 of SEQ ID NO: 1244877
aggagaugauccugggcau

SEQ ID NO: 1519713 - RNA, 19 nt, Artificial Sequence
  Description of Artificial Sequence: Synthetic oligonucleotide
  Antisense strand to SEQ ID NO: 1519712
augcccaggaucaucuccu

SEQ ID NO: 1519714 - RNA, 19 nt, Artificial Sequence
  Description of Artificial Sequence: Synthetic oligonucleotide
  Sense strand starting at position 543 of SEQ ID NO: 1244877
ggagaugauccugggcauu

SEQ ID NO: 1519715 - RNA, 19 nt, Artificial Sequence
  Description of Artificial Sequence: Synthetic oligonucleotide
  Antisense strand to SEQ ID NO: 1519714
aaugcccaggaucaucucc

SEQ ID NO: 1519716 - RNA, 19 nt, Artificial Sequence
  Description of Artificial Sequence: Synthetic oligonucleotide
  Sense strand starting at position 601 of SEQ ID NO: 1244877
gcugacuuccaccaguagu

SEQ ID NO: 1519717 - RNA, 19 nt, Artificial Sequence
  Description of Artificial Sequence: Synthetic oligonucleotide
  Antisense strand to SEQ ID NO: 1519716
acuacugguggaagucagc

SEQ ID NO: 1519718 - RNA, 19 nt, Artificial Sequence
  Description of Artificial Sequence: Synthetic oligonucleotide
  Sense strand starting at position 722 of SEQ ID NO: 1244877
agacgcuuuccuggaaguu

SEQ ID NO: 1519719 - RNA, 19 nt, Artificial Sequence
  Description of Artificial Sequence: Synthetic oligonucleotide
  Antisense strand to SEQ ID NO: 1519718
aacuuccaggaaagcgucu

SEQ ID NO: 1519720 - RNA, 19 nt, Artificial Sequence
  Description of Artificial Sequence: Synthetic oligonucleotide
  Sense strand starting at position 723 of SEQ ID NO: 1244877
gacgcuuuccuggaaguuu

SEQ ID NO: 1519721 - RNA, 19 nt, Artificial Sequence
  Description of Artificial Sequence: Synthetic oligonucleotide
  Antisense strand to SEQ ID NO: 1519720
aaacuuccaggaaagcguc

SEQ ID NO: 1519722 - RNA, 19 nt, Artificial Sequence
  Description of Artificial Sequence: Synthetic oligonucleotide
  Sense strand starting at position 790 of SEQ ID NO: 1244877
cuggaauaauaguuuauag

SEQ ID NO: 1519723 - RNA, 19 nt, Artificial Sequence
  Description of Artificial Sequence: Synthetic oligonucleotide
  Antisense strand to SEQ ID NO: 1519722
cuauaaacuauuauuccag

SEQ ID NO: 1519724 - RNA, 19 nt, Artificial Sequence
  Description of Artificial Sequence: Synthetic oligonucleotide
  Sense strand starting at position 799 of SEQ ID NO: 1244877
uaguuuauaguggguaaga

SEQ ID NO: 1519725 - RNA, 19 nt, Artificial Sequence
  Description of Artificial Sequence: Synthetic oligonucleotide
  Antisense strand to SEQ ID NO: 1519724
ucuuacccacuauaaacua

SEQ ID NO: 1519726 - RNA, 19 nt, Artificial Sequence
  Description of Artificial Sequence: Synthetic oligonucleotide
  Sense strand starting at position 800 of SEQ ID NO: 1244877
aguuuauaguggguaagau

SEQ ID NO: 1519727 - RNA, 19 nt, Artificial Sequence
  Description of Artificial Sequence: Synthetic oligonucleotide
  Antisense strand to SEQ ID NO: 1519726
aucuuacccacuauaaacu

SEQ ID NO: 1519728 - RNA, 19 nt, Artificial Sequence
  Description of Artificial Sequence: Synthetic oligonucleotide
  Sense strand starting at position 801 of SEQ ID NO: 1244877
guuuauaguggguaagaug

SEQ ID NO: 1519729 - RNA, 19 nt, Artificial Sequence
  Description of Artificial Sequence: Synthetic oligonucleotide
  Antisense strand to SEQ ID NO: 1519728
caucuuacccacuauaaac

SEQ ID NO: 1519730 - RNA, 19 nt, Artificial Sequence
  Description of Artificial Sequence: Synthetic oligonucleotide
  Sense strand starting at position 809 of SEQ ID NO: 1244877
uggguaagaugcuuuguuu

SEQ ID NO: 1519731 - RNA, 19 nt, Artificial Sequence
  Description of Artificial Sequence: Synthetic oligonucleotide
  Antisense strand to SEQ ID NO: 1519730
aaacaaagcaucuuaccca

SEQ ID NO: 1519732 - RNA, 19 nt, Artificial Sequence
  Description of Artificial Sequence: Synthetic oligonucleotide
  Sense strand starting at position 876 of SEQ ID NO: 1244877
gggugauguucagucuaaa

SEQ ID NO: 1519733 - RNA, 19 nt, Artificial Sequence
  Description of Artificial Sequence: Synthetic oligonucleotide
  Antisense strand to SEQ ID NO: 1519732
uuuagacugaacaucaccc

SEQ ID NO: 1519734 - RNA, 19 nt, Artificial Sequence
  Description of Artificial Sequence: Synthetic oligonucleotide
  Sense strand starting at position 912 of SEQ ID NO: 1244877
gguugcuggccucagugaa

SEQ ID NO: 1519735 - RNA, 19 nt, Artificial Sequence
  Description of Artificial Sequence: Synthetic oligonucleotide
  Antisense strand to SEQ ID NO: 1519734
uucacugaggccagcaacc

SEQ ID NO: 1519736 - RNA, 19 nt, Artificial Sequence
  Description of Artificial Sequence: Synthetic oligonucleotide
  Sense strand starting at position 951 of SEQ ID NO: 1244877
ccagcauccuagcauaaga

SEQ ID NO: 1519737 - RNA, 19 nt, Artificial Sequence
  Description of Artificial Sequence: Synthetic oligonucleotide
  Antisense strand to SEQ ID NO: 1519736
ucuuaugcuaggaugcugg

SEQ ID NO: 1519738 - RNA, 19 nt, Artificial Sequence
  Description of Artificial Sequence: Synthetic oligonucleotide
  Sense strand starting at position 1072 of SEQ ID NO: 1244877
auagucugcuucucucuua

SEQ ID NO: 1519739 - RNA, 19 nt, Artificial Sequence
  Description of Artificial Sequence: Synthetic oligonucleotide
  Antisense strand to SEQ ID NO: 1519738
uaagagagaagcagacuau

SEQ ID NO: 1519740 - RNA, 19 nt, Artificial Sequence
  Description of Artificial Sequence: Synthetic oligonucleotide
  Sense strand starting at position 1094 of SEQ ID NO: 1244877
ugacgugauggacaaggua

SEQ ID NO: 1519741 - RNA, 19 nt, Artificial Sequence
  Description of Artificial Sequence: Synthetic oligonucleotide
  Antisense strand to SEQ ID NO: 1519740
uaccuuguccaucacguca

SEQ ID NO: 1519742 - RNA, 19 nt, Artificial Sequence
  Description of Artificial Sequence: Synthetic oligonucleotide
  Sense strand starting at position 1152 of SEQ ID NO: 1244877
caccguaucguggaugaaa

SEQ ID NO: 1519743 - RNA, 19 nt, Artificial Sequence
  Description of Artificial Sequence: Synthetic oligonucleotide
  Antisense strand to SEQ ID NO: 1519742
uuucauccacgauacggug

SEQ ID NO: 1519744 - RNA, 19 nt, Artificial Sequence
  Description of Artificial Sequence: Synthetic oligonucleotide
  Sense strand starting at position 1154 of SEQ ID NO: 1244877
ccguaucguggaugaaaua

SEQ ID NO: 1519745 - RNA, 19 nt, Artificial Sequence
  Description of Artificial Sequence: Synthetic oligonucleotide
  Antisense strand to SEQ ID NO: 1519744
uauuucauccacgauacgg

SEQ ID NO: 1519746 - RNA, 19 nt, Artificial Sequence
  Description of Artificial Sequence: Synthetic oligonucleotide
  Sense strand starting at position 1302 of SEQ ID NO: 1244877
gugaccacgccgucucaau

SEQ ID NO: 1519747 - RNA, 19 nt, Artificial Sequence
  Description of Artificial Sequence: Synthetic oligonucleotide
  Antisense strand to SEQ ID NO: 1519746
auugagacggcguggucac

SEQ ID NO: 1519748 - RNA, 19 nt, Artificial Sequence
  Description of Artificial Sequence: Synthetic oligonucleotide
  Sense strand starting at position 1323 of SEQ ID NO: 1244877
ccacuaacaugucaggagu

SEQ ID NO: 1519749 - RNA, 19 nt, Artificial Sequence
  Description of Artificial Sequence: Synthetic oligonucleotide
  Antisense strand to SEQ ID NO: 1519748
acuccugacauguuagugg

SEQ ID NO: 1519750 - RNA, 19 nt, Artificial Sequence
  Description of Artificial Sequence: Synthetic oligonucleotide
  Sense strand starting at position 1331 of SEQ ID NO: 1244877
augucaggagucugccaua

SEQ ID NO: 1519751 - RNA, 19 nt, Artificial Sequence
  Description of Artificial Sequence: Synthetic oligonucleotide
  Antisense strand to SEQ ID NO: 1519750
uauggcagacuccugacau

SEQ ID NO: 1519752 - RNA, 19 nt, Artificial Sequence
  Description of Artificial Sequence: Synthetic oligonucleotide
  Sense strand starting at position 1334 of SEQ ID NO: 1244877
ucaggagucugccauacac

SEQ ID NO: 1519753 - RNA, 19 nt, Artificial Sequence
  Description of Artificial Sequence: Synthetic oligonucleotide
  Antisense strand to SEQ ID NO: 1519752
guguauggcagacuccuga

SEQ ID NO: 1519754 - RNA, 19 nt, Artificial Sequence
  Description of Artificial Sequence: Synthetic oligonucleotide
  Sense strand starting at position 1398 of SEQ ID NO: 1244877
accaucaacuucucgguua

SEQ ID NO: 1519755 - RNA, 19 nt, Artificial Sequence
  Description of Artificial Sequence: Synthetic oligonucleotide
  Antisense strand to SEQ ID NO: 1519754
uaaccgagaaguugauggu

SEQ ID NO: 1519756 - RNA, 19 nt, Artificial Sequence
  Description of Artificial Sequence: Synthetic oligonucleotide
  Sense strand starting at position 1469 of SEQ ID NO: 1244877
cuaagaguggcugggcaaa

SEQ ID NO: 1519757 - RNA, 19 nt, Artificial Sequence
  Description of Artificial Sequence: Synthetic oligonucleotide
  Antisense strand to SEQ ID NO: 1519756
uuugcccagccacucuuag

SEQ ID NO: 1519758 - RNA, 19 nt, Artificial Sequence
  Description of Artificial Sequence: Synthetic oligonucleotide
  Sense strand starting at position 2290 of SEQ ID NO: 1244877
gcucgccuggccucauuaa

SEQ ID NO: 1519759 - RNA, 19 nt, Artificial Sequence
  Description of Artificial Sequence: Synthetic oligonucleotide
  Antisense strand to SEQ ID NO: 1519758
uuaaugaggccaggcgagc

SEQ ID NO: 1519760 - RNA, 19 nt, Artificial Sequence
  Description of Artificial Sequence: Synthetic oligonucleotide
  Sense strand starting at position 2514 of SEQ ID NO: 1244877
gcagucuucuggccggagu

SEQ ID NO: 1519761 - RNA, 19 nt, Artificial Sequence
  Description of Artificial Sequence: Synthetic oligonucleotide
  Antisense strand to SEQ ID NO: 1519760
acuccggccagaagacugc

SEQ ID NO: 1519762 - RNA, 19 nt, Artificial Sequence
  Description of Artificial Sequence: Synthetic oligonucleotide
  Sense strand starting at position 2524 of SEQ ID NO: 1244877
ggccggagucccguguuua

SEQ ID NO: 1519763 - RNA, 19 nt, Artificial Sequence
  Description of Artificial Sequence: Synthetic oligonucleotide
  Antisense strand to SEQ ID NO: 1519762
uaaacacgggacuccggcc

SEQ ID NO: 1519764 - RNA, 19 nt, Artificial Sequence
  Description of Artificial Sequence: Synthetic oligonucleotide
  Sense strand starting at position 2867 of SEQ ID NO: 1244877
guauaaacucugggcgaaa

SEQ ID NO: 1519765 - RNA, 19 nt, Artificial Sequence
  Description of Artificial Sequence: Synthetic oligonucleotide
  Antisense strand to SEQ ID NO: 1519764
uuucgcccagaguuuauac

SEQ ID NO: 1519766 - RNA, 19 nt, Artificial Sequence
  Description of Artificial Sequence: Synthetic oligonucleotide
  Sense strand starting at position 2942 of SEQ ID NO: 1244877
agaagaggguaguaauaga

SEQ ID NO: 1519767 - RNA, 19 nt, Artificial Sequence
  Description of Artificial Sequence: Synthetic oligonucleotide
  Antisense strand to SEQ ID NO: 1519766
ucuauuacuacccucuucu

SEQ ID NO: 1519768 - RNA, 19 nt, Artificial Sequence
  Description of Artificial Sequence: Synthetic oligonucleotide
  Sense strand starting at position 3132 of SEQ ID NO: 1244877
gucgguuucuaggugagaa

SEQ ID NO: 1519769 - RNA, 19 nt, Artificial Sequence
  Description of Artificial Sequence: Synthetic oligonucleotide
  Antisense strand to SEQ ID NO: 1519768
uucucaccuagaaaccgac

SEQ ID NO: 1519770 - RNA, 19 nt, Artificial Sequence
  Description of Artificial Sequence: Synthetic oligonucleotide
  Sense strand starting at position 3133 of SEQ ID NO: 1244877
ucgguuucuaggugagaac

SEQ ID NO: 1519771 - RNA, 19 nt, Artificial Sequence
  Description of Artificial Sequence: Synthetic oligonucleotide
  Antisense strand to SEQ ID NO: 1519770
guucucaccuagaaaccga

SEQ ID NO: 1519772 - RNA, 19 nt, Artificial Sequence
  Description of Artificial Sequence: Synthetic oligonucleotide
  Sense strand starting at position 3134 of SEQ ID NO: 1244877
cgguuucuaggugagaaca

SEQ ID NO: 1519773 - RNA, 19 nt, Artificial Sequence
  Description of Artificial Sequence: Synthetic oligonucleotide
  Antisense strand to SEQ ID NO: 1519772
uguucucaccuagaaaccg

SEQ ID NO: 1519774 - RNA, 19 nt, Artificial Sequence
  Description of Artificial Sequence: Synthetic oligonucleotide
  Sense strand starting at position 3249 of SEQ ID NO: 1244877
gcagucauuccacgugggu

SEQ ID NO: 1519775 - RNA, 19 nt, Artificial Sequence
  Description of Artificial Sequence: Synthetic oligonucleotide
  Antisense strand to SEQ ID NO: 1519774
acccacguggaaugacugc

SEQ ID NO: 1519776 - RNA, 19 nt, Artificial Sequence
  Description of Artificial Sequence: Synthetic oligonucleotide
  Sense strand starting at position 3271 of SEQ ID NO: 1244877
uuuggauacccuugcgaga

SEQ ID NO: 1519777 - RNA, 19 nt, Artificial Sequence
  Description of Artificial Sequence: Synthetic oligonucleotide
  Antisense strand to SEQ ID NO: 1519776
ucucgcaaggguauccaaa

SEQ ID NO: 1519778 - RNA, 19 nt, Artificial Sequence
  Description of Artificial Sequence: Synthetic oligonucleotide
  Sense strand starting at position 3833 of SEQ ID NO: 1244877
ugagcucauuucggcgaaa

SEQ ID NO: 1519779 - RNA, 19 nt, Artificial Sequence
  Description of Artificial Sequence: Synthetic oligonucleotide
  Antisense strand to SEQ ID NO: 1519778
uuucgccgaaaugagcuca

SEQ ID NO: 1519780 - RNA, 19 nt, Artificial Sequence
  Description of Artificial Sequence: Synthetic oligonucleotide
  Sense strand starting at position 3834 of SEQ ID NO: 1244877
gagcucauuucggcgaaac

SEQ ID NO: 1519781 - RNA, 19 nt, Artificial Sequence
  Description of Artificial Sequence: Synthetic oligonucleotide
  Antisense strand to SEQ ID NO: 1519780
guuucgccgaaaugagcuc

SEQ ID NO: 1519782 - RNA, 19 nt, Artificial Sequence
  Description of Artificial Sequence: Synthetic oligonucleotide
  Sense strand starting at position 3 of SEQ ID NO: 1244878
cugagcagccuugaaacaa

SEQ ID NO: 1519783 - RNA, 19 nt, Artificial Sequence
  Description of Artificial Sequence: Synthetic oligonucleotide
  Antisense strand to SEQ ID NO: 1519782
uuguuucaaggcugcucag

SEQ ID NO: 1519784 - RNA, 19 nt, Artificial Sequence
  Description of Artificial Sequence: Synthetic oligonucleotide
  Sense strand starting at position 479 of SEQ ID NO: 1244878
auuccacauuucugugauc

SEQ ID NO: 1519785 - RNA, 19 nt, Artificial Sequence
  Description of Artificial Sequence: Synthetic oligonucleotide
  Antisense strand to SEQ ID NO: 1519784
gaucacagaaauguggaau

SEQ ID NO: 1519786 - RNA, 19 nt, Artificial Sequence
  Description of Artificial Sequence: Synthetic oligonucleotide
  Sense strand starting at position 696 of SEQ ID NO: 1244878
ggcagagacugugggaaau

SEQ ID NO: 1519787 - RNA, 19 nt, Artificial Sequence
  Description of Artificial Sequence: Synthetic oligonucleotide
  Antisense strand to SEQ ID NO: 1519786
auuucccacagucucugcc

SEQ ID NO: 1519788 - RNA, 19 nt, Artificial Sequence
  Description of Artificial Sequence: Synthetic oligonucleotide
  Sense strand starting at position 698 of SEQ ID NO: 1244878
cagagacugugggaaauua

SEQ ID NO: 1519789 - RNA, 19 nt, Artificial Sequence
  Description of Artificial Sequence: Synthetic oligonucleotide
  Antisense strand to SEQ ID NO: 1519788
uaauuucccacagucucug

SEQ ID NO: 1519790 - RNA, 19 nt, Artificial Sequence
  Description of Artificial Sequence: Synthetic oligonucleotide
  Sense strand starting at position 708 of SEQ ID NO: 1244878
gggaaauuauaggacagca

SEQ ID NO: 1519791 - RNA, 19 nt, Artificial Sequence
  Description of Artificial Sequence: Synthetic oligonucleotide
  Antisense strand to SEQ ID NO: 1519790
ugcuguccuauaauuuccc

SEQ ID NO: 1519792 - RNA, 19 nt, Artificial Sequence
  Description of Artificial Sequence: Synthetic oligonucleotide
  Sense strand starting at position 1132 of SEQ ID NO: 1244878
accaaaugaugacagagaa

SEQ ID NO: 1519793 - RNA, 19 nt, Artificial Sequence
  Description of Artificial Sequence: Synthetic oligonucleotide
  Antisense strand to SEQ ID NO: 1519792
uucucugucaucauuuggu

SEQ ID NO: 1519794 - RNA, 19 nt, Artificial Sequence
  Description of Artificial Sequence: Synthetic oligonucleotide
  Sense strand starting at position 1193 of SEQ ID NO: 1244878
cuccgucugccaggaagua

SEQ ID NO: 1519795 - RNA, 19 nt, Artificial Sequence
  Description of Artificial Sequence: Synthetic oligonucleotide
  Antisense strand to SEQ ID NO: 1519794
uacuuccuggcagacggag

SEQ ID NO: 1519796 - RNA, 19 nt, Artificial Sequence
  Description of Artificial Sequence: Synthetic oligonucleotide
  Sense strand starting at position 1205 of SEQ ID NO: 1244878
ggaaguaaccugugggcau

SEQ ID NO: 1519797 - RNA, 19 nt, Artificial Sequence
  Description of Artificial Sequence: Synthetic oligonucleotide
  Antisense strand to SEQ ID NO: 1519796
augcccacagguuacuucc

SEQ ID NO: 1519798 - RNA, 19 nt, Artificial Sequence
  Description of Artificial Sequence: Synthetic oligonucleotide
  Sense strand starting at position 2179 of SEQ ID NO: 1244878
ccgggauguucgccaauag

SEQ ID NO: 1519799 - RNA, 19 nt, Artificial Sequence
  Description of Artificial Sequence: Synthetic oligonucleotide
  Antisense strand to SEQ ID NO: 1519798
cuauuggcgaacaucccgg

SEQ ID NO: 1519800 - RNA, 19 nt, Artificial Sequence
  Description of Artificial Sequence: Synthetic oligonucleotide
  Sense strand starting at position 2720 of SEQ ID NO: 1244878
ccguuggguggguagaaua

SEQ ID NO: 1519801 - RNA, 19 nt, Artificial Sequence
  Description of Artificial Sequence: Synthetic oligonucleotide
  Antisense strand to SEQ ID NO: 1519800
uauucuacccacccaacgg

SEQ ID NO: 1519802 - RNA, 19 nt, Artificial Sequence
  Description of Artificial Sequence: Synthetic oligonucleotide
  Sense strand starting at position 3216 of SEQ ID NO: 1244878
gugacuuuguuccaccaua

SEQ ID NO: 1519803 - RNA, 19 nt, Artificial Sequence
  Description of Artificial Sequence: Synthetic oligonucleotide
  Antisense strand to SEQ ID NO: 1519802
uaugguggaacaaagucac

SEQ ID NO: 1519804 - RNA, 19 nt, Artificial Sequence
  Description of Artificial Sequence: Synthetic oligonucleotide
  Sense strand starting at position 3480 of SEQ ID NO: 1244878
auugcaaacuuucguuaca

SEQ ID NO: 1519805 - RNA, 19 nt, Artificial Sequence
  Description of Artificial Sequence: Synthetic oligonucleotide
  Antisense strand to SEQ ID NO: 1519804
uguaacgaaaguuugcaau

SEQ ID NO: 1519806 - RNA, 19 nt, Artificial Sequence
  Description of Artificial Sequence: Synthetic oligonucleotide
  Sense strand starting at position 3483 of SEQ ID NO: 1244878
gcaaacuuucguuacagca

SEQ ID NO: 1519807 - RNA, 19 nt, Artificial Sequence
  Description of Artificial Sequence: Synthetic oligonucleotide
  Antisense strand to SEQ ID NO: 1519806
ugcuguaacgaaaguuugc

SEQ ID NO: 1519808 - RNA, 19 nt, Artificial Sequence
  Description of Artificial Sequence: Synthetic oligonucleotide
  Sense strand starting at position 3485 of SEQ ID NO: 1244878
aaacuuucguuacagcaga

SEQ ID NO: 1519809 - RNA, 19 nt, Artificial Sequence
  Description of Artificial Sequence: Synthetic oligonucleotide
  Antisense strand to SEQ ID NO: 1519808
ucugcuguaacgaaaguuu

SEQ ID NO: 1519810 - RNA, 19 nt, Artificial Sequence
  Description of Artificial Sequence: Synthetic oligonucleotide
  Sense strand starting at position 3549 of SEQ ID NO: 1244878
auugcaaugcugggaugaa

SEQ ID NO: 1519811 - RNA, 19 nt, Artificial Sequence
  Description of Artificial Sequence: Synthetic oligonucleotide
  Antisense strand to SEQ ID NO: 1519810
uucaucccagcauugcaau

SEQ ID NO: 1519812 - RNA, 19 nt, Artificial Sequence
  Description of Artificial Sequence: Synthetic oligonucleotide
  Sense strand starting at position 3550 of SEQ ID NO: 1244878
uugcaaugcugggaugaac

SEQ ID NO: 1519813 - RNA, 19 nt, Artificial Sequence
  Description of Artificial Sequence: Synthetic oligonucleotide
  Antisense strand to SEQ ID NO: 1519812
guucaucccagcauugcaa

SEQ ID NO: 1519814 - RNA, 19 nt, Artificial Sequence
  Description of Artificial Sequence: Synthetic oligonucleotide
  Sense strand starting at position 3561 of SEQ ID NO: 1244878
ggaugaacaucuuaucacu

SEQ ID NO: 1519815 - RNA, 19 nt, Artificial Sequence
  Description of Artificial Sequence: Synthetic oligonucleotide
  Antisense strand to SEQ ID NO: 1519814
agugauaagauguucaucc

SEQ ID NO: 1519816 - RNA, 19 nt, Artificial Sequence
  Description of Artificial Sequence: Synthetic oligonucleotide
  Sense strand starting at position 3604 of SEQ ID NO: 1244878
aggauaaauucccaaagau

SEQ ID NO: 1519817 - RNA, 19 nt, Artificial Sequence
  Description of Artificial Sequence: Synthetic oligonucleotide
  Antisense strand to SEQ ID NO: 1519816
aucuuugggaauuuauccu

SEQ ID NO: 1519818 - RNA, 19 nt, Artificial Sequence
  Description of Artificial Sequence: Synthetic oligonucleotide
  Sense strand starting at position 3621 of SEQ ID NO: 1244878
auagaauucguaggucaaa

SEQ ID NO: 1519819 - RNA, 19 nt, Artificial Sequence
  Description of Artificial Sequence: Synthetic oligonucleotide
  Antisense strand to SEQ ID NO: 1519818
uuugaccuacgaauucuau

SEQ ID NO: 1519820 - RNA, 19 nt, Artificial Sequence
  Description of Artificial Sequence: Synthetic oligonucleotide
  Sense strand starting at position 3622 of SEQ ID NO: 1244878
uagaauucguaggucaaau

SEQ ID NO: 1519821 - RNA, 19 nt, Artificial Sequence
  Description of Artificial Sequence: Synthetic oligonucleotide
  Antisense strand to SEQ ID NO: 1519820
auuugaccuacgaauucua

SEQ ID NO: 1519822 - RNA, 19 nt, Artificial Sequence
  Description of Artificial Sequence: Synthetic oligonucleotide
  Sense strand starting at position 3624 of SEQ ID NO: 1244878
gaauucguaggucaaauga

SEQ ID NO: 1519823 - RNA, 19 nt, Artificial Sequence
  Description of Artificial Sequence: Synthetic oligonucleotide
  Antisense strand to SEQ ID NO: 1519822
ucauuugaccuacgaauuc

SEQ ID NO: 1519824 - RNA, 19 nt, Artificial Sequence
  Description of Artificial Sequence: Synthetic oligonucleotide
  Sense strand starting at position 3706 of SEQ ID NO: 1244878
uguauacucccacacgcaa

SEQ ID NO: 1519825 - RNA, 19 nt, Artificial Sequence
  Description of Artificial Sequence: Synthetic oligonucleotide
  Antisense strand to SEQ ID NO: 1519824
uugcgugugggaguauaca

SEQ ID NO: 1519826 - RNA, 19 nt, Artificial Sequence
  Description of Artificial Sequence: Synthetic oligonucleotide
  Sense strand starting at position 3717 of SEQ ID NO: 1244878
acacgcaauguaugggaau

SEQ ID NO: 1519827 - RNA, 19 nt, Artificial Sequence
  Description of Artificial Sequence: Synthetic oligonucleotide
  Antisense strand to SEQ ID NO: 1519826
auucccauacauugcgugu

SEQ ID NO: 1519828 - RNA, 19 nt, Artificial Sequence
  Description of Artificial Sequence: Synthetic oligonucleotide
  Sense strand starting at position 3719 of SEQ ID NO: 1244878
acgcaauguaugggaaugu

SEQ ID NO: 1519829 - RNA, 19 nt, Artificial Sequence
  Description of Artificial Sequence: Synthetic oligonucleotide
  Antisense strand to SEQ ID NO: 1519828
acauucccauacauugcgu

SEQ ID NO: 1519830 - RNA, 19 nt, Artificial Sequence
  Description of Artificial Sequence: Synthetic oligonucleotide
  Sense strand starting at position 3720 of SEQ ID NO: 1244878
cgcaauguaugggaauguu

SEQ ID NO: 1519831 - RNA, 19 nt, Artificial Sequence
  Description of Artificial Sequence: Synthetic oligonucleotide
  Antisense strand to SEQ ID NO: 1519830
aacauucccauacauugcg

SEQ ID NO: 1519832 - RNA, 19 nt, Artificial Sequence
  Description of Artificial Sequence: Synthetic oligonucleotide
  Sense strand starting at position 3742 of SEQ ID NO: 1244878
ucaguagucucuuugccaa

SEQ ID NO: 1519833 - RNA, 19 nt, Artificial Sequence
  Description of Artificial Sequence: Synthetic oligonucleotide
  Antisense strand to SEQ ID NO: 1519832
uuggcaaagagacuacuga

SEQ ID NO: 1519834 - RNA, 19 nt, Artificial Sequence
  Description of Artificial Sequence: Synthetic oligonucleotide
  Sense strand starting at position 3744 of SEQ ID NO: 1244878
aguagucucuuugccaaua

SEQ ID NO: 1519835 - RNA, 19 nt, Artificial Sequence
  Description of Artificial Sequence: Synthetic oligonucleotide
  Antisense strand to SEQ ID NO: 1519834
uauuggcaaagagacuacu

SEQ ID NO: 1519836 - RNA, 19 nt, Artificial Sequence
  Description of Artificial Sequence: Synthetic oligonucleotide
  Sense strand starting at position 3745 of SEQ ID NO: 1244878
guagucucuuugccaauau

SEQ ID NO: 1519837 - RNA, 19 nt, Artificial Sequence
  Description of Artificial Sequence: Synthetic oligonucleotide
  Antisense strand to SEQ ID NO: 1519836
auauuggcaaagagacuac

SEQ ID NO: 1519838 - RNA, 19 nt, Artificial Sequence
  Description of Artificial Sequence: Synthetic oligonucleotide
  Sense strand starting at position 3754 of SEQ ID NO: 1244878
uugccaauauugggucuua

SEQ ID NO: 1519839 - RNA, 19 nt, Artificial Sequence
  Description of Artificial Sequence: Synthetic oligonucleotide
  Antisense strand to SEQ ID NO: 1519838
uaagacccaauauuggcaa

SEQ ID NO: 1519840 - RNA, 19 nt, Artificial Sequence
  Description of Artificial Sequence: Synthetic oligonucleotide
  Sense strand starting at position 3755 of SEQ ID NO: 1244878
ugccaauauugggucuuau

SEQ ID NO: 1519841 - RNA, 19 nt, Artificial Sequence
  Description of Artificial Sequence: Synthetic oligonucleotide
  Antisense strand to SEQ ID NO: 1519840
auaagacccaauauuggca

SEQ ID NO: 1519842 - RNA, 19 nt, Artificial Sequence
  Description of Artificial Sequence: Synthetic oligonucleotide
  Sense strand starting at position 3779 of SEQ ID NO: 1244878
ucuguuaugguuugcuaag

SEQ ID NO: 1519843 - RNA, 19 nt, Artificial Sequence
  Description of Artificial Sequence: Synthetic oligonucleotide
  Antisense strand to SEQ ID NO: 1519842
cuuagcaaaccauaacaga

SEQ ID NO: 1519844 - RNA, 19 nt, Artificial Sequence
  Description of Artificial Sequence: Synthetic oligonucleotide
  Sense strand starting at position 3902 of SEQ ID NO: 1244878
uguccuuucgcagaugguu

SEQ ID NO: 1519845 - RNA, 19 nt, Artificial Sequence
  Description of Artificial Sequence: Synthetic oligonucleotide
  Antisense strand to SEQ ID NO: 1519844
aaccaucugcgaaaggaca

SEQ ID NO: 1519846 - RNA, 19 nt, Artificial Sequence
  Description of Artificial Sequence: Synthetic oligonucleotide
  Sense strand starting at position 3927 of SEQ ID NO: 1244878
ccuugaggcugcuuauaua

SEQ ID NO: 1519847 - RNA, 19 nt, Artificial Sequence
  Description of Artificial Sequence: Synthetic oligonucleotide
  Antisense strand to SEQ ID NO: 1519846
uauauaagcagccucaagg

SEQ ID NO: 1519848 - RNA, 19 nt, Artificial Sequence
  Description of Artificial Sequence: Synthetic oligonucleotide
  Sense strand starting at position 133 of SEQ ID NO: 1244879
uucccuaguucugauuuga

SEQ ID NO: 1519849 - RNA, 19 nt, Artificial Sequence
  Description of Artificial Sequence: Synthetic oligonucleotide
  Antisense strand to SEQ ID NO: 1519848
ucaaaucagaacuagggaa

SEQ ID NO: 1519850 - RNA, 19 nt, Artificial Sequence
  Description of Artificial Sequence: Synthetic oligonucleotide
  Sense strand starting at position 265 of SEQ ID NO: 1244879
gccuuaaucuagcuaagua

SEQ ID NO: 1519851 - RNA, 19 nt, Artificial Sequence
  Description of Artificial Sequence: Synthetic oligonucleotide
  Antisense strand to SEQ ID NO: 1519850
uacuuagcuagauuaaggc

SEQ ID NO: 1519852 - RNA, 19 nt, Artificial Sequence
  Description of Artificial Sequence: Synthetic oligonucleotide
  Sense strand starting at position 364 of SEQ ID NO: 1244879
uaggaugaaucagaagcua

SEQ ID NO: 1519853 - RNA, 19 nt, Artificial Sequence
  Description of Artificial Sequence: Synthetic oligonucleotide
  Antisense strand to SEQ ID NO: 1519852
uagcuucugauucauccua

SEQ ID NO: 1519854 - RNA, 19 nt, Artificial Sequence
  Description of Artificial Sequence: Synthetic oligonucleotide
  Sense strand starting at position 1021 of SEQ ID NO: 1244879
aggaaauucucagaaaggu

SEQ ID NO: 1519855 - RNA, 19 nt, Artificial Sequence
  Description of Artificial Sequence: Synthetic oligonucleotide
  Antisense strand to SEQ ID NO: 1519854
accuuucugagaauuuccu

SEQ ID NO: 1519856 - RNA, 19 nt, Artificial Sequence
  Description of Artificial Sequence: Synthetic oligonucleotide
  Sense strand starting at position 1242 of SEQ ID NO: 1244879
cgguuauuccguuuaaugu

SEQ ID NO: 1519857 - RNA, 19 nt, Artificial Sequence
  Description of Artificial Sequence: Synthetic oligonucleotide
  Antisense strand to SEQ ID NO: 1519856
acauuaaacggaauaaccg

SEQ ID NO: 1519858 - RNA, 19 nt, Artificial Sequence
  Description of Artificial Sequence: Synthetic oligonucleotide
  Sense strand starting at position 1243 of SEQ ID NO: 1244879
gguuauuccguuuaauguc

SEQ ID NO: 1519859 - RNA, 19 nt, Artificial Sequence
  Description of Artificial Sequence: Synthetic oligonucleotide
  Antisense strand to SEQ ID NO: 1519858
gacauuaaacggaauaacc

SEQ ID NO: 1519860 - RNA, 19 nt, Artificial Sequence
  Description of Artificial Sequence: Synthetic oligonucleotide
  Sense strand starting at position 1249 of SEQ ID NO: 1244879
uccguuuaaugucaacuca

SEQ ID NO: 1519861 - RNA, 19 nt, Artificial Sequence
  Description of Artificial Sequence: Synthetic oligonucleotide
  Antisense strand to SEQ ID NO: 1519860
ugaguugacauuaaacgga

SEQ ID NO: 1519862 - RNA, 19 nt, Artificial Sequence
  Description of Artificial Sequence: Synthetic oligonucleotide
  Sense strand starting at position 2190 of SEQ ID NO: 1244879
cggauuaguagugaucggu

SEQ ID NO: 1519863 - RNA, 19 nt, Artificial Sequence
  Description of Artificial Sequence: Synthetic oligonucleotide
  Antisense strand to SEQ ID NO: 1519862
accgaucacuacuaauccg

SEQ ID NO: 1519864 - RNA, 19 nt, Artificial Sequence
  Description of Artificial Sequence: Synthetic oligonucleotide
  Sense strand starting at position 2193 of SEQ ID NO: 1244879
auuaguagugaucggugua

SEQ ID NO: 1519865 - RNA, 19 nt, Artificial Sequence
  Description of Artificial Sequence: Synthetic oligonucleotide
  Antisense strand to SEQ ID NO: 1519864
uacaccgaucacuacuaau

SEQ ID NO: 1519866 - RNA, 19 nt, Artificial Sequence
  Description of Artificial Sequence: Synthetic oligonucleotide
  Sense strand starting at position 2194 of SEQ ID NO: 1244879
uuaguagugaucgguguaa

SEQ ID NO: 1519867 - RNA, 19 nt, Artificial Sequence
  Description of Artificial Sequence: Synthetic oligonucleotide
  Antisense strand to SEQ ID NO: 1519866
uuacaccgaucacuacuaa

SEQ ID NO: 1519868 - RNA, 19 nt, Artificial Sequence
  Description of Artificial Sequence: Synthetic oligonucleotide
  Sense strand starting at position 2196 of SEQ ID NO: 1244879
aguagugaucgguguaaac

SEQ ID NO: 1519869 - RNA, 19 nt, Artificial Sequence
  Description of Artificial Sequence: Synthetic oligonucleotide
  Antisense strand to SEQ ID NO: 1519868
guuuacaccgaucacuacu

SEQ ID NO: 1519870 - RNA, 19 nt, Artificial Sequence
  Description of Artificial Sequence: Synthetic oligonucleotide
  Sense strand starting at position 2198 of SEQ ID NO: 1244879
uagugaucgguguaaacac

SEQ ID NO: 1519871 - RNA, 19 nt, Artificial Sequence
  Description of Artificial Sequence: Synthetic oligonucleotide
  Antisense strand to SEQ ID NO: 1519870
guguuuacaccgaucacua

SEQ ID NO: 1519872 - RNA, 19 nt, Artificial Sequence
  Description of Artificial Sequence: Synthetic oligonucleotide
  Sense strand starting at position 2767 of SEQ ID NO: 1244879
ggacgcuaauccuaugugu

SEQ ID NO: 1519873 - RNA, 19 nt, Artificial Sequence
  Description of Artificial Sequence: Synthetic oligonucleotide
  Antisense strand to SEQ ID NO: 1519872
acacauaggauuagcgucc

SEQ ID NO: 1519874 - RNA, 19 nt, Artificial Sequence
  Description of Artificial Sequence: Synthetic oligonucleotide
  Sense strand starting at position 2769 of SEQ ID NO: 1244879
acgcuaauccuauguguga

SEQ ID NO: 1519875 - RNA, 19 nt, Artificial Sequence
  Description of Artificial Sequence: Synthetic oligonucleotide
  Antisense strand to SEQ ID NO: 1519874
ucacacauaggauuagcgu

SEQ ID NO: 1519876 - RNA, 19 nt, Artificial Sequence
  Description of Artificial Sequence: Synthetic oligonucleotide
  Sense strand starting at position 2972 of SEQ ID NO: 1244879
aaaggugcccugggaucaa

SEQ ID NO: 1519877 - RNA, 19 nt, Artificial Sequence
  Description of Artificial Sequence: Synthetic oligonucleotide
  Antisense strand to SEQ ID NO: 1519876
uugaucccagggcaccuuu

SEQ ID NO: 1519878 - RNA, 19 nt, Artificial Sequence
  Description of Artificial Sequence: Synthetic oligonucleotide
  Sense strand starting at position 3196 of SEQ ID NO: 1244879
agaacuaucuagcgggcaa

SEQ ID NO: 1519879 - RNA, 19 nt, Artificial Sequence
  Description of Artificial Sequence: Synthetic oligonucleotide
  Antisense strand to SEQ ID NO: 1519878
uugcccgcuagauaguucu

SEQ ID NO: 1519880 - RNA, 19 nt, Artificial Sequence
  Description of Artificial Sequence: Synthetic oligonucleotide
  Sense strand starting at position 3349 of SEQ ID NO: 1244879
cugccuugaucagaugucu

SEQ ID NO: 1519881 - RNA, 19 nt, Artificial Sequence
  Description of Artificial Sequence: Synthetic oligonucleotide
  Antisense strand to SEQ ID NO: 1519880
agacaucugaucaaggcag

SEQ ID NO: 1519882 - RNA, 19 nt, Artificial Sequence
  Description of Artificial Sequence: Synthetic oligonucleotide
  Sense strand starting at position 3354 of SEQ ID NO: 1244879
uugaucagaugucugaaga

SEQ ID NO: 1519883 - RNA, 19 nt, Artificial Sequence
  Description of Artificial Sequence: Synthetic oligonucleotide
  Antisense strand to SEQ ID NO: 1519882
ucuucagacaucugaucaa

SEQ ID NO: 1519884 - RNA, 19 nt, Artificial Sequence
  Description of Artificial Sequence: Synthetic oligonucleotide
  Sense strand starting at position 3355 of SEQ ID NO: 1244879
ugaucagaugucugaagau

SEQ ID NO: 1519885 - RNA, 19 nt, Artificial Sequence
  Description of Artificial Sequence: Synthetic oligonucleotide
  Antisense strand to SEQ ID NO: 1519884
aucuucagacaucugauca

SEQ ID NO: 1519886 - RNA, 19 nt, Artificial Sequence
  Description of Artificial Sequence: Synthetic oligonucleotide
  Sense strand starting at position 3364 of SEQ ID NO: 1244879
gucugaagaugacuuuaag

SEQ ID NO: 1519887 - RNA, 19 nt, Artificial Sequence
  Description of Artificial Sequence: Synthetic oligonucleotide
  Antisense strand to SEQ ID NO: 1519886
cuuaaagucaucuucagac

SEQ ID NO: 1519888 - RNA, 19 nt, Artificial Sequence
  Description of Artificial Sequence: Synthetic oligonucleotide
  Sense strand starting at position 3464 of SEQ ID NO: 1244879
aguggaguuucugcccuua

SEQ ID NO: 1519889 - RNA, 19 nt, Artificial Sequence
  Description of Artificial Sequence: Synthetic oligonucleotide
  Antisense strand to SEQ ID NO: 1519888
uaagggcagaaacuccacu

SEQ ID NO: 1519890 - RNA, 19 nt, Artificial Sequence
  Description of Artificial Sequence: Synthetic oligonucleotide
  Sense strand starting at position 3691 of SEQ ID NO: 1244879
agagaacaguguuggaaga

SEQ ID NO: 1519891 - RNA, 19 nt, Artificial Sequence
  Description of Artificial Sequence: Synthetic oligonucleotide
  Antisense strand to SEQ ID NO: 1519890
ucuuccaacacuguucucu

SEQ ID NO: 1519892 - RNA, 19 nt, Artificial Sequence
  Description of Artificial Sequence: Synthetic oligonucleotide
  Sense strand starting at position 3693 of SEQ ID NO: 1244879
agaacaguguuggaagaag

SEQ ID NO: 1519893 - RNA, 19 nt, Artificial Sequence
  Description of Artificial Sequence: Synthetic oligonucleotide
  Antisense strand to SEQ ID NO: 1519892
cuucuuccaacacuguucu

SEQ ID NO: 1519894 - RNA, 19 nt, Artificial Sequence
  Description of Artificial Sequence: Synthetic oligonucleotide
  Sense strand starting at position 3796 of SEQ ID NO: 1244879
gccuguuagggcgguagaa

SEQ ID NO: 1519895 - RNA, 19 nt, Artificial Sequence
  Description of Artificial Sequence: Synthetic oligonucleotide
  Antisense strand to SEQ ID NO: 1519894
uucuaccgcccuaacaggc

SEQ ID NO: 1519896 - RNA, 19 nt, Artificial Sequence
  Description of Artificial Sequence: Synthetic oligonucleotide
  Sense strand starting at position 3846 of SEQ ID NO: 1244879
cagugaggcuaggucuuua

SEQ ID NO: 1519897 - RNA, 19 nt, Artificial Sequence
  Description of Artificial Sequence: Synthetic oligonucleotide
  Antisense strand to SEQ ID NO: 1519896
uaaagaccuagccucacug

SEQ ID NO: 1519898 - RNA, 19 nt, Artificial Sequence
  Description of Artificial Sequence: Synthetic oligonucleotide
  Sense strand starting at position 3850 of SEQ ID NO: 1244879
gaggcuaggucuuuaauug

SEQ ID NO: 1519899 - RNA, 19 nt, Artificial Sequence
  Description of Artificial Sequence: Synthetic oligonucleotide
  Antisense strand to SEQ ID NO: 1519898
caauuaaagaccuagccuc

SEQ ID NO: 1519900 - RNA, 19 nt, Artificial Sequence
  Description of Artificial Sequence: Synthetic oligonucleotide
  Sense strand starting at position 3857 of SEQ ID NO: 1244879
ggucuuuaauugcagccaa

SEQ ID NO: 1519901 - RNA, 19 nt, Artificial Sequence
  Description of Artificial Sequence: Synthetic oligonucleotide
  Antisense strand to SEQ ID NO: 1519900
uuggcugcaauuaaagacc

SEQ ID NO: 1519902 - RNA, 19 nt, Artificial Sequence
  Description of Artificial Sequence: Synthetic oligonucleotide
  Sense strand starting at position 217 of SEQ ID NO: 1244880
uacagaucucaucacggua

SEQ ID NO: 1519903 - RNA, 19 nt, Artificial Sequence
  Description of Artificial Sequence: Synthetic oligonucleotide
  Antisense strand to SEQ ID NO: 1519902
uaccgugaugagaucugua

SEQ ID NO: 1519904 - RNA, 19 nt, Artificial Sequence
  Description of Artificial Sequence: Synthetic oligonucleotide
  Sense strand starting at position 220 of SEQ ID NO: 1244880
agaucucaucacgguauca

SEQ ID NO: 1519905 - RNA, 19 nt, Artificial Sequence
  Description of Artificial Sequence: Synthetic oligonucleotide
  Antisense strand to SEQ ID NO: 1519904
ugauaccgugaugagaucu

SEQ ID NO: 1519906 - RNA, 19 nt, Artificial Sequence
  Description of Artificial Sequence: Synthetic oligonucleotide
  Sense strand starting at position 222 of SEQ ID NO: 1244880
aucucaucacgguaucauc

SEQ ID NO: 1519907 - RNA, 19 nt, Artificial Sequence
  Description of Artificial Sequence: Synthetic oligonucleotide
  Antisense strand to SEQ ID NO: 1519906
gaugauaccgugaugagau

SEQ ID NO: 1519908 - RNA, 19 nt, Artificial Sequence
  Description of Artificial Sequence: Synthetic oligonucleotide
  Sense strand starting at position 824 of SEQ ID NO: 1244880
agaaacaaauguuguauca

SEQ ID NO: 1519909 - RNA, 19 nt, Artificial Sequence
  Description of Artificial Sequence: Synthetic oligonucleotide
  Antisense strand to SEQ ID NO: 1519908
ugauacaacauuuguuucu

SEQ ID NO: 1519910 - RNA, 19 nt, Artificial Sequence
  Description of Artificial Sequence: Synthetic oligonucleotide
  Sense strand starting at position 834 of SEQ ID NO: 1244880
guuguaucacacugguuaa

SEQ ID NO: 1519911 - RNA, 19 nt, Artificial Sequence
  Description of Artificial Sequence: Synthetic oligonucleotide
  Antisense strand to SEQ ID NO: 1519910
uuaaccagugugauacaac

SEQ ID NO: 1519912 - RNA, 19 nt, Artificial Sequence
  Description of Artificial Sequence: Synthetic oligonucleotide
  Sense strand starting at position 837 of SEQ ID NO: 1244880
guaucacacugguuaaaga

SEQ ID NO: 1519913 - RNA, 19 nt, Artificial Sequence
  Description of Artificial Sequence: Synthetic oligonucleotide
  Antisense strand to SEQ ID NO: 1519912
ucuuuaaccagugugauac

SEQ ID NO: 1519914 - RNA, 19 nt, Artificial Sequence
  Description of Artificial Sequence: Synthetic oligonucleotide
  Sense strand starting at position 1239 of SEQ ID NO: 1244880
ucguaaauauacuuugcau

SEQ ID NO: 1519915 - RNA, 19 nt, Artificial Sequence
  Description of Artificial Sequence: Synthetic oligonucleotide
  Antisense strand to SEQ ID NO: 1519914
augcaaaguauauuuacga

SEQ ID NO: 1519916 - RNA, 19 nt, Artificial Sequence
  Description of Artificial Sequence: Synthetic oligonucleotide
  Sense strand starting at position 1583 of SEQ ID NO: 1244880
uucugaauggcugacaagu

SEQ ID NO: 1519917 - RNA, 19 nt, Artificial Sequence
  Description of Artificial Sequence: Synthetic oligonucleotide
  Antisense strand to SEQ ID NO: 1519916
acuugucagccauucagaa

SEQ ID NO: 1519918 - RNA, 19 nt, Artificial Sequence
  Description of Artificial Sequence: Synthetic oligonucleotide
  Sense strand starting at position 1585 of SEQ ID NO: 1244880
cugaauggcugacaaguuu

SEQ ID NO: 1519919 - RNA, 19 nt, Artificial Sequence
  Description of Artificial Sequence: Synthetic oligonucleotide
  Antisense strand to SEQ ID NO: 1519918
aaacuugucagccauucag

SEQ ID NO: 1519920 - RNA, 19 nt, Artificial Sequence
  Description of Artificial Sequence: Synthetic oligonucleotide
  Sense strand starting at position 2221 of SEQ ID NO: 1244880
uucccuaguucugauuuga

SEQ ID NO: 1519921 - RNA, 19 nt, Artificial Sequence
  Description of Artificial Sequence: Synthetic oligonucleotide
  Antisense strand to SEQ ID NO: 1519920
ucaaaucagaacuagggaa

SEQ ID NO: 1519922 - RNA, 19 nt, Artificial Sequence
  Description of Artificial Sequence: Synthetic oligonucleotide
  Sense strand starting at position 2353 of SEQ ID NO: 1244880
gccuuaaucuagcuaagua

SEQ ID NO: 1519923 - RNA, 19 nt, Artificial Sequence
  Description of Artificial Sequence: Synthetic oligonucleotide
  Antisense strand to SEQ ID NO: 1519922
uacuuagcuagauuaaggc

SEQ ID NO: 1519924 - RNA, 19 nt, Artificial Sequence
  Description of Artificial Sequence: Synthetic oligonucleotide
  Sense strand starting at position 2452 of SEQ ID NO: 1244880
uaggaugaaucagaagcua

SEQ ID NO: 1519925 - RNA, 19 nt, Artificial Sequence
  Description of Artificial Sequence: Synthetic oligonucleotide
  Antisense strand to SEQ ID NO: 1519924
uagcuucugauucauccua

SEQ ID NO: 1519926 - RNA, 19 nt, Artificial Sequence
  Description of Artificial Sequence: Synthetic oligonucleotide
  Sense strand starting at position 3109 of SEQ ID NO: 1244880
aggaaauucucagaaaggu

SEQ ID NO: 1519927 - RNA, 19 nt, Artificial Sequence
  Description of Artificial Sequence: Synthetic oligonucleotide
  Antisense strand to SEQ ID NO: 1519926
accuuucugagaauuuccu

SEQ ID NO: 1519928 - RNA, 19 nt, Artificial Sequence
  Description of Artificial Sequence: Synthetic oligonucleotide
  Sense strand starting at position 3330 of SEQ ID NO: 1244880
cgguuauuccguuuaaugu

SEQ ID NO: 1519929 - RNA, 19 nt, Artificial Sequence
  Description of Artificial Sequence: Synthetic oligonucleotide
  Antisense strand to SEQ ID NO: 1519928
acauuaaacggaauaaccg

SEQ ID NO: 1519930 - RNA, 19 nt, Artificial Sequence
  Description of Artificial Sequence: Synthetic oligonucleotide
  Sense strand starting at position 3331 of SEQ ID NO: 1244880
gguuauuccguuuaauguc

SEQ ID NO: 1519931 - RNA, 19 nt, Artificial Sequence
  Description of Artificial Sequence: Synthetic oligonucleotide
  Antisense strand to SEQ ID NO: 1519930
gacauuaaacggaauaacc

SEQ ID NO: 1519932 - RNA, 19 nt, Artificial Sequence
  Description of Artificial Sequence: Synthetic oligonucleotide
  Sense strand starting at position 3337 of SEQ ID NO: 1244880
uccguuuaaugucaacuca

SEQ ID NO: 1519933 - RNA, 19 nt, Artificial Sequence
  Description of Artificial Sequence: Synthetic oligonucleotide
  Antisense strand to SEQ ID NO: 1519932
ugaguugacauuaaacgga

SEQ ID NO: 1519934 - RNA, 19 nt, Artificial Sequence
  Description of Artificial Sequence: Synthetic oligonucleotide
  Sense strand starting at position 54 of SEQ ID NO: 1244881
gaagcaagcugguuagaug

SEQ ID NO: 1519935 - RNA, 19 nt, Artificial Sequence
  Description of Artificial Sequence: Synthetic oligonucleotide
  Antisense strand to SEQ ID NO: 1519934
caucuaaccagcuugcuuc

SEQ ID NO: 1519936 - RNA, 19 nt, Artificial Sequence
  Description of Artificial Sequence: Synthetic oligonucleotide
  Sense strand starting at position 141 of SEQ ID NO: 1244881
gugugucagccugagagga

SEQ ID NO: 1519937 - RNA, 19 nt, Artificial Sequence
  Description of Artificial Sequence: Synthetic oligonucleotide
  Antisense strand to SEQ ID NO: 1519936
uccucucaggcugacacac

SEQ ID NO: 1519938 - RNA, 19 nt, Artificial Sequence
  Description of Artificial Sequence: Synthetic oligonucleotide
  Sense strand starting at position 154 of SEQ ID NO: 1244881
agaggagugugacucucaa

SEQ ID NO: 1519939 - RNA, 19 nt, Artificial Sequence
  Description of Artificial Sequence: Synthetic oligonucleotide
  Antisense strand to SEQ ID NO: 1519938
uugagagucacacuccucu

SEQ ID NO: 1519940 - RNA, 19 nt, Artificial Sequence
  Description of Artificial Sequence: Synthetic oligonucleotide
  Sense strand starting at position 168 of SEQ ID NO: 1244881
cucaaagagaguugaguuu

SEQ ID NO: 1519941 - RNA, 19 nt, Artificial Sequence
  Description of Artificial Sequence: Synthetic oligonucleotide
  Antisense strand to SEQ ID NO: 1519940
aaacucaacucucuuugag

SEQ ID NO: 1519942 - RNA, 19 nt, Artificial Sequence
  Description of Artificial Sequence: Synthetic oligonucleotide
  Sense strand starting at position 179 of SEQ ID NO: 1244881
uugaguuuagagcgauaga

SEQ ID NO: 1519943 - RNA, 19 nt, Artificial Sequence
  Description of Artificial Sequence: Synthetic oligonucleotide
  Antisense strand to SEQ ID NO: 1519942
ucuaucgcucuaaacucaa

SEQ ID NO: 1519944 - RNA, 19 nt, Artificial Sequence
  Description of Artificial Sequence: Synthetic oligonucleotide
  Sense strand starting at position 180 of SEQ ID NO: 1244881
ugaguuuagagcgauagag

SEQ ID NO: 1519945 - RNA, 19 nt, Artificial Sequence
  Description of Artificial Sequence: Synthetic oligonucleotide
  Antisense strand to SEQ ID NO: 1519944
cucuaucgcucuaaacuca

SEQ ID NO: 1519946 - RNA, 19 nt, Artificial Sequence
  Description of Artificial Sequence: Synthetic oligonucleotide
  Sense strand starting at position 182 of SEQ ID NO: 1244881
aguuuagagcgauagagua

SEQ ID NO: 1519947 - RNA, 19 nt, Artificial Sequence
  Description of Artificial Sequence: Synthetic oligonucleotide
  Antisense strand to SEQ ID NO: 1519946
uacucuaucgcucuaaacu

SEQ ID NO: 1519948 - RNA, 19 nt, Artificial Sequence
  Description of Artificial Sequence: Synthetic oligonucleotide
  Sense strand starting at position 362 of SEQ ID NO: 1244881
uggagaaugucauuagcca

SEQ ID NO: 1519949 - RNA, 19 nt, Artificial Sequence
  Description of Artificial Sequence: Synthetic oligonucleotide
  Antisense strand to SEQ ID NO: 1519948
uggcuaaugacauucucca

SEQ ID NO: 1519950 - RNA, 19 nt, Artificial Sequence
  Description of Artificial Sequence: Synthetic oligonucleotide
  Sense strand starting at position 377 of SEQ ID NO: 1244881
gccaacuguccugagaagu

SEQ ID NO: 1519951 - RNA, 19 nt, Artificial Sequence
  Description of Artificial Sequence: Synthetic oligonucleotide
  Antisense strand to SEQ ID NO: 1519950
acuucucaggacaguuggc

SEQ ID NO: 1519952 - RNA, 19 nt, Artificial Sequence
  Description of Artificial Sequence: Synthetic oligonucleotide
  Sense strand starting at position 397 of SEQ ID NO: 1244881
gggaacugugcuggguaga

SEQ ID NO: 1519953 - RNA, 19 nt, Artificial Sequence
  Description of Artificial Sequence: Synthetic oligonucleotide
  Antisense strand to SEQ ID NO: 1519952
ucuacccagcacaguuccc

SEQ ID NO: 1519954 - RNA, 19 nt, Artificial Sequence
  Description of Artificial Sequence: Synthetic oligonucleotide
  Sense strand starting at position 398 of SEQ ID NO: 1244881
ggaacugugcuggguagau

SEQ ID NO: 1519955 - RNA, 19 nt, Artificial Sequence
  Description of Artificial Sequence: Synthetic oligonucleotide
  Antisense strand to SEQ ID NO: 1519954
aucuacccagcacaguucc

SEQ ID NO: 1519956 - RNA, 19 nt, Artificial Sequence
  Description of Artificial Sequence: Synthetic oligonucleotide
  Sense strand starting at position 423 of SEQ ID NO: 1244881
ucuuuaucgcaugaagaua

SEQ ID NO: 1519957 - RNA, 19 nt, Artificial Sequence
  Description of Artificial Sequence: Synthetic oligonucleotide
  Antisense strand to SEQ ID NO: 1519956
uaucuucaugcgauaaaga

SEQ ID NO: 1519958 - RNA, 19 nt, Artificial Sequence
  Description of Artificial Sequence: Synthetic oligonucleotide
  Sense strand starting at position 460 of SEQ ID NO: 1244881
cccaaaguuucccugaaug

SEQ ID NO: 1519959 - RNA, 19 nt, Artificial Sequence
  Description of Artificial Sequence: Synthetic oligonucleotide
  Antisense strand to SEQ ID NO: 1519958
cauucagggaaacuuuggg

SEQ ID NO: 1519960 - RNA, 19 nt, Artificial Sequence
  Description of Artificial Sequence: Synthetic oligonucleotide
  Sense strand starting at position 470 of SEQ ID NO: 1244881
cccugaauggguggagagu

SEQ ID NO: 1519961 - RNA, 19 nt, Artificial Sequence
  Description of Artificial Sequence: Synthetic oligonucleotide
  Antisense strand to SEQ ID NO: 1519960
acucuccacccauucaggg

SEQ ID NO: 1519962 - RNA, 19 nt, Artificial Sequence
  Description of Artificial Sequence: Synthetic oligonucleotide
  Sense strand starting at position 478 of SEQ ID NO: 1244881
ggguggagaguuggaagau

SEQ ID NO: 1519963 - RNA, 19 nt, Artificial Sequence
  Description of Artificial Sequence: Synthetic oligonucleotide
  Antisense strand to SEQ ID NO: 1519962
aucuuccaacucuccaccc

SEQ ID NO: 1519964 - RNA, 19 nt, Artificial Sequence
  Description of Artificial Sequence: Synthetic oligonucleotide
  Sense strand starting at position 514 of SEQ ID NO: 1244881
ggaaaucugugucuccuuu

SEQ ID NO: 1519965 - RNA, 19 nt, Artificial Sequence
  Description of Artificial Sequence: Synthetic oligonucleotide
  Antisense strand to SEQ ID NO: 1519964
aaaggagacacagauuucc

SEQ ID NO: 1519966 - RNA, 19 nt, Artificial Sequence
  Description of Artificial Sequence: Synthetic oligonucleotide
  Sense strand starting at position 660 of SEQ ID NO: 1244881
cagagauacuccgucucua

SEQ ID NO: 1519967 - RNA, 19 nt, Artificial Sequence
  Description of Artificial Sequence: Synthetic oligonucleotide
  Antisense strand to SEQ ID NO: 1519966
uagagacggaguaucucug

SEQ ID NO: 1519968 - RNA, 19 nt, Artificial Sequence
  Description of Artificial Sequence: Synthetic oligonucleotide
  Sense strand starting at position 1282 of SEQ ID NO: 1244881
cugaguuuauccuuagcag

SEQ ID NO: 1519969 - RNA, 19 nt, Artificial Sequence
  Description of Artificial Sequence: Synthetic oligonucleotide
  Antisense strand to SEQ ID NO: 1519968
cugcuaaggauaaacucag

SEQ ID NO: 1519970 - RNA, 19 nt, Artificial Sequence
  Description of Artificial Sequence: Synthetic oligonucleotide
  Sense strand starting at position 1283 of SEQ ID NO: 1244881
ugaguuuauccuuagcagu

SEQ ID NO: 1519971 - RNA, 19 nt, Artificial Sequence
  Description of Artificial Sequence: Synthetic oligonucleotide
  Antisense strand to SEQ ID NO: 1519970
acugcuaaggauaaacuca

SEQ ID NO: 1519972 - RNA, 19 nt, Artificial Sequence
  Description of Artificial Sequence: Synthetic oligonucleotide
  Sense strand starting at position 1360 of SEQ ID NO: 1244881
gagggugacugauccguga

SEQ ID NO: 1519973 - RNA, 19 nt, Artificial Sequence
  Description of Artificial Sequence: Synthetic oligonucleotide
  Antisense strand to SEQ ID NO: 1519972
ucacggaucagucacccuc

SEQ ID NO: 1519974 - RNA, 19 nt, Artificial Sequence
  Description of Artificial Sequence: Synthetic oligonucleotide
  Sense strand starting at position 1443 of SEQ ID NO: 1244881
cgaugacgucucugacaac

SEQ ID NO: 1519975 - RNA, 19 nt, Artificial Sequence
  Description of Artificial Sequence: Synthetic oligonucleotide
  Antisense strand to SEQ ID NO: 1519974
guugucagagacgucaucg

SEQ ID NO: 1519976 - RNA, 19 nt, Artificial Sequence
  Description of Artificial Sequence: Synthetic oligonucleotide
  Sense strand starting at position 1481 of SEQ ID NO: 1244881
gaccauuguagugagguuu

SEQ ID NO: 1519977 - RNA, 19 nt, Artificial Sequence
  Description of Artificial Sequence: Synthetic oligonucleotide
  Antisense strand to SEQ ID NO: 1519976
aaaccucacuacaaugguc

SEQ ID NO: 1519978 - RNA, 19 nt, Artificial Sequence
  Description of Artificial Sequence: Synthetic oligonucleotide
  Sense strand starting at position 1502 of SEQ ID NO: 1244881
ccagcaucugcucaacagu

SEQ ID NO: 1519979 - RNA, 19 nt, Artificial Sequence
  Description of Artificial Sequence: Synthetic oligonucleotide
  Antisense strand to SEQ ID NO: 1519978
acuguugagcagaugcugg

SEQ ID NO: 1519980 - RNA, 19 nt, Artificial Sequence
  Description of Artificial Sequence: Synthetic oligonucleotide
  Sense strand starting at position 2090 of SEQ ID NO: 1244881
ggaucagaaugauaaggga

SEQ ID NO: 1519981 - RNA, 19 nt, Artificial Sequence
  Description of Artificial Sequence: Synthetic oligonucleotide
  Antisense strand to SEQ ID NO: 1519980
ucccuuaucauucugaucc

SEQ ID NO: 1519982 - RNA, 19 nt, Artificial Sequence
  Description of Artificial Sequence: Synthetic oligonucleotide
  Sense strand starting at position 2206 of SEQ ID NO: 1244881
gacacauuacccuggguua

SEQ ID NO: 1519983 - RNA, 19 nt, Artificial Sequence
  Description of Artificial Sequence: Synthetic oligonucleotide
  Antisense strand to SEQ ID NO: 1519982
uaacccaggguaauguguc

SEQ ID NO: 1519984 - RNA, 19 nt, Artificial Sequence
  Description of Artificial Sequence: Synthetic oligonucleotide
  Sense strand starting at position 2208 of SEQ ID NO: 1244881
cacauuacccuggguuagu

SEQ ID NO: 1519985 - RNA, 19 nt, Artificial Sequence
  Description of Artificial Sequence: Synthetic oligonucleotide
  Antisense strand to SEQ ID NO: 1519984
acuaacccaggguaaugug

SEQ ID NO: 1519986 - RNA, 19 nt, Artificial Sequence
  Description of Artificial Sequence: Synthetic oligonucleotide
  Sense strand starting at position 2734 of SEQ ID NO: 1244881
gcuacuugugaggauuaaa

SEQ ID NO: 1519987 - RNA, 19 nt, Artificial Sequence
  Description of Artificial Sequence: Synthetic oligonucleotide
  Antisense strand to SEQ ID NO: 1519986
uuuaauccucacaaguagc

SEQ ID NO: 1519988 - RNA, 19 nt, Artificial Sequence
  Description of Artificial Sequence: Synthetic oligonucleotide
  Sense strand starting at position 2836 of SEQ ID NO: 1244881
gcagcauucuucccaggga

SEQ ID NO: 1519989 - RNA, 19 nt, Artificial Sequence
  Description of Artificial Sequence: Synthetic oligonucleotide
  Antisense strand to SEQ ID NO: 1519988
ucccugggaagaaugcugc

SEQ ID NO: 1519990 - RNA, 19 nt, Artificial Sequence
  Description of Artificial Sequence: Synthetic oligonucleotide
  Sense strand starting at position 2879 of SEQ ID NO: 1244881
ucuuauuguccuugcauuu

SEQ ID NO: 1519991 - RNA, 19 nt, Artificial Sequence
  Description of Artificial Sequence: Synthetic oligonucleotide
  Antisense strand to SEQ ID NO: 1519990
aaaugcaaggacaauaaga

SEQ ID NO: 1519992 - RNA, 19 nt, Artificial Sequence
  Description of Artificial Sequence: Synthetic oligonucleotide
  Sense strand starting at position 2895 of SEQ ID NO: 1244881
uuucgucuuccugguauuu

SEQ ID NO: 1519993 - RNA, 19 nt, Artificial Sequence
  Description of Artificial Sequence: Synthetic oligonucleotide
  Antisense strand to SEQ ID NO: 1519992
aaauaccaggaagacgaaa

SEQ ID NO: 1519994 - RNA, 19 nt, Artificial Sequence
  Description of Artificial Sequence: Synthetic oligonucleotide
  Sense strand starting at position 2969 of SEQ ID NO: 1244881
ggaccuaggccucauugau

SEQ ID NO: 1519995 - RNA, 19 nt, Artificial Sequence
  Description of Artificial Sequence: Synthetic oligonucleotide
  Antisense strand to SEQ ID NO: 1519994
aucaaugaggccuaggucc

SEQ ID NO: 1519996 - RNA, 19 nt, Artificial Sequence
  Description of Artificial Sequence: Synthetic oligonucleotide
  Sense strand starting at position 3007 of SEQ ID NO: 1244881
agccucgguguuugauuua

SEQ ID NO: 1519997 - RNA, 19 nt, Artificial Sequence
  Description of Artificial Sequence: Synthetic oligonucleotide
  Antisense strand to SEQ ID NO: 1519996
uaaaucaaacaccgaggcu

SEQ ID NO: 1519998 - RNA, 19 nt, Artificial Sequence
  Description of Artificial Sequence: Synthetic oligonucleotide
  Sense strand starting at position 3010 of SEQ ID NO: 1244881
cucgguguuugauuuagca

SEQ ID NO: 1519999 - RNA, 19 nt, Artificial Sequence
  Description of Artificial Sequence: Synthetic oligonucleotide
  Antisense strand to SEQ ID NO: 1519998
ugcuaaaucaaacaccgag

SEQ ID NO: 1520000 - RNA, 19 nt, Artificial Sequence
  Description of Artificial Sequence: Synthetic oligonucleotide
  Sense strand starting at position 3012 of SEQ ID NO: 1244881
cgguguuugauuuagcaac

SEQ ID NO: 1520001 - RNA, 19 nt, Artificial Sequence
  Description of Artificial Sequence: Synthetic oligonucleotide
  Antisense strand to SEQ ID NO: 1520000
guugcuaaaucaaacaccg

SEQ ID NO: 1520002 - RNA, 19 nt, Artificial Sequence
  Description of Artificial Sequence: Synthetic oligonucleotide
  Sense strand starting at position 3043 of SEQ ID NO: 1244881
ugagccaacucugugagaa

SEQ ID NO: 1520003 - RNA, 19 nt, Artificial Sequence
  Description of Artificial Sequence: Synthetic oligonucleotide
  Antisense strand to SEQ ID NO: 1520002
uucucacagaguuggcuca

SEQ ID NO: 1520004 - RNA, 19 nt, Artificial Sequence
  Description of Artificial Sequence: Synthetic oligonucleotide
  Sense strand starting at position 3044 of SEQ ID NO: 1244881
gagccaacucugugagaau

SEQ ID NO: 1520005 - RNA, 19 nt, Artificial Sequence
  Description of Artificial Sequence: Synthetic oligonucleotide
  Antisense strand to SEQ ID NO: 1520004
auucucacagaguuggcuc

SEQ ID NO: 1520006 - RNA, 19 nt, Artificial Sequence
  Description of Artificial Sequence: Synthetic oligonucleotide
  Sense strand starting at position 3120 of SEQ ID NO: 1244881
ugcaguuuccuugauaacu

SEQ ID NO: 1520007 - RNA, 19 nt, Artificial Sequence
  Description of Artificial Sequence: Synthetic oligonucleotide
  Antisense strand to SEQ ID NO: 1520006
aguuaucaaggaaacugca

SEQ ID NO: 1520008 - RNA, 19 nt, Artificial Sequence
  Description of Artificial Sequence: Synthetic oligonucleotide
  Sense strand starting at position 3774 of SEQ ID NO: 1244881
gugggagugccaugaagag

SEQ ID NO: 1520009 - RNA, 19 nt, Artificial Sequence
  Description of Artificial Sequence: Synthetic oligonucleotide
  Antisense strand to SEQ ID NO: 1520008
cucuucauggcacucccac

SEQ ID NO: 1520010 - RNA, 19 nt, Artificial Sequence
  Description of Artificial Sequence: Synthetic oligonucleotide
  Sense strand starting at position 3838 of SEQ ID NO: 1244881
gaggcugucaccuggaaag

SEQ ID NO: 1520011 - RNA, 19 nt, Artificial Sequence
  Description of Artificial Sequence: Synthetic oligonucleotide
  Antisense strand to SEQ ID NO: 1520010
cuuuccaggugacagccuc

SEQ ID NO: 1520012 - RNA, 19 nt, Artificial Sequence
  Description of Artificial Sequence: Synthetic oligonucleotide
  Sense strand starting at position 3938 of SEQ ID NO: 1244881
gccagaaucucugcuauuu

SEQ ID NO: 1520013 - RNA, 19 nt, Artificial Sequence
  Description of Artificial Sequence: Synthetic oligonucleotide
  Antisense strand to SEQ ID NO: 1520012
aaauagcagagauucuggc

SEQ ID NO: 1520014 - RNA, 19 nt, Artificial Sequence
  Description of Artificial Sequence: Synthetic oligonucleotide
  Sense strand starting at position 46 of SEQ ID NO: 1244882
gggccaugucucuggccaa

SEQ ID NO: 1520015 - RNA, 19 nt, Artificial Sequence
  Description of Artificial Sequence: Synthetic oligonucleotide
  Antisense strand to SEQ ID NO: 1520014
uuggccagagacauggccc

SEQ ID NO: 1520016 - RNA, 19 nt, Artificial Sequence
  Description of Artificial Sequence: Synthetic oligonucleotide
  Sense strand starting at position 47 of SEQ ID NO: 1244882
ggccaugucucuggccaau

SEQ ID NO: 1520017 - RNA, 19 nt, Artificial Sequence
  Description of Artificial Sequence: Synthetic oligonucleotide
  Antisense strand to SEQ ID NO: 1520016
auuggccagagacauggcc

SEQ ID NO: 1520018 - RNA, 19 nt, Artificial Sequence
  Description of Artificial Sequence: Synthetic oligonucleotide
  Sense strand starting at position 261 of SEQ ID NO: 1244882
guacauaaauggugaggca

SEQ ID NO: 1520019 - RNA, 19 nt, Artificial Sequence
  Description of Artificial Sequence: Synthetic oligonucleotide
  Antisense strand to SEQ ID NO: 1520018
ugccucaccauuuauguac

SEQ ID NO: 1520020 - RNA, 19 nt, Artificial Sequence
  Description of Artificial Sequence: Synthetic oligonucleotide
  Sense strand starting at position 280 of SEQ ID NO: 1244882
ccgaauaagccucaugcca

SEQ ID NO: 1520021 - RNA, 19 nt, Artificial Sequence
  Description of Artificial Sequence: Synthetic oligonucleotide
  Antisense strand to SEQ ID NO: 1520020
uggcaugaggcuuauucgg

SEQ ID NO: 1520022 - RNA, 19 nt, Artificial Sequence
  Description of Artificial Sequence: Synthetic oligonucleotide
  Sense strand starting at position 370 of SEQ ID NO: 1244882
ccacaucuguuuccucgau

SEQ ID NO: 1520023 - RNA, 19 nt, Artificial Sequence
  Description of Artificial Sequence: Synthetic oligonucleotide
  Antisense strand to SEQ ID NO: 1520022
aucgaggaaacagaugugg

SEQ ID NO: 1520024 - RNA, 19 nt, Artificial Sequence
  Description of Artificial Sequence: Synthetic oligonucleotide
  Sense strand starting at position 372 of SEQ ID NO: 1244882
acaucuguuuccucgaugu

SEQ ID NO: 1520025 - RNA, 19 nt, Artificial Sequence
  Description of Artificial Sequence: Synthetic oligonucleotide
  Antisense strand to SEQ ID NO: 1520024
acaucgaggaaacagaugu

SEQ ID NO: 1520026 - RNA, 19 nt, Artificial Sequence
  Description of Artificial Sequence: Synthetic oligonucleotide
  Sense strand starting at position 389 of SEQ ID NO: 1244882
gucgccagucccugggaaa

SEQ ID NO: 1520027 - RNA, 19 nt, Artificial Sequence
  Description of Artificial Sequence: Synthetic oligonucleotide
  Antisense strand to SEQ ID NO: 1520026
uuucccagggacuggcgac

SEQ ID NO: 1520028 - RNA, 19 nt, Artificial Sequence
  Description of Artificial Sequence: Synthetic oligonucleotide
  Sense strand starting at position 390 of SEQ ID NO: 1244882
ucgccagucccugggaaau

SEQ ID NO: 1520029 - RNA, 19 nt, Artificial Sequence
  Description of Artificial Sequence: Synthetic oligonucleotide
  Antisense strand to SEQ ID NO: 1520028
auuucccagggacuggcga

SEQ ID NO: 1520030 - RNA, 19 nt, Artificial Sequence
  Description of Artificial Sequence: Synthetic oligonucleotide
  Sense strand starting at position 553 of SEQ ID NO: 1244882
cuuccucuagcaggaaauu

SEQ ID NO: 1520031 - RNA, 19 nt, Artificial Sequence
  Description of Artificial Sequence: Synthetic oligonucleotide
  Antisense strand to SEQ ID NO: 1520030
aauuuccugcuagaggaag

SEQ ID NO: 1520032 - RNA, 19 nt, Artificial Sequence
  Description of Artificial Sequence: Synthetic oligonucleotide
  Sense strand starting at position 554 of SEQ ID NO: 1244882
uuccucuagcaggaaauua

SEQ ID NO: 1520033 - RNA, 19 nt, Artificial Sequence
  Description of Artificial Sequence: Synthetic oligonucleotide
  Antisense strand to SEQ ID NO: 1520032
uaauuuccugcuagaggaa

SEQ ID NO: 1520034 - RNA, 19 nt, Artificial Sequence
  Description of Artificial Sequence: Synthetic oligonucleotide
  Sense strand starting at position 670 of SEQ ID NO: 1244882
gcgccaagguccucauguu

SEQ ID NO: 1520035 - RNA, 19 nt, Artificial Sequence
  Description of Artificial Sequence: Synthetic oligonucleotide
  Antisense strand to SEQ ID NO: 1520034
aacaugaggaccuuggcgc

SEQ ID NO: 1520036 - RNA, 19 nt, Artificial Sequence
  Description of Artificial Sequence: Synthetic oligonucleotide
  Sense strand starting at position 676 of SEQ ID NO: 1244882
agguccucauguucucaga

SEQ ID NO: 1520037 - RNA, 19 nt, Artificial Sequence
  Description of Artificial Sequence: Synthetic oligonucleotide
  Antisense strand to SEQ ID NO: 1520036
ucugagaacaugaggaccu

SEQ ID NO: 1520038 - RNA, 19 nt, Artificial Sequence
  Description of Artificial Sequence: Synthetic oligonucleotide
  Sense strand starting at position 837 of SEQ ID NO: 1244882
gcccguucaucugugagag

SEQ ID NO: 1520039 - RNA, 19 nt, Artificial Sequence
  Description of Artificial Sequence: Synthetic oligonucleotide
  Antisense strand to SEQ ID NO: 1520038
cucucacagaugaacgggc

SEQ ID NO: 1520040 - RNA, 19 nt, Artificial Sequence
  Description of Artificial Sequence: Synthetic oligonucleotide
  Sense strand starting at position 838 of SEQ ID NO: 1244882
cccguucaucugugagagu

SEQ ID NO: 1520041 - RNA, 19 nt, Artificial Sequence
  Description of Artificial Sequence: Synthetic oligonucleotide
  Antisense strand to SEQ ID NO: 1520040
acucucacagaugaacggg

SEQ ID NO: 1520042 - RNA, 19 nt, Artificial Sequence
  Description of Artificial Sequence: Synthetic oligonucleotide
  Sense strand starting at position 839 of SEQ ID NO: 1244882
ccguucaucugugagagug

SEQ ID NO: 1520043 - RNA, 19 nt, Artificial Sequence
  Description of Artificial Sequence: Synthetic oligonucleotide
  Antisense strand to SEQ ID NO: 1520042
cacucucacagaugaacgg

SEQ ID NO: 1520044 - RNA, 19 nt, Artificial Sequence
  Description of Artificial Sequence: Synthetic oligonucleotide
  Sense strand starting at position 841 of SEQ ID NO: 1244882
guucaucugugagagugga

SEQ ID NO: 1520045 - RNA, 19 nt, Artificial Sequence
  Description of Artificial Sequence: Synthetic oligonucleotide
  Antisense strand to SEQ ID NO: 1520044
uccacucucacagaugaac

SEQ ID NO: 1520046 - RNA, 19 nt, Artificial Sequence
  Description of Artificial Sequence: Synthetic oligonucleotide
  Sense strand starting at position 1344 of SEQ ID NO: 1244882
gcgcaccauuccugagcua

SEQ ID NO: 1520047 - RNA, 19 nt, Artificial Sequence
  Description of Artificial Sequence: Synthetic oligonucleotide
  Antisense strand to SEQ ID NO: 1520046
uagcucaggaauggugcgc

SEQ ID NO: 1520048 - RNA, 19 nt, Artificial Sequence
  Description of Artificial Sequence: Synthetic oligonucleotide
  Sense strand starting at position 1709 of SEQ ID NO: 1244882
agggaacucggcugccaaa

SEQ ID NO: 1520049 - RNA, 19 nt, Artificial Sequence
  Description of Artificial Sequence: Synthetic oligonucleotide
  Antisense strand to SEQ ID NO: 1520048
uuuggcagccgaguucccu

SEQ ID NO: 1520050 - RNA, 19 nt, Artificial Sequence
  Description of Artificial Sequence: Synthetic oligonucleotide
  Sense strand starting at position 2230 of SEQ ID NO: 1244882
gggcaauauuuccagacuc

SEQ ID NO: 1520051 - RNA, 19 nt, Artificial Sequence
  Description of Artificial Sequence: Synthetic oligonucleotide
  Antisense strand to SEQ ID NO: 1520050
gagucuggaaauauugccc

SEQ ID NO: 1520052 - RNA, 19 nt, Artificial Sequence
  Description of Artificial Sequence: Synthetic oligonucleotide
  Sense strand starting at position 2260 of SEQ ID NO: 1244882
augguuagggaucguccaa

SEQ ID NO: 1520053 - RNA, 19 nt, Artificial Sequence
  Description of Artificial Sequence: Synthetic oligonucleotide
  Antisense strand to SEQ ID NO: 1520052
uuggacgaucccuaaccau

SEQ ID NO: 1520054 - RNA, 19 nt, Artificial Sequence
  Description of Artificial Sequence: Synthetic oligonucleotide
  Sense strand starting at position 2437 of SEQ ID NO: 1244882
uuguuuaucuagcaagagu

SEQ ID NO: 1520055 - RNA, 19 nt, Artificial Sequence
  Description of Artificial Sequence: Synthetic oligonucleotide
  Antisense strand to SEQ ID NO: 1520054
acucuugcuagauaaacaa

SEQ ID NO: 1520056 - RNA, 19 nt, Artificial Sequence
  Description of Artificial Sequence: Synthetic oligonucleotide
  Sense strand starting at position 2446 of SEQ ID NO: 1244882
uagcaagaguucuggcuca

SEQ ID NO: 1520057 - RNA, 19 nt, Artificial Sequence
  Description of Artificial Sequence: Synthetic oligonucleotide
  Antisense strand to SEQ ID NO: 1520056
ugagccagaacucuugcua

SEQ ID NO: 1520058 - RNA, 19 nt, Artificial Sequence
  Description of Artificial Sequence: Synthetic oligonucleotide
  Sense strand starting at position 2581 of SEQ ID NO: 1244882
gaagguaugcacugauauu

SEQ ID NO: 1520059 - RNA, 19 nt, Artificial Sequence
  Description of Artificial Sequence: Synthetic oligonucleotide
  Antisense strand to SEQ ID NO: 1520058
aauaucagugcauaccuuc

SEQ ID NO: 1520060 - RNA, 19 nt, Artificial Sequence
  Description of Artificial Sequence: Synthetic oligonucleotide
  Sense strand starting at position 2629 of SEQ ID NO: 1244882
gagagaaguuaaucacccu

SEQ ID NO: 1520061 - RNA, 19 nt, Artificial Sequence
  Description of Artificial Sequence: Synthetic oligonucleotide
  Antisense strand to SEQ ID NO: 1520060
agggugauuaacuucucuc

SEQ ID NO: 1520062 - RNA, 19 nt, Artificial Sequence
  Description of Artificial Sequence: Synthetic oligonucleotide
  Sense strand starting at position 2690 of SEQ ID NO: 1244882
ugggaacucuauggaggaa

SEQ ID NO: 1520063 - RNA, 19 nt, Artificial Sequence
  Description of Artificial Sequence: Synthetic oligonucleotide
  Antisense strand to SEQ ID NO: 1520062
uuccuccauagaguuccca

SEQ ID NO: 1520064 - RNA, 19 nt, Artificial Sequence
  Description of Artificial Sequence: Synthetic oligonucleotide
  Sense strand starting at position 2705 of SEQ ID NO: 1244882
ggaaacugccuuugagauu

SEQ ID NO: 1520065 - RNA, 19 nt, Artificial Sequence
  Description of Artificial Sequence: Synthetic oligonucleotide
  Antisense strand to SEQ ID NO: 1520064
aaucucaaaggcaguuucc

SEQ ID NO: 1520066 - RNA, 19 nt, Artificial Sequence
  Description of Artificial Sequence: Synthetic oligonucleotide
  Sense strand starting at position 3060 of SEQ ID NO: 1244882
cagauugaacccuggugga

SEQ ID NO: 1520067 - RNA, 19 nt, Artificial Sequence
  Description of Artificial Sequence: Synthetic oligonucleotide
  Antisense strand to SEQ ID NO: 1520066
uccaccaggguucaaucug

SEQ ID NO: 1520068 - RNA, 19 nt, Artificial Sequence
  Description of Artificial Sequence: Synthetic oligonucleotide
  Sense strand starting at position 3163 of SEQ ID NO: 1244882
auagcuugcgccugacaca

SEQ ID NO: 1520069 - RNA, 19 nt, Artificial Sequence
  Description of Artificial Sequence: Synthetic oligonucleotide
  Antisense strand to SEQ ID NO: 1520068
ugugucaggcgcaagcuau

SEQ ID NO: 1520070 - RNA, 19 nt, Artificial Sequence
  Description of Artificial Sequence: Synthetic oligonucleotide
  Sense strand starting at position 3332 of SEQ ID NO: 1244882
uggcaaagauaugucuuaa

SEQ ID NO: 1520071 - RNA, 19 nt, Artificial Sequence
  Description of Artificial Sequence: Synthetic oligonucleotide
  Antisense strand to SEQ ID NO: 1520070
uuaagacauaucuuugcca

SEQ ID NO: 1520072 - RNA, 19 nt, Artificial Sequence
  Description of Artificial Sequence: Synthetic oligonucleotide
  Sense strand starting at position 3349 of SEQ ID NO: 1244882
aaacaucuagccugggaga

SEQ ID NO: 1520073 - RNA, 19 nt, Artificial Sequence
  Description of Artificial Sequence: Synthetic oligonucleotide
  Antisense strand to SEQ ID NO: 1520072
ucucccaggcuagauguuu

SEQ ID NO: 1520074 - RNA, 19 nt, Artificial Sequence
  Description of Artificial Sequence: Synthetic oligonucleotide
  Sense strand starting at position 3379 of SEQ ID NO: 1244882
gccaauuccugagcacuua

SEQ ID NO: 1520075 - RNA, 19 nt, Artificial Sequence
  Description of Artificial Sequence: Synthetic oligonucleotide
  Antisense strand to SEQ ID NO: 1520074
uaagugcucaggaauuggc

SEQ ID NO: 1520076 - RNA, 19 nt, Artificial Sequence
  Description of Artificial Sequence: Synthetic oligonucleotide
  Sense strand starting at position 3630 of SEQ ID NO: 1244882
gaggucaaguccugccuau

SEQ ID NO: 1520077 - RNA, 19 nt, Artificial Sequence
  Description of Artificial Sequence: Synthetic oligonucleotide
  Antisense strand to SEQ ID NO: 1520076
auaggcaggacuugaccuc

SEQ ID NO: 1520078 - RNA, 19 nt, Artificial Sequence
  Description of Artificial Sequence: Synthetic oligonucleotide
  Sense strand starting at position 3886 of SEQ ID NO: 1244882
ccugcuuggccucaguuua

SEQ ID NO: 1520079 - RNA, 19 nt, Artificial Sequence
  Description of Artificial Sequence: Synthetic oligonucleotide
  Antisense strand to SEQ ID NO: 1520078
uaaacugaggccaagcagg

SEQ ID NO: 1520080 - RNA, 19 nt, Artificial Sequence
  Description of Artificial Sequence: Synthetic oligonucleotide
  Sense strand starting at position 3960 of SEQ ID NO: 1244882
uggguuuccugucauauga

SEQ ID NO: 1520081 - RNA, 19 nt, Artificial Sequence
  Description of Artificial Sequence: Synthetic oligonucleotide
  Antisense strand to SEQ ID NO: 1520080
ucauaugacaggaaaccca

SEQ ID NO: 1520082 - RNA, 19 nt, Artificial Sequence
  Description of Artificial Sequence: Synthetic oligonucleotide
  Sense strand starting at position 3 of SEQ ID NO: 1244883
gaggucaaguccugccuau

SEQ ID NO: 1520083 - RNA, 19 nt, Artificial Sequence
  Description of Artificial Sequence: Synthetic oligonucleotide
  Antisense strand to SEQ ID NO: 1520082
auaggcaggacuugaccuc

SEQ ID NO: 1520084 - RNA, 19 nt, Artificial Sequence
  Description of Artificial Sequence: Synthetic oligonucleotide
  Sense strand starting at position 259 of SEQ ID NO: 1244883
ccugcuuggccucaguuua

SEQ ID NO: 1520085 - RNA, 19 nt, Artificial Sequence
  Description of Artificial Sequence: Synthetic oligonucleotide
  Antisense strand to SEQ ID NO: 1520084
uaaacugaggccaagcagg

SEQ ID NO: 1520086 - RNA, 19 nt, Artificial Sequence
  Description of Artificial Sequence: Synthetic oligonucleotide
  Sense strand starting at position 333 of SEQ ID NO: 1244883
uggguuuccugucauauga

SEQ ID NO: 1520087 - RNA, 19 nt, Artificial Sequence
  Description of Artificial Sequence: Synthetic oligonucleotide
  Antisense strand to SEQ ID NO: 1520086
ucauaugacaggaaaccca

SEQ ID NO: 1520088 - RNA, 19 nt, Artificial Sequence
  Description of Artificial Sequence: Synthetic oligonucleotide
  Sense strand starting at position 2469 of SEQ ID NO: 1244883
ugaggucugucccggcuau

SEQ ID NO: 1520089 - RNA, 19 nt, Artificial Sequence
  Description of Artificial Sequence: Synthetic oligonucleotide
  Antisense strand to SEQ ID NO: 1520088
auagccgggacagaccuca

SEQ ID NO: 1520090 - RNA, 19 nt, Artificial Sequence
  Description of Artificial Sequence: Synthetic oligonucleotide
  Sense strand starting at position 2775 of SEQ ID NO: 1244883
gccaucgaguggucaccaa

SEQ ID NO: 1520091 - RNA, 19 nt, Artificial Sequence
  Description of Artificial Sequence: Synthetic oligonucleotide
  Antisense strand to SEQ ID NO: 1520090
uuggugaccacucgauggc

SEQ ID NO: 1520092 - RNA, 19 nt, Artificial Sequence
  Description of Artificial Sequence: Synthetic oligonucleotide
  Sense strand starting at position 2806 of SEQ ID NO: 1244883
guuccagucguggcucuau

SEQ ID NO: 1520093 - RNA, 19 nt, Artificial Sequence
  Description of Artificial Sequence: Synthetic oligonucleotide
  Antisense strand to SEQ ID NO: 1520092
auagagccacgacuggaac

SEQ ID NO: 1520094 - RNA, 19 nt, Artificial Sequence
  Description of Artificial Sequence: Synthetic oligonucleotide
  Sense strand starting at position 3170 of SEQ ID NO: 1244883
agggaaucuucccugauca

SEQ ID NO: 1520095 - RNA, 19 nt, Artificial Sequence
  Description of Artificial Sequence: Synthetic oligonucleotide
  Antisense strand to SEQ ID NO: 1520094
ugaucagggaagauucccu

SEQ ID NO: 1520096 - RNA, 19 nt, Artificial Sequence
  Description of Artificial Sequence: Synthetic oligonucleotide
  Sense strand starting at position 3171 of SEQ ID NO: 1244883
gggaaucuucccugaucac

SEQ ID NO: 1520097 - RNA, 19 nt, Artificial Sequence
  Description of Artificial Sequence: Synthetic oligonucleotide
  Antisense strand to SEQ ID NO: 1520096
gugaucagggaagauuccc

SEQ ID NO: 1520098 - RNA, 19 nt, Artificial Sequence
  Description of Artificial Sequence: Synthetic oligonucleotide
  Sense strand starting at position 3581 of SEQ ID NO: 1244883
caacgaguucaaggugugu

SEQ ID NO: 1520099 - RNA, 19 nt, Artificial Sequence
  Description of Artificial Sequence: Synthetic oligonucleotide
  Antisense strand to SEQ ID NO: 1520098
acacaccuugaacucguug

SEQ ID NO: 1520100 - RNA, 19 nt, Artificial Sequence
  Description of Artificial Sequence: Synthetic oligonucleotide
  Sense strand starting at position 3602 of SEQ ID NO: 1244883
acgagugagugccugagau

SEQ ID NO: 1520101 - RNA, 19 nt, Artificial Sequence
  Description of Artificial Sequence: Synthetic oligonucleotide
  Antisense strand to SEQ ID NO: 1520100
aucucaggcacucacucgu

SEQ ID NO: 1520102 - RNA, 19 nt, Artificial Sequence
  Description of Artificial Sequence: Synthetic oligonucleotide
  Sense strand starting at position 3621 of SEQ ID NO: 1244883
ccacaagcuccagguauau

SEQ ID NO: 1520103 - RNA, 19 nt, Artificial Sequence
  Description of Artificial Sequence: Synthetic oligonucleotide
  Antisense strand to SEQ ID NO: 1520102
auauaccuggagcuugugg

SEQ ID NO: 1520104 - RNA, 19 nt, Artificial Sequence
  Description of Artificial Sequence: Synthetic oligonucleotide
  Sense strand starting at position 3739 of SEQ ID NO: 1244883
ugauggagagcgugugaau

SEQ ID NO: 1520105 - RNA, 19 nt, Artificial Sequence
  Description of Artificial Sequence: Synthetic oligonucleotide
  Antisense strand to SEQ ID NO: 1520104
auucacacgcucuccauca

SEQ ID NO: 1520106 - RNA, 19 nt, Artificial Sequence
  Description of Artificial Sequence: Synthetic oligonucleotide
  Sense strand starting at position 3828 of SEQ ID NO: 1244883
gugugaaucugagugucua

SEQ ID NO: 1520107 - RNA, 19 nt, Artificial Sequence
  Description of Artificial Sequence: Synthetic oligonucleotide
  Antisense strand to SEQ ID NO: 1520106
uagacacucagauucacac

SEQ ID NO: 1520108 - RNA, 19 nt, Artificial Sequence
  Description of Artificial Sequence: Synthetic oligonucleotide
  Sense strand starting at position 3829 of SEQ ID NO: 1244883
ugugaaucugagugucuau

SEQ ID NO: 1520109 - RNA, 19 nt, Artificial Sequence
  Description of Artificial Sequence: Synthetic oligonucleotide
  Antisense strand to SEQ ID NO: 1520108
auagacacucagauucaca

SEQ ID NO: 1520110 - RNA, 19 nt, Artificial Sequence
  Description of Artificial Sequence: Synthetic oligonucleotide
  Sense strand starting at position 3841 of SEQ ID NO: 1244883
ugucuaugggagcaugaca

SEQ ID NO: 1520111 - RNA, 19 nt, Artificial Sequence
  Description of Artificial Sequence: Synthetic oligonucleotide
  Antisense strand to SEQ ID NO: 1520110
ugucaugcucccauagaca

SEQ ID NO: 1520112 - RNA, 19 nt, Artificial Sequence
  Description of Artificial Sequence: Synthetic oligonucleotide
  Sense strand starting at position 3849 of SEQ ID NO: 1244883
ggagcaugacagugugaga

SEQ ID NO: 1520113 - RNA, 19 nt, Artificial Sequence
  Description of Artificial Sequence: Synthetic oligonucleotide
  Antisense strand to SEQ ID NO: 1520112
ucucacacugucaugcucc

SEQ ID NO: 1520114 - RNA, 19 nt, Artificial Sequence
  Description of Artificial Sequence: Synthetic oligonucleotide
  Sense strand starting at position 3852 of SEQ ID NO: 1244883
gcaugacagugugagaguu

SEQ ID NO: 1520115 - RNA, 19 nt, Artificial Sequence
  Description of Artificial Sequence: Synthetic oligonucleotide
  Antisense strand to SEQ ID NO: 1520114
aacucucacacugucaugc

SEQ ID NO: 1520116 - RNA, 19 nt, Artificial Sequence
  Description of Artificial Sequence: Synthetic oligonucleotide
  Sense strand starting at position 3864 of SEQ ID NO: 1244883
gagaguuugugacugugua

SEQ ID NO: 1520117 - RNA, 19 nt, Artificial Sequence
  Description of Artificial Sequence: Synthetic oligonucleotide
  Antisense strand to SEQ ID NO: 1520116
uacacagucacaaacucuc

SEQ ID NO: 1520118 - RNA, 19 nt, Artificial Sequence
  Description of Artificial Sequence: Synthetic oligonucleotide
  Sense strand starting at position 3865 of SEQ ID NO: 1244883
agaguuugugacuguguau

SEQ ID NO: 1520119 - RNA, 19 nt, Artificial Sequence
  Description of Artificial Sequence: Synthetic oligonucleotide
  Antisense strand to SEQ ID NO: 1520118
auacacagucacaaacucu

SEQ ID NO: 1520120 - RNA, 19 nt, Artificial Sequence
  Description of Artificial Sequence: Synthetic oligonucleotide
  Sense strand starting at position 3876 of SEQ ID NO: 1244883
cuguguaugugagcgugaa

SEQ ID NO: 1520121 - RNA, 19 nt, Artificial Sequence
  Description of Artificial Sequence: Synthetic oligonucleotide
  Antisense strand to SEQ ID NO: 1520120
uucacgcucacauacacag

SEQ ID NO: 1520122 - RNA, 19 nt, Artificial Sequence
  Description of Artificial Sequence: Synthetic oligonucleotide
  Sense strand starting at position 3877 of SEQ ID NO: 1244883
uguguaugugagcgugaau

SEQ ID NO: 1520123 - RNA, 19 nt, Artificial Sequence
  Description of Artificial Sequence: Synthetic oligonucleotide
  Antisense strand to SEQ ID NO: 1520122
auucacgcucacauacaca

SEQ ID NO: 1520124 - RNA, 19 nt, Artificial Sequence
  Description of Artificial Sequence: Synthetic oligonucleotide
  Sense strand starting at position 3880 of SEQ ID NO: 1244883
guaugugagcgugaauggu

SEQ ID NO: 1520125 - RNA, 19 nt, Artificial Sequence
  Description of Artificial Sequence: Synthetic oligonucleotide
  Antisense strand to SEQ ID NO: 1520124
accauucacgcucacauac

SEQ ID NO: 1520126 - RNA, 19 nt, Artificial Sequence
  Description of Artificial Sequence: Synthetic oligonucleotide
  Sense strand starting at position 3889 of SEQ ID NO: 1244883
cgugaaugguugugacugu

SEQ ID NO: 1520127 - RNA, 19 nt, Artificial Sequence
  Description of Artificial Sequence: Synthetic oligonucleotide
  Antisense strand to SEQ ID NO: 1520126
acagucacaaccauucacg

SEQ ID NO: 1520128 - RNA, 19 nt, Artificial Sequence
  Description of Artificial Sequence: Synthetic oligonucleotide
  Sense strand starting at position 48 of SEQ ID NO: 1244884
ugcggcuacugcucuauaa

SEQ ID NO: 1520129 - RNA, 19 nt, Artificial Sequence
  Description of Artificial Sequence: Synthetic oligonucleotide
  Antisense strand to SEQ ID NO: 1520128
uuauagagcaguagccgca

SEQ ID NO: 1520130 - RNA, 19 nt, Artificial Sequence
  Description of Artificial Sequence: Synthetic oligonucleotide
  Sense strand starting at position 2081 of SEQ ID NO: 1244884
gguuuccucugcuuuaaac

SEQ ID NO: 1520131 - RNA, 19 nt, Artificial Sequence
  Description of Artificial Sequence: Synthetic oligonucleotide
  Antisense strand to SEQ ID NO: 1520130
guuuaaagcagaggaaacc

SEQ ID NO: 1520132 - RNA, 19 nt, Artificial Sequence
  Description of Artificial Sequence: Synthetic oligonucleotide
  Sense strand starting at position 2424 of SEQ ID NO: 1244884
gggccaaacucuuuaucug

SEQ ID NO: 1520133 - RNA, 19 nt, Artificial Sequence
  Description of Artificial Sequence: Synthetic oligonucleotide
  Antisense strand to SEQ ID NO: 1520132
cagauaaagaguuuggccc

SEQ ID NO: 1520134 - RNA, 19 nt, Artificial Sequence
  Description of Artificial Sequence: Synthetic oligonucleotide
  Sense strand starting at position 2461 of SEQ ID NO: 1244884
gugugauaaugacaggaug

SEQ ID NO: 1520135 - RNA, 19 nt, Artificial Sequence
  Description of Artificial Sequence: Synthetic oligonucleotide
  Antisense strand to SEQ ID NO: 1520134
cauccugucauuaucacac

SEQ ID NO: 1520136 - RNA, 19 nt, Artificial Sequence
  Description of Artificial Sequence: Synthetic oligonucleotide
  Sense strand starting at position 2463 of SEQ ID NO: 1244884
gugauaaugacaggauggu

SEQ ID NO: 1520137 - RNA, 19 nt, Artificial Sequence
  Description of Artificial Sequence: Synthetic oligonucleotide
  Antisense strand to SEQ ID NO: 1520136
accauccugucauuaucac

SEQ ID NO: 1520138 - RNA, 19 nt, Artificial Sequence
  Description of Artificial Sequence: Synthetic oligonucleotide
  Sense strand starting at position 2499 of SEQ ID NO: 1244884
gcugcuggguuuccagaua

SEQ ID NO: 1520139 - RNA, 19 nt, Artificial Sequence
  Description of Artificial Sequence: Synthetic oligonucleotide
  Antisense strand to SEQ ID NO: 1520138
uaucuggaaacccagcagc

SEQ ID NO: 1520140 - RNA, 19 nt, Artificial Sequence
  Description of Artificial Sequence: Synthetic oligonucleotide
  Sense strand starting at position 2510 of SEQ ID NO: 1244884
uccagauacucuugguguu

SEQ ID NO: 1520141 - RNA, 19 nt, Artificial Sequence
  Description of Artificial Sequence: Synthetic oligonucleotide
  Antisense strand to SEQ ID NO: 1520140
aacaccaagaguaucugga

SEQ ID NO: 1520142 - RNA, 19 nt, Artificial Sequence
  Description of Artificial Sequence: Synthetic oligonucleotide
  Sense strand starting at position 2511 of SEQ ID NO: 1244884
ccagauacucuugguguua

SEQ ID NO: 1520143 - RNA, 19 nt, Artificial Sequence
  Description of Artificial Sequence: Synthetic oligonucleotide
  Antisense strand to SEQ ID NO: 1520142
uaacaccaagaguaucugg

SEQ ID NO: 1520144 - RNA, 19 nt, Artificial Sequence
  Description of Artificial Sequence: Synthetic oligonucleotide
  Sense strand starting at position 2513 of SEQ ID NO: 1244884
agauacucuugguguuacu

SEQ ID NO: 1520145 - RNA, 19 nt, Artificial Sequence
  Description of Artificial Sequence: Synthetic oligonucleotide
  Antisense strand to SEQ ID NO: 1520144
aguaacaccaagaguaucu

SEQ ID NO: 1520146 - RNA, 19 nt, Artificial Sequence
  Description of Artificial Sequence: Synthetic oligonucleotide
  Sense strand starting at position 2522 of SEQ ID NO: 1244884
ugguguuacugcuguacuu

SEQ ID NO: 1520147 - RNA, 19 nt, Artificial Sequence
  Description of Artificial Sequence: Synthetic oligonucleotide
  Antisense strand to SEQ ID NO: 1520146
aaguacagcaguaacacca

SEQ ID NO: 1520148 - RNA, 19 nt, Artificial Sequence
  Description of Artificial Sequence: Synthetic oligonucleotide
  Sense strand starting at position 2548 of SEQ ID NO: 1244884
cugucauuggcguuauggu

SEQ ID NO: 1520149 - RNA, 19 nt, Artificial Sequence
  Description of Artificial Sequence: Synthetic oligonucleotide
  Antisense strand to SEQ ID NO: 1520148
accauaacgccaaugacag

SEQ ID NO: 1520150 - RNA, 19 nt, Artificial Sequence
  Description of Artificial Sequence: Synthetic oligonucleotide
  Sense strand starting at position 2549 of SEQ ID NO: 1244884
ugucauuggcguuaugguu

SEQ ID NO: 1520151 - RNA, 19 nt, Artificial Sequence
  Description of Artificial Sequence: Synthetic oligonucleotide
  Antisense strand to SEQ ID NO: 1520150
aaccauaacgccaaugaca

SEQ ID NO: 1520152 - RNA, 19 nt, Artificial Sequence
  Description of Artificial Sequence: Synthetic oligonucleotide
  Sense strand starting at position 2555 of SEQ ID NO: 1244884
uggcguuaugguugugcca

SEQ ID NO: 1520153 - RNA, 19 nt, Artificial Sequence
  Description of Artificial Sequence: Synthetic oligonucleotide
  Antisense strand to SEQ ID NO: 1520152
uggcacaaccauaacgcca

SEQ ID NO: 1520154 - RNA, 19 nt, Artificial Sequence
  Description of Artificial Sequence: Synthetic oligonucleotide
  Sense strand starting at position 2556 of SEQ ID NO: 1244884
ggcguuaugguugugccaa

SEQ ID NO: 1520155 - RNA, 19 nt, Artificial Sequence
  Description of Artificial Sequence: Synthetic oligonucleotide
  Antisense strand to SEQ ID NO: 1520154
uuggcacaaccauaacgcc

SEQ ID NO: 1520156 - RNA, 19 nt, Artificial Sequence
  Description of Artificial Sequence: Synthetic oligonucleotide
  Sense strand starting at position 2557 of SEQ ID NO: 1244884
gcguuaugguugugccaag

SEQ ID NO: 1520157 - RNA, 19 nt, Artificial Sequence
  Description of Artificial Sequence: Synthetic oligonucleotide
  Antisense strand to SEQ ID NO: 1520156
cuuggcacaaccauaacgc

SEQ ID NO: 1520158 - RNA, 19 nt, Artificial Sequence
  Description of Artificial Sequence: Synthetic oligonucleotide
  Sense strand starting at position 2558 of SEQ ID NO: 1244884
cguuaugguugugccaaga

SEQ ID NO: 1520159 - RNA, 19 nt, Artificial Sequence
  Description of Artificial Sequence: Synthetic oligonucleotide
  Antisense strand to SEQ ID NO: 1520158
ucuuggcacaaccauaacg

SEQ ID NO: 1520160 - RNA, 19 nt, Artificial Sequence
  Description of Artificial Sequence: Synthetic oligonucleotide
  Sense strand starting at position 2597 of SEQ ID NO: 1244884
gguaguaagugcucaggaa

SEQ ID NO: 1520161 - RNA, 19 nt, Artificial Sequence
  Description of Artificial Sequence: Synthetic oligonucleotide
  Antisense strand to SEQ ID NO: 1520160
uuccugagcacuuacuacc

SEQ ID NO: 1520162 - RNA, 19 nt, Artificial Sequence
  Description of Artificial Sequence: Synthetic oligonucleotide
  Sense strand starting at position 2598 of SEQ ID NO: 1244884
guaguaagugcucaggaau

SEQ ID NO: 1520163 - RNA, 19 nt, Artificial Sequence
  Description of Artificial Sequence: Synthetic oligonucleotide
  Antisense strand to SEQ ID NO: 1520162
auuccugagcacuuacuac

SEQ ID NO: 1520164 - RNA, 19 nt, Artificial Sequence
  Description of Artificial Sequence: Synthetic oligonucleotide
  Sense strand starting at position 2641 of SEQ ID NO: 1244884
cuagauguuuaagacauau

SEQ ID NO: 1520165 - RNA, 19 nt, Artificial Sequence
  Description of Artificial Sequence: Synthetic oligonucleotide
  Antisense strand to SEQ ID NO: 1520164
auaugucuuaaacaucuag

SEQ ID NO: 1520166 - RNA, 19 nt, Artificial Sequence
  Description of Artificial Sequence: Synthetic oligonucleotide
  Sense strand starting at position 2739 of SEQ ID NO: 1244884
ccagucaucucaggucuga

SEQ ID NO: 1520167 - RNA, 19 nt, Artificial Sequence
  Description of Artificial Sequence: Synthetic oligonucleotide
  Antisense strand to SEQ ID NO: 1520166
ucagaccugagaugacugg

SEQ ID NO: 1520168 - RNA, 19 nt, Artificial Sequence
  Description of Artificial Sequence: Synthetic oligonucleotide
  Sense strand starting at position 2744 of SEQ ID NO: 1244884
caucucaggucugaauguu

SEQ ID NO: 1520169 - RNA, 19 nt, Artificial Sequence
  Description of Artificial Sequence: Synthetic oligonucleotide
  Antisense strand to SEQ ID NO: 1520168
aacauucagaccugagaug

SEQ ID NO: 1520170 - RNA, 19 nt, Artificial Sequence
  Description of Artificial Sequence: Synthetic oligonucleotide
  Sense strand starting at position 2806 of SEQ ID NO: 1244884
gaguccuuucuguguguca

SEQ ID NO: 1520171 - RNA, 19 nt, Artificial Sequence
  Description of Artificial Sequence: Synthetic oligonucleotide
  Antisense strand to SEQ ID NO: 1520170
ugacacacagaaaggacuc

SEQ ID NO: 1520172 - RNA, 19 nt, Artificial Sequence
  Description of Artificial Sequence: Synthetic oligonucleotide
  Sense strand starting at position 2970 of SEQ ID NO: 1244884
gcaaauucaguguggguau

SEQ ID NO: 1520173 - RNA, 19 nt, Artificial Sequence
  Description of Artificial Sequence: Synthetic oligonucleotide
  Antisense strand to SEQ ID NO: 1520172
auacccacacugaauuugc

SEQ ID NO: 1520174 - RNA, 19 nt, Artificial Sequence
  Description of Artificial Sequence: Synthetic oligonucleotide
  Sense strand starting at position 3285 of SEQ ID NO: 1244884
ggcaguuuccuccauagag

SEQ ID NO: 1520175 - RNA, 19 nt, Artificial Sequence
  Description of Artificial Sequence: Synthetic oligonucleotide
  Antisense strand to SEQ ID NO: 1520174
cucuauggaggaaacugcc

SEQ ID NO: 1520176 - RNA, 19 nt, Artificial Sequence
  Description of Artificial Sequence: Synthetic oligonucleotide
  Sense strand starting at position 3344 of SEQ ID NO: 1244884
cacccuaaagggugauuaa

SEQ ID NO: 1520177 - RNA, 19 nt, Artificial Sequence
  Description of Artificial Sequence: Synthetic oligonucleotide
  Antisense strand to SEQ ID NO: 1520176
uuaaucacccuuuagggug

SEQ ID NO: 1520178 - RNA, 19 nt, Artificial Sequence
  Description of Artificial Sequence: Synthetic oligonucleotide
  Sense strand starting at position 3347 of SEQ ID NO: 1244884
ccuaaagggugauuaacuu

SEQ ID NO: 1520179 - RNA, 19 nt, Artificial Sequence
  Description of Artificial Sequence: Synthetic oligonucleotide
  Antisense strand to SEQ ID NO: 1520178
aaguuaaucacccuuuagg

SEQ ID NO: 1520180 - RNA, 19 nt, Artificial Sequence
  Description of Artificial Sequence: Synthetic oligonucleotide
  Sense strand starting at position 3395 of SEQ ID NO: 1244884
augggaauaucagugcaua

SEQ ID NO: 1520181 - RNA, 19 nt, Artificial Sequence
  Description of Artificial Sequence: Synthetic oligonucleotide
  Antisense strand to SEQ ID NO: 1520180
uaugcacugauauucccau

SEQ ID NO: 1520182 - RNA, 19 nt, Artificial Sequence
  Description of Artificial Sequence: Synthetic oligonucleotide
  Sense strand starting at position 3396 of SEQ ID NO: 1244884
ugggaauaucagugcauac

SEQ ID NO: 1520183 - RNA, 19 nt, Artificial Sequence
  Description of Artificial Sequence: Synthetic oligonucleotide
  Antisense strand to SEQ ID NO: 1520182
guaugcacugauauuccca

SEQ ID NO: 1520184 - RNA, 19 nt, Artificial Sequence
  Description of Artificial Sequence: Synthetic oligonucleotide
  Sense strand starting at position 3398 of SEQ ID NO: 1244884
ggaauaucagugcauaccu

SEQ ID NO: 1520185 - RNA, 19 nt, Artificial Sequence
  Description of Artificial Sequence: Synthetic oligonucleotide
  Antisense strand to SEQ ID NO: 1520184
agguaugcacugauauucc

SEQ ID NO: 1520186 - RNA, 19 nt, Artificial Sequence
  Description of Artificial Sequence: Synthetic oligonucleotide
  Sense strand starting at position 3467 of SEQ ID NO: 1244884
gggacagucaccuaagugu

SEQ ID NO: 1520187 - RNA, 19 nt, Artificial Sequence
  Description of Artificial Sequence: Synthetic oligonucleotide
  Antisense strand to SEQ ID NO: 1520186
acacuuaggugacuguccc

SEQ ID NO: 1520188 - RNA, 19 nt, Artificial Sequence
  Description of Artificial Sequence: Synthetic oligonucleotide
  Sense strand starting at position 3539 of SEQ ID NO: 1244884
ccagaacucuugcuagaua

SEQ ID NO: 1520189 - RNA, 19 nt, Artificial Sequence
  Description of Artificial Sequence: Synthetic oligonucleotide
  Antisense strand to SEQ ID NO: 1520188
uaucuagcaagaguucugg

SEQ ID NO: 1520190 - RNA, 19 nt, Artificial Sequence
  Description of Artificial Sequence: Synthetic oligonucleotide
  Sense strand starting at position 3577 of SEQ ID NO: 1244884
gugucaggagugggagaua

SEQ ID NO: 1520191 - RNA, 19 nt, Artificial Sequence
  Description of Artificial Sequence: Synthetic oligonucleotide
  Antisense strand to SEQ ID NO: 1520190
uaucucccacuccugacac

SEQ ID NO: 1520192 - RNA, 19 nt, Artificial Sequence
  Description of Artificial Sequence: Synthetic oligonucleotide
  Sense strand starting at position 3668 of SEQ ID NO: 1244884
cccaaucuggagugagaua

SEQ ID NO: 1520193 - RNA, 19 nt, Artificial Sequence
  Description of Artificial Sequence: Synthetic oligonucleotide
  Antisense strand to SEQ ID NO: 1520192
uaucucacuccagauuggg

SEQ ID NO: 1520194 - RNA, 19 nt, Artificial Sequence
  Description of Artificial Sequence: Synthetic oligonucleotide
  Sense strand starting at position 3710 of SEQ ID NO: 1244884
cggcaucuuacuuggacga

SEQ ID NO: 1520195 - RNA, 19 nt, Artificial Sequence
  Description of Artificial Sequence: Synthetic oligonucleotide
  Antisense strand to SEQ ID NO: 1520194
ucguccaaguaagaugccg

SEQ ID NO: 1520196 - RNA, 19 nt, Artificial Sequence
  Description of Artificial Sequence: Synthetic oligonucleotide
  Sense strand starting at position 3711 of SEQ ID NO: 1244884
ggcaucuuacuuggacgau

SEQ ID NO: 1520197 - RNA, 19 nt, Artificial Sequence
  Description of Artificial Sequence: Synthetic oligonucleotide
  Antisense strand to SEQ ID NO: 1520196
aucguccaaguaagaugcc

SEQ ID NO: 1520198 - RNA, 19 nt, Artificial Sequence
  Description of Artificial Sequence: Synthetic oligonucleotide
  Sense strand starting at position 3744 of SEQ ID NO: 1244884
agcagaugagucuggaaau

SEQ ID NO: 1520199 - RNA, 19 nt, Artificial Sequence
  Description of Artificial Sequence: Synthetic oligonucleotide
  Antisense strand to SEQ ID NO: 1520198
auuuccagacucaucugcu

SEQ ID NO: 1520200 - RNA, 19 nt, Artificial Sequence
  Description of Artificial Sequence: Synthetic oligonucleotide
  Sense strand starting at position 3745 of SEQ ID NO: 1244884
gcagaugagucuggaaaua

SEQ ID NO: 1520201 - RNA, 19 nt, Artificial Sequence
  Description of Artificial Sequence: Synthetic oligonucleotide
  Antisense strand to SEQ ID NO: 1520200
uauuuccagacucaucugc

SEQ ID NO: 1520202 - RNA, 19 nt, Artificial Sequence
  Description of Artificial Sequence: Synthetic oligonucleotide
  Sense strand starting at position 23 of SEQ ID NO: 1244885
ugaacauguugguugggaa

SEQ ID NO: 1520203 - RNA, 19 nt, Artificial Sequence
  Description of Artificial Sequence: Synthetic oligonucleotide
  Antisense strand to SEQ ID NO: 1520202
uucccaaccaacauguuca

SEQ ID NO: 1520204 - RNA, 19 nt, Artificial Sequence
  Description of Artificial Sequence: Synthetic oligonucleotide
  Sense strand starting at position 24 of SEQ ID NO: 1244885
gaacauguugguugggaaa

SEQ ID NO: 1520205 - RNA, 19 nt, Artificial Sequence
  Description of Artificial Sequence: Synthetic oligonucleotide
  Antisense strand to SEQ ID NO: 1520204
uuucccaaccaacauguuc

SEQ ID NO: 1520206 - RNA, 19 nt, Artificial Sequence
  Description of Artificial Sequence: Synthetic oligonucleotide
  Sense strand starting at position 139 of SEQ ID NO: 1244885
auugaaaucggauguaaau

SEQ ID NO: 1520207 - RNA, 19 nt, Artificial Sequence
  Description of Artificial Sequence: Synthetic oligonucleotide
  Antisense strand to SEQ ID NO: 1520206
auuuacauccgauuucaau

SEQ ID NO: 1520208 - RNA, 19 nt, Artificial Sequence
  Description of Artificial Sequence: Synthetic oligonucleotide
  Sense strand starting at position 358 of SEQ ID NO: 1244885
cuaaucccuguggaauauu

SEQ ID NO: 1520209 - RNA, 19 nt, Artificial Sequence
  Description of Artificial Sequence: Synthetic oligonucleotide
  Antisense strand to SEQ ID NO: 1520208
aauauuccacagggauuag

SEQ ID NO: 1520210 - RNA, 19 nt, Artificial Sequence
  Description of Artificial Sequence: Synthetic oligonucleotide
  Sense strand starting at position 408 of SEQ ID NO: 1244885
guagcucauaaggaguaaa

SEQ ID NO: 1520211 - RNA, 19 nt, Artificial Sequence
  Description of Artificial Sequence: Synthetic oligonucleotide
  Antisense strand to SEQ ID NO: 1520210
uuuacuccuuaugagcuac

SEQ ID NO: 1520212 - RNA, 19 nt, Artificial Sequence
  Description of Artificial Sequence: Synthetic oligonucleotide
  Sense strand starting at position 411 of SEQ ID NO: 1244885
gcucauaaggaguaaacuu

SEQ ID NO: 1520213 - RNA, 19 nt, Artificial Sequence
  Description of Artificial Sequence: Synthetic oligonucleotide
  Antisense strand to SEQ ID NO: 1520212
aaguuuacuccuuaugagc

SEQ ID NO: 1520214 - RNA, 19 nt, Artificial Sequence
  Description of Artificial Sequence: Synthetic oligonucleotide
  Sense strand starting at position 512 of SEQ ID NO: 1244885
guguuauauuaauugagga

SEQ ID NO: 1520215 - RNA, 19 nt, Artificial Sequence
  Description of Artificial Sequence: Synthetic oligonucleotide
  Antisense strand to SEQ ID NO: 1520214
uccucaauuaauauaacac

SEQ ID NO: 1520216 - RNA, 19 nt, Artificial Sequence
  Description of Artificial Sequence: Synthetic oligonucleotide
  Sense strand starting at position 652 of SEQ ID NO: 1244885
agaacuguuuaucuaauga

SEQ ID NO: 1520217 - RNA, 19 nt, Artificial Sequence
  Description of Artificial Sequence: Synthetic oligonucleotide
  Antisense strand to SEQ ID NO: 1520216
ucauuagauaaacaguucu

SEQ ID NO: 1520218 - RNA, 19 nt, Artificial Sequence
  Description of Artificial Sequence: Synthetic oligonucleotide
  Sense strand starting at position 951 of SEQ ID NO: 1244885
guacauuuguacccaguua

SEQ ID NO: 1520219 - RNA, 19 nt, Artificial Sequence
  Description of Artificial Sequence: Synthetic oligonucleotide
  Antisense strand to SEQ ID NO: 1520218
uaacuggguacaaauguac

SEQ ID NO: 1520220 - RNA, 19 nt, Artificial Sequence
  Description of Artificial Sequence: Synthetic oligonucleotide
  Sense strand starting at position 980 of SEQ ID NO: 1244885
uguugauaacuuuggauga

SEQ ID NO: 1520221 - RNA, 19 nt, Artificial Sequence
  Description of Artificial Sequence: Synthetic oligonucleotide
  Antisense strand to SEQ ID NO: 1520220
ucauccaaaguuaucaaca

SEQ ID NO: 1520222 - RNA, 19 nt, Artificial Sequence
  Description of Artificial Sequence: Synthetic oligonucleotide
  Sense strand starting at position 996 of SEQ ID NO: 1244885
ugacuuccaguaugaugga

SEQ ID NO: 1520223 - RNA, 19 nt, Artificial Sequence
  Description of Artificial Sequence: Synthetic oligonucleotide
  Antisense strand to SEQ ID NO: 1520222
uccaucauacuggaaguca

SEQ ID NO: 1520224 - RNA, 19 nt, Artificial Sequence
  Description of Artificial Sequence: Synthetic oligonucleotide
  Sense strand starting at position 1005 of SEQ ID NO: 1244885
guaugauggacucaguagu

SEQ ID NO: 1520225 - RNA, 19 nt, Artificial Sequence
  Description of Artificial Sequence: Synthetic oligonucleotide
  Antisense strand to SEQ ID NO: 1520224
acuacugaguccaucauac

SEQ ID NO: 1520226 - RNA, 19 nt, Artificial Sequence
  Description of Artificial Sequence: Synthetic oligonucleotide
  Sense strand starting at position 1141 of SEQ ID NO: 1244885
cuaauagggcuugaucauc

SEQ ID NO: 1520227 - RNA, 19 nt, Artificial Sequence
  Description of Artificial Sequence: Synthetic oligonucleotide
  Antisense strand to SEQ ID NO: 1520226
gaugaucaagcccuauuag

SEQ ID NO: 1520228 - RNA, 19 nt, Artificial Sequence
  Description of Artificial Sequence: Synthetic oligonucleotide
  Sense strand starting at position 1165 of SEQ ID NO: 1244885
ucuagaaucuagguuauag

SEQ ID NO: 1520229 - RNA, 19 nt, Artificial Sequence
  Description of Artificial Sequence: Synthetic oligonucleotide
  Antisense strand to SEQ ID NO: 1520228
cuauaaccuagauucuaga

SEQ ID NO: 1520230 - RNA, 19 nt, Artificial Sequence
  Description of Artificial Sequence: Synthetic oligonucleotide
  Sense strand starting at position 1167 of SEQ ID NO: 1244885
uagaaucuagguuauagca

SEQ ID NO: 1520231 - RNA, 19 nt, Artificial Sequence
  Description of Artificial Sequence: Synthetic oligonucleotide
  Antisense strand to SEQ ID NO: 1520230
ugcuauaaccuagauucua

SEQ ID NO: 1520232 - RNA, 19 nt, Artificial Sequence
  Description of Artificial Sequence: Synthetic oligonucleotide
  Sense strand starting at position 1259 of SEQ ID NO: 1244885
uuaacugaaagucgagaaa

SEQ ID NO: 1520233 - RNA, 19 nt, Artificial Sequence
  Description of Artificial Sequence: Synthetic oligonucleotide
  Antisense strand to SEQ ID NO: 1520232
uuucucgacuuucaguuaa

SEQ ID NO: 1520234 - RNA, 19 nt, Artificial Sequence
  Description of Artificial Sequence: Synthetic oligonucleotide
  Sense strand starting at position 1352 of SEQ ID NO: 1244885
aggauuccaucuguagaua

SEQ ID NO: 1520235 - RNA, 19 nt, Artificial Sequence
  Description of Artificial Sequence: Synthetic oligonucleotide
  Antisense strand to SEQ ID NO: 1520234
uaucuacagauggaauccu

SEQ ID NO: 1520236 - RNA, 19 nt, Artificial Sequence
  Description of Artificial Sequence: Synthetic oligonucleotide
  Sense strand starting at position 1355 of SEQ ID NO: 1244885
auuccaucuguagauacuu

SEQ ID NO: 1520237 - RNA, 19 nt, Artificial Sequence
  Description of Artificial Sequence: Synthetic oligonucleotide
  Antisense strand to SEQ ID NO: 1520236
aaguaucuacagauggaau

SEQ ID NO: 1520238 - RNA, 19 nt, Artificial Sequence
  Description of Artificial Sequence: Synthetic oligonucleotide
  Sense strand starting at position 1401 of SEQ ID NO: 1244885
ccuaucugggcucagaaua

SEQ ID NO: 1520239 - RNA, 19 nt, Artificial Sequence
  Description of Artificial Sequence: Synthetic oligonucleotide
  Antisense strand to SEQ ID NO: 1520238
uauucugagcccagauagg

SEQ ID NO: 1520240 - RNA, 19 nt, Artificial Sequence
  Description of Artificial Sequence: Synthetic oligonucleotide
  Sense strand starting at position 1910 of SEQ ID NO: 1244885
gggugaaucucucugggaa

SEQ ID NO: 1520241 - RNA, 19 nt, Artificial Sequence
  Description of Artificial Sequence: Synthetic oligonucleotide
  Antisense strand to SEQ ID NO: 1520240
uucccagagagauucaccc

SEQ ID NO: 1520242 - RNA, 19 nt, Artificial Sequence
  Description of Artificial Sequence: Synthetic oligonucleotide
  Sense strand starting at position 1911 of SEQ ID NO: 1244885
ggugaaucucucugggaac

SEQ ID NO: 1520243 - RNA, 19 nt, Artificial Sequence
  Description of Artificial Sequence: Synthetic oligonucleotide
  Antisense strand to SEQ ID NO: 1520242
guucccagagagauucacc

SEQ ID NO: 1520244 - RNA, 19 nt, Artificial Sequence
  Description of Artificial Sequence: Synthetic oligonucleotide
  Sense strand starting at position 2454 of SEQ ID NO: 1244885
ccauaugaaguuugagauc

SEQ ID NO: 1520245 - RNA, 19 nt, Artificial Sequence
  Description of Artificial Sequence: Synthetic oligonucleotide
  Antisense strand to SEQ ID NO: 1520244
gaucucaaacuucauaugg

SEQ ID NO: 1520246 - RNA, 19 nt, Artificial Sequence
  Description of Artificial Sequence: Synthetic oligonucleotide
  Sense strand starting at position 2563 of SEQ ID NO: 1244885
ggucuagaaucucuacaug

SEQ ID NO: 1520247 - RNA, 19 nt, Artificial Sequence
  Description of Artificial Sequence: Synthetic oligonucleotide
  Antisense strand to SEQ ID NO: 1520246
cauguagagauucuagacc

SEQ ID NO: 1520248 - RNA, 19 nt, Artificial Sequence
  Description of Artificial Sequence: Synthetic oligonucleotide
  Sense strand starting at position 2633 of SEQ ID NO: 1244885
uccagcuuggaucaaauua

SEQ ID NO: 1520249 - RNA, 19 nt, Artificial Sequence
  Description of Artificial Sequence: Synthetic oligonucleotide
  Antisense strand to SEQ ID NO: 1520248
uaauuugauccaagcugga

SEQ ID NO: 1520250 - RNA, 19 nt, Artificial Sequence
  Description of Artificial Sequence: Synthetic oligonucleotide
  Sense strand starting at position 2677 of SEQ ID NO: 1244885
auguuugucaugcuuuguu

SEQ ID NO: 1520251 - RNA, 19 nt, Artificial Sequence
  Description of Artificial Sequence: Synthetic oligonucleotide
  Antisense strand to SEQ ID NO: 1520250
aacaaagcaugacaaacau

SEQ ID NO: 1520252 - RNA, 19 nt, Artificial Sequence
  Description of Artificial Sequence: Synthetic oligonucleotide
  Sense strand starting at position 2715 of SEQ ID NO: 1244885
ucaagaugaugucuacuca

SEQ ID NO: 1520253 - RNA, 19 nt, Artificial Sequence
  Description of Artificial Sequence: Synthetic oligonucleotide
  Antisense strand to SEQ ID NO: 1520252
ugaguagacaucaucuuga

SEQ ID NO: 1520254 - RNA, 19 nt, Artificial Sequence
  Description of Artificial Sequence: Synthetic oligonucleotide
  Sense strand starting at position 2910 of SEQ ID NO: 1244885
aagagcuguccuguucguu

SEQ ID NO: 1520255 - RNA, 19 nt, Artificial Sequence
  Description of Artificial Sequence: Synthetic oligonucleotide
  Antisense strand to SEQ ID NO: 1520254
aacgaacaggacagcucuu

SEQ ID NO: 1520256 - RNA, 19 nt, Artificial Sequence
  Description of Artificial Sequence: Synthetic oligonucleotide
  Sense strand starting at position 2998 of SEQ ID NO: 1244885
aguugugacaaccacgaau

SEQ ID NO: 1520257 - RNA, 19 nt, Artificial Sequence
  Description of Artificial Sequence: Synthetic oligonucleotide
  Antisense strand to SEQ ID NO: 1520256
auucgugguugucacaacu

SEQ ID NO: 1520258 - RNA, 19 nt, Artificial Sequence
  Description of Artificial Sequence: Synthetic oligonucleotide
  Sense strand starting at position 3121 of SEQ ID NO: 1244885
ggcuguuugcuuguuuauc

SEQ ID NO: 1520259 - RNA, 19 nt, Artificial Sequence
  Description of Artificial Sequence: Synthetic oligonucleotide
  Antisense strand to SEQ ID NO: 1520258
gauaaacaagcaaacagcc

SEQ ID NO: 1520260 - RNA, 19 nt, Artificial Sequence
  Description of Artificial Sequence: Synthetic oligonucleotide
  Sense strand starting at position 3155 of SEQ ID NO: 1244885
gacugagaguuucuuaaga

SEQ ID NO: 1520261 - RNA, 19 nt, Artificial Sequence
  Description of Artificial Sequence: Synthetic oligonucleotide
  Antisense strand to SEQ ID NO: 1520260
ucuuaagaaacucucaguc

SEQ ID NO: 1520262 - RNA, 19 nt, Artificial Sequence
  Description of Artificial Sequence: Synthetic oligonucleotide
  Sense strand starting at position 3163 of SEQ ID NO: 1244885
guuucuuaagaguaacgag

SEQ ID NO: 1520263 - RNA, 19 nt, Artificial Sequence
  Description of Artificial Sequence: Synthetic oligonucleotide
  Antisense strand to SEQ ID NO: 1520262
cucguuacucuuaagaaac

SEQ ID NO: 1520264 - RNA, 19 nt, Artificial Sequence
  Description of Artificial Sequence: Synthetic oligonucleotide
  Sense strand starting at position 3172 of SEQ ID NO: 1244885
gaguaacgaguguacagaa

SEQ ID NO: 1520265 - RNA, 19 nt, Artificial Sequence
  Description of Artificial Sequence: Synthetic oligonucleotide
  Antisense strand to SEQ ID NO: 1520264
uucuguacacucguuacuc

SEQ ID NO: 1520266 - RNA, 19 nt, Artificial Sequence
  Description of Artificial Sequence: Synthetic oligonucleotide
  Sense strand starting at position 3425 of SEQ ID NO: 1244885
ucauuaugcagguauggga

SEQ ID NO: 1520267 - RNA, 19 nt, Artificial Sequence
  Description of Artificial Sequence: Synthetic oligonucleotide
  Antisense strand to SEQ ID NO: 1520266
ucccauaccugcauaauga

SEQ ID NO: 1520268 - RNA, 19 nt, Artificial Sequence
  Description of Artificial Sequence: Synthetic oligonucleotide
  Sense strand starting at position 3456 of SEQ ID NO: 1244885
caggaagaacccugguuau

SEQ ID NO: 1520269 - RNA, 19 nt, Artificial Sequence
  Description of Artificial Sequence: Synthetic oligonucleotide
  Antisense strand to SEQ ID NO: 1520268
auaaccaggguucuuccug

SEQ ID NO: 1520270 - RNA, 19 nt, Artificial Sequence
  Description of Artificial Sequence: Synthetic oligonucleotide
  Sense strand starting at position 3459 of SEQ ID NO: 1244885
gaagaacccugguuauagu

SEQ ID NO: 1520271 - RNA, 19 nt, Artificial Sequence
  Description of Artificial Sequence: Synthetic oligonucleotide
  Antisense strand to SEQ ID NO: 1520270
acuauaaccaggguucuuc

SEQ ID NO: 1520272 - RNA, 19 nt, Artificial Sequence
  Description of Artificial Sequence: Synthetic oligonucleotide
  Sense strand starting at position 3473 of SEQ ID NO: 1244885
auaguaaugugaccuaaag

SEQ ID NO: 1520273 - RNA, 19 nt, Artificial Sequence
  Description of Artificial Sequence: Synthetic oligonucleotide
  Antisense strand to SEQ ID NO: 1520272
cuuuaggucacauuacuau

SEQ ID NO: 1520274 - RNA, 19 nt, Artificial Sequence
  Description of Artificial Sequence: Synthetic oligonucleotide
  Sense strand starting at position 3475 of SEQ ID NO: 1244885
aguaaugugaccuaaaggu

SEQ ID NO: 1520275 - RNA, 19 nt, Artificial Sequence
  Description of Artificial Sequence: Synthetic oligonucleotide
  Antisense strand to SEQ ID NO: 1520274
accuuuaggucacauuacu

SEQ ID NO: 1520276 - RNA, 19 nt, Artificial Sequence
  Description of Artificial Sequence: Synthetic oligonucleotide
  Sense strand starting at position 3508 of SEQ ID NO: 1244885
uugccuucucuggaaacau

SEQ ID NO: 1520277 - RNA, 19 nt, Artificial Sequence
  Description of Artificial Sequence: Synthetic oligonucleotide
  Antisense strand to SEQ ID NO: 1520276
auguuuccagagaaggcaa

SEQ ID NO: 1520278 - RNA, 19 nt, Artificial Sequence
  Description of Artificial Sequence: Synthetic oligonucleotide
  Sense strand starting at position 3563 of SEQ ID NO: 1244885
uuaacaauagcuggaggau

SEQ ID NO: 1520279 - RNA, 19 nt, Artificial Sequence
  Description of Artificial Sequence: Synthetic oligonucleotide
  Antisense strand to SEQ ID NO: 1520278
auccuccagcuauuguuaa

SEQ ID NO: 1520280 - RNA, 19 nt, Artificial Sequence
  Description of Artificial Sequence: Synthetic oligonucleotide
  Sense strand starting at position 3692 of SEQ ID NO: 1244885
uguacagcacacuaugaau

SEQ ID NO: 1520281 - RNA, 19 nt, Artificial Sequence
  Description of Artificial Sequence: Synthetic oligonucleotide
  Antisense strand to SEQ ID NO: 1520280
auucauagugugcuguaca

SEQ ID NO: 1520282 - RNA, 19 nt, Artificial Sequence
  Description of Artificial Sequence: Synthetic oligonucleotide
  Sense strand starting at position 105 of SEQ ID NO: 1244886
gacuguggugaucacaacu

SEQ ID NO: 1520283 - RNA, 19 nt, Artificial Sequence
  Description of Artificial Sequence: Synthetic oligonucleotide
  Antisense strand to SEQ ID NO: 1520282
aguugugaucaccacaguc

SEQ ID NO: 1520284 - RNA, 19 nt, Artificial Sequence
  Description of Artificial Sequence: Synthetic oligonucleotide
  Sense strand starting at position 252 of SEQ ID NO: 1244886
cagucucaccagggugaaa

SEQ ID NO: 1520285 - RNA, 19 nt, Artificial Sequence
  Description of Artificial Sequence: Synthetic oligonucleotide
  Antisense strand to SEQ ID NO: 1520284
uuucacccuggugagacug

SEQ ID NO: 1520286 - RNA, 19 nt, Artificial Sequence
  Description of Artificial Sequence: Synthetic oligonucleotide
  Sense strand starting at position 263 of SEQ ID NO: 1244886
gggugaaagcugugaagau

SEQ ID NO: 1520287 - RNA, 19 nt, Artificial Sequence
  Description of Artificial Sequence: Synthetic oligonucleotide
  Antisense strand to SEQ ID NO: 1520286
aucuucacagcuuucaccc

SEQ ID NO: 1520288 - RNA, 19 nt, Artificial Sequence
  Description of Artificial Sequence: Synthetic oligonucleotide
  Sense strand starting at position 286 of SEQ ID NO: 1244886
ggagaugucagcuacaugu

SEQ ID NO: 1520289 - RNA, 19 nt, Artificial Sequence
  Description of Artificial Sequence: Synthetic oligonucleotide
  Antisense strand to SEQ ID NO: 1520288
acauguagcugacaucucc

SEQ ID NO: 1520290 - RNA, 19 nt, Artificial Sequence
  Description of Artificial Sequence: Synthetic oligonucleotide
  Sense strand starting at position 288 of SEQ ID NO: 1244886
agaugucagcuacauguau

SEQ ID NO: 1520291 - RNA, 19 nt, Artificial Sequence
  Description of Artificial Sequence: Synthetic oligonucleotide
  Antisense strand to SEQ ID NO: 1520290
auacauguagcugacaucu

SEQ ID NO: 1520292 - RNA, 19 nt, Artificial Sequence
  Description of Artificial Sequence: Synthetic oligonucleotide
  Sense strand starting at position 365 of SEQ ID NO: 1244886
ggcacagauccaugugaaa

SEQ ID NO: 1520293 - RNA, 19 nt, Artificial Sequence
  Description of Artificial Sequence: Synthetic oligonucleotide
  Antisense strand to SEQ ID NO: 1520292
uuucacauggaucugugcc

SEQ ID NO: 1520294 - RNA, 19 nt, Artificial Sequence
  Description of Artificial Sequence: Synthetic oligonucleotide
  Sense strand starting at position 442 of SEQ ID NO: 1244886
agaugaagcagaugcauau

SEQ ID NO: 1520295 - RNA, 19 nt, Artificial Sequence
  Description of Artificial Sequence: Synthetic oligonucleotide
  Antisense strand to SEQ ID NO: 1520294
auaugcaucugcuucaucu

SEQ ID NO: 1520296 - RNA, 19 nt, Artificial Sequence
  Description of Artificial Sequence: Synthetic oligonucleotide
  Sense strand starting at position 595 of SEQ ID NO: 1244886
auccaaagauggucucauu

SEQ ID NO: 1520297 - RNA, 19 nt, Artificial Sequence
  Description of Artificial Sequence: Synthetic oligonucleotide
  Antisense strand to SEQ ID NO: 1520296
aaugagaccaucuuuggau

SEQ ID NO: 1520298 - RNA, 19 nt, Artificial Sequence
  Description of Artificial Sequence: Synthetic oligonucleotide
  Sense strand starting at position 744 of SEQ ID NO: 1244886
aaucaaugucaaggcaagu

SEQ ID NO: 1520299 - RNA, 19 nt, Artificial Sequence
  Description of Artificial Sequence: Synthetic oligonucleotide
  Antisense strand to SEQ ID NO: 1520298
acuugccuugacauugauu

SEQ ID NO: 1520300 - RNA, 19 nt, Artificial Sequence
  Description of Artificial Sequence: Synthetic oligonucleotide
  Sense strand starting at position 780 of SEQ ID NO: 1244886
guucuucuccauugaauga

SEQ ID NO: 1520301 - RNA, 19 nt, Artificial Sequence
  Description of Artificial Sequence: Synthetic oligonucleotide
  Antisense strand to SEQ ID NO: 1520300
ucauucaauggagaagaac

SEQ ID NO: 1520302 - RNA, 19 nt, Artificial Sequence
  Description of Artificial Sequence: Synthetic oligonucleotide
  Sense strand starting at position 923 of SEQ ID NO: 1244886
uggucugaaguguaacaau

SEQ ID NO: 1520303 - RNA, 19 nt, Artificial Sequence
  Description of Artificial Sequence: Synthetic oligonucleotide
  Antisense strand to SEQ ID NO: 1520302
auuguuacacuucagacca

SEQ ID NO: 1520304 - RNA, 19 nt, Artificial Sequence
  Description of Artificial Sequence: Synthetic oligonucleotide
  Sense strand starting at position 1098 of SEQ ID NO: 1244886
cgauauuauguauacuaca

SEQ ID NO: 1520305 - RNA, 19 nt, Artificial Sequence
  Description of Artificial Sequence: Synthetic oligonucleotide
  Antisense strand to SEQ ID NO: 1520304
uguaguauacauaauaucg

SEQ ID NO: 1520306 - RNA, 19 nt, Artificial Sequence
  Description of Artificial Sequence: Synthetic oligonucleotide
  Sense strand starting at position 1269 of SEQ ID NO: 1244886
aaaguaucugguugaaaug

SEQ ID NO: 1520307 - RNA, 19 nt, Artificial Sequence
  Description of Artificial Sequence: Synthetic oligonucleotide
  Antisense strand to SEQ ID NO: 1520306
cauuucaaccagauacuuu

SEQ ID NO: 1520308 - RNA, 19 nt, Artificial Sequence
  Description of Artificial Sequence: Synthetic oligonucleotide
  Sense strand starting at position 1280 of SEQ ID NO: 1244886
uugaaaugcugucuaugag

SEQ ID NO: 1520309 - RNA, 19 nt, Artificial Sequence
  Description of Artificial Sequence: Synthetic oligonucleotide
  Antisense strand to SEQ ID NO: 1520308
cucauagacagcauuucaa

SEQ ID NO: 1520310 - RNA, 19 nt, Artificial Sequence
  Description of Artificial Sequence: Synthetic oligonucleotide
  Sense strand starting at position 1281 of SEQ ID NO: 1244886
ugaaaugcugucuaugaga

SEQ ID NO: 1520311 - RNA, 19 nt, Artificial Sequence
  Description of Artificial Sequence: Synthetic oligonucleotide
  Antisense strand to SEQ ID NO: 1520310
ucucauagacagcauuuca

SEQ ID NO: 1520312 - RNA, 19 nt, Artificial Sequence
  Description of Artificial Sequence: Synthetic oligonucleotide
  Sense strand starting at position 1323 of SEQ ID NO: 1244886
cucagacaugguugaguca

SEQ ID NO: 1520313 - RNA, 19 nt, Artificial Sequence
  Description of Artificial Sequence: Synthetic oligonucleotide
  Antisense strand to SEQ ID NO: 1520312
ugacucaaccaugucugag

SEQ ID NO: 1520314 - RNA, 19 nt, Artificial Sequence
  Description of Artificial Sequence: Synthetic oligonucleotide
  Sense strand starting at position 1389 of SEQ ID NO: 1244886
guuguaguuaccgaacaag

SEQ ID NO: 1520315 - RNA, 19 nt, Artificial Sequence
  Description of Artificial Sequence: Synthetic oligonucleotide
  Antisense strand to SEQ ID NO: 1520314
cuuguucgguaacuacaac

SEQ ID NO: 1520316 - RNA, 19 nt, Artificial Sequence
  Description of Artificial Sequence: Synthetic oligonucleotide
  Sense strand starting at position 1392 of SEQ ID NO: 1244886
guaguuaccgaacaaguuu

SEQ ID NO: 1520317 - RNA, 19 nt, Artificial Sequence
  Description of Artificial Sequence: Synthetic oligonucleotide
  Antisense strand to SEQ ID NO: 1520316
aaacuuguucgguaacuac

SEQ ID NO: 1520318 - RNA, 19 nt, Artificial Sequence
  Description of Artificial Sequence: Synthetic oligonucleotide
  Sense strand starting at position 1539 of SEQ ID NO: 1244886
cucccugagcaaugaaacu

SEQ ID NO: 1520319 - RNA, 19 nt, Artificial Sequence
  Description of Artificial Sequence: Synthetic oligonucleotide
  Antisense strand to SEQ ID NO: 1520318
aguuucauugcucagggag

SEQ ID NO: 1520320 - RNA, 19 nt, Artificial Sequence
  Description of Artificial Sequence: Synthetic oligonucleotide
  Sense strand starting at position 1695 of SEQ ID NO: 1244886
caaagcugagauugagcua

SEQ ID NO: 1520321 - RNA, 19 nt, Artificial Sequence
  Description of Artificial Sequence: Synthetic oligonucleotide
  Antisense strand to SEQ ID NO: 1520320
uagcucaaucucagcuuug

SEQ ID NO: 1520322 - RNA, 19 nt, Artificial Sequence
  Description of Artificial Sequence: Synthetic oligonucleotide
  Sense strand starting at position 2126 of SEQ ID NO: 1244886
ugcucagugacaugaugag

SEQ ID NO: 1520323 - RNA, 19 nt, Artificial Sequence
  Description of Artificial Sequence: Synthetic oligonucleotide
  Antisense strand to SEQ ID NO: 1520322
cucaucaugucacugagca

SEQ ID NO: 1520324 - RNA, 19 nt, Artificial Sequence
  Description of Artificial Sequence: Synthetic oligonucleotide
  Sense strand starting at position 2132 of SEQ ID NO: 1244886
gugacaugaugaguccgaa

SEQ ID NO: 1520325 - RNA, 19 nt, Artificial Sequence
  Description of Artificial Sequence: Synthetic oligonucleotide
  Antisense strand to SEQ ID NO: 1520324
uucggacucaucaugucac

SEQ ID NO: 1520326 - RNA, 19 nt, Artificial Sequence
  Description of Artificial Sequence: Synthetic oligonucleotide
  Sense strand starting at position 2135 of SEQ ID NO: 1244886
acaugaugaguccgaauca

SEQ ID NO: 1520327 - RNA, 19 nt, Artificial Sequence
  Description of Artificial Sequence: Synthetic oligonucleotide
  Antisense strand to SEQ ID NO: 1520326
ugauucggacucaucaugu

SEQ ID NO: 1520328 - RNA, 19 nt, Artificial Sequence
  Description of Artificial Sequence: Synthetic oligonucleotide
  Sense strand starting at position 2675 of SEQ ID NO: 1244886
guggacauggcacaauauu

SEQ ID NO: 1520329 - RNA, 19 nt, Artificial Sequence
  Description of Artificial Sequence: Synthetic oligonucleotide
  Antisense strand to SEQ ID NO: 1520328
aauauugugccauguccac

SEQ ID NO: 1520330 - RNA, 19 nt, Artificial Sequence
  Description of Artificial Sequence: Synthetic oligonucleotide
  Sense strand starting at position 2801 of SEQ ID NO: 1244886
ugguuugaacccuaaucuu

SEQ ID NO: 1520331 - RNA, 19 nt, Artificial Sequence
  Description of Artificial Sequence: Synthetic oligonucleotide
  Antisense strand to SEQ ID NO: 1520330
aagauuaggguucaaacca

SEQ ID NO: 1520332 - RNA, 19 nt, Artificial Sequence
  Description of Artificial Sequence: Synthetic oligonucleotide
  Sense strand starting at position 2869 of SEQ ID NO: 1244886
ucaguaagucuguaacaag

SEQ ID NO: 1520333 - RNA, 19 nt, Artificial Sequence
  Description of Artificial Sequence: Synthetic oligonucleotide
  Antisense strand to SEQ ID NO: 1520332
cuuguuacagacuuacuga

SEQ ID NO: 1520334 - RNA, 19 nt, Artificial Sequence
  Description of Artificial Sequence: Synthetic oligonucleotide
  Sense strand starting at position 2888 of SEQ ID NO: 1244886
cucccuaccuauguugaga

SEQ ID NO: 1520335 - RNA, 19 nt, Artificial Sequence
  Description of Artificial Sequence: Synthetic oligonucleotide
  Antisense strand to SEQ ID NO: 1520334
ucucaacauagguagggag

SEQ ID NO: 1520336 - RNA, 19 nt, Artificial Sequence
  Description of Artificial Sequence: Synthetic oligonucleotide
  Sense strand starting at position 3013 of SEQ ID NO: 1244886
cccauaaaccuguaaguga

SEQ ID NO: 1520337 - RNA, 19 nt, Artificial Sequence
  Description of Artificial Sequence: Synthetic oligonucleotide
  Antisense strand to SEQ ID NO: 1520336
ucacuuacagguuuauggg

SEQ ID NO: 1520338 - RNA, 19 nt, Artificial Sequence
  Description of Artificial Sequence: Synthetic oligonucleotide
  Sense strand starting at position 3020 of SEQ ID NO: 1244886
accuguaagugacuuuaua

SEQ ID NO: 1520339 - RNA, 19 nt, Artificial Sequence
  Description of Artificial Sequence: Synthetic oligonucleotide
  Antisense strand to SEQ ID NO: 1520338
uauaaagucacuuacaggu

SEQ ID NO: 1520340 - RNA, 19 nt, Artificial Sequence
  Description of Artificial Sequence: Synthetic oligonucleotide
  Sense strand starting at position 3142 of SEQ ID NO: 1244886
uccuacacucuguaguuaa

SEQ ID NO: 1520341 - RNA, 19 nt, Artificial Sequence
  Description of Artificial Sequence: Synthetic oligonucleotide
  Antisense strand to SEQ ID NO: 1520340
uuaacuacagaguguagga

SEQ ID NO: 1520342 - RNA, 19 nt, Artificial Sequence
  Description of Artificial Sequence: Synthetic oligonucleotide
  Sense strand starting at position 3309 of SEQ ID NO: 1244886
gggcuuggauguucucaaa

SEQ ID NO: 1520343 - RNA, 19 nt, Artificial Sequence
  Description of Artificial Sequence: Synthetic oligonucleotide
  Antisense strand to SEQ ID NO: 1520342
uuugagaacauccaagccc

SEQ ID NO: 1520344 - RNA, 19 nt, Artificial Sequence
  Description of Artificial Sequence: Synthetic oligonucleotide
  Sense strand starting at position 3375 of SEQ ID NO: 1244886
guagcaauacccugaugac

SEQ ID NO: 1520345 - RNA, 19 nt, Artificial Sequence
  Description of Artificial Sequence: Synthetic oligonucleotide
  Antisense strand to SEQ ID NO: 1520344
gucaucaggguauugcuac

SEQ ID NO: 1520346 - RNA, 19 nt, Artificial Sequence
  Description of Artificial Sequence: Synthetic oligonucleotide
  Sense strand starting at position 3385 of SEQ ID NO: 1244886
ccugaugacuugucacaaa

SEQ ID NO: 1520347 - RNA, 19 nt, Artificial Sequence
  Description of Artificial Sequence: Synthetic oligonucleotide
  Antisense strand to SEQ ID NO: 1520346
uuugugacaagucaucagg

SEQ ID NO: 1520348 - RNA, 19 nt, Artificial Sequence
  Description of Artificial Sequence: Synthetic oligonucleotide
  Sense strand starting at position 3410 of SEQ ID NO: 1244886
gggaccagaaguuguuuau

SEQ ID NO: 1520349 - RNA, 19 nt, Artificial Sequence
  Description of Artificial Sequence: Synthetic oligonucleotide
  Antisense strand to SEQ ID NO: 1520348
auaaacaacuucugguccc

SEQ ID NO: 1520350 - RNA, 19 nt, Artificial Sequence
  Description of Artificial Sequence: Synthetic oligonucleotide
  Sense strand starting at position 3413 of SEQ ID NO: 1244886
accagaaguuguuuauucu

SEQ ID NO: 1520351 - RNA, 19 nt, Artificial Sequence
  Description of Artificial Sequence: Synthetic oligonucleotide
  Antisense strand to SEQ ID NO: 1520350
agaauaaacaacuucuggu

SEQ ID NO: 1520352 - RNA, 19 nt, Artificial Sequence
  Description of Artificial Sequence: Synthetic oligonucleotide
  Sense strand starting at position 3417 of SEQ ID NO: 1244886
gaaguuguuuauucuggaa

SEQ ID NO: 1520353 - RNA, 19 nt, Artificial Sequence
  Description of Artificial Sequence: Synthetic oligonucleotide
  Antisense strand to SEQ ID NO: 1520352
uuccagaauaaacaacuuc

SEQ ID NO: 1520354 - RNA, 19 nt, Artificial Sequence
  Description of Artificial Sequence: Synthetic oligonucleotide
  Sense strand starting at position 3710 of SEQ ID NO: 1244886
uugagaagcuccuuaacag

SEQ ID NO: 1520355 - RNA, 19 nt, Artificial Sequence
  Description of Artificial Sequence: Synthetic oligonucleotide
  Antisense strand to SEQ ID NO: 1520354
cuguuaaggagcuucucaa

SEQ ID NO: 1520356 - RNA, 19 nt, Artificial Sequence
  Description of Artificial Sequence: Synthetic oligonucleotide
  Sense strand starting at position 3789 of SEQ ID NO: 1244886
ccacuuugccugcaagaua

SEQ ID NO: 1520357 - RNA, 19 nt, Artificial Sequence
  Description of Artificial Sequence: Synthetic oligonucleotide
  Antisense strand to SEQ ID NO: 1520356
uaucuugcaggcaaagugg

SEQ ID NO: 1520358 - RNA, 19 nt, Artificial Sequence
  Description of Artificial Sequence: Synthetic oligonucleotide
  Sense strand starting at position 3931 of SEQ ID NO: 1244886
auaguaagcccuugacuga

SEQ ID NO: 1520359 - RNA, 19 nt, Artificial Sequence
  Description of Artificial Sequence: Synthetic oligonucleotide
  Antisense strand to SEQ ID NO: 1520358
ucagucaagggcuuacuau

SEQ ID NO: 1520360 - RNA, 19 nt, Artificial Sequence
  Description of Artificial Sequence: Synthetic oligonucleotide
  Sense strand starting at position 3979 of SEQ ID NO: 1244886
guguccuaggagcacaaau

SEQ ID NO: 1520361 - RNA, 19 nt, Artificial Sequence
  Description of Artificial Sequence: Synthetic oligonucleotide
  Antisense strand to SEQ ID NO: 1520360
auuugugcuccuaggacac

SEQ ID NO: 1520362 - RNA, 19 nt, Artificial Sequence
  Description of Artificial Sequence: Synthetic oligonucleotide
  Sense strand starting at position 155 of SEQ ID NO: 1244887
aacugugcgcgaguacaua

SEQ ID NO: 1520363 - RNA, 19 nt, Artificial Sequence
  Description of Artificial Sequence: Synthetic oligonucleotide
  Antisense strand to SEQ ID NO: 1520362
uauguacucgcgcacaguu

SEQ ID NO: 1520364 - RNA, 19 nt, Artificial Sequence
  Description of Artificial Sequence: Synthetic oligonucleotide
  Sense strand starting at position 230 of SEQ ID NO: 1244887
ccuggcuucccagagugua

SEQ ID NO: 1520365 - RNA, 19 nt, Artificial Sequence
  Description of Artificial Sequence: Synthetic oligonucleotide
  Antisense strand to SEQ ID NO: 1520364
uacacucugggaagccagg

SEQ ID NO: 1520366 - RNA, 19 nt, Artificial Sequence
  Description of Artificial Sequence: Synthetic oligonucleotide
  Sense strand starting at position 233 of SEQ ID NO: 1244887
ggcuucccagaguguagaa

SEQ ID NO: 1520367 - RNA, 19 nt, Artificial Sequence
  Description of Artificial Sequence: Synthetic oligonucleotide
  Antisense strand to SEQ ID NO: 1520366
uucuacacucugggaagcc

SEQ ID NO: 1520368 - RNA, 19 nt, Artificial Sequence
  Description of Artificial Sequence: Synthetic oligonucleotide
  Sense strand starting at position 771 of SEQ ID NO: 1244887
cucagaucuguagacucua

SEQ ID NO: 1520369 - RNA, 19 nt, Artificial Sequence
  Description of Artificial Sequence: Synthetic oligonucleotide
  Antisense strand to SEQ ID NO: 1520368
uagagucuacagaucugag

SEQ ID NO: 1520370 - RNA, 19 nt, Artificial Sequence
  Description of Artificial Sequence: Synthetic oligonucleotide
  Sense strand starting at position 784 of SEQ ID NO: 1244887
acucuaaucuugguguucu

SEQ ID NO: 1520371 - RNA, 19 nt, Artificial Sequence
  Description of Artificial Sequence: Synthetic oligonucleotide
  Antisense strand to SEQ ID NO: 1520370
agaacaccaagauuagagu

SEQ ID NO: 1520372 - RNA, 19 nt, Artificial Sequence
  Description of Artificial Sequence: Synthetic oligonucleotide
  Sense strand starting at position 792 of SEQ ID NO: 1244887
cuugguguucuuuauucua

SEQ ID NO: 1520373 - RNA, 19 nt, Artificial Sequence
  Description of Artificial Sequence: Synthetic oligonucleotide
  Antisense strand to SEQ ID NO: 1520372
uagaauaaagaacaccaag

SEQ ID NO: 1520374 - RNA, 19 nt, Artificial Sequence
  Description of Artificial Sequence: Synthetic oligonucleotide
  Sense strand starting at position 794 of SEQ ID NO: 1244887
ugguguucuuuauucuaca

SEQ ID NO: 1520375 - RNA, 19 nt, Artificial Sequence
  Description of Artificial Sequence: Synthetic oligonucleotide
  Antisense strand to SEQ ID NO: 1520374
uguagaauaaagaacacca

SEQ ID NO: 1520376 - RNA, 19 nt, Artificial Sequence
  Description of Artificial Sequence: Synthetic oligonucleotide
  Sense strand starting at position 1142 of SEQ ID NO: 1244887
gggaaagucuguuucccau

SEQ ID NO: 1520377 - RNA, 19 nt, Artificial Sequence
  Description of Artificial Sequence: Synthetic oligonucleotide
  Antisense strand to SEQ ID NO: 1520376
augggaaacagacuuuccc

SEQ ID NO: 1520378 - RNA, 19 nt, Artificial Sequence
  Description of Artificial Sequence: Synthetic oligonucleotide
  Sense strand starting at position 1189 of SEQ ID NO: 1244887
gaggaaguuuguguggucu

SEQ ID NO: 1520379 - RNA, 19 nt, Artificial Sequence
  Description of Artificial Sequence: Synthetic oligonucleotide
  Antisense strand to SEQ ID NO: 1520378
agaccacacaaacuuccuc

SEQ ID NO: 1520380 - RNA, 19 nt, Artificial Sequence
  Description of Artificial Sequence: Synthetic oligonucleotide
  Sense strand starting at position 1193 of SEQ ID NO: 1244887
aaguuuguguggucucuaa

SEQ ID NO: 1520381 - RNA, 19 nt, Artificial Sequence
  Description of Artificial Sequence: Synthetic oligonucleotide
  Antisense strand to SEQ ID NO: 1520380
uuagagaccacacaaacuu

SEQ ID NO: 1520382 - RNA, 19 nt, Artificial Sequence
  Description of Artificial Sequence: Synthetic oligonucleotide
  Sense strand starting at position 1197 of SEQ ID NO: 1244887
uuguguggucucuaagauc

SEQ ID NO: 1520383 - RNA, 19 nt, Artificial Sequence
  Description of Artificial Sequence: Synthetic oligonucleotide
  Antisense strand to SEQ ID NO: 1520382
gaucuuagagaccacacaa

SEQ ID NO: 1520384 - RNA, 19 nt, Artificial Sequence
  Description of Artificial Sequence: Synthetic oligonucleotide
  Sense strand starting at position 1217 of SEQ ID NO: 1244887
auuucugcgcucuguaauc

SEQ ID NO: 1520385 - RNA, 19 nt, Artificial Sequence
  Description of Artificial Sequence: Synthetic oligonucleotide
  Antisense strand to SEQ ID NO: 1520384
gauuacagagcgcagaaau

SEQ ID NO: 1520386 - RNA, 19 nt, Artificial Sequence
  Description of Artificial Sequence: Synthetic oligonucleotide
  Sense strand starting at position 2077 of SEQ ID NO: 1244887
cggaaacaacggugucauu

SEQ ID NO: 1520387 - RNA, 19 nt, Artificial Sequence
  Description of Artificial Sequence: Synthetic oligonucleotide
  Antisense strand to SEQ ID NO: 1520386
aaugacaccguuguuuccg

SEQ ID NO: 1520388 - RNA, 19 nt, Artificial Sequence
  Description of Artificial Sequence: Synthetic oligonucleotide
  Sense strand starting at position 2095 of SEQ ID NO: 1244887
ucucuaguuccggaucuaa

SEQ ID NO: 1520389 - RNA, 19 nt, Artificial Sequence
  Description of Artificial Sequence: Synthetic oligonucleotide
  Antisense strand to SEQ ID NO: 1520388
uuagauccggaacuagaga

SEQ ID NO: 1520390 - RNA, 19 nt, Artificial Sequence
  Description of Artificial Sequence: Synthetic oligonucleotide
  Sense strand starting at position 2167 of SEQ ID NO: 1244887
ccauauuugucccugcgaa

SEQ ID NO: 1520391 - RNA, 19 nt, Artificial Sequence
  Description of Artificial Sequence: Synthetic oligonucleotide
  Antisense strand to SEQ ID NO: 1520390
uucgcagggacaaauaugg

SEQ ID NO: 1520392 - RNA, 19 nt, Artificial Sequence
  Description of Artificial Sequence: Synthetic oligonucleotide
  Sense strand starting at position 2168 of SEQ ID NO: 1244887
cauauuugucccugcgaau

SEQ ID NO: 1520393 - RNA, 19 nt, Artificial Sequence
  Description of Artificial Sequence: Synthetic oligonucleotide
  Antisense strand to SEQ ID NO: 1520392
auucgcagggacaaauaug

SEQ ID NO: 1520394 - RNA, 19 nt, Artificial Sequence
  Description of Artificial Sequence: Synthetic oligonucleotide
  Sense strand starting at position 2214 of SEQ ID NO: 1244887
guggguucaggauagcaga

SEQ ID NO: 1520395 - RNA, 19 nt, Artificial Sequence
  Description of Artificial Sequence: Synthetic oligonucleotide
  Antisense strand to SEQ ID NO: 1520394
ucugcuauccugaacccac

SEQ ID NO: 1520396 - RNA, 19 nt, Artificial Sequence
  Description of Artificial Sequence: Synthetic oligonucleotide
  Sense strand starting at position 2231 of SEQ ID NO: 1244887
gaagucuuggaccguagua

SEQ ID NO: 1520397 - RNA, 19 nt, Artificial Sequence
  Description of Artificial Sequence: Synthetic oligonucleotide
  Antisense strand to SEQ ID NO: 1520396
uacuacgguccaagacuuc

SEQ ID NO: 1520398 - RNA, 19 nt, Artificial Sequence
  Description of Artificial Sequence: Synthetic oligonucleotide
  Sense strand starting at position 2243 of SEQ ID NO: 1244887
cguaguaugauguauugaa

SEQ ID NO: 1520399 - RNA, 19 nt, Artificial Sequence
  Description of Artificial Sequence: Synthetic oligonucleotide
  Antisense strand to SEQ ID NO: 1520398
uucaauacaucauacuacg

SEQ ID NO: 1520400 - RNA, 19 nt, Artificial Sequence
  Description of Artificial Sequence: Synthetic oligonucleotide
  Sense strand starting at position 2247 of SEQ ID NO: 1244887
guaugauguauugaagcaa

SEQ ID NO: 1520401 - RNA, 19 nt, Artificial Sequence
  Description of Artificial Sequence: Synthetic oligonucleotide
  Antisense strand to SEQ ID NO: 1520400
uugcuucaauacaucauac

SEQ ID NO: 1520402 - RNA, 19 nt, Artificial Sequence
  Description of Artificial Sequence: Synthetic oligonucleotide
  Sense strand starting at position 2259 of SEQ ID NO: 1244887
gaagcaaacuggucuuuga

SEQ ID NO: 1520403 - RNA, 19 nt, Artificial Sequence
  Description of Artificial Sequence: Synthetic oligonucleotide
  Antisense strand to SEQ ID NO: 1520402
ucaaagaccaguuugcuuc

SEQ ID NO: 1520404 - RNA, 19 nt, Artificial Sequence
  Description of Artificial Sequence: Synthetic oligonucleotide
  Sense strand starting at position 2262 of SEQ ID NO: 1244887
gcaaacuggucuuugaaug

SEQ ID NO: 1520405 - RNA, 19 nt, Artificial Sequence
  Description of Artificial Sequence: Synthetic oligonucleotide
  Antisense strand to SEQ ID NO: 1520404
cauucaaagaccaguuugc

SEQ ID NO: 1520406 - RNA, 19 nt, Artificial Sequence
  Description of Artificial Sequence: Synthetic oligonucleotide
  Sense strand starting at position 2293 of SEQ ID NO: 1244887
ggcccuaauccugauucca

SEQ ID NO: 1520407 - RNA, 19 nt, Artificial Sequence
  Description of Artificial Sequence: Synthetic oligonucleotide
  Antisense strand to SEQ ID NO: 1520406
uggaaucaggauuagggcc

SEQ ID NO: 1520408 - RNA, 19 nt, Artificial Sequence
  Description of Artificial Sequence: Synthetic oligonucleotide
  Sense strand starting at position 2306 of SEQ ID NO: 1244887
auuccaacccugugugauu

SEQ ID NO: 1520409 - RNA, 19 nt, Artificial Sequence
  Description of Artificial Sequence: Synthetic oligonucleotide
  Antisense strand to SEQ ID NO: 1520408
aaucacacaggguuggaau

SEQ ID NO: 1520410 - RNA, 19 nt, Artificial Sequence
  Description of Artificial Sequence: Synthetic oligonucleotide
  Sense strand starting at position 2317 of SEQ ID NO: 1244887
gugugauucugggcacauc

SEQ ID NO: 1520411 - RNA, 19 nt, Artificial Sequence
  Description of Artificial Sequence: Synthetic oligonucleotide
  Antisense strand to SEQ ID NO: 1520410
gaugugcccagaaucacac

SEQ ID NO: 1520412 - RNA, 19 nt, Artificial Sequence
  Description of Artificial Sequence: Synthetic oligonucleotide
  Sense strand starting at position 2318 of SEQ ID NO: 1244887
ugugauucugggcacauca

SEQ ID NO: 1520413 - RNA, 19 nt, Artificial Sequence
  Description of Artificial Sequence: Synthetic oligonucleotide
  Antisense strand to SEQ ID NO: 1520412
ugaugugcccagaaucaca

SEQ ID NO: 1520414 - RNA, 19 nt, Artificial Sequence
  Description of Artificial Sequence: Synthetic oligonucleotide
  Sense strand starting at position 2718 of SEQ ID NO: 1244887
aguugugaacuuuaaaugu

SEQ ID NO: 1520415 - RNA, 19 nt, Artificial Sequence
  Description of Artificial Sequence: Synthetic oligonucleotide
  Antisense strand to SEQ ID NO: 1520414
acauuuaaaguucacaacu

SEQ ID NO: 1520416 - RNA, 19 nt, Artificial Sequence
  Description of Artificial Sequence: Synthetic oligonucleotide
  Sense strand starting at position 2809 of SEQ ID NO: 1244887
uucuguuaagaucaaagua

SEQ ID NO: 1520417 - RNA, 19 nt, Artificial Sequence
  Description of Artificial Sequence: Synthetic oligonucleotide
  Antisense strand to SEQ ID NO: 1520416
uacuuugaucuuaacagaa

SEQ ID NO: 1520418 - RNA, 19 nt, Artificial Sequence
  Description of Artificial Sequence: Synthetic oligonucleotide
  Sense strand starting at position 2964 of SEQ ID NO: 1244887
auugucauacuuugucagu

SEQ ID NO: 1520419 - RNA, 19 nt, Artificial Sequence
  Description of Artificial Sequence: Synthetic oligonucleotide
  Antisense strand to SEQ ID NO: 1520418
acugacaaaguaugacaau

SEQ ID NO: 1520420 - RNA, 19 nt, Artificial Sequence
  Description of Artificial Sequence: Synthetic oligonucleotide
  Sense strand starting at position 2981 of SEQ ID NO: 1244887
guuuaauugcagcagacau

SEQ ID NO: 1520421 - RNA, 19 nt, Artificial Sequence
  Description of Artificial Sequence: Synthetic oligonucleotide
  Antisense strand to SEQ ID NO: 1520420
augucugcugcaauuaaac

SEQ ID NO: 1520422 - RNA, 19 nt, Artificial Sequence
  Description of Artificial Sequence: Synthetic oligonucleotide
  Sense strand starting at position 3060 of SEQ ID NO: 1244887
guuuauauguucucauaac

SEQ ID NO: 1520423 - RNA, 19 nt, Artificial Sequence
  Description of Artificial Sequence: Synthetic oligonucleotide
  Antisense strand to SEQ ID NO: 1520422
guuaugagaacauauaaac

SEQ ID NO: 1520424 - RNA, 19 nt, Artificial Sequence
  Description of Artificial Sequence: Synthetic oligonucleotide
  Sense strand starting at position 3574 of SEQ ID NO: 1244887
ucuguuuacuguuuacaga

SEQ ID NO: 1520425 - RNA, 19 nt, Artificial Sequence
  Description of Artificial Sequence: Synthetic oligonucleotide
  Antisense strand to SEQ ID NO: 1520424
ucuguaaacaguaaacaga

SEQ ID NO: 1520426 - RNA, 19 nt, Artificial Sequence
  Description of Artificial Sequence: Synthetic oligonucleotide
  Sense strand starting at position 3575 of SEQ ID NO: 1244887
cuguuuacuguuuacagau

SEQ ID NO: 1520427 - RNA, 19 nt, Artificial Sequence
  Description of Artificial Sequence: Synthetic oligonucleotide
  Antisense strand to SEQ ID NO: 1520426
aucuguaaacaguaaacag

SEQ ID NO: 1520428 - RNA, 19 nt, Artificial Sequence
  Description of Artificial Sequence: Synthetic oligonucleotide
  Sense strand starting at position 3599 of SEQ ID NO: 1244887
uugacuugugauggaguua

SEQ ID NO: 1520429 - RNA, 19 nt, Artificial Sequence
  Description of Artificial Sequence: Synthetic oligonucleotide
  Antisense strand to SEQ ID NO: 1520428
uaacuccaucacaagucaa

SEQ ID NO: 1520430 - RNA, 19 nt, Artificial Sequence
  Description of Artificial Sequence: Synthetic oligonucleotide
  Sense strand starting at position 3600 of SEQ ID NO: 1244887
ugacuugugauggaguuau

SEQ ID NO: 1520431 - RNA, 19 nt, Artificial Sequence
  Description of Artificial Sequence: Synthetic oligonucleotide
  Antisense strand to SEQ ID NO: 1520430
auaacuccaucacaaguca

SEQ ID NO: 1520432 - RNA, 19 nt, Artificial Sequence
  Description of Artificial Sequence: Synthetic oligonucleotide
  Sense strand starting at position 3739 of SEQ ID NO: 1244887
agaucugcuuucgcaccaa

SEQ ID NO: 1520433 - RNA, 19 nt, Artificial Sequence
  Description of Artificial Sequence: Synthetic oligonucleotide
  Antisense strand to SEQ ID NO: 1520432
uuggugcgaaagcagaucu

SEQ ID NO: 1520434 - RNA, 19 nt, Artificial Sequence
  Description of Artificial Sequence: Synthetic oligonucleotide
  Sense strand starting at position 3780 of SEQ ID NO: 1244887
cugggaaccaucuguagua

SEQ ID NO: 1520435 - RNA, 19 nt, Artificial Sequence
  Description of Artificial Sequence: Synthetic oligonucleotide
  Antisense strand to SEQ ID NO: 1520434
uacuacagaugguucccag

SEQ ID NO: 1520436 - RNA, 19 nt, Artificial Sequence
  Description of Artificial Sequence: Synthetic oligonucleotide
  Sense strand starting at position 3836 of SEQ ID NO: 1244887
ucaggaaauaugugcugua

SEQ ID NO: 1520437 - RNA, 19 nt, Artificial Sequence
  Description of Artificial Sequence: Synthetic oligonucleotide
  Antisense strand to SEQ ID NO: 1520436
uacagcacauauuuccuga

SEQ ID NO: 1520438 - RNA, 19 nt, Artificial Sequence
  Description of Artificial Sequence: Synthetic oligonucleotide
  Sense strand starting at position 3841 of SEQ ID NO: 1244887
aaauaugugcuguacagau

SEQ ID NO: 1520439 - RNA, 19 nt, Artificial Sequence
  Description of Artificial Sequence: Synthetic oligonucleotide
  Antisense strand to SEQ ID NO: 1520438
aucuguacagcacauauuu

SEQ ID NO: 1520440 - RNA, 19 nt, Artificial Sequence
  Description of Artificial Sequence: Synthetic oligonucleotide
  Sense strand starting at position 3843 of SEQ ID NO: 1244887
auaugugcuguacagauaa

SEQ ID NO: 1520441 - RNA, 19 nt, Artificial Sequence
  Description of Artificial Sequence: Synthetic oligonucleotide
  Antisense strand to SEQ ID NO: 1520440
uuaucuguacagcacauau

SEQ ID NO: 1520442 - RNA, 19 nt, Artificial Sequence
  Description of Artificial Sequence: Synthetic oligonucleotide
  Sense strand starting at position 1314 of SEQ ID NO: 1244888
gaggcugagagcugugagu

SEQ ID NO: 1520443 - RNA, 19 nt, Artificial Sequence
  Description of Artificial Sequence: Synthetic oligonucleotide
  Antisense strand to SEQ ID NO: 1520442
acucacagcucucagccuc

SEQ ID NO: 1520444 - RNA, 19 nt, Artificial Sequence
  Description of Artificial Sequence: Synthetic oligonucleotide
  Sense strand starting at position 1316 of SEQ ID NO: 1244888
ggcugagagcugugaguuc

SEQ ID NO: 1520445 - RNA, 19 nt, Artificial Sequence
  Description of Artificial Sequence: Synthetic oligonucleotide
  Antisense strand to SEQ ID NO: 1520444
gaacucacagcucucagcc

SEQ ID NO: 1520446 - RNA, 19 nt, Artificial Sequence
  Description of Artificial Sequence: Synthetic oligonucleotide
  Sense strand starting at position 1346 of SEQ ID NO: 1244888
uaggguuacuuaccaagca

SEQ ID NO: 1520447 - RNA, 19 nt, Artificial Sequence
  Description of Artificial Sequence: Synthetic oligonucleotide
  Antisense strand to SEQ ID NO: 1520446
ugcuugguaaguaacccua

SEQ ID NO: 1520448 - RNA, 19 nt, Artificial Sequence
  Description of Artificial Sequence: Synthetic oligonucleotide
  Sense strand starting at position 1347 of SEQ ID NO: 1244888
aggguuacuuaccaagcaa

SEQ ID NO: 1520449 - RNA, 19 nt, Artificial Sequence
  Description of Artificial Sequence: Synthetic oligonucleotide
  Antisense strand to SEQ ID NO: 1520448
uugcuugguaaguaacccu

SEQ ID NO: 1520450 - RNA, 19 nt, Artificial Sequence
  Description of Artificial Sequence: Synthetic oligonucleotide
  Sense strand starting at position 1582 of SEQ ID NO: 1244888
ucgcuuugggcugcggaaa

SEQ ID NO: 1520451 - RNA, 19 nt, Artificial Sequence
  Description of Artificial Sequence: Synthetic oligonucleotide
  Antisense strand to SEQ ID NO: 1520450
uuuccgcagcccaaagcga

SEQ ID NO: 1520452 - RNA, 19 nt, Artificial Sequence
  Description of Artificial Sequence: Synthetic oligonucleotide
  Sense strand starting at position 1687 of SEQ ID NO: 1244888
uacaaaugggucuguagau

SEQ ID NO: 1520453 - RNA, 19 nt, Artificial Sequence
  Description of Artificial Sequence: Synthetic oligonucleotide
  Antisense strand to SEQ ID NO: 1520452
aucuacagacccauuugua

SEQ ID NO: 1520454 - RNA, 19 nt, Artificial Sequence
  Description of Artificial Sequence: Synthetic oligonucleotide
  Sense strand starting at position 1688 of SEQ ID NO: 1244888
acaaaugggucuguagaug

SEQ ID NO: 1520455 - RNA, 19 nt, Artificial Sequence
  Description of Artificial Sequence: Synthetic oligonucleotide
  Antisense strand to SEQ ID NO: 1520454
caucuacagacccauuugu

SEQ ID NO: 1520456 - RNA, 19 nt, Artificial Sequence
  Description of Artificial Sequence: Synthetic oligonucleotide
  Sense strand starting at position 1699 of SEQ ID NO: 1244888
uguagaugauggguucuaa

SEQ ID NO: 1520457 - RNA, 19 nt, Artificial Sequence
  Description of Artificial Sequence: Synthetic oligonucleotide
  Antisense strand to SEQ ID NO: 1520456
uuagaacccaucaucuaca

SEQ ID NO: 1520458 - RNA, 19 nt, Artificial Sequence
  Description of Artificial Sequence: Synthetic oligonucleotide
  Sense strand starting at position 1703 of SEQ ID NO: 1244888
gaugauggguucuaaauuu

SEQ ID NO: 1520459 - RNA, 19 nt, Artificial Sequence
  Description of Artificial Sequence: Synthetic oligonucleotide
  Antisense strand to SEQ ID NO: 1520458
aaauuuagaacccaucauc

SEQ ID NO: 1520460 - RNA, 19 nt, Artificial Sequence
  Description of Artificial Sequence: Synthetic oligonucleotide
  Sense strand starting at position 2106 of SEQ ID NO: 1244888
ugcugaaaucccgcguuau

SEQ ID NO: 1520461 - RNA, 19 nt, Artificial Sequence
  Description of Artificial Sequence: Synthetic oligonucleotide
  Antisense strand to SEQ ID NO: 1520460
auaacgcgggauuucagca

SEQ ID NO: 1520462 - RNA, 19 nt, Artificial Sequence
  Description of Artificial Sequence: Synthetic oligonucleotide
  Sense strand starting at position 2107 of SEQ ID NO: 1244888
gcugaaaucccgcguuauc

SEQ ID NO: 1520463 - RNA, 19 nt, Artificial Sequence
  Description of Artificial Sequence: Synthetic oligonucleotide
  Antisense strand to SEQ ID NO: 1520462
gauaacgcgggauuucagc

SEQ ID NO: 1520464 - RNA, 19 nt, Artificial Sequence
  Description of Artificial Sequence: Synthetic oligonucleotide
  Sense strand starting at position 2116 of SEQ ID NO: 1244888
ccgcguuauccugggaguu

SEQ ID NO: 1520465 - RNA, 19 nt, Artificial Sequence
  Description of Artificial Sequence: Synthetic oligonucleotide
  Antisense strand to SEQ ID NO: 1520464
aacucccaggauaacgcgg

SEQ ID NO: 1520466 - RNA, 19 nt, Artificial Sequence
  Description of Artificial Sequence: Synthetic oligonucleotide
  Sense strand starting at position 2117 of SEQ ID NO: 1244888
cgcguuauccugggaguug

SEQ ID NO: 1520467 - RNA, 19 nt, Artificial Sequence
  Description of Artificial Sequence: Synthetic oligonucleotide
  Antisense strand to SEQ ID NO: 1520466
caacucccaggauaacgcg

SEQ ID NO: 1520468 - RNA, 19 nt, Artificial Sequence
  Description of Artificial Sequence: Synthetic oligonucleotide
  Sense strand starting at position 2134 of SEQ ID NO: 1244888
uguaguuucccgcucuacu

SEQ ID NO: 1520469 - RNA, 19 nt, Artificial Sequence
  Description of Artificial Sequence: Synthetic oligonucleotide
  Antisense strand to SEQ ID NO: 1520468
aguagagcgggaaacuaca

SEQ ID NO: 1520470 - RNA, 19 nt, Artificial Sequence
  Description of Artificial Sequence: Synthetic oligonucleotide
  Sense strand starting at position 2194 of SEQ ID NO: 1244888
ugaaguagugccugaugga

SEQ ID NO: 1520471 - RNA, 19 nt, Artificial Sequence
  Description of Artificial Sequence: Synthetic oligonucleotide
  Antisense strand to SEQ ID NO: 1520470
uccaucaggcacuacuuca

SEQ ID NO: 1520472 - RNA, 19 nt, Artificial Sequence
  Description of Artificial Sequence: Synthetic oligonucleotide
  Sense strand starting at position 2195 of SEQ ID NO: 1244888
gaaguagugccugauggaa

SEQ ID NO: 1520473 - RNA, 19 nt, Artificial Sequence
  Description of Artificial Sequence: Synthetic oligonucleotide
  Antisense strand to SEQ ID NO: 1520472
uuccaucaggcacuacuuc

SEQ ID NO: 1520474 - RNA, 19 nt, Artificial Sequence
  Description of Artificial Sequence: Synthetic oligonucleotide
  Sense strand starting at position 2229 of SEQ ID NO: 1244888
gagacagauuauucugugu

SEQ ID NO: 1520475 - RNA, 19 nt, Artificial Sequence
  Description of Artificial Sequence: Synthetic oligonucleotide
  Antisense strand to SEQ ID NO: 1520474
acacagaauaaucugucuc

SEQ ID NO: 1520476 - RNA, 19 nt, Artificial Sequence
  Description of Artificial Sequence: Synthetic oligonucleotide
  Sense strand starting at position 2232 of SEQ ID NO: 1244888
acagauuauucugugucuu

SEQ ID NO: 1520477 - RNA, 19 nt, Artificial Sequence
  Description of Artificial Sequence: Synthetic oligonucleotide
  Antisense strand to SEQ ID NO: 1520476
aagacacagaauaaucugu

SEQ ID NO: 1520478 - RNA, 19 nt, Artificial Sequence
  Description of Artificial Sequence: Synthetic oligonucleotide
  Sense strand starting at position 2726 of SEQ ID NO: 1244888
cccagaaauggacguuuga

SEQ ID NO: 1520479 - RNA, 19 nt, Artificial Sequence
  Description of Artificial Sequence: Synthetic oligonucleotide
  Antisense strand to SEQ ID NO: 1520478
ucaaacguccauuucuggg

SEQ ID NO: 1520480 - RNA, 19 nt, Artificial Sequence
  Description of Artificial Sequence: Synthetic oligonucleotide
  Sense strand starting at position 2735 of SEQ ID NO: 1244888
ggacguuugacucauagga

SEQ ID NO: 1520481 - RNA, 19 nt, Artificial Sequence
  Description of Artificial Sequence: Synthetic oligonucleotide
  Antisense strand to SEQ ID NO: 1520480
uccuaugagucaaacgucc

SEQ ID NO: 1520482 - RNA, 19 nt, Artificial Sequence
  Description of Artificial Sequence: Synthetic oligonucleotide
  Sense strand starting at position 2737 of SEQ ID NO: 1244888
acguuugacucauaggaga

SEQ ID NO: 1520483 - RNA, 19 nt, Artificial Sequence
  Description of Artificial Sequence: Synthetic oligonucleotide
  Antisense strand to SEQ ID NO: 1520482
ucuccuaugagucaaacgu

SEQ ID NO: 1520484 - RNA, 19 nt, Artificial Sequence
  Description of Artificial Sequence: Synthetic oligonucleotide
  Sense strand starting at position 2755 of SEQ ID NO: 1244888
agacauacauguuagugau

SEQ ID NO: 1520485 - RNA, 19 nt, Artificial Sequence
  Description of Artificial Sequence: Synthetic oligonucleotide
  Antisense strand to SEQ ID NO: 1520484
aucacuaacauguaugucu

SEQ ID NO: 1520486 - RNA, 19 nt, Artificial Sequence
  Description of Artificial Sequence: Synthetic oligonucleotide
  Sense strand starting at position 2765 of SEQ ID NO: 1244888
guuagugaugcccaccuca

SEQ ID NO: 1520487 - RNA, 19 nt, Artificial Sequence
  Description of Artificial Sequence: Synthetic oligonucleotide
  Antisense strand to SEQ ID NO: 1520486
ugaggugggcaucacuaac

SEQ ID NO: 1520488 - RNA, 19 nt, Artificial Sequence
  Description of Artificial Sequence: Synthetic oligonucleotide
  Sense strand starting at position 3143 of SEQ ID NO: 1244888
ggccacgacuucuuacauu

SEQ ID NO: 1520489 - RNA, 19 nt, Artificial Sequence
  Description of Artificial Sequence: Synthetic oligonucleotide
  Antisense strand to SEQ ID NO: 1520488
aauguaagaagucguggcc

SEQ ID NO: 1520490 - RNA, 19 nt, Artificial Sequence
  Description of Artificial Sequence: Synthetic oligonucleotide
  Sense strand starting at position 3196 of SEQ ID NO: 1244888
ggccuaaguccauggauaa

SEQ ID NO: 1520491 - RNA, 19 nt, Artificial Sequence
  Description of Artificial Sequence: Synthetic oligonucleotide
  Antisense strand to SEQ ID NO: 1520490
uuauccauggacuuaggcc

SEQ ID NO: 1520492 - RNA, 19 nt, Artificial Sequence
  Description of Artificial Sequence: Synthetic oligonucleotide
  Sense strand starting at position 3197 of SEQ ID NO: 1244888
gccuaaguccauggauaag

SEQ ID NO: 1520493 - RNA, 19 nt, Artificial Sequence
  Description of Artificial Sequence: Synthetic oligonucleotide
  Antisense strand to SEQ ID NO: 1520492
cuuauccauggacuuaggc

SEQ ID NO: 1520494 - RNA, 19 nt, Artificial Sequence
  Description of Artificial Sequence: Synthetic oligonucleotide
  Sense strand starting at position 3203 of SEQ ID NO: 1244888
guccauggauaagauaauu

SEQ ID NO: 1520495 - RNA, 19 nt, Artificial Sequence
  Description of Artificial Sequence: Synthetic oligonucleotide
  Antisense strand to SEQ ID NO: 1520494
aauuaucuuauccauggac

SEQ ID NO: 1520496 - RNA, 19 nt, Artificial Sequence
  Description of Artificial Sequence: Synthetic oligonucleotide
  Sense strand starting at position 3309 of SEQ ID NO: 1244888
guuccucgucacugacaga

SEQ ID NO: 1520497 - RNA, 19 nt, Artificial Sequence
  Description of Artificial Sequence: Synthetic oligonucleotide
  Antisense strand to SEQ ID NO: 1520496
ucugucagugacgaggaac

SEQ ID NO: 1520498 - RNA, 19 nt, Artificial Sequence
  Description of Artificial Sequence: Synthetic oligonucleotide
  Sense strand starting at position 3314 of SEQ ID NO: 1244888
ucgucacugacagagaguu

SEQ ID NO: 1520499 - RNA, 19 nt, Artificial Sequence
  Description of Artificial Sequence: Synthetic oligonucleotide
  Antisense strand to SEQ ID NO: 1520498
aacucucugucagugacga

SEQ ID NO: 1520500 - RNA, 19 nt, Artificial Sequence
  Description of Artificial Sequence: Synthetic oligonucleotide
  Sense strand starting at position 3400 of SEQ ID NO: 1244888
gcaaguagguucccguaca

SEQ ID NO: 1520501 - RNA, 19 nt, Artificial Sequence
  Description of Artificial Sequence: Synthetic oligonucleotide
  Antisense strand to SEQ ID NO: 1520500
uguacgggaaccuacuugc

SEQ ID NO: 1520502 - RNA, 19 nt, Artificial Sequence
  Description of Artificial Sequence: Synthetic oligonucleotide
  Sense strand starting at position 3475 of SEQ ID NO: 1244888
uucucacagucuggaguaa

SEQ ID NO: 1520503 - RNA, 19 nt, Artificial Sequence
  Description of Artificial Sequence: Synthetic oligonucleotide
  Antisense strand to SEQ ID NO: 1520502
uuacuccagacugugagaa

SEQ ID NO: 1520504 - RNA, 19 nt, Artificial Sequence
  Description of Artificial Sequence: Synthetic oligonucleotide
  Sense strand starting at position 3560 of SEQ ID NO: 1244888
gaacuaaguucucuggacu

SEQ ID NO: 1520505 - RNA, 19 nt, Artificial Sequence
  Description of Artificial Sequence: Synthetic oligonucleotide
  Antisense strand to SEQ ID NO: 1520504
aguccagagaacuuaguuc

SEQ ID NO: 1520506 - RNA, 19 nt, Artificial Sequence
  Description of Artificial Sequence: Synthetic oligonucleotide
  Sense strand starting at position 3580 of SEQ ID NO: 1244888
uguggaagcuuugaagaug

SEQ ID NO: 1520507 - RNA, 19 nt, Artificial Sequence
  Description of Artificial Sequence: Synthetic oligonucleotide
  Antisense strand to SEQ ID NO: 1520506
caucuucaaagcuuccaca

SEQ ID NO: 1520508 - RNA, 19 nt, Artificial Sequence
  Description of Artificial Sequence: Synthetic oligonucleotide
  Sense strand starting at position 3588 of SEQ ID NO: 1244888
cuuugaagauguuaagaau

SEQ ID NO: 1520509 - RNA, 19 nt, Artificial Sequence
  Description of Artificial Sequence: Synthetic oligonucleotide
  Antisense strand to SEQ ID NO: 1520508
auucuuaacaucuucaaag

SEQ ID NO: 1520510 - RNA, 19 nt, Artificial Sequence
  Description of Artificial Sequence: Synthetic oligonucleotide
  Sense strand starting at position 3594 of SEQ ID NO: 1244888
agauguuaagaauggguga

SEQ ID NO: 1520511 - RNA, 19 nt, Artificial Sequence
  Description of Artificial Sequence: Synthetic oligonucleotide
  Antisense strand to SEQ ID NO: 1520510
ucacccauucuuaacaucu

SEQ ID NO: 1520512 - RNA, 19 nt, Artificial Sequence
  Description of Artificial Sequence: Synthetic oligonucleotide
  Sense strand starting at position 3596 of SEQ ID NO: 1244888
auguuaagaaugggugaca

SEQ ID NO: 1520513 - RNA, 19 nt, Artificial Sequence
  Description of Artificial Sequence: Synthetic oligonucleotide
  Antisense strand to SEQ ID NO: 1520512
ugucacccauucuuaacau

SEQ ID NO: 1520514 - RNA, 19 nt, Artificial Sequence
  Description of Artificial Sequence: Synthetic oligonucleotide
  Sense strand starting at position 3597 of SEQ ID NO: 1244888
uguuaagaaugggugacaa

SEQ ID NO: 1520515 - RNA, 19 nt, Artificial Sequence
  Description of Artificial Sequence: Synthetic oligonucleotide
  Antisense strand to SEQ ID NO: 1520514
uugucacccauucuuaaca

SEQ ID NO: 1520516 - RNA, 19 nt, Artificial Sequence
  Description of Artificial Sequence: Synthetic oligonucleotide
  Sense strand starting at position 3615 of SEQ ID NO: 1244888
aggaauaguuccucuaaac

SEQ ID NO: 1520517 - RNA, 19 nt, Artificial Sequence
  Description of Artificial Sequence: Synthetic oligonucleotide
  Antisense strand to SEQ ID NO: 1520516
guuuagaggaacuauuccu

SEQ ID NO: 1520518 - RNA, 19 nt, Artificial Sequence
  Description of Artificial Sequence: Synthetic oligonucleotide
  Sense strand starting at position 3686 of SEQ ID NO: 1244888
guugguccugucugauaca

SEQ ID NO: 1520519 - RNA, 19 nt, Artificial Sequence
  Description of Artificial Sequence: Synthetic oligonucleotide
  Antisense strand to SEQ ID NO: 1520518
uguaucagacaggaccaac

SEQ ID NO: 1520520 - RNA, 19 nt, Artificial Sequence
  Description of Artificial Sequence: Synthetic oligonucleotide
  Sense strand starting at position 3689 of SEQ ID NO: 1244888
gguccugucugauacagua

SEQ ID NO: 1520521 - RNA, 19 nt, Artificial Sequence
  Description of Artificial Sequence: Synthetic oligonucleotide
  Antisense strand to SEQ ID NO: 1520520
uacuguaucagacaggacc

SEQ ID NO: 1520522 - RNA, 19 nt, Artificial Sequence
  Description of Artificial Sequence: Synthetic oligonucleotide
  Sense strand starting at position 4 of SEQ ID NO: 1244889
aaugcuagucugugaagcu

SEQ ID NO: 1520523 - RNA, 19 nt, Artificial Sequence
  Description of Artificial Sequence: Synthetic oligonucleotide
  Antisense strand to SEQ ID NO: 1520522
agcuucacagacuagcauu

SEQ ID NO: 1520524 - RNA, 19 nt, Artificial Sequence
  Description of Artificial Sequence: Synthetic oligonucleotide
  Sense strand starting at position 191 of SEQ ID NO: 1244889
gcuacuuauccaggcaaga

SEQ ID NO: 1520525 - RNA, 19 nt, Artificial Sequence
  Description of Artificial Sequence: Synthetic oligonucleotide
  Antisense strand to SEQ ID NO: 1520524
ucuugccuggauaaguagc

SEQ ID NO: 1520526 - RNA, 19 nt, Artificial Sequence
  Description of Artificial Sequence: Synthetic oligonucleotide
  Sense strand starting at position 204 of SEQ ID NO: 1244889
gcaagagggcccugugaug

SEQ ID NO: 1520527 - RNA, 19 nt, Artificial Sequence
  Description of Artificial Sequence: Synthetic oligonucleotide
  Antisense strand to SEQ ID NO: 1520526
caucacagggcccucuugc

SEQ ID NO: 1520528 - RNA, 19 nt, Artificial Sequence
  Description of Artificial Sequence: Synthetic oligonucleotide
  Sense strand starting at position 211 of SEQ ID NO: 1244889
ggcccugugauguaacaac

SEQ ID NO: 1520529 - RNA, 19 nt, Artificial Sequence
  Description of Artificial Sequence: Synthetic oligonucleotide
  Antisense strand to SEQ ID NO: 1520528
guuguuacaucacagggcc

SEQ ID NO: 1520530 - RNA, 19 nt, Artificial Sequence
  Description of Artificial Sequence: Synthetic oligonucleotide
  Sense strand starting at position 302 of SEQ ID NO: 1244889
cuaagacagugagaaucaa

SEQ ID NO: 1520531 - RNA, 19 nt, Artificial Sequence
  Description of Artificial Sequence: Synthetic oligonucleotide
  Antisense strand to SEQ ID NO: 1520530
uugauucucacugucuuag

SEQ ID NO: 1520532 - RNA, 19 nt, Artificial Sequence
  Description of Artificial Sequence: Synthetic oligonucleotide
  Sense strand starting at position 332 of SEQ ID NO: 1244889
guucuaauugcagagucca

SEQ ID NO: 1520533 - RNA, 19 nt, Artificial Sequence
  Description of Artificial Sequence: Synthetic oligonucleotide
  Antisense strand to SEQ ID NO: 1520532
uggacucugcaauuagaac

SEQ ID NO: 1520534 - RNA, 19 nt, Artificial Sequence
  Description of Artificial Sequence: Synthetic oligonucleotide
  Sense strand starting at position 362 of SEQ ID NO: 1244889
uuagaagucucuguaugcu

SEQ ID NO: 1520535 - RNA, 19 nt, Artificial Sequence
  Description of Artificial Sequence: Synthetic oligonucleotide
  Antisense strand to SEQ ID NO: 1520534
agcauacagagacuucuaa

SEQ ID NO: 1520536 - RNA, 19 nt, Artificial Sequence
  Description of Artificial Sequence: Synthetic oligonucleotide
  Sense strand starting at position 451 of SEQ ID NO: 1244889
uuuccaacugcugagauga

SEQ ID NO: 1520537 - RNA, 19 nt, Artificial Sequence
  Description of Artificial Sequence: Synthetic oligonucleotide
  Antisense strand to SEQ ID NO: 1520536
ucaucucagcaguuggaaa

SEQ ID NO: 1520538 - RNA, 19 nt, Artificial Sequence
  Description of Artificial Sequence: Synthetic oligonucleotide
  Sense strand starting at position 532 of SEQ ID NO: 1244889
ugugguagccuggagauga

SEQ ID NO: 1520539 - RNA, 19 nt, Artificial Sequence
  Description of Artificial Sequence: Synthetic oligonucleotide
  Antisense strand to SEQ ID NO: 1520538
ucaucuccaggcuaccaca

SEQ ID NO: 1520540 - RNA, 19 nt, Artificial Sequence
  Description of Artificial Sequence: Synthetic oligonucleotide
  Sense strand starting at position 533 of SEQ ID NO: 1244889
gugguagccuggagaugaa

SEQ ID NO: 1520541 - RNA, 19 nt, Artificial Sequence
  Description of Artificial Sequence: Synthetic oligonucleotide
  Antisense strand to SEQ ID NO: 1520540
uucaucuccaggcuaccac

SEQ ID NO: 1520542 - RNA, 19 nt, Artificial Sequence
  Description of Artificial Sequence: Synthetic oligonucleotide
  Sense strand starting at position 849 of SEQ ID NO: 1244889
ggauuaacauuauaaacag

SEQ ID NO: 1520543 - RNA, 19 nt, Artificial Sequence
  Description of Artificial Sequence: Synthetic oligonucleotide
  Antisense strand to SEQ ID NO: 1520542
cuguuuauaauguuaaucc

SEQ ID NO: 1520544 - RNA, 19 nt, Artificial Sequence
  Description of Artificial Sequence: Synthetic oligonucleotide
  Sense strand starting at position 885 of SEQ ID NO: 1244889
gcuugaccacucugacaaa

SEQ ID NO: 1520545 - RNA, 19 nt, Artificial Sequence
  Description of Artificial Sequence: Synthetic oligonucleotide
  Antisense strand to SEQ ID NO: 1520544
uuugucagaguggucaagc

SEQ ID NO: 1520546 - RNA, 19 nt, Artificial Sequence
  Description of Artificial Sequence: Synthetic oligonucleotide
  Sense strand starting at position 993 of SEQ ID NO: 1244889
uccacuauggucugcucaa

SEQ ID NO: 1520547 - RNA, 19 nt, Artificial Sequence
  Description of Artificial Sequence: Synthetic oligonucleotide
  Antisense strand to SEQ ID NO: 1520546
uugagcagaccauagugga

SEQ ID NO: 1520548 - RNA, 19 nt, Artificial Sequence
  Description of Artificial Sequence: Synthetic oligonucleotide
  Sense strand starting at position 994 of SEQ ID NO: 1244889
ccacuauggucugcucaag

SEQ ID NO: 1520549 - RNA, 19 nt, Artificial Sequence
  Description of Artificial Sequence: Synthetic oligonucleotide
  Antisense strand to SEQ ID NO: 1520548
cuugagcagaccauagugg

SEQ ID NO: 1520550 - RNA, 19 nt, Artificial Sequence
  Description of Artificial Sequence: Synthetic oligonucleotide
  Sense strand starting at position 1067 of SEQ ID NO: 1244889
ggaacacuuaagugagcaa

SEQ ID NO: 1520551 - RNA, 19 nt, Artificial Sequence
  Description of Artificial Sequence: Synthetic oligonucleotide
  Antisense strand to SEQ ID NO: 1520550
uugcucacuuaaguguucc

SEQ ID NO: 1520552 - RNA, 19 nt, Artificial Sequence
  Description of Artificial Sequence: Synthetic oligonucleotide
  Sense strand starting at position 1330 of SEQ ID NO: 1244889
gccucaguaucugucacaa

SEQ ID NO: 1520553 - RNA, 19 nt, Artificial Sequence
  Description of Artificial Sequence: Synthetic oligonucleotide
  Antisense strand to SEQ ID NO: 1520552
uugugacagauacugaggc

SEQ ID NO: 1520554 - RNA, 19 nt, Artificial Sequence
  Description of Artificial Sequence: Synthetic oligonucleotide
  Sense strand starting at position 1545 of SEQ ID NO: 1244889
ggugguuauccucguuuag

SEQ ID NO: 1520555 - RNA, 19 nt, Artificial Sequence
  Description of Artificial Sequence: Synthetic oligonucleotide
  Antisense strand to SEQ ID NO: 1520554
cuaaacgaggauaaccacc

SEQ ID NO: 1520556 - RNA, 19 nt, Artificial Sequence
  Description of Artificial Sequence: Synthetic oligonucleotide
  Sense strand starting at position 1546 of SEQ ID NO: 1244889
gugguuauccucguuuagu

SEQ ID NO: 1520557 - RNA, 19 nt, Artificial Sequence
  Description of Artificial Sequence: Synthetic oligonucleotide
  Antisense strand to SEQ ID NO: 1520556
acuaaacgaggauaaccac

SEQ ID NO: 1520558 - RNA, 19 nt, Artificial Sequence
  Description of Artificial Sequence: Synthetic oligonucleotide
  Sense strand starting at position 1557 of SEQ ID NO: 1244889
cguuuaguuccaggaacca

SEQ ID NO: 1520559 - RNA, 19 nt, Artificial Sequence
  Description of Artificial Sequence: Synthetic oligonucleotide
  Antisense strand to SEQ ID NO: 1520558
ugguuccuggaacuaaacg

SEQ ID NO: 1520560 - RNA, 19 nt, Artificial Sequence
  Description of Artificial Sequence: Synthetic oligonucleotide
  Sense strand starting at position 2197 of SEQ ID NO: 1244889
ggacgauuucgucgguggu

SEQ ID NO: 1520561 - RNA, 19 nt, Artificial Sequence
  Description of Artificial Sequence: Synthetic oligonucleotide
  Antisense strand to SEQ ID NO: 1520560
accaccgacgaaaucgucc

SEQ ID NO: 1520562 - RNA, 19 nt, Artificial Sequence
  Description of Artificial Sequence: Synthetic oligonucleotide
  Sense strand starting at position 2198 of SEQ ID NO: 1244889
gacgauuucgucgguggua

SEQ ID NO: 1520563 - RNA, 19 nt, Artificial Sequence
  Description of Artificial Sequence: Synthetic oligonucleotide
  Antisense strand to SEQ ID NO: 1520562
uaccaccgacgaaaucguc

SEQ ID NO: 1520564 - RNA, 19 nt, Artificial Sequence
  Description of Artificial Sequence: Synthetic oligonucleotide
  Sense strand starting at position 2260 of SEQ ID NO: 1244889
ggucgaagagaguggucua

SEQ ID NO: 1520565 - RNA, 19 nt, Artificial Sequence
  Description of Artificial Sequence: Synthetic oligonucleotide
  Antisense strand to SEQ ID NO: 1520564
uagaccacucucuucgacc

SEQ ID NO: 1520566 - RNA, 19 nt, Artificial Sequence
  Description of Artificial Sequence: Synthetic oligonucleotide
  Sense strand starting at position 2263 of SEQ ID NO: 1244889
cgaagagaguggucuagaa

SEQ ID NO: 1520567 - RNA, 19 nt, Artificial Sequence
  Description of Artificial Sequence: Synthetic oligonucleotide
  Antisense strand to SEQ ID NO: 1520566
uucuagaccacucucuucg

SEQ ID NO: 1520568 - RNA, 19 nt, Artificial Sequence
  Description of Artificial Sequence: Synthetic oligonucleotide
  Sense strand starting at position 2379 of SEQ ID NO: 1244889
ggguaagagguuggaagua

SEQ ID NO: 1520569 - RNA, 19 nt, Artificial Sequence
  Description of Artificial Sequence: Synthetic oligonucleotide
  Antisense strand to SEQ ID NO: 1520568
uacuuccaaccucuuaccc

SEQ ID NO: 1520570 - RNA, 19 nt, Artificial Sequence
  Description of Artificial Sequence: Synthetic oligonucleotide
  Sense strand starting at position 2492 of SEQ ID NO: 1244889
ggugcuuggguuugaggaa

SEQ ID NO: 1520571 - RNA, 19 nt, Artificial Sequence
  Description of Artificial Sequence: Synthetic oligonucleotide
  Antisense strand to SEQ ID NO: 1520570
uuccucaaacccaagcacc

SEQ ID NO: 1520572 - RNA, 19 nt, Artificial Sequence
  Description of Artificial Sequence: Synthetic oligonucleotide
  Sense strand starting at position 2501 of SEQ ID NO: 1244889
guuugaggaaucgaaguuc

SEQ ID NO: 1520573 - RNA, 19 nt, Artificial Sequence
  Description of Artificial Sequence: Synthetic oligonucleotide
  Antisense strand to SEQ ID NO: 1520572
gaacuucgauuccucaaac

SEQ ID NO: 1520574 - RNA, 19 nt, Artificial Sequence
  Description of Artificial Sequence: Synthetic oligonucleotide
  Sense strand starting at position 2575 of SEQ ID NO: 1244889
gugggagucaaggauuguu

SEQ ID NO: 1520575 - RNA, 19 nt, Artificial Sequence
  Description of Artificial Sequence: Synthetic oligonucleotide
  Antisense strand to SEQ ID NO: 1520574
aacaauccuugacucccac

SEQ ID NO: 1520576 - RNA, 19 nt, Artificial Sequence
  Description of Artificial Sequence: Synthetic oligonucleotide
  Sense strand starting at position 2578 of SEQ ID NO: 1244889
ggagucaaggauuguuuaa

SEQ ID NO: 1520577 - RNA, 19 nt, Artificial Sequence
  Description of Artificial Sequence: Synthetic oligonucleotide
  Antisense strand to SEQ ID NO: 1520576
uuaaacaauccuugacucc

SEQ ID NO: 1520578 - RNA, 19 nt, Artificial Sequence
  Description of Artificial Sequence: Synthetic oligonucleotide
  Sense strand starting at position 2580 of SEQ ID NO: 1244889
agucaaggauuguuuaauu

SEQ ID NO: 1520579 - RNA, 19 nt, Artificial Sequence
  Description of Artificial Sequence: Synthetic oligonucleotide
  Antisense strand to SEQ ID NO: 1520578
aauuaaacaauccuugacu

SEQ ID NO: 1520580 - RNA, 19 nt, Artificial Sequence
  Description of Artificial Sequence: Synthetic oligonucleotide
  Sense strand starting at position 2585 of SEQ ID NO: 1244889
aggauuguuuaauuauccu

SEQ ID NO: 1520581 - RNA, 19 nt, Artificial Sequence
  Description of Artificial Sequence: Synthetic oligonucleotide
  Antisense strand to SEQ ID NO: 1520580
aggauaauuaaacaauccu

SEQ ID NO: 1520582 - RNA, 19 nt, Artificial Sequence
  Description of Artificial Sequence: Synthetic oligonucleotide
  Sense strand starting at position 2637 of SEQ ID NO: 1244889
uggagucuguauucuuuga

SEQ ID NO: 1520583 - RNA, 19 nt, Artificial Sequence
  Description of Artificial Sequence: Synthetic oligonucleotide
  Antisense strand to SEQ ID NO: 1520582
ucaaagaauacagacucca

SEQ ID NO: 1520584 - RNA, 19 nt, Artificial Sequence
  Description of Artificial Sequence: Synthetic oligonucleotide
  Sense strand starting at position 2639 of SEQ ID NO: 1244889
gagucuguauucuuugaag

SEQ ID NO: 1520585 - RNA, 19 nt, Artificial Sequence
  Description of Artificial Sequence: Synthetic oligonucleotide
  Antisense strand to SEQ ID NO: 1520584
cuucaaagaauacagacuc

SEQ ID NO: 1520586 - RNA, 19 nt, Artificial Sequence
  Description of Artificial Sequence: Synthetic oligonucleotide
  Sense strand starting at position 2641 of SEQ ID NO: 1244889
gucuguauucuuugaagug

SEQ ID NO: 1520587 - RNA, 19 nt, Artificial Sequence
  Description of Artificial Sequence: Synthetic oligonucleotide
  Antisense strand to SEQ ID NO: 1520586
cacuucaaagaauacagac

SEQ ID NO: 1520588 - RNA, 19 nt, Artificial Sequence
  Description of Artificial Sequence: Synthetic oligonucleotide
  Sense strand starting at position 2655 of SEQ ID NO: 1244889
aagugucuagacggaacua

SEQ ID NO: 1520589 - RNA, 19 nt, Artificial Sequence
  Description of Artificial Sequence: Synthetic oligonucleotide
  Antisense strand to SEQ ID NO: 1520588
uaguuccgucuagacacuu

SEQ ID NO: 1520590 - RNA, 19 nt, Artificial Sequence
  Description of Artificial Sequence: Synthetic oligonucleotide
  Sense strand starting at position 2656 of SEQ ID NO: 1244889
agugucuagacggaacuaa

SEQ ID NO: 1520591 - RNA, 19 nt, Artificial Sequence
  Description of Artificial Sequence: Synthetic oligonucleotide
  Antisense strand to SEQ ID NO: 1520590
uuaguuccgucuagacacu

SEQ ID NO: 1520592 - RNA, 19 nt, Artificial Sequence
  Description of Artificial Sequence: Synthetic oligonucleotide
  Sense strand starting at position 2781 of SEQ ID NO: 1244889
cuaccaugagguugaauca

SEQ ID NO: 1520593 - RNA, 19 nt, Artificial Sequence
  Description of Artificial Sequence: Synthetic oligonucleotide
  Antisense strand to SEQ ID NO: 1520592
ugauucaaccucaugguag

SEQ ID NO: 1520594 - RNA, 19 nt, Artificial Sequence
  Description of Artificial Sequence: Synthetic oligonucleotide
  Sense strand starting at position 2848 of SEQ ID NO: 1244889
ggagcaugugcccagguau

SEQ ID NO: 1520595 - RNA, 19 nt, Artificial Sequence
  Description of Artificial Sequence: Synthetic oligonucleotide
  Antisense strand to SEQ ID NO: 1520594
auaccugggcacaugcucc

SEQ ID NO: 1520596 - RNA, 19 nt, Artificial Sequence
  Description of Artificial Sequence: Synthetic oligonucleotide
  Sense strand starting at position 2948 of SEQ ID NO: 1244889
gaagaaacauugguuguga

SEQ ID NO: 1520597 - RNA, 19 nt, Artificial Sequence
  Description of Artificial Sequence: Synthetic oligonucleotide
  Antisense strand to SEQ ID NO: 1520596
ucacaaccaauguuucuuc

SEQ ID NO: 1520598 - RNA, 19 nt, Artificial Sequence
  Description of Artificial Sequence: Synthetic oligonucleotide
  Sense strand starting at position 2950 of SEQ ID NO: 1244889
agaaacauugguugugaga

SEQ ID NO: 1520599 - RNA, 19 nt, Artificial Sequence
  Description of Artificial Sequence: Synthetic oligonucleotide
  Antisense strand to SEQ ID NO: 1520598
ucucacaaccaauguuucu

SEQ ID NO: 1520600 - RNA, 19 nt, Artificial Sequence
  Description of Artificial Sequence: Synthetic oligonucleotide
  Sense strand starting at position 2953 of SEQ ID NO: 1244889
aacauugguugugagaaau

SEQ ID NO: 1520601 - RNA, 19 nt, Artificial Sequence
  Description of Artificial Sequence: Synthetic oligonucleotide
  Antisense strand to SEQ ID NO: 1520600
auuucucacaaccaauguu

SEQ ID NO: 1520602 - RNA, 19 nt, Artificial Sequence
  Description of Artificial Sequence: Synthetic oligonucleotide
  Sense strand starting at position 46 of SEQ ID NO: 1244890
cuugauuuguaagagucca

SEQ ID NO: 1520603 - RNA, 19 nt, Artificial Sequence
  Description of Artificial Sequence: Synthetic oligonucleotide
  Antisense strand to SEQ ID NO: 1520602
uggacucuuacaaaucaag

SEQ ID NO: 1520604 - RNA, 19 nt, Artificial Sequence
  Description of Artificial Sequence: Synthetic oligonucleotide
  Sense strand starting at position 611 of SEQ ID NO: 1244890
gccugcaauuucgcagaua

SEQ ID NO: 1520605 - RNA, 19 nt, Artificial Sequence
  Description of Artificial Sequence: Synthetic oligonucleotide
  Antisense strand to SEQ ID NO: 1520604
uaucugcgaaauugcaggc

SEQ ID NO: 1520606 - RNA, 19 nt, Artificial Sequence
  Description of Artificial Sequence: Synthetic oligonucleotide
  Sense strand starting at position 612 of SEQ ID NO: 1244890
ccugcaauuucgcagauac

SEQ ID NO: 1520607 - RNA, 19 nt, Artificial Sequence
  Description of Artificial Sequence: Synthetic oligonucleotide
  Antisense strand to SEQ ID NO: 1520606
guaucugcgaaauugcagg

SEQ ID NO: 1520608 - RNA, 19 nt, Artificial Sequence
  Description of Artificial Sequence: Synthetic oligonucleotide
  Sense strand starting at position 1390 of SEQ ID NO: 1244890
guggguuccugagaccuga

SEQ ID NO: 1520609 - RNA, 19 nt, Artificial Sequence
  Description of Artificial Sequence: Synthetic oligonucleotide
  Antisense strand to SEQ ID NO: 1520608
ucaggucucaggaacccac

SEQ ID NO: 1520610 - RNA, 19 nt, Artificial Sequence
  Description of Artificial Sequence: Synthetic oligonucleotide
  Sense strand starting at position 1461 of SEQ ID NO: 1244890
cccucuuaccuggagcaga

SEQ ID NO: 1520611 - RNA, 19 nt, Artificial Sequence
  Description of Artificial Sequence: Synthetic oligonucleotide
  Antisense strand to SEQ ID NO: 1520610
ucugcuccagguaagaggg

SEQ ID NO: 1520612 - RNA, 19 nt, Artificial Sequence
  Description of Artificial Sequence: Synthetic oligonucleotide
  Sense strand starting at position 1791 of SEQ ID NO: 1244890
aggaguuccuccucacaga

SEQ ID NO: 1520613 - RNA, 19 nt, Artificial Sequence
  Description of Artificial Sequence: Synthetic oligonucleotide
  Antisense strand to SEQ ID NO: 1520612
ucugugaggaggaacuccu

SEQ ID NO: 1520614 - RNA, 19 nt, Artificial Sequence
  Description of Artificial Sequence: Synthetic oligonucleotide
  Sense strand starting at position 1968 of SEQ ID NO: 1244890
ugcguauucuuugagcuga

SEQ ID NO: 1520615 - RNA, 19 nt, Artificial Sequence
  Description of Artificial Sequence: Synthetic oligonucleotide
  Antisense strand to SEQ ID NO: 1520614
ucagcucaaagaauacgca

SEQ ID NO: 1520616 - RNA, 19 nt, Artificial Sequence
  Description of Artificial Sequence: Synthetic oligonucleotide
  Sense strand starting at position 1970 of SEQ ID NO: 1244890
cguauucuuugagcugaug

SEQ ID NO: 1520617 - RNA, 19 nt, Artificial Sequence
  Description of Artificial Sequence: Synthetic oligonucleotide
  Antisense strand to SEQ ID NO: 1520616
caucagcucaaagaauacg

SEQ ID NO: 1520618 - RNA, 19 nt, Artificial Sequence
  Description of Artificial Sequence: Synthetic oligonucleotide
  Sense strand starting at position 2070 of SEQ ID NO: 1244890
ggcagaaagcccuguucag

SEQ ID NO: 1520619 - RNA, 19 nt, Artificial Sequence
  Description of Artificial Sequence: Synthetic oligonucleotide
  Antisense strand to SEQ ID NO: 1520618
cugaacagggcuuucugcc

SEQ ID NO: 1520620 - RNA, 19 nt, Artificial Sequence
  Description of Artificial Sequence: Synthetic oligonucleotide
  Sense strand starting at position 2115 of SEQ ID NO: 1244890
ggguccgaauucguaacaa

SEQ ID NO: 1520621 - RNA, 19 nt, Artificial Sequence
  Description of Artificial Sequence: Synthetic oligonucleotide
  Antisense strand to SEQ ID NO: 1520620
uuguuacgaauucggaccc

SEQ ID NO: 1520622 - RNA, 19 nt, Artificial Sequence
  Description of Artificial Sequence: Synthetic oligonucleotide
  Sense strand starting at position 2119 of SEQ ID NO: 1244890
ccgaauucguaacaagcau

SEQ ID NO: 1520623 - RNA, 19 nt, Artificial Sequence
  Description of Artificial Sequence: Synthetic oligonucleotide
  Antisense strand to SEQ ID NO: 1520622
augcuuguuacgaauucgg

SEQ ID NO: 1520624 - RNA, 19 nt, Artificial Sequence
  Description of Artificial Sequence: Synthetic oligonucleotide
  Sense strand starting at position 2438 of SEQ ID NO: 1244890
gaugccagcucugagaaca

SEQ ID NO: 1520625 - RNA, 19 nt, Artificial Sequence
  Description of Artificial Sequence: Synthetic oligonucleotide
  Antisense strand to SEQ ID NO: 1520624
uguucucagagcuggcauc

SEQ ID NO: 1520626 - RNA, 19 nt, Artificial Sequence
  Description of Artificial Sequence: Synthetic oligonucleotide
  Sense strand starting at position 2875 of SEQ ID NO: 1244890
cgacucuaaucagcagaga

SEQ ID NO: 1520627 - RNA, 19 nt, Artificial Sequence
  Description of Artificial Sequence: Synthetic oligonucleotide
  Antisense strand to SEQ ID NO: 1520626
ucucugcugauuagagucg

SEQ ID NO: 1520628 - RNA, 19 nt, Artificial Sequence
  Description of Artificial Sequence: Synthetic oligonucleotide
  Sense strand starting at position 3205 of SEQ ID NO: 1244890
ggcauccucuggucuacaa

SEQ ID NO: 1520629 - RNA, 19 nt, Artificial Sequence
  Description of Artificial Sequence: Synthetic oligonucleotide
  Antisense strand to SEQ ID NO: 1520628
uuguagaccagaggaugcc

SEQ ID NO: 1520630 - RNA, 19 nt, Artificial Sequence
  Description of Artificial Sequence: Synthetic oligonucleotide
  Sense strand starting at position 3288 of SEQ ID NO: 1244890
cucugcaguagaugugaaa

SEQ ID NO: 1520631 - RNA, 19 nt, Artificial Sequence
  Description of Artificial Sequence: Synthetic oligonucleotide
  Antisense strand to SEQ ID NO: 1520630
uuucacaucuacugcagag

SEQ ID NO: 1520632 - RNA, 19 nt, Artificial Sequence
  Description of Artificial Sequence: Synthetic oligonucleotide
  Sense strand starting at position 3428 of SEQ ID NO: 1244890
ucaacucugcucugugaaa

SEQ ID NO: 1520633 - RNA, 19 nt, Artificial Sequence
  Description of Artificial Sequence: Synthetic oligonucleotide
  Antisense strand to SEQ ID NO: 1520632
uuucacagagcagaguuga

SEQ ID NO: 1520634 - RNA, 19 nt, Artificial Sequence
  Description of Artificial Sequence: Synthetic oligonucleotide
  Sense strand starting at position 3450 of SEQ ID NO: 1244890
ggaugauucuaacagugcu

SEQ ID NO: 1520635 - RNA, 19 nt, Artificial Sequence
  Description of Artificial Sequence: Synthetic oligonucleotide
  Antisense strand to SEQ ID NO: 1520634
agcacuguuagaaucaucc

SEQ ID NO: 1520636 - RNA, 19 nt, Artificial Sequence
  Description of Artificial Sequence: Synthetic oligonucleotide
  Sense strand starting at position 3498 of SEQ ID NO: 1244890
gaggucauguguuccauga

SEQ ID NO: 1520637 - RNA, 19 nt, Artificial Sequence
  Description of Artificial Sequence: Synthetic oligonucleotide
  Antisense strand to SEQ ID NO: 1520636
ucauggaacacaugaccuc

SEQ ID NO: 1520638 - RNA, 19 nt, Artificial Sequence
  Description of Artificial Sequence: Synthetic oligonucleotide
  Sense strand starting at position 3500 of SEQ ID NO: 1244890
ggucauguguuccaugauc

SEQ ID NO: 1520639 - RNA, 19 nt, Artificial Sequence
  Description of Artificial Sequence: Synthetic oligonucleotide
  Antisense strand to SEQ ID NO: 1520638
gaucauggaacacaugacc

SEQ ID NO: 1520640 - RNA, 19 nt, Artificial Sequence
  Description of Artificial Sequence: Synthetic oligonucleotide
  Sense strand starting at position 3502 of SEQ ID NO: 1244890
ucauguguuccaugauccu

SEQ ID NO: 1520641 - RNA, 19 nt, Artificial Sequence
  Description of Artificial Sequence: Synthetic oligonucleotide
  Antisense strand to SEQ ID NO: 1520640
aggaucauggaacacauga

SEQ ID NO: 1520642 - RNA, 19 nt, Artificial Sequence
  Description of Artificial Sequence: Synthetic oligonucleotide
  Sense strand starting at position 3764 of SEQ ID NO: 1244890
ggcuucaguuagucagagu

SEQ ID NO: 1520643 - RNA, 19 nt, Artificial Sequence
  Description of Artificial Sequence: Synthetic oligonucleotide
  Antisense strand to SEQ ID NO: 1520642
acucugacuaacugaagcc

SEQ ID NO: 1520644 - RNA, 19 nt, Artificial Sequence
  Description of Artificial Sequence: Synthetic oligonucleotide
  Sense strand starting at position 3854 of SEQ ID NO: 1244890
gcagggcaguggugagaau

SEQ ID NO: 1520645 - RNA, 19 nt, Artificial Sequence
  Description of Artificial Sequence: Synthetic oligonucleotide
  Antisense strand to SEQ ID NO: 1520644
auucucaccacugcccugc

SEQ ID NO: 1520646 - RNA, 19 nt, Artificial Sequence
  Description of Artificial Sequence: Synthetic oligonucleotide
  Sense strand starting at position 3855 of SEQ ID NO: 1244890
cagggcaguggugagaaua

SEQ ID NO: 1520647 - RNA, 19 nt, Artificial Sequence
  Description of Artificial Sequence: Synthetic oligonucleotide
  Antisense strand to SEQ ID NO: 1520646
uauucucaccacugcccug

SEQ ID NO: 1520648 - RNA, 19 nt, Artificial Sequence
  Description of Artificial Sequence: Synthetic oligonucleotide
  Sense strand starting at position 3867 of SEQ ID NO: 1244890
gagaauaaggcucacugca

SEQ ID NO: 1520649 - RNA, 19 nt, Artificial Sequence
  Description of Artificial Sequence: Synthetic oligonucleotide
  Antisense strand to SEQ ID NO: 1520648
ugcagugagccuuauucuc

SEQ ID NO: 1520650 - RNA, 19 nt, Artificial Sequence
  Description of Artificial Sequence: Synthetic oligonucleotide
  Sense strand starting at position 32 of SEQ ID NO: 1244891
agaugcaacugugacaaau

SEQ ID NO: 1520651 - RNA, 19 nt, Artificial Sequence
  Description of Artificial Sequence: Synthetic oligonucleotide
  Antisense strand to SEQ ID NO: 1520650
auuugucacaguugcaucu

SEQ ID NO: 1520652 - RNA, 19 nt, Artificial Sequence
  Description of Artificial Sequence: Synthetic oligonucleotide
  Sense strand starting at position 34 of SEQ ID NO: 1244891
augcaacugugacaaauau

SEQ ID NO: 1520653 - RNA, 19 nt, Artificial Sequence
  Description of Artificial Sequence: Synthetic oligonucleotide
  Antisense strand to SEQ ID NO: 1520652
auauuugucacaguugcau

SEQ ID NO: 1520654 - RNA, 19 nt, Artificial Sequence
  Description of Artificial Sequence: Synthetic oligonucleotide
  Sense strand starting at position 91 of SEQ ID NO: 1244891
accauagagcaauguuaga

SEQ ID NO: 1520655 - RNA, 19 nt, Artificial Sequence
  Description of Artificial Sequence: Synthetic oligonucleotide
  Antisense strand to SEQ ID NO: 1520654
ucuaacauugcucuauggu

SEQ ID NO: 1520656 - RNA, 19 nt, Artificial Sequence
  Description of Artificial Sequence: Synthetic oligonucleotide
  Sense strand starting at position 96 of SEQ ID NO: 1244891
agagcaauguuagaaacau

SEQ ID NO: 1520657 - RNA, 19 nt, Artificial Sequence
  Description of Artificial Sequence: Synthetic oligonucleotide
  Antisense strand to SEQ ID NO: 1520656
auguuucuaacauugcucu

SEQ ID NO: 1520658 - RNA, 19 nt, Artificial Sequence
  Description of Artificial Sequence: Synthetic oligonucleotide
  Sense strand starting at position 146 of SEQ ID NO: 1244891
acuggacucugcuaccaaa

SEQ ID NO: 1520659 - RNA, 19 nt, Artificial Sequence
  Description of Artificial Sequence: Synthetic oligonucleotide
  Antisense strand to SEQ ID NO: 1520658
uuugguagcagaguccagu

SEQ ID NO: 1520660 - RNA, 19 nt, Artificial Sequence
  Description of Artificial Sequence: Synthetic oligonucleotide
  Sense strand starting at position 180 of SEQ ID NO: 1244891
uugccaucucuagaaugga

SEQ ID NO: 1520661 - RNA, 19 nt, Artificial Sequence
  Description of Artificial Sequence: Synthetic oligonucleotide
  Antisense strand to SEQ ID NO: 1520660
uccauucuagagauggcaa

SEQ ID NO: 1520662 - RNA, 19 nt, Artificial Sequence
  Description of Artificial Sequence: Synthetic oligonucleotide
  Sense strand starting at position 183 of SEQ ID NO: 1244891
ccaucucuagaauggaagu

SEQ ID NO: 1520663 - RNA, 19 nt, Artificial Sequence
  Description of Artificial Sequence: Synthetic oligonucleotide
  Antisense strand to SEQ ID NO: 1520662
acuuccauucuagagaugg

SEQ ID NO: 1520664 - RNA, 19 nt, Artificial Sequence
  Description of Artificial Sequence: Synthetic oligonucleotide
  Sense strand starting at position 211 of SEQ ID NO: 1244891
acuaauagguaugaagaau

SEQ ID NO: 1520665 - RNA, 19 nt, Artificial Sequence
  Description of Artificial Sequence: Synthetic oligonucleotide
  Antisense strand to SEQ ID NO: 1520664
auucuucauaccuauuagu

SEQ ID NO: 1520666 - RNA, 19 nt, Artificial Sequence
  Description of Artificial Sequence: Synthetic oligonucleotide
  Sense strand starting at position 222 of SEQ ID NO: 1244891
ugaagaaucucugaaaguc

SEQ ID NO: 1520667 - RNA, 19 nt, Artificial Sequence
  Description of Artificial Sequence: Synthetic oligonucleotide
  Antisense strand to SEQ ID NO: 1520666
gacuuucagagauucuuca

SEQ ID NO: 1520668 - RNA, 19 nt, Artificial Sequence
  Description of Artificial Sequence: Synthetic oligonucleotide
  Sense strand starting at position 231 of SEQ ID NO: 1244891
ucugaaagucaccagcaaa

SEQ ID NO: 1520669 - RNA, 19 nt, Artificial Sequence
  Description of Artificial Sequence: Synthetic oligonucleotide
  Antisense strand to SEQ ID NO: 1520668
uuugcuggugacuuucaga

SEQ ID NO: 1520670 - RNA, 19 nt, Artificial Sequence
  Description of Artificial Sequence: Synthetic oligonucleotide
  Sense strand starting at position 252 of SEQ ID NO: 1244891
agagaugcccagcaucuuu

SEQ ID NO: 1520671 - RNA, 19 nt, Artificial Sequence
  Description of Artificial Sequence: Synthetic oligonucleotide
  Antisense strand to SEQ ID NO: 1520670
aaagaugcugggcaucucu

SEQ ID NO: 1520672 - RNA, 19 nt, Artificial Sequence
  Description of Artificial Sequence: Synthetic oligonucleotide
  Sense strand starting at position 257 of SEQ ID NO: 1244891
ugcccagcaucuuuggaaa

SEQ ID NO: 1520673 - RNA, 19 nt, Artificial Sequence
  Description of Artificial Sequence: Synthetic oligonucleotide
  Antisense strand to SEQ ID NO: 1520672
uuuccaaagaugcugggca

SEQ ID NO: 1520674 - RNA, 19 nt, Artificial Sequence
  Description of Artificial Sequence: Synthetic oligonucleotide
  Sense strand starting at position 282 of SEQ ID NO: 1244891
uuguaacuuccugaacuga

SEQ ID NO: 1520675 - RNA, 19 nt, Artificial Sequence
  Description of Artificial Sequence: Synthetic oligonucleotide
  Antisense strand to SEQ ID NO: 1520674
ucaguucaggaaguuacaa

SEQ ID NO: 1520676 - RNA, 19 nt, Artificial Sequence
  Description of Artificial Sequence: Synthetic oligonucleotide
  Sense strand starting at position 314 of SEQ ID NO: 1244891
cacacaguguugcucagaa

SEQ ID NO: 1520677 - RNA, 19 nt, Artificial Sequence
  Description of Artificial Sequence: Synthetic oligonucleotide
  Antisense strand to SEQ ID NO: 1520676
uucugagcaacacugugug

SEQ ID NO: 1520678 - RNA, 19 nt, Artificial Sequence
  Description of Artificial Sequence: Synthetic oligonucleotide
  Sense strand starting at position 411 of SEQ ID NO: 1244891
acccaaggauaguuaagua

SEQ ID NO: 1520679 - RNA, 19 nt, Artificial Sequence
  Description of Artificial Sequence: Synthetic oligonucleotide
  Antisense strand to SEQ ID NO: 1520678
uacuuaacuauccuugggu

SEQ ID NO: 1520680 - RNA, 19 nt, Artificial Sequence
  Description of Artificial Sequence: Synthetic oligonucleotide
  Sense strand starting at position 423 of SEQ ID NO: 1244891
uuaaguaucucccuggcca

SEQ ID NO: 1520681 - RNA, 19 nt, Artificial Sequence
  Description of Artificial Sequence: Synthetic oligonucleotide
  Antisense strand to SEQ ID NO: 1520680
uggccagggagauacuuaa

SEQ ID NO: 1520682 - RNA, 19 nt, Artificial Sequence
  Description of Artificial Sequence: Synthetic oligonucleotide
  Sense strand starting at position 524 of SEQ ID NO: 1244891
cuaagaacuuucccuggau

SEQ ID NO: 1520683 - RNA, 19 nt, Artificial Sequence
  Description of Artificial Sequence: Synthetic oligonucleotide
  Antisense strand to SEQ ID NO: 1520682
auccagggaaaguucuuag

SEQ ID NO: 1520684 - RNA, 19 nt, Artificial Sequence
  Description of Artificial Sequence: Synthetic oligonucleotide
  Sense strand starting at position 831 of SEQ ID NO: 1244891
agugcuaagcuuguuagca

SEQ ID NO: 1520685 - RNA, 19 nt, Artificial Sequence
  Description of Artificial Sequence: Synthetic oligonucleotide
  Antisense strand to SEQ ID NO: 1520684
ugcuaacaagcuuagcacu

SEQ ID NO: 1520686 - RNA, 19 nt, Artificial Sequence
  Description of Artificial Sequence: Synthetic oligonucleotide
  Sense strand starting at position 832 of SEQ ID NO: 1244891
gugcuaagcuuguuagcac

SEQ ID NO: 1520687 - RNA, 19 nt, Artificial Sequence
  Description of Artificial Sequence: Synthetic oligonucleotide
  Antisense strand to SEQ ID NO: 1520686
gugcuaacaagcuuagcac

SEQ ID NO: 1520688 - RNA, 19 nt, Artificial Sequence
  Description of Artificial Sequence: Synthetic oligonucleotide
  Sense strand starting at position 849 of SEQ ID NO: 1244891
acugacgccagauguaauu

SEQ ID NO: 1520689 - RNA, 19 nt, Artificial Sequence
  Description of Artificial Sequence: Synthetic oligonucleotide
  Antisense strand to SEQ ID NO: 1520688
aauuacaucuggcgucagu

SEQ ID NO: 1520690 - RNA, 19 nt, Artificial Sequence
  Description of Artificial Sequence: Synthetic oligonucleotide
  Sense strand starting at position 871 of SEQ ID NO: 1244891
guuugaaguucucaagacu

SEQ ID NO: 1520691 - RNA, 19 nt, Artificial Sequence
  Description of Artificial Sequence: Synthetic oligonucleotide
  Antisense strand to SEQ ID NO: 1520690
agucuugagaacuucaaac

SEQ ID NO: 1520692 - RNA, 19 nt, Artificial Sequence
  Description of Artificial Sequence: Synthetic oligonucleotide
  Sense strand starting at position 963 of SEQ ID NO: 1244891
augggacucucagaagucu

SEQ ID NO: 1520693 - RNA, 19 nt, Artificial Sequence
  Description of Artificial Sequence: Synthetic oligonucleotide
  Antisense strand to SEQ ID NO: 1520692
agacuucugagagucccau

SEQ ID NO: 1520694 - RNA, 19 nt, Artificial Sequence
  Description of Artificial Sequence: Synthetic oligonucleotide
  Sense strand starting at position 1080 of SEQ ID NO: 1244891
uccauaagugauugucaga

SEQ ID NO: 1520695 - RNA, 19 nt, Artificial Sequence
  Description of Artificial Sequence: Synthetic oligonucleotide
  Antisense strand to SEQ ID NO: 1520694
ucugacaaucacuuaugga

SEQ ID NO: 1520696 - RNA, 19 nt, Artificial Sequence
  Description of Artificial Sequence: Synthetic oligonucleotide
  Sense strand starting at position 1083 of SEQ ID NO: 1244891
auaagugauugucagagca

SEQ ID NO: 1520697 - RNA, 19 nt, Artificial Sequence
  Description of Artificial Sequence: Synthetic oligonucleotide
  Antisense strand to SEQ ID NO: 1520696
ugcucugacaaucacuuau

SEQ ID NO: 1520698 - RNA, 19 nt, Artificial Sequence
  Description of Artificial Sequence: Synthetic oligonucleotide
  Sense strand starting at position 1209 of SEQ ID NO: 1244891
uggucacaggugugguuaa

SEQ ID NO: 1520699 - RNA, 19 nt, Artificial Sequence
  Description of Artificial Sequence: Synthetic oligonucleotide
  Antisense strand to SEQ ID NO: 1520698
uuaaccacaccugugacca

SEQ ID NO: 1520700 - RNA, 19 nt, Artificial Sequence
  Description of Artificial Sequence: Synthetic oligonucleotide
  Sense strand starting at position 1298 of SEQ ID NO: 1244891
ugaggagggucauagugau

SEQ ID NO: 1520701 - RNA, 19 nt, Artificial Sequence
  Description of Artificial Sequence: Synthetic oligonucleotide
  Antisense strand to SEQ ID NO: 1520700
aucacuaugacccuccuca

SEQ ID NO: 1520702 - RNA, 19 nt, Artificial Sequence
  Description of Artificial Sequence: Synthetic oligonucleotide
  Sense strand starting at position 1310 of SEQ ID NO: 1244891
uagugauaccagggucugu

SEQ ID NO: 1520703 - RNA, 19 nt, Artificial Sequence
  Description of Artificial Sequence: Synthetic oligonucleotide
  Antisense strand to SEQ ID NO: 1520702
acagacccugguaucacua

SEQ ID NO: 1520704 - RNA, 19 nt, Artificial Sequence
  Description of Artificial Sequence: Synthetic oligonucleotide
  Sense strand starting at position 1353 of SEQ ID NO: 1244891
aaaucuggacucuguguga

SEQ ID NO: 1520705 - RNA, 19 nt, Artificial Sequence
  Description of Artificial Sequence: Synthetic oligonucleotide
  Antisense strand to SEQ ID NO: 1520704
ucacacagaguccagauuu

SEQ ID NO: 1520706 - RNA, 19 nt, Artificial Sequence
  Description of Artificial Sequence: Synthetic oligonucleotide
  Sense strand starting at position 1357 of SEQ ID NO: 1244891
cuggacucugugugacaga

SEQ ID NO: 1520707 - RNA, 19 nt, Artificial Sequence
  Description of Artificial Sequence: Synthetic oligonucleotide
  Antisense strand to SEQ ID NO: 1520706
ucugucacacagaguccag

SEQ ID NO: 1520708 - RNA, 19 nt, Artificial Sequence
  Description of Artificial Sequence: Synthetic oligonucleotide
  Sense strand starting at position 1358 of SEQ ID NO: 1244891
uggacucugugugacagaa

SEQ ID NO: 1520709 - RNA, 19 nt, Artificial Sequence
  Description of Artificial Sequence: Synthetic oligonucleotide
  Antisense strand to SEQ ID NO: 1520708
uucugucacacagagucca

SEQ ID NO: 1520710 - RNA, 19 nt, Artificial Sequence
  Description of Artificial Sequence: Synthetic oligonucleotide
  Sense strand starting at position 1385 of SEQ ID NO: 1244891
gcaagugagccacacagau

SEQ ID NO: 1520711 - RNA, 19 nt, Artificial Sequence
  Description of Artificial Sequence: Synthetic oligonucleotide
  Antisense strand to SEQ ID NO: 1520710
aucuguguggcucacuugc

SEQ ID NO: 1520712 - RNA, 19 nt, Artificial Sequence
  Description of Artificial Sequence: Synthetic oligonucleotide
  Sense strand starting at position 1421 of SEQ ID NO: 1244891
uagggaugcucaccuuguu

SEQ ID NO: 1520713 - RNA, 19 nt, Artificial Sequence
  Description of Artificial Sequence: Synthetic oligonucleotide
  Antisense strand to SEQ ID NO: 1520712
aacaaggugagcaucccua

SEQ ID NO: 1520714 - RNA, 19 nt, Artificial Sequence
  Description of Artificial Sequence: Synthetic oligonucleotide
  Sense strand starting at position 1669 of SEQ ID NO: 1244891
agccgauuccugggcuaca

SEQ ID NO: 1520715 - RNA, 19 nt, Artificial Sequence
  Description of Artificial Sequence: Synthetic oligonucleotide
  Antisense strand to SEQ ID NO: 1520714
uguagcccaggaaucggcu

SEQ ID NO: 1520716 - RNA, 19 nt, Artificial Sequence
  Description of Artificial Sequence: Synthetic oligonucleotide
  Sense strand starting at position 1670 of SEQ ID NO: 1244891
gccgauuccugggcuacau

SEQ ID NO: 1520717 - RNA, 19 nt, Artificial Sequence
  Description of Artificial Sequence: Synthetic oligonucleotide
  Antisense strand to SEQ ID NO: 1520716
auguagcccaggaaucggc

SEQ ID NO: 1520718 - RNA, 19 nt, Artificial Sequence
  Description of Artificial Sequence: Synthetic oligonucleotide
  Sense strand starting at position 1733 of SEQ ID NO: 1244891
gugugacuucauuaaggga

SEQ ID NO: 1520719 - RNA, 19 nt, Artificial Sequence
  Description of Artificial Sequence: Synthetic oligonucleotide
  Antisense strand to SEQ ID NO: 1520718
ucccuuaaugaagucacac

SEQ ID NO: 1520720 - RNA, 19 nt, Artificial Sequence
  Description of Artificial Sequence: Synthetic oligonucleotide
  Sense strand starting at position 1776 of SEQ ID NO: 1244891
ccuagaggccguuagucaa

SEQ ID NO: 1520721 - RNA, 19 nt, Artificial Sequence
  Description of Artificial Sequence: Synthetic oligonucleotide
  Antisense strand to SEQ ID NO: 1520720
uugacuaacggccucuagg

SEQ ID NO: 1520722 - RNA, 19 nt, Artificial Sequence
  Description of Artificial Sequence: Synthetic oligonucleotide
  Sense strand starting at position 1866 of SEQ ID NO: 1244891
aaagguaaaguagguauaa

SEQ ID NO: 1520723 - RNA, 19 nt, Artificial Sequence
  Description of Artificial Sequence: Synthetic oligonucleotide
  Antisense strand to SEQ ID NO: 1520722
uuauaccuacuuuaccuuu

SEQ ID NO: 1520724 - RNA, 19 nt, Artificial Sequence
  Description of Artificial Sequence: Synthetic oligonucleotide
  Sense strand starting at position 1867 of SEQ ID NO: 1244891
aagguaaaguagguauaaa

SEQ ID NO: 1520725 - RNA, 19 nt, Artificial Sequence
  Description of Artificial Sequence: Synthetic oligonucleotide
  Antisense strand to SEQ ID NO: 1520724
uuuauaccuacuuuaccuu

SEQ ID NO: 1520726 - RNA, 19 nt, Artificial Sequence
  Description of Artificial Sequence: Synthetic oligonucleotide
  Sense strand starting at position 3919 of SEQ ID NO: 1244891
aauuauuggcuguguagag

SEQ ID NO: 1520727 - RNA, 19 nt, Artificial Sequence
  Description of Artificial Sequence: Synthetic oligonucleotide
  Antisense strand to SEQ ID NO: 1520726
cucuacacagccaauaauu

SEQ ID NO: 1520728 - RNA, 19 nt, Artificial Sequence
  Description of Artificial Sequence: Synthetic oligonucleotide
  Sense strand starting at position 3920 of SEQ ID NO: 1244891
auuauuggcuguguagaga

SEQ ID NO: 1520729 - RNA, 19 nt, Artificial Sequence
  Description of Artificial Sequence: Synthetic oligonucleotide
  Antisense strand to SEQ ID NO: 1520728
ucucuacacagccaauaau

SEQ ID NO: 1520730 - RNA, 19 nt, Artificial Sequence
  Description of Artificial Sequence: Synthetic oligonucleotide
  Sense strand starting at position 26 of SEQ ID NO: 1244892
guaucucacacauggagga

SEQ ID NO: 1520731 - RNA, 19 nt, Artificial Sequence
  Description of Artificial Sequence: Synthetic oligonucleotide
  Antisense strand to SEQ ID NO: 1520730
uccuccaugugugagauac

SEQ ID NO: 1520732 - RNA, 19 nt, Artificial Sequence
  Description of Artificial Sequence: Synthetic oligonucleotide
  Sense strand starting at position 239 of SEQ ID NO: 1244892
uaaggaaagucuuuggauc

SEQ ID NO: 1520733 - RNA, 19 nt, Artificial Sequence
  Description of Artificial Sequence: Synthetic oligonucleotide
  Antisense strand to SEQ ID NO: 1520732
gauccaaagacuuuccuua

SEQ ID NO: 1520734 - RNA, 19 nt, Artificial Sequence
  Description of Artificial Sequence: Synthetic oligonucleotide
  Sense strand starting at position 358 of SEQ ID NO: 1244892
agcucugacuucugaauuu

SEQ ID NO: 1520735 - RNA, 19 nt, Artificial Sequence
  Description of Artificial Sequence: Synthetic oligonucleotide
  Antisense strand to SEQ ID NO: 1520734
aaauucagaagucagagcu

SEQ ID NO: 1520736 - RNA, 19 nt, Artificial Sequence
  Description of Artificial Sequence: Synthetic oligonucleotide
  Sense strand starting at position 514 of SEQ ID NO: 1244892
gagugcugacagcgacuua

SEQ ID NO: 1520737 - RNA, 19 nt, Artificial Sequence
  Description of Artificial Sequence: Synthetic oligonucleotide
  Antisense strand to SEQ ID NO: 1520736
uaagucgcugucagcacuc

SEQ ID NO: 1520738 - RNA, 19 nt, Artificial Sequence
  Description of Artificial Sequence: Synthetic oligonucleotide
  Sense strand starting at position 515 of SEQ ID NO: 1244892
agugcugacagcgacuuaa

SEQ ID NO: 1520739 - RNA, 19 nt, Artificial Sequence
  Description of Artificial Sequence: Synthetic oligonucleotide
  Antisense strand to SEQ ID NO: 1520738
uuaagucgcugucagcacu

SEQ ID NO: 1520740 - RNA, 19 nt, Artificial Sequence
  Description of Artificial Sequence: Synthetic oligonucleotide
  Sense strand starting at position 519 of SEQ ID NO: 1244892
cugacagcgacuuaauaug

SEQ ID NO: 1520741 - RNA, 19 nt, Artificial Sequence
  Description of Artificial Sequence: Synthetic oligonucleotide
  Antisense strand to SEQ ID NO: 1520740
cauauuaagucgcugucag

SEQ ID NO: 1520742 - RNA, 19 nt, Artificial Sequence
  Description of Artificial Sequence: Synthetic oligonucleotide
  Sense strand starting at position 527 of SEQ ID NO: 1244892
gacuuaauaugcgcuggaa

SEQ ID NO: 1520743 - RNA, 19 nt, Artificial Sequence
  Description of Artificial Sequence: Synthetic oligonucleotide
  Antisense strand to SEQ ID NO: 1520742
uuccagcgcauauuaaguc

SEQ ID NO: 1520744 - RNA, 19 nt, Artificial Sequence
  Description of Artificial Sequence: Synthetic oligonucleotide
  Sense strand starting at position 529 of SEQ ID NO: 1244892
cuuaauaugcgcuggaauc

SEQ ID NO: 1520745 - RNA, 19 nt, Artificial Sequence
  Description of Artificial Sequence: Synthetic oligonucleotide
  Antisense strand to SEQ ID NO: 1520744
gauuccagcgcauauuaag

SEQ ID NO: 1520746 - RNA, 19 nt, Artificial Sequence
  Description of Artificial Sequence: Synthetic oligonucleotide
  Sense strand starting at position 530 of SEQ ID NO: 1244892
uuaauaugcgcuggaauca

SEQ ID NO: 1520747 - RNA, 19 nt, Artificial Sequence
  Description of Artificial Sequence: Synthetic oligonucleotide
  Antisense strand to SEQ ID NO: 1520746
ugauuccagcgcauauuaa

SEQ ID NO: 1520748 - RNA, 19 nt, Artificial Sequence
  Description of Artificial Sequence: Synthetic oligonucleotide
  Sense strand starting at position 650 of SEQ ID NO: 1244892
cugaguucccauugugcuu

SEQ ID NO: 1520749 - RNA, 19 nt, Artificial Sequence
  Description of Artificial Sequence: Synthetic oligonucleotide
  Antisense strand to SEQ ID NO: 1520748
aagcacaaugggaacucag

SEQ ID NO: 1520750 - RNA, 19 nt, Artificial Sequence
  Description of Artificial Sequence: Synthetic oligonucleotide
  Sense strand starting at position 655 of SEQ ID NO: 1244892
uucccauugugcuuuauau

SEQ ID NO: 1520751 - RNA, 19 nt, Artificial Sequence
  Description of Artificial Sequence: Synthetic oligonucleotide
  Antisense strand to SEQ ID NO: 1520750
auauaaagcacaaugggaa

SEQ ID NO: 1520752 - RNA, 19 nt, Artificial Sequence
  Description of Artificial Sequence: Synthetic oligonucleotide
  Sense strand starting at position 657 of SEQ ID NO: 1244892
cccauugugcuuuauaucu

SEQ ID NO: 1520753 - RNA, 19 nt, Artificial Sequence
  Description of Artificial Sequence: Synthetic oligonucleotide
  Antisense strand to SEQ ID NO: 1520752
agauauaaagcacaauggg

SEQ ID NO: 1520754 - RNA, 19 nt, Artificial Sequence
  Description of Artificial Sequence: Synthetic oligonucleotide
  Sense strand starting at position 1096 of SEQ ID NO: 1244892
agacuuggguucucacuau

SEQ ID NO: 1520755 - RNA, 19 nt, Artificial Sequence
  Description of Artificial Sequence: Synthetic oligonucleotide
  Antisense strand to SEQ ID NO: 1520754
auagugagaacccaagucu

SEQ ID NO: 1520756 - RNA, 19 nt, Artificial Sequence
  Description of Artificial Sequence: Synthetic oligonucleotide
  Sense strand starting at position 1216 of SEQ ID NO: 1244892
ccuaguaaacagcaggauu

SEQ ID NO: 1520757 - RNA, 19 nt, Artificial Sequence
  Description of Artificial Sequence: Synthetic oligonucleotide
  Antisense strand to SEQ ID NO: 1520756
aauccugcuguuuacuagg

SEQ ID NO: 1520758 - RNA, 19 nt, Artificial Sequence
  Description of Artificial Sequence: Synthetic oligonucleotide
  Sense strand starting at position 1233 of SEQ ID NO: 1244892
uuuagcacaucguugaaga

SEQ ID NO: 1520759 - RNA, 19 nt, Artificial Sequence
  Description of Artificial Sequence: Synthetic oligonucleotide
  Antisense strand to SEQ ID NO: 1520758
ucuucaacgaugugcuaaa

SEQ ID NO: 1520760 - RNA, 19 nt, Artificial Sequence
  Description of Artificial Sequence: Synthetic oligonucleotide
  Sense strand starting at position 1234 of SEQ ID NO: 1244892
uuagcacaucguugaagau

SEQ ID NO: 1520761 - RNA, 19 nt, Artificial Sequence
  Description of Artificial Sequence: Synthetic oligonucleotide
  Antisense strand to SEQ ID NO: 1520760
aucuucaacgaugugcuaa

SEQ ID NO: 1520762 - RNA, 19 nt, Artificial Sequence
  Description of Artificial Sequence: Synthetic oligonucleotide
  Sense strand starting at position 1243 of SEQ ID NO: 1244892
cguugaagaucuuugaacu

SEQ ID NO: 1520763 - RNA, 19 nt, Artificial Sequence
  Description of Artificial Sequence: Synthetic oligonucleotide
  Antisense strand to SEQ ID NO: 1520762
aguucaaagaucuucaacg

SEQ ID NO: 1520764 - RNA, 19 nt, Artificial Sequence
  Description of Artificial Sequence: Synthetic oligonucleotide
  Sense strand starting at position 1244 of SEQ ID NO: 1244892
guugaagaucuuugaacug

SEQ ID NO: 1520765 - RNA, 19 nt, Artificial Sequence
  Description of Artificial Sequence: Synthetic oligonucleotide
  Antisense strand to SEQ ID NO: 1520764
caguucaaagaucuucaac

SEQ ID NO: 1520766 - RNA, 19 nt, Artificial Sequence
  Description of Artificial Sequence: Synthetic oligonucleotide
  Sense strand starting at position 1389 of SEQ ID NO: 1244892
ggagacuccugagaggaaa

SEQ ID NO: 1520767 - RNA, 19 nt, Artificial Sequence
  Description of Artificial Sequence: Synthetic oligonucleotide
  Antisense strand to SEQ ID NO: 1520766
uuuccucucaggagucucc

SEQ ID NO: 1520768 - RNA, 19 nt, Artificial Sequence
  Description of Artificial Sequence: Synthetic oligonucleotide
  Sense strand starting at position 1548 of SEQ ID NO: 1244892
gucccaagagcucacugaa

SEQ ID NO: 1520769 - RNA, 19 nt, Artificial Sequence
  Description of Artificial Sequence: Synthetic oligonucleotide
  Antisense strand to SEQ ID NO: 1520768
uucagugagcucuugggac

SEQ ID NO: 1520770 - RNA, 19 nt, Artificial Sequence
  Description of Artificial Sequence: Synthetic oligonucleotide
  Sense strand starting at position 1551 of SEQ ID NO: 1244892
ccaagagcucacugaaugu

SEQ ID NO: 1520771 - RNA, 19 nt, Artificial Sequence
  Description of Artificial Sequence: Synthetic oligonucleotide
  Antisense strand to SEQ ID NO: 1520770
acauucagugagcucuugg

SEQ ID NO: 1520772 - RNA, 19 nt, Artificial Sequence
  Description of Artificial Sequence: Synthetic oligonucleotide
  Sense strand starting at position 1564 of SEQ ID NO: 1244892
gaauguccugcuugucaua

SEQ ID NO: 1520773 - RNA, 19 nt, Artificial Sequence
  Description of Artificial Sequence: Synthetic oligonucleotide
  Antisense strand to SEQ ID NO: 1520772
uaugacaagcaggacauuc

SEQ ID NO: 1520774 - RNA, 19 nt, Artificial Sequence
  Description of Artificial Sequence: Synthetic oligonucleotide
  Sense strand starting at position 1566 of SEQ ID NO: 1244892
auguccugcuugucauacu

SEQ ID NO: 1520775 - RNA, 19 nt, Artificial Sequence
  Description of Artificial Sequence: Synthetic oligonucleotide
  Antisense strand to SEQ ID NO: 1520774
aguaugacaagcaggacau

SEQ ID NO: 1520776 - RNA, 19 nt, Artificial Sequence
  Description of Artificial Sequence: Synthetic oligonucleotide
  Sense strand starting at position 1618 of SEQ ID NO: 1244892
guauguugcuguccuggga

SEQ ID NO: 1520777 - RNA, 19 nt, Artificial Sequence
  Description of Artificial Sequence: Synthetic oligonucleotide
  Antisense strand to SEQ ID NO: 1520776
ucccaggacagcaacauac

SEQ ID NO: 1520778 - RNA, 19 nt, Artificial Sequence
  Description of Artificial Sequence: Synthetic oligonucleotide
  Sense strand starting at position 1796 of SEQ ID NO: 1244892
ggucuuacccgggaccaga

SEQ ID NO: 1520779 - RNA, 19 nt, Artificial Sequence
  Description of Artificial Sequence: Synthetic oligonucleotide
  Antisense strand to SEQ ID NO: 1520778
ucuggucccggguaagacc

SEQ ID NO: 1520780 - RNA, 19 nt, Artificial Sequence
  Description of Artificial Sequence: Synthetic oligonucleotide
  Sense strand starting at position 2010 of SEQ ID NO: 1244892
cgcccaguugccuugguaa

SEQ ID NO: 1520781 - RNA, 19 nt, Artificial Sequence
  Description of Artificial Sequence: Synthetic oligonucleotide
  Antisense strand to SEQ ID NO: 1520780
uuaccaaggcaacugggcg

SEQ ID NO: 1520782 - RNA, 19 nt, Artificial Sequence
  Description of Artificial Sequence: Synthetic oligonucleotide
  Sense strand starting at position 2059 of SEQ ID NO: 1244892
ggaaauccucgcgagcagu

SEQ ID NO: 1520783 - RNA, 19 nt, Artificial Sequence
  Description of Artificial Sequence: Synthetic oligonucleotide
  Antisense strand to SEQ ID NO: 1520782
acugcucgcgaggauuucc

SEQ ID NO: 1520784 - RNA, 19 nt, Artificial Sequence
  Description of Artificial Sequence: Synthetic oligonucleotide
  Sense strand starting at position 2337 of SEQ ID NO: 1244892
aguuguggaucacuugaga

SEQ ID NO: 1520785 - RNA, 19 nt, Artificial Sequence
  Description of Artificial Sequence: Synthetic oligonucleotide
  Antisense strand to SEQ ID NO: 1520784
ucucaagugauccacaacu

SEQ ID NO: 1520786 - RNA, 19 nt, Artificial Sequence
  Description of Artificial Sequence: Synthetic oligonucleotide
  Sense strand starting at position 2449 of SEQ ID NO: 1244892
ccaagcugggccugagaaa

SEQ ID NO: 1520787 - RNA, 19 nt, Artificial Sequence
  Description of Artificial Sequence: Synthetic oligonucleotide
  Antisense strand to SEQ ID NO: 1520786
uuucucaggcccagcuugg

SEQ ID NO: 1520788 - RNA, 19 nt, Artificial Sequence
  Description of Artificial Sequence: Synthetic oligonucleotide
  Sense strand starting at position 2559 of SEQ ID NO: 1244892
ccugaaccuuccuugagga

SEQ ID NO: 1520789 - RNA, 19 nt, Artificial Sequence
  Description of Artificial Sequence: Synthetic oligonucleotide
  Antisense strand to SEQ ID NO: 1520788
uccucaaggaagguucagg

SEQ ID NO: 1520790 - RNA, 19 nt, Artificial Sequence
  Description of Artificial Sequence: Synthetic oligonucleotide
  Sense strand starting at position 2560 of SEQ ID NO: 1244892
cugaaccuuccuugaggaa

SEQ ID NO: 1520791 - RNA, 19 nt, Artificial Sequence
  Description of Artificial Sequence: Synthetic oligonucleotide
  Antisense strand to SEQ ID NO: 1520790
uuccucaaggaagguucag

SEQ ID NO: 1520792 - RNA, 19 nt, Artificial Sequence
  Description of Artificial Sequence: Synthetic oligonucleotide
  Sense strand starting at position 2593 of SEQ ID NO: 1244892
agacuacuuugcucaguuu

SEQ ID NO: 1520793 - RNA, 19 nt, Artificial Sequence
  Description of Artificial Sequence: Synthetic oligonucleotide
  Antisense strand to SEQ ID NO: 1520792
aaacugagcaaaguagucu

SEQ ID NO: 1520794 - RNA, 19 nt, Artificial Sequence
  Description of Artificial Sequence: Synthetic oligonucleotide
  Sense strand starting at position 2605 of SEQ ID NO: 1244892
ucaguuuggugagggauuu

SEQ ID NO: 1520795 - RNA, 19 nt, Artificial Sequence
  Description of Artificial Sequence: Synthetic oligonucleotide
  Antisense strand to SEQ ID NO: 1520794
aaaucccucaccaaacuga

SEQ ID NO: 1520796 - RNA, 19 nt, Artificial Sequence
  Description of Artificial Sequence: Synthetic oligonucleotide
  Sense strand starting at position 2639 of SEQ ID NO: 1244892
uggccagcguccuuaaacu

SEQ ID NO: 1520797 - RNA, 19 nt, Artificial Sequence
  Description of Artificial Sequence: Synthetic oligonucleotide
  Antisense strand to SEQ ID NO: 1520796
aguuuaaggacgcuggcca

SEQ ID NO: 1520798 - RNA, 19 nt, Artificial Sequence
  Description of Artificial Sequence: Synthetic oligonucleotide
  Sense strand starting at position 2889 of SEQ ID NO: 1244892
ucugaaaguucuuuaauug

SEQ ID NO: 1520799 - RNA, 19 nt, Artificial Sequence
  Description of Artificial Sequence: Synthetic oligonucleotide
  Antisense strand to SEQ ID NO: 1520798
caauuaaagaacuuucaga

SEQ ID NO: 1520800 - RNA, 19 nt, Artificial Sequence
  Description of Artificial Sequence: Synthetic oligonucleotide
  Sense strand starting at position 2898 of SEQ ID NO: 1244892
ucuuuaauugcugagucaa

SEQ ID NO: 1520801 - RNA, 19 nt, Artificial Sequence
  Description of Artificial Sequence: Synthetic oligonucleotide
  Antisense strand to SEQ ID NO: 1520800
uugacucagcaauuaaaga

SEQ ID NO: 1520802 - RNA, 19 nt, Artificial Sequence
  Description of Artificial Sequence: Synthetic oligonucleotide
  Sense strand starting at position 2900 of SEQ ID NO: 1244892
uuuaauugcugagucaagu

SEQ ID NO: 1520803 - RNA, 19 nt, Artificial Sequence
  Description of Artificial Sequence: Synthetic oligonucleotide
  Antisense strand to SEQ ID NO: 1520802
acuugacucagcaauuaaa

SEQ ID NO: 1520804 - RNA, 19 nt, Artificial Sequence
  Description of Artificial Sequence: Synthetic oligonucleotide
  Sense strand starting at position 3060 of SEQ ID NO: 1244892
guuuauugauuaccuagua

SEQ ID NO: 1520805 - RNA, 19 nt, Artificial Sequence
  Description of Artificial Sequence: Synthetic oligonucleotide
  Antisense strand to SEQ ID NO: 1520804
uacuagguaaucaauaaac

SEQ ID NO: 1520806 - RNA, 19 nt, Artificial Sequence
  Description of Artificial Sequence: Synthetic oligonucleotide
  Sense strand starting at position 3083 of SEQ ID NO: 1244892
uauucuagucagggagauc

SEQ ID NO: 1520807 - RNA, 19 nt, Artificial Sequence
  Description of Artificial Sequence: Synthetic oligonucleotide
  Antisense strand to SEQ ID NO: 1520806
gaucucccugacuagaaua

SEQ ID NO: 1520808 - RNA, 19 nt, Artificial Sequence
  Description of Artificial Sequence: Synthetic oligonucleotide
  Sense strand starting at position 3118 of SEQ ID NO: 1244892
acaaauaaauccguaagau

SEQ ID NO: 1520809 - RNA, 19 nt, Artificial Sequence
  Description of Artificial Sequence: Synthetic oligonucleotide
  Antisense strand to SEQ ID NO: 1520808
aucuuacggauuuauuugu

SEQ ID NO: 1520810 - RNA, 19 nt, Artificial Sequence
  Description of Artificial Sequence: Synthetic oligonucleotide
  Sense strand starting at position 139 of SEQ ID NO: 1244893
gagggcguauguuucuaau

SEQ ID NO: 1520811 - RNA, 19 nt, Artificial Sequence
  Description of Artificial Sequence: Synthetic oligonucleotide
  Antisense strand to SEQ ID NO: 1520810
auuagaaacauacgcccuc

SEQ ID NO: 1520812 - RNA, 19 nt, Artificial Sequence
  Description of Artificial Sequence: Synthetic oligonucleotide
  Sense strand starting at position 172 of SEQ ID NO: 1244893
acagguuauuucguauuac

SEQ ID NO: 1520813 - RNA, 19 nt, Artificial Sequence
  Description of Artificial Sequence: Synthetic oligonucleotide
  Antisense strand to SEQ ID NO: 1520812
guaauacgaaauaaccugu

SEQ ID NO: 1520814 - RNA, 19 nt, Artificial Sequence
  Description of Artificial Sequence: Synthetic oligonucleotide
  Sense strand starting at position 184 of SEQ ID NO: 1244893
guauuacuguuugcauuga

SEQ ID NO: 1520815 - RNA, 19 nt, Artificial Sequence
  Description of Artificial Sequence: Synthetic oligonucleotide
  Antisense strand to SEQ ID NO: 1520814
ucaaugcaaacaguaauac

SEQ ID NO: 1520816 - RNA, 19 nt, Artificial Sequence
  Description of Artificial Sequence: Synthetic oligonucleotide
  Sense strand starting at position 195 of SEQ ID NO: 1244893
ugcauugaauaucuugaaa

SEQ ID NO: 1520817 - RNA, 19 nt, Artificial Sequence
  Description of Artificial Sequence: Synthetic oligonucleotide
  Antisense strand to SEQ ID NO: 1520816
uuucaagauauucaaugca

SEQ ID NO: 1520818 - RNA, 19 nt, Artificial Sequence
  Description of Artificial Sequence: Synthetic oligonucleotide
  Sense strand starting at position 307 of SEQ ID NO: 1244893
guguguuuaccacugcuuu

SEQ ID NO: 1520819 - RNA, 19 nt, Artificial Sequence
  Description of Artificial Sequence: Synthetic oligonucleotide
  Antisense strand to SEQ ID NO: 1520818
aaagcagugguaaacacac

SEQ ID NO: 1520820 - RNA, 19 nt, Artificial Sequence
  Description of Artificial Sequence: Synthetic oligonucleotide
  Sense strand starting at position 357 of SEQ ID NO: 1244893
gcuggauaacugggcuaaa

SEQ ID NO: 1520821 - RNA, 19 nt, Artificial Sequence
  Description of Artificial Sequence: Synthetic oligonucleotide
  Antisense strand to SEQ ID NO: 1520820
uuuagcccaguuauccagc

SEQ ID NO: 1520822 - RNA, 19 nt, Artificial Sequence
  Description of Artificial Sequence: Synthetic oligonucleotide
  Sense strand starting at position 423 of SEQ ID NO: 1244893
ggaagaaucuucccagcug

SEQ ID NO: 1520823 - RNA, 19 nt, Artificial Sequence
  Description of Artificial Sequence: Synthetic oligonucleotide
  Antisense strand to SEQ ID NO: 1520822
cagcugggaagauucuucc

SEQ ID NO: 1520824 - RNA, 19 nt, Artificial Sequence
  Description of Artificial Sequence: Synthetic oligonucleotide
  Sense strand starting at position 627 of SEQ ID NO: 1244893
agcuuuagcggacaguuaa

SEQ ID NO: 1520825 - RNA, 19 nt, Artificial Sequence
  Description of Artificial Sequence: Synthetic oligonucleotide
  Antisense strand to SEQ ID NO: 1520824
uuaacuguccgcuaaagcu

SEQ ID NO: 1520826 - RNA, 19 nt, Artificial Sequence
  Description of Artificial Sequence: Synthetic oligonucleotide
  Sense strand starting at position 703 of SEQ ID NO: 1244893
agugguuuccacuagcuga

SEQ ID NO: 1520827 - RNA, 19 nt, Artificial Sequence
  Description of Artificial Sequence: Synthetic oligonucleotide
  Antisense strand to SEQ ID NO: 1520826
ucagcuaguggaaaccacu

SEQ ID NO: 1520828 - RNA, 19 nt, Artificial Sequence
  Description of Artificial Sequence: Synthetic oligonucleotide
  Sense strand starting at position 931 of SEQ ID NO: 1244893
agaaucuucccucgaggaa

SEQ ID NO: 1520829 - RNA, 19 nt, Artificial Sequence
  Description of Artificial Sequence: Synthetic oligonucleotide
  Antisense strand to SEQ ID NO: 1520828
uuccucgagggaagauucu

SEQ ID NO: 1520830 - RNA, 19 nt, Artificial Sequence
  Description of Artificial Sequence: Synthetic oligonucleotide
  Sense strand starting at position 989 of SEQ ID NO: 1244893
agcuaaagcucccuaguaa

SEQ ID NO: 1520831 - RNA, 19 nt, Artificial Sequence
  Description of Artificial Sequence: Synthetic oligonucleotide
  Antisense strand to SEQ ID NO: 1520830
uuacuagggagcuuuagcu

SEQ ID NO: 1520832 - RNA, 19 nt, Artificial Sequence
  Description of Artificial Sequence: Synthetic oligonucleotide
  Sense strand starting at position 990 of SEQ ID NO: 1244893
gcuaaagcucccuaguaaa

SEQ ID NO: 1520833 - RNA, 19 nt, Artificial Sequence
  Description of Artificial Sequence: Synthetic oligonucleotide
  Antisense strand to SEQ ID NO: 1520832
uuuacuagggagcuuuagc

SEQ ID NO: 1520834 - RNA, 19 nt, Artificial Sequence
  Description of Artificial Sequence: Synthetic oligonucleotide
  Sense strand starting at position 1001 of SEQ ID NO: 1244893
cuaguaaacgugcagauca

SEQ ID NO: 1520835 - RNA, 19 nt, Artificial Sequence
  Description of Artificial Sequence: Synthetic oligonucleotide
  Antisense strand to SEQ ID NO: 1520834
ugaucugcacguuuacuag

SEQ ID NO: 1520836 - RNA, 19 nt, Artificial Sequence
  Description of Artificial Sequence: Synthetic oligonucleotide
  Sense strand starting at position 1003 of SEQ ID NO: 1244893
aguaaacgugcagaucaaa

SEQ ID NO: 1520837 - RNA, 19 nt, Artificial Sequence
  Description of Artificial Sequence: Synthetic oligonucleotide
  Antisense strand to SEQ ID NO: 1520836
uuugaucugcacguuuacu

SEQ ID NO: 1520838 - RNA, 19 nt, Artificial Sequence
  Description of Artificial Sequence: Synthetic oligonucleotide
  Sense strand starting at position 1739 of SEQ ID NO: 1244893
gcccguaguccuucugcga

SEQ ID NO: 1520839 - RNA, 19 nt, Artificial Sequence
  Description of Artificial Sequence: Synthetic oligonucleotide
  Antisense strand to SEQ ID NO: 1520838
ucgcagaaggacuacgggc

SEQ ID NO: 1520840 - RNA, 19 nt, Artificial Sequence
  Description of Artificial Sequence: Synthetic oligonucleotide
  Sense strand starting at position 1788 of SEQ ID NO: 1244893
ucgagcauuucugaagaaa

SEQ ID NO: 1520841 - RNA, 19 nt, Artificial Sequence
  Description of Artificial Sequence: Synthetic oligonucleotide
  Antisense strand to SEQ ID NO: 1520840
uuucuucagaaaugcucga

SEQ ID NO: 1520842 - RNA, 19 nt, Artificial Sequence
  Description of Artificial Sequence: Synthetic oligonucleotide
  Sense strand starting at position 1852 of SEQ ID NO: 1244893
accgguagguccuugaguu

SEQ ID NO: 1520843 - RNA, 19 nt, Artificial Sequence
  Description of Artificial Sequence: Synthetic oligonucleotide
  Antisense strand to SEQ ID NO: 1520842
aacucaaggaccuaccggu

SEQ ID NO: 1520844 - RNA, 19 nt, Artificial Sequence
  Description of Artificial Sequence: Synthetic oligonucleotide
  Sense strand starting at position 2257 of SEQ ID NO: 1244893
ggaauagcuguaugauaac

SEQ ID NO: 1520845 - RNA, 19 nt, Artificial Sequence
  Description of Artificial Sequence: Synthetic oligonucleotide
  Antisense strand to SEQ ID NO: 1520844
guuaucauacagcuauucc

SEQ ID NO: 1520846 - RNA, 19 nt, Artificial Sequence
  Description of Artificial Sequence: Synthetic oligonucleotide
  Sense strand starting at position 2382 of SEQ ID NO: 1244893
cggcauaaucucgggaucu

SEQ ID NO: 1520847 - RNA, 19 nt, Artificial Sequence
  Description of Artificial Sequence: Synthetic oligonucleotide
  Antisense strand to SEQ ID NO: 1520846
agaucccgagauuaugccg

SEQ ID NO: 1520848 - RNA, 19 nt, Artificial Sequence
  Description of Artificial Sequence: Synthetic oligonucleotide
  Sense strand starting at position 2384 of SEQ ID NO: 1244893
gcauaaucucgggaucuuu

SEQ ID NO: 1520849 - RNA, 19 nt, Artificial Sequence
  Description of Artificial Sequence: Synthetic oligonucleotide
  Antisense strand to SEQ ID NO: 1520848
aaagaucccgagauuaugc

SEQ ID NO: 1520850 - RNA, 19 nt, Artificial Sequence
  Description of Artificial Sequence: Synthetic oligonucleotide
  Sense strand starting at position 2394 of SEQ ID NO: 1244893
gggaucuuugaaggcagau

SEQ ID NO: 1520851 - RNA, 19 nt, Artificial Sequence
  Description of Artificial Sequence: Synthetic oligonucleotide
  Antisense strand to SEQ ID NO: 1520850
aucugccuucaaagauccc

SEQ ID NO: 1520852 - RNA, 19 nt, Artificial Sequence
  Description of Artificial Sequence: Synthetic oligonucleotide
  Sense strand starting at position 2481 of SEQ ID NO: 1244893
gcuguaacgagucaaaguc

SEQ ID NO: 1520853 - RNA, 19 nt, Artificial Sequence
  Description of Artificial Sequence: Synthetic oligonucleotide
  Antisense strand to SEQ ID NO: 1520852
gacuuugacucguuacagc

SEQ ID NO: 1520854 - RNA, 19 nt, Artificial Sequence
  Description of Artificial Sequence: Synthetic oligonucleotide
  Sense strand starting at position 2520 of SEQ ID NO: 1244893
cagagauucccaggugcug

SEQ ID NO: 1520855 - RNA, 19 nt, Artificial Sequence
  Description of Artificial Sequence: Synthetic oligonucleotide
  Antisense strand to SEQ ID NO: 1520854
cagcaccugggaaucucug

SEQ ID NO: 1520856 - RNA, 19 nt, Artificial Sequence
  Description of Artificial Sequence: Synthetic oligonucleotide
  Sense strand starting at position 2569 of SEQ ID NO: 1244893
ucucuuacaguuugugaac

SEQ ID NO: 1520857 - RNA, 19 nt, Artificial Sequence
  Description of Artificial Sequence: Synthetic oligonucleotide
  Antisense strand to SEQ ID NO: 1520856
guucacaaacuguaagaga

SEQ ID NO: 1520858 - RNA, 19 nt, Artificial Sequence
  Description of Artificial Sequence: Synthetic oligonucleotide
  Sense strand starting at position 2610 of SEQ ID NO: 1244893
cacagacaacguugcuaaa

SEQ ID NO: 1520859 - RNA, 19 nt, Artificial Sequence
  Description of Artificial Sequence: Synthetic oligonucleotide
  Antisense strand to SEQ ID NO: 1520858
uuuagcaacguugucugug

SEQ ID NO: 1520860 - RNA, 19 nt, Artificial Sequence
  Description of Artificial Sequence: Synthetic oligonucleotide
  Sense strand starting at position 2803 of SEQ ID NO: 1244893
uguugaggauuccuuucga

SEQ ID NO: 1520861 - RNA, 19 nt, Artificial Sequence
  Description of Artificial Sequence: Synthetic oligonucleotide
  Antisense strand to SEQ ID NO: 1520860
ucgaaaggaauccucaaca

SEQ ID NO: 1520862 - RNA, 19 nt, Artificial Sequence
  Description of Artificial Sequence: Synthetic oligonucleotide
  Sense strand starting at position 2884 of SEQ ID NO: 1244893
ucaccuacagugugugauu

SEQ ID NO: 1520863 - RNA, 19 nt, Artificial Sequence
  Description of Artificial Sequence: Synthetic oligonucleotide
  Antisense strand to SEQ ID NO: 1520862
aaucacacacuguagguga

SEQ ID NO: 1520864 - RNA, 19 nt, Artificial Sequence
  Description of Artificial Sequence: Synthetic oligonucleotide
  Sense strand starting at position 3009 of SEQ ID NO: 1244893
uucagaggguuugcagaua

SEQ ID NO: 1520865 - RNA, 19 nt, Artificial Sequence
  Description of Artificial Sequence: Synthetic oligonucleotide
  Antisense strand to SEQ ID NO: 1520864
uaucugcaaacccucugaa

SEQ ID NO: 1520866 - RNA, 19 nt, Artificial Sequence
  Description of Artificial Sequence: Synthetic oligonucleotide
  Sense strand starting at position 3029 of SEQ ID NO: 1244893
guagauguucuaugcuuua

SEQ ID NO: 1520867 - RNA, 19 nt, Artificial Sequence
  Description of Artificial Sequence: Synthetic oligonucleotide
  Antisense strand to SEQ ID NO: 1520866
uaaagcauagaacaucuac

SEQ ID NO: 1520868 - RNA, 19 nt, Artificial Sequence
  Description of Artificial Sequence: Synthetic oligonucleotide
  Sense strand starting at position 3403 of SEQ ID NO: 1244893
guaccugucuggucucuaa

SEQ ID NO: 1520869 - RNA, 19 nt, Artificial Sequence
  Description of Artificial Sequence: Synthetic oligonucleotide
  Antisense strand to SEQ ID NO: 1520868
uuagagaccagacagguac

SEQ ID NO: 1520870 - RNA, 19 nt, Artificial Sequence
  Description of Artificial Sequence: Synthetic oligonucleotide
  Sense strand starting at position 3495 of SEQ ID NO: 1244893
uuaacaguuccaugguaug

SEQ ID NO: 1520871 - RNA, 19 nt, Artificial Sequence
  Description of Artificial Sequence: Synthetic oligonucleotide
  Antisense strand to SEQ ID NO: 1520870
cauaccauggaacuguuaa

SEQ ID NO: 1520872 - RNA, 19 nt, Artificial Sequence
  Description of Artificial Sequence: Synthetic oligonucleotide
  Sense strand starting at position 3539 of SEQ ID NO: 1244893
uuuguaucaguguggugau

SEQ ID NO: 1520873 - RNA, 19 nt, Artificial Sequence
  Description of Artificial Sequence: Synthetic oligonucleotide
  Antisense strand to SEQ ID NO: 1520872
aucaccacacugauacaaa

SEQ ID NO: 1520874 - RNA, 19 nt, Artificial Sequence
  Description of Artificial Sequence: Synthetic oligonucleotide
  Sense strand starting at position 3552 of SEQ ID NO: 1244893
ggugauucagaggguauac

SEQ ID NO: 1520875 - RNA, 19 nt, Artificial Sequence
  Description of Artificial Sequence: Synthetic oligonucleotide
  Antisense strand to SEQ ID NO: 1520874
guauacccucugaaucacc

SEQ ID NO: 1520876 - RNA, 19 nt, Artificial Sequence
  Description of Artificial Sequence: Synthetic oligonucleotide
  Sense strand starting at position 3573 of SEQ ID NO: 1244893
gggauucuagaacgcacuu

SEQ ID NO: 1520877 - RNA, 19 nt, Artificial Sequence
  Description of Artificial Sequence: Synthetic oligonucleotide
  Antisense strand to SEQ ID NO: 1520876
aagugcguucuagaauccc

SEQ ID NO: 1520878 - RNA, 19 nt, Artificial Sequence
  Description of Artificial Sequence: Synthetic oligonucleotide
  Sense strand starting at position 3606 of SEQ ID NO: 1244893
gcuuguguaacuucuguuu

SEQ ID NO: 1520879 - RNA, 19 nt, Artificial Sequence
  Description of Artificial Sequence: Synthetic oligonucleotide
  Antisense strand to SEQ ID NO: 1520878
aaacagaaguuacacaagc

SEQ ID NO: 1520880 - RNA, 19 nt, Artificial Sequence
  Description of Artificial Sequence: Synthetic oligonucleotide
  Sense strand starting at position 3637 of SEQ ID NO: 1244893
guuuguaucaugggaugau

SEQ ID NO: 1520881 - RNA, 19 nt, Artificial Sequence
  Description of Artificial Sequence: Synthetic oligonucleotide
  Antisense strand to SEQ ID NO: 1520880
aucaucccaugauacaaac

SEQ ID NO: 1520882 - RNA, 19 nt, Artificial Sequence
  Description of Artificial Sequence: Synthetic oligonucleotide
  Sense strand starting at position 3640 of SEQ ID NO: 1244893
uguaucaugggaugauagu

SEQ ID NO: 1520883 - RNA, 19 nt, Artificial Sequence
  Description of Artificial Sequence: Synthetic oligonucleotide
  Antisense strand to SEQ ID NO: 1520882
acuaucaucccaugauaca

SEQ ID NO: 1520884 - RNA, 19 nt, Artificial Sequence
  Description of Artificial Sequence: Synthetic oligonucleotide
  Sense strand starting at position 3679 of SEQ ID NO: 1244893
gguauuucaugaggugaua

SEQ ID NO: 1520885 - RNA, 19 nt, Artificial Sequence
  Description of Artificial Sequence: Synthetic oligonucleotide
  Antisense strand to SEQ ID NO: 1520884
uaucaccucaugaaauacc

SEQ ID NO: 1520886 - RNA, 19 nt, Artificial Sequence
  Description of Artificial Sequence: Synthetic oligonucleotide
  Sense strand starting at position 3690 of SEQ ID NO: 1244893
aggugauacguguauggag

SEQ ID NO: 1520887 - RNA, 19 nt, Artificial Sequence
  Description of Artificial Sequence: Synthetic oligonucleotide
  Antisense strand to SEQ ID NO: 1520886
cuccauacacguaucaccu

SEQ ID NO: 1520888 - RNA, 19 nt, Artificial Sequence
  Description of Artificial Sequence: Synthetic oligonucleotide
  Sense strand starting at position 3729 of SEQ ID NO: 1244893
uuaagugaucuacaucuug

SEQ ID NO: 1520889 - RNA, 19 nt, Artificial Sequence
  Description of Artificial Sequence: Synthetic oligonucleotide
  Antisense strand to SEQ ID NO: 1520888
caagauguagaucacuuaa

SEQ ID NO: 1520890 - RNA, 19 nt, Artificial Sequence
  Description of Artificial Sequence: Synthetic oligonucleotide
  Sense strand starting at position 169 of SEQ ID NO: 1244894
gccuauuccucccauagag

SEQ ID NO: 1520891 - RNA, 19 nt, Artificial Sequence
  Description of Artificial Sequence: Synthetic oligonucleotide
  Antisense strand to SEQ ID NO: 1520890
cucuaugggaggaauaggc

SEQ ID NO: 1520892 - RNA, 19 nt, Artificial Sequence
  Description of Artificial Sequence: Synthetic oligonucleotide
  Sense strand starting at position 179 of SEQ ID NO: 1244894
cccauagagaacugagguu

SEQ ID NO: 1520893 - RNA, 19 nt, Artificial Sequence
  Description of Artificial Sequence: Synthetic oligonucleotide
  Antisense strand to SEQ ID NO: 1520892
aaccucaguucucuauggg

SEQ ID NO: 1520894 - RNA, 19 nt, Artificial Sequence
  Description of Artificial Sequence: Synthetic oligonucleotide
  Sense strand starting at position 195 of SEQ ID NO: 1244894
guuagcugucucuggugaa

SEQ ID NO: 1520895 - RNA, 19 nt, Artificial Sequence
  Description of Artificial Sequence: Synthetic oligonucleotide
  Antisense strand to SEQ ID NO: 1520894
uucaccagagacagcuaac

SEQ ID NO: 1520896 - RNA, 19 nt, Artificial Sequence
  Description of Artificial Sequence: Synthetic oligonucleotide
  Sense strand starting at position 196 of SEQ ID NO: 1244894
uuagcugucucuggugaac

SEQ ID NO: 1520897 - RNA, 19 nt, Artificial Sequence
  Description of Artificial Sequence: Synthetic oligonucleotide
  Antisense strand to SEQ ID NO: 1520896
guucaccagagacagcuaa

SEQ ID NO: 1520898 - RNA, 19 nt, Artificial Sequence
  Description of Artificial Sequence: Synthetic oligonucleotide
  Sense strand starting at position 198 of SEQ ID NO: 1244894
agcugucucuggugaacug

SEQ ID NO: 1520899 - RNA, 19 nt, Artificial Sequence
  Description of Artificial Sequence: Synthetic oligonucleotide
  Antisense strand to SEQ ID NO: 1520898
caguucaccagagacagcu

SEQ ID NO: 1520900 - RNA, 19 nt, Artificial Sequence
  Description of Artificial Sequence: Synthetic oligonucleotide
  Sense strand starting at position 199 of SEQ ID NO: 1244894
gcugucucuggugaacuga

SEQ ID NO: 1520901 - RNA, 19 nt, Artificial Sequence
  Description of Artificial Sequence: Synthetic oligonucleotide
  Antisense strand to SEQ ID NO: 1520900
ucaguucaccagagacagc

SEQ ID NO: 1520902 - RNA, 19 nt, Artificial Sequence
  Description of Artificial Sequence: Synthetic oligonucleotide
  Sense strand starting at position 240 of SEQ ID NO: 1244894
guuaccucagccgggaaua

SEQ ID NO: 1520903 - RNA, 19 nt, Artificial Sequence
  Description of Artificial Sequence: Synthetic oligonucleotide
  Antisense strand to SEQ ID NO: 1520902
uauucccggcugagguaac

SEQ ID NO: 1520904 - RNA, 19 nt, Artificial Sequence
  Description of Artificial Sequence: Synthetic oligonucleotide
  Sense strand starting at position 241 of SEQ ID NO: 1244894
uuaccucagccgggaauaa

SEQ ID NO: 1520905 - RNA, 19 nt, Artificial Sequence
  Description of Artificial Sequence: Synthetic oligonucleotide
  Antisense strand to SEQ ID NO: 1520904
uuauucccggcugagguaa

SEQ ID NO: 1520906 - RNA, 19 nt, Artificial Sequence
  Description of Artificial Sequence: Synthetic oligonucleotide
  Sense strand starting at position 368 of SEQ ID NO: 1244894
gcgcuuuggucagggugaa

SEQ ID NO: 1520907 - RNA, 19 nt, Artificial Sequence
  Description of Artificial Sequence: Synthetic oligonucleotide
  Antisense strand to SEQ ID NO: 1520906
uucacccugaccaaagcgc

SEQ ID NO: 1520908 - RNA, 19 nt, Artificial Sequence
  Description of Artificial Sequence: Synthetic oligonucleotide
  Sense strand starting at position 369 of SEQ ID NO: 1244894
cgcuuuggucagggugaaa

SEQ ID NO: 1520909 - RNA, 19 nt, Artificial Sequence
  Description of Artificial Sequence: Synthetic oligonucleotide
  Antisense strand to SEQ ID NO: 1520908
uuucacccugaccaaagcg

SEQ ID NO: 1520910 - RNA, 19 nt, Artificial Sequence
  Description of Artificial Sequence: Synthetic oligonucleotide
  Sense strand starting at position 603 of SEQ ID NO: 1244894
acgccuugcugguuaagaa

SEQ ID NO: 1520911 - RNA, 19 nt, Artificial Sequence
  Description of Artificial Sequence: Synthetic oligonucleotide
  Antisense strand to SEQ ID NO: 1520910
uucuuaaccagcaaggcgu

SEQ ID NO: 1520912 - RNA, 19 nt, Artificial Sequence
  Description of Artificial Sequence: Synthetic oligonucleotide
  Sense strand starting at position 604 of SEQ ID NO: 1244894
cgccuugcugguuaagaaa

SEQ ID NO: 1520913 - RNA, 19 nt, Artificial Sequence
  Description of Artificial Sequence: Synthetic oligonucleotide
  Antisense strand to SEQ ID NO: 1520912
uuucuuaaccagcaaggcg

SEQ ID NO: 1520914 - RNA, 19 nt, Artificial Sequence
  Description of Artificial Sequence: Synthetic oligonucleotide
  Sense strand starting at position 1306 of SEQ ID NO: 1244894
cuagauuuccgugggcgga

SEQ ID NO: 1520915 - RNA, 19 nt, Artificial Sequence
  Description of Artificial Sequence: Synthetic oligonucleotide
  Antisense strand to SEQ ID NO: 1520914
uccgcccacggaaaucuag

SEQ ID NO: 1520916 - RNA, 19 nt, Artificial Sequence
  Description of Artificial Sequence: Synthetic oligonucleotide
  Sense strand starting at position 2108 of SEQ ID NO: 1244894
guaguaaccgcacauggau

SEQ ID NO: 1520917 - RNA, 19 nt, Artificial Sequence
  Description of Artificial Sequence: Synthetic oligonucleotide
  Antisense strand to SEQ ID NO: 1520916
auccaugugcgguuacuac

SEQ ID NO: 1520918 - RNA, 19 nt, Artificial Sequence
  Description of Artificial Sequence: Synthetic oligonucleotide
  Sense strand starting at position 2196 of SEQ ID NO: 1244894
ugcugucuuucucaaagaa

SEQ ID NO: 1520919 - RNA, 19 nt, Artificial Sequence
  Description of Artificial Sequence: Synthetic oligonucleotide
  Antisense strand to SEQ ID NO: 1520918
uucuuugagaaagacagca

SEQ ID NO: 1520920 - RNA, 19 nt, Artificial Sequence
  Description of Artificial Sequence: Synthetic oligonucleotide
  Sense strand starting at position 2233 of SEQ ID NO: 1244894
uuuaauccaucuggagaag

SEQ ID NO: 1520921 - RNA, 19 nt, Artificial Sequence
  Description of Artificial Sequence: Synthetic oligonucleotide
  Antisense strand to SEQ ID NO: 1520920
cuucuccagauggauuaaa

SEQ ID NO: 1520922 - RNA, 19 nt, Artificial Sequence
  Description of Artificial Sequence: Synthetic oligonucleotide
  Sense strand starting at position 2381 of SEQ ID NO: 1244894
gcgcuuucuccagucugga

SEQ ID NO: 1520923 - RNA, 19 nt, Artificial Sequence
  Description of Artificial Sequence: Synthetic oligonucleotide
  Antisense strand to SEQ ID NO: 1520922
uccagacuggagaaagcgc

SEQ ID NO: 1520924 - RNA, 19 nt, Artificial Sequence
  Description of Artificial Sequence: Synthetic oligonucleotide
  Sense strand starting at position 2594 of SEQ ID NO: 1244894
gaccauaaacgcuguaaga

SEQ ID NO: 1520925 - RNA, 19 nt, Artificial Sequence
  Description of Artificial Sequence: Synthetic oligonucleotide
  Antisense strand to SEQ ID NO: 1520924
ucuuacagcguuuaugguc

SEQ ID NO: 1520926 - RNA, 19 nt, Artificial Sequence
  Description of Artificial Sequence: Synthetic oligonucleotide
  Sense strand starting at position 2596 of SEQ ID NO: 1244894
ccauaaacgcuguaagaug

SEQ ID NO: 1520927 - RNA, 19 nt, Artificial Sequence
  Description of Artificial Sequence: Synthetic oligonucleotide
  Antisense strand to SEQ ID NO: 1520926
caucuuacagcguuuaugg

SEQ ID NO: 1520928 - RNA, 19 nt, Artificial Sequence
  Description of Artificial Sequence: Synthetic oligonucleotide
  Sense strand starting at position 3148 of SEQ ID NO: 1244894
gcugcuccgccguaaauga

SEQ ID NO: 1520929 - RNA, 19 nt, Artificial Sequence
  Description of Artificial Sequence: Synthetic oligonucleotide
  Antisense strand to SEQ ID NO: 1520928
ucauuuacggcggagcagc

SEQ ID NO: 1520930 - RNA, 19 nt, Artificial Sequence
  Description of Artificial Sequence: Synthetic oligonucleotide
  Sense strand starting at position 3155 of SEQ ID NO: 1244894
cgccguaaaugacucgaga

SEQ ID NO: 1520931 - RNA, 19 nt, Artificial Sequence
  Description of Artificial Sequence: Synthetic oligonucleotide
  Antisense strand to SEQ ID NO: 1520930
ucucgagucauuuacggcg

SEQ ID NO: 1520932 - RNA, 19 nt, Artificial Sequence
  Description of Artificial Sequence: Synthetic oligonucleotide
  Sense strand starting at position 3157 of SEQ ID NO: 1244894
ccguaaaugacucgagaga

SEQ ID NO: 1520933 - RNA, 19 nt, Artificial Sequence
  Description of Artificial Sequence: Synthetic oligonucleotide
  Antisense strand to SEQ ID NO: 1520932
ucucucgagucauuuacgg

SEQ ID NO: 1520934 - RNA, 19 nt, Artificial Sequence
  Description of Artificial Sequence: Synthetic oligonucleotide
  Sense strand starting at position 3158 of SEQ ID NO: 1244894
cguaaaugacucgagagag

SEQ ID NO: 1520935 - RNA, 19 nt, Artificial Sequence
  Description of Artificial Sequence: Synthetic oligonucleotide
  Antisense strand to SEQ ID NO: 1520934
cucucucgagucauuuacg

SEQ ID NO: 1520936 - RNA, 19 nt, Artificial Sequence
  Description of Artificial Sequence: Synthetic oligonucleotide
  Sense strand starting at position 3409 of SEQ ID NO: 1244894
gcggcuccuuaaugagacu

SEQ ID NO: 1520937 - RNA, 19 nt, Artificial Sequence
  Description of Artificial Sequence: Synthetic oligonucleotide
  Antisense strand to SEQ ID NO: 1520936
agucucauuaaggagccgc

SEQ ID NO: 1520938 - RNA, 19 nt, Artificial Sequence
  Description of Artificial Sequence: Synthetic oligonucleotide
  Sense strand starting at position 3561 of SEQ ID NO: 1244894
ugcguuucuccaggguaga

SEQ ID NO: 1520939 - RNA, 19 nt, Artificial Sequence
  Description of Artificial Sequence: Synthetic oligonucleotide
  Antisense strand to SEQ ID NO: 1520938
ucuacccuggagaaacgca

SEQ ID NO: 1520940 - RNA, 19 nt, Artificial Sequence
  Description of Artificial Sequence: Synthetic oligonucleotide
  Sense strand starting at position 3562 of SEQ ID NO: 1244894
gcguuucuccaggguagac

SEQ ID NO: 1520941 - RNA, 19 nt, Artificial Sequence
  Description of Artificial Sequence: Synthetic oligonucleotide
  Antisense strand to SEQ ID NO: 1520940
gucuacccuggagaaacgc

SEQ ID NO: 1520942 - RNA, 19 nt, Artificial Sequence
  Description of Artificial Sequence: Synthetic oligonucleotide
  Sense strand starting at position 3885 of SEQ ID NO: 1244894
uuagcaagccuuuaaagag

SEQ ID NO: 1520943 - RNA, 19 nt, Artificial Sequence
  Description of Artificial Sequence: Synthetic oligonucleotide
  Antisense strand to SEQ ID NO: 1520942
cucuuuaaaggcuugcuaa

SEQ ID NO: 1520944 - RNA, 19 nt, Artificial Sequence
  Description of Artificial Sequence: Synthetic oligonucleotide
  Sense strand starting at position 3983 of SEQ ID NO: 1244894
ugauaucuguucccaccau

SEQ ID NO: 1520945 - RNA, 19 nt, Artificial Sequence
  Description of Artificial Sequence: Synthetic oligonucleotide
  Antisense strand to SEQ ID NO: 1520944
auggugggaacagauauca

SEQ ID NO: 1520946 - RNA, 19 nt, Artificial Sequence
  Description of Artificial Sequence: Synthetic oligonucleotide
  Sense strand starting at position 85 of SEQ ID NO: 1244895
cccagagucucagugaaug

SEQ ID NO: 1520947 - RNA, 19 nt, Artificial Sequence
  Description of Artificial Sequence: Synthetic oligonucleotide
  Antisense strand to SEQ ID NO: 1520946
cauucacugagacucuggg

SEQ ID NO: 1520948 - RNA, 19 nt, Artificial Sequence
  Description of Artificial Sequence: Synthetic oligonucleotide
  Sense strand starting at position 134 of SEQ ID NO: 1244895
uuccuauggucccugaaca

SEQ ID NO: 1520949 - RNA, 19 nt, Artificial Sequence
  Description of Artificial Sequence: Synthetic oligonucleotide
  Antisense strand to SEQ ID NO: 1520948
uguucagggaccauaggaa

SEQ ID NO: 1520950 - RNA, 19 nt, Artificial Sequence
  Description of Artificial Sequence: Synthetic oligonucleotide
  Sense strand starting at position 246 of SEQ ID NO: 1244895
agagcauguccuuaccuga

SEQ ID NO: 1520951 - RNA, 19 nt, Artificial Sequence
  Description of Artificial Sequence: Synthetic oligonucleotide
  Antisense strand to SEQ ID NO: 1520950
ucagguaaggacaugcucu

SEQ ID NO: 1520952 - RNA, 19 nt, Artificial Sequence
  Description of Artificial Sequence: Synthetic oligonucleotide
  Sense strand starting at position 249 of SEQ ID NO: 1244895
gcauguccuuaccugacaa

SEQ ID NO: 1520953 - RNA, 19 nt, Artificial Sequence
  Description of Artificial Sequence: Synthetic oligonucleotide
  Antisense strand to SEQ ID NO: 1520952
uugucagguaaggacaugc

SEQ ID NO: 1520954 - RNA, 19 nt, Artificial Sequence
  Description of Artificial Sequence: Synthetic oligonucleotide
  Sense strand starting at position 251 of SEQ ID NO: 1244895
auguccuuaccugacaagu

SEQ ID NO: 1520955 - RNA, 19 nt, Artificial Sequence
  Description of Artificial Sequence: Synthetic oligonucleotide
  Antisense strand to SEQ ID NO: 1520954
acuugucagguaaggacau

SEQ ID NO: 1520956 - RNA, 19 nt, Artificial Sequence
  Description of Artificial Sequence: Synthetic oligonucleotide
  Sense strand starting at position 383 of SEQ ID NO: 1244895
auucccagcuuguuagaaa

SEQ ID NO: 1520957 - RNA, 19 nt, Artificial Sequence
  Description of Artificial Sequence: Synthetic oligonucleotide
  Antisense strand to SEQ ID NO: 1520956
uuucuaacaagcugggaau

SEQ ID NO: 1520958 - RNA, 19 nt, Artificial Sequence
  Description of Artificial Sequence: Synthetic oligonucleotide
  Sense strand starting at position 467 of SEQ ID NO: 1244895
gucguaacuccagugcuuu

SEQ ID NO: 1520959 - RNA, 19 nt, Artificial Sequence
  Description of Artificial Sequence: Synthetic oligonucleotide
  Antisense strand to SEQ ID NO: 1520958
aaagcacuggaguuacgac

SEQ ID NO: 1520960 - RNA, 19 nt, Artificial Sequence
  Description of Artificial Sequence: Synthetic oligonucleotide
  Sense strand starting at position 742 of SEQ ID NO: 1244895
uuuggaaucugagaagaaa

SEQ ID NO: 1520961 - RNA, 19 nt, Artificial Sequence
  Description of Artificial Sequence: Synthetic oligonucleotide
  Antisense strand to SEQ ID NO: 1520960
uuucuucucagauuccaaa

SEQ ID NO: 1520962 - RNA, 19 nt, Artificial Sequence
  Description of Artificial Sequence: Synthetic oligonucleotide
  Sense strand starting at position 849 of SEQ ID NO: 1244895
gggccaucucuacauuaau

SEQ ID NO: 1520963 - RNA, 19 nt, Artificial Sequence
  Description of Artificial Sequence: Synthetic oligonucleotide
  Antisense strand to SEQ ID NO: 1520962
auuaauguagagauggccc

SEQ ID NO: 1520964 - RNA, 19 nt, Artificial Sequence
  Description of Artificial Sequence: Synthetic oligonucleotide
  Sense strand starting at position 903 of SEQ ID NO: 1244895
uggauaauuccauguaggu

SEQ ID NO: 1520965 - RNA, 19 nt, Artificial Sequence
  Description of Artificial Sequence: Synthetic oligonucleotide
  Antisense strand to SEQ ID NO: 1520964
accuacauggaauuaucca

SEQ ID NO: 1520966 - RNA, 19 nt, Artificial Sequence
  Description of Artificial Sequence: Synthetic oligonucleotide
  Sense strand starting at position 1007 of SEQ ID NO: 1244895
gugccuuuggguuagauca

SEQ ID NO: 1520967 - RNA, 19 nt, Artificial Sequence
  Description of Artificial Sequence: Synthetic oligonucleotide
  Antisense strand to SEQ ID NO: 1520966
ugaucuaacccaaaggcac

SEQ ID NO: 1520968 - RNA, 19 nt, Artificial Sequence
  Description of Artificial Sequence: Synthetic oligonucleotide
  Sense strand starting at position 1024 of SEQ ID NO: 1244895
caguucuguggccacaaca

SEQ ID NO: 1520969 - RNA, 19 nt, Artificial Sequence
  Description of Artificial Sequence: Synthetic oligonucleotide
  Antisense strand to SEQ ID NO: 1520968
uguuguggccacagaacug

SEQ ID NO: 1520970 - RNA, 19 nt, Artificial Sequence
  Description of Artificial Sequence: Synthetic oligonucleotide
  Sense strand starting at position 1061 of SEQ ID NO: 1244895
uuaggucauagugaugcua

SEQ ID NO: 1520971 - RNA, 19 nt, Artificial Sequence
  Description of Artificial Sequence: Synthetic oligonucleotide
  Antisense strand to SEQ ID NO: 1520970
uagcaucacuaugaccuaa

SEQ ID NO: 1520972 - RNA, 19 nt, Artificial Sequence
  Description of Artificial Sequence: Synthetic oligonucleotide
  Sense strand starting at position 1074 of SEQ ID NO: 1244895
augcuaaaugcucagagga

SEQ ID NO: 1520973 - RNA, 19 nt, Artificial Sequence
  Description of Artificial Sequence: Synthetic oligonucleotide
  Antisense strand to SEQ ID NO: 1520972
uccucugagcauuuagcau

SEQ ID NO: 1520974 - RNA, 19 nt, Artificial Sequence
  Description of Artificial Sequence: Synthetic oligonucleotide
  Sense strand starting at position 1134 of SEQ ID NO: 1244895
cuaauaauugagcagucua

SEQ ID NO: 1520975 - RNA, 19 nt, Artificial Sequence
  Description of Artificial Sequence: Synthetic oligonucleotide
  Antisense strand to SEQ ID NO: 1520974
uagacugcucaauuauuag

SEQ ID NO: 1520976 - RNA, 19 nt, Artificial Sequence
  Description of Artificial Sequence: Synthetic oligonucleotide
  Sense strand starting at position 1446 of SEQ ID NO: 1244895
augcuaagcugauuccuaa

SEQ ID NO: 1520977 - RNA, 19 nt, Artificial Sequence
  Description of Artificial Sequence: Synthetic oligonucleotide
  Antisense strand to SEQ ID NO: 1520976
uuaggaaucagcuuagcau

SEQ ID NO: 1520978 - RNA, 19 nt, Artificial Sequence
  Description of Artificial Sequence: Synthetic oligonucleotide
  Sense strand starting at position 1449 of SEQ ID NO: 1244895
cuaagcugauuccuaaagu

SEQ ID NO: 1520979 - RNA, 19 nt, Artificial Sequence
  Description of Artificial Sequence: Synthetic oligonucleotide
  Antisense strand to SEQ ID NO: 1520978
acuuuaggaaucagcuuag

SEQ ID NO: 1520980 - RNA, 19 nt, Artificial Sequence
  Description of Artificial Sequence: Synthetic oligonucleotide
  Sense strand starting at position 1518 of SEQ ID NO: 1244895
agacuuucucaagggugaa

SEQ ID NO: 1520981 - RNA, 19 nt, Artificial Sequence
  Description of Artificial Sequence: Synthetic oligonucleotide
  Antisense strand to SEQ ID NO: 1520980
uucacccuugagaaagucu

SEQ ID NO: 1520982 - RNA, 19 nt, Artificial Sequence
  Description of Artificial Sequence: Synthetic oligonucleotide
  Sense strand starting at position 1532 of SEQ ID NO: 1244895
gugaauugggccuaggugu

SEQ ID NO: 1520983 - RNA, 19 nt, Artificial Sequence
  Description of Artificial Sequence: Synthetic oligonucleotide
  Antisense strand to SEQ ID NO: 1520982
acaccuaggcccaauucac

SEQ ID NO: 1520984 - RNA, 19 nt, Artificial Sequence
  Description of Artificial Sequence: Synthetic oligonucleotide
  Sense strand starting at position 1602 of SEQ ID NO: 1244895
uuugucauccacgagaaau

SEQ ID NO: 1520985 - RNA, 19 nt, Artificial Sequence
  Description of Artificial Sequence: Synthetic oligonucleotide
  Antisense strand to SEQ ID NO: 1520984
auuucucguggaugacaaa

SEQ ID NO: 1520986 - RNA, 19 nt, Artificial Sequence
  Description of Artificial Sequence: Synthetic oligonucleotide
  Sense strand starting at position 1604 of SEQ ID NO: 1244895
ugucauccacgagaaauuc

SEQ ID NO: 1520987 - RNA, 19 nt, Artificial Sequence
  Description of Artificial Sequence: Synthetic oligonucleotide
  Antisense strand to SEQ ID NO: 1520986
gaauuucucguggaugaca

SEQ ID NO: 1520988 - RNA, 19 nt, Artificial Sequence
  Description of Artificial Sequence: Synthetic oligonucleotide
  Sense strand starting at position 1667 of SEQ ID NO: 1244895
acucuugacuugucuagau

SEQ ID NO: 1520989 - RNA, 19 nt, Artificial Sequence
  Description of Artificial Sequence: Synthetic oligonucleotide
  Antisense strand to SEQ ID NO: 1520988
aucuagacaagucaagagu

SEQ ID NO: 1520990 - RNA, 19 nt, Artificial Sequence
  Description of Artificial Sequence: Synthetic oligonucleotide
  Sense strand starting at position 1669 of SEQ ID NO: 1244895
ucuugacuugucuagauga

SEQ ID NO: 1520991 - RNA, 19 nt, Artificial Sequence
  Description of Artificial Sequence: Synthetic oligonucleotide
  Antisense strand to SEQ ID NO: 1520990
ucaucuagacaagucaaga

SEQ ID NO: 1520992 - RNA, 19 nt, Artificial Sequence
  Description of Artificial Sequence: Synthetic oligonucleotide
  Sense strand starting at position 1671 of SEQ ID NO: 1244895
uugacuugucuagaugagu

SEQ ID NO: 1520993 - RNA, 19 nt, Artificial Sequence
  Description of Artificial Sequence: Synthetic oligonucleotide
  Antisense strand to SEQ ID NO: 1520992
acucaucuagacaagucaa

SEQ ID NO: 1520994 - RNA, 19 nt, Artificial Sequence
  Description of Artificial Sequence: Synthetic oligonucleotide
  Sense strand starting at position 1684 of SEQ ID NO: 1244895
augagugcuccguagaaga

SEQ ID NO: 1520995 - RNA, 19 nt, Artificial Sequence
  Description of Artificial Sequence: Synthetic oligonucleotide
  Antisense strand to SEQ ID NO: 1520994
ucuucuacggagcacucau

SEQ ID NO: 1520996 - RNA, 19 nt, Artificial Sequence
  Description of Artificial Sequence: Synthetic oligonucleotide
  Sense strand starting at position 1686 of SEQ ID NO: 1244895
gagugcuccguagaagaag

SEQ ID NO: 1520997 - RNA, 19 nt, Artificial Sequence
  Description of Artificial Sequence: Synthetic oligonucleotide
  Antisense strand to SEQ ID NO: 1520996
cuucuucuacggagcacuc

SEQ ID NO: 1520998 - RNA, 19 nt, Artificial Sequence
  Description of Artificial Sequence: Synthetic oligonucleotide
  Sense strand starting at position 2480 of SEQ ID NO: 1244895
uggaguuugacccgggaga

SEQ ID NO: 1520999 - RNA, 19 nt, Artificial Sequence
  Description of Artificial Sequence: Synthetic oligonucleotide
  Antisense strand to SEQ ID NO: 1520998
ucucccgggucaaacucca

SEQ ID NO: 1521000 - RNA, 19 nt, Artificial Sequence
  Description of Artificial Sequence: Synthetic oligonucleotide
  Sense strand starting at position 2658 of SEQ ID NO: 1244895
cgaugucagagggaagcuu

SEQ ID NO: 1521001 - RNA, 19 nt, Artificial Sequence
  Description of Artificial Sequence: Synthetic oligonucleotide
  Antisense strand to SEQ ID NO: 1521000
aagcuucccucugacaucg

SEQ ID NO: 1521002 - RNA, 19 nt, Artificial Sequence
  Description of Artificial Sequence: Synthetic oligonucleotide
  Sense strand starting at position 2736 of SEQ ID NO: 1244895
gccucagaaagaugcuaga

SEQ ID NO: 1521003 - RNA, 19 nt, Artificial Sequence
  Description of Artificial Sequence: Synthetic oligonucleotide
  Antisense strand to SEQ ID NO: 1521002
ucuagcaucuuucugaggc

SEQ ID NO: 1521004 - RNA, 19 nt, Artificial Sequence
  Description of Artificial Sequence: Synthetic oligonucleotide
  Sense strand starting at position 2880 of SEQ ID NO: 1244895
acuguuuccacggauggga

SEQ ID NO: 1521005 - RNA, 19 nt, Artificial Sequence
  Description of Artificial Sequence: Synthetic oligonucleotide
  Antisense strand to SEQ ID NO: 1521004
ucccauccguggaaacagu

SEQ ID NO: 1521006 - RNA, 19 nt, Artificial Sequence
  Description of Artificial Sequence: Synthetic oligonucleotide
  Sense strand starting at position 2918 of SEQ ID NO: 1244895
gguggaucagugggaggaa

SEQ ID NO: 1521007 - RNA, 19 nt, Artificial Sequence
  Description of Artificial Sequence: Synthetic oligonucleotide
  Antisense strand to SEQ ID NO: 1521006
uuccucccacugauccacc

SEQ ID NO: 1521008 - RNA, 19 nt, Artificial Sequence
  Description of Artificial Sequence: Synthetic oligonucleotide
  Sense strand starting at position 3010 of SEQ ID NO: 1244895
cagaguggugacugacauu

SEQ ID NO: 1521009 - RNA, 19 nt, Artificial Sequence
  Description of Artificial Sequence: Synthetic oligonucleotide
  Antisense strand to SEQ ID NO: 1521008
aaugucagucaccacucug

SEQ ID NO: 1521010 - RNA, 19 nt, Artificial Sequence
  Description of Artificial Sequence: Synthetic oligonucleotide
  Sense strand starting at position 3113 of SEQ ID NO: 1244895
acgguauugagagagcgau

SEQ ID NO: 1521011 - RNA, 19 nt, Artificial Sequence
  Description of Artificial Sequence: Synthetic oligonucleotide
  Antisense strand to SEQ ID NO: 1521010
aucgcucucucaauaccgu

SEQ ID NO: 1521012 - RNA, 19 nt, Artificial Sequence
  Description of Artificial Sequence: Synthetic oligonucleotide
  Sense strand starting at position 3145 of SEQ ID NO: 1244895
ucuagagauguuuaagcuu

SEQ ID NO: 1521013 - RNA, 19 nt, Artificial Sequence
  Description of Artificial Sequence: Synthetic oligonucleotide
  Antisense strand to SEQ ID NO: 1521012
aagcuuaaacaucucuaga

SEQ ID NO: 1521014 - RNA, 19 nt, Artificial Sequence
  Description of Artificial Sequence: Synthetic oligonucleotide
  Sense strand starting at position 3208 of SEQ ID NO: 1244895
auggaauuauaauacagga

SEQ ID NO: 1521015 - RNA, 19 nt, Artificial Sequence
  Description of Artificial Sequence: Synthetic oligonucleotide
  Antisense strand to SEQ ID NO: 1521014
uccuguauuauaauuccau

SEQ ID NO: 1521016 - RNA, 19 nt, Artificial Sequence
  Description of Artificial Sequence: Synthetic oligonucleotide
  Sense strand starting at position 3363 of SEQ ID NO: 1244895
gcaggauauuguuugauga

SEQ ID NO: 1521017 - RNA, 19 nt, Artificial Sequence
  Description of Artificial Sequence: Synthetic oligonucleotide
  Antisense strand to SEQ ID NO: 1521016
ucaucaaacaauauccugc

SEQ ID NO: 1521018 - RNA, 19 nt, Artificial Sequence
  Description of Artificial Sequence: Synthetic oligonucleotide
  Sense strand starting at position 3364 of SEQ ID NO: 1244895
caggauauuguuugaugac

SEQ ID NO: 1521019 - RNA, 19 nt, Artificial Sequence
  Description of Artificial Sequence: Synthetic oligonucleotide
  Antisense strand to SEQ ID NO: 1521018
gucaucaaacaauauccug

SEQ ID NO: 1521020 - RNA, 19 nt, Artificial Sequence
  Description of Artificial Sequence: Synthetic oligonucleotide
  Sense strand starting at position 3370 of SEQ ID NO: 1244895
auuguuugaugacuuguga

SEQ ID NO: 1521021 - RNA, 19 nt, Artificial Sequence
  Description of Artificial Sequence: Synthetic oligonucleotide
  Antisense strand to SEQ ID NO: 1521020
ucacaagucaucaaacaau

SEQ ID NO: 1521022 - RNA, 19 nt, Artificial Sequence
  Description of Artificial Sequence: Synthetic oligonucleotide
  Sense strand starting at position 3530 of SEQ ID NO: 1244895
gugugagggcaugauauga

SEQ ID NO: 1521023 - RNA, 19 nt, Artificial Sequence
  Description of Artificial Sequence: Synthetic oligonucleotide
  Antisense strand to SEQ ID NO: 1521022
ucauaucaugcccucacac

SEQ ID NO: 1521024 - RNA, 19 nt, Artificial Sequence
  Description of Artificial Sequence: Synthetic oligonucleotide
  Sense strand starting at position 3801 of SEQ ID NO: 1244895
gggcaaaguguuggagaca

SEQ ID NO: 1521025 - RNA, 19 nt, Artificial Sequence
  Description of Artificial Sequence: Synthetic oligonucleotide
  Antisense strand to SEQ ID NO: 1521024
ugucuccaacacuuugccc

SEQ ID NO: 1521026 - RNA, 19 nt, Artificial Sequence
  Description of Artificial Sequence: Synthetic oligonucleotide
  Sense strand starting at position 331 of SEQ ID NO: 1244896
agaacuuaagccuguuauu

SEQ ID NO: 1521027 - RNA, 19 nt, Artificial Sequence
  Description of Artificial Sequence: Synthetic oligonucleotide
  Antisense strand to SEQ ID NO: 1521026
aauaacaggcuuaaguucu

SEQ ID NO: 1521028 - RNA, 19 nt, Artificial Sequence
  Description of Artificial Sequence: Synthetic oligonucleotide
  Sense strand starting at position 354 of SEQ ID NO: 1244896
ggucaaagguuugcauuga

SEQ ID NO: 1521029 - RNA, 19 nt, Artificial Sequence
  Description of Artificial Sequence: Synthetic oligonucleotide
  Antisense strand to SEQ ID NO: 1521028
ucaaugcaaaccuuugacc

SEQ ID NO: 1521030 - RNA, 19 nt, Artificial Sequence
  Description of Artificial Sequence: Synthetic oligonucleotide
  Sense strand starting at position 358 of SEQ ID NO: 1244896
aaagguuugcauugagugu

SEQ ID NO: 1521031 - RNA, 19 nt, Artificial Sequence
  Description of Artificial Sequence: Synthetic oligonucleotide
  Antisense strand to SEQ ID NO: 1521030
acacucaaugcaaaccuuu

SEQ ID NO: 1521032 - RNA, 19 nt, Artificial Sequence
  Description of Artificial Sequence: Synthetic oligonucleotide
  Sense strand starting at position 365 of SEQ ID NO: 1244896
ugcauugagugucuggcua

SEQ ID NO: 1521033 - RNA, 19 nt, Artificial Sequence
  Description of Artificial Sequence: Synthetic oligonucleotide
  Antisense strand to SEQ ID NO: 1521032
uagccagacacucaaugca

SEQ ID NO: 1521034 - RNA, 19 nt, Artificial Sequence
  Description of Artificial Sequence: Synthetic oligonucleotide
  Sense strand starting at position 369 of SEQ ID NO: 1244896
uugagugucuggcuagaaa

SEQ ID NO: 1521035 - RNA, 19 nt, Artificial Sequence
  Description of Artificial Sequence: Synthetic oligonucleotide
  Antisense strand to SEQ ID NO: 1521034
uuucuagccagacacucaa

SEQ ID NO: 1521036 - RNA, 19 nt, Artificial Sequence
  Description of Artificial Sequence: Synthetic oligonucleotide
  Sense strand starting at position 380 of SEQ ID NO: 1244896
gcuagaaacucauaaggaa

SEQ ID NO: 1521037 - RNA, 19 nt, Artificial Sequence
  Description of Artificial Sequence: Synthetic oligonucleotide
  Antisense strand to SEQ ID NO: 1521036
uuccuuaugaguuucuagc

SEQ ID NO: 1521038 - RNA, 19 nt, Artificial Sequence
  Description of Artificial Sequence: Synthetic oligonucleotide
  Sense strand starting at position 411 of SEQ ID NO: 1244896
ucuugagaggccuacucua

SEQ ID NO: 1521039 - RNA, 19 nt, Artificial Sequence
  Description of Artificial Sequence: Synthetic oligonucleotide
  Antisense strand to SEQ ID NO: 1521038
uagaguaggccucucaaga

SEQ ID NO: 1521040 - RNA, 19 nt, Artificial Sequence
  Description of Artificial Sequence: Synthetic oligonucleotide
  Sense strand starting at position 435 of SEQ ID NO: 1244896
ucaagaaaguccucaguug

SEQ ID NO: 1521041 - RNA, 19 nt, Artificial Sequence
  Description of Artificial Sequence: Synthetic oligonucleotide
  Antisense strand to SEQ ID NO: 1521040
caacugaggacuuucuuga

SEQ ID NO: 1521042 - RNA, 19 nt, Artificial Sequence
  Description of Artificial Sequence: Synthetic oligonucleotide
  Sense strand starting at position 493 of SEQ ID NO: 1244896
uccagaaaguucgaaauuc

SEQ ID NO: 1521043 - RNA, 19 nt, Artificial Sequence
  Description of Artificial Sequence: Synthetic oligonucleotide
  Antisense strand to SEQ ID NO: 1521042
gaauuucgaacuuucugga

SEQ ID NO: 1521044 - RNA, 19 nt, Artificial Sequence
  Description of Artificial Sequence: Synthetic oligonucleotide
  Sense strand starting at position 740 of SEQ ID NO: 1244896
ccagaauaccaagguguua

SEQ ID NO: 1521045 - RNA, 19 nt, Artificial Sequence
  Description of Artificial Sequence: Synthetic oligonucleotide
  Antisense strand to SEQ ID NO: 1521044
uaacaccuugguauucugg

SEQ ID NO: 1521046 - RNA, 19 nt, Artificial Sequence
  Description of Artificial Sequence: Synthetic oligonucleotide
  Sense strand starting at position 759 of SEQ ID NO: 1244896
gcagacauccugugcuguu

SEQ ID NO: 1521047 - RNA, 19 nt, Artificial Sequence
  Description of Artificial Sequence: Synthetic oligonucleotide
  Antisense strand to SEQ ID NO: 1521046
aacagcacaggaugucugc

SEQ ID NO: 1521048 - RNA, 19 nt, Artificial Sequence
  Description of Artificial Sequence: Synthetic oligonucleotide
  Sense strand starting at position 837 of SEQ ID NO: 1244896
gcaauaggcaucgagggua

SEQ ID NO: 1521049 - RNA, 19 nt, Artificial Sequence
  Description of Artificial Sequence: Synthetic oligonucleotide
  Antisense strand to SEQ ID NO: 1521048
uacccucgaugccuauugc

SEQ ID NO: 1521050 - RNA, 19 nt, Artificial Sequence
  Description of Artificial Sequence: Synthetic oligonucleotide
  Sense strand starting at position 898 of SEQ ID NO: 1244896
ggguuucuggcugacacaa

SEQ ID NO: 1521051 - RNA, 19 nt, Artificial Sequence
  Description of Artificial Sequence: Synthetic oligonucleotide
  Antisense strand to SEQ ID NO: 1521050
uugugucagccagaaaccc

SEQ ID NO: 1521052 - RNA, 19 nt, Artificial Sequence
  Description of Artificial Sequence: Synthetic oligonucleotide
  Sense strand starting at position 1115 of SEQ ID NO: 1244896
ucuccuaggcccugagaua

SEQ ID NO: 1521053 - RNA, 19 nt, Artificial Sequence
  Description of Artificial Sequence: Synthetic oligonucleotide
  Antisense strand to SEQ ID NO: 1521052
uaucucagggccuaggaga

SEQ ID NO: 1521054 - RNA, 19 nt, Artificial Sequence
  Description of Artificial Sequence: Synthetic oligonucleotide
  Sense strand starting at position 1116 of SEQ ID NO: 1244896
cuccuaggcccugagauau

SEQ ID NO: 1521055 - RNA, 19 nt, Artificial Sequence
  Description of Artificial Sequence: Synthetic oligonucleotide
  Antisense strand to SEQ ID NO: 1521054
auaucucagggccuaggag

SEQ ID NO: 1521056 - RNA, 19 nt, Artificial Sequence
  Description of Artificial Sequence: Synthetic oligonucleotide
  Sense strand starting at position 1128 of SEQ ID NO: 1244896
gagauauguucagugucgu

SEQ ID NO: 1521057 - RNA, 19 nt, Artificial Sequence
  Description of Artificial Sequence: Synthetic oligonucleotide
  Antisense strand to SEQ ID NO: 1521056
acgacacugaacauaucuc

SEQ ID NO: 1521058 - RNA, 19 nt, Artificial Sequence
  Description of Artificial Sequence: Synthetic oligonucleotide
  Sense strand starting at position 1129 of SEQ ID NO: 1244896
agauauguucagugucguc

SEQ ID NO: 1521059 - RNA, 19 nt, Artificial Sequence
  Description of Artificial Sequence: Synthetic oligonucleotide
  Antisense strand to SEQ ID NO: 1521058
gacgacacugaacauaucu

SEQ ID NO: 1521060 - RNA, 19 nt, Artificial Sequence
  Description of Artificial Sequence: Synthetic oligonucleotide
  Sense strand starting at position 1233 of SEQ ID NO: 1244896
gggugugagcccugguaug

SEQ ID NO: 1521061 - RNA, 19 nt, Artificial Sequence
  Description of Artificial Sequence: Synthetic oligonucleotide
  Antisense strand to SEQ ID NO: 1521060
cauaccagggcucacaccc

SEQ ID NO: 1521062 - RNA, 19 nt, Artificial Sequence
  Description of Artificial Sequence: Synthetic oligonucleotide
  Sense strand starting at position 1767 of SEQ ID NO: 1244896
ccugguuucgcggauggga

SEQ ID NO: 1521063 - RNA, 19 nt, Artificial Sequence
  Description of Artificial Sequence: Synthetic oligonucleotide
  Antisense strand to SEQ ID NO: 1521062
ucccauccgcgaaaccagg

SEQ ID NO: 1521064 - RNA, 19 nt, Artificial Sequence
  Description of Artificial Sequence: Synthetic oligonucleotide
  Sense strand starting at position 1769 of SEQ ID NO: 1244896
ugguuucgcggaugggaaa

SEQ ID NO: 1521065 - RNA, 19 nt, Artificial Sequence
  Description of Artificial Sequence: Synthetic oligonucleotide
  Antisense strand to SEQ ID NO: 1521064
uuucccauccgcgaaacca

SEQ ID NO: 1521066 - RNA, 19 nt, Artificial Sequence
  Description of Artificial Sequence: Synthetic oligonucleotide
  Sense strand starting at position 2383 of SEQ ID NO: 1244896
guguguucuguuuaguauu

SEQ ID NO: 1521067 - RNA, 19 nt, Artificial Sequence
  Description of Artificial Sequence: Synthetic oligonucleotide
  Antisense strand to SEQ ID NO: 1521066
aauacuaaacagaacacac

SEQ ID NO: 1521068 - RNA, 19 nt, Artificial Sequence
  Description of Artificial Sequence: Synthetic oligonucleotide
  Sense strand starting at position 2385 of SEQ ID NO: 1244896
guguucuguuuaguauuua

SEQ ID NO: 1521069 - RNA, 19 nt, Artificial Sequence
  Description of Artificial Sequence: Synthetic oligonucleotide
  Antisense strand to SEQ ID NO: 1521068
uaaauacuaaacagaacac

SEQ ID NO: 1521070 - RNA, 19 nt, Artificial Sequence
  Description of Artificial Sequence: Synthetic oligonucleotide
  Sense strand starting at position 2438 of SEQ ID NO: 1244896
cccuguaagcauuauggua

SEQ ID NO: 1521071 - RNA, 19 nt, Artificial Sequence
  Description of Artificial Sequence: Synthetic oligonucleotide
  Antisense strand to SEQ ID NO: 1521070
uaccauaaugcuuacaggg

SEQ ID NO: 1521072 - RNA, 19 nt, Artificial Sequence
  Description of Artificial Sequence: Synthetic oligonucleotide
  Sense strand starting at position 2440 of SEQ ID NO: 1244896
cuguaagcauuaugguaau

SEQ ID NO: 1521073 - RNA, 19 nt, Artificial Sequence
  Description of Artificial Sequence: Synthetic oligonucleotide
  Antisense strand to SEQ ID NO: 1521072
auuaccauaaugcuuacag

SEQ ID NO: 1521074 - RNA, 19 nt, Artificial Sequence
  Description of Artificial Sequence: Synthetic oligonucleotide
  Sense strand starting at position 2450 of SEQ ID NO: 1244896
uaugguaauuucuagagug

SEQ ID NO: 1521075 - RNA, 19 nt, Artificial Sequence
  Description of Artificial Sequence: Synthetic oligonucleotide
  Antisense strand to SEQ ID NO: 1521074
cacucuagaaauuaccaua

SEQ ID NO: 1521076 - RNA, 19 nt, Artificial Sequence
  Description of Artificial Sequence: Synthetic oligonucleotide
  Sense strand starting at position 2465 of SEQ ID NO: 1244896
agugacgacaguuauauua

SEQ ID NO: 1521077 - RNA, 19 nt, Artificial Sequence
  Description of Artificial Sequence: Synthetic oligonucleotide
  Antisense strand to SEQ ID NO: 1521076
uaauauaacugucgucacu

SEQ ID NO: 1521078 - RNA, 19 nt, Artificial Sequence
  Description of Artificial Sequence: Synthetic oligonucleotide
  Sense strand starting at position 2467 of SEQ ID NO: 1244896
ugacgacaguuauauuaac

SEQ ID NO: 1521079 - RNA, 19 nt, Artificial Sequence
  Description of Artificial Sequence: Synthetic oligonucleotide
  Antisense strand to SEQ ID NO: 1521078
guuaauauaacugucguca

SEQ ID NO: 1521080 - RNA, 19 nt, Artificial Sequence
  Description of Artificial Sequence: Synthetic oligonucleotide
  Sense strand starting at position 2624 of SEQ ID NO: 1244896
ugaauuucuuaugaaccga

SEQ ID NO: 1521081 - RNA, 19 nt, Artificial Sequence
  Description of Artificial Sequence: Synthetic oligonucleotide
  Antisense strand to SEQ ID NO: 1521080
ucgguucauaagaaauuca

SEQ ID NO: 1521082 - RNA, 19 nt, Artificial Sequence
  Description of Artificial Sequence: Synthetic oligonucleotide
  Sense strand starting at position 2750 of SEQ ID NO: 1244896
ccucauuucugcuguucua

SEQ ID NO: 1521083 - RNA, 19 nt, Artificial Sequence
  Description of Artificial Sequence: Synthetic oligonucleotide
  Antisense strand to SEQ ID NO: 1521082
uagaacagcagaaaugagg

SEQ ID NO: 1521084 - RNA, 19 nt, Artificial Sequence
  Description of Artificial Sequence: Synthetic oligonucleotide
  Sense strand starting at position 3038 of SEQ ID NO: 1244896
gguggaguuccacagcuaa

SEQ ID NO: 1521085 - RNA, 19 nt, Artificial Sequence
  Description of Artificial Sequence: Synthetic oligonucleotide
  Antisense strand to SEQ ID NO: 1521084
uuagcuguggaacuccacc

SEQ ID NO: 1521086 - RNA, 19 nt, Artificial Sequence
  Description of Artificial Sequence: Synthetic oligonucleotide
  Sense strand starting at position 3053 of SEQ ID NO: 1244896
cuaaaucagcccugggauu

SEQ ID NO: 1521087 - RNA, 19 nt, Artificial Sequence
  Description of Artificial Sequence: Synthetic oligonucleotide
  Antisense strand to SEQ ID NO: 1521086
aaucccagggcugauuuag

SEQ ID NO: 1521088 - RNA, 19 nt, Artificial Sequence
  Description of Artificial Sequence: Synthetic oligonucleotide
  Sense strand starting at position 3079 of SEQ ID NO: 1244896
agcgaagacuauucucacu

SEQ ID NO: 1521089 - RNA, 19 nt, Artificial Sequence
  Description of Artificial Sequence: Synthetic oligonucleotide
  Antisense strand to SEQ ID NO: 1521088
agugagaauagucuucgcu

SEQ ID NO: 1521090 - RNA, 19 nt, Artificial Sequence
  Description of Artificial Sequence: Synthetic oligonucleotide
  Sense strand starting at position 3081 of SEQ ID NO: 1244896
cgaagacuauucucacugu

SEQ ID NO: 1521091 - RNA, 19 nt, Artificial Sequence
  Description of Artificial Sequence: Synthetic oligonucleotide
  Antisense strand to SEQ ID NO: 1521090
acagugagaauagucuucg

SEQ ID NO: 1521092 - RNA, 19 nt, Artificial Sequence
  Description of Artificial Sequence: Synthetic oligonucleotide
  Sense strand starting at position 3289 of SEQ ID NO: 1244896
uaugacuaguguccugaua

SEQ ID NO: 1521093 - RNA, 19 nt, Artificial Sequence
  Description of Artificial Sequence: Synthetic oligonucleotide
  Antisense strand to SEQ ID NO: 1521092
uaucaggacacuagucaua

SEQ ID NO: 1521094 - RNA, 19 nt, Artificial Sequence
  Description of Artificial Sequence: Synthetic oligonucleotide
  Sense strand starting at position 3484 of SEQ ID NO: 1244896
gugguacuuuguugggaca

SEQ ID NO: 1521095 - RNA, 19 nt, Artificial Sequence
  Description of Artificial Sequence: Synthetic oligonucleotide
  Antisense strand to SEQ ID NO: 1521094
ugucccaacaaaguaccac

SEQ ID NO: 1521096 - RNA, 19 nt, Artificial Sequence
  Description of Artificial Sequence: Synthetic oligonucleotide
  Sense strand starting at position 3486 of SEQ ID NO: 1244896
gguacuuuguugggacagu

SEQ ID NO: 1521097 - RNA, 19 nt, Artificial Sequence
  Description of Artificial Sequence: Synthetic oligonucleotide
  Antisense strand to SEQ ID NO: 1521096
acugucccaacaaaguacc

SEQ ID NO: 1521098 - RNA, 19 nt, Artificial Sequence
  Description of Artificial Sequence: Synthetic oligonucleotide
  Sense strand starting at position 3495 of SEQ ID NO: 1244896
uugggacaguccuagcaaa

SEQ ID NO: 1521099 - RNA, 19 nt, Artificial Sequence
  Description of Artificial Sequence: Synthetic oligonucleotide
  Antisense strand to SEQ ID NO: 1521098
uuugcuaggacugucccaa

SEQ ID NO: 1521100 - RNA, 19 nt, Artificial Sequence
  Description of Artificial Sequence: Synthetic oligonucleotide
  Sense strand starting at position 3546 of SEQ ID NO: 1244896
gaaacaauggcauggaagu

SEQ ID NO: 1521101 - RNA, 19 nt, Artificial Sequence
  Description of Artificial Sequence: Synthetic oligonucleotide
  Antisense strand to SEQ ID NO: 1521100
acuuccaugccauuguuuc

SEQ ID NO: 1521102 - RNA, 19 nt, Artificial Sequence
  Description of Artificial Sequence: Synthetic oligonucleotide
  Sense strand starting at position 3573 of SEQ ID NO: 1244896
gcucuugaaugccauacaa

SEQ ID NO: 1521103 - RNA, 19 nt, Artificial Sequence
  Description of Artificial Sequence: Synthetic oligonucleotide
  Antisense strand to SEQ ID NO: 1521102
uuguauggcauucaagagc

SEQ ID NO: 1521104 - RNA, 19 nt, Artificial Sequence
  Description of Artificial Sequence: Synthetic oligonucleotide
  Sense strand starting at position 3615 of SEQ ID NO: 1244896
cacuguugucugggacuuu

SEQ ID NO: 1521105 - RNA, 19 nt, Artificial Sequence
  Description of Artificial Sequence: Synthetic oligonucleotide
  Antisense strand to SEQ ID NO: 1521104
aaagucccagacaacagug

SEQ ID NO: 1521106 - RNA, 19 nt, Artificial Sequence
  Description of Artificial Sequence: Synthetic oligonucleotide
  Sense strand starting at position 15 of SEQ ID NO: 1244897
caggcuuugccugaaagga

SEQ ID NO: 1521107 - RNA, 19 nt, Artificial Sequence
  Description of Artificial Sequence: Synthetic oligonucleotide
  Antisense strand to SEQ ID NO: 1521106
uccuuucaggcaaagccug

SEQ ID NO: 1521108 - RNA, 19 nt, Artificial Sequence
  Description of Artificial Sequence: Synthetic oligonucleotide
  Sense strand starting at position 71 of SEQ ID NO: 1244897
ucuggaaucuuccugacuc

SEQ ID NO: 1521109 - RNA, 19 nt, Artificial Sequence
  Description of Artificial Sequence: Synthetic oligonucleotide
  Antisense strand to SEQ ID NO: 1521108
gagucaggaagauuccaga

SEQ ID NO: 1521110 - RNA, 19 nt, Artificial Sequence
  Description of Artificial Sequence: Synthetic oligonucleotide
  Sense strand starting at position 79 of SEQ ID NO: 1244897
cuuccugacucgugucaug

SEQ ID NO: 1521111 - RNA, 19 nt, Artificial Sequence
  Description of Artificial Sequence: Synthetic oligonucleotide
  Antisense strand to SEQ ID NO: 1521110
caugacacgagucaggaag

SEQ ID NO: 1521112 - RNA, 19 nt, Artificial Sequence
  Description of Artificial Sequence: Synthetic oligonucleotide
  Sense strand starting at position 86 of SEQ ID NO: 1244897
acucgugucaugugggcau

SEQ ID NO: 1521113 - RNA, 19 nt, Artificial Sequence
  Description of Artificial Sequence: Synthetic oligonucleotide
  Antisense strand to SEQ ID NO: 1521112
augcccacaugacacgagu

SEQ ID NO: 1521114 - RNA, 19 nt, Artificial Sequence
  Description of Artificial Sequence: Synthetic oligonucleotide
  Sense strand starting at position 89 of SEQ ID NO: 1244897
cgugucaugugggcauaca

SEQ ID NO: 1521115 - RNA, 19 nt, Artificial Sequence
  Description of Artificial Sequence: Synthetic oligonucleotide
  Antisense strand to SEQ ID NO: 1521114
uguaugcccacaugacacg

SEQ ID NO: 1521116 - RNA, 19 nt, Artificial Sequence
  Description of Artificial Sequence: Synthetic oligonucleotide
  Sense strand starting at position 90 of SEQ ID NO: 1244897
gugucaugugggcauacau

SEQ ID NO: 1521117 - RNA, 19 nt, Artificial Sequence
  Description of Artificial Sequence: Synthetic oligonucleotide
  Antisense strand to SEQ ID NO: 1521116
auguaugcccacaugacac

SEQ ID NO: 1521118 - RNA, 19 nt, Artificial Sequence
  Description of Artificial Sequence: Synthetic oligonucleotide
  Sense strand starting at position 697 of SEQ ID NO: 1244897
ggugaacagcucugacagu

SEQ ID NO: 1521119 - RNA, 19 nt, Artificial Sequence
  Description of Artificial Sequence: Synthetic oligonucleotide
  Antisense strand to SEQ ID NO: 1521118
acugucagagcuguucacc

SEQ ID NO: 1521120 - RNA, 19 nt, Artificial Sequence
  Description of Artificial Sequence: Synthetic oligonucleotide
  Sense strand starting at position 1089 of SEQ ID NO: 1244897
gccgguuaccuucgcagau

SEQ ID NO: 1521121 - RNA, 19 nt, Artificial Sequence
  Description of Artificial Sequence: Synthetic oligonucleotide
  Antisense strand to SEQ ID NO: 1521120
aucugcgaagguaaccggc

SEQ ID NO: 1521122 - RNA, 19 nt, Artificial Sequence
  Description of Artificial Sequence: Synthetic oligonucleotide
  Sense strand starting at position 1957 of SEQ ID NO: 1244897
uccagucacucacggagaa

SEQ ID NO: 1521123 - RNA, 19 nt, Artificial Sequence
  Description of Artificial Sequence: Synthetic oligonucleotide
  Antisense strand to SEQ ID NO: 1521122
uucuccgugagugacugga

SEQ ID NO: 1521124 - RNA, 19 nt, Artificial Sequence
  Description of Artificial Sequence: Synthetic oligonucleotide
  Sense strand starting at position 1958 of SEQ ID NO: 1244897
ccagucacucacggagaaa

SEQ ID NO: 1521125 - RNA, 19 nt, Artificial Sequence
  Description of Artificial Sequence: Synthetic oligonucleotide
  Antisense strand to SEQ ID NO: 1521124
uuucuccgugagugacugg

SEQ ID NO: 1521126 - RNA, 19 nt, Artificial Sequence
  Description of Artificial Sequence: Synthetic oligonucleotide
  Sense strand starting at position 2321 of SEQ ID NO: 1244897
ucuuguugguuugaggaau

SEQ ID NO: 1521127 - RNA, 19 nt, Artificial Sequence
  Description of Artificial Sequence: Synthetic oligonucleotide
  Antisense strand to SEQ ID NO: 1521126
auuccucaaaccaacaaga

SEQ ID NO: 1521128 - RNA, 19 nt, Artificial Sequence
  Description of Artificial Sequence: Synthetic oligonucleotide
  Sense strand starting at position 2327 of SEQ ID NO: 1244897
ugguuugaggaauauaguc

SEQ ID NO: 1521129 - RNA, 19 nt, Artificial Sequence
  Description of Artificial Sequence: Synthetic oligonucleotide
  Antisense strand to SEQ ID NO: 1521128
gacuauauuccucaaacca

SEQ ID NO: 1521130 - RNA, 19 nt, Artificial Sequence
  Description of Artificial Sequence: Synthetic oligonucleotide
  Sense strand starting at position 2335 of SEQ ID NO: 1244897
ggaauauagucaggaagga

SEQ ID NO: 1521131 - RNA, 19 nt, Artificial Sequence
  Description of Artificial Sequence: Synthetic oligonucleotide
  Antisense strand to SEQ ID NO: 1521130
uccuuccugacuauauucc

SEQ ID NO: 1521132 - RNA, 19 nt, Artificial Sequence
  Description of Artificial Sequence: Synthetic oligonucleotide
  Sense strand starting at position 2362 of SEQ ID NO: 1244897
ccuagcaguuauugaaaca

SEQ ID NO: 1521133 - RNA, 19 nt, Artificial Sequence
  Description of Artificial Sequence: Synthetic oligonucleotide
  Antisense strand to SEQ ID NO: 1521132
uguuucaauaacugcuagg

SEQ ID NO: 1521134 - RNA, 19 nt, Artificial Sequence
  Description of Artificial Sequence: Synthetic oligonucleotide
  Sense strand starting at position 2586 of SEQ ID NO: 1244897
cacauuagaucuggaaggu

SEQ ID NO: 1521135 - RNA, 19 nt, Artificial Sequence
  Description of Artificial Sequence: Synthetic oligonucleotide
  Antisense strand to SEQ ID NO: 1521134
accuuccagaucuaaugug

SEQ ID NO: 1521136 - RNA, 19 nt, Artificial Sequence
  Description of Artificial Sequence: Synthetic oligonucleotide
  Sense strand starting at position 2627 of SEQ ID NO: 1244897
gagaguagcagccguuaua

SEQ ID NO: 1521137 - RNA, 19 nt, Artificial Sequence
  Description of Artificial Sequence: Synthetic oligonucleotide
  Antisense strand to SEQ ID NO: 1521136
uauaacggcugcuacucuc

SEQ ID NO: 1521138 - RNA, 19 nt, Artificial Sequence
  Description of Artificial Sequence: Synthetic oligonucleotide
  Sense strand starting at position 2712 of SEQ ID NO: 1244897
aagaacggugcgugaugaa

SEQ ID NO: 1521139 - RNA, 19 nt, Artificial Sequence
  Description of Artificial Sequence: Synthetic oligonucleotide
  Antisense strand to SEQ ID NO: 1521138
uucaucacgcaccguucuu

SEQ ID NO: 1521140 - RNA, 19 nt, Artificial Sequence
  Description of Artificial Sequence: Synthetic oligonucleotide
  Sense strand starting at position 2779 of SEQ ID NO: 1244897
aaucaauauugcuucgguu

SEQ ID NO: 1521141 - RNA, 19 nt, Artificial Sequence
  Description of Artificial Sequence: Synthetic oligonucleotide
  Antisense strand to SEQ ID NO: 1521140
aaccgaagcaauauugauu

SEQ ID NO: 1521142 - RNA, 19 nt, Artificial Sequence
  Description of Artificial Sequence: Synthetic oligonucleotide
  Sense strand starting at position 2782 of SEQ ID NO: 1244897
caauauugcuucgguugga

SEQ ID NO: 1521143 - RNA, 19 nt, Artificial Sequence
  Description of Artificial Sequence: Synthetic oligonucleotide
  Antisense strand to SEQ ID NO: 1521142
uccaaccgaagcaauauug

SEQ ID NO: 1521144 - RNA, 19 nt, Artificial Sequence
  Description of Artificial Sequence: Synthetic oligonucleotide
  Sense strand starting at position 2783 of SEQ ID NO: 1244897
aauauugcuucgguuggau

SEQ ID NO: 1521145 - RNA, 19 nt, Artificial Sequence
  Description of Artificial Sequence: Synthetic oligonucleotide
  Antisense strand to SEQ ID NO: 1521144
auccaaccgaagcaauauu

SEQ ID NO: 1521146 - RNA, 19 nt, Artificial Sequence
  Description of Artificial Sequence: Synthetic oligonucleotide
  Sense strand starting at position 2785 of SEQ ID NO: 1244897
uauugcuucgguuggauca

SEQ ID NO: 1521147 - RNA, 19 nt, Artificial Sequence
  Description of Artificial Sequence: Synthetic oligonucleotide
  Antisense strand to SEQ ID NO: 1521146
ugauccaaccgaagcaaua

SEQ ID NO: 1521148 - RNA, 19 nt, Artificial Sequence
  Description of Artificial Sequence: Synthetic oligonucleotide
  Sense strand starting at position 2786 of SEQ ID NO: 1244897
auugcuucgguuggaucaa

SEQ ID NO: 1521149 - RNA, 19 nt, Artificial Sequence
  Description of Artificial Sequence: Synthetic oligonucleotide
  Antisense strand to SEQ ID NO: 1521148
uugauccaaccgaagcaau

SEQ ID NO: 1521150 - RNA, 19 nt, Artificial Sequence
  Description of Artificial Sequence: Synthetic oligonucleotide
  Sense strand starting at position 2805 of SEQ ID NO: 1244897
caccuuugugcaugugaaa

SEQ ID NO: 1521151 - RNA, 19 nt, Artificial Sequence
  Description of Artificial Sequence: Synthetic oligonucleotide
  Antisense strand to SEQ ID NO: 1521150
uuucacaugcacaaaggug

SEQ ID NO: 1521152 - RNA, 19 nt, Artificial Sequence
  Description of Artificial Sequence: Synthetic oligonucleotide
  Sense strand starting at position 2808 of SEQ ID NO: 1244897
cuuugugcaugugaaaggu

SEQ ID NO: 1521153 - RNA, 19 nt, Artificial Sequence
  Description of Artificial Sequence: Synthetic oligonucleotide
  Antisense strand to SEQ ID NO: 1521152
accuuucacaugcacaaag

SEQ ID NO: 1521154 - RNA, 19 nt, Artificial Sequence
  Description of Artificial Sequence: Synthetic oligonucleotide
  Sense strand starting at position 2882 of SEQ ID NO: 1244897
guguguccucccggugacu

SEQ ID NO: 1521155 - RNA, 19 nt, Artificial Sequence
  Description of Artificial Sequence: Synthetic oligonucleotide
  Antisense strand to SEQ ID NO: 1521154
agucaccgggaggacacac

SEQ ID NO: 1521156 - RNA, 19 nt, Artificial Sequence
  Description of Artificial Sequence: Synthetic oligonucleotide
  Sense strand starting at position 3211 of SEQ ID NO: 1244897
cccuucucuugagcugaga

SEQ ID NO: 1521157 - RNA, 19 nt, Artificial Sequence
  Description of Artificial Sequence: Synthetic oligonucleotide
  Antisense strand to SEQ ID NO: 1521156
ucucagcucaagagaaggg

SEQ ID NO: 1521158 - RNA, 19 nt, Artificial Sequence
  Description of Artificial Sequence: Synthetic oligonucleotide
  Sense strand starting at position 3232 of SEQ ID NO: 1244897
ugguuugagaucuguuauu

SEQ ID NO: 1521159 - RNA, 19 nt, Artificial Sequence
  Description of Artificial Sequence: Synthetic oligonucleotide
  Antisense strand to SEQ ID NO: 1521158
aauaacagaucucaaacca

SEQ ID NO: 1521160 - RNA, 19 nt, Artificial Sequence
  Description of Artificial Sequence: Synthetic oligonucleotide
  Sense strand starting at position 3275 of SEQ ID NO: 1244897
gccagauaugguggcuugu

SEQ ID NO: 1521161 - RNA, 19 nt, Artificial Sequence
  Description of Artificial Sequence: Synthetic oligonucleotide
  Antisense strand to SEQ ID NO: 1521160
acaagccaccauaucuggc

SEQ ID NO: 1521162 - RNA, 19 nt, Artificial Sequence
  Description of Artificial Sequence: Synthetic oligonucleotide
  Sense strand starting at position 3373 of SEQ ID NO: 1244897
uguggcugugaucaacaga

SEQ ID NO: 1521163 - RNA, 19 nt, Artificial Sequence
  Description of Artificial Sequence: Synthetic oligonucleotide
  Antisense strand to SEQ ID NO: 1521162
ucuguugaucacagccaca

SEQ ID NO: 1521164 - RNA, 19 nt, Artificial Sequence
  Description of Artificial Sequence: Synthetic oligonucleotide
  Sense strand starting at position 3376 of SEQ ID NO: 1244897
ggcugugaucaacagagug

SEQ ID NO: 1521165 - RNA, 19 nt, Artificial Sequence
  Description of Artificial Sequence: Synthetic oligonucleotide
  Antisense strand to SEQ ID NO: 1521164
cacucuguugaucacagcc

SEQ ID NO: 1521166 - RNA, 19 nt, Artificial Sequence
  Description of Artificial Sequence: Synthetic oligonucleotide
  Sense strand starting at position 3718 of SEQ ID NO: 1244897
gcuuaacgccacuguuauc

SEQ ID NO: 1521167 - RNA, 19 nt, Artificial Sequence
  Description of Artificial Sequence: Synthetic oligonucleotide
  Antisense strand to SEQ ID NO: 1521166
gauaacaguggcguuaagc

SEQ ID NO: 1521168 - RNA, 19 nt, Artificial Sequence
  Description of Artificial Sequence: Synthetic oligonucleotide
  Sense strand starting at position 3727 of SEQ ID NO: 1244897
cacuguuaucuaggaggag

SEQ ID NO: 1521169 - RNA, 19 nt, Artificial Sequence
  Description of Artificial Sequence: Synthetic oligonucleotide
  Antisense strand to SEQ ID NO: 1521168
cuccuccuagauaacagug

SEQ ID NO: 1521170 - RNA, 19 nt, Artificial Sequence
  Description of Artificial Sequence: Synthetic oligonucleotide
  Sense strand starting at position 3730 of SEQ ID NO: 1244897
uguuaucuaggaggagguu

SEQ ID NO: 1521171 - RNA, 19 nt, Artificial Sequence
  Description of Artificial Sequence: Synthetic oligonucleotide
  Antisense strand to SEQ ID NO: 1521170
aaccuccuccuagauaaca

SEQ ID NO: 1521172 - RNA, 19 nt, Artificial Sequence
  Description of Artificial Sequence: Synthetic oligonucleotide
  Sense strand starting at position 618 of SEQ ID NO: 1244898
gauucucaggcccgaaaga

SEQ ID NO: 1521173 - RNA, 19 nt, Artificial Sequence
  Description of Artificial Sequence: Synthetic oligonucleotide
  Antisense strand to SEQ ID NO: 1521172
ucuuucgggccugagaauc

SEQ ID NO: 1521174 - RNA, 19 nt, Artificial Sequence
  Description of Artificial Sequence: Synthetic oligonucleotide
  Sense strand starting at position 629 of SEQ ID NO: 1244898
ccgaaagagugcuucagua

SEQ ID NO: 1521175 - RNA, 19 nt, Artificial Sequence
  Description of Artificial Sequence: Synthetic oligonucleotide
  Antisense strand to SEQ ID NO: 1521174
uacugaagcacucuuucgg

SEQ ID NO: 1521176 - RNA, 19 nt, Artificial Sequence
  Description of Artificial Sequence: Synthetic oligonucleotide
  Sense strand starting at position 642 of SEQ ID NO: 1244898
ucaguaggaaucuguguua

SEQ ID NO: 1521177 - RNA, 19 nt, Artificial Sequence
  Description of Artificial Sequence: Synthetic oligonucleotide
  Antisense strand to SEQ ID NO: 1521176
uaacacagauuccuacuga

SEQ ID NO: 1521178 - RNA, 19 nt, Artificial Sequence
  Description of Artificial Sequence: Synthetic oligonucleotide
  Sense strand starting at position 743 of SEQ ID NO: 1244898
accuaaggcucacugauua

SEQ ID NO: 1521179 - RNA, 19 nt, Artificial Sequence
  Description of Artificial Sequence: Synthetic oligonucleotide
  Antisense strand to SEQ ID NO: 1521178
uaaucagugagccuuaggu

SEQ ID NO: 1521180 - RNA, 19 nt, Artificial Sequence
  Description of Artificial Sequence: Synthetic oligonucleotide
  Sense strand starting at position 755 of SEQ ID NO: 1244898
cugauuaagucuuaggaaa

SEQ ID NO: 1521181 - RNA, 19 nt, Artificial Sequence
  Description of Artificial Sequence: Synthetic oligonucleotide
  Antisense strand to SEQ ID NO: 1521180
uuuccuaagacuuaaucag

SEQ ID NO: 1521182 - RNA, 19 nt, Artificial Sequence
  Description of Artificial Sequence: Synthetic oligonucleotide
  Sense strand starting at position 757 of SEQ ID NO: 1244898
gauuaagucuuaggaaaug

SEQ ID NO: 1521183 - RNA, 19 nt, Artificial Sequence
  Description of Artificial Sequence: Synthetic oligonucleotide
  Antisense strand to SEQ ID NO: 1521182
cauuuccuaagacuuaauc

SEQ ID NO: 1521184 - RNA, 19 nt, Artificial Sequence
  Description of Artificial Sequence: Synthetic oligonucleotide
  Sense strand starting at position 805 of SEQ ID NO: 1244898
uucguccuccaagagguua

SEQ ID NO: 1521185 - RNA, 19 nt, Artificial Sequence
  Description of Artificial Sequence: Synthetic oligonucleotide
  Antisense strand to SEQ ID NO: 1521184
uaaccucuuggaggacgaa

SEQ ID NO: 1521186 - RNA, 19 nt, Artificial Sequence
  Description of Artificial Sequence: Synthetic oligonucleotide
  Sense strand starting at position 1012 of SEQ ID NO: 1244898
cacucagagccugguagua

SEQ ID NO: 1521187 - RNA, 19 nt, Artificial Sequence
  Description of Artificial Sequence: Synthetic oligonucleotide
  Antisense strand to SEQ ID NO: 1521186
uacuaccaggcucugagug

SEQ ID NO: 1521188 - RNA, 19 nt, Artificial Sequence
  Description of Artificial Sequence: Synthetic oligonucleotide
  Sense strand starting at position 1014 of SEQ ID NO: 1244898
cucagagccugguaguaaa

SEQ ID NO: 1521189 - RNA, 19 nt, Artificial Sequence
  Description of Artificial Sequence: Synthetic oligonucleotide
  Antisense strand to SEQ ID NO: 1521188
uuuacuaccaggcucugag

SEQ ID NO: 1521190 - RNA, 19 nt, Artificial Sequence
  Description of Artificial Sequence: Synthetic oligonucleotide
  Sense strand starting at position 1042 of SEQ ID NO: 1244898
agaauaaggucguuccgga

SEQ ID NO: 1521191 - RNA, 19 nt, Artificial Sequence
  Description of Artificial Sequence: Synthetic oligonucleotide
  Antisense strand to SEQ ID NO: 1521190
uccggaacgaccuuauucu

SEQ ID NO: 1521192 - RNA, 19 nt, Artificial Sequence
  Description of Artificial Sequence: Synthetic oligonucleotide
  Sense strand starting at position 1180 of SEQ ID NO: 1244898
cagaguggcuuucugcaau

SEQ ID NO: 1521193 - RNA, 19 nt, Artificial Sequence
  Description of Artificial Sequence: Synthetic oligonucleotide
  Antisense strand to SEQ ID NO: 1521192
auugcagaaagccacucug

SEQ ID NO: 1521194 - RNA, 19 nt, Artificial Sequence
  Description of Artificial Sequence: Synthetic oligonucleotide
  Sense strand starting at position 1214 of SEQ ID NO: 1244898
gggccaggcuguguaagaa

SEQ ID NO: 1521195 - RNA, 19 nt, Artificial Sequence
  Description of Artificial Sequence: Synthetic oligonucleotide
  Antisense strand to SEQ ID NO: 1521194
uucuuacacagccuggccc

SEQ ID NO: 1521196 - RNA, 19 nt, Artificial Sequence
  Description of Artificial Sequence: Synthetic oligonucleotide
  Sense strand starting at position 1222 of SEQ ID NO: 1244898
cuguguaagaagugguguu

SEQ ID NO: 1521197 - RNA, 19 nt, Artificial Sequence
  Description of Artificial Sequence: Synthetic oligonucleotide
  Antisense strand to SEQ ID NO: 1521196
aacaccacuucuuacacag

SEQ ID NO: 1521198 - RNA, 19 nt, Artificial Sequence
  Description of Artificial Sequence: Synthetic oligonucleotide
  Sense strand starting at position 1223 of SEQ ID NO: 1244898
uguguaagaagugguguuu

SEQ ID NO: 1521199 - RNA, 19 nt, Artificial Sequence
  Description of Artificial Sequence: Synthetic oligonucleotide
  Antisense strand to SEQ ID NO: 1521198
aaacaccacuucuuacaca

SEQ ID NO: 1521200 - RNA, 19 nt, Artificial Sequence
  Description of Artificial Sequence: Synthetic oligonucleotide
  Sense strand starting at position 1236 of SEQ ID NO: 1244898
guguuuguuggccuuguca

SEQ ID NO: 1521201 - RNA, 19 nt, Artificial Sequence
  Description of Artificial Sequence: Synthetic oligonucleotide
  Antisense strand to SEQ ID NO: 1521200
ugacaaggccaacaaacac

SEQ ID NO: 1521202 - RNA, 19 nt, Artificial Sequence
  Description of Artificial Sequence: Synthetic oligonucleotide
  Sense strand starting at position 1238 of SEQ ID NO: 1244898
guuuguuggccuugucaaa

SEQ ID NO: 1521203 - RNA, 19 nt, Artificial Sequence
  Description of Artificial Sequence: Synthetic oligonucleotide
  Antisense strand to SEQ ID NO: 1521202
uuugacaaggccaacaaac

SEQ ID NO: 1521204 - RNA, 19 nt, Artificial Sequence
  Description of Artificial Sequence: Synthetic oligonucleotide
  Sense strand starting at position 1251 of SEQ ID NO: 1244898
gucaaacagcuguaagaaa

SEQ ID NO: 1521205 - RNA, 19 nt, Artificial Sequence
  Description of Artificial Sequence: Synthetic oligonucleotide
  Antisense strand to SEQ ID NO: 1521204
uuucuuacagcuguuugac

SEQ ID NO: 1521206 - RNA, 19 nt, Artificial Sequence
  Description of Artificial Sequence: Synthetic oligonucleotide
  Sense strand starting at position 1281 of SEQ ID NO: 1244898
agggaugucguaggcaaua

SEQ ID NO: 1521207 - RNA, 19 nt, Artificial Sequence
  Description of Artificial Sequence: Synthetic oligonucleotide
  Antisense strand to SEQ ID NO: 1521206
uauugccuacgacaucccu

SEQ ID NO: 1521208 - RNA, 19 nt, Artificial Sequence
  Description of Artificial Sequence: Synthetic oligonucleotide
  Sense strand starting at position 1283 of SEQ ID NO: 1244898
ggaugucguaggcaauaca

SEQ ID NO: 1521209 - RNA, 19 nt, Artificial Sequence
  Description of Artificial Sequence: Synthetic oligonucleotide
  Antisense strand to SEQ ID NO: 1521208
uguauugccuacgacaucc

SEQ ID NO: 1521210 - RNA, 19 nt, Artificial Sequence
  Description of Artificial Sequence: Synthetic oligonucleotide
  Sense strand starting at position 1470 of SEQ ID NO: 1244898
cagacuuugugccuucgua

SEQ ID NO: 1521211 - RNA, 19 nt, Artificial Sequence
  Description of Artificial Sequence: Synthetic oligonucleotide
  Antisense strand to SEQ ID NO: 1521210
uacgaaggcacaaagucug

SEQ ID NO: 1521212 - RNA, 19 nt, Artificial Sequence
  Description of Artificial Sequence: Synthetic oligonucleotide
  Sense strand starting at position 1533 of SEQ ID NO: 1244898
cccguaggcaucugggaau

SEQ ID NO: 1521213 - RNA, 19 nt, Artificial Sequence
  Description of Artificial Sequence: Synthetic oligonucleotide
  Antisense strand to SEQ ID NO: 1521212
auucccagaugccuacggg

SEQ ID NO: 1521214 - RNA, 19 nt, Artificial Sequence
  Description of Artificial Sequence: Synthetic oligonucleotide
  Sense strand starting at position 1630 of SEQ ID NO: 1244898
gguggacauuggcgagaaa

SEQ ID NO: 1521215 - RNA, 19 nt, Artificial Sequence
  Description of Artificial Sequence: Synthetic oligonucleotide
  Antisense strand to SEQ ID NO: 1521214
uuucucgccaauguccacc

SEQ ID NO: 1521216 - RNA, 19 nt, Artificial Sequence
  Description of Artificial Sequence: Synthetic oligonucleotide
  Sense strand starting at position 1757 of SEQ ID NO: 1244898
cgcggacugucugauaaac

SEQ ID NO: 1521217 - RNA, 19 nt, Artificial Sequence
  Description of Artificial Sequence: Synthetic oligonucleotide
  Antisense strand to SEQ ID NO: 1521216
guuuaucagacaguccgcg

SEQ ID NO: 1521218 - RNA, 19 nt, Artificial Sequence
  Description of Artificial Sequence: Synthetic oligonucleotide
  Sense strand starting at position 1759 of SEQ ID NO: 1244898
cggacugucugauaaacga

SEQ ID NO: 1521219 - RNA, 19 nt, Artificial Sequence
  Description of Artificial Sequence: Synthetic oligonucleotide
  Antisense strand to SEQ ID NO: 1521218
ucguuuaucagacaguccg

SEQ ID NO: 1521220 - RNA, 19 nt, Artificial Sequence
  Description of Artificial Sequence: Synthetic oligonucleotide
  Sense strand starting at position 1784 of SEQ ID NO: 1244898
gggcaccucccauagguua

SEQ ID NO: 1521221 - RNA, 19 nt, Artificial Sequence
  Description of Artificial Sequence: Synthetic oligonucleotide
  Antisense strand to SEQ ID NO: 1521220
uaaccuaugggaggugccc

SEQ ID NO: 1521222 - RNA, 19 nt, Artificial Sequence
  Description of Artificial Sequence: Synthetic oligonucleotide
  Sense strand starting at position 1947 of SEQ ID NO: 1244898
cggccauagcuguagaaca

SEQ ID NO: 1521223 - RNA, 19 nt, Artificial Sequence
  Description of Artificial Sequence: Synthetic oligonucleotide
  Antisense strand to SEQ ID NO: 1521222
uguucuacagcuauggccg

SEQ ID NO: 1521224 - RNA, 19 nt, Artificial Sequence
  Description of Artificial Sequence: Synthetic oligonucleotide
  Sense strand starting at position 2205 of SEQ ID NO: 1244898
ggauuugcgucaaggauug

SEQ ID NO: 1521225 - RNA, 19 nt, Artificial Sequence
  Description of Artificial Sequence: Synthetic oligonucleotide
  Antisense strand to SEQ ID NO: 1521224
caauccuugacgcaaaucc

SEQ ID NO: 1521226 - RNA, 19 nt, Artificial Sequence
  Description of Artificial Sequence: Synthetic oligonucleotide
  Sense strand starting at position 2272 of SEQ ID NO: 1244898
ccggccaauuuccaaagau

SEQ ID NO: 1521227 - RNA, 19 nt, Artificial Sequence
  Description of Artificial Sequence: Synthetic oligonucleotide
  Antisense strand to SEQ ID NO: 1521226
aucuuuggaaauuggccgg

SEQ ID NO: 1521228 - RNA, 19 nt, Artificial Sequence
  Description of Artificial Sequence: Synthetic oligonucleotide
  Sense strand starting at position 2292 of SEQ ID NO: 1244898
ccggucuucucucaaaguu

SEQ ID NO: 1521229 - RNA, 19 nt, Artificial Sequence
  Description of Artificial Sequence: Synthetic oligonucleotide
  Antisense strand to SEQ ID NO: 1521228
aacuuugagagaagaccgg

SEQ ID NO: 1521230 - RNA, 19 nt, Artificial Sequence
  Description of Artificial Sequence: Synthetic oligonucleotide
  Sense strand starting at position 2457 of SEQ ID NO: 1244898
uccgccuucuuuguaugau

SEQ ID NO: 1521231 - RNA, 19 nt, Artificial Sequence
  Description of Artificial Sequence: Synthetic oligonucleotide
  Antisense strand to SEQ ID NO: 1521230
aucauacaaagaaggcgga

SEQ ID NO: 1521232 - RNA, 19 nt, Artificial Sequence
  Description of Artificial Sequence: Synthetic oligonucleotide
  Sense strand starting at position 3587 of SEQ ID NO: 1244898
cgugucuccgccuagggau

SEQ ID NO: 1521233 - RNA, 19 nt, Artificial Sequence
  Description of Artificial Sequence: Synthetic oligonucleotide
  Antisense strand to SEQ ID NO: 1521232
aucccuaggcggagacacg

SEQ ID NO: 1521234 - RNA, 19 nt, Artificial Sequence
  Description of Artificial Sequence: Synthetic oligonucleotide
  Sense strand starting at position 3649 of SEQ ID NO: 1244898
cucuccaguccaugaauga

SEQ ID NO: 1521235 - RNA, 19 nt, Artificial Sequence
  Description of Artificial Sequence: Synthetic oligonucleotide
  Antisense strand to SEQ ID NO: 1521234
ucauucauggacuggagag

SEQ ID NO: 1521236 - RNA, 19 nt, Artificial Sequence
  Description of Artificial Sequence: Synthetic oligonucleotide
  Sense strand starting at position 3650 of SEQ ID NO: 1244898
ucuccaguccaugaaugau

SEQ ID NO: 1521237 - RNA, 19 nt, Artificial Sequence
  Description of Artificial Sequence: Synthetic oligonucleotide
  Antisense strand to SEQ ID NO: 1521236
aucauucauggacuggaga

SEQ ID NO: 1521238 - RNA, 19 nt, Artificial Sequence
  Description of Artificial Sequence: Synthetic oligonucleotide
  Sense strand starting at position 82 of SEQ ID NO: 1244899
gguaauguggcggaaccuu

SEQ ID NO: 1521239 - RNA, 19 nt, Artificial Sequence
  Description of Artificial Sequence: Synthetic oligonucleotide
  Antisense strand to SEQ ID NO: 1521238
aagguuccgccacauuacc

SEQ ID NO: 1521240 - RNA, 19 nt, Artificial Sequence
  Description of Artificial Sequence: Synthetic oligonucleotide
  Sense strand starting at position 178 of SEQ ID NO: 1244899
gacugauucuggccuacuu

SEQ ID NO: 1521241 - RNA, 19 nt, Artificial Sequence
  Description of Artificial Sequence: Synthetic oligonucleotide
  Antisense strand to SEQ ID NO: 1521240
aaguaggccagaaucaguc

SEQ ID NO: 1521242 - RNA, 19 nt, Artificial Sequence
  Description of Artificial Sequence: Synthetic oligonucleotide
  Sense strand starting at position 188 of SEQ ID NO: 1244899
ggccuacuuuccugaugcu

SEQ ID NO: 1521243 - RNA, 19 nt, Artificial Sequence
  Description of Artificial Sequence: Synthetic oligonucleotide
  Antisense strand to SEQ ID NO: 1521242
agcaucaggaaaguaggcc

SEQ ID NO: 1521244 - RNA, 19 nt, Artificial Sequence
  Description of Artificial Sequence: Synthetic oligonucleotide
  Sense strand starting at position 197 of SEQ ID NO: 1244899
uccugaugcucugauccuu

SEQ ID NO: 1521245 - RNA, 19 nt, Artificial Sequence
  Description of Artificial Sequence: Synthetic oligonucleotide
  Antisense strand to SEQ ID NO: 1521244
aaggaucagagcaucagga

SEQ ID NO: 1521246 - RNA, 19 nt, Artificial Sequence
  Description of Artificial Sequence: Synthetic oligonucleotide
  Sense strand starting at position 282 of SEQ ID NO: 1244899
caucguuuccauugaggug

SEQ ID NO: 1521247 - RNA, 19 nt, Artificial Sequence
  Description of Artificial Sequence: Synthetic oligonucleotide
  Antisense strand to SEQ ID NO: 1521246
caccucaauggaaacgaug

SEQ ID NO: 1521248 - RNA, 19 nt, Artificial Sequence
  Description of Artificial Sequence: Synthetic oligonucleotide
  Sense strand starting at position 325 of SEQ ID NO: 1244899
ccguaucucugaccacgau

SEQ ID NO: 1521249 - RNA, 19 nt, Artificial Sequence
  Description of Artificial Sequence: Synthetic oligonucleotide
  Antisense strand to SEQ ID NO: 1521248
aucguggucagagauacgg

SEQ ID NO: 1521250 - RNA, 19 nt, Artificial Sequence
  Description of Artificial Sequence: Synthetic oligonucleotide
  Sense strand starting at position 363 of SEQ ID NO: 1244899
ucauuaaacuuaugaccga

SEQ ID NO: 1521251 - RNA, 19 nt, Artificial Sequence
  Description of Artificial Sequence: Synthetic oligonucleotide
  Antisense strand to SEQ ID NO: 1521250
ucggucauaaguuuaauga

SEQ ID NO: 1521252 - RNA, 19 nt, Artificial Sequence
  Description of Artificial Sequence: Synthetic oligonucleotide
  Sense strand starting at position 509 of SEQ ID NO: 1244899
gccaaagguucucucaagu

SEQ ID NO: 1521253 - RNA, 19 nt, Artificial Sequence
  Description of Artificial Sequence: Synthetic oligonucleotide
  Antisense strand to SEQ ID NO: 1521252
acuugagagaaccuuuggc

SEQ ID NO: 1521254 - RNA, 19 nt, Artificial Sequence
  Description of Artificial Sequence: Synthetic oligonucleotide
  Sense strand starting at position 637 of SEQ ID NO: 1244899
gugucauccugcuccggaa

SEQ ID NO: 1521255 - RNA, 19 nt, Artificial Sequence
  Description of Artificial Sequence: Synthetic oligonucleotide
  Antisense strand to SEQ ID NO: 1521254
uuccggagcaggaugacac

SEQ ID NO: 1521256 - RNA, 19 nt, Artificial Sequence
  Description of Artificial Sequence: Synthetic oligonucleotide
  Sense strand starting at position 801 of SEQ ID NO: 1244899
ggaacagaucucugagguc

SEQ ID NO: 1521257 - RNA, 19 nt, Artificial Sequence
  Description of Artificial Sequence: Synthetic oligonucleotide
  Antisense strand to SEQ ID NO: 1521256
gaccucagagaucuguucc

SEQ ID NO: 1521258 - RNA, 19 nt, Artificial Sequence
  Description of Artificial Sequence: Synthetic oligonucleotide
  Sense strand starting at position 814 of SEQ ID NO: 1244899
gaggucuggccaggaagaa

SEQ ID NO: 1521259 - RNA, 19 nt, Artificial Sequence
  Description of Artificial Sequence: Synthetic oligonucleotide
  Antisense strand to SEQ ID NO: 1521258
uucuuccuggccagaccuc

SEQ ID NO: 1521260 - RNA, 19 nt, Artificial Sequence
  Description of Artificial Sequence: Synthetic oligonucleotide
  Sense strand starting at position 928 of SEQ ID NO: 1244899
ggugauaguacuugugcca

SEQ ID NO: 1521261 - RNA, 19 nt, Artificial Sequence
  Description of Artificial Sequence: Synthetic oligonucleotide
  Antisense strand to SEQ ID NO: 1521260
uggcacaaguacuaucacc

SEQ ID NO: 1521262 - RNA, 19 nt, Artificial Sequence
  Description of Artificial Sequence: Synthetic oligonucleotide
  Sense strand starting at position 961 of SEQ ID NO: 1244899
gagcgcguucaguucguua

SEQ ID NO: 1521263 - RNA, 19 nt, Artificial Sequence
  Description of Artificial Sequence: Synthetic oligonucleotide
  Antisense strand to SEQ ID NO: 1521262
uaacgaacugaacgcgcuc

SEQ ID NO: 1521264 - RNA, 19 nt, Artificial Sequence
  Description of Artificial Sequence: Synthetic oligonucleotide
  Sense strand starting at position 963 of SEQ ID NO: 1244899
gcgcguucaguucguuaaa

SEQ ID NO: 1521265 - RNA, 19 nt, Artificial Sequence
  Description of Artificial Sequence: Synthetic oligonucleotide
  Antisense strand to SEQ ID NO: 1521264
uuuaacgaacugaacgcgc

SEQ ID NO: 1521266 - RNA, 19 nt, Artificial Sequence
  Description of Artificial Sequence: Synthetic oligonucleotide
  Sense strand starting at position 964 of SEQ ID NO: 1244899
cgcguucaguucguuaaau

SEQ ID NO: 1521267 - RNA, 19 nt, Artificial Sequence
  Description of Artificial Sequence: Synthetic oligonucleotide
  Antisense strand to SEQ ID NO: 1521266
auuuaacgaacugaacgcg

SEQ ID NO: 1521268 - RNA, 19 nt, Artificial Sequence
  Description of Artificial Sequence: Synthetic oligonucleotide
  Sense strand starting at position 965 of SEQ ID NO: 1244899
gcguucaguucguuaaauc

SEQ ID NO: 1521269 - RNA, 19 nt, Artificial Sequence
  Description of Artificial Sequence: Synthetic oligonucleotide
  Antisense strand to SEQ ID NO: 1521268
gauuuaacgaacugaacgc

SEQ ID NO: 1521270 - RNA, 19 nt, Artificial Sequence
  Description of Artificial Sequence: Synthetic oligonucleotide
  Sense strand starting at position 1698 of SEQ ID NO: 1244899
gaaguuguggcccauagac

SEQ ID NO: 1521271 - RNA, 19 nt, Artificial Sequence
  Description of Artificial Sequence: Synthetic oligonucleotide
  Antisense strand to SEQ ID NO: 1521270
gucuaugggccacaacuuc

SEQ ID NO: 1521272 - RNA, 19 nt, Artificial Sequence
  Description of Artificial Sequence: Synthetic oligonucleotide
  Sense strand starting at position 2254 of SEQ ID NO: 1244899
ccguuagcgaaacaggauu

SEQ ID NO: 1521273 - RNA, 19 nt, Artificial Sequence
  Description of Artificial Sequence: Synthetic oligonucleotide
  Antisense strand to SEQ ID NO: 1521272
aauccuguuucgcuaacgg

SEQ ID NO: 1521274 - RNA, 19 nt, Artificial Sequence
  Description of Artificial Sequence: Synthetic oligonucleotide
  Sense strand starting at position 397 of SEQ ID NO: 1244900
cagucauguucucugucuu

SEQ ID NO: 1521275 - RNA, 19 nt, Artificial Sequence
  Description of Artificial Sequence: Synthetic oligonucleotide
  Antisense strand to SEQ ID NO: 1521274
aagacagagaacaugacug

SEQ ID NO: 1521276 - RNA, 19 nt, Artificial Sequence
  Description of Artificial Sequence: Synthetic oligonucleotide
  Sense strand starting at position 398 of SEQ ID NO: 1244900
agucauguucucugucuua

SEQ ID NO: 1521277 - RNA, 19 nt, Artificial Sequence
  Description of Artificial Sequence: Synthetic oligonucleotide
  Antisense strand to SEQ ID NO: 1521276
uaagacagagaacaugacu

SEQ ID NO: 1521278 - RNA, 19 nt, Artificial Sequence
  Description of Artificial Sequence: Synthetic oligonucleotide
  Sense strand starting at position 403 of SEQ ID NO: 1244900
uguucucugucuuauauuu

SEQ ID NO: 1521279 - RNA, 19 nt, Artificial Sequence
  Description of Artificial Sequence: Synthetic oligonucleotide
  Antisense strand to SEQ ID NO: 1521278
aaauauaagacagagaaca

SEQ ID NO: 1521280 - RNA, 19 nt, Artificial Sequence
  Description of Artificial Sequence: Synthetic oligonucleotide
  Sense strand starting at position 739 of SEQ ID NO: 1244900
agaagauaaucuucuaguc

SEQ ID NO: 1521281 - RNA, 19 nt, Artificial Sequence
  Description of Artificial Sequence: Synthetic oligonucleotide
  Antisense strand to SEQ ID NO: 1521280
gacuagaagauuaucuucu

SEQ ID NO: 1521282 - RNA, 19 nt, Artificial Sequence
  Description of Artificial Sequence: Synthetic oligonucleotide
  Sense strand starting at position 791 of SEQ ID NO: 1244900
cuguauuugaagugacugu

SEQ ID NO: 1521283 - RNA, 19 nt, Artificial Sequence
  Description of Artificial Sequence: Synthetic oligonucleotide
  Antisense strand to SEQ ID NO: 1521282
acagucacuucaaauacag

SEQ ID NO: 1521284 - RNA, 19 nt, Artificial Sequence
  Description of Artificial Sequence: Synthetic oligonucleotide
  Sense strand starting at position 804 of SEQ ID NO: 1244900
gacugugagcuuggagaag

SEQ ID NO: 1521285 - RNA, 19 nt, Artificial Sequence
  Description of Artificial Sequence: Synthetic oligonucleotide
  Antisense strand to SEQ ID NO: 1521284
cuucuccaagcucacaguc

SEQ ID NO: 1521286 - RNA, 19 nt, Artificial Sequence
  Description of Artificial Sequence: Synthetic oligonucleotide
  Sense strand starting at position 872 of SEQ ID NO: 1244900
gggaccucguccugagagu

SEQ ID NO: 1521287 - RNA, 19 nt, Artificial Sequence
  Description of Artificial Sequence: Synthetic oligonucleotide
  Antisense strand to SEQ ID NO: 1521286
acucucaggacgagguccc

SEQ ID NO: 1521288 - RNA, 19 nt, Artificial Sequence
  Description of Artificial Sequence: Synthetic oligonucleotide
  Sense strand starting at position 904 of SEQ ID NO: 1244900
ccucuugagucguugccaa

SEQ ID NO: 1521289 - RNA, 19 nt, Artificial Sequence
  Description of Artificial Sequence: Synthetic oligonucleotide
  Antisense strand to SEQ ID NO: 1521288
uuggcaacgacucaagagg

SEQ ID NO: 1521290 - RNA, 19 nt, Artificial Sequence
  Description of Artificial Sequence: Synthetic oligonucleotide
  Sense strand starting at position 1298 of SEQ ID NO: 1244900
acaggaggcccagguaaau

SEQ ID NO: 1521291 - RNA, 19 nt, Artificial Sequence
  Description of Artificial Sequence: Synthetic oligonucleotide
  Antisense strand to SEQ ID NO: 1521290
auuuaccugggccuccugu

SEQ ID NO: 1521292 - RNA, 19 nt, Artificial Sequence
  Description of Artificial Sequence: Synthetic oligonucleotide
  Sense strand starting at position 2072 of SEQ ID NO: 1244900
uggcaaugcuauccacauc

SEQ ID NO: 1521293 - RNA, 19 nt, Artificial Sequence
  Description of Artificial Sequence: Synthetic oligonucleotide
  Antisense strand to SEQ ID NO: 1521292
gauguggauagcauugcca

SEQ ID NO: 1521294 - RNA, 19 nt, Artificial Sequence
  Description of Artificial Sequence: Synthetic oligonucleotide
  Sense strand starting at position 2091 of SEQ ID NO: 1244900
gcuacaauguccuaggaac

SEQ ID NO: 1521295 - RNA, 19 nt, Artificial Sequence
  Description of Artificial Sequence: Synthetic oligonucleotide
  Antisense strand to SEQ ID NO: 1521294
guuccuaggacauuguagc

SEQ ID NO: 1521296 - RNA, 19 nt, Artificial Sequence
  Description of Artificial Sequence: Synthetic oligonucleotide
  Sense strand starting at position 2144 of SEQ ID NO: 1244900
aagugagguccuuagcacu

SEQ ID NO: 1521297 - RNA, 19 nt, Artificial Sequence
  Description of Artificial Sequence: Synthetic oligonucleotide
  Antisense strand to SEQ ID NO: 1521296
agugcuaaggaccucacuu

SEQ ID NO: 1521298 - RNA, 19 nt, Artificial Sequence
  Description of Artificial Sequence: Synthetic oligonucleotide
  Sense strand starting at position 2237 of SEQ ID NO: 1244900
cuacguuccuuccugcaga

SEQ ID NO: 1521299 - RNA, 19 nt, Artificial Sequence
  Description of Artificial Sequence: Synthetic oligonucleotide
  Antisense strand to SEQ ID NO: 1521298
ucugcaggaaggaacguag

SEQ ID NO: 1521300 - RNA, 19 nt, Artificial Sequence
  Description of Artificial Sequence: Synthetic oligonucleotide
  Sense strand starting at position 2417 of SEQ ID NO: 1244900
ggcuguucuagaggaagga

SEQ ID NO: 1521301 - RNA, 19 nt, Artificial Sequence
  Description of Artificial Sequence: Synthetic oligonucleotide
  Antisense strand to SEQ ID NO: 1521300
uccuuccucuagaacagcc

SEQ ID NO: 1521302 - RNA, 19 nt, Artificial Sequence
  Description of Artificial Sequence: Synthetic oligonucleotide
  Sense strand starting at position 2430 of SEQ ID NO: 1244900
gaaggaggguccuggacaa

SEQ ID NO: 1521303 - RNA, 19 nt, Artificial Sequence
  Description of Artificial Sequence: Synthetic oligonucleotide
  Antisense strand to SEQ ID NO: 1521302
uuguccaggacccuccuuc

SEQ ID NO: 1521304 - RNA, 19 nt, Artificial Sequence
  Description of Artificial Sequence: Synthetic oligonucleotide
  Sense strand starting at position 2657 of SEQ ID NO: 1244900
gaaugagcugauugugcau

SEQ ID NO: 1521305 - RNA, 19 nt, Artificial Sequence
  Description of Artificial Sequence: Synthetic oligonucleotide
  Antisense strand to SEQ ID NO: 1521304
augcacaaucagcucauuc

SEQ ID NO: 1521306 - RNA, 19 nt, Artificial Sequence
  Description of Artificial Sequence: Synthetic oligonucleotide
  Sense strand starting at position 2799 of SEQ ID NO: 1244900
gagucaggaucagaaccau

SEQ ID NO: 1521307 - RNA, 19 nt, Artificial Sequence
  Description of Artificial Sequence: Synthetic oligonucleotide
  Antisense strand to SEQ ID NO: 1521306
augguucugauccugacuc

SEQ ID NO: 1521308 - RNA, 19 nt, Artificial Sequence
  Description of Artificial Sequence: Synthetic oligonucleotide
  Sense strand starting at position 3028 of SEQ ID NO: 1244900
ggacacuaauaucuguaau

SEQ ID NO: 1521309 - RNA, 19 nt, Artificial Sequence
  Description of Artificial Sequence: Synthetic oligonucleotide
  Antisense strand to SEQ ID NO: 1521308
auuacagauauuagugucc

SEQ ID NO: 1521310 - RNA, 19 nt, Artificial Sequence
  Description of Artificial Sequence: Synthetic oligonucleotide
  Sense strand starting at position 3084 of SEQ ID NO: 1244900
agcagaaugcucugcucua

SEQ ID NO: 1521311 - RNA, 19 nt, Artificial Sequence
  Description of Artificial Sequence: Synthetic oligonucleotide
  Antisense strand to SEQ ID NO: 1521310
uagagcagagcauucugcu

SEQ ID NO: 1521312 - RNA, 19 nt, Artificial Sequence
  Description of Artificial Sequence: Synthetic oligonucleotide
  Sense strand starting at position 3085 of SEQ ID NO: 1244900
gcagaaugcucugcucuag

SEQ ID NO: 1521313 - RNA, 19 nt, Artificial Sequence
  Description of Artificial Sequence: Synthetic oligonucleotide
  Antisense strand to SEQ ID NO: 1521312
cuagagcagagcauucugc

SEQ ID NO: 1521314 - RNA, 19 nt, Artificial Sequence
  Description of Artificial Sequence: Synthetic oligonucleotide
  Sense strand starting at position 3122 of SEQ ID NO: 1244900
ggcaguauugugucguguu

SEQ ID NO: 1521315 - RNA, 19 nt, Artificial Sequence
  Description of Artificial Sequence: Synthetic oligonucleotide
  Antisense strand to SEQ ID NO: 1521314
aacacgacacaauacugcc

SEQ ID NO: 1521316 - RNA, 19 nt, Artificial Sequence
  Description of Artificial Sequence: Synthetic oligonucleotide
  Sense strand starting at position 3127 of SEQ ID NO: 1244900
uauugugucguguuaguca

SEQ ID NO: 1521317 - RNA, 19 nt, Artificial Sequence
  Description of Artificial Sequence: Synthetic oligonucleotide
  Antisense strand to SEQ ID NO: 1521316
ugacuaacacgacacaaua

SEQ ID NO: 1521318 - RNA, 19 nt, Artificial Sequence
  Description of Artificial Sequence: Synthetic oligonucleotide
  Sense strand starting at position 3129 of SEQ ID NO: 1244900
uugugucguguuagucagu

SEQ ID NO: 1521319 - RNA, 19 nt, Artificial Sequence
  Description of Artificial Sequence: Synthetic oligonucleotide
  Antisense strand to SEQ ID NO: 1521318
acugacuaacacgacacaa

SEQ ID NO: 1521320 - RNA, 19 nt, Artificial Sequence
  Description of Artificial Sequence: Synthetic oligonucleotide
  Sense strand starting at position 3131 of SEQ ID NO: 1244900
gugucguguuagucagugu

SEQ ID NO: 1521321 - RNA, 19 nt, Artificial Sequence
  Description of Artificial Sequence: Synthetic oligonucleotide
  Antisense strand to SEQ ID NO: 1521320
acacugacuaacacgacac

SEQ ID NO: 1521322 - RNA, 19 nt, Artificial Sequence
  Description of Artificial Sequence: Synthetic oligonucleotide
  Sense strand starting at position 3135 of SEQ ID NO: 1244900
cguguuagucagugugcca

SEQ ID NO: 1521323 - RNA, 19 nt, Artificial Sequence
  Description of Artificial Sequence: Synthetic oligonucleotide
  Antisense strand to SEQ ID NO: 1521322
uggcacacugacuaacacg

SEQ ID NO: 1521324 - RNA, 19 nt, Artificial Sequence
  Description of Artificial Sequence: Synthetic oligonucleotide
  Sense strand starting at position 3164 of SEQ ID NO: 1244900
ugugcugugugaccuuaga

SEQ ID NO: 1521325 - RNA, 19 nt, Artificial Sequence
  Description of Artificial Sequence: Synthetic oligonucleotide
  Antisense strand to SEQ ID NO: 1521324
ucuaaggucacacagcaca

SEQ ID NO: 1521326 - RNA, 19 nt, Artificial Sequence
  Description of Artificial Sequence: Synthetic oligonucleotide
  Sense strand starting at position 3171 of SEQ ID NO: 1244900
ugugaccuuagacgagaaa

SEQ ID NO: 1521327 - RNA, 19 nt, Artificial Sequence
  Description of Artificial Sequence: Synthetic oligonucleotide
  Antisense strand to SEQ ID NO: 1521326
uuucucgucuaaggucaca

SEQ ID NO: 1521328 - RNA, 19 nt, Artificial Sequence
  Description of Artificial Sequence: Synthetic oligonucleotide
  Sense strand starting at position 3291 of SEQ ID NO: 1244900
cagagucuggcauacagua

SEQ ID NO: 1521329 - RNA, 19 nt, Artificial Sequence
  Description of Artificial Sequence: Synthetic oligonucleotide
  Antisense strand to SEQ ID NO: 1521328
uacuguaugccagacucug

SEQ ID NO: 1521330 - RNA, 19 nt, Artificial Sequence
  Description of Artificial Sequence: Synthetic oligonucleotide
  Sense strand starting at position 3299 of SEQ ID NO: 1244900
ggcauacaguaauggcaaa

SEQ ID NO: 1521331 - RNA, 19 nt, Artificial Sequence
  Description of Artificial Sequence: Synthetic oligonucleotide
  Antisense strand to SEQ ID NO: 1521330
uuugccauuacuguaugcc

SEQ ID NO: 1521332 - RNA, 19 nt, Artificial Sequence
  Description of Artificial Sequence: Synthetic oligonucleotide
  Sense strand starting at position 3327 of SEQ ID NO: 1244900
gcugucauuccuggcagag

SEQ ID NO: 1521333 - RNA, 19 nt, Artificial Sequence
  Description of Artificial Sequence: Synthetic oligonucleotide
  Antisense strand to SEQ ID NO: 1521332
cucugccaggaaugacagc

SEQ ID NO: 1521334 - RNA, 19 nt, Artificial Sequence
  Description of Artificial Sequence: Synthetic oligonucleotide
  Sense strand starting at position 3329 of SEQ ID NO: 1244900
ugucauuccuggcagagac

SEQ ID NO: 1521335 - RNA, 19 nt, Artificial Sequence
  Description of Artificial Sequence: Synthetic oligonucleotide
  Antisense strand to SEQ ID NO: 1521334
gucucugccaggaaugaca

SEQ ID NO: 1521336 - RNA, 19 nt, Artificial Sequence
  Description of Artificial Sequence: Synthetic oligonucleotide
  Sense strand starting at position 3475 of SEQ ID NO: 1244900
ccaggaagcuuugcucacu

SEQ ID NO: 1521337 - RNA, 19 nt, Artificial Sequence
  Description of Artificial Sequence: Synthetic oligonucleotide
  Antisense strand to SEQ ID NO: 1521336
agugagcaaagcuuccugg

SEQ ID NO: 1521338 - RNA, 19 nt, Artificial Sequence
  Description of Artificial Sequence: Synthetic oligonucleotide
  Sense strand starting at position 3478 of SEQ ID NO: 1244900
ggaagcuuugcucacuaaa

SEQ ID NO: 1521339 - RNA, 19 nt, Artificial Sequence
  Description of Artificial Sequence: Synthetic oligonucleotide
  Antisense strand to SEQ ID NO: 1521338
uuuagugagcaaagcuucc

SEQ ID NO: 1521340 - RNA, 19 nt, Artificial Sequence
  Description of Artificial Sequence: Synthetic oligonucleotide
  Sense strand starting at position 3610 of SEQ ID NO: 1244900
ugggacuggagaugugauu

SEQ ID NO: 1521341 - RNA, 19 nt, Artificial Sequence
  Description of Artificial Sequence: Synthetic oligonucleotide
  Antisense strand to SEQ ID NO: 1521340
aaucacaucuccaguccca

SEQ ID NO: 1521342 - RNA, 19 nt, Artificial Sequence
  Description of Artificial Sequence: Synthetic oligonucleotide
  Sense strand starting at position 3619 of SEQ ID NO: 1244900
agaugugauucccuccacu

SEQ ID NO: 1521343 - RNA, 19 nt, Artificial Sequence
  Description of Artificial Sequence: Synthetic oligonucleotide
  Antisense strand to SEQ ID NO: 1521342
aguggagggaaucacaucu

SEQ ID NO: 1521344 - RNA, 19 nt, Artificial Sequence
  Description of Artificial Sequence: Synthetic oligonucleotide
  Sense strand starting at position 3688 of SEQ ID NO: 1244900
gggucuacuucacagagga

SEQ ID NO: 1521345 - RNA, 19 nt, Artificial Sequence
  Description of Artificial Sequence: Synthetic oligonucleotide
  Antisense strand to SEQ ID NO: 1521344
uccucugugaaguagaccc

SEQ ID NO: 1521346 - RNA, 19 nt, Artificial Sequence
  Description of Artificial Sequence: Synthetic oligonucleotide
  Sense strand starting at position 3727 of SEQ ID NO: 1244900
cugagagcucauggagacu

SEQ ID NO: 1521347 - RNA, 19 nt, Artificial Sequence
  Description of Artificial Sequence: Synthetic oligonucleotide
  Antisense strand to SEQ ID NO: 1521346
agucuccaugagcucucag

SEQ ID NO: 1521348 - RNA, 19 nt, Artificial Sequence
  Description of Artificial Sequence: Synthetic oligonucleotide
  Sense strand starting at position 3746 of SEQ ID NO: 1244900
ggaggcugugccugucaca

SEQ ID NO: 1521349 - RNA, 19 nt, Artificial Sequence
  Description of Artificial Sequence: Synthetic oligonucleotide
  Antisense strand to SEQ ID NO: 1521348
ugugacaggcacagccucc

SEQ ID NO: 1521350 - RNA, 19 nt, Artificial Sequence
  Description of Artificial Sequence: Synthetic oligonucleotide
  Sense strand starting at position 3819 of SEQ ID NO: 1244900
ucaggacucucguagccau

SEQ ID NO: 1521351 - RNA, 19 nt, Artificial Sequence
  Description of Artificial Sequence: Synthetic oligonucleotide
  Antisense strand to SEQ ID NO: 1521350
auggcuacgagaguccuga

SEQ ID NO: 1521352 - RNA, 19 nt, Artificial Sequence
  Description of Artificial Sequence: Synthetic oligonucleotide
  Sense strand starting at position 3822 of SEQ ID NO: 1244900
ggacucucguagccauauu

SEQ ID NO: 1521353 - RNA, 19 nt, Artificial Sequence
  Description of Artificial Sequence: Synthetic oligonucleotide
  Antisense strand to SEQ ID NO: 1521352
aauauggcuacgagagucc

SEQ ID NO: 1521354 - RNA, 19 nt, Artificial Sequence
  Description of Artificial Sequence: Synthetic oligonucleotide
  Sense strand starting at position 85 of SEQ ID NO: 1244901
aagggugagucugugaauc

SEQ ID NO: 1521355 - RNA, 19 nt, Artificial Sequence
  Description of Artificial Sequence: Synthetic oligonucleotide
  Antisense strand to SEQ ID NO: 1521354
gauucacagacucacccuu

SEQ ID NO: 1521356 - RNA, 19 nt, Artificial Sequence
  Description of Artificial Sequence: Synthetic oligonucleotide
  Sense strand starting at position 87 of SEQ ID NO: 1244901
gggugagucugugaaucca

SEQ ID NO: 1521357 - RNA, 19 nt, Artificial Sequence
  Description of Artificial Sequence: Synthetic oligonucleotide
  Antisense strand to SEQ ID NO: 1521356
uggauucacagacucaccc

SEQ ID NO: 1521358 - RNA, 19 nt, Artificial Sequence
  Description of Artificial Sequence: Synthetic oligonucleotide
  Sense strand starting at position 705 of SEQ ID NO: 1244901
gcuaauaaguaauggauaa

SEQ ID NO: 1521359 - RNA, 19 nt, Artificial Sequence
  Description of Artificial Sequence: Synthetic oligonucleotide
  Antisense strand to SEQ ID NO: 1521358
uuauccauuacuuauuagc

SEQ ID NO: 1521360 - RNA, 19 nt, Artificial Sequence
  Description of Artificial Sequence: Synthetic oligonucleotide
  Sense strand starting at position 770 of SEQ ID NO: 1244901
aggagcucuucucccagau

SEQ ID NO: 1521361 - RNA, 19 nt, Artificial Sequence
  Description of Artificial Sequence: Synthetic oligonucleotide
  Antisense strand to SEQ ID NO: 1521360
aucugggagaagagcuccu

SEQ ID NO: 1521362 - RNA, 19 nt, Artificial Sequence
  Description of Artificial Sequence: Synthetic oligonucleotide
  Sense strand starting at position 864 of SEQ ID NO: 1244901
uggucuugggcugggagua

SEQ ID NO: 1521363 - RNA, 19 nt, Artificial Sequence
  Description of Artificial Sequence: Synthetic oligonucleotide
  Antisense strand to SEQ ID NO: 1521362
uacucccagcccaagacca

SEQ ID NO: 1521364 - RNA, 19 nt, Artificial Sequence
  Description of Artificial Sequence: Synthetic oligonucleotide
  Sense strand starting at position 865 of SEQ ID NO: 1244901
ggucuugggcugggaguaa

SEQ ID NO: 1521365 - RNA, 19 nt, Artificial Sequence
  Description of Artificial Sequence: Synthetic oligonucleotide
  Antisense strand to SEQ ID NO: 1521364
uuacucccagcccaagacc

SEQ ID NO: 1521366 - RNA, 19 nt, Artificial Sequence
  Description of Artificial Sequence: Synthetic oligonucleotide
  Sense strand starting at position 880 of SEQ ID NO: 1244901
guaaguaaaucucagcuua

SEQ ID NO: 1521367 - RNA, 19 nt, Artificial Sequence
  Description of Artificial Sequence: Synthetic oligonucleotide
  Antisense strand to SEQ ID NO: 1521366
uaagcugagauuuacuuac

SEQ ID NO: 1521368 - RNA, 19 nt, Artificial Sequence
  Description of Artificial Sequence: Synthetic oligonucleotide
  Sense strand starting at position 905 of SEQ ID NO: 1244901
uccagaauugaagguauua

SEQ ID NO: 1521369 - RNA, 19 nt, Artificial Sequence
  Description of Artificial Sequence: Synthetic oligonucleotide
  Antisense strand to SEQ ID NO: 1521368
uaauaccuucaauucugga

SEQ ID NO: 1521370 - RNA, 19 nt, Artificial Sequence
  Description of Artificial Sequence: Synthetic oligonucleotide
  Sense strand starting at position 993 of SEQ ID NO: 1244901
cugaccgcccagugauuua

SEQ ID NO: 1521371 - RNA, 19 nt, Artificial Sequence
  Description of Artificial Sequence: Synthetic oligonucleotide
  Antisense strand to SEQ ID NO: 1521370
uaaaucacugggcggucag

SEQ ID NO: 1521372 - RNA, 19 nt, Artificial Sequence
  Description of Artificial Sequence: Synthetic oligonucleotide
  Sense strand starting at position 1000 of SEQ ID NO: 1244901
cccagugauuuagaaggaa

SEQ ID NO: 1521373 - RNA, 19 nt, Artificial Sequence
  Description of Artificial Sequence: Synthetic oligonucleotide
  Antisense strand to SEQ ID NO: 1521372
uuccuucuaaaucacuggg

SEQ ID NO: 1521374 - RNA, 19 nt, Artificial Sequence
  Description of Artificial Sequence: Synthetic oligonucleotide
  Sense strand starting at position 1015 of SEQ ID NO: 1244901
ggaacaccuugcucacuaa

SEQ ID NO: 1521375 - RNA, 19 nt, Artificial Sequence
  Description of Artificial Sequence: Synthetic oligonucleotide
  Antisense strand to SEQ ID NO: 1521374
uuagugagcaagguguucc

SEQ ID NO: 1521376 - RNA, 19 nt, Artificial Sequence
  Description of Artificial Sequence: Synthetic oligonucleotide
  Sense strand starting at position 1056 of SEQ ID NO: 1244901
ggcagagccucucugaaag

SEQ ID NO: 1521377 - RNA, 19 nt, Artificial Sequence
  Description of Artificial Sequence: Synthetic oligonucleotide
  Antisense strand to SEQ ID NO: 1521376
cuuucagagaggcucugcc

SEQ ID NO: 1521378 - RNA, 19 nt, Artificial Sequence
  Description of Artificial Sequence: Synthetic oligonucleotide
  Sense strand starting at position 1140 of SEQ ID NO: 1244901
ccgguucuuaaauggaaau

SEQ ID NO: 1521379 - RNA, 19 nt, Artificial Sequence
  Description of Artificial Sequence: Synthetic oligonucleotide
  Antisense strand to SEQ ID NO: 1521378
auuuccauuuaagaaccgg

SEQ ID NO: 1521380 - RNA, 19 nt, Artificial Sequence
  Description of Artificial Sequence: Synthetic oligonucleotide
  Sense strand starting at position 1141 of SEQ ID NO: 1244901
cgguucuuaaauggaaaua

SEQ ID NO: 1521381 - RNA, 19 nt, Artificial Sequence
  Description of Artificial Sequence: Synthetic oligonucleotide
  Antisense strand to SEQ ID NO: 1521380
uauuuccauuuaagaaccg

SEQ ID NO: 1521382 - RNA, 19 nt, Artificial Sequence
  Description of Artificial Sequence: Synthetic oligonucleotide
  Sense strand starting at position 1184 of SEQ ID NO: 1244901
cgucucuguucccaggaua

SEQ ID NO: 1521383 - RNA, 19 nt, Artificial Sequence
  Description of Artificial Sequence: Synthetic oligonucleotide
  Antisense strand to SEQ ID NO: 1521382
uauccugggaacagagacg

SEQ ID NO: 1521384 - RNA, 19 nt, Artificial Sequence
  Description of Artificial Sequence: Synthetic oligonucleotide
  Sense strand starting at position 1187 of SEQ ID NO: 1244901
cucuguucccaggauaaac

SEQ ID NO: 1521385 - RNA, 19 nt, Artificial Sequence
  Description of Artificial Sequence: Synthetic oligonucleotide
  Antisense strand to SEQ ID NO: 1521384
guuuauccugggaacagag

SEQ ID NO: 1521386 - RNA, 19 nt, Artificial Sequence
  Description of Artificial Sequence: Synthetic oligonucleotide
  Sense strand starting at position 1234 of SEQ ID NO: 1244901
ccaucaccuguagaguuua

SEQ ID NO: 1521387 - RNA, 19 nt, Artificial Sequence
  Description of Artificial Sequence: Synthetic oligonucleotide
  Antisense strand to SEQ ID NO: 1521386
uaaacucuacaggugaugg

SEQ ID NO: 1521388 - RNA, 19 nt, Artificial Sequence
  Description of Artificial Sequence: Synthetic oligonucleotide
  Sense strand starting at position 1244 of SEQ ID NO: 1244901
uagaguuuacuugggagga

SEQ ID NO: 1521389 - RNA, 19 nt, Artificial Sequence
  Description of Artificial Sequence: Synthetic oligonucleotide
  Antisense strand to SEQ ID NO: 1521388
uccucccaaguaaacucua

SEQ ID NO: 1521390 - RNA, 19 nt, Artificial Sequence
  Description of Artificial Sequence: Synthetic oligonucleotide
  Sense strand starting at position 1245 of SEQ ID NO: 1244901
agaguuuacuugggaggaa

SEQ ID NO: 1521391 - RNA, 19 nt, Artificial Sequence
  Description of Artificial Sequence: Synthetic oligonucleotide
  Antisense strand to SEQ ID NO: 1521390
uuccucccaaguaaacucu

SEQ ID NO: 1521392 - RNA, 19 nt, Artificial Sequence
  Description of Artificial Sequence: Synthetic oligonucleotide
  Sense strand starting at position 1246 of SEQ ID NO: 1244901
gaguuuacuugggaggaac

SEQ ID NO: 1521393 - RNA, 19 nt, Artificial Sequence
  Description of Artificial Sequence: Synthetic oligonucleotide
  Antisense strand to SEQ ID NO: 1521392
guuccucccaaguaaacuc

SEQ ID NO: 1521394 - RNA, 19 nt, Artificial Sequence
  Description of Artificial Sequence: Synthetic oligonucleotide
  Sense strand starting at position 1545 of SEQ ID NO: 1244901
aggauaagcugaggcuaau

SEQ ID NO: 1521395 - RNA, 19 nt, Artificial Sequence
  Description of Artificial Sequence: Synthetic oligonucleotide
  Antisense strand to SEQ ID NO: 1521394
auuagccucagcuuauccu

SEQ ID NO: 1521396 - RNA, 19 nt, Artificial Sequence
  Description of Artificial Sequence: Synthetic oligonucleotide
  Sense strand starting at position 1590 of SEQ ID NO: 1244901
agacgugcuaggugucaga

SEQ ID NO: 1521397 - RNA, 19 nt, Artificial Sequence
  Description of Artificial Sequence: Synthetic oligonucleotide
  Antisense strand to SEQ ID NO: 1521396
ucugacaccuagcacgucu

SEQ ID NO: 1521398 - RNA, 19 nt, Artificial Sequence
  Description of Artificial Sequence: Synthetic oligonucleotide
  Sense strand starting at position 1593 of SEQ ID NO: 1244901
cgugcuaggugucagauaa

SEQ ID NO: 1521399 - RNA, 19 nt, Artificial Sequence
  Description of Artificial Sequence: Synthetic oligonucleotide
  Antisense strand to SEQ ID NO: 1521398
uuaucugacaccuagcacg

SEQ ID NO: 1521400 - RNA, 19 nt, Artificial Sequence
  Description of Artificial Sequence: Synthetic oligonucleotide
  Sense strand starting at position 1597 of SEQ ID NO: 1244901
cuaggugucagauaaggug

SEQ ID NO: 1521401 - RNA, 19 nt, Artificial Sequence
  Description of Artificial Sequence: Synthetic oligonucleotide
  Antisense strand to SEQ ID NO: 1521400
caccuuaucugacaccuag

SEQ ID NO: 1521402 - RNA, 19 nt, Artificial Sequence
  Description of Artificial Sequence: Synthetic oligonucleotide
  Sense strand starting at position 1759 of SEQ ID NO: 1244901
aauccugauucuggaaggu

SEQ ID NO: 1521403 - RNA, 19 nt, Artificial Sequence
  Description of Artificial Sequence: Synthetic oligonucleotide
  Antisense strand to SEQ ID NO: 1521402
accuuccagaaucaggauu

SEQ ID NO: 1521404 - RNA, 19 nt, Artificial Sequence
  Description of Artificial Sequence: Synthetic oligonucleotide
  Sense strand starting at position 2130 of SEQ ID NO: 1244901
agaagagauuaacggauuu

SEQ ID NO: 1521405 - RNA, 19 nt, Artificial Sequence
  Description of Artificial Sequence: Synthetic oligonucleotide
  Antisense strand to SEQ ID NO: 1521404
aaauccguuaaucucuucu

SEQ ID NO: 1521406 - RNA, 19 nt, Artificial Sequence
  Description of Artificial Sequence: Synthetic oligonucleotide
  Sense strand starting at position 2663 of SEQ ID NO: 1244901
aggcgaagguucuagggua

SEQ ID NO: 1521407 - RNA, 19 nt, Artificial Sequence
  Description of Artificial Sequence: Synthetic oligonucleotide
  Antisense strand to SEQ ID NO: 1521406
uacccuagaaccuucgccu

SEQ ID NO: 1521408 - RNA, 19 nt, Artificial Sequence
  Description of Artificial Sequence: Synthetic oligonucleotide
  Sense strand starting at position 2665 of SEQ ID NO: 1244901
gcgaagguucuaggguaga

SEQ ID NO: 1521409 - RNA, 19 nt, Artificial Sequence
  Description of Artificial Sequence: Synthetic oligonucleotide
  Antisense strand to SEQ ID NO: 1521408
ucuacccuagaaccuucgc

SEQ ID NO: 1521410 - RNA, 19 nt, Artificial Sequence
  Description of Artificial Sequence: Synthetic oligonucleotide
  Sense strand starting at position 3418 of SEQ ID NO: 1244901
cagucauguucucugucuu

SEQ ID NO: 1521411 - RNA, 19 nt, Artificial Sequence
  Description of Artificial Sequence: Synthetic oligonucleotide
  Antisense strand to SEQ ID NO: 1521410
aagacagagaacaugacug

SEQ ID NO: 1521412 - RNA, 19 nt, Artificial Sequence
  Description of Artificial Sequence: Synthetic oligonucleotide
  Sense strand starting at position 3419 of SEQ ID NO: 1244901
agucauguucucugucuua

SEQ ID NO: 1521413 - RNA, 19 nt, Artificial Sequence
  Description of Artificial Sequence: Synthetic oligonucleotide
  Antisense strand to SEQ ID NO: 1521412
uaagacagagaacaugacu

SEQ ID NO: 1521414 - RNA, 19 nt, Artificial Sequence
  Description of Artificial Sequence: Synthetic oligonucleotide
  Sense strand starting at position 3424 of SEQ ID NO: 1244901
uguucucugucuuauauuu

SEQ ID NO: 1521415 - RNA, 19 nt, Artificial Sequence
  Description of Artificial Sequence: Synthetic oligonucleotide
  Antisense strand to SEQ ID NO: 1521414
aaauauaagacagagaaca

SEQ ID NO: 1521416 - RNA, 19 nt, Artificial Sequence
  Description of Artificial Sequence: Synthetic oligonucleotide
  Sense strand starting at position 3515 of SEQ ID NO: 1244901
cccaguuucucucgaguuc

SEQ ID NO: 1521417 - RNA, 19 nt, Artificial Sequence
  Description of Artificial Sequence: Synthetic oligonucleotide
  Antisense strand to SEQ ID NO: 1521416
gaacucgagagaaacuggg

SEQ ID NO: 1521418 - RNA, 19 nt, Artificial Sequence
  Description of Artificial Sequence: Synthetic oligonucleotide
  Sense strand starting at position 3760 of SEQ ID NO: 1244901
agaagauaaucuucuaguc

SEQ ID NO: 1521419 - RNA, 19 nt, Artificial Sequence
  Description of Artificial Sequence: Synthetic oligonucleotide
  Antisense strand to SEQ ID NO: 1521418
gacuagaagauuaucuucu

SEQ ID NO: 1521420 - RNA, 19 nt, Artificial Sequence
  Description of Artificial Sequence: Synthetic oligonucleotide
  Sense strand starting at position 3812 of SEQ ID NO: 1244901
cuguauuugaagugacugu

SEQ ID NO: 1521421 - RNA, 19 nt, Artificial Sequence
  Description of Artificial Sequence: Synthetic oligonucleotide
  Antisense strand to SEQ ID NO: 1521420
acagucacuucaaauacag

SEQ ID NO: 1521422 - RNA, 19 nt, Artificial Sequence
  Description of Artificial Sequence: Synthetic oligonucleotide
  Sense strand starting at position 3825 of SEQ ID NO: 1244901
gacugugagcuuggagaag

SEQ ID NO: 1521423 - RNA, 19 nt, Artificial Sequence
  Description of Artificial Sequence: Synthetic oligonucleotide
  Antisense strand to SEQ ID NO: 1521422
cuucuccaagcucacaguc

SEQ ID NO: 1521424 - RNA, 19 nt, Artificial Sequence
  Description of Artificial Sequence: Synthetic oligonucleotide
  Sense strand starting at position 3893 of SEQ ID NO: 1244901
gggaccucguccugagagu

SEQ ID NO: 1521425 - RNA, 19 nt, Artificial Sequence
  Description of Artificial Sequence: Synthetic oligonucleotide
  Antisense strand to SEQ ID NO: 1521424
acucucaggacgagguccc

SEQ ID NO: 1521426 - RNA, 19 nt, Artificial Sequence
  Description of Artificial Sequence: Synthetic oligonucleotide
  Sense strand starting at position 3925 of SEQ ID NO: 1244901
ccucuugagucguugccaa

SEQ ID NO: 1521427 - RNA, 19 nt, Artificial Sequence
  Description of Artificial Sequence: Synthetic oligonucleotide
  Antisense strand to SEQ ID NO: 1521426
uuggcaacgacucaagagg

SEQ ID NO: 1521428 - RNA, 19 nt, Artificial Sequence
  Description of Artificial Sequence: Synthetic oligonucleotide
  Sense strand starting at position 779 of SEQ ID NO: 1244902
ccugacuuccugcagggaa

SEQ ID NO: 1521429 - RNA, 19 nt, Artificial Sequence
  Description of Artificial Sequence: Synthetic oligonucleotide
  Antisense strand to SEQ ID NO: 1521428
uucccugcaggaagucagg

SEQ ID NO: 1521430 - RNA, 19 nt, Artificial Sequence
  Description of Artificial Sequence: Synthetic oligonucleotide
  Sense strand starting at position 811 of SEQ ID NO: 1244902
gaaugauucugggacccac

SEQ ID NO: 1521431 - RNA, 19 nt, Artificial Sequence
  Description of Artificial Sequence: Synthetic oligonucleotide
  Antisense strand to SEQ ID NO: 1521430
gugggucccagaaucauuc

SEQ ID NO: 1521432 - RNA, 19 nt, Artificial Sequence
  Description of Artificial Sequence: Synthetic oligonucleotide
  Sense strand starting at position 1204 of SEQ ID NO: 1244902
acacauuccuuugguuaag

SEQ ID NO: 1521433 - RNA, 19 nt, Artificial Sequence
  Description of Artificial Sequence: Synthetic oligonucleotide
  Antisense strand to SEQ ID NO: 1521432
cuuaaccaaaggaaugugu

SEQ ID NO: 1521434 - RNA, 19 nt, Artificial Sequence
  Description of Artificial Sequence: Synthetic oligonucleotide
  Sense strand starting at position 1585 of SEQ ID NO: 1244902
acaccucaucuguggagau

SEQ ID NO: 1521435 - RNA, 19 nt, Artificial Sequence
  Description of Artificial Sequence: Synthetic oligonucleotide
  Antisense strand to SEQ ID NO: 1521434
aucuccacagaugaggugu

SEQ ID NO: 1521436 - RNA, 19 nt, Artificial Sequence
  Description of Artificial Sequence: Synthetic oligonucleotide
  Sense strand starting at position 1669 of SEQ ID NO: 1244902
ggagcucucucagagggaa

SEQ ID NO: 1521437 - RNA, 19 nt, Artificial Sequence
  Description of Artificial Sequence: Synthetic oligonucleotide
  Antisense strand to SEQ ID NO: 1521436
uucccucugagagagcucc

SEQ ID NO: 1521438 - RNA, 19 nt, Artificial Sequence
  Description of Artificial Sequence: Synthetic oligonucleotide
  Sense strand starting at position 1791 of SEQ ID NO: 1244902
gaugucugguccuaccuaa

SEQ ID NO: 1521439 - RNA, 19 nt, Artificial Sequence
  Description of Artificial Sequence: Synthetic oligonucleotide
  Antisense strand to SEQ ID NO: 1521438
uuagguaggaccagacauc

SEQ ID NO: 1521440 - RNA, 19 nt, Artificial Sequence
  Description of Artificial Sequence: Synthetic oligonucleotide
  Sense strand starting at position 2055 of SEQ ID NO: 1244902
gagguucuagaauguucca

SEQ ID NO: 1521441 - RNA, 19 nt, Artificial Sequence
  Description of Artificial Sequence: Synthetic oligonucleotide
  Antisense strand to SEQ ID NO: 1521440
uggaacauucuagaaccuc

SEQ ID NO: 1521442 - RNA, 19 nt, Artificial Sequence
  Description of Artificial Sequence: Synthetic oligonucleotide
  Sense strand starting at position 2060 of SEQ ID NO: 1244902
ucuagaauguuccagaaca

SEQ ID NO: 1521443 - RNA, 19 nt, Artificial Sequence
  Description of Artificial Sequence: Synthetic oligonucleotide
  Antisense strand to SEQ ID NO: 1521442
uguucuggaacauucuaga

SEQ ID NO: 1521444 - RNA, 19 nt, Artificial Sequence
  Description of Artificial Sequence: Synthetic oligonucleotide
  Sense strand starting at position 2230 of SEQ ID NO: 1244902
acaaguuugugguuccaaa

SEQ ID NO: 1521445 - RNA, 19 nt, Artificial Sequence
  Description of Artificial Sequence: Synthetic oligonucleotide
  Antisense strand to SEQ ID NO: 1521444
uuuggaaccacaaacuugu

SEQ ID NO: 1521446 - RNA, 19 nt, Artificial Sequence
  Description of Artificial Sequence: Synthetic oligonucleotide
  Sense strand starting at position 84 of SEQ ID NO: 1244903
cugugacuauuacuuuauu

SEQ ID NO: 1521447 - RNA, 19 nt, Artificial Sequence
  Description of Artificial Sequence: Synthetic oligonucleotide
  Antisense strand to SEQ ID NO: 1521446
aauaaaguaauagucacag

SEQ ID NO: 1521448 - RNA, 19 nt, Artificial Sequence
  Description of Artificial Sequence: Synthetic oligonucleotide
  Sense strand starting at position 178 of SEQ ID NO: 1244903
auguaugacaagugucuuu

SEQ ID NO: 1521449 - RNA, 19 nt, Artificial Sequence
  Description of Artificial Sequence: Synthetic oligonucleotide
  Antisense strand to SEQ ID NO: 1521448
aaagacacuugucauacau

SEQ ID NO: 1521450 - RNA, 19 nt, Artificial Sequence
  Description of Artificial Sequence: Synthetic oligonucleotide
  Sense strand starting at position 444 of SEQ ID NO: 1244903
cuacauuugugguaacuac

SEQ ID NO: 1521451 - RNA, 19 nt, Artificial Sequence
  Description of Artificial Sequence: Synthetic oligonucleotide
  Antisense strand to SEQ ID NO: 1521450
guaguuaccacaaauguag

SEQ ID NO: 1521452 - RNA, 19 nt, Artificial Sequence
  Description of Artificial Sequence: Synthetic oligonucleotide
  Sense strand starting at position 491 of SEQ ID NO: 1244903
guauauguuugagcuuaua

SEQ ID NO: 1521453 - RNA, 19 nt, Artificial Sequence
  Description of Artificial Sequence: Synthetic oligonucleotide
  Antisense strand to SEQ ID NO: 1521452
uauaagcucaaacauauac

SEQ ID NO: 1521454 - RNA, 19 nt, Artificial Sequence
  Description of Artificial Sequence: Synthetic oligonucleotide
  Sense strand starting at position 569 of SEQ ID NO: 1244903
ccuccaguucuuggaagaa

SEQ ID NO: 1521455 - RNA, 19 nt, Artificial Sequence
  Description of Artificial Sequence: Synthetic oligonucleotide
  Antisense strand to SEQ ID NO: 1521454
uucuuccaagaacuggagg

SEQ ID NO: 1521456 - RNA, 19 nt, Artificial Sequence
  Description of Artificial Sequence: Synthetic oligonucleotide
  Sense strand starting at position 697 of SEQ ID NO: 1244903
gacuuaugggagugguaga

SEQ ID NO: 1521457 - RNA, 19 nt, Artificial Sequence
  Description of Artificial Sequence: Synthetic oligonucleotide
  Antisense strand to SEQ ID NO: 1521456
ucuaccacucccauaaguc

SEQ ID NO: 1521458 - RNA, 19 nt, Artificial Sequence
  Description of Artificial Sequence: Synthetic oligonucleotide
  Sense strand starting at position 698 of SEQ ID NO: 1244903
acuuaugggagugguagaa

SEQ ID NO: 1521459 - RNA, 19 nt, Artificial Sequence
  Description of Artificial Sequence: Synthetic oligonucleotide
  Antisense strand to SEQ ID NO: 1521458
uucuaccacucccauaagu

SEQ ID NO: 1521460 - RNA, 19 nt, Artificial Sequence
  Description of Artificial Sequence: Synthetic oligonucleotide
  Sense strand starting at position 774 of SEQ ID NO: 1244903
cuauauucuccuugcagga

SEQ ID NO: 1521461 - RNA, 19 nt, Artificial Sequence
  Description of Artificial Sequence: Synthetic oligonucleotide
  Antisense strand to SEQ ID NO: 1521460
uccugcaaggagaauauag

SEQ ID NO: 1521462 - RNA, 19 nt, Artificial Sequence
  Description of Artificial Sequence: Synthetic oligonucleotide
  Sense strand starting at position 919 of SEQ ID NO: 1244903
gucaguccugccuacaguu

SEQ ID NO: 1521463 - RNA, 19 nt, Artificial Sequence
  Description of Artificial Sequence: Synthetic oligonucleotide
  Antisense strand to SEQ ID NO: 1521462
aacuguaggcaggacugac

SEQ ID NO: 1521464 - RNA, 19 nt, Artificial Sequence
  Description of Artificial Sequence: Synthetic oligonucleotide
  Sense strand starting at position 1086 of SEQ ID NO: 1244903
uugaaagaaugcucuccaa

SEQ ID NO: 1521465 - RNA, 19 nt, Artificial Sequence
  Description of Artificial Sequence: Synthetic oligonucleotide
  Antisense strand to SEQ ID NO: 1521464
uuggagagcauucuuucaa

SEQ ID NO: 1521466 - RNA, 19 nt, Artificial Sequence
  Description of Artificial Sequence: Synthetic oligonucleotide
  Sense strand starting at position 1141 of SEQ ID NO: 1244903
ucaggagaucauuguuacu

SEQ ID NO: 1521467 - RNA, 19 nt, Artificial Sequence
  Description of Artificial Sequence: Synthetic oligonucleotide
  Antisense strand to SEQ ID NO: 1521466
aguaacaaugaucuccuga

SEQ ID NO: 1521468 - RNA, 19 nt, Artificial Sequence
  Description of Artificial Sequence: Synthetic oligonucleotide
  Sense strand starting at position 1146 of SEQ ID NO: 1244903
agaucauuguuacucgaac

SEQ ID NO: 1521469 - RNA, 19 nt, Artificial Sequence
  Description of Artificial Sequence: Synthetic oligonucleotide
  Antisense strand to SEQ ID NO: 1521468
guucgaguaacaaugaucu

SEQ ID NO: 1521470 - RNA, 19 nt, Artificial Sequence
  Description of Artificial Sequence: Synthetic oligonucleotide
  Sense strand starting at position 1202 of SEQ ID NO: 1244903
acuccugagcucuggaagu

SEQ ID NO: 1521471 - RNA, 19 nt, Artificial Sequence
  Description of Artificial Sequence: Synthetic oligonucleotide
  Antisense strand to SEQ ID NO: 1521470
acuuccagagcucaggagu

SEQ ID NO: 1521472 - RNA, 19 nt, Artificial Sequence
  Description of Artificial Sequence: Synthetic oligonucleotide
  Sense strand starting at position 1222 of SEQ ID NO: 1244903
gcuggaaccugaucucgaa

SEQ ID NO: 1521473 - RNA, 19 nt, Artificial Sequence
  Description of Artificial Sequence: Synthetic oligonucleotide
  Antisense strand to SEQ ID NO: 1521472
uucgagaucagguuccagc

SEQ ID NO: 1521474 - RNA, 19 nt, Artificial Sequence
  Description of Artificial Sequence: Synthetic oligonucleotide
  Sense strand starting at position 1300 of SEQ ID NO: 1244903
gucuauuucuacucggauu

SEQ ID NO: 1521475 - RNA, 19 nt, Artificial Sequence
  Description of Artificial Sequence: Synthetic oligonucleotide
  Antisense strand to SEQ ID NO: 1521474
aauccgaguagaaauagac

SEQ ID NO: 1521476 - RNA, 19 nt, Artificial Sequence
  Description of Artificial Sequence: Synthetic oligonucleotide
  Sense strand starting at position 1325 of SEQ ID NO: 1244903
uugggaucagacugguauu

SEQ ID NO: 1521477 - RNA, 19 nt, Artificial Sequence
  Description of Artificial Sequence: Synthetic oligonucleotide
  Antisense strand to SEQ ID NO: 1521476
aauaccagucugaucccaa

SEQ ID NO: 1521478 - RNA, 19 nt, Artificial Sequence
  Description of Artificial Sequence: Synthetic oligonucleotide
  Sense strand starting at position 2033 of SEQ ID NO: 1244903
cacccauugguccguauaa

SEQ ID NO: 1521479 - RNA, 19 nt, Artificial Sequence
  Description of Artificial Sequence: Synthetic oligonucleotide
  Antisense strand to SEQ ID NO: 1521478
uuauacggaccaaugggug

SEQ ID NO: 1521480 - RNA, 19 nt, Artificial Sequence
  Description of Artificial Sequence: Synthetic oligonucleotide
  Sense strand starting at position 2034 of SEQ ID NO: 1244903
acccauugguccguauaag

SEQ ID NO: 1521481 - RNA, 19 nt, Artificial Sequence
  Description of Artificial Sequence: Synthetic oligonucleotide
  Antisense strand to SEQ ID NO: 1521480
cuuauacggaccaaugggu

SEQ ID NO: 1521482 - RNA, 19 nt, Artificial Sequence
  Description of Artificial Sequence: Synthetic oligonucleotide
  Sense strand starting at position 2035 of SEQ ID NO: 1244903
cccauugguccguauaagu

SEQ ID NO: 1521483 - RNA, 19 nt, Artificial Sequence
  Description of Artificial Sequence: Synthetic oligonucleotide
  Antisense strand to SEQ ID NO: 1521482
acuuauacggaccaauggg

SEQ ID NO: 1521484 - RNA, 19 nt, Artificial Sequence
  Description of Artificial Sequence: Synthetic oligonucleotide
  Sense strand starting at position 2153 of SEQ ID NO: 1244903
guguagauugcgguuguga

SEQ ID NO: 1521485 - RNA, 19 nt, Artificial Sequence
  Description of Artificial Sequence: Synthetic oligonucleotide
  Antisense strand to SEQ ID NO: 1521484
ucacaaccgcaaucuacac

SEQ ID NO: 1521486 - RNA, 19 nt, Artificial Sequence
  Description of Artificial Sequence: Synthetic oligonucleotide
  Sense strand starting at position 2300 of SEQ ID NO: 1244903
ggccuucugcaguaaguca

SEQ ID NO: 1521487 - RNA, 19 nt, Artificial Sequence
  Description of Artificial Sequence: Synthetic oligonucleotide
  Antisense strand to SEQ ID NO: 1521486
ugacuuacugcagaaggcc

SEQ ID NO: 1521488 - RNA, 19 nt, Artificial Sequence
  Description of Artificial Sequence: Synthetic oligonucleotide
  Sense strand starting at position 2307 of SEQ ID NO: 1244903
ugcaguaagucagcauuaa

SEQ ID NO: 1521489 - RNA, 19 nt, Artificial Sequence
  Description of Artificial Sequence: Synthetic oligonucleotide
  Antisense strand to SEQ ID NO: 1521488
uuaaugcugacuuacugca

SEQ ID NO: 1521490 - RNA, 19 nt, Artificial Sequence
  Description of Artificial Sequence: Synthetic oligonucleotide
  Sense strand starting at position 2308 of SEQ ID NO: 1244903
gcaguaagucagcauuaaa

SEQ ID NO: 1521491 - RNA, 19 nt, Artificial Sequence
  Description of Artificial Sequence: Synthetic oligonucleotide
  Antisense strand to SEQ ID NO: 1521490
uuuaaugcugacuuacugc

SEQ ID NO: 1521492 - RNA, 19 nt, Artificial Sequence
  Description of Artificial Sequence: Synthetic oligonucleotide
  Sense strand starting at position 2495 of SEQ ID NO: 1244903
guccuagcuaguucgugua

SEQ ID NO: 1521493 - RNA, 19 nt, Artificial Sequence
  Description of Artificial Sequence: Synthetic oligonucleotide
  Antisense strand to SEQ ID NO: 1521492
uacacgaacuagcuaggac

SEQ ID NO: 1521494 - RNA, 19 nt, Artificial Sequence
  Description of Artificial Sequence: Synthetic oligonucleotide
  Sense strand starting at position 2501 of SEQ ID NO: 1244903
gcuaguucguguacuagug

SEQ ID NO: 1521495 - RNA, 19 nt, Artificial Sequence
  Description of Artificial Sequence: Synthetic oligonucleotide
  Antisense strand to SEQ ID NO: 1521494
cacuaguacacgaacuagc

SEQ ID NO: 1521496 - RNA, 19 nt, Artificial Sequence
  Description of Artificial Sequence: Synthetic oligonucleotide
  Sense strand starting at position 2748 of SEQ ID NO: 1244903
ggucaaggauucguuuaca

SEQ ID NO: 1521497 - RNA, 19 nt, Artificial Sequence
  Description of Artificial Sequence: Synthetic oligonucleotide
  Antisense strand to SEQ ID NO: 1521496
uguaaacgaauccuugacc

SEQ ID NO: 1521498 - RNA, 19 nt, Artificial Sequence
  Description of Artificial Sequence: Synthetic oligonucleotide
  Sense strand starting at position 2751 of SEQ ID NO: 1244903
caaggauucguuuacacgu

SEQ ID NO: 1521499 - RNA, 19 nt, Artificial Sequence
  Description of Artificial Sequence: Synthetic oligonucleotide
  Antisense strand to SEQ ID NO: 1521498
acguguaaacgaauccuug

SEQ ID NO: 1521500 - RNA, 19 nt, Artificial Sequence
  Description of Artificial Sequence: Synthetic oligonucleotide
  Sense strand starting at position 2879 of SEQ ID NO: 1244903
aggaaugcagcuuggacua

SEQ ID NO: 1521501 - RNA, 19 nt, Artificial Sequence
  Description of Artificial Sequence: Synthetic oligonucleotide
  Antisense strand to SEQ ID NO: 1521500
uaguccaagcugcauuccu

SEQ ID NO: 1521502 - RNA, 19 nt, Artificial Sequence
  Description of Artificial Sequence: Synthetic oligonucleotide
  Sense strand starting at position 2981 of SEQ ID NO: 1244903
gccuuugauggcgagcaga

SEQ ID NO: 1521503 - RNA, 19 nt, Artificial Sequence
  Description of Artificial Sequence: Synthetic oligonucleotide
  Antisense strand to SEQ ID NO: 1521502
ucugcucgccaucaaaggc

SEQ ID NO: 1521504 - RNA, 19 nt, Artificial Sequence
  Description of Artificial Sequence: Synthetic oligonucleotide
  Sense strand starting at position 3054 of SEQ ID NO: 1244903
cugagauaggagcguacua

SEQ ID NO: 1521505 - RNA, 19 nt, Artificial Sequence
  Description of Artificial Sequence: Synthetic oligonucleotide
  Antisense strand to SEQ ID NO: 1521504
uaguacgcuccuaucucag

SEQ ID NO: 1521506 - RNA, 19 nt, Artificial Sequence
  Description of Artificial Sequence: Synthetic oligonucleotide
  Sense strand starting at position 3101 of SEQ ID NO: 1244903
gccugucaacacugaguga

SEQ ID NO: 1521507 - RNA, 19 nt, Artificial Sequence
  Description of Artificial Sequence: Synthetic oligonucleotide
  Antisense strand to SEQ ID NO: 1521506
ucacucaguguugacaggc

SEQ ID NO: 1521508 - RNA, 19 nt, Artificial Sequence
  Description of Artificial Sequence: Synthetic oligonucleotide
  Sense strand starting at position 3253 of SEQ ID NO: 1244903
gagagaugcacucgagagu

SEQ ID NO: 1521509 - RNA, 19 nt, Artificial Sequence
  Description of Artificial Sequence: Synthetic oligonucleotide
  Antisense strand to SEQ ID NO: 1521508
acucucgagugcaucucuc

SEQ ID NO: 1521510 - RNA, 19 nt, Artificial Sequence
  Description of Artificial Sequence: Synthetic oligonucleotide
  Sense strand starting at position 3254 of SEQ ID NO: 1244903
agagaugcacucgagaguu

SEQ ID NO: 1521511 - RNA, 19 nt, Artificial Sequence
  Description of Artificial Sequence: Synthetic oligonucleotide
  Antisense strand to SEQ ID NO: 1521510
aacucucgagugcaucucu

SEQ ID NO: 1521512 - RNA, 19 nt, Artificial Sequence
  Description of Artificial Sequence: Synthetic oligonucleotide
  Sense strand starting at position 3256 of SEQ ID NO: 1244903
agaugcacucgagaguuua

SEQ ID NO: 1521513 - RNA, 19 nt, Artificial Sequence
  Description of Artificial Sequence: Synthetic oligonucleotide
  Antisense strand to SEQ ID NO: 1521512
uaaacucucgagugcaucu

SEQ ID NO: 1521514 - RNA, 19 nt, Artificial Sequence
  Description of Artificial Sequence: Synthetic oligonucleotide
  Sense strand starting at position 3283 of SEQ ID NO: 1244903
gugagaaagacuugagcua

SEQ ID NO: 1521515 - RNA, 19 nt, Artificial Sequence
  Description of Artificial Sequence: Synthetic oligonucleotide
  Antisense strand to SEQ ID NO: 1521514
uagcucaagucuuucucac

SEQ ID NO: 1521516 - RNA, 19 nt, Artificial Sequence
  Description of Artificial Sequence: Synthetic oligonucleotide
  Sense strand starting at position 3470 of SEQ ID NO: 1244903
ggauuauggcaguguugaa

SEQ ID NO: 1521517 - RNA, 19 nt, Artificial Sequence
  Description of Artificial Sequence: Synthetic oligonucleotide
  Antisense strand to SEQ ID NO: 1521516
uucaacacugccauaaucc

SEQ ID NO: 1521518 - RNA, 19 nt, Artificial Sequence
  Description of Artificial Sequence: Synthetic oligonucleotide
  Sense strand starting at position 3618 of SEQ ID NO: 1244903
agcgaaagguggcuuugaa

SEQ ID NO: 1521519 - RNA, 19 nt, Artificial Sequence
  Description of Artificial Sequence: Synthetic oligonucleotide
  Antisense strand to SEQ ID NO: 1521518
uucaaagccaccuuucgcu

SEQ ID NO: 1521520 - RNA, 19 nt, Artificial Sequence
  Description of Artificial Sequence: Synthetic oligonucleotide
  Sense strand starting at position 3639 of SEQ ID NO: 1244903
gcugaagaagagugauuga

SEQ ID NO: 1521521 - RNA, 19 nt, Artificial Sequence
  Description of Artificial Sequence: Synthetic oligonucleotide
  Antisense strand to SEQ ID NO: 1521520
ucaaucacucuucuucagc

SEQ ID NO: 1521522 - RNA, 19 nt, Artificial Sequence
  Description of Artificial Sequence: Synthetic oligonucleotide
  Sense strand starting at position 3648 of SEQ ID NO: 1244903
gagugauugaggugcagaa

SEQ ID NO: 1521523 - RNA, 19 nt, Artificial Sequence
  Description of Artificial Sequence: Synthetic oligonucleotide
  Antisense strand to SEQ ID NO: 1521522
uucugcaccucaaucacuc

SEQ ID NO: 1521524 - RNA, 19 nt, Artificial Sequence
  Description of Artificial Sequence: Synthetic oligonucleotide
  Sense strand starting at position 3652 of SEQ ID NO: 1244903
gauugaggugcagaagguu

SEQ ID NO: 1521525 - RNA, 19 nt, Artificial Sequence
  Description of Artificial Sequence: Synthetic oligonucleotide
  Antisense strand to SEQ ID NO: 1521524
aaccuucugcaccucaauc

SEQ ID NO: 1521526 - RNA, 19 nt, Artificial Sequence
  Description of Artificial Sequence: Synthetic oligonucleotide
  Sense strand starting at position 15 of SEQ ID NO: 1244904
cugugcuuccugcagaaga

SEQ ID NO: 1521527 - RNA, 19 nt, Artificial Sequence
  Description of Artificial Sequence: Synthetic oligonucleotide
  Antisense strand to SEQ ID NO: 1521526
ucuucugcaggaagcacag

SEQ ID NO: 1521528 - RNA, 19 nt, Artificial Sequence
  Description of Artificial Sequence: Synthetic oligonucleotide
  Sense strand starting at position 17 of SEQ ID NO: 1244904
gugcuuccugcagaagaac

SEQ ID NO: 1521529 - RNA, 19 nt, Artificial Sequence
  Description of Artificial Sequence: Synthetic oligonucleotide
  Antisense strand to SEQ ID NO: 1521528
guucuucugcaggaagcac

SEQ ID NO: 1521530 - RNA, 19 nt, Artificial Sequence
  Description of Artificial Sequence: Synthetic oligonucleotide
  Sense strand starting at position 60 of SEQ ID NO: 1244904
gcaugacacuuucugggaa

SEQ ID NO: 1521531 - RNA, 19 nt, Artificial Sequence
  Description of Artificial Sequence: Synthetic oligonucleotide
  Antisense strand to SEQ ID NO: 1521530
uucccagaaagugucaugc

SEQ ID NO: 1521532 - RNA, 19 nt, Artificial Sequence
  Description of Artificial Sequence: Synthetic oligonucleotide
  Sense strand starting at position 131 of SEQ ID NO: 1244904
aggaguuugccagguagac

SEQ ID NO: 1521533 - RNA, 19 nt, Artificial Sequence
  Description of Artificial Sequence: Synthetic oligonucleotide
  Antisense strand to SEQ ID NO: 1521532
gucuaccuggcaaacuccu

SEQ ID NO: 1521534 - RNA, 19 nt, Artificial Sequence
  Description of Artificial Sequence: Synthetic oligonucleotide
  Sense strand starting at position 133 of SEQ ID NO: 1244904
gaguuugccagguagacaa

SEQ ID NO: 1521535 - RNA, 19 nt, Artificial Sequence
  Description of Artificial Sequence: Synthetic oligonucleotide
  Antisense strand to SEQ ID NO: 1521534
uugucuaccuggcaaacuc

SEQ ID NO: 1521536 - RNA, 19 nt, Artificial Sequence
  Description of Artificial Sequence: Synthetic oligonucleotide
  Sense strand starting at position 155 of SEQ ID NO: 1244904
ugggacaugccuggcuuaa

SEQ ID NO: 1521537 - RNA, 19 nt, Artificial Sequence
  Description of Artificial Sequence: Synthetic oligonucleotide
  Antisense strand to SEQ ID NO: 1521536
uuaagccaggcauguccca

SEQ ID NO: 1521538 - RNA, 19 nt, Artificial Sequence
  Description of Artificial Sequence: Synthetic oligonucleotide
  Sense strand starting at position 157 of SEQ ID NO: 1244904
ggacaugccuggcuuaaag

SEQ ID NO: 1521539 - RNA, 19 nt, Artificial Sequence
  Description of Artificial Sequence: Synthetic oligonucleotide
  Antisense strand to SEQ ID NO: 1521538
cuuuaagccaggcaugucc

SEQ ID NO: 1521540 - RNA, 19 nt, Artificial Sequence
  Description of Artificial Sequence: Synthetic oligonucleotide
  Sense strand starting at position 546 of SEQ ID NO: 1244904
cuuccugugcguucugagu

SEQ ID NO: 1521541 - RNA, 19 nt, Artificial Sequence
  Description of Artificial Sequence: Synthetic oligonucleotide
  Antisense strand to SEQ ID NO: 1521540
acucagaacgcacaggaag

SEQ ID NO: 1521542 - RNA, 19 nt, Artificial Sequence
  Description of Artificial Sequence: Synthetic oligonucleotide
  Sense strand starting at position 554 of SEQ ID NO: 1244904
gcguucugaguguuucucu

SEQ ID NO: 1521543 - RNA, 19 nt, Artificial Sequence
  Description of Artificial Sequence: Synthetic oligonucleotide
  Antisense strand to SEQ ID NO: 1521542
agagaaacacucagaacgc

SEQ ID NO: 1521544 - RNA, 19 nt, Artificial Sequence
  Description of Artificial Sequence: Synthetic oligonucleotide
  Sense strand starting at position 673 of SEQ ID NO: 1244904
gugugugagcuguuucuca

SEQ ID NO: 1521545 - RNA, 19 nt, Artificial Sequence
  Description of Artificial Sequence: Synthetic oligonucleotide
  Antisense strand to SEQ ID NO: 1521544
ugagaaacagcucacacac

SEQ ID NO: 1521546 - RNA, 19 nt, Artificial Sequence
  Description of Artificial Sequence: Synthetic oligonucleotide
  Sense strand starting at position 708 of SEQ ID NO: 1244904
gugugagcuguguuucuca

SEQ ID NO: 1521547 - RNA, 19 nt, Artificial Sequence
  Description of Artificial Sequence: Synthetic oligonucleotide
  Antisense strand to SEQ ID NO: 1521546
ugagaaacacagcucacac

SEQ ID NO: 1521548 - RNA, 19 nt, Artificial Sequence
  Description of Artificial Sequence: Synthetic oligonucleotide
  Sense strand starting at position 717 of SEQ ID NO: 1244904
guguuucucagaguguguu

SEQ ID NO: 1521549 - RNA, 19 nt, Artificial Sequence
  Description of Artificial Sequence: Synthetic oligonucleotide
  Antisense strand to SEQ ID NO: 1521548
aacacacucugagaaacac

SEQ ID NO: 1521550 - RNA, 19 nt, Artificial Sequence
  Description of Artificial Sequence: Synthetic oligonucleotide
  Sense strand starting at position 731 of SEQ ID NO: 1244904
guguuucugaguguuagcu

SEQ ID NO: 1521551 - RNA, 19 nt, Artificial Sequence
  Description of Artificial Sequence: Synthetic oligonucleotide
  Antisense strand to SEQ ID NO: 1521550
agcuaacacucagaaacac

SEQ ID NO: 1521552 - RNA, 19 nt, Artificial Sequence
  Description of Artificial Sequence: Synthetic oligonucleotide
  Sense strand starting at position 820 of SEQ ID NO: 1244904
cugauuguguuucucagag

SEQ ID NO: 1521553 - RNA, 19 nt, Artificial Sequence
  Description of Artificial Sequence: Synthetic oligonucleotide
  Antisense strand to SEQ ID NO: 1521552
cucugagaaacacaaucag

SEQ ID NO: 1521554 - RNA, 19 nt, Artificial Sequence
  Description of Artificial Sequence: Synthetic oligonucleotide
  Sense strand starting at position 827 of SEQ ID NO: 1244904
uguuucucagaguauguuu

SEQ ID NO: 1521555 - RNA, 19 nt, Artificial Sequence
  Description of Artificial Sequence: Synthetic oligonucleotide
  Antisense strand to SEQ ID NO: 1521554
aaacauacucugagaaaca

SEQ ID NO: 1521556 - RNA, 19 nt, Artificial Sequence
  Description of Artificial Sequence: Synthetic oligonucleotide
  Sense strand starting at position 834 of SEQ ID NO: 1244904
cagaguauguuucugagug

SEQ ID NO: 1521557 - RNA, 19 nt, Artificial Sequence
  Description of Artificial Sequence: Synthetic oligonucleotide
  Antisense strand to SEQ ID NO: 1521556
cacucagaaacauacucug

SEQ ID NO: 1521558 - RNA, 19 nt, Artificial Sequence
  Description of Artificial Sequence: Synthetic oligonucleotide
  Sense strand starting at position 852 of SEQ ID NO: 1244904
gugugugagcugaauguuu

SEQ ID NO: 1521559 - RNA, 19 nt, Artificial Sequence
  Description of Artificial Sequence: Synthetic oligonucleotide
  Antisense strand to SEQ ID NO: 1521558
aaacauucagcucacacac

SEQ ID NO: 1521560 - RNA, 19 nt, Artificial Sequence
  Description of Artificial Sequence: Synthetic oligonucleotide
  Sense strand starting at position 922 of SEQ ID NO: 1244904
acuguuucucggagugugu

SEQ ID NO: 1521561 - RNA, 19 nt, Artificial Sequence
  Description of Artificial Sequence: Synthetic oligonucleotide
  Antisense strand to SEQ ID NO: 1521560
acacacuccgagaaacagu

SEQ ID NO: 1521562 - RNA, 19 nt, Artificial Sequence
  Description of Artificial Sequence: Synthetic oligonucleotide
  Sense strand starting at position 923 of SEQ ID NO: 1244904
cuguuucucggaguguguu

SEQ ID NO: 1521563 - RNA, 19 nt, Artificial Sequence
  Description of Artificial Sequence: Synthetic oligonucleotide
  Antisense strand to SEQ ID NO: 1521562
aacacacuccgagaaacag

SEQ ID NO: 1521564 - RNA, 19 nt, Artificial Sequence
  Description of Artificial Sequence: Synthetic oligonucleotide
  Sense strand starting at position 951 of SEQ ID NO: 1244904
gugugaacugaauguuuga

SEQ ID NO: 1521565 - RNA, 19 nt, Artificial Sequence
  Description of Artificial Sequence: Synthetic oligonucleotide
  Antisense strand to SEQ ID NO: 1521564
ucaaacauucaguucacac

SEQ ID NO: 1521566 - RNA, 19 nt, Artificial Sequence
  Description of Artificial Sequence: Synthetic oligonucleotide
  Sense strand starting at position 1067 of SEQ ID NO: 1244904
gugugugagcugaguguuu

SEQ ID NO: 1521567 - RNA, 19 nt, Artificial Sequence
  Description of Artificial Sequence: Synthetic oligonucleotide
  Antisense strand to SEQ ID NO: 1521566
aaacacucagcucacacac

SEQ ID NO: 1521568 - RNA, 19 nt, Artificial Sequence
  Description of Artificial Sequence: Synthetic oligonucleotide
  Sense strand starting at position 1154 of SEQ ID NO: 1244904
gugugugaccugaguguuu

SEQ ID NO: 1521569 - RNA, 19 nt, Artificial Sequence
  Description of Artificial Sequence: Synthetic oligonucleotide
  Antisense strand to SEQ ID NO: 1521568
aaacacucaggucacacac

SEQ ID NO: 1521570 - RNA, 19 nt, Artificial Sequence
  Description of Artificial Sequence: Synthetic oligonucleotide
  Sense strand starting at position 1159 of SEQ ID NO: 1244904
ugaccugaguguuuaucuu

SEQ ID NO: 1521571 - RNA, 19 nt, Artificial Sequence
  Description of Artificial Sequence: Synthetic oligonucleotide
  Antisense strand to SEQ ID NO: 1521570
aagauaaacacucagguca

SEQ ID NO: 1521572 - RNA, 19 nt, Artificial Sequence
  Description of Artificial Sequence: Synthetic oligonucleotide
  Sense strand starting at position 1293 of SEQ ID NO: 1244904
cguacugaagaguaaguuu

SEQ ID NO: 1521573 - RNA, 19 nt, Artificial Sequence
  Description of Artificial Sequence: Synthetic oligonucleotide
  Antisense strand to SEQ ID NO: 1521572
aaacuuacucuucaguacg

SEQ ID NO: 1521574 - RNA, 19 nt, Artificial Sequence
  Description of Artificial Sequence: Synthetic oligonucleotide
  Sense strand starting at position 2137 of SEQ ID NO: 1244904
uugugccucggucuguaaa

SEQ ID NO: 1521575 - RNA, 19 nt, Artificial Sequence
  Description of Artificial Sequence: Synthetic oligonucleotide
  Antisense strand to SEQ ID NO: 1521574
uuuacagaccgaggcacaa

SEQ ID NO: 1521576 - RNA, 19 nt, Artificial Sequence
  Description of Artificial Sequence: Synthetic oligonucleotide
  Sense strand starting at position 2177 of SEQ ID NO: 1244904
auccucagaguugguauua

SEQ ID NO: 1521577 - RNA, 19 nt, Artificial Sequence
  Description of Artificial Sequence: Synthetic oligonucleotide
  Antisense strand to SEQ ID NO: 1521576
uaauaccaacucugaggau

SEQ ID NO: 1521578 - RNA, 19 nt, Artificial Sequence
  Description of Artificial Sequence: Synthetic oligonucleotide
  Sense strand starting at position 2354 of SEQ ID NO: 1244904
gcuaguagucuugcugcuu

SEQ ID NO: 1521579 - RNA, 19 nt, Artificial Sequence
  Description of Artificial Sequence: Synthetic oligonucleotide
  Antisense strand to SEQ ID NO: 1521578
aagcagcaagacuacuagc

SEQ ID NO: 1521580 - RNA, 19 nt, Artificial Sequence
  Description of Artificial Sequence: Synthetic oligonucleotide
  Sense strand starting at position 2357 of SEQ ID NO: 1244904
aguagucuugcugcuucua

SEQ ID NO: 1521581 - RNA, 19 nt, Artificial Sequence
  Description of Artificial Sequence: Synthetic oligonucleotide
  Antisense strand to SEQ ID NO: 1521580
uagaagcagcaagacuacu

SEQ ID NO: 1521582 - RNA, 19 nt, Artificial Sequence
  Description of Artificial Sequence: Synthetic oligonucleotide
  Sense strand starting at position 2358 of SEQ ID NO: 1244904
guagucuugcugcuucuau

SEQ ID NO: 1521583 - RNA, 19 nt, Artificial Sequence
  Description of Artificial Sequence: Synthetic oligonucleotide
  Antisense strand to SEQ ID NO: 1521582
auagaagcagcaagacuac

SEQ ID NO: 1521584 - RNA, 19 nt, Artificial Sequence
  Description of Artificial Sequence: Synthetic oligonucleotide
  Sense strand starting at position 2411 of SEQ ID NO: 1244904
ggucuacugguucaggcaa

SEQ ID NO: 1521585 - RNA, 19 nt, Artificial Sequence
  Description of Artificial Sequence: Synthetic oligonucleotide
  Antisense strand to SEQ ID NO: 1521584
uugccugaaccaguagacc

SEQ ID NO: 1521586 - RNA, 19 nt, Artificial Sequence
  Description of Artificial Sequence: Synthetic oligonucleotide
  Sense strand starting at position 2565 of SEQ ID NO: 1244904
guaccaggagcaugaucua

SEQ ID NO: 1521587 - RNA, 19 nt, Artificial Sequence
  Description of Artificial Sequence: Synthetic oligonucleotide
  Antisense strand to SEQ ID NO: 1521586
uagaucaugcuccugguac

SEQ ID NO: 1521588 - RNA, 19 nt, Artificial Sequence
  Description of Artificial Sequence: Synthetic oligonucleotide
  Sense strand starting at position 2568 of SEQ ID NO: 1244904
ccaggagcaugaucuagaa

SEQ ID NO: 1521589 - RNA, 19 nt, Artificial Sequence
  Description of Artificial Sequence: Synthetic oligonucleotide
  Antisense strand to SEQ ID NO: 1521588
uucuagaucaugcuccugg

SEQ ID NO: 1521590 - RNA, 19 nt, Artificial Sequence
  Description of Artificial Sequence: Synthetic oligonucleotide
  Sense strand starting at position 2661 of SEQ ID NO: 1244904
gaggucaguaucggugaca

SEQ ID NO: 1521591 - RNA, 19 nt, Artificial Sequence
  Description of Artificial Sequence: Synthetic oligonucleotide
  Antisense strand to SEQ ID NO: 1521590
ugucaccgauacugaccuc

SEQ ID NO: 1521592 - RNA, 19 nt, Artificial Sequence
  Description of Artificial Sequence: Synthetic oligonucleotide
  Sense strand starting at position 2670 of SEQ ID NO: 1244904
aucggugacaguuaacaaa

SEQ ID NO: 1521593 - RNA, 19 nt, Artificial Sequence
  Description of Artificial Sequence: Synthetic oligonucleotide
  Antisense strand to SEQ ID NO: 1521592
uuuguuaacugucaccgau

SEQ ID NO: 1521594 - RNA, 19 nt, Artificial Sequence
  Description of Artificial Sequence: Synthetic oligonucleotide
  Sense strand starting at position 3457 of SEQ ID NO: 1244904
ugccacaauuagucugauu

SEQ ID NO: 1521595 - RNA, 19 nt, Artificial Sequence
  Description of Artificial Sequence: Synthetic oligonucleotide
  Antisense strand to SEQ ID NO: 1521594
aaucagacuaauuguggca

SEQ ID NO: 1521596 - RNA, 19 nt, Artificial Sequence
  Description of Artificial Sequence: Synthetic oligonucleotide
  Sense strand starting at position 3540 of SEQ ID NO: 1244904
gaagauuuggcccgcaauc

SEQ ID NO: 1521597 - RNA, 19 nt, Artificial Sequence
  Description of Artificial Sequence: Synthetic oligonucleotide
  Antisense strand to SEQ ID NO: 1521596
gauugcgggccaaaucuuc

SEQ ID NO: 1521598 - RNA, 19 nt, Artificial Sequence
  Description of Artificial Sequence: Synthetic oligonucleotide
  Sense strand starting at position 3554 of SEQ ID NO: 1244904
caaucagucugaucgguua

SEQ ID NO: 1521599 - RNA, 19 nt, Artificial Sequence
  Description of Artificial Sequence: Synthetic oligonucleotide
  Antisense strand to SEQ ID NO: 1521598
uaaccgaucagacugauug

SEQ ID NO: 1521600 - RNA, 19 nt, Artificial Sequence
  Description of Artificial Sequence: Synthetic oligonucleotide
  Sense strand starting at position 3630 of SEQ ID NO: 1244904
agaauauuuggccgcaauc

SEQ ID NO: 1521601 - RNA, 19 nt, Artificial Sequence
  Description of Artificial Sequence: Synthetic oligonucleotide
  Antisense strand to SEQ ID NO: 1521600
gauugcggccaaauauucu

SEQ ID NO: 1521602 - RNA, 19 nt, Artificial Sequence
  Description of Artificial Sequence: Synthetic oligonucleotide
  Sense strand starting at position 3815 of SEQ ID NO: 1244904
gucucugguccguuuguua

SEQ ID NO: 1521603 - RNA, 19 nt, Artificial Sequence
  Description of Artificial Sequence: Synthetic oligonucleotide
  Antisense strand to SEQ ID NO: 1521602
uaacaaacggaccagagac

SEQ ID NO: 1521604 - RNA, 19 nt, Artificial Sequence
  Description of Artificial Sequence: Synthetic oligonucleotide
  Sense strand starting at position 3978 of SEQ ID NO: 1244904
gaggaacuguaacugcuuu

SEQ ID NO: 1521605 - RNA, 19 nt, Artificial Sequence
  Description of Artificial Sequence: Synthetic oligonucleotide
  Antisense strand to SEQ ID NO: 1521604
aaagcaguuacaguuccuc

SEQ ID NO: 1521606 - RNA, 19 nt, Artificial Sequence
  Description of Artificial Sequence: Synthetic oligonucleotide
  Sense strand starting at position 146 of SEQ ID NO: 1244905
gcugaaguaaguuaaguga

SEQ ID NO: 1521607 - RNA, 19 nt, Artificial Sequence
  Description of Artificial Sequence: Synthetic oligonucleotide
  Antisense strand to SEQ ID NO: 1521606
ucacuuaacuuacuucagc

SEQ ID NO: 1521608 - RNA, 19 nt, Artificial Sequence
  Description of Artificial Sequence: Synthetic oligonucleotide
  Sense strand starting at position 216 of SEQ ID NO: 1244905
uugggaugcccucaauaac

SEQ ID NO: 1521609 - RNA, 19 nt, Artificial Sequence
  Description of Artificial Sequence: Synthetic oligonucleotide
  Antisense strand to SEQ ID NO: 1521608
guuauugagggcaucccaa

SEQ ID NO: 1521610 - RNA, 19 nt, Artificial Sequence
  Description of Artificial Sequence: Synthetic oligonucleotide
  Sense strand starting at position 219 of SEQ ID NO: 1244905
ggaugcccucaauaacauu

SEQ ID NO: 1521611 - RNA, 19 nt, Artificial Sequence
  Description of Artificial Sequence: Synthetic oligonucleotide
  Antisense strand to SEQ ID NO: 1521610
aauguuauugagggcaucc

SEQ ID NO: 1521612 - RNA, 19 nt, Artificial Sequence
  Description of Artificial Sequence: Synthetic oligonucleotide
  Sense strand starting at position 275 of SEQ ID NO: 1244905
ggaguuaucugagaaauuu

SEQ ID NO: 1521613 - RNA, 19 nt, Artificial Sequence
  Description of Artificial Sequence: Synthetic oligonucleotide
  Antisense strand to SEQ ID NO: 1521612
aaauuucucagauaacucc

SEQ ID NO: 1521614 - RNA, 19 nt, Artificial Sequence
  Description of Artificial Sequence: Synthetic oligonucleotide
  Sense strand starting at position 412 of SEQ ID NO: 1244905
uugccauuacaugagauca

SEQ ID NO: 1521615 - RNA, 19 nt, Artificial Sequence
  Description of Artificial Sequence: Synthetic oligonucleotide
  Antisense strand to SEQ ID NO: 1521614
ugaucucauguaauggcaa

SEQ ID NO: 1521616 - RNA, 19 nt, Artificial Sequence
  Description of Artificial Sequence: Synthetic oligonucleotide
  Sense strand starting at position 453 of SEQ ID NO: 1244905
agucucugcccagauacau

SEQ ID NO: 1521617 - RNA, 19 nt, Artificial Sequence
  Description of Artificial Sequence: Synthetic oligonucleotide
  Antisense strand to SEQ ID NO: 1521616
auguaucugggcagagacu

SEQ ID NO: 1521618 - RNA, 19 nt, Artificial Sequence
  Description of Artificial Sequence: Synthetic oligonucleotide
  Sense strand starting at position 484 of SEQ ID NO: 1244905
aguuauaaccaguauugau

SEQ ID NO: 1521619 - RNA, 19 nt, Artificial Sequence
  Description of Artificial Sequence: Synthetic oligonucleotide
  Antisense strand to SEQ ID NO: 1521618
aucaauacugguuauaacu

SEQ ID NO: 1521620 - RNA, 19 nt, Artificial Sequence
  Description of Artificial Sequence: Synthetic oligonucleotide
  Sense strand starting at position 516 of SEQ ID NO: 1244905
cagguaugagaaugaggua

SEQ ID NO: 1521621 - RNA, 19 nt, Artificial Sequence
  Description of Artificial Sequence: Synthetic oligonucleotide
  Antisense strand to SEQ ID NO: 1521620
uaccucauucucauaccug

SEQ ID NO: 1521622 - RNA, 19 nt, Artificial Sequence
  Description of Artificial Sequence: Synthetic oligonucleotide
  Sense strand starting at position 636 of SEQ ID NO: 1244905
gacugaagagcuggccuau

SEQ ID NO: 1521623 - RNA, 19 nt, Artificial Sequence
  Description of Artificial Sequence: Synthetic oligonucleotide
  Antisense strand to SEQ ID NO: 1521622
auaggccagcucuucaguc

SEQ ID NO: 1521624 - RNA, 19 nt, Artificial Sequence
  Description of Artificial Sequence: Synthetic oligonucleotide
  Sense strand starting at position 792 of SEQ ID NO: 1244905
uggugaugugaauguggaa

SEQ ID NO: 1521625 - RNA, 19 nt, Artificial Sequence
  Description of Artificial Sequence: Synthetic oligonucleotide
  Antisense strand to SEQ ID NO: 1521624
uuccacauucacaucacca

SEQ ID NO: 1521626 - RNA, 19 nt, Artificial Sequence
  Description of Artificial Sequence: Synthetic oligonucleotide
  Sense strand starting at position 929 of SEQ ID NO: 1244905
aguaaucuuccuuauagug

SEQ ID NO: 1521627 - RNA, 19 nt, Artificial Sequence
  Description of Artificial Sequence: Synthetic oligonucleotide
  Antisense strand to SEQ ID NO: 1521626
cacuauaaggaagauuacu

SEQ ID NO: 1521628 - RNA, 19 nt, Artificial Sequence
  Description of Artificial Sequence: Synthetic oligonucleotide
  Sense strand starting at position 944 of SEQ ID NO: 1244905
agugaaacucauggagguu

SEQ ID NO: 1521629 - RNA, 19 nt, Artificial Sequence
  Description of Artificial Sequence: Synthetic oligonucleotide
  Antisense strand to SEQ ID NO: 1521628
aaccuccaugaguuucacu

SEQ ID NO: 1521630 - RNA, 19 nt, Artificial Sequence
  Description of Artificial Sequence: Synthetic oligonucleotide
  Sense strand starting at position 945 of SEQ ID NO: 1244905
gugaaacucauggagguuu

SEQ ID NO: 1521631 - RNA, 19 nt, Artificial Sequence
  Description of Artificial Sequence: Synthetic oligonucleotide
  Antisense strand to SEQ ID NO: 1521630
aaaccuccaugaguuucac

SEQ ID NO: 1521632 - RNA, 19 nt, Artificial Sequence
  Description of Artificial Sequence: Synthetic oligonucleotide
  Sense strand starting at position 1078 of SEQ ID NO: 1244905
acugaauugagacguaaug

SEQ ID NO: 1521633 - RNA, 19 nt, Artificial Sequence
  Description of Artificial Sequence: Synthetic oligonucleotide
  Antisense strand to SEQ ID NO: 1521632
cauuacgucucaauucagu

SEQ ID NO: 1521634 - RNA, 19 nt, Artificial Sequence
  Description of Artificial Sequence: Synthetic oligonucleotide
  Sense strand starting at position 1080 of SEQ ID NO: 1244905
ugaauugagacguaaugua

SEQ ID NO: 1521635 - RNA, 19 nt, Artificial Sequence
  Description of Artificial Sequence: Synthetic oligonucleotide
  Antisense strand to SEQ ID NO: 1521634
uacauuacgucucaauuca

SEQ ID NO: 1521636 - RNA, 19 nt, Artificial Sequence
  Description of Artificial Sequence: Synthetic oligonucleotide
  Sense strand starting at position 1094 of SEQ ID NO: 1244905
auguacaagcucuggagau

SEQ ID NO: 1521637 - RNA, 19 nt, Artificial Sequence
  Description of Artificial Sequence: Synthetic oligonucleotide
  Antisense strand to SEQ ID NO: 1521636
aucuccagagcuuguacau

SEQ ID NO: 1521638 - RNA, 19 nt, Artificial Sequence
  Description of Artificial Sequence: Synthetic oligonucleotide
  Sense strand starting at position 1221 of SEQ ID NO: 1244905
ugcagaguuggagguaaga

SEQ ID NO: 1521639 - RNA, 19 nt, Artificial Sequence
  Description of Artificial Sequence: Synthetic oligonucleotide
  Antisense strand to SEQ ID NO: 1521638
ucuuaccuccaacucugca

SEQ ID NO: 1521640 - RNA, 19 nt, Artificial Sequence
  Description of Artificial Sequence: Synthetic oligonucleotide
  Sense strand starting at position 1249 of SEQ ID NO: 1244905
caaagugaagcucauguua

SEQ ID NO: 1521641 - RNA, 19 nt, Artificial Sequence
  Description of Artificial Sequence: Synthetic oligonucleotide
  Antisense strand to SEQ ID NO: 1521640
uaacaugagcuucacuuug

SEQ ID NO: 1521642 - RNA, 19 nt, Artificial Sequence
  Description of Artificial Sequence: Synthetic oligonucleotide
  Sense strand starting at position 1258 of SEQ ID NO: 1244905
gcucauguuaauggaggaa

SEQ ID NO: 1521643 - RNA, 19 nt, Artificial Sequence
  Description of Artificial Sequence: Synthetic oligonucleotide
  Antisense strand to SEQ ID NO: 1521642
uuccuccauuaacaugagc

SEQ ID NO: 1521644 - RNA, 19 nt, Artificial Sequence
  Description of Artificial Sequence: Synthetic oligonucleotide
  Sense strand starting at position 1281 of SEQ ID NO: 1244905
acuacuaguguugaucuaa

SEQ ID NO: 1521645 - RNA, 19 nt, Artificial Sequence
  Description of Artificial Sequence: Synthetic oligonucleotide
  Antisense strand to SEQ ID NO: 1521644
uuagaucaacacuaguagu

SEQ ID NO: 1521646 - RNA, 19 nt, Artificial Sequence
  Description of Artificial Sequence: Synthetic oligonucleotide
  Sense strand starting at position 1386 of SEQ ID NO: 1244905
ucaaauaagcgucaccaua

SEQ ID NO: 1521647 - RNA, 19 nt, Artificial Sequence
  Description of Artificial Sequence: Synthetic oligonucleotide
  Antisense strand to SEQ ID NO: 1521646
uauggugacgcuuauuuga

SEQ ID NO: 1521648 - RNA, 19 nt, Artificial Sequence
  Description of Artificial Sequence: Synthetic oligonucleotide
  Sense strand starting at position 1463 of SEQ ID NO: 1244905
ggaagccuccuuggcagaa

SEQ ID NO: 1521649 - RNA, 19 nt, Artificial Sequence
  Description of Artificial Sequence: Synthetic oligonucleotide
  Antisense strand to SEQ ID NO: 1521648
uucugccaaggaggcuucc

SEQ ID NO: 1521650 - RNA, 19 nt, Artificial Sequence
  Description of Artificial Sequence: Synthetic oligonucleotide
  Sense strand starting at position 1525 of SEQ ID NO: 1244905
agauauccgcucuggaaga

SEQ ID NO: 1521651 - RNA, 19 nt, Artificial Sequence
  Description of Artificial Sequence: Synthetic oligonucleotide
  Antisense strand to SEQ ID NO: 1521650
ucuuccagagcggauaucu

SEQ ID NO: 1521652 - RNA, 19 nt, Artificial Sequence
  Description of Artificial Sequence: Synthetic oligonucleotide
  Sense strand starting at position 1568 of SEQ ID NO: 1244905
aaccgagugccagaauacu

SEQ ID NO: 1521653 - RNA, 19 nt, Artificial Sequence
  Description of Artificial Sequence: Synthetic oligonucleotide
  Antisense strand to SEQ ID NO: 1521652
aguauucuggcacucgguu

SEQ ID NO: 1521654 - RNA, 19 nt, Artificial Sequence
  Description of Artificial Sequence: Synthetic oligonucleotide
  Sense strand starting at position 1851 of SEQ ID NO: 1244905
uuaagaguucugugaacuu

SEQ ID NO: 1521655 - RNA, 19 nt, Artificial Sequence
  Description of Artificial Sequence: Synthetic oligonucleotide
  Antisense strand to SEQ ID NO: 1521654
aaguucacagaacucuuaa

SEQ ID NO: 1521656 - RNA, 19 nt, Artificial Sequence
  Description of Artificial Sequence: Synthetic oligonucleotide
  Sense strand starting at position 2460 of SEQ ID NO: 1244905
gcgcuuuaagcucuagagu

SEQ ID NO: 1521657 - RNA, 19 nt, Artificial Sequence
  Description of Artificial Sequence: Synthetic oligonucleotide
  Antisense strand to SEQ ID NO: 1521656
acucuagagcuuaaagcgc

SEQ ID NO: 1521658 - RNA, 19 nt, Artificial Sequence
  Description of Artificial Sequence: Synthetic oligonucleotide
  Sense strand starting at position 2595 of SEQ ID NO: 1244905
ugggcuuaacaauguaaag

SEQ ID NO: 1521659 - RNA, 19 nt, Artificial Sequence
  Description of Artificial Sequence: Synthetic oligonucleotide
  Antisense strand to SEQ ID NO: 1521658
cuuuacauuguuaagccca

SEQ ID NO: 1521660 - RNA, 19 nt, Artificial Sequence
  Description of Artificial Sequence: Synthetic oligonucleotide
  Sense strand starting at position 2642 of SEQ ID NO: 1244905
gcuuguuaauuacuaagga

SEQ ID NO: 1521661 - RNA, 19 nt, Artificial Sequence
  Description of Artificial Sequence: Synthetic oligonucleotide
  Antisense strand to SEQ ID NO: 1521660
uccuuaguaauuaacaagc

SEQ ID NO: 1521662 - RNA, 19 nt, Artificial Sequence
  Description of Artificial Sequence: Synthetic oligonucleotide
  Sense strand starting at position 2898 of SEQ ID NO: 1244905
cuugauggucuauggaaau

SEQ ID NO: 1521663 - RNA, 19 nt, Artificial Sequence
  Description of Artificial Sequence: Synthetic oligonucleotide
  Antisense strand to SEQ ID NO: 1521662
auuuccauagaccaucaag

SEQ ID NO: 1521664 - RNA, 19 nt, Artificial Sequence
  Description of Artificial Sequence: Synthetic oligonucleotide
  Sense strand starting at position 2980 of SEQ ID NO: 1244905
accagaaaguguucuuuaa

SEQ ID NO: 1521665 - RNA, 19 nt, Artificial Sequence
  Description of Artificial Sequence: Synthetic oligonucleotide
  Antisense strand to SEQ ID NO: 1521664
uuaaagaacacuuucuggu

SEQ ID NO: 1521666 - RNA, 19 nt, Artificial Sequence
  Description of Artificial Sequence: Synthetic oligonucleotide
  Sense strand starting at position 2982 of SEQ ID NO: 1244905
cagaaaguguucuuuaaug

SEQ ID NO: 1521667 - RNA, 19 nt, Artificial Sequence
  Description of Artificial Sequence: Synthetic oligonucleotide
  Antisense strand to SEQ ID NO: 1521666
cauuaaagaacacuuucug

SEQ ID NO: 1521668 - RNA, 19 nt, Artificial Sequence
  Description of Artificial Sequence: Synthetic oligonucleotide
  Sense strand starting at position 2988 of SEQ ID NO: 1244905
guguucuuuaauggaaaga

SEQ ID NO: 1521669 - RNA, 19 nt, Artificial Sequence
  Description of Artificial Sequence: Synthetic oligonucleotide
  Antisense strand to SEQ ID NO: 1521668
ucuuuccauuaaagaacac

SEQ ID NO: 1521670 - RNA, 19 nt, Artificial Sequence
  Description of Artificial Sequence: Synthetic oligonucleotide
  Sense strand starting at position 3127 of SEQ ID NO: 1244905
auuaguaacccauagcagu

SEQ ID NO: 1521671 - RNA, 19 nt, Artificial Sequence
  Description of Artificial Sequence: Synthetic oligonucleotide
  Antisense strand to SEQ ID NO: 1521670
acugcuauggguuacuaau

SEQ ID NO: 1521672 - RNA, 19 nt, Artificial Sequence
  Description of Artificial Sequence: Synthetic oligonucleotide
  Sense strand starting at position 3245 of SEQ ID NO: 1244905
cugaguaaagucuguaaau

SEQ ID NO: 1521673 - RNA, 19 nt, Artificial Sequence
  Description of Artificial Sequence: Synthetic oligonucleotide
  Antisense strand to SEQ ID NO: 1521672
auuuacagacuuuacucag

SEQ ID NO: 1521674 - RNA, 19 nt, Artificial Sequence
  Description of Artificial Sequence: Synthetic oligonucleotide
  Sense strand starting at position 3246 of SEQ ID NO: 1244905
ugaguaaagucuguaaauc

SEQ ID NO: 1521675 - RNA, 19 nt, Artificial Sequence
  Description of Artificial Sequence: Synthetic oligonucleotide
  Antisense strand to SEQ ID NO: 1521674
gauuuacagacuuuacuca

SEQ ID NO: 1521676 - RNA, 19 nt, Artificial Sequence
  Description of Artificial Sequence: Synthetic oligonucleotide
  Sense strand starting at position 3247 of SEQ ID NO: 1244905
gaguaaagucuguaaaucc

SEQ ID NO: 1521677 - RNA, 19 nt, Artificial Sequence
  Description of Artificial Sequence: Synthetic oligonucleotide
  Antisense strand to SEQ ID NO: 1521676
ggauuuacagacuuuacuc

SEQ ID NO: 1521678 - RNA, 19 nt, Artificial Sequence
  Description of Artificial Sequence: Synthetic oligonucleotide
  Sense strand starting at position 3468 of SEQ ID NO: 1244905
auuguuauauagcuugaca

SEQ ID NO: 1521679 - RNA, 19 nt, Artificial Sequence
  Description of Artificial Sequence: Synthetic oligonucleotide
  Antisense strand to SEQ ID NO: 1521678
ugucaagcuauauaacaau

SEQ ID NO: 1521680 - RNA, 19 nt, Artificial Sequence
  Description of Artificial Sequence: Synthetic oligonucleotide
  Sense strand starting at position 3471 of SEQ ID NO: 1244905
guuauauagcuugacauau

SEQ ID NO: 1521681 - RNA, 19 nt, Artificial Sequence
  Description of Artificial Sequence: Synthetic oligonucleotide
  Antisense strand to SEQ ID NO: 1521680
auaugucaagcuauauaac

SEQ ID NO: 1521682 - RNA, 19 nt, Artificial Sequence
  Description of Artificial Sequence: Synthetic oligonucleotide
  Sense strand starting at position 3781 of SEQ ID NO: 1244905
ucugaugaguucuuggauu

SEQ ID NO: 1521683 - RNA, 19 nt, Artificial Sequence
  Description of Artificial Sequence: Synthetic oligonucleotide
  Antisense strand to SEQ ID NO: 1521682
aauccaagaacucaucaga

SEQ ID NO: 1521684 - RNA, 19 nt, Artificial Sequence
  Description of Artificial Sequence: Synthetic oligonucleotide
  Sense strand starting at position 3783 of SEQ ID NO: 1244905
ugaugaguucuuggauuac

SEQ ID NO: 1521685 - RNA, 19 nt, Artificial Sequence
  Description of Artificial Sequence: Synthetic oligonucleotide
  Antisense strand to SEQ ID NO: 1521684
guaauccaagaacucauca

SEQ ID NO: 1521686 - RNA, 19 nt, Artificial Sequence
  Description of Artificial Sequence: Synthetic oligonucleotide
  Sense strand starting at position 53 of SEQ ID NO: 1244906
gcugaaguaaguuaaguga

SEQ ID NO: 1521687 - RNA, 19 nt, Artificial Sequence
  Description of Artificial Sequence: Synthetic oligonucleotide
  Antisense strand to SEQ ID NO: 1521686
ucacuuaacuuacuucagc

SEQ ID NO: 1521688 - RNA, 19 nt, Artificial Sequence
  Description of Artificial Sequence: Synthetic oligonucleotide
  Sense strand starting at position 123 of SEQ ID NO: 1244906
uugggaugcccucaauaac

SEQ ID NO: 1521689 - RNA, 19 nt, Artificial Sequence
  Description of Artificial Sequence: Synthetic oligonucleotide
  Antisense strand to SEQ ID NO: 1521688
guuauugagggcaucccaa

SEQ ID NO: 1521690 - RNA, 19 nt, Artificial Sequence
  Description of Artificial Sequence: Synthetic oligonucleotide
  Sense strand starting at position 126 of SEQ ID NO: 1244906
ggaugcccucaauaacauu

SEQ ID NO: 1521691 - RNA, 19 nt, Artificial Sequence
  Description of Artificial Sequence: Synthetic oligonucleotide
  Antisense strand to SEQ ID NO: 1521690
aauguuauugagggcaucc

SEQ ID NO: 1521692 - RNA, 19 nt, Artificial Sequence
  Description of Artificial Sequence: Synthetic oligonucleotide
  Sense strand starting at position 182 of SEQ ID NO: 1244906
ggaguuaucugagaaauuu

SEQ ID NO: 1521693 - RNA, 19 nt, Artificial Sequence
  Description of Artificial Sequence: Synthetic oligonucleotide
  Antisense strand to SEQ ID NO: 1521692
aaauuucucagauaacucc

SEQ ID NO: 1521694 - RNA, 19 nt, Artificial Sequence
  Description of Artificial Sequence: Synthetic oligonucleotide
  Sense strand starting at position 319 of SEQ ID NO: 1244906
uugccauuacaugagauca

SEQ ID NO: 1521695 - RNA, 19 nt, Artificial Sequence
  Description of Artificial Sequence: Synthetic oligonucleotide
  Antisense strand to SEQ ID NO: 1521694
ugaucucauguaauggcaa

SEQ ID NO: 1521696 - RNA, 19 nt, Artificial Sequence
  Description of Artificial Sequence: Synthetic oligonucleotide
  Sense strand starting at position 360 of SEQ ID NO: 1244906
agucucugcccagauacau

SEQ ID NO: 1521697 - RNA, 19 nt, Artificial Sequence
  Description of Artificial Sequence: Synthetic oligonucleotide
  Antisense strand to SEQ ID NO: 1521696
auguaucugggcagagacu

SEQ ID NO: 1521698 - RNA, 19 nt, Artificial Sequence
  Description of Artificial Sequence: Synthetic oligonucleotide
  Sense strand starting at position 391 of SEQ ID NO: 1244906
aguuauaaccaguauugau

SEQ ID NO: 1521699 - RNA, 19 nt, Artificial Sequence
  Description of Artificial Sequence: Synthetic oligonucleotide
  Antisense strand to SEQ ID NO: 1521698
aucaauacugguuauaacu

SEQ ID NO: 1521700 - RNA, 19 nt, Artificial Sequence
  Description of Artificial Sequence: Synthetic oligonucleotide
  Sense strand starting at position 423 of SEQ ID NO: 1244906
cagguaugagaaugaggua

SEQ ID NO: 1521701 - RNA, 19 nt, Artificial Sequence
  Description of Artificial Sequence: Synthetic oligonucleotide
  Antisense strand to SEQ ID NO: 1521700
uaccucauucucauaccug

SEQ ID NO: 1521702 - RNA, 19 nt, Artificial Sequence
  Description of Artificial Sequence: Synthetic oligonucleotide
  Sense strand starting at position 543 of SEQ ID NO: 1244906
gacugaagagcuggccuau

SEQ ID NO: 1521703 - RNA, 19 nt, Artificial Sequence
  Description of Artificial Sequence: Synthetic oligonucleotide
  Antisense strand to SEQ ID NO: 1521702
auaggccagcucuucaguc

SEQ ID NO: 1521704 - RNA, 19 nt, Artificial Sequence
  Description of Artificial Sequence: Synthetic oligonucleotide
  Sense strand starting at position 699 of SEQ ID NO: 1244906
uggugaugugaauguggaa

SEQ ID NO: 1521705 - RNA, 19 nt, Artificial Sequence
  Description of Artificial Sequence: Synthetic oligonucleotide
  Antisense strand to SEQ ID NO: 1521704
uuccacauucacaucacca

SEQ ID NO: 1521706 - RNA, 19 nt, Artificial Sequence
  Description of Artificial Sequence: Synthetic oligonucleotide
  Sense strand starting at position 836 of SEQ ID NO: 1244906
aguaaucuuccuuauagug

SEQ ID NO: 1521707 - RNA, 19 nt, Artificial Sequence
  Description of Artificial Sequence: Synthetic oligonucleotide
  Antisense strand to SEQ ID NO: 1521706
cacuauaaggaagauuacu

SEQ ID NO: 1521708 - RNA, 19 nt, Artificial Sequence
  Description of Artificial Sequence: Synthetic oligonucleotide
  Sense strand starting at position 851 of SEQ ID NO: 1244906
agugaaacucauggagguu

SEQ ID NO: 1521709 - RNA, 19 nt, Artificial Sequence
  Description of Artificial Sequence: Synthetic oligonucleotide
  Antisense strand to SEQ ID NO: 1521708
aaccuccaugaguuucacu

SEQ ID NO: 1521710 - RNA, 19 nt, Artificial Sequence
  Description of Artificial Sequence: Synthetic oligonucleotide
  Sense strand starting at position 852 of SEQ ID NO: 1244906
gugaaacucauggagguuu

SEQ ID NO: 1521711 - RNA, 19 nt, Artificial Sequence
  Description of Artificial Sequence: Synthetic oligonucleotide
  Antisense strand to SEQ ID NO: 1521710
aaaccuccaugaguuucac

SEQ ID NO: 1521712 - RNA, 19 nt, Artificial Sequence
  Description of Artificial Sequence: Synthetic oligonucleotide
  Sense strand starting at position 985 of SEQ ID NO: 1244906
acugaauugagacguaaug

SEQ ID NO: 1521713 - RNA, 19 nt, Artificial Sequence
  Description of Artificial Sequence: Synthetic oligonucleotide
  Antisense strand to SEQ ID NO: 1521712
cauuacgucucaauucagu

SEQ ID NO: 1521714 - RNA, 19 nt, Artificial Sequence
  Description of Artificial Sequence: Synthetic oligonucleotide
  Sense strand starting at position 987 of SEQ ID NO: 1244906
ugaauugagacguaaugua

SEQ ID NO: 1521715 - RNA, 19 nt, Artificial Sequence
  Description of Artificial Sequence: Synthetic oligonucleotide
  Antisense strand to SEQ ID NO: 1521714
uacauuacgucucaauuca

SEQ ID NO: 1521716 - RNA, 19 nt, Artificial Sequence
  Description of Artificial Sequence: Synthetic oligonucleotide
  Sense strand starting at position 1001 of SEQ ID NO: 1244906
auguacaagcucuggagau

SEQ ID NO: 1521717 - RNA, 19 nt, Artificial Sequence
  Description of Artificial Sequence: Synthetic oligonucleotide
  Antisense strand to SEQ ID NO: 1521716
aucuccagagcuuguacau

SEQ ID NO: 1521718 - RNA, 19 nt, Artificial Sequence
  Description of Artificial Sequence: Synthetic oligonucleotide
  Sense strand starting at position 1128 of SEQ ID NO: 1244906
ugcagaguuggagguaaga

SEQ ID NO: 1521719 - RNA, 19 nt, Artificial Sequence
  Description of Artificial Sequence: Synthetic oligonucleotide
  Antisense strand to SEQ ID NO: 1521718
ucuuaccuccaacucugca

SEQ ID NO: 1521720 - RNA, 19 nt, Artificial Sequence
  Description of Artificial Sequence: Synthetic oligonucleotide
  Sense strand starting at position 1156 of SEQ ID NO: 1244906
caaagugaagcucauguua

SEQ ID NO: 1521721 - RNA, 19 nt, Artificial Sequence
  Description of Artificial Sequence: Synthetic oligonucleotide
  Antisense strand to SEQ ID NO: 1521720
uaacaugagcuucacuuug

SEQ ID NO: 1521722 - RNA, 19 nt, Artificial Sequence
  Description of Artificial Sequence: Synthetic oligonucleotide
  Sense strand starting at position 1165 of SEQ ID NO: 1244906
gcucauguuaauggaggaa

SEQ ID NO: 1521723 - RNA, 19 nt, Artificial Sequence
  Description of Artificial Sequence: Synthetic oligonucleotide
  Antisense strand to SEQ ID NO: 1521722
uuccuccauuaacaugagc

SEQ ID NO: 1521724 - RNA, 19 nt, Artificial Sequence
  Description of Artificial Sequence: Synthetic oligonucleotide
  Sense strand starting at position 1188 of SEQ ID NO: 1244906
acuacuaguguugaucuaa

SEQ ID NO: 1521725 - RNA, 19 nt, Artificial Sequence
  Description of Artificial Sequence: Synthetic oligonucleotide
  Antisense strand to SEQ ID NO: 1521724
uuagaucaacacuaguagu

SEQ ID NO: 1521726 - RNA, 19 nt, Artificial Sequence
  Description of Artificial Sequence: Synthetic oligonucleotide
  Sense strand starting at position 1293 of SEQ ID NO: 1244906
ucaaauaagcgucaccaua

SEQ ID NO: 1521727 - RNA, 19 nt, Artificial Sequence
  Description of Artificial Sequence: Synthetic oligonucleotide
  Antisense strand to SEQ ID NO: 1521726
uauggugacgcuuauuuga

SEQ ID NO: 1521728 - RNA, 19 nt, Artificial Sequence
  Description of Artificial Sequence: Synthetic oligonucleotide
  Sense strand starting at position 1370 of SEQ ID NO: 1244906
ggaagccuccuuggcagaa

SEQ ID NO: 1521729 - RNA, 19 nt, Artificial Sequence
  Description of Artificial Sequence: Synthetic oligonucleotide
  Antisense strand to SEQ ID NO: 1521728
uucugccaaggaggcuucc

SEQ ID NO: 1521730 - RNA, 19 nt, Artificial Sequence
  Description of Artificial Sequence: Synthetic oligonucleotide
  Sense strand starting at position 1432 of SEQ ID NO: 1244906
agauauccgcucuggaaga

SEQ ID NO: 1521731 - RNA, 19 nt, Artificial Sequence
  Description of Artificial Sequence: Synthetic oligonucleotide
  Antisense strand to SEQ ID NO: 1521730
ucuuccagagcggauaucu

SEQ ID NO: 1521732 - RNA, 19 nt, Artificial Sequence
  Description of Artificial Sequence: Synthetic oligonucleotide
  Sense strand starting at position 1475 of SEQ ID NO: 1244906
aaccgagugccagaauacu

SEQ ID NO: 1521733 - RNA, 19 nt, Artificial Sequence
  Description of Artificial Sequence: Synthetic oligonucleotide
  Antisense strand to SEQ ID NO: 1521732
aguauucuggcacucgguu

SEQ ID NO: 1521734 - RNA, 19 nt, Artificial Sequence
  Description of Artificial Sequence: Synthetic oligonucleotide
  Sense strand starting at position 1758 of SEQ ID NO: 1244906
uuaagaguucugugaacuu

SEQ ID NO: 1521735 - RNA, 19 nt, Artificial Sequence
  Description of Artificial Sequence: Synthetic oligonucleotide
  Antisense strand to SEQ ID NO: 1521734
aaguucacagaacucuuaa

SEQ ID NO: 1521736 - RNA, 19 nt, Artificial Sequence
  Description of Artificial Sequence: Synthetic oligonucleotide
  Sense strand starting at position 2367 of SEQ ID NO: 1244906
gcgcuuuaagcucuagagu

SEQ ID NO: 1521737 - RNA, 19 nt, Artificial Sequence
  Description of Artificial Sequence: Synthetic oligonucleotide
  Antisense strand to SEQ ID NO: 1521736
acucuagagcuuaaagcgc

SEQ ID NO: 1521738 - RNA, 19 nt, Artificial Sequence
  Description of Artificial Sequence: Synthetic oligonucleotide
  Sense strand starting at position 2502 of SEQ ID NO: 1244906
ugggcuuaacaauguaaag

SEQ ID NO: 1521739 - RNA, 19 nt, Artificial Sequence
  Description of Artificial Sequence: Synthetic oligonucleotide
  Antisense strand to SEQ ID NO: 1521738
cuuuacauuguuaagccca

SEQ ID NO: 1521740 - RNA, 19 nt, Artificial Sequence
  Description of Artificial Sequence: Synthetic oligonucleotide
  Sense strand starting at position 2549 of SEQ ID NO: 1244906
gcuuguuaauuacuaagga

SEQ ID NO: 1521741 - RNA, 19 nt, Artificial Sequence
  Description of Artificial Sequence: Synthetic oligonucleotide
  Antisense strand to SEQ ID NO: 1521740
uccuuaguaauuaacaagc

SEQ ID NO: 1521742 - RNA, 19 nt, Artificial Sequence
  Description of Artificial Sequence: Synthetic oligonucleotide
  Sense strand starting at position 2805 of SEQ ID NO: 1244906
cuugauggucuauggaaau

SEQ ID NO: 1521743 - RNA, 19 nt, Artificial Sequence
  Description of Artificial Sequence: Synthetic oligonucleotide
  Antisense strand to SEQ ID NO: 1521742
auuuccauagaccaucaag

SEQ ID NO: 1521744 - RNA, 19 nt, Artificial Sequence
  Description of Artificial Sequence: Synthetic oligonucleotide
  Sense strand starting at position 2887 of SEQ ID NO: 1244906
accagaaaguguucuuuaa

SEQ ID NO: 1521745 - RNA, 19 nt, Artificial Sequence
  Description of Artificial Sequence: Synthetic oligonucleotide
  Antisense strand to SEQ ID NO: 1521744
uuaaagaacacuuucuggu

SEQ ID NO: 1521746 - RNA, 19 nt, Artificial Sequence
  Description of Artificial Sequence: Synthetic oligonucleotide
  Sense strand starting at position 2889 of SEQ ID NO: 1244906
cagaaaguguucuuuaaug

SEQ ID NO: 1521747 - RNA, 19 nt, Artificial Sequence
  Description of Artificial Sequence: Synthetic oligonucleotide
  Antisense strand to SEQ ID NO: 1521746
cauuaaagaacacuuucug

SEQ ID NO: 1521748 - RNA, 19 nt, Artificial Sequence
  Description of Artificial Sequence: Synthetic oligonucleotide
  Sense strand starting at position 2895 of SEQ ID NO: 1244906
guguucuuuaauggaaaga

SEQ ID NO: 1521749 - RNA, 19 nt, Artificial Sequence
  Description of Artificial Sequence: Synthetic oligonucleotide
  Antisense strand to SEQ ID NO: 1521748
ucuuuccauuaaagaacac

SEQ ID NO: 1521750 - RNA, 19 nt, Artificial Sequence
  Description of Artificial Sequence: Synthetic oligonucleotide
  Sense strand starting at position 3034 of SEQ ID NO: 1244906
auuaguaacccauagcagu

SEQ ID NO: 1521751 - RNA, 19 nt, Artificial Sequence
  Description of Artificial Sequence: Synthetic oligonucleotide
  Antisense strand to SEQ ID NO: 1521750
acugcuauggguuacuaau

SEQ ID NO: 1521752 - RNA, 19 nt, Artificial Sequence
  Description of Artificial Sequence: Synthetic oligonucleotide
  Sense strand starting at position 3152 of SEQ ID NO: 1244906
cugaguaaagucuguaaau

SEQ ID NO: 1521753 - RNA, 19 nt, Artificial Sequence
  Description of Artificial Sequence: Synthetic oligonucleotide
  Antisense strand to SEQ ID NO: 1521752
auuuacagacuuuacucag

SEQ ID NO: 1521754 - RNA, 19 nt, Artificial Sequence
  Description of Artificial Sequence: Synthetic oligonucleotide
  Sense strand starting at position 3153 of SEQ ID NO: 1244906
ugaguaaagucuguaaauc

SEQ ID NO: 1521755 - RNA, 19 nt, Artificial Sequence
  Description of Artificial Sequence: Synthetic oligonucleotide
  Antisense strand to SEQ ID NO: 1521754
gauuuacagacuuuacuca

SEQ ID NO: 1521756 - RNA, 19 nt, Artificial Sequence
  Description of Artificial Sequence: Synthetic oligonucleotide
  Sense strand starting at position 3154 of SEQ ID NO: 1244906
gaguaaagucuguaaaucc

SEQ ID NO: 1521757 - RNA, 19 nt, Artificial Sequence
  Description of Artificial Sequence: Synthetic oligonucleotide
  Antisense strand to SEQ ID NO: 1521756
ggauuuacagacuuuacuc

SEQ ID NO: 1521758 - RNA, 19 nt, Artificial Sequence
  Description of Artificial Sequence: Synthetic oligonucleotide
  Sense strand starting at position 3375 of SEQ ID NO: 1244906
auuguuauauagcuugaca

SEQ ID NO: 1521759 - RNA, 19 nt, Artificial Sequence
  Description of Artificial Sequence: Synthetic oligonucleotide
  Antisense strand to SEQ ID NO: 1521758
ugucaagcuauauaacaau

SEQ ID NO: 1521760 - RNA, 19 nt, Artificial Sequence
  Description of Artificial Sequence: Synthetic oligonucleotide
  Sense strand starting at position 3378 of SEQ ID NO: 1244906
guuauauagcuugacauau

SEQ ID NO: 1521761 - RNA, 19 nt, Artificial Sequence
  Description of Artificial Sequence: Synthetic oligonucleotide
  Antisense strand to SEQ ID NO: 1521760
auaugucaagcuauauaac

SEQ ID NO: 1521762 - RNA, 19 nt, Artificial Sequence
  Description of Artificial Sequence: Synthetic oligonucleotide
  Sense strand starting at position 3688 of SEQ ID NO: 1244906
ucugaugaguucuuggauu

SEQ ID NO: 1521763 - RNA, 19 nt, Artificial Sequence
  Description of Artificial Sequence: Synthetic oligonucleotide
  Antisense strand to SEQ ID NO: 1521762
aauccaagaacucaucaga

SEQ ID NO: 1521764 - RNA, 19 nt, Artificial Sequence
  Description of Artificial Sequence: Synthetic oligonucleotide
  Sense strand starting at position 3690 of SEQ ID NO: 1244906
ugaugaguucuuggauuac

SEQ ID NO: 1521765 - RNA, 19 nt, Artificial Sequence
  Description of Artificial Sequence: Synthetic oligonucleotide
  Antisense strand to SEQ ID NO: 1521764
guaauccaagaacucauca

SEQ ID NO: 1521766 - RNA, 19 nt, Artificial Sequence
  Description of Artificial Sequence: Synthetic oligonucleotide
  Sense strand starting at position 83 of SEQ ID NO: 1244907
gcugaaguaaguuaaguga

SEQ ID NO: 1521767 - RNA, 19 nt, Artificial Sequence
  Description of Artificial Sequence: Synthetic oligonucleotide
  Antisense strand to SEQ ID NO: 1521766
ucacuuaacuuacuucagc

SEQ ID NO: 1521768 - RNA, 19 nt, Artificial Sequence
  Description of Artificial Sequence: Synthetic oligonucleotide
  Sense strand starting at position 153 of SEQ ID NO: 1244907
uugggaugcccucaauaac

SEQ ID NO: 1521769 - RNA, 19 nt, Artificial Sequence
  Description of Artificial Sequence: Synthetic oligonucleotide
  Antisense strand to SEQ ID NO: 1521768
guuauugagggcaucccaa

SEQ ID NO: 1521770 - RNA, 19 nt, Artificial Sequence
  Description of Artificial Sequence: Synthetic oligonucleotide
  Sense strand starting at position 156 of SEQ ID NO: 1244907
ggaugcccucaauaacauu

SEQ ID NO: 1521771 - RNA, 19 nt, Artificial Sequence
  Description of Artificial Sequence: Synthetic oligonucleotide
  Antisense strand to SEQ ID NO: 1521770
aauguuauugagggcaucc

SEQ ID NO: 1521772 - RNA, 19 nt, Artificial Sequence
  Description of Artificial Sequence: Synthetic oligonucleotide
  Sense strand starting at position 212 of SEQ ID NO: 1244907
ggaguuaucugagaaauuu

SEQ ID NO: 1521773 - RNA, 19 nt, Artificial Sequence
  Description of Artificial Sequence: Synthetic oligonucleotide
  Antisense strand to SEQ ID NO: 1521772
aaauuucucagauaacucc

SEQ ID NO: 1521774 - RNA, 19 nt, Artificial Sequence
  Description of Artificial Sequence: Synthetic oligonucleotide
  Sense strand starting at position 349 of SEQ ID NO: 1244907
uugccauuacaugagauca

SEQ ID NO: 1521775 - RNA, 19 nt, Artificial Sequence
  Description of Artificial Sequence: Synthetic oligonucleotide
  Antisense strand to SEQ ID NO: 1521774
ugaucucauguaauggcaa

SEQ ID NO: 1521776 - RNA, 19 nt, Artificial Sequence
  Description of Artificial Sequence: Synthetic oligonucleotide
  Sense strand starting at position 390 of SEQ ID NO: 1244907
agucucugcccagauacau

SEQ ID NO: 1521777 - RNA, 19 nt, Artificial Sequence
  Description of Artificial Sequence: Synthetic oligonucleotide
  Antisense strand to SEQ ID NO: 1521776
auguaucugggcagagacu

SEQ ID NO: 1521778 - RNA, 19 nt, Artificial Sequence
  Description of Artificial Sequence: Synthetic oligonucleotide
  Sense strand starting at position 421 of SEQ ID NO: 1244907
aguuauaaccaguauugau

SEQ ID NO: 1521779 - RNA, 19 nt, Artificial Sequence
  Description of Artificial Sequence: Synthetic oligonucleotide
  Antisense strand to SEQ ID NO: 1521778
aucaauacugguuauaacu

SEQ ID NO: 1521780 - RNA, 19 nt, Artificial Sequence
  Description of Artificial Sequence: Synthetic oligonucleotide
  Sense strand starting at position 453 of SEQ ID NO: 1244907
cagguaugagaaugaggua

SEQ ID NO: 1521781 - RNA, 19 nt, Artificial Sequence
  Description of Artificial Sequence: Synthetic oligonucleotide
  Antisense strand to SEQ ID NO: 1521780
uaccucauucucauaccug

SEQ ID NO: 1521782 - RNA, 19 nt, Artificial Sequence
  Description of Artificial Sequence: Synthetic oligonucleotide
  Sense strand starting at position 573 of SEQ ID NO: 1244907
gacugaagagcuggccuau

SEQ ID NO: 1521783 - RNA, 19 nt, Artificial Sequence
  Description of Artificial Sequence: Synthetic oligonucleotide
  Antisense strand to SEQ ID NO: 1521782
auaggccagcucuucaguc

SEQ ID NO: 1521784 - RNA, 19 nt, Artificial Sequence
  Description of Artificial Sequence: Synthetic oligonucleotide
  Sense strand starting at position 729 of SEQ ID NO: 1244907
uggugaugugaauguggaa

SEQ ID NO: 1521785 - RNA, 19 nt, Artificial Sequence
  Description of Artificial Sequence: Synthetic oligonucleotide
  Antisense strand to SEQ ID NO: 1521784
uuccacauucacaucacca

SEQ ID NO: 1521786 - RNA, 19 nt, Artificial Sequence
  Description of Artificial Sequence: Synthetic oligonucleotide
  Sense strand starting at position 866 of SEQ ID NO: 1244907
aguaaucuuccuuauagug

SEQ ID NO: 1521787 - RNA, 19 nt, Artificial Sequence
  Description of Artificial Sequence: Synthetic oligonucleotide
  Antisense strand to SEQ ID NO: 1521786
cacuauaaggaagauuacu

SEQ ID NO: 1521788 - RNA, 19 nt, Artificial Sequence
  Description of Artificial Sequence: Synthetic oligonucleotide
  Sense strand starting at position 881 of SEQ ID NO: 1244907
agugaaacucauggagguu

SEQ ID NO: 1521789 - RNA, 19 nt, Artificial Sequence
  Description of Artificial Sequence: Synthetic oligonucleotide
  Antisense strand to SEQ ID NO: 1521788
aaccuccaugaguuucacu

SEQ ID NO: 1521790 - RNA, 19 nt, Artificial Sequence
  Description of Artificial Sequence: Synthetic oligonucleotide
  Sense strand starting at position 882 of SEQ ID NO: 1244907
gugaaacucauggagguuu

SEQ ID NO: 1521791 - RNA, 19 nt, Artificial Sequence
  Description of Artificial Sequence: Synthetic oligonucleotide
  Antisense strand to SEQ ID NO: 1521790
aaaccuccaugaguuucac

SEQ ID NO: 1521792 - RNA, 19 nt, Artificial Sequence
  Description of Artificial Sequence: Synthetic oligonucleotide
  Sense strand starting at position 1015 of SEQ ID NO: 1244907
acugaauugagacguaaug

SEQ ID NO: 1521793 - RNA, 19 nt, Artificial Sequence
  Description of Artificial Sequence: Synthetic oligonucleotide
  Antisense strand to SEQ ID NO: 1521792
cauuacgucucaauucagu

SEQ ID NO: 1521794 - RNA, 19 nt, Artificial Sequence
  Description of Artificial Sequence: Synthetic oligonucleotide
  Sense strand starting at position 1017 of SEQ ID NO: 1244907
ugaauugagacguaaugua

SEQ ID NO: 1521795 - RNA, 19 nt, Artificial Sequence
  Description of Artificial Sequence: Synthetic oligonucleotide
  Antisense strand to SEQ ID NO: 1521794
uacauuacgucucaauuca

SEQ ID NO: 1521796 - RNA, 19 nt, Artificial Sequence
  Description of Artificial Sequence: Synthetic oligonucleotide
  Sense strand starting at position 1031 of SEQ ID NO: 1244907
auguacaagcucuggagau

SEQ ID NO: 1521797 - RNA, 19 nt, Artificial Sequence
  Description of Artificial Sequence: Synthetic oligonucleotide
  Antisense strand to SEQ ID NO: 1521796
aucuccagagcuuguacau

SEQ ID NO: 1521798 - RNA, 19 nt, Artificial Sequence
  Description of Artificial Sequence: Synthetic oligonucleotide
  Sense strand starting at position 1158 of SEQ ID NO: 1244907
ugcagaguuggagguaaga

SEQ ID NO: 1521799 - RNA, 19 nt, Artificial Sequence
  Description of Artificial Sequence: Synthetic oligonucleotide
  Antisense strand to SEQ ID NO: 1521798
ucuuaccuccaacucugca

SEQ ID NO: 1521800 - RNA, 19 nt, Artificial Sequence
  Description of Artificial Sequence: Synthetic oligonucleotide
  Sense strand starting at position 1186 of SEQ ID NO: 1244907
caaagugaagcucauguua

SEQ ID NO: 1521801 - RNA, 19 nt, Artificial Sequence
  Description of Artificial Sequence: Synthetic oligonucleotide
  Antisense strand to SEQ ID NO: 1521800
uaacaugagcuucacuuug

SEQ ID NO: 1521802 - RNA, 19 nt, Artificial Sequence
  Description of Artificial Sequence: Synthetic oligonucleotide
  Sense strand starting at position 1195 of SEQ ID NO: 1244907
gcucauguuaauggaggaa

SEQ ID NO: 1521803 - RNA, 19 nt, Artificial Sequence
  Description of Artificial Sequence: Synthetic oligonucleotide
  Antisense strand to SEQ ID NO: 1521802
uuccuccauuaacaugagc

SEQ ID NO: 1521804 - RNA, 19 nt, Artificial Sequence
  Description of Artificial Sequence: Synthetic oligonucleotide
  Sense strand starting at position 1218 of SEQ ID NO: 1244907
acuacuaguguugaucuaa

SEQ ID NO: 1521805 - RNA, 19 nt, Artificial Sequence
  Description of Artificial Sequence: Synthetic oligonucleotide
  Antisense strand to SEQ ID NO: 1521804
uuagaucaacacuaguagu

SEQ ID NO: 1521806 - RNA, 19 nt, Artificial Sequence
  Description of Artificial Sequence: Synthetic oligonucleotide
  Sense strand starting at position 1323 of SEQ ID NO: 1244907
ucaaauaagcgucaccaua

SEQ ID NO: 1521807 - RNA, 19 nt, Artificial Sequence
  Description of Artificial Sequence: Synthetic oligonucleotide
  Antisense strand to SEQ ID NO: 1521806
uauggugacgcuuauuuga

SEQ ID NO: 1521808 - RNA, 19 nt, Artificial Sequence
  Description of Artificial Sequence: Synthetic oligonucleotide
  Sense strand starting at position 1400 of SEQ ID NO: 1244907
ggaagccuccuuggcagaa

SEQ ID NO: 1521809 - RNA, 19 nt, Artificial Sequence
  Description of Artificial Sequence: Synthetic oligonucleotide
  Antisense strand to SEQ ID NO: 1521808
uucugccaaggaggcuucc

SEQ ID NO: 1521810 - RNA, 19 nt, Artificial Sequence
  Description of Artificial Sequence: Synthetic oligonucleotide
  Sense strand starting at position 1462 of SEQ ID NO: 1244907
agauauccgcucuggaaga

SEQ ID NO: 1521811 - RNA, 19 nt, Artificial Sequence
  Description of Artificial Sequence: Synthetic oligonucleotide
  Antisense strand to SEQ ID NO: 1521810
ucuuccagagcggauaucu

SEQ ID NO: 1521812 - RNA, 19 nt, Artificial Sequence
  Description of Artificial Sequence: Synthetic oligonucleotide
  Sense strand starting at position 1505 of SEQ ID NO: 1244907
aaccgagugccagaauacu

SEQ ID NO: 1521813 - RNA, 19 nt, Artificial Sequence
  Description of Artificial Sequence: Synthetic oligonucleotide
  Antisense strand to SEQ ID NO: 1521812
aguauucuggcacucgguu

SEQ ID NO: 1521814 - RNA, 19 nt, Artificial Sequence
  Description of Artificial Sequence: Synthetic oligonucleotide
  Sense strand starting at position 1788 of SEQ ID NO: 1244907
uuaagaguucugugaacuu

SEQ ID NO: 1521815 - RNA, 19 nt, Artificial Sequence
  Description of Artificial Sequence: Synthetic oligonucleotide
  Antisense strand to SEQ ID NO: 1521814
aaguucacagaacucuuaa

SEQ ID NO: 1521816 - RNA, 19 nt, Artificial Sequence
  Description of Artificial Sequence: Synthetic oligonucleotide
  Sense strand starting at position 2397 of SEQ ID NO: 1244907
gcgcuuuaagcucuagagu

SEQ ID NO: 1521817 - RNA, 19 nt, Artificial Sequence
  Description of Artificial Sequence: Synthetic oligonucleotide
  Antisense strand to SEQ ID NO: 1521816
acucuagagcuuaaagcgc

SEQ ID NO: 1521818 - RNA, 19 nt, Artificial Sequence
  Description of Artificial Sequence: Synthetic oligonucleotide
  Sense strand starting at position 2532 of SEQ ID NO: 1244907
ugggcuuaacaauguaaag

SEQ ID NO: 1521819 - RNA, 19 nt, Artificial Sequence
  Description of Artificial Sequence: Synthetic oligonucleotide
  Antisense strand to SEQ ID NO: 1521818
cuuuacauuguuaagccca

SEQ ID NO: 1521820 - RNA, 19 nt, Artificial Sequence
  Description of Artificial Sequence: Synthetic oligonucleotide
  Sense strand starting at position 2579 of SEQ ID NO: 1244907
gcuuguuaauuacuaagga

SEQ ID NO: 1521821 - RNA, 19 nt, Artificial Sequence
  Description of Artificial Sequence: Synthetic oligonucleotide
  Antisense strand to SEQ ID NO: 1521820
uccuuaguaauuaacaagc

SEQ ID NO: 1521822 - RNA, 19 nt, Artificial Sequence
  Description of Artificial Sequence: Synthetic oligonucleotide
  Sense strand starting at position 2835 of SEQ ID NO: 1244907
cuugauggucuauggaaau

SEQ ID NO: 1521823 - RNA, 19 nt, Artificial Sequence
  Description of Artificial Sequence: Synthetic oligonucleotide
  Antisense strand to SEQ ID NO: 1521822
auuuccauagaccaucaag

SEQ ID NO: 1521824 - RNA, 19 nt, Artificial Sequence
  Description of Artificial Sequence: Synthetic oligonucleotide
  Sense strand starting at position 2917 of SEQ ID NO: 1244907
accagaaaguguucuuuaa

SEQ ID NO: 1521825 - RNA, 19 nt, Artificial Sequence
  Description of Artificial Sequence: Synthetic oligonucleotide
  Antisense strand to SEQ ID NO: 1521824
uuaaagaacacuuucuggu

SEQ ID NO: 1521826 - RNA, 19 nt, Artificial Sequence
  Description of Artificial Sequence: Synthetic oligonucleotide
  Sense strand starting at position 2919 of SEQ ID NO: 1244907
cagaaaguguucuuuaaug

SEQ ID NO: 1521827 - RNA, 19 nt, Artificial Sequence
  Description of Artificial Sequence: Synthetic oligonucleotide
  Antisense strand to SEQ ID NO: 1521826
cauuaaagaacacuuucug

SEQ ID NO: 1521828 - RNA, 19 nt, Artificial Sequence
  Description of Artificial Sequence: Synthetic oligonucleotide
  Sense strand starting at position 2925 of SEQ ID NO: 1244907
guguucuuuaauggaaaga

SEQ ID NO: 1521829 - RNA, 19 nt, Artificial Sequence
  Description of Artificial Sequence: Synthetic oligonucleotide
  Antisense strand to SEQ ID NO: 1521828
ucuuuccauuaaagaacac

SEQ ID NO: 1521830 - RNA, 19 nt, Artificial Sequence
  Description of Artificial Sequence: Synthetic oligonucleotide
  Sense strand starting at position 3064 of SEQ ID NO: 1244907
auuaguaacccauagcagu

SEQ ID NO: 1521831 - RNA, 19 nt, Artificial Sequence
  Description of Artificial Sequence: Synthetic oligonucleotide
  Antisense strand to SEQ ID NO: 1521830
acugcuauggguuacuaau

SEQ ID NO: 1521832 - RNA, 19 nt, Artificial Sequence
  Description of Artificial Sequence: Synthetic oligonucleotide
  Sense strand starting at position 3182 of SEQ ID NO: 1244907
cugaguaaagucuguaaau

SEQ ID NO: 1521833 - RNA, 19 nt, Artificial Sequence
  Description of Artificial Sequence: Synthetic oligonucleotide
  Antisense strand to SEQ ID NO: 1521832
auuuacagacuuuacucag

SEQ ID NO: 1521834 - RNA, 19 nt, Artificial Sequence
  Description of Artificial Sequence: Synthetic oligonucleotide
  Sense strand starting at position 3183 of SEQ ID NO: 1244907
ugaguaaagucuguaaauc

SEQ ID NO: 1521835 - RNA, 19 nt, Artificial Sequence
  Description of Artificial Sequence: Synthetic oligonucleotide
  Antisense strand to SEQ ID NO: 1521834
gauuuacagacuuuacuca

SEQ ID NO: 1521836 - RNA, 19 nt, Artificial Sequence
  Description of Artificial Sequence: Synthetic oligonucleotide
  Sense strand starting at position 3184 of SEQ ID NO: 1244907
gaguaaagucuguaaaucc

SEQ ID NO: 1521837 - RNA, 19 nt, Artificial Sequence
  Description of Artificial Sequence: Synthetic oligonucleotide
  Antisense strand to SEQ ID NO: 1521836
ggauuuacagacuuuacuc

SEQ ID NO: 1521838 - RNA, 19 nt, Artificial Sequence
  Description of Artificial Sequence: Synthetic oligonucleotide
  Sense strand starting at position 3405 of SEQ ID NO: 1244907
auuguuauauagcuugaca

SEQ ID NO: 1521839 - RNA, 19 nt, Artificial Sequence
  Description of Artificial Sequence: Synthetic oligonucleotide
  Antisense strand to SEQ ID NO: 1521838
ugucaagcuauauaacaau

SEQ ID NO: 1521840 - RNA, 19 nt, Artificial Sequence
  Description of Artificial Sequence: Synthetic oligonucleotide
  Sense strand starting at position 3408 of SEQ ID NO: 1244907
guuauauagcuugacauau

SEQ ID NO: 1521841 - RNA, 19 nt, Artificial Sequence
  Description of Artificial Sequence: Synthetic oligonucleotide
  Antisense strand to SEQ ID NO: 1521840
auaugucaagcuauauaac

SEQ ID NO: 1521842 - RNA, 19 nt, Artificial Sequence
  Description of Artificial Sequence: Synthetic oligonucleotide
  Sense strand starting at position 3718 of SEQ ID NO: 1244907
ucugaugaguucuuggauu

SEQ ID NO: 1521843 - RNA, 19 nt, Artificial Sequence
  Description of Artificial Sequence: Synthetic oligonucleotide
  Antisense strand to SEQ ID NO: 1521842
aauccaagaacucaucaga

SEQ ID NO: 1521844 - RNA, 19 nt, Artificial Sequence
  Description of Artificial Sequence: Synthetic oligonucleotide
  Sense strand starting at position 3720 of SEQ ID NO: 1244907
ugaugaguucuuggauuac

SEQ ID NO: 1521845 - RNA, 19 nt, Artificial Sequence
  Description of Artificial Sequence: Synthetic oligonucleotide
  Antisense strand to SEQ ID NO: 1521844
guaauccaagaacucauca

SEQ ID NO: 1521846 - RNA, 19 nt, Artificial Sequence
  Description of Artificial Sequence: Synthetic oligonucleotide
  Sense strand starting at position 11 of SEQ ID NO: 1244908
ucucacguggcagaaauaa

SEQ ID NO: 1521847 - RNA, 19 nt, Artificial Sequence
  Description of Artificial Sequence: Synthetic oligonucleotide
  Antisense strand to SEQ ID NO: 1521846
uuauuucugccacgugaga

SEQ ID NO: 1521848 - RNA, 19 nt, Artificial Sequence
  Description of Artificial Sequence: Synthetic oligonucleotide
  Sense strand starting at position 153 of SEQ ID NO: 1244908
caaugaguucgugaaccuu

SEQ ID NO: 1521849 - RNA, 19 nt, Artificial Sequence
  Description of Artificial Sequence: Synthetic oligonucleotide
  Antisense strand to SEQ ID NO: 1521848
aagguucacgaacucauug

SEQ ID NO: 1521850 - RNA, 19 nt, Artificial Sequence
  Description of Artificial Sequence: Synthetic oligonucleotide
  Sense strand starting at position 175 of SEQ ID NO: 1244908
ucugucuauuaugcauuua

SEQ ID NO: 1521851 - RNA, 19 nt, Artificial Sequence
  Description of Artificial Sequence: Synthetic oligonucleotide
  Antisense strand to SEQ ID NO: 1521850
uaaaugcauaauagacaga

SEQ ID NO: 1521852 - RNA, 19 nt, Artificial Sequence
  Description of Artificial Sequence: Synthetic oligonucleotide
  Sense strand starting at position 219 of SEQ ID NO: 1244908
cagcuauaacgguacuacu

SEQ ID NO: 1521853 - RNA, 19 nt, Artificial Sequence
  Description of Artificial Sequence: Synthetic oligonucleotide
  Antisense strand to SEQ ID NO: 1521852
aguaguaccguuauagcug

SEQ ID NO: 1521854 - RNA, 19 nt, Artificial Sequence
  Description of Artificial Sequence: Synthetic oligonucleotide
  Sense strand starting at position 430 of SEQ ID NO: 1244908
cuugucucauucucagaca

SEQ ID NO: 1521855 - RNA, 19 nt, Artificial Sequence
  Description of Artificial Sequence: Synthetic oligonucleotide
  Antisense strand to SEQ ID NO: 1521854
ugucugagaaugagacaag

SEQ ID NO: 1521856 - RNA, 19 nt, Artificial Sequence
  Description of Artificial Sequence: Synthetic oligonucleotide
  Sense strand starting at position 464 of SEQ ID NO: 1244908
aguaauucuuguucugaaa

SEQ ID NO: 1521857 - RNA, 19 nt, Artificial Sequence
  Description of Artificial Sequence: Synthetic oligonucleotide
  Antisense strand to SEQ ID NO: 1521856
uuucagaacaagaauuacu

SEQ ID NO: 1521858 - RNA, 19 nt, Artificial Sequence
  Description of Artificial Sequence: Synthetic oligonucleotide
  Sense strand starting at position 973 of SEQ ID NO: 1244908
aaaugucaaggucgggauu

SEQ ID NO: 1521859 - RNA, 19 nt, Artificial Sequence
  Description of Artificial Sequence: Synthetic oligonucleotide
  Antisense strand to SEQ ID NO: 1521858
aaucccgaccuugacauuu

SEQ ID NO: 1521860 - RNA, 19 nt, Artificial Sequence
  Description of Artificial Sequence: Synthetic oligonucleotide
  Sense strand starting at position 1551 of SEQ ID NO: 1244908
cccugacaggaguaaguuu

SEQ ID NO: 1521861 - RNA, 19 nt, Artificial Sequence
  Description of Artificial Sequence: Synthetic oligonucleotide
  Antisense strand to SEQ ID NO: 1521860
aaacuuacuccugucaggg

SEQ ID NO: 1521862 - RNA, 19 nt, Artificial Sequence
  Description of Artificial Sequence: Synthetic oligonucleotide
  Sense strand starting at position 1694 of SEQ ID NO: 1244908
uguuguaacagugauuacu

SEQ ID NO: 1521863 - RNA, 19 nt, Artificial Sequence
  Description of Artificial Sequence: Synthetic oligonucleotide
  Antisense strand to SEQ ID NO: 1521862
aguaaucacuguuacaaca

SEQ ID NO: 1521864 - RNA, 19 nt, Artificial Sequence
  Description of Artificial Sequence: Synthetic oligonucleotide
  Sense strand starting at position 1702 of SEQ ID NO: 1244908
cagugauuacugcagaaug

SEQ ID NO: 1521865 - RNA, 19 nt, Artificial Sequence
  Description of Artificial Sequence: Synthetic oligonucleotide
  Antisense strand to SEQ ID NO: 1521864
cauucugcaguaaucacug

SEQ ID NO: 1521866 - RNA, 19 nt, Artificial Sequence
  Description of Artificial Sequence: Synthetic oligonucleotide
  Sense strand starting at position 1704 of SEQ ID NO: 1244908
gugauuacugcagaaugug

SEQ ID NO: 1521867 - RNA, 19 nt, Artificial Sequence
  Description of Artificial Sequence: Synthetic oligonucleotide
  Antisense strand to SEQ ID NO: 1521866
cacauucugcaguaaucac

SEQ ID NO: 1521868 - RNA, 19 nt, Artificial Sequence
  Description of Artificial Sequence: Synthetic oligonucleotide
  Sense strand starting at position 1712 of SEQ ID NO: 1244908
ugcagaauguggucaauag

SEQ ID NO: 1521869 - RNA, 19 nt, Artificial Sequence
  Description of Artificial Sequence: Synthetic oligonucleotide
  Antisense strand to SEQ ID NO: 1521868
cuauugaccacauucugca

SEQ ID NO: 1521870 - RNA, 19 nt, Artificial Sequence
  Description of Artificial Sequence: Synthetic oligonucleotide
  Sense strand starting at position 1713 of SEQ ID NO: 1244908
gcagaauguggucaauagu

SEQ ID NO: 1521871 - RNA, 19 nt, Artificial Sequence
  Description of Artificial Sequence: Synthetic oligonucleotide
  Antisense strand to SEQ ID NO: 1521870
acuauugaccacauucugc

SEQ ID NO: 1521872 - RNA, 19 nt, Artificial Sequence
  Description of Artificial Sequence: Synthetic oligonucleotide
  Sense strand starting at position 1716 of SEQ ID NO: 1244908
gaauguggucaauaguaga

SEQ ID NO: 1521873 - RNA, 19 nt, Artificial Sequence
  Description of Artificial Sequence: Synthetic oligonucleotide
  Antisense strand to SEQ ID NO: 1521872
ucuacuauugaccacauuc

SEQ ID NO: 1521874 - RNA, 19 nt, Artificial Sequence
  Description of Artificial Sequence: Synthetic oligonucleotide
  Sense strand starting at position 1820 of SEQ ID NO: 1244908
gggacaaaucuaugucuuc

SEQ ID NO: 1521875 - RNA, 19 nt, Artificial Sequence
  Description of Artificial Sequence: Synthetic oligonucleotide
  Antisense strand to SEQ ID NO: 1521874
gaagacauagauuuguccc

SEQ ID NO: 1521876 - RNA, 19 nt, Artificial Sequence
  Description of Artificial Sequence: Synthetic oligonucleotide
  Sense strand starting at position 1821 of SEQ ID NO: 1244908
ggacaaaucuaugucuucu

SEQ ID NO: 1521877 - RNA, 19 nt, Artificial Sequence
  Description of Artificial Sequence: Synthetic oligonucleotide
  Antisense strand to SEQ ID NO: 1521876
agaagacauagauuugucc

SEQ ID NO: 1521878 - RNA, 19 nt, Artificial Sequence
  Description of Artificial Sequence: Synthetic oligonucleotide
  Sense strand starting at position 1952 of SEQ ID NO: 1244908
ccucuugagcucugagaag

SEQ ID NO: 1521879 - RNA, 19 nt, Artificial Sequence
  Description of Artificial Sequence: Synthetic oligonucleotide
  Antisense strand to SEQ ID NO: 1521878
cuucucagagcucaagagg

SEQ ID NO: 1521880 - RNA, 19 nt, Artificial Sequence
  Description of Artificial Sequence: Synthetic oligonucleotide
  Sense strand starting at position 2345 of SEQ ID NO: 1244908
caaagagaaguuugacuuu

SEQ ID NO: 1521881 - RNA, 19 nt, Artificial Sequence
  Description of Artificial Sequence: Synthetic oligonucleotide
  Antisense strand to SEQ ID NO: 1521880
aaagucaaacuucucuuug

SEQ ID NO: 1521882 - RNA, 19 nt, Artificial Sequence
  Description of Artificial Sequence: Synthetic oligonucleotide
  Sense strand starting at position 2348 of SEQ ID NO: 1244908
agagaaguuugacuuuaac

SEQ ID NO: 1521883 - RNA, 19 nt, Artificial Sequence
  Description of Artificial Sequence: Synthetic oligonucleotide
  Antisense strand to SEQ ID NO: 1521882
guuaaagucaaacuucucu

SEQ ID NO: 1521884 - RNA, 19 nt, Artificial Sequence
  Description of Artificial Sequence: Synthetic oligonucleotide
  Sense strand starting at position 2419 of SEQ ID NO: 1244908
cuuaguuaccacuaguaac

SEQ ID NO: 1521885 - RNA, 19 nt, Artificial Sequence
  Description of Artificial Sequence: Synthetic oligonucleotide
  Antisense strand to SEQ ID NO: 1521884
guuacuagugguaacuaag

SEQ ID NO: 1521886 - RNA, 19 nt, Artificial Sequence
  Description of Artificial Sequence: Synthetic oligonucleotide
  Sense strand starting at position 2560 of SEQ ID NO: 1244908
cacaauuguggcugacuga

SEQ ID NO: 1521887 - RNA, 19 nt, Artificial Sequence
  Description of Artificial Sequence: Synthetic oligonucleotide
  Antisense strand to SEQ ID NO: 1521886
ucagucagccacaauugug

SEQ ID NO: 1521888 - RNA, 19 nt, Artificial Sequence
  Description of Artificial Sequence: Synthetic oligonucleotide
  Sense strand starting at position 2561 of SEQ ID NO: 1244908
acaauuguggcugacugaa

SEQ ID NO: 1521889 - RNA, 19 nt, Artificial Sequence
  Description of Artificial Sequence: Synthetic oligonucleotide
  Antisense strand to SEQ ID NO: 1521888
uucagucagccacaauugu

SEQ ID NO: 1521890 - RNA, 19 nt, Artificial Sequence
  Description of Artificial Sequence: Synthetic oligonucleotide
  Sense strand starting at position 2673 of SEQ ID NO: 1244908
gaaauuucgccauguuucc

SEQ ID NO: 1521891 - RNA, 19 nt, Artificial Sequence
  Description of Artificial Sequence: Synthetic oligonucleotide
  Antisense strand to SEQ ID NO: 1521890
ggaaacauggcgaaauuuc

SEQ ID NO: 1521892 - RNA, 19 nt, Artificial Sequence
  Description of Artificial Sequence: Synthetic oligonucleotide
  Sense strand starting at position 2777 of SEQ ID NO: 1244908
uugggagauccuugcauua

SEQ ID NO: 1521893 - RNA, 19 nt, Artificial Sequence
  Description of Artificial Sequence: Synthetic oligonucleotide
  Antisense strand to SEQ ID NO: 1521892
uaaugcaaggaucucccaa

SEQ ID NO: 1521894 - RNA, 19 nt, Artificial Sequence
  Description of Artificial Sequence: Synthetic oligonucleotide
  Sense strand starting at position 2793 of SEQ ID NO: 1244908
uuacacuauguuuauggua

SEQ ID NO: 1521895 - RNA, 19 nt, Artificial Sequence
  Description of Artificial Sequence: Synthetic oligonucleotide
  Antisense strand to SEQ ID NO: 1521894
uaccauaaacauaguguaa

SEQ ID NO: 1521896 - RNA, 19 nt, Artificial Sequence
  Description of Artificial Sequence: Synthetic oligonucleotide
  Sense strand starting at position 2808 of SEQ ID NO: 1244908
gguauuguuaacgaugcaa

SEQ ID NO: 1521897 - RNA, 19 nt, Artificial Sequence
  Description of Artificial Sequence: Synthetic oligonucleotide
  Antisense strand to SEQ ID NO: 1521896
uugcaucguuaacaauacc

SEQ ID NO: 1521898 - RNA, 19 nt, Artificial Sequence
  Description of Artificial Sequence: Synthetic oligonucleotide
  Sense strand starting at position 2942 of SEQ ID NO: 1244908
cuagcuauguaacuuugaa

SEQ ID NO: 1521899 - RNA, 19 nt, Artificial Sequence
  Description of Artificial Sequence: Synthetic oligonucleotide
  Antisense strand to SEQ ID NO: 1521898
uucaaaguuacauagcuag

SEQ ID NO: 1521900 - RNA, 19 nt, Artificial Sequence
  Description of Artificial Sequence: Synthetic oligonucleotide
  Sense strand starting at position 3053 of SEQ ID NO: 1244908
ugaaaugaagcaugugaau

SEQ ID NO: 1521901 - RNA, 19 nt, Artificial Sequence
  Description of Artificial Sequence: Synthetic oligonucleotide
  Antisense strand to SEQ ID NO: 1521900
auucacaugcuucauuuca

SEQ ID NO: 1521902 - RNA, 19 nt, Artificial Sequence
  Description of Artificial Sequence: Synthetic oligonucleotide
  Sense strand starting at position 3065 of SEQ ID NO: 1244908
ugugaaucugccgcacagu

SEQ ID NO: 1521903 - RNA, 19 nt, Artificial Sequence
  Description of Artificial Sequence: Synthetic oligonucleotide
  Antisense strand to SEQ ID NO: 1521902
acugugcggcagauucaca

SEQ ID NO: 1521904 - RNA, 19 nt, Artificial Sequence
  Description of Artificial Sequence: Synthetic oligonucleotide
  Sense strand starting at position 3260 of SEQ ID NO: 1244908
gggauccaagauugucauu

SEQ ID NO: 1521905 - RNA, 19 nt, Artificial Sequence
  Description of Artificial Sequence: Synthetic oligonucleotide
  Antisense strand to SEQ ID NO: 1521904
aaugacaaucuuggauccc

SEQ ID NO: 1521906 - RNA, 19 nt, Artificial Sequence
  Description of Artificial Sequence: Synthetic oligonucleotide
  Sense strand starting at position 3291 of SEQ ID NO: 1244908
uagcaauggagugauguuu

SEQ ID NO: 1521907 - RNA, 19 nt, Artificial Sequence
  Description of Artificial Sequence: Synthetic oligonucleotide
  Antisense strand to SEQ ID NO: 1521906
aaacaucacuccauugcua

SEQ ID NO: 1521908 - RNA, 19 nt, Artificial Sequence
  Description of Artificial Sequence: Synthetic oligonucleotide
  Sense strand starting at position 3635 of SEQ ID NO: 1244908
uuccaaucugggcgagaga

SEQ ID NO: 1521909 - RNA, 19 nt, Artificial Sequence
  Description of Artificial Sequence: Synthetic oligonucleotide
  Antisense strand to SEQ ID NO: 1521908
ucucucgcccagauuggaa

SEQ ID NO: 1521910 - RNA, 19 nt, Artificial Sequence
  Description of Artificial Sequence: Synthetic oligonucleotide
  Sense strand starting at position 3729 of SEQ ID NO: 1244908
ggaggaaacuaguaaagaa

SEQ ID NO: 1521911 - RNA, 19 nt, Artificial Sequence
  Description of Artificial Sequence: Synthetic oligonucleotide
  Antisense strand to SEQ ID NO: 1521910
uucuuuacuaguuuccucc

SEQ ID NO: 1521912 - RNA, 19 nt, Artificial Sequence
  Description of Artificial Sequence: Synthetic oligonucleotide
  Sense strand starting at position 3736 of SEQ ID NO: 1244908
acuaguaaagaauguguua

SEQ ID NO: 1521913 - RNA, 19 nt, Artificial Sequence
  Description of Artificial Sequence: Synthetic oligonucleotide
  Antisense strand to SEQ ID NO: 1521912
uaacacauucuuuacuagu

SEQ ID NO: 1521914 - RNA, 19 nt, Artificial Sequence
  Description of Artificial Sequence: Synthetic oligonucleotide
  Sense strand starting at position 3739 of SEQ ID NO: 1244908
aguaaagaauguguuaaag

SEQ ID NO: 1521915 - RNA, 19 nt, Artificial Sequence
  Description of Artificial Sequence: Synthetic oligonucleotide
  Antisense strand to SEQ ID NO: 1521914
cuuuaacacauucuuuacu

SEQ ID NO: 1521916 - RNA, 19 nt, Artificial Sequence
  Description of Artificial Sequence: Synthetic oligonucleotide
  Sense strand starting at position 3757 of SEQ ID NO: 1244908
gauuacuaccgugagcaac

SEQ ID NO: 1521917 - RNA, 19 nt, Artificial Sequence
  Description of Artificial Sequence: Synthetic oligonucleotide
  Antisense strand to SEQ ID NO: 1521916
guugcucacgguaguaauc

SEQ ID NO: 1521918 - RNA, 19 nt, Artificial Sequence
  Description of Artificial Sequence: Synthetic oligonucleotide
  Sense strand starting at position 3774 of SEQ ID NO: 1244908
acuauaucccuggagcuuu

SEQ ID NO: 1521919 - RNA, 19 nt, Artificial Sequence
  Description of Artificial Sequence: Synthetic oligonucleotide
  Antisense strand to SEQ ID NO: 1521918
aaagcuccagggauauagu

SEQ ID NO: 1521920 - RNA, 19 nt, Artificial Sequence
  Description of Artificial Sequence: Synthetic oligonucleotide
  Sense strand starting at position 3845 of SEQ ID NO: 1244908
ggaagcaacuucucuccau

SEQ ID NO: 1521921 - RNA, 19 nt, Artificial Sequence
  Description of Artificial Sequence: Synthetic oligonucleotide
  Antisense strand to SEQ ID NO: 1521920
auggagagaaguugcuucc

SEQ ID NO: 1521922 - RNA, 19 nt, Artificial Sequence
  Description of Artificial Sequence: Synthetic oligonucleotide
  Sense strand starting at position 3973 of SEQ ID NO: 1244908
ucaggaagucacuggcuau

SEQ ID NO: 1521923 - RNA, 19 nt, Artificial Sequence
  Description of Artificial Sequence: Synthetic oligonucleotide
  Antisense strand to SEQ ID NO: 1521922
auagccagugacuuccuga

SEQ ID NO: 1521924 - RNA, 19 nt, Artificial Sequence
  Description of Artificial Sequence: Synthetic oligonucleotide
  Sense strand starting at position 3976 of SEQ ID NO: 1244908
ggaagucacuggcuauaug

SEQ ID NO: 1521925 - RNA, 19 nt, Artificial Sequence
  Description of Artificial Sequence: Synthetic oligonucleotide
  Antisense strand to SEQ ID NO: 1521924
cauauagccagugacuucc

SEQ ID NO: 1521926 - RNA, 19 nt, Artificial Sequence
  Description of Artificial Sequence: Synthetic oligonucleotide
  Sense strand starting at position 67 of SEQ ID NO: 1244909
aaaggaguucaguguugug

SEQ ID NO: 1521927 - RNA, 19 nt, Artificial Sequence
  Description of Artificial Sequence: Synthetic oligonucleotide
  Antisense strand to SEQ ID NO: 1521926
cacaacacugaacuccuuu

SEQ ID NO: 1521928 - RNA, 19 nt, Artificial Sequence
  Description of Artificial Sequence: Synthetic oligonucleotide
  Sense strand starting at position 208 of SEQ ID NO: 1244909
ccaacuucccaaugagugu

SEQ ID NO: 1521929 - RNA, 19 nt, Artificial Sequence
  Description of Artificial Sequence: Synthetic oligonucleotide
  Antisense strand to SEQ ID NO: 1521928
acacucauugggaaguugg

SEQ ID NO: 1521930 - RNA, 19 nt, Artificial Sequence
  Description of Artificial Sequence: Synthetic oligonucleotide
  Sense strand starting at position 214 of SEQ ID NO: 1244909
ucccaaugaguguggauca

SEQ ID NO: 1521931 - RNA, 19 nt, Artificial Sequence
  Description of Artificial Sequence: Synthetic oligonucleotide
  Antisense strand to SEQ ID NO: 1521930
ugauccacacucauuggga

SEQ ID NO: 1521932 - RNA, 19 nt, Artificial Sequence
  Description of Artificial Sequence: Synthetic oligonucleotide
  Sense strand starting at position 327 of SEQ ID NO: 1244909
auuucuaucgcuuggucaa

SEQ ID NO: 1521933 - RNA, 19 nt, Artificial Sequence
  Description of Artificial Sequence: Synthetic oligonucleotide
  Antisense strand to SEQ ID NO: 1521932
uugaccaagcgauagaaau

SEQ ID NO: 1521934 - RNA, 19 nt, Artificial Sequence
  Description of Artificial Sequence: Synthetic oligonucleotide
  Sense strand starting at position 328 of SEQ ID NO: 1244909
uuucuaucgcuuggucaag

SEQ ID NO: 1521935 - RNA, 19 nt, Artificial Sequence
  Description of Artificial Sequence: Synthetic oligonucleotide
  Antisense strand to SEQ ID NO: 1521934
cuugaccaagcgauagaaa

SEQ ID NO: 1521936 - RNA, 19 nt, Artificial Sequence
  Description of Artificial Sequence: Synthetic oligonucleotide
  Sense strand starting at position 447 of SEQ ID NO: 1244909
ccugccagauugucucauu

SEQ ID NO: 1521937 - RNA, 19 nt, Artificial Sequence
  Description of Artificial Sequence: Synthetic oligonucleotide
  Antisense strand to SEQ ID NO: 1521936
aaugagacaaucuggcagg

SEQ ID NO: 1521938 - RNA, 19 nt, Artificial Sequence
  Description of Artificial Sequence: Synthetic oligonucleotide
  Sense strand starting at position 448 of SEQ ID NO: 1244909
cugccagauugucucauuu

SEQ ID NO: 1521939 - RNA, 19 nt, Artificial Sequence
  Description of Artificial Sequence: Synthetic oligonucleotide
  Antisense strand to SEQ ID NO: 1521938
aaaugagacaaucuggcag

SEQ ID NO: 1521940 - RNA, 19 nt, Artificial Sequence
  Description of Artificial Sequence: Synthetic oligonucleotide
  Sense strand starting at position 450 of SEQ ID NO: 1244909
gccagauugucucauuuga

SEQ ID NO: 1521941 - RNA, 19 nt, Artificial Sequence
  Description of Artificial Sequence: Synthetic oligonucleotide
  Antisense strand to SEQ ID NO: 1521940
ucaaaugagacaaucuggc

SEQ ID NO: 1521942 - RNA, 19 nt, Artificial Sequence
  Description of Artificial Sequence: Synthetic oligonucleotide
  Sense strand starting at position 501 of SEQ ID NO: 1244909
gccagaugucaagagccaa

SEQ ID NO: 1521943 - RNA, 19 nt, Artificial Sequence
  Description of Artificial Sequence: Synthetic oligonucleotide
  Antisense strand to SEQ ID NO: 1521942
uuggcucuugacaucuggc

SEQ ID NO: 1521944 - RNA, 19 nt, Artificial Sequence
  Description of Artificial Sequence: Synthetic oligonucleotide
  Sense strand starting at position 540 of SEQ ID NO: 1244909
aaagcagagucagacaaau

SEQ ID NO: 1521945 - RNA, 19 nt, Artificial Sequence
  Description of Artificial Sequence: Synthetic oligonucleotide
  Antisense strand to SEQ ID NO: 1521944
auuugucugacucugcuuu

SEQ ID NO: 1521946 - RNA, 19 nt, Artificial Sequence
  Description of Artificial Sequence: Synthetic oligonucleotide
  Sense strand starting at position 563 of SEQ ID NO: 1244909
aacgauaacucuguaggga

SEQ ID NO: 1521947 - RNA, 19 nt, Artificial Sequence
  Description of Artificial Sequence: Synthetic oligonucleotide
  Antisense strand to SEQ ID NO: 1521946
ucccuacagaguuaucguu

SEQ ID NO: 1521948 - RNA, 19 nt, Artificial Sequence
  Description of Artificial Sequence: Synthetic oligonucleotide
  Sense strand starting at position 591 of SEQ ID NO: 1244909
gauacuaugcagcagacau

SEQ ID NO: 1521949 - RNA, 19 nt, Artificial Sequence
  Description of Artificial Sequence: Synthetic oligonucleotide
  Antisense strand to SEQ ID NO: 1521948
augucugcugcauaguauc

SEQ ID NO: 1521950 - RNA, 19 nt, Artificial Sequence
  Description of Artificial Sequence: Synthetic oligonucleotide
  Sense strand starting at position 805 of SEQ ID NO: 1244909
ugcugcaguuucuuagaaa

SEQ ID NO: 1521951 - RNA, 19 nt, Artificial Sequence
  Description of Artificial Sequence: Synthetic oligonucleotide
  Antisense strand to SEQ ID NO: 1521950
uuucuaagaaacugcagca

SEQ ID NO: 1521952 - RNA, 19 nt, Artificial Sequence
  Description of Artificial Sequence: Synthetic oligonucleotide
  Sense strand starting at position 838 of SEQ ID NO: 1244909
cugcuugcuccuuggagua

SEQ ID NO: 1521953 - RNA, 19 nt, Artificial Sequence
  Description of Artificial Sequence: Synthetic oligonucleotide
  Antisense strand to SEQ ID NO: 1521952
uacuccaaggagcaagcag

SEQ ID NO: 1521954 - RNA, 19 nt, Artificial Sequence
  Description of Artificial Sequence: Synthetic oligonucleotide
  Sense strand starting at position 861 of SEQ ID NO: 1244909
cuauuucccuuggagaauc

SEQ ID NO: 1521955 - RNA, 19 nt, Artificial Sequence
  Description of Artificial Sequence: Synthetic oligonucleotide
  Antisense strand to SEQ ID NO: 1521954
gauucuccaagggaaauag

SEQ ID NO: 1521956 - RNA, 19 nt, Artificial Sequence
  Description of Artificial Sequence: Synthetic oligonucleotide
  Sense strand starting at position 890 of SEQ ID NO: 1244909
acagcugucccugggcaaa

SEQ ID NO: 1521957 - RNA, 19 nt, Artificial Sequence
  Description of Artificial Sequence: Synthetic oligonucleotide
  Antisense strand to SEQ ID NO: 1521956
uuugcccagggacagcugu

SEQ ID NO: 1521958 - RNA, 19 nt, Artificial Sequence
  Description of Artificial Sequence: Synthetic oligonucleotide
  Sense strand starting at position 910 of SEQ ID NO: 1244909
ccagucuggugauuaccau

SEQ ID NO: 1521959 - RNA, 19 nt, Artificial Sequence
  Description of Artificial Sequence: Synthetic oligonucleotide
  Antisense strand to SEQ ID NO: 1521958
augguaaucaccagacugg

SEQ ID NO: 1521960 - RNA, 19 nt, Artificial Sequence
  Description of Artificial Sequence: Synthetic oligonucleotide
  Sense strand starting at position 911 of SEQ ID NO: 1244909
cagucuggugauuaccauu

SEQ ID NO: 1521961 - RNA, 19 nt, Artificial Sequence
  Description of Artificial Sequence: Synthetic oligonucleotide
  Antisense strand to SEQ ID NO: 1521960
aaugguaaucaccagacug

SEQ ID NO: 1521962 - RNA, 19 nt, Artificial Sequence
  Description of Artificial Sequence: Synthetic oligonucleotide
  Sense strand starting at position 993 of SEQ ID NO: 1244909
uuagacuccugguagacaa

SEQ ID NO: 1521963 - RNA, 19 nt, Artificial Sequence
  Description of Artificial Sequence: Synthetic oligonucleotide
  Antisense strand to SEQ ID NO: 1521962
uugucuaccaggagucuaa

SEQ ID NO: 1521964 - RNA, 19 nt, Artificial Sequence
  Description of Artificial Sequence: Synthetic oligonucleotide
  Sense strand starting at position 1017 of SEQ ID NO: 1244909
guauguauuucucuuggua

SEQ ID NO: 1521965 - RNA, 19 nt, Artificial Sequence
  Description of Artificial Sequence: Synthetic oligonucleotide
  Antisense strand to SEQ ID NO: 1521964
uaccaagagaaauacauac

SEQ ID NO: 1521966 - RNA, 19 nt, Artificial Sequence
  Description of Artificial Sequence: Synthetic oligonucleotide
  Sense strand starting at position 1030 of SEQ ID NO: 1244909
uugguacugaaguguccaa

SEQ ID NO: 1521967 - RNA, 19 nt, Artificial Sequence
  Description of Artificial Sequence: Synthetic oligonucleotide
  Antisense strand to SEQ ID NO: 1521966
uuggacacuucaguaccaa

SEQ ID NO: 1521968 - RNA, 19 nt, Artificial Sequence
  Description of Artificial Sequence: Synthetic oligonucleotide
  Sense strand starting at position 1057 of SEQ ID NO: 1244909
cccaguaguugcucaaaga

SEQ ID NO: 1521969 - RNA, 19 nt, Artificial Sequence
  Description of Artificial Sequence: Synthetic oligonucleotide
  Antisense strand to SEQ ID NO: 1521968
ucuuugagcaacuacuggg

SEQ ID NO: 1521970 - RNA, 19 nt, Artificial Sequence
  Description of Artificial Sequence: Synthetic oligonucleotide
  Sense strand starting at position 1058 of SEQ ID NO: 1244909
ccaguaguugcucaaagaa

SEQ ID NO: 1521971 - RNA, 19 nt, Artificial Sequence
  Description of Artificial Sequence: Synthetic oligonucleotide
  Antisense strand to SEQ ID NO: 1521970
uucuuugagcaacuacugg

SEQ ID NO: 1521972 - RNA, 19 nt, Artificial Sequence
  Description of Artificial Sequence: Synthetic oligonucleotide
  Sense strand starting at position 1073 of SEQ ID NO: 1244909
agaauuaucuguggaacac

SEQ ID NO: 1521973 - RNA, 19 nt, Artificial Sequence
  Description of Artificial Sequence: Synthetic oligonucleotide
  Antisense strand to SEQ ID NO: 1521972
guguuccacagauaauucu

SEQ ID NO: 1521974 - RNA, 19 nt, Artificial Sequence
  Description of Artificial Sequence: Synthetic oligonucleotide
  Sense strand starting at position 1149 of SEQ ID NO: 1244909
cccagucuugcgucuuacu

SEQ ID NO: 1521975 - RNA, 19 nt, Artificial Sequence
  Description of Artificial Sequence: Synthetic oligonucleotide
  Antisense strand to SEQ ID NO: 1521974
aguaagacgcaagacuggg

SEQ ID NO: 1521976 - RNA, 19 nt, Artificial Sequence
  Description of Artificial Sequence: Synthetic oligonucleotide
  Sense strand starting at position 1158 of SEQ ID NO: 1244909
gcgucuuacuagcuauaac

SEQ ID NO: 1521977 - RNA, 19 nt, Artificial Sequence
  Description of Artificial Sequence: Synthetic oligonucleotide
  Antisense strand to SEQ ID NO: 1521976
guuauagcuaguaagacgc

SEQ ID NO: 1521978 - RNA, 19 nt, Artificial Sequence
  Description of Artificial Sequence: Synthetic oligonucleotide
  Sense strand starting at position 1813 of SEQ ID NO: 1244909
cgaggagucaugggaaauu

SEQ ID NO: 1521979 - RNA, 19 nt, Artificial Sequence
  Description of Artificial Sequence: Synthetic oligonucleotide
  Antisense strand to SEQ ID NO: 1521978
aauuucccaugacuccucg

SEQ ID NO: 1521980 - RNA, 19 nt, Artificial Sequence
  Description of Artificial Sequence: Synthetic oligonucleotide
  Sense strand starting at position 2010 of SEQ ID NO: 1244909
gcuguuauaccagggacag

SEQ ID NO: 1521981 - RNA, 19 nt, Artificial Sequence
  Description of Artificial Sequence: Synthetic oligonucleotide
  Antisense strand to SEQ ID NO: 1521980
cugucccugguauaacagc

SEQ ID NO: 1521982 - RNA, 19 nt, Artificial Sequence
  Description of Artificial Sequence: Synthetic oligonucleotide
  Sense strand starting at position 2113 of SEQ ID NO: 1244909
acagguuucucagcggaag

SEQ ID NO: 1521983 - RNA, 19 nt, Artificial Sequence
  Description of Artificial Sequence: Synthetic oligonucleotide
  Antisense strand to SEQ ID NO: 1521982
cuuccgcugagaaaccugu

SEQ ID NO: 1521984 - RNA, 19 nt, Artificial Sequence
  Description of Artificial Sequence: Synthetic oligonucleotide
  Sense strand starting at position 2115 of SEQ ID NO: 1244909
agguuucucagcggaagga

SEQ ID NO: 1521985 - RNA, 19 nt, Artificial Sequence
  Description of Artificial Sequence: Synthetic oligonucleotide
  Antisense strand to SEQ ID NO: 1521984
uccuuccgcugagaaaccu

SEQ ID NO: 1521986 - RNA, 19 nt, Artificial Sequence
  Description of Artificial Sequence: Synthetic oligonucleotide
  Sense strand starting at position 2140 of SEQ ID NO: 1244909
gagucauuguuggcgggau

SEQ ID NO: 1521987 - RNA, 19 nt, Artificial Sequence
  Description of Artificial Sequence: Synthetic oligonucleotide
  Antisense strand to SEQ ID NO: 1521986
aucccgccaacaaugacuc

SEQ ID NO: 1521988 - RNA, 19 nt, Artificial Sequence
  Description of Artificial Sequence: Synthetic oligonucleotide
  Sense strand starting at position 2202 of SEQ ID NO: 1244909
uaggcaauccagggugaga

SEQ ID NO: 1521989 - RNA, 19 nt, Artificial Sequence
  Description of Artificial Sequence: Synthetic oligonucleotide
  Antisense strand to SEQ ID NO: 1521988
ucucacccuggauugccua

SEQ ID NO: 1521990 - RNA, 19 nt, Artificial Sequence
  Description of Artificial Sequence: Synthetic oligonucleotide
  Sense strand starting at position 2237 of SEQ ID NO: 1244909
aggaguuagcgcggaggua

SEQ ID NO: 1521991 - RNA, 19 nt, Artificial Sequence
  Description of Artificial Sequence: Synthetic oligonucleotide
  Antisense strand to SEQ ID NO: 1521990
uaccuccgcgcuaacuccu

SEQ ID NO: 1521992 - RNA, 19 nt, Artificial Sequence
  Description of Artificial Sequence: Synthetic oligonucleotide
  Sense strand starting at position 2246 of SEQ ID NO: 1244909
cgcggagguacuugggaaa

SEQ ID NO: 1521993 - RNA, 19 nt, Artificial Sequence
  Description of Artificial Sequence: Synthetic oligonucleotide
  Antisense strand to SEQ ID NO: 1521992
uuucccaaguaccuccgcg

SEQ ID NO: 1521994 - RNA, 19 nt, Artificial Sequence
  Description of Artificial Sequence: Synthetic oligonucleotide
  Sense strand starting at position 2378 of SEQ ID NO: 1244909
gcugauuggauucguuacu

SEQ ID NO: 1521995 - RNA, 19 nt, Artificial Sequence
  Description of Artificial Sequence: Synthetic oligonucleotide
  Antisense strand to SEQ ID NO: 1521994
aguaacgaauccaaucagc

SEQ ID NO: 1521996 - RNA, 19 nt, Artificial Sequence
  Description of Artificial Sequence: Synthetic oligonucleotide
  Sense strand starting at position 2387 of SEQ ID NO: 1244909
auucguuacugcuuugcaa

SEQ ID NO: 1521997 - RNA, 19 nt, Artificial Sequence
  Description of Artificial Sequence: Synthetic oligonucleotide
  Antisense strand to SEQ ID NO: 1521996
uugcaaagcaguaacgaau

SEQ ID NO: 1521998 - RNA, 19 nt, Artificial Sequence
  Description of Artificial Sequence: Synthetic oligonucleotide
  Sense strand starting at position 2491 of SEQ ID NO: 1244909
agcauccagugcuugaaga

SEQ ID NO: 1521999 - RNA, 19 nt, Artificial Sequence
  Description of Artificial Sequence: Synthetic oligonucleotide
  Antisense strand to SEQ ID NO: 1521998
ucuucaagcacuggaugcu

SEQ ID NO: 1522000 - RNA, 19 nt, Artificial Sequence
  Description of Artificial Sequence: Synthetic oligonucleotide
  Sense strand starting at position 3071 of SEQ ID NO: 1244909
ugagcuaugaucugagcca

SEQ ID NO: 1522001 - RNA, 19 nt, Artificial Sequence
  Description of Artificial Sequence: Synthetic oligonucleotide
  Antisense strand to SEQ ID NO: 1522000
uggcucagaucauagcuca

SEQ ID NO: 1522002 - RNA, 19 nt, Artificial Sequence
  Description of Artificial Sequence: Synthetic oligonucleotide
  Sense strand starting at position 3650 of SEQ ID NO: 1244909
ugacgucugucaccauaca

SEQ ID NO: 1522003 - RNA, 19 nt, Artificial Sequence
  Description of Artificial Sequence: Synthetic oligonucleotide
  Antisense strand to SEQ ID NO: 1522002
uguauggugacagacguca

SEQ ID NO: 1522004 - RNA, 19 nt, Artificial Sequence
  Description of Artificial Sequence: Synthetic oligonucleotide
  Sense strand starting at position 3651 of SEQ ID NO: 1244909
gacgucugucaccauacau

SEQ ID NO: 1522005 - RNA, 19 nt, Artificial Sequence
  Description of Artificial Sequence: Synthetic oligonucleotide
  Antisense strand to SEQ ID NO: 1522004
auguauggugacagacguc

SEQ ID NO: 1522006 - RNA, 19 nt, Artificial Sequence
  Description of Artificial Sequence: Synthetic oligonucleotide
  Sense strand starting at position 287 of SEQ ID NO: 1244910
aaaggaguucaguguugug

SEQ ID NO: 1522007 - RNA, 19 nt, Artificial Sequence
  Description of Artificial Sequence: Synthetic oligonucleotide
  Antisense strand to SEQ ID NO: 1522006
cacaacacugaacuccuuu

SEQ ID NO: 1522008 - RNA, 19 nt, Artificial Sequence
  Description of Artificial Sequence: Synthetic oligonucleotide
  Sense strand starting at position 428 of SEQ ID NO: 1244910
ccaacuucccaaugagugu

SEQ ID NO: 1522009 - RNA, 19 nt, Artificial Sequence
  Description of Artificial Sequence: Synthetic oligonucleotide
  Antisense strand to SEQ ID NO: 1522008
acacucauugggaaguugg

SEQ ID NO: 1522010 - RNA, 19 nt, Artificial Sequence
  Description of Artificial Sequence: Synthetic oligonucleotide
  Sense strand starting at position 434 of SEQ ID NO: 1244910
ucccaaugaguguggauca

SEQ ID NO: 1522011 - RNA, 19 nt, Artificial Sequence
  Description of Artificial Sequence: Synthetic oligonucleotide
  Antisense strand to SEQ ID NO: 1522010
ugauccacacucauuggga

SEQ ID NO: 1522012 - RNA, 19 nt, Artificial Sequence
  Description of Artificial Sequence: Synthetic oligonucleotide
  Sense strand starting at position 547 of SEQ ID NO: 1244910
auuucuaucgcuuggucaa

SEQ ID NO: 1522013 - RNA, 19 nt, Artificial Sequence
  Description of Artificial Sequence: Synthetic oligonucleotide
  Antisense strand to SEQ ID NO: 1522012
uugaccaagcgauagaaau

SEQ ID NO: 1522014 - RNA, 19 nt, Artificial Sequence
  Description of Artificial Sequence: Synthetic oligonucleotide
  Sense strand starting at position 548 of SEQ ID NO: 1244910
uuucuaucgcuuggucaag

SEQ ID NO: 1522015 - RNA, 19 nt, Artificial Sequence
  Description of Artificial Sequence: Synthetic oligonucleotide
  Antisense strand to SEQ ID NO: 1522014
cuugaccaagcgauagaaa

SEQ ID NO: 1522016 - RNA, 19 nt, Artificial Sequence
  Description of Artificial Sequence: Synthetic oligonucleotide
  Sense strand starting at position 667 of SEQ ID NO: 1244910
ccugccagauugucucauu

SEQ ID NO: 1522017 - RNA, 19 nt, Artificial Sequence
  Description of Artificial Sequence: Synthetic oligonucleotide
  Antisense strand to SEQ ID NO: 1522016
aaugagacaaucuggcagg

SEQ ID NO: 1522018 - RNA, 19 nt, Artificial Sequence
  Description of Artificial Sequence: Synthetic oligonucleotide
  Sense strand starting at position 668 of SEQ ID NO: 1244910
cugccagauugucucauuu

SEQ ID NO: 1522019 - RNA, 19 nt, Artificial Sequence
  Description of Artificial Sequence: Synthetic oligonucleotide
  Antisense strand to SEQ ID NO: 1522018
aaaugagacaaucuggcag

SEQ ID NO: 1522020 - RNA, 19 nt, Artificial Sequence
  Description of Artificial Sequence: Synthetic oligonucleotide
  Sense strand starting at position 670 of SEQ ID NO: 1244910
gccagauugucucauuuga

SEQ ID NO: 1522021 - RNA, 19 nt, Artificial Sequence
  Description of Artificial Sequence: Synthetic oligonucleotide
  Antisense strand to SEQ ID NO: 1522020
ucaaaugagacaaucuggc

SEQ ID NO: 1522022 - RNA, 19 nt, Artificial Sequence
  Description of Artificial Sequence: Synthetic oligonucleotide
  Sense strand starting at position 721 of SEQ ID NO: 1244910
gccagaugucaagagccaa

SEQ ID NO: 1522023 - RNA, 19 nt, Artificial Sequence
  Description of Artificial Sequence: Synthetic oligonucleotide
  Antisense strand to SEQ ID NO: 1522022
uuggcucuugacaucuggc

SEQ ID NO: 1522024 - RNA, 19 nt, Artificial Sequence
  Description of Artificial Sequence: Synthetic oligonucleotide
  Sense strand starting at position 760 of SEQ ID NO: 1244910
aaagcagagucagacaaau

SEQ ID NO: 1522025 - RNA, 19 nt, Artificial Sequence
  Description of Artificial Sequence: Synthetic oligonucleotide
  Antisense strand to SEQ ID NO: 1522024
auuugucugacucugcuuu

SEQ ID NO: 1522026 - RNA, 19 nt, Artificial Sequence
  Description of Artificial Sequence: Synthetic oligonucleotide
  Sense strand starting at position 783 of SEQ ID NO: 1244910
aacgauaacucuguaggga

SEQ ID NO: 1522027 - RNA, 19 nt, Artificial Sequence
  Description of Artificial Sequence: Synthetic oligonucleotide
  Antisense strand to SEQ ID NO: 1522026
ucccuacagaguuaucguu

SEQ ID NO: 1522028 - RNA, 19 nt, Artificial Sequence
  Description of Artificial Sequence: Synthetic oligonucleotide
  Sense strand starting at position 811 of SEQ ID NO: 1244910
gauacuaugcagcagacau

SEQ ID NO: 1522029 - RNA, 19 nt, Artificial Sequence
  Description of Artificial Sequence: Synthetic oligonucleotide
  Antisense strand to SEQ ID NO: 1522028
augucugcugcauaguauc

SEQ ID NO: 1522030 - RNA, 19 nt, Artificial Sequence
  Description of Artificial Sequence: Synthetic oligonucleotide
  Sense strand starting at position 1025 of SEQ ID NO: 1244910
ugcugcaguuucuuagaaa

SEQ ID NO: 1522031 - RNA, 19 nt, Artificial Sequence
  Description of Artificial Sequence: Synthetic oligonucleotide
  Antisense strand to SEQ ID NO: 1522030
uuucuaagaaacugcagca

SEQ ID NO: 1522032 - RNA, 19 nt, Artificial Sequence
  Description of Artificial Sequence: Synthetic oligonucleotide
  Sense strand starting at position 1058 of SEQ ID NO: 1244910
cugcuugcuccuuggagua

SEQ ID NO: 1522033 - RNA, 19 nt, Artificial Sequence
  Description of Artificial Sequence: Synthetic oligonucleotide
  Antisense strand to SEQ ID NO: 1522032
uacuccaaggagcaagcag

SEQ ID NO: 1522034 - RNA, 19 nt, Artificial Sequence
  Description of Artificial Sequence: Synthetic oligonucleotide
  Sense strand starting at position 1081 of SEQ ID NO: 1244910
cuauuucccuuggagaauc

SEQ ID NO: 1522035 - RNA, 19 nt, Artificial Sequence
  Description of Artificial Sequence: Synthetic oligonucleotide
  Antisense strand to SEQ ID NO: 1522034
gauucuccaagggaaauag

SEQ ID NO: 1522036 - RNA, 19 nt, Artificial Sequence
  Description of Artificial Sequence: Synthetic oligonucleotide
  Sense strand starting at position 1110 of SEQ ID NO: 1244910
acagcugucccugggcaaa

SEQ ID NO: 1522037 - RNA, 19 nt, Artificial Sequence
  Description of Artificial Sequence: Synthetic oligonucleotide
  Antisense strand to SEQ ID NO: 1522036
uuugcccagggacagcugu

SEQ ID NO: 1522038 - RNA, 19 nt, Artificial Sequence
  Description of Artificial Sequence: Synthetic oligonucleotide
  Sense strand starting at position 1130 of SEQ ID NO: 1244910
ccagucuggugauuaccau

SEQ ID NO: 1522039 - RNA, 19 nt, Artificial Sequence
  Description of Artificial Sequence: Synthetic oligonucleotide
  Antisense strand to SEQ ID NO: 1522038
augguaaucaccagacugg

SEQ ID NO: 1522040 - RNA, 19 nt, Artificial Sequence
  Description of Artificial Sequence: Synthetic oligonucleotide
  Sense strand starting at position 1131 of SEQ ID NO: 1244910
cagucuggugauuaccauu

SEQ ID NO: 1522041 - RNA, 19 nt, Artificial Sequence
  Description of Artificial Sequence: Synthetic oligonucleotide
  Antisense strand to SEQ ID NO: 1522040
aaugguaaucaccagacug

SEQ ID NO: 1522042 - RNA, 19 nt, Artificial Sequence
  Description of Artificial Sequence: Synthetic oligonucleotide
  Sense strand starting at position 1213 of SEQ ID NO: 1244910
uuagacuccugguagacaa

SEQ ID NO: 1522043 - RNA, 19 nt, Artificial Sequence
  Description of Artificial Sequence: Synthetic oligonucleotide
  Antisense strand to SEQ ID NO: 1522042
uugucuaccaggagucuaa

SEQ ID NO: 1522044 - RNA, 19 nt, Artificial Sequence
  Description of Artificial Sequence: Synthetic oligonucleotide
  Sense strand starting at position 1237 of SEQ ID NO: 1244910
guauguauuucucuuggua

SEQ ID NO: 1522045 - RNA, 19 nt, Artificial Sequence
  Description of Artificial Sequence: Synthetic oligonucleotide
  Antisense strand to SEQ ID NO: 1522044
uaccaagagaaauacauac

SEQ ID NO: 1522046 - RNA, 19 nt, Artificial Sequence
  Description of Artificial Sequence: Synthetic oligonucleotide
  Sense strand starting at position 1250 of SEQ ID NO: 1244910
uugguacugaaguguccaa

SEQ ID NO: 1522047 - RNA, 19 nt, Artificial Sequence
  Description of Artificial Sequence: Synthetic oligonucleotide
  Antisense strand to SEQ ID NO: 1522046
uuggacacuucaguaccaa

SEQ ID NO: 1522048 - RNA, 19 nt, Artificial Sequence
  Description of Artificial Sequence: Synthetic oligonucleotide
  Sense strand starting at position 1277 of SEQ ID NO: 1244910
cccaguaguugcucaaaga

SEQ ID NO: 1522049 - RNA, 19 nt, Artificial Sequence
  Description of Artificial Sequence: Synthetic oligonucleotide
  Antisense strand to SEQ ID NO: 1522048
ucuuugagcaacuacuggg

SEQ ID NO: 1522050 - RNA, 19 nt, Artificial Sequence
  Description of Artificial Sequence: Synthetic oligonucleotide
  Sense strand starting at position 1278 of SEQ ID NO: 1244910
ccaguaguugcucaaagaa

SEQ ID NO: 1522051 - RNA, 19 nt, Artificial Sequence
  Description of Artificial Sequence: Synthetic oligonucleotide
  Antisense strand to SEQ ID NO: 1522050
uucuuugagcaacuacugg

SEQ ID NO: 1522052 - RNA, 19 nt, Artificial Sequence
  Description of Artificial Sequence: Synthetic oligonucleotide
  Sense strand starting at position 1293 of SEQ ID NO: 1244910
agaauuaucuguggaacac

SEQ ID NO: 1522053 - RNA, 19 nt, Artificial Sequence
  Description of Artificial Sequence: Synthetic oligonucleotide
  Antisense strand to SEQ ID NO: 1522052
guguuccacagauaauucu

SEQ ID NO: 1522054 - RNA, 19 nt, Artificial Sequence
  Description of Artificial Sequence: Synthetic oligonucleotide
  Sense strand starting at position 1369 of SEQ ID NO: 1244910
cccagucuugcgucuuacu

SEQ ID NO: 1522055 - RNA, 19 nt, Artificial Sequence
  Description of Artificial Sequence: Synthetic oligonucleotide
  Antisense strand to SEQ ID NO: 1522054
aguaagacgcaagacuggg

SEQ ID NO: 1522056 - RNA, 19 nt, Artificial Sequence
  Description of Artificial Sequence: Synthetic oligonucleotide
  Sense strand starting at position 1378 of SEQ ID NO: 1244910
gcgucuuacuagcuauaac

SEQ ID NO: 1522057 - RNA, 19 nt, Artificial Sequence
  Description of Artificial Sequence: Synthetic oligonucleotide
  Antisense strand to SEQ ID NO: 1522056
guuauagcuaguaagacgc

SEQ ID NO: 1522058 - RNA, 19 nt, Artificial Sequence
  Description of Artificial Sequence: Synthetic oligonucleotide
  Sense strand starting at position 2033 of SEQ ID NO: 1244910
cgaggagucaugggaaauu

SEQ ID NO: 1522059 - RNA, 19 nt, Artificial Sequence
  Description of Artificial Sequence: Synthetic oligonucleotide
  Antisense strand to SEQ ID NO: 1522058
aauuucccaugacuccucg

SEQ ID NO: 1522060 - RNA, 19 nt, Artificial Sequence
  Description of Artificial Sequence: Synthetic oligonucleotide
  Sense strand starting at position 2230 of SEQ ID NO: 1244910
gcuguuauaccagggacag

SEQ ID NO: 1522061 - RNA, 19 nt, Artificial Sequence
  Description of Artificial Sequence: Synthetic oligonucleotide
  Antisense strand to SEQ ID NO: 1522060
cugucccugguauaacagc

SEQ ID NO: 1522062 - RNA, 19 nt, Artificial Sequence
  Description of Artificial Sequence: Synthetic oligonucleotide
  Sense strand starting at position 2333 of SEQ ID NO: 1244910
acagguuucucagcggaag

SEQ ID NO: 1522063 - RNA, 19 nt, Artificial Sequence
  Description of Artificial Sequence: Synthetic oligonucleotide
  Antisense strand to SEQ ID NO: 1522062
cuuccgcugagaaaccugu

SEQ ID NO: 1522064 - RNA, 19 nt, Artificial Sequence
  Description of Artificial Sequence: Synthetic oligonucleotide
  Sense strand starting at position 2335 of SEQ ID NO: 1244910
agguuucucagcggaagga

SEQ ID NO: 1522065 - RNA, 19 nt, Artificial Sequence
  Description of Artificial Sequence: Synthetic oligonucleotide
  Antisense strand to SEQ ID NO: 1522064
uccuuccgcugagaaaccu

SEQ ID NO: 1522066 - RNA, 19 nt, Artificial Sequence
  Description of Artificial Sequence: Synthetic oligonucleotide
  Sense strand starting at position 2360 of SEQ ID NO: 1244910
gagucauuguuggcgggau

SEQ ID NO: 1522067 - RNA, 19 nt, Artificial Sequence
  Description of Artificial Sequence: Synthetic oligonucleotide
  Antisense strand to SEQ ID NO: 1522066
aucccgccaacaaugacuc

SEQ ID NO: 1522068 - RNA, 19 nt, Artificial Sequence
  Description of Artificial Sequence: Synthetic oligonucleotide
  Sense strand starting at position 2422 of SEQ ID NO: 1244910
uaggcaauccagggugaga

SEQ ID NO: 1522069 - RNA, 19 nt, Artificial Sequence
  Description of Artificial Sequence: Synthetic oligonucleotide
  Antisense strand to SEQ ID NO: 1522068
ucucacccuggauugccua

SEQ ID NO: 1522070 - RNA, 19 nt, Artificial Sequence
  Description of Artificial Sequence: Synthetic oligonucleotide
  Sense strand starting at position 2457 of SEQ ID NO: 1244910
aggaguuagcgcggaggua

SEQ ID NO: 1522071 - RNA, 19 nt, Artificial Sequence
  Description of Artificial Sequence: Synthetic oligonucleotide
  Antisense strand to SEQ ID NO: 1522070
uaccuccgcgcuaacuccu

SEQ ID NO: 1522072 - RNA, 19 nt, Artificial Sequence
  Description of Artificial Sequence: Synthetic oligonucleotide
  Sense strand starting at position 2466 of SEQ ID NO: 1244910
cgcggagguacuugggaaa

SEQ ID NO: 1522073 - RNA, 19 nt, Artificial Sequence
  Description of Artificial Sequence: Synthetic oligonucleotide
  Antisense strand to SEQ ID NO: 1522072
uuucccaaguaccuccgcg

SEQ ID NO: 1522074 - RNA, 19 nt, Artificial Sequence
  Description of Artificial Sequence: Synthetic oligonucleotide
  Sense strand starting at position 2598 of SEQ ID NO: 1244910
gcugauuggauucguuacu

SEQ ID NO: 1522075 - RNA, 19 nt, Artificial Sequence
  Description of Artificial Sequence: Synthetic oligonucleotide
  Antisense strand to SEQ ID NO: 1522074
aguaacgaauccaaucagc

SEQ ID NO: 1522076 - RNA, 19 nt, Artificial Sequence
  Description of Artificial Sequence: Synthetic oligonucleotide
  Sense strand starting at position 2607 of SEQ ID NO: 1244910
auucguuacugcuuugcaa

SEQ ID NO: 1522077 - RNA, 19 nt, Artificial Sequence
  Description of Artificial Sequence: Synthetic oligonucleotide
  Antisense strand to SEQ ID NO: 1522076
uugcaaagcaguaacgaau

SEQ ID NO: 1522078 - RNA, 19 nt, Artificial Sequence
  Description of Artificial Sequence: Synthetic oligonucleotide
  Sense strand starting at position 2711 of SEQ ID NO: 1244910
agcauccagugcuugaaga

SEQ ID NO: 1522079 - RNA, 19 nt, Artificial Sequence
  Description of Artificial Sequence: Synthetic oligonucleotide
  Antisense strand to SEQ ID NO: 1522078
ucuucaagcacuggaugcu

SEQ ID NO: 1522080 - RNA, 19 nt, Artificial Sequence
  Description of Artificial Sequence: Synthetic oligonucleotide
  Sense strand starting at position 3291 of SEQ ID NO: 1244910
ugagcuaugaucugagcca

SEQ ID NO: 1522081 - RNA, 19 nt, Artificial Sequence
  Description of Artificial Sequence: Synthetic oligonucleotide
  Antisense strand to SEQ ID NO: 1522080
uggcucagaucauagcuca

SEQ ID NO: 1522082 - RNA, 19 nt, Artificial Sequence
  Description of Artificial Sequence: Synthetic oligonucleotide
  Sense strand starting at position 3870 of SEQ ID NO: 1244910
ugacgucugucaccauaca

SEQ ID NO: 1522083 - RNA, 19 nt, Artificial Sequence
  Description of Artificial Sequence: Synthetic oligonucleotide
  Antisense strand to SEQ ID NO: 1522082
uguauggugacagacguca

SEQ ID NO: 1522084 - RNA, 19 nt, Artificial Sequence
  Description of Artificial Sequence: Synthetic oligonucleotide
  Sense strand starting at position 3871 of SEQ ID NO: 1244910
gacgucugucaccauacau

SEQ ID NO: 1522085 - RNA, 19 nt, Artificial Sequence
  Description of Artificial Sequence: Synthetic oligonucleotide
  Antisense strand to SEQ ID NO: 1522084
auguauggugacagacguc

SEQ ID NO: 1522086 - RNA, 19 nt, Artificial Sequence
  Description of Artificial Sequence: Synthetic oligonucleotide
  Sense strand starting at position 129 of SEQ ID NO: 1244911
ggaucagaaauacggucau

SEQ ID NO: 1522087 - RNA, 19 nt, Artificial Sequence
  Description of Artificial Sequence: Synthetic oligonucleotide
  Antisense strand to SEQ ID NO: 1522086
augaccguauuucugaucc

SEQ ID NO: 1522088 - RNA, 19 nt, Artificial Sequence
  Description of Artificial Sequence: Synthetic oligonucleotide
  Sense strand starting at position 348 of SEQ ID NO: 1244911
augaauuguaaaggugcaa

SEQ ID NO: 1522089 - RNA, 19 nt, Artificial Sequence
  Description of Artificial Sequence: Synthetic oligonucleotide
  Antisense strand to SEQ ID NO: 1522088
uugcaccuuuacaauucau

SEQ ID NO: 1522090 - RNA, 19 nt, Artificial Sequence
  Description of Artificial Sequence: Synthetic oligonucleotide
  Sense strand starting at position 390 of SEQ ID NO: 1244911
gaagcaguagucuaggcaa

SEQ ID NO: 1522091 - RNA, 19 nt, Artificial Sequence
  Description of Artificial Sequence: Synthetic oligonucleotide
  Antisense strand to SEQ ID NO: 1522090
uugccuagacuacugcuuc

SEQ ID NO: 1522092 - RNA, 19 nt, Artificial Sequence
  Description of Artificial Sequence: Synthetic oligonucleotide
  Sense strand starting at position 425 of SEQ ID NO: 1244911
ccuggaccacauugguaau

SEQ ID NO: 1522093 - RNA, 19 nt, Artificial Sequence
  Description of Artificial Sequence: Synthetic oligonucleotide
  Antisense strand to SEQ ID NO: 1522092
auuaccaaugugguccagg

SEQ ID NO: 1522094 - RNA, 19 nt, Artificial Sequence
  Description of Artificial Sequence: Synthetic oligonucleotide
  Sense strand starting at position 427 of SEQ ID NO: 1244911
uggaccacauugguaauaa

SEQ ID NO: 1522095 - RNA, 19 nt, Artificial Sequence
  Description of Artificial Sequence: Synthetic oligonucleotide
  Antisense strand to SEQ ID NO: 1522094
uuauuaccaauguggucca

SEQ ID NO: 1522096 - RNA, 19 nt, Artificial Sequence
  Description of Artificial Sequence: Synthetic oligonucleotide
  Sense strand starting at position 475 of SEQ ID NO: 1244911
accgaaugcucaucacaug

SEQ ID NO: 1522097 - RNA, 19 nt, Artificial Sequence
  Description of Artificial Sequence: Synthetic oligonucleotide
  Antisense strand to SEQ ID NO: 1522096
caugugaugagcauucggu

SEQ ID NO: 1522098 - RNA, 19 nt, Artificial Sequence
  Description of Artificial Sequence: Synthetic oligonucleotide
  Sense strand starting at position 484 of SEQ ID NO: 1244911
ucaucacaugcaggaguuu

SEQ ID NO: 1522099 - RNA, 19 nt, Artificial Sequence
  Description of Artificial Sequence: Synthetic oligonucleotide
  Antisense strand to SEQ ID NO: 1522098
aaacuccugcaugugauga

SEQ ID NO: 1522100 - RNA, 19 nt, Artificial Sequence
  Description of Artificial Sequence: Synthetic oligonucleotide
  Sense strand starting at position 553 of SEQ ID NO: 1244911
ccaaguuuaccgcuguguu

SEQ ID NO: 1522101 - RNA, 19 nt, Artificial Sequence
  Description of Artificial Sequence: Synthetic oligonucleotide
  Antisense strand to SEQ ID NO: 1522100
aacacagcgguaaacuugg

SEQ ID NO: 1522102 - RNA, 19 nt, Artificial Sequence
  Description of Artificial Sequence: Synthetic oligonucleotide
  Sense strand starting at position 611 of SEQ ID NO: 1244911
guauuuaacauacgucagu

SEQ ID NO: 1522103 - RNA, 19 nt, Artificial Sequence
  Description of Artificial Sequence: Synthetic oligonucleotide
  Antisense strand to SEQ ID NO: 1522102
acugacguauguuaaauac

SEQ ID NO: 1522104 - RNA, 19 nt, Artificial Sequence
  Description of Artificial Sequence: Synthetic oligonucleotide
  Sense strand starting at position 628 of SEQ ID NO: 1244911
guuuguuagacugaaauug

SEQ ID NO: 1522105 - RNA, 19 nt, Artificial Sequence
  Description of Artificial Sequence: Synthetic oligonucleotide
  Antisense strand to SEQ ID NO: 1522104
caauuucagucuaacaaac

SEQ ID NO: 1522106 - RNA, 19 nt, Artificial Sequence
  Description of Artificial Sequence: Synthetic oligonucleotide
  Sense strand starting at position 636 of SEQ ID NO: 1244911
gacugaaauugucccugaa

SEQ ID NO: 1522107 - RNA, 19 nt, Artificial Sequence
  Description of Artificial Sequence: Synthetic oligonucleotide
  Antisense strand to SEQ ID NO: 1522106
uucagggacaauuucaguc

SEQ ID NO: 1522108 - RNA, 19 nt, Artificial Sequence
  Description of Artificial Sequence: Synthetic oligonucleotide
  Sense strand starting at position 660 of SEQ ID NO: 1244911
uuagguaagucccugggaa

SEQ ID NO: 1522109 - RNA, 19 nt, Artificial Sequence
  Description of Artificial Sequence: Synthetic oligonucleotide
  Antisense strand to SEQ ID NO: 1522108
uucccagggacuuaccuaa

SEQ ID NO: 1522110 - RNA, 19 nt, Artificial Sequence
  Description of Artificial Sequence: Synthetic oligonucleotide
  Sense strand starting at position 661 of SEQ ID NO: 1244911
uagguaagucccugggaag

SEQ ID NO: 1522111 - RNA, 19 nt, Artificial Sequence
  Description of Artificial Sequence: Synthetic oligonucleotide
  Antisense strand to SEQ ID NO: 1522110
cuucccagggacuuaccua

SEQ ID NO: 1522112 - RNA, 19 nt, Artificial Sequence
  Description of Artificial Sequence: Synthetic oligonucleotide
  Sense strand starting at position 662 of SEQ ID NO: 1244911
agguaagucccugggaaga

SEQ ID NO: 1522113 - RNA, 19 nt, Artificial Sequence
  Description of Artificial Sequence: Synthetic oligonucleotide
  Antisense strand to SEQ ID NO: 1522112
ucuucccagggacuuaccu

SEQ ID NO: 1522114 - RNA, 19 nt, Artificial Sequence
  Description of Artificial Sequence: Synthetic oligonucleotide
  Sense strand starting at position 803 of SEQ ID NO: 1244911
ggagguugccaaugacuaa

SEQ ID NO: 1522115 - RNA, 19 nt, Artificial Sequence
  Description of Artificial Sequence: Synthetic oligonucleotide
  Antisense strand to SEQ ID NO: 1522114
uuagucauuggcaaccucc

SEQ ID NO: 1522116 - RNA, 19 nt, Artificial Sequence
  Description of Artificial Sequence: Synthetic oligonucleotide
  Sense strand starting at position 903 of SEQ ID NO: 1244911
gcaaguucccuguguauuu

SEQ ID NO: 1522117 - RNA, 19 nt, Artificial Sequence
  Description of Artificial Sequence: Synthetic oligonucleotide
  Antisense strand to SEQ ID NO: 1522116
aaauacacagggaacuugc

SEQ ID NO: 1522118 - RNA, 19 nt, Artificial Sequence
  Description of Artificial Sequence: Synthetic oligonucleotide
  Sense strand starting at position 1136 of SEQ ID NO: 1244911
cccagaaaguaauuccagu

SEQ ID NO: 1522119 - RNA, 19 nt, Artificial Sequence
  Description of Artificial Sequence: Synthetic oligonucleotide
  Antisense strand to SEQ ID NO: 1522118
acuggaauuacuuucuggg

SEQ ID NO: 1522120 - RNA, 19 nt, Artificial Sequence
  Description of Artificial Sequence: Synthetic oligonucleotide
  Sense strand starting at position 1142 of SEQ ID NO: 1244911
aaguaauuccagugagaau

SEQ ID NO: 1522121 - RNA, 19 nt, Artificial Sequence
  Description of Artificial Sequence: Synthetic oligonucleotide
  Antisense strand to SEQ ID NO: 1522120
auucucacuggaauuacuu

SEQ ID NO: 1522122 - RNA, 19 nt, Artificial Sequence
  Description of Artificial Sequence: Synthetic oligonucleotide
  Sense strand starting at position 1160 of SEQ ID NO: 1244911
ugaaguuuccacugauagc

SEQ ID NO: 1522123 - RNA, 19 nt, Artificial Sequence
  Description of Artificial Sequence: Synthetic oligonucleotide
  Antisense strand to SEQ ID NO: 1522122
gcuaucaguggaaacuuca

SEQ ID NO: 1522124 - RNA, 19 nt, Artificial Sequence
  Description of Artificial Sequence: Synthetic oligonucleotide
  Sense strand starting at position 1341 of SEQ ID NO: 1244911
ccagaaauccgucagacac

SEQ ID NO: 1522125 - RNA, 19 nt, Artificial Sequence
  Description of Artificial Sequence: Synthetic oligonucleotide
  Antisense strand to SEQ ID NO: 1522124
gugucugacggauuucugg

SEQ ID NO: 1522126 - RNA, 19 nt, Artificial Sequence
  Description of Artificial Sequence: Synthetic oligonucleotide
  Sense strand starting at position 1404 of SEQ ID NO: 1244911
gcagaaacccuagguguaa

SEQ ID NO: 1522127 - RNA, 19 nt, Artificial Sequence
  Description of Artificial Sequence: Synthetic oligonucleotide
  Antisense strand to SEQ ID NO: 1522126
uuacaccuaggguuucugc

SEQ ID NO: 1522128 - RNA, 19 nt, Artificial Sequence
  Description of Artificial Sequence: Synthetic oligonucleotide
  Sense strand starting at position 1405 of SEQ ID NO: 1244911
cagaaacccuagguguaaa

SEQ ID NO: 1522129 - RNA, 19 nt, Artificial Sequence
  Description of Artificial Sequence: Synthetic oligonucleotide
  Antisense strand to SEQ ID NO: 1522128
uuuacaccuaggguuucug

SEQ ID NO: 1522130 - RNA, 19 nt, Artificial Sequence
  Description of Artificial Sequence: Synthetic oligonucleotide
  Sense strand starting at position 2361 of SEQ ID NO: 1244911
acgaucuuacgaggaaacu

SEQ ID NO: 1522131 - RNA, 19 nt, Artificial Sequence
  Description of Artificial Sequence: Synthetic oligonucleotide
  Antisense strand to SEQ ID NO: 1522130
aguuuccucguaagaucgu

SEQ ID NO: 1522132 - RNA, 19 nt, Artificial Sequence
  Description of Artificial Sequence: Synthetic oligonucleotide
  Sense strand starting at position 2553 of SEQ ID NO: 1244911
guugguagauaaucuguga

SEQ ID NO: 1522133 - RNA, 19 nt, Artificial Sequence
  Description of Artificial Sequence: Synthetic oligonucleotide
  Antisense strand to SEQ ID NO: 1522132
ucacagauuaucuaccaac

SEQ ID NO: 1522134 - RNA, 19 nt, Artificial Sequence
  Description of Artificial Sequence: Synthetic oligonucleotide
  Sense strand starting at position 2556 of SEQ ID NO: 1244911
gguagauaaucugugaacu

SEQ ID NO: 1522135 - RNA, 19 nt, Artificial Sequence
  Description of Artificial Sequence: Synthetic oligonucleotide
  Antisense strand to SEQ ID NO: 1522134
aguucacagauuaucuacc

SEQ ID NO: 1522136 - RNA, 19 nt, Artificial Sequence
  Description of Artificial Sequence: Synthetic oligonucleotide
  Sense strand starting at position 2557 of SEQ ID NO: 1244911
guagauaaucugugaacuc

SEQ ID NO: 1522137 - RNA, 19 nt, Artificial Sequence
  Description of Artificial Sequence: Synthetic oligonucleotide
  Antisense strand to SEQ ID NO: 1522136
gaguucacagauuaucuac

SEQ ID NO: 1522138 - RNA, 19 nt, Artificial Sequence
  Description of Artificial Sequence: Synthetic oligonucleotide
  Sense strand starting at position 2658 of SEQ ID NO: 1244911
gggagucaugccugacuug

SEQ ID NO: 1522139 - RNA, 19 nt, Artificial Sequence
  Description of Artificial Sequence: Synthetic oligonucleotide
  Antisense strand to SEQ ID NO: 1522138
caagucaggcaugacuccc

SEQ ID NO: 1522140 - RNA, 19 nt, Artificial Sequence
  Description of Artificial Sequence: Synthetic oligonucleotide
  Sense strand starting at position 2659 of SEQ ID NO: 1244911
ggagucaugccugacuugu

SEQ ID NO: 1522141 - RNA, 19 nt, Artificial Sequence
  Description of Artificial Sequence: Synthetic oligonucleotide
  Antisense strand to SEQ ID NO: 1522140
acaagucaggcaugacucc

SEQ ID NO: 1522142 - RNA, 19 nt, Artificial Sequence
  Description of Artificial Sequence: Synthetic oligonucleotide
  Sense strand starting at position 2832 of SEQ ID NO: 1244911
acauuuacugagugccagu

SEQ ID NO: 1522143 - RNA, 19 nt, Artificial Sequence
  Description of Artificial Sequence: Synthetic oligonucleotide
  Antisense strand to SEQ ID NO: 1522142
acuggcacucaguaaaugu

SEQ ID NO: 1522144 - RNA, 19 nt, Artificial Sequence
  Description of Artificial Sequence: Synthetic oligonucleotide
  Sense strand starting at position 2950 of SEQ ID NO: 1244911
cugagcaagagugaucuuu

SEQ ID NO: 1522145 - RNA, 19 nt, Artificial Sequence
  Description of Artificial Sequence: Synthetic oligonucleotide
  Antisense strand to SEQ ID NO: 1522144
aaagaucacucuugcucag

SEQ ID NO: 1522146 - RNA, 19 nt, Artificial Sequence
  Description of Artificial Sequence: Synthetic oligonucleotide
  Sense strand starting at position 2952 of SEQ ID NO: 1244911
gagcaagagugaucuuucu

SEQ ID NO: 1522147 - RNA, 19 nt, Artificial Sequence
  Description of Artificial Sequence: Synthetic oligonucleotide
  Antisense strand to SEQ ID NO: 1522146
agaaagaucacucuugcuc

SEQ ID NO: 1522148 - RNA, 19 nt, Artificial Sequence
  Description of Artificial Sequence: Synthetic oligonucleotide
  Sense strand starting at position 2961 of SEQ ID NO: 1244911
ugaucuuucuaagucugau

SEQ ID NO: 1522149 - RNA, 19 nt, Artificial Sequence
  Description of Artificial Sequence: Synthetic oligonucleotide
  Antisense strand to SEQ ID NO: 1522148
aucagacuuagaaagauca

SEQ ID NO: 1522150 - RNA, 19 nt, Artificial Sequence
  Description of Artificial Sequence: Synthetic oligonucleotide
  Sense strand starting at position 3388 of SEQ ID NO: 1244911
accaucuguccagaggcau

SEQ ID NO: 1522151 - RNA, 19 nt, Artificial Sequence
  Description of Artificial Sequence: Synthetic oligonucleotide
  Antisense strand to SEQ ID NO: 1522150
augccucuggacagauggu

SEQ ID NO: 1522152 - RNA, 19 nt, Artificial Sequence
  Description of Artificial Sequence: Synthetic oligonucleotide
  Sense strand starting at position 3438 of SEQ ID NO: 1244911
cugaguggauguuucugaa

SEQ ID NO: 1522153 - RNA, 19 nt, Artificial Sequence
  Description of Artificial Sequence: Synthetic oligonucleotide
  Antisense strand to SEQ ID NO: 1522152
uucagaaacauccacucag

SEQ ID NO: 1522154 - RNA, 19 nt, Artificial Sequence
  Description of Artificial Sequence: Synthetic oligonucleotide
  Sense strand starting at position 3445 of SEQ ID NO: 1244911
gauguuucugaauaaaugc

SEQ ID NO: 1522155 - RNA, 19 nt, Artificial Sequence
  Description of Artificial Sequence: Synthetic oligonucleotide
  Antisense strand to SEQ ID NO: 1522154
gcauuuauucagaaacauc

SEQ ID NO: 1522156 - RNA, 19 nt, Artificial Sequence
  Description of Artificial Sequence: Synthetic oligonucleotide
  Sense strand starting at position 3494 of SEQ ID NO: 1244911
gcagauauuugcucccuca

SEQ ID NO: 1522157 - RNA, 19 nt, Artificial Sequence
  Description of Artificial Sequence: Synthetic oligonucleotide
  Antisense strand to SEQ ID NO: 1522156
ugagggagcaaauaucugc

SEQ ID NO: 1522158 - RNA, 19 nt, Artificial Sequence
  Description of Artificial Sequence: Synthetic oligonucleotide
  Sense strand starting at position 3531 of SEQ ID NO: 1244911
ggagcagcuggucagauua

SEQ ID NO: 1522159 - RNA, 19 nt, Artificial Sequence
  Description of Artificial Sequence: Synthetic oligonucleotide
  Antisense strand to SEQ ID NO: 1522158
uaaucugaccagcugcucc

SEQ ID NO: 1522160 - RNA, 19 nt, Artificial Sequence
  Description of Artificial Sequence: Synthetic oligonucleotide
  Sense strand starting at position 3730 of SEQ ID NO: 1244911
aggucuggcuaucuuagaa

SEQ ID NO: 1522161 - RNA, 19 nt, Artificial Sequence
  Description of Artificial Sequence: Synthetic oligonucleotide
  Antisense strand to SEQ ID NO: 1522160
uucuaagauagccagaccu

SEQ ID NO: 1522162 - RNA, 19 nt, Artificial Sequence
  Description of Artificial Sequence: Synthetic oligonucleotide
  Sense strand starting at position 3945 of SEQ ID NO: 1244911
ucacuuacaucaguggauu

SEQ ID NO: 1522163 - RNA, 19 nt, Artificial Sequence
  Description of Artificial Sequence: Synthetic oligonucleotide
  Antisense strand to SEQ ID NO: 1522162
aauccacugauguaaguga

SEQ ID NO: 1522164 - RNA, 19 nt, Artificial Sequence
  Description of Artificial Sequence: Synthetic oligonucleotide
  Sense strand starting at position 3979 of SEQ ID NO: 1244911
gccagagucgucuacagac

SEQ ID NO: 1522165 - RNA, 19 nt, Artificial Sequence
  Description of Artificial Sequence: Synthetic oligonucleotide
  Antisense strand to SEQ ID NO: 1522164
gucuguagacgacucuggc

SEQ ID NO: 1522166 - RNA, 19 nt, Artificial Sequence
  Description of Artificial Sequence: Synthetic oligonucleotide
  Sense strand starting at position 139 of SEQ ID NO: 1244912
gagagaagcuucguugaug

SEQ ID NO: 1522167 - RNA, 19 nt, Artificial Sequence
  Description of Artificial Sequence: Synthetic oligonucleotide
  Antisense strand to SEQ ID NO: 1522166
caucaacgaagcuucucuc

SEQ ID NO: 1522168 - RNA, 19 nt, Artificial Sequence
  Description of Artificial Sequence: Synthetic oligonucleotide
  Sense strand starting at position 142 of SEQ ID NO: 1244912
agaagcuucguugauggaa

SEQ ID NO: 1522169 - RNA, 19 nt, Artificial Sequence
  Description of Artificial Sequence: Synthetic oligonucleotide
  Antisense strand to SEQ ID NO: 1522168
uuccaucaacgaagcuucu

SEQ ID NO: 1522170 - RNA, 19 nt, Artificial Sequence
  Description of Artificial Sequence: Synthetic oligonucleotide
  Sense strand starting at position 172 of SEQ ID NO: 1244912
ggaacaccucucugacacu

SEQ ID NO: 1522171 - RNA, 19 nt, Artificial Sequence
  Description of Artificial Sequence: Synthetic oligonucleotide
  Antisense strand to SEQ ID NO: 1522170
agugucagagagguguucc

SEQ ID NO: 1522172 - RNA, 19 nt, Artificial Sequence
  Description of Artificial Sequence: Synthetic oligonucleotide
  Sense strand starting at position 436 of SEQ ID NO: 1244912
agagccuuuccucaugacu

SEQ ID NO: 1522173 - RNA, 19 nt, Artificial Sequence
  Description of Artificial Sequence: Synthetic oligonucleotide
  Antisense strand to SEQ ID NO: 1522172
agucaugaggaaaggcucu

SEQ ID NO: 1522174 - RNA, 19 nt, Artificial Sequence
  Description of Artificial Sequence: Synthetic oligonucleotide
  Sense strand starting at position 494 of SEQ ID NO: 1244912
guguguuugagggaugucu

SEQ ID NO: 1522175 - RNA, 19 nt, Artificial Sequence
  Description of Artificial Sequence: Synthetic oligonucleotide
  Antisense strand to SEQ ID NO: 1522174
agacaucccucaaacacac

SEQ ID NO: 1522176 - RNA, 19 nt, Artificial Sequence
  Description of Artificial Sequence: Synthetic oligonucleotide
  Sense strand starting at position 505 of SEQ ID NO: 1244912
ggaugucugguaggaaaga

SEQ ID NO: 1522177 - RNA, 19 nt, Artificial Sequence
  Description of Artificial Sequence: Synthetic oligonucleotide
  Antisense strand to SEQ ID NO: 1522176
ucuuuccuaccagacaucc

SEQ ID NO: 1522178 - RNA, 19 nt, Artificial Sequence
  Description of Artificial Sequence: Synthetic oligonucleotide
  Sense strand starting at position 724 of SEQ ID NO: 1244912
uuguccaagucucucagaa

SEQ ID NO: 1522179 - RNA, 19 nt, Artificial Sequence
  Description of Artificial Sequence: Synthetic oligonucleotide
  Antisense strand to SEQ ID NO: 1522178
uucugagagacuuggacaa

SEQ ID NO: 1522180 - RNA, 19 nt, Artificial Sequence
  Description of Artificial Sequence: Synthetic oligonucleotide
  Sense strand starting at position 902 of SEQ ID NO: 1244912
ggguucugucugcacuaaa

SEQ ID NO: 1522181 - RNA, 19 nt, Artificial Sequence
  Description of Artificial Sequence: Synthetic oligonucleotide
  Antisense strand to SEQ ID NO: 1522180
uuuagugcagacagaaccc

SEQ ID NO: 1522182 - RNA, 19 nt, Artificial Sequence
  Description of Artificial Sequence: Synthetic oligonucleotide
  Sense strand starting at position 905 of SEQ ID NO: 1244912
uucugucugcacuaaagga

SEQ ID NO: 1522183 - RNA, 19 nt, Artificial Sequence
  Description of Artificial Sequence: Synthetic oligonucleotide
  Antisense strand to SEQ ID NO: 1522182
uccuuuagugcagacagaa

SEQ ID NO: 1522184 - RNA, 19 nt, Artificial Sequence
  Description of Artificial Sequence: Synthetic oligonucleotide
  Sense strand starting at position 1346 of SEQ ID NO: 1244912
auggguggaaacuguuaua

SEQ ID NO: 1522185 - RNA, 19 nt, Artificial Sequence
  Description of Artificial Sequence: Synthetic oligonucleotide
  Antisense strand to SEQ ID NO: 1522184
uauaacaguuuccacccau

SEQ ID NO: 1522186 - RNA, 19 nt, Artificial Sequence
  Description of Artificial Sequence: Synthetic oligonucleotide
  Sense strand starting at position 1432 of SEQ ID NO: 1244912
uggugagacaguugguaca

SEQ ID NO: 1522187 - RNA, 19 nt, Artificial Sequence
  Description of Artificial Sequence: Synthetic oligonucleotide
  Antisense strand to SEQ ID NO: 1522186
uguaccaacugucucacca

SEQ ID NO: 1522188 - RNA, 19 nt, Artificial Sequence
  Description of Artificial Sequence: Synthetic oligonucleotide
  Sense strand starting at position 1465 of SEQ ID NO: 1244912
gggcuaugugaugauguuc

SEQ ID NO: 1522189 - RNA, 19 nt, Artificial Sequence
  Description of Artificial Sequence: Synthetic oligonucleotide
  Antisense strand to SEQ ID NO: 1522188
gaacaucaucacauagccc

SEQ ID NO: 1522190 - RNA, 19 nt, Artificial Sequence
  Description of Artificial Sequence: Synthetic oligonucleotide
  Sense strand starting at position 1471 of SEQ ID NO: 1244912
ugugaugauguucaggaau

SEQ ID NO: 1522191 - RNA, 19 nt, Artificial Sequence
  Description of Artificial Sequence: Synthetic oligonucleotide
  Antisense strand to SEQ ID NO: 1522190
auuccugaacaucaucaca

SEQ ID NO: 1522192 - RNA, 19 nt, Artificial Sequence
  Description of Artificial Sequence: Synthetic oligonucleotide
  Sense strand starting at position 1543 of SEQ ID NO: 1244912
ggguuuguguucuuaagga

SEQ ID NO: 1522193 - RNA, 19 nt, Artificial Sequence
  Description of Artificial Sequence: Synthetic oligonucleotide
  Antisense strand to SEQ ID NO: 1522192
uccuuaagaacacaaaccc

SEQ ID NO: 1522194 - RNA, 19 nt, Artificial Sequence
  Description of Artificial Sequence: Synthetic oligonucleotide
  Sense strand starting at position 1560 of SEQ ID NO: 1244912
gaauaaauccuguggucuc

SEQ ID NO: 1522195 - RNA, 19 nt, Artificial Sequence
  Description of Artificial Sequence: Synthetic oligonucleotide
  Antisense strand to SEQ ID NO: 1522194
gagaccacaggauuuauuc

SEQ ID NO: 1522196 - RNA, 19 nt, Artificial Sequence
  Description of Artificial Sequence: Synthetic oligonucleotide
  Sense strand starting at position 1567 of SEQ ID NO: 1244912
uccuguggucuccacaacu

SEQ ID NO: 1522197 - RNA, 19 nt, Artificial Sequence
  Description of Artificial Sequence: Synthetic oligonucleotide
  Antisense strand to SEQ ID NO: 1522196
aguuguggagaccacagga

SEQ ID NO: 1522198 - RNA, 19 nt, Artificial Sequence
  Description of Artificial Sequence: Synthetic oligonucleotide
  Sense strand starting at position 1979 of SEQ ID NO: 1244912
gccacucauuacucaggau

SEQ ID NO: 1522199 - RNA, 19 nt, Artificial Sequence
  Description of Artificial Sequence: Synthetic oligonucleotide
  Antisense strand to SEQ ID NO: 1522198
auccugaguaaugaguggc

SEQ ID NO: 1522200 - RNA, 19 nt, Artificial Sequence
  Description of Artificial Sequence: Synthetic oligonucleotide
  Sense strand starting at position 1983 of SEQ ID NO: 1244912
cucauuacucaggaugcuu

SEQ ID NO: 1522201 - RNA, 19 nt, Artificial Sequence
  Description of Artificial Sequence: Synthetic oligonucleotide
  Antisense strand to SEQ ID NO: 1522200
aagcauccugaguaaugag

SEQ ID NO: 1522202 - RNA, 19 nt, Artificial Sequence
  Description of Artificial Sequence: Synthetic oligonucleotide
  Sense strand starting at position 1991 of SEQ ID NO: 1244912
ucaggaugcuuauuacuag

SEQ ID NO: 1522203 - RNA, 19 nt, Artificial Sequence
  Description of Artificial Sequence: Synthetic oligonucleotide
  Antisense strand to SEQ ID NO: 1522202
cuaguaauaagcauccuga

SEQ ID NO: 1522204 - RNA, 19 nt, Artificial Sequence
  Description of Artificial Sequence: Synthetic oligonucleotide
  Sense strand starting at position 1998 of SEQ ID NO: 1244912
gcuuauuacuagucuuaga

SEQ ID NO: 1522205 - RNA, 19 nt, Artificial Sequence
  Description of Artificial Sequence: Synthetic oligonucleotide
  Antisense strand to SEQ ID NO: 1522204
ucuaagacuaguaauaagc

SEQ ID NO: 1522206 - RNA, 19 nt, Artificial Sequence
  Description of Artificial Sequence: Synthetic oligonucleotide
  Sense strand starting at position 2003 of SEQ ID NO: 1244912
uuacuagucuuagauuuga

SEQ ID NO: 1522207 - RNA, 19 nt, Artificial Sequence
  Description of Artificial Sequence: Synthetic oligonucleotide
  Antisense strand to SEQ ID NO: 1522206
ucaaaucuaagacuaguaa

SEQ ID NO: 1522208 - RNA, 19 nt, Artificial Sequence
  Description of Artificial Sequence: Synthetic oligonucleotide
  Sense strand starting at position 2057 of SEQ ID NO: 1244912
caaccuguuggauguaaau

SEQ ID NO: 1522209 - RNA, 19 nt, Artificial Sequence
  Description of Artificial Sequence: Synthetic oligonucleotide
  Antisense strand to SEQ ID NO: 1522208
auuuacauccaacagguug

SEQ ID NO: 1522210 - RNA, 19 nt, Artificial Sequence
  Description of Artificial Sequence: Synthetic oligonucleotide
  Sense strand starting at position 2203 of SEQ ID NO: 1244912
cgaugagguauugacuaug

SEQ ID NO: 1522211 - RNA, 19 nt, Artificial Sequence
  Description of Artificial Sequence: Synthetic oligonucleotide
  Antisense strand to SEQ ID NO: 1522210
cauagucaauaccucaucg

SEQ ID NO: 1522212 - RNA, 19 nt, Artificial Sequence
  Description of Artificial Sequence: Synthetic oligonucleotide
  Sense strand starting at position 2208 of SEQ ID NO: 1244912
agguauugacuaugggaug

SEQ ID NO: 1522213 - RNA, 19 nt, Artificial Sequence
  Description of Artificial Sequence: Synthetic oligonucleotide
  Antisense strand to SEQ ID NO: 1522212
caucccauagucaauaccu

SEQ ID NO: 1522214 - RNA, 19 nt, Artificial Sequence
  Description of Artificial Sequence: Synthetic oligonucleotide
  Sense strand starting at position 2350 of SEQ ID NO: 1244912
uggguauacuuauucuauu

SEQ ID NO: 1522215 - RNA, 19 nt, Artificial Sequence
  Description of Artificial Sequence: Synthetic oligonucleotide
  Antisense strand to SEQ ID NO: 1522214
aauagaauaaguauaccca

SEQ ID NO: 1522216 - RNA, 19 nt, Artificial Sequence
  Description of Artificial Sequence: Synthetic oligonucleotide
  Sense strand starting at position 2351 of SEQ ID NO: 1244912
ggguauacuuauucuauuc

SEQ ID NO: 1522217 - RNA, 19 nt, Artificial Sequence
  Description of Artificial Sequence: Synthetic oligonucleotide
  Antisense strand to SEQ ID NO: 1522216
gaauagaauaaguauaccc

SEQ ID NO: 1522218 - RNA, 19 nt, Artificial Sequence
  Description of Artificial Sequence: Synthetic oligonucleotide
  Sense strand starting at position 2559 of SEQ ID NO: 1244912
uugacucugcugcauacua

SEQ ID NO: 1522219 - RNA, 19 nt, Artificial Sequence
  Description of Artificial Sequence: Synthetic oligonucleotide
  Antisense strand to SEQ ID NO: 1522218
uaguaugcagcagagucaa

SEQ ID NO: 1522220 - RNA, 19 nt, Artificial Sequence
  Description of Artificial Sequence: Synthetic oligonucleotide
  Sense strand starting at position 2971 of SEQ ID NO: 1244912
ggcgguuaugagcaugaaa

SEQ ID NO: 1522221 - RNA, 19 nt, Artificial Sequence
  Description of Artificial Sequence: Synthetic oligonucleotide
  Antisense strand to SEQ ID NO: 1522220
uuucaugcucauaaccgcc

SEQ ID NO: 1522222 - RNA, 19 nt, Artificial Sequence
  Description of Artificial Sequence: Synthetic oligonucleotide
  Sense strand starting at position 2973 of SEQ ID NO: 1244912
cgguuaugagcaugaaaug

SEQ ID NO: 1522223 - RNA, 19 nt, Artificial Sequence
  Description of Artificial Sequence: Synthetic oligonucleotide
  Antisense strand to SEQ ID NO: 1522222
cauuucaugcucauaaccg

SEQ ID NO: 1522224 - RNA, 19 nt, Artificial Sequence
  Description of Artificial Sequence: Synthetic oligonucleotide
  Sense strand starting at position 3502 of SEQ ID NO: 1244912
cagcguucuggagaguaac

SEQ ID NO: 1522225 - RNA, 19 nt, Artificial Sequence
  Description of Artificial Sequence: Synthetic oligonucleotide
  Antisense strand to SEQ ID NO: 1522224
guuacucuccagaacgcug

SEQ ID NO: 1522226 - RNA, 19 nt, Artificial Sequence
  Description of Artificial Sequence: Synthetic oligonucleotide
  Sense strand starting at position 3521 of SEQ ID NO: 1244912
cagccagggucaguuaaau

SEQ ID NO: 1522227 - RNA, 19 nt, Artificial Sequence
  Description of Artificial Sequence: Synthetic oligonucleotide
  Antisense strand to SEQ ID NO: 1522226
auuuaacugacccuggcug

SEQ ID NO: 1522228 - RNA, 19 nt, Artificial Sequence
  Description of Artificial Sequence: Synthetic oligonucleotide
  Sense strand starting at position 3527 of SEQ ID NO: 1244912
gggucaguuaaaugcacaa

SEQ ID NO: 1522229 - RNA, 19 nt, Artificial Sequence
  Description of Artificial Sequence: Synthetic oligonucleotide
  Antisense strand to SEQ ID NO: 1522228
uugugcauuuaacugaccc

SEQ ID NO: 1522230 - RNA, 19 nt, Artificial Sequence
  Description of Artificial Sequence: Synthetic oligonucleotide
  Sense strand starting at position 3591 of SEQ ID NO: 1244912
uccucaugacagcgagaaa

SEQ ID NO: 1522231 - RNA, 19 nt, Artificial Sequence
  Description of Artificial Sequence: Synthetic oligonucleotide
  Antisense strand to SEQ ID NO: 1522230
uuucucgcugucaugagga

SEQ ID NO: 1522232 - RNA, 19 nt, Artificial Sequence
  Description of Artificial Sequence: Synthetic oligonucleotide
  Sense strand starting at position 3635 of SEQ ID NO: 1244912
agcagaggaugccugaaua

SEQ ID NO: 1522233 - RNA, 19 nt, Artificial Sequence
  Description of Artificial Sequence: Synthetic oligonucleotide
  Antisense strand to SEQ ID NO: 1522232
uauucaggcauccucugcu

SEQ ID NO: 1522234 - RNA, 19 nt, Artificial Sequence
  Description of Artificial Sequence: Synthetic oligonucleotide
  Sense strand starting at position 3702 of SEQ ID NO: 1244912
augagaaaucucgaagcuu

SEQ ID NO: 1522235 - RNA, 19 nt, Artificial Sequence
  Description of Artificial Sequence: Synthetic oligonucleotide
  Antisense strand to SEQ ID NO: 1522234
aagcuucgagauuucucau

SEQ ID NO: 1522236 - RNA, 19 nt, Artificial Sequence
  Description of Artificial Sequence: Synthetic oligonucleotide
  Sense strand starting at position 3725 of SEQ ID NO: 1244912
gacagacgcugaguaaaua

SEQ ID NO: 1522237 - RNA, 19 nt, Artificial Sequence
  Description of Artificial Sequence: Synthetic oligonucleotide
  Antisense strand to SEQ ID NO: 1522236
uauuuacucagcgucuguc

SEQ ID NO: 1522238 - RNA, 19 nt, Artificial Sequence
  Description of Artificial Sequence: Synthetic oligonucleotide
  Sense strand starting at position 3861 of SEQ ID NO: 1244912
cacacaugacugugaagca

SEQ ID NO: 1522239 - RNA, 19 nt, Artificial Sequence
  Description of Artificial Sequence: Synthetic oligonucleotide
  Antisense strand to SEQ ID NO: 1522238
ugcuucacagucaugugug

SEQ ID NO: 1522240 - RNA, 19 nt, Artificial Sequence
  Description of Artificial Sequence: Synthetic oligonucleotide
  Sense strand starting at position 3877 of SEQ ID NO: 1244912
gcauaagaagucugcaaag

SEQ ID NO: 1522241 - RNA, 19 nt, Artificial Sequence
  Description of Artificial Sequence: Synthetic oligonucleotide
  Antisense strand to SEQ ID NO: 1522240
cuuugcagacuucuuaugc

SEQ ID NO: 1522242 - RNA, 19 nt, Artificial Sequence
  Description of Artificial Sequence: Synthetic oligonucleotide
  Sense strand starting at position 3891 of SEQ ID NO: 1244912
caaagacaugcaugacgaa

SEQ ID NO: 1522243 - RNA, 19 nt, Artificial Sequence
  Description of Artificial Sequence: Synthetic oligonucleotide
  Antisense strand to SEQ ID NO: 1522242
uucgucaugcaugucuuug

SEQ ID NO: 1522244 - RNA, 19 nt, Artificial Sequence
  Description of Artificial Sequence: Synthetic oligonucleotide
  Sense strand starting at position 3975 of SEQ ID NO: 1244912
gcccuauuuguagggcuaa

SEQ ID NO: 1522245 - RNA, 19 nt, Artificial Sequence
  Description of Artificial Sequence: Synthetic oligonucleotide
  Antisense strand to SEQ ID NO: 1522244
uuagcccuacaaauagggc

SEQ ID NO: 1522246 - RNA, 19 nt, Artificial Sequence
  Description of Artificial Sequence: Synthetic oligonucleotide
  Sense strand starting at position 108 of SEQ ID NO: 1244913
guggaugaacuguaaagua

SEQ ID NO: 1522247 - RNA, 19 nt, Artificial Sequence
  Description of Artificial Sequence: Synthetic oligonucleotide
  Antisense strand to SEQ ID NO: 1522246
uacuuuacaguucauccac

SEQ ID NO: 1522248 - RNA, 19 nt, Artificial Sequence
  Description of Artificial Sequence: Synthetic oligonucleotide
  Sense strand starting at position 250 of SEQ ID NO: 1244913
gccuuuaggugcugaggau

SEQ ID NO: 1522249 - RNA, 19 nt, Artificial Sequence
  Description of Artificial Sequence: Synthetic oligonucleotide
  Antisense strand to SEQ ID NO: 1522248
auccucagcaccuaaaggc

SEQ ID NO: 1522250 - RNA, 19 nt, Artificial Sequence
  Description of Artificial Sequence: Synthetic oligonucleotide
  Sense strand starting at position 356 of SEQ ID NO: 1244913
uccuuauucuuguccagac

SEQ ID NO: 1522251 - RNA, 19 nt, Artificial Sequence
  Description of Artificial Sequence: Synthetic oligonucleotide
  Antisense strand to SEQ ID NO: 1522250
gucuggacaagaauaagga

SEQ ID NO: 1522252 - RNA, 19 nt, Artificial Sequence
  Description of Artificial Sequence: Synthetic oligonucleotide
  Sense strand starting at position 357 of SEQ ID NO: 1244913
ccuuauucuuguccagacu

SEQ ID NO: 1522253 - RNA, 19 nt, Artificial Sequence
  Description of Artificial Sequence: Synthetic oligonucleotide
  Antisense strand to SEQ ID NO: 1522252
agucuggacaagaauaagg

SEQ ID NO: 1522254 - RNA, 19 nt, Artificial Sequence
  Description of Artificial Sequence: Synthetic oligonucleotide
  Sense strand starting at position 369 of SEQ ID NO: 1244913
ccagacuccuggccuuaga

SEQ ID NO: 1522255 - RNA, 19 nt, Artificial Sequence
  Description of Artificial Sequence: Synthetic oligonucleotide
  Antisense strand to SEQ ID NO: 1522254
ucuaaggccaggagucugg

SEQ ID NO: 1522256 - RNA, 19 nt, Artificial Sequence
  Description of Artificial Sequence: Synthetic oligonucleotide
  Sense strand starting at position 382 of SEQ ID NO: 1244913
cuuagaaucucaggccuca

SEQ ID NO: 1522257 - RNA, 19 nt, Artificial Sequence
  Description of Artificial Sequence: Synthetic oligonucleotide
  Antisense strand to SEQ ID NO: 1522256
ugaggccugagauucuaag

SEQ ID NO: 1522258 - RNA, 19 nt, Artificial Sequence
  Description of Artificial Sequence: Synthetic oligonucleotide
  Sense strand starting at position 394 of SEQ ID NO: 1244913
ggccucaucuuccucagua

SEQ ID NO: 1522259 - RNA, 19 nt, Artificial Sequence
  Description of Artificial Sequence: Synthetic oligonucleotide
  Antisense strand to SEQ ID NO: 1522258
uacugaggaagaugaggcc

SEQ ID NO: 1522260 - RNA, 19 nt, Artificial Sequence
  Description of Artificial Sequence: Synthetic oligonucleotide
  Sense strand starting at position 398 of SEQ ID NO: 1244913
ucaucuuccucaguaagua

SEQ ID NO: 1522261 - RNA, 19 nt, Artificial Sequence
  Description of Artificial Sequence: Synthetic oligonucleotide
  Antisense strand to SEQ ID NO: 1522260
uacuuacugaggaagauga

SEQ ID NO: 1522262 - RNA, 19 nt, Artificial Sequence
  Description of Artificial Sequence: Synthetic oligonucleotide
  Sense strand starting at position 408 of SEQ ID NO: 1244913
caguaaguagagugacuau

SEQ ID NO: 1522263 - RNA, 19 nt, Artificial Sequence
  Description of Artificial Sequence: Synthetic oligonucleotide
  Antisense strand to SEQ ID NO: 1522262
auagucacucuacuuacug

SEQ ID NO: 1522264 - RNA, 19 nt, Artificial Sequence
  Description of Artificial Sequence: Synthetic oligonucleotide
  Sense strand starting at position 411 of SEQ ID NO: 1244913
uaaguagagugacuauaau

SEQ ID NO: 1522265 - RNA, 19 nt, Artificial Sequence
  Description of Artificial Sequence: Synthetic oligonucleotide
  Antisense strand to SEQ ID NO: 1522264
auuauagucacucuacuua

SEQ ID NO: 1522266 - RNA, 19 nt, Artificial Sequence
  Description of Artificial Sequence: Synthetic oligonucleotide
  Sense strand starting at position 431 of SEQ ID NO: 1244913
ugucauccacacugggaua

SEQ ID NO: 1522267 - RNA, 19 nt, Artificial Sequence
  Description of Artificial Sequence: Synthetic oligonucleotide
  Antisense strand to SEQ ID NO: 1522266
uaucccaguguggaugaca

SEQ ID NO: 1522268 - RNA, 19 nt, Artificial Sequence
  Description of Artificial Sequence: Synthetic oligonucleotide
  Sense strand starting at position 445 of SEQ ID NO: 1244913
ggauacugcugagagcaaa

SEQ ID NO: 1522269 - RNA, 19 nt, Artificial Sequence
  Description of Artificial Sequence: Synthetic oligonucleotide
  Antisense strand to SEQ ID NO: 1522268
uuugcucucagcaguaucc

SEQ ID NO: 1522270 - RNA, 19 nt, Artificial Sequence
  Description of Artificial Sequence: Synthetic oligonucleotide
  Sense strand starting at position 464 of SEQ ID NO: 1244913
acgggaagcugcuauuaau

SEQ ID NO: 1522271 - RNA, 19 nt, Artificial Sequence
  Description of Artificial Sequence: Synthetic oligonucleotide
  Antisense strand to SEQ ID NO: 1522270
auuaauagcagcuucccgu

SEQ ID NO: 1522272 - RNA, 19 nt, Artificial Sequence
  Description of Artificial Sequence: Synthetic oligonucleotide
  Sense strand starting at position 621 of SEQ ID NO: 1244913
ucaggaucccaguaguucu

SEQ ID NO: 1522273 - RNA, 19 nt, Artificial Sequence
  Description of Artificial Sequence: Synthetic oligonucleotide
  Antisense strand to SEQ ID NO: 1522272
agaacuacugggauccuga

SEQ ID NO: 1522274 - RNA, 19 nt, Artificial Sequence
  Description of Artificial Sequence: Synthetic oligonucleotide
  Sense strand starting at position 628 of SEQ ID NO: 1244913
cccaguaguucuucuaacu

SEQ ID NO: 1522275 - RNA, 19 nt, Artificial Sequence
  Description of Artificial Sequence: Synthetic oligonucleotide
  Antisense strand to SEQ ID NO: 1522274
aguuagaagaacuacuggg

SEQ ID NO: 1522276 - RNA, 19 nt, Artificial Sequence
  Description of Artificial Sequence: Synthetic oligonucleotide
  Sense strand starting at position 689 of SEQ ID NO: 1244913
gcacauccauaugacagaa

SEQ ID NO: 1522277 - RNA, 19 nt, Artificial Sequence
  Description of Artificial Sequence: Synthetic oligonucleotide
  Antisense strand to SEQ ID NO: 1522276
uucugucauauggaugugc

SEQ ID NO: 1522278 - RNA, 19 nt, Artificial Sequence
  Description of Artificial Sequence: Synthetic oligonucleotide
  Sense strand starting at position 722 of SEQ ID NO: 1244913
gggcgagaaucccuagguu

SEQ ID NO: 1522279 - RNA, 19 nt, Artificial Sequence
  Description of Artificial Sequence: Synthetic oligonucleotide
  Antisense strand to SEQ ID NO: 1522278
aaccuagggauucucgccc

SEQ ID NO: 1522280 - RNA, 19 nt, Artificial Sequence
  Description of Artificial Sequence: Synthetic oligonucleotide
  Sense strand starting at position 725 of SEQ ID NO: 1244913
cgagaaucccuagguuuga

SEQ ID NO: 1522281 - RNA, 19 nt, Artificial Sequence
  Description of Artificial Sequence: Synthetic oligonucleotide
  Antisense strand to SEQ ID NO: 1522280
ucaaaccuagggauucucg

SEQ ID NO: 1522282 - RNA, 19 nt, Artificial Sequence
  Description of Artificial Sequence: Synthetic oligonucleotide
  Sense strand starting at position 738 of SEQ ID NO: 1244913
guuugagucuuggcugguu

SEQ ID NO: 1522283 - RNA, 19 nt, Artificial Sequence
  Description of Artificial Sequence: Synthetic oligonucleotide
  Antisense strand to SEQ ID NO: 1522282
aaccagccaagacucaaac

SEQ ID NO: 1522284 - RNA, 19 nt, Artificial Sequence
  Description of Artificial Sequence: Synthetic oligonucleotide
  Sense strand starting at position 794 of SEQ ID NO: 1244913
ucaguuucucccuguggau

SEQ ID NO: 1522285 - RNA, 19 nt, Artificial Sequence
  Description of Artificial Sequence: Synthetic oligonucleotide
  Antisense strand to SEQ ID NO: 1522284
auccacagggagaaacuga

SEQ ID NO: 1522286 - RNA, 19 nt, Artificial Sequence
  Description of Artificial Sequence: Synthetic oligonucleotide
  Sense strand starting at position 796 of SEQ ID NO: 1244913
aguuucucccuguggauaa

SEQ ID NO: 1522287 - RNA, 19 nt, Artificial Sequence
  Description of Artificial Sequence: Synthetic oligonucleotide
  Antisense strand to SEQ ID NO: 1522286
uuauccacagggagaaacu

SEQ ID NO: 1522288 - RNA, 19 nt, Artificial Sequence
  Description of Artificial Sequence: Synthetic oligonucleotide
  Sense strand starting at position 797 of SEQ ID NO: 1244913
guuucucccuguggauaau

SEQ ID NO: 1522289 - RNA, 19 nt, Artificial Sequence
  Description of Artificial Sequence: Synthetic oligonucleotide
  Antisense strand to SEQ ID NO: 1522288
auuauccacagggagaaac

SEQ ID NO: 1522290 - RNA, 19 nt, Artificial Sequence
  Description of Artificial Sequence: Synthetic oligonucleotide
  Sense strand starting at position 832 of SEQ ID NO: 1244913
gcuuccugagguugggaua

SEQ ID NO: 1522291 - RNA, 19 nt, Artificial Sequence
  Description of Artificial Sequence: Synthetic oligonucleotide
  Antisense strand to SEQ ID NO: 1522290
uaucccaaccucaggaagc

SEQ ID NO: 1522292 - RNA, 19 nt, Artificial Sequence
  Description of Artificial Sequence: Synthetic oligonucleotide
  Sense strand starting at position 980 of SEQ ID NO: 1244913
gauauaaagugagacauac

SEQ ID NO: 1522293 - RNA, 19 nt, Artificial Sequence
  Description of Artificial Sequence: Synthetic oligonucleotide
  Antisense strand to SEQ ID NO: 1522292
guaugucucacuuuauauc

SEQ ID NO: 1522294 - RNA, 19 nt, Artificial Sequence
  Description of Artificial Sequence: Synthetic oligonucleotide
  Sense strand starting at position 1707 of SEQ ID NO: 1244913
uccugaugugcccaagaag

SEQ ID NO: 1522295 - RNA, 19 nt, Artificial Sequence
  Description of Artificial Sequence: Synthetic oligonucleotide
  Antisense strand to SEQ ID NO: 1522294
cuucuugggcacaucagga

SEQ ID NO: 1522296 - RNA, 19 nt, Artificial Sequence
  Description of Artificial Sequence: Synthetic oligonucleotide
  Sense strand starting at position 2368 of SEQ ID NO: 1244913
cagggaguuccagguugua

SEQ ID NO: 1522297 - RNA, 19 nt, Artificial Sequence
  Description of Artificial Sequence: Synthetic oligonucleotide
  Antisense strand to SEQ ID NO: 1522296
uacaaccuggaacucccug

SEQ ID NO: 1522298 - RNA, 19 nt, Artificial Sequence
  Description of Artificial Sequence: Synthetic oligonucleotide
  Sense strand starting at position 2371 of SEQ ID NO: 1244913
ggaguuccagguuguauga

SEQ ID NO: 1522299 - RNA, 19 nt, Artificial Sequence
  Description of Artificial Sequence: Synthetic oligonucleotide
  Antisense strand to SEQ ID NO: 1522298
ucauacaaccuggaacucc

SEQ ID NO: 1522300 - RNA, 19 nt, Artificial Sequence
  Description of Artificial Sequence: Synthetic oligonucleotide
  Sense strand starting at position 2381 of SEQ ID NO: 1244913
guuguaugaccugguucag

SEQ ID NO: 1522301 - RNA, 19 nt, Artificial Sequence
  Description of Artificial Sequence: Synthetic oligonucleotide
  Antisense strand to SEQ ID NO: 1522300
cugaaccaggucauacaac

SEQ ID NO: 1522302 - RNA, 19 nt, Artificial Sequence
  Description of Artificial Sequence: Synthetic oligonucleotide
  Sense strand starting at position 2387 of SEQ ID NO: 1244913
ugaccugguucagggaaga

SEQ ID NO: 1522303 - RNA, 19 nt, Artificial Sequence
  Description of Artificial Sequence: Synthetic oligonucleotide
  Antisense strand to SEQ ID NO: 1522302
ucuucccugaaccagguca

SEQ ID NO: 1522304 - RNA, 19 nt, Artificial Sequence
  Description of Artificial Sequence: Synthetic oligonucleotide
  Sense strand starting at position 2411 of SEQ ID NO: 1244913
aggagaagguaagaaagau

SEQ ID NO: 1522305 - RNA, 19 nt, Artificial Sequence
  Description of Artificial Sequence: Synthetic oligonucleotide
  Antisense strand to SEQ ID NO: 1522304
aucuuucuuaccuucuccu

SEQ ID NO: 1522306 - RNA, 19 nt, Artificial Sequence
  Description of Artificial Sequence: Synthetic oligonucleotide
  Sense strand starting at position 2420 of SEQ ID NO: 1244913
uaagaaagauccuucggcu

SEQ ID NO: 1522307 - RNA, 19 nt, Artificial Sequence
  Description of Artificial Sequence: Synthetic oligonucleotide
  Antisense strand to SEQ ID NO: 1522306
agccgaaggaucuuucuua

SEQ ID NO: 1522308 - RNA, 19 nt, Artificial Sequence
  Description of Artificial Sequence: Synthetic oligonucleotide
  Sense strand starting at position 2423 of SEQ ID NO: 1244913
gaaagauccuucggcuucu

SEQ ID NO: 1522309 - RNA, 19 nt, Artificial Sequence
  Description of Artificial Sequence: Synthetic oligonucleotide
  Antisense strand to SEQ ID NO: 1522308
agaagccgaaggaucuuuc

SEQ ID NO: 1522310 - RNA, 19 nt, Artificial Sequence
  Description of Artificial Sequence: Synthetic oligonucleotide
  Sense strand starting at position 2482 of SEQ ID NO: 1244913
gccgguagcacguucugaa

SEQ ID NO: 1522311 - RNA, 19 nt, Artificial Sequence
  Description of Artificial Sequence: Synthetic oligonucleotide
  Antisense strand to SEQ ID NO: 1522310
uucagaacgugcuaccggc

SEQ ID NO: 1522312 - RNA, 19 nt, Artificial Sequence
  Description of Artificial Sequence: Synthetic oligonucleotide
  Sense strand starting at position 2492 of SEQ ID NO: 1244913
cguucugaagcccaucauu

SEQ ID NO: 1522313 - RNA, 19 nt, Artificial Sequence
  Description of Artificial Sequence: Synthetic oligonucleotide
  Antisense strand to SEQ ID NO: 1522312
aaugaugggcuucagaacg

SEQ ID NO: 1522314 - RNA, 19 nt, Artificial Sequence
  Description of Artificial Sequence: Synthetic oligonucleotide
  Sense strand starting at position 2511 of SEQ ID NO: 1244913
accaaugauugccaagcau

SEQ ID NO: 1522315 - RNA, 19 nt, Artificial Sequence
  Description of Artificial Sequence: Synthetic oligonucleotide
  Antisense strand to SEQ ID NO: 1522314
augcuuggcaaucauuggu

SEQ ID NO: 1522316 - RNA, 19 nt, Artificial Sequence
  Description of Artificial Sequence: Synthetic oligonucleotide
  Sense strand starting at position 108 of SEQ ID NO: 1244914
guggaugaacuguaaagua

SEQ ID NO: 1522317 - RNA, 19 nt, Artificial Sequence
  Description of Artificial Sequence: Synthetic oligonucleotide
  Antisense strand to SEQ ID NO: 1522316
uacuuuacaguucauccac

SEQ ID NO: 1522318 - RNA, 19 nt, Artificial Sequence
  Description of Artificial Sequence: Synthetic oligonucleotide
  Sense strand starting at position 250 of SEQ ID NO: 1244914
gccuuuaggugcugaggau

SEQ ID NO: 1522319 - RNA, 19 nt, Artificial Sequence
  Description of Artificial Sequence: Synthetic oligonucleotide
  Antisense strand to SEQ ID NO: 1522318
auccucagcaccuaaaggc

SEQ ID NO: 1522320 - RNA, 19 nt, Artificial Sequence
  Description of Artificial Sequence: Synthetic oligonucleotide
  Sense strand starting at position 356 of SEQ ID NO: 1244914
uccuuauucuuguccagac

SEQ ID NO: 1522321 - RNA, 19 nt, Artificial Sequence
  Description of Artificial Sequence: Synthetic oligonucleotide
  Antisense strand to SEQ ID NO: 1522320
gucuggacaagaauaagga

SEQ ID NO: 1522322 - RNA, 19 nt, Artificial Sequence
  Description of Artificial Sequence: Synthetic oligonucleotide
  Sense strand starting at position 357 of SEQ ID NO: 1244914
ccuuauucuuguccagacu

SEQ ID NO: 1522323 - RNA, 19 nt, Artificial Sequence
  Description of Artificial Sequence: Synthetic oligonucleotide
  Antisense strand to SEQ ID NO: 1522322
agucuggacaagaauaagg

SEQ ID NO: 1522324 - RNA, 19 nt, Artificial Sequence
  Description of Artificial Sequence: Synthetic oligonucleotide
  Sense strand starting at position 369 of SEQ ID NO: 1244914
ccagacuccuggccuuaga

SEQ ID NO: 1522325 - RNA, 19 nt, Artificial Sequence
  Description of Artificial Sequence: Synthetic oligonucleotide
  Antisense strand to SEQ ID NO: 1522324
ucuaaggccaggagucugg

SEQ ID NO: 1522326 - RNA, 19 nt, Artificial Sequence
  Description of Artificial Sequence: Synthetic oligonucleotide
  Sense strand starting at position 382 of SEQ ID NO: 1244914
cuuagaaucucaggccuca

SEQ ID NO: 1522327 - RNA, 19 nt, Artificial Sequence
  Description of Artificial Sequence: Synthetic oligonucleotide
  Antisense strand to SEQ ID NO: 1522326
ugaggccugagauucuaag

SEQ ID NO: 1522328 - RNA, 19 nt, Artificial Sequence
  Description of Artificial Sequence: Synthetic oligonucleotide
  Sense strand starting at position 394 of SEQ ID NO: 1244914
ggccucaucuuccucagua

SEQ ID NO: 1522329 - RNA, 19 nt, Artificial Sequence
  Description of Artificial Sequence: Synthetic oligonucleotide
  Antisense strand to SEQ ID NO: 1522328
uacugaggaagaugaggcc

SEQ ID NO: 1522330 - RNA, 19 nt, Artificial Sequence
  Description of Artificial Sequence: Synthetic oligonucleotide
  Sense strand starting at position 398 of SEQ ID NO: 1244914
ucaucuuccucaguaagua

SEQ ID NO: 1522331 - RNA, 19 nt, Artificial Sequence
  Description of Artificial Sequence: Synthetic oligonucleotide
  Antisense strand to SEQ ID NO: 1522330
uacuuacugaggaagauga

SEQ ID NO: 1522332 - RNA, 19 nt, Artificial Sequence
  Description of Artificial Sequence: Synthetic oligonucleotide
  Sense strand starting at position 408 of SEQ ID NO: 1244914
caguaaguagagugacuau

SEQ ID NO: 1522333 - RNA, 19 nt, Artificial Sequence
  Description of Artificial Sequence: Synthetic oligonucleotide
  Antisense strand to SEQ ID NO: 1522332
auagucacucuacuuacug

SEQ ID NO: 1522334 - RNA, 19 nt, Artificial Sequence
  Description of Artificial Sequence: Synthetic oligonucleotide
  Sense strand starting at position 411 of SEQ ID NO: 1244914
uaaguagagugacuauaau

SEQ ID NO: 1522335 - RNA, 19 nt, Artificial Sequence
  Description of Artificial Sequence: Synthetic oligonucleotide
  Antisense strand to SEQ ID NO: 1522334
auuauagucacucuacuua

SEQ ID NO: 1522336 - RNA, 19 nt, Artificial Sequence
  Description of Artificial Sequence: Synthetic oligonucleotide
  Sense strand starting at position 431 of SEQ ID NO: 1244914
ugucauccacacugggaua

SEQ ID NO: 1522337 - RNA, 19 nt, Artificial Sequence
  Description of Artificial Sequence: Synthetic oligonucleotide
  Antisense strand to SEQ ID NO: 1522336
uaucccaguguggaugaca

SEQ ID NO: 1522338 - RNA, 19 nt, Artificial Sequence
  Description of Artificial Sequence: Synthetic oligonucleotide
  Sense strand starting at position 445 of SEQ ID NO: 1244914
ggauacugcugagagcaaa

SEQ ID NO: 1522339 - RNA, 19 nt, Artificial Sequence
  Description of Artificial Sequence: Synthetic oligonucleotide
  Antisense strand to SEQ ID NO: 1522338
uuugcucucagcaguaucc

SEQ ID NO: 1522340 - RNA, 19 nt, Artificial Sequence
  Description of Artificial Sequence: Synthetic oligonucleotide
  Sense strand starting at position 464 of SEQ ID NO: 1244914
acgggaagcugcuauuaau

SEQ ID NO: 1522341 - RNA, 19 nt, Artificial Sequence
  Description of Artificial Sequence: Synthetic oligonucleotide
  Antisense strand to SEQ ID NO: 1522340
auuaauagcagcuucccgu

SEQ ID NO: 1522342 - RNA, 19 nt, Artificial Sequence
  Description of Artificial Sequence: Synthetic oligonucleotide
  Sense strand starting at position 621 of SEQ ID NO: 1244914
ucaggaucccaguaguucu

SEQ ID NO: 1522343 - RNA, 19 nt, Artificial Sequence
  Description of Artificial Sequence: Synthetic oligonucleotide
  Antisense strand to SEQ ID NO: 1522342
agaacuacugggauccuga

SEQ ID NO: 1522344 - RNA, 19 nt, Artificial Sequence
  Description of Artificial Sequence: Synthetic oligonucleotide
  Sense strand starting at position 628 of SEQ ID NO: 1244914
cccaguaguucuucuaacu

SEQ ID NO: 1522345 - RNA, 19 nt, Artificial Sequence
  Description of Artificial Sequence: Synthetic oligonucleotide
  Antisense strand to SEQ ID NO: 1522344
aguuagaagaacuacuggg

SEQ ID NO: 1522346 - RNA, 19 nt, Artificial Sequence
  Description of Artificial Sequence: Synthetic oligonucleotide
  Sense strand starting at position 689 of SEQ ID NO: 1244914
gcacauccauaugacagaa

SEQ ID NO: 1522347 - RNA, 19 nt, Artificial Sequence
  Description of Artificial Sequence: Synthetic oligonucleotide
  Antisense strand to SEQ ID NO: 1522346
uucugucauauggaugugc

SEQ ID NO: 1522348 - RNA, 19 nt, Artificial Sequence
  Description of Artificial Sequence: Synthetic oligonucleotide
  Sense strand starting at position 722 of SEQ ID NO: 1244914
gggcgagaaucccuagguu

SEQ ID NO: 1522349 - RNA, 19 nt, Artificial Sequence
  Description of Artificial Sequence: Synthetic oligonucleotide
  Antisense strand to SEQ ID NO: 1522348
aaccuagggauucucgccc

SEQ ID NO: 1522350 - RNA, 19 nt, Artificial Sequence
  Description of Artificial Sequence: Synthetic oligonucleotide
  Sense strand starting at position 725 of SEQ ID NO: 1244914
cgagaaucccuagguuuga

SEQ ID NO: 1522351 - RNA, 19 nt, Artificial Sequence
  Description of Artificial Sequence: Synthetic oligonucleotide
  Antisense strand to SEQ ID NO: 1522350
ucaaaccuagggauucucg

SEQ ID NO: 1522352 - RNA, 19 nt, Artificial Sequence
  Description of Artificial Sequence: Synthetic oligonucleotide
  Sense strand starting at position 738 of SEQ ID NO: 1244914
guuugagucuuggcugguu

SEQ ID NO: 1522353 - RNA, 19 nt, Artificial Sequence
  Description of Artificial Sequence: Synthetic oligonucleotide
  Antisense strand to SEQ ID NO: 1522352
aaccagccaagacucaaac

SEQ ID NO: 1522354 - RNA, 19 nt, Artificial Sequence
  Description of Artificial Sequence: Synthetic oligonucleotide
  Sense strand starting at position 794 of SEQ ID NO: 1244914
ucaguuucucccuguggau

SEQ ID NO: 1522355 - RNA, 19 nt, Artificial Sequence
  Description of Artificial Sequence: Synthetic oligonucleotide
  Antisense strand to SEQ ID NO: 1522354
auccacagggagaaacuga

SEQ ID NO: 1522356 - RNA, 19 nt, Artificial Sequence
  Description of Artificial Sequence: Synthetic oligonucleotide
  Sense strand starting at position 796 of SEQ ID NO: 1244914
aguuucucccuguggauaa

SEQ ID NO: 1522357 - RNA, 19 nt, Artificial Sequence
  Description of Artificial Sequence: Synthetic oligonucleotide
  Antisense strand to SEQ ID NO: 1522356
uuauccacagggagaaacu

SEQ ID NO: 1522358 - RNA, 19 nt, Artificial Sequence
  Description of Artificial Sequence: Synthetic oligonucleotide
  Sense strand starting at position 797 of SEQ ID NO: 1244914
guuucucccuguggauaau

SEQ ID NO: 1522359 - RNA, 19 nt, Artificial Sequence
  Description of Artificial Sequence: Synthetic oligonucleotide
  Antisense strand to SEQ ID NO: 1522358
auuauccacagggagaaac

SEQ ID NO: 1522360 - RNA, 19 nt, Artificial Sequence
  Description of Artificial Sequence: Synthetic oligonucleotide
  Sense strand starting at position 832 of SEQ ID NO: 1244914
gcuuccugagguugggaua

SEQ ID NO: 1522361 - RNA, 19 nt, Artificial Sequence
  Description of Artificial Sequence: Synthetic oligonucleotide
  Antisense strand to SEQ ID NO: 1522360
uaucccaaccucaggaagc

SEQ ID NO: 1522362 - RNA, 19 nt, Artificial Sequence
  Description of Artificial Sequence: Synthetic oligonucleotide
  Sense strand starting at position 980 of SEQ ID NO: 1244914
gauauaaagugagacauac

SEQ ID NO: 1522363 - RNA, 19 nt, Artificial Sequence
  Description of Artificial Sequence: Synthetic oligonucleotide
  Antisense strand to SEQ ID NO: 1522362
guaugucucacuuuauauc

SEQ ID NO: 1522364 - RNA, 19 nt, Artificial Sequence
  Description of Artificial Sequence: Synthetic oligonucleotide
  Sense strand starting at position 1707 of SEQ ID NO: 1244914
uccugaugugcccaagaag

SEQ ID NO: 1522365 - RNA, 19 nt, Artificial Sequence
  Description of Artificial Sequence: Synthetic oligonucleotide
  Antisense strand to SEQ ID NO: 1522364
cuucuugggcacaucagga

SEQ ID NO: 1522366 - RNA, 19 nt, Artificial Sequence
  Description of Artificial Sequence: Synthetic oligonucleotide
  Sense strand starting at position 2368 of SEQ ID NO: 1244914
cagggaguuccagguugua

SEQ ID NO: 1522367 - RNA, 19 nt, Artificial Sequence
  Description of Artificial Sequence: Synthetic oligonucleotide
  Antisense strand to SEQ ID NO: 1522366
uacaaccuggaacucccug

SEQ ID NO: 1522368 - RNA, 19 nt, Artificial Sequence
  Description of Artificial Sequence: Synthetic oligonucleotide
  Sense strand starting at position 2371 of SEQ ID NO: 1244914
ggaguuccagguuguauga

SEQ ID NO: 1522369 - RNA, 19 nt, Artificial Sequence
  Description of Artificial Sequence: Synthetic oligonucleotide
  Antisense strand to SEQ ID NO: 1522368
ucauacaaccuggaacucc

SEQ ID NO: 1522370 - RNA, 19 nt, Artificial Sequence
  Description of Artificial Sequence: Synthetic oligonucleotide
  Sense strand starting at position 2381 of SEQ ID NO: 1244914
guuguaugaccugguucag

SEQ ID NO: 1522371 - RNA, 19 nt, Artificial Sequence
  Description of Artificial Sequence: Synthetic oligonucleotide
  Antisense strand to SEQ ID NO: 1522370
cugaaccaggucauacaac

SEQ ID NO: 1522372 - RNA, 19 nt, Artificial Sequence
  Description of Artificial Sequence: Synthetic oligonucleotide
  Sense strand starting at position 2387 of SEQ ID NO: 1244914
ugaccugguucagggaaga

SEQ ID NO: 1522373 - RNA, 19 nt, Artificial Sequence
  Description of Artificial Sequence: Synthetic oligonucleotide
  Antisense strand to SEQ ID NO: 1522372
ucuucccugaaccagguca

SEQ ID NO: 1522374 - RNA, 19 nt, Artificial Sequence
  Description of Artificial Sequence: Synthetic oligonucleotide
  Sense strand starting at position 2411 of SEQ ID NO: 1244914
aggagaagguaagaaagau

SEQ ID NO: 1522375 - RNA, 19 nt, Artificial Sequence
  Description of Artificial Sequence: Synthetic oligonucleotide
  Antisense strand to SEQ ID NO: 1522374
aucuuucuuaccuucuccu

SEQ ID NO: 1522376 - RNA, 19 nt, Artificial Sequence
  Description of Artificial Sequence: Synthetic oligonucleotide
  Sense strand starting at position 2420 of SEQ ID NO: 1244914
uaagaaagauccuucggcu

SEQ ID NO: 1522377 - RNA, 19 nt, Artificial Sequence
  Description of Artificial Sequence: Synthetic oligonucleotide
  Antisense strand to SEQ ID NO: 1522376
agccgaaggaucuuucuua

SEQ ID NO: 1522378 - RNA, 19 nt, Artificial Sequence
  Description of Artificial Sequence: Synthetic oligonucleotide
  Sense strand starting at position 2423 of SEQ ID NO: 1244914
gaaagauccuucggcuucu

SEQ ID NO: 1522379 - RNA, 19 nt, Artificial Sequence
  Description of Artificial Sequence: Synthetic oligonucleotide
  Antisense strand to SEQ ID NO: 1522378
agaagccgaaggaucuuuc

SEQ ID NO: 1522380 - RNA, 19 nt, Artificial Sequence
  Description of Artificial Sequence: Synthetic oligonucleotide
  Sense strand starting at position 2482 of SEQ ID NO: 1244914
gccgguagcacguucugaa

SEQ ID NO: 1522381 - RNA, 19 nt, Artificial Sequence
  Description of Artificial Sequence: Synthetic oligonucleotide
  Antisense strand to SEQ ID NO: 1522380
uucagaacgugcuaccggc

SEQ ID NO: 1522382 - RNA, 19 nt, Artificial Sequence
  Description of Artificial Sequence: Synthetic oligonucleotide
  Sense strand starting at position 2492 of SEQ ID NO: 1244914
cguucugaagcccaucauu

SEQ ID NO: 1522383 - RNA, 19 nt, Artificial Sequence
  Description of Artificial Sequence: Synthetic oligonucleotide
  Antisense strand to SEQ ID NO: 1522382
aaugaugggcuucagaacg

SEQ ID NO: 1522384 - RNA, 19 nt, Artificial Sequence
  Description of Artificial Sequence: Synthetic oligonucleotide
  Sense strand starting at position 2511 of SEQ ID NO: 1244914
accaaugauugccaagcau

SEQ ID NO: 1522385 - RNA, 19 nt, Artificial Sequence
  Description of Artificial Sequence: Synthetic oligonucleotide
  Antisense strand to SEQ ID NO: 1522384
augcuuggcaaucauuggu

SEQ ID NO: 1522386 - RNA, 19 nt, Artificial Sequence
  Description of Artificial Sequence: Synthetic oligonucleotide
  Sense strand starting at position 38 of SEQ ID NO: 1244915
cuggguuugguaugaauag

SEQ ID NO: 1522387 - RNA, 19 nt, Artificial Sequence
  Description of Artificial Sequence: Synthetic oligonucleotide
  Antisense strand to SEQ ID NO: 1522386
cuauucauaccaaacccag

SEQ ID NO: 1522388 - RNA, 19 nt, Artificial Sequence
  Description of Artificial Sequence: Synthetic oligonucleotide
  Sense strand starting at position 39 of SEQ ID NO: 1244915
uggguuugguaugaauaga

SEQ ID NO: 1522389 - RNA, 19 nt, Artificial Sequence
  Description of Artificial Sequence: Synthetic oligonucleotide
  Antisense strand to SEQ ID NO: 1522388
ucuauucauaccaaaccca

SEQ ID NO: 1522390 - RNA, 19 nt, Artificial Sequence
  Description of Artificial Sequence: Synthetic oligonucleotide
  Sense strand starting at position 236 of SEQ ID NO: 1244915
cggagucaucuggagguga

SEQ ID NO: 1522391 - RNA, 19 nt, Artificial Sequence
  Description of Artificial Sequence: Synthetic oligonucleotide
  Antisense strand to SEQ ID NO: 1522390
ucaccuccagaugacuccg

SEQ ID NO: 1522392 - RNA, 19 nt, Artificial Sequence
  Description of Artificial Sequence: Synthetic oligonucleotide
  Sense strand starting at position 237 of SEQ ID NO: 1244915
ggagucaucuggaggugag

SEQ ID NO: 1522393 - RNA, 19 nt, Artificial Sequence
  Description of Artificial Sequence: Synthetic oligonucleotide
  Antisense strand to SEQ ID NO: 1522392
cucaccuccagaugacucc

SEQ ID NO: 1522394 - RNA, 19 nt, Artificial Sequence
  Description of Artificial Sequence: Synthetic oligonucleotide
  Sense strand starting at position 238 of SEQ ID NO: 1244915
gagucaucuggaggugaga

SEQ ID NO: 1522395 - RNA, 19 nt, Artificial Sequence
  Description of Artificial Sequence: Synthetic oligonucleotide
  Antisense strand to SEQ ID NO: 1522394
ucucaccuccagaugacuc

SEQ ID NO: 1522396 - RNA, 19 nt, Artificial Sequence
  Description of Artificial Sequence: Synthetic oligonucleotide
  Sense strand starting at position 253 of SEQ ID NO: 1244915
gagagugugucggucagga

SEQ ID NO: 1522397 - RNA, 19 nt, Artificial Sequence
  Description of Artificial Sequence: Synthetic oligonucleotide
  Antisense strand to SEQ ID NO: 1522396
uccugaccgacacacucuc

SEQ ID NO: 1522398 - RNA, 19 nt, Artificial Sequence
  Description of Artificial Sequence: Synthetic oligonucleotide
  Sense strand starting at position 344 of SEQ ID NO: 1244915
gcccgaguuccugguuauu

SEQ ID NO: 1522399 - RNA, 19 nt, Artificial Sequence
  Description of Artificial Sequence: Synthetic oligonucleotide
  Antisense strand to SEQ ID NO: 1522398
aauaaccaggaacucgggc

SEQ ID NO: 1522400 - RNA, 19 nt, Artificial Sequence
  Description of Artificial Sequence: Synthetic oligonucleotide
  Sense strand starting at position 438 of SEQ ID NO: 1244915
gagugcugcucugaggaga

SEQ ID NO: 1522401 - RNA, 19 nt, Artificial Sequence
  Description of Artificial Sequence: Synthetic oligonucleotide
  Antisense strand to SEQ ID NO: 1522400
ucuccucagagcagcacuc

SEQ ID NO: 1522402 - RNA, 19 nt, Artificial Sequence
  Description of Artificial Sequence: Synthetic oligonucleotide
  Sense strand starting at position 461 of SEQ ID NO: 1244915
gagggaaucucagccgcau

SEQ ID NO: 1522403 - RNA, 19 nt, Artificial Sequence
  Description of Artificial Sequence: Synthetic oligonucleotide
  Antisense strand to SEQ ID NO: 1522402
augcggcugagauucccuc

SEQ ID NO: 1522404 - RNA, 19 nt, Artificial Sequence
  Description of Artificial Sequence: Synthetic oligonucleotide
  Sense strand starting at position 663 of SEQ ID NO: 1244915
cggaacucugcucauggaa

SEQ ID NO: 1522405 - RNA, 19 nt, Artificial Sequence
  Description of Artificial Sequence: Synthetic oligonucleotide
  Antisense strand to SEQ ID NO: 1522404
uuccaugagcagaguuccg

SEQ ID NO: 1522406 - RNA, 19 nt, Artificial Sequence
  Description of Artificial Sequence: Synthetic oligonucleotide
  Sense strand starting at position 665 of SEQ ID NO: 1244915
gaacucugcucauggaaag

SEQ ID NO: 1522407 - RNA, 19 nt, Artificial Sequence
  Description of Artificial Sequence: Synthetic oligonucleotide
  Antisense strand to SEQ ID NO: 1522406
cuuuccaugagcagaguuc

SEQ ID NO: 1522408 - RNA, 19 nt, Artificial Sequence
  Description of Artificial Sequence: Synthetic oligonucleotide
  Sense strand starting at position 815 of SEQ ID NO: 1244915
caggauuuguuagguauga

SEQ ID NO: 1522409 - RNA, 19 nt, Artificial Sequence
  Description of Artificial Sequence: Synthetic oligonucleotide
  Antisense strand to SEQ ID NO: 1522408
ucauaccuaacaaauccug

SEQ ID NO: 1522410 - RNA, 19 nt, Artificial Sequence
  Description of Artificial Sequence: Synthetic oligonucleotide
  Sense strand starting at position 850 of SEQ ID NO: 1244915
acaguuuccuuuccuggaa

SEQ ID NO: 1522411 - RNA, 19 nt, Artificial Sequence
  Description of Artificial Sequence: Synthetic oligonucleotide
  Antisense strand to SEQ ID NO: 1522410
uuccaggaaaggaaacugu

SEQ ID NO: 1522412 - RNA, 19 nt, Artificial Sequence
  Description of Artificial Sequence: Synthetic oligonucleotide
  Sense strand starting at position 2198 of SEQ ID NO: 1244915
guaccuugggcggaggauu

SEQ ID NO: 1522413 - RNA, 19 nt, Artificial Sequence
  Description of Artificial Sequence: Synthetic oligonucleotide
  Antisense strand to SEQ ID NO: 1522412
aauccuccgcccaagguac

SEQ ID NO: 1522414 - RNA, 19 nt, Artificial Sequence
  Description of Artificial Sequence: Synthetic oligonucleotide
  Sense strand starting at position 2298 of SEQ ID NO: 1244915
ugaacaucaucccggaguu

SEQ ID NO: 1522415 - RNA, 19 nt, Artificial Sequence
  Description of Artificial Sequence: Synthetic oligonucleotide
  Antisense strand to SEQ ID NO: 1522414
aacuccgggaugauguuca

SEQ ID NO: 1522416 - RNA, 19 nt, Artificial Sequence
  Description of Artificial Sequence: Synthetic oligonucleotide
  Sense strand starting at position 3247 of SEQ ID NO: 1244915
uuuccaauuuccucagcga

SEQ ID NO: 1522417 - RNA, 19 nt, Artificial Sequence
  Description of Artificial Sequence: Synthetic oligonucleotide
  Antisense strand to SEQ ID NO: 1522416
ucgcugaggaaauuggaaa

SEQ ID NO: 1522418 - RNA, 19 nt, Artificial Sequence
  Description of Artificial Sequence: Synthetic oligonucleotide
  Sense strand starting at position 3521 of SEQ ID NO: 1244915
cacggaugcucagagauaa

SEQ ID NO: 1522419 - RNA, 19 nt, Artificial Sequence
  Description of Artificial Sequence: Synthetic oligonucleotide
  Antisense strand to SEQ ID NO: 1522418
uuaucucugagcauccgug

SEQ ID NO: 1522420 - RNA, 19 nt, Artificial Sequence
  Description of Artificial Sequence: Synthetic oligonucleotide
  Sense strand starting at position 3538 of SEQ ID NO: 1244915
aaggaaacgucucucuaca

SEQ ID NO: 1522421 - RNA, 19 nt, Artificial Sequence
  Description of Artificial Sequence: Synthetic oligonucleotide
  Antisense strand to SEQ ID NO: 1522420
uguagagagacguuuccuu

SEQ ID NO: 1522422 - RNA, 19 nt, Artificial Sequence
  Description of Artificial Sequence: Synthetic oligonucleotide
  Sense strand starting at position 3659 of SEQ ID NO: 1244915
cccuaugaugcccauaguu

SEQ ID NO: 1522423 - RNA, 19 nt, Artificial Sequence
  Description of Artificial Sequence: Synthetic oligonucleotide
  Antisense strand to SEQ ID NO: 1522422
aacuaugggcaucauaggg

SEQ ID NO: 1522424 - RNA, 19 nt, Artificial Sequence
  Description of Artificial Sequence: Synthetic oligonucleotide
  Sense strand starting at position 3661 of SEQ ID NO: 1244915
cuaugaugcccauaguuga

SEQ ID NO: 1522425 - RNA, 19 nt, Artificial Sequence
  Description of Artificial Sequence: Synthetic oligonucleotide
  Antisense strand to SEQ ID NO: 1522424
ucaacuaugggcaucauag

SEQ ID NO: 1522426 - RNA, 19 nt, Artificial Sequence
  Description of Artificial Sequence: Synthetic oligonucleotide
  Sense strand starting at position 3668 of SEQ ID NO: 1244915
gcccauaguugacuaggaa

SEQ ID NO: 1522427 - RNA, 19 nt, Artificial Sequence
  Description of Artificial Sequence: Synthetic oligonucleotide
  Antisense strand to SEQ ID NO: 1522426
uuccuagucaacuaugggc

SEQ ID NO: 1522428 - RNA, 19 nt, Artificial Sequence
  Description of Artificial Sequence: Synthetic oligonucleotide
  Sense strand starting at position 3671 of SEQ ID NO: 1244915
cauaguugacuaggaaguu

SEQ ID NO: 1522429 - RNA, 19 nt, Artificial Sequence
  Description of Artificial Sequence: Synthetic oligonucleotide
  Antisense strand to SEQ ID NO: 1522428
aacuuccuagucaacuaug

SEQ ID NO: 1522430 - RNA, 19 nt, Artificial Sequence
  Description of Artificial Sequence: Synthetic oligonucleotide
  Sense strand starting at position 3672 of SEQ ID NO: 1244915
auaguugacuaggaaguua

SEQ ID NO: 1522431 - RNA, 19 nt, Artificial Sequence
  Description of Artificial Sequence: Synthetic oligonucleotide
  Antisense strand to SEQ ID NO: 1522430
uaacuuccuagucaacuau

SEQ ID NO: 1522432 - RNA, 19 nt, Artificial Sequence
  Description of Artificial Sequence: Synthetic oligonucleotide
  Sense strand starting at position 3703 of SEQ ID NO: 1244915
uaauguauauggccagaga

SEQ ID NO: 1522433 - RNA, 19 nt, Artificial Sequence
  Description of Artificial Sequence: Synthetic oligonucleotide
  Antisense strand to SEQ ID NO: 1522432
ucucuggccauauacauua

SEQ ID NO: 1522434 - RNA, 19 nt, Artificial Sequence
  Description of Artificial Sequence: Synthetic oligonucleotide
  Sense strand starting at position 3706 of SEQ ID NO: 1244915
uguauauggccagagacau

SEQ ID NO: 1522435 - RNA, 19 nt, Artificial Sequence
  Description of Artificial Sequence: Synthetic oligonucleotide
  Antisense strand to SEQ ID NO: 1522434
augucucuggccauauaca

SEQ ID NO: 1522436 - RNA, 19 nt, Artificial Sequence
  Description of Artificial Sequence: Synthetic oligonucleotide
  Sense strand starting at position 138 of SEQ ID NO: 1244916
accugcaagucauuagaaa

SEQ ID NO: 1522437 - RNA, 19 nt, Artificial Sequence
  Description of Artificial Sequence: Synthetic oligonucleotide
  Antisense strand to SEQ ID NO: 1522436
uuucuaaugacuugcaggu

SEQ ID NO: 1522438 - RNA, 19 nt, Artificial Sequence
  Description of Artificial Sequence: Synthetic oligonucleotide
  Sense strand starting at position 139 of SEQ ID NO: 1244916
ccugcaagucauuagaaac

SEQ ID NO: 1522439 - RNA, 19 nt, Artificial Sequence
  Description of Artificial Sequence: Synthetic oligonucleotide
  Antisense strand to SEQ ID NO: 1522438
guuucuaaugacuugcagg

SEQ ID NO: 1522440 - RNA, 19 nt, Artificial Sequence
  Description of Artificial Sequence: Synthetic oligonucleotide
  Sense strand starting at position 362 of SEQ ID NO: 1244916
cugaaauaucacggcacau

SEQ ID NO: 1522441 - RNA, 19 nt, Artificial Sequence
  Description of Artificial Sequence: Synthetic oligonucleotide
  Antisense strand to SEQ ID NO: 1522440
augugccgugauauuucag

SEQ ID NO: 1522442 - RNA, 19 nt, Artificial Sequence
  Description of Artificial Sequence: Synthetic oligonucleotide
  Sense strand starting at position 509 of SEQ ID NO: 1244916
gagacauguuugccuacca

SEQ ID NO: 1522443 - RNA, 19 nt, Artificial Sequence
  Description of Artificial Sequence: Synthetic oligonucleotide
  Antisense strand to SEQ ID NO: 1522442
ugguaggcaaacaugucuc

SEQ ID NO: 1522444 - RNA, 19 nt, Artificial Sequence
  Description of Artificial Sequence: Synthetic oligonucleotide
  Sense strand starting at position 986 of SEQ ID NO: 1244916
ggccgauauaugucgucuu

SEQ ID NO: 1522445 - RNA, 19 nt, Artificial Sequence
  Description of Artificial Sequence: Synthetic oligonucleotide
  Antisense strand to SEQ ID NO: 1522444
aagacgacauauaucggcc

SEQ ID NO: 1522446 - RNA, 19 nt, Artificial Sequence
  Description of Artificial Sequence: Synthetic oligonucleotide
  Sense strand starting at position 999 of SEQ ID NO: 1244916
cgucuuaacgcugagacau

SEQ ID NO: 1522447 - RNA, 19 nt, Artificial Sequence
  Description of Artificial Sequence: Synthetic oligonucleotide
  Antisense strand to SEQ ID NO: 1522446
augucucagcguuaagacg

SEQ ID NO: 1522448 - RNA, 19 nt, Artificial Sequence
  Description of Artificial Sequence: Synthetic oligonucleotide
  Sense strand starting at position 1052 of SEQ ID NO: 1244916
uguguccuuccaugagaug

SEQ ID NO: 1522449 - RNA, 19 nt, Artificial Sequence
  Description of Artificial Sequence: Synthetic oligonucleotide
  Antisense strand to SEQ ID NO: 1522448
caucucauggaaggacaca

SEQ ID NO: 1522450 - RNA, 19 nt, Artificial Sequence
  Description of Artificial Sequence: Synthetic oligonucleotide
  Sense strand starting at position 1053 of SEQ ID NO: 1244916
guguccuuccaugagaugu

SEQ ID NO: 1522451 - RNA, 19 nt, Artificial Sequence
  Description of Artificial Sequence: Synthetic oligonucleotide
  Antisense strand to SEQ ID NO: 1522450
acaucucauggaaggacac

SEQ ID NO: 1522452 - RNA, 19 nt, Artificial Sequence
  Description of Artificial Sequence: Synthetic oligonucleotide
  Sense strand starting at position 1063 of SEQ ID NO: 1244916
augagauguuccuuguaca

SEQ ID NO: 1522453 - RNA, 19 nt, Artificial Sequence
  Description of Artificial Sequence: Synthetic oligonucleotide
  Antisense strand to SEQ ID NO: 1522452
uguacaaggaacaucucau

SEQ ID NO: 1522454 - RNA, 19 nt, Artificial Sequence
  Description of Artificial Sequence: Synthetic oligonucleotide
  Sense strand starting at position 1064 of SEQ ID NO: 1244916
ugagauguuccuuguacau

SEQ ID NO: 1522455 - RNA, 19 nt, Artificial Sequence
  Description of Artificial Sequence: Synthetic oligonucleotide
  Antisense strand to SEQ ID NO: 1522454
auguacaaggaacaucuca

SEQ ID NO: 1522456 - RNA, 19 nt, Artificial Sequence
  Description of Artificial Sequence: Synthetic oligonucleotide
  Sense strand starting at position 1085 of SEQ ID NO: 1244916
gugucacauccaugggaca

SEQ ID NO: 1522457 - RNA, 19 nt, Artificial Sequence
  Description of Artificial Sequence: Synthetic oligonucleotide
  Antisense strand to SEQ ID NO: 1522456
ugucccauggaugugacac

SEQ ID NO: 1522458 - RNA, 19 nt, Artificial Sequence
  Description of Artificial Sequence: Synthetic oligonucleotide
  Sense strand starting at position 1086 of SEQ ID NO: 1244916
ugucacauccaugggacau

SEQ ID NO: 1522459 - RNA, 19 nt, Artificial Sequence
  Description of Artificial Sequence: Synthetic oligonucleotide
  Antisense strand to SEQ ID NO: 1522458
augucccauggaugugaca

SEQ ID NO: 1522460 - RNA, 19 nt, Artificial Sequence
  Description of Artificial Sequence: Synthetic oligonucleotide
  Sense strand starting at position 1087 of SEQ ID NO: 1244916
gucacauccaugggacaug

SEQ ID NO: 1522461 - RNA, 19 nt, Artificial Sequence
  Description of Artificial Sequence: Synthetic oligonucleotide
  Antisense strand to SEQ ID NO: 1522460
caugucccauggaugugac

SEQ ID NO: 1522462 - RNA, 19 nt, Artificial Sequence
  Description of Artificial Sequence: Synthetic oligonucleotide
  Sense strand starting at position 1287 of SEQ ID NO: 1244916
gcagcaacauuugaaauca

SEQ ID NO: 1522463 - RNA, 19 nt, Artificial Sequence
  Description of Artificial Sequence: Synthetic oligonucleotide
  Antisense strand to SEQ ID NO: 1522462
ugauuucaaauguugcugc

SEQ ID NO: 1522464 - RNA, 19 nt, Artificial Sequence
  Description of Artificial Sequence: Synthetic oligonucleotide
  Sense strand starting at position 2332 of SEQ ID NO: 1244916
ccuagcaggcuuuacuuaa

SEQ ID NO: 1522465 - RNA, 19 nt, Artificial Sequence
  Description of Artificial Sequence: Synthetic oligonucleotide
  Antisense strand to SEQ ID NO: 1522464
uuaaguaaagccugcuagg

SEQ ID NO: 1522466 - RNA, 19 nt, Artificial Sequence
  Description of Artificial Sequence: Synthetic oligonucleotide
  Sense strand starting at position 2533 of SEQ ID NO: 1244916
gcaagcucugcagaacuca

SEQ ID NO: 1522467 - RNA, 19 nt, Artificial Sequence
  Description of Artificial Sequence: Synthetic oligonucleotide
  Antisense strand to SEQ ID NO: 1522466
ugaguucugcagagcuugc

SEQ ID NO: 1522468 - RNA, 19 nt, Artificial Sequence
  Description of Artificial Sequence: Synthetic oligonucleotide
  Sense strand starting at position 2588 of SEQ ID NO: 1244916
ggacuaaguccaggaccuu

SEQ ID NO: 1522469 - RNA, 19 nt, Artificial Sequence
  Description of Artificial Sequence: Synthetic oligonucleotide
  Antisense strand to SEQ ID NO: 1522468
aagguccuggacuuagucc

SEQ ID NO: 1522470 - RNA, 19 nt, Artificial Sequence
  Description of Artificial Sequence: Synthetic oligonucleotide
  Sense strand starting at position 2774 of SEQ ID NO: 1244916
gguaaacauguaggauguu

SEQ ID NO: 1522471 - RNA, 19 nt, Artificial Sequence
  Description of Artificial Sequence: Synthetic oligonucleotide
  Antisense strand to SEQ ID NO: 1522470
aacauccuacauguuuacc

SEQ ID NO: 1522472 - RNA, 19 nt, Artificial Sequence
  Description of Artificial Sequence: Synthetic oligonucleotide
  Sense strand starting at position 2784 of SEQ ID NO: 1244916
uaggauguuugaucccaac

SEQ ID NO: 1522473 - RNA, 19 nt, Artificial Sequence
  Description of Artificial Sequence: Synthetic oligonucleotide
  Antisense strand to SEQ ID NO: 1522472
guugggaucaaacauccua

SEQ ID NO: 1522474 - RNA, 19 nt, Artificial Sequence
  Description of Artificial Sequence: Synthetic oligonucleotide
  Sense strand starting at position 2878 of SEQ ID NO: 1244916
gaugucuguaagggaaagu

SEQ ID NO: 1522475 - RNA, 19 nt, Artificial Sequence
  Description of Artificial Sequence: Synthetic oligonucleotide
  Antisense strand to SEQ ID NO: 1522474
acuuucccuuacagacauc

SEQ ID NO: 1522476 - RNA, 19 nt, Artificial Sequence
  Description of Artificial Sequence: Synthetic oligonucleotide
  Sense strand starting at position 2950 of SEQ ID NO: 1244916
uggaguugccuugaaacca

SEQ ID NO: 1522477 - RNA, 19 nt, Artificial Sequence
  Description of Artificial Sequence: Synthetic oligonucleotide
  Antisense strand to SEQ ID NO: 1522476
ugguuucaaggcaacucca

SEQ ID NO: 1522478 - RNA, 19 nt, Artificial Sequence
  Description of Artificial Sequence: Synthetic oligonucleotide
  Sense strand starting at position 3030 of SEQ ID NO: 1244916
guggauccuacgugggaua

SEQ ID NO: 1522479 - RNA, 19 nt, Artificial Sequence
  Description of Artificial Sequence: Synthetic oligonucleotide
  Antisense strand to SEQ ID NO: 1522478
uaucccacguaggauccac

SEQ ID NO: 1522480 - RNA, 19 nt, Artificial Sequence
  Description of Artificial Sequence: Synthetic oligonucleotide
  Sense strand starting at position 3240 of SEQ ID NO: 1244916
ggcauauaauaggccugau

SEQ ID NO: 1522481 - RNA, 19 nt, Artificial Sequence
  Description of Artificial Sequence: Synthetic oligonucleotide
  Antisense strand to SEQ ID NO: 1522480
aucaggccuauuauaugcc

SEQ ID NO: 1522482 - RNA, 19 nt, Artificial Sequence
  Description of Artificial Sequence: Synthetic oligonucleotide
  Sense strand starting at position 3243 of SEQ ID NO: 1244916
auauaauaggccugauaca

SEQ ID NO: 1522483 - RNA, 19 nt, Artificial Sequence
  Description of Artificial Sequence: Synthetic oligonucleotide
  Antisense strand to SEQ ID NO: 1522482
uguaucaggccuauuauau

SEQ ID NO: 1522484 - RNA, 19 nt, Artificial Sequence
  Description of Artificial Sequence: Synthetic oligonucleotide
  Sense strand starting at position 3255 of SEQ ID NO: 1244916
ugauacauguugguuguaa

SEQ ID NO: 1522485 - RNA, 19 nt, Artificial Sequence
  Description of Artificial Sequence: Synthetic oligonucleotide
  Antisense strand to SEQ ID NO: 1522484
uuacaaccaacauguauca

SEQ ID NO: 1522486 - RNA, 19 nt, Artificial Sequence
  Description of Artificial Sequence: Synthetic oligonucleotide
  Sense strand starting at position 3256 of SEQ ID NO: 1244916
gauacauguugguuguaaa

SEQ ID NO: 1522487 - RNA, 19 nt, Artificial Sequence
  Description of Artificial Sequence: Synthetic oligonucleotide
  Antisense strand to SEQ ID NO: 1522486
uuuacaaccaacauguauc

SEQ ID NO: 1522488 - RNA, 19 nt, Artificial Sequence
  Description of Artificial Sequence: Synthetic oligonucleotide
  Sense strand starting at position 3257 of SEQ ID NO: 1244916
auacauguugguuguaaag

SEQ ID NO: 1522489 - RNA, 19 nt, Artificial Sequence
  Description of Artificial Sequence: Synthetic oligonucleotide
  Antisense strand to SEQ ID NO: 1522488
cuuuacaaccaacauguau

SEQ ID NO: 1522490 - RNA, 19 nt, Artificial Sequence
  Description of Artificial Sequence: Synthetic oligonucleotide
  Sense strand starting at position 3263 of SEQ ID NO: 1244916
guugguuguaaagaagucu

SEQ ID NO: 1522491 - RNA, 19 nt, Artificial Sequence
  Description of Artificial Sequence: Synthetic oligonucleotide
  Antisense strand to SEQ ID NO: 1522490
agacuucuuuacaaccaac

SEQ ID NO: 1522492 - RNA, 19 nt, Artificial Sequence
  Description of Artificial Sequence: Synthetic oligonucleotide
  Sense strand starting at position 3284 of SEQ ID NO: 1244916
ucagucuaauccucauugu

SEQ ID NO: 1522493 - RNA, 19 nt, Artificial Sequence
  Description of Artificial Sequence: Synthetic oligonucleotide
  Antisense strand to SEQ ID NO: 1522492
acaaugaggauuagacuga

SEQ ID NO: 1522494 - RNA, 19 nt, Artificial Sequence
  Description of Artificial Sequence: Synthetic oligonucleotide
  Sense strand starting at position 3295 of SEQ ID NO: 1244916
cucauuguuguguagauga

SEQ ID NO: 1522495 - RNA, 19 nt, Artificial Sequence
  Description of Artificial Sequence: Synthetic oligonucleotide
  Antisense strand to SEQ ID NO: 1522494
ucaucuacacaacaaugag

SEQ ID NO: 1522496 - RNA, 19 nt, Artificial Sequence
  Description of Artificial Sequence: Synthetic oligonucleotide
  Sense strand starting at position 3297 of SEQ ID NO: 1244916
cauuguuguguagaugauc

SEQ ID NO: 1522497 - RNA, 19 nt, Artificial Sequence
  Description of Artificial Sequence: Synthetic oligonucleotide
  Antisense strand to SEQ ID NO: 1522496
gaucaucuacacaacaaug

SEQ ID NO: 1522498 - RNA, 19 nt, Artificial Sequence
  Description of Artificial Sequence: Synthetic oligonucleotide
  Sense strand starting at position 3302 of SEQ ID NO: 1244916
uuguguagaugaucucuuu

SEQ ID NO: 1522499 - RNA, 19 nt, Artificial Sequence
  Description of Artificial Sequence: Synthetic oligonucleotide
  Antisense strand to SEQ ID NO: 1522498
aaagagaucaucuacacaa

SEQ ID NO: 1522500 - RNA, 19 nt, Artificial Sequence
  Description of Artificial Sequence: Synthetic oligonucleotide
  Sense strand starting at position 3334 of SEQ ID NO: 1244916
uuaagauaucauugguguu

SEQ ID NO: 1522501 - RNA, 19 nt, Artificial Sequence
  Description of Artificial Sequence: Synthetic oligonucleotide
  Antisense strand to SEQ ID NO: 1522500
aacaccaaugauaucuuaa

SEQ ID NO: 1522502 - RNA, 19 nt, Artificial Sequence
  Description of Artificial Sequence: Synthetic oligonucleotide
  Sense strand starting at position 3363 of SEQ ID NO: 1244916
gucacaauguaucuagaug

SEQ ID NO: 1522503 - RNA, 19 nt, Artificial Sequence
  Description of Artificial Sequence: Synthetic oligonucleotide
  Antisense strand to SEQ ID NO: 1522502
caucuagauacauugugac

SEQ ID NO: 1522504 - RNA, 19 nt, Artificial Sequence
  Description of Artificial Sequence: Synthetic oligonucleotide
  Sense strand starting at position 3413 of SEQ ID NO: 1244916
uuguacuuccuguauguau

SEQ ID NO: 1522505 - RNA, 19 nt, Artificial Sequence
  Description of Artificial Sequence: Synthetic oligonucleotide
  Antisense strand to SEQ ID NO: 1522504
auacauacaggaaguacaa

SEQ ID NO: 1522506 - RNA, 19 nt, Artificial Sequence
  Description of Artificial Sequence: Synthetic oligonucleotide
  Sense strand starting at position 3526 of SEQ ID NO: 1244916
gccaacucugauuaggagu

SEQ ID NO: 1522507 - RNA, 19 nt, Artificial Sequence
  Description of Artificial Sequence: Synthetic oligonucleotide
  Antisense strand to SEQ ID NO: 1522506
acuccuaaucagaguuggc

SEQ ID NO: 1522508 - RNA, 19 nt, Artificial Sequence
  Description of Artificial Sequence: Synthetic oligonucleotide
  Sense strand starting at position 3532 of SEQ ID NO: 1244916
ucugauuaggaguguucua

SEQ ID NO: 1522509 - RNA, 19 nt, Artificial Sequence
  Description of Artificial Sequence: Synthetic oligonucleotide
  Antisense strand to SEQ ID NO: 1522508
uagaacacuccuaaucaga

SEQ ID NO: 1522510 - RNA, 19 nt, Artificial Sequence
  Description of Artificial Sequence: Synthetic oligonucleotide
  Sense strand starting at position 3539 of SEQ ID NO: 1244916
aggaguguucuagaccuuu

SEQ ID NO: 1522511 - RNA, 19 nt, Artificial Sequence
  Description of Artificial Sequence: Synthetic oligonucleotide
  Antisense strand to SEQ ID NO: 1522510
aaaggucuagaacacuccu

SEQ ID NO: 1522512 - RNA, 19 nt, Artificial Sequence
  Description of Artificial Sequence: Synthetic oligonucleotide
  Sense strand starting at position 3582 of SEQ ID NO: 1244916
accugucuccuguaucuuu

SEQ ID NO: 1522513 - RNA, 19 nt, Artificial Sequence
  Description of Artificial Sequence: Synthetic oligonucleotide
  Antisense strand to SEQ ID NO: 1522512
aaagauacaggagacaggu

SEQ ID NO: 1522514 - RNA, 19 nt, Artificial Sequence
  Description of Artificial Sequence: Synthetic oligonucleotide
  Sense strand starting at position 3608 of SEQ ID NO: 1244916
uugugucuuggugauacau

SEQ ID NO: 1522515 - RNA, 19 nt, Artificial Sequence
  Description of Artificial Sequence: Synthetic oligonucleotide
  Antisense strand to SEQ ID NO: 1522514
auguaucaccaagacacaa

SEQ ID NO: 1522516 - RNA, 19 nt, Artificial Sequence
  Description of Artificial Sequence: Synthetic oligonucleotide
  Sense strand starting at position 92 of SEQ ID NO: 1244917
cuaggagauuaucuguaaa

SEQ ID NO: 1522517 - RNA, 19 nt, Artificial Sequence
  Description of Artificial Sequence: Synthetic oligonucleotide
  Antisense strand to SEQ ID NO: 1522516
uuuacagauaaucuccuag

SEQ ID NO: 1522518 - RNA, 19 nt, Artificial Sequence
  Description of Artificial Sequence: Synthetic oligonucleotide
  Sense strand starting at position 94 of SEQ ID NO: 1244917
aggagauuaucuguaaacg

SEQ ID NO: 1522519 - RNA, 19 nt, Artificial Sequence
  Description of Artificial Sequence: Synthetic oligonucleotide
  Antisense strand to SEQ ID NO: 1522518
cguuuacagauaaucuccu

SEQ ID NO: 1522520 - RNA, 19 nt, Artificial Sequence
  Description of Artificial Sequence: Synthetic oligonucleotide
  Sense strand starting at position 472 of SEQ ID NO: 1244917
agccuaaagaagugaagua

SEQ ID NO: 1522521 - RNA, 19 nt, Artificial Sequence
  Description of Artificial Sequence: Synthetic oligonucleotide
  Antisense strand to SEQ ID NO: 1522520
uacuucacuucuuuaggcu

SEQ ID NO: 1522522 - RNA, 19 nt, Artificial Sequence
  Description of Artificial Sequence: Synthetic oligonucleotide
  Sense strand starting at position 539 of SEQ ID NO: 1244917
gcucuuaaccacugggaaa

SEQ ID NO: 1522523 - RNA, 19 nt, Artificial Sequence
  Description of Artificial Sequence: Synthetic oligonucleotide
  Antisense strand to SEQ ID NO: 1522522
uuucccagugguuaagagc

SEQ ID NO: 1522524 - RNA, 19 nt, Artificial Sequence
  Description of Artificial Sequence: Synthetic oligonucleotide
  Sense strand starting at position 579 of SEQ ID NO: 1244917
aaggaagaggcuuggagua

SEQ ID NO: 1522525 - RNA, 19 nt, Artificial Sequence
  Description of Artificial Sequence: Synthetic oligonucleotide
  Antisense strand to SEQ ID NO: 1522524
uacuccaagccucuuccuu

SEQ ID NO: 1522526 - RNA, 19 nt, Artificial Sequence
  Description of Artificial Sequence: Synthetic oligonucleotide
  Sense strand starting at position 638 of SEQ ID NO: 1244917
aggaguuccugaguaacag

SEQ ID NO: 1522527 - RNA, 19 nt, Artificial Sequence
  Description of Artificial Sequence: Synthetic oligonucleotide
  Antisense strand to SEQ ID NO: 1522526
cuguuacucaggaacuccu

SEQ ID NO: 1522528 - RNA, 19 nt, Artificial Sequence
  Description of Artificial Sequence: Synthetic oligonucleotide
  Sense strand starting at position 639 of SEQ ID NO: 1244917
ggaguuccugaguaacagu

SEQ ID NO: 1522529 - RNA, 19 nt, Artificial Sequence
  Description of Artificial Sequence: Synthetic oligonucleotide
  Antisense strand to SEQ ID NO: 1522528
acuguuacucaggaacucc

SEQ ID NO: 1522530 - RNA, 19 nt, Artificial Sequence
  Description of Artificial Sequence: Synthetic oligonucleotide
  Sense strand starting at position 791 of SEQ ID NO: 1244917
aaaggauaguuggcaauga

SEQ ID NO: 1522531 - RNA, 19 nt, Artificial Sequence
  Description of Artificial Sequence: Synthetic oligonucleotide
  Antisense strand to SEQ ID NO: 1522530
ucauugccaacuauccuuu

SEQ ID NO: 1522532 - RNA, 19 nt, Artificial Sequence
  Description of Artificial Sequence: Synthetic oligonucleotide
  Sense strand starting at position 885 of SEQ ID NO: 1244917
uccuguuugguggaaauca

SEQ ID NO: 1522533 - RNA, 19 nt, Artificial Sequence
  Description of Artificial Sequence: Synthetic oligonucleotide
  Antisense strand to SEQ ID NO: 1522532
ugauuuccaccaaacagga

SEQ ID NO: 1522534 - RNA, 19 nt, Artificial Sequence
  Description of Artificial Sequence: Synthetic oligonucleotide
  Sense strand starting at position 999 of SEQ ID NO: 1244917
agugauaaaugaggaauuu

SEQ ID NO: 1522535 - RNA, 19 nt, Artificial Sequence
  Description of Artificial Sequence: Synthetic oligonucleotide
  Antisense strand to SEQ ID NO: 1522534
aaauuccucauuuaucacu

SEQ ID NO: 1522536 - RNA, 19 nt, Artificial Sequence
  Description of Artificial Sequence: Synthetic oligonucleotide
  Sense strand starting at position 1222 of SEQ ID NO: 1244917
uuaggaauaauguguagaa

SEQ ID NO: 1522537 - RNA, 19 nt, Artificial Sequence
  Description of Artificial Sequence: Synthetic oligonucleotide
  Antisense strand to SEQ ID NO: 1522536
uucuacacauuauuccuaa

SEQ ID NO: 1522538 - RNA, 19 nt, Artificial Sequence
  Description of Artificial Sequence: Synthetic oligonucleotide
  Sense strand starting at position 1223 of SEQ ID NO: 1244917
uaggaauaauguguagaau

SEQ ID NO: 1522539 - RNA, 19 nt, Artificial Sequence
  Description of Artificial Sequence: Synthetic oligonucleotide
  Antisense strand to SEQ ID NO: 1522538
auucuacacauuauuccua

SEQ ID NO: 1522540 - RNA, 19 nt, Artificial Sequence
  Description of Artificial Sequence: Synthetic oligonucleotide
  Sense strand starting at position 1231 of SEQ ID NO: 1244917
auguguagaauguacacau

SEQ ID NO: 1522541 - RNA, 19 nt, Artificial Sequence
  Description of Artificial Sequence: Synthetic oligonucleotide
  Antisense strand to SEQ ID NO: 1522540
auguguacauucuacacau

SEQ ID NO: 1522542 - RNA, 19 nt, Artificial Sequence
  Description of Artificial Sequence: Synthetic oligonucleotide
  Sense strand starting at position 1241 of SEQ ID NO: 1244917
uguacacaucuaugaaagu

SEQ ID NO: 1522543 - RNA, 19 nt, Artificial Sequence
  Description of Artificial Sequence: Synthetic oligonucleotide
  Antisense strand to SEQ ID NO: 1522542
acuuucauagauguguaca

SEQ ID NO: 1522544 - RNA, 19 nt, Artificial Sequence
  Description of Artificial Sequence: Synthetic oligonucleotide
  Sense strand starting at position 1438 of SEQ ID NO: 1244917
agguauacuguuuaaacua

SEQ ID NO: 1522545 - RNA, 19 nt, Artificial Sequence
  Description of Artificial Sequence: Synthetic oligonucleotide
  Antisense strand to SEQ ID NO: 1522544
uaguuuaaacaguauaccu

SEQ ID NO: 1522546 - RNA, 19 nt, Artificial Sequence
  Description of Artificial Sequence: Synthetic oligonucleotide
  Sense strand starting at position 1676 of SEQ ID NO: 1244917
augguuguucaggacaguu

SEQ ID NO: 1522547 - RNA, 19 nt, Artificial Sequence
  Description of Artificial Sequence: Synthetic oligonucleotide
  Antisense strand to SEQ ID NO: 1522546
aacuguccugaacaaccau

SEQ ID NO: 1522548 - RNA, 19 nt, Artificial Sequence
  Description of Artificial Sequence: Synthetic oligonucleotide
  Sense strand starting at position 1821 of SEQ ID NO: 1244917
ccaguaggauaucuauuau

SEQ ID NO: 1522549 - RNA, 19 nt, Artificial Sequence
  Description of Artificial Sequence: Synthetic oligonucleotide
  Antisense strand to SEQ ID NO: 1522548
auaauagauauccuacugg

SEQ ID NO: 1522550 - RNA, 19 nt, Artificial Sequence
  Description of Artificial Sequence: Synthetic oligonucleotide
  Sense strand starting at position 1846 of SEQ ID NO: 1244917
auuauagacuuggcauauu

SEQ ID NO: 1522551 - RNA, 19 nt, Artificial Sequence
  Description of Artificial Sequence: Synthetic oligonucleotide
  Antisense strand to SEQ ID NO: 1522550
aauaugccaagucuauaau

SEQ ID NO: 1522552 - RNA, 19 nt, Artificial Sequence
  Description of Artificial Sequence: Synthetic oligonucleotide
  Sense strand starting at position 1893 of SEQ ID NO: 1244917
gucauauaauggcuaugau

SEQ ID NO: 1522553 - RNA, 19 nt, Artificial Sequence
  Description of Artificial Sequence: Synthetic oligonucleotide
  Antisense strand to SEQ ID NO: 1522552
aucauagccauuauaugac

SEQ ID NO: 1522554 - RNA, 19 nt, Artificial Sequence
  Description of Artificial Sequence: Synthetic oligonucleotide
  Sense strand starting at position 1896 of SEQ ID NO: 1244917
auauaauggcuaugaugau

SEQ ID NO: 1522555 - RNA, 19 nt, Artificial Sequence
  Description of Artificial Sequence: Synthetic oligonucleotide
  Antisense strand to SEQ ID NO: 1522554
aucaucauagccauuauau

SEQ ID NO: 1522556 - RNA, 19 nt, Artificial Sequence
  Description of Artificial Sequence: Synthetic oligonucleotide
  Sense strand starting at position 2088 of SEQ ID NO: 1244917
cuaguauaaguuugaugau

SEQ ID NO: 1522557 - RNA, 19 nt, Artificial Sequence
  Description of Artificial Sequence: Synthetic oligonucleotide
  Antisense strand to SEQ ID NO: 1522556
aucaucaaacuuauacuag

SEQ ID NO: 1522558 - RNA, 19 nt, Artificial Sequence
  Description of Artificial Sequence: Synthetic oligonucleotide
  Sense strand starting at position 2095 of SEQ ID NO: 1244917
aaguuugaugaucauguua

SEQ ID NO: 1522559 - RNA, 19 nt, Artificial Sequence
  Description of Artificial Sequence: Synthetic oligonucleotide
  Antisense strand to SEQ ID NO: 1522558
uaacaugaucaucaaacuu

SEQ ID NO: 1522560 - RNA, 19 nt, Artificial Sequence
  Description of Artificial Sequence: Synthetic oligonucleotide
  Sense strand starting at position 2103 of SEQ ID NO: 1244917
ugaucauguuaagucaaac

SEQ ID NO: 1522561 - RNA, 19 nt, Artificial Sequence
  Description of Artificial Sequence: Synthetic oligonucleotide
  Antisense strand to SEQ ID NO: 1522560
guuugacuuaacaugauca

SEQ ID NO: 1522562 - RNA, 19 nt, Artificial Sequence
  Description of Artificial Sequence: Synthetic oligonucleotide
  Sense strand starting at position 2471 of SEQ ID NO: 1244917
ccacuugaucucuaggguu

SEQ ID NO: 1522563 - RNA, 19 nt, Artificial Sequence
  Description of Artificial Sequence: Synthetic oligonucleotide
  Antisense strand to SEQ ID NO: 1522562
aacccuagagaucaagugg

SEQ ID NO: 1522564 - RNA, 19 nt, Artificial Sequence
  Description of Artificial Sequence: Synthetic oligonucleotide
  Sense strand starting at position 2523 of SEQ ID NO: 1244917
cauuauuugugcuuggcau

SEQ ID NO: 1522565 - RNA, 19 nt, Artificial Sequence
  Description of Artificial Sequence: Synthetic oligonucleotide
  Antisense strand to SEQ ID NO: 1522564
augccaagcacaaauaaug

SEQ ID NO: 1522566 - RNA, 19 nt, Artificial Sequence
  Description of Artificial Sequence: Synthetic oligonucleotide
  Sense strand starting at position 2524 of SEQ ID NO: 1244917
auuauuugugcuuggcauu

SEQ ID NO: 1522567 - RNA, 19 nt, Artificial Sequence
  Description of Artificial Sequence: Synthetic oligonucleotide
  Antisense strand to SEQ ID NO: 1522566
aaugccaagcacaaauaau

SEQ ID NO: 1522568 - RNA, 19 nt, Artificial Sequence
  Description of Artificial Sequence: Synthetic oligonucleotide
  Sense strand starting at position 2622 of SEQ ID NO: 1244917
auugaaucucuuggauuga

SEQ ID NO: 1522569 - RNA, 19 nt, Artificial Sequence
  Description of Artificial Sequence: Synthetic oligonucleotide
  Antisense strand to SEQ ID NO: 1522568
ucaauccaagagauucaau

SEQ ID NO: 1522570 - RNA, 19 nt, Artificial Sequence
  Description of Artificial Sequence: Synthetic oligonucleotide
  Sense strand starting at position 2632 of SEQ ID NO: 1244917
uuggauugaucaccuguaa

SEQ ID NO: 1522571 - RNA, 19 nt, Artificial Sequence
  Description of Artificial Sequence: Synthetic oligonucleotide
  Antisense strand to SEQ ID NO: 1522570
uuacaggugaucaauccaa

SEQ ID NO: 1522572 - RNA, 19 nt, Artificial Sequence
  Description of Artificial Sequence: Synthetic oligonucleotide
  Sense strand starting at position 2937 of SEQ ID NO: 1244917
uccucaacucuguaguaac

SEQ ID NO: 1522573 - RNA, 19 nt, Artificial Sequence
  Description of Artificial Sequence: Synthetic oligonucleotide
  Antisense strand to SEQ ID NO: 1522572
guuacuacagaguugagga

SEQ ID NO: 1522574 - RNA, 19 nt, Artificial Sequence
  Description of Artificial Sequence: Synthetic oligonucleotide
  Sense strand starting at position 2993 of SEQ ID NO: 1244917
gggcuuuguauguauggga

SEQ ID NO: 1522575 - RNA, 19 nt, Artificial Sequence
  Description of Artificial Sequence: Synthetic oligonucleotide
  Antisense strand to SEQ ID NO: 1522574
ucccauacauacaaagccc

SEQ ID NO: 1522576 - RNA, 19 nt, Artificial Sequence
  Description of Artificial Sequence: Synthetic oligonucleotide
  Sense strand starting at position 2997 of SEQ ID NO: 1244917
uuuguauguaugggaugga

SEQ ID NO: 1522577 - RNA, 19 nt, Artificial Sequence
  Description of Artificial Sequence: Synthetic oligonucleotide
  Antisense strand to SEQ ID NO: 1522576
uccaucccauacauacaaa

SEQ ID NO: 1522578 - RNA, 19 nt, Artificial Sequence
  Description of Artificial Sequence: Synthetic oligonucleotide
  Sense strand starting at position 3204 of SEQ ID NO: 1244917
ccgcauucugaccauaacu

SEQ ID NO: 1522579 - RNA, 19 nt, Artificial Sequence
  Description of Artificial Sequence: Synthetic oligonucleotide
  Antisense strand to SEQ ID NO: 1522578
aguuauggucagaaugcgg

SEQ ID NO: 1522580 - RNA, 19 nt, Artificial Sequence
  Description of Artificial Sequence: Synthetic oligonucleotide
  Sense strand starting at position 3254 of SEQ ID NO: 1244917
guucuugauccucacugaa

SEQ ID NO: 1522581 - RNA, 19 nt, Artificial Sequence
  Description of Artificial Sequence: Synthetic oligonucleotide
  Antisense strand to SEQ ID NO: 1522580
uucagugaggaucaagaac

SEQ ID NO: 1522582 - RNA, 19 nt, Artificial Sequence
  Description of Artificial Sequence: Synthetic oligonucleotide
  Sense strand starting at position 3653 of SEQ ID NO: 1244917
gggauuauagcaggaagca

SEQ ID NO: 1522583 - RNA, 19 nt, Artificial Sequence
  Description of Artificial Sequence: Synthetic oligonucleotide
  Antisense strand to SEQ ID NO: 1522582
ugcuuccugcuauaauccc

SEQ ID NO: 1522584 - RNA, 19 nt, Artificial Sequence
  Description of Artificial Sequence: Synthetic oligonucleotide
  Sense strand starting at position 3758 of SEQ ID NO: 1244917
cagugagaauuugacaaga

SEQ ID NO: 1522585 - RNA, 19 nt, Artificial Sequence
  Description of Artificial Sequence: Synthetic oligonucleotide
  Antisense strand to SEQ ID NO: 1522584
ucuugucaaauucucacug

SEQ ID NO: 1522586 - RNA, 19 nt, Artificial Sequence
  Description of Artificial Sequence: Synthetic oligonucleotide
  Sense strand starting at position 3760 of SEQ ID NO: 1244917
gugagaauuugacaagaug

SEQ ID NO: 1522587 - RNA, 19 nt, Artificial Sequence
  Description of Artificial Sequence: Synthetic oligonucleotide
  Antisense strand to SEQ ID NO: 1522586
caucuugucaaauucucac

SEQ ID NO: 1522588 - RNA, 19 nt, Artificial Sequence
  Description of Artificial Sequence: Synthetic oligonucleotide
  Sense strand starting at position 3846 of SEQ ID NO: 1244917
auguccuggcuuuaaauga

SEQ ID NO: 1522589 - RNA, 19 nt, Artificial Sequence
  Description of Artificial Sequence: Synthetic oligonucleotide
  Antisense strand to SEQ ID NO: 1522588
ucauuuaaagccaggacau

SEQ ID NO: 1522590 - RNA, 19 nt, Artificial Sequence
  Description of Artificial Sequence: Synthetic oligonucleotide
  Sense strand starting at position 3878 of SEQ ID NO: 1244917
cucuguccucuggacuaua

SEQ ID NO: 1522591 - RNA, 19 nt, Artificial Sequence
  Description of Artificial Sequence: Synthetic oligonucleotide
  Antisense strand to SEQ ID NO: 1522590
uauaguccagaggacagag

SEQ ID NO: 1522592 - RNA, 19 nt, Artificial Sequence
  Description of Artificial Sequence: Synthetic oligonucleotide
  Sense strand starting at position 3881 of SEQ ID NO: 1244917
uguccucuggacuauaagu

SEQ ID NO: 1522593 - RNA, 19 nt, Artificial Sequence
  Description of Artificial Sequence: Synthetic oligonucleotide
  Antisense strand to SEQ ID NO: 1522592
acuuauaguccagaggaca

SEQ ID NO: 1522594 - RNA, 19 nt, Artificial Sequence
  Description of Artificial Sequence: Synthetic oligonucleotide
  Sense strand starting at position 3932 of SEQ ID NO: 1244917
ugagaagaaucuguuacuc

SEQ ID NO: 1522595 - RNA, 19 nt, Artificial Sequence
  Description of Artificial Sequence: Synthetic oligonucleotide
  Antisense strand to SEQ ID NO: 1522594
gaguaacagauucuucuca

SEQ ID NO: 1522596 - RNA, 19 nt, Artificial Sequence
  Description of Artificial Sequence: Synthetic oligonucleotide
  Sense strand starting at position 54 of SEQ ID NO: 1244918
acgggaagcuuucuauaaa

SEQ ID NO: 1522597 - RNA, 19 nt, Artificial Sequence
  Description of Artificial Sequence: Synthetic oligonucleotide
  Antisense strand to SEQ ID NO: 1522596
uuuauagaaagcuucccgu

SEQ ID NO: 1522598 - RNA, 19 nt, Artificial Sequence
  Description of Artificial Sequence: Synthetic oligonucleotide
  Sense strand starting at position 219 of SEQ ID NO: 1244918
ggcuguguccugcagagga

SEQ ID NO: 1522599 - RNA, 19 nt, Artificial Sequence
  Description of Artificial Sequence: Synthetic oligonucleotide
  Antisense strand to SEQ ID NO: 1522598
uccucugcaggacacagcc

SEQ ID NO: 1522600 - RNA, 19 nt, Artificial Sequence
  Description of Artificial Sequence: Synthetic oligonucleotide
  Sense strand starting at position 477 of SEQ ID NO: 1244918
uggagagguugaggaauuu

SEQ ID NO: 1522601 - RNA, 19 nt, Artificial Sequence
  Description of Artificial Sequence: Synthetic oligonucleotide
  Antisense strand to SEQ ID NO: 1522600
aaauuccucaaccucucca

SEQ ID NO: 1522602 - RNA, 19 nt, Artificial Sequence
  Description of Artificial Sequence: Synthetic oligonucleotide
  Sense strand starting at position 759 of SEQ ID NO: 1244918
uccuguauuccugaaugcu

SEQ ID NO: 1522603 - RNA, 19 nt, Artificial Sequence
  Description of Artificial Sequence: Synthetic oligonucleotide
  Antisense strand to SEQ ID NO: 1522602
agcauucaggaauacagga

SEQ ID NO: 1522604 - RNA, 19 nt, Artificial Sequence
  Description of Artificial Sequence: Synthetic oligonucleotide
  Sense strand starting at position 958 of SEQ ID NO: 1244918
ucagaucucuuucuuuguu

SEQ ID NO: 1522605 - RNA, 19 nt, Artificial Sequence
  Description of Artificial Sequence: Synthetic oligonucleotide
  Antisense strand to SEQ ID NO: 1522604
aacaaagaaagagaucuga

SEQ ID NO: 1522606 - RNA, 19 nt, Artificial Sequence
  Description of Artificial Sequence: Synthetic oligonucleotide
  Sense strand starting at position 966 of SEQ ID NO: 1244918
cuuucuuuguucccaagga

SEQ ID NO: 1522607 - RNA, 19 nt, Artificial Sequence
  Description of Artificial Sequence: Synthetic oligonucleotide
  Antisense strand to SEQ ID NO: 1522606
uccuugggaacaaagaaag

SEQ ID NO: 1522608 - RNA, 19 nt, Artificial Sequence
  Description of Artificial Sequence: Synthetic oligonucleotide
  Sense strand starting at position 1280 of SEQ ID NO: 1244918
aguccugucuaccucugaa

SEQ ID NO: 1522609 - RNA, 19 nt, Artificial Sequence
  Description of Artificial Sequence: Synthetic oligonucleotide
  Antisense strand to SEQ ID NO: 1522608
uucagagguagacaggacu

SEQ ID NO: 1522610 - RNA, 19 nt, Artificial Sequence
  Description of Artificial Sequence: Synthetic oligonucleotide
  Sense strand starting at position 1426 of SEQ ID NO: 1244918
cagguuuaguucccuugaa

SEQ ID NO: 1522611 - RNA, 19 nt, Artificial Sequence
  Description of Artificial Sequence: Synthetic oligonucleotide
  Antisense strand to SEQ ID NO: 1522610
uucaagggaacuaaaccug

SEQ ID NO: 1522612 - RNA, 19 nt, Artificial Sequence
  Description of Artificial Sequence: Synthetic oligonucleotide
  Sense strand starting at position 1427 of SEQ ID NO: 1244918
agguuuaguucccuugaac

SEQ ID NO: 1522613 - RNA, 19 nt, Artificial Sequence
  Description of Artificial Sequence: Synthetic oligonucleotide
  Antisense strand to SEQ ID NO: 1522612
guucaagggaacuaaaccu

SEQ ID NO: 1522614 - RNA, 19 nt, Artificial Sequence
  Description of Artificial Sequence: Synthetic oligonucleotide
  Sense strand starting at position 1460 of SEQ ID NO: 1244918
gucugugauccugagacca

SEQ ID NO: 1522615 - RNA, 19 nt, Artificial Sequence
  Description of Artificial Sequence: Synthetic oligonucleotide
  Antisense strand to SEQ ID NO: 1522614
uggucucaggaucacagac

SEQ ID NO: 1522616 - RNA, 19 nt, Artificial Sequence
  Description of Artificial Sequence: Synthetic oligonucleotide
  Sense strand starting at position 1718 of SEQ ID NO: 1244918
aucuguaaucccuguuacu

SEQ ID NO: 1522617 - RNA, 19 nt, Artificial Sequence
  Description of Artificial Sequence: Synthetic oligonucleotide
  Antisense strand to SEQ ID NO: 1522616
aguaacagggauuacagau

SEQ ID NO: 1522618 - RNA, 19 nt, Artificial Sequence
  Description of Artificial Sequence: Synthetic oligonucleotide
  Sense strand starting at position 2260 of SEQ ID NO: 1244918
gggaguccuugcuuggaca

SEQ ID NO: 1522619 - RNA, 19 nt, Artificial Sequence
  Description of Artificial Sequence: Synthetic oligonucleotide
  Antisense strand to SEQ ID NO: 1522618
uguccaagcaaggacuccc

SEQ ID NO: 1522620 - RNA, 19 nt, Artificial Sequence
  Description of Artificial Sequence: Synthetic oligonucleotide
  Sense strand starting at position 2363 of SEQ ID NO: 1244918
gagugagggccuugacaaa

SEQ ID NO: 1522621 - RNA, 19 nt, Artificial Sequence
  Description of Artificial Sequence: Synthetic oligonucleotide
  Antisense strand to SEQ ID NO: 1522620
uuugucaaggcccucacuc

SEQ ID NO: 1522622 - RNA, 19 nt, Artificial Sequence
  Description of Artificial Sequence: Synthetic oligonucleotide
  Sense strand starting at position 2515 of SEQ ID NO: 1244918
caguaaugacucuagcuug

SEQ ID NO: 1522623 - RNA, 19 nt, Artificial Sequence
  Description of Artificial Sequence: Synthetic oligonucleotide
  Antisense strand to SEQ ID NO: 1522622
caagcuagagucauuacug

SEQ ID NO: 1522624 - RNA, 19 nt, Artificial Sequence
  Description of Artificial Sequence: Synthetic oligonucleotide
  Sense strand starting at position 2701 of SEQ ID NO: 1244918
ccagaagucuggucuggua

SEQ ID NO: 1522625 - RNA, 19 nt, Artificial Sequence
  Description of Artificial Sequence: Synthetic oligonucleotide
  Antisense strand to SEQ ID NO: 1522624
uaccagaccagacuucugg

SEQ ID NO: 1522626 - RNA, 19 nt, Artificial Sequence
  Description of Artificial Sequence: Synthetic oligonucleotide
  Sense strand starting at position 2778 of SEQ ID NO: 1244918
guuguaaggagguguucag

SEQ ID NO: 1522627 - RNA, 19 nt, Artificial Sequence
  Description of Artificial Sequence: Synthetic oligonucleotide
  Antisense strand to SEQ ID NO: 1522626
cugaacaccuccuuacaac

SEQ ID NO: 1522628 - RNA, 19 nt, Artificial Sequence
  Description of Artificial Sequence: Synthetic oligonucleotide
  Sense strand starting at position 2881 of SEQ ID NO: 1244918
gacucauggugaucccagu

SEQ ID NO: 1522629 - RNA, 19 nt, Artificial Sequence
  Description of Artificial Sequence: Synthetic oligonucleotide
  Antisense strand to SEQ ID NO: 1522628
acugggaucaccaugaguc

SEQ ID NO: 1522630 - RNA, 19 nt, Artificial Sequence
  Description of Artificial Sequence: Synthetic oligonucleotide
  Sense strand starting at position 2887 of SEQ ID NO: 1244918
uggugaucccaguaggcua

SEQ ID NO: 1522631 - RNA, 19 nt, Artificial Sequence
  Description of Artificial Sequence: Synthetic oligonucleotide
  Antisense strand to SEQ ID NO: 1522630
uagccuacugggaucacca

SEQ ID NO: 1522632 - RNA, 19 nt, Artificial Sequence
  Description of Artificial Sequence: Synthetic oligonucleotide
  Sense strand starting at position 2987 of SEQ ID NO: 1244918
uucacugaggcauggugaa

SEQ ID NO: 1522633 - RNA, 19 nt, Artificial Sequence
  Description of Artificial Sequence: Synthetic oligonucleotide
  Antisense strand to SEQ ID NO: 1522632
uucaccaugccucagugaa

SEQ ID NO: 1522634 - RNA, 19 nt, Artificial Sequence
  Description of Artificial Sequence: Synthetic oligonucleotide
  Sense strand starting at position 3027 of SEQ ID NO: 1244918
agcaaagcuauggaaaguu

SEQ ID NO: 1522635 - RNA, 19 nt, Artificial Sequence
  Description of Artificial Sequence: Synthetic oligonucleotide
  Antisense strand to SEQ ID NO: 1522634
aacuuuccauagcuuugcu

SEQ ID NO: 1522636 - RNA, 19 nt, Artificial Sequence
  Description of Artificial Sequence: Synthetic oligonucleotide
  Sense strand starting at position 3115 of SEQ ID NO: 1244918
auggcuugaugagcaauua

SEQ ID NO: 1522637 - RNA, 19 nt, Artificial Sequence
  Description of Artificial Sequence: Synthetic oligonucleotide
  Antisense strand to SEQ ID NO: 1522636
uaauugcucaucaagccau

SEQ ID NO: 1522638 - RNA, 19 nt, Artificial Sequence
  Description of Artificial Sequence: Synthetic oligonucleotide
  Sense strand starting at position 3116 of SEQ ID NO: 1244918
uggcuugaugagcaauuau

SEQ ID NO: 1522639 - RNA, 19 nt, Artificial Sequence
  Description of Artificial Sequence: Synthetic oligonucleotide
  Antisense strand to SEQ ID NO: 1522638
auaauugcucaucaagcca

SEQ ID NO: 1522640 - RNA, 19 nt, Artificial Sequence
  Description of Artificial Sequence: Synthetic oligonucleotide
  Sense strand starting at position 3125 of SEQ ID NO: 1244918
gagcaauuaugucuuugga

SEQ ID NO: 1522641 - RNA, 19 nt, Artificial Sequence
  Description of Artificial Sequence: Synthetic oligonucleotide
  Antisense strand to SEQ ID NO: 1522640
uccaaagacauaauugcuc

SEQ ID NO: 1522642 - RNA, 19 nt, Artificial Sequence
  Description of Artificial Sequence: Synthetic oligonucleotide
  Sense strand starting at position 3127 of SEQ ID NO: 1244918
gcaauuaugucuuuggaug

SEQ ID NO: 1522643 - RNA, 19 nt, Artificial Sequence
  Description of Artificial Sequence: Synthetic oligonucleotide
  Antisense strand to SEQ ID NO: 1522642
cauccaaagacauaauugc

SEQ ID NO: 1522644 - RNA, 19 nt, Artificial Sequence
  Description of Artificial Sequence: Synthetic oligonucleotide
  Sense strand starting at position 3128 of SEQ ID NO: 1244918
caauuaugucuuuggauga

SEQ ID NO: 1522645 - RNA, 19 nt, Artificial Sequence
  Description of Artificial Sequence: Synthetic oligonucleotide
  Antisense strand to SEQ ID NO: 1522644
ucauccaaagacauaauug

SEQ ID NO: 1522646 - RNA, 19 nt, Artificial Sequence
  Description of Artificial Sequence: Synthetic oligonucleotide
  Sense strand starting at position 3170 of SEQ ID NO: 1244918
aguggaugucacugcacau

SEQ ID NO: 1522647 - RNA, 19 nt, Artificial Sequence
  Description of Artificial Sequence: Synthetic oligonucleotide
  Antisense strand to SEQ ID NO: 1522646
augugcagugacauccacu

SEQ ID NO: 1522648 - RNA, 19 nt, Artificial Sequence
  Description of Artificial Sequence: Synthetic oligonucleotide
  Sense strand starting at position 3204 of SEQ ID NO: 1244918
gaggcuguggcucaugauu

SEQ ID NO: 1522649 - RNA, 19 nt, Artificial Sequence
  Description of Artificial Sequence: Synthetic oligonucleotide
  Antisense strand to SEQ ID NO: 1522648
aaucaugagccacagccuc

SEQ ID NO: 1522650 - RNA, 19 nt, Artificial Sequence
  Description of Artificial Sequence: Synthetic oligonucleotide
  Sense strand starting at position 3238 of SEQ ID NO: 1244918
gggcgacucgugaguuucu

SEQ ID NO: 1522651 - RNA, 19 nt, Artificial Sequence
  Description of Artificial Sequence: Synthetic oligonucleotide
  Antisense strand to SEQ ID NO: 1522650
agaaacucacgagucgccc

SEQ ID NO: 1522652 - RNA, 19 nt, Artificial Sequence
  Description of Artificial Sequence: Synthetic oligonucleotide
  Sense strand starting at position 3248 of SEQ ID NO: 1244918
ugaguuucuugaguggaag

SEQ ID NO: 1522653 - RNA, 19 nt, Artificial Sequence
  Description of Artificial Sequence: Synthetic oligonucleotide
  Antisense strand to SEQ ID NO: 1522652
cuuccacucaagaaacuca

SEQ ID NO: 1522654 - RNA, 19 nt, Artificial Sequence
  Description of Artificial Sequence: Synthetic oligonucleotide
  Sense strand starting at position 3420 of SEQ ID NO: 1244918
auggucuuucuuggcagau

SEQ ID NO: 1522655 - RNA, 19 nt, Artificial Sequence
  Description of Artificial Sequence: Synthetic oligonucleotide
  Antisense strand to SEQ ID NO: 1522654
aucugccaagaaagaccau

SEQ ID NO: 1522656 - RNA, 19 nt, Artificial Sequence
  Description of Artificial Sequence: Synthetic oligonucleotide
  Sense strand starting at position 3421 of SEQ ID NO: 1244918
uggucuuucuuggcagauu

SEQ ID NO: 1522657 - RNA, 19 nt, Artificial Sequence
  Description of Artificial Sequence: Synthetic oligonucleotide
  Antisense strand to SEQ ID NO: 1522656
aaucugccaagaaagacca

SEQ ID NO: 1522658 - RNA, 19 nt, Artificial Sequence
  Description of Artificial Sequence: Synthetic oligonucleotide
  Sense strand starting at position 3463 of SEQ ID NO: 1244918
ugcuuccuuuagcuuaaga

SEQ ID NO: 1522659 - RNA, 19 nt, Artificial Sequence
  Description of Artificial Sequence: Synthetic oligonucleotide
  Antisense strand to SEQ ID NO: 1522658
ucuuaagcuaaaggaagca

SEQ ID NO: 1522660 - RNA, 19 nt, Artificial Sequence
  Description of Artificial Sequence: Synthetic oligonucleotide
  Sense strand starting at position 3465 of SEQ ID NO: 1244918
cuuccuuuagcuuaagaug

SEQ ID NO: 1522661 - RNA, 19 nt, Artificial Sequence
  Description of Artificial Sequence: Synthetic oligonucleotide
  Antisense strand to SEQ ID NO: 1522660
caucuuaagcuaaaggaag

SEQ ID NO: 1522662 - RNA, 19 nt, Artificial Sequence
  Description of Artificial Sequence: Synthetic oligonucleotide
  Sense strand starting at position 3473 of SEQ ID NO: 1244918
agcuuaagauggucucaga

SEQ ID NO: 1522663 - RNA, 19 nt, Artificial Sequence
  Description of Artificial Sequence: Synthetic oligonucleotide
  Antisense strand to SEQ ID NO: 1522662
ucugagaccaucuuaagcu

SEQ ID NO: 1522664 - RNA, 19 nt, Artificial Sequence
  Description of Artificial Sequence: Synthetic oligonucleotide
  Sense strand starting at position 3551 of SEQ ID NO: 1244918
ugccgugaucaucaaggga

SEQ ID NO: 1522665 - RNA, 19 nt, Artificial Sequence
  Description of Artificial Sequence: Synthetic oligonucleotide
  Antisense strand to SEQ ID NO: 1522664
ucccuugaugaucacggca

SEQ ID NO: 1522666 - RNA, 19 nt, Artificial Sequence
  Description of Artificial Sequence: Synthetic oligonucleotide
  Sense strand starting at position 3619 of SEQ ID NO: 1244918
uuagccuauggaugugaua

SEQ ID NO: 1522667 - RNA, 19 nt, Artificial Sequence
  Description of Artificial Sequence: Synthetic oligonucleotide
  Antisense strand to SEQ ID NO: 1522666
uaucacauccauaggcuaa

SEQ ID NO: 1522668 - RNA, 19 nt, Artificial Sequence
  Description of Artificial Sequence: Synthetic oligonucleotide
  Sense strand starting at position 3621 of SEQ ID NO: 1244918
agccuauggaugugauaga

SEQ ID NO: 1522669 - RNA, 19 nt, Artificial Sequence
  Description of Artificial Sequence: Synthetic oligonucleotide
  Antisense strand to SEQ ID NO: 1522668
ucuaucacauccauaggcu

SEQ ID NO: 1522670 - RNA, 19 nt, Artificial Sequence
  Description of Artificial Sequence: Synthetic oligonucleotide
  Sense strand starting at position 3833 of SEQ ID NO: 1244918
augccugggucuguauaau

SEQ ID NO: 1522671 - RNA, 19 nt, Artificial Sequence
  Description of Artificial Sequence: Synthetic oligonucleotide
  Antisense strand to SEQ ID NO: 1522670
auuauacagacccaggcau

SEQ ID NO: 1522672 - RNA, 19 nt, Artificial Sequence
  Description of Artificial Sequence: Synthetic oligonucleotide
  Sense strand starting at position 3916 of SEQ ID NO: 1244918
augagugauauuggugucu

SEQ ID NO: 1522673 - RNA, 19 nt, Artificial Sequence
  Description of Artificial Sequence: Synthetic oligonucleotide
  Antisense strand to SEQ ID NO: 1522672
agacaccaauaucacucau

SEQ ID NO: 1522674 - RNA, 19 nt, Artificial Sequence
  Description of Artificial Sequence: Synthetic oligonucleotide
  Sense strand starting at position 3921 of SEQ ID NO: 1244918
ugauauuggugucuaguuu

SEQ ID NO: 1522675 - RNA, 19 nt, Artificial Sequence
  Description of Artificial Sequence: Synthetic oligonucleotide
  Antisense strand to SEQ ID NO: 1522674
aaacuagacaccaauauca

SEQ ID NO: 1522676 - RNA, 19 nt, Artificial Sequence
  Description of Artificial Sequence: Synthetic oligonucleotide
  Sense strand starting at position 237 of SEQ ID NO: 1244919
uugggagaucgccguuagu

SEQ ID NO: 1522677 - RNA, 19 nt, Artificial Sequence
  Description of Artificial Sequence: Synthetic oligonucleotide
  Antisense strand to SEQ ID NO: 1522676
acuaacggcgaucucccaa

SEQ ID NO: 1522678 - RNA, 19 nt, Artificial Sequence
  Description of Artificial Sequence: Synthetic oligonucleotide
  Sense strand starting at position 1229 of SEQ ID NO: 1244919
ggccaaacugcguauguau

SEQ ID NO: 1522679 - RNA, 19 nt, Artificial Sequence
  Description of Artificial Sequence: Synthetic oligonucleotide
  Antisense strand to SEQ ID NO: 1522678
auacauacgcaguuuggcc

SEQ ID NO: 1522680 - RNA, 19 nt, Artificial Sequence
  Description of Artificial Sequence: Synthetic oligonucleotide
  Sense strand starting at position 1240 of SEQ ID NO: 1244919
guauguaucuguguccaug

SEQ ID NO: 1522681 - RNA, 19 nt, Artificial Sequence
  Description of Artificial Sequence: Synthetic oligonucleotide
  Antisense strand to SEQ ID NO: 1522680
cauggacacagauacauac

SEQ ID NO: 1522682 - RNA, 19 nt, Artificial Sequence
  Description of Artificial Sequence: Synthetic oligonucleotide
  Sense strand starting at position 1333 of SEQ ID NO: 1244919
uuguaaagcgcguuuaaga

SEQ ID NO: 1522683 - RNA, 19 nt, Artificial Sequence
  Description of Artificial Sequence: Synthetic oligonucleotide
  Antisense strand to SEQ ID NO: 1522682
ucuuaaacgcgcuuuacaa

SEQ ID NO: 1522684 - RNA, 19 nt, Artificial Sequence
  Description of Artificial Sequence: Synthetic oligonucleotide
  Sense strand starting at position 1334 of SEQ ID NO: 1244919
uguaaagcgcguuuaagau

SEQ ID NO: 1522685 - RNA, 19 nt, Artificial Sequence
  Description of Artificial Sequence: Synthetic oligonucleotide
  Antisense strand to SEQ ID NO: 1522684
aucuuaaacgcgcuuuaca

SEQ ID NO: 1522686 - RNA, 19 nt, Artificial Sequence
  Description of Artificial Sequence: Synthetic oligonucleotide
  Sense strand starting at position 1340 of SEQ ID NO: 1244919
gcgcguuuaagaucauucu

SEQ ID NO: 1522687 - RNA, 19 nt, Artificial Sequence
  Description of Artificial Sequence: Synthetic oligonucleotide
  Antisense strand to SEQ ID NO: 1522686
agaaugaucuuaaacgcgc

SEQ ID NO: 1522688 - RNA, 19 nt, Artificial Sequence
  Description of Artificial Sequence: Synthetic oligonucleotide
  Sense strand starting at position 1341 of SEQ ID NO: 1244919
cgcguuuaagaucauucuu

SEQ ID NO: 1522689 - RNA, 19 nt, Artificial Sequence
  Description of Artificial Sequence: Synthetic oligonucleotide
  Antisense strand to SEQ ID NO: 1522688
aagaaugaucuuaaacgcg

SEQ ID NO: 1522690 - RNA, 19 nt, Artificial Sequence
  Description of Artificial Sequence: Synthetic oligonucleotide
  Sense strand starting at position 1349 of SEQ ID NO: 1244919
agaucauucuuggcugaaa

SEQ ID NO: 1522691 - RNA, 19 nt, Artificial Sequence
  Description of Artificial Sequence: Synthetic oligonucleotide
  Antisense strand to SEQ ID NO: 1522690
uuucagccaagaaugaucu

SEQ ID NO: 1522692 - RNA, 19 nt, Artificial Sequence
  Description of Artificial Sequence: Synthetic oligonucleotide
  Sense strand starting at position 1351 of SEQ ID NO: 1244919
aucauucuuggcugaaaua

SEQ ID NO: 1522693 - RNA, 19 nt, Artificial Sequence
  Description of Artificial Sequence: Synthetic oligonucleotide
  Antisense strand to SEQ ID NO: 1522692
uauuucagccaagaaugau

SEQ ID NO: 1522694 - RNA, 19 nt, Artificial Sequence
  Description of Artificial Sequence: Synthetic oligonucleotide
  Sense strand starting at position 1352 of SEQ ID NO: 1244919
ucauucuuggcugaaauau

SEQ ID NO: 1522695 - RNA, 19 nt, Artificial Sequence
  Description of Artificial Sequence: Synthetic oligonucleotide
  Antisense strand to SEQ ID NO: 1522694
auauuucagccaagaauga

SEQ ID NO: 1522696 - RNA, 19 nt, Artificial Sequence
  Description of Artificial Sequence: Synthetic oligonucleotide
  Sense strand starting at position 1361 of SEQ ID NO: 1244919
gcugaaauaugugcgggua

SEQ ID NO: 1522697 - RNA, 19 nt, Artificial Sequence
  Description of Artificial Sequence: Synthetic oligonucleotide
  Antisense strand to SEQ ID NO: 1522696
uacccgcacauauuucagc

SEQ ID NO: 1522698 - RNA, 19 nt, Artificial Sequence
  Description of Artificial Sequence: Synthetic oligonucleotide
  Sense strand starting at position 1364 of SEQ ID NO: 1244919
gaaauaugugcggguaccu

SEQ ID NO: 1522699 - RNA, 19 nt, Artificial Sequence
  Description of Artificial Sequence: Synthetic oligonucleotide
  Antisense strand to SEQ ID NO: 1522698
agguacccgcacauauuuc

SEQ ID NO: 1522700 - RNA, 19 nt, Artificial Sequence
  Description of Artificial Sequence: Synthetic oligonucleotide
  Sense strand starting at position 1459 of SEQ ID NO: 1244919
acgaaauuacaucgggagu

SEQ ID NO: 1522701 - RNA, 19 nt, Artificial Sequence
  Description of Artificial Sequence: Synthetic oligonucleotide
  Antisense strand to SEQ ID NO: 1522700
acucccgauguaauuucgu

SEQ ID NO: 1522702 - RNA, 19 nt, Artificial Sequence
  Description of Artificial Sequence: Synthetic oligonucleotide
  Sense strand starting at position 2446 of SEQ ID NO: 1244919
cuuggaaugccuuaccaaa

SEQ ID NO: 1522703 - RNA, 19 nt, Artificial Sequence
  Description of Artificial Sequence: Synthetic oligonucleotide
  Antisense strand to SEQ ID NO: 1522702
uuugguaaggcauuccaag

SEQ ID NO: 1522704 - RNA, 19 nt, Artificial Sequence
  Description of Artificial Sequence: Synthetic oligonucleotide
  Sense strand starting at position 2517 of SEQ ID NO: 1244919
ggcaaauaaugguacugua

SEQ ID NO: 1522705 - RNA, 19 nt, Artificial Sequence
  Description of Artificial Sequence: Synthetic oligonucleotide
  Antisense strand to SEQ ID NO: 1522704
uacaguaccauuauuugcc

SEQ ID NO: 1522706 - RNA, 19 nt, Artificial Sequence
  Description of Artificial Sequence: Synthetic oligonucleotide
  Sense strand starting at position 2525 of SEQ ID NO: 1244919
augguacuguaccaaacau

SEQ ID NO: 1522707 - RNA, 19 nt, Artificial Sequence
  Description of Artificial Sequence: Synthetic oligonucleotide
  Antisense strand to SEQ ID NO: 1522706
auguuugguacaguaccau

SEQ ID NO: 1522708 - RNA, 19 nt, Artificial Sequence
  Description of Artificial Sequence: Synthetic oligonucleotide
  Sense strand starting at position 2554 of SEQ ID NO: 1244919
gggaccaugugucuugauu

SEQ ID NO: 1522709 - RNA, 19 nt, Artificial Sequence
  Description of Artificial Sequence: Synthetic oligonucleotide
  Antisense strand to SEQ ID NO: 1522708
aaucaagacacaugguccc

SEQ ID NO: 1522710 - RNA, 19 nt, Artificial Sequence
  Description of Artificial Sequence: Synthetic oligonucleotide
  Sense strand starting at position 2560 of SEQ ID NO: 1244919
augugucuugauuaguaau

SEQ ID NO: 1522711 - RNA, 19 nt, Artificial Sequence
  Description of Artificial Sequence: Synthetic oligonucleotide
  Antisense strand to SEQ ID NO: 1522710
auuacuaaucaagacacau

SEQ ID NO: 1522712 - RNA, 19 nt, Artificial Sequence
  Description of Artificial Sequence: Synthetic oligonucleotide
  Sense strand starting at position 2562 of SEQ ID NO: 1244919
gugucuugauuaguaauuu

SEQ ID NO: 1522713 - RNA, 19 nt, Artificial Sequence
  Description of Artificial Sequence: Synthetic oligonucleotide
  Antisense strand to SEQ ID NO: 1522712
aaauuacuaaucaagacac

SEQ ID NO: 1522714 - RNA, 19 nt, Artificial Sequence
  Description of Artificial Sequence: Synthetic oligonucleotide
  Sense strand starting at position 2593 of SEQ ID NO: 1244919
gcauauuaggcauggcuga

SEQ ID NO: 1522715 - RNA, 19 nt, Artificial Sequence
  Description of Artificial Sequence: Synthetic oligonucleotide
  Antisense strand to SEQ ID NO: 1522714
ucagccaugccuaauaugc

SEQ ID NO: 1522716 - RNA, 19 nt, Artificial Sequence
  Description of Artificial Sequence: Synthetic oligonucleotide
  Sense strand starting at position 2598 of SEQ ID NO: 1244919
uuaggcauggcugagacua

SEQ ID NO: 1522717 - RNA, 19 nt, Artificial Sequence
  Description of Artificial Sequence: Synthetic oligonucleotide
  Antisense strand to SEQ ID NO: 1522716
uagucucagccaugccuaa

SEQ ID NO: 1522718 - RNA, 19 nt, Artificial Sequence
  Description of Artificial Sequence: Synthetic oligonucleotide
  Sense strand starting at position 2600 of SEQ ID NO: 1244919
aggcauggcugagacuaaa

SEQ ID NO: 1522719 - RNA, 19 nt, Artificial Sequence
  Description of Artificial Sequence: Synthetic oligonucleotide
  Antisense strand to SEQ ID NO: 1522718
uuuagucucagccaugccu

SEQ ID NO: 1522720 - RNA, 19 nt, Artificial Sequence
  Description of Artificial Sequence: Synthetic oligonucleotide
  Sense strand starting at position 2647 of SEQ ID NO: 1244919
ugucaaacuuaucuguacu

SEQ ID NO: 1522721 - RNA, 19 nt, Artificial Sequence
  Description of Artificial Sequence: Synthetic oligonucleotide
  Antisense strand to SEQ ID NO: 1522720
aguacagauaaguuugaca

SEQ ID NO: 1522722 - RNA, 19 nt, Artificial Sequence
  Description of Artificial Sequence: Synthetic oligonucleotide
  Sense strand starting at position 2734 of SEQ ID NO: 1244919
uuugaaauaugagagcagu

SEQ ID NO: 1522723 - RNA, 19 nt, Artificial Sequence
  Description of Artificial Sequence: Synthetic oligonucleotide
  Antisense strand to SEQ ID NO: 1522722
acugcucucauauuucaaa

SEQ ID NO: 1522724 - RNA, 19 nt, Artificial Sequence
  Description of Artificial Sequence: Synthetic oligonucleotide
  Sense strand starting at position 2745 of SEQ ID NO: 1244919
agagcagucaucugauagg

SEQ ID NO: 1522725 - RNA, 19 nt, Artificial Sequence
  Description of Artificial Sequence: Synthetic oligonucleotide
  Antisense strand to SEQ ID NO: 1522724
ccuaucagaugacugcucu

SEQ ID NO: 1522726 - RNA, 19 nt, Artificial Sequence
  Description of Artificial Sequence: Synthetic oligonucleotide
  Sense strand starting at position 2748 of SEQ ID NO: 1244919
gcagucaucugauagguac

SEQ ID NO: 1522727 - RNA, 19 nt, Artificial Sequence
  Description of Artificial Sequence: Synthetic oligonucleotide
  Antisense strand to SEQ ID NO: 1522726
guaccuaucagaugacugc

SEQ ID NO: 1522728 - RNA, 19 nt, Artificial Sequence
  Description of Artificial Sequence: Synthetic oligonucleotide
  Sense strand starting at position 2751 of SEQ ID NO: 1244919
gucaucugauagguacuga

SEQ ID NO: 1522729 - RNA, 19 nt, Artificial Sequence
  Description of Artificial Sequence: Synthetic oligonucleotide
  Antisense strand to SEQ ID NO: 1522728
ucaguaccuaucagaugac

SEQ ID NO: 1522730 - RNA, 19 nt, Artificial Sequence
  Description of Artificial Sequence: Synthetic oligonucleotide
  Sense strand starting at position 2755 of SEQ ID NO: 1244919
ucugauagguacugauuaa

SEQ ID NO: 1522731 - RNA, 19 nt, Artificial Sequence
  Description of Artificial Sequence: Synthetic oligonucleotide
  Antisense strand to SEQ ID NO: 1522730
uuaaucaguaccuaucaga

SEQ ID NO: 1522732 - RNA, 19 nt, Artificial Sequence
  Description of Artificial Sequence: Synthetic oligonucleotide
  Sense strand starting at position 2802 of SEQ ID NO: 1244919
gucagaaauguagauguca

SEQ ID NO: 1522733 - RNA, 19 nt, Artificial Sequence
  Description of Artificial Sequence: Synthetic oligonucleotide
  Antisense strand to SEQ ID NO: 1522732
ugacaucuacauuucugac

SEQ ID NO: 1522734 - RNA, 19 nt, Artificial Sequence
  Description of Artificial Sequence: Synthetic oligonucleotide
  Sense strand starting at position 2845 of SEQ ID NO: 1244919
ggccuaggaguguaagaag

SEQ ID NO: 1522735 - RNA, 19 nt, Artificial Sequence
  Description of Artificial Sequence: Synthetic oligonucleotide
  Antisense strand to SEQ ID NO: 1522734
cuucuuacacuccuaggcc

SEQ ID NO: 1522736 - RNA, 19 nt, Artificial Sequence
  Description of Artificial Sequence: Synthetic oligonucleotide
  Sense strand starting at position 2853 of SEQ ID NO: 1244919
aguguaagaagaugucuga

SEQ ID NO: 1522737 - RNA, 19 nt, Artificial Sequence
  Description of Artificial Sequence: Synthetic oligonucleotide
  Antisense strand to SEQ ID NO: 1522736
ucagacaucuucuuacacu

SEQ ID NO: 1522738 - RNA, 19 nt, Artificial Sequence
  Description of Artificial Sequence: Synthetic oligonucleotide
  Sense strand starting at position 2856 of SEQ ID NO: 1244919
guaagaagaugucugacca

SEQ ID NO: 1522739 - RNA, 19 nt, Artificial Sequence
  Description of Artificial Sequence: Synthetic oligonucleotide
  Antisense strand to SEQ ID NO: 1522738
uggucagacaucuucuuac

SEQ ID NO: 1522740 - RNA, 19 nt, Artificial Sequence
  Description of Artificial Sequence: Synthetic oligonucleotide
  Sense strand starting at position 3018 of SEQ ID NO: 1244919
aggguugaauuagaucaua

SEQ ID NO: 1522741 - RNA, 19 nt, Artificial Sequence
  Description of Artificial Sequence: Synthetic oligonucleotide
  Antisense strand to SEQ ID NO: 1522740
uaugaucuaauucaacccu

SEQ ID NO: 1522742 - RNA, 19 nt, Artificial Sequence
  Description of Artificial Sequence: Synthetic oligonucleotide
  Sense strand starting at position 3831 of SEQ ID NO: 1244919
uucugcauauggcuuauua

SEQ ID NO: 1522743 - RNA, 19 nt, Artificial Sequence
  Description of Artificial Sequence: Synthetic oligonucleotide
  Antisense strand to SEQ ID NO: 1522742
uaauaagccauaugcagaa

SEQ ID NO: 1522744 - RNA, 19 nt, Artificial Sequence
  Description of Artificial Sequence: Synthetic oligonucleotide
  Sense strand starting at position 3857 of SEQ ID NO: 1244919
acauuuacuuuggaauugu

SEQ ID NO: 1522745 - RNA, 19 nt, Artificial Sequence
  Description of Artificial Sequence: Synthetic oligonucleotide
  Antisense strand to SEQ ID NO: 1522744
acaauuccaaaguaaaugu

SEQ ID NO: 1522746 - RNA, 19 nt, Artificial Sequence
  Description of Artificial Sequence: Synthetic oligonucleotide
  Sense strand starting at position 3896 of SEQ ID NO: 1244919
cugcuaauugugcagggaa

SEQ ID NO: 1522747 - RNA, 19 nt, Artificial Sequence
  Description of Artificial Sequence: Synthetic oligonucleotide
  Antisense strand to SEQ ID NO: 1522746
uucccugcacaauuagcag

SEQ ID NO: 1522748 - RNA, 19 nt, Artificial Sequence
  Description of Artificial Sequence: Synthetic oligonucleotide
  Sense strand starting at position 3898 of SEQ ID NO: 1244919
gcuaauugugcagggaauu

SEQ ID NO: 1522749 - RNA, 19 nt, Artificial Sequence
  Description of Artificial Sequence: Synthetic oligonucleotide
  Antisense strand to SEQ ID NO: 1522748
aauucccugcacaauuagc

SEQ ID NO: 1522750 - RNA, 19 nt, Artificial Sequence
  Description of Artificial Sequence: Synthetic oligonucleotide
  Sense strand starting at position 3899 of SEQ ID NO: 1244919
cuaauugugcagggaauua

SEQ ID NO: 1522751 - RNA, 19 nt, Artificial Sequence
  Description of Artificial Sequence: Synthetic oligonucleotide
  Antisense strand to SEQ ID NO: 1522750
uaauucccugcacaauuag

SEQ ID NO: 1522752 - RNA, 19 nt, Artificial Sequence
  Description of Artificial Sequence: Synthetic oligonucleotide
  Sense strand starting at position 3912 of SEQ ID NO: 1244919
gaauuagacuuauggagga

SEQ ID NO: 1522753 - RNA, 19 nt, Artificial Sequence
  Description of Artificial Sequence: Synthetic oligonucleotide
  Antisense strand to SEQ ID NO: 1522752
uccuccauaagucuaauuc

SEQ ID NO: 1522754 - RNA, 19 nt, Artificial Sequence
  Description of Artificial Sequence: Synthetic oligonucleotide
  Sense strand starting at position 3942 of SEQ ID NO: 1244919
gauauuaggcuccaagugu

SEQ ID NO: 1522755 - RNA, 19 nt, Artificial Sequence
  Description of Artificial Sequence: Synthetic oligonucleotide
  Antisense strand to SEQ ID NO: 1522754
acacuuggagccuaauauc

SEQ ID NO: 1522756 - RNA, 19 nt, Artificial Sequence
  Description of Artificial Sequence: Synthetic oligonucleotide
  Sense strand starting at position 77 of SEQ ID NO: 1244920
ccuguuucugaauagaguu

SEQ ID NO: 1522757 - RNA, 19 nt, Artificial Sequence
  Description of Artificial Sequence: Synthetic oligonucleotide
  Antisense strand to SEQ ID NO: 1522756
aacucuauucagaaacagg

SEQ ID NO: 1522758 - RNA, 19 nt, Artificial Sequence
  Description of Artificial Sequence: Synthetic oligonucleotide
  Sense strand starting at position 85 of SEQ ID NO: 1244920
ugaauagaguucuaagaag

SEQ ID NO: 1522759 - RNA, 19 nt, Artificial Sequence
  Description of Artificial Sequence: Synthetic oligonucleotide
  Antisense strand to SEQ ID NO: 1522758
cuucuuagaacucuauuca

SEQ ID NO: 1522760 - RNA, 19 nt, Artificial Sequence
  Description of Artificial Sequence: Synthetic oligonucleotide
  Sense strand starting at position 121 of SEQ ID NO: 1244920
gcauucuucucuccucagu

SEQ ID NO: 1522761 - RNA, 19 nt, Artificial Sequence
  Description of Artificial Sequence: Synthetic oligonucleotide
  Antisense strand to SEQ ID NO: 1522760
acugaggagagaagaaugc

SEQ ID NO: 1522762 - RNA, 19 nt, Artificial Sequence
  Description of Artificial Sequence: Synthetic oligonucleotide
  Sense strand starting at position 276 of SEQ ID NO: 1244920
cuguuuaaaucugcucugu

SEQ ID NO: 1522763 - RNA, 19 nt, Artificial Sequence
  Description of Artificial Sequence: Synthetic oligonucleotide
  Antisense strand to SEQ ID NO: 1522762
acagagcagauuuaaacag

SEQ ID NO: 1522764 - RNA, 19 nt, Artificial Sequence
  Description of Artificial Sequence: Synthetic oligonucleotide
  Sense strand starting at position 278 of SEQ ID NO: 1244920
guuuaaaucugcucuguca

SEQ ID NO: 1522765 - RNA, 19 nt, Artificial Sequence
  Description of Artificial Sequence: Synthetic oligonucleotide
  Antisense strand to SEQ ID NO: 1522764
ugacagagcagauuuaaac

SEQ ID NO: 1522766 - RNA, 19 nt, Artificial Sequence
  Description of Artificial Sequence: Synthetic oligonucleotide
  Sense strand starting at position 285 of SEQ ID NO: 1244920
ucugcucugucacugacau

SEQ ID NO: 1522767 - RNA, 19 nt, Artificial Sequence
  Description of Artificial Sequence: Synthetic oligonucleotide
  Antisense strand to SEQ ID NO: 1522766
augucagugacagagcaga

SEQ ID NO: 1522768 - RNA, 19 nt, Artificial Sequence
  Description of Artificial Sequence: Synthetic oligonucleotide
  Sense strand starting at position 286 of SEQ ID NO: 1244920
cugcucugucacugacauu

SEQ ID NO: 1522769 - RNA, 19 nt, Artificial Sequence
  Description of Artificial Sequence: Synthetic oligonucleotide
  Antisense strand to SEQ ID NO: 1522768
aaugucagugacagagcag

SEQ ID NO: 1522770 - RNA, 19 nt, Artificial Sequence
  Description of Artificial Sequence: Synthetic oligonucleotide
  Sense strand starting at position 316 of SEQ ID NO: 1244920
uuacguuaggaagaucauu

SEQ ID NO: 1522771 - RNA, 19 nt, Artificial Sequence
  Description of Artificial Sequence: Synthetic oligonucleotide
  Antisense strand to SEQ ID NO: 1522770
aaugaucuuccuaacguaa

SEQ ID NO: 1522772 - RNA, 19 nt, Artificial Sequence
  Description of Artificial Sequence: Synthetic oligonucleotide
  Sense strand starting at position 424 of SEQ ID NO: 1244920
uauauaguuucggccuuaa

SEQ ID NO: 1522773 - RNA, 19 nt, Artificial Sequence
  Description of Artificial Sequence: Synthetic oligonucleotide
  Antisense strand to SEQ ID NO: 1522772
uuaaggccgaaacuauaua

SEQ ID NO: 1522774 - RNA, 19 nt, Artificial Sequence
  Description of Artificial Sequence: Synthetic oligonucleotide
  Sense strand starting at position 428 of SEQ ID NO: 1244920
uaguuucggccuuaaguau

SEQ ID NO: 1522775 - RNA, 19 nt, Artificial Sequence
  Description of Artificial Sequence: Synthetic oligonucleotide
  Antisense strand to SEQ ID NO: 1522774
auacuuaaggccgaaacua

SEQ ID NO: 1522776 - RNA, 19 nt, Artificial Sequence
  Description of Artificial Sequence: Synthetic oligonucleotide
  Sense strand starting at position 527 of SEQ ID NO: 1244920
ccuauucggcagcaaguau

SEQ ID NO: 1522777 - RNA, 19 nt, Artificial Sequence
  Description of Artificial Sequence: Synthetic oligonucleotide
  Antisense strand to SEQ ID NO: 1522776
auacuugcugccgaauagg

SEQ ID NO: 1522778 - RNA, 19 nt, Artificial Sequence
  Description of Artificial Sequence: Synthetic oligonucleotide
  Sense strand starting at position 576 of SEQ ID NO: 1244920
ugauuauucuguuuaaggc

SEQ ID NO: 1522779 - RNA, 19 nt, Artificial Sequence
  Description of Artificial Sequence: Synthetic oligonucleotide
  Antisense strand to SEQ ID NO: 1522778
gccuuaaacagaauaauca

SEQ ID NO: 1522780 - RNA, 19 nt, Artificial Sequence
  Description of Artificial Sequence: Synthetic oligonucleotide
  Sense strand starting at position 674 of SEQ ID NO: 1244920
cggagaggcaaguauggua

SEQ ID NO: 1522781 - RNA, 19 nt, Artificial Sequence
  Description of Artificial Sequence: Synthetic oligonucleotide
  Antisense strand to SEQ ID NO: 1522780
uaccauacuugccucuccg

SEQ ID NO: 1522782 - RNA, 19 nt, Artificial Sequence
  Description of Artificial Sequence: Synthetic oligonucleotide
  Sense strand starting at position 700 of SEQ ID NO: 1244920
ccuuuaaacguuugcugga

SEQ ID NO: 1522783 - RNA, 19 nt, Artificial Sequence
  Description of Artificial Sequence: Synthetic oligonucleotide
  Antisense strand to SEQ ID NO: 1522782
uccagcaaacguuuaaagg

SEQ ID NO: 1522784 - RNA, 19 nt, Artificial Sequence
  Description of Artificial Sequence: Synthetic oligonucleotide
  Sense strand starting at position 701 of SEQ ID NO: 1244920
cuuuaaacguuugcuggau

SEQ ID NO: 1522785 - RNA, 19 nt, Artificial Sequence
  Description of Artificial Sequence: Synthetic oligonucleotide
  Antisense strand to SEQ ID NO: 1522784
auccagcaaacguuuaaag

SEQ ID NO: 1522786 - RNA, 19 nt, Artificial Sequence
  Description of Artificial Sequence: Synthetic oligonucleotide
  Sense strand starting at position 758 of SEQ ID NO: 1244920
agaagauauuugcgaaagg

SEQ ID NO: 1522787 - RNA, 19 nt, Artificial Sequence
  Description of Artificial Sequence: Synthetic oligonucleotide
  Antisense strand to SEQ ID NO: 1522786
ccuuucgcaaauaucuucu

SEQ ID NO: 1522788 - RNA, 19 nt, Artificial Sequence
  Description of Artificial Sequence: Synthetic oligonucleotide
  Sense strand starting at position 829 of SEQ ID NO: 1244920
gucuuaauucgucuguucu

SEQ ID NO: 1522789 - RNA, 19 nt, Artificial Sequence
  Description of Artificial Sequence: Synthetic oligonucleotide
  Antisense strand to SEQ ID NO: 1522788
agaacagacgaauuaagac

SEQ ID NO: 1522790 - RNA, 19 nt, Artificial Sequence
  Description of Artificial Sequence: Synthetic oligonucleotide
  Sense strand starting at position 830 of SEQ ID NO: 1244920
ucuuaauucgucuguucua

SEQ ID NO: 1522791 - RNA, 19 nt, Artificial Sequence
  Description of Artificial Sequence: Synthetic oligonucleotide
  Antisense strand to SEQ ID NO: 1522790
uagaacagacgaauuaaga

SEQ ID NO: 1522792 - RNA, 19 nt, Artificial Sequence
  Description of Artificial Sequence: Synthetic oligonucleotide
  Sense strand starting at position 831 of SEQ ID NO: 1244920
cuuaauucgucuguucuau

SEQ ID NO: 1522793 - RNA, 19 nt, Artificial Sequence
  Description of Artificial Sequence: Synthetic oligonucleotide
  Antisense strand to SEQ ID NO: 1522792
auagaacagacgaauuaag

SEQ ID NO: 1522794 - RNA, 19 nt, Artificial Sequence
  Description of Artificial Sequence: Synthetic oligonucleotide
  Sense strand starting at position 851 of SEQ ID NO: 1244920
uuccauauucguggugaca

SEQ ID NO: 1522795 - RNA, 19 nt, Artificial Sequence
  Description of Artificial Sequence: Synthetic oligonucleotide
  Antisense strand to SEQ ID NO: 1522794
ugucaccacgaauauggaa

SEQ ID NO: 1522796 - RNA, 19 nt, Artificial Sequence
  Description of Artificial Sequence: Synthetic oligonucleotide
  Sense strand starting at position 854 of SEQ ID NO: 1244920
cauauucguggugacaaag

SEQ ID NO: 1522797 - RNA, 19 nt, Artificial Sequence
  Description of Artificial Sequence: Synthetic oligonucleotide
  Antisense strand to SEQ ID NO: 1522796
cuuugucaccacgaauaug

SEQ ID NO: 1522798 - RNA, 19 nt, Artificial Sequence
  Description of Artificial Sequence: Synthetic oligonucleotide
  Sense strand starting at position 936 of SEQ ID NO: 1244920
ggcagaggcagcugauuaa

SEQ ID NO: 1522799 - RNA, 19 nt, Artificial Sequence
  Description of Artificial Sequence: Synthetic oligonucleotide
  Antisense strand to SEQ ID NO: 1522798
uuaaucagcugccucugcc

SEQ ID NO: 1522800 - RNA, 19 nt, Artificial Sequence
  Description of Artificial Sequence: Synthetic oligonucleotide
  Sense strand starting at position 954 of SEQ ID NO: 1244920
agcccaauugcuugaaggu

SEQ ID NO: 1522801 - RNA, 19 nt, Artificial Sequence
  Description of Artificial Sequence: Synthetic oligonucleotide
  Antisense strand to SEQ ID NO: 1522800
accuucaagcaauugggcu

SEQ ID NO: 1522802 - RNA, 19 nt, Artificial Sequence
  Description of Artificial Sequence: Synthetic oligonucleotide
  Sense strand starting at position 996 of SEQ ID NO: 1244920
gguggaagguaguuacaaa

SEQ ID NO: 1522803 - RNA, 19 nt, Artificial Sequence
  Description of Artificial Sequence: Synthetic oligonucleotide
  Antisense strand to SEQ ID NO: 1522802
uuuguaacuaccuuccacc

SEQ ID NO: 1522804 - RNA, 19 nt, Artificial Sequence
  Description of Artificial Sequence: Synthetic oligonucleotide
  Sense strand starting at position 1039 of SEQ ID NO: 1244920
ugugaagaauuacauaaac

SEQ ID NO: 1522805 - RNA, 19 nt, Artificial Sequence
  Description of Artificial Sequence: Synthetic oligonucleotide
  Antisense strand to SEQ ID NO: 1522804
guuuauguaauucuucaca

SEQ ID NO: 1522806 - RNA, 19 nt, Artificial Sequence
  Description of Artificial Sequence: Synthetic oligonucleotide
  Sense strand starting at position 1060 of SEQ ID NO: 1244920
ccaguuagaucucauuaga

SEQ ID NO: 1522807 - RNA, 19 nt, Artificial Sequence
  Description of Artificial Sequence: Synthetic oligonucleotide
  Antisense strand to SEQ ID NO: 1522806
ucuaaugagaucuaacugg

SEQ ID NO: 1522808 - RNA, 19 nt, Artificial Sequence
  Description of Artificial Sequence: Synthetic oligonucleotide
  Sense strand starting at position 1181 of SEQ ID NO: 1244920
ggaggaaggcccgggaaau

SEQ ID NO: 1522809 - RNA, 19 nt, Artificial Sequence
  Description of Artificial Sequence: Synthetic oligonucleotide
  Antisense strand to SEQ ID NO: 1522808
auuucccgggccuuccucc

SEQ ID NO: 1522810 - RNA, 19 nt, Artificial Sequence
  Description of Artificial Sequence: Synthetic oligonucleotide
  Sense strand starting at position 1861 of SEQ ID NO: 1244920
uugggagaucgccguuagu

SEQ ID NO: 1522811 - RNA, 19 nt, Artificial Sequence
  Description of Artificial Sequence: Synthetic oligonucleotide
  Antisense strand to SEQ ID NO: 1522810
acuaacggcgaucucccaa

SEQ ID NO: 1522812 - RNA, 19 nt, Artificial Sequence
  Description of Artificial Sequence: Synthetic oligonucleotide
  Sense strand starting at position 2853 of SEQ ID NO: 1244920
ggccaaacugcguauguau

SEQ ID NO: 1522813 - RNA, 19 nt, Artificial Sequence
  Description of Artificial Sequence: Synthetic oligonucleotide
  Antisense strand to SEQ ID NO: 1522812
auacauacgcaguuuggcc

SEQ ID NO: 1522814 - RNA, 19 nt, Artificial Sequence
  Description of Artificial Sequence: Synthetic oligonucleotide
  Sense strand starting at position 2864 of SEQ ID NO: 1244920
guauguaucuguguccaug

SEQ ID NO: 1522815 - RNA, 19 nt, Artificial Sequence
  Description of Artificial Sequence: Synthetic oligonucleotide
  Antisense strand to SEQ ID NO: 1522814
cauggacacagauacauac

SEQ ID NO: 1522816 - RNA, 19 nt, Artificial Sequence
  Description of Artificial Sequence: Synthetic oligonucleotide
  Sense strand starting at position 2957 of SEQ ID NO: 1244920
uuguaaagcgcguuuaaga

SEQ ID NO: 1522817 - RNA, 19 nt, Artificial Sequence
  Description of Artificial Sequence: Synthetic oligonucleotide
  Antisense strand to SEQ ID NO: 1522816
ucuuaaacgcgcuuuacaa

SEQ ID NO: 1522818 - RNA, 19 nt, Artificial Sequence
  Description of Artificial Sequence: Synthetic oligonucleotide
  Sense strand starting at position 2958 of SEQ ID NO: 1244920
uguaaagcgcguuuaagau

SEQ ID NO: 1522819 - RNA, 19 nt, Artificial Sequence
  Description of Artificial Sequence: Synthetic oligonucleotide
  Antisense strand to SEQ ID NO: 1522818
aucuuaaacgcgcuuuaca

SEQ ID NO: 1522820 - RNA, 19 nt, Artificial Sequence
  Description of Artificial Sequence: Synthetic oligonucleotide
  Sense strand starting at position 2964 of SEQ ID NO: 1244920
gcgcguuuaagaucauucu

SEQ ID NO: 1522821 - RNA, 19 nt, Artificial Sequence
  Description of Artificial Sequence: Synthetic oligonucleotide
  Antisense strand to SEQ ID NO: 1522820
agaaugaucuuaaacgcgc

SEQ ID NO: 1522822 - RNA, 19 nt, Artificial Sequence
  Description of Artificial Sequence: Synthetic oligonucleotide
  Sense strand starting at position 2965 of SEQ ID NO: 1244920
cgcguuuaagaucauucuu

SEQ ID NO: 1522823 - RNA, 19 nt, Artificial Sequence
  Description of Artificial Sequence: Synthetic oligonucleotide
  Antisense strand to SEQ ID NO: 1522822
aagaaugaucuuaaacgcg

SEQ ID NO: 1522824 - RNA, 19 nt, Artificial Sequence
  Description of Artificial Sequence: Synthetic oligonucleotide
  Sense strand starting at position 2973 of SEQ ID NO: 1244920
agaucauucuuggcugaaa

SEQ ID NO: 1522825 - RNA, 19 nt, Artificial Sequence
  Description of Artificial Sequence: Synthetic oligonucleotide
  Antisense strand to SEQ ID NO: 1522824
uuucagccaagaaugaucu

SEQ ID NO: 1522826 - RNA, 19 nt, Artificial Sequence
  Description of Artificial Sequence: Synthetic oligonucleotide
  Sense strand starting at position 2975 of SEQ ID NO: 1244920
aucauucuuggcugaaaua

SEQ ID NO: 1522827 - RNA, 19 nt, Artificial Sequence
  Description of Artificial Sequence: Synthetic oligonucleotide
  Antisense strand to SEQ ID NO: 1522826
uauuucagccaagaaugau

SEQ ID NO: 1522828 - RNA, 19 nt, Artificial Sequence
  Description of Artificial Sequence: Synthetic oligonucleotide
  Sense strand starting at position 2976 of SEQ ID NO: 1244920
ucauucuuggcugaaauau

SEQ ID NO: 1522829 - RNA, 19 nt, Artificial Sequence
  Description of Artificial Sequence: Synthetic oligonucleotide
  Antisense strand to SEQ ID NO: 1522828
auauuucagccaagaauga

SEQ ID NO: 1522830 - RNA, 19 nt, Artificial Sequence
  Description of Artificial Sequence: Synthetic oligonucleotide
  Sense strand starting at position 2985 of SEQ ID NO: 1244920
gcugaaauaugugcgggua

SEQ ID NO: 1522831 - RNA, 19 nt, Artificial Sequence
  Description of Artificial Sequence: Synthetic oligonucleotide
  Antisense strand to SEQ ID NO: 1522830
uacccgcacauauuucagc

SEQ ID NO: 1522832 - RNA, 19 nt, Artificial Sequence
  Description of Artificial Sequence: Synthetic oligonucleotide
  Sense strand starting at position 2988 of SEQ ID NO: 1244920
gaaauaugugcggguaccu

SEQ ID NO: 1522833 - RNA, 19 nt, Artificial Sequence
  Description of Artificial Sequence: Synthetic oligonucleotide
  Antisense strand to SEQ ID NO: 1522832
agguacccgcacauauuuc

SEQ ID NO: 1522834 - RNA, 19 nt, Artificial Sequence
  Description of Artificial Sequence: Synthetic oligonucleotide
  Sense strand starting at position 3083 of SEQ ID NO: 1244920
acgaaauuacaucgggagu

SEQ ID NO: 1522835 - RNA, 19 nt, Artificial Sequence
  Description of Artificial Sequence: Synthetic oligonucleotide
  Antisense strand to SEQ ID NO: 1522834
acucccgauguaauuucgu

SEQ ID NO: 1522836 - RNA, 19 nt, Artificial Sequence
  Description of Artificial Sequence: Synthetic oligonucleotide
  Sense strand starting at position 323 of SEQ ID NO: 1244921
ugcagugugccgagagcua

SEQ ID NO: 1522837 - RNA, 19 nt, Artificial Sequence
  Description of Artificial Sequence: Synthetic oligonucleotide
  Antisense strand to SEQ ID NO: 1522836
uagcucucggcacacugca

SEQ ID NO: 1522838 - RNA, 19 nt, Artificial Sequence
  Description of Artificial Sequence: Synthetic oligonucleotide
  Sense strand starting at position 573 of SEQ ID NO: 1244921
ccgucuucucuacaagaaa

SEQ ID NO: 1522839 - RNA, 19 nt, Artificial Sequence
  Description of Artificial Sequence: Synthetic oligonucleotide
  Antisense strand to SEQ ID NO: 1522838
uuucuuguagagaagacgg

SEQ ID NO: 1522840 - RNA, 19 nt, Artificial Sequence
  Description of Artificial Sequence: Synthetic oligonucleotide
  Sense strand starting at position 672 of SEQ ID NO: 1244921
uuaguccauguuuacagaa

SEQ ID NO: 1522841 - RNA, 19 nt, Artificial Sequence
  Description of Artificial Sequence: Synthetic oligonucleotide
  Antisense strand to SEQ ID NO: 1522840
uucuguaaacauggacuaa

SEQ ID NO: 1522842 - RNA, 19 nt, Artificial Sequence
  Description of Artificial Sequence: Synthetic oligonucleotide
  Sense strand starting at position 802 of SEQ ID NO: 1244921
gggaaagcaucuccucaau

SEQ ID NO: 1522843 - RNA, 19 nt, Artificial Sequence
  Description of Artificial Sequence: Synthetic oligonucleotide
  Antisense strand to SEQ ID NO: 1522842
auugaggagaugcuuuccc

SEQ ID NO: 1522844 - RNA, 19 nt, Artificial Sequence
  Description of Artificial Sequence: Synthetic oligonucleotide
  Sense strand starting at position 837 of SEQ ID NO: 1244921
aucuuauaaggauguguaa

SEQ ID NO: 1522845 - RNA, 19 nt, Artificial Sequence
  Description of Artificial Sequence: Synthetic oligonucleotide
  Antisense strand to SEQ ID NO: 1522844
uuacacauccuuauaagau

SEQ ID NO: 1522846 - RNA, 19 nt, Artificial Sequence
  Description of Artificial Sequence: Synthetic oligonucleotide
  Sense strand starting at position 840 of SEQ ID NO: 1244921
uuauaaggauguguaaacu

SEQ ID NO: 1522847 - RNA, 19 nt, Artificial Sequence
  Description of Artificial Sequence: Synthetic oligonucleotide
  Antisense strand to SEQ ID NO: 1522846
aguuuacacauccuuauaa

SEQ ID NO: 1522848 - RNA, 19 nt, Artificial Sequence
  Description of Artificial Sequence: Synthetic oligonucleotide
  Sense strand starting at position 846 of SEQ ID NO: 1244921
ggauguguaaacuaagguu

SEQ ID NO: 1522849 - RNA, 19 nt, Artificial Sequence
  Description of Artificial Sequence: Synthetic oligonucleotide
  Antisense strand to SEQ ID NO: 1522848
aaccuuaguuuacacaucc

SEQ ID NO: 1522850 - RNA, 19 nt, Artificial Sequence
  Description of Artificial Sequence: Synthetic oligonucleotide
  Sense strand starting at position 855 of SEQ ID NO: 1244921
aacuaagguucuguuuaag

SEQ ID NO: 1522851 - RNA, 19 nt, Artificial Sequence
  Description of Artificial Sequence: Synthetic oligonucleotide
  Antisense strand to SEQ ID NO: 1522850
cuuaaacagaaccuuaguu

SEQ ID NO: 1522852 - RNA, 19 nt, Artificial Sequence
  Description of Artificial Sequence: Synthetic oligonucleotide
  Sense strand starting at position 946 of SEQ ID NO: 1244921
acuacuagguucucacgau

SEQ ID NO: 1522853 - RNA, 19 nt, Artificial Sequence
  Description of Artificial Sequence: Synthetic oligonucleotide
  Antisense strand to SEQ ID NO: 1522852
aucgugagaaccuaguagu

SEQ ID NO: 1522854 - RNA, 19 nt, Artificial Sequence
  Description of Artificial Sequence: Synthetic oligonucleotide
  Sense strand starting at position 1124 of SEQ ID NO: 1244921
gguacauccggaggagaga

SEQ ID NO: 1522855 - RNA, 19 nt, Artificial Sequence
  Description of Artificial Sequence: Synthetic oligonucleotide
  Antisense strand to SEQ ID NO: 1522854
ucucuccuccggauguacc

SEQ ID NO: 1522856 - RNA, 19 nt, Artificial Sequence
  Description of Artificial Sequence: Synthetic oligonucleotide
  Sense strand starting at position 1142 of SEQ ID NO: 1244921
agaaaucauuuagguggau

SEQ ID NO: 1522857 - RNA, 19 nt, Artificial Sequence
  Description of Artificial Sequence: Synthetic oligonucleotide
  Antisense strand to SEQ ID NO: 1522856
auccaccuaaaugauuucu

SEQ ID NO: 1522858 - RNA, 19 nt, Artificial Sequence
  Description of Artificial Sequence: Synthetic oligonucleotide
  Sense strand starting at position 1276 of SEQ ID NO: 1244921
aguaauccagguuguauaa

SEQ ID NO: 1522859 - RNA, 19 nt, Artificial Sequence
  Description of Artificial Sequence: Synthetic oligonucleotide
  Antisense strand to SEQ ID NO: 1522858
uuauacaaccuggauuacu

SEQ ID NO: 1522860 - RNA, 19 nt, Artificial Sequence
  Description of Artificial Sequence: Synthetic oligonucleotide
  Sense strand starting at position 1292 of SEQ ID NO: 1244921
uaagcuuggcacuagagaa

SEQ ID NO: 1522861 - RNA, 19 nt, Artificial Sequence
  Description of Artificial Sequence: Synthetic oligonucleotide
  Antisense strand to SEQ ID NO: 1522860
uucucuagugccaagcuua

SEQ ID NO: 1522862 - RNA, 19 nt, Artificial Sequence
  Description of Artificial Sequence: Synthetic oligonucleotide
  Sense strand starting at position 2209 of SEQ ID NO: 1244921
gaaucuccagccugggaau

SEQ ID NO: 1522863 - RNA, 19 nt, Artificial Sequence
  Description of Artificial Sequence: Synthetic oligonucleotide
  Antisense strand to SEQ ID NO: 1522862
auucccaggcuggagauuc

SEQ ID NO: 1522864 - RNA, 19 nt, Artificial Sequence
  Description of Artificial Sequence: Synthetic oligonucleotide
  Sense strand starting at position 2361 of SEQ ID NO: 1244921
gaaggacguaaccgauuau

SEQ ID NO: 1522865 - RNA, 19 nt, Artificial Sequence
  Description of Artificial Sequence: Synthetic oligonucleotide
  Antisense strand to SEQ ID NO: 1522864
auaaucgguuacguccuuc

SEQ ID NO: 1522866 - RNA, 19 nt, Artificial Sequence
  Description of Artificial Sequence: Synthetic oligonucleotide
  Sense strand starting at position 2383 of SEQ ID NO: 1244921
ggugucugguacccacaaa

SEQ ID NO: 1522867 - RNA, 19 nt, Artificial Sequence
  Description of Artificial Sequence: Synthetic oligonucleotide
  Antisense strand to SEQ ID NO: 1522866
uuuguggguaccagacacc

SEQ ID NO: 1522868 - RNA, 19 nt, Artificial Sequence
  Description of Artificial Sequence: Synthetic oligonucleotide
  Sense strand starting at position 2406 of SEQ ID NO: 1244921
auaguuagccacugaauau

SEQ ID NO: 1522869 - RNA, 19 nt, Artificial Sequence
  Description of Artificial Sequence: Synthetic oligonucleotide
  Antisense strand to SEQ ID NO: 1522868
auauucaguggcuaacuau

SEQ ID NO: 1522870 - RNA, 19 nt, Artificial Sequence
  Description of Artificial Sequence: Synthetic oligonucleotide
  Sense strand starting at position 2457 of SEQ ID NO: 1244921
gccuuuguccuagagaucc

SEQ ID NO: 1522871 - RNA, 19 nt, Artificial Sequence
  Description of Artificial Sequence: Synthetic oligonucleotide
  Antisense strand to SEQ ID NO: 1522870
ggaucucuaggacaaaggc

SEQ ID NO: 1522872 - RNA, 19 nt, Artificial Sequence
  Description of Artificial Sequence: Synthetic oligonucleotide
  Sense strand starting at position 2511 of SEQ ID NO: 1244921
uggucaugucuaggaggaa

SEQ ID NO: 1522873 - RNA, 19 nt, Artificial Sequence
  Description of Artificial Sequence: Synthetic oligonucleotide
  Antisense strand to SEQ ID NO: 1522872
uuccuccuagacaugacca

SEQ ID NO: 1522874 - RNA, 19 nt, Artificial Sequence
  Description of Artificial Sequence: Synthetic oligonucleotide
  Sense strand starting at position 2697 of SEQ ID NO: 1244921
uucuucuggcaaggaguau

SEQ ID NO: 1522875 - RNA, 19 nt, Artificial Sequence
  Description of Artificial Sequence: Synthetic oligonucleotide
  Antisense strand to SEQ ID NO: 1522874
auacuccuugccagaagaa

SEQ ID NO: 1522876 - RNA, 19 nt, Artificial Sequence
  Description of Artificial Sequence: Synthetic oligonucleotide
  Sense strand starting at position 2721 of SEQ ID NO: 1244921
gcuuuaggccugcuuugua

SEQ ID NO: 1522877 - RNA, 19 nt, Artificial Sequence
  Description of Artificial Sequence: Synthetic oligonucleotide
  Antisense strand to SEQ ID NO: 1522876
uacaaagcaggccuaaagc

SEQ ID NO: 1522878 - RNA, 19 nt, Artificial Sequence
  Description of Artificial Sequence: Synthetic oligonucleotide
  Sense strand starting at position 2734 of SEQ ID NO: 1244921
uuuguaauguagguuggaa

SEQ ID NO: 1522879 - RNA, 19 nt, Artificial Sequence
  Description of Artificial Sequence: Synthetic oligonucleotide
  Antisense strand to SEQ ID NO: 1522878
uuccaaccuacauuacaaa

SEQ ID NO: 1522880 - RNA, 19 nt, Artificial Sequence
  Description of Artificial Sequence: Synthetic oligonucleotide
  Sense strand starting at position 2824 of SEQ ID NO: 1244921
uuaacaucugauuggcgau

SEQ ID NO: 1522881 - RNA, 19 nt, Artificial Sequence
  Description of Artificial Sequence: Synthetic oligonucleotide
  Antisense strand to SEQ ID NO: 1522880
aucgccaaucagauguuaa

SEQ ID NO: 1522882 - RNA, 19 nt, Artificial Sequence
  Description of Artificial Sequence: Synthetic oligonucleotide
  Sense strand starting at position 2893 of SEQ ID NO: 1244921
ggcgaugucagauagccau

SEQ ID NO: 1522883 - RNA, 19 nt, Artificial Sequence
  Description of Artificial Sequence: Synthetic oligonucleotide
  Antisense strand to SEQ ID NO: 1522882
auggcuaucugacaucgcc

SEQ ID NO: 1522884 - RNA, 19 nt, Artificial Sequence
  Description of Artificial Sequence: Synthetic oligonucleotide
  Sense strand starting at position 2896 of SEQ ID NO: 1244921
gaugucagauagccauaga

SEQ ID NO: 1522885 - RNA, 19 nt, Artificial Sequence
  Description of Artificial Sequence: Synthetic oligonucleotide
  Antisense strand to SEQ ID NO: 1522884
ucuauggcuaucugacauc

SEQ ID NO: 1522886 - RNA, 19 nt, Artificial Sequence
  Description of Artificial Sequence: Synthetic oligonucleotide
  Sense strand starting at position 3033 of SEQ ID NO: 1244921
guccguggucuugugaauu

SEQ ID NO: 1522887 - RNA, 19 nt, Artificial Sequence
  Description of Artificial Sequence: Synthetic oligonucleotide
  Antisense strand to SEQ ID NO: 1522886
aauucacaagaccacggac

SEQ ID NO: 1522888 - RNA, 19 nt, Artificial Sequence
  Description of Artificial Sequence: Synthetic oligonucleotide
  Sense strand starting at position 3086 of SEQ ID NO: 1244921
ccaggaggcuaacauuuaa

SEQ ID NO: 1522889 - RNA, 19 nt, Artificial Sequence
  Description of Artificial Sequence: Synthetic oligonucleotide
  Antisense strand to SEQ ID NO: 1522888
uuaaauguuagccuccugg

SEQ ID NO: 1522890 - RNA, 19 nt, Artificial Sequence
  Description of Artificial Sequence: Synthetic oligonucleotide
  Sense strand starting at position 3179 of SEQ ID NO: 1244921
gaaauauucuuguugugau

SEQ ID NO: 1522891 - RNA, 19 nt, Artificial Sequence
  Description of Artificial Sequence: Synthetic oligonucleotide
  Antisense strand to SEQ ID NO: 1522890
aucacaacaagaauauuuc

SEQ ID NO: 1522892 - RNA, 19 nt, Artificial Sequence
  Description of Artificial Sequence: Synthetic oligonucleotide
  Sense strand starting at position 3186 of SEQ ID NO: 1244921
ucuuguugugaugauaugu

SEQ ID NO: 1522893 - RNA, 19 nt, Artificial Sequence
  Description of Artificial Sequence: Synthetic oligonucleotide
  Antisense strand to SEQ ID NO: 1522892
acauaucaucacaacaaga

SEQ ID NO: 1522894 - RNA, 19 nt, Artificial Sequence
  Description of Artificial Sequence: Synthetic oligonucleotide
  Sense strand starting at position 3191 of SEQ ID NO: 1244921
uugugaugauaugucucau

SEQ ID NO: 1522895 - RNA, 19 nt, Artificial Sequence
  Description of Artificial Sequence: Synthetic oligonucleotide
  Antisense strand to SEQ ID NO: 1522894
augagacauaucaucacaa

SEQ ID NO: 1522896 - RNA, 19 nt, Artificial Sequence
  Description of Artificial Sequence: Synthetic oligonucleotide
  Sense strand starting at position 3214 of SEQ ID NO: 1244921
ggauuugucccacguguaa

SEQ ID NO: 1522897 - RNA, 19 nt, Artificial Sequence
  Description of Artificial Sequence: Synthetic oligonucleotide
  Antisense strand to SEQ ID NO: 1522896
uuacacgugggacaaaucc

SEQ ID NO: 1522898 - RNA, 19 nt, Artificial Sequence
  Description of Artificial Sequence: Synthetic oligonucleotide
  Sense strand starting at position 3216 of SEQ ID NO: 1244921
auuugucccacguguaacu

SEQ ID NO: 1522899 - RNA, 19 nt, Artificial Sequence
  Description of Artificial Sequence: Synthetic oligonucleotide
  Antisense strand to SEQ ID NO: 1522898
aguuacacgugggacaaau

SEQ ID NO: 1522900 - RNA, 19 nt, Artificial Sequence
  Description of Artificial Sequence: Synthetic oligonucleotide
  Sense strand starting at position 3260 of SEQ ID NO: 1244921
gcgaguagcuauuucagau

SEQ ID NO: 1522901 - RNA, 19 nt, Artificial Sequence
  Description of Artificial Sequence: Synthetic oligonucleotide
  Antisense strand to SEQ ID NO: 1522900
aucugaaauagcuacucgc

SEQ ID NO: 1522902 - RNA, 19 nt, Artificial Sequence
  Description of Artificial Sequence: Synthetic oligonucleotide
  Sense strand starting at position 3474 of SEQ ID NO: 1244921
ggccuucuaucaguuaaug

SEQ ID NO: 1522903 - RNA, 19 nt, Artificial Sequence
  Description of Artificial Sequence: Synthetic oligonucleotide
  Antisense strand to SEQ ID NO: 1522902
cauuaacugauagaaggcc

SEQ ID NO: 1522904 - RNA, 19 nt, Artificial Sequence
  Description of Artificial Sequence: Synthetic oligonucleotide
  Sense strand starting at position 3534 of SEQ ID NO: 1244921
aacauacuucuauguggga

SEQ ID NO: 1522905 - RNA, 19 nt, Artificial Sequence
  Description of Artificial Sequence: Synthetic oligonucleotide
  Antisense strand to SEQ ID NO: 1522904
ucccacauagaaguauguu

SEQ ID NO: 1522906 - RNA, 19 nt, Artificial Sequence
  Description of Artificial Sequence: Synthetic oligonucleotide
  Sense strand starting at position 3664 of SEQ ID NO: 1244921
caaggagugucuucuggac

SEQ ID NO: 1522907 - RNA, 19 nt, Artificial Sequence
  Description of Artificial Sequence: Synthetic oligonucleotide
  Antisense strand to SEQ ID NO: 1522906
guccagaagacacuccuug

SEQ ID NO: 1522908 - RNA, 19 nt, Artificial Sequence
  Description of Artificial Sequence: Synthetic oligonucleotide
  Sense strand starting at position 3668 of SEQ ID NO: 1244921
gagugucuucuggacuuga

SEQ ID NO: 1522909 - RNA, 19 nt, Artificial Sequence
  Description of Artificial Sequence: Synthetic oligonucleotide
  Antisense strand to SEQ ID NO: 1522908
ucaaguccagaagacacuc

SEQ ID NO: 1522910 - RNA, 19 nt, Artificial Sequence
  Description of Artificial Sequence: Synthetic oligonucleotide
  Sense strand starting at position 3679 of SEQ ID NO: 1244921
ggacuugaugcuuggguga

SEQ ID NO: 1522911 - RNA, 19 nt, Artificial Sequence
  Description of Artificial Sequence: Synthetic oligonucleotide
  Antisense strand to SEQ ID NO: 1522910
ucacccaagcaucaagucc

SEQ ID NO: 1522912 - RNA, 19 nt, Artificial Sequence
  Description of Artificial Sequence: Synthetic oligonucleotide
  Sense strand starting at position 3682 of SEQ ID NO: 1244921
cuugaugcuugggugaaca

SEQ ID NO: 1522913 - RNA, 19 nt, Artificial Sequence
  Description of Artificial Sequence: Synthetic oligonucleotide
  Antisense strand to SEQ ID NO: 1522912
uguucacccaagcaucaag

SEQ ID NO: 1522914 - RNA, 19 nt, Artificial Sequence
  Description of Artificial Sequence: Synthetic oligonucleotide
  Sense strand starting at position 3684 of SEQ ID NO: 1244921
ugaugcuugggugaacaga

SEQ ID NO: 1522915 - RNA, 19 nt, Artificial Sequence
  Description of Artificial Sequence: Synthetic oligonucleotide
  Antisense strand to SEQ ID NO: 1522914
ucuguucacccaagcauca

SEQ ID NO: 1522916 - RNA, 19 nt, Artificial Sequence
  Description of Artificial Sequence: Synthetic oligonucleotide
  Sense strand starting at position 21 of SEQ ID NO: 1244922
uccauuaacuggcuggaaa

SEQ ID NO: 1522917 - RNA, 19 nt, Artificial Sequence
  Description of Artificial Sequence: Synthetic oligonucleotide
  Antisense strand to SEQ ID NO: 1522916
uuuccagccaguuaaugga

SEQ ID NO: 1522918 - RNA, 19 nt, Artificial Sequence
  Description of Artificial Sequence: Synthetic oligonucleotide
  Sense strand starting at position 22 of SEQ ID NO: 1244922
ccauuaacuggcuggaaau

SEQ ID NO: 1522919 - RNA, 19 nt, Artificial Sequence
  Description of Artificial Sequence: Synthetic oligonucleotide
  Antisense strand to SEQ ID NO: 1522918
auuuccagccaguuaaugg

SEQ ID NO: 1522920 - RNA, 19 nt, Artificial Sequence
  Description of Artificial Sequence: Synthetic oligonucleotide
  Sense strand starting at position 208 of SEQ ID NO: 1244922
gauacuacgccagaaagua

SEQ ID NO: 1522921 - RNA, 19 nt, Artificial Sequence
  Description of Artificial Sequence: Synthetic oligonucleotide
  Antisense strand to SEQ ID NO: 1522920
uacuuucuggcguaguauc

SEQ ID NO: 1522922 - RNA, 19 nt, Artificial Sequence
  Description of Artificial Sequence: Synthetic oligonucleotide
  Sense strand starting at position 275 of SEQ ID NO: 1244922
guuuauaggcuccacuaaa

SEQ ID NO: 1522923 - RNA, 19 nt, Artificial Sequence
  Description of Artificial Sequence: Synthetic oligonucleotide
  Antisense strand to SEQ ID NO: 1522922
uuuaguggagccuauaaac

SEQ ID NO: 1522924 - RNA, 19 nt, Artificial Sequence
  Description of Artificial Sequence: Synthetic oligonucleotide
  Sense strand starting at position 286 of SEQ ID NO: 1244922
ccacuaaaggcuggaaagu

SEQ ID NO: 1522925 - RNA, 19 nt, Artificial Sequence
  Description of Artificial Sequence: Synthetic oligonucleotide
  Antisense strand to SEQ ID NO: 1522924
acuuuccagccuuuagugg

SEQ ID NO: 1522926 - RNA, 19 nt, Artificial Sequence
  Description of Artificial Sequence: Synthetic oligonucleotide
  Sense strand starting at position 374 of SEQ ID NO: 1244922
accaaagauccuggcucau

SEQ ID NO: 1522927 - RNA, 19 nt, Artificial Sequence
  Description of Artificial Sequence: Synthetic oligonucleotide
  Antisense strand to SEQ ID NO: 1522926
augagccaggaucuuuggu

SEQ ID NO: 1522928 - RNA, 19 nt, Artificial Sequence
  Description of Artificial Sequence: Synthetic oligonucleotide
  Sense strand starting at position 452 of SEQ ID NO: 1244922
aucagcauucuugacugau

SEQ ID NO: 1522929 - RNA, 19 nt, Artificial Sequence
  Description of Artificial Sequence: Synthetic oligonucleotide
  Antisense strand to SEQ ID NO: 1522928
aucagucaagaaugcugau

SEQ ID NO: 1522930 - RNA, 19 nt, Artificial Sequence
  Description of Artificial Sequence: Synthetic oligonucleotide
  Sense strand starting at position 455 of SEQ ID NO: 1244922
agcauucuugacugaucaa

SEQ ID NO: 1522931 - RNA, 19 nt, Artificial Sequence
  Description of Artificial Sequence: Synthetic oligonucleotide
  Antisense strand to SEQ ID NO: 1522930
uugaucagucaagaaugcu

SEQ ID NO: 1522932 - RNA, 19 nt, Artificial Sequence
  Description of Artificial Sequence: Synthetic oligonucleotide
  Sense strand starting at position 458 of SEQ ID NO: 1244922
auucuugacugaucaagug

SEQ ID NO: 1522933 - RNA, 19 nt, Artificial Sequence
  Description of Artificial Sequence: Synthetic oligonucleotide
  Antisense strand to SEQ ID NO: 1522932
cacuugaucagucaagaau

SEQ ID NO: 1522934 - RNA, 19 nt, Artificial Sequence
  Description of Artificial Sequence: Synthetic oligonucleotide
  Sense strand starting at position 569 of SEQ ID NO: 1244922
uugggcuuuccuuauccau

SEQ ID NO: 1522935 - RNA, 19 nt, Artificial Sequence
  Description of Artificial Sequence: Synthetic oligonucleotide
  Antisense strand to SEQ ID NO: 1522934
auggauaaggaaagcccaa

SEQ ID NO: 1522936 - RNA, 19 nt, Artificial Sequence
  Description of Artificial Sequence: Synthetic oligonucleotide
  Sense strand starting at position 571 of SEQ ID NO: 1244922
gggcuuuccuuauccauga

SEQ ID NO: 1522937 - RNA, 19 nt, Artificial Sequence
  Description of Artificial Sequence: Synthetic oligonucleotide
  Antisense strand to SEQ ID NO: 1522936
ucauggauaaggaaagccc

SEQ ID NO: 1522938 - RNA, 19 nt, Artificial Sequence
  Description of Artificial Sequence: Synthetic oligonucleotide
  Sense strand starting at position 572 of SEQ ID NO: 1244922
ggcuuuccuuauccaugau

SEQ ID NO: 1522939 - RNA, 19 nt, Artificial Sequence
  Description of Artificial Sequence: Synthetic oligonucleotide
  Antisense strand to SEQ ID NO: 1522938
aucauggauaaggaaagcc

SEQ ID NO: 1522940 - RNA, 19 nt, Artificial Sequence
  Description of Artificial Sequence: Synthetic oligonucleotide
  Sense strand starting at position 584 of SEQ ID NO: 1244922
ccaugauucuggccaucuc

SEQ ID NO: 1522941 - RNA, 19 nt, Artificial Sequence
  Description of Artificial Sequence: Synthetic oligonucleotide
  Antisense strand to SEQ ID NO: 1522940
gagauggccagaaucaugg

SEQ ID NO: 1522942 - RNA, 19 nt, Artificial Sequence
  Description of Artificial Sequence: Synthetic oligonucleotide
  Sense strand starting at position 643 of SEQ ID NO: 1244922
agauaaugcugaguaccau

SEQ ID NO: 1522943 - RNA, 19 nt, Artificial Sequence
  Description of Artificial Sequence: Synthetic oligonucleotide
  Antisense strand to SEQ ID NO: 1522942
augguacucagcauuaucu

SEQ ID NO: 1522944 - RNA, 19 nt, Artificial Sequence
  Description of Artificial Sequence: Synthetic oligonucleotide
  Sense strand starting at position 644 of SEQ ID NO: 1244922
gauaaugcugaguaccauu

SEQ ID NO: 1522945 - RNA, 19 nt, Artificial Sequence
  Description of Artificial Sequence: Synthetic oligonucleotide
  Antisense strand to SEQ ID NO: 1522944
aaugguacucagcauuauc

SEQ ID NO: 1522946 - RNA, 19 nt, Artificial Sequence
  Description of Artificial Sequence: Synthetic oligonucleotide
  Sense strand starting at position 728 of SEQ ID NO: 1244922
acagucaaugugcagagua

SEQ ID NO: 1522947 - RNA, 19 nt, Artificial Sequence
  Description of Artificial Sequence: Synthetic oligonucleotide
  Antisense strand to SEQ ID NO: 1522946
uacucugcacauugacugu

SEQ ID NO: 1522948 - RNA, 19 nt, Artificial Sequence
  Description of Artificial Sequence: Synthetic oligonucleotide
  Sense strand starting at position 730 of SEQ ID NO: 1244922
agucaaugugcagaguacu

SEQ ID NO: 1522949 - RNA, 19 nt, Artificial Sequence
  Description of Artificial Sequence: Synthetic oligonucleotide
  Antisense strand to SEQ ID NO: 1522948
aguacucugcacauugacu

SEQ ID NO: 1522950 - RNA, 19 nt, Artificial Sequence
  Description of Artificial Sequence: Synthetic oligonucleotide
  Sense strand starting at position 909 of SEQ ID NO: 1244922
gggcucuuaucauuaaaua

SEQ ID NO: 1522951 - RNA, 19 nt, Artificial Sequence
  Description of Artificial Sequence: Synthetic oligonucleotide
  Antisense strand to SEQ ID NO: 1522950
uauuuaaugauaagagccc

SEQ ID NO: 1522952 - RNA, 19 nt, Artificial Sequence
  Description of Artificial Sequence: Synthetic oligonucleotide
  Sense strand starting at position 938 of SEQ ID NO: 1244922
ccuucuuuccugggaggca

SEQ ID NO: 1522953 - RNA, 19 nt, Artificial Sequence
  Description of Artificial Sequence: Synthetic oligonucleotide
  Antisense strand to SEQ ID NO: 1522952
ugccucccaggaaagaagg

SEQ ID NO: 1522954 - RNA, 19 nt, Artificial Sequence
  Description of Artificial Sequence: Synthetic oligonucleotide
  Sense strand starting at position 1038 of SEQ ID NO: 1244922
ugaguugcagcucaaauua

SEQ ID NO: 1522955 - RNA, 19 nt, Artificial Sequence
  Description of Artificial Sequence: Synthetic oligonucleotide
  Antisense strand to SEQ ID NO: 1522954
uaauuugagcugcaacuca

SEQ ID NO: 1522956 - RNA, 19 nt, Artificial Sequence
  Description of Artificial Sequence: Synthetic oligonucleotide
  Sense strand starting at position 1838 of SEQ ID NO: 1244922
cuccaucuuggguggacaa

SEQ ID NO: 1522957 - RNA, 19 nt, Artificial Sequence
  Description of Artificial Sequence: Synthetic oligonucleotide
  Antisense strand to SEQ ID NO: 1522956
uuguccacccaagauggag

SEQ ID NO: 1522958 - RNA, 19 nt, Artificial Sequence
  Description of Artificial Sequence: Synthetic oligonucleotide
  Sense strand starting at position 2173 of SEQ ID NO: 1244922
uuugauuccucuguauauu

SEQ ID NO: 1522959 - RNA, 19 nt, Artificial Sequence
  Description of Artificial Sequence: Synthetic oligonucleotide
  Antisense strand to SEQ ID NO: 1522958
aauauacagaggaaucaaa

SEQ ID NO: 1522960 - RNA, 19 nt, Artificial Sequence
  Description of Artificial Sequence: Synthetic oligonucleotide
  Sense strand starting at position 2174 of SEQ ID NO: 1244922
uugauuccucuguauauug

SEQ ID NO: 1522961 - RNA, 19 nt, Artificial Sequence
  Description of Artificial Sequence: Synthetic oligonucleotide
  Antisense strand to SEQ ID NO: 1522960
caauauacagaggaaucaa

SEQ ID NO: 1522962 - RNA, 19 nt, Artificial Sequence
  Description of Artificial Sequence: Synthetic oligonucleotide
  Sense strand starting at position 2183 of SEQ ID NO: 1244922
cuguauauuggucaaucua

SEQ ID NO: 1522963 - RNA, 19 nt, Artificial Sequence
  Description of Artificial Sequence: Synthetic oligonucleotide
  Antisense strand to SEQ ID NO: 1522962
uagauugaccaauauacag

SEQ ID NO: 1522964 - RNA, 19 nt, Artificial Sequence
  Description of Artificial Sequence: Synthetic oligonucleotide
  Sense strand starting at position 2228 of SEQ ID NO: 1244922
agacgagucaaucacgcaa

SEQ ID NO: 1522965 - RNA, 19 nt, Artificial Sequence
  Description of Artificial Sequence: Synthetic oligonucleotide
  Antisense strand to SEQ ID NO: 1522964
uugcgugauugacucgucu

SEQ ID NO: 1522966 - RNA, 19 nt, Artificial Sequence
  Description of Artificial Sequence: Synthetic oligonucleotide
  Sense strand starting at position 2602 of SEQ ID NO: 1244922
cggcccuucucauuuauaa

SEQ ID NO: 1522967 - RNA, 19 nt, Artificial Sequence
  Description of Artificial Sequence: Synthetic oligonucleotide
  Antisense strand to SEQ ID NO: 1522966
uuauaaaugagaagggccg

SEQ ID NO: 1522968 - RNA, 19 nt, Artificial Sequence
  Description of Artificial Sequence: Synthetic oligonucleotide
  Sense strand starting at position 2910 of SEQ ID NO: 1244922
ugugaauacggcuacucaa

SEQ ID NO: 1522969 - RNA, 19 nt, Artificial Sequence
  Description of Artificial Sequence: Synthetic oligonucleotide
  Antisense strand to SEQ ID NO: 1522968
uugaguagccguauucaca

SEQ ID NO: 1522970 - RNA, 19 nt, Artificial Sequence
  Description of Artificial Sequence: Synthetic oligonucleotide
  Sense strand starting at position 2957 of SEQ ID NO: 1244922
auuguacgacuuuggacaa

SEQ ID NO: 1522971 - RNA, 19 nt, Artificial Sequence
  Description of Artificial Sequence: Synthetic oligonucleotide
  Antisense strand to SEQ ID NO: 1522970
uuguccaaagucguacaau

SEQ ID NO: 1522972 - RNA, 19 nt, Artificial Sequence
  Description of Artificial Sequence: Synthetic oligonucleotide
  Sense strand starting at position 3002 of SEQ ID NO: 1244922
guucccuagcugggaaaua

SEQ ID NO: 1522973 - RNA, 19 nt, Artificial Sequence
  Description of Artificial Sequence: Synthetic oligonucleotide
  Antisense strand to SEQ ID NO: 1522972
uauuucccagcuagggaac

SEQ ID NO: 1522974 - RNA, 19 nt, Artificial Sequence
  Description of Artificial Sequence: Synthetic oligonucleotide
  Sense strand starting at position 3327 of SEQ ID NO: 1244922
gccaauagggacuauaguu

SEQ ID NO: 1522975 - RNA, 19 nt, Artificial Sequence
  Description of Artificial Sequence: Synthetic oligonucleotide
  Antisense strand to SEQ ID NO: 1522974
aacuauagucccuauuggc

SEQ ID NO: 1522976 - RNA, 19 nt, Artificial Sequence
  Description of Artificial Sequence: Synthetic oligonucleotide
  Sense strand starting at position 3367 of SEQ ID NO: 1244922
guuaucauuucccaggaaa

SEQ ID NO: 1522977 - RNA, 19 nt, Artificial Sequence
  Description of Artificial Sequence: Synthetic oligonucleotide
  Antisense strand to SEQ ID NO: 1522976
uuuccugggaaaugauaac

SEQ ID NO: 1522978 - RNA, 19 nt, Artificial Sequence
  Description of Artificial Sequence: Synthetic oligonucleotide
  Sense strand starting at position 3626 of SEQ ID NO: 1244922
ccuggauacaguugaguca

SEQ ID NO: 1522979 - RNA, 19 nt, Artificial Sequence
  Description of Artificial Sequence: Synthetic oligonucleotide
  Antisense strand to SEQ ID NO: 1522978
ugacucaacuguauccagg

SEQ ID NO: 1522980 - RNA, 19 nt, Artificial Sequence
  Description of Artificial Sequence: Synthetic oligonucleotide
  Sense strand starting at position 3629 of SEQ ID NO: 1244922
ggauacaguugagucauga

SEQ ID NO: 1522981 - RNA, 19 nt, Artificial Sequence
  Description of Artificial Sequence: Synthetic oligonucleotide
  Antisense strand to SEQ ID NO: 1522980
ucaugacucaacuguaucc

SEQ ID NO: 1522982 - RNA, 19 nt, Artificial Sequence
  Description of Artificial Sequence: Synthetic oligonucleotide
  Sense strand starting at position 3680 of SEQ ID NO: 1244922
uaugaaguugggcauguua

SEQ ID NO: 1522983 - RNA, 19 nt, Artificial Sequence
  Description of Artificial Sequence: Synthetic oligonucleotide
  Antisense strand to SEQ ID NO: 1522982
uaacaugcccaacuucaua

SEQ ID NO: 1522984 - RNA, 19 nt, Artificial Sequence
  Description of Artificial Sequence: Synthetic oligonucleotide
  Sense strand starting at position 3682 of SEQ ID NO: 1244922
ugaaguugggcauguuaau

SEQ ID NO: 1522985 - RNA, 19 nt, Artificial Sequence
  Description of Artificial Sequence: Synthetic oligonucleotide
  Antisense strand to SEQ ID NO: 1522984
auuaacaugcccaacuuca

SEQ ID NO: 1522986 - RNA, 19 nt, Artificial Sequence
  Description of Artificial Sequence: Synthetic oligonucleotide
  Sense strand starting at position 3725 of SEQ ID NO: 1244922
uucuuaucuggauauuggu

SEQ ID NO: 1522987 - RNA, 19 nt, Artificial Sequence
  Description of Artificial Sequence: Synthetic oligonucleotide
  Antisense strand to SEQ ID NO: 1522986
accaauauccagauaagaa

SEQ ID NO: 1522988 - RNA, 19 nt, Artificial Sequence
  Description of Artificial Sequence: Synthetic oligonucleotide
  Sense strand starting at position 3732 of SEQ ID NO: 1244922
cuggauauuggugaguauu

SEQ ID NO: 1522989 - RNA, 19 nt, Artificial Sequence
  Description of Artificial Sequence: Synthetic oligonucleotide
  Antisense strand to SEQ ID NO: 1522988
aauacucaccaauauccag

SEQ ID NO: 1522990 - RNA, 19 nt, Artificial Sequence
  Description of Artificial Sequence: Synthetic oligonucleotide
  Sense strand starting at position 3734 of SEQ ID NO: 1244922
ggauauuggugaguauuag

SEQ ID NO: 1522991 - RNA, 19 nt, Artificial Sequence
  Description of Artificial Sequence: Synthetic oligonucleotide
  Antisense strand to SEQ ID NO: 1522990
cuaauacucaccaauaucc

SEQ ID NO: 1522992 - RNA, 19 nt, Artificial Sequence
  Description of Artificial Sequence: Synthetic oligonucleotide
  Sense strand starting at position 3744 of SEQ ID NO: 1244922
gaguauuagcccuacaugu

SEQ ID NO: 1522993 - RNA, 19 nt, Artificial Sequence
  Description of Artificial Sequence: Synthetic oligonucleotide
  Antisense strand to SEQ ID NO: 1522992
acauguagggcuaauacuc

SEQ ID NO: 1522994 - RNA, 19 nt, Artificial Sequence
  Description of Artificial Sequence: Synthetic oligonucleotide
  Sense strand starting at position 3746 of SEQ ID NO: 1244922
guauuagcccuacauguaa

SEQ ID NO: 1522995 - RNA, 19 nt, Artificial Sequence
  Description of Artificial Sequence: Synthetic oligonucleotide
  Antisense strand to SEQ ID NO: 1522994
uuacauguagggcuaauac

SEQ ID NO: 1522996 - RNA, 19 nt, Artificial Sequence
  Description of Artificial Sequence: Synthetic oligonucleotide
  Sense strand starting at position 62 of SEQ ID NO: 1244923
uugugacucuaauacaaga

SEQ ID NO: 1522997 - RNA, 19 nt, Artificial Sequence
  Description of Artificial Sequence: Synthetic oligonucleotide
  Antisense strand to SEQ ID NO: 1522996
ucuuguauuagagucacaa

SEQ ID NO: 1522998 - RNA, 19 nt, Artificial Sequence
  Description of Artificial Sequence: Synthetic oligonucleotide
  Sense strand starting at position 172 of SEQ ID NO: 1244923
cuguaacucuaaguaagau

SEQ ID NO: 1522999 - RNA, 19 nt, Artificial Sequence
  Description of Artificial Sequence: Synthetic oligonucleotide
  Antisense strand to SEQ ID NO: 1522998
aucuuacuuagaguuacag

SEQ ID NO: 1523000 - RNA, 19 nt, Artificial Sequence
  Description of Artificial Sequence: Synthetic oligonucleotide
  Sense strand starting at position 223 of SEQ ID NO: 1244923
uggcauuaacaagguguua

SEQ ID NO: 1523001 - RNA, 19 nt, Artificial Sequence
  Description of Artificial Sequence: Synthetic oligonucleotide
  Antisense strand to SEQ ID NO: 1523000
uaacaccuuguuaaugcca

SEQ ID NO: 1523002 - RNA, 19 nt, Artificial Sequence
  Description of Artificial Sequence: Synthetic oligonucleotide
  Sense strand starting at position 351 of SEQ ID NO: 1244923
acagcagguuugguagaaa

SEQ ID NO: 1523003 - RNA, 19 nt, Artificial Sequence
  Description of Artificial Sequence: Synthetic oligonucleotide
  Antisense strand to SEQ ID NO: 1523002
uuucuaccaaaccugcugu

SEQ ID NO: 1523004 - RNA, 19 nt, Artificial Sequence
  Description of Artificial Sequence: Synthetic oligonucleotide
  Sense strand starting at position 354 of SEQ ID NO: 1244923
gcagguuugguagaaauga

SEQ ID NO: 1523005 - RNA, 19 nt, Artificial Sequence
  Description of Artificial Sequence: Synthetic oligonucleotide
  Antisense strand to SEQ ID NO: 1523004
ucauuucuaccaaaccugc

SEQ ID NO: 1523006 - RNA, 19 nt, Artificial Sequence
  Description of Artificial Sequence: Synthetic oligonucleotide
  Sense strand starting at position 412 of SEQ ID NO: 1244923
uuggaaugauacuucuuau

SEQ ID NO: 1523007 - RNA, 19 nt, Artificial Sequence
  Description of Artificial Sequence: Synthetic oligonucleotide
  Antisense strand to SEQ ID NO: 1523006
auaagaaguaucauuccaa

SEQ ID NO: 1523008 - RNA, 19 nt, Artificial Sequence
  Description of Artificial Sequence: Synthetic oligonucleotide
  Sense strand starting at position 513 of SEQ ID NO: 1244923
gugacuucccuauaguuaa

SEQ ID NO: 1523009 - RNA, 19 nt, Artificial Sequence
  Description of Artificial Sequence: Synthetic oligonucleotide
  Antisense strand to SEQ ID NO: 1523008
uuaacuauagggaagucac

SEQ ID NO: 1523010 - RNA, 19 nt, Artificial Sequence
  Description of Artificial Sequence: Synthetic oligonucleotide
  Sense strand starting at position 607 of SEQ ID NO: 1244923
auuguucuguuaucaugau

SEQ ID NO: 1523011 - RNA, 19 nt, Artificial Sequence
  Description of Artificial Sequence: Synthetic oligonucleotide
  Antisense strand to SEQ ID NO: 1523010
aucaugauaacagaacaau

SEQ ID NO: 1523012 - RNA, 19 nt, Artificial Sequence
  Description of Artificial Sequence: Synthetic oligonucleotide
  Sense strand starting at position 613 of SEQ ID NO: 1244923
cuguuaucaugauuaccau

SEQ ID NO: 1523013 - RNA, 19 nt, Artificial Sequence
  Description of Artificial Sequence: Synthetic oligonucleotide
  Antisense strand to SEQ ID NO: 1523012
augguaaucaugauaacag

SEQ ID NO: 1523014 - RNA, 19 nt, Artificial Sequence
  Description of Artificial Sequence: Synthetic oligonucleotide
  Sense strand starting at position 757 of SEQ ID NO: 1244923
uagguuaacugccuuugau

SEQ ID NO: 1523015 - RNA, 19 nt, Artificial Sequence
  Description of Artificial Sequence: Synthetic oligonucleotide
  Antisense strand to SEQ ID NO: 1523014
aucaaaggcaguuaaccua

SEQ ID NO: 1523016 - RNA, 19 nt, Artificial Sequence
  Description of Artificial Sequence: Synthetic oligonucleotide
  Sense strand starting at position 793 of SEQ ID NO: 1244923
ggucacuaauuccacagaa

SEQ ID NO: 1523017 - RNA, 19 nt, Artificial Sequence
  Description of Artificial Sequence: Synthetic oligonucleotide
  Antisense strand to SEQ ID NO: 1523016
uucuguggaauuagugacc

SEQ ID NO: 1523018 - RNA, 19 nt, Artificial Sequence
  Description of Artificial Sequence: Synthetic oligonucleotide
  Sense strand starting at position 1028 of SEQ ID NO: 1244923
gugagaugucaacaugcau

SEQ ID NO: 1523019 - RNA, 19 nt, Artificial Sequence
  Description of Artificial Sequence: Synthetic oligonucleotide
  Antisense strand to SEQ ID NO: 1523018
augcauguugacaucucac

SEQ ID NO: 1523020 - RNA, 19 nt, Artificial Sequence
  Description of Artificial Sequence: Synthetic oligonucleotide
  Sense strand starting at position 1235 of SEQ ID NO: 1244923
ucaguuccugcauacauua

SEQ ID NO: 1523021 - RNA, 19 nt, Artificial Sequence
  Description of Artificial Sequence: Synthetic oligonucleotide
  Antisense strand to SEQ ID NO: 1523020
uaauguaugcaggaacuga

SEQ ID NO: 1523022 - RNA, 19 nt, Artificial Sequence
  Description of Artificial Sequence: Synthetic oligonucleotide
  Sense strand starting at position 1251 of SEQ ID NO: 1244923
uuauuuaccgagugccuau

SEQ ID NO: 1523023 - RNA, 19 nt, Artificial Sequence
  Description of Artificial Sequence: Synthetic oligonucleotide
  Antisense strand to SEQ ID NO: 1523022
auaggcacucgguaaauaa

SEQ ID NO: 1523024 - RNA, 19 nt, Artificial Sequence
  Description of Artificial Sequence: Synthetic oligonucleotide
  Sense strand starting at position 1311 of SEQ ID NO: 1244923
aaauaauucuaguucggca

SEQ ID NO: 1523025 - RNA, 19 nt, Artificial Sequence
  Description of Artificial Sequence: Synthetic oligonucleotide
  Antisense strand to SEQ ID NO: 1523024
ugccgaacuagaauuauuu

SEQ ID NO: 1523026 - RNA, 19 nt, Artificial Sequence
  Description of Artificial Sequence: Synthetic oligonucleotide
  Sense strand starting at position 1366 of SEQ ID NO: 1244923
ccaccugagcguugugaac

SEQ ID NO: 1523027 - RNA, 19 nt, Artificial Sequence
  Description of Artificial Sequence: Synthetic oligonucleotide
  Antisense strand to SEQ ID NO: 1523026
guucacaacgcucaggugg

SEQ ID NO: 1523028 - RNA, 19 nt, Artificial Sequence
  Description of Artificial Sequence: Synthetic oligonucleotide
  Sense strand starting at position 2152 of SEQ ID NO: 1244923
ggcgucauagcggagagau

SEQ ID NO: 1523029 - RNA, 19 nt, Artificial Sequence
  Description of Artificial Sequence: Synthetic oligonucleotide
  Antisense strand to SEQ ID NO: 1523028
aucucuccgcuaugacgcc

SEQ ID NO: 1523030 - RNA, 19 nt, Artificial Sequence
  Description of Artificial Sequence: Synthetic oligonucleotide
  Sense strand starting at position 2153 of SEQ ID NO: 1244923
gcgucauagcggagagauu

SEQ ID NO: 1523031 - RNA, 19 nt, Artificial Sequence
  Description of Artificial Sequence: Synthetic oligonucleotide
  Antisense strand to SEQ ID NO: 1523030
aaucucuccgcuaugacgc

SEQ ID NO: 1523032 - RNA, 19 nt, Artificial Sequence
  Description of Artificial Sequence: Synthetic oligonucleotide
  Sense strand starting at position 2162 of SEQ ID NO: 1244923
cggagagauugacagggaa

SEQ ID NO: 1523033 - RNA, 19 nt, Artificial Sequence
  Description of Artificial Sequence: Synthetic oligonucleotide
  Antisense strand to SEQ ID NO: 1523032
uucccugucaaucucuccg

SEQ ID NO: 1523034 - RNA, 19 nt, Artificial Sequence
  Description of Artificial Sequence: Synthetic oligonucleotide
  Sense strand starting at position 2174 of SEQ ID NO: 1244923
cagggaaucuggccaauga

SEQ ID NO: 1523035 - RNA, 19 nt, Artificial Sequence
  Description of Artificial Sequence: Synthetic oligonucleotide
  Antisense strand to SEQ ID NO: 1523034
ucauuggccagauucccug

SEQ ID NO: 1523036 - RNA, 19 nt, Artificial Sequence
  Description of Artificial Sequence: Synthetic oligonucleotide
  Sense strand starting at position 2189 of SEQ ID NO: 1244923
augagaagggcucacuugu

SEQ ID NO: 1523037 - RNA, 19 nt, Artificial Sequence
  Description of Artificial Sequence: Synthetic oligonucleotide
  Antisense strand to SEQ ID NO: 1523036
acaagugagcccuucucau

SEQ ID NO: 1523038 - RNA, 19 nt, Artificial Sequence
  Description of Artificial Sequence: Synthetic oligonucleotide
  Sense strand starting at position 2293 of SEQ ID NO: 1244923
ggauguuuauucuccagga

SEQ ID NO: 1523039 - RNA, 19 nt, Artificial Sequence
  Description of Artificial Sequence: Synthetic oligonucleotide
  Antisense strand to SEQ ID NO: 1523038
uccuggagaauaaacaucc

SEQ ID NO: 1523040 - RNA, 19 nt, Artificial Sequence
  Description of Artificial Sequence: Synthetic oligonucleotide
  Sense strand starting at position 2294 of SEQ ID NO: 1244923
gauguuuauucuccaggaa

SEQ ID NO: 1523041 - RNA, 19 nt, Artificial Sequence
  Description of Artificial Sequence: Synthetic oligonucleotide
  Antisense strand to SEQ ID NO: 1523040
uuccuggagaauaaacauc

SEQ ID NO: 1523042 - RNA, 19 nt, Artificial Sequence
  Description of Artificial Sequence: Synthetic oligonucleotide
  Sense strand starting at position 2295 of SEQ ID NO: 1244923
auguuuauucuccaggaac

SEQ ID NO: 1523043 - RNA, 19 nt, Artificial Sequence
  Description of Artificial Sequence: Synthetic oligonucleotide
  Antisense strand to SEQ ID NO: 1523042
guuccuggagaauaaacau

SEQ ID NO: 1523044 - RNA, 19 nt, Artificial Sequence
  Description of Artificial Sequence: Synthetic oligonucleotide
  Sense strand starting at position 2888 of SEQ ID NO: 1244923
guuccauauaguggaagga

SEQ ID NO: 1523045 - RNA, 19 nt, Artificial Sequence
  Description of Artificial Sequence: Synthetic oligonucleotide
  Antisense strand to SEQ ID NO: 1523044
uccuuccacuauauggaac

SEQ ID NO: 1523046 - RNA, 19 nt, Artificial Sequence
  Description of Artificial Sequence: Synthetic oligonucleotide
  Sense strand starting at position 2962 of SEQ ID NO: 1244923
cuggacugcaacugguaaa

SEQ ID NO: 1523047 - RNA, 19 nt, Artificial Sequence
  Description of Artificial Sequence: Synthetic oligonucleotide
  Antisense strand to SEQ ID NO: 1523046
uuuaccaguugcaguccag

SEQ ID NO: 1523048 - RNA, 19 nt, Artificial Sequence
  Description of Artificial Sequence: Synthetic oligonucleotide
  Sense strand starting at position 2963 of SEQ ID NO: 1244923
uggacugcaacugguaaau

SEQ ID NO: 1523049 - RNA, 19 nt, Artificial Sequence
  Description of Artificial Sequence: Synthetic oligonucleotide
  Antisense strand to SEQ ID NO: 1523048
auuuaccaguugcagucca

SEQ ID NO: 1523050 - RNA, 19 nt, Artificial Sequence
  Description of Artificial Sequence: Synthetic oligonucleotide
  Sense strand starting at position 3130 of SEQ ID NO: 1244923
guuccaauuugacaaggaa

SEQ ID NO: 1523051 - RNA, 19 nt, Artificial Sequence
  Description of Artificial Sequence: Synthetic oligonucleotide
  Antisense strand to SEQ ID NO: 1523050
uuccuugucaaauuggaac

SEQ ID NO: 1523052 - RNA, 19 nt, Artificial Sequence
  Description of Artificial Sequence: Synthetic oligonucleotide
  Sense strand starting at position 3519 of SEQ ID NO: 1244923
auaaauguuugaguggauu

SEQ ID NO: 1523053 - RNA, 19 nt, Artificial Sequence
  Description of Artificial Sequence: Synthetic oligonucleotide
  Antisense strand to SEQ ID NO: 1523052
aauccacucaaacauuuau

SEQ ID NO: 1523054 - RNA, 19 nt, Artificial Sequence
  Description of Artificial Sequence: Synthetic oligonucleotide
  Sense strand starting at position 3581 of SEQ ID NO: 1244923
ugcacaauuugagugccua

SEQ ID NO: 1523055 - RNA, 19 nt, Artificial Sequence
  Description of Artificial Sequence: Synthetic oligonucleotide
  Antisense strand to SEQ ID NO: 1523054
uaggcacucaaauugugca

SEQ ID NO: 1523056 - RNA, 19 nt, Artificial Sequence
  Description of Artificial Sequence: Synthetic oligonucleotide
  Sense strand starting at position 3582 of SEQ ID NO: 1244923
gcacaauuugagugccuac

SEQ ID NO: 1523057 - RNA, 19 nt, Artificial Sequence
  Description of Artificial Sequence: Synthetic oligonucleotide
  Antisense strand to SEQ ID NO: 1523056
guaggcacucaaauugugc

SEQ ID NO: 1523058 - RNA, 19 nt, Artificial Sequence
  Description of Artificial Sequence: Synthetic oligonucleotide
  Sense strand starting at position 3678 of SEQ ID NO: 1244923
ccauucgugucauuucgau

SEQ ID NO: 1523059 - RNA, 19 nt, Artificial Sequence
  Description of Artificial Sequence: Synthetic oligonucleotide
  Antisense strand to SEQ ID NO: 1523058
aucgaaaugacacgaaugg

SEQ ID NO: 1523060 - RNA, 19 nt, Artificial Sequence
  Description of Artificial Sequence: Synthetic oligonucleotide
  Sense strand starting at position 3761 of SEQ ID NO: 1244923
uagugugaggguuacauga

SEQ ID NO: 1523061 - RNA, 19 nt, Artificial Sequence
  Description of Artificial Sequence: Synthetic oligonucleotide
  Antisense strand to SEQ ID NO: 1523060
ucauguaacccucacacua

SEQ ID NO: 1523062 - RNA, 19 nt, Artificial Sequence
  Description of Artificial Sequence: Synthetic oligonucleotide
  Sense strand starting at position 3768 of SEQ ID NO: 1244923
aggguuacaugagagaagu

SEQ ID NO: 1523063 - RNA, 19 nt, Artificial Sequence
  Description of Artificial Sequence: Synthetic oligonucleotide
  Antisense strand to SEQ ID NO: 1523062
acuucucucauguaacccu

SEQ ID NO: 1523064 - RNA, 19 nt, Artificial Sequence
  Description of Artificial Sequence: Synthetic oligonucleotide
  Sense strand starting at position 3839 of SEQ ID NO: 1244923
uggugugacaauuguggau

SEQ ID NO: 1523065 - RNA, 19 nt, Artificial Sequence
  Description of Artificial Sequence: Synthetic oligonucleotide
  Antisense strand to SEQ ID NO: 1523064
auccacaauugucacacca

SEQ ID NO: 1523066 - RNA, 19 nt, Artificial Sequence
  Description of Artificial Sequence: Synthetic oligonucleotide
  Sense strand starting at position 3843 of SEQ ID NO: 1244923
gugacaauuguggauguaa

SEQ ID NO: 1523067 - RNA, 19 nt, Artificial Sequence
  Description of Artificial Sequence: Synthetic oligonucleotide
  Antisense strand to SEQ ID NO: 1523066
uuacauccacaauugucac

SEQ ID NO: 1523068 - RNA, 19 nt, Artificial Sequence
  Description of Artificial Sequence: Synthetic oligonucleotide
  Sense strand starting at position 3845 of SEQ ID NO: 1244923
gacaauuguggauguaauu

SEQ ID NO: 1523069 - RNA, 19 nt, Artificial Sequence
  Description of Artificial Sequence: Synthetic oligonucleotide
  Antisense strand to SEQ ID NO: 1523068
aauuacauccacaauuguc

SEQ ID NO: 1523070 - RNA, 19 nt, Artificial Sequence
  Description of Artificial Sequence: Synthetic oligonucleotide
  Sense strand starting at position 3891 of SEQ ID NO: 1244923
gaggucaaccauuguuaca

SEQ ID NO: 1523071 - RNA, 19 nt, Artificial Sequence
  Description of Artificial Sequence: Synthetic oligonucleotide
  Antisense strand to SEQ ID NO: 1523070
uguaacaaugguugaccuc

SEQ ID NO: 1523072 - RNA, 19 nt, Artificial Sequence
  Description of Artificial Sequence: Synthetic oligonucleotide
  Sense strand starting at position 3893 of SEQ ID NO: 1244923
ggucaaccauuguuacaua

SEQ ID NO: 1523073 - RNA, 19 nt, Artificial Sequence
  Description of Artificial Sequence: Synthetic oligonucleotide
  Antisense strand to SEQ ID NO: 1523072
uauguaacaaugguugacc

SEQ ID NO: 1523074 - RNA, 19 nt, Artificial Sequence
  Description of Artificial Sequence: Synthetic oligonucleotide
  Sense strand starting at position 3973 of SEQ ID NO: 1244923
ggaaguugcccaugggcua

SEQ ID NO: 1523075 - RNA, 19 nt, Artificial Sequence
  Description of Artificial Sequence: Synthetic oligonucleotide
  Antisense strand to SEQ ID NO: 1523074
uagcccaugggcaacuucc

SEQ ID NO: 1523076 - RNA, 19 nt, Artificial Sequence
  Description of Artificial Sequence: Synthetic oligonucleotide
  Sense strand starting at position 134 of SEQ ID NO: 1244924
uggaguuucucuggccaca

SEQ ID NO: 1523077 - RNA, 19 nt, Artificial Sequence
  Description of Artificial Sequence: Synthetic oligonucleotide
  Antisense strand to SEQ ID NO: 1523076
uguggccagagaaacucca

SEQ ID NO: 1523078 - RNA, 19 nt, Artificial Sequence
  Description of Artificial Sequence: Synthetic oligonucleotide
  Sense strand starting at position 136 of SEQ ID NO: 1244924
gaguuucucuggccacaga

SEQ ID NO: 1523079 - RNA, 19 nt, Artificial Sequence
  Description of Artificial Sequence: Synthetic oligonucleotide
  Antisense strand to SEQ ID NO: 1523078
ucuguggccagagaaacuc

SEQ ID NO: 1523080 - RNA, 19 nt, Artificial Sequence
  Description of Artificial Sequence: Synthetic oligonucleotide
  Sense strand starting at position 167 of SEQ ID NO: 1244924
caaugaaggugauauugag

SEQ ID NO: 1523081 - RNA, 19 nt, Artificial Sequence
  Description of Artificial Sequence: Synthetic oligonucleotide
  Antisense strand to SEQ ID NO: 1523080
cucaauaucaccuucauug

SEQ ID NO: 1523082 - RNA, 19 nt, Artificial Sequence
  Description of Artificial Sequence: Synthetic oligonucleotide
  Sense strand starting at position 173 of SEQ ID NO: 1244924
aggugauauugaggacuuc

SEQ ID NO: 1523083 - RNA, 19 nt, Artificial Sequence
  Description of Artificial Sequence: Synthetic oligonucleotide
  Antisense strand to SEQ ID NO: 1523082
gaaguccucaauaucaccu

SEQ ID NO: 1523084 - RNA, 19 nt, Artificial Sequence
  Description of Artificial Sequence: Synthetic oligonucleotide
  Sense strand starting at position 179 of SEQ ID NO: 1244924
uauugaggacuucgugaga

SEQ ID NO: 1523085 - RNA, 19 nt, Artificial Sequence
  Description of Artificial Sequence: Synthetic oligonucleotide
  Antisense strand to SEQ ID NO: 1523084
ucucacgaaguccucaaua

SEQ ID NO: 1523086 - RNA, 19 nt, Artificial Sequence
  Description of Artificial Sequence: Synthetic oligonucleotide
  Sense strand starting at position 184 of SEQ ID NO: 1244924
aggacuucgugagaaugca

SEQ ID NO: 1523087 - RNA, 19 nt, Artificial Sequence
  Description of Artificial Sequence: Synthetic oligonucleotide
  Antisense strand to SEQ ID NO: 1523086
ugcauucucacgaaguccu

SEQ ID NO: 1523088 - RNA, 19 nt, Artificial Sequence
  Description of Artificial Sequence: Synthetic oligonucleotide
  Sense strand starting at position 229 of SEQ ID NO: 1244924
aauguuacauggcagaacu

SEQ ID NO: 1523089 - RNA, 19 nt, Artificial Sequence
  Description of Artificial Sequence: Synthetic oligonucleotide
  Antisense strand to SEQ ID NO: 1523088
aguucugccauguaacauu

SEQ ID NO: 1523090 - RNA, 19 nt, Artificial Sequence
  Description of Artificial Sequence: Synthetic oligonucleotide
  Sense strand starting at position 253 of SEQ ID NO: 1244924
agucuauguuacccagcau

SEQ ID NO: 1523091 - RNA, 19 nt, Artificial Sequence
  Description of Artificial Sequence: Synthetic oligonucleotide
  Antisense strand to SEQ ID NO: 1523090
augcuggguaacauagacu

SEQ ID NO: 1523092 - RNA, 19 nt, Artificial Sequence
  Description of Artificial Sequence: Synthetic oligonucleotide
  Sense strand starting at position 295 of SEQ ID NO: 1244924
gggcuagauucuugcccaa

SEQ ID NO: 1523093 - RNA, 19 nt, Artificial Sequence
  Description of Artificial Sequence: Synthetic oligonucleotide
  Antisense strand to SEQ ID NO: 1523092
uugggcaagaaucuagccc

SEQ ID NO: 1523094 - RNA, 19 nt, Artificial Sequence
  Description of Artificial Sequence: Synthetic oligonucleotide
  Sense strand starting at position 297 of SEQ ID NO: 1244924
gcuagauucuugcccaaag

SEQ ID NO: 1523095 - RNA, 19 nt, Artificial Sequence
  Description of Artificial Sequence: Synthetic oligonucleotide
  Antisense strand to SEQ ID NO: 1523094
cuuugggcaagaaucuagc

SEQ ID NO: 1523096 - RNA, 19 nt, Artificial Sequence
  Description of Artificial Sequence: Synthetic oligonucleotide
  Sense strand starting at position 298 of SEQ ID NO: 1244924
cuagauucuugcccaaaga

SEQ ID NO: 1523097 - RNA, 19 nt, Artificial Sequence
  Description of Artificial Sequence: Synthetic oligonucleotide
  Antisense strand to SEQ ID NO: 1523096
ucuuugggcaagaaucuag

SEQ ID NO: 1523098 - RNA, 19 nt, Artificial Sequence
  Description of Artificial Sequence: Synthetic oligonucleotide
  Sense strand starting at position 322 of SEQ ID NO: 1244924
uguuucuauugagcauauu

SEQ ID NO: 1523099 - RNA, 19 nt, Artificial Sequence
  Description of Artificial Sequence: Synthetic oligonucleotide
  Antisense strand to SEQ ID NO: 1523098
aauaugcucaauagaaaca

SEQ ID NO: 1523100 - RNA, 19 nt, Artificial Sequence
  Description of Artificial Sequence: Synthetic oligonucleotide
  Sense strand starting at position 323 of SEQ ID NO: 1244924
guuucuauugagcauauua

SEQ ID NO: 1523101 - RNA, 19 nt, Artificial Sequence
  Description of Artificial Sequence: Synthetic oligonucleotide
  Antisense strand to SEQ ID NO: 1523100
uaauaugcucaauagaaac

SEQ ID NO: 1523102 - RNA, 19 nt, Artificial Sequence
  Description of Artificial Sequence: Synthetic oligonucleotide
  Sense strand starting at position 325 of SEQ ID NO: 1244924
uucuauugagcauauuaag

SEQ ID NO: 1523103 - RNA, 19 nt, Artificial Sequence
  Description of Artificial Sequence: Synthetic oligonucleotide
  Antisense strand to SEQ ID NO: 1523102
cuuaauaugcucaauagaa

SEQ ID NO: 1523104 - RNA, 19 nt, Artificial Sequence
  Description of Artificial Sequence: Synthetic oligonucleotide
  Sense strand starting at position 436 of SEQ ID NO: 1244924
gccuguuccauugagggaa

SEQ ID NO: 1523105 - RNA, 19 nt, Artificial Sequence
  Description of Artificial Sequence: Synthetic oligonucleotide
  Antisense strand to SEQ ID NO: 1523104
uucccucaauggaacaggc

SEQ ID NO: 1523106 - RNA, 19 nt, Artificial Sequence
  Description of Artificial Sequence: Synthetic oligonucleotide
  Sense strand starting at position 439 of SEQ ID NO: 1244924
uguuccauugagggaagua

SEQ ID NO: 1523107 - RNA, 19 nt, Artificial Sequence
  Description of Artificial Sequence: Synthetic oligonucleotide
  Antisense strand to SEQ ID NO: 1523106
uacuucccucaauggaaca

SEQ ID NO: 1523108 - RNA, 19 nt, Artificial Sequence
  Description of Artificial Sequence: Synthetic oligonucleotide
  Sense strand starting at position 451 of SEQ ID NO: 1244924
ggaaguacacuuugugaga

SEQ ID NO: 1523109 - RNA, 19 nt, Artificial Sequence
  Description of Artificial Sequence: Synthetic oligonucleotide
  Antisense strand to SEQ ID NO: 1523108
ucucacaaaguguacuucc

SEQ ID NO: 1523110 - RNA, 19 nt, Artificial Sequence
  Description of Artificial Sequence: Synthetic oligonucleotide
  Sense strand starting at position 517 of SEQ ID NO: 1244924
caugguaugauaggguaaa

SEQ ID NO: 1523111 - RNA, 19 nt, Artificial Sequence
  Description of Artificial Sequence: Synthetic oligonucleotide
  Antisense strand to SEQ ID NO: 1523110
uuuacccuaucauaccaug

SEQ ID NO: 1523112 - RNA, 19 nt, Artificial Sequence
  Description of Artificial Sequence: Synthetic oligonucleotide
  Sense strand starting at position 550 of SEQ ID NO: 1244924
agaccucuggauugcuuaa

SEQ ID NO: 1523113 - RNA, 19 nt, Artificial Sequence
  Description of Artificial Sequence: Synthetic oligonucleotide
  Antisense strand to SEQ ID NO: 1523112
uuaagcaauccagaggucu

SEQ ID NO: 1523114 - RNA, 19 nt, Artificial Sequence
  Description of Artificial Sequence: Synthetic oligonucleotide
  Sense strand starting at position 626 of SEQ ID NO: 1244924
agaaguuaggcguaggaga

SEQ ID NO: 1523115 - RNA, 19 nt, Artificial Sequence
  Description of Artificial Sequence: Synthetic oligonucleotide
  Antisense strand to SEQ ID NO: 1523114
ucuccuacgccuaacuucu

SEQ ID NO: 1523116 - RNA, 19 nt, Artificial Sequence
  Description of Artificial Sequence: Synthetic oligonucleotide
  Sense strand starting at position 929 of SEQ ID NO: 1244924
cguggcaccuccuuuauga

SEQ ID NO: 1523117 - RNA, 19 nt, Artificial Sequence
  Description of Artificial Sequence: Synthetic oligonucleotide
  Antisense strand to SEQ ID NO: 1523116
ucauaaaggaggugccacg

SEQ ID NO: 1523118 - RNA, 19 nt, Artificial Sequence
  Description of Artificial Sequence: Synthetic oligonucleotide
  Sense strand starting at position 931 of SEQ ID NO: 1244924
uggcaccuccuuuaugaaa

SEQ ID NO: 1523119 - RNA, 19 nt, Artificial Sequence
  Description of Artificial Sequence: Synthetic oligonucleotide
  Antisense strand to SEQ ID NO: 1523118
uuucauaaaggaggugcca

SEQ ID NO: 1523120 - RNA, 19 nt, Artificial Sequence
  Description of Artificial Sequence: Synthetic oligonucleotide
  Sense strand starting at position 986 of SEQ ID NO: 1244924
guguguagaacacauucuu

SEQ ID NO: 1523121 - RNA, 19 nt, Artificial Sequence
  Description of Artificial Sequence: Synthetic oligonucleotide
  Antisense strand to SEQ ID NO: 1523120
aagaauguguucuacacac

SEQ ID NO: 1523122 - RNA, 19 nt, Artificial Sequence
  Description of Artificial Sequence: Synthetic oligonucleotide
  Sense strand starting at position 1025 of SEQ ID NO: 1244924
ucaguucauucggguagga

SEQ ID NO: 1523123 - RNA, 19 nt, Artificial Sequence
  Description of Artificial Sequence: Synthetic oligonucleotide
  Antisense strand to SEQ ID NO: 1523122
uccuacccgaaugaacuga

SEQ ID NO: 1523124 - RNA, 19 nt, Artificial Sequence
  Description of Artificial Sequence: Synthetic oligonucleotide
  Sense strand starting at position 1027 of SEQ ID NO: 1244924
aguucauucggguaggaac

SEQ ID NO: 1523125 - RNA, 19 nt, Artificial Sequence
  Description of Artificial Sequence: Synthetic oligonucleotide
  Antisense strand to SEQ ID NO: 1523124
guuccuacccgaaugaacu

SEQ ID NO: 1523126 - RNA, 19 nt, Artificial Sequence
  Description of Artificial Sequence: Synthetic oligonucleotide
  Sense strand starting at position 1190 of SEQ ID NO: 1244924
gggcuugaaugccaaguua

SEQ ID NO: 1523127 - RNA, 19 nt, Artificial Sequence
  Description of Artificial Sequence: Synthetic oligonucleotide
  Antisense strand to SEQ ID NO: 1523126
uaacuuggcauucaagccc

SEQ ID NO: 1523128 - RNA, 19 nt, Artificial Sequence
  Description of Artificial Sequence: Synthetic oligonucleotide
  Sense strand starting at position 1208 of SEQ ID NO: 1244924
aagggaaucuggucaguag

SEQ ID NO: 1523129 - RNA, 19 nt, Artificial Sequence
  Description of Artificial Sequence: Synthetic oligonucleotide
  Antisense strand to SEQ ID NO: 1523128
cuacugaccagauucccuu

SEQ ID NO: 1523130 - RNA, 19 nt, Artificial Sequence
  Description of Artificial Sequence: Synthetic oligonucleotide
  Sense strand starting at position 1209 of SEQ ID NO: 1244924
agggaaucuggucaguagu

SEQ ID NO: 1523131 - RNA, 19 nt, Artificial Sequence
  Description of Artificial Sequence: Synthetic oligonucleotide
  Antisense strand to SEQ ID NO: 1523130
acuacugaccagauucccu

SEQ ID NO: 1523132 - RNA, 19 nt, Artificial Sequence
  Description of Artificial Sequence: Synthetic oligonucleotide
  Sense strand starting at position 1219 of SEQ ID NO: 1244924
gucaguaguucccaaauga

SEQ ID NO: 1523133 - RNA, 19 nt, Artificial Sequence
  Description of Artificial Sequence: Synthetic oligonucleotide
  Antisense strand to SEQ ID NO: 1523132
ucauuugggaacuacugac

SEQ ID NO: 1523134 - RNA, 19 nt, Artificial Sequence
  Description of Artificial Sequence: Synthetic oligonucleotide
  Sense strand starting at position 1318 of SEQ ID NO: 1244924
aggcgauuccgagaaucag

SEQ ID NO: 1523135 - RNA, 19 nt, Artificial Sequence
  Description of Artificial Sequence: Synthetic oligonucleotide
  Antisense strand to SEQ ID NO: 1523134
cugauucucggaaucgccu

SEQ ID NO: 1523136 - RNA, 19 nt, Artificial Sequence
  Description of Artificial Sequence: Synthetic oligonucleotide
  Sense strand starting at position 1324 of SEQ ID NO: 1244924
uuccgagaaucagacaagu

SEQ ID NO: 1523137 - RNA, 19 nt, Artificial Sequence
  Description of Artificial Sequence: Synthetic oligonucleotide
  Antisense strand to SEQ ID NO: 1523136
acuugucugauucucggaa

SEQ ID NO: 1523138 - RNA, 19 nt, Artificial Sequence
  Description of Artificial Sequence: Synthetic oligonucleotide
  Sense strand starting at position 1382 of SEQ ID NO: 1244924
acgcaaaugagugagaugu

SEQ ID NO: 1523139 - RNA, 19 nt, Artificial Sequence
  Description of Artificial Sequence: Synthetic oligonucleotide
  Antisense strand to SEQ ID NO: 1523138
acaucucacucauuugcgu

SEQ ID NO: 1523140 - RNA, 19 nt, Artificial Sequence
  Description of Artificial Sequence: Synthetic oligonucleotide
  Sense strand starting at position 1384 of SEQ ID NO: 1244924
gcaaaugagugagauguau

SEQ ID NO: 1523141 - RNA, 19 nt, Artificial Sequence
  Description of Artificial Sequence: Synthetic oligonucleotide
  Antisense strand to SEQ ID NO: 1523140
auacaucucacucauuugc

SEQ ID NO: 1523142 - RNA, 19 nt, Artificial Sequence
  Description of Artificial Sequence: Synthetic oligonucleotide
  Sense strand starting at position 1471 of SEQ ID NO: 1244924
ggcagugaggccugagaaa

SEQ ID NO: 1523143 - RNA, 19 nt, Artificial Sequence
  Description of Artificial Sequence: Synthetic oligonucleotide
  Antisense strand to SEQ ID NO: 1523142
uuucucaggccucacugcc

SEQ ID NO: 1523144 - RNA, 19 nt, Artificial Sequence
  Description of Artificial Sequence: Synthetic oligonucleotide
  Sense strand starting at position 1572 of SEQ ID NO: 1244924
aucggaacgcgcuuucuua

SEQ ID NO: 1523145 - RNA, 19 nt, Artificial Sequence
  Description of Artificial Sequence: Synthetic oligonucleotide
  Antisense strand to SEQ ID NO: 1523144
uaagaaagcgcguuccgau

SEQ ID NO: 1523146 - RNA, 19 nt, Artificial Sequence
  Description of Artificial Sequence: Synthetic oligonucleotide
  Sense strand starting at position 1594 of SEQ ID NO: 1244924
gccucaugcgaccguuuga

SEQ ID NO: 1523147 - RNA, 19 nt, Artificial Sequence
  Description of Artificial Sequence: Synthetic oligonucleotide
  Antisense strand to SEQ ID NO: 1523146
ucaaacggucgcaugaggc

SEQ ID NO: 1523148 - RNA, 19 nt, Artificial Sequence
  Description of Artificial Sequence: Synthetic oligonucleotide
  Sense strand starting at position 1964 of SEQ ID NO: 1244924
ccaguaucuuggcguggaa

SEQ ID NO: 1523149 - RNA, 19 nt, Artificial Sequence
  Description of Artificial Sequence: Synthetic oligonucleotide
  Antisense strand to SEQ ID NO: 1523148
uuccacgccaagauacugg

SEQ ID NO: 1523150 - RNA, 19 nt, Artificial Sequence
  Description of Artificial Sequence: Synthetic oligonucleotide
  Sense strand starting at position 1966 of SEQ ID NO: 1244924
aguaucuuggcguggaacu

SEQ ID NO: 1523151 - RNA, 19 nt, Artificial Sequence
  Description of Artificial Sequence: Synthetic oligonucleotide
  Antisense strand to SEQ ID NO: 1523150
aguuccacgccaagauacu

SEQ ID NO: 1523152 - RNA, 19 nt, Artificial Sequence
  Description of Artificial Sequence: Synthetic oligonucleotide
  Sense strand starting at position 1967 of SEQ ID NO: 1244924
guaucuuggcguggaacuu

SEQ ID NO: 1523153 - RNA, 19 nt, Artificial Sequence
  Description of Artificial Sequence: Synthetic oligonucleotide
  Antisense strand to SEQ ID NO: 1523152
aaguuccacgccaagauac

SEQ ID NO: 1523154 - RNA, 19 nt, Artificial Sequence
  Description of Artificial Sequence: Synthetic oligonucleotide
  Sense strand starting at position 199 of SEQ ID NO: 1244925
auaugaaguucuccaacag

SEQ ID NO: 1523155 - RNA, 19 nt, Artificial Sequence
  Description of Artificial Sequence: Synthetic oligonucleotide
  Antisense strand to SEQ ID NO: 1523154
cuguuggagaacuucauau

SEQ ID NO: 1523156 - RNA, 19 nt, Artificial Sequence
  Description of Artificial Sequence: Synthetic oligonucleotide
  Sense strand starting at position 254 of SEQ ID NO: 1244925
cgggaaucgacugggaaga

SEQ ID NO: 1523157 - RNA, 19 nt, Artificial Sequence
  Description of Artificial Sequence: Synthetic oligonucleotide
  Antisense strand to SEQ ID NO: 1523156
ucuucccagucgauucccg

SEQ ID NO: 1523158 - RNA, 19 nt, Artificial Sequence
  Description of Artificial Sequence: Synthetic oligonucleotide
  Sense strand starting at position 284 of SEQ ID NO: 1244925
acguuucugggacgaugaa

SEQ ID NO: 1523159 - RNA, 19 nt, Artificial Sequence
  Description of Artificial Sequence: Synthetic oligonucleotide
  Antisense strand to SEQ ID NO: 1523158
uucaucgucccagaaacgu

SEQ ID NO: 1523160 - RNA, 19 nt, Artificial Sequence
  Description of Artificial Sequence: Synthetic oligonucleotide
  Sense strand starting at position 285 of SEQ ID NO: 1244925
cguuucugggacgaugaaa

SEQ ID NO: 1523161 - RNA, 19 nt, Artificial Sequence
  Description of Artificial Sequence: Synthetic oligonucleotide
  Antisense strand to SEQ ID NO: 1523160
uuucaucgucccagaaacg

SEQ ID NO: 1523162 - RNA, 19 nt, Artificial Sequence
  Description of Artificial Sequence: Synthetic oligonucleotide
  Sense strand starting at position 303 of SEQ ID NO: 1244925
aagggucugugacuuggua

SEQ ID NO: 1523163 - RNA, 19 nt, Artificial Sequence
  Description of Artificial Sequence: Synthetic oligonucleotide
  Antisense strand to SEQ ID NO: 1523162
uaccaagucacagacccuu

SEQ ID NO: 1523164 - RNA, 19 nt, Artificial Sequence
  Description of Artificial Sequence: Synthetic oligonucleotide
  Sense strand starting at position 727 of SEQ ID NO: 1244925
aaauuugauucucagacgu

SEQ ID NO: 1523165 - RNA, 19 nt, Artificial Sequence
  Description of Artificial Sequence: Synthetic oligonucleotide
  Antisense strand to SEQ ID NO: 1523164
acgucugagaaucaaauuu

SEQ ID NO: 1523166 - RNA, 19 nt, Artificial Sequence
  Description of Artificial Sequence: Synthetic oligonucleotide
  Sense strand starting at position 729 of SEQ ID NO: 1244925
auuugauucucagacguac

SEQ ID NO: 1523167 - RNA, 19 nt, Artificial Sequence
  Description of Artificial Sequence: Synthetic oligonucleotide
  Antisense strand to SEQ ID NO: 1523166
guacgucugagaaucaaau

SEQ ID NO: 1523168 - RNA, 19 nt, Artificial Sequence
  Description of Artificial Sequence: Synthetic oligonucleotide
  Sense strand starting at position 914 of SEQ ID NO: 1244925
gggauugagguuugcauca

SEQ ID NO: 1523169 - RNA, 19 nt, Artificial Sequence
  Description of Artificial Sequence: Synthetic oligonucleotide
  Antisense strand to SEQ ID NO: 1523168
ugaugcaaaccucaauccc

SEQ ID NO: 1523170 - RNA, 19 nt, Artificial Sequence
  Description of Artificial Sequence: Synthetic oligonucleotide
  Sense strand starting at position 951 of SEQ ID NO: 1244925
uugcaaaggccauaacuaa

SEQ ID NO: 1523171 - RNA, 19 nt, Artificial Sequence
  Description of Artificial Sequence: Synthetic oligonucleotide
  Antisense strand to SEQ ID NO: 1523170
uuaguuauggccuuugcaa

SEQ ID NO: 1523172 - RNA, 19 nt, Artificial Sequence
  Description of Artificial Sequence: Synthetic oligonucleotide
  Sense strand starting at position 1065 of SEQ ID NO: 1244925
ccucucaucgggugaauag

SEQ ID NO: 1523173 - RNA, 19 nt, Artificial Sequence
  Description of Artificial Sequence: Synthetic oligonucleotide
  Antisense strand to SEQ ID NO: 1523172
cuauucacccgaugagagg

SEQ ID NO: 1523174 - RNA, 19 nt, Artificial Sequence
  Description of Artificial Sequence: Synthetic oligonucleotide
  Sense strand starting at position 1066 of SEQ ID NO: 1244925
cucucaucgggugaauagu

SEQ ID NO: 1523175 - RNA, 19 nt, Artificial Sequence
  Description of Artificial Sequence: Synthetic oligonucleotide
  Antisense strand to SEQ ID NO: 1523174
acuauucacccgaugagag

SEQ ID NO: 1523176 - RNA, 19 nt, Artificial Sequence
  Description of Artificial Sequence: Synthetic oligonucleotide
  Sense strand starting at position 1370 of SEQ ID NO: 1244925
aaaugaucauuucggaaug

SEQ ID NO: 1523177 - RNA, 19 nt, Artificial Sequence
  Description of Artificial Sequence: Synthetic oligonucleotide
  Antisense strand to SEQ ID NO: 1523176
cauuccgaaaugaucauuu

SEQ ID NO: 1523178 - RNA, 19 nt, Artificial Sequence
  Description of Artificial Sequence: Synthetic oligonucleotide
  Sense strand starting at position 1372 of SEQ ID NO: 1244925
augaucauuucggaaugga

SEQ ID NO: 1523179 - RNA, 19 nt, Artificial Sequence
  Description of Artificial Sequence: Synthetic oligonucleotide
  Antisense strand to SEQ ID NO: 1523178
uccauuccgaaaugaucau

SEQ ID NO: 1523180 - RNA, 19 nt, Artificial Sequence
  Description of Artificial Sequence: Synthetic oligonucleotide
  Sense strand starting at position 1432 of SEQ ID NO: 1244925
agcuaugaguucucaaugu

SEQ ID NO: 1523181 - RNA, 19 nt, Artificial Sequence
  Description of Artificial Sequence: Synthetic oligonucleotide
  Antisense strand to SEQ ID NO: 1523180
acauugagaacucauagcu

SEQ ID NO: 1523182 - RNA, 19 nt, Artificial Sequence
  Description of Artificial Sequence: Synthetic oligonucleotide
  Sense strand starting at position 1439 of SEQ ID NO: 1244925
aguucucaauguuucgaga

SEQ ID NO: 1523183 - RNA, 19 nt, Artificial Sequence
  Description of Artificial Sequence: Synthetic oligonucleotide
  Antisense strand to SEQ ID NO: 1523182
ucucgaaacauugagaacu

SEQ ID NO: 1523184 - RNA, 19 nt, Artificial Sequence
  Description of Artificial Sequence: Synthetic oligonucleotide
  Sense strand starting at position 1472 of SEQ ID NO: 1244925
accucaaugcuuugugcau

SEQ ID NO: 1523185 - RNA, 19 nt, Artificial Sequence
  Description of Artificial Sequence: Synthetic oligonucleotide
  Antisense strand to SEQ ID NO: 1523184
augcacaaagcauugaggu

SEQ ID NO: 1523186 - RNA, 19 nt, Artificial Sequence
  Description of Artificial Sequence: Synthetic oligonucleotide
  Sense strand starting at position 1595 of SEQ ID NO: 1244925
guucaacuuugaguucgga

SEQ ID NO: 1523187 - RNA, 19 nt, Artificial Sequence
  Description of Artificial Sequence: Synthetic oligonucleotide
  Antisense strand to SEQ ID NO: 1523186
uccgaacucaaaguugaac

SEQ ID NO: 1523188 - RNA, 19 nt, Artificial Sequence
  Description of Artificial Sequence: Synthetic oligonucleotide
  Sense strand starting at position 1603 of SEQ ID NO: 1244925
uugaguucggaugguccua

SEQ ID NO: 1523189 - RNA, 19 nt, Artificial Sequence
  Description of Artificial Sequence: Synthetic oligonucleotide
  Antisense strand to SEQ ID NO: 1523188
uaggaccauccgaacucaa

SEQ ID NO: 1523190 - RNA, 19 nt, Artificial Sequence
  Description of Artificial Sequence: Synthetic oligonucleotide
  Sense strand starting at position 1656 of SEQ ID NO: 1244925
augcaacuccuaugaugau

SEQ ID NO: 1523191 - RNA, 19 nt, Artificial Sequence
  Description of Artificial Sequence: Synthetic oligonucleotide
  Antisense strand to SEQ ID NO: 1523190
aucaucauaggaguugcau

SEQ ID NO: 1523192 - RNA, 19 nt, Artificial Sequence
  Description of Artificial Sequence: Synthetic oligonucleotide
  Sense strand starting at position 1668 of SEQ ID NO: 1244925
ugaugaucccucuagccaa

SEQ ID NO: 1523193 - RNA, 19 nt, Artificial Sequence
  Description of Artificial Sequence: Synthetic oligonucleotide
  Antisense strand to SEQ ID NO: 1523192
uuggcuagagggaucauca

SEQ ID NO: 1523194 - RNA, 19 nt, Artificial Sequence
  Description of Artificial Sequence: Synthetic oligonucleotide
  Sense strand starting at position 1841 of SEQ ID NO: 1244925
cgugucaccgucguggaaa

SEQ ID NO: 1523195 - RNA, 19 nt, Artificial Sequence
  Description of Artificial Sequence: Synthetic oligonucleotide
  Antisense strand to SEQ ID NO: 1523194
uuuccacgacggugacacg

SEQ ID NO: 1523196 - RNA, 19 nt, Artificial Sequence
  Description of Artificial Sequence: Synthetic oligonucleotide
  Sense strand starting at position 2187 of SEQ ID NO: 1244925
agggcagaauugguggaaa

SEQ ID NO: 1523197 - RNA, 19 nt, Artificial Sequence
  Description of Artificial Sequence: Synthetic oligonucleotide
  Antisense strand to SEQ ID NO: 1523196
uuuccaccaauucugcccu

SEQ ID NO: 1523198 - RNA, 19 nt, Artificial Sequence
  Description of Artificial Sequence: Synthetic oligonucleotide
  Sense strand starting at position 2189 of SEQ ID NO: 1244925
ggcagaauugguggaaauc

SEQ ID NO: 1523199 - RNA, 19 nt, Artificial Sequence
  Description of Artificial Sequence: Synthetic oligonucleotide
  Antisense strand to SEQ ID NO: 1523198
gauuuccaccaauucugcc

SEQ ID NO: 1523200 - RNA, 19 nt, Artificial Sequence
  Description of Artificial Sequence: Synthetic oligonucleotide
  Sense strand starting at position 2213 of SEQ ID NO: 1244925
ggaggaauccugcauugug

SEQ ID NO: 1523201 - RNA, 19 nt, Artificial Sequence
  Description of Artificial Sequence: Synthetic oligonucleotide
  Antisense strand to SEQ ID NO: 1523200
cacaaugcaggauuccucc

SEQ ID NO: 1523202 - RNA, 19 nt, Artificial Sequence
  Description of Artificial Sequence: Synthetic oligonucleotide
  Sense strand starting at position 2216 of SEQ ID NO: 1244925
ggaauccugcauuguguca

SEQ ID NO: 1523203 - RNA, 19 nt, Artificial Sequence
  Description of Artificial Sequence: Synthetic oligonucleotide
  Antisense strand to SEQ ID NO: 1523202
ugacacaaugcaggauucc

SEQ ID NO: 1523204 - RNA, 19 nt, Artificial Sequence
  Description of Artificial Sequence: Synthetic oligonucleotide
  Sense strand starting at position 2278 of SEQ ID NO: 1244925
gcuggauccuuucuucuca

SEQ ID NO: 1523205 - RNA, 19 nt, Artificial Sequence
  Description of Artificial Sequence: Synthetic oligonucleotide
  Antisense strand to SEQ ID NO: 1523204
ugagaagaaaggauccagc

SEQ ID NO: 1523206 - RNA, 19 nt, Artificial Sequence
  Description of Artificial Sequence: Synthetic oligonucleotide
  Sense strand starting at position 2317 of SEQ ID NO: 1244925
uaggaaggcuuuccguaau

SEQ ID NO: 1523207 - RNA, 19 nt, Artificial Sequence
  Description of Artificial Sequence: Synthetic oligonucleotide
  Antisense strand to SEQ ID NO: 1523206
auuacggaaagccuuccua

SEQ ID NO: 1523208 - RNA, 19 nt, Artificial Sequence
  Description of Artificial Sequence: Synthetic oligonucleotide
  Sense strand starting at position 2320 of SEQ ID NO: 1244925
gaaggcuuuccguaauauc

SEQ ID NO: 1523209 - RNA, 19 nt, Artificial Sequence
  Description of Artificial Sequence: Synthetic oligonucleotide
  Antisense strand to SEQ ID NO: 1523208
gauauuacggaaagccuuc

SEQ ID NO: 1523210 - RNA, 19 nt, Artificial Sequence
  Description of Artificial Sequence: Synthetic oligonucleotide
  Sense strand starting at position 2500 of SEQ ID NO: 1244925
uuguauuccugagugccua

SEQ ID NO: 1523211 - RNA, 19 nt, Artificial Sequence
  Description of Artificial Sequence: Synthetic oligonucleotide
  Antisense strand to SEQ ID NO: 1523210
uaggcacucaggaauacaa

SEQ ID NO: 1523212 - RNA, 19 nt, Artificial Sequence
  Description of Artificial Sequence: Synthetic oligonucleotide
  Sense strand starting at position 2501 of SEQ ID NO: 1244925
uguauuccugagugccuau

SEQ ID NO: 1523213 - RNA, 19 nt, Artificial Sequence
  Description of Artificial Sequence: Synthetic oligonucleotide
  Antisense strand to SEQ ID NO: 1523212
auaggcacucaggaauaca

SEQ ID NO: 1523214 - RNA, 19 nt, Artificial Sequence
  Description of Artificial Sequence: Synthetic oligonucleotide
  Sense strand starting at position 2535 of SEQ ID NO: 1244925
caaguaagagcucgauaau

SEQ ID NO: 1523215 - RNA, 19 nt, Artificial Sequence
  Description of Artificial Sequence: Synthetic oligonucleotide
  Antisense strand to SEQ ID NO: 1523214
auuaucgagcucuuacuug

SEQ ID NO: 1523216 - RNA, 19 nt, Artificial Sequence
  Description of Artificial Sequence: Synthetic oligonucleotide
  Sense strand starting at position 2536 of SEQ ID NO: 1244925
aaguaagagcucgauaaua

SEQ ID NO: 1523217 - RNA, 19 nt, Artificial Sequence
  Description of Artificial Sequence: Synthetic oligonucleotide
  Antisense strand to SEQ ID NO: 1523216
uauuaucgagcucuuacuu

SEQ ID NO: 1523218 - RNA, 19 nt, Artificial Sequence
  Description of Artificial Sequence: Synthetic oligonucleotide
  Sense strand starting at position 2538 of SEQ ID NO: 1244925
guaagagcucgauaauaaa

SEQ ID NO: 1523219 - RNA, 19 nt, Artificial Sequence
  Description of Artificial Sequence: Synthetic oligonucleotide
  Antisense strand to SEQ ID NO: 1523218
uuuauuaucgagcucuuac

SEQ ID NO: 1523220 - RNA, 19 nt, Artificial Sequence
  Description of Artificial Sequence: Synthetic oligonucleotide
  Sense strand starting at position 2578 of SEQ ID NO: 1244925
aggucugaagccuggagaa

SEQ ID NO: 1523221 - RNA, 19 nt, Artificial Sequence
  Description of Artificial Sequence: Synthetic oligonucleotide
  Antisense strand to SEQ ID NO: 1523220
uucuccaggcuucagaccu

SEQ ID NO: 1523222 - RNA, 19 nt, Artificial Sequence
  Description of Artificial Sequence: Synthetic oligonucleotide
  Sense strand starting at position 2580 of SEQ ID NO: 1244925
gucugaagccuggagaaug

SEQ ID NO: 1523223 - RNA, 19 nt, Artificial Sequence
  Description of Artificial Sequence: Synthetic oligonucleotide
  Antisense strand to SEQ ID NO: 1523222
cauucuccaggcuucagac

SEQ ID NO: 1523224 - RNA, 19 nt, Artificial Sequence
  Description of Artificial Sequence: Synthetic oligonucleotide
  Sense strand starting at position 2665 of SEQ ID NO: 1244925
uaagaauuaccgcgggacu

SEQ ID NO: 1523225 - RNA, 19 nt, Artificial Sequence
  Description of Artificial Sequence: Synthetic oligonucleotide
  Antisense strand to SEQ ID NO: 1523224
agucccgcgguaauucuua

SEQ ID NO: 1523226 - RNA, 19 nt, Artificial Sequence
  Description of Artificial Sequence: Synthetic oligonucleotide
  Sense strand starting at position 2703 of SEQ ID NO: 1244925
gcuucucgccaagauagaa

SEQ ID NO: 1523227 - RNA, 19 nt, Artificial Sequence
  Description of Artificial Sequence: Synthetic oligonucleotide
  Antisense strand to SEQ ID NO: 1523226
uucuaucuuggcgagaagc

SEQ ID NO: 1523228 - RNA, 19 nt, Artificial Sequence
  Description of Artificial Sequence: Synthetic oligonucleotide
  Sense strand starting at position 2764 of SEQ ID NO: 1244925
gcuugaugggaacgggaaa

SEQ ID NO: 1523229 - RNA, 19 nt, Artificial Sequence
  Description of Artificial Sequence: Synthetic oligonucleotide
  Antisense strand to SEQ ID NO: 1523228
uuucccguucccaucaagc

SEQ ID NO: 1523230 - RNA, 19 nt, Artificial Sequence
  Description of Artificial Sequence: Synthetic oligonucleotide
  Sense strand starting at position 3912 of SEQ ID NO: 1244925
gcaguuugugucuucuacu

SEQ ID NO: 1523231 - RNA, 19 nt, Artificial Sequence
  Description of Artificial Sequence: Synthetic oligonucleotide
  Antisense strand to SEQ ID NO: 1523230
aguagaagacacaaacugc

SEQ ID NO: 1523232 - RNA, 19 nt, Artificial Sequence
  Description of Artificial Sequence: Synthetic oligonucleotide
  Sense strand starting at position 3913 of SEQ ID NO: 1244925
caguuugugucuucuacuu

SEQ ID NO: 1523233 - RNA, 19 nt, Artificial Sequence
  Description of Artificial Sequence: Synthetic oligonucleotide
  Antisense strand to SEQ ID NO: 1523232
aaguagaagacacaaacug

SEQ ID NO: 1523234 - RNA, 19 nt, Artificial Sequence
  Description of Artificial Sequence: Synthetic oligonucleotide
  Sense strand starting at position 32 of SEQ ID NO: 1244926
gacuuaguaccugaagggu

SEQ ID NO: 1523235 - RNA, 19 nt, Artificial Sequence
  Description of Artificial Sequence: Synthetic oligonucleotide
  Antisense strand to SEQ ID NO: 1523234
acccuucagguacuaaguc

SEQ ID NO: 1523236 - RNA, 19 nt, Artificial Sequence
  Description of Artificial Sequence: Synthetic oligonucleotide
  Sense strand starting at position 38 of SEQ ID NO: 1244926
guaccugaagggugaaaua

SEQ ID NO: 1523237 - RNA, 19 nt, Artificial Sequence
  Description of Artificial Sequence: Synthetic oligonucleotide
  Antisense strand to SEQ ID NO: 1523236
uauuucacccuucagguac

SEQ ID NO: 1523238 - RNA, 19 nt, Artificial Sequence
  Description of Artificial Sequence: Synthetic oligonucleotide
  Sense strand starting at position 146 of SEQ ID NO: 1244926
gugaaucugaggcauaacu

SEQ ID NO: 1523239 - RNA, 19 nt, Artificial Sequence
  Description of Artificial Sequence: Synthetic oligonucleotide
  Antisense strand to SEQ ID NO: 1523238
aguuaugccucagauucac

SEQ ID NO: 1523240 - RNA, 19 nt, Artificial Sequence
  Description of Artificial Sequence: Synthetic oligonucleotide
  Sense strand starting at position 320 of SEQ ID NO: 1244926
gcuguuccgucccaguaga

SEQ ID NO: 1523241 - RNA, 19 nt, Artificial Sequence
  Description of Artificial Sequence: Synthetic oligonucleotide
  Antisense strand to SEQ ID NO: 1523240
ucuacugggacggaacagc

SEQ ID NO: 1523242 - RNA, 19 nt, Artificial Sequence
  Description of Artificial Sequence: Synthetic oligonucleotide
  Sense strand starting at position 581 of SEQ ID NO: 1244926
uggguaguaguauggaaga

SEQ ID NO: 1523243 - RNA, 19 nt, Artificial Sequence
  Description of Artificial Sequence: Synthetic oligonucleotide
  Antisense strand to SEQ ID NO: 1523242
ucuuccauacuacuaccca

SEQ ID NO: 1523244 - RNA, 19 nt, Artificial Sequence
  Description of Artificial Sequence: Synthetic oligonucleotide
  Sense strand starting at position 690 of SEQ ID NO: 1244926
ggagucuuccagugugaug

SEQ ID NO: 1523245 - RNA, 19 nt, Artificial Sequence
  Description of Artificial Sequence: Synthetic oligonucleotide
  Antisense strand to SEQ ID NO: 1523244
caucacacuggaagacucc

SEQ ID NO: 1523246 - RNA, 19 nt, Artificial Sequence
  Description of Artificial Sequence: Synthetic oligonucleotide
  Sense strand starting at position 692 of SEQ ID NO: 1244926
agucuuccagugugaugau

SEQ ID NO: 1523247 - RNA, 19 nt, Artificial Sequence
  Description of Artificial Sequence: Synthetic oligonucleotide
  Antisense strand to SEQ ID NO: 1523246
aucaucacacuggaagacu

SEQ ID NO: 1523248 - RNA, 19 nt, Artificial Sequence
  Description of Artificial Sequence: Synthetic oligonucleotide
  Sense strand starting at position 701 of SEQ ID NO: 1244926
gugugaugauggugaggau

SEQ ID NO: 1523249 - RNA, 19 nt, Artificial Sequence
  Description of Artificial Sequence: Synthetic oligonucleotide
  Antisense strand to SEQ ID NO: 1523248
auccucaccaucaucacac

SEQ ID NO: 1523250 - RNA, 19 nt, Artificial Sequence
  Description of Artificial Sequence: Synthetic oligonucleotide
  Sense strand starting at position 790 of SEQ ID NO: 1244926
gagccaaccuaggagauaa

SEQ ID NO: 1523251 - RNA, 19 nt, Artificial Sequence
  Description of Artificial Sequence: Synthetic oligonucleotide
  Antisense strand to SEQ ID NO: 1523250
uuaucuccuagguuggcuc

SEQ ID NO: 1523252 - RNA, 19 nt, Artificial Sequence
  Description of Artificial Sequence: Synthetic oligonucleotide
  Sense strand starting at position 1207 of SEQ ID NO: 1244926
ucaacugugcaauaguuaa

SEQ ID NO: 1523253 - RNA, 19 nt, Artificial Sequence
  Description of Artificial Sequence: Synthetic oligonucleotide
  Antisense strand to SEQ ID NO: 1523252
uuaacuauugcacaguuga

SEQ ID NO: 1523254 - RNA, 19 nt, Artificial Sequence
  Description of Artificial Sequence: Synthetic oligonucleotide
  Sense strand starting at position 1251 of SEQ ID NO: 1244926
ggguuauagggaggucaaa

SEQ ID NO: 1523255 - RNA, 19 nt, Artificial Sequence
  Description of Artificial Sequence: Synthetic oligonucleotide
  Antisense strand to SEQ ID NO: 1523254
uuugaccucccuauaaccc

SEQ ID NO: 1523256 - RNA, 19 nt, Artificial Sequence
  Description of Artificial Sequence: Synthetic oligonucleotide
  Sense strand starting at position 1406 of SEQ ID NO: 1244926
guguuucugucauccaaau

SEQ ID NO: 1523257 - RNA, 19 nt, Artificial Sequence
  Description of Artificial Sequence: Synthetic oligonucleotide
  Antisense strand to SEQ ID NO: 1523256
auuuggaugacagaaacac

SEQ ID NO: 1523258 - RNA, 19 nt, Artificial Sequence
  Description of Artificial Sequence: Synthetic oligonucleotide
  Sense strand starting at position 1441 of SEQ ID NO: 1244926
uccuuccacucggauaaga

SEQ ID NO: 1523259 - RNA, 19 nt, Artificial Sequence
  Description of Artificial Sequence: Synthetic oligonucleotide
  Antisense strand to SEQ ID NO: 1523258
ucuuauccgaguggaagga

SEQ ID NO: 1523260 - RNA, 19 nt, Artificial Sequence
  Description of Artificial Sequence: Synthetic oligonucleotide
  Sense strand starting at position 1484 of SEQ ID NO: 1244926
agcaaucagugaggaauca

SEQ ID NO: 1523261 - RNA, 19 nt, Artificial Sequence
  Description of Artificial Sequence: Synthetic oligonucleotide
  Antisense strand to SEQ ID NO: 1523260
ugauuccucacugauugcu

SEQ ID NO: 1523262 - RNA, 19 nt, Artificial Sequence
  Description of Artificial Sequence: Synthetic oligonucleotide
  Sense strand starting at position 1614 of SEQ ID NO: 1244926
ugugcugugacugcuugua

SEQ ID NO: 1523263 - RNA, 19 nt, Artificial Sequence
  Description of Artificial Sequence: Synthetic oligonucleotide
  Antisense strand to SEQ ID NO: 1523262
uacaagcagucacagcaca

SEQ ID NO: 1523264 - RNA, 19 nt, Artificial Sequence
  Description of Artificial Sequence: Synthetic oligonucleotide
  Sense strand starting at position 1616 of SEQ ID NO: 1244926
ugcugugacugcuuguaga

SEQ ID NO: 1523265 - RNA, 19 nt, Artificial Sequence
  Description of Artificial Sequence: Synthetic oligonucleotide
  Antisense strand to SEQ ID NO: 1523264
ucuacaagcagucacagca

SEQ ID NO: 1523266 - RNA, 19 nt, Artificial Sequence
  Description of Artificial Sequence: Synthetic oligonucleotide
  Sense strand starting at position 2285 of SEQ ID NO: 1244926
ggugugaugggauggauaa

SEQ ID NO: 1523267 - RNA, 19 nt, Artificial Sequence
  Description of Artificial Sequence: Synthetic oligonucleotide
  Antisense strand to SEQ ID NO: 1523266
uuauccaucccaucacacc

SEQ ID NO: 1523268 - RNA, 19 nt, Artificial Sequence
  Description of Artificial Sequence: Synthetic oligonucleotide
  Sense strand starting at position 2286 of SEQ ID NO: 1244926
gugugaugggauggauaaa

SEQ ID NO: 1523269 - RNA, 19 nt, Artificial Sequence
  Description of Artificial Sequence: Synthetic oligonucleotide
  Antisense strand to SEQ ID NO: 1523268
uuuauccaucccaucacac

SEQ ID NO: 1523270 - RNA, 19 nt, Artificial Sequence
  Description of Artificial Sequence: Synthetic oligonucleotide
  Sense strand starting at position 2357 of SEQ ID NO: 1244926
cacauuaaguggguaaacu

SEQ ID NO: 1523271 - RNA, 19 nt, Artificial Sequence
  Description of Artificial Sequence: Synthetic oligonucleotide
  Antisense strand to SEQ ID NO: 1523270
aguuuacccacuuaaugug

SEQ ID NO: 1523272 - RNA, 19 nt, Artificial Sequence
  Description of Artificial Sequence: Synthetic oligonucleotide
  Sense strand starting at position 2513 of SEQ ID NO: 1244926
agacuuggcugucccagaa

SEQ ID NO: 1523273 - RNA, 19 nt, Artificial Sequence
  Description of Artificial Sequence: Synthetic oligonucleotide
  Antisense strand to SEQ ID NO: 1523272
uucugggacagccaagucu

SEQ ID NO: 1523274 - RNA, 19 nt, Artificial Sequence
  Description of Artificial Sequence: Synthetic oligonucleotide
  Sense strand starting at position 2697 of SEQ ID NO: 1244926
ggaccugggucuucaguga

SEQ ID NO: 1523275 - RNA, 19 nt, Artificial Sequence
  Description of Artificial Sequence: Synthetic oligonucleotide
  Antisense strand to SEQ ID NO: 1523274
ucacugaagacccaggucc

SEQ ID NO: 1523276 - RNA, 19 nt, Artificial Sequence
  Description of Artificial Sequence: Synthetic oligonucleotide
  Sense strand starting at position 2927 of SEQ ID NO: 1244926
gaaagucagucccauggaa

SEQ ID NO: 1523277 - RNA, 19 nt, Artificial Sequence
  Description of Artificial Sequence: Synthetic oligonucleotide
  Antisense strand to SEQ ID NO: 1523276
uuccaugggacugacuuuc

SEQ ID NO: 1523278 - RNA, 19 nt, Artificial Sequence
  Description of Artificial Sequence: Synthetic oligonucleotide
  Sense strand starting at position 2929 of SEQ ID NO: 1244926
aagucagucccauggaauu

SEQ ID NO: 1523279 - RNA, 19 nt, Artificial Sequence
  Description of Artificial Sequence: Synthetic oligonucleotide
  Antisense strand to SEQ ID NO: 1523278
aauuccaugggacugacuu

SEQ ID NO: 1523280 - RNA, 19 nt, Artificial Sequence
  Description of Artificial Sequence: Synthetic oligonucleotide
  Sense strand starting at position 3336 of SEQ ID NO: 1244926
ccaugcacuucuuugagga

SEQ ID NO: 1523281 - RNA, 19 nt, Artificial Sequence
  Description of Artificial Sequence: Synthetic oligonucleotide
  Antisense strand to SEQ ID NO: 1523280
uccucaaagaagugcaugg

SEQ ID NO: 1523282 - RNA, 19 nt, Artificial Sequence
  Description of Artificial Sequence: Synthetic oligonucleotide
  Sense strand starting at position 3338 of SEQ ID NO: 1244926
augcacuucuuugaggaaa

SEQ ID NO: 1523283 - RNA, 19 nt, Artificial Sequence
  Description of Artificial Sequence: Synthetic oligonucleotide
  Antisense strand to SEQ ID NO: 1523282
uuuccucaaagaagugcau

SEQ ID NO: 1523284 - RNA, 19 nt, Artificial Sequence
  Description of Artificial Sequence: Synthetic oligonucleotide
  Sense strand starting at position 3749 of SEQ ID NO: 1244926
uccuguuaacaaggauaua

SEQ ID NO: 1523285 - RNA, 19 nt, Artificial Sequence
  Description of Artificial Sequence: Synthetic oligonucleotide
  Antisense strand to SEQ ID NO: 1523284
uauauccuuguuaacagga

SEQ ID NO: 1523286 - RNA, 19 nt, Artificial Sequence
  Description of Artificial Sequence: Synthetic oligonucleotide
  Sense strand starting at position 3760 of SEQ ID NO: 1244926
aggauauagucauucucag

SEQ ID NO: 1523287 - RNA, 19 nt, Artificial Sequence
  Description of Artificial Sequence: Synthetic oligonucleotide
  Antisense strand to SEQ ID NO: 1523286
cugagaaugacuauauccu

SEQ ID NO: 1523288 - RNA, 19 nt, Artificial Sequence
  Description of Artificial Sequence: Synthetic oligonucleotide
  Sense strand starting at position 3840 of SEQ ID NO: 1244926
cggcuccauuucuuugauu

SEQ ID NO: 1523289 - RNA, 19 nt, Artificial Sequence
  Description of Artificial Sequence: Synthetic oligonucleotide
  Antisense strand to SEQ ID NO: 1523288
aaucaaagaaauggagccg

SEQ ID NO: 1523290 - RNA, 19 nt, Artificial Sequence
  Description of Artificial Sequence: Synthetic oligonucleotide
  Sense strand starting at position 3906 of SEQ ID NO: 1244926
ugcccauucucuucggaca

SEQ ID NO: 1523291 - RNA, 19 nt, Artificial Sequence
  Description of Artificial Sequence: Synthetic oligonucleotide
  Antisense strand to SEQ ID NO: 1523290
uguccgaagagaaugggca

SEQ ID NO: 1523292 - RNA, 19 nt, Artificial Sequence
  Description of Artificial Sequence: Synthetic oligonucleotide
  Sense strand starting at position 3960 of SEQ ID NO: 1244926
gcccgucucggcuucuuua

SEQ ID NO: 1523293 - RNA, 19 nt, Artificial Sequence
  Description of Artificial Sequence: Synthetic oligonucleotide
  Antisense strand to SEQ ID NO: 1523292
uaaagaagccgagacgggc

SEQ ID NO: 1523294 - RNA, 19 nt, Artificial Sequence
  Description of Artificial Sequence: Synthetic oligonucleotide
  Sense strand starting at position 3961 of SEQ ID NO: 1244926
cccgucucggcuucuuuaa

SEQ ID NO: 1523295 - RNA, 19 nt, Artificial Sequence
  Description of Artificial Sequence: Synthetic oligonucleotide
  Antisense strand to SEQ ID NO: 1523294
uuaaagaagccgagacggg

SEQ ID NO: 1523296 - RNA, 19 nt, Artificial Sequence
  Description of Artificial Sequence: Synthetic oligonucleotide
  Sense strand starting at position 3962 of SEQ ID NO: 1244926
ccgucucggcuucuuuaau

SEQ ID NO: 1523297 - RNA, 19 nt, Artificial Sequence
  Description of Artificial Sequence: Synthetic oligonucleotide
  Antisense strand to SEQ ID NO: 1523296
auuaaagaagccgagacgg

SEQ ID NO: 1523298 - RNA, 19 nt, Artificial Sequence
  Description of Artificial Sequence: Synthetic oligonucleotide
  Sense strand starting at position 15 of SEQ ID NO: 1244927
ucagacgaagcuuacuuaa

SEQ ID NO: 1523299 - RNA, 19 nt, Artificial Sequence
  Description of Artificial Sequence: Synthetic oligonucleotide
  Antisense strand to SEQ ID NO: 1523298
uuaaguaagcuucgucuga

SEQ ID NO: 1523300 - RNA, 19 nt, Artificial Sequence
  Description of Artificial Sequence: Synthetic oligonucleotide
  Sense strand starting at position 17 of SEQ ID NO: 1244927
agacgaagcuuacuuaagu

SEQ ID NO: 1523301 - RNA, 19 nt, Artificial Sequence
  Description of Artificial Sequence: Synthetic oligonucleotide
  Antisense strand to SEQ ID NO: 1523300
acuuaaguaagcuucgucu

SEQ ID NO: 1523302 - RNA, 19 nt, Artificial Sequence
  Description of Artificial Sequence: Synthetic oligonucleotide
  Sense strand starting at position 18 of SEQ ID NO: 1244927
gacgaagcuuacuuaagua

SEQ ID NO: 1523303 - RNA, 19 nt, Artificial Sequence
  Description of Artificial Sequence: Synthetic oligonucleotide
  Antisense strand to SEQ ID NO: 1523302
uacuuaaguaagcuucguc

SEQ ID NO: 1523304 - RNA, 19 nt, Artificial Sequence
  Description of Artificial Sequence: Synthetic oligonucleotide
  Sense strand starting at position 55 of SEQ ID NO: 1244927
cggagaauauggccacgau

SEQ ID NO: 1523305 - RNA, 19 nt, Artificial Sequence
  Description of Artificial Sequence: Synthetic oligonucleotide
  Antisense strand to SEQ ID NO: 1523304
aucguggccauauucuccg

SEQ ID NO: 1523306 - RNA, 19 nt, Artificial Sequence
  Description of Artificial Sequence: Synthetic oligonucleotide
  Sense strand starting at position 58 of SEQ ID NO: 1244927
agaauauggccacgauaag

SEQ ID NO: 1523307 - RNA, 19 nt, Artificial Sequence
  Description of Artificial Sequence: Synthetic oligonucleotide
  Antisense strand to SEQ ID NO: 1523306
cuuaucguggccauauucu

SEQ ID NO: 1523308 - RNA, 19 nt, Artificial Sequence
  Description of Artificial Sequence: Synthetic oligonucleotide
  Sense strand starting at position 67 of SEQ ID NO: 1244927
ccacgauaaggugggaaau

SEQ ID NO: 1523309 - RNA, 19 nt, Artificial Sequence
  Description of Artificial Sequence: Synthetic oligonucleotide
  Antisense strand to SEQ ID NO: 1523308
auuucccaccuuaucgugg

SEQ ID NO: 1523310 - RNA, 19 nt, Artificial Sequence
  Description of Artificial Sequence: Synthetic oligonucleotide
  Sense strand starting at position 69 of SEQ ID NO: 1244927
acgauaaggugggaaauaa

SEQ ID NO: 1523311 - RNA, 19 nt, Artificial Sequence
  Description of Artificial Sequence: Synthetic oligonucleotide
  Antisense strand to SEQ ID NO: 1523310
uuauuucccaccuuaucgu

SEQ ID NO: 1523312 - RNA, 19 nt, Artificial Sequence
  Description of Artificial Sequence: Synthetic oligonucleotide
  Sense strand starting at position 93 of SEQ ID NO: 1244927
cauugacaguuugugaaca

SEQ ID NO: 1523313 - RNA, 19 nt, Artificial Sequence
  Description of Artificial Sequence: Synthetic oligonucleotide
  Antisense strand to SEQ ID NO: 1523312
uguucacaaacugucaaug

SEQ ID NO: 1523314 - RNA, 19 nt, Artificial Sequence
  Description of Artificial Sequence: Synthetic oligonucleotide
  Sense strand starting at position 95 of SEQ ID NO: 1244927
uugacaguuugugaacaga

SEQ ID NO: 1523315 - RNA, 19 nt, Artificial Sequence
  Description of Artificial Sequence: Synthetic oligonucleotide
  Antisense strand to SEQ ID NO: 1523314
ucuguucacaaacugucaa

SEQ ID NO: 1523316 - RNA, 19 nt, Artificial Sequence
  Description of Artificial Sequence: Synthetic oligonucleotide
  Sense strand starting at position 174 of SEQ ID NO: 1244927
aacucuuggccuggagcua

SEQ ID NO: 1523317 - RNA, 19 nt, Artificial Sequence
  Description of Artificial Sequence: Synthetic oligonucleotide
  Antisense strand to SEQ ID NO: 1523316
uagcuccaggccaagaguu

SEQ ID NO: 1523318 - RNA, 19 nt, Artificial Sequence
  Description of Artificial Sequence: Synthetic oligonucleotide
  Sense strand starting at position 912 of SEQ ID NO: 1244927
gaugcagcucuguacugua

SEQ ID NO: 1523319 - RNA, 19 nt, Artificial Sequence
  Description of Artificial Sequence: Synthetic oligonucleotide
  Antisense strand to SEQ ID NO: 1523318
uacaguacagagcugcauc

SEQ ID NO: 1523320 - RNA, 19 nt, Artificial Sequence
  Description of Artificial Sequence: Synthetic oligonucleotide
  Sense strand starting at position 1195 of SEQ ID NO: 1244927
gcugaucuguccugggcuu

SEQ ID NO: 1523321 - RNA, 19 nt, Artificial Sequence
  Description of Artificial Sequence: Synthetic oligonucleotide
  Antisense strand to SEQ ID NO: 1523320
aagcccaggacagaucagc

SEQ ID NO: 1523322 - RNA, 19 nt, Artificial Sequence
  Description of Artificial Sequence: Synthetic oligonucleotide
  Sense strand starting at position 1500 of SEQ ID NO: 1244927
uggagaaguuggcuacuga

SEQ ID NO: 1523323 - RNA, 19 nt, Artificial Sequence
  Description of Artificial Sequence: Synthetic oligonucleotide
  Antisense strand to SEQ ID NO: 1523322
ucaguagccaacuucucca

SEQ ID NO: 1523324 - RNA, 19 nt, Artificial Sequence
  Description of Artificial Sequence: Synthetic oligonucleotide
  Sense strand starting at position 2268 of SEQ ID NO: 1244927
gggauucgucucagcaggu

SEQ ID NO: 1523325 - RNA, 19 nt, Artificial Sequence
  Description of Artificial Sequence: Synthetic oligonucleotide
  Antisense strand to SEQ ID NO: 1523324
accugcugagacgaauccc

SEQ ID NO: 1523326 - RNA, 19 nt, Artificial Sequence
  Description of Artificial Sequence: Synthetic oligonucleotide
  Sense strand starting at position 2344 of SEQ ID NO: 1244927
gaguguaaggccggaaaug

SEQ ID NO: 1523327 - RNA, 19 nt, Artificial Sequence
  Description of Artificial Sequence: Synthetic oligonucleotide
  Antisense strand to SEQ ID NO: 1523326
cauuuccggccuuacacuc

SEQ ID NO: 1523328 - RNA, 19 nt, Artificial Sequence
  Description of Artificial Sequence: Synthetic oligonucleotide
  Sense strand starting at position 2423 of SEQ ID NO: 1244927
gcuucagauuugucggugu

SEQ ID NO: 1523329 - RNA, 19 nt, Artificial Sequence
  Description of Artificial Sequence: Synthetic oligonucleotide
  Antisense strand to SEQ ID NO: 1523328
acaccgacaaaucugaagc

SEQ ID NO: 1523330 - RNA, 19 nt, Artificial Sequence
  Description of Artificial Sequence: Synthetic oligonucleotide
  Sense strand starting at position 2425 of SEQ ID NO: 1244927
uucagauuugucgguguga

SEQ ID NO: 1523331 - RNA, 19 nt, Artificial Sequence
  Description of Artificial Sequence: Synthetic oligonucleotide
  Antisense strand to SEQ ID NO: 1523330
ucacaccgacaaaucugaa

SEQ ID NO: 1523332 - RNA, 19 nt, Artificial Sequence
  Description of Artificial Sequence: Synthetic oligonucleotide
  Sense strand starting at position 2426 of SEQ ID NO: 1244927
ucagauuugucggugugac

SEQ ID NO: 1523333 - RNA, 19 nt, Artificial Sequence
  Description of Artificial Sequence: Synthetic oligonucleotide
  Antisense strand to SEQ ID NO: 1523332
gucacaccgacaaaucuga

SEQ ID NO: 1523334 - RNA, 19 nt, Artificial Sequence
  Description of Artificial Sequence: Synthetic oligonucleotide
  Sense strand starting at position 2427 of SEQ ID NO: 1244927
cagauuugucggugugacc

SEQ ID NO: 1523335 - RNA, 19 nt, Artificial Sequence
  Description of Artificial Sequence: Synthetic oligonucleotide
  Antisense strand to SEQ ID NO: 1523334
ggucacaccgacaaaucug

SEQ ID NO: 1523336 - RNA, 19 nt, Artificial Sequence
  Description of Artificial Sequence: Synthetic oligonucleotide
  Sense strand starting at position 2434 of SEQ ID NO: 1244927
gucggugugaccugcaaug

SEQ ID NO: 1523337 - RNA, 19 nt, Artificial Sequence
  Description of Artificial Sequence: Synthetic oligonucleotide
  Antisense strand to SEQ ID NO: 1523336
cauugcaggucacaccgac

SEQ ID NO: 1523338 - RNA, 19 nt, Artificial Sequence
  Description of Artificial Sequence: Synthetic oligonucleotide
  Sense strand starting at position 2689 of SEQ ID NO: 1244927
gcgcgucuagaaagagauu

SEQ ID NO: 1523339 - RNA, 19 nt, Artificial Sequence
  Description of Artificial Sequence: Synthetic oligonucleotide
  Antisense strand to SEQ ID NO: 1523338
aaucucuuucuagacgcgc

SEQ ID NO: 1523340 - RNA, 19 nt, Artificial Sequence
  Description of Artificial Sequence: Synthetic oligonucleotide
  Sense strand starting at position 2702 of SEQ ID NO: 1244927
gagauuggucgccgcgaga

SEQ ID NO: 1523341 - RNA, 19 nt, Artificial Sequence
  Description of Artificial Sequence: Synthetic oligonucleotide
  Antisense strand to SEQ ID NO: 1523340
ucucgcggcgaccaaucuc

SEQ ID NO: 1523342 - RNA, 19 nt, Artificial Sequence
  Description of Artificial Sequence: Synthetic oligonucleotide
  Sense strand starting at position 2703 of SEQ ID NO: 1244927
agauuggucgccgcgagau

SEQ ID NO: 1523343 - RNA, 19 nt, Artificial Sequence
  Description of Artificial Sequence: Synthetic oligonucleotide
  Antisense strand to SEQ ID NO: 1523342
aucucgcggcgaccaaucu

SEQ ID NO: 1523344 - RNA, 19 nt, Artificial Sequence
  Description of Artificial Sequence: Synthetic oligonucleotide
  Sense strand starting at position 2704 of SEQ ID NO: 1244927
gauuggucgccgcgagaug

SEQ ID NO: 1523345 - RNA, 19 nt, Artificial Sequence
  Description of Artificial Sequence: Synthetic oligonucleotide
  Antisense strand to SEQ ID NO: 1523344
caucucgcggcgaccaauc

SEQ ID NO: 1523346 - RNA, 19 nt, Artificial Sequence
  Description of Artificial Sequence: Synthetic oligonucleotide
  Sense strand starting at position 2837 of SEQ ID NO: 1244927
ggucgagaugccuauccca

SEQ ID NO: 1523347 - RNA, 19 nt, Artificial Sequence
  Description of Artificial Sequence: Synthetic oligonucleotide
  Antisense strand to SEQ ID NO: 1523346
ugggauaggcaucucgacc

SEQ ID NO: 1523348 - RNA, 19 nt, Artificial Sequence
  Description of Artificial Sequence: Synthetic oligonucleotide
  Sense strand starting at position 2876 of SEQ ID NO: 1244927
cguguuauuuccguggucu

SEQ ID NO: 1523349 - RNA, 19 nt, Artificial Sequence
  Description of Artificial Sequence: Synthetic oligonucleotide
  Antisense strand to SEQ ID NO: 1523348
agaccacggaaauaacacg

SEQ ID NO: 1523350 - RNA, 19 nt, Artificial Sequence
  Description of Artificial Sequence: Synthetic oligonucleotide
  Sense strand starting at position 2877 of SEQ ID NO: 1244927
guguuauuuccguggucuc

SEQ ID NO: 1523351 - RNA, 19 nt, Artificial Sequence
  Description of Artificial Sequence: Synthetic oligonucleotide
  Antisense strand to SEQ ID NO: 1523350
gagaccacggaaauaacac

SEQ ID NO: 1523352 - RNA, 19 nt, Artificial Sequence
  Description of Artificial Sequence: Synthetic oligonucleotide
  Sense strand starting at position 2910 of SEQ ID NO: 1244927
uuacgaggcguuccuugua

SEQ ID NO: 1523353 - RNA, 19 nt, Artificial Sequence
  Description of Artificial Sequence: Synthetic oligonucleotide
  Antisense strand to SEQ ID NO: 1523352
uacaaggaacgccucguaa

SEQ ID NO: 1523354 - RNA, 19 nt, Artificial Sequence
  Description of Artificial Sequence: Synthetic oligonucleotide
  Sense strand starting at position 2979 of SEQ ID NO: 1244927
gacugacucucggaggcuu

SEQ ID NO: 1523355 - RNA, 19 nt, Artificial Sequence
  Description of Artificial Sequence: Synthetic oligonucleotide
  Antisense strand to SEQ ID NO: 1523354
aagccuccgagagucaguc

SEQ ID NO: 1523356 - RNA, 19 nt, Artificial Sequence
  Description of Artificial Sequence: Synthetic oligonucleotide
  Sense strand starting at position 3035 of SEQ ID NO: 1244927
ggauuuccuugauguggag

SEQ ID NO: 1523357 - RNA, 19 nt, Artificial Sequence
  Description of Artificial Sequence: Synthetic oligonucleotide
  Antisense strand to SEQ ID NO: 1523356
cuccacaucaaggaaaucc

SEQ ID NO: 1523358 - RNA, 19 nt, Artificial Sequence
  Description of Artificial Sequence: Synthetic oligonucleotide
  Sense strand starting at position 3367 of SEQ ID NO: 1244927
ggaagacccugaugacagu

SEQ ID NO: 1523359 - RNA, 19 nt, Artificial Sequence
  Description of Artificial Sequence: Synthetic oligonucleotide
  Antisense strand to SEQ ID NO: 1523358
acugucaucagggucuucc

SEQ ID NO: 1523360 - RNA, 19 nt, Artificial Sequence
  Description of Artificial Sequence: Synthetic oligonucleotide
  Sense strand starting at position 3535 of SEQ ID NO: 1244927
uugcaauugcuguacaaag

SEQ ID NO: 1523361 - RNA, 19 nt, Artificial Sequence
  Description of Artificial Sequence: Synthetic oligonucleotide
  Antisense strand to SEQ ID NO: 1523360
cuuuguacagcaauugcaa

SEQ ID NO: 1523362 - RNA, 19 nt, Artificial Sequence
  Description of Artificial Sequence: Synthetic oligonucleotide
  Sense strand starting at position 3961 of SEQ ID NO: 1244927
ggugcagccuuguuugcaa

SEQ ID NO: 1523363 - RNA, 19 nt, Artificial Sequence
  Description of Artificial Sequence: Synthetic oligonucleotide
  Antisense strand to SEQ ID NO: 1523362
uugcaaacaaggcugcacc

SEQ ID NO: 1523364 - RNA, 19 nt, Artificial Sequence
  Description of Artificial Sequence: Synthetic oligonucleotide
  Sense strand starting at position 101 of SEQ ID NO: 1244928
ucaggaaugugcugacuga

SEQ ID NO: 1523365 - RNA, 19 nt, Artificial Sequence
  Description of Artificial Sequence: Synthetic oligonucleotide
  Antisense strand to SEQ ID NO: 1523364
ucagucagcacauuccuga

SEQ ID NO: 1523366 - RNA, 19 nt, Artificial Sequence
  Description of Artificial Sequence: Synthetic oligonucleotide
  Sense strand starting at position 146 of SEQ ID NO: 1244928
gaggcaagucccuaggcuu

SEQ ID NO: 1523367 - RNA, 19 nt, Artificial Sequence
  Description of Artificial Sequence: Synthetic oligonucleotide
  Antisense strand to SEQ ID NO: 1523366
aagccuagggacuugccuc

SEQ ID NO: 1523368 - RNA, 19 nt, Artificial Sequence
  Description of Artificial Sequence: Synthetic oligonucleotide
  Sense strand starting at position 610 of SEQ ID NO: 1244928
gggcugugucuguaggaga

SEQ ID NO: 1523369 - RNA, 19 nt, Artificial Sequence
  Description of Artificial Sequence: Synthetic oligonucleotide
  Antisense strand to SEQ ID NO: 1523368
ucuccuacagacacagccc

SEQ ID NO: 1523370 - RNA, 19 nt, Artificial Sequence
  Description of Artificial Sequence: Synthetic oligonucleotide
  Sense strand starting at position 613 of SEQ ID NO: 1244928
cugugucuguaggagagua

SEQ ID NO: 1523371 - RNA, 19 nt, Artificial Sequence
  Description of Artificial Sequence: Synthetic oligonucleotide
  Antisense strand to SEQ ID NO: 1523370
uacucuccuacagacacag

SEQ ID NO: 1523372 - RNA, 19 nt, Artificial Sequence
  Description of Artificial Sequence: Synthetic oligonucleotide
  Sense strand starting at position 615 of SEQ ID NO: 1244928
gugucuguaggagaguaaa

SEQ ID NO: 1523373 - RNA, 19 nt, Artificial Sequence
  Description of Artificial Sequence: Synthetic oligonucleotide
  Antisense strand to SEQ ID NO: 1523372
uuuacucuccuacagacac

SEQ ID NO: 1523374 - RNA, 19 nt, Artificial Sequence
  Description of Artificial Sequence: Synthetic oligonucleotide
  Sense strand starting at position 618 of SEQ ID NO: 1244928
ucuguaggagaguaaaugu

SEQ ID NO: 1523375 - RNA, 19 nt, Artificial Sequence
  Description of Artificial Sequence: Synthetic oligonucleotide
  Antisense strand to SEQ ID NO: 1523374
acauuuacucuccuacaga

SEQ ID NO: 1523376 - RNA, 19 nt, Artificial Sequence
  Description of Artificial Sequence: Synthetic oligonucleotide
  Sense strand starting at position 625 of SEQ ID NO: 1244928
gagaguaaauguguacacu

SEQ ID NO: 1523377 - RNA, 19 nt, Artificial Sequence
  Description of Artificial Sequence: Synthetic oligonucleotide
  Antisense strand to SEQ ID NO: 1523376
aguguacacauuuacucuc

SEQ ID NO: 1523378 - RNA, 19 nt, Artificial Sequence
  Description of Artificial Sequence: Synthetic oligonucleotide
  Sense strand starting at position 668 of SEQ ID NO: 1244928
cagcuugugccggagcaua

SEQ ID NO: 1523379 - RNA, 19 nt, Artificial Sequence
  Description of Artificial Sequence: Synthetic oligonucleotide
  Antisense strand to SEQ ID NO: 1523378
uaugcuccggcacaagcug

SEQ ID NO: 1523380 - RNA, 19 nt, Artificial Sequence
  Description of Artificial Sequence: Synthetic oligonucleotide
  Sense strand starting at position 737 of SEQ ID NO: 1244928
ugcugagauuuccgccagu

SEQ ID NO: 1523381 - RNA, 19 nt, Artificial Sequence
  Description of Artificial Sequence: Synthetic oligonucleotide
  Antisense strand to SEQ ID NO: 1523380
acuggcggaaaucucagca

SEQ ID NO: 1523382 - RNA, 19 nt, Artificial Sequence
  Description of Artificial Sequence: Synthetic oligonucleotide
  Sense strand starting at position 814 of SEQ ID NO: 1244928
aggcgucucagagguacua

SEQ ID NO: 1523383 - RNA, 19 nt, Artificial Sequence
  Description of Artificial Sequence: Synthetic oligonucleotide
  Antisense strand to SEQ ID NO: 1523382
uaguaccucugagacgccu

SEQ ID NO: 1523384 - RNA, 19 nt, Artificial Sequence
  Description of Artificial Sequence: Synthetic oligonucleotide
  Sense strand starting at position 1067 of SEQ ID NO: 1244928
gcgggaguucaguaacaac

SEQ ID NO: 1523385 - RNA, 19 nt, Artificial Sequence
  Description of Artificial Sequence: Synthetic oligonucleotide
  Antisense strand to SEQ ID NO: 1523384
guuguuacugaacucccgc

SEQ ID NO: 1523386 - RNA, 19 nt, Artificial Sequence
  Description of Artificial Sequence: Synthetic oligonucleotide
  Sense strand starting at position 1196 of SEQ ID NO: 1244928
uccuccauugugugaucau

SEQ ID NO: 1523387 - RNA, 19 nt, Artificial Sequence
  Description of Artificial Sequence: Synthetic oligonucleotide
  Antisense strand to SEQ ID NO: 1523386
augaucacacaauggagga

SEQ ID NO: 1523388 - RNA, 19 nt, Artificial Sequence
  Description of Artificial Sequence: Synthetic oligonucleotide
  Sense strand starting at position 1197 of SEQ ID NO: 1244928
ccuccauugugugaucaua

SEQ ID NO: 1523389 - RNA, 19 nt, Artificial Sequence
  Description of Artificial Sequence: Synthetic oligonucleotide
  Antisense strand to SEQ ID NO: 1523388
uaugaucacacaauggagg

SEQ ID NO: 1523390 - RNA, 19 nt, Artificial Sequence
  Description of Artificial Sequence: Synthetic oligonucleotide
  Sense strand starting at position 1199 of SEQ ID NO: 1244928
uccauugugugaucauaag

SEQ ID NO: 1523391 - RNA, 19 nt, Artificial Sequence
  Description of Artificial Sequence: Synthetic oligonucleotide
  Antisense strand to SEQ ID NO: 1523390
cuuaugaucacacaaugga

SEQ ID NO: 1523392 - RNA, 19 nt, Artificial Sequence
  Description of Artificial Sequence: Synthetic oligonucleotide
  Sense strand starting at position 1213 of SEQ ID NO: 1244928
auaagcaguccggguuuaa

SEQ ID NO: 1523393 - RNA, 19 nt, Artificial Sequence
  Description of Artificial Sequence: Synthetic oligonucleotide
  Antisense strand to SEQ ID NO: 1523392
uuaaacccggacugcuuau

SEQ ID NO: 1523394 - RNA, 19 nt, Artificial Sequence
  Description of Artificial Sequence: Synthetic oligonucleotide
  Sense strand starting at position 1224 of SEQ ID NO: 1244928
ggguuuaaauccuaguuaa

SEQ ID NO: 1523395 - RNA, 19 nt, Artificial Sequence
  Description of Artificial Sequence: Synthetic oligonucleotide
  Antisense strand to SEQ ID NO: 1523394
uuaacuaggauuuaaaccc

SEQ ID NO: 1523396 - RNA, 19 nt, Artificial Sequence
  Description of Artificial Sequence: Synthetic oligonucleotide
  Sense strand starting at position 1273 of SEQ ID NO: 1244928
gucgcagccuuucuuugaa

SEQ ID NO: 1523397 - RNA, 19 nt, Artificial Sequence
  Description of Artificial Sequence: Synthetic oligonucleotide
  Antisense strand to SEQ ID NO: 1523396
uucaaagaaaggcugcgac

SEQ ID NO: 1523398 - RNA, 19 nt, Artificial Sequence
  Description of Artificial Sequence: Synthetic oligonucleotide
  Sense strand starting at position 1276 of SEQ ID NO: 1244928
gcagccuuucuuugaaucu

SEQ ID NO: 1523399 - RNA, 19 nt, Artificial Sequence
  Description of Artificial Sequence: Synthetic oligonucleotide
  Antisense strand to SEQ ID NO: 1523398
agauucaaagaaaggcugc

SEQ ID NO: 1523400 - RNA, 19 nt, Artificial Sequence
  Description of Artificial Sequence: Synthetic oligonucleotide
  Sense strand starting at position 1336 of SEQ ID NO: 1244928
cucugaacguucgaagaau

SEQ ID NO: 1523401 - RNA, 19 nt, Artificial Sequence
  Description of Artificial Sequence: Synthetic oligonucleotide
  Antisense strand to SEQ ID NO: 1523400
auucuucgaacguucagag

SEQ ID NO: 1523402 - RNA, 19 nt, Artificial Sequence
  Description of Artificial Sequence: Synthetic oligonucleotide
  Sense strand starting at position 2573 of SEQ ID NO: 1244928
cuuccuguccucugggaaa

SEQ ID NO: 1523403 - RNA, 19 nt, Artificial Sequence
  Description of Artificial Sequence: Synthetic oligonucleotide
  Antisense strand to SEQ ID NO: 1523402
uuucccagaggacaggaag

SEQ ID NO: 1523404 - RNA, 19 nt, Artificial Sequence
  Description of Artificial Sequence: Synthetic oligonucleotide
  Sense strand starting at position 2862 of SEQ ID NO: 1244928
gcuccaaaguauggagaua

SEQ ID NO: 1523405 - RNA, 19 nt, Artificial Sequence
  Description of Artificial Sequence: Synthetic oligonucleotide
  Antisense strand to SEQ ID NO: 1523404
uaucuccauacuuuggagc

SEQ ID NO: 1523406 - RNA, 19 nt, Artificial Sequence
  Description of Artificial Sequence: Synthetic oligonucleotide
  Sense strand starting at position 2875 of SEQ ID NO: 1244928
gagauagagucccgguaag

SEQ ID NO: 1523407 - RNA, 19 nt, Artificial Sequence
  Description of Artificial Sequence: Synthetic oligonucleotide
  Antisense strand to SEQ ID NO: 1523406
cuuaccgggacucuaucuc

SEQ ID NO: 1523408 - RNA, 19 nt, Artificial Sequence
  Description of Artificial Sequence: Synthetic oligonucleotide
  Sense strand starting at position 215 of SEQ ID NO: 1244929
ucaauauucccacgguuga

SEQ ID NO: 1523409 - RNA, 19 nt, Artificial Sequence
  Description of Artificial Sequence: Synthetic oligonucleotide
  Antisense strand to SEQ ID NO: 1523408
ucaaccgugggaauauuga

SEQ ID NO: 1523410 - RNA, 19 nt, Artificial Sequence
  Description of Artificial Sequence: Synthetic oligonucleotide
  Sense strand starting at position 219 of SEQ ID NO: 1244929
uauucccacgguugagaaa

SEQ ID NO: 1523411 - RNA, 19 nt, Artificial Sequence
  Description of Artificial Sequence: Synthetic oligonucleotide
  Antisense strand to SEQ ID NO: 1523410
uuucucaaccgugggaaua

SEQ ID NO: 1523412 - RNA, 19 nt, Artificial Sequence
  Description of Artificial Sequence: Synthetic oligonucleotide
  Sense strand starting at position 817 of SEQ ID NO: 1244929
gugaaugcacaaggaauaa

SEQ ID NO: 1523413 - RNA, 19 nt, Artificial Sequence
  Description of Artificial Sequence: Synthetic oligonucleotide
  Antisense strand to SEQ ID NO: 1523412
uuauuccuugugcauucac

SEQ ID NO: 1523414 - RNA, 19 nt, Artificial Sequence
  Description of Artificial Sequence: Synthetic oligonucleotide
  Sense strand starting at position 906 of SEQ ID NO: 1244929
aacucuugaguugagcaaa

SEQ ID NO: 1523415 - RNA, 19 nt, Artificial Sequence
  Description of Artificial Sequence: Synthetic oligonucleotide
  Antisense strand to SEQ ID NO: 1523414
uuugcucaacucaagaguu

SEQ ID NO: 1523416 - RNA, 19 nt, Artificial Sequence
  Description of Artificial Sequence: Synthetic oligonucleotide
  Sense strand starting at position 909 of SEQ ID NO: 1244929
ucuugaguugagcaaacau

SEQ ID NO: 1523417 - RNA, 19 nt, Artificial Sequence
  Description of Artificial Sequence: Synthetic oligonucleotide
  Antisense strand to SEQ ID NO: 1523416
auguuugcucaacucaaga

SEQ ID NO: 1523418 - RNA, 19 nt, Artificial Sequence
  Description of Artificial Sequence: Synthetic oligonucleotide
  Sense strand starting at position 1071 of SEQ ID NO: 1244929
ugacaacuuugaucccagu

SEQ ID NO: 1523419 - RNA, 19 nt, Artificial Sequence
  Description of Artificial Sequence: Synthetic oligonucleotide
  Antisense strand to SEQ ID NO: 1523418
acugggaucaaaguuguca

SEQ ID NO: 1523420 - RNA, 19 nt, Artificial Sequence
  Description of Artificial Sequence: Synthetic oligonucleotide
  Sense strand starting at position 1142 of SEQ ID NO: 1244929
ccauccuuccugcagagau

SEQ ID NO: 1523421 - RNA, 19 nt, Artificial Sequence
  Description of Artificial Sequence: Synthetic oligonucleotide
  Antisense strand to SEQ ID NO: 1523420
aucucugcaggaaggaugg

SEQ ID NO: 1523422 - RNA, 19 nt, Artificial Sequence
  Description of Artificial Sequence: Synthetic oligonucleotide
  Sense strand starting at position 1144 of SEQ ID NO: 1244929
auccuuccugcagagauga

SEQ ID NO: 1523423 - RNA, 19 nt, Artificial Sequence
  Description of Artificial Sequence: Synthetic oligonucleotide
  Antisense strand to SEQ ID NO: 1523422
ucaucucugcaggaaggau

SEQ ID NO: 1523424 - RNA, 19 nt, Artificial Sequence
  Description of Artificial Sequence: Synthetic oligonucleotide
  Sense strand starting at position 1160 of SEQ ID NO: 1244929
ugaggaggguguuaaagaa

SEQ ID NO: 1523425 - RNA, 19 nt, Artificial Sequence
  Description of Artificial Sequence: Synthetic oligonucleotide
  Antisense strand to SEQ ID NO: 1523424
uucuuuaacacccuccuca

SEQ ID NO: 1523426 - RNA, 19 nt, Artificial Sequence
  Description of Artificial Sequence: Synthetic oligonucleotide
  Sense strand starting at position 1181 of SEQ ID NO: 1244929
ggagcagaaucucucccaa

SEQ ID NO: 1523427 - RNA, 19 nt, Artificial Sequence
  Description of Artificial Sequence: Synthetic oligonucleotide
  Antisense strand to SEQ ID NO: 1523426
uugggagagauucugcucc

SEQ ID NO: 1523428 - RNA, 19 nt, Artificial Sequence
  Description of Artificial Sequence: Synthetic oligonucleotide
  Sense strand starting at position 1183 of SEQ ID NO: 1244929
agcagaaucucucccaaag

SEQ ID NO: 1523429 - RNA, 19 nt, Artificial Sequence
  Description of Artificial Sequence: Synthetic oligonucleotide
  Antisense strand to SEQ ID NO: 1523428
cuuugggagagauucugcu

SEQ ID NO: 1523430 - RNA, 19 nt, Artificial Sequence
  Description of Artificial Sequence: Synthetic oligonucleotide
  Sense strand starting at position 1257 of SEQ ID NO: 1244929
guagaagccugguugagua

SEQ ID NO: 1523431 - RNA, 19 nt, Artificial Sequence
  Description of Artificial Sequence: Synthetic oligonucleotide
  Antisense strand to SEQ ID NO: 1523430
uacucaaccaggcuucuac

SEQ ID NO: 1523432 - RNA, 19 nt, Artificial Sequence
  Description of Artificial Sequence: Synthetic oligonucleotide
  Sense strand starting at position 1259 of SEQ ID NO: 1244929
agaagccugguugaguaaa

SEQ ID NO: 1523433 - RNA, 19 nt, Artificial Sequence
  Description of Artificial Sequence: Synthetic oligonucleotide
  Antisense strand to SEQ ID NO: 1523432
uuuacucaaccaggcuucu

SEQ ID NO: 1523434 - RNA, 19 nt, Artificial Sequence
  Description of Artificial Sequence: Synthetic oligonucleotide
  Sense strand starting at position 1261 of SEQ ID NO: 1244929
aagccugguugaguaaaga

SEQ ID NO: 1523435 - RNA, 19 nt, Artificial Sequence
  Description of Artificial Sequence: Synthetic oligonucleotide
  Antisense strand to SEQ ID NO: 1523434
ucuuuacucaaccaggcuu

SEQ ID NO: 1523436 - RNA, 19 nt, Artificial Sequence
  Description of Artificial Sequence: Synthetic oligonucleotide
  Sense strand starting at position 1271 of SEQ ID NO: 1244929
gaguaaagacaucgcccau

SEQ ID NO: 1523437 - RNA, 19 nt, Artificial Sequence
  Description of Artificial Sequence: Synthetic oligonucleotide
  Antisense strand to SEQ ID NO: 1523436
augggcgaugucuuuacuc

SEQ ID NO: 1523438 - RNA, 19 nt, Artificial Sequence
  Description of Artificial Sequence: Synthetic oligonucleotide
  Sense strand starting at position 1556 of SEQ ID NO: 1244929
ucccguacaucagcuuaua

SEQ ID NO: 1523439 - RNA, 19 nt, Artificial Sequence
  Description of Artificial Sequence: Synthetic oligonucleotide
  Antisense strand to SEQ ID NO: 1523438
uauaagcugauguacggga

SEQ ID NO: 1523440 - RNA, 19 nt, Artificial Sequence
  Description of Artificial Sequence: Synthetic oligonucleotide
  Sense strand starting at position 1568 of SEQ ID NO: 1244929
gcuuauacuccuggaggga

SEQ ID NO: 1523441 - RNA, 19 nt, Artificial Sequence
  Description of Artificial Sequence: Synthetic oligonucleotide
  Antisense strand to SEQ ID NO: 1523440
ucccuccaggaguauaagc

SEQ ID NO: 1523442 - RNA, 19 nt, Artificial Sequence
  Description of Artificial Sequence: Synthetic oligonucleotide
  Sense strand starting at position 1674 of SEQ ID NO: 1244929
gacuauagguguuuggaga

SEQ ID NO: 1523443 - RNA, 19 nt, Artificial Sequence
  Description of Artificial Sequence: Synthetic oligonucleotide
  Antisense strand to SEQ ID NO: 1523442
ucuccaaacaccuauaguc

SEQ ID NO: 1523444 - RNA, 19 nt, Artificial Sequence
  Description of Artificial Sequence: Synthetic oligonucleotide
  Sense strand starting at position 1675 of SEQ ID NO: 1244929
acuauagguguuuggagau

SEQ ID NO: 1523445 - RNA, 19 nt, Artificial Sequence
  Description of Artificial Sequence: Synthetic oligonucleotide
  Antisense strand to SEQ ID NO: 1523444
aucuccaaacaccuauagu

SEQ ID NO: 1523446 - RNA, 19 nt, Artificial Sequence
  Description of Artificial Sequence: Synthetic oligonucleotide
  Sense strand starting at position 1678 of SEQ ID NO: 1244929
auagguguuuggagaugag

SEQ ID NO: 1523447 - RNA, 19 nt, Artificial Sequence
  Description of Artificial Sequence: Synthetic oligonucleotide
  Antisense strand to SEQ ID NO: 1523446
cucaucuccaaacaccuau

SEQ ID NO: 1523448 - RNA, 19 nt, Artificial Sequence
  Description of Artificial Sequence: Synthetic oligonucleotide
  Sense strand starting at position 1728 of SEQ ID NO: 1244929
ucaccuccuccuugggaau

SEQ ID NO: 1523449 - RNA, 19 nt, Artificial Sequence
  Description of Artificial Sequence: Synthetic oligonucleotide
  Antisense strand to SEQ ID NO: 1523448
auucccaaggaggagguga

SEQ ID NO: 1523450 - RNA, 19 nt, Artificial Sequence
  Description of Artificial Sequence: Synthetic oligonucleotide
  Sense strand starting at position 3428 of SEQ ID NO: 1244929
aagcuuugaugagauuuga

SEQ ID NO: 1523451 - RNA, 19 nt, Artificial Sequence
  Description of Artificial Sequence: Synthetic oligonucleotide
  Antisense strand to SEQ ID NO: 1523450
ucaaaucucaucaaagcuu

SEQ ID NO: 1523452 - RNA, 19 nt, Artificial Sequence
  Description of Artificial Sequence: Synthetic oligonucleotide
  Sense strand starting at position 3538 of SEQ ID NO: 1244929
uuaugaaacuucccagugu

SEQ ID NO: 1523453 - RNA, 19 nt, Artificial Sequence
  Description of Artificial Sequence: Synthetic oligonucleotide
  Antisense strand to SEQ ID NO: 1523452
acacugggaaguuucauaa

SEQ ID NO: 1523454 - RNA, 19 nt, Artificial Sequence
  Description of Artificial Sequence: Synthetic oligonucleotide
  Sense strand starting at position 3568 of SEQ ID NO: 1244929
agacaucucugcuccgagu

SEQ ID NO: 1523455 - RNA, 19 nt, Artificial Sequence
  Description of Artificial Sequence: Synthetic oligonucleotide
  Antisense strand to SEQ ID NO: 1523454
acucggagcagagaugucu

SEQ ID NO: 1523456 - RNA, 19 nt, Artificial Sequence
  Description of Artificial Sequence: Synthetic oligonucleotide
  Sense strand starting at position 3607 of SEQ ID NO: 1244929
guagguuggugagcuauuu

SEQ ID NO: 1523457 - RNA, 19 nt, Artificial Sequence
  Description of Artificial Sequence: Synthetic oligonucleotide
  Antisense strand to SEQ ID NO: 1523456
aaauagcucaccaaccuac

SEQ ID NO: 1523458 - RNA, 19 nt, Artificial Sequence
  Description of Artificial Sequence: Synthetic oligonucleotide
  Sense strand starting at position 3615 of SEQ ID NO: 1244929
gugagcuauuucccgugca

SEQ ID NO: 1523459 - RNA, 19 nt, Artificial Sequence
  Description of Artificial Sequence: Synthetic oligonucleotide
  Antisense strand to SEQ ID NO: 1523458
ugcacgggaaauagcucac

SEQ ID NO: 1523460 - RNA, 19 nt, Artificial Sequence
  Description of Artificial Sequence: Synthetic oligonucleotide
  Sense strand starting at position 3641 of SEQ ID NO: 1244929
uggguaagguuucuugauc

SEQ ID NO: 1523461 - RNA, 19 nt, Artificial Sequence
  Description of Artificial Sequence: Synthetic oligonucleotide
  Antisense strand to SEQ ID NO: 1523460
gaucaagaaaccuuaccca

SEQ ID NO: 1523462 - RNA, 19 nt, Artificial Sequence
  Description of Artificial Sequence: Synthetic oligonucleotide
  Sense strand starting at position 3646 of SEQ ID NO: 1244929
aagguuucuugaucccaag

SEQ ID NO: 1523463 - RNA, 19 nt, Artificial Sequence
  Description of Artificial Sequence: Synthetic oligonucleotide
  Antisense strand to SEQ ID NO: 1523462
cuugggaucaagaaaccuu

SEQ ID NO: 1523464 - RNA, 19 nt, Artificial Sequence
  Description of Artificial Sequence: Synthetic oligonucleotide
  Sense strand starting at position 3704 of SEQ ID NO: 1244929
agcucaacacuauguugau

SEQ ID NO: 1523465 - RNA, 19 nt, Artificial Sequence
  Description of Artificial Sequence: Synthetic oligonucleotide
  Antisense strand to SEQ ID NO: 1523464
aucaacauaguguugagcu

SEQ ID NO: 1523466 - RNA, 19 nt, Artificial Sequence
  Description of Artificial Sequence: Synthetic oligonucleotide
  Sense strand starting at position 3705 of SEQ ID NO: 1244929
gcucaacacuauguugaua

SEQ ID NO: 1523467 - RNA, 19 nt, Artificial Sequence
  Description of Artificial Sequence: Synthetic oligonucleotide
  Antisense strand to SEQ ID NO: 1523466
uaucaacauaguguugagc

SEQ ID NO: 1523468 - RNA, 19 nt, Artificial Sequence
  Description of Artificial Sequence: Synthetic oligonucleotide
  Sense strand starting at position 3718 of SEQ ID NO: 1244929
uugauaguaugguuccaac

SEQ ID NO: 1523469 - RNA, 19 nt, Artificial Sequence
  Description of Artificial Sequence: Synthetic oligonucleotide
  Antisense strand to SEQ ID NO: 1523468
guuggaaccauacuaucaa

SEQ ID NO: 1523470 - RNA, 19 nt, Artificial Sequence
  Description of Artificial Sequence: Synthetic oligonucleotide
  Sense strand starting at position 3729 of SEQ ID NO: 1244929
guuccaacuuuggcaugua

SEQ ID NO: 1523471 - RNA, 19 nt, Artificial Sequence
  Description of Artificial Sequence: Synthetic oligonucleotide
  Antisense strand to SEQ ID NO: 1523470
uacaugccaaaguuggaac

SEQ ID NO: 1523472 - RNA, 19 nt, Artificial Sequence
  Description of Artificial Sequence: Synthetic oligonucleotide
  Sense strand starting at position 3732 of SEQ ID NO: 1244929
ccaacuuuggcauguacau

SEQ ID NO: 1523473 - RNA, 19 nt, Artificial Sequence
  Description of Artificial Sequence: Synthetic oligonucleotide
  Antisense strand to SEQ ID NO: 1523472
auguacaugccaaaguugg

SEQ ID NO: 1523474 - RNA, 19 nt, Artificial Sequence
  Description of Artificial Sequence: Synthetic oligonucleotide
  Sense strand starting at position 3739 of SEQ ID NO: 1244929
uggcauguacaucauuaag

SEQ ID NO: 1523475 - RNA, 19 nt, Artificial Sequence
  Description of Artificial Sequence: Synthetic oligonucleotide
  Antisense strand to SEQ ID NO: 1523474
cuuaaugauguacaugcca

SEQ ID NO: 1523476 - RNA, 19 nt, Artificial Sequence
  Description of Artificial Sequence: Synthetic oligonucleotide
  Sense strand starting at position 3741 of SEQ ID NO: 1244929
gcauguacaucauuaagac

SEQ ID NO: 1523477 - RNA, 19 nt, Artificial Sequence
  Description of Artificial Sequence: Synthetic oligonucleotide
  Antisense strand to SEQ ID NO: 1523476
gucuuaaugauguacaugc

SEQ ID NO: 1523478 - RNA, 19 nt, Artificial Sequence
  Description of Artificial Sequence: Synthetic oligonucleotide
  Sense strand starting at position 3756 of SEQ ID NO: 1244929
agacauagcuuagucaacu

SEQ ID NO: 1523479 - RNA, 19 nt, Artificial Sequence
  Description of Artificial Sequence: Synthetic oligonucleotide
  Antisense strand to SEQ ID NO: 1523478
aguugacuaagcuaugucu

SEQ ID NO: 1523480 - RNA, 19 nt, Artificial Sequence
  Description of Artificial Sequence: Synthetic oligonucleotide
  Sense strand starting at position 3845 of SEQ ID NO: 1244929
uuaggucuuccagaguuug

SEQ ID NO: 1523481 - RNA, 19 nt, Artificial Sequence
  Description of Artificial Sequence: Synthetic oligonucleotide
  Antisense strand to SEQ ID NO: 1523480
caaacucuggaagaccuaa

SEQ ID NO: 1523482 - RNA, 19 nt, Artificial Sequence
  Description of Artificial Sequence: Synthetic oligonucleotide
  Sense strand starting at position 3899 of SEQ ID NO: 1244929
uguucuugaaucggcaaga

SEQ ID NO: 1523483 - RNA, 19 nt, Artificial Sequence
  Description of Artificial Sequence: Synthetic oligonucleotide
  Antisense strand to SEQ ID NO: 1523482
ucuugccgauucaagaaca

SEQ ID NO: 1523484 - RNA, 19 nt, Artificial Sequence
  Description of Artificial Sequence: Synthetic oligonucleotide
  Sense strand starting at position 3900 of SEQ ID NO: 1244929
guucuugaaucggcaagaa

SEQ ID NO: 1523485 - RNA, 19 nt, Artificial Sequence
  Description of Artificial Sequence: Synthetic oligonucleotide
  Antisense strand to SEQ ID NO: 1523484
uucuugccgauucaagaac

SEQ ID NO: 1523486 - RNA, 19 nt, Artificial Sequence
  Description of Artificial Sequence: Synthetic oligonucleotide
  Sense strand starting at position 3912 of SEQ ID NO: 1244929
gcaagaaucuccgcaacuc

SEQ ID NO: 1523487 - RNA, 19 nt, Artificial Sequence
  Description of Artificial Sequence: Synthetic oligonucleotide
  Antisense strand to SEQ ID NO: 1523486
gaguugcggagauucuugc

SEQ ID NO: 1523488 - RNA, 19 nt, Artificial Sequence
  Description of Artificial Sequence: Synthetic oligonucleotide
  Sense strand starting at position 265 of SEQ ID NO: 1244930
ucaauauucccacgguuga

SEQ ID NO: 1523489 - RNA, 19 nt, Artificial Sequence
  Description of Artificial Sequence: Synthetic oligonucleotide
  Antisense strand to SEQ ID NO: 1523488
ucaaccgugggaauauuga

SEQ ID NO: 1523490 - RNA, 19 nt, Artificial Sequence
  Description of Artificial Sequence: Synthetic oligonucleotide
  Sense strand starting at position 269 of SEQ ID NO: 1244930
uauucccacgguugagaaa

SEQ ID NO: 1523491 - RNA, 19 nt, Artificial Sequence
  Description of Artificial Sequence: Synthetic oligonucleotide
  Antisense strand to SEQ ID NO: 1523490
uuucucaaccgugggaaua

SEQ ID NO: 1523492 - RNA, 19 nt, Artificial Sequence
  Description of Artificial Sequence: Synthetic oligonucleotide
  Sense strand starting at position 867 of SEQ ID NO: 1244930
gugaaugcacaaggaauaa

SEQ ID NO: 1523493 - RNA, 19 nt, Artificial Sequence
  Description of Artificial Sequence: Synthetic oligonucleotide
  Antisense strand to SEQ ID NO: 1523492
uuauuccuugugcauucac

SEQ ID NO: 1523494 - RNA, 19 nt, Artificial Sequence
  Description of Artificial Sequence: Synthetic oligonucleotide
  Sense strand starting at position 956 of SEQ ID NO: 1244930
aacucuugaguugagcaaa

SEQ ID NO: 1523495 - RNA, 19 nt, Artificial Sequence
  Description of Artificial Sequence: Synthetic oligonucleotide
  Antisense strand to SEQ ID NO: 1523494
uuugcucaacucaagaguu

SEQ ID NO: 1523496 - RNA, 19 nt, Artificial Sequence
  Description of Artificial Sequence: Synthetic oligonucleotide
  Sense strand starting at position 959 of SEQ ID NO: 1244930
ucuugaguugagcaaacau

SEQ ID NO: 1523497 - RNA, 19 nt, Artificial Sequence
  Description of Artificial Sequence: Synthetic oligonucleotide
  Antisense strand to SEQ ID NO: 1523496
auguuugcucaacucaaga

SEQ ID NO: 1523498 - RNA, 19 nt, Artificial Sequence
  Description of Artificial Sequence: Synthetic oligonucleotide
  Sense strand starting at position 1121 of SEQ ID NO: 1244930
ugacaacuuugaucccagu

SEQ ID NO: 1523499 - RNA, 19 nt, Artificial Sequence
  Description of Artificial Sequence: Synthetic oligonucleotide
  Antisense strand to SEQ ID NO: 1523498
acugggaucaaaguuguca

SEQ ID NO: 1523500 - RNA, 19 nt, Artificial Sequence
  Description of Artificial Sequence: Synthetic oligonucleotide
  Sense strand starting at position 1192 of SEQ ID NO: 1244930
ccauccuuccugcagagau

SEQ ID NO: 1523501 - RNA, 19 nt, Artificial Sequence
  Description of Artificial Sequence: Synthetic oligonucleotide
  Antisense strand to SEQ ID NO: 1523500
aucucugcaggaaggaugg

SEQ ID NO: 1523502 - RNA, 19 nt, Artificial Sequence
  Description of Artificial Sequence: Synthetic oligonucleotide
  Sense strand starting at position 1194 of SEQ ID NO: 1244930
auccuuccugcagagauga

SEQ ID NO: 1523503 - RNA, 19 nt, Artificial Sequence
  Description of Artificial Sequence: Synthetic oligonucleotide
  Antisense strand to SEQ ID NO: 1523502
ucaucucugcaggaaggau

SEQ ID NO: 1523504 - RNA, 19 nt, Artificial Sequence
  Description of Artificial Sequence: Synthetic oligonucleotide
  Sense strand starting at position 1210 of SEQ ID NO: 1244930
ugaggaggguguuaaagaa

SEQ ID NO: 1523505 - RNA, 19 nt, Artificial Sequence
  Description of Artificial Sequence: Synthetic oligonucleotide
  Antisense strand to SEQ ID NO: 1523504
uucuuuaacacccuccuca

SEQ ID NO: 1523506 - RNA, 19 nt, Artificial Sequence
  Description of Artificial Sequence: Synthetic oligonucleotide
  Sense strand starting at position 1231 of SEQ ID NO: 1244930
ggagcagaaucucucccaa

SEQ ID NO: 1523507 - RNA, 19 nt, Artificial Sequence
  Description of Artificial Sequence: Synthetic oligonucleotide
  Antisense strand to SEQ ID NO: 1523506
uugggagagauucugcucc

SEQ ID NO: 1523508 - RNA, 19 nt, Artificial Sequence
  Description of Artificial Sequence: Synthetic oligonucleotide
  Sense strand starting at position 1233 of SEQ ID NO: 1244930
agcagaaucucucccaaag

SEQ ID NO: 1523509 - RNA, 19 nt, Artificial Sequence
  Description of Artificial Sequence: Synthetic oligonucleotide
  Antisense strand to SEQ ID NO: 1523508
cuuugggagagauucugcu

SEQ ID NO: 1523510 - RNA, 19 nt, Artificial Sequence
  Description of Artificial Sequence: Synthetic oligonucleotide
  Sense strand starting at position 1307 of SEQ ID NO: 1244930
guagaagccugguugagua

SEQ ID NO: 1523511 - RNA, 19 nt, Artificial Sequence
  Description of Artificial Sequence: Synthetic oligonucleotide
  Antisense strand to SEQ ID NO: 1523510
uacucaaccaggcuucuac

SEQ ID NO: 1523512 - RNA, 19 nt, Artificial Sequence
  Description of Artificial Sequence: Synthetic oligonucleotide
  Sense strand starting at position 1309 of SEQ ID NO: 1244930
agaagccugguugaguaaa

SEQ ID NO: 1523513 - RNA, 19 nt, Artificial Sequence
  Description of Artificial Sequence: Synthetic oligonucleotide
  Antisense strand to SEQ ID NO: 1523512
uuuacucaaccaggcuucu

SEQ ID NO: 1523514 - RNA, 19 nt, Artificial Sequence
  Description of Artificial Sequence: Synthetic oligonucleotide
  Sense strand starting at position 1311 of SEQ ID NO: 1244930
aagccugguugaguaaaga

SEQ ID NO: 1523515 - RNA, 19 nt, Artificial Sequence
  Description of Artificial Sequence: Synthetic oligonucleotide
  Antisense strand to SEQ ID NO: 1523514
ucuuuacucaaccaggcuu

SEQ ID NO: 1523516 - RNA, 19 nt, Artificial Sequence
  Description of Artificial Sequence: Synthetic oligonucleotide
  Sense strand starting at position 1321 of SEQ ID NO: 1244930
gaguaaagacaucgcccau

SEQ ID NO: 1523517 - RNA, 19 nt, Artificial Sequence
  Description of Artificial Sequence: Synthetic oligonucleotide
  Antisense strand to SEQ ID NO: 1523516
augggcgaugucuuuacuc

SEQ ID NO: 1523518 - RNA, 19 nt, Artificial Sequence
  Description of Artificial Sequence: Synthetic oligonucleotide
  Sense strand starting at position 1606 of SEQ ID NO: 1244930
ucccguacaucagcuuaua

SEQ ID NO: 1523519 - RNA, 19 nt, Artificial Sequence
  Description of Artificial Sequence: Synthetic oligonucleotide
  Antisense strand to SEQ ID NO: 1523518
uauaagcugauguacggga

SEQ ID NO: 1523520 - RNA, 19 nt, Artificial Sequence
  Description of Artificial Sequence: Synthetic oligonucleotide
  Sense strand starting at position 1618 of SEQ ID NO: 1244930
gcuuauacuccuggaggga

SEQ ID NO: 1523521 - RNA, 19 nt, Artificial Sequence
  Description of Artificial Sequence: Synthetic oligonucleotide
  Antisense strand to SEQ ID NO: 1523520
ucccuccaggaguauaagc

SEQ ID NO: 1523522 - RNA, 19 nt, Artificial Sequence
  Description of Artificial Sequence: Synthetic oligonucleotide
  Sense strand starting at position 1724 of SEQ ID NO: 1244930
gacuauagguguuuggaga

SEQ ID NO: 1523523 - RNA, 19 nt, Artificial Sequence
  Description of Artificial Sequence: Synthetic oligonucleotide
  Antisense strand to SEQ ID NO: 1523522
ucuccaaacaccuauaguc

SEQ ID NO: 1523524 - RNA, 19 nt, Artificial Sequence
  Description of Artificial Sequence: Synthetic oligonucleotide
  Sense strand starting at position 1725 of SEQ ID NO: 1244930
acuauagguguuuggagau

SEQ ID NO: 1523525 - RNA, 19 nt, Artificial Sequence
  Description of Artificial Sequence: Synthetic oligonucleotide
  Antisense strand to SEQ ID NO: 1523524
aucuccaaacaccuauagu

SEQ ID NO: 1523526 - RNA, 19 nt, Artificial Sequence
  Description of Artificial Sequence: Synthetic oligonucleotide
  Sense strand starting at position 1728 of SEQ ID NO: 1244930
auagguguuuggagaugag

SEQ ID NO: 1523527 - RNA, 19 nt, Artificial Sequence
  Description of Artificial Sequence: Synthetic oligonucleotide
  Antisense strand to SEQ ID NO: 1523526
cucaucuccaaacaccuau

SEQ ID NO: 1523528 - RNA, 19 nt, Artificial Sequence
  Description of Artificial Sequence: Synthetic oligonucleotide
  Sense strand starting at position 1778 of SEQ ID NO: 1244930
ucaccuccuccuugggaau

SEQ ID NO: 1523529 - RNA, 19 nt, Artificial Sequence
  Description of Artificial Sequence: Synthetic oligonucleotide
  Antisense strand to SEQ ID NO: 1523528
auucccaaggaggagguga

SEQ ID NO: 1523530 - RNA, 19 nt, Artificial Sequence
  Description of Artificial Sequence: Synthetic oligonucleotide
  Sense strand starting at position 3478 of SEQ ID NO: 1244930
aagcuuugaugagauuuga

SEQ ID NO: 1523531 - RNA, 19 nt, Artificial Sequence
  Description of Artificial Sequence: Synthetic oligonucleotide
  Antisense strand to SEQ ID NO: 1523530
ucaaaucucaucaaagcuu

SEQ ID NO: 1523532 - RNA, 19 nt, Artificial Sequence
  Description of Artificial Sequence: Synthetic oligonucleotide
  Sense strand starting at position 3588 of SEQ ID NO: 1244930
uuaugaaacuucccagugu

SEQ ID NO: 1523533 - RNA, 19 nt, Artificial Sequence
  Description of Artificial Sequence: Synthetic oligonucleotide
  Antisense strand to SEQ ID NO: 1523532
acacugggaaguuucauaa

SEQ ID NO: 1523534 - RNA, 19 nt, Artificial Sequence
  Description of Artificial Sequence: Synthetic oligonucleotide
  Sense strand starting at position 3618 of SEQ ID NO: 1244930
agacaucucugcuccgagu

SEQ ID NO: 1523535 - RNA, 19 nt, Artificial Sequence
  Description of Artificial Sequence: Synthetic oligonucleotide
  Antisense strand to SEQ ID NO: 1523534
acucggagcagagaugucu

SEQ ID NO: 1523536 - RNA, 19 nt, Artificial Sequence
  Description of Artificial Sequence: Synthetic oligonucleotide
  Sense strand starting at position 3657 of SEQ ID NO: 1244930
guagguuggugagcuauuu

SEQ ID NO: 1523537 - RNA, 19 nt, Artificial Sequence
  Description of Artificial Sequence: Synthetic oligonucleotide
  Antisense strand to SEQ ID NO: 1523536
aaauagcucaccaaccuac

SEQ ID NO: 1523538 - RNA, 19 nt, Artificial Sequence
  Description of Artificial Sequence: Synthetic oligonucleotide
  Sense strand starting at position 3665 of SEQ ID NO: 1244930
gugagcuauuucccgugca

SEQ ID NO: 1523539 - RNA, 19 nt, Artificial Sequence
  Description of Artificial Sequence: Synthetic oligonucleotide
  Antisense strand to SEQ ID NO: 1523538
ugcacgggaaauagcucac

SEQ ID NO: 1523540 - RNA, 19 nt, Artificial Sequence
  Description of Artificial Sequence: Synthetic oligonucleotide
  Sense strand starting at position 3691 of SEQ ID NO: 1244930
uggguaagguuucuugauc

SEQ ID NO: 1523541 - RNA, 19 nt, Artificial Sequence
  Description of Artificial Sequence: Synthetic oligonucleotide
  Antisense strand to SEQ ID NO: 1523540
gaucaagaaaccuuaccca

SEQ ID NO: 1523542 - RNA, 19 nt, Artificial Sequence
  Description of Artificial Sequence: Synthetic oligonucleotide
  Sense strand starting at position 3696 of SEQ ID NO: 1244930
aagguuucuugaucccaag

SEQ ID NO: 1523543 - RNA, 19 nt, Artificial Sequence
  Description of Artificial Sequence: Synthetic oligonucleotide
  Antisense strand to SEQ ID NO: 1523542
cuugggaucaagaaaccuu

SEQ ID NO: 1523544 - RNA, 19 nt, Artificial Sequence
  Description of Artificial Sequence: Synthetic oligonucleotide
  Sense strand starting at position 3754 of SEQ ID NO: 1244930
agcucaacacuauguugau

SEQ ID NO: 1523545 - RNA, 19 nt, Artificial Sequence
  Description of Artificial Sequence: Synthetic oligonucleotide
  Antisense strand to SEQ ID NO: 1523544
aucaacauaguguugagcu

SEQ ID NO: 1523546 - RNA, 19 nt, Artificial Sequence
  Description of Artificial Sequence: Synthetic oligonucleotide
  Sense strand starting at position 3755 of SEQ ID NO: 1244930
gcucaacacuauguugaua

SEQ ID NO: 1523547 - RNA, 19 nt, Artificial Sequence
  Description of Artificial Sequence: Synthetic oligonucleotide
  Antisense strand to SEQ ID NO: 1523546
uaucaacauaguguugagc

SEQ ID NO: 1523548 - RNA, 19 nt, Artificial Sequence
  Description of Artificial Sequence: Synthetic oligonucleotide
  Sense strand starting at position 3768 of SEQ ID NO: 1244930
uugauaguaugguuccaac

SEQ ID NO: 1523549 - RNA, 19 nt, Artificial Sequence
  Description of Artificial Sequence: Synthetic oligonucleotide
  Antisense strand to SEQ ID NO: 1523548
guuggaaccauacuaucaa

SEQ ID NO: 1523550 - RNA, 19 nt, Artificial Sequence
  Description of Artificial Sequence: Synthetic oligonucleotide
  Sense strand starting at position 3779 of SEQ ID NO: 1244930
guuccaacuuuggcaugua

SEQ ID NO: 1523551 - RNA, 19 nt, Artificial Sequence
  Description of Artificial Sequence: Synthetic oligonucleotide
  Antisense strand to SEQ ID NO: 1523550
uacaugccaaaguuggaac

SEQ ID NO: 1523552 - RNA, 19 nt, Artificial Sequence
  Description of Artificial Sequence: Synthetic oligonucleotide
  Sense strand starting at position 3782 of SEQ ID NO: 1244930
ccaacuuuggcauguacau

SEQ ID NO: 1523553 - RNA, 19 nt, Artificial Sequence
  Description of Artificial Sequence: Synthetic oligonucleotide
  Antisense strand to SEQ ID NO: 1523552
auguacaugccaaaguugg

SEQ ID NO: 1523554 - RNA, 19 nt, Artificial Sequence
  Description of Artificial Sequence: Synthetic oligonucleotide
  Sense strand starting at position 3789 of SEQ ID NO: 1244930
uggcauguacaucauuaag

SEQ ID NO: 1523555 - RNA, 19 nt, Artificial Sequence
  Description of Artificial Sequence: Synthetic oligonucleotide
  Antisense strand to SEQ ID NO: 1523554
cuuaaugauguacaugcca

SEQ ID NO: 1523556 - RNA, 19 nt, Artificial Sequence
  Description of Artificial Sequence: Synthetic oligonucleotide
  Sense strand starting at position 3791 of SEQ ID NO: 1244930
gcauguacaucauuaagac

SEQ ID NO: 1523557 - RNA, 19 nt, Artificial Sequence
  Description of Artificial Sequence: Synthetic oligonucleotide
  Antisense strand to SEQ ID NO: 1523556
gucuuaaugauguacaugc

SEQ ID NO: 1523558 - RNA, 19 nt, Artificial Sequence
  Description of Artificial Sequence: Synthetic oligonucleotide
  Sense strand starting at position 3806 of SEQ ID NO: 1244930
agacauagcuuagucaacu

SEQ ID NO: 1523559 - RNA, 19 nt, Artificial Sequence
  Description of Artificial Sequence: Synthetic oligonucleotide
  Antisense strand to SEQ ID NO: 1523558
aguugacuaagcuaugucu

SEQ ID NO: 1523560 - RNA, 19 nt, Artificial Sequence
  Description of Artificial Sequence: Synthetic oligonucleotide
  Sense strand starting at position 3895 of SEQ ID NO: 1244930
uuaggucuuccagaguuug

SEQ ID NO: 1523561 - RNA, 19 nt, Artificial Sequence
  Description of Artificial Sequence: Synthetic oligonucleotide
  Antisense strand to SEQ ID NO: 1523560
caaacucuggaagaccuaa

SEQ ID NO: 1523562 - RNA, 19 nt, Artificial Sequence
  Description of Artificial Sequence: Synthetic oligonucleotide
  Sense strand starting at position 3949 of SEQ ID NO: 1244930
uguucuugaaucggcaaga

SEQ ID NO: 1523563 - RNA, 19 nt, Artificial Sequence
  Description of Artificial Sequence: Synthetic oligonucleotide
  Antisense strand to SEQ ID NO: 1523562
ucuugccgauucaagaaca

SEQ ID NO: 1523564 - RNA, 19 nt, Artificial Sequence
  Description of Artificial Sequence: Synthetic oligonucleotide
  Sense strand starting at position 3950 of SEQ ID NO: 1244930
guucuugaaucggcaagaa

SEQ ID NO: 1523565 - RNA, 19 nt, Artificial Sequence
  Description of Artificial Sequence: Synthetic oligonucleotide
  Antisense strand to SEQ ID NO: 1523564
uucuugccgauucaagaac

SEQ ID NO: 1523566 - RNA, 19 nt, Artificial Sequence
  Description of Artificial Sequence: Synthetic oligonucleotide
  Sense strand starting at position 3962 of SEQ ID NO: 1244930
gcaagaaucuccgcaacuc

SEQ ID NO: 1523567 - RNA, 19 nt, Artificial Sequence
  Description of Artificial Sequence: Synthetic oligonucleotide
  Antisense strand to SEQ ID NO: 1523566
gaguugcggagauucuugc

SEQ ID NO: 1523568 - RNA, 19 nt, Artificial Sequence
  Description of Artificial Sequence: Synthetic oligonucleotide
  Sense strand starting at position 78 of SEQ ID NO: 1244931
gaaggaaauugacauaaag

SEQ ID NO: 1523569 - RNA, 19 nt, Artificial Sequence
  Description of Artificial Sequence: Synthetic oligonucleotide
  Antisense strand to SEQ ID NO: 1523568
cuuuaugucaauuuccuuc

SEQ ID NO: 1523570 - RNA, 19 nt, Artificial Sequence
  Description of Artificial Sequence: Synthetic oligonucleotide
  Sense strand starting at position 93 of SEQ ID NO: 1244931
aaaggaaccugguuuaucu

SEQ ID NO: 1523571 - RNA, 19 nt, Artificial Sequence
  Description of Artificial Sequence: Synthetic oligonucleotide
  Antisense strand to SEQ ID NO: 1523570
agauaaaccagguuccuuu

SEQ ID NO: 1523572 - RNA, 19 nt, Artificial Sequence
  Description of Artificial Sequence: Synthetic oligonucleotide
  Sense strand starting at position 101 of SEQ ID NO: 1244931
cugguuuaucuuuauguau

SEQ ID NO: 1523573 - RNA, 19 nt, Artificial Sequence
  Description of Artificial Sequence: Synthetic oligonucleotide
  Antisense strand to SEQ ID NO: 1523572
auacauaaagauaaaccag

SEQ ID NO: 1523574 - RNA, 19 nt, Artificial Sequence
  Description of Artificial Sequence: Synthetic oligonucleotide
  Sense strand starting at position 178 of SEQ ID NO: 1244931
uguccauagcuugaaggau

SEQ ID NO: 1523575 - RNA, 19 nt, Artificial Sequence
  Description of Artificial Sequence: Synthetic oligonucleotide
  Antisense strand to SEQ ID NO: 1523574
auccuucaagcuauggaca

SEQ ID NO: 1523576 - RNA, 19 nt, Artificial Sequence
  Description of Artificial Sequence: Synthetic oligonucleotide
  Sense strand starting at position 319 of SEQ ID NO: 1244931
cgagguucccugggaccaa

SEQ ID NO: 1523577 - RNA, 19 nt, Artificial Sequence
  Description of Artificial Sequence: Synthetic oligonucleotide
  Antisense strand to SEQ ID NO: 1523576
uuggucccagggaaccucg

SEQ ID NO: 1523578 - RNA, 19 nt, Artificial Sequence
  Description of Artificial Sequence: Synthetic oligonucleotide
  Sense strand starting at position 355 of SEQ ID NO: 1244931
caagaagugcaauguuaca

SEQ ID NO: 1523579 - RNA, 19 nt, Artificial Sequence
  Description of Artificial Sequence: Synthetic oligonucleotide
  Antisense strand to SEQ ID NO: 1523578
uguaacauugcacuucuug

SEQ ID NO: 1523580 - RNA, 19 nt, Artificial Sequence
  Description of Artificial Sequence: Synthetic oligonucleotide
  Sense strand starting at position 364 of SEQ ID NO: 1244931
caauguuacaguuggagag

SEQ ID NO: 1523581 - RNA, 19 nt, Artificial Sequence
  Description of Artificial Sequence: Synthetic oligonucleotide
  Antisense strand to SEQ ID NO: 1523580
cucuccaacuguaacauug

SEQ ID NO: 1523582 - RNA, 19 nt, Artificial Sequence
  Description of Artificial Sequence: Synthetic oligonucleotide
  Sense strand starting at position 662 of SEQ ID NO: 1244931
gacagcagucccuaaguau

SEQ ID NO: 1523583 - RNA, 19 nt, Artificial Sequence
  Description of Artificial Sequence: Synthetic oligonucleotide
  Antisense strand to SEQ ID NO: 1523582
auacuuagggacugcuguc

SEQ ID NO: 1523584 - RNA, 19 nt, Artificial Sequence
  Description of Artificial Sequence: Synthetic oligonucleotide
  Sense strand starting at position 705 of SEQ ID NO: 1244931
cuaaauucccuuggucuga

SEQ ID NO: 1523585 - RNA, 19 nt, Artificial Sequence
  Description of Artificial Sequence: Synthetic oligonucleotide
  Antisense strand to SEQ ID NO: 1523584
ucagaccaagggaauuuag

SEQ ID NO: 1523586 - RNA, 19 nt, Artificial Sequence
  Description of Artificial Sequence: Synthetic oligonucleotide
  Sense strand starting at position 792 of SEQ ID NO: 1244931
gagagaacugcugaugcua

SEQ ID NO: 1523587 - RNA, 19 nt, Artificial Sequence
  Description of Artificial Sequence: Synthetic oligonucleotide
  Antisense strand to SEQ ID NO: 1523586
uagcaucagcaguucucuc

SEQ ID NO: 1523588 - RNA, 19 nt, Artificial Sequence
  Description of Artificial Sequence: Synthetic oligonucleotide
  Sense strand starting at position 853 of SEQ ID NO: 1244931
guuacaugcuauuuaucuu

SEQ ID NO: 1523589 - RNA, 19 nt, Artificial Sequence
  Description of Artificial Sequence: Synthetic oligonucleotide
  Antisense strand to SEQ ID NO: 1523588
aagauaaauagcauguaac

SEQ ID NO: 1523590 - RNA, 19 nt, Artificial Sequence
  Description of Artificial Sequence: Synthetic oligonucleotide
  Sense strand starting at position 957 of SEQ ID NO: 1244931
acuuaaaccuccuugugga

SEQ ID NO: 1523591 - RNA, 19 nt, Artificial Sequence
  Description of Artificial Sequence: Synthetic oligonucleotide
  Antisense strand to SEQ ID NO: 1523590
uccacaaggagguuuaagu

SEQ ID NO: 1523592 - RNA, 19 nt, Artificial Sequence
  Description of Artificial Sequence: Synthetic oligonucleotide
  Sense strand starting at position 958 of SEQ ID NO: 1244931
cuuaaaccuccuuguggau

SEQ ID NO: 1523593 - RNA, 19 nt, Artificial Sequence
  Description of Artificial Sequence: Synthetic oligonucleotide
  Antisense strand to SEQ ID NO: 1523592
auccacaaggagguuuaag

SEQ ID NO: 1523594 - RNA, 19 nt, Artificial Sequence
  Description of Artificial Sequence: Synthetic oligonucleotide
  Sense strand starting at position 1004 of SEQ ID NO: 1244931
aggccucaguuauuaccaa

SEQ ID NO: 1523595 - RNA, 19 nt, Artificial Sequence
  Description of Artificial Sequence: Synthetic oligonucleotide
  Antisense strand to SEQ ID NO: 1523594
uugguaauaacugaggccu

SEQ ID NO: 1523596 - RNA, 19 nt, Artificial Sequence
  Description of Artificial Sequence: Synthetic oligonucleotide
  Sense strand starting at position 1064 of SEQ ID NO: 1244931
auccuuugucauuggaacu

SEQ ID NO: 1523597 - RNA, 19 nt, Artificial Sequence
  Description of Artificial Sequence: Synthetic oligonucleotide
  Antisense strand to SEQ ID NO: 1523596
aguuccaaugacaaaggau

SEQ ID NO: 1523598 - RNA, 19 nt, Artificial Sequence
  Description of Artificial Sequence: Synthetic oligonucleotide
  Sense strand starting at position 1212 of SEQ ID NO: 1244931
uguguuaaugcacauaaac

SEQ ID NO: 1523599 - RNA, 19 nt, Artificial Sequence
  Description of Artificial Sequence: Synthetic oligonucleotide
  Antisense strand to SEQ ID NO: 1523598
guuuaugugcauuaacaca

SEQ ID NO: 1523600 - RNA, 19 nt, Artificial Sequence
  Description of Artificial Sequence: Synthetic oligonucleotide
  Sense strand starting at position 1260 of SEQ ID NO: 1244931
gcacucaggaaaggucauu

SEQ ID NO: 1523601 - RNA, 19 nt, Artificial Sequence
  Description of Artificial Sequence: Synthetic oligonucleotide
  Antisense strand to SEQ ID NO: 1523600
aaugaccuuuccugagugc

SEQ ID NO: 1523602 - RNA, 19 nt, Artificial Sequence
  Description of Artificial Sequence: Synthetic oligonucleotide
  Sense strand starting at position 1379 of SEQ ID NO: 1244931
agguaugaucaauauguuu

SEQ ID NO: 1523603 - RNA, 19 nt, Artificial Sequence
  Description of Artificial Sequence: Synthetic oligonucleotide
  Antisense strand to SEQ ID NO: 1523602
aaacauauugaucauaccu

SEQ ID NO: 1523604 - RNA, 19 nt, Artificial Sequence
  Description of Artificial Sequence: Synthetic oligonucleotide
  Sense strand starting at position 1385 of SEQ ID NO: 1244931
gaucaauauguuuggucau

SEQ ID NO: 1523605 - RNA, 19 nt, Artificial Sequence
  Description of Artificial Sequence: Synthetic oligonucleotide
  Antisense strand to SEQ ID NO: 1523604
augaccaaacauauugauc

SEQ ID NO: 1523606 - RNA, 19 nt, Artificial Sequence
  Description of Artificial Sequence: Synthetic oligonucleotide
  Sense strand starting at position 1447 of SEQ ID NO: 1244931
uguacuggacacugacaau

SEQ ID NO: 1523607 - RNA, 19 nt, Artificial Sequence
  Description of Artificial Sequence: Synthetic oligonucleotide
  Antisense strand to SEQ ID NO: 1523606
auugucaguguccaguaca

SEQ ID NO: 1523608 - RNA, 19 nt, Artificial Sequence
  Description of Artificial Sequence: Synthetic oligonucleotide
  Sense strand starting at position 1526 of SEQ ID NO: 1244931
gccugagggcaggauauua

SEQ ID NO: 1523609 - RNA, 19 nt, Artificial Sequence
  Description of Artificial Sequence: Synthetic oligonucleotide
  Antisense strand to SEQ ID NO: 1523608
uaauauccugcccucaggc

SEQ ID NO: 1523610 - RNA, 19 nt, Artificial Sequence
  Description of Artificial Sequence: Synthetic oligonucleotide
  Sense strand starting at position 1658 of SEQ ID NO: 1244931
aggagcagucucuaauucu

SEQ ID NO: 1523611 - RNA, 19 nt, Artificial Sequence
  Description of Artificial Sequence: Synthetic oligonucleotide
  Antisense strand to SEQ ID NO: 1523610
agaauuagagacugcuccu

SEQ ID NO: 1523612 - RNA, 19 nt, Artificial Sequence
  Description of Artificial Sequence: Synthetic oligonucleotide
  Sense strand starting at position 1827 of SEQ ID NO: 1244931
uuccaaggaguccgacuua

SEQ ID NO: 1523613 - RNA, 19 nt, Artificial Sequence
  Description of Artificial Sequence: Synthetic oligonucleotide
  Antisense strand to SEQ ID NO: 1523612
uaagucggacuccuuggaa

SEQ ID NO: 1523614 - RNA, 19 nt, Artificial Sequence
  Description of Artificial Sequence: Synthetic oligonucleotide
  Sense strand starting at position 1861 of SEQ ID NO: 1244931
cagaaaggcaggugguaua

SEQ ID NO: 1523615 - RNA, 19 nt, Artificial Sequence
  Description of Artificial Sequence: Synthetic oligonucleotide
  Antisense strand to SEQ ID NO: 1523614
uauaccaccugccuuucug

SEQ ID NO: 1523616 - RNA, 19 nt, Artificial Sequence
  Description of Artificial Sequence: Synthetic oligonucleotide
  Sense strand starting at position 1894 of SEQ ID NO: 1244931
gaaguaagguaucuucuuu

SEQ ID NO: 1523617 - RNA, 19 nt, Artificial Sequence
  Description of Artificial Sequence: Synthetic oligonucleotide
  Antisense strand to SEQ ID NO: 1523616
aaagaagauaccuuacuuc

SEQ ID NO: 1523618 - RNA, 19 nt, Artificial Sequence
  Description of Artificial Sequence: Synthetic oligonucleotide
  Sense strand starting at position 1983 of SEQ ID NO: 1244931
aggugcuuuccauaaauca

SEQ ID NO: 1523619 - RNA, 19 nt, Artificial Sequence
  Description of Artificial Sequence: Synthetic oligonucleotide
  Antisense strand to SEQ ID NO: 1523618
ugauuuauggaaagcaccu

SEQ ID NO: 1523620 - RNA, 19 nt, Artificial Sequence
  Description of Artificial Sequence: Synthetic oligonucleotide
  Sense strand starting at position 2207 of SEQ ID NO: 1244931
ucacuauuuggguguagca

SEQ ID NO: 1523621 - RNA, 19 nt, Artificial Sequence
  Description of Artificial Sequence: Synthetic oligonucleotide
  Antisense strand to SEQ ID NO: 1523620
ugcuacacccaaauaguga

SEQ ID NO: 1523622 - RNA, 19 nt, Artificial Sequence
  Description of Artificial Sequence: Synthetic oligonucleotide
  Sense strand starting at position 2239 of SEQ ID NO: 1244931
ccacguaucuuccuggaaa

SEQ ID NO: 1523623 - RNA, 19 nt, Artificial Sequence
  Description of Artificial Sequence: Synthetic oligonucleotide
  Antisense strand to SEQ ID NO: 1523622
uuuccaggaagauacgugg

SEQ ID NO: 1523624 - RNA, 19 nt, Artificial Sequence
  Description of Artificial Sequence: Synthetic oligonucleotide
  Sense strand starting at position 2242 of SEQ ID NO: 1244931
cguaucuuccuggaaauug

SEQ ID NO: 1523625 - RNA, 19 nt, Artificial Sequence
  Description of Artificial Sequence: Synthetic oligonucleotide
  Antisense strand to SEQ ID NO: 1523624
caauuuccaggaagauacg

SEQ ID NO: 1523626 - RNA, 19 nt, Artificial Sequence
  Description of Artificial Sequence: Synthetic oligonucleotide
  Sense strand starting at position 2253 of SEQ ID NO: 1244931
ggaaauugccagcauucua

SEQ ID NO: 1523627 - RNA, 19 nt, Artificial Sequence
  Description of Artificial Sequence: Synthetic oligonucleotide
  Antisense strand to SEQ ID NO: 1523626
uagaaugcuggcaauuucc

SEQ ID NO: 1523628 - RNA, 19 nt, Artificial Sequence
  Description of Artificial Sequence: Synthetic oligonucleotide
  Sense strand starting at position 2288 of SEQ ID NO: 1244931
gagguucuggauugaaguu

SEQ ID NO: 1523629 - RNA, 19 nt, Artificial Sequence
  Description of Artificial Sequence: Synthetic oligonucleotide
  Antisense strand to SEQ ID NO: 1523628
aacuucaauccagaaccuc

SEQ ID NO: 1523630 - RNA, 19 nt, Artificial Sequence
  Description of Artificial Sequence: Synthetic oligonucleotide
  Sense strand starting at position 2522 of SEQ ID NO: 1244931
uaaggauacugugccugau

SEQ ID NO: 1523631 - RNA, 19 nt, Artificial Sequence
  Description of Artificial Sequence: Synthetic oligonucleotide
  Antisense strand to SEQ ID NO: 1523630
aucaggcacaguauccuua

SEQ ID NO: 1523632 - RNA, 19 nt, Artificial Sequence
  Description of Artificial Sequence: Synthetic oligonucleotide
  Sense strand starting at position 2524 of SEQ ID NO: 1244931
aggauacugugccugauga

SEQ ID NO: 1523633 - RNA, 19 nt, Artificial Sequence
  Description of Artificial Sequence: Synthetic oligonucleotide
  Antisense strand to SEQ ID NO: 1523632
ucaucaggcacaguauccu

SEQ ID NO: 1523634 - RNA, 19 nt, Artificial Sequence
  Description of Artificial Sequence: Synthetic oligonucleotide
  Sense strand starting at position 2525 of SEQ ID NO: 1244931
ggauacugugccugaugaa

SEQ ID NO: 1523635 - RNA, 19 nt, Artificial Sequence
  Description of Artificial Sequence: Synthetic oligonucleotide
  Antisense strand to SEQ ID NO: 1523634
uucaucaggcacaguaucc

SEQ ID NO: 1523636 - RNA, 19 nt, Artificial Sequence
  Description of Artificial Sequence: Synthetic oligonucleotide
  Sense strand starting at position 2526 of SEQ ID NO: 1244931
gauacugugccugaugaau

SEQ ID NO: 1523637 - RNA, 19 nt, Artificial Sequence
  Description of Artificial Sequence: Synthetic oligonucleotide
  Antisense strand to SEQ ID NO: 1523636
auucaucaggcacaguauc

SEQ ID NO: 1523638 - RNA, 19 nt, Artificial Sequence
  Description of Artificial Sequence: Synthetic oligonucleotide
  Sense strand starting at position 2679 of SEQ ID NO: 1244931
gcagauggaugccuacuau

SEQ ID NO: 1523639 - RNA, 19 nt, Artificial Sequence
  Description of Artificial Sequence: Synthetic oligonucleotide
  Antisense strand to SEQ ID NO: 1523638
auaguaggcauccaucugc

SEQ ID NO: 1523640 - RNA, 19 nt, Artificial Sequence
  Description of Artificial Sequence: Synthetic oligonucleotide
  Sense strand starting at position 3053 of SEQ ID NO: 1244931
aaccaaaugcuccagggua

SEQ ID NO: 1523641 - RNA, 19 nt, Artificial Sequence
  Description of Artificial Sequence: Synthetic oligonucleotide
  Antisense strand to SEQ ID NO: 1523640
uacccuggagcauuugguu

SEQ ID NO: 1523642 - RNA, 19 nt, Artificial Sequence
  Description of Artificial Sequence: Synthetic oligonucleotide
  Sense strand starting at position 3109 of SEQ ID NO: 1244931
aggugucucggauaagaaa

SEQ ID NO: 1523643 - RNA, 19 nt, Artificial Sequence
  Description of Artificial Sequence: Synthetic oligonucleotide
  Antisense strand to SEQ ID NO: 1523642
uuucuuauccgagacaccu

SEQ ID NO: 1523644 - RNA, 19 nt, Artificial Sequence
  Description of Artificial Sequence: Synthetic oligonucleotide
  Sense strand starting at position 3289 of SEQ ID NO: 1244931
cugacaauccacugcugaa

SEQ ID NO: 1523645 - RNA, 19 nt, Artificial Sequence
  Description of Artificial Sequence: Synthetic oligonucleotide
  Antisense strand to SEQ ID NO: 1523644
uucagcaguggauugucag

SEQ ID NO: 1523646 - RNA, 19 nt, Artificial Sequence
  Description of Artificial Sequence: Synthetic oligonucleotide
  Sense strand starting at position 3545 of SEQ ID NO: 1244931
gaaguuauagagcggaaau

SEQ ID NO: 1523647 - RNA, 19 nt, Artificial Sequence
  Description of Artificial Sequence: Synthetic oligonucleotide
  Antisense strand to SEQ ID NO: 1523646
auuuccgcucuauaacuuc

SEQ ID NO: 1523648 - RNA, 19 nt, Artificial Sequence
  Description of Artificial Sequence: Synthetic oligonucleotide
  Sense strand starting at position 5 of SEQ ID NO: 1244932
ccuguaaguuccucauaga

SEQ ID NO: 1523649 - RNA, 19 nt, Artificial Sequence
  Description of Artificial Sequence: Synthetic oligonucleotide
  Antisense strand to SEQ ID NO: 1523648
ucuaugaggaacuuacagg

SEQ ID NO: 1523650 - RNA, 19 nt, Artificial Sequence
  Description of Artificial Sequence: Synthetic oligonucleotide
  Sense strand starting at position 6 of SEQ ID NO: 1244932
cuguaaguuccucauagaa

SEQ ID NO: 1523651 - RNA, 19 nt, Artificial Sequence
  Description of Artificial Sequence: Synthetic oligonucleotide
  Antisense strand to SEQ ID NO: 1523650
uucuaugaggaacuuacag

SEQ ID NO: 1523652 - RNA, 19 nt, Artificial Sequence
  Description of Artificial Sequence: Synthetic oligonucleotide
  Sense strand starting at position 39 of SEQ ID NO: 1244932
ggcuaagaggcaugagacu

SEQ ID NO: 1523653 - RNA, 19 nt, Artificial Sequence
  Description of Artificial Sequence: Synthetic oligonucleotide
  Antisense strand to SEQ ID NO: 1523652
agucucaugccucuuagcc

SEQ ID NO: 1523654 - RNA, 19 nt, Artificial Sequence
  Description of Artificial Sequence: Synthetic oligonucleotide
  Sense strand starting at position 130 of SEQ ID NO: 1244932
ggaggugucagaugauauu

SEQ ID NO: 1523655 - RNA, 19 nt, Artificial Sequence
  Description of Artificial Sequence: Synthetic oligonucleotide
  Antisense strand to SEQ ID NO: 1523654
aauaucaucugacaccucc

SEQ ID NO: 1523656 - RNA, 19 nt, Artificial Sequence
  Description of Artificial Sequence: Synthetic oligonucleotide
  Sense strand starting at position 137 of SEQ ID NO: 1244932
ucagaugauauugguggau

SEQ ID NO: 1523657 - RNA, 19 nt, Artificial Sequence
  Description of Artificial Sequence: Synthetic oligonucleotide
  Antisense strand to SEQ ID NO: 1523656
auccaccaauaucaucuga

SEQ ID NO: 1523658 - RNA, 19 nt, Artificial Sequence
  Description of Artificial Sequence: Synthetic oligonucleotide
  Sense strand starting at position 140 of SEQ ID NO: 1244932
gaugauauugguggauuga

SEQ ID NO: 1523659 - RNA, 19 nt, Artificial Sequence
  Description of Artificial Sequence: Synthetic oligonucleotide
  Antisense strand to SEQ ID NO: 1523658
ucaauccaccaauaucauc

SEQ ID NO: 1523660 - RNA, 19 nt, Artificial Sequence
  Description of Artificial Sequence: Synthetic oligonucleotide
  Sense strand starting at position 228 of SEQ ID NO: 1244932
guaaauguaaugugcaaag

SEQ ID NO: 1523661 - RNA, 19 nt, Artificial Sequence
  Description of Artificial Sequence: Synthetic oligonucleotide
  Antisense strand to SEQ ID NO: 1523660
cuuugcacauuacauuuac

SEQ ID NO: 1523662 - RNA, 19 nt, Artificial Sequence
  Description of Artificial Sequence: Synthetic oligonucleotide
  Sense strand starting at position 246 of SEQ ID NO: 1244932
gggcauuacuuaccacgaa

SEQ ID NO: 1523663 - RNA, 19 nt, Artificial Sequence
  Description of Artificial Sequence: Synthetic oligonucleotide
  Antisense strand to SEQ ID NO: 1523662
uucgugguaaguaaugccc

SEQ ID NO: 1523664 - RNA, 19 nt, Artificial Sequence
  Description of Artificial Sequence: Synthetic oligonucleotide
  Sense strand starting at position 350 of SEQ ID NO: 1244932
ugguguacaugccuaucaa

SEQ ID NO: 1523665 - RNA, 19 nt, Artificial Sequence
  Description of Artificial Sequence: Synthetic oligonucleotide
  Antisense strand to SEQ ID NO: 1523664
uugauaggcauguacacca

SEQ ID NO: 1523666 - RNA, 19 nt, Artificial Sequence
  Description of Artificial Sequence: Synthetic oligonucleotide
  Sense strand starting at position 351 of SEQ ID NO: 1244932
gguguacaugccuaucaau

SEQ ID NO: 1523667 - RNA, 19 nt, Artificial Sequence
  Description of Artificial Sequence: Synthetic oligonucleotide
  Antisense strand to SEQ ID NO: 1523666
auugauaggcauguacacc

SEQ ID NO: 1523668 - RNA, 19 nt, Artificial Sequence
  Description of Artificial Sequence: Synthetic oligonucleotide
  Sense strand starting at position 441 of SEQ ID NO: 1244932
agacaaguauugucaucuc

SEQ ID NO: 1523669 - RNA, 19 nt, Artificial Sequence
  Description of Artificial Sequence: Synthetic oligonucleotide
  Antisense strand to SEQ ID NO: 1523668
gagaugacaauacuugucu

SEQ ID NO: 1523670 - RNA, 19 nt, Artificial Sequence
  Description of Artificial Sequence: Synthetic oligonucleotide
  Sense strand starting at position 541 of SEQ ID NO: 1244932
gagggaucaaagugucuga

SEQ ID NO: 1523671 - RNA, 19 nt, Artificial Sequence
  Description of Artificial Sequence: Synthetic oligonucleotide
  Antisense strand to SEQ ID NO: 1523670
ucagacacuuugaucccuc

SEQ ID NO: 1523672 - RNA, 19 nt, Artificial Sequence
  Description of Artificial Sequence: Synthetic oligonucleotide
  Sense strand starting at position 604 of SEQ ID NO: 1244932
agguuaucuugagccugga

SEQ ID NO: 1523673 - RNA, 19 nt, Artificial Sequence
  Description of Artificial Sequence: Synthetic oligonucleotide
  Antisense strand to SEQ ID NO: 1523672
uccaggcucaagauaaccu

SEQ ID NO: 1523674 - RNA, 19 nt, Artificial Sequence
  Description of Artificial Sequence: Synthetic oligonucleotide
  Sense strand starting at position 607 of SEQ ID NO: 1244932
uuaucuugagccuggaaau

SEQ ID NO: 1523675 - RNA, 19 nt, Artificial Sequence
  Description of Artificial Sequence: Synthetic oligonucleotide
  Antisense strand to SEQ ID NO: 1523674
auuuccaggcucaagauaa

SEQ ID NO: 1523676 - RNA, 19 nt, Artificial Sequence
  Description of Artificial Sequence: Synthetic oligonucleotide
  Sense strand starting at position 624 of SEQ ID NO: 1244932
auccauuaucucugaaggu

SEQ ID NO: 1523677 - RNA, 19 nt, Artificial Sequence
  Description of Artificial Sequence: Synthetic oligonucleotide
  Antisense strand to SEQ ID NO: 1523676
accuucagagauaauggau

SEQ ID NO: 1523678 - RNA, 19 nt, Artificial Sequence
  Description of Artificial Sequence: Synthetic oligonucleotide
  Sense strand starting at position 628 of SEQ ID NO: 1244932
auuaucucugaagguuuau

SEQ ID NO: 1523679 - RNA, 19 nt, Artificial Sequence
  Description of Artificial Sequence: Synthetic oligonucleotide
  Antisense strand to SEQ ID NO: 1523678
auaaaccuucagagauaau

SEQ ID NO: 1523680 - RNA, 19 nt, Artificial Sequence
  Description of Artificial Sequence: Synthetic oligonucleotide
  Sense strand starting at position 657 of SEQ ID NO: 1244932
agggauaauucucuuucuu

SEQ ID NO: 1523681 - RNA, 19 nt, Artificial Sequence
  Description of Artificial Sequence: Synthetic oligonucleotide
  Antisense strand to SEQ ID NO: 1523680
aagaaagagaauuaucccu

SEQ ID NO: 1523682 - RNA, 19 nt, Artificial Sequence
  Description of Artificial Sequence: Synthetic oligonucleotide
  Sense strand starting at position 683 of SEQ ID NO: 1244932
uaagauauuguggguaaga

SEQ ID NO: 1523683 - RNA, 19 nt, Artificial Sequence
  Description of Artificial Sequence: Synthetic oligonucleotide
  Antisense strand to SEQ ID NO: 1523682
ucuuacccacaauaucuua

SEQ ID NO: 1523684 - RNA, 19 nt, Artificial Sequence
  Description of Artificial Sequence: Synthetic oligonucleotide
  Sense strand starting at position 694 of SEQ ID NO: 1244932
ggguaagaaagagguguuu

SEQ ID NO: 1523685 - RNA, 19 nt, Artificial Sequence
  Description of Artificial Sequence: Synthetic oligonucleotide
  Antisense strand to SEQ ID NO: 1523684
aaacaccucuuucuuaccc

SEQ ID NO: 1523686 - RNA, 19 nt, Artificial Sequence
  Description of Artificial Sequence: Synthetic oligonucleotide
  Sense strand starting at position 1356 of SEQ ID NO: 1244932
ggucauaggacuggugaga

SEQ ID NO: 1523687 - RNA, 19 nt, Artificial Sequence
  Description of Artificial Sequence: Synthetic oligonucleotide
  Antisense strand to SEQ ID NO: 1523686
ucucaccaguccuaugacc

SEQ ID NO: 1523688 - RNA, 19 nt, Artificial Sequence
  Description of Artificial Sequence: Synthetic oligonucleotide
  Sense strand starting at position 1369 of SEQ ID NO: 1244932
gugagacucacaugcagaa

SEQ ID NO: 1523689 - RNA, 19 nt, Artificial Sequence
  Description of Artificial Sequence: Synthetic oligonucleotide
  Antisense strand to SEQ ID NO: 1523688
uucugcaugugagucucac

SEQ ID NO: 1523690 - RNA, 19 nt, Artificial Sequence
  Description of Artificial Sequence: Synthetic oligonucleotide
  Sense strand starting at position 1408 of SEQ ID NO: 1244932
agccaagauuacguauagu

SEQ ID NO: 1523691 - RNA, 19 nt, Artificial Sequence
  Description of Artificial Sequence: Synthetic oligonucleotide
  Antisense strand to SEQ ID NO: 1523690
acuauacguaaucuuggcu

SEQ ID NO: 1523692 - RNA, 19 nt, Artificial Sequence
  Description of Artificial Sequence: Synthetic oligonucleotide
  Sense strand starting at position 1509 of SEQ ID NO: 1244932
guuguuauuacaggauuag

SEQ ID NO: 1523693 - RNA, 19 nt, Artificial Sequence
  Description of Artificial Sequence: Synthetic oligonucleotide
  Antisense strand to SEQ ID NO: 1523692
cuaauccuguaauaacaac

SEQ ID NO: 1523694 - RNA, 19 nt, Artificial Sequence
  Description of Artificial Sequence: Synthetic oligonucleotide
  Sense strand starting at position 1510 of SEQ ID NO: 1244932
uuguuauuacaggauuagu

SEQ ID NO: 1523695 - RNA, 19 nt, Artificial Sequence
  Description of Artificial Sequence: Synthetic oligonucleotide
  Antisense strand to SEQ ID NO: 1523694
acuaauccuguaauaacaa

SEQ ID NO: 1523696 - RNA, 19 nt, Artificial Sequence
  Description of Artificial Sequence: Synthetic oligonucleotide
  Sense strand starting at position 1520 of SEQ ID NO: 1244932
aggauuagucuugguucua

SEQ ID NO: 1523697 - RNA, 19 nt, Artificial Sequence
  Description of Artificial Sequence: Synthetic oligonucleotide
  Antisense strand to SEQ ID NO: 1523696
uagaaccaagacuaauccu

SEQ ID NO: 1523698 - RNA, 19 nt, Artificial Sequence
  Description of Artificial Sequence: Synthetic oligonucleotide
  Sense strand starting at position 1521 of SEQ ID NO: 1244932
ggauuagucuugguucuaa

SEQ ID NO: 1523699 - RNA, 19 nt, Artificial Sequence
  Description of Artificial Sequence: Synthetic oligonucleotide
  Antisense strand to SEQ ID NO: 1523698
uuagaaccaagacuaaucc

SEQ ID NO: 1523700 - RNA, 19 nt, Artificial Sequence
  Description of Artificial Sequence: Synthetic oligonucleotide
  Sense strand starting at position 1635 of SEQ ID NO: 1244932
agucaacuguaccuacaau

SEQ ID NO: 1523701 - RNA, 19 nt, Artificial Sequence
  Description of Artificial Sequence: Synthetic oligonucleotide
  Antisense strand to SEQ ID NO: 1523700
auuguagguacaguugacu

SEQ ID NO: 1523702 - RNA, 19 nt, Artificial Sequence
  Description of Artificial Sequence: Synthetic oligonucleotide
  Sense strand starting at position 1651 of SEQ ID NO: 1244932
aauucucauuuguggagaa

SEQ ID NO: 1523703 - RNA, 19 nt, Artificial Sequence
  Description of Artificial Sequence: Synthetic oligonucleotide
  Antisense strand to SEQ ID NO: 1523702
uucuccacaaaugagaauu

SEQ ID NO: 1523704 - RNA, 19 nt, Artificial Sequence
  Description of Artificial Sequence: Synthetic oligonucleotide
  Sense strand starting at position 1652 of SEQ ID NO: 1244932
auucucauuuguggagaaa

SEQ ID NO: 1523705 - RNA, 19 nt, Artificial Sequence
  Description of Artificial Sequence: Synthetic oligonucleotide
  Antisense strand to SEQ ID NO: 1523704
uuucuccacaaaugagaau

SEQ ID NO: 1523706 - RNA, 19 nt, Artificial Sequence
  Description of Artificial Sequence: Synthetic oligonucleotide
  Sense strand starting at position 2264 of SEQ ID NO: 1244932
ucagacauggcucauuaua

SEQ ID NO: 1523707 - RNA, 19 nt, Artificial Sequence
  Description of Artificial Sequence: Synthetic oligonucleotide
  Antisense strand to SEQ ID NO: 1523706
uauaaugagccaugucuga

SEQ ID NO: 1523708 - RNA, 19 nt, Artificial Sequence
  Description of Artificial Sequence: Synthetic oligonucleotide
  Sense strand starting at position 2266 of SEQ ID NO: 1244932
agacauggcucauuauaac

SEQ ID NO: 1523709 - RNA, 19 nt, Artificial Sequence
  Description of Artificial Sequence: Synthetic oligonucleotide
  Antisense strand to SEQ ID NO: 1523708
guuauaaugagccaugucu

SEQ ID NO: 1523710 - RNA, 19 nt, Artificial Sequence
  Description of Artificial Sequence: Synthetic oligonucleotide
  Sense strand starting at position 2375 of SEQ ID NO: 1244932
aggcuuuacccacaugaua

SEQ ID NO: 1523711 - RNA, 19 nt, Artificial Sequence
  Description of Artificial Sequence: Synthetic oligonucleotide
  Antisense strand to SEQ ID NO: 1523710
uaucauguggguaaagccu

SEQ ID NO: 1523712 - RNA, 19 nt, Artificial Sequence
  Description of Artificial Sequence: Synthetic oligonucleotide
  Sense strand starting at position 2598 of SEQ ID NO: 1244932
aaauguauacuaggcugua

SEQ ID NO: 1523713 - RNA, 19 nt, Artificial Sequence
  Description of Artificial Sequence: Synthetic oligonucleotide
  Antisense strand to SEQ ID NO: 1523712
uacagccuaguauacauuu

SEQ ID NO: 1523714 - RNA, 19 nt, Artificial Sequence
  Description of Artificial Sequence: Synthetic oligonucleotide
  Sense strand starting at position 2684 of SEQ ID NO: 1244932
auauuuggcucaggaugaa

SEQ ID NO: 1523715 - RNA, 19 nt, Artificial Sequence
  Description of Artificial Sequence: Synthetic oligonucleotide
  Antisense strand to SEQ ID NO: 1523714
uucauccugagccaaauau

SEQ ID NO: 1523716 - RNA, 19 nt, Artificial Sequence
  Description of Artificial Sequence: Synthetic oligonucleotide
  Sense strand starting at position 2687 of SEQ ID NO: 1244932
uuuggcucaggaugaauau

SEQ ID NO: 1523717 - RNA, 19 nt, Artificial Sequence
  Description of Artificial Sequence: Synthetic oligonucleotide
  Antisense strand to SEQ ID NO: 1523716
auauucauccugagccaaa

SEQ ID NO: 1523718 - RNA, 19 nt, Artificial Sequence
  Description of Artificial Sequence: Synthetic oligonucleotide
  Sense strand starting at position 2907 of SEQ ID NO: 1244932
uugagacuuuggccaaauu

SEQ ID NO: 1523719 - RNA, 19 nt, Artificial Sequence
  Description of Artificial Sequence: Synthetic oligonucleotide
  Antisense strand to SEQ ID NO: 1523718
aauuuggccaaagucucaa

SEQ ID NO: 1523720 - RNA, 19 nt, Artificial Sequence
  Description of Artificial Sequence: Synthetic oligonucleotide
  Sense strand starting at position 2954 of SEQ ID NO: 1244932
uuugucuuauagucacaca

SEQ ID NO: 1523721 - RNA, 19 nt, Artificial Sequence
  Description of Artificial Sequence: Synthetic oligonucleotide
  Antisense strand to SEQ ID NO: 1523720
ugugugacuauaagacaaa

SEQ ID NO: 1523722 - RNA, 19 nt, Artificial Sequence
  Description of Artificial Sequence: Synthetic oligonucleotide
  Sense strand starting at position 3043 of SEQ ID NO: 1244932
gguguccuaagauguaacu

SEQ ID NO: 1523723 - RNA, 19 nt, Artificial Sequence
  Description of Artificial Sequence: Synthetic oligonucleotide
  Antisense strand to SEQ ID NO: 1523722
aguuacaucuuaggacacc

SEQ ID NO: 1523724 - RNA, 19 nt, Artificial Sequence
  Description of Artificial Sequence: Synthetic oligonucleotide
  Sense strand starting at position 3219 of SEQ ID NO: 1244932
uggguuugugucuuuguuu

SEQ ID NO: 1523725 - RNA, 19 nt, Artificial Sequence
  Description of Artificial Sequence: Synthetic oligonucleotide
  Antisense strand to SEQ ID NO: 1523724
aaacaaagacacaaaccca

SEQ ID NO: 1523726 - RNA, 19 nt, Artificial Sequence
  Description of Artificial Sequence: Synthetic oligonucleotide
  Sense strand starting at position 3734 of SEQ ID NO: 1244932
ccagucaucucacuggcau

SEQ ID NO: 1523727 - RNA, 19 nt, Artificial Sequence
  Description of Artificial Sequence: Synthetic oligonucleotide
  Antisense strand to SEQ ID NO: 1523726
augccagugagaugacugg

SEQ ID NO: 1523728 - RNA, 19 nt, Artificial Sequence
  Description of Artificial Sequence: Synthetic oligonucleotide
  Sense strand starting at position 13 of SEQ ID NO: 1244933
guuuauaugcuacacaaag

SEQ ID NO: 1523729 - RNA, 19 nt, Artificial Sequence
  Description of Artificial Sequence: Synthetic oligonucleotide
  Antisense strand to SEQ ID NO: 1523728
cuuuguguagcauauaaac

SEQ ID NO: 1523730 - RNA, 19 nt, Artificial Sequence
  Description of Artificial Sequence: Synthetic oligonucleotide
  Sense strand starting at position 66 of SEQ ID NO: 1244933
gcuacugucuccucugaca

SEQ ID NO: 1523731 - RNA, 19 nt, Artificial Sequence
  Description of Artificial Sequence: Synthetic oligonucleotide
  Antisense strand to SEQ ID NO: 1523730
ugucagaggagacaguagc

SEQ ID NO: 1523732 - RNA, 19 nt, Artificial Sequence
  Description of Artificial Sequence: Synthetic oligonucleotide
  Sense strand starting at position 95 of SEQ ID NO: 1244933
gggucuuguucucccugaa

SEQ ID NO: 1523733 - RNA, 19 nt, Artificial Sequence
  Description of Artificial Sequence: Synthetic oligonucleotide
  Antisense strand to SEQ ID NO: 1523732
uucagggagaacaagaccc

SEQ ID NO: 1523734 - RNA, 19 nt, Artificial Sequence
  Description of Artificial Sequence: Synthetic oligonucleotide
  Sense strand starting at position 98 of SEQ ID NO: 1244933
ucuuguucucccugaaggu

SEQ ID NO: 1523735 - RNA, 19 nt, Artificial Sequence
  Description of Artificial Sequence: Synthetic oligonucleotide
  Antisense strand to SEQ ID NO: 1523734
accuucagggagaacaaga

SEQ ID NO: 1523736 - RNA, 19 nt, Artificial Sequence
  Description of Artificial Sequence: Synthetic oligonucleotide
  Sense strand starting at position 131 of SEQ ID NO: 1244933
augaaaucaggccaugcuu

SEQ ID NO: 1523737 - RNA, 19 nt, Artificial Sequence
  Description of Artificial Sequence: Synthetic oligonucleotide
  Antisense strand to SEQ ID NO: 1523736
aagcauggccugauuucau

SEQ ID NO: 1523738 - RNA, 19 nt, Artificial Sequence
  Description of Artificial Sequence: Synthetic oligonucleotide
  Sense strand starting at position 150 of SEQ ID NO: 1244933
uggaucuuaggcugaugua

SEQ ID NO: 1523739 - RNA, 19 nt, Artificial Sequence
  Description of Artificial Sequence: Synthetic oligonucleotide
  Antisense strand to SEQ ID NO: 1523738
uacaucagccuaagaucca

SEQ ID NO: 1523740 - RNA, 19 nt, Artificial Sequence
  Description of Artificial Sequence: Synthetic oligonucleotide
  Sense strand starting at position 151 of SEQ ID NO: 1244933
ggaucuuaggcugauguaa

SEQ ID NO: 1523741 - RNA, 19 nt, Artificial Sequence
  Description of Artificial Sequence: Synthetic oligonucleotide
  Antisense strand to SEQ ID NO: 1523740
uuacaucagccuaagaucc

SEQ ID NO: 1523742 - RNA, 19 nt, Artificial Sequence
  Description of Artificial Sequence: Synthetic oligonucleotide
  Sense strand starting at position 360 of SEQ ID NO: 1244933
gacacuauggugcaagagu

SEQ ID NO: 1523743 - RNA, 19 nt, Artificial Sequence
  Description of Artificial Sequence: Synthetic oligonucleotide
  Antisense strand to SEQ ID NO: 1523742
acucuugcaccauaguguc

SEQ ID NO: 1523744 - RNA, 19 nt, Artificial Sequence
  Description of Artificial Sequence: Synthetic oligonucleotide
  Sense strand starting at position 392 of SEQ ID NO: 1244933
guggcucugauccagugau

SEQ ID NO: 1523745 - RNA, 19 nt, Artificial Sequence
  Description of Artificial Sequence: Synthetic oligonucleotide
  Antisense strand to SEQ ID NO: 1523744
aucacuggaucagagccac

SEQ ID NO: 1523746 - RNA, 19 nt, Artificial Sequence
  Description of Artificial Sequence: Synthetic oligonucleotide
  Sense strand starting at position 404 of SEQ ID NO: 1244933
cagugauuacugggacgcu

SEQ ID NO: 1523747 - RNA, 19 nt, Artificial Sequence
  Description of Artificial Sequence: Synthetic oligonucleotide
  Antisense strand to SEQ ID NO: 1523746
agcgucccaguaaucacug

SEQ ID NO: 1523748 - RNA, 19 nt, Artificial Sequence
  Description of Artificial Sequence: Synthetic oligonucleotide
  Sense strand starting at position 562 of SEQ ID NO: 1244933
gcugguccaugggaagaaa

SEQ ID NO: 1523749 - RNA, 19 nt, Artificial Sequence
  Description of Artificial Sequence: Synthetic oligonucleotide
  Antisense strand to SEQ ID NO: 1523748
uuucuucccauggaccagc

SEQ ID NO: 1523750 - RNA, 19 nt, Artificial Sequence
  Description of Artificial Sequence: Synthetic oligonucleotide
  Sense strand starting at position 744 of SEQ ID NO: 1244933
agagguaaccuccaacguu

SEQ ID NO: 1523751 - RNA, 19 nt, Artificial Sequence
  Description of Artificial Sequence: Synthetic oligonucleotide
  Antisense strand to SEQ ID NO: 1523750
aacguuggagguuaccucu

SEQ ID NO: 1523752 - RNA, 19 nt, Artificial Sequence
  Description of Artificial Sequence: Synthetic oligonucleotide
  Sense strand starting at position 1199 of SEQ ID NO: 1244933
cuacucugacauuggagau

SEQ ID NO: 1523753 - RNA, 19 nt, Artificial Sequence
  Description of Artificial Sequence: Synthetic oligonucleotide
  Antisense strand to SEQ ID NO: 1523752
aucuccaaugucagaguag

SEQ ID NO: 1523754 - RNA, 19 nt, Artificial Sequence
  Description of Artificial Sequence: Synthetic oligonucleotide
  Sense strand starting at position 1454 of SEQ ID NO: 1244933
gccgauugugcugggaaca

SEQ ID NO: 1523755 - RNA, 19 nt, Artificial Sequence
  Description of Artificial Sequence: Synthetic oligonucleotide
  Antisense strand to SEQ ID NO: 1523754
uguucccagcacaaucggc

SEQ ID NO: 1523756 - RNA, 19 nt, Artificial Sequence
  Description of Artificial Sequence: Synthetic oligonucleotide
  Sense strand starting at position 1455 of SEQ ID NO: 1244933
ccgauugugcugggaacau

SEQ ID NO: 1523757 - RNA, 19 nt, Artificial Sequence
  Description of Artificial Sequence: Synthetic oligonucleotide
  Antisense strand to SEQ ID NO: 1523756
auguucccagcacaaucgg

SEQ ID NO: 1523758 - RNA, 19 nt, Artificial Sequence
  Description of Artificial Sequence: Synthetic oligonucleotide
  Sense strand starting at position 1468 of SEQ ID NO: 1244933
gaacauuugcggcgcaaca

SEQ ID NO: 1523759 - RNA, 19 nt, Artificial Sequence
  Description of Artificial Sequence: Synthetic oligonucleotide
  Antisense strand to SEQ ID NO: 1523758
uguugcgccgcaaauguuc

SEQ ID NO: 1523760 - RNA, 19 nt, Artificial Sequence
  Description of Artificial Sequence: Synthetic oligonucleotide
  Sense strand starting at position 2422 of SEQ ID NO: 1244933
cuagcagcgcugguuauau

SEQ ID NO: 1523761 - RNA, 19 nt, Artificial Sequence
  Description of Artificial Sequence: Synthetic oligonucleotide
  Antisense strand to SEQ ID NO: 1523760
auauaaccagcgcugcuag

SEQ ID NO: 1523762 - RNA, 19 nt, Artificial Sequence
  Description of Artificial Sequence: Synthetic oligonucleotide
  Sense strand starting at position 2557 of SEQ ID NO: 1244933
gacauacaaucccggaaga

SEQ ID NO: 1523763 - RNA, 19 nt, Artificial Sequence
  Description of Artificial Sequence: Synthetic oligonucleotide
  Antisense strand to SEQ ID NO: 1523762
ucuuccgggauuguauguc

SEQ ID NO: 1523764 - RNA, 19 nt, Artificial Sequence
  Description of Artificial Sequence: Synthetic oligonucleotide
  Sense strand starting at position 2601 of SEQ ID NO: 1244933
auuuaaaccuggugauuuc

SEQ ID NO: 1523765 - RNA, 19 nt, Artificial Sequence
  Description of Artificial Sequence: Synthetic oligonucleotide
  Antisense strand to SEQ ID NO: 1523764
gaaaucaccagguuuaaau

SEQ ID NO: 1523766 - RNA, 19 nt, Artificial Sequence
  Description of Artificial Sequence: Synthetic oligonucleotide
  Sense strand starting at position 2612 of SEQ ID NO: 1244933
gugauuucuuuccauucua

SEQ ID NO: 1523767 - RNA, 19 nt, Artificial Sequence
  Description of Artificial Sequence: Synthetic oligonucleotide
  Antisense strand to SEQ ID NO: 1523766
uagaauggaaagaaaucac

SEQ ID NO: 1523768 - RNA, 19 nt, Artificial Sequence
  Description of Artificial Sequence: Synthetic oligonucleotide
  Sense strand starting at position 2878 of SEQ ID NO: 1244933
gcuugacugcaggacauau

SEQ ID NO: 1523769 - RNA, 19 nt, Artificial Sequence
  Description of Artificial Sequence: Synthetic oligonucleotide
  Antisense strand to SEQ ID NO: 1523768
auauguccugcagucaagc

SEQ ID NO: 1523770 - RNA, 19 nt, Artificial Sequence
  Description of Artificial Sequence: Synthetic oligonucleotide
  Sense strand starting at position 2963 of SEQ ID NO: 1244933
ggaaggaguuaguuggagu

SEQ ID NO: 1523771 - RNA, 19 nt, Artificial Sequence
  Description of Artificial Sequence: Synthetic oligonucleotide
  Antisense strand to SEQ ID NO: 1523770
acuccaacuaacuccuucc

SEQ ID NO: 1523772 - RNA, 19 nt, Artificial Sequence
  Description of Artificial Sequence: Synthetic oligonucleotide
  Sense strand starting at position 2964 of SEQ ID NO: 1244933
gaaggaguuaguuggaguu

SEQ ID NO: 1523773 - RNA, 19 nt, Artificial Sequence
  Description of Artificial Sequence: Synthetic oligonucleotide
  Antisense strand to SEQ ID NO: 1523772
aacuccaacuaacuccuuc

SEQ ID NO: 1523774 - RNA, 19 nt, Artificial Sequence
  Description of Artificial Sequence: Synthetic oligonucleotide
  Sense strand starting at position 3073 of SEQ ID NO: 1244933
uugugugcuagauaaguca

SEQ ID NO: 1523775 - RNA, 19 nt, Artificial Sequence
  Description of Artificial Sequence: Synthetic oligonucleotide
  Antisense strand to SEQ ID NO: 1523774
ugacuuaucuagcacacaa

SEQ ID NO: 1523776 - RNA, 19 nt, Artificial Sequence
  Description of Artificial Sequence: Synthetic oligonucleotide
  Sense strand starting at position 3076 of SEQ ID NO: 1244933
ugugcuagauaagucacau

SEQ ID NO: 1523777 - RNA, 19 nt, Artificial Sequence
  Description of Artificial Sequence: Synthetic oligonucleotide
  Antisense strand to SEQ ID NO: 1523776
augugacuuaucuagcaca

SEQ ID NO: 1523778 - RNA, 19 nt, Artificial Sequence
  Description of Artificial Sequence: Synthetic oligonucleotide
  Sense strand starting at position 3088 of SEQ ID NO: 1244933
gucacaugguuaucucuua

SEQ ID NO: 1523779 - RNA, 19 nt, Artificial Sequence
  Description of Artificial Sequence: Synthetic oligonucleotide
  Antisense strand to SEQ ID NO: 1523778
uaagagauaaccaugugac

SEQ ID NO: 1523780 - RNA, 19 nt, Artificial Sequence
  Description of Artificial Sequence: Synthetic oligonucleotide
  Sense strand starting at position 3089 of SEQ ID NO: 1244933
ucacaugguuaucucuuau

SEQ ID NO: 1523781 - RNA, 19 nt, Artificial Sequence
  Description of Artificial Sequence: Synthetic oligonucleotide
  Antisense strand to SEQ ID NO: 1523780
auaagagauaaccauguga

SEQ ID NO: 1523782 - RNA, 19 nt, Artificial Sequence
  Description of Artificial Sequence: Synthetic oligonucleotide
  Sense strand starting at position 3586 of SEQ ID NO: 1244933
cuuguuugcacagagagga

SEQ ID NO: 1523783 - RNA, 19 nt, Artificial Sequence
  Description of Artificial Sequence: Synthetic oligonucleotide
  Antisense strand to SEQ ID NO: 1523782
uccucucugugcaaacaag

SEQ ID NO: 1523784 - RNA, 19 nt, Artificial Sequence
  Description of Artificial Sequence: Synthetic oligonucleotide
  Sense strand starting at position 3709 of SEQ ID NO: 1244933
acuaaauagugugucuaag

SEQ ID NO: 1523785 - RNA, 19 nt, Artificial Sequence
  Description of Artificial Sequence: Synthetic oligonucleotide
  Antisense strand to SEQ ID NO: 1523784
cuuagacacacuauuuagu

SEQ ID NO: 1523786 - RNA, 19 nt, Artificial Sequence
  Description of Artificial Sequence: Synthetic oligonucleotide
  Sense strand starting at position 3711 of SEQ ID NO: 1244933
uaaauagugugucuaagaa

SEQ ID NO: 1523787 - RNA, 19 nt, Artificial Sequence
  Description of Artificial Sequence: Synthetic oligonucleotide
  Antisense strand to SEQ ID NO: 1523786
uucuuagacacacuauuua

SEQ ID NO: 1523788 - RNA, 19 nt, Artificial Sequence
  Description of Artificial Sequence: Synthetic oligonucleotide
  Sense strand starting at position 3718 of SEQ ID NO: 1244933
ugugucuaagaauggacau

SEQ ID NO: 1523789 - RNA, 19 nt, Artificial Sequence
  Description of Artificial Sequence: Synthetic oligonucleotide
  Antisense strand to SEQ ID NO: 1523788
auguccauucuuagacaca

SEQ ID NO: 1523790 - RNA, 19 nt, Artificial Sequence
  Description of Artificial Sequence: Synthetic oligonucleotide
  Sense strand starting at position 3719 of SEQ ID NO: 1244933
gugucuaagaauggacauu

SEQ ID NO: 1523791 - RNA, 19 nt, Artificial Sequence
  Description of Artificial Sequence: Synthetic oligonucleotide
  Antisense strand to SEQ ID NO: 1523790
aauguccauucuuagacac

SEQ ID NO: 1523792 - RNA, 19 nt, Artificial Sequence
  Description of Artificial Sequence: Synthetic oligonucleotide
  Sense strand starting at position 3756 of SEQ ID NO: 1244933
uuuccaaagccaggaguuu

SEQ ID NO: 1523793 - RNA, 19 nt, Artificial Sequence
  Description of Artificial Sequence: Synthetic oligonucleotide
  Antisense strand to SEQ ID NO: 1523792
aaacuccuggcuuuggaaa

SEQ ID NO: 1523794 - RNA, 19 nt, Artificial Sequence
  Description of Artificial Sequence: Synthetic oligonucleotide
  Sense strand starting at position 3811 of SEQ ID NO: 1244933
agcaguuuccaggaaacac

SEQ ID NO: 1523795 - RNA, 19 nt, Artificial Sequence
  Description of Artificial Sequence: Synthetic oligonucleotide
  Antisense strand to SEQ ID NO: 1523794
guguuuccuggaaacugcu

SEQ ID NO: 1523796 - RNA, 19 nt, Artificial Sequence
  Description of Artificial Sequence: Synthetic oligonucleotide
  Sense strand starting at position 3846 of SEQ ID NO: 1244933
accuauuuaucauggguga

SEQ ID NO: 1523797 - RNA, 19 nt, Artificial Sequence
  Description of Artificial Sequence: Synthetic oligonucleotide
  Antisense strand to SEQ ID NO: 1523796
ucacccaugauaaauaggu

SEQ ID NO: 1523798 - RNA, 19 nt, Artificial Sequence
  Description of Artificial Sequence: Synthetic oligonucleotide
  Sense strand starting at position 3860 of SEQ ID NO: 1244933
ggugagguggccuagugau

SEQ ID NO: 1523799 - RNA, 19 nt, Artificial Sequence
  Description of Artificial Sequence: Synthetic oligonucleotide
  Antisense strand to SEQ ID NO: 1523798
aucacuaggccaccucacc

SEQ ID NO: 1523800 - RNA, 19 nt, Artificial Sequence
  Description of Artificial Sequence: Synthetic oligonucleotide
  Sense strand starting at position 3906 of SEQ ID NO: 1244933
caggcugguugguuuagaa

SEQ ID NO: 1523801 - RNA, 19 nt, Artificial Sequence
  Description of Artificial Sequence: Synthetic oligonucleotide
  Antisense strand to SEQ ID NO: 1523800
uucuaaaccaaccagccug

SEQ ID NO: 1523802 - RNA, 19 nt, Artificial Sequence
  Description of Artificial Sequence: Synthetic oligonucleotide
  Sense strand starting at position 3918 of SEQ ID NO: 1244933
uuuagaagggcuuguuaga

SEQ ID NO: 1523803 - RNA, 19 nt, Artificial Sequence
  Description of Artificial Sequence: Synthetic oligonucleotide
  Antisense strand to SEQ ID NO: 1523802
ucuaacaagcccuucuaaa

SEQ ID NO: 1523804 - RNA, 19 nt, Artificial Sequence
  Description of Artificial Sequence: Synthetic oligonucleotide
  Sense strand starting at position 3929 of SEQ ID NO: 1244933
uuguuagaccaaugaggau

SEQ ID NO: 1523805 - RNA, 19 nt, Artificial Sequence
  Description of Artificial Sequence: Synthetic oligonucleotide
  Antisense strand to SEQ ID NO: 1523804
auccucauuggucuaacaa

SEQ ID NO: 1523806 - RNA, 19 nt, Artificial Sequence
  Description of Artificial Sequence: Synthetic oligonucleotide
  Sense strand starting at position 3983 of SEQ ID NO: 1244933
guagauauuuacuaagacc

SEQ ID NO: 1523807 - RNA, 19 nt, Artificial Sequence
  Description of Artificial Sequence: Synthetic oligonucleotide
  Antisense strand to SEQ ID NO: 1523806
ggucuuaguaaauaucuac

SEQ ID NO: 1523808 - RNA, 19 nt, Artificial Sequence
  Description of Artificial Sequence: Synthetic oligonucleotide
  Sense strand starting at position 340 of SEQ ID NO: 1244934
aguguacugugacccagaa

SEQ ID NO: 1523809 - RNA, 19 nt, Artificial Sequence
  Description of Artificial Sequence: Synthetic oligonucleotide
  Antisense strand to SEQ ID NO: 1523808
uucugggucacaguacacu

SEQ ID NO: 1523810 - RNA, 19 nt, Artificial Sequence
  Description of Artificial Sequence: Synthetic oligonucleotide
  Sense strand starting at position 387 of SEQ ID NO: 1244934
aauugcugcccugauguua

SEQ ID NO: 1523811 - RNA, 19 nt, Artificial Sequence
  Description of Artificial Sequence: Synthetic oligonucleotide
  Antisense strand to SEQ ID NO: 1523810
uaacaucagggcagcaauu

SEQ ID NO: 1523812 - RNA, 19 nt, Artificial Sequence
  Description of Artificial Sequence: Synthetic oligonucleotide
  Sense strand starting at position 469 of SEQ ID NO: 1244934
caaagcgaucuugggaaca

SEQ ID NO: 1523813 - RNA, 19 nt, Artificial Sequence
  Description of Artificial Sequence: Synthetic oligonucleotide
  Antisense strand to SEQ ID NO: 1523812
uguucccaagaucgcuuug

SEQ ID NO: 1523814 - RNA, 19 nt, Artificial Sequence
  Description of Artificial Sequence: Synthetic oligonucleotide
  Sense strand starting at position 517 of SEQ ID NO: 1244934
acaguauuauguuugcaag

SEQ ID NO: 1523815 - RNA, 19 nt, Artificial Sequence
  Description of Artificial Sequence: Synthetic oligonucleotide
  Antisense strand to SEQ ID NO: 1523814
cuugcaaacauaauacugu

SEQ ID NO: 1523816 - RNA, 19 nt, Artificial Sequence
  Description of Artificial Sequence: Synthetic oligonucleotide
  Sense strand starting at position 788 of SEQ ID NO: 1244934
gaugcagauucuguaaccu

SEQ ID NO: 1523817 - RNA, 19 nt, Artificial Sequence
  Description of Artificial Sequence: Synthetic oligonucleotide
  Antisense strand to SEQ ID NO: 1523816
agguuacagaaucugcauc

SEQ ID NO: 1523818 - RNA, 19 nt, Artificial Sequence
  Description of Artificial Sequence: Synthetic oligonucleotide
  Sense strand starting at position 1048 of SEQ ID NO: 1244934
agaagaguuuguucuggaa

SEQ ID NO: 1523819 - RNA, 19 nt, Artificial Sequence
  Description of Artificial Sequence: Synthetic oligonucleotide
  Antisense strand to SEQ ID NO: 1523818
uuccagaacaaacucuucu

SEQ ID NO: 1523820 - RNA, 19 nt, Artificial Sequence
  Description of Artificial Sequence: Synthetic oligonucleotide
  Sense strand starting at position 1052 of SEQ ID NO: 1244934
gaguuuguucuggaaacua

SEQ ID NO: 1523821 - RNA, 19 nt, Artificial Sequence
  Description of Artificial Sequence: Synthetic oligonucleotide
  Antisense strand to SEQ ID NO: 1523820
uaguuuccagaacaaacuc

SEQ ID NO: 1523822 - RNA, 19 nt, Artificial Sequence
  Description of Artificial Sequence: Synthetic oligonucleotide
  Sense strand starting at position 1226 of SEQ ID NO: 1244934
ucugaugaaucugcaguuu

SEQ ID NO: 1523823 - RNA, 19 nt, Artificial Sequence
  Description of Artificial Sequence: Synthetic oligonucleotide
  Antisense strand to SEQ ID NO: 1523822
aaacugcagauucaucaga

SEQ ID NO: 1523824 - RNA, 19 nt, Artificial Sequence
  Description of Artificial Sequence: Synthetic oligonucleotide
  Sense strand starting at position 1253 of SEQ ID NO: 1244934
aaaggaugcuguuugcaaa

SEQ ID NO: 1523825 - RNA, 19 nt, Artificial Sequence
  Description of Artificial Sequence: Synthetic oligonucleotide
  Antisense strand to SEQ ID NO: 1523824
uuugcaaacagcauccuuu

SEQ ID NO: 1523826 - RNA, 19 nt, Artificial Sequence
  Description of Artificial Sequence: Synthetic oligonucleotide
  Sense strand starting at position 1284 of SEQ ID NO: 1244934
augaguaccugugccaaga

SEQ ID NO: 1523827 - RNA, 19 nt, Artificial Sequence
  Description of Artificial Sequence: Synthetic oligonucleotide
  Antisense strand to SEQ ID NO: 1523826
ucuuggcacagguacucau

SEQ ID NO: 1523828 - RNA, 19 nt, Artificial Sequence
  Description of Artificial Sequence: Synthetic oligonucleotide
  Sense strand starting at position 1635 of SEQ ID NO: 1244934
cagaucaaaucgccgauaa

SEQ ID NO: 1523829 - RNA, 19 nt, Artificial Sequence
  Description of Artificial Sequence: Synthetic oligonucleotide
  Antisense strand to SEQ ID NO: 1523828
uuaucggcgauuugaucug

SEQ ID NO: 1523830 - RNA, 19 nt, Artificial Sequence
  Description of Artificial Sequence: Synthetic oligonucleotide
  Sense strand starting at position 1636 of SEQ ID NO: 1244934
agaucaaaucgccgauaaa

SEQ ID NO: 1523831 - RNA, 19 nt, Artificial Sequence
  Description of Artificial Sequence: Synthetic oligonucleotide
  Antisense strand to SEQ ID NO: 1523830
uuuaucggcgauuugaucu

SEQ ID NO: 1523832 - RNA, 19 nt, Artificial Sequence
  Description of Artificial Sequence: Synthetic oligonucleotide
  Sense strand starting at position 1886 of SEQ ID NO: 1244934
gguggaguucagcgaagaa

SEQ ID NO: 1523833 - RNA, 19 nt, Artificial Sequence
  Description of Artificial Sequence: Synthetic oligonucleotide
  Antisense strand to SEQ ID NO: 1523832
uucuucgcugaacuccacc

SEQ ID NO: 1523834 - RNA, 19 nt, Artificial Sequence
  Description of Artificial Sequence: Synthetic oligonucleotide
  Sense strand starting at position 1902 of SEQ ID NO: 1244934
gaaggugccgcagagaauu

SEQ ID NO: 1523835 - RNA, 19 nt, Artificial Sequence
  Description of Artificial Sequence: Synthetic oligonucleotide
  Antisense strand to SEQ ID NO: 1523834
aauucucugcggcaccuuc

SEQ ID NO: 1523836 - RNA, 19 nt, Artificial Sequence
  Description of Artificial Sequence: Synthetic oligonucleotide
  Sense strand starting at position 2249 of SEQ ID NO: 1244934
gagccacacccguaguuaa

SEQ ID NO: 1523837 - RNA, 19 nt, Artificial Sequence
  Description of Artificial Sequence: Synthetic oligonucleotide
  Antisense strand to SEQ ID NO: 1523836
uuaacuacggguguggcuc

SEQ ID NO: 1523838 - RNA, 19 nt, Artificial Sequence
  Description of Artificial Sequence: Synthetic oligonucleotide
  Sense strand starting at position 2268 of SEQ ID NO: 1244934
guauucggacucugagauu

SEQ ID NO: 1523839 - RNA, 19 nt, Artificial Sequence
  Description of Artificial Sequence: Synthetic oligonucleotide
  Antisense strand to SEQ ID NO: 1523838
aaucucagaguccgaauac

SEQ ID NO: 1523840 - RNA, 19 nt, Artificial Sequence
  Description of Artificial Sequence: Synthetic oligonucleotide
  Sense strand starting at position 2328 of SEQ ID NO: 1244934
gugugauucggcagcaggu

SEQ ID NO: 1523841 - RNA, 19 nt, Artificial Sequence
  Description of Artificial Sequence: Synthetic oligonucleotide
  Antisense strand to SEQ ID NO: 1523840
accugcugccgaaucacac

SEQ ID NO: 1523842 - RNA, 19 nt, Artificial Sequence
  Description of Artificial Sequence: Synthetic oligonucleotide
  Sense strand starting at position 2417 of SEQ ID NO: 1244934
cagucuaagguuuguagga

SEQ ID NO: 1523843 - RNA, 19 nt, Artificial Sequence
  Description of Artificial Sequence: Synthetic oligonucleotide
  Antisense strand to SEQ ID NO: 1523842
uccuacaaaccuuagacug

SEQ ID NO: 1523844 - RNA, 19 nt, Artificial Sequence
  Description of Artificial Sequence: Synthetic oligonucleotide
  Sense strand starting at position 2449 of SEQ ID NO: 1244934
uaccaaagcuaaucgaguu

SEQ ID NO: 1523845 - RNA, 19 nt, Artificial Sequence
  Description of Artificial Sequence: Synthetic oligonucleotide
  Antisense strand to SEQ ID NO: 1523844
aacucgauuagcuuuggua

SEQ ID NO: 1523846 - RNA, 19 nt, Artificial Sequence
  Description of Artificial Sequence: Synthetic oligonucleotide
  Sense strand starting at position 2487 of SEQ ID NO: 1244934
ugucauuucucauuacggu

SEQ ID NO: 1523847 - RNA, 19 nt, Artificial Sequence
  Description of Artificial Sequence: Synthetic oligonucleotide
  Antisense strand to SEQ ID NO: 1523846
accguaaugagaaaugaca

SEQ ID NO: 1523848 - RNA, 19 nt, Artificial Sequence
  Description of Artificial Sequence: Synthetic oligonucleotide
  Sense strand starting at position 2494 of SEQ ID NO: 1244934
ucucauuacgguggugaga

SEQ ID NO: 1523849 - RNA, 19 nt, Artificial Sequence
  Description of Artificial Sequence: Synthetic oligonucleotide
  Antisense strand to SEQ ID NO: 1523848
ucucaccaccguaaugaga

SEQ ID NO: 1523850 - RNA, 19 nt, Artificial Sequence
  Description of Artificial Sequence: Synthetic oligonucleotide
  Sense strand starting at position 2559 of SEQ ID NO: 1244934
ucauucuugccgccuaagu

SEQ ID NO: 1523851 - RNA, 19 nt, Artificial Sequence
  Description of Artificial Sequence: Synthetic oligonucleotide
  Antisense strand to SEQ ID NO: 1523850
acuuaggcggcaagaauga

SEQ ID NO: 1523852 - RNA, 19 nt, Artificial Sequence
  Description of Artificial Sequence: Synthetic oligonucleotide
  Sense strand starting at position 2600 of SEQ ID NO: 1244934
ggguaucagcgauauucau

SEQ ID NO: 1523853 - RNA, 19 nt, Artificial Sequence
  Description of Artificial Sequence: Synthetic oligonucleotide
  Antisense strand to SEQ ID NO: 1523852
augaauaucgcugauaccc

SEQ ID NO: 1523854 - RNA, 19 nt, Artificial Sequence
  Description of Artificial Sequence: Synthetic oligonucleotide
  Sense strand starting at position 2632 of SEQ ID NO: 1244934
gggaucugcuuucuacagu

SEQ ID NO: 1523855 - RNA, 19 nt, Artificial Sequence
  Description of Artificial Sequence: Synthetic oligonucleotide
  Antisense strand to SEQ ID NO: 1523854
acuguagaaagcagauccc

SEQ ID NO: 1523856 - RNA, 19 nt, Artificial Sequence
  Description of Artificial Sequence: Synthetic oligonucleotide
  Sense strand starting at position 2654 of SEQ ID NO: 1244934
cugccagauguguaaagau

SEQ ID NO: 1523857 - RNA, 19 nt, Artificial Sequence
  Description of Artificial Sequence: Synthetic oligonucleotide
  Antisense strand to SEQ ID NO: 1523856
aucuuuacacaucuggcag

SEQ ID NO: 1523858 - RNA, 19 nt, Artificial Sequence
  Description of Artificial Sequence: Synthetic oligonucleotide
  Sense strand starting at position 2661 of SEQ ID NO: 1244934
auguguaaagauugcaaga

SEQ ID NO: 1523859 - RNA, 19 nt, Artificial Sequence
  Description of Artificial Sequence: Synthetic oligonucleotide
  Antisense strand to SEQ ID NO: 1523858
ucuugcaaucuuuacacau

SEQ ID NO: 1523860 - RNA, 19 nt, Artificial Sequence
  Description of Artificial Sequence: Synthetic oligonucleotide
  Sense strand starting at position 2674 of SEQ ID NO: 1244934
gcaagaauugaagguuugu

SEQ ID NO: 1523861 - RNA, 19 nt, Artificial Sequence
  Description of Artificial Sequence: Synthetic oligonucleotide
  Antisense strand to SEQ ID NO: 1523860
acaaaccuucaauucuugc

SEQ ID NO: 1523862 - RNA, 19 nt, Artificial Sequence
  Description of Artificial Sequence: Synthetic oligonucleotide
  Sense strand starting at position 2910 of SEQ ID NO: 1244934
agauuaaucugagacugaa

SEQ ID NO: 1523863 - RNA, 19 nt, Artificial Sequence
  Description of Artificial Sequence: Synthetic oligonucleotide
  Antisense strand to SEQ ID NO: 1523862
uucagucucagauuaaucu

SEQ ID NO: 1523864 - RNA, 19 nt, Artificial Sequence
  Description of Artificial Sequence: Synthetic oligonucleotide
  Sense strand starting at position 2952 of SEQ ID NO: 1244934
uguggucuuugaccuacau

SEQ ID NO: 1523865 - RNA, 19 nt, Artificial Sequence
  Description of Artificial Sequence: Synthetic oligonucleotide
  Antisense strand to SEQ ID NO: 1523864
auguaggucaaagaccaca

SEQ ID NO: 1523866 - RNA, 19 nt, Artificial Sequence
  Description of Artificial Sequence: Synthetic oligonucleotide
  Sense strand starting at position 3012 of SEQ ID NO: 1244934
aaugguugaugguuaauau

SEQ ID NO: 1523867 - RNA, 19 nt, Artificial Sequence
  Description of Artificial Sequence: Synthetic oligonucleotide
  Antisense strand to SEQ ID NO: 1523866
auauuaaccaucaaccauu

SEQ ID NO: 1523868 - RNA, 19 nt, Artificial Sequence
  Description of Artificial Sequence: Synthetic oligonucleotide
  Sense strand starting at position 3013 of SEQ ID NO: 1244934
augguugaugguuaauauu

SEQ ID NO: 1523869 - RNA, 19 nt, Artificial Sequence
  Description of Artificial Sequence: Synthetic oligonucleotide
  Antisense strand to SEQ ID NO: 1523868
aauauuaaccaucaaccau

SEQ ID NO: 1523870 - RNA, 19 nt, Artificial Sequence
  Description of Artificial Sequence: Synthetic oligonucleotide
  Sense strand starting at position 3480 of SEQ ID NO: 1244934
uaguuaagauucuuguaug

SEQ ID NO: 1523871 - RNA, 19 nt, Artificial Sequence
  Description of Artificial Sequence: Synthetic oligonucleotide
  Antisense strand to SEQ ID NO: 1523870
cauacaagaaucuuaacua

SEQ ID NO: 1523872 - RNA, 19 nt, Artificial Sequence
  Description of Artificial Sequence: Synthetic oligonucleotide
  Sense strand starting at position 3514 of SEQ ID NO: 1244934
aagaaugucgaaggacuua

SEQ ID NO: 1523873 - RNA, 19 nt, Artificial Sequence
  Description of Artificial Sequence: Synthetic oligonucleotide
  Antisense strand to SEQ ID NO: 1523872
uaaguccuucgacauucuu

SEQ ID NO: 1523874 - RNA, 19 nt, Artificial Sequence
  Description of Artificial Sequence: Synthetic oligonucleotide
  Sense strand starting at position 3519 of SEQ ID NO: 1244934
ugucgaaggacuuauugca

SEQ ID NO: 1523875 - RNA, 19 nt, Artificial Sequence
  Description of Artificial Sequence: Synthetic oligonucleotide
  Antisense strand to SEQ ID NO: 1523874
ugcaauaaguccuucgaca

SEQ ID NO: 1523876 - RNA, 19 nt, Artificial Sequence
  Description of Artificial Sequence: Synthetic oligonucleotide
  Sense strand starting at position 3558 of SEQ ID NO: 1244934
auuagaaaccuguacagcu

SEQ ID NO: 1523877 - RNA, 19 nt, Artificial Sequence
  Description of Artificial Sequence: Synthetic oligonucleotide
  Antisense strand to SEQ ID NO: 1523876
agcuguacagguuucuaau

SEQ ID NO: 1523878 - RNA, 19 nt, Artificial Sequence
  Description of Artificial Sequence: Synthetic oligonucleotide
  Sense strand starting at position 3565 of SEQ ID NO: 1244934
accuguacagcugauuaga

SEQ ID NO: 1523879 - RNA, 19 nt, Artificial Sequence
  Description of Artificial Sequence: Synthetic oligonucleotide
  Antisense strand to SEQ ID NO: 1523878
ucuaaucagcuguacaggu

SEQ ID NO: 1523880 - RNA, 19 nt, Artificial Sequence
  Description of Artificial Sequence: Synthetic oligonucleotide
  Sense strand starting at position 3627 of SEQ ID NO: 1244934
uaauuuaguuggcaagaug

SEQ ID NO: 1523881 - RNA, 19 nt, Artificial Sequence
  Description of Artificial Sequence: Synthetic oligonucleotide
  Antisense strand to SEQ ID NO: 1523880
caucuugccaacuaaauua

SEQ ID NO: 1523882 - RNA, 19 nt, Artificial Sequence
  Description of Artificial Sequence: Synthetic oligonucleotide
  Sense strand starting at position 3630 of SEQ ID NO: 1244934
uuuaguuggcaagaugcua

SEQ ID NO: 1523883 - RNA, 19 nt, Artificial Sequence
  Description of Artificial Sequence: Synthetic oligonucleotide
  Antisense strand to SEQ ID NO: 1523882
uagcaucuugccaacuaaa

SEQ ID NO: 1523884 - RNA, 19 nt, Artificial Sequence
  Description of Artificial Sequence: Synthetic oligonucleotide
  Sense strand starting at position 3687 of SEQ ID NO: 1244934
aacggucugcuccaucaga

SEQ ID NO: 1523885 - RNA, 19 nt, Artificial Sequence
  Description of Artificial Sequence: Synthetic oligonucleotide
  Antisense strand to SEQ ID NO: 1523884
ucugauggagcagaccguu

SEQ ID NO: 1523886 - RNA, 19 nt, Artificial Sequence
  Description of Artificial Sequence: Synthetic oligonucleotide
  Sense strand starting at position 3823 of SEQ ID NO: 1244934
uguuauagagcuuaaaugu

SEQ ID NO: 1523887 - RNA, 19 nt, Artificial Sequence
  Description of Artificial Sequence: Synthetic oligonucleotide
  Antisense strand to SEQ ID NO: 1523886
acauuuaagcucuauaaca

SEQ ID NO: 1523888 - RNA, 19 nt, Artificial Sequence
  Description of Artificial Sequence: Synthetic oligonucleotide
  Sense strand starting at position 33 of SEQ ID NO: 1244935
gacugagccuguccuggau

SEQ ID NO: 1523889 - RNA, 19 nt, Artificial Sequence
  Description of Artificial Sequence: Synthetic oligonucleotide
  Antisense strand to SEQ ID NO: 1523888
auccaggacaggcucaguc

SEQ ID NO: 1523890 - RNA, 19 nt, Artificial Sequence
  Description of Artificial Sequence: Synthetic oligonucleotide
  Sense strand starting at position 67 of SEQ ID NO: 1244935
ggacacuugugcucaguag

SEQ ID NO: 1523891 - RNA, 19 nt, Artificial Sequence
  Description of Artificial Sequence: Synthetic oligonucleotide
  Antisense strand to SEQ ID NO: 1523890
cuacugagcacaagugucc

SEQ ID NO: 1523892 - RNA, 19 nt, Artificial Sequence
  Description of Artificial Sequence: Synthetic oligonucleotide
  Sense strand starting at position 71 of SEQ ID NO: 1244935
acuugugcucaguagguau

SEQ ID NO: 1523893 - RNA, 19 nt, Artificial Sequence
  Description of Artificial Sequence: Synthetic oligonucleotide
  Antisense strand to SEQ ID NO: 1523892
auaccuacugagcacaagu

SEQ ID NO: 1523894 - RNA, 19 nt, Artificial Sequence
  Description of Artificial Sequence: Synthetic oligonucleotide
  Sense strand starting at position 95 of SEQ ID NO: 1244935
ugguuuguuuggaguggau

SEQ ID NO: 1523895 - RNA, 19 nt, Artificial Sequence
  Description of Artificial Sequence: Synthetic oligonucleotide
  Antisense strand to SEQ ID NO: 1523894
auccacuccaaacaaacca

SEQ ID NO: 1523896 - RNA, 19 nt, Artificial Sequence
  Description of Artificial Sequence: Synthetic oligonucleotide
  Sense strand starting at position 109 of SEQ ID NO: 1244935
uggauuguuccaugcugag

SEQ ID NO: 1523897 - RNA, 19 nt, Artificial Sequence
  Description of Artificial Sequence: Synthetic oligonucleotide
  Antisense strand to SEQ ID NO: 1523896
cucagcauggaacaaucca

SEQ ID NO: 1523898 - RNA, 19 nt, Artificial Sequence
  Description of Artificial Sequence: Synthetic oligonucleotide
  Sense strand starting at position 133 of SEQ ID NO: 1244935
gguguuugaccuugaugag

SEQ ID NO: 1523899 - RNA, 19 nt, Artificial Sequence
  Description of Artificial Sequence: Synthetic oligonucleotide
  Antisense strand to SEQ ID NO: 1523898
cucaucaaggucaaacacc

SEQ ID NO: 1523900 - RNA, 19 nt, Artificial Sequence
  Description of Artificial Sequence: Synthetic oligonucleotide
  Sense strand starting at position 259 of SEQ ID NO: 1244935
gagugugaggucuggcaga

SEQ ID NO: 1523901 - RNA, 19 nt, Artificial Sequence
  Description of Artificial Sequence: Synthetic oligonucleotide
  Antisense strand to SEQ ID NO: 1523900
ucugccagaccucacacuc

SEQ ID NO: 1523902 - RNA, 19 nt, Artificial Sequence
  Description of Artificial Sequence: Synthetic oligonucleotide
  Sense strand starting at position 335 of SEQ ID NO: 1244935
gggagugguaucugugcau

SEQ ID NO: 1523903 - RNA, 19 nt, Artificial Sequence
  Description of Artificial Sequence: Synthetic oligonucleotide
  Antisense strand to SEQ ID NO: 1523902
augcacagauaccacuccc

SEQ ID NO: 1523904 - RNA, 19 nt, Artificial Sequence
  Description of Artificial Sequence: Synthetic oligonucleotide
  Sense strand starting at position 373 of SEQ ID NO: 1244935
cacgaugucccauaauaug

SEQ ID NO: 1523905 - RNA, 19 nt, Artificial Sequence
  Description of Artificial Sequence: Synthetic oligonucleotide
  Antisense strand to SEQ ID NO: 1523904
cauauuaugggacaucgug

SEQ ID NO: 1523906 - RNA, 19 nt, Artificial Sequence
  Description of Artificial Sequence: Synthetic oligonucleotide
  Sense strand starting at position 508 of SEQ ID NO: 1244935
gucucaguguugcucagau

SEQ ID NO: 1523907 - RNA, 19 nt, Artificial Sequence
  Description of Artificial Sequence: Synthetic oligonucleotide
  Antisense strand to SEQ ID NO: 1523906
aucugagcaacacugagac

SEQ ID NO: 1523908 - RNA, 19 nt, Artificial Sequence
  Description of Artificial Sequence: Synthetic oligonucleotide
  Sense strand starting at position 510 of SEQ ID NO: 1244935
cucaguguugcucagauga

SEQ ID NO: 1523909 - RNA, 19 nt, Artificial Sequence
  Description of Artificial Sequence: Synthetic oligonucleotide
  Antisense strand to SEQ ID NO: 1523908
ucaucugagcaacacugag

SEQ ID NO: 1523910 - RNA, 19 nt, Artificial Sequence
  Description of Artificial Sequence: Synthetic oligonucleotide
  Sense strand starting at position 521 of SEQ ID NO: 1244935
ucagaugaauuugagaacu

SEQ ID NO: 1523911 - RNA, 19 nt, Artificial Sequence
  Description of Artificial Sequence: Synthetic oligonucleotide
  Antisense strand to SEQ ID NO: 1523910
aguucucaaauucaucuga

SEQ ID NO: 1523912 - RNA, 19 nt, Artificial Sequence
  Description of Artificial Sequence: Synthetic oligonucleotide
  Sense strand starting at position 632 of SEQ ID NO: 1244935
gaggaucacuguucccaaa

SEQ ID NO: 1523913 - RNA, 19 nt, Artificial Sequence
  Description of Artificial Sequence: Synthetic oligonucleotide
  Antisense strand to SEQ ID NO: 1523912
uuugggaacagugauccuc

SEQ ID NO: 1523914 - RNA, 19 nt, Artificial Sequence
  Description of Artificial Sequence: Synthetic oligonucleotide
  Sense strand starting at position 634 of SEQ ID NO: 1244935
ggaucacuguucccaaaga

SEQ ID NO: 1523915 - RNA, 19 nt, Artificial Sequence
  Description of Artificial Sequence: Synthetic oligonucleotide
  Antisense strand to SEQ ID NO: 1523914
ucuuugggaacagugaucc

SEQ ID NO: 1523916 - RNA, 19 nt, Artificial Sequence
  Description of Artificial Sequence: Synthetic oligonucleotide
  Sense strand starting at position 635 of SEQ ID NO: 1244935
gaucacuguucccaaagag

SEQ ID NO: 1523917 - RNA, 19 nt, Artificial Sequence
  Description of Artificial Sequence: Synthetic oligonucleotide
  Antisense strand to SEQ ID NO: 1523916
cucuuugggaacagugauc

SEQ ID NO: 1523918 - RNA, 19 nt, Artificial Sequence
  Description of Artificial Sequence: Synthetic oligonucleotide
  Sense strand starting at position 707 of SEQ ID NO: 1244935
ggucuuaugagucacugcu

SEQ ID NO: 1523919 - RNA, 19 nt, Artificial Sequence
  Description of Artificial Sequence: Synthetic oligonucleotide
  Antisense strand to SEQ ID NO: 1523918
agcagugacucauaagacc

SEQ ID NO: 1523920 - RNA, 19 nt, Artificial Sequence
  Description of Artificial Sequence: Synthetic oligonucleotide
  Sense strand starting at position 936 of SEQ ID NO: 1244935
gggcaaaucugagcugaga

SEQ ID NO: 1523921 - RNA, 19 nt, Artificial Sequence
  Description of Artificial Sequence: Synthetic oligonucleotide
  Antisense strand to SEQ ID NO: 1523920
ucucagcucagauuugccc

SEQ ID NO: 1523922 - RNA, 19 nt, Artificial Sequence
  Description of Artificial Sequence: Synthetic oligonucleotide
  Sense strand starting at position 1136 of SEQ ID NO: 1244935
agcagaugaccuugucaag

SEQ ID NO: 1523923 - RNA, 19 nt, Artificial Sequence
  Description of Artificial Sequence: Synthetic oligonucleotide
  Antisense strand to SEQ ID NO: 1523922
cuugacaaggucaucugcu

SEQ ID NO: 1523924 - RNA, 19 nt, Artificial Sequence
  Description of Artificial Sequence: Synthetic oligonucleotide
  Sense strand starting at position 1166 of SEQ ID NO: 1244935
ccgcaaagauccucagguu

SEQ ID NO: 1523925 - RNA, 19 nt, Artificial Sequence
  Description of Artificial Sequence: Synthetic oligonucleotide
  Antisense strand to SEQ ID NO: 1523924
aaccugaggaucuuugcgg

SEQ ID NO: 1523926 - RNA, 19 nt, Artificial Sequence
  Description of Artificial Sequence: Synthetic oligonucleotide
  Sense strand starting at position 1167 of SEQ ID NO: 1244935
cgcaaagauccucagguua

SEQ ID NO: 1523927 - RNA, 19 nt, Artificial Sequence
  Description of Artificial Sequence: Synthetic oligonucleotide
  Antisense strand to SEQ ID NO: 1523926
uaaccugaggaucuuugcg

SEQ ID NO: 1523928 - RNA, 19 nt, Artificial Sequence
  Description of Artificial Sequence: Synthetic oligonucleotide
  Sense strand starting at position 1762 of SEQ ID NO: 1244935
ugguucuugcggagcugaa

SEQ ID NO: 1523929 - RNA, 19 nt, Artificial Sequence
  Description of Artificial Sequence: Synthetic oligonucleotide
  Antisense strand to SEQ ID NO: 1523928
uucagcuccgcaagaacca

SEQ ID NO: 1523930 - RNA, 19 nt, Artificial Sequence
  Description of Artificial Sequence: Synthetic oligonucleotide
  Sense strand starting at position 2225 of SEQ ID NO: 1244935
gcugaaagggugugaaacu

SEQ ID NO: 1523931 - RNA, 19 nt, Artificial Sequence
  Description of Artificial Sequence: Synthetic oligonucleotide
  Antisense strand to SEQ ID NO: 1523930
aguuucacacccuuucagc

SEQ ID NO: 1523932 - RNA, 19 nt, Artificial Sequence
  Description of Artificial Sequence: Synthetic oligonucleotide
  Sense strand starting at position 2352 of SEQ ID NO: 1244935
gcgcgucuagcugugucau

SEQ ID NO: 1523933 - RNA, 19 nt, Artificial Sequence
  Description of Artificial Sequence: Synthetic oligonucleotide
  Antisense strand to SEQ ID NO: 1523932
augacacagcuagacgcgc

SEQ ID NO: 1523934 - RNA, 19 nt, Artificial Sequence
  Description of Artificial Sequence: Synthetic oligonucleotide
  Sense strand starting at position 2364 of SEQ ID NO: 1244935
gugucaugccugcaccuuu

SEQ ID NO: 1523935 - RNA, 19 nt, Artificial Sequence
  Description of Artificial Sequence: Synthetic oligonucleotide
  Antisense strand to SEQ ID NO: 1523934
aaaggugcaggcaugacac

SEQ ID NO: 1523936 - RNA, 19 nt, Artificial Sequence
  Description of Artificial Sequence: Synthetic oligonucleotide
  Sense strand starting at position 2854 of SEQ ID NO: 1244935
cccuaagucccuugucuga

SEQ ID NO: 1523937 - RNA, 19 nt, Artificial Sequence
  Description of Artificial Sequence: Synthetic oligonucleotide
  Antisense strand to SEQ ID NO: 1523936
ucagacaagggacuuaggg

SEQ ID NO: 1523938 - RNA, 19 nt, Artificial Sequence
  Description of Artificial Sequence: Synthetic oligonucleotide
  Sense strand starting at position 2858 of SEQ ID NO: 1244935
aagucccuugucugaggaa

SEQ ID NO: 1523939 - RNA, 19 nt, Artificial Sequence
  Description of Artificial Sequence: Synthetic oligonucleotide
  Antisense strand to SEQ ID NO: 1523938
uuccucagacaagggacuu

SEQ ID NO: 1523940 - RNA, 19 nt, Artificial Sequence
  Description of Artificial Sequence: Synthetic oligonucleotide
  Sense strand starting at position 2867 of SEQ ID NO: 1244935
gucugaggaauguaguucu

SEQ ID NO: 1523941 - RNA, 19 nt, Artificial Sequence
  Description of Artificial Sequence: Synthetic oligonucleotide
  Antisense strand to SEQ ID NO: 1523940
agaacuacauuccucagac

SEQ ID NO: 1523942 - RNA, 19 nt, Artificial Sequence
  Description of Artificial Sequence: Synthetic oligonucleotide
  Sense strand starting at position 3093 of SEQ ID NO: 1244935
ugaguccaugccgauauaa

SEQ ID NO: 1523943 - RNA, 19 nt, Artificial Sequence
  Description of Artificial Sequence: Synthetic oligonucleotide
  Antisense strand to SEQ ID NO: 1523942
uuauaucggcauggacuca

SEQ ID NO: 1523944 - RNA, 19 nt, Artificial Sequence
  Description of Artificial Sequence: Synthetic oligonucleotide
  Sense strand starting at position 3095 of SEQ ID NO: 1244935
aguccaugccgauauaaau

SEQ ID NO: 1523945 - RNA, 19 nt, Artificial Sequence
  Description of Artificial Sequence: Synthetic oligonucleotide
  Antisense strand to SEQ ID NO: 1523944
auuuauaucggcauggacu

SEQ ID NO: 1523946 - RNA, 19 nt, Artificial Sequence
  Description of Artificial Sequence: Synthetic oligonucleotide
  Sense strand starting at position 3143 of SEQ ID NO: 1244935
agacauauuucgcauugaa

SEQ ID NO: 1523947 - RNA, 19 nt, Artificial Sequence
  Description of Artificial Sequence: Synthetic oligonucleotide
  Antisense strand to SEQ ID NO: 1523946
uucaaugcgaaauaugucu

SEQ ID NO: 1523948 - RNA, 19 nt, Artificial Sequence
  Description of Artificial Sequence: Synthetic oligonucleotide
  Sense strand starting at position 3498 of SEQ ID NO: 1244935
gugacaaagucacagguaa

SEQ ID NO: 1523949 - RNA, 19 nt, Artificial Sequence
  Description of Artificial Sequence: Synthetic oligonucleotide
  Antisense strand to SEQ ID NO: 1523948
uuaccugugacuuugucac

SEQ ID NO: 1523950 - RNA, 19 nt, Artificial Sequence
  Description of Artificial Sequence: Synthetic oligonucleotide
  Sense strand starting at position 3530 of SEQ ID NO: 1244935
ucugguguauucucuccau

SEQ ID NO: 1523951 - RNA, 19 nt, Artificial Sequence
  Description of Artificial Sequence: Synthetic oligonucleotide
  Antisense strand to SEQ ID NO: 1523950
auggagagaauacaccaga

SEQ ID NO: 1523952 - RNA, 19 nt, Artificial Sequence
  Description of Artificial Sequence: Synthetic oligonucleotide
  Sense strand starting at position 3533 of SEQ ID NO: 1244935
gguguauucucuccauuug

SEQ ID NO: 1523953 - RNA, 19 nt, Artificial Sequence
  Description of Artificial Sequence: Synthetic oligonucleotide
  Antisense strand to SEQ ID NO: 1523952
caaauggagagaauacacc

SEQ ID NO: 1523954 - RNA, 19 nt, Artificial Sequence
  Description of Artificial Sequence: Synthetic oligonucleotide
  Sense strand starting at position 3605 of SEQ ID NO: 1244935
gcaggaucugagggagacu

SEQ ID NO: 1523955 - RNA, 19 nt, Artificial Sequence
  Description of Artificial Sequence: Synthetic oligonucleotide
  Antisense strand to SEQ ID NO: 1523954
agucucccucagauccugc

SEQ ID NO: 1523956 - RNA, 19 nt, Artificial Sequence
  Description of Artificial Sequence: Synthetic oligonucleotide
  Sense strand starting at position 3679 of SEQ ID NO: 1244935
uuggcuuguagcuguaaga

SEQ ID NO: 1523957 - RNA, 19 nt, Artificial Sequence
  Description of Artificial Sequence: Synthetic oligonucleotide
  Antisense strand to SEQ ID NO: 1523956
ucuuacagcuacaagccaa

SEQ ID NO: 1523958 - RNA, 19 nt, Artificial Sequence
  Description of Artificial Sequence: Synthetic oligonucleotide
  Sense strand starting at position 3689 of SEQ ID NO: 1244935
gcuguaagaugcgcucuaa

SEQ ID NO: 1523959 - RNA, 19 nt, Artificial Sequence
  Description of Artificial Sequence: Synthetic oligonucleotide
  Antisense strand to SEQ ID NO: 1523958
uuagagcgcaucuuacagc

SEQ ID NO: 1523960 - RNA, 19 nt, Artificial Sequence
  Description of Artificial Sequence: Synthetic oligonucleotide
  Sense strand starting at position 3707 of SEQ ID NO: 1244935
auaucagucucuguuguca

SEQ ID NO: 1523961 - RNA, 19 nt, Artificial Sequence
  Description of Artificial Sequence: Synthetic oligonucleotide
  Antisense strand to SEQ ID NO: 1523960
ugacaacagagacugauau

SEQ ID NO: 1523962 - RNA, 19 nt, Artificial Sequence
  Description of Artificial Sequence: Synthetic oligonucleotide
  Sense strand starting at position 3738 of SEQ ID NO: 1244935
cugugucuguguucaaaug

SEQ ID NO: 1523963 - RNA, 19 nt, Artificial Sequence
  Description of Artificial Sequence: Synthetic oligonucleotide
  Antisense strand to SEQ ID NO: 1523962
cauuugaacacagacacag

SEQ ID NO: 1523964 - RNA, 19 nt, Artificial Sequence
  Description of Artificial Sequence: Synthetic oligonucleotide
  Sense strand starting at position 3739 of SEQ ID NO: 1244935
ugugucuguguucaaaugu

SEQ ID NO: 1523965 - RNA, 19 nt, Artificial Sequence
  Description of Artificial Sequence: Synthetic oligonucleotide
  Antisense strand to SEQ ID NO: 1523964
acauuugaacacagacaca

SEQ ID NO: 1523966 - RNA, 19 nt, Artificial Sequence
  Description of Artificial Sequence: Synthetic oligonucleotide
  Sense strand starting at position 3776 of SEQ ID NO: 1244935
uagggagucuugcucuguu

SEQ ID NO: 1523967 - RNA, 19 nt, Artificial Sequence
  Description of Artificial Sequence: Synthetic oligonucleotide
  Antisense strand to SEQ ID NO: 1523966
aacagagcaagacucccua

SEQ ID NO: 1523968 - RNA, 19 nt, Artificial Sequence
  Description of Artificial Sequence: Synthetic oligonucleotide
  Sense strand starting at position 53 of SEQ ID NO: 1244936
cuauauguccaaggccaaa

SEQ ID NO: 1523969 - RNA, 19 nt, Artificial Sequence
  Description of Artificial Sequence: Synthetic oligonucleotide
  Antisense strand to SEQ ID NO: 1523968
uuuggccuuggacauauag

SEQ ID NO: 1523970 - RNA, 19 nt, Artificial Sequence
  Description of Artificial Sequence: Synthetic oligonucleotide
  Sense strand starting at position 117 of SEQ ID NO: 1244936
cugcgugcucaagacagaa

SEQ ID NO: 1523971 - RNA, 19 nt, Artificial Sequence
  Description of Artificial Sequence: Synthetic oligonucleotide
  Antisense strand to SEQ ID NO: 1523970
uucugucuugagcacgcag

SEQ ID NO: 1523972 - RNA, 19 nt, Artificial Sequence
  Description of Artificial Sequence: Synthetic oligonucleotide
  Sense strand starting at position 343 of SEQ ID NO: 1244936
ggugaucagucuccaugaa

SEQ ID NO: 1523973 - RNA, 19 nt, Artificial Sequence
  Description of Artificial Sequence: Synthetic oligonucleotide
  Antisense strand to SEQ ID NO: 1523972
uucauggagacugaucacc

SEQ ID NO: 1523974 - RNA, 19 nt, Artificial Sequence
  Description of Artificial Sequence: Synthetic oligonucleotide
  Sense strand starting at position 362 of SEQ ID NO: 1244936
gcccaaaucugaucaugug

SEQ ID NO: 1523975 - RNA, 19 nt, Artificial Sequence
  Description of Artificial Sequence: Synthetic oligonucleotide
  Antisense strand to SEQ ID NO: 1523974
cacaugaucagauuugggc

SEQ ID NO: 1523976 - RNA, 19 nt, Artificial Sequence
  Description of Artificial Sequence: Synthetic oligonucleotide
  Sense strand starting at position 487 of SEQ ID NO: 1244936
cacagaucucaguggcaca

SEQ ID NO: 1523977 - RNA, 19 nt, Artificial Sequence
  Description of Artificial Sequence: Synthetic oligonucleotide
  Antisense strand to SEQ ID NO: 1523976
ugugccacugagaucugug

SEQ ID NO: 1523978 - RNA, 19 nt, Artificial Sequence
  Description of Artificial Sequence: Synthetic oligonucleotide
  Sense strand starting at position 490 of SEQ ID NO: 1244936
agaucucaguggcacaaau

SEQ ID NO: 1523979 - RNA, 19 nt, Artificial Sequence
  Description of Artificial Sequence: Synthetic oligonucleotide
  Antisense strand to SEQ ID NO: 1523978
auuugugccacugagaucu

SEQ ID NO: 1523980 - RNA, 19 nt, Artificial Sequence
  Description of Artificial Sequence: Synthetic oligonucleotide
  Sense strand starting at position 563 of SEQ ID NO: 1244936
ggcugauuccucugccuag

SEQ ID NO: 1523981 - RNA, 19 nt, Artificial Sequence
  Description of Artificial Sequence: Synthetic oligonucleotide
  Antisense strand to SEQ ID NO: 1523980
cuaggcagaggaaucagcc

SEQ ID NO: 1523982 - RNA, 19 nt, Artificial Sequence
  Description of Artificial Sequence: Synthetic oligonucleotide
  Sense strand starting at position 566 of SEQ ID NO: 1244936
ugauuccucugccuagaau

SEQ ID NO: 1523983 - RNA, 19 nt, Artificial Sequence
  Description of Artificial Sequence: Synthetic oligonucleotide
  Antisense strand to SEQ ID NO: 1523982
auucuaggcagaggaauca

SEQ ID NO: 1523984 - RNA, 19 nt, Artificial Sequence
  Description of Artificial Sequence: Synthetic oligonucleotide
  Sense strand starting at position 607 of SEQ ID NO: 1244936
uggcuugcgcuuccucaau

SEQ ID NO: 1523985 - RNA, 19 nt, Artificial Sequence
  Description of Artificial Sequence: Synthetic oligonucleotide
  Antisense strand to SEQ ID NO: 1523984
auugaggaagcgcaagcca

SEQ ID NO: 1523986 - RNA, 19 nt, Artificial Sequence
  Description of Artificial Sequence: Synthetic oligonucleotide
  Sense strand starting at position 712 of SEQ ID NO: 1244936
gugcuuuccucacugcauu

SEQ ID NO: 1523987 - RNA, 19 nt, Artificial Sequence
  Description of Artificial Sequence: Synthetic oligonucleotide
  Antisense strand to SEQ ID NO: 1523986
aaugcagugaggaaagcac

SEQ ID NO: 1523988 - RNA, 19 nt, Artificial Sequence
  Description of Artificial Sequence: Synthetic oligonucleotide
  Sense strand starting at position 763 of SEQ ID NO: 1244936
cugacuucuuaaguggauu

SEQ ID NO: 1523989 - RNA, 19 nt, Artificial Sequence
  Description of Artificial Sequence: Synthetic oligonucleotide
  Antisense strand to SEQ ID NO: 1523988
aauccacuuaagaagucag

SEQ ID NO: 1523990 - RNA, 19 nt, Artificial Sequence
  Description of Artificial Sequence: Synthetic oligonucleotide
  Sense strand starting at position 766 of SEQ ID NO: 1244936
acuucuuaaguggauucua

SEQ ID NO: 1523991 - RNA, 19 nt, Artificial Sequence
  Description of Artificial Sequence: Synthetic oligonucleotide
  Antisense strand to SEQ ID NO: 1523990
uagaauccacuuaagaagu

SEQ ID NO: 1523992 - RNA, 19 nt, Artificial Sequence
  Description of Artificial Sequence: Synthetic oligonucleotide
  Sense strand starting at position 771 of SEQ ID NO: 1244936
uuaaguggauucuaagucu

SEQ ID NO: 1523993 - RNA, 19 nt, Artificial Sequence
  Description of Artificial Sequence: Synthetic oligonucleotide
  Antisense strand to SEQ ID NO: 1523992
agacuuagaauccacuuaa

SEQ ID NO: 1523994 - RNA, 19 nt, Artificial Sequence
  Description of Artificial Sequence: Synthetic oligonucleotide
  Sense strand starting at position 774 of SEQ ID NO: 1244936
aguggauucuaagucucuu

SEQ ID NO: 1523995 - RNA, 19 nt, Artificial Sequence
  Description of Artificial Sequence: Synthetic oligonucleotide
  Antisense strand to SEQ ID NO: 1523994
aagagacuuagaauccacu

SEQ ID NO: 1523996 - RNA, 19 nt, Artificial Sequence
  Description of Artificial Sequence: Synthetic oligonucleotide
  Sense strand starting at position 800 of SEQ ID NO: 1244936
gggagcucgucugauccau

SEQ ID NO: 1523997 - RNA, 19 nt, Artificial Sequence
  Description of Artificial Sequence: Synthetic oligonucleotide
  Antisense strand to SEQ ID NO: 1523996
auggaucagacgagcuccc

SEQ ID NO: 1523998 - RNA, 19 nt, Artificial Sequence
  Description of Artificial Sequence: Synthetic oligonucleotide
  Sense strand starting at position 802 of SEQ ID NO: 1244936
gagcucgucugauccauuu

SEQ ID NO: 1523999 - RNA, 19 nt, Artificial Sequence
  Description of Artificial Sequence: Synthetic oligonucleotide
  Antisense strand to SEQ ID NO: 1523998
aaauggaucagacgagcuc

SEQ ID NO: 1524000 - RNA, 19 nt, Artificial Sequence
  Description of Artificial Sequence: Synthetic oligonucleotide
  Sense strand starting at position 1864 of SEQ ID NO: 1244936
gucacuggguccugguaga

SEQ ID NO: 1524001 - RNA, 19 nt, Artificial Sequence
  Description of Artificial Sequence: Synthetic oligonucleotide
  Antisense strand to SEQ ID NO: 1524000
ucuaccaggacccagugac

SEQ ID NO: 1524002 - RNA, 19 nt, Artificial Sequence
  Description of Artificial Sequence: Synthetic oligonucleotide
  Sense strand starting at position 2582 of SEQ ID NO: 1244936
gauggaaaugucuggucac

SEQ ID NO: 1524003 - RNA, 19 nt, Artificial Sequence
  Description of Artificial Sequence: Synthetic oligonucleotide
  Antisense strand to SEQ ID NO: 1524002
gugaccagacauuuccauc

SEQ ID NO: 1524004 - RNA, 19 nt, Artificial Sequence
  Description of Artificial Sequence: Synthetic oligonucleotide
  Sense strand starting at position 2585 of SEQ ID NO: 1244936
ggaaaugucuggucaccaa

SEQ ID NO: 1524005 - RNA, 19 nt, Artificial Sequence
  Description of Artificial Sequence: Synthetic oligonucleotide
  Antisense strand to SEQ ID NO: 1524004
uuggugaccagacauuucc

SEQ ID NO: 1524006 - RNA, 19 nt, Artificial Sequence
  Description of Artificial Sequence: Synthetic oligonucleotide
  Sense strand starting at position 2611 of SEQ ID NO: 1244936
ggaccaguuaacugguauu

SEQ ID NO: 1524007 - RNA, 19 nt, Artificial Sequence
  Description of Artificial Sequence: Synthetic oligonucleotide
  Antisense strand to SEQ ID NO: 1524006
aauaccaguuaacuggucc

SEQ ID NO: 1524008 - RNA, 19 nt, Artificial Sequence
  Description of Artificial Sequence: Synthetic oligonucleotide
  Sense strand starting at position 2739 of SEQ ID NO: 1244936
ucugcagccucaguauuua

SEQ ID NO: 1524009 - RNA, 19 nt, Artificial Sequence
  Description of Artificial Sequence: Synthetic oligonucleotide
  Antisense strand to SEQ ID NO: 1524008
uaaauacugaggcugcaga

SEQ ID NO: 1524010 - RNA, 19 nt, Artificial Sequence
  Description of Artificial Sequence: Synthetic oligonucleotide
  Sense strand starting at position 2952 of SEQ ID NO: 1244936
gacgaaguuucuuucugga

SEQ ID NO: 1524011 - RNA, 19 nt, Artificial Sequence
  Description of Artificial Sequence: Synthetic oligonucleotide
  Antisense strand to SEQ ID NO: 1524010
uccagaaagaaacuucguc

SEQ ID NO: 1524012 - RNA, 19 nt, Artificial Sequence
  Description of Artificial Sequence: Synthetic oligonucleotide
  Sense strand starting at position 2954 of SEQ ID NO: 1244936
cgaaguuucuuucuggaca

SEQ ID NO: 1524013 - RNA, 19 nt, Artificial Sequence
  Description of Artificial Sequence: Synthetic oligonucleotide
  Antisense strand to SEQ ID NO: 1524012
uguccagaaagaaacuucg

SEQ ID NO: 1524014 - RNA, 19 nt, Artificial Sequence
  Description of Artificial Sequence: Synthetic oligonucleotide
  Sense strand starting at position 2955 of SEQ ID NO: 1244936
gaaguuucuuucuggacaa

SEQ ID NO: 1524015 - RNA, 19 nt, Artificial Sequence
  Description of Artificial Sequence: Synthetic oligonucleotide
  Antisense strand to SEQ ID NO: 1524014
uuguccagaaagaaacuuc

SEQ ID NO: 1524016 - RNA, 19 nt, Artificial Sequence
  Description of Artificial Sequence: Synthetic oligonucleotide
  Sense strand starting at position 2995 of SEQ ID NO: 1244936
ccuacuaguuagccagacu

SEQ ID NO: 1524017 - RNA, 19 nt, Artificial Sequence
  Description of Artificial Sequence: Synthetic oligonucleotide
  Antisense strand to SEQ ID NO: 1524016
agucuggcuaacuaguagg

SEQ ID NO: 1524018 - RNA, 19 nt, Artificial Sequence
  Description of Artificial Sequence: Synthetic oligonucleotide
  Sense strand starting at position 2998 of SEQ ID NO: 1244936
acuaguuagccagacuucu

SEQ ID NO: 1524019 - RNA, 19 nt, Artificial Sequence
  Description of Artificial Sequence: Synthetic oligonucleotide
  Antisense strand to SEQ ID NO: 1524018
agaagucuggcuaacuagu

SEQ ID NO: 1524020 - RNA, 19 nt, Artificial Sequence
  Description of Artificial Sequence: Synthetic oligonucleotide
  Sense strand starting at position 3083 of SEQ ID NO: 1244936
cugagcaggucucuugaga

SEQ ID NO: 1524021 - RNA, 19 nt, Artificial Sequence
  Description of Artificial Sequence: Synthetic oligonucleotide
  Antisense strand to SEQ ID NO: 1524020
ucucaagagaccugcucag

SEQ ID NO: 1524022 - RNA, 19 nt, Artificial Sequence
  Description of Artificial Sequence: Synthetic oligonucleotide
  Sense strand starting at position 3227 of SEQ ID NO: 1244936
cagagccagugcucaauaa

SEQ ID NO: 1524023 - RNA, 19 nt, Artificial Sequence
  Description of Artificial Sequence: Synthetic oligonucleotide
  Antisense strand to SEQ ID NO: 1524022
uuauugagcacuggcucug

SEQ ID NO: 1524024 - RNA, 19 nt, Artificial Sequence
  Description of Artificial Sequence: Synthetic oligonucleotide
  Sense strand starting at position 3536 of SEQ ID NO: 1244936
caggcagggucucauuaua

SEQ ID NO: 1524025 - RNA, 19 nt, Artificial Sequence
  Description of Artificial Sequence: Synthetic oligonucleotide
  Antisense strand to SEQ ID NO: 1524024
uauaaugagacccugccug

SEQ ID NO: 1524026 - RNA, 19 nt, Artificial Sequence
  Description of Artificial Sequence: Synthetic oligonucleotide
  Sense strand starting at position 3642 of SEQ ID NO: 1244936
ccggcaagaaaucauguuu

SEQ ID NO: 1524027 - RNA, 19 nt, Artificial Sequence
  Description of Artificial Sequence: Synthetic oligonucleotide
  Antisense strand to SEQ ID NO: 1524026
aaacaugauuucuugccgg

SEQ ID NO: 1524028 - RNA, 19 nt, Artificial Sequence
  Description of Artificial Sequence: Synthetic oligonucleotide
  Sense strand starting at position 3782 of SEQ ID NO: 1244936
ggagcugugucuuuacucu

SEQ ID NO: 1524029 - RNA, 19 nt, Artificial Sequence
  Description of Artificial Sequence: Synthetic oligonucleotide
  Antisense strand to SEQ ID NO: 1524028
agaguaaagacacagcucc

SEQ ID NO: 1524030 - RNA, 19 nt, Artificial Sequence
  Description of Artificial Sequence: Synthetic oligonucleotide
  Sense strand starting at position 3796 of SEQ ID NO: 1244936
acucuugcugccgaucaau

SEQ ID NO: 1524031 - RNA, 19 nt, Artificial Sequence
  Description of Artificial Sequence: Synthetic oligonucleotide
  Antisense strand to SEQ ID NO: 1524030
auugaucggcagcaagagu

SEQ ID NO: 1524032 - RNA, 19 nt, Artificial Sequence
  Description of Artificial Sequence: Synthetic oligonucleotide
  Sense strand starting at position 3974 of SEQ ID NO: 1244936
ucccgcaugucugcaagaa

SEQ ID NO: 1524033 - RNA, 19 nt, Artificial Sequence
  Description of Artificial Sequence: Synthetic oligonucleotide
  Antisense strand to SEQ ID NO: 1524032
uucuugcagacaugcggga

SEQ ID NO: 1524034 - RNA, 19 nt, Artificial Sequence
  Description of Artificial Sequence: Synthetic oligonucleotide
  Sense strand starting at position 3975 of SEQ ID NO: 1244936
cccgcaugucugcaagaag

SEQ ID NO: 1524035 - RNA, 19 nt, Artificial Sequence
  Description of Artificial Sequence: Synthetic oligonucleotide
  Antisense strand to SEQ ID NO: 1524034
cuucuugcagacaugcggg

SEQ ID NO: 1524036 - RNA, 19 nt, Artificial Sequence
  Description of Artificial Sequence: Synthetic oligonucleotide
  Sense strand starting at position 3978 of SEQ ID NO: 1244936
gcaugucugcaagaagagu

SEQ ID NO: 1524037 - RNA, 19 nt, Artificial Sequence
  Description of Artificial Sequence: Synthetic oligonucleotide
  Antisense strand to SEQ ID NO: 1524036
acucuucuugcagacaugc

SEQ ID NO: 1524038 - RNA, 19 nt, Artificial Sequence
  Description of Artificial Sequence: Synthetic oligonucleotide
  Sense strand starting at position 3 of SEQ ID NO: 1244937
gggugcuagucuucccuuu

SEQ ID NO: 1524039 - RNA, 19 nt, Artificial Sequence
  Description of Artificial Sequence: Synthetic oligonucleotide
  Antisense strand to SEQ ID NO: 1524038
aaagggaagacuagcaccc

SEQ ID NO: 1524040 - RNA, 19 nt, Artificial Sequence
  Description of Artificial Sequence: Synthetic oligonucleotide
  Sense strand starting at position 10 of SEQ ID NO: 1244937
agucuucccuuucugaaga

SEQ ID NO: 1524041 - RNA, 19 nt, Artificial Sequence
  Description of Artificial Sequence: Synthetic oligonucleotide
  Antisense strand to SEQ ID NO: 1524040
ucuucagaaagggaagacu

SEQ ID NO: 1524042 - RNA, 19 nt, Artificial Sequence
  Description of Artificial Sequence: Synthetic oligonucleotide
  Sense strand starting at position 103 of SEQ ID NO: 1244937
agcagaaucguugaugcgu

SEQ ID NO: 1524043 - RNA, 19 nt, Artificial Sequence
  Description of Artificial Sequence: Synthetic oligonucleotide
  Antisense strand to SEQ ID NO: 1524042
acgcaucaacgauucugcu

SEQ ID NO: 1524044 - RNA, 19 nt, Artificial Sequence
  Description of Artificial Sequence: Synthetic oligonucleotide
  Sense strand starting at position 460 of SEQ ID NO: 1244937
gcaccucucgcucaaacaa

SEQ ID NO: 1524045 - RNA, 19 nt, Artificial Sequence
  Description of Artificial Sequence: Synthetic oligonucleotide
  Antisense strand to SEQ ID NO: 1524044
uuguuugagcgagaggugc

SEQ ID NO: 1524046 - RNA, 19 nt, Artificial Sequence
  Description of Artificial Sequence: Synthetic oligonucleotide
  Sense strand starting at position 546 of SEQ ID NO: 1244937
ggaugucuauggucuccaa

SEQ ID NO: 1524047 - RNA, 19 nt, Artificial Sequence
  Description of Artificial Sequence: Synthetic oligonucleotide
  Antisense strand to SEQ ID NO: 1524046
uuggagaccauagacaucc

SEQ ID NO: 1524048 - RNA, 19 nt, Artificial Sequence
  Description of Artificial Sequence: Synthetic oligonucleotide
  Sense strand starting at position 549 of SEQ ID NO: 1244937
ugucuauggucuccaagaa

SEQ ID NO: 1524049 - RNA, 19 nt, Artificial Sequence
  Description of Artificial Sequence: Synthetic oligonucleotide
  Antisense strand to SEQ ID NO: 1524048
uucuuggagaccauagaca

SEQ ID NO: 1524050 - RNA, 19 nt, Artificial Sequence
  Description of Artificial Sequence: Synthetic oligonucleotide
  Sense strand starting at position 550 of SEQ ID NO: 1244937
gucuauggucuccaagaau

SEQ ID NO: 1524051 - RNA, 19 nt, Artificial Sequence
  Description of Artificial Sequence: Synthetic oligonucleotide
  Antisense strand to SEQ ID NO: 1524050
auucuuggagaccauagac

SEQ ID NO: 1524052 - RNA, 19 nt, Artificial Sequence
  Description of Artificial Sequence: Synthetic oligonucleotide
  Sense strand starting at position 564 of SEQ ID NO: 1244937
agaauaagcuaagaauaag

SEQ ID NO: 1524053 - RNA, 19 nt, Artificial Sequence
  Description of Artificial Sequence: Synthetic oligonucleotide
  Antisense strand to SEQ ID NO: 1524052
cuuauucuuagcuuauucu

SEQ ID NO: 1524054 - RNA, 19 nt, Artificial Sequence
  Description of Artificial Sequence: Synthetic oligonucleotide
  Sense strand starting at position 642 of SEQ ID NO: 1244937
ugaaccuuucggcaauguu

SEQ ID NO: 1524055 - RNA, 19 nt, Artificial Sequence
  Description of Artificial Sequence: Synthetic oligonucleotide
  Antisense strand to SEQ ID NO: 1524054
aacauugccgaaagguuca

SEQ ID NO: 1524056 - RNA, 19 nt, Artificial Sequence
  Description of Artificial Sequence: Synthetic oligonucleotide
  Sense strand starting at position 650 of SEQ ID NO: 1244937
ucggcaauguucuuuguca

SEQ ID NO: 1524057 - RNA, 19 nt, Artificial Sequence
  Description of Artificial Sequence: Synthetic oligonucleotide
  Antisense strand to SEQ ID NO: 1524056
ugacaaagaacauugccga

SEQ ID NO: 1524058 - RNA, 19 nt, Artificial Sequence
  Description of Artificial Sequence: Synthetic oligonucleotide
  Sense strand starting at position 651 of SEQ ID NO: 1244937
cggcaauguucuuugucag

SEQ ID NO: 1524059 - RNA, 19 nt, Artificial Sequence
  Description of Artificial Sequence: Synthetic oligonucleotide
  Antisense strand to SEQ ID NO: 1524058
cugacaaagaacauugccg

SEQ ID NO: 1524060 - RNA, 19 nt, Artificial Sequence
  Description of Artificial Sequence: Synthetic oligonucleotide
  Sense strand starting at position 756 of SEQ ID NO: 1244937
ucgacaaacgcugaaucua

SEQ ID NO: 1524061 - RNA, 19 nt, Artificial Sequence
  Description of Artificial Sequence: Synthetic oligonucleotide
  Antisense strand to SEQ ID NO: 1524060
uagauucagcguuugucga

SEQ ID NO: 1524062 - RNA, 19 nt, Artificial Sequence
  Description of Artificial Sequence: Synthetic oligonucleotide
  Sense strand starting at position 810 of SEQ ID NO: 1244937
ccaagcuucuuccagggaa

SEQ ID NO: 1524063 - RNA, 19 nt, Artificial Sequence
  Description of Artificial Sequence: Synthetic oligonucleotide
  Antisense strand to SEQ ID NO: 1524062
uucccuggaagaagcuugg

SEQ ID NO: 1524064 - RNA, 19 nt, Artificial Sequence
  Description of Artificial Sequence: Synthetic oligonucleotide
  Sense strand starting at position 913 of SEQ ID NO: 1244937
gaguguacccugcaccuaa

SEQ ID NO: 1524065 - RNA, 19 nt, Artificial Sequence
  Description of Artificial Sequence: Synthetic oligonucleotide
  Antisense strand to SEQ ID NO: 1524064
uuaggugcaggguacacuc

SEQ ID NO: 1524066 - RNA, 19 nt, Artificial Sequence
  Description of Artificial Sequence: Synthetic oligonucleotide
  Sense strand starting at position 925 of SEQ ID NO: 1244937
caccuaagcccguggugau

SEQ ID NO: 1524067 - RNA, 19 nt, Artificial Sequence
  Description of Artificial Sequence: Synthetic oligonucleotide
  Antisense strand to SEQ ID NO: 1524066
aucaccacgggcuuaggug

SEQ ID NO: 1524068 - RNA, 19 nt, Artificial Sequence
  Description of Artificial Sequence: Synthetic oligonucleotide
  Sense strand starting at position 1006 of SEQ ID NO: 1244937
cgaguguuggcugugugau

SEQ ID NO: 1524069 - RNA, 19 nt, Artificial Sequence
  Description of Artificial Sequence: Synthetic oligonucleotide
  Antisense strand to SEQ ID NO: 1524068
aucacacagccaacacucg

SEQ ID NO: 1524070 - RNA, 19 nt, Artificial Sequence
  Description of Artificial Sequence: Synthetic oligonucleotide
  Sense strand starting at position 1007 of SEQ ID NO: 1244937
gaguguuggcugugugaug

SEQ ID NO: 1524071 - RNA, 19 nt, Artificial Sequence
  Description of Artificial Sequence: Synthetic oligonucleotide
  Antisense strand to SEQ ID NO: 1524070
caucacacagccaacacuc

SEQ ID NO: 1524072 - RNA, 19 nt, Artificial Sequence
  Description of Artificial Sequence: Synthetic oligonucleotide
  Sense strand starting at position 1018 of SEQ ID NO: 1244937
gugugauggagauggugau

SEQ ID NO: 1524073 - RNA, 19 nt, Artificial Sequence
  Description of Artificial Sequence: Synthetic oligonucleotide
  Antisense strand to SEQ ID NO: 1524072
aucaccaucuccaucacac

SEQ ID NO: 1524074 - RNA, 19 nt, Artificial Sequence
  Description of Artificial Sequence: Synthetic oligonucleotide
  Sense strand starting at position 1030 of SEQ ID NO: 1244937
uggugauucugguuuacac

SEQ ID NO: 1524075 - RNA, 19 nt, Artificial Sequence
  Description of Artificial Sequence: Synthetic oligonucleotide
  Antisense strand to SEQ ID NO: 1524074
guguaaaccagaaucacca

SEQ ID NO: 1524076 - RNA, 19 nt, Artificial Sequence
  Description of Artificial Sequence: Synthetic oligonucleotide
  Sense strand starting at position 1032 of SEQ ID NO: 1244937
gugauucugguuuacacaa

SEQ ID NO: 1524077 - RNA, 19 nt, Artificial Sequence
  Description of Artificial Sequence: Synthetic oligonucleotide
  Antisense strand to SEQ ID NO: 1524076
uuguguaaaccagaaucac

SEQ ID NO: 1524078 - RNA, 19 nt, Artificial Sequence
  Description of Artificial Sequence: Synthetic oligonucleotide
  Sense strand starting at position 1034 of SEQ ID NO: 1244937
gauucugguuuacacaaga

SEQ ID NO: 1524079 - RNA, 19 nt, Artificial Sequence
  Description of Artificial Sequence: Synthetic oligonucleotide
  Antisense strand to SEQ ID NO: 1524078
ucuuguguaaaccagaauc

SEQ ID NO: 1524080 - RNA, 19 nt, Artificial Sequence
  Description of Artificial Sequence: Synthetic oligonucleotide
  Sense strand starting at position 1116 of SEQ ID NO: 1244937
cgugguaugaucugagucu

SEQ ID NO: 1524081 - RNA, 19 nt, Artificial Sequence
  Description of Artificial Sequence: Synthetic oligonucleotide
  Antisense strand to SEQ ID NO: 1524080
agacucagaucauaccacg

SEQ ID NO: 1524082 - RNA, 19 nt, Artificial Sequence
  Description of Artificial Sequence: Synthetic oligonucleotide
  Sense strand starting at position 1123 of SEQ ID NO: 1244937
ugaucugagucuuucucaa

SEQ ID NO: 1524083 - RNA, 19 nt, Artificial Sequence
  Description of Artificial Sequence: Synthetic oligonucleotide
  Antisense strand to SEQ ID NO: 1524082
uugagaaagacucagauca

SEQ ID NO: 1524084 - RNA, 19 nt, Artificial Sequence
  Description of Artificial Sequence: Synthetic oligonucleotide
  Sense strand starting at position 1352 of SEQ ID NO: 1244937
gccagauuauucucaguag

SEQ ID NO: 1524085 - RNA, 19 nt, Artificial Sequence
  Description of Artificial Sequence: Synthetic oligonucleotide
  Antisense strand to SEQ ID NO: 1524084
cuacugagaauaaucuggc

SEQ ID NO: 1524086 - RNA, 19 nt, Artificial Sequence
  Description of Artificial Sequence: Synthetic oligonucleotide
  Sense strand starting at position 1843 of SEQ ID NO: 1244937
ugcauuggccaucagacaa

SEQ ID NO: 1524087 - RNA, 19 nt, Artificial Sequence
  Description of Artificial Sequence: Synthetic oligonucleotide
  Antisense strand to SEQ ID NO: 1524086
uugucugauggccaaugca

SEQ ID NO: 1524088 - RNA, 19 nt, Artificial Sequence
  Description of Artificial Sequence: Synthetic oligonucleotide
  Sense strand starting at position 1906 of SEQ ID NO: 1244937
gggugcuugugagcuugaa

SEQ ID NO: 1524089 - RNA, 19 nt, Artificial Sequence
  Description of Artificial Sequence: Synthetic oligonucleotide
  Antisense strand to SEQ ID NO: 1524088
uucaagcucacaagcaccc

SEQ ID NO: 1524090 - RNA, 19 nt, Artificial Sequence
  Description of Artificial Sequence: Synthetic oligonucleotide
  Sense strand starting at position 2106 of SEQ ID NO: 1244937
ggcucugauucccagagga

SEQ ID NO: 1524091 - RNA, 19 nt, Artificial Sequence
  Description of Artificial Sequence: Synthetic oligonucleotide
  Antisense strand to SEQ ID NO: 1524090
uccucugggaaucagagcc

SEQ ID NO: 1524092 - RNA, 19 nt, Artificial Sequence
  Description of Artificial Sequence: Synthetic oligonucleotide
  Sense strand starting at position 2416 of SEQ ID NO: 1244937
acaguacuggccuggcauu

SEQ ID NO: 1524093 - RNA, 19 nt, Artificial Sequence
  Description of Artificial Sequence: Synthetic oligonucleotide
  Antisense strand to SEQ ID NO: 1524092
aaugccaggccaguacugu

SEQ ID NO: 1524094 - RNA, 19 nt, Artificial Sequence
  Description of Artificial Sequence: Synthetic oligonucleotide
  Sense strand starting at position 2608 of SEQ ID NO: 1244937
agauaacuaucagugucau

SEQ ID NO: 1524095 - RNA, 19 nt, Artificial Sequence
  Description of Artificial Sequence: Synthetic oligonucleotide
  Antisense strand to SEQ ID NO: 1524094
augacacugauaguuaucu

SEQ ID NO: 1524096 - RNA, 19 nt, Artificial Sequence
  Description of Artificial Sequence: Synthetic oligonucleotide
  Sense strand starting at position 2614 of SEQ ID NO: 1244937
cuaucagugucauuuccuu

SEQ ID NO: 1524097 - RNA, 19 nt, Artificial Sequence
  Description of Artificial Sequence: Synthetic oligonucleotide
  Antisense strand to SEQ ID NO: 1524096
aaggaaaugacacugauag

SEQ ID NO: 1524098 - RNA, 19 nt, Artificial Sequence
  Description of Artificial Sequence: Synthetic oligonucleotide
  Sense strand starting at position 3077 of SEQ ID NO: 1244937
aacagugaggucuagguau

SEQ ID NO: 1524099 - RNA, 19 nt, Artificial Sequence
  Description of Artificial Sequence: Synthetic oligonucleotide
  Antisense strand to SEQ ID NO: 1524098
auaccuagaccucacuguu

SEQ ID NO: 1524100 - RNA, 19 nt, Artificial Sequence
  Description of Artificial Sequence: Synthetic oligonucleotide
  Sense strand starting at position 3171 of SEQ ID NO: 1244937
gcagguccagccuggaaua

SEQ ID NO: 1524101 - RNA, 19 nt, Artificial Sequence
  Description of Artificial Sequence: Synthetic oligonucleotide
  Antisense strand to SEQ ID NO: 1524100
uauuccaggcuggaccugc

SEQ ID NO: 1524102 - RNA, 19 nt, Artificial Sequence
  Description of Artificial Sequence: Synthetic oligonucleotide
  Sense strand starting at position 3296 of SEQ ID NO: 1244937
gcaguugacaaagagcuuu

SEQ ID NO: 1524103 - RNA, 19 nt, Artificial Sequence
  Description of Artificial Sequence: Synthetic oligonucleotide
  Antisense strand to SEQ ID NO: 1524102
aaagcucuuugucaacugc

SEQ ID NO: 1524104 - RNA, 19 nt, Artificial Sequence
  Description of Artificial Sequence: Synthetic oligonucleotide
  Sense strand starting at position 3359 of SEQ ID NO: 1244937
gagggcagagacugucaua

SEQ ID NO: 1524105 - RNA, 19 nt, Artificial Sequence
  Description of Artificial Sequence: Synthetic oligonucleotide
  Antisense strand to SEQ ID NO: 1524104
uaugacagucucugcccuc

SEQ ID NO: 1524106 - RNA, 19 nt, Artificial Sequence
  Description of Artificial Sequence: Synthetic oligonucleotide
  Sense strand starting at position 3386 of SEQ ID NO: 1244937
acaggugagaaauguguga

SEQ ID NO: 1524107 - RNA, 19 nt, Artificial Sequence
  Description of Artificial Sequence: Synthetic oligonucleotide
  Antisense strand to SEQ ID NO: 1524106
ucacacauuucucaccugu

SEQ ID NO: 1524108 - RNA, 19 nt, Artificial Sequence
  Description of Artificial Sequence: Synthetic oligonucleotide
  Sense strand starting at position 3390 of SEQ ID NO: 1244937
gugagaaaugugugacgcu

SEQ ID NO: 1524109 - RNA, 19 nt, Artificial Sequence
  Description of Artificial Sequence: Synthetic oligonucleotide
  Antisense strand to SEQ ID NO: 1524108
agcgucacacauuucucac

SEQ ID NO: 1524110 - RNA, 19 nt, Artificial Sequence
  Description of Artificial Sequence: Synthetic oligonucleotide
  Sense strand starting at position 3399 of SEQ ID NO: 1244937
gugugacgcugggcaauua

SEQ ID NO: 1524111 - RNA, 19 nt, Artificial Sequence
  Description of Artificial Sequence: Synthetic oligonucleotide
  Antisense strand to SEQ ID NO: 1524110
uaauugcccagcgucacac

SEQ ID NO: 1524112 - RNA, 19 nt, Artificial Sequence
  Description of Artificial Sequence: Synthetic oligonucleotide
  Sense strand starting at position 3450 of SEQ ID NO: 1244937
cacguuggucuaggcauaa

SEQ ID NO: 1524113 - RNA, 19 nt, Artificial Sequence
  Description of Artificial Sequence: Synthetic oligonucleotide
  Antisense strand to SEQ ID NO: 1524112
uuaugccuagaccaacgug

SEQ ID NO: 1524114 - RNA, 19 nt, Artificial Sequence
  Description of Artificial Sequence: Synthetic oligonucleotide
  Sense strand starting at position 3841 of SEQ ID NO: 1244937
augcuaugugugucauguu

SEQ ID NO: 1524115 - RNA, 19 nt, Artificial Sequence
  Description of Artificial Sequence: Synthetic oligonucleotide
  Antisense strand to SEQ ID NO: 1524114
aacaugacacacauagcau

SEQ ID NO: 1524116 - RNA, 19 nt, Artificial Sequence
  Description of Artificial Sequence: Synthetic oligonucleotide
  Sense strand starting at position 3846 of SEQ ID NO: 1244937
augugugucauguuagcuu

SEQ ID NO: 1524117 - RNA, 19 nt, Artificial Sequence
  Description of Artificial Sequence: Synthetic oligonucleotide
  Antisense strand to SEQ ID NO: 1524116
aagcuaacaugacacacau

SEQ ID NO: 1524118 - RNA, 19 nt, Artificial Sequence
  Description of Artificial Sequence: Synthetic oligonucleotide
  Sense strand starting at position 1044 of SEQ ID NO: 1244938
gggcgaucugacgacuaag

SEQ ID NO: 1524119 - RNA, 19 nt, Artificial Sequence
  Description of Artificial Sequence: Synthetic oligonucleotide
  Antisense strand to SEQ ID NO: 1524118
cuuagucgucagaucgccc

SEQ ID NO: 1524120 - RNA, 19 nt, Artificial Sequence
  Description of Artificial Sequence: Synthetic oligonucleotide
  Sense strand starting at position 1047 of SEQ ID NO: 1244938
cgaucugacgacuaaguga

SEQ ID NO: 1524121 - RNA, 19 nt, Artificial Sequence
  Description of Artificial Sequence: Synthetic oligonucleotide
  Antisense strand to SEQ ID NO: 1524120
ucacuuagucgucagaucg

SEQ ID NO: 1524122 - RNA, 19 nt, Artificial Sequence
  Description of Artificial Sequence: Synthetic oligonucleotide
  Sense strand starting at position 1292 of SEQ ID NO: 1244938
cagcuuuccugggugauug

SEQ ID NO: 1524123 - RNA, 19 nt, Artificial Sequence
  Description of Artificial Sequence: Synthetic oligonucleotide
  Antisense strand to SEQ ID NO: 1524122
caaucacccaggaaagcug

SEQ ID NO: 1524124 - RNA, 19 nt, Artificial Sequence
  Description of Artificial Sequence: Synthetic oligonucleotide
  Sense strand starting at position 1302 of SEQ ID NO: 1244938
gggugauugggagacguuu

SEQ ID NO: 1524125 - RNA, 19 nt, Artificial Sequence
  Description of Artificial Sequence: Synthetic oligonucleotide
  Antisense strand to SEQ ID NO: 1524124
aaacgucucccaaucaccc

SEQ ID NO: 1524126 - RNA, 19 nt, Artificial Sequence
  Description of Artificial Sequence: Synthetic oligonucleotide
  Sense strand starting at position 1352 of SEQ ID NO: 1244938
gaggaugaucuacgaauuc

SEQ ID NO: 1524127 - RNA, 19 nt, Artificial Sequence
  Description of Artificial Sequence: Synthetic oligonucleotide
  Antisense strand to SEQ ID NO: 1524126
gaauucguagaucauccuc

SEQ ID NO: 1524128 - RNA, 19 nt, Artificial Sequence
  Description of Artificial Sequence: Synthetic oligonucleotide
  Sense strand starting at position 1433 of SEQ ID NO: 1244938
acagcagagagguguguuu

SEQ ID NO: 1524129 - RNA, 19 nt, Artificial Sequence
  Description of Artificial Sequence: Synthetic oligonucleotide
  Antisense strand to SEQ ID NO: 1524128
aaacacaccucucugcugu

SEQ ID NO: 1524130 - RNA, 19 nt, Artificial Sequence
  Description of Artificial Sequence: Synthetic oligonucleotide
  Sense strand starting at position 1775 of SEQ ID NO: 1244938
aagaaugggcuuuaguauc

SEQ ID NO: 1524131 - RNA, 19 nt, Artificial Sequence
  Description of Artificial Sequence: Synthetic oligonucleotide
  Antisense strand to SEQ ID NO: 1524130
gauacuaaagcccauucuu

SEQ ID NO: 1524132 - RNA, 19 nt, Artificial Sequence
  Description of Artificial Sequence: Synthetic oligonucleotide
  Sense strand starting at position 1781 of SEQ ID NO: 1244938
gggcuuuaguaucugacau

SEQ ID NO: 1524133 - RNA, 19 nt, Artificial Sequence
  Description of Artificial Sequence: Synthetic oligonucleotide
  Antisense strand to SEQ ID NO: 1524132
augucagauacuaaagccc

SEQ ID NO: 1524134 - RNA, 19 nt, Artificial Sequence
  Description of Artificial Sequence: Synthetic oligonucleotide
  Sense strand starting at position 2204 of SEQ ID NO: 1244938
gccuaugggauacagaguu

SEQ ID NO: 1524135 - RNA, 19 nt, Artificial Sequence
  Description of Artificial Sequence: Synthetic oligonucleotide
  Antisense strand to SEQ ID NO: 1524134
aacucuguaucccauaggc

SEQ ID NO: 1524136 - RNA, 19 nt, Artificial Sequence
  Description of Artificial Sequence: Synthetic oligonucleotide
  Sense strand starting at position 2212 of SEQ ID NO: 1244938
gauacagaguucucuuuga

SEQ ID NO: 1524137 - RNA, 19 nt, Artificial Sequence
  Description of Artificial Sequence: Synthetic oligonucleotide
  Antisense strand to SEQ ID NO: 1524136
ucaaagagaacucuguauc

SEQ ID NO: 1524138 - RNA, 19 nt, Artificial Sequence
  Description of Artificial Sequence: Synthetic oligonucleotide
  Sense strand starting at position 2650 of SEQ ID NO: 1244938
ugguucaguccaggagaca

SEQ ID NO: 1524139 - RNA, 19 nt, Artificial Sequence
  Description of Artificial Sequence: Synthetic oligonucleotide
  Antisense strand to SEQ ID NO: 1524138
ugucuccuggacugaacca

SEQ ID NO: 1524140 - RNA, 19 nt, Artificial Sequence
  Description of Artificial Sequence: Synthetic oligonucleotide
  Sense strand starting at position 2785 of SEQ ID NO: 1244938
cuuucuggugucugaagua

SEQ ID NO: 1524141 - RNA, 19 nt, Artificial Sequence
  Description of Artificial Sequence: Synthetic oligonucleotide
  Antisense strand to SEQ ID NO: 1524140
uacuucagacaccagaaag

SEQ ID NO: 1524142 - RNA, 19 nt, Artificial Sequence
  Description of Artificial Sequence: Synthetic oligonucleotide
  Sense strand starting at position 2790 of SEQ ID NO: 1244938
uggugucugaaguacacau

SEQ ID NO: 1524143 - RNA, 19 nt, Artificial Sequence
  Description of Artificial Sequence: Synthetic oligonucleotide
  Antisense strand to SEQ ID NO: 1524142
auguguacuucagacacca

SEQ ID NO: 1524144 - RNA, 19 nt, Artificial Sequence
  Description of Artificial Sequence: Synthetic oligonucleotide
  Sense strand starting at position 2897 of SEQ ID NO: 1244938
cauggacauuuguaaauag

SEQ ID NO: 1524145 - RNA, 19 nt, Artificial Sequence
  Description of Artificial Sequence: Synthetic oligonucleotide
  Antisense strand to SEQ ID NO: 1524144
cuauuuacaaauguccaug

SEQ ID NO: 1524146 - RNA, 19 nt, Artificial Sequence
  Description of Artificial Sequence: Synthetic oligonucleotide
  Sense strand starting at position 2925 of SEQ ID NO: 1244938
gggucaauuucggaaggca

SEQ ID NO: 1524147 - RNA, 19 nt, Artificial Sequence
  Description of Artificial Sequence: Synthetic oligonucleotide
  Antisense strand to SEQ ID NO: 1524146
ugccuuccgaaauugaccc

SEQ ID NO: 1524148 - RNA, 19 nt, Artificial Sequence
  Description of Artificial Sequence: Synthetic oligonucleotide
  Sense strand starting at position 2976 of SEQ ID NO: 1244938
gcauuauuagaguauguuc

SEQ ID NO: 1524149 - RNA, 19 nt, Artificial Sequence
  Description of Artificial Sequence: Synthetic oligonucleotide
  Antisense strand to SEQ ID NO: 1524148
gaacauacucuaauaaugc

SEQ ID NO: 1524150 - RNA, 19 nt, Artificial Sequence
  Description of Artificial Sequence: Synthetic oligonucleotide
  Sense strand starting at position 2979 of SEQ ID NO: 1244938
uuauuagaguauguucuga

SEQ ID NO: 1524151 - RNA, 19 nt, Artificial Sequence
  Description of Artificial Sequence: Synthetic oligonucleotide
  Antisense strand to SEQ ID NO: 1524150
ucagaacauacucuaauaa

SEQ ID NO: 1524152 - RNA, 19 nt, Artificial Sequence
  Description of Artificial Sequence: Synthetic oligonucleotide
  Sense strand starting at position 2981 of SEQ ID NO: 1244938
auuagaguauguucugaag

SEQ ID NO: 1524153 - RNA, 19 nt, Artificial Sequence
  Description of Artificial Sequence: Synthetic oligonucleotide
  Antisense strand to SEQ ID NO: 1524152
cuucagaacauacucuaau

SEQ ID NO: 1524154 - RNA, 19 nt, Artificial Sequence
  Description of Artificial Sequence: Synthetic oligonucleotide
  Sense strand starting at position 2987 of SEQ ID NO: 1244938
guauguucugaagguaagu

SEQ ID NO: 1524155 - RNA, 19 nt, Artificial Sequence
  Description of Artificial Sequence: Synthetic oligonucleotide
  Antisense strand to SEQ ID NO: 1524154
acuuaccuucagaacauac

SEQ ID NO: 1524156 - RNA, 19 nt, Artificial Sequence
  Description of Artificial Sequence: Synthetic oligonucleotide
  Sense strand starting at position 3001 of SEQ ID NO: 1244938
uaaguucuuggccgagaug

SEQ ID NO: 1524157 - RNA, 19 nt, Artificial Sequence
  Description of Artificial Sequence: Synthetic oligonucleotide
  Antisense strand to SEQ ID NO: 1524156
caucucggccaagaacuua

SEQ ID NO: 1524158 - RNA, 19 nt, Artificial Sequence
  Description of Artificial Sequence: Synthetic oligonucleotide
  Sense strand starting at position 3040 of SEQ ID NO: 1244938
cuugaaagcuguccacuga

SEQ ID NO: 1524159 - RNA, 19 nt, Artificial Sequence
  Description of Artificial Sequence: Synthetic oligonucleotide
  Antisense strand to SEQ ID NO: 1524158
ucaguggacagcuuucaag

SEQ ID NO: 1524160 - RNA, 19 nt, Artificial Sequence
  Description of Artificial Sequence: Synthetic oligonucleotide
  Sense strand starting at position 3041 of SEQ ID NO: 1244938
uugaaagcuguccacugaa

SEQ ID NO: 1524161 - RNA, 19 nt, Artificial Sequence
  Description of Artificial Sequence: Synthetic oligonucleotide
  Antisense strand to SEQ ID NO: 1524160
uucaguggacagcuuucaa

SEQ ID NO: 1524162 - RNA, 19 nt, Artificial Sequence
  Description of Artificial Sequence: Synthetic oligonucleotide
  Sense strand starting at position 3087 of SEQ ID NO: 1244938
uggugucaggaauguuaau

SEQ ID NO: 1524163 - RNA, 19 nt, Artificial Sequence
  Description of Artificial Sequence: Synthetic oligonucleotide
  Antisense strand to SEQ ID NO: 1524162
auuaacauuccugacacca

SEQ ID NO: 1524164 - RNA, 19 nt, Artificial Sequence
  Description of Artificial Sequence: Synthetic oligonucleotide
  Sense strand starting at position 3093 of SEQ ID NO: 1244938
caggaauguuaaucaggua

SEQ ID NO: 1524165 - RNA, 19 nt, Artificial Sequence
  Description of Artificial Sequence: Synthetic oligonucleotide
  Antisense strand to SEQ ID NO: 1524164
uaccugauuaacauuccug

SEQ ID NO: 1524166 - RNA, 19 nt, Artificial Sequence
  Description of Artificial Sequence: Synthetic oligonucleotide
  Sense strand starting at position 3123 of SEQ ID NO: 1244938
agucguuuggcgaaagagu

SEQ ID NO: 1524167 - RNA, 19 nt, Artificial Sequence
  Description of Artificial Sequence: Synthetic oligonucleotide
  Antisense strand to SEQ ID NO: 1524166
acucuuucgccaaacgacu

SEQ ID NO: 1524168 - RNA, 19 nt, Artificial Sequence
  Description of Artificial Sequence: Synthetic oligonucleotide
  Sense strand starting at position 3124 of SEQ ID NO: 1244938
gucguuuggcgaaagaguu

SEQ ID NO: 1524169 - RNA, 19 nt, Artificial Sequence
  Description of Artificial Sequence: Synthetic oligonucleotide
  Antisense strand to SEQ ID NO: 1524168
aacucuuucgccaaacgac

SEQ ID NO: 1524170 - RNA, 19 nt, Artificial Sequence
  Description of Artificial Sequence: Synthetic oligonucleotide
  Sense strand starting at position 3125 of SEQ ID NO: 1244938
ucguuuggcgaaagaguuu

SEQ ID NO: 1524171 - RNA, 19 nt, Artificial Sequence
  Description of Artificial Sequence: Synthetic oligonucleotide
  Antisense strand to SEQ ID NO: 1524170
aaacucuuucgccaaacga

SEQ ID NO: 1524172 - RNA, 19 nt, Artificial Sequence
  Description of Artificial Sequence: Synthetic oligonucleotide
  Sense strand starting at position 3137 of SEQ ID NO: 1244938
agaguuugcugucuaagau

SEQ ID NO: 1524173 - RNA, 19 nt, Artificial Sequence
  Description of Artificial Sequence: Synthetic oligonucleotide
  Antisense strand to SEQ ID NO: 1524172
aucuuagacagcaaacucu

SEQ ID NO: 1524174 - RNA, 19 nt, Artificial Sequence
  Description of Artificial Sequence: Synthetic oligonucleotide
  Sense strand starting at position 3138 of SEQ ID NO: 1244938
gaguuugcugucuaagauu

SEQ ID NO: 1524175 - RNA, 19 nt, Artificial Sequence
  Description of Artificial Sequence: Synthetic oligonucleotide
  Antisense strand to SEQ ID NO: 1524174
aaucuuagacagcaaacuc

SEQ ID NO: 1524176 - RNA, 19 nt, Artificial Sequence
  Description of Artificial Sequence: Synthetic oligonucleotide
  Sense strand starting at position 3147 of SEQ ID NO: 1244938
gucuaagauuccuucuggu

SEQ ID NO: 1524177 - RNA, 19 nt, Artificial Sequence
  Description of Artificial Sequence: Synthetic oligonucleotide
  Antisense strand to SEQ ID NO: 1524176
accagaaggaaucuuagac

SEQ ID NO: 1524178 - RNA, 19 nt, Artificial Sequence
  Description of Artificial Sequence: Synthetic oligonucleotide
  Sense strand starting at position 3153 of SEQ ID NO: 1244938
gauuccuucugguugaggu

SEQ ID NO: 1524179 - RNA, 19 nt, Artificial Sequence
  Description of Artificial Sequence: Synthetic oligonucleotide
  Antisense strand to SEQ ID NO: 1524178
accucaaccagaaggaauc

SEQ ID NO: 1524180 - RNA, 19 nt, Artificial Sequence
  Description of Artificial Sequence: Synthetic oligonucleotide
  Sense strand starting at position 3363 of SEQ ID NO: 1244938
ugaacaaugccucggcaca

SEQ ID NO: 1524181 - RNA, 19 nt, Artificial Sequence
  Description of Artificial Sequence: Synthetic oligonucleotide
  Antisense strand to SEQ ID NO: 1524180
ugugccgaggcauuguuca

SEQ ID NO: 1524182 - RNA, 19 nt, Artificial Sequence
  Description of Artificial Sequence: Synthetic oligonucleotide
  Sense strand starting at position 3418 of SEQ ID NO: 1244938
aggagauucuggucacuga

SEQ ID NO: 1524183 - RNA, 19 nt, Artificial Sequence
  Description of Artificial Sequence: Synthetic oligonucleotide
  Antisense strand to SEQ ID NO: 1524182
ucagugaccagaaucuccu

SEQ ID NO: 1524184 - RNA, 19 nt, Artificial Sequence
  Description of Artificial Sequence: Synthetic oligonucleotide
  Sense strand starting at position 3517 of SEQ ID NO: 1244938
ccugaaucaugcgugaaua

SEQ ID NO: 1524185 - RNA, 19 nt, Artificial Sequence
  Description of Artificial Sequence: Synthetic oligonucleotide
  Antisense strand to SEQ ID NO: 1524184
uauucacgcaugauucagg

SEQ ID NO: 1524186 - RNA, 19 nt, Artificial Sequence
  Description of Artificial Sequence: Synthetic oligonucleotide
  Sense strand starting at position 3518 of SEQ ID NO: 1244938
cugaaucaugcgugaauac

SEQ ID NO: 1524187 - RNA, 19 nt, Artificial Sequence
  Description of Artificial Sequence: Synthetic oligonucleotide
  Antisense strand to SEQ ID NO: 1524186
guauucacgcaugauucag

SEQ ID NO: 1524188 - RNA, 19 nt, Artificial Sequence
  Description of Artificial Sequence: Synthetic oligonucleotide
  Sense strand starting at position 3519 of SEQ ID NO: 1244938
ugaaucaugcgugaauaca

SEQ ID NO: 1524189 - RNA, 19 nt, Artificial Sequence
  Description of Artificial Sequence: Synthetic oligonucleotide
  Antisense strand to SEQ ID NO: 1524188
uguauucacgcaugauuca

SEQ ID NO: 1524190 - RNA, 19 nt, Artificial Sequence
  Description of Artificial Sequence: Synthetic oligonucleotide
  Sense strand starting at position 3572 of SEQ ID NO: 1244938
cagagaagaucuguguaag

SEQ ID NO: 1524191 - RNA, 19 nt, Artificial Sequence
  Description of Artificial Sequence: Synthetic oligonucleotide
  Antisense strand to SEQ ID NO: 1524190
cuuacacagaucuucucug

SEQ ID NO: 1524192 - RNA, 19 nt, Artificial Sequence
  Description of Artificial Sequence: Synthetic oligonucleotide
  Sense strand starting at position 3573 of SEQ ID NO: 1244938
agagaagaucuguguaagc

SEQ ID NO: 1524193 - RNA, 19 nt, Artificial Sequence
  Description of Artificial Sequence: Synthetic oligonucleotide
  Antisense strand to SEQ ID NO: 1524192
gcuuacacagaucuucucu

SEQ ID NO: 1524194 - RNA, 19 nt, Artificial Sequence
  Description of Artificial Sequence: Synthetic oligonucleotide
  Sense strand starting at position 3575 of SEQ ID NO: 1244938
agaagaucuguguaagcuc

SEQ ID NO: 1524195 - RNA, 19 nt, Artificial Sequence
  Description of Artificial Sequence: Synthetic oligonucleotide
  Antisense strand to SEQ ID NO: 1524194
gagcuuacacagaucuucu

SEQ ID NO: 1524196 - RNA, 19 nt, Artificial Sequence
  Description of Artificial Sequence: Synthetic oligonucleotide
  Sense strand starting at position 3692 of SEQ ID NO: 1244938
gggcucagggacugcuaua

SEQ ID NO: 1524197 - RNA, 19 nt, Artificial Sequence
  Description of Artificial Sequence: Synthetic oligonucleotide
  Antisense strand to SEQ ID NO: 1524196
uauagcagucccugagccc

SEQ ID NO: 1524198 - RNA, 19 nt, Artificial Sequence
  Description of Artificial Sequence: Synthetic oligonucleotide
  Sense strand starting at position 393 of SEQ ID NO: 1244939
ccauuuccauaggaaguua

SEQ ID NO: 1524199 - RNA, 19 nt, Artificial Sequence
  Description of Artificial Sequence: Synthetic oligonucleotide
  Antisense strand to SEQ ID NO: 1524198
uaacuuccuauggaaaugg

SEQ ID NO: 1524200 - RNA, 19 nt, Artificial Sequence
  Description of Artificial Sequence: Synthetic oligonucleotide
  Sense strand starting at position 401 of SEQ ID NO: 1244939
auaggaaguuagggagauu

SEQ ID NO: 1524201 - RNA, 19 nt, Artificial Sequence
  Description of Artificial Sequence: Synthetic oligonucleotide
  Antisense strand to SEQ ID NO: 1524200
aaucucccuaacuuccuau

SEQ ID NO: 1524202 - RNA, 19 nt, Artificial Sequence
  Description of Artificial Sequence: Synthetic oligonucleotide
  Sense strand starting at position 413 of SEQ ID NO: 1244939
ggagauuacuguuccagca

SEQ ID NO: 1524203 - RNA, 19 nt, Artificial Sequence
  Description of Artificial Sequence: Synthetic oligonucleotide
  Antisense strand to SEQ ID NO: 1524202
ugcuggaacaguaaucucc

SEQ ID NO: 1524204 - RNA, 19 nt, Artificial Sequence
  Description of Artificial Sequence: Synthetic oligonucleotide
  Sense strand starting at position 465 of SEQ ID NO: 1244939
augagaggcuucucaaguc

SEQ ID NO: 1524205 - RNA, 19 nt, Artificial Sequence
  Description of Artificial Sequence: Synthetic oligonucleotide
  Antisense strand to SEQ ID NO: 1524204
gacuugagaagccucucau

SEQ ID NO: 1524206 - RNA, 19 nt, Artificial Sequence
  Description of Artificial Sequence: Synthetic oligonucleotide
  Sense strand starting at position 536 of SEQ ID NO: 1244939
gccagaauggcucagagag

SEQ ID NO: 1524207 - RNA, 19 nt, Artificial Sequence
  Description of Artificial Sequence: Synthetic oligonucleotide
  Antisense strand to SEQ ID NO: 1524206
cucucugagccauucuggc

SEQ ID NO: 1524208 - RNA, 19 nt, Artificial Sequence
  Description of Artificial Sequence: Synthetic oligonucleotide
  Sense strand starting at position 616 of SEQ ID NO: 1244939
gggccauggcuguaaacca

SEQ ID NO: 1524209 - RNA, 19 nt, Artificial Sequence
  Description of Artificial Sequence: Synthetic oligonucleotide
  Antisense strand to SEQ ID NO: 1524208
ugguuuacagccauggccc

SEQ ID NO: 1524210 - RNA, 19 nt, Artificial Sequence
  Description of Artificial Sequence: Synthetic oligonucleotide
  Sense strand starting at position 760 of SEQ ID NO: 1244939
gccugagucuuucucugac

SEQ ID NO: 1524211 - RNA, 19 nt, Artificial Sequence
  Description of Artificial Sequence: Synthetic oligonucleotide
  Antisense strand to SEQ ID NO: 1524210
gucagagaaagacucaggc

SEQ ID NO: 1524212 - RNA, 19 nt, Artificial Sequence
  Description of Artificial Sequence: Synthetic oligonucleotide
  Sense strand starting at position 763 of SEQ ID NO: 1244939
ugagucuuucucugacuca

SEQ ID NO: 1524213 - RNA, 19 nt, Artificial Sequence
  Description of Artificial Sequence: Synthetic oligonucleotide
  Antisense strand to SEQ ID NO: 1524212
ugagucagagaaagacuca

SEQ ID NO: 1524214 - RNA, 19 nt, Artificial Sequence
  Description of Artificial Sequence: Synthetic oligonucleotide
  Sense strand starting at position 806 of SEQ ID NO: 1244939
aggaguguucccggccaca

SEQ ID NO: 1524215 - RNA, 19 nt, Artificial Sequence
  Description of Artificial Sequence: Synthetic oligonucleotide
  Antisense strand to SEQ ID NO: 1524214
uguggccgggaacacuccu

SEQ ID NO: 1524216 - RNA, 19 nt, Artificial Sequence
  Description of Artificial Sequence: Synthetic oligonucleotide
  Sense strand starting at position 809 of SEQ ID NO: 1244939
aguguucccggccacagaa

SEQ ID NO: 1524217 - RNA, 19 nt, Artificial Sequence
  Description of Artificial Sequence: Synthetic oligonucleotide
  Antisense strand to SEQ ID NO: 1524216
uucuguggccgggaacacu

SEQ ID NO: 1524218 - RNA, 19 nt, Artificial Sequence
  Description of Artificial Sequence: Synthetic oligonucleotide
  Sense strand starting at position 828 of SEQ ID NO: 1244939
agccgauucccucaucuca

SEQ ID NO: 1524219 - RNA, 19 nt, Artificial Sequence
  Description of Artificial Sequence: Synthetic oligonucleotide
  Antisense strand to SEQ ID NO: 1524218
ugagaugagggaaucggcu

SEQ ID NO: 1524220 - RNA, 19 nt, Artificial Sequence
  Description of Artificial Sequence: Synthetic oligonucleotide
  Sense strand starting at position 1183 of SEQ ID NO: 1244939
cauggaugaugcuuuggaa

SEQ ID NO: 1524221 - RNA, 19 nt, Artificial Sequence
  Description of Artificial Sequence: Synthetic oligonucleotide
  Antisense strand to SEQ ID NO: 1524220
uuccaaagcaucauccaug

SEQ ID NO: 1524222 - RNA, 19 nt, Artificial Sequence
  Description of Artificial Sequence: Synthetic oligonucleotide
  Sense strand starting at position 1214 of SEQ ID NO: 1244939
gggugcuagucuucccuuu

SEQ ID NO: 1524223 - RNA, 19 nt, Artificial Sequence
  Description of Artificial Sequence: Synthetic oligonucleotide
  Antisense strand to SEQ ID NO: 1524222
aaagggaagacuagcaccc

SEQ ID NO: 1524224 - RNA, 19 nt, Artificial Sequence
  Description of Artificial Sequence: Synthetic oligonucleotide
  Sense strand starting at position 1221 of SEQ ID NO: 1244939
agucuucccuuucugaaga

SEQ ID NO: 1524225 - RNA, 19 nt, Artificial Sequence
  Description of Artificial Sequence: Synthetic oligonucleotide
  Antisense strand to SEQ ID NO: 1524224
ucuucagaaagggaagacu

SEQ ID NO: 1524226 - RNA, 19 nt, Artificial Sequence
  Description of Artificial Sequence: Synthetic oligonucleotide
  Sense strand starting at position 1314 of SEQ ID NO: 1244939
agcagaaucguugaugcgu

SEQ ID NO: 1524227 - RNA, 19 nt, Artificial Sequence
  Description of Artificial Sequence: Synthetic oligonucleotide
  Antisense strand to SEQ ID NO: 1524226
acgcaucaacgauucugcu

SEQ ID NO: 1524228 - RNA, 19 nt, Artificial Sequence
  Description of Artificial Sequence: Synthetic oligonucleotide
  Sense strand starting at position 1671 of SEQ ID NO: 1244939
gcaccucucgcucaaacaa

SEQ ID NO: 1524229 - RNA, 19 nt, Artificial Sequence
  Description of Artificial Sequence: Synthetic oligonucleotide
  Antisense strand to SEQ ID NO: 1524228
uuguuugagcgagaggugc

SEQ ID NO: 1524230 - RNA, 19 nt, Artificial Sequence
  Description of Artificial Sequence: Synthetic oligonucleotide
  Sense strand starting at position 1757 of SEQ ID NO: 1244939
ggaugucuauggucuccaa

SEQ ID NO: 1524231 - RNA, 19 nt, Artificial Sequence
  Description of Artificial Sequence: Synthetic oligonucleotide
  Antisense strand to SEQ ID NO: 1524230
uuggagaccauagacaucc

SEQ ID NO: 1524232 - RNA, 19 nt, Artificial Sequence
  Description of Artificial Sequence: Synthetic oligonucleotide
  Sense strand starting at position 1760 of SEQ ID NO: 1244939
ugucuauggucuccaagaa

SEQ ID NO: 1524233 - RNA, 19 nt, Artificial Sequence
  Description of Artificial Sequence: Synthetic oligonucleotide
  Antisense strand to SEQ ID NO: 1524232
uucuuggagaccauagaca

SEQ ID NO: 1524234 - RNA, 19 nt, Artificial Sequence
  Description of Artificial Sequence: Synthetic oligonucleotide
  Sense strand starting at position 1761 of SEQ ID NO: 1244939
gucuauggucuccaagaau

SEQ ID NO: 1524235 - RNA, 19 nt, Artificial Sequence
  Description of Artificial Sequence: Synthetic oligonucleotide
  Antisense strand to SEQ ID NO: 1524234
auucuuggagaccauagac

SEQ ID NO: 1524236 - RNA, 19 nt, Artificial Sequence
  Description of Artificial Sequence: Synthetic oligonucleotide
  Sense strand starting at position 1775 of SEQ ID NO: 1244939
agaauaagcuaagaauaag

SEQ ID NO: 1524237 - RNA, 19 nt, Artificial Sequence
  Description of Artificial Sequence: Synthetic oligonucleotide
  Antisense strand to SEQ ID NO: 1524236
cuuauucuuagcuuauucu

SEQ ID NO: 1524238 - RNA, 19 nt, Artificial Sequence
  Description of Artificial Sequence: Synthetic oligonucleotide
  Sense strand starting at position 1853 of SEQ ID NO: 1244939
ugaaccuuucggcaauguu

SEQ ID NO: 1524239 - RNA, 19 nt, Artificial Sequence
  Description of Artificial Sequence: Synthetic oligonucleotide
  Antisense strand to SEQ ID NO: 1524238
aacauugccgaaagguuca

SEQ ID NO: 1524240 - RNA, 19 nt, Artificial Sequence
  Description of Artificial Sequence: Synthetic oligonucleotide
  Sense strand starting at position 1861 of SEQ ID NO: 1244939
ucggcaauguucuuuguca

SEQ ID NO: 1524241 - RNA, 19 nt, Artificial Sequence
  Description of Artificial Sequence: Synthetic oligonucleotide
  Antisense strand to SEQ ID NO: 1524240
ugacaaagaacauugccga

SEQ ID NO: 1524242 - RNA, 19 nt, Artificial Sequence
  Description of Artificial Sequence: Synthetic oligonucleotide
  Sense strand starting at position 1862 of SEQ ID NO: 1244939
cggcaauguucuuugucag

SEQ ID NO: 1524243 - RNA, 19 nt, Artificial Sequence
  Description of Artificial Sequence: Synthetic oligonucleotide
  Antisense strand to SEQ ID NO: 1524242
cugacaaagaacauugccg

SEQ ID NO: 1524244 - RNA, 19 nt, Artificial Sequence
  Description of Artificial Sequence: Synthetic oligonucleotide
  Sense strand starting at position 1967 of SEQ ID NO: 1244939
ucgacaaacgcugaaucua

SEQ ID NO: 1524245 - RNA, 19 nt, Artificial Sequence
  Description of Artificial Sequence: Synthetic oligonucleotide
  Antisense strand to SEQ ID NO: 1524244
uagauucagcguuugucga

SEQ ID NO: 1524246 - RNA, 19 nt, Artificial Sequence
  Description of Artificial Sequence: Synthetic oligonucleotide
  Sense strand starting at position 2124 of SEQ ID NO: 1244939
gaguguacccugcaccuaa

SEQ ID NO: 1524247 - RNA, 19 nt, Artificial Sequence
  Description of Artificial Sequence: Synthetic oligonucleotide
  Antisense strand to SEQ ID NO: 1524246
uuaggugcaggguacacuc

SEQ ID NO: 1524248 - RNA, 19 nt, Artificial Sequence
  Description of Artificial Sequence: Synthetic oligonucleotide
  Sense strand starting at position 2136 of SEQ ID NO: 1244939
caccuaagcccguggugau

SEQ ID NO: 1524249 - RNA, 19 nt, Artificial Sequence
  Description of Artificial Sequence: Synthetic oligonucleotide
  Antisense strand to SEQ ID NO: 1524248
aucaccacgggcuuaggug

SEQ ID NO: 1524250 - RNA, 19 nt, Artificial Sequence
  Description of Artificial Sequence: Synthetic oligonucleotide
  Sense strand starting at position 2217 of SEQ ID NO: 1244939
cgaguguuggcugugugau

SEQ ID NO: 1524251 - RNA, 19 nt, Artificial Sequence
  Description of Artificial Sequence: Synthetic oligonucleotide
  Antisense strand to SEQ ID NO: 1524250
aucacacagccaacacucg

SEQ ID NO: 1524252 - RNA, 19 nt, Artificial Sequence
  Description of Artificial Sequence: Synthetic oligonucleotide
  Sense strand starting at position 2218 of SEQ ID NO: 1244939
gaguguuggcugugugaug

SEQ ID NO: 1524253 - RNA, 19 nt, Artificial Sequence
  Description of Artificial Sequence: Synthetic oligonucleotide
  Antisense strand to SEQ ID NO: 1524252
caucacacagccaacacuc

SEQ ID NO: 1524254 - RNA, 19 nt, Artificial Sequence
  Description of Artificial Sequence: Synthetic oligonucleotide
  Sense strand starting at position 2229 of SEQ ID NO: 1244939
gugugauggagauggugau

SEQ ID NO: 1524255 - RNA, 19 nt, Artificial Sequence
  Description of Artificial Sequence: Synthetic oligonucleotide
  Antisense strand to SEQ ID NO: 1524254
aucaccaucuccaucacac

SEQ ID NO: 1524256 - RNA, 19 nt, Artificial Sequence
  Description of Artificial Sequence: Synthetic oligonucleotide
  Sense strand starting at position 2241 of SEQ ID NO: 1244939
uggugauucugguuuacac

SEQ ID NO: 1524257 - RNA, 19 nt, Artificial Sequence
  Description of Artificial Sequence: Synthetic oligonucleotide
  Antisense strand to SEQ ID NO: 1524256
guguaaaccagaaucacca

SEQ ID NO: 1524258 - RNA, 19 nt, Artificial Sequence
  Description of Artificial Sequence: Synthetic oligonucleotide
  Sense strand starting at position 2243 of SEQ ID NO: 1244939
gugauucugguuuacacaa

SEQ ID NO: 1524259 - RNA, 19 nt, Artificial Sequence
  Description of Artificial Sequence: Synthetic oligonucleotide
  Antisense strand to SEQ ID NO: 1524258
uuguguaaaccagaaucac

SEQ ID NO: 1524260 - RNA, 19 nt, Artificial Sequence
  Description of Artificial Sequence: Synthetic oligonucleotide
  Sense strand starting at position 2245 of SEQ ID NO: 1244939
gauucugguuuacacaaga

SEQ ID NO: 1524261 - RNA, 19 nt, Artificial Sequence
  Description of Artificial Sequence: Synthetic oligonucleotide
  Antisense strand to SEQ ID NO: 1524260
ucuuguguaaaccagaauc

SEQ ID NO: 1524262 - RNA, 19 nt, Artificial Sequence
  Description of Artificial Sequence: Synthetic oligonucleotide
  Sense strand starting at position 2327 of SEQ ID NO: 1244939
cgugguaugaucugagucu

SEQ ID NO: 1524263 - RNA, 19 nt, Artificial Sequence
  Description of Artificial Sequence: Synthetic oligonucleotide
  Antisense strand to SEQ ID NO: 1524262
agacucagaucauaccacg

SEQ ID NO: 1524264 - RNA, 19 nt, Artificial Sequence
  Description of Artificial Sequence: Synthetic oligonucleotide
  Sense strand starting at position 2334 of SEQ ID NO: 1244939
ugaucugagucuuucucaa

SEQ ID NO: 1524265 - RNA, 19 nt, Artificial Sequence
  Description of Artificial Sequence: Synthetic oligonucleotide
  Antisense strand to SEQ ID NO: 1524264
uugagaaagacucagauca

SEQ ID NO: 1524266 - RNA, 19 nt, Artificial Sequence
  Description of Artificial Sequence: Synthetic oligonucleotide
  Sense strand starting at position 2563 of SEQ ID NO: 1244939
gccagauuauucucaguag

SEQ ID NO: 1524267 - RNA, 19 nt, Artificial Sequence
  Description of Artificial Sequence: Synthetic oligonucleotide
  Antisense strand to SEQ ID NO: 1524266
cuacugagaauaaucuggc

SEQ ID NO: 1524268 - RNA, 19 nt, Artificial Sequence
  Description of Artificial Sequence: Synthetic oligonucleotide
  Sense strand starting at position 3054 of SEQ ID NO: 1244939
ugcauuggccaucagacaa

SEQ ID NO: 1524269 - RNA, 19 nt, Artificial Sequence
  Description of Artificial Sequence: Synthetic oligonucleotide
  Antisense strand to SEQ ID NO: 1524268
uugucugauggccaaugca

SEQ ID NO: 1524270 - RNA, 19 nt, Artificial Sequence
  Description of Artificial Sequence: Synthetic oligonucleotide
  Sense strand starting at position 3117 of SEQ ID NO: 1244939
gggugcuugugagcuugaa

SEQ ID NO: 1524271 - RNA, 19 nt, Artificial Sequence
  Description of Artificial Sequence: Synthetic oligonucleotide
  Antisense strand to SEQ ID NO: 1524270
uucaagcucacaagcaccc

SEQ ID NO: 1524272 - RNA, 19 nt, Artificial Sequence
  Description of Artificial Sequence: Synthetic oligonucleotide
  Sense strand starting at position 3627 of SEQ ID NO: 1244939
acaguacuggccuggcauu

SEQ ID NO: 1524273 - RNA, 19 nt, Artificial Sequence
  Description of Artificial Sequence: Synthetic oligonucleotide
  Antisense strand to SEQ ID NO: 1524272
aaugccaggccaguacugu

SEQ ID NO: 1524274 - RNA, 19 nt, Artificial Sequence
  Description of Artificial Sequence: Synthetic oligonucleotide
  Sense strand starting at position 3819 of SEQ ID NO: 1244939
agauaacuaucagugucau

SEQ ID NO: 1524275 - RNA, 19 nt, Artificial Sequence
  Description of Artificial Sequence: Synthetic oligonucleotide
  Antisense strand to SEQ ID NO: 1524274
augacacugauaguuaucu

SEQ ID NO: 1524276 - RNA, 19 nt, Artificial Sequence
  Description of Artificial Sequence: Synthetic oligonucleotide
  Sense strand starting at position 3825 of SEQ ID NO: 1244939
cuaucagugucauuuccuu

SEQ ID NO: 1524277 - RNA, 19 nt, Artificial Sequence
  Description of Artificial Sequence: Synthetic oligonucleotide
  Antisense strand to SEQ ID NO: 1524276
aaggaaaugacacugauag

SEQ ID NO: 1524278 - RNA, 19 nt, Artificial Sequence
  Description of Artificial Sequence: Synthetic oligonucleotide
  Sense strand starting at position 78 of SEQ ID NO: 1244940
ccuccucacccuuguagua

SEQ ID NO: 1524279 - RNA, 19 nt, Artificial Sequence
  Description of Artificial Sequence: Synthetic oligonucleotide
  Antisense strand to SEQ ID NO: 1524278
uacuacaagggugaggagg

SEQ ID NO: 1524280 - RNA, 19 nt, Artificial Sequence
  Description of Artificial Sequence: Synthetic oligonucleotide
  Sense strand starting at position 217 of SEQ ID NO: 1244940
acaggucuucccugucuca

SEQ ID NO: 1524281 - RNA, 19 nt, Artificial Sequence
  Description of Artificial Sequence: Synthetic oligonucleotide
  Antisense strand to SEQ ID NO: 1524280
ugagacagggaagaccugu

SEQ ID NO: 1524282 - RNA, 19 nt, Artificial Sequence
  Description of Artificial Sequence: Synthetic oligonucleotide
  Sense strand starting at position 229 of SEQ ID NO: 1244940
ugucucagggucugaaaga

SEQ ID NO: 1524283 - RNA, 19 nt, Artificial Sequence
  Description of Artificial Sequence: Synthetic oligonucleotide
  Antisense strand to SEQ ID NO: 1524282
ucuuucagacccugagaca

SEQ ID NO: 1524284 - RNA, 19 nt, Artificial Sequence
  Description of Artificial Sequence: Synthetic oligonucleotide
  Sense strand starting at position 537 of SEQ ID NO: 1244940
ggagcuugucaagggaaca

SEQ ID NO: 1524285 - RNA, 19 nt, Artificial Sequence
  Description of Artificial Sequence: Synthetic oligonucleotide
  Antisense strand to SEQ ID NO: 1524284
uguucccuugacaagcucc

SEQ ID NO: 1524286 - RNA, 19 nt, Artificial Sequence
  Description of Artificial Sequence: Synthetic oligonucleotide
  Sense strand starting at position 615 of SEQ ID NO: 1244940
cuaggugacuguccagaaa

SEQ ID NO: 1524287 - RNA, 19 nt, Artificial Sequence
  Description of Artificial Sequence: Synthetic oligonucleotide
  Antisense strand to SEQ ID NO: 1524286
uuucuggacagucaccuag

SEQ ID NO: 1524288 - RNA, 19 nt, Artificial Sequence
  Description of Artificial Sequence: Synthetic oligonucleotide
  Sense strand starting at position 899 of SEQ ID NO: 1244940
cugugcugugcucuccaaa

SEQ ID NO: 1524289 - RNA, 19 nt, Artificial Sequence
  Description of Artificial Sequence: Synthetic oligonucleotide
  Antisense strand to SEQ ID NO: 1524288
uuuggagagcacagcacag

SEQ ID NO: 1524290 - RNA, 19 nt, Artificial Sequence
  Description of Artificial Sequence: Synthetic oligonucleotide
  Sense strand starting at position 1213 of SEQ ID NO: 1244940
uggccucuggauggugaua

SEQ ID NO: 1524291 - RNA, 19 nt, Artificial Sequence
  Description of Artificial Sequence: Synthetic oligonucleotide
  Antisense strand to SEQ ID NO: 1524290
uaucaccauccagaggcca

SEQ ID NO: 1524292 - RNA, 19 nt, Artificial Sequence
  Description of Artificial Sequence: Synthetic oligonucleotide
  Sense strand starting at position 1282 of SEQ ID NO: 1244940
agggcaauccaccgggaaa

SEQ ID NO: 1524293 - RNA, 19 nt, Artificial Sequence
  Description of Artificial Sequence: Synthetic oligonucleotide
  Antisense strand to SEQ ID NO: 1524292
uuucccgguggauugcccu

SEQ ID NO: 1524294 - RNA, 19 nt, Artificial Sequence
  Description of Artificial Sequence: Synthetic oligonucleotide
  Sense strand starting at position 1295 of SEQ ID NO: 1244940
gggaaagccuccuccgagu

SEQ ID NO: 1524295 - RNA, 19 nt, Artificial Sequence
  Description of Artificial Sequence: Synthetic oligonucleotide
  Antisense strand to SEQ ID NO: 1524294
acucggaggaggcuuuccc

SEQ ID NO: 1524296 - RNA, 19 nt, Artificial Sequence
  Description of Artificial Sequence: Synthetic oligonucleotide
  Sense strand starting at position 1382 of SEQ ID NO: 1244940
gaguuagggucuccaucca

SEQ ID NO: 1524297 - RNA, 19 nt, Artificial Sequence
  Description of Artificial Sequence: Synthetic oligonucleotide
  Antisense strand to SEQ ID NO: 1524296
uggauggagacccuaacuc

SEQ ID NO: 1524298 - RNA, 19 nt, Artificial Sequence
  Description of Artificial Sequence: Synthetic oligonucleotide
  Sense strand starting at position 1545 of SEQ ID NO: 1244940
aggacugcuuguccuuaga

SEQ ID NO: 1524299 - RNA, 19 nt, Artificial Sequence
  Description of Artificial Sequence: Synthetic oligonucleotide
  Antisense strand to SEQ ID NO: 1524298
ucuaaggacaagcaguccu

SEQ ID NO: 1524300 - RNA, 19 nt, Artificial Sequence
  Description of Artificial Sequence: Synthetic oligonucleotide
  Sense strand starting at position 1902 of SEQ ID NO: 1244940
ggcugucgugggcugaauu

SEQ ID NO: 1524301 - RNA, 19 nt, Artificial Sequence
  Description of Artificial Sequence: Synthetic oligonucleotide
  Antisense strand to SEQ ID NO: 1524300
aauucagcccacgacagcc

SEQ ID NO: 1524302 - RNA, 19 nt, Artificial Sequence
  Description of Artificial Sequence: Synthetic oligonucleotide
  Sense strand starting at position 1912 of SEQ ID NO: 1244940
ggcugaauucagggaggau

SEQ ID NO: 1524303 - RNA, 19 nt, Artificial Sequence
  Description of Artificial Sequence: Synthetic oligonucleotide
  Antisense strand to SEQ ID NO: 1524302
auccucccugaauucagcc

SEQ ID NO: 1524304 - RNA, 19 nt, Artificial Sequence
  Description of Artificial Sequence: Synthetic oligonucleotide
  Sense strand starting at position 1923 of SEQ ID NO: 1244940
gggaggaucucggugauga

SEQ ID NO: 1524305 - RNA, 19 nt, Artificial Sequence
  Description of Artificial Sequence: Synthetic oligonucleotide
  Antisense strand to SEQ ID NO: 1524304
ucaucaccgagauccuccc

SEQ ID NO: 1524306 - RNA, 19 nt, Artificial Sequence
  Description of Artificial Sequence: Synthetic oligonucleotide
  Sense strand starting at position 1924 of SEQ ID NO: 1244940
ggaggaucucggugaugag

SEQ ID NO: 1524307 - RNA, 19 nt, Artificial Sequence
  Description of Artificial Sequence: Synthetic oligonucleotide
  Antisense strand to SEQ ID NO: 1524306
cucaucaccgagauccucc

SEQ ID NO: 1524308 - RNA, 19 nt, Artificial Sequence
  Description of Artificial Sequence: Synthetic oligonucleotide
  Sense strand starting at position 1940 of SEQ ID NO: 1244940
gaggauggcucaguccaga

SEQ ID NO: 1524309 - RNA, 19 nt, Artificial Sequence
  Description of Artificial Sequence: Synthetic oligonucleotide
  Antisense strand to SEQ ID NO: 1524308
ucuggacugagccauccuc

SEQ ID NO: 1524310 - RNA, 19 nt, Artificial Sequence
  Description of Artificial Sequence: Synthetic oligonucleotide
  Sense strand starting at position 1970 of SEQ ID NO: 1244940
gacugugucccuggaauag

SEQ ID NO: 1524311 - RNA, 19 nt, Artificial Sequence
  Description of Artificial Sequence: Synthetic oligonucleotide
  Antisense strand to SEQ ID NO: 1524310
cuauuccagggacacaguc

SEQ ID NO: 1524312 - RNA, 19 nt, Artificial Sequence
  Description of Artificial Sequence: Synthetic oligonucleotide
  Sense strand starting at position 2116 of SEQ ID NO: 1244940
cugagcuuauacgagauuu

SEQ ID NO: 1524313 - RNA, 19 nt, Artificial Sequence
  Description of Artificial Sequence: Synthetic oligonucleotide
  Antisense strand to SEQ ID NO: 1524312
aaaucucguauaagcucag

SEQ ID NO: 1524314 - RNA, 19 nt, Artificial Sequence
  Description of Artificial Sequence: Synthetic oligonucleotide
  Sense strand starting at position 2431 of SEQ ID NO: 1244940
gggaacguuuaggcuuuaa

SEQ ID NO: 1524315 - RNA, 19 nt, Artificial Sequence
  Description of Artificial Sequence: Synthetic oligonucleotide
  Antisense strand to SEQ ID NO: 1524314
uuaaagccuaaacguuccc

SEQ ID NO: 1524316 - RNA, 19 nt, Artificial Sequence
  Description of Artificial Sequence: Synthetic oligonucleotide
  Sense strand starting at position 2435 of SEQ ID NO: 1244940
acguuuaggcuuuaaguga

SEQ ID NO: 1524317 - RNA, 19 nt, Artificial Sequence
  Description of Artificial Sequence: Synthetic oligonucleotide
  Antisense strand to SEQ ID NO: 1524316
ucacuuaaagccuaaacgu

SEQ ID NO: 1524318 - RNA, 19 nt, Artificial Sequence
  Description of Artificial Sequence: Synthetic oligonucleotide
  Sense strand starting at position 2457 of SEQ ID NO: 1244940
ggagcugguuggucuucua

SEQ ID NO: 1524319 - RNA, 19 nt, Artificial Sequence
  Description of Artificial Sequence: Synthetic oligonucleotide
  Antisense strand to SEQ ID NO: 1524318
uagaagaccaaccagcucc

SEQ ID NO: 1524320 - RNA, 19 nt, Artificial Sequence
  Description of Artificial Sequence: Synthetic oligonucleotide
  Sense strand starting at position 2465 of SEQ ID NO: 1244940
uuggucuucuaggccuaaa

SEQ ID NO: 1524321 - RNA, 19 nt, Artificial Sequence
  Description of Artificial Sequence: Synthetic oligonucleotide
  Antisense strand to SEQ ID NO: 1524320
uuuaggccuagaagaccaa

SEQ ID NO: 1524322 - RNA, 19 nt, Artificial Sequence
  Description of Artificial Sequence: Synthetic oligonucleotide
  Sense strand starting at position 2512 of SEQ ID NO: 1244940
cagcauguguaguuggaca

SEQ ID NO: 1524323 - RNA, 19 nt, Artificial Sequence
  Description of Artificial Sequence: Synthetic oligonucleotide
  Antisense strand to SEQ ID NO: 1524322
uguccaacuacacaugcug

SEQ ID NO: 1524324 - RNA, 19 nt, Artificial Sequence
  Description of Artificial Sequence: Synthetic oligonucleotide
  Sense strand starting at position 2514 of SEQ ID NO: 1244940
gcauguguaguuggacaca

SEQ ID NO: 1524325 - RNA, 19 nt, Artificial Sequence
  Description of Artificial Sequence: Synthetic oligonucleotide
  Antisense strand to SEQ ID NO: 1524324
uguguccaacuacacaugc

SEQ ID NO: 1524326 - RNA, 19 nt, Artificial Sequence
  Description of Artificial Sequence: Synthetic oligonucleotide
  Sense strand starting at position 2517 of SEQ ID NO: 1244940
uguguaguuggacacauga

SEQ ID NO: 1524327 - RNA, 19 nt, Artificial Sequence
  Description of Artificial Sequence: Synthetic oligonucleotide
  Antisense strand to SEQ ID NO: 1524326
ucauguguccaacuacaca

SEQ ID NO: 1524328 - RNA, 19 nt, Artificial Sequence
  Description of Artificial Sequence: Synthetic oligonucleotide
  Sense strand starting at position 2527 of SEQ ID NO: 1244940
gacacaugagcugaugcua

SEQ ID NO: 1524329 - RNA, 19 nt, Artificial Sequence
  Description of Artificial Sequence: Synthetic oligonucleotide
  Antisense strand to SEQ ID NO: 1524328
uagcaucagcucauguguc

SEQ ID NO: 1524330 - RNA, 19 nt, Artificial Sequence
  Description of Artificial Sequence: Synthetic oligonucleotide
  Sense strand starting at position 2872 of SEQ ID NO: 1244940
ugcuaucugucacugauuu

SEQ ID NO: 1524331 - RNA, 19 nt, Artificial Sequence
  Description of Artificial Sequence: Synthetic oligonucleotide
  Antisense strand to SEQ ID NO: 1524330
aaaucagugacagauagca

SEQ ID NO: 1524332 - RNA, 19 nt, Artificial Sequence
  Description of Artificial Sequence: Synthetic oligonucleotide
  Sense strand starting at position 2873 of SEQ ID NO: 1244940
gcuaucugucacugauuua

SEQ ID NO: 1524333 - RNA, 19 nt, Artificial Sequence
  Description of Artificial Sequence: Synthetic oligonucleotide
  Antisense strand to SEQ ID NO: 1524332
uaaaucagugacagauagc

SEQ ID NO: 1524334 - RNA, 19 nt, Artificial Sequence
  Description of Artificial Sequence: Synthetic oligonucleotide
  Sense strand starting at position 2925 of SEQ ID NO: 1244940
gggaccuuuccugguccau

SEQ ID NO: 1524335 - RNA, 19 nt, Artificial Sequence
  Description of Artificial Sequence: Synthetic oligonucleotide
  Antisense strand to SEQ ID NO: 1524334
auggaccaggaaagguccc

SEQ ID NO: 1524336 - RNA, 19 nt, Artificial Sequence
  Description of Artificial Sequence: Synthetic oligonucleotide
  Sense strand starting at position 2936 of SEQ ID NO: 1244940
ugguccaucuccuuaugaa

SEQ ID NO: 1524337 - RNA, 19 nt, Artificial Sequence
  Description of Artificial Sequence: Synthetic oligonucleotide
  Antisense strand to SEQ ID NO: 1524336
uucauaaggagauggacca

SEQ ID NO: 1524338 - RNA, 19 nt, Artificial Sequence
  Description of Artificial Sequence: Synthetic oligonucleotide
  Sense strand starting at position 2937 of SEQ ID NO: 1244940
gguccaucuccuuaugaag

SEQ ID NO: 1524339 - RNA, 19 nt, Artificial Sequence
  Description of Artificial Sequence: Synthetic oligonucleotide
  Antisense strand to SEQ ID NO: 1524338
cuucauaaggagauggacc

SEQ ID NO: 1524340 - RNA, 19 nt, Artificial Sequence
  Description of Artificial Sequence: Synthetic oligonucleotide
  Sense strand starting at position 3347 of SEQ ID NO: 1244940
ccauuuccauaggaaguua

SEQ ID NO: 1524341 - RNA, 19 nt, Artificial Sequence
  Description of Artificial Sequence: Synthetic oligonucleotide
  Antisense strand to SEQ ID NO: 1524340
uaacuuccuauggaaaugg

SEQ ID NO: 1524342 - RNA, 19 nt, Artificial Sequence
  Description of Artificial Sequence: Synthetic oligonucleotide
  Sense strand starting at position 3367 of SEQ ID NO: 1244940
ggagauuacuguuccagca

SEQ ID NO: 1524343 - RNA, 19 nt, Artificial Sequence
  Description of Artificial Sequence: Synthetic oligonucleotide
  Antisense strand to SEQ ID NO: 1524342
ugcuggaacaguaaucucc

SEQ ID NO: 1524344 - RNA, 19 nt, Artificial Sequence
  Description of Artificial Sequence: Synthetic oligonucleotide
  Sense strand starting at position 3419 of SEQ ID NO: 1244940
augagaggcuucucaaguc

SEQ ID NO: 1524345 - RNA, 19 nt, Artificial Sequence
  Description of Artificial Sequence: Synthetic oligonucleotide
  Antisense strand to SEQ ID NO: 1524344
gacuugagaagccucucau

SEQ ID NO: 1524346 - RNA, 19 nt, Artificial Sequence
  Description of Artificial Sequence: Synthetic oligonucleotide
  Sense strand starting at position 3490 of SEQ ID NO: 1244940
gccagaauggcucagagag

SEQ ID NO: 1524347 - RNA, 19 nt, Artificial Sequence
  Description of Artificial Sequence: Synthetic oligonucleotide
  Antisense strand to SEQ ID NO: 1524346
cucucugagccauucuggc

SEQ ID NO: 1524348 - RNA, 19 nt, Artificial Sequence
  Description of Artificial Sequence: Synthetic oligonucleotide
  Sense strand starting at position 3570 of SEQ ID NO: 1244940
gggccauggcuguaaacca

SEQ ID NO: 1524349 - RNA, 19 nt, Artificial Sequence
  Description of Artificial Sequence: Synthetic oligonucleotide
  Antisense strand to SEQ ID NO: 1524348
ugguuuacagccauggccc

SEQ ID NO: 1524350 - RNA, 19 nt, Artificial Sequence
  Description of Artificial Sequence: Synthetic oligonucleotide
  Sense strand starting at position 3714 of SEQ ID NO: 1244940
gccugagucuuucucugac

SEQ ID NO: 1524351 - RNA, 19 nt, Artificial Sequence
  Description of Artificial Sequence: Synthetic oligonucleotide
  Antisense strand to SEQ ID NO: 1524350
gucagagaaagacucaggc

SEQ ID NO: 1524352 - RNA, 19 nt, Artificial Sequence
  Description of Artificial Sequence: Synthetic oligonucleotide
  Sense strand starting at position 3717 of SEQ ID NO: 1244940
ugagucuuucucugacuca

SEQ ID NO: 1524353 - RNA, 19 nt, Artificial Sequence
  Description of Artificial Sequence: Synthetic oligonucleotide
  Antisense strand to SEQ ID NO: 1524352
ugagucagagaaagacuca

SEQ ID NO: 1524354 - RNA, 19 nt, Artificial Sequence
  Description of Artificial Sequence: Synthetic oligonucleotide
  Sense strand starting at position 3763 of SEQ ID NO: 1244940
aguguucccggccacagaa

SEQ ID NO: 1524355 - RNA, 19 nt, Artificial Sequence
  Description of Artificial Sequence: Synthetic oligonucleotide
  Antisense strand to SEQ ID NO: 1524354
uucuguggccgggaacacu

SEQ ID NO: 1524356 - RNA, 19 nt, Artificial Sequence
  Description of Artificial Sequence: Synthetic oligonucleotide
  Sense strand starting at position 3782 of SEQ ID NO: 1244940
agccgauucccucaucuca

SEQ ID NO: 1524357 - RNA, 19 nt, Artificial Sequence
  Description of Artificial Sequence: Synthetic oligonucleotide
  Antisense strand to SEQ ID NO: 1524356
ugagaugagggaaucggcu

SEQ ID NO: 1524358 - RNA, 19 nt, Artificial Sequence
  Description of Artificial Sequence: Synthetic oligonucleotide
  Sense strand starting at position 20 of SEQ ID NO: 1244941
cgugguggcuggguguaau

SEQ ID NO: 1524359 - RNA, 19 nt, Artificial Sequence
  Description of Artificial Sequence: Synthetic oligonucleotide
  Antisense strand to SEQ ID NO: 1524358
auuacacccagccaccacg

SEQ ID NO: 1524360 - RNA, 19 nt, Artificial Sequence
  Description of Artificial Sequence: Synthetic oligonucleotide
  Sense strand starting at position 199 of SEQ ID NO: 1244941
ugcuuaaacccggaagcua

SEQ ID NO: 1524361 - RNA, 19 nt, Artificial Sequence
  Description of Artificial Sequence: Synthetic oligonucleotide
  Antisense strand to SEQ ID NO: 1524360
uagcuuccggguuuaagca

SEQ ID NO: 1524362 - RNA, 19 nt, Artificial Sequence
  Description of Artificial Sequence: Synthetic oligonucleotide
  Sense strand starting at position 522 of SEQ ID NO: 1244941
cugggacuuccuggaaucu

SEQ ID NO: 1524363 - RNA, 19 nt, Artificial Sequence
  Description of Artificial Sequence: Synthetic oligonucleotide
  Antisense strand to SEQ ID NO: 1524362
agauuccaggaagucccag

SEQ ID NO: 1524364 - RNA, 19 nt, Artificial Sequence
  Description of Artificial Sequence: Synthetic oligonucleotide
  Sense strand starting at position 1389 of SEQ ID NO: 1244941
gggugcucuuuccguuuca

SEQ ID NO: 1524365 - RNA, 19 nt, Artificial Sequence
  Description of Artificial Sequence: Synthetic oligonucleotide
  Antisense strand to SEQ ID NO: 1524364
ugaaacggaaagagcaccc

SEQ ID NO: 1524366 - RNA, 19 nt, Artificial Sequence
  Description of Artificial Sequence: Synthetic oligonucleotide
  Sense strand starting at position 2185 of SEQ ID NO: 1244941
agccguguggcccauaaau

SEQ ID NO: 1524367 - RNA, 19 nt, Artificial Sequence
  Description of Artificial Sequence: Synthetic oligonucleotide
  Antisense strand to SEQ ID NO: 1524366
auuuaugggccacacggcu

SEQ ID NO: 1524368 - RNA, 19 nt, Artificial Sequence
  Description of Artificial Sequence: Synthetic oligonucleotide
  Sense strand starting at position 2197 of SEQ ID NO: 1244941
cauaaaugggccugaguug

SEQ ID NO: 1524369 - RNA, 19 nt, Artificial Sequence
  Description of Artificial Sequence: Synthetic oligonucleotide
  Antisense strand to SEQ ID NO: 1524368
caacucaggcccauuuaug

SEQ ID NO: 1524370 - RNA, 19 nt, Artificial Sequence
  Description of Artificial Sequence: Synthetic oligonucleotide
  Sense strand starting at position 2366 of SEQ ID NO: 1244941
ccaggacucugauggcuaa

SEQ ID NO: 1524371 - RNA, 19 nt, Artificial Sequence
  Description of Artificial Sequence: Synthetic oligonucleotide
  Antisense strand to SEQ ID NO: 1524370
uuagccaucagaguccugg

SEQ ID NO: 1524372 - RNA, 19 nt, Artificial Sequence
  Description of Artificial Sequence: Synthetic oligonucleotide
  Sense strand starting at position 2367 of SEQ ID NO: 1244941
caggacucugauggcuaaa

SEQ ID NO: 1524373 - RNA, 19 nt, Artificial Sequence
  Description of Artificial Sequence: Synthetic oligonucleotide
  Antisense strand to SEQ ID NO: 1524372
uuuagccaucagaguccug

SEQ ID NO: 1524374 - RNA, 19 nt, Artificial Sequence
  Description of Artificial Sequence: Synthetic oligonucleotide
  Sense strand starting at position 2369 of SEQ ID NO: 1244941
ggacucugauggcuaaagu

SEQ ID NO: 1524375 - RNA, 19 nt, Artificial Sequence
  Description of Artificial Sequence: Synthetic oligonucleotide
  Antisense strand to SEQ ID NO: 1524374
acuuuagccaucagagucc

SEQ ID NO: 1524376 - RNA, 19 nt, Artificial Sequence
  Description of Artificial Sequence: Synthetic oligonucleotide
  Sense strand starting at position 2370 of SEQ ID NO: 1244941
gacucugauggcuaaaguu

SEQ ID NO: 1524377 - RNA, 19 nt, Artificial Sequence
  Description of Artificial Sequence: Synthetic oligonucleotide
  Antisense strand to SEQ ID NO: 1524376
aacuuuagccaucagaguc

SEQ ID NO: 1524378 - RNA, 19 nt, Artificial Sequence
  Description of Artificial Sequence: Synthetic oligonucleotide
  Sense strand starting at position 2523 of SEQ ID NO: 1244941
gaaguagcccuaggaaucu

SEQ ID NO: 1524379 - RNA, 19 nt, Artificial Sequence
  Description of Artificial Sequence: Synthetic oligonucleotide
  Antisense strand to SEQ ID NO: 1524378
agauuccuagggcuacuuc

SEQ ID NO: 1524380 - RNA, 19 nt, Artificial Sequence
  Description of Artificial Sequence: Synthetic oligonucleotide
  Sense strand starting at position 2585 of SEQ ID NO: 1244941
auuugucuuucugaguggu

SEQ ID NO: 1524381 - RNA, 19 nt, Artificial Sequence
  Description of Artificial Sequence: Synthetic oligonucleotide
  Antisense strand to SEQ ID NO: 1524380
accacucagaaagacaaau

SEQ ID NO: 1524382 - RNA, 19 nt, Artificial Sequence
  Description of Artificial Sequence: Synthetic oligonucleotide
  Sense strand starting at position 2588 of SEQ ID NO: 1244941
ugucuuucugaguggucca

SEQ ID NO: 1524383 - RNA, 19 nt, Artificial Sequence
  Description of Artificial Sequence: Synthetic oligonucleotide
  Antisense strand to SEQ ID NO: 1524382
uggaccacucagaaagaca

SEQ ID NO: 1524384 - RNA, 19 nt, Artificial Sequence
  Description of Artificial Sequence: Synthetic oligonucleotide
  Sense strand starting at position 2589 of SEQ ID NO: 1244941
gucuuucugagugguccaa

SEQ ID NO: 1524385 - RNA, 19 nt, Artificial Sequence
  Description of Artificial Sequence: Synthetic oligonucleotide
  Antisense strand to SEQ ID NO: 1524384
uuggaccacucagaaagac

SEQ ID NO: 1524386 - RNA, 19 nt, Artificial Sequence
  Description of Artificial Sequence: Synthetic oligonucleotide
  Sense strand starting at position 3078 of SEQ ID NO: 1244941
cacccauggugcuuggaau

SEQ ID NO: 1524387 - RNA, 19 nt, Artificial Sequence
  Description of Artificial Sequence: Synthetic oligonucleotide
  Antisense strand to SEQ ID NO: 1524386
auuccaagcaccaugggug

SEQ ID NO: 1524388 - RNA, 19 nt, Artificial Sequence
  Description of Artificial Sequence: Synthetic oligonucleotide
  Sense strand starting at position 3079 of SEQ ID NO: 1244941
acccauggugcuuggaaua

SEQ ID NO: 1524389 - RNA, 19 nt, Artificial Sequence
  Description of Artificial Sequence: Synthetic oligonucleotide
  Antisense strand to SEQ ID NO: 1524388
uauuccaagcaccaugggu

SEQ ID NO: 1524390 - RNA, 19 nt, Artificial Sequence
  Description of Artificial Sequence: Synthetic oligonucleotide
  Sense strand starting at position 3147 of SEQ ID NO: 1244941
aucgcuauccgucacucau

SEQ ID NO: 1524391 - RNA, 19 nt, Artificial Sequence
  Description of Artificial Sequence: Synthetic oligonucleotide
  Antisense strand to SEQ ID NO: 1524390
augagugacggauagcgau

SEQ ID NO: 1524392 - RNA, 19 nt, Artificial Sequence
  Description of Artificial Sequence: Synthetic oligonucleotide
  Sense strand starting at position 3171 of SEQ ID NO: 1244941
cccugucaugcacauuaca

SEQ ID NO: 1524393 - RNA, 19 nt, Artificial Sequence
  Description of Artificial Sequence: Synthetic oligonucleotide
  Antisense strand to SEQ ID NO: 1524392
uguaaugugcaugacaggg

SEQ ID NO: 1524394 - RNA, 19 nt, Artificial Sequence
  Description of Artificial Sequence: Synthetic oligonucleotide
  Sense strand starting at position 3199 of SEQ ID NO: 1244941
ugcgccauccaauaagaua

SEQ ID NO: 1524395 - RNA, 19 nt, Artificial Sequence
  Description of Artificial Sequence: Synthetic oligonucleotide
  Antisense strand to SEQ ID NO: 1524394
uaucuuauuggauggcgca

SEQ ID NO: 1524396 - RNA, 19 nt, Artificial Sequence
  Description of Artificial Sequence: Synthetic oligonucleotide
  Sense strand starting at position 3210 of SEQ ID NO: 1244941
auaagauagucacuagcca

SEQ ID NO: 1524397 - RNA, 19 nt, Artificial Sequence
  Description of Artificial Sequence: Synthetic oligonucleotide
  Antisense strand to SEQ ID NO: 1524396
uggcuagugacuaucuuau

SEQ ID NO: 1524398 - RNA, 19 nt, Artificial Sequence
  Description of Artificial Sequence: Synthetic oligonucleotide
  Sense strand starting at position 3261 of SEQ ID NO: 1244941
aggccucacgcuuguaauc

SEQ ID NO: 1524399 - RNA, 19 nt, Artificial Sequence
  Description of Artificial Sequence: Synthetic oligonucleotide
  Antisense strand to SEQ ID NO: 1524398
gauuacaagcgugaggccu

SEQ ID NO: 1524400 - RNA, 19 nt, Artificial Sequence
  Description of Artificial Sequence: Synthetic oligonucleotide
  Sense strand starting at position 3730 of SEQ ID NO: 1244941
uuuaaaugcucaguuggca

SEQ ID NO: 1524401 - RNA, 19 nt, Artificial Sequence
  Description of Artificial Sequence: Synthetic oligonucleotide
  Antisense strand to SEQ ID NO: 1524400
ugccaacugagcauuuaaa

SEQ ID NO: 1524402 - RNA, 19 nt, Artificial Sequence
  Description of Artificial Sequence: Synthetic oligonucleotide
  Sense strand starting at position 3764 of SEQ ID NO: 1244941
uaccauaucggauagcaca

SEQ ID NO: 1524403 - RNA, 19 nt, Artificial Sequence
  Description of Artificial Sequence: Synthetic oligonucleotide
  Antisense strand to SEQ ID NO: 1524402
ugugcuauccgauauggua

SEQ ID NO: 1524404 - RNA, 19 nt, Artificial Sequence
  Description of Artificial Sequence: Synthetic oligonucleotide
  Sense strand starting at position 3778 of SEQ ID NO: 1244941
gcacacagaugacaaauuu

SEQ ID NO: 1524405 - RNA, 19 nt, Artificial Sequence
  Description of Artificial Sequence: Synthetic oligonucleotide
  Antisense strand to SEQ ID NO: 1524404
aaauuugucaucugugugc

SEQ ID NO: 1524406 - RNA, 19 nt, Artificial Sequence
  Description of Artificial Sequence: Synthetic oligonucleotide
  Sense strand starting at position 457 of SEQ ID NO: 1244942
gugccacucucagcuugaa

SEQ ID NO: 1524407 - RNA, 19 nt, Artificial Sequence
  Description of Artificial Sequence: Synthetic oligonucleotide
  Antisense strand to SEQ ID NO: 1524406
uucaagcugagaguggcac

SEQ ID NO: 1524408 - RNA, 19 nt, Artificial Sequence
  Description of Artificial Sequence: Synthetic oligonucleotide
  Sense strand starting at position 525 of SEQ ID NO: 1244942
ggauuucuguaagaagaac

SEQ ID NO: 1524409 - RNA, 19 nt, Artificial Sequence
  Description of Artificial Sequence: Synthetic oligonucleotide
  Antisense strand to SEQ ID NO: 1524408
guucuucuuacagaaaucc

SEQ ID NO: 1524410 - RNA, 19 nt, Artificial Sequence
  Description of Artificial Sequence: Synthetic oligonucleotide
  Sense strand starting at position 605 of SEQ ID NO: 1244942
gaggaaguuuccggagcca

SEQ ID NO: 1524411 - RNA, 19 nt, Artificial Sequence
  Description of Artificial Sequence: Synthetic oligonucleotide
  Antisense strand to SEQ ID NO: 1524410
uggcuccggaaacuuccuc

SEQ ID NO: 1524412 - RNA, 19 nt, Artificial Sequence
  Description of Artificial Sequence: Synthetic oligonucleotide
  Sense strand starting at position 626 of SEQ ID NO: 1244942
ugucaucaggcuggagaga

SEQ ID NO: 1524413 - RNA, 19 nt, Artificial Sequence
  Description of Artificial Sequence: Synthetic oligonucleotide
  Antisense strand to SEQ ID NO: 1524412
ucucuccagccugaugaca

SEQ ID NO: 1524414 - RNA, 19 nt, Artificial Sequence
  Description of Artificial Sequence: Synthetic oligonucleotide
  Sense strand starting at position 850 of SEQ ID NO: 1244942
uggccuuugguggacuaaa

SEQ ID NO: 1524415 - RNA, 19 nt, Artificial Sequence
  Description of Artificial Sequence: Synthetic oligonucleotide
  Antisense strand to SEQ ID NO: 1524414
uuuaguccaccaaaggcca

SEQ ID NO: 1524416 - RNA, 19 nt, Artificial Sequence
  Description of Artificial Sequence: Synthetic oligonucleotide
  Sense strand starting at position 935 of SEQ ID NO: 1244942
cugguuuccuuucugagaa

SEQ ID NO: 1524417 - RNA, 19 nt, Artificial Sequence
  Description of Artificial Sequence: Synthetic oligonucleotide
  Antisense strand to SEQ ID NO: 1524416
uucucagaaaggaaaccag

SEQ ID NO: 1524418 - RNA, 19 nt, Artificial Sequence
  Description of Artificial Sequence: Synthetic oligonucleotide
  Sense strand starting at position 936 of SEQ ID NO: 1244942
ugguuuccuuucugagaag

SEQ ID NO: 1524419 - RNA, 19 nt, Artificial Sequence
  Description of Artificial Sequence: Synthetic oligonucleotide
  Antisense strand to SEQ ID NO: 1524418
cuucucagaaaggaaacca

SEQ ID NO: 1524420 - RNA, 19 nt, Artificial Sequence
  Description of Artificial Sequence: Synthetic oligonucleotide
  Sense strand starting at position 937 of SEQ ID NO: 1244942
gguuuccuuucugagaagu

SEQ ID NO: 1524421 - RNA, 19 nt, Artificial Sequence
  Description of Artificial Sequence: Synthetic oligonucleotide
  Antisense strand to SEQ ID NO: 1524420
acuucucagaaaggaaacc

SEQ ID NO: 1524422 - RNA, 19 nt, Artificial Sequence
  Description of Artificial Sequence: Synthetic oligonucleotide
  Sense strand starting at position 1009 of SEQ ID NO: 1244942
cuucucugggcccgagaau

SEQ ID NO: 1524423 - RNA, 19 nt, Artificial Sequence
  Description of Artificial Sequence: Synthetic oligonucleotide
  Antisense strand to SEQ ID NO: 1524422
auucucgggcccagagaag

SEQ ID NO: 1524424 - RNA, 19 nt, Artificial Sequence
  Description of Artificial Sequence: Synthetic oligonucleotide
  Sense strand starting at position 1095 of SEQ ID NO: 1244942
ucauuagcucccugaguca

SEQ ID NO: 1524425 - RNA, 19 nt, Artificial Sequence
  Description of Artificial Sequence: Synthetic oligonucleotide
  Antisense strand to SEQ ID NO: 1524424
ugacucagggagcuaauga

SEQ ID NO: 1524426 - RNA, 19 nt, Artificial Sequence
  Description of Artificial Sequence: Synthetic oligonucleotide
  Sense strand starting at position 1244 of SEQ ID NO: 1244942
ugacucagcaccugugaga

SEQ ID NO: 1524427 - RNA, 19 nt, Artificial Sequence
  Description of Artificial Sequence: Synthetic oligonucleotide
  Antisense strand to SEQ ID NO: 1524426
ucucacaggugcugaguca

SEQ ID NO: 1524428 - RNA, 19 nt, Artificial Sequence
  Description of Artificial Sequence: Synthetic oligonucleotide
  Sense strand starting at position 1398 of SEQ ID NO: 1244942
gugagauugagaugucccu

SEQ ID NO: 1524429 - RNA, 19 nt, Artificial Sequence
  Description of Artificial Sequence: Synthetic oligonucleotide
  Antisense strand to SEQ ID NO: 1524428
agggacaucucaaucucac

SEQ ID NO: 1524430 - RNA, 19 nt, Artificial Sequence
  Description of Artificial Sequence: Synthetic oligonucleotide
  Sense strand starting at position 1439 of SEQ ID NO: 1244942
gggaauguuccugagucug

SEQ ID NO: 1524431 - RNA, 19 nt, Artificial Sequence
  Description of Artificial Sequence: Synthetic oligonucleotide
  Antisense strand to SEQ ID NO: 1524430
cagacucaggaacauuccc

SEQ ID NO: 1524432 - RNA, 19 nt, Artificial Sequence
  Description of Artificial Sequence: Synthetic oligonucleotide
  Sense strand starting at position 1441 of SEQ ID NO: 1244942
gaauguuccugagucugua

SEQ ID NO: 1524433 - RNA, 19 nt, Artificial Sequence
  Description of Artificial Sequence: Synthetic oligonucleotide
  Antisense strand to SEQ ID NO: 1524432
uacagacucaggaacauuc

SEQ ID NO: 1524434 - RNA, 19 nt, Artificial Sequence
  Description of Artificial Sequence: Synthetic oligonucleotide
  Sense strand starting at position 1445 of SEQ ID NO: 1244942
guuccugagucuguaagga

SEQ ID NO: 1524435 - RNA, 19 nt, Artificial Sequence
  Description of Artificial Sequence: Synthetic oligonucleotide
  Antisense strand to SEQ ID NO: 1524434
uccuuacagacucaggaac

SEQ ID NO: 1524436 - RNA, 19 nt, Artificial Sequence
  Description of Artificial Sequence: Synthetic oligonucleotide
  Sense strand starting at position 1657 of SEQ ID NO: 1244942
cugccuugugcacagaaga

SEQ ID NO: 1524437 - RNA, 19 nt, Artificial Sequence
  Description of Artificial Sequence: Synthetic oligonucleotide
  Antisense strand to SEQ ID NO: 1524436
ucuucugugcacaaggcag

SEQ ID NO: 1524438 - RNA, 19 nt, Artificial Sequence
  Description of Artificial Sequence: Synthetic oligonucleotide
  Sense strand starting at position 1673 of SEQ ID NO: 1244942
agacucaccuggugagguu

SEQ ID NO: 1524439 - RNA, 19 nt, Artificial Sequence
  Description of Artificial Sequence: Synthetic oligonucleotide
  Antisense strand to SEQ ID NO: 1524438
aaccucaccaggugagucu

SEQ ID NO: 1524440 - RNA, 19 nt, Artificial Sequence
  Description of Artificial Sequence: Synthetic oligonucleotide
  Sense strand starting at position 1717 of SEQ ID NO: 1244942
cugagaucaccgcaugucu

SEQ ID NO: 1524441 - RNA, 19 nt, Artificial Sequence
  Description of Artificial Sequence: Synthetic oligonucleotide
  Antisense strand to SEQ ID NO: 1524440
agacaugcggugaucucag

SEQ ID NO: 1524442 - RNA, 19 nt, Artificial Sequence
  Description of Artificial Sequence: Synthetic oligonucleotide
  Sense strand starting at position 1774 of SEQ ID NO: 1244942
gcgggaagcucucauugca

SEQ ID NO: 1524443 - RNA, 19 nt, Artificial Sequence
  Description of Artificial Sequence: Synthetic oligonucleotide
  Antisense strand to SEQ ID NO: 1524442
ugcaaugagagcuucccgc

SEQ ID NO: 1524444 - RNA, 19 nt, Artificial Sequence
  Description of Artificial Sequence: Synthetic oligonucleotide
  Sense strand starting at position 1805 of SEQ ID NO: 1244942
gcuggaaugaggcgucaga

SEQ ID NO: 1524445 - RNA, 19 nt, Artificial Sequence
  Description of Artificial Sequence: Synthetic oligonucleotide
  Antisense strand to SEQ ID NO: 1524444
ucugacgccucauuccagc

SEQ ID NO: 1524446 - RNA, 19 nt, Artificial Sequence
  Description of Artificial Sequence: Synthetic oligonucleotide
  Sense strand starting at position 2088 of SEQ ID NO: 1244942
acaucuacuuuccaaggga

SEQ ID NO: 1524447 - RNA, 19 nt, Artificial Sequence
  Description of Artificial Sequence: Synthetic oligonucleotide
  Antisense strand to SEQ ID NO: 1524446
ucccuuggaaaguagaugu

SEQ ID NO: 1524448 - RNA, 19 nt, Artificial Sequence
  Description of Artificial Sequence: Synthetic oligonucleotide
  Sense strand starting at position 2141 of SEQ ID NO: 1244942
gggccuagugaagagucaa

SEQ ID NO: 1524449 - RNA, 19 nt, Artificial Sequence
  Description of Artificial Sequence: Synthetic oligonucleotide
  Antisense strand to SEQ ID NO: 1524448
uugacucuucacuaggccc

SEQ ID NO: 1524450 - RNA, 19 nt, Artificial Sequence
  Description of Artificial Sequence: Synthetic oligonucleotide
  Sense strand starting at position 2239 of SEQ ID NO: 1244942
cucggcacuuguucucaaa

SEQ ID NO: 1524451 - RNA, 19 nt, Artificial Sequence
  Description of Artificial Sequence: Synthetic oligonucleotide
  Antisense strand to SEQ ID NO: 1524450
uuugagaacaagugccgag

SEQ ID NO: 1524452 - RNA, 19 nt, Artificial Sequence
  Description of Artificial Sequence: Synthetic oligonucleotide
  Sense strand starting at position 2379 of SEQ ID NO: 1244942
aggucauuucuccgagccu

SEQ ID NO: 1524453 - RNA, 19 nt, Artificial Sequence
  Description of Artificial Sequence: Synthetic oligonucleotide
  Antisense strand to SEQ ID NO: 1524452
aggcucggagaaaugaccu

SEQ ID NO: 1524454 - RNA, 19 nt, Artificial Sequence
  Description of Artificial Sequence: Synthetic oligonucleotide
  Sense strand starting at position 2402 of SEQ ID NO: 1244942
cuccucaucugugaaacgu

SEQ ID NO: 1524455 - RNA, 19 nt, Artificial Sequence
  Description of Artificial Sequence: Synthetic oligonucleotide
  Antisense strand to SEQ ID NO: 1524454
acguuucacagaugaggag

SEQ ID NO: 1524456 - RNA, 19 nt, Artificial Sequence
  Description of Artificial Sequence: Synthetic oligonucleotide
  Sense strand starting at position 2523 of SEQ ID NO: 1244942
gucagcucuuagcuaugau

SEQ ID NO: 1524457 - RNA, 19 nt, Artificial Sequence
  Description of Artificial Sequence: Synthetic oligonucleotide
  Antisense strand to SEQ ID NO: 1524456
aucauagcuaagagcugac

SEQ ID NO: 1524458 - RNA, 19 nt, Artificial Sequence
  Description of Artificial Sequence: Synthetic oligonucleotide
  Sense strand starting at position 2547 of SEQ ID NO: 1244942
uugucaucucaauguauuc

SEQ ID NO: 1524459 - RNA, 19 nt, Artificial Sequence
  Description of Artificial Sequence: Synthetic oligonucleotide
  Antisense strand to SEQ ID NO: 1524458
gaauacauugagaugacaa

SEQ ID NO: 1524460 - RNA, 19 nt, Artificial Sequence
  Description of Artificial Sequence: Synthetic oligonucleotide
  Sense strand starting at position 2685 of SEQ ID NO: 1244942
gugugucucgcgucacuca

SEQ ID NO: 1524461 - RNA, 19 nt, Artificial Sequence
  Description of Artificial Sequence: Synthetic oligonucleotide
  Antisense strand to SEQ ID NO: 1524460
ugagugacgcgagacacac

SEQ ID NO: 1524462 - RNA, 19 nt, Artificial Sequence
  Description of Artificial Sequence: Synthetic oligonucleotide
  Sense strand starting at position 2728 of SEQ ID NO: 1244942
gcgagauguggacaagaca

SEQ ID NO: 1524463 - RNA, 19 nt, Artificial Sequence
  Description of Artificial Sequence: Synthetic oligonucleotide
  Antisense strand to SEQ ID NO: 1524462
ugucuuguccacaucucgc

SEQ ID NO: 1524464 - RNA, 19 nt, Artificial Sequence
  Description of Artificial Sequence: Synthetic oligonucleotide
  Sense strand starting at position 2794 of SEQ ID NO: 1244942
gccugaugggcagggaaau

SEQ ID NO: 1524465 - RNA, 19 nt, Artificial Sequence
  Description of Artificial Sequence: Synthetic oligonucleotide
  Antisense strand to SEQ ID NO: 1524464
auuucccugcccaucaggc

SEQ ID NO: 1524466 - RNA, 19 nt, Artificial Sequence
  Description of Artificial Sequence: Synthetic oligonucleotide
  Sense strand starting at position 2963 of SEQ ID NO: 1244942
gaccgcuucugccguugaa

SEQ ID NO: 1524467 - RNA, 19 nt, Artificial Sequence
  Description of Artificial Sequence: Synthetic oligonucleotide
  Antisense strand to SEQ ID NO: 1524466
uucaacggcagaagcgguc

SEQ ID NO: 1524468 - RNA, 19 nt, Artificial Sequence
  Description of Artificial Sequence: Synthetic oligonucleotide
  Sense strand starting at position 2965 of SEQ ID NO: 1244942
ccgcuucugccguugaagu

SEQ ID NO: 1524469 - RNA, 19 nt, Artificial Sequence
  Description of Artificial Sequence: Synthetic oligonucleotide
  Antisense strand to SEQ ID NO: 1524468
acuucaacggcagaagcgg

SEQ ID NO: 1524470 - RNA, 19 nt, Artificial Sequence
  Description of Artificial Sequence: Synthetic oligonucleotide
  Sense strand starting at position 3012 of SEQ ID NO: 1244942
ucugaaaucucaugacugu

SEQ ID NO: 1524471 - RNA, 19 nt, Artificial Sequence
  Description of Artificial Sequence: Synthetic oligonucleotide
  Antisense strand to SEQ ID NO: 1524470
acagucaugagauuucaga

SEQ ID NO: 1524472 - RNA, 19 nt, Artificial Sequence
  Description of Artificial Sequence: Synthetic oligonucleotide
  Sense strand starting at position 3021 of SEQ ID NO: 1244942
ucaugacugugccugaaac

SEQ ID NO: 1524473 - RNA, 19 nt, Artificial Sequence
  Description of Artificial Sequence: Synthetic oligonucleotide
  Antisense strand to SEQ ID NO: 1524472
guuucaggcacagucauga

SEQ ID NO: 1524474 - RNA, 19 nt, Artificial Sequence
  Description of Artificial Sequence: Synthetic oligonucleotide
  Sense strand starting at position 3022 of SEQ ID NO: 1244942
caugacugugccugaaacu

SEQ ID NO: 1524475 - RNA, 19 nt, Artificial Sequence
  Description of Artificial Sequence: Synthetic oligonucleotide
  Antisense strand to SEQ ID NO: 1524474
aguuucaggcacagucaug

SEQ ID NO: 1524476 - RNA, 19 nt, Artificial Sequence
  Description of Artificial Sequence: Synthetic oligonucleotide
  Sense strand starting at position 3629 of SEQ ID NO: 1244942
ggaggaagucccugugaug

SEQ ID NO: 1524477 - RNA, 19 nt, Artificial Sequence
  Description of Artificial Sequence: Synthetic oligonucleotide
  Antisense strand to SEQ ID NO: 1524476
caucacagggacuuccucc

SEQ ID NO: 1524478 - RNA, 19 nt, Artificial Sequence
  Description of Artificial Sequence: Synthetic oligonucleotide
  Sense strand starting at position 3656 of SEQ ID NO: 1244942
gggaugaguucgggaaaga

SEQ ID NO: 1524479 - RNA, 19 nt, Artificial Sequence
  Description of Artificial Sequence: Synthetic oligonucleotide
  Antisense strand to SEQ ID NO: 1524478
ucuuucccgaacucauccc

SEQ ID NO: 1524480 - RNA, 19 nt, Artificial Sequence
  Description of Artificial Sequence: Synthetic oligonucleotide
  Sense strand starting at position 3676 of SEQ ID NO: 1244942
ggagcaucugccuggacuu

SEQ ID NO: 1524481 - RNA, 19 nt, Artificial Sequence
  Description of Artificial Sequence: Synthetic oligonucleotide
  Antisense strand to SEQ ID NO: 1524480
aaguccaggcagaugcucc

SEQ ID NO: 1524482 - RNA, 19 nt, Artificial Sequence
  Description of Artificial Sequence: Synthetic oligonucleotide
  Sense strand starting at position 3954 of SEQ ID NO: 1244942
ggaauaugaucagaacaaa

SEQ ID NO: 1524483 - RNA, 19 nt, Artificial Sequence
  Description of Artificial Sequence: Synthetic oligonucleotide
  Antisense strand to SEQ ID NO: 1524482
uuuguucugaucauauucc

SEQ ID NO: 1524484 - RNA, 19 nt, Artificial Sequence
  Description of Artificial Sequence: Synthetic oligonucleotide
  Sense strand starting at position 22 of SEQ ID NO: 1244943
gcuugaucucagcaggcuu

SEQ ID NO: 1524485 - RNA, 19 nt, Artificial Sequence
  Description of Artificial Sequence: Synthetic oligonucleotide
  Antisense strand to SEQ ID NO: 1524484
aagccugcugagaucaagc

SEQ ID NO: 1524486 - RNA, 19 nt, Artificial Sequence
  Description of Artificial Sequence: Synthetic oligonucleotide
  Sense strand starting at position 82 of SEQ ID NO: 1244943
gcuucugugaugcgacuuu

SEQ ID NO: 1524487 - RNA, 19 nt, Artificial Sequence
  Description of Artificial Sequence: Synthetic oligonucleotide
  Antisense strand to SEQ ID NO: 1524486
aaagucgcaucacagaagc

SEQ ID NO: 1524488 - RNA, 19 nt, Artificial Sequence
  Description of Artificial Sequence: Synthetic oligonucleotide
  Sense strand starting at position 133 of SEQ ID NO: 1244943
gucuguuucugcuucuuau

SEQ ID NO: 1524489 - RNA, 19 nt, Artificial Sequence
  Description of Artificial Sequence: Synthetic oligonucleotide
  Antisense strand to SEQ ID NO: 1524488
auaagaagcagaaacagac

SEQ ID NO: 1524490 - RNA, 19 nt, Artificial Sequence
  Description of Artificial Sequence: Synthetic oligonucleotide
  Sense strand starting at position 220 of SEQ ID NO: 1244943
acagcccaguaguuuaaau

SEQ ID NO: 1524491 - RNA, 19 nt, Artificial Sequence
  Description of Artificial Sequence: Synthetic oligonucleotide
  Antisense strand to SEQ ID NO: 1524490
auuuaaacuacugggcugu

SEQ ID NO: 1524492 - RNA, 19 nt, Artificial Sequence
  Description of Artificial Sequence: Synthetic oligonucleotide
  Sense strand starting at position 310 of SEQ ID NO: 1244943
ccaauugucugucugcuuu

SEQ ID NO: 1524493 - RNA, 19 nt, Artificial Sequence
  Description of Artificial Sequence: Synthetic oligonucleotide
  Antisense strand to SEQ ID NO: 1524492
aaagcagacagacaauugg

SEQ ID NO: 1524494 - RNA, 19 nt, Artificial Sequence
  Description of Artificial Sequence: Synthetic oligonucleotide
  Sense strand starting at position 324 of SEQ ID NO: 1244943
gcuuuacacucacuuggau

SEQ ID NO: 1524495 - RNA, 19 nt, Artificial Sequence
  Description of Artificial Sequence: Synthetic oligonucleotide
  Antisense strand to SEQ ID NO: 1524494
auccaagugaguguaaagc

SEQ ID NO: 1524496 - RNA, 19 nt, Artificial Sequence
  Description of Artificial Sequence: Synthetic oligonucleotide
  Sense strand starting at position 333 of SEQ ID NO: 1244943
ucacuuggauguccaagaa

SEQ ID NO: 1524497 - RNA, 19 nt, Artificial Sequence
  Description of Artificial Sequence: Synthetic oligonucleotide
  Antisense strand to SEQ ID NO: 1524496
uucuuggacauccaaguga

SEQ ID NO: 1524498 - RNA, 19 nt, Artificial Sequence
  Description of Artificial Sequence: Synthetic oligonucleotide
  Sense strand starting at position 373 of SEQ ID NO: 1244943
ugacacaguucuuucgacu

SEQ ID NO: 1524499 - RNA, 19 nt, Artificial Sequence
  Description of Artificial Sequence: Synthetic oligonucleotide
  Antisense strand to SEQ ID NO: 1524498
agucgaaagaacuguguca

SEQ ID NO: 1524500 - RNA, 19 nt, Artificial Sequence
  Description of Artificial Sequence: Synthetic oligonucleotide
  Sense strand starting at position 379 of SEQ ID NO: 1244943
aguucuuucgacuggucuu

SEQ ID NO: 1524501 - RNA, 19 nt, Artificial Sequence
  Description of Artificial Sequence: Synthetic oligonucleotide
  Antisense strand to SEQ ID NO: 1524500
aagaccagucgaaagaacu

SEQ ID NO: 1524502 - RNA, 19 nt, Artificial Sequence
  Description of Artificial Sequence: Synthetic oligonucleotide
  Sense strand starting at position 390 of SEQ ID NO: 1244943
cuggucuuguccucccaaa

SEQ ID NO: 1524503 - RNA, 19 nt, Artificial Sequence
  Description of Artificial Sequence: Synthetic oligonucleotide
  Antisense strand to SEQ ID NO: 1524502
uuugggaggacaagaccag

SEQ ID NO: 1524504 - RNA, 19 nt, Artificial Sequence
  Description of Artificial Sequence: Synthetic oligonucleotide
  Sense strand starting at position 468 of SEQ ID NO: 1244943
gcccaaaucaugggcggua

SEQ ID NO: 1524505 - RNA, 19 nt, Artificial Sequence
  Description of Artificial Sequence: Synthetic oligonucleotide
  Antisense strand to SEQ ID NO: 1524504
uaccgcccaugauuugggc

SEQ ID NO: 1524506 - RNA, 19 nt, Artificial Sequence
  Description of Artificial Sequence: Synthetic oligonucleotide
  Sense strand starting at position 470 of SEQ ID NO: 1244943
ccaaaucaugggcgguaau

SEQ ID NO: 1524507 - RNA, 19 nt, Artificial Sequence
  Description of Artificial Sequence: Synthetic oligonucleotide
  Antisense strand to SEQ ID NO: 1524506
auuaccgcccaugauuugg

SEQ ID NO: 1524508 - RNA, 19 nt, Artificial Sequence
  Description of Artificial Sequence: Synthetic oligonucleotide
  Sense strand starting at position 480 of SEQ ID NO: 1244943
ggcgguaauccuggguucu

SEQ ID NO: 1524509 - RNA, 19 nt, Artificial Sequence
  Description of Artificial Sequence: Synthetic oligonucleotide
  Antisense strand to SEQ ID NO: 1524508
agaacccaggauuaccgcc

SEQ ID NO: 1524510 - RNA, 19 nt, Artificial Sequence
  Description of Artificial Sequence: Synthetic oligonucleotide
  Sense strand starting at position 481 of SEQ ID NO: 1244943
gcgguaauccuggguucuu

SEQ ID NO: 1524511 - RNA, 19 nt, Artificial Sequence
  Description of Artificial Sequence: Synthetic oligonucleotide
  Antisense strand to SEQ ID NO: 1524510
aagaacccaggauuaccgc

SEQ ID NO: 1524512 - RNA, 19 nt, Artificial Sequence
  Description of Artificial Sequence: Synthetic oligonucleotide
  Sense strand starting at position 649 of SEQ ID NO: 1244943
agcccagucucuuuggauu

SEQ ID NO: 1524513 - RNA, 19 nt, Artificial Sequence
  Description of Artificial Sequence: Synthetic oligonucleotide
  Antisense strand to SEQ ID NO: 1524512
aauccaaagagacugggcu

SEQ ID NO: 1524514 - RNA, 19 nt, Artificial Sequence
  Description of Artificial Sequence: Synthetic oligonucleotide
  Sense strand starting at position 731 of SEQ ID NO: 1244943
caauguaagccucgugaca

SEQ ID NO: 1524515 - RNA, 19 nt, Artificial Sequence
  Description of Artificial Sequence: Synthetic oligonucleotide
  Antisense strand to SEQ ID NO: 1524514
ugucacgaggcuuacauug

SEQ ID NO: 1524516 - RNA, 19 nt, Artificial Sequence
  Description of Artificial Sequence: Synthetic oligonucleotide
  Sense strand starting at position 801 of SEQ ID NO: 1244943
ccuuauggguacuugucaa

SEQ ID NO: 1524517 - RNA, 19 nt, Artificial Sequence
  Description of Artificial Sequence: Synthetic oligonucleotide
  Antisense strand to SEQ ID NO: 1524516
uugacaaguacccauaagg

SEQ ID NO: 1524518 - RNA, 19 nt, Artificial Sequence
  Description of Artificial Sequence: Synthetic oligonucleotide
  Sense strand starting at position 805 of SEQ ID NO: 1244943
auggguacuugucaauacu

SEQ ID NO: 1524519 - RNA, 19 nt, Artificial Sequence
  Description of Artificial Sequence: Synthetic oligonucleotide
  Antisense strand to SEQ ID NO: 1524518
aguauugacaaguacccau

SEQ ID NO: 1524520 - RNA, 19 nt, Artificial Sequence
  Description of Artificial Sequence: Synthetic oligonucleotide
  Sense strand starting at position 808 of SEQ ID NO: 1244943
gguacuugucaauacucau

SEQ ID NO: 1524521 - RNA, 19 nt, Artificial Sequence
  Description of Artificial Sequence: Synthetic oligonucleotide
  Antisense strand to SEQ ID NO: 1524520
augaguauugacaaguacc

SEQ ID NO: 1524522 - RNA, 19 nt, Artificial Sequence
  Description of Artificial Sequence: Synthetic oligonucleotide
  Sense strand starting at position 863 of SEQ ID NO: 1244943
guggcagauaccugguacu

SEQ ID NO: 1524523 - RNA, 19 nt, Artificial Sequence
  Description of Artificial Sequence: Synthetic oligonucleotide
  Antisense strand to SEQ ID NO: 1524522
aguaccagguaucugccac

SEQ ID NO: 1524524 - RNA, 19 nt, Artificial Sequence
  Description of Artificial Sequence: Synthetic oligonucleotide
  Sense strand starting at position 866 of SEQ ID NO: 1244943
gcagauaccugguacugca

SEQ ID NO: 1524525 - RNA, 19 nt, Artificial Sequence
  Description of Artificial Sequence: Synthetic oligonucleotide
  Antisense strand to SEQ ID NO: 1524524
ugcaguaccagguaucugc

SEQ ID NO: 1524526 - RNA, 19 nt, Artificial Sequence
  Description of Artificial Sequence: Synthetic oligonucleotide
  Sense strand starting at position 1070 of SEQ ID NO: 1244943
ucagcagcgcaucaagaau

SEQ ID NO: 1524527 - RNA, 19 nt, Artificial Sequence
  Description of Artificial Sequence: Synthetic oligonucleotide
  Antisense strand to SEQ ID NO: 1524526
auucuugaugcgcugcuga

SEQ ID NO: 1524528 - RNA, 19 nt, Artificial Sequence
  Description of Artificial Sequence: Synthetic oligonucleotide
  Sense strand starting at position 1164 of SEQ ID NO: 1244943
gcuuuagaaguuugguuau

SEQ ID NO: 1524529 - RNA, 19 nt, Artificial Sequence
  Description of Artificial Sequence: Synthetic oligonucleotide
  Antisense strand to SEQ ID NO: 1524528
auaaccaaacuucuaaagc

SEQ ID NO: 1524530 - RNA, 19 nt, Artificial Sequence
  Description of Artificial Sequence: Synthetic oligonucleotide
  Sense strand starting at position 1166 of SEQ ID NO: 1244943
uuuagaaguuugguuauca

SEQ ID NO: 1524531 - RNA, 19 nt, Artificial Sequence
  Description of Artificial Sequence: Synthetic oligonucleotide
  Antisense strand to SEQ ID NO: 1524530
ugauaaccaaacuucuaaa

SEQ ID NO: 1524532 - RNA, 19 nt, Artificial Sequence
  Description of Artificial Sequence: Synthetic oligonucleotide
  Sense strand starting at position 1167 of SEQ ID NO: 1244943
uuagaaguuugguuaucag

SEQ ID NO: 1524533 - RNA, 19 nt, Artificial Sequence
  Description of Artificial Sequence: Synthetic oligonucleotide
  Antisense strand to SEQ ID NO: 1524532
cugauaaccaaacuucuaa

SEQ ID NO: 1524534 - RNA, 19 nt, Artificial Sequence
  Description of Artificial Sequence: Synthetic oligonucleotide
  Sense strand starting at position 1170 of SEQ ID NO: 1244943
gaaguuugguuaucaguuc

SEQ ID NO: 1524535 - RNA, 19 nt, Artificial Sequence
  Description of Artificial Sequence: Synthetic oligonucleotide
  Antisense strand to SEQ ID NO: 1524534
gaacugauaaccaaacuuc

SEQ ID NO: 1524536 - RNA, 19 nt, Artificial Sequence
  Description of Artificial Sequence: Synthetic oligonucleotide
  Sense strand starting at position 1177 of SEQ ID NO: 1244943
gguuaucaguucucuaaag

SEQ ID NO: 1524537 - RNA, 19 nt, Artificial Sequence
  Description of Artificial Sequence: Synthetic oligonucleotide
  Antisense strand to SEQ ID NO: 1524536
cuuuagagaacugauaacc

SEQ ID NO: 1524538 - RNA, 19 nt, Artificial Sequence
  Description of Artificial Sequence: Synthetic oligonucleotide
  Sense strand starting at position 1178 of SEQ ID NO: 1244943
guuaucaguucucuaaaga

SEQ ID NO: 1524539 - RNA, 19 nt, Artificial Sequence
  Description of Artificial Sequence: Synthetic oligonucleotide
  Antisense strand to SEQ ID NO: 1524538
ucuuuagagaacugauaac

SEQ ID NO: 1524540 - RNA, 19 nt, Artificial Sequence
  Description of Artificial Sequence: Synthetic oligonucleotide
  Sense strand starting at position 1356 of SEQ ID NO: 1244943
gccagaauuugcccugugu

SEQ ID NO: 1524541 - RNA, 19 nt, Artificial Sequence
  Description of Artificial Sequence: Synthetic oligonucleotide
  Antisense strand to SEQ ID NO: 1524540
acacagggcaaauucuggc

SEQ ID NO: 1524542 - RNA, 19 nt, Artificial Sequence
  Description of Artificial Sequence: Synthetic oligonucleotide
  Sense strand starting at position 2268 of SEQ ID NO: 1244943
ugcgaauggucacacuugu

SEQ ID NO: 1524543 - RNA, 19 nt, Artificial Sequence
  Description of Artificial Sequence: Synthetic oligonucleotide
  Antisense strand to SEQ ID NO: 1524542
acaagugugaccauucgca

SEQ ID NO: 1524544 - RNA, 19 nt, Artificial Sequence
  Description of Artificial Sequence: Synthetic oligonucleotide
  Sense strand starting at position 2989 of SEQ ID NO: 1244943
ggcgggauuuccugcggga

SEQ ID NO: 1524545 - RNA, 19 nt, Artificial Sequence
  Description of Artificial Sequence: Synthetic oligonucleotide
  Antisense strand to SEQ ID NO: 1524544
ucccgcaggaaaucccgcc

SEQ ID NO: 1524546 - RNA, 19 nt, Artificial Sequence
  Description of Artificial Sequence: Synthetic oligonucleotide
  Sense strand starting at position 3252 of SEQ ID NO: 1244943
uccauccuccgcguuuaua

SEQ ID NO: 1524547 - RNA, 19 nt, Artificial Sequence
  Description of Artificial Sequence: Synthetic oligonucleotide
  Antisense strand to SEQ ID NO: 1524546
uauaaacgcggaggaugga

SEQ ID NO: 1524548 - RNA, 19 nt, Artificial Sequence
  Description of Artificial Sequence: Synthetic oligonucleotide
  Sense strand starting at position 3524 of SEQ ID NO: 1244943
cggaucucaugccacaaga

SEQ ID NO: 1524549 - RNA, 19 nt, Artificial Sequence
  Description of Artificial Sequence: Synthetic oligonucleotide
  Antisense strand to SEQ ID NO: 1524548
ucuuguggcaugagauccg

SEQ ID NO: 1524550 - RNA, 19 nt, Artificial Sequence
  Description of Artificial Sequence: Synthetic oligonucleotide
  Sense strand starting at position 3535 of SEQ ID NO: 1244943
ccacaagacucuggcagua

SEQ ID NO: 1524551 - RNA, 19 nt, Artificial Sequence
  Description of Artificial Sequence: Synthetic oligonucleotide
  Antisense strand to SEQ ID NO: 1524550
uacugccagagucuugugg

SEQ ID NO: 1524552 - RNA, 19 nt, Artificial Sequence
  Description of Artificial Sequence: Synthetic oligonucleotide
  Sense strand starting at position 3537 of SEQ ID NO: 1244943
acaagacucuggcaguaaa

SEQ ID NO: 1524553 - RNA, 19 nt, Artificial Sequence
  Description of Artificial Sequence: Synthetic oligonucleotide
  Antisense strand to SEQ ID NO: 1524552
uuuacugccagagucuugu

SEQ ID NO: 1524554 - RNA, 19 nt, Artificial Sequence
  Description of Artificial Sequence: Synthetic oligonucleotide
  Sense strand starting at position 3808 of SEQ ID NO: 1244943
cacaaagaguccuaggacu

SEQ ID NO: 1524555 - RNA, 19 nt, Artificial Sequence
  Description of Artificial Sequence: Synthetic oligonucleotide
  Antisense strand to SEQ ID NO: 1524554
aguccuaggacucuuugug

SEQ ID NO: 1524556 - RNA, 19 nt, Artificial Sequence
  Description of Artificial Sequence: Synthetic oligonucleotide
  Sense strand starting at position 3957 of SEQ ID NO: 1244943
gccaguugucugugggugu

SEQ ID NO: 1524557 - RNA, 19 nt, Artificial Sequence
  Description of Artificial Sequence: Synthetic oligonucleotide
  Antisense strand to SEQ ID NO: 1524556
acacccacagacaacuggc

SEQ ID NO: 1524558 - RNA, 19 nt, Artificial Sequence
  Description of Artificial Sequence: Synthetic oligonucleotide
  Sense strand starting at position 47 of SEQ ID NO: 1244944
aguuaaagagaucggacuu

SEQ ID NO: 1524559 - RNA, 19 nt, Artificial Sequence
  Description of Artificial Sequence: Synthetic oligonucleotide
  Antisense strand to SEQ ID NO: 1524558
aaguccgaucucuuuaacu

SEQ ID NO: 1524560 - RNA, 19 nt, Artificial Sequence
  Description of Artificial Sequence: Synthetic oligonucleotide
  Sense strand starting at position 48 of SEQ ID NO: 1244944
guuaaagagaucggacuua

SEQ ID NO: 1524561 - RNA, 19 nt, Artificial Sequence
  Description of Artificial Sequence: Synthetic oligonucleotide
  Antisense strand to SEQ ID NO: 1524560
uaaguccgaucucuuuaac

SEQ ID NO: 1524562 - RNA, 19 nt, Artificial Sequence
  Description of Artificial Sequence: Synthetic oligonucleotide
  Sense strand starting at position 135 of SEQ ID NO: 1244944
ucgggaggcgcuuaguuua

SEQ ID NO: 1524563 - RNA, 19 nt, Artificial Sequence
  Description of Artificial Sequence: Synthetic oligonucleotide
  Antisense strand to SEQ ID NO: 1524562
uaaacuaagcgccucccga

SEQ ID NO: 1524564 - RNA, 19 nt, Artificial Sequence
  Description of Artificial Sequence: Synthetic oligonucleotide
  Sense strand starting at position 314 of SEQ ID NO: 1244944
ccaaauugcuucucaggau

SEQ ID NO: 1524565 - RNA, 19 nt, Artificial Sequence
  Description of Artificial Sequence: Synthetic oligonucleotide
  Antisense strand to SEQ ID NO: 1524564
auccugagaagcaauuugg

SEQ ID NO: 1524566 - RNA, 19 nt, Artificial Sequence
  Description of Artificial Sequence: Synthetic oligonucleotide
  Sense strand starting at position 414 of SEQ ID NO: 1244944
uugauaaacuggcucauau

SEQ ID NO: 1524567 - RNA, 19 nt, Artificial Sequence
  Description of Artificial Sequence: Synthetic oligonucleotide
  Antisense strand to SEQ ID NO: 1524566
auaugagccaguuuaucaa

SEQ ID NO: 1524568 - RNA, 19 nt, Artificial Sequence
  Description of Artificial Sequence: Synthetic oligonucleotide
  Sense strand starting at position 894 of SEQ ID NO: 1244944
cugaauucucaaggacacu

SEQ ID NO: 1524569 - RNA, 19 nt, Artificial Sequence
  Description of Artificial Sequence: Synthetic oligonucleotide
  Antisense strand to SEQ ID NO: 1524568
aguguccuugagaauucag

SEQ ID NO: 1524570 - RNA, 19 nt, Artificial Sequence
  Description of Artificial Sequence: Synthetic oligonucleotide
  Sense strand starting at position 952 of SEQ ID NO: 1244944
caagcuggcucugugugaa

SEQ ID NO: 1524571 - RNA, 19 nt, Artificial Sequence
  Description of Artificial Sequence: Synthetic oligonucleotide
  Antisense strand to SEQ ID NO: 1524570
uucacacagagccagcuug

SEQ ID NO: 1524572 - RNA, 19 nt, Artificial Sequence
  Description of Artificial Sequence: Synthetic oligonucleotide
  Sense strand starting at position 1024 of SEQ ID NO: 1244944
ggacaauauguuggguagu

SEQ ID NO: 1524573 - RNA, 19 nt, Artificial Sequence
  Description of Artificial Sequence: Synthetic oligonucleotide
  Antisense strand to SEQ ID NO: 1524572
acuacccaacauauugucc

SEQ ID NO: 1524574 - RNA, 19 nt, Artificial Sequence
  Description of Artificial Sequence: Synthetic oligonucleotide
  Sense strand starting at position 1026 of SEQ ID NO: 1244944
acaauauguuggguaguua

SEQ ID NO: 1524575 - RNA, 19 nt, Artificial Sequence
  Description of Artificial Sequence: Synthetic oligonucleotide
  Antisense strand to SEQ ID NO: 1524574
uaacuacccaacauauugu

SEQ ID NO: 1524576 - RNA, 19 nt, Artificial Sequence
  Description of Artificial Sequence: Synthetic oligonucleotide
  Sense strand starting at position 1123 of SEQ ID NO: 1244944
cugucacaguaauugugau

SEQ ID NO: 1524577 - RNA, 19 nt, Artificial Sequence
  Description of Artificial Sequence: Synthetic oligonucleotide
  Antisense strand to SEQ ID NO: 1524576
aucacaauuacugugacag

SEQ ID NO: 1524578 - RNA, 19 nt, Artificial Sequence
  Description of Artificial Sequence: Synthetic oligonucleotide
  Sense strand starting at position 1157 of SEQ ID NO: 1244944
uacauuuagucuuccgguu

SEQ ID NO: 1524579 - RNA, 19 nt, Artificial Sequence
  Description of Artificial Sequence: Synthetic oligonucleotide
  Antisense strand to SEQ ID NO: 1524578
aaccggaagacuaaaugua

SEQ ID NO: 1524580 - RNA, 19 nt, Artificial Sequence
  Description of Artificial Sequence: Synthetic oligonucleotide
  Sense strand starting at position 1198 of SEQ ID NO: 1244944
uccuuagaaucugugaagu

SEQ ID NO: 1524581 - RNA, 19 nt, Artificial Sequence
  Description of Artificial Sequence: Synthetic oligonucleotide
  Antisense strand to SEQ ID NO: 1524580
acuucacagauucuaagga

SEQ ID NO: 1524582 - RNA, 19 nt, Artificial Sequence
  Description of Artificial Sequence: Synthetic oligonucleotide
  Sense strand starting at position 1664 of SEQ ID NO: 1244944
aguuuaaacucguuuguuu

SEQ ID NO: 1524583 - RNA, 19 nt, Artificial Sequence
  Description of Artificial Sequence: Synthetic oligonucleotide
  Antisense strand to SEQ ID NO: 1524582
aaacaaacgaguuuaaacu

SEQ ID NO: 1524584 - RNA, 19 nt, Artificial Sequence
  Description of Artificial Sequence: Synthetic oligonucleotide
  Sense strand starting at position 2502 of SEQ ID NO: 1244944
gagccuuucuaagcaggga

SEQ ID NO: 1524585 - RNA, 19 nt, Artificial Sequence
  Description of Artificial Sequence: Synthetic oligonucleotide
  Antisense strand to SEQ ID NO: 1524584
ucccugcuuagaaaggcuc

SEQ ID NO: 1524586 - RNA, 19 nt, Artificial Sequence
  Description of Artificial Sequence: Synthetic oligonucleotide
  Sense strand starting at position 2506 of SEQ ID NO: 1244944
cuuucuaagcagggagaau

SEQ ID NO: 1524587 - RNA, 19 nt, Artificial Sequence
  Description of Artificial Sequence: Synthetic oligonucleotide
  Antisense strand to SEQ ID NO: 1524586
auucucccugcuuagaaag

SEQ ID NO: 1524588 - RNA, 19 nt, Artificial Sequence
  Description of Artificial Sequence: Synthetic oligonucleotide
  Sense strand starting at position 2576 of SEQ ID NO: 1244944
aggagacuuccuggucuaa

SEQ ID NO: 1524589 - RNA, 19 nt, Artificial Sequence
  Description of Artificial Sequence: Synthetic oligonucleotide
  Antisense strand to SEQ ID NO: 1524588
uuagaccaggaagucuccu

SEQ ID NO: 1524590 - RNA, 19 nt, Artificial Sequence
  Description of Artificial Sequence: Synthetic oligonucleotide
  Sense strand starting at position 2578 of SEQ ID NO: 1244944
gagacuuccuggucuaauu

SEQ ID NO: 1524591 - RNA, 19 nt, Artificial Sequence
  Description of Artificial Sequence: Synthetic oligonucleotide
  Antisense strand to SEQ ID NO: 1524590
aauuagaccaggaagucuc

SEQ ID NO: 1524592 - RNA, 19 nt, Artificial Sequence
  Description of Artificial Sequence: Synthetic oligonucleotide
  Sense strand starting at position 2588 of SEQ ID NO: 1244944
ggucuaauuccagggacuc

SEQ ID NO: 1524593 - RNA, 19 nt, Artificial Sequence
  Description of Artificial Sequence: Synthetic oligonucleotide
  Antisense strand to SEQ ID NO: 1524592
gagucccuggaauuagacc

SEQ ID NO: 1524594 - RNA, 19 nt, Artificial Sequence
  Description of Artificial Sequence: Synthetic oligonucleotide
  Sense strand starting at position 2634 of SEQ ID NO: 1244944
agggacaccucuuauccua

SEQ ID NO: 1524595 - RNA, 19 nt, Artificial Sequence
  Description of Artificial Sequence: Synthetic oligonucleotide
  Antisense strand to SEQ ID NO: 1524594
uaggauaagaggugucccu

SEQ ID NO: 1524596 - RNA, 19 nt, Artificial Sequence
  Description of Artificial Sequence: Synthetic oligonucleotide
  Sense strand starting at position 2693 of SEQ ID NO: 1244944
gcaagugccuugucaugag

SEQ ID NO: 1524597 - RNA, 19 nt, Artificial Sequence
  Description of Artificial Sequence: Synthetic oligonucleotide
  Antisense strand to SEQ ID NO: 1524596
cucaugacaaggcacuugc

SEQ ID NO: 1524598 - RNA, 19 nt, Artificial Sequence
  Description of Artificial Sequence: Synthetic oligonucleotide
  Sense strand starting at position 2703 of SEQ ID NO: 1244944
ugucaugagucacuaagga

SEQ ID NO: 1524599 - RNA, 19 nt, Artificial Sequence
  Description of Artificial Sequence: Synthetic oligonucleotide
  Antisense strand to SEQ ID NO: 1524598
uccuuagugacucaugaca

SEQ ID NO: 1524600 - RNA, 19 nt, Artificial Sequence
  Description of Artificial Sequence: Synthetic oligonucleotide
  Sense strand starting at position 2847 of SEQ ID NO: 1244944
aaaggaauguuguaaauga

SEQ ID NO: 1524601 - RNA, 19 nt, Artificial Sequence
  Description of Artificial Sequence: Synthetic oligonucleotide
  Antisense strand to SEQ ID NO: 1524600
ucauuuacaacauuccuuu

SEQ ID NO: 1524602 - RNA, 19 nt, Artificial Sequence
  Description of Artificial Sequence: Synthetic oligonucleotide
  Sense strand starting at position 2857 of SEQ ID NO: 1244944
uguaaaugauguugauuuc

SEQ ID NO: 1524603 - RNA, 19 nt, Artificial Sequence
  Description of Artificial Sequence: Synthetic oligonucleotide
  Antisense strand to SEQ ID NO: 1524602
gaaaucaacaucauuuaca

SEQ ID NO: 1524604 - RNA, 19 nt, Artificial Sequence
  Description of Artificial Sequence: Synthetic oligonucleotide
  Sense strand starting at position 3045 of SEQ ID NO: 1244944
cgucauggcgcacuguaau

SEQ ID NO: 1524605 - RNA, 19 nt, Artificial Sequence
  Description of Artificial Sequence: Synthetic oligonucleotide
  Antisense strand to SEQ ID NO: 1524604
auuacagugcgccaugacg

SEQ ID NO: 1524606 - RNA, 19 nt, Artificial Sequence
  Description of Artificial Sequence: Synthetic oligonucleotide
  Sense strand starting at position 3129 of SEQ ID NO: 1244944
cugagaucccuccauggca

SEQ ID NO: 1524607 - RNA, 19 nt, Artificial Sequence
  Description of Artificial Sequence: Synthetic oligonucleotide
  Antisense strand to SEQ ID NO: 1524606
ugccauggagggaucucag

SEQ ID NO: 1524608 - RNA, 19 nt, Artificial Sequence
  Description of Artificial Sequence: Synthetic oligonucleotide
  Sense strand starting at position 3246 of SEQ ID NO: 1244944
aaaccagucccucguuaag

SEQ ID NO: 1524609 - RNA, 19 nt, Artificial Sequence
  Description of Artificial Sequence: Synthetic oligonucleotide
  Antisense strand to SEQ ID NO: 1524608
cuuaacgagggacugguuu

SEQ ID NO: 1524610 - RNA, 19 nt, Artificial Sequence
  Description of Artificial Sequence: Synthetic oligonucleotide
  Sense strand starting at position 3248 of SEQ ID NO: 1244944
accagucccucguuaaguu

SEQ ID NO: 1524611 - RNA, 19 nt, Artificial Sequence
  Description of Artificial Sequence: Synthetic oligonucleotide
  Antisense strand to SEQ ID NO: 1524610
aacuuaacgagggacuggu

SEQ ID NO: 1524612 - RNA, 19 nt, Artificial Sequence
  Description of Artificial Sequence: Synthetic oligonucleotide
  Sense strand starting at position 3267 of SEQ ID NO: 1244944
gugagaaguuucuucccaa

SEQ ID NO: 1524613 - RNA, 19 nt, Artificial Sequence
  Description of Artificial Sequence: Synthetic oligonucleotide
  Antisense strand to SEQ ID NO: 1524612
uugggaagaaacuucucac

SEQ ID NO: 1524614 - RNA, 19 nt, Artificial Sequence
  Description of Artificial Sequence: Synthetic oligonucleotide
  Sense strand starting at position 3286 of SEQ ID NO: 1244944
aaguaaaugugaugggaaa

SEQ ID NO: 1524615 - RNA, 19 nt, Artificial Sequence
  Description of Artificial Sequence: Synthetic oligonucleotide
  Antisense strand to SEQ ID NO: 1524614
uuucccaucacauuuacuu

SEQ ID NO: 1524616 - RNA, 19 nt, Artificial Sequence
  Description of Artificial Sequence: Synthetic oligonucleotide
  Sense strand starting at position 3337 of SEQ ID NO: 1244944
gguuaauauuaaggaagau

SEQ ID NO: 1524617 - RNA, 19 nt, Artificial Sequence
  Description of Artificial Sequence: Synthetic oligonucleotide
  Antisense strand to SEQ ID NO: 1524616
aucuuccuuaauauuaacc

SEQ ID NO: 1524618 - RNA, 19 nt, Artificial Sequence
  Description of Artificial Sequence: Synthetic oligonucleotide
  Sense strand starting at position 3378 of SEQ ID NO: 1244944
agcaguauugggugaagag

SEQ ID NO: 1524619 - RNA, 19 nt, Artificial Sequence
  Description of Artificial Sequence: Synthetic oligonucleotide
  Antisense strand to SEQ ID NO: 1524618
cucuucacccaauacugcu

SEQ ID NO: 1524620 - RNA, 19 nt, Artificial Sequence
  Description of Artificial Sequence: Synthetic oligonucleotide
  Sense strand starting at position 3379 of SEQ ID NO: 1244944
gcaguauugggugaagagu

SEQ ID NO: 1524621 - RNA, 19 nt, Artificial Sequence
  Description of Artificial Sequence: Synthetic oligonucleotide
  Antisense strand to SEQ ID NO: 1524620
acucuucacccaauacugc

SEQ ID NO: 1524622 - RNA, 19 nt, Artificial Sequence
  Description of Artificial Sequence: Synthetic oligonucleotide
  Sense strand starting at position 3385 of SEQ ID NO: 1244944
uugggugaagaguaauguu

SEQ ID NO: 1524623 - RNA, 19 nt, Artificial Sequence
  Description of Artificial Sequence: Synthetic oligonucleotide
  Antisense strand to SEQ ID NO: 1524622
aacauuacucuucacccaa

SEQ ID NO: 1524624 - RNA, 19 nt, Artificial Sequence
  Description of Artificial Sequence: Synthetic oligonucleotide
  Sense strand starting at position 3418 of SEQ ID NO: 1244944
gugacagucucugcaguuu

SEQ ID NO: 1524625 - RNA, 19 nt, Artificial Sequence
  Description of Artificial Sequence: Synthetic oligonucleotide
  Antisense strand to SEQ ID NO: 1524624
aaacugcagagacugucac

SEQ ID NO: 1524626 - RNA, 19 nt, Artificial Sequence
  Description of Artificial Sequence: Synthetic oligonucleotide
  Sense strand starting at position 3439 of SEQ ID NO: 1244944
ccagguguugucuagaaua

SEQ ID NO: 1524627 - RNA, 19 nt, Artificial Sequence
  Description of Artificial Sequence: Synthetic oligonucleotide
  Antisense strand to SEQ ID NO: 1524626
uauucuagacaacaccugg

SEQ ID NO: 1524628 - RNA, 19 nt, Artificial Sequence
  Description of Artificial Sequence: Synthetic oligonucleotide
  Sense strand starting at position 3441 of SEQ ID NO: 1244944
agguguugucuagaauagg

SEQ ID NO: 1524629 - RNA, 19 nt, Artificial Sequence
  Description of Artificial Sequence: Synthetic oligonucleotide
  Antisense strand to SEQ ID NO: 1524628
ccuauucuagacaacaccu

SEQ ID NO: 1524630 - RNA, 19 nt, Artificial Sequence
  Description of Artificial Sequence: Synthetic oligonucleotide
  Sense strand starting at position 3442 of SEQ ID NO: 1244944
gguguugucuagaauaggu

SEQ ID NO: 1524631 - RNA, 19 nt, Artificial Sequence
  Description of Artificial Sequence: Synthetic oligonucleotide
  Antisense strand to SEQ ID NO: 1524630
accuauucuagacaacacc

SEQ ID NO: 1524632 - RNA, 19 nt, Artificial Sequence
  Description of Artificial Sequence: Synthetic oligonucleotide
  Sense strand starting at position 3608 of SEQ ID NO: 1244944
gaaugagacugucucacac

SEQ ID NO: 1524633 - RNA, 19 nt, Artificial Sequence
  Description of Artificial Sequence: Synthetic oligonucleotide
  Antisense strand to SEQ ID NO: 1524632
gugugagacagucucauuc

SEQ ID NO: 1524634 - RNA, 19 nt, Artificial Sequence
  Description of Artificial Sequence: Synthetic oligonucleotide
  Sense strand starting at position 3647 of SEQ ID NO: 1244944
aggagaaccuagcacuuau

SEQ ID NO: 1524635 - RNA, 19 nt, Artificial Sequence
  Description of Artificial Sequence: Synthetic oligonucleotide
  Antisense strand to SEQ ID NO: 1524634
auaagugcuagguucuccu

SEQ ID NO: 1524636 - RNA, 19 nt, Artificial Sequence
  Description of Artificial Sequence: Synthetic oligonucleotide
  Sense strand starting at position 3771 of SEQ ID NO: 1244944
ggagaaacuuaggaaacgu

SEQ ID NO: 1524637 - RNA, 19 nt, Artificial Sequence
  Description of Artificial Sequence: Synthetic oligonucleotide
  Antisense strand to SEQ ID NO: 1524636
acguuuccuaaguuucucc

SEQ ID NO: 1524638 - RNA, 19 nt, Artificial Sequence
  Description of Artificial Sequence: Synthetic oligonucleotide
  Sense strand starting at position 104 of SEQ ID NO: 1244945
cccaguucugccgggaaga

SEQ ID NO: 1524639 - RNA, 19 nt, Artificial Sequence
  Description of Artificial Sequence: Synthetic oligonucleotide
  Antisense strand to SEQ ID NO: 1524638
ucuucccggcagaacuggg

SEQ ID NO: 1524640 - RNA, 19 nt, Artificial Sequence
  Description of Artificial Sequence: Synthetic oligonucleotide
  Sense strand starting at position 105 of SEQ ID NO: 1244945
ccaguucugccgggaagag

SEQ ID NO: 1524641 - RNA, 19 nt, Artificial Sequence
  Description of Artificial Sequence: Synthetic oligonucleotide
  Antisense strand to SEQ ID NO: 1524640
cucuucccggcagaacugg

SEQ ID NO: 1524642 - RNA, 19 nt, Artificial Sequence
  Description of Artificial Sequence: Synthetic oligonucleotide
  Sense strand starting at position 106 of SEQ ID NO: 1244945
caguucugccgggaagagu

SEQ ID NO: 1524643 - RNA, 19 nt, Artificial Sequence
  Description of Artificial Sequence: Synthetic oligonucleotide
  Antisense strand to SEQ ID NO: 1524642
acucuucccggcagaacug

SEQ ID NO: 1524644 - RNA, 19 nt, Artificial Sequence
  Description of Artificial Sequence: Synthetic oligonucleotide
  Sense strand starting at position 654 of SEQ ID NO: 1244945
gcaaccauguccugguaau

SEQ ID NO: 1524645 - RNA, 19 nt, Artificial Sequence
  Description of Artificial Sequence: Synthetic oligonucleotide
  Antisense strand to SEQ ID NO: 1524644
auuaccaggacaugguugc

SEQ ID NO: 1524646 - RNA, 19 nt, Artificial Sequence
  Description of Artificial Sequence: Synthetic oligonucleotide
  Sense strand starting at position 1191 of SEQ ID NO: 1244945
ugugaauugcuugaaccga

SEQ ID NO: 1524647 - RNA, 19 nt, Artificial Sequence
  Description of Artificial Sequence: Synthetic oligonucleotide
  Antisense strand to SEQ ID NO: 1524646
ucgguucaagcaauucaca

SEQ ID NO: 1524648 - RNA, 19 nt, Artificial Sequence
  Description of Artificial Sequence: Synthetic oligonucleotide
  Sense strand starting at position 1990 of SEQ ID NO: 1244945
cugggcuagucugugaaca

SEQ ID NO: 1524649 - RNA, 19 nt, Artificial Sequence
  Description of Artificial Sequence: Synthetic oligonucleotide
  Antisense strand to SEQ ID NO: 1524648
uguucacagacuagcccag

SEQ ID NO: 1524650 - RNA, 19 nt, Artificial Sequence
  Description of Artificial Sequence: Synthetic oligonucleotide
  Sense strand starting at position 1992 of SEQ ID NO: 1244945
gggcuagucugugaacagu

SEQ ID NO: 1524651 - RNA, 19 nt, Artificial Sequence
  Description of Artificial Sequence: Synthetic oligonucleotide
  Antisense strand to SEQ ID NO: 1524650
acuguucacagacuagccc

SEQ ID NO: 1524652 - RNA, 19 nt, Artificial Sequence
  Description of Artificial Sequence: Synthetic oligonucleotide
  Sense strand starting at position 2059 of SEQ ID NO: 1244945
cggagucacaguugaguca

SEQ ID NO: 1524653 - RNA, 19 nt, Artificial Sequence
  Description of Artificial Sequence: Synthetic oligonucleotide
  Antisense strand to SEQ ID NO: 1524652
ugacucaacugugacuccg

SEQ ID NO: 1524654 - RNA, 19 nt, Artificial Sequence
  Description of Artificial Sequence: Synthetic oligonucleotide
  Sense strand starting at position 2060 of SEQ ID NO: 1244945
ggagucacaguugagucau

SEQ ID NO: 1524655 - RNA, 19 nt, Artificial Sequence
  Description of Artificial Sequence: Synthetic oligonucleotide
  Antisense strand to SEQ ID NO: 1524654
augacucaacugugacucc

SEQ ID NO: 1524656 - RNA, 19 nt, Artificial Sequence
  Description of Artificial Sequence: Synthetic oligonucleotide
  Sense strand starting at position 2066 of SEQ ID NO: 1244945
acaguugagucaugugaag

SEQ ID NO: 1524657 - RNA, 19 nt, Artificial Sequence
  Description of Artificial Sequence: Synthetic oligonucleotide
  Antisense strand to SEQ ID NO: 1524656
cuucacaugacucaacugu

SEQ ID NO: 1524658 - RNA, 19 nt, Artificial Sequence
  Description of Artificial Sequence: Synthetic oligonucleotide
  Sense strand starting at position 2068 of SEQ ID NO: 1244945
aguugagucaugugaagaa

SEQ ID NO: 1524659 - RNA, 19 nt, Artificial Sequence
  Description of Artificial Sequence: Synthetic oligonucleotide
  Antisense strand to SEQ ID NO: 1524658
uucuucacaugacucaacu

SEQ ID NO: 1524660 - RNA, 19 nt, Artificial Sequence
  Description of Artificial Sequence: Synthetic oligonucleotide
  Sense strand starting at position 2108 of SEQ ID NO: 1244945
ggccucugcuuguggagau

SEQ ID NO: 1524661 - RNA, 19 nt, Artificial Sequence
  Description of Artificial Sequence: Synthetic oligonucleotide
  Antisense strand to SEQ ID NO: 1524660
aucuccacaagcagaggcc

SEQ ID NO: 1524662 - RNA, 19 nt, Artificial Sequence
  Description of Artificial Sequence: Synthetic oligonucleotide
  Sense strand starting at position 2109 of SEQ ID NO: 1244945
gccucugcuuguggagaua

SEQ ID NO: 1524663 - RNA, 19 nt, Artificial Sequence
  Description of Artificial Sequence: Synthetic oligonucleotide
  Antisense strand to SEQ ID NO: 1524662
uaucuccacaagcagaggc

SEQ ID NO: 1524664 - RNA, 19 nt, Artificial Sequence
  Description of Artificial Sequence: Synthetic oligonucleotide
  Sense strand starting at position 2112 of SEQ ID NO: 1244945
ucugcuuguggagauauau

SEQ ID NO: 1524665 - RNA, 19 nt, Artificial Sequence
  Description of Artificial Sequence: Synthetic oligonucleotide
  Antisense strand to SEQ ID NO: 1524664
auauaucuccacaagcaga

SEQ ID NO: 1524666 - RNA, 19 nt, Artificial Sequence
  Description of Artificial Sequence: Synthetic oligonucleotide
  Sense strand starting at position 2287 of SEQ ID NO: 1244945
gaaucagacccugguaaau

SEQ ID NO: 1524667 - RNA, 19 nt, Artificial Sequence
  Description of Artificial Sequence: Synthetic oligonucleotide
  Antisense strand to SEQ ID NO: 1524666
auuuaccagggucugauuc

SEQ ID NO: 1524668 - RNA, 19 nt, Artificial Sequence
  Description of Artificial Sequence: Synthetic oligonucleotide
  Sense strand starting at position 2364 of SEQ ID NO: 1244945
cggcuuguucacugcacga

SEQ ID NO: 1524669 - RNA, 19 nt, Artificial Sequence
  Description of Artificial Sequence: Synthetic oligonucleotide
  Antisense strand to SEQ ID NO: 1524668
ucgugcagugaacaagccg

SEQ ID NO: 1524670 - RNA, 19 nt, Artificial Sequence
  Description of Artificial Sequence: Synthetic oligonucleotide
  Sense strand starting at position 2916 of SEQ ID NO: 1244945
ucagaucuuccucggagaa

SEQ ID NO: 1524671 - RNA, 19 nt, Artificial Sequence
  Description of Artificial Sequence: Synthetic oligonucleotide
  Antisense strand to SEQ ID NO: 1524670
uucuccgaggaagaucuga

SEQ ID NO: 1524672 - RNA, 19 nt, Artificial Sequence
  Description of Artificial Sequence: Synthetic oligonucleotide
  Sense strand starting at position 2917 of SEQ ID NO: 1244945
cagaucuuccucggagaag

SEQ ID NO: 1524673 - RNA, 19 nt, Artificial Sequence
  Description of Artificial Sequence: Synthetic oligonucleotide
  Antisense strand to SEQ ID NO: 1524672
cuucuccgaggaagaucug

SEQ ID NO: 1524674 - RNA, 19 nt, Artificial Sequence
  Description of Artificial Sequence: Synthetic oligonucleotide
  Sense strand starting at position 2918 of SEQ ID NO: 1244945
agaucuuccucggagaagu

SEQ ID NO: 1524675 - RNA, 19 nt, Artificial Sequence
  Description of Artificial Sequence: Synthetic oligonucleotide
  Antisense strand to SEQ ID NO: 1524674
acuucuccgaggaagaucu

SEQ ID NO: 1524676 - RNA, 19 nt, Artificial Sequence
  Description of Artificial Sequence: Synthetic oligonucleotide
  Sense strand starting at position 3099 of SEQ ID NO: 1244945
ccaacucagucuguucuaa

SEQ ID NO: 1524677 - RNA, 19 nt, Artificial Sequence
  Description of Artificial Sequence: Synthetic oligonucleotide
  Antisense strand to SEQ ID NO: 1524676
uuagaacagacugaguugg

SEQ ID NO: 1524678 - RNA, 19 nt, Artificial Sequence
  Description of Artificial Sequence: Synthetic oligonucleotide
  Sense strand starting at position 3103 of SEQ ID NO: 1244945
cucagucuguucuaaggau

SEQ ID NO: 1524679 - RNA, 19 nt, Artificial Sequence
  Description of Artificial Sequence: Synthetic oligonucleotide
  Antisense strand to SEQ ID NO: 1524678
auccuuagaacagacugag

SEQ ID NO: 1524680 - RNA, 19 nt, Artificial Sequence
  Description of Artificial Sequence: Synthetic oligonucleotide
  Sense strand starting at position 3107 of SEQ ID NO: 1244945
gucuguucuaaggaugggu

SEQ ID NO: 1524681 - RNA, 19 nt, Artificial Sequence
  Description of Artificial Sequence: Synthetic oligonucleotide
  Antisense strand to SEQ ID NO: 1524680
acccauccuuagaacagac

SEQ ID NO: 1524682 - RNA, 19 nt, Artificial Sequence
  Description of Artificial Sequence: Synthetic oligonucleotide
  Sense strand starting at position 3109 of SEQ ID NO: 1244945
cuguucuaaggauggguaa

SEQ ID NO: 1524683 - RNA, 19 nt, Artificial Sequence
  Description of Artificial Sequence: Synthetic oligonucleotide
  Antisense strand to SEQ ID NO: 1524682
uuacccauccuuagaacag

SEQ ID NO: 1524684 - RNA, 19 nt, Artificial Sequence
  Description of Artificial Sequence: Synthetic oligonucleotide
  Sense strand starting at position 3411 of SEQ ID NO: 1244945
cggccaaagucuggguaau

SEQ ID NO: 1524685 - RNA, 19 nt, Artificial Sequence
  Description of Artificial Sequence: Synthetic oligonucleotide
  Antisense strand to SEQ ID NO: 1524684
auuacccagacuuuggccg

SEQ ID NO: 1524686 - RNA, 19 nt, Artificial Sequence
  Description of Artificial Sequence: Synthetic oligonucleotide
  Sense strand starting at position 3412 of SEQ ID NO: 1244945
ggccaaagucuggguaauc

SEQ ID NO: 1524687 - RNA, 19 nt, Artificial Sequence
  Description of Artificial Sequence: Synthetic oligonucleotide
  Antisense strand to SEQ ID NO: 1524686
gauuacccagacuuuggcc

SEQ ID NO: 1524688 - RNA, 19 nt, Artificial Sequence
  Description of Artificial Sequence: Synthetic oligonucleotide
  Sense strand starting at position 3413 of SEQ ID NO: 1244945
gccaaagucuggguaaucu

SEQ ID NO: 1524689 - RNA, 19 nt, Artificial Sequence
  Description of Artificial Sequence: Synthetic oligonucleotide
  Antisense strand to SEQ ID NO: 1524688
agauuacccagacuuuggc

SEQ ID NO: 1524690 - RNA, 19 nt, Artificial Sequence
  Description of Artificial Sequence: Synthetic oligonucleotide
  Sense strand starting at position 3436 of SEQ ID NO: 1244945
augaaacgaucaucaucua

SEQ ID NO: 1524691 - RNA, 19 nt, Artificial Sequence
  Description of Artificial Sequence: Synthetic oligonucleotide
  Antisense strand to SEQ ID NO: 1524690
uagaugaugaucguuucau

SEQ ID NO: 1524692 - RNA, 19 nt, Artificial Sequence
  Description of Artificial Sequence: Synthetic oligonucleotide
  Sense strand starting at position 3929 of SEQ ID NO: 1244945
cgaggaaugugugcacaga

SEQ ID NO: 1524693 - RNA, 19 nt, Artificial Sequence
  Description of Artificial Sequence: Synthetic oligonucleotide
  Antisense strand to SEQ ID NO: 1524692
ucugugcacacauuccucg

SEQ ID NO: 1524694 - RNA, 19 nt, Artificial Sequence
  Description of Artificial Sequence: Synthetic oligonucleotide
  Sense strand starting at position 3930 of SEQ ID NO: 1244945
gaggaaugugugcacagaa

SEQ ID NO: 1524695 - RNA, 19 nt, Artificial Sequence
  Description of Artificial Sequence: Synthetic oligonucleotide
  Antisense strand to SEQ ID NO: 1524694
uucugugcacacauuccuc

SEQ ID NO: 1524696 - RNA, 19 nt, Artificial Sequence
  Description of Artificial Sequence: Synthetic oligonucleotide
  Sense strand starting at position 3977 of SEQ ID NO: 1244945
ggugccaucuucgagcuaa

SEQ ID NO: 1524697 - RNA, 19 nt, Artificial Sequence
  Description of Artificial Sequence: Synthetic oligonucleotide
  Antisense strand to SEQ ID NO: 1524696
uuagcucgaagauggcacc

SEQ ID NO: 1524698 - RNA, 19 nt, Artificial Sequence
  Description of Artificial Sequence: Synthetic oligonucleotide
  Sense strand starting at position 179 of SEQ ID NO: 1244946
cauaaaguucuggguguuu

SEQ ID NO: 1524699 - RNA, 19 nt, Artificial Sequence
  Description of Artificial Sequence: Synthetic oligonucleotide
  Antisense strand to SEQ ID NO: 1524698
aaacacccagaacuuuaug

SEQ ID NO: 1524700 - RNA, 19 nt, Artificial Sequence
  Description of Artificial Sequence: Synthetic oligonucleotide
  Sense strand starting at position 219 of SEQ ID NO: 1244946
guuccagugucccuaucuu

SEQ ID NO: 1524701 - RNA, 19 nt, Artificial Sequence
  Description of Artificial Sequence: Synthetic oligonucleotide
  Antisense strand to SEQ ID NO: 1524700
aagauagggacacuggaac

SEQ ID NO: 1524702 - RNA, 19 nt, Artificial Sequence
  Description of Artificial Sequence: Synthetic oligonucleotide
  Sense strand starting at position 250 of SEQ ID NO: 1244946
uggccucuggcagggaaau

SEQ ID NO: 1524703 - RNA, 19 nt, Artificial Sequence
  Description of Artificial Sequence: Synthetic oligonucleotide
  Antisense strand to SEQ ID NO: 1524702
auuucccugccagaggcca

SEQ ID NO: 1524704 - RNA, 19 nt, Artificial Sequence
  Description of Artificial Sequence: Synthetic oligonucleotide
  Sense strand starting at position 251 of SEQ ID NO: 1244946
ggccucuggcagggaaauu

SEQ ID NO: 1524705 - RNA, 19 nt, Artificial Sequence
  Description of Artificial Sequence: Synthetic oligonucleotide
  Antisense strand to SEQ ID NO: 1524704
aauuucccugccagaggcc

SEQ ID NO: 1524706 - RNA, 19 nt, Artificial Sequence
  Description of Artificial Sequence: Synthetic oligonucleotide
  Sense strand starting at position 326 of SEQ ID NO: 1244946
cugucucuucucugccaga

SEQ ID NO: 1524707 - RNA, 19 nt, Artificial Sequence
  Description of Artificial Sequence: Synthetic oligonucleotide
  Antisense strand to SEQ ID NO: 1524706
ucuggcagagaagagacag

SEQ ID NO: 1524708 - RNA, 19 nt, Artificial Sequence
  Description of Artificial Sequence: Synthetic oligonucleotide
  Sense strand starting at position 368 of SEQ ID NO: 1244946
agaacaucucagugucuca

SEQ ID NO: 1524709 - RNA, 19 nt, Artificial Sequence
  Description of Artificial Sequence: Synthetic oligonucleotide
  Antisense strand to SEQ ID NO: 1524708
ugagacacugagauguucu

SEQ ID NO: 1524710 - RNA, 19 nt, Artificial Sequence
  Description of Artificial Sequence: Synthetic oligonucleotide
  Sense strand starting at position 582 of SEQ ID NO: 1244946
uuuccacuucgaggcauua

SEQ ID NO: 1524711 - RNA, 19 nt, Artificial Sequence
  Description of Artificial Sequence: Synthetic oligonucleotide
  Antisense strand to SEQ ID NO: 1524710
uaaugccucgaaguggaaa

SEQ ID NO: 1524712 - RNA, 19 nt, Artificial Sequence
  Description of Artificial Sequence: Synthetic oligonucleotide
  Sense strand starting at position 755 of SEQ ID NO: 1244946
gccugaauggcagauuaga

SEQ ID NO: 1524713 - RNA, 19 nt, Artificial Sequence
  Description of Artificial Sequence: Synthetic oligonucleotide
  Antisense strand to SEQ ID NO: 1524712
ucuaaucugccauucaggc

SEQ ID NO: 1524714 - RNA, 19 nt, Artificial Sequence
  Description of Artificial Sequence: Synthetic oligonucleotide
  Sense strand starting at position 896 of SEQ ID NO: 1244946
agaguuaauaacggccaaa

SEQ ID NO: 1524715 - RNA, 19 nt, Artificial Sequence
  Description of Artificial Sequence: Synthetic oligonucleotide
  Antisense strand to SEQ ID NO: 1524714
uuuggccguuauuaacucu

SEQ ID NO: 1524716 - RNA, 19 nt, Artificial Sequence
  Description of Artificial Sequence: Synthetic oligonucleotide
  Sense strand starting at position 932 of SEQ ID NO: 1244946
acguuaucuccuuacccuu

SEQ ID NO: 1524717 - RNA, 19 nt, Artificial Sequence
  Description of Artificial Sequence: Synthetic oligonucleotide
  Antisense strand to SEQ ID NO: 1524716
aaggguaaggagauaacgu

SEQ ID NO: 1524718 - RNA, 19 nt, Artificial Sequence
  Description of Artificial Sequence: Synthetic oligonucleotide
  Sense strand starting at position 988 of SEQ ID NO: 1244946
ccgccuuuaugagcuuuau

SEQ ID NO: 1524719 - RNA, 19 nt, Artificial Sequence
  Description of Artificial Sequence: Synthetic oligonucleotide
  Antisense strand to SEQ ID NO: 1524718
auaaagcucauaaaggcgg

SEQ ID NO: 1524720 - RNA, 19 nt, Artificial Sequence
  Description of Artificial Sequence: Synthetic oligonucleotide
  Sense strand starting at position 1335 of SEQ ID NO: 1244946
gcgcuauaaagcugcauca

SEQ ID NO: 1524721 - RNA, 19 nt, Artificial Sequence
  Description of Artificial Sequence: Synthetic oligonucleotide
  Antisense strand to SEQ ID NO: 1524720
ugaugcagcuuuauagcgc

SEQ ID NO: 1524722 - RNA, 19 nt, Artificial Sequence
  Description of Artificial Sequence: Synthetic oligonucleotide
  Sense strand starting at position 1376 of SEQ ID NO: 1244946
ggcuccauucgugccgaaa

SEQ ID NO: 1524723 - RNA, 19 nt, Artificial Sequence
  Description of Artificial Sequence: Synthetic oligonucleotide
  Antisense strand to SEQ ID NO: 1524722
uuucggcacgaauggagcc

SEQ ID NO: 1524724 - RNA, 19 nt, Artificial Sequence
  Description of Artificial Sequence: Synthetic oligonucleotide
  Sense strand starting at position 1431 of SEQ ID NO: 1244946
guugcucuuccguuugcaa

SEQ ID NO: 1524725 - RNA, 19 nt, Artificial Sequence
  Description of Artificial Sequence: Synthetic oligonucleotide
  Antisense strand to SEQ ID NO: 1524724
uugcaaacggaagagcaac

SEQ ID NO: 1524726 - RNA, 19 nt, Artificial Sequence
  Description of Artificial Sequence: Synthetic oligonucleotide
  Sense strand starting at position 1448 of SEQ ID NO: 1244946
aacggcauguucuuuauca

SEQ ID NO: 1524727 - RNA, 19 nt, Artificial Sequence
  Description of Artificial Sequence: Synthetic oligonucleotide
  Antisense strand to SEQ ID NO: 1524726
ugauaaagaacaugccguu

SEQ ID NO: 1524728 - RNA, 19 nt, Artificial Sequence
  Description of Artificial Sequence: Synthetic oligonucleotide
  Sense strand starting at position 1450 of SEQ ID NO: 1244946
cggcauguucuuuaucacu

SEQ ID NO: 1524729 - RNA, 19 nt, Artificial Sequence
  Description of Artificial Sequence: Synthetic oligonucleotide
  Antisense strand to SEQ ID NO: 1524728
agugauaaagaacaugccg

SEQ ID NO: 1524730 - RNA, 19 nt, Artificial Sequence
  Description of Artificial Sequence: Synthetic oligonucleotide
  Sense strand starting at position 1452 of SEQ ID NO: 1244946
gcauguucuuuaucacucu

SEQ ID NO: 1524731 - RNA, 19 nt, Artificial Sequence
  Description of Artificial Sequence: Synthetic oligonucleotide
  Antisense strand to SEQ ID NO: 1524730
agagugauaaagaacaugc

SEQ ID NO: 1524732 - RNA, 19 nt, Artificial Sequence
  Description of Artificial Sequence: Synthetic oligonucleotide
  Sense strand starting at position 1508 of SEQ ID NO: 1244946
uugggaaucgcguggaaga

SEQ ID NO: 1524733 - RNA, 19 nt, Artificial Sequence
  Description of Artificial Sequence: Synthetic oligonucleotide
  Antisense strand to SEQ ID NO: 1524732
ucuuccacgcgauucccaa

SEQ ID NO: 1524734 - RNA, 19 nt, Artificial Sequence
  Description of Artificial Sequence: Synthetic oligonucleotide
  Sense strand starting at position 2358 of SEQ ID NO: 1244946
ggagguaaagucgagucaa

SEQ ID NO: 1524735 - RNA, 19 nt, Artificial Sequence
  Description of Artificial Sequence: Synthetic oligonucleotide
  Antisense strand to SEQ ID NO: 1524734
uugacucgacuuuaccucc

SEQ ID NO: 1524736 - RNA, 19 nt, Artificial Sequence
  Description of Artificial Sequence: Synthetic oligonucleotide
  Sense strand starting at position 2840 of SEQ ID NO: 1244946
cggagugaucgcugccgga

SEQ ID NO: 1524737 - RNA, 19 nt, Artificial Sequence
  Description of Artificial Sequence: Synthetic oligonucleotide
  Antisense strand to SEQ ID NO: 1524736
uccggcagcgaucacuccg

SEQ ID NO: 1524738 - RNA, 19 nt, Artificial Sequence
  Description of Artificial Sequence: Synthetic oligonucleotide
  Sense strand starting at position 2918 of SEQ ID NO: 1244946
gggcuuguuuggaaugguu

SEQ ID NO: 1524739 - RNA, 19 nt, Artificial Sequence
  Description of Artificial Sequence: Synthetic oligonucleotide
  Antisense strand to SEQ ID NO: 1524738
aaccauuccaaacaagccc

SEQ ID NO: 1524740 - RNA, 19 nt, Artificial Sequence
  Description of Artificial Sequence: Synthetic oligonucleotide
  Sense strand starting at position 3069 of SEQ ID NO: 1244946
ugaccaugugaaugacuca

SEQ ID NO: 1524741 - RNA, 19 nt, Artificial Sequence
  Description of Artificial Sequence: Synthetic oligonucleotide
  Antisense strand to SEQ ID NO: 1524740
ugagucauucacaugguca

SEQ ID NO: 1524742 - RNA, 19 nt, Artificial Sequence
  Description of Artificial Sequence: Synthetic oligonucleotide
  Sense strand starting at position 3076 of SEQ ID NO: 1244946
gugaaugacucacucccau

SEQ ID NO: 1524743 - RNA, 19 nt, Artificial Sequence
  Description of Artificial Sequence: Synthetic oligonucleotide
  Antisense strand to SEQ ID NO: 1524742
augggagugagucauucac

SEQ ID NO: 1524744 - RNA, 19 nt, Artificial Sequence
  Description of Artificial Sequence: Synthetic oligonucleotide
  Sense strand starting at position 3168 of SEQ ID NO: 1244946
ggcuguugucugccuggua

SEQ ID NO: 1524745 - RNA, 19 nt, Artificial Sequence
  Description of Artificial Sequence: Synthetic oligonucleotide
  Antisense strand to SEQ ID NO: 1524744
uaccaggcagacaacagcc

SEQ ID NO: 1524746 - RNA, 19 nt, Artificial Sequence
  Description of Artificial Sequence: Synthetic oligonucleotide
  Sense strand starting at position 3169 of SEQ ID NO: 1244946
gcuguugucugccugguaa

SEQ ID NO: 1524747 - RNA, 19 nt, Artificial Sequence
  Description of Artificial Sequence: Synthetic oligonucleotide
  Antisense strand to SEQ ID NO: 1524746
uuaccaggcagacaacagc

SEQ ID NO: 1524748 - RNA, 19 nt, Artificial Sequence
  Description of Artificial Sequence: Synthetic oligonucleotide
  Sense strand starting at position 3171 of SEQ ID NO: 1244946
uguugucugccugguaagu

SEQ ID NO: 1524749 - RNA, 19 nt, Artificial Sequence
  Description of Artificial Sequence: Synthetic oligonucleotide
  Antisense strand to SEQ ID NO: 1524748
acuuaccaggcagacaaca

SEQ ID NO: 1524750 - RNA, 19 nt, Artificial Sequence
  Description of Artificial Sequence: Synthetic oligonucleotide
  Sense strand starting at position 3262 of SEQ ID NO: 1244946
cuccgugacuguuugguaa

SEQ ID NO: 1524751 - RNA, 19 nt, Artificial Sequence
  Description of Artificial Sequence: Synthetic oligonucleotide
  Antisense strand to SEQ ID NO: 1524750
uuaccaaacagucacggag

SEQ ID NO: 1524752 - RNA, 19 nt, Artificial Sequence
  Description of Artificial Sequence: Synthetic oligonucleotide
  Sense strand starting at position 3265 of SEQ ID NO: 1244946
cgugacuguuugguaaaua

SEQ ID NO: 1524753 - RNA, 19 nt, Artificial Sequence
  Description of Artificial Sequence: Synthetic oligonucleotide
  Antisense strand to SEQ ID NO: 1524752
uauuuaccaaacagucacg

SEQ ID NO: 1524754 - RNA, 19 nt, Artificial Sequence
  Description of Artificial Sequence: Synthetic oligonucleotide
  Sense strand starting at position 3266 of SEQ ID NO: 1244946
gugacuguuugguaaauaa

SEQ ID NO: 1524755 - RNA, 19 nt, Artificial Sequence
  Description of Artificial Sequence: Synthetic oligonucleotide
  Antisense strand to SEQ ID NO: 1524754
uuauuuaccaaacagucac

SEQ ID NO: 1524756 - RNA, 19 nt, Artificial Sequence
  Description of Artificial Sequence: Synthetic oligonucleotide
  Sense strand starting at position 3276 of SEQ ID NO: 1244946
gguaaauaaaugugcugau

SEQ ID NO: 1524757 - RNA, 19 nt, Artificial Sequence
  Description of Artificial Sequence: Synthetic oligonucleotide
  Antisense strand to SEQ ID NO: 1524756
aucagcacauuuauuuacc

SEQ ID NO: 1524758 - RNA, 19 nt, Artificial Sequence
  Description of Artificial Sequence: Synthetic oligonucleotide
  Sense strand starting at position 3307 of SEQ ID NO: 1244946
gaggccugguguuuggaaa

SEQ ID NO: 1524759 - RNA, 19 nt, Artificial Sequence
  Description of Artificial Sequence: Synthetic oligonucleotide
  Antisense strand to SEQ ID NO: 1524758
uuuccaaacaccaggccuc

SEQ ID NO: 1524760 - RNA, 19 nt, Artificial Sequence
  Description of Artificial Sequence: Synthetic oligonucleotide
  Sense strand starting at position 3315 of SEQ ID NO: 1244946
guguuuggaaagcauacau

SEQ ID NO: 1524761 - RNA, 19 nt, Artificial Sequence
  Description of Artificial Sequence: Synthetic oligonucleotide
  Antisense strand to SEQ ID NO: 1524760
auguaugcuuuccaaacac

SEQ ID NO: 1524762 - RNA, 19 nt, Artificial Sequence
  Description of Artificial Sequence: Synthetic oligonucleotide
  Sense strand starting at position 3335 of SEQ ID NO: 1244946
uuggaauagucuggaccua

SEQ ID NO: 1524763 - RNA, 19 nt, Artificial Sequence
  Description of Artificial Sequence: Synthetic oligonucleotide
  Antisense strand to SEQ ID NO: 1524762
uagguccagacuauuccaa

SEQ ID NO: 1524764 - RNA, 19 nt, Artificial Sequence
  Description of Artificial Sequence: Synthetic oligonucleotide
  Sense strand starting at position 3348 of SEQ ID NO: 1244946
gaccuaauucugugugacc

SEQ ID NO: 1524765 - RNA, 19 nt, Artificial Sequence
  Description of Artificial Sequence: Synthetic oligonucleotide
  Antisense strand to SEQ ID NO: 1524764
ggucacacagaauuagguc

SEQ ID NO: 1524766 - RNA, 19 nt, Artificial Sequence
  Description of Artificial Sequence: Synthetic oligonucleotide
  Sense strand starting at position 3349 of SEQ ID NO: 1244946
accuaauucugugugaccu

SEQ ID NO: 1524767 - RNA, 19 nt, Artificial Sequence
  Description of Artificial Sequence: Synthetic oligonucleotide
  Antisense strand to SEQ ID NO: 1524766
aggucacacagaauuaggu

SEQ ID NO: 1524768 - RNA, 19 nt, Artificial Sequence
  Description of Artificial Sequence: Synthetic oligonucleotide
  Sense strand starting at position 3350 of SEQ ID NO: 1244946
ccuaauucugugugaccuu

SEQ ID NO: 1524769 - RNA, 19 nt, Artificial Sequence
  Description of Artificial Sequence: Synthetic oligonucleotide
  Antisense strand to SEQ ID NO: 1524768
aaggucacacagaauuagg

SEQ ID NO: 1524770 - RNA, 19 nt, Artificial Sequence
  Description of Artificial Sequence: Synthetic oligonucleotide
  Sense strand starting at position 3359 of SEQ ID NO: 1244946
gugugaccuugagucucua

SEQ ID NO: 1524771 - RNA, 19 nt, Artificial Sequence
  Description of Artificial Sequence: Synthetic oligonucleotide
  Antisense strand to SEQ ID NO: 1524770
uagagacucaaggucacac

SEQ ID NO: 1524772 - RNA, 19 nt, Artificial Sequence
  Description of Artificial Sequence: Synthetic oligonucleotide
  Sense strand starting at position 3694 of SEQ ID NO: 1244946
uuagcugagccguaauuag

SEQ ID NO: 1524773 - RNA, 19 nt, Artificial Sequence
  Description of Artificial Sequence: Synthetic oligonucleotide
  Antisense strand to SEQ ID NO: 1524772
cuaauuacggcucagcuaa

SEQ ID NO: 1524774 - RNA, 19 nt, Artificial Sequence
  Description of Artificial Sequence: Synthetic oligonucleotide
  Sense strand starting at position 3742 of SEQ ID NO: 1244946
cucauaacauccuggaaag

SEQ ID NO: 1524775 - RNA, 19 nt, Artificial Sequence
  Description of Artificial Sequence: Synthetic oligonucleotide
  Antisense strand to SEQ ID NO: 1524774
cuuuccaggauguuaugag

SEQ ID NO: 1524776 - RNA, 19 nt, Artificial Sequence
  Description of Artificial Sequence: Synthetic oligonucleotide
  Sense strand starting at position 3743 of SEQ ID NO: 1244946
ucauaacauccuggaaagu

SEQ ID NO: 1524777 - RNA, 19 nt, Artificial Sequence
  Description of Artificial Sequence: Synthetic oligonucleotide
  Antisense strand to SEQ ID NO: 1524776
acuuuccaggauguuauga

SEQ ID NO: 1524778 - RNA, 19 nt, Artificial Sequence
  Description of Artificial Sequence: Synthetic oligonucleotide
  Sense strand starting at position 242 of SEQ ID NO: 1244947
uugguuucugcauggagaa

SEQ ID NO: 1524779 - RNA, 19 nt, Artificial Sequence
  Description of Artificial Sequence: Synthetic oligonucleotide
  Antisense strand to SEQ ID NO: 1524778
uucuccaugcagaaaccaa

SEQ ID NO: 1524780 - RNA, 19 nt, Artificial Sequence
  Description of Artificial Sequence: Synthetic oligonucleotide
  Sense strand starting at position 243 of SEQ ID NO: 1244947
ugguuucugcauggagaau

SEQ ID NO: 1524781 - RNA, 19 nt, Artificial Sequence
  Description of Artificial Sequence: Synthetic oligonucleotide
  Antisense strand to SEQ ID NO: 1524780
auucuccaugcagaaacca

SEQ ID NO: 1524782 - RNA, 19 nt, Artificial Sequence
  Description of Artificial Sequence: Synthetic oligonucleotide
  Sense strand starting at position 244 of SEQ ID NO: 1244947
gguuucugcauggagaaua

SEQ ID NO: 1524783 - RNA, 19 nt, Artificial Sequence
  Description of Artificial Sequence: Synthetic oligonucleotide
  Antisense strand to SEQ ID NO: 1524782
uauucuccaugcagaaacc

SEQ ID NO: 1524784 - RNA, 19 nt, Artificial Sequence
  Description of Artificial Sequence: Synthetic oligonucleotide
  Sense strand starting at position 380 of SEQ ID NO: 1244947
uuugcauuuguuggcaaca

SEQ ID NO: 1524785 - RNA, 19 nt, Artificial Sequence
  Description of Artificial Sequence: Synthetic oligonucleotide
  Antisense strand to SEQ ID NO: 1524784
uguugccaacaaaugcaaa

SEQ ID NO: 1524786 - RNA, 19 nt, Artificial Sequence
  Description of Artificial Sequence: Synthetic oligonucleotide
  Sense strand starting at position 495 of SEQ ID NO: 1244947
guaguaaagagauggcgaa

SEQ ID NO: 1524787 - RNA, 19 nt, Artificial Sequence
  Description of Artificial Sequence: Synthetic oligonucleotide
  Antisense strand to SEQ ID NO: 1524786
uucgccaucucuuuacuac

SEQ ID NO: 1524788 - RNA, 19 nt, Artificial Sequence
  Description of Artificial Sequence: Synthetic oligonucleotide
  Sense strand starting at position 517 of SEQ ID NO: 1244947
guauguugaggaggcauua

SEQ ID NO: 1524789 - RNA, 19 nt, Artificial Sequence
  Description of Artificial Sequence: Synthetic oligonucleotide
  Antisense strand to SEQ ID NO: 1524788
uaaugccuccucaacauac

SEQ ID NO: 1524790 - RNA, 19 nt, Artificial Sequence
  Description of Artificial Sequence: Synthetic oligonucleotide
  Sense strand starting at position 526 of SEQ ID NO: 1244947
ggaggcauuaaagaucguu

SEQ ID NO: 1524791 - RNA, 19 nt, Artificial Sequence
  Description of Artificial Sequence: Synthetic oligonucleotide
  Antisense strand to SEQ ID NO: 1524790
aacgaucuuuaaugccucc

SEQ ID NO: 1524792 - RNA, 19 nt, Artificial Sequence
  Description of Artificial Sequence: Synthetic oligonucleotide
  Sense strand starting at position 529 of SEQ ID NO: 1244947
ggcauuaaagaucguuuag

SEQ ID NO: 1524793 - RNA, 19 nt, Artificial Sequence
  Description of Artificial Sequence: Synthetic oligonucleotide
  Antisense strand to SEQ ID NO: 1524792
cuaaacgaucuuuaaugcc

SEQ ID NO: 1524794 - RNA, 19 nt, Artificial Sequence
  Description of Artificial Sequence: Synthetic oligonucleotide
  Sense strand starting at position 554 of SEQ ID NO: 1244947
gcauguuaaaucugagagg

SEQ ID NO: 1524795 - RNA, 19 nt, Artificial Sequence
  Description of Artificial Sequence: Synthetic oligonucleotide
  Antisense strand to SEQ ID NO: 1524794
ccucucagauuuaacaugc

SEQ ID NO: 1524796 - RNA, 19 nt, Artificial Sequence
  Description of Artificial Sequence: Synthetic oligonucleotide
  Sense strand starting at position 559 of SEQ ID NO: 1244947
uuaaaucugagagguaggu

SEQ ID NO: 1524797 - RNA, 19 nt, Artificial Sequence
  Description of Artificial Sequence: Synthetic oligonucleotide
  Antisense strand to SEQ ID NO: 1524796
accuaccucucagauuuaa

SEQ ID NO: 1524798 - RNA, 19 nt, Artificial Sequence
  Description of Artificial Sequence: Synthetic oligonucleotide
  Sense strand starting at position 595 of SEQ ID NO: 1244947
auggcaugucaguagcaca

SEQ ID NO: 1524799 - RNA, 19 nt, Artificial Sequence
  Description of Artificial Sequence: Synthetic oligonucleotide
  Antisense strand to SEQ ID NO: 1524798
ugugcuacugacaugccau

SEQ ID NO: 1524800 - RNA, 19 nt, Artificial Sequence
  Description of Artificial Sequence: Synthetic oligonucleotide
  Sense strand starting at position 647 of SEQ ID NO: 1244947
ggcaucgaguagguauuua

SEQ ID NO: 1524801 - RNA, 19 nt, Artificial Sequence
  Description of Artificial Sequence: Synthetic oligonucleotide
  Antisense strand to SEQ ID NO: 1524800
uaaauaccuacucgaugcc

SEQ ID NO: 1524802 - RNA, 19 nt, Artificial Sequence
  Description of Artificial Sequence: Synthetic oligonucleotide
  Sense strand starting at position 795 of SEQ ID NO: 1244947
cgcuauauacgugcgaaau

SEQ ID NO: 1524803 - RNA, 19 nt, Artificial Sequence
  Description of Artificial Sequence: Synthetic oligonucleotide
  Antisense strand to SEQ ID NO: 1524802
auuucgcacguauauagcg

SEQ ID NO: 1524804 - RNA, 19 nt, Artificial Sequence
  Description of Artificial Sequence: Synthetic oligonucleotide
  Sense strand starting at position 805 of SEQ ID NO: 1244947
gugcgaaauuaugucauuu

SEQ ID NO: 1524805 - RNA, 19 nt, Artificial Sequence
  Description of Artificial Sequence: Synthetic oligonucleotide
  Antisense strand to SEQ ID NO: 1524804
aaaugacauaauuucgcac

SEQ ID NO: 1524806 - RNA, 19 nt, Artificial Sequence
  Description of Artificial Sequence: Synthetic oligonucleotide
  Sense strand starting at position 824 of SEQ ID NO: 1244947
cagauaggcugguuaauug

SEQ ID NO: 1524807 - RNA, 19 nt, Artificial Sequence
  Description of Artificial Sequence: Synthetic oligonucleotide
  Antisense strand to SEQ ID NO: 1524806
caauuaaccagccuaucug

SEQ ID NO: 1524808 - RNA, 19 nt, Artificial Sequence
  Description of Artificial Sequence: Synthetic oligonucleotide
  Sense strand starting at position 828 of SEQ ID NO: 1244947
uaggcugguuaauugauaa

SEQ ID NO: 1524809 - RNA, 19 nt, Artificial Sequence
  Description of Artificial Sequence: Synthetic oligonucleotide
  Antisense strand to SEQ ID NO: 1524808
uuaucaauuaaccagccua

SEQ ID NO: 1524810 - RNA, 19 nt, Artificial Sequence
  Description of Artificial Sequence: Synthetic oligonucleotide
  Sense strand starting at position 863 of SEQ ID NO: 1244947
ucccgauauuucguuugca

SEQ ID NO: 1524811 - RNA, 19 nt, Artificial Sequence
  Description of Artificial Sequence: Synthetic oligonucleotide
  Antisense strand to SEQ ID NO: 1524810
ugcaaacgaaauaucggga

SEQ ID NO: 1524812 - RNA, 19 nt, Artificial Sequence
  Description of Artificial Sequence: Synthetic oligonucleotide
  Sense strand starting at position 864 of SEQ ID NO: 1244947
cccgauauuucguuugcau

SEQ ID NO: 1524813 - RNA, 19 nt, Artificial Sequence
  Description of Artificial Sequence: Synthetic oligonucleotide
  Antisense strand to SEQ ID NO: 1524812
augcaaacgaaauaucggg

SEQ ID NO: 1524814 - RNA, 19 nt, Artificial Sequence
  Description of Artificial Sequence: Synthetic oligonucleotide
  Sense strand starting at position 866 of SEQ ID NO: 1244947
cgauauuucguuugcauaa

SEQ ID NO: 1524815 - RNA, 19 nt, Artificial Sequence
  Description of Artificial Sequence: Synthetic oligonucleotide
  Antisense strand to SEQ ID NO: 1524814
uuaugcaaacgaaauaucg

SEQ ID NO: 1524816 - RNA, 19 nt, Artificial Sequence
  Description of Artificial Sequence: Synthetic oligonucleotide
  Sense strand starting at position 2198 of SEQ ID NO: 1244947
gccuacagugagugauaga

SEQ ID NO: 1524817 - RNA, 19 nt, Artificial Sequence
  Description of Artificial Sequence: Synthetic oligonucleotide
  Antisense strand to SEQ ID NO: 1524816
ucuaucacucacuguaggc

SEQ ID NO: 1524818 - RNA, 19 nt, Artificial Sequence
  Description of Artificial Sequence: Synthetic oligonucleotide
  Sense strand starting at position 2209 of SEQ ID NO: 1244947
gugauagaaacguggaguu

SEQ ID NO: 1524819 - RNA, 19 nt, Artificial Sequence
  Description of Artificial Sequence: Synthetic oligonucleotide
  Antisense strand to SEQ ID NO: 1524818
aacuccacguuucuaucac

SEQ ID NO: 1524820 - RNA, 19 nt, Artificial Sequence
  Description of Artificial Sequence: Synthetic oligonucleotide
  Sense strand starting at position 2211 of SEQ ID NO: 1244947
gauagaaacguggaguucu

SEQ ID NO: 1524821 - RNA, 19 nt, Artificial Sequence
  Description of Artificial Sequence: Synthetic oligonucleotide
  Antisense strand to SEQ ID NO: 1524820
agaacuccacguuucuauc

SEQ ID NO: 1524822 - RNA, 19 nt, Artificial Sequence
  Description of Artificial Sequence: Synthetic oligonucleotide
  Sense strand starting at position 2219 of SEQ ID NO: 1244947
cguggaguucuugauuauu

SEQ ID NO: 1524823 - RNA, 19 nt, Artificial Sequence
  Description of Artificial Sequence: Synthetic oligonucleotide
  Antisense strand to SEQ ID NO: 1524822
aauaaucaagaacuccacg

SEQ ID NO: 1524824 - RNA, 19 nt, Artificial Sequence
  Description of Artificial Sequence: Synthetic oligonucleotide
  Sense strand starting at position 2668 of SEQ ID NO: 1244947
ggaguaaaucuggguauug

SEQ ID NO: 1524825 - RNA, 19 nt, Artificial Sequence
  Description of Artificial Sequence: Synthetic oligonucleotide
  Antisense strand to SEQ ID NO: 1524824
caauacccagauuuacucc

SEQ ID NO: 1524826 - RNA, 19 nt, Artificial Sequence
  Description of Artificial Sequence: Synthetic oligonucleotide
  Sense strand starting at position 2669 of SEQ ID NO: 1244947
gaguaaaucuggguauugu

SEQ ID NO: 1524827 - RNA, 19 nt, Artificial Sequence
  Description of Artificial Sequence: Synthetic oligonucleotide
  Antisense strand to SEQ ID NO: 1524826
acaauacccagauuuacuc

SEQ ID NO: 1524828 - RNA, 19 nt, Artificial Sequence
  Description of Artificial Sequence: Synthetic oligonucleotide
  Sense strand starting at position 2670 of SEQ ID NO: 1244947
aguaaaucuggguauugug

SEQ ID NO: 1524829 - RNA, 19 nt, Artificial Sequence
  Description of Artificial Sequence: Synthetic oligonucleotide
  Antisense strand to SEQ ID NO: 1524828
cacaauacccagauuuacu

SEQ ID NO: 1524830 - RNA, 19 nt, Artificial Sequence
  Description of Artificial Sequence: Synthetic oligonucleotide
  Sense strand starting at position 2726 of SEQ ID NO: 1244947
uuuggcuaugcucaccaaa

SEQ ID NO: 1524831 - RNA, 19 nt, Artificial Sequence
  Description of Artificial Sequence: Synthetic oligonucleotide
  Antisense strand to SEQ ID NO: 1524830
uuuggugagcauagccaaa

SEQ ID NO: 1524832 - RNA, 19 nt, Artificial Sequence
  Description of Artificial Sequence: Synthetic oligonucleotide
  Sense strand starting at position 2746 of SEQ ID NO: 1244947
ucacuugagaaggguugau

SEQ ID NO: 1524833 - RNA, 19 nt, Artificial Sequence
  Description of Artificial Sequence: Synthetic oligonucleotide
  Antisense strand to SEQ ID NO: 1524832
aucaacccuucucaaguga

SEQ ID NO: 1524834 - RNA, 19 nt, Artificial Sequence
  Description of Artificial Sequence: Synthetic oligonucleotide
  Sense strand starting at position 2758 of SEQ ID NO: 1244947
gguugaucucaagaugugu

SEQ ID NO: 1524835 - RNA, 19 nt, Artificial Sequence
  Description of Artificial Sequence: Synthetic oligonucleotide
  Antisense strand to SEQ ID NO: 1524834
acacaucuugagaucaacc

SEQ ID NO: 1524836 - RNA, 19 nt, Artificial Sequence
  Description of Artificial Sequence: Synthetic oligonucleotide
  Sense strand starting at position 2778 of SEQ ID NO: 1244947
cagaguaugcuaggauaag

SEQ ID NO: 1524837 - RNA, 19 nt, Artificial Sequence
  Description of Artificial Sequence: Synthetic oligonucleotide
  Antisense strand to SEQ ID NO: 1524836
cuuauccuagcauacucug

SEQ ID NO: 1524838 - RNA, 19 nt, Artificial Sequence
  Description of Artificial Sequence: Synthetic oligonucleotide
  Sense strand starting at position 2960 of SEQ ID NO: 1244947
aggguuuaucuugaguuac

SEQ ID NO: 1524839 - RNA, 19 nt, Artificial Sequence
  Description of Artificial Sequence: Synthetic oligonucleotide
  Antisense strand to SEQ ID NO: 1524838
guaacucaagauaaacccu

SEQ ID NO: 1524840 - RNA, 19 nt, Artificial Sequence
  Description of Artificial Sequence: Synthetic oligonucleotide
  Sense strand starting at position 2962 of SEQ ID NO: 1244947
gguuuaucuugaguuacug

SEQ ID NO: 1524841 - RNA, 19 nt, Artificial Sequence
  Description of Artificial Sequence: Synthetic oligonucleotide
  Antisense strand to SEQ ID NO: 1524840
caguaacucaagauaaacc

SEQ ID NO: 1524842 - RNA, 19 nt, Artificial Sequence
  Description of Artificial Sequence: Synthetic oligonucleotide
  Sense strand starting at position 3047 of SEQ ID NO: 1244947
aaguauaugugcuugaaag

SEQ ID NO: 1524843 - RNA, 19 nt, Artificial Sequence
  Description of Artificial Sequence: Synthetic oligonucleotide
  Antisense strand to SEQ ID NO: 1524842
cuuucaagcacauauacuu

SEQ ID NO: 1524844 - RNA, 19 nt, Artificial Sequence
  Description of Artificial Sequence: Synthetic oligonucleotide
  Sense strand starting at position 3048 of SEQ ID NO: 1244947
aguauaugugcuugaaaga

SEQ ID NO: 1524845 - RNA, 19 nt, Artificial Sequence
  Description of Artificial Sequence: Synthetic oligonucleotide
  Antisense strand to SEQ ID NO: 1524844
ucuuucaagcacauauacu

SEQ ID NO: 1524846 - RNA, 19 nt, Artificial Sequence
  Description of Artificial Sequence: Synthetic oligonucleotide
  Sense strand starting at position 3049 of SEQ ID NO: 1244947
guauaugugcuugaaagau

SEQ ID NO: 1524847 - RNA, 19 nt, Artificial Sequence
  Description of Artificial Sequence: Synthetic oligonucleotide
  Antisense strand to SEQ ID NO: 1524846
aucuuucaagcacauauac

SEQ ID NO: 1524848 - RNA, 19 nt, Artificial Sequence
  Description of Artificial Sequence: Synthetic oligonucleotide
  Sense strand starting at position 3053 of SEQ ID NO: 1244947
augugcuugaaagauuagu

SEQ ID NO: 1524849 - RNA, 19 nt, Artificial Sequence
  Description of Artificial Sequence: Synthetic oligonucleotide
  Antisense strand to SEQ ID NO: 1524848
acuaaucuuucaagcacau

SEQ ID NO: 1524850 - RNA, 19 nt, Artificial Sequence
  Description of Artificial Sequence: Synthetic oligonucleotide
  Sense strand starting at position 3061 of SEQ ID NO: 1244947
gaaagauuagugcagccaa

SEQ ID NO: 1524851 - RNA, 19 nt, Artificial Sequence
  Description of Artificial Sequence: Synthetic oligonucleotide
  Antisense strand to SEQ ID NO: 1524850
uuggcugcacuaaucuuuc

SEQ ID NO: 1524852 - RNA, 19 nt, Artificial Sequence
  Description of Artificial Sequence: Synthetic oligonucleotide
  Sense strand starting at position 3222 of SEQ ID NO: 1244947
gugucugaauagguuaauc

SEQ ID NO: 1524853 - RNA, 19 nt, Artificial Sequence
  Description of Artificial Sequence: Synthetic oligonucleotide
  Antisense strand to SEQ ID NO: 1524852
gauuaaccuauucagacac

SEQ ID NO: 1524854 - RNA, 19 nt, Artificial Sequence
  Description of Artificial Sequence: Synthetic oligonucleotide
  Sense strand starting at position 3224 of SEQ ID NO: 1244947
gucugaauagguuaaucca

SEQ ID NO: 1524855 - RNA, 19 nt, Artificial Sequence
  Description of Artificial Sequence: Synthetic oligonucleotide
  Antisense strand to SEQ ID NO: 1524854
uggauuaaccuauucagac

SEQ ID NO: 1524856 - RNA, 19 nt, Artificial Sequence
  Description of Artificial Sequence: Synthetic oligonucleotide
  Sense strand starting at position 3227 of SEQ ID NO: 1244947
ugaauagguuaauccauac

SEQ ID NO: 1524857 - RNA, 19 nt, Artificial Sequence
  Description of Artificial Sequence: Synthetic oligonucleotide
  Antisense strand to SEQ ID NO: 1524856
guauggauuaaccuauuca

SEQ ID NO: 1524858 - RNA, 19 nt, Artificial Sequence
  Description of Artificial Sequence: Synthetic oligonucleotide
  Sense strand starting at position 47 of SEQ ID NO: 1244948
acgagauccugucucugaa

SEQ ID NO: 1524859 - RNA, 19 nt, Artificial Sequence
  Description of Artificial Sequence: Synthetic oligonucleotide
  Antisense strand to SEQ ID NO: 1524858
uucagagacaggaucucgu

SEQ ID NO: 1524860 - RNA, 19 nt, Artificial Sequence
  Description of Artificial Sequence: Synthetic oligonucleotide
  Sense strand starting at position 95 of SEQ ID NO: 1244948
uuuccuuaugcagauguca

SEQ ID NO: 1524861 - RNA, 19 nt, Artificial Sequence
  Description of Artificial Sequence: Synthetic oligonucleotide
  Antisense strand to SEQ ID NO: 1524860
ugacaucugcauaaggaaa

SEQ ID NO: 1524862 - RNA, 19 nt, Artificial Sequence
  Description of Artificial Sequence: Synthetic oligonucleotide
  Sense strand starting at position 104 of SEQ ID NO: 1244948
gcagaugucagauguguag

SEQ ID NO: 1524863 - RNA, 19 nt, Artificial Sequence
  Description of Artificial Sequence: Synthetic oligonucleotide
  Antisense strand to SEQ ID NO: 1524862
cuacacaucugacaucugc

SEQ ID NO: 1524864 - RNA, 19 nt, Artificial Sequence
  Description of Artificial Sequence: Synthetic oligonucleotide
  Sense strand starting at position 106 of SEQ ID NO: 1244948
agaugucagauguguaguu

SEQ ID NO: 1524865 - RNA, 19 nt, Artificial Sequence
  Description of Artificial Sequence: Synthetic oligonucleotide
  Antisense strand to SEQ ID NO: 1524864
aacuacacaucugacaucu

SEQ ID NO: 1524866 - RNA, 19 nt, Artificial Sequence
  Description of Artificial Sequence: Synthetic oligonucleotide
  Sense strand starting at position 107 of SEQ ID NO: 1244948
gaugucagauguguaguuu

SEQ ID NO: 1524867 - RNA, 19 nt, Artificial Sequence
  Description of Artificial Sequence: Synthetic oligonucleotide
  Antisense strand to SEQ ID NO: 1524866
aaacuacacaucugacauc

SEQ ID NO: 1524868 - RNA, 19 nt, Artificial Sequence
  Description of Artificial Sequence: Synthetic oligonucleotide
  Sense strand starting at position 128 of SEQ ID NO: 1244948
ugguuagcaccucagcauu

SEQ ID NO: 1524869 - RNA, 19 nt, Artificial Sequence
  Description of Artificial Sequence: Synthetic oligonucleotide
  Antisense strand to SEQ ID NO: 1524868
aaugcugaggugcuaacca

SEQ ID NO: 1524870 - RNA, 19 nt, Artificial Sequence
  Description of Artificial Sequence: Synthetic oligonucleotide
  Sense strand starting at position 748 of SEQ ID NO: 1244948
ugcaauuuauacuaggguu

SEQ ID NO: 1524871 - RNA, 19 nt, Artificial Sequence
  Description of Artificial Sequence: Synthetic oligonucleotide
  Antisense strand to SEQ ID NO: 1524870
aacccuaguauaaauugca

SEQ ID NO: 1524872 - RNA, 19 nt, Artificial Sequence
  Description of Artificial Sequence: Synthetic oligonucleotide
  Sense strand starting at position 756 of SEQ ID NO: 1244948
auacuaggguuacuauaau

SEQ ID NO: 1524873 - RNA, 19 nt, Artificial Sequence
  Description of Artificial Sequence: Synthetic oligonucleotide
  Antisense strand to SEQ ID NO: 1524872
auuauaguaacccuaguau

SEQ ID NO: 1524874 - RNA, 19 nt, Artificial Sequence
  Description of Artificial Sequence: Synthetic oligonucleotide
  Sense strand starting at position 793 of SEQ ID NO: 1244948
agcagcucaccucaguaau

SEQ ID NO: 1524875 - RNA, 19 nt, Artificial Sequence
  Description of Artificial Sequence: Synthetic oligonucleotide
  Antisense strand to SEQ ID NO: 1524874
auuacugaggugagcugcu

SEQ ID NO: 1524876 - RNA, 19 nt, Artificial Sequence
  Description of Artificial Sequence: Synthetic oligonucleotide
  Sense strand starting at position 1161 of SEQ ID NO: 1244948
ccaaucugccagcaaauga

SEQ ID NO: 1524877 - RNA, 19 nt, Artificial Sequence
  Description of Artificial Sequence: Synthetic oligonucleotide
  Antisense strand to SEQ ID NO: 1524876
ucauuugcuggcagauugg

SEQ ID NO: 1524878 - RNA, 19 nt, Artificial Sequence
  Description of Artificial Sequence: Synthetic oligonucleotide
  Sense strand starting at position 1211 of SEQ ID NO: 1244948
ccgguuaaucaugaaacau

SEQ ID NO: 1524879 - RNA, 19 nt, Artificial Sequence
  Description of Artificial Sequence: Synthetic oligonucleotide
  Antisense strand to SEQ ID NO: 1524878
auguuucaugauuaaccgg

SEQ ID NO: 1524880 - RNA, 19 nt, Artificial Sequence
  Description of Artificial Sequence: Synthetic oligonucleotide
  Sense strand starting at position 1255 of SEQ ID NO: 1244948
acuguuaacgcagagaaug

SEQ ID NO: 1524881 - RNA, 19 nt, Artificial Sequence
  Description of Artificial Sequence: Synthetic oligonucleotide
  Antisense strand to SEQ ID NO: 1524880
cauucucugcguuaacagu

SEQ ID NO: 1524882 - RNA, 19 nt, Artificial Sequence
  Description of Artificial Sequence: Synthetic oligonucleotide
  Sense strand starting at position 1267 of SEQ ID NO: 1244948
gagaauggagauugcaagu

SEQ ID NO: 1524883 - RNA, 19 nt, Artificial Sequence
  Description of Artificial Sequence: Synthetic oligonucleotide
  Antisense strand to SEQ ID NO: 1524882
acuugcaaucuccauucuc

SEQ ID NO: 1524884 - RNA, 19 nt, Artificial Sequence
  Description of Artificial Sequence: Synthetic oligonucleotide
  Sense strand starting at position 1327 of SEQ ID NO: 1244948
acagcaguguguccaucaa

SEQ ID NO: 1524885 - RNA, 19 nt, Artificial Sequence
  Description of Artificial Sequence: Synthetic oligonucleotide
  Antisense strand to SEQ ID NO: 1524884
uugauggacacacugcugu

SEQ ID NO: 1524886 - RNA, 19 nt, Artificial Sequence
  Description of Artificial Sequence: Synthetic oligonucleotide
  Sense strand starting at position 1385 of SEQ ID NO: 1244948
ucaucaagaccucaguguu

SEQ ID NO: 1524887 - RNA, 19 nt, Artificial Sequence
  Description of Artificial Sequence: Synthetic oligonucleotide
  Antisense strand to SEQ ID NO: 1524886
aacacugaggucuugauga

SEQ ID NO: 1524888 - RNA, 19 nt, Artificial Sequence
  Description of Artificial Sequence: Synthetic oligonucleotide
  Sense strand starting at position 1388 of SEQ ID NO: 1244948
ucaagaccucaguguuauc

SEQ ID NO: 1524889 - RNA, 19 nt, Artificial Sequence
  Description of Artificial Sequence: Synthetic oligonucleotide
  Antisense strand to SEQ ID NO: 1524888
gauaacacugaggucuuga

SEQ ID NO: 1524890 - RNA, 19 nt, Artificial Sequence
  Description of Artificial Sequence: Synthetic oligonucleotide
  Sense strand starting at position 1393 of SEQ ID NO: 1244948
accucaguguuaucugcaa

SEQ ID NO: 1524891 - RNA, 19 nt, Artificial Sequence
  Description of Artificial Sequence: Synthetic oligonucleotide
  Antisense strand to SEQ ID NO: 1524890
uugcagauaacacugaggu

SEQ ID NO: 1524892 - RNA, 19 nt, Artificial Sequence
  Description of Artificial Sequence: Synthetic oligonucleotide
  Sense strand starting at position 1757 of SEQ ID NO: 1244948
ggugauggauagguugaga

SEQ ID NO: 1524893 - RNA, 19 nt, Artificial Sequence
  Description of Artificial Sequence: Synthetic oligonucleotide
  Antisense strand to SEQ ID NO: 1524892
ucucaaccuauccaucacc

SEQ ID NO: 1524894 - RNA, 19 nt, Artificial Sequence
  Description of Artificial Sequence: Synthetic oligonucleotide
  Sense strand starting at position 2039 of SEQ ID NO: 1244948
cccggauucuggguacaac

SEQ ID NO: 1524895 - RNA, 19 nt, Artificial Sequence
  Description of Artificial Sequence: Synthetic oligonucleotide
  Antisense strand to SEQ ID NO: 1524894
guuguacccagaauccggg

SEQ ID NO: 1524896 - RNA, 19 nt, Artificial Sequence
  Description of Artificial Sequence: Synthetic oligonucleotide
  Sense strand starting at position 2224 of SEQ ID NO: 1244948
gaggguuggaggcaaaguu

SEQ ID NO: 1524897 - RNA, 19 nt, Artificial Sequence
  Description of Artificial Sequence: Synthetic oligonucleotide
  Antisense strand to SEQ ID NO: 1524896
aacuuugccuccaacccuc

SEQ ID NO: 1524898 - RNA, 19 nt, Artificial Sequence
  Description of Artificial Sequence: Synthetic oligonucleotide
  Sense strand starting at position 2251 of SEQ ID NO: 1244948
ggaugaggcauacguggua

SEQ ID NO: 1524899 - RNA, 19 nt, Artificial Sequence
  Description of Artificial Sequence: Synthetic oligonucleotide
  Antisense strand to SEQ ID NO: 1524898
uaccacguaugccucaucc

SEQ ID NO: 1524900 - RNA, 19 nt, Artificial Sequence
  Description of Artificial Sequence: Synthetic oligonucleotide
  Sense strand starting at position 2510 of SEQ ID NO: 1244948
gcaguuauuugagcagcua

SEQ ID NO: 1524901 - RNA, 19 nt, Artificial Sequence
  Description of Artificial Sequence: Synthetic oligonucleotide
  Antisense strand to SEQ ID NO: 1524900
uagcugcucaaauaacugc

SEQ ID NO: 1524902 - RNA, 19 nt, Artificial Sequence
  Description of Artificial Sequence: Synthetic oligonucleotide
  Sense strand starting at position 2538 of SEQ ID NO: 1244948
ggccuugaccaaggcauau

SEQ ID NO: 1524903 - RNA, 19 nt, Artificial Sequence
  Description of Artificial Sequence: Synthetic oligonucleotide
  Antisense strand to SEQ ID NO: 1524902
auaugccuuggucaaggcc

SEQ ID NO: 1524904 - RNA, 19 nt, Artificial Sequence
  Description of Artificial Sequence: Synthetic oligonucleotide
  Sense strand starting at position 2638 of SEQ ID NO: 1244948
cuaaguagcuugcuuaacu

SEQ ID NO: 1524905 - RNA, 19 nt, Artificial Sequence
  Description of Artificial Sequence: Synthetic oligonucleotide
  Antisense strand to SEQ ID NO: 1524904
aguuaagcaagcuacuuag

SEQ ID NO: 1524906 - RNA, 19 nt, Artificial Sequence
  Description of Artificial Sequence: Synthetic oligonucleotide
  Sense strand starting at position 2682 of SEQ ID NO: 1244948
guccuaaugucauuguuaa

SEQ ID NO: 1524907 - RNA, 19 nt, Artificial Sequence
  Description of Artificial Sequence: Synthetic oligonucleotide
  Antisense strand to SEQ ID NO: 1524906
uuaacaaugacauuaggac

SEQ ID NO: 1524908 - RNA, 19 nt, Artificial Sequence
  Description of Artificial Sequence: Synthetic oligonucleotide
  Sense strand starting at position 2683 of SEQ ID NO: 1244948
uccuaaugucauuguuaaa

SEQ ID NO: 1524909 - RNA, 19 nt, Artificial Sequence
  Description of Artificial Sequence: Synthetic oligonucleotide
  Antisense strand to SEQ ID NO: 1524908
uuuaacaaugacauuagga

SEQ ID NO: 1524910 - RNA, 19 nt, Artificial Sequence
  Description of Artificial Sequence: Synthetic oligonucleotide
  Sense strand starting at position 2780 of SEQ ID NO: 1244948
auauuugaguaagaucagu

SEQ ID NO: 1524911 - RNA, 19 nt, Artificial Sequence
  Description of Artificial Sequence: Synthetic oligonucleotide
  Antisense strand to SEQ ID NO: 1524910
acugaucuuacucaaauau

SEQ ID NO: 1524912 - RNA, 19 nt, Artificial Sequence
  Description of Artificial Sequence: Synthetic oligonucleotide
  Sense strand starting at position 2785 of SEQ ID NO: 1244948
ugaguaagaucaguggauu

SEQ ID NO: 1524913 - RNA, 19 nt, Artificial Sequence
  Description of Artificial Sequence: Synthetic oligonucleotide
  Antisense strand to SEQ ID NO: 1524912
aauccacugaucuuacuca

SEQ ID NO: 1524914 - RNA, 19 nt, Artificial Sequence
  Description of Artificial Sequence: Synthetic oligonucleotide
  Sense strand starting at position 2786 of SEQ ID NO: 1244948
gaguaagaucaguggauug

SEQ ID NO: 1524915 - RNA, 19 nt, Artificial Sequence
  Description of Artificial Sequence: Synthetic oligonucleotide
  Antisense strand to SEQ ID NO: 1524914
caauccacugaucuuacuc

SEQ ID NO: 1524916 - RNA, 19 nt, Artificial Sequence
  Description of Artificial Sequence: Synthetic oligonucleotide
  Sense strand starting at position 2798 of SEQ ID NO: 1244948
uggauuguaucagugucaa

SEQ ID NO: 1524917 - RNA, 19 nt, Artificial Sequence
  Description of Artificial Sequence: Synthetic oligonucleotide
  Antisense strand to SEQ ID NO: 1524916
uugacacugauacaaucca

SEQ ID NO: 1524918 - RNA, 19 nt, Artificial Sequence
  Description of Artificial Sequence: Synthetic oligonucleotide
  Sense strand starting at position 2851 of SEQ ID NO: 1244948
ggauguuaccauugggaga

SEQ ID NO: 1524919 - RNA, 19 nt, Artificial Sequence
  Description of Artificial Sequence: Synthetic oligonucleotide
  Antisense strand to SEQ ID NO: 1524918
ucucccaaugguaacaucc

SEQ ID NO: 1524920 - RNA, 19 nt, Artificial Sequence
  Description of Artificial Sequence: Synthetic oligonucleotide
  Sense strand starting at position 2971 of SEQ ID NO: 1244948
uaauauggucccugcuuga

SEQ ID NO: 1524921 - RNA, 19 nt, Artificial Sequence
  Description of Artificial Sequence: Synthetic oligonucleotide
  Antisense strand to SEQ ID NO: 1524920
ucaagcagggaccauauua

SEQ ID NO: 1524922 - RNA, 19 nt, Artificial Sequence
  Description of Artificial Sequence: Synthetic oligonucleotide
  Sense strand starting at position 3033 of SEQ ID NO: 1244948
cggccacuuaagugauauu

SEQ ID NO: 1524923 - RNA, 19 nt, Artificial Sequence
  Description of Artificial Sequence: Synthetic oligonucleotide
  Antisense strand to SEQ ID NO: 1524922
aauaucacuuaaguggccg

SEQ ID NO: 1524924 - RNA, 19 nt, Artificial Sequence
  Description of Artificial Sequence: Synthetic oligonucleotide
  Sense strand starting at position 3103 of SEQ ID NO: 1244948
gugugaaacccaggcaaau

SEQ ID NO: 1524925 - RNA, 19 nt, Artificial Sequence
  Description of Artificial Sequence: Synthetic oligonucleotide
  Antisense strand to SEQ ID NO: 1524924
auuugccuggguuucacac

SEQ ID NO: 1524926 - RNA, 19 nt, Artificial Sequence
  Description of Artificial Sequence: Synthetic oligonucleotide
  Sense strand starting at position 3477 of SEQ ID NO: 1244948
auuguagccuguguaacaa

SEQ ID NO: 1524927 - RNA, 19 nt, Artificial Sequence
  Description of Artificial Sequence: Synthetic oligonucleotide
  Antisense strand to SEQ ID NO: 1524926
uuguuacacaggcuacaau

SEQ ID NO: 1524928 - RNA, 19 nt, Artificial Sequence
  Description of Artificial Sequence: Synthetic oligonucleotide
  Sense strand starting at position 3607 of SEQ ID NO: 1244948
cagugaaacugguccuguu

SEQ ID NO: 1524929 - RNA, 19 nt, Artificial Sequence
  Description of Artificial Sequence: Synthetic oligonucleotide
  Antisense strand to SEQ ID NO: 1524928
aacaggaccaguuucacug

SEQ ID NO: 1524930 - RNA, 19 nt, Artificial Sequence
  Description of Artificial Sequence: Synthetic oligonucleotide
  Sense strand starting at position 3628 of SEQ ID NO: 1244948
aaguuaaggugggcucauu

SEQ ID NO: 1524931 - RNA, 19 nt, Artificial Sequence
  Description of Artificial Sequence: Synthetic oligonucleotide
  Antisense strand to SEQ ID NO: 1524930
aaugagcccaccuuaacuu

SEQ ID NO: 1524932 - RNA, 19 nt, Artificial Sequence
  Description of Artificial Sequence: Synthetic oligonucleotide
  Sense strand starting at position 3638 of SEQ ID NO: 1244948
gggcucauugaugaguuga

SEQ ID NO: 1524933 - RNA, 19 nt, Artificial Sequence
  Description of Artificial Sequence: Synthetic oligonucleotide
  Antisense strand to SEQ ID NO: 1524932
ucaacucaucaaugagccc

SEQ ID NO: 1524934 - RNA, 19 nt, Artificial Sequence
  Description of Artificial Sequence: Synthetic oligonucleotide
  Sense strand starting at position 3646 of SEQ ID NO: 1244948
ugaugaguugaggacuguu

SEQ ID NO: 1524935 - RNA, 19 nt, Artificial Sequence
  Description of Artificial Sequence: Synthetic oligonucleotide
  Antisense strand to SEQ ID NO: 1524934
aacaguccucaacucauca

SEQ ID NO: 1524936 - RNA, 19 nt, Artificial Sequence
  Description of Artificial Sequence: Synthetic oligonucleotide
  Sense strand starting at position 3656 of SEQ ID NO: 1244948
aggacuguugcuggagcaa

SEQ ID NO: 1524937 - RNA, 19 nt, Artificial Sequence
  Description of Artificial Sequence: Synthetic oligonucleotide
  Antisense strand to SEQ ID NO: 1524936
uugcuccagcaacaguccu

SEQ ID NO: 1524938 - RNA, 19 nt, Artificial Sequence
  Description of Artificial Sequence: Synthetic oligonucleotide
  Sense strand starting at position 4 of SEQ ID NO: 1244949
acgggcauccuauaaauga

SEQ ID NO: 1524939 - RNA, 19 nt, Artificial Sequence
  Description of Artificial Sequence: Synthetic oligonucleotide
  Antisense strand to SEQ ID NO: 1524938
ucauuuauaggaugcccgu

SEQ ID NO: 1524940 - RNA, 19 nt, Artificial Sequence
  Description of Artificial Sequence: Synthetic oligonucleotide
  Sense strand starting at position 142 of SEQ ID NO: 1244949
uauauagagcacugaaagu

SEQ ID NO: 1524941 - RNA, 19 nt, Artificial Sequence
  Description of Artificial Sequence: Synthetic oligonucleotide
  Antisense strand to SEQ ID NO: 1524940
acuuucagugcucuauaua

SEQ ID NO: 1524942 - RNA, 19 nt, Artificial Sequence
  Description of Artificial Sequence: Synthetic oligonucleotide
  Sense strand starting at position 259 of SEQ ID NO: 1244949
cuggaagcaucccucugaa

SEQ ID NO: 1524943 - RNA, 19 nt, Artificial Sequence
  Description of Artificial Sequence: Synthetic oligonucleotide
  Antisense strand to SEQ ID NO: 1524942
uucagagggaugcuuccag

SEQ ID NO: 1524944 - RNA, 19 nt, Artificial Sequence
  Description of Artificial Sequence: Synthetic oligonucleotide
  Sense strand starting at position 333 of SEQ ID NO: 1244949
agguaagaccucuggaucu

SEQ ID NO: 1524945 - RNA, 19 nt, Artificial Sequence
  Description of Artificial Sequence: Synthetic oligonucleotide
  Antisense strand to SEQ ID NO: 1524944
agauccagaggucuuaccu

SEQ ID NO: 1524946 - RNA, 19 nt, Artificial Sequence
  Description of Artificial Sequence: Synthetic oligonucleotide
  Sense strand starting at position 370 of SEQ ID NO: 1244949
uccaacucaguaugucaua

SEQ ID NO: 1524947 - RNA, 19 nt, Artificial Sequence
  Description of Artificial Sequence: Synthetic oligonucleotide
  Antisense strand to SEQ ID NO: 1524946
uaugacauacugaguugga

SEQ ID NO: 1524948 - RNA, 19 nt, Artificial Sequence
  Description of Artificial Sequence: Synthetic oligonucleotide
  Sense strand starting at position 371 of SEQ ID NO: 1244949
ccaacucaguaugucauaa

SEQ ID NO: 1524949 - RNA, 19 nt, Artificial Sequence
  Description of Artificial Sequence: Synthetic oligonucleotide
  Antisense strand to SEQ ID NO: 1524948
uuaugacauacugaguugg

SEQ ID NO: 1524950 - RNA, 19 nt, Artificial Sequence
  Description of Artificial Sequence: Synthetic oligonucleotide
  Sense strand starting at position 664 of SEQ ID NO: 1244949
ugacaagucaccuguagug

SEQ ID NO: 1524951 - RNA, 19 nt, Artificial Sequence
  Description of Artificial Sequence: Synthetic oligonucleotide
  Antisense strand to SEQ ID NO: 1524950
cacuacaggugacuuguca

SEQ ID NO: 1524952 - RNA, 19 nt, Artificial Sequence
  Description of Artificial Sequence: Synthetic oligonucleotide
  Sense strand starting at position 689 of SEQ ID NO: 1244949
auaagaaucuugcugacuu

SEQ ID NO: 1524953 - RNA, 19 nt, Artificial Sequence
  Description of Artificial Sequence: Synthetic oligonucleotide
  Antisense strand to SEQ ID NO: 1524952
aagucagcaagauucuuau

SEQ ID NO: 1524954 - RNA, 19 nt, Artificial Sequence
  Description of Artificial Sequence: Synthetic oligonucleotide
  Sense strand starting at position 735 of SEQ ID NO: 1244949
cugagaaauucugcaagau

SEQ ID NO: 1524955 - RNA, 19 nt, Artificial Sequence
  Description of Artificial Sequence: Synthetic oligonucleotide
  Antisense strand to SEQ ID NO: 1524954
aucuugcagaauuucucag

SEQ ID NO: 1524956 - RNA, 19 nt, Artificial Sequence
  Description of Artificial Sequence: Synthetic oligonucleotide
  Sense strand starting at position 861 of SEQ ID NO: 1244949
uaguuucuagaauguguga

SEQ ID NO: 1524957 - RNA, 19 nt, Artificial Sequence
  Description of Artificial Sequence: Synthetic oligonucleotide
  Antisense strand to SEQ ID NO: 1524956
ucacacauucuagaaacua

SEQ ID NO: 1524958 - RNA, 19 nt, Artificial Sequence
  Description of Artificial Sequence: Synthetic oligonucleotide
  Sense strand starting at position 911 of SEQ ID NO: 1244949
ucagcuucuguauaaguaa

SEQ ID NO: 1524959 - RNA, 19 nt, Artificial Sequence
  Description of Artificial Sequence: Synthetic oligonucleotide
  Antisense strand to SEQ ID NO: 1524958
uuacuuauacagaagcuga

SEQ ID NO: 1524960 - RNA, 19 nt, Artificial Sequence
  Description of Artificial Sequence: Synthetic oligonucleotide
  Sense strand starting at position 1337 of SEQ ID NO: 1244949
ggagaacuuucugcaaagc

SEQ ID NO: 1524961 - RNA, 19 nt, Artificial Sequence
  Description of Artificial Sequence: Synthetic oligonucleotide
  Antisense strand to SEQ ID NO: 1524960
gcuuugcagaaaguucucc

SEQ ID NO: 1524962 - RNA, 19 nt, Artificial Sequence
  Description of Artificial Sequence: Synthetic oligonucleotide
  Sense strand starting at position 1444 of SEQ ID NO: 1244949
gacuaugccggccaugaaa

SEQ ID NO: 1524963 - RNA, 19 nt, Artificial Sequence
  Description of Artificial Sequence: Synthetic oligonucleotide
  Antisense strand to SEQ ID NO: 1524962
uuucauggccggcauaguc

SEQ ID NO: 1524964 - RNA, 19 nt, Artificial Sequence
  Description of Artificial Sequence: Synthetic oligonucleotide
  Sense strand starting at position 1467 of SEQ ID NO: 1244949
ggaagugucuugcuggaag

SEQ ID NO: 1524965 - RNA, 19 nt, Artificial Sequence
  Description of Artificial Sequence: Synthetic oligonucleotide
  Antisense strand to SEQ ID NO: 1524964
cuuccagcaagacacuucc

SEQ ID NO: 1524966 - RNA, 19 nt, Artificial Sequence
  Description of Artificial Sequence: Synthetic oligonucleotide
  Sense strand starting at position 1470 of SEQ ID NO: 1244949
agugucuugcuggaagguu

SEQ ID NO: 1524967 - RNA, 19 nt, Artificial Sequence
  Description of Artificial Sequence: Synthetic oligonucleotide
  Antisense strand to SEQ ID NO: 1524966
aaccuuccagcaagacacu

SEQ ID NO: 1524968 - RNA, 19 nt, Artificial Sequence
  Description of Artificial Sequence: Synthetic oligonucleotide
  Sense strand starting at position 1478 of SEQ ID NO: 1244949
gcuggaagguuucuccaga

SEQ ID NO: 1524969 - RNA, 19 nt, Artificial Sequence
  Description of Artificial Sequence: Synthetic oligonucleotide
  Antisense strand to SEQ ID NO: 1524968
ucuggagaaaccuuccagc

SEQ ID NO: 1524970 - RNA, 19 nt, Artificial Sequence
  Description of Artificial Sequence: Synthetic oligonucleotide
  Sense strand starting at position 1547 of SEQ ID NO: 1244949
gaugaagagaguuguguga

SEQ ID NO: 1524971 - RNA, 19 nt, Artificial Sequence
  Description of Artificial Sequence: Synthetic oligonucleotide
  Antisense strand to SEQ ID NO: 1524970
ucacacaacucucuucauc

SEQ ID NO: 1524972 - RNA, 19 nt, Artificial Sequence
  Description of Artificial Sequence: Synthetic oligonucleotide
  Sense strand starting at position 1634 of SEQ ID NO: 1244949
gcgggaaaugaacguuaau

SEQ ID NO: 1524973 - RNA, 19 nt, Artificial Sequence
  Description of Artificial Sequence: Synthetic oligonucleotide
  Antisense strand to SEQ ID NO: 1524972
auuaacguucauuucccgc

SEQ ID NO: 1524974 - RNA, 19 nt, Artificial Sequence
  Description of Artificial Sequence: Synthetic oligonucleotide
  Sense strand starting at position 2437 of SEQ ID NO: 1244949
gcaucucaggcauauuagu

SEQ ID NO: 1524975 - RNA, 19 nt, Artificial Sequence
  Description of Artificial Sequence: Synthetic oligonucleotide
  Antisense strand to SEQ ID NO: 1524974
acuaauaugccugagaugc

SEQ ID NO: 1524976 - RNA, 19 nt, Artificial Sequence
  Description of Artificial Sequence: Synthetic oligonucleotide
  Sense strand starting at position 2445 of SEQ ID NO: 1244949
ggcauauuagugccugugu

SEQ ID NO: 1524977 - RNA, 19 nt, Artificial Sequence
  Description of Artificial Sequence: Synthetic oligonucleotide
  Antisense strand to SEQ ID NO: 1524976
acacaggcacuaauaugcc

SEQ ID NO: 1524978 - RNA, 19 nt, Artificial Sequence
  Description of Artificial Sequence: Synthetic oligonucleotide
  Sense strand starting at position 2523 of SEQ ID NO: 1244949
guugcaaaccugugaugac

SEQ ID NO: 1524979 - RNA, 19 nt, Artificial Sequence
  Description of Artificial Sequence: Synthetic oligonucleotide
  Antisense strand to SEQ ID NO: 1524978
gucaucacagguuugcaac

SEQ ID NO: 1524980 - RNA, 19 nt, Artificial Sequence
  Description of Artificial Sequence: Synthetic oligonucleotide
  Sense strand starting at position 2585 of SEQ ID NO: 1244949
ggucauggccuccagugaa

SEQ ID NO: 1524981 - RNA, 19 nt, Artificial Sequence
  Description of Artificial Sequence: Synthetic oligonucleotide
  Antisense strand to SEQ ID NO: 1524980
uucacuggaggccaugacc

SEQ ID NO: 1524982 - RNA, 19 nt, Artificial Sequence
  Description of Artificial Sequence: Synthetic oligonucleotide
  Sense strand starting at position 2599 of SEQ ID NO: 1244949
gugaacugaucaguaagag

SEQ ID NO: 1524983 - RNA, 19 nt, Artificial Sequence
  Description of Artificial Sequence: Synthetic oligonucleotide
  Antisense strand to SEQ ID NO: 1524982
cucuuacugaucaguucac

SEQ ID NO: 1524984 - RNA, 19 nt, Artificial Sequence
  Description of Artificial Sequence: Synthetic oligonucleotide
  Sense strand starting at position 2672 of SEQ ID NO: 1244949
ggcuucucagagcaaccau

SEQ ID NO: 1524985 - RNA, 19 nt, Artificial Sequence
  Description of Artificial Sequence: Synthetic oligonucleotide
  Antisense strand to SEQ ID NO: 1524984
augguugcucugagaagcc

SEQ ID NO: 1524986 - RNA, 19 nt, Artificial Sequence
  Description of Artificial Sequence: Synthetic oligonucleotide
  Sense strand starting at position 2690 of SEQ ID NO: 1244949
uuuggucucagguggagaa

SEQ ID NO: 1524987 - RNA, 19 nt, Artificial Sequence
  Description of Artificial Sequence: Synthetic oligonucleotide
  Antisense strand to SEQ ID NO: 1524986
uucuccaccugagaccaaa

SEQ ID NO: 1524988 - RNA, 19 nt, Artificial Sequence
  Description of Artificial Sequence: Synthetic oligonucleotide
  Sense strand starting at position 2691 of SEQ ID NO: 1244949
uuggucucagguggagaau

SEQ ID NO: 1524989 - RNA, 19 nt, Artificial Sequence
  Description of Artificial Sequence: Synthetic oligonucleotide
  Antisense strand to SEQ ID NO: 1524988
auucuccaccugagaccaa

SEQ ID NO: 1524990 - RNA, 19 nt, Artificial Sequence
  Description of Artificial Sequence: Synthetic oligonucleotide
  Sense strand starting at position 2700 of SEQ ID NO: 1244949
gguggagaaucuguaguag

SEQ ID NO: 1524991 - RNA, 19 nt, Artificial Sequence
  Description of Artificial Sequence: Synthetic oligonucleotide
  Antisense strand to SEQ ID NO: 1524990
cuacuacagauucuccacc

SEQ ID NO: 1524992 - RNA, 19 nt, Artificial Sequence
  Description of Artificial Sequence: Synthetic oligonucleotide
  Sense strand starting at position 3054 of SEQ ID NO: 1244949
cugaguugguaaccuaagu

SEQ ID NO: 1524993 - RNA, 19 nt, Artificial Sequence
  Description of Artificial Sequence: Synthetic oligonucleotide
  Antisense strand to SEQ ID NO: 1524992
acuuagguuaccaacucag

SEQ ID NO: 1524994 - RNA, 19 nt, Artificial Sequence
  Description of Artificial Sequence: Synthetic oligonucleotide
  Sense strand starting at position 3335 of SEQ ID NO: 1244949
gggccaagugaccaucauu

SEQ ID NO: 1524995 - RNA, 19 nt, Artificial Sequence
  Description of Artificial Sequence: Synthetic oligonucleotide
  Antisense strand to SEQ ID NO: 1524994
aaugauggucacuuggccc

SEQ ID NO: 1524996 - RNA, 19 nt, Artificial Sequence
  Description of Artificial Sequence: Synthetic oligonucleotide
  Sense strand starting at position 3366 of SEQ ID NO: 1244949
agcagaugcuucccuaaga

SEQ ID NO: 1524997 - RNA, 19 nt, Artificial Sequence
  Description of Artificial Sequence: Synthetic oligonucleotide
  Antisense strand to SEQ ID NO: 1524996
ucuuagggaagcaucugcu

SEQ ID NO: 1524998 - RNA, 19 nt, Artificial Sequence
  Description of Artificial Sequence: Synthetic oligonucleotide
  Sense strand starting at position 3479 of SEQ ID NO: 1244949
gucccucaggagugauauu

SEQ ID NO: 1524999 - RNA, 19 nt, Artificial Sequence
  Description of Artificial Sequence: Synthetic oligonucleotide
  Antisense strand to SEQ ID NO: 1524998
aauaucacuccugagggac

SEQ ID NO: 1525000 - RNA, 19 nt, Artificial Sequence
  Description of Artificial Sequence: Synthetic oligonucleotide
  Sense strand starting at position 3591 of SEQ ID NO: 1244949
augagauguugcaacggga

SEQ ID NO: 1525001 - RNA, 19 nt, Artificial Sequence
  Description of Artificial Sequence: Synthetic oligonucleotide
  Antisense strand to SEQ ID NO: 1525000
ucccguugcaacaucucau

SEQ ID NO: 1525002 - RNA, 19 nt, Artificial Sequence
  Description of Artificial Sequence: Synthetic oligonucleotide
  Sense strand starting at position 3647 of SEQ ID NO: 1244949
ggcugaugucaggagcaaa

SEQ ID NO: 1525003 - RNA, 19 nt, Artificial Sequence
  Description of Artificial Sequence: Synthetic oligonucleotide
  Antisense strand to SEQ ID NO: 1525002
uuugcuccugacaucagcc

SEQ ID NO: 1525004 - RNA, 19 nt, Artificial Sequence
  Description of Artificial Sequence: Synthetic oligonucleotide
  Sense strand starting at position 3727 of SEQ ID NO: 1244949
ccgagugacagccaggaaa

SEQ ID NO: 1525005 - RNA, 19 nt, Artificial Sequence
  Description of Artificial Sequence: Synthetic oligonucleotide
  Antisense strand to SEQ ID NO: 1525004
uuuccuggcugucacucgg

SEQ ID NO: 1525006 - RNA, 19 nt, Artificial Sequence
  Description of Artificial Sequence: Synthetic oligonucleotide
  Sense strand starting at position 3758 of SEQ ID NO: 1244949
agugauuugugccuggcaa

SEQ ID NO: 1525007 - RNA, 19 nt, Artificial Sequence
  Description of Artificial Sequence: Synthetic oligonucleotide
  Antisense strand to SEQ ID NO: 1525006
uugccaggcacaaaucacu

SEQ ID NO: 1525008 - RNA, 19 nt, Artificial Sequence
  Description of Artificial Sequence: Synthetic oligonucleotide
  Sense strand starting at position 3759 of SEQ ID NO: 1244949
gugauuugugccuggcaaa

SEQ ID NO: 1525009 - RNA, 19 nt, Artificial Sequence
  Description of Artificial Sequence: Synthetic oligonucleotide
  Antisense strand to SEQ ID NO: 1525008
uuugccaggcacaaaucac

SEQ ID NO: 1525010 - RNA, 19 nt, Artificial Sequence
  Description of Artificial Sequence: Synthetic oligonucleotide
  Sense strand starting at position 3760 of SEQ ID NO: 1244949
ugauuugugccuggcaaac

SEQ ID NO: 1525011 - RNA, 19 nt, Artificial Sequence
  Description of Artificial Sequence: Synthetic oligonucleotide
  Antisense strand to SEQ ID NO: 1525010
guuugccaggcacaaauca

SEQ ID NO: 1525012 - RNA, 19 nt, Artificial Sequence
  Description of Artificial Sequence: Synthetic oligonucleotide
  Sense strand starting at position 3887 of SEQ ID NO: 1244949
uguccuagaagcugucaga

SEQ ID NO: 1525013 - RNA, 19 nt, Artificial Sequence
  Description of Artificial Sequence: Synthetic oligonucleotide
  Antisense strand to SEQ ID NO: 1525012
ucugacagcuucuaggaca

SEQ ID NO: 1525014 - RNA, 19 nt, Artificial Sequence
  Description of Artificial Sequence: Synthetic oligonucleotide
  Sense strand starting at position 3894 of SEQ ID NO: 1244949
gaagcugucagaggcaaga

SEQ ID NO: 1525015 - RNA, 19 nt, Artificial Sequence
  Description of Artificial Sequence: Synthetic oligonucleotide
  Antisense strand to SEQ ID NO: 1525014
ucuugccucugacagcuuc

SEQ ID NO: 1525016 - RNA, 19 nt, Artificial Sequence
  Description of Artificial Sequence: Synthetic oligonucleotide
  Sense strand starting at position 3905 of SEQ ID NO: 1244949
aggcaagaguguguggaaa

SEQ ID NO: 1525017 - RNA, 19 nt, Artificial Sequence
  Description of Artificial Sequence: Synthetic oligonucleotide
  Antisense strand to SEQ ID NO: 1525016
uuuccacacacucuugccu

SEQ ID NO: 1525018 - RNA, 19 nt, Artificial Sequence
  Description of Artificial Sequence: Synthetic oligonucleotide
  Sense strand starting at position 8 of SEQ ID NO: 1244950
gaggauggaugucacaaau

SEQ ID NO: 1525019 - RNA, 19 nt, Artificial Sequence
  Description of Artificial Sequence: Synthetic oligonucleotide
  Antisense strand to SEQ ID NO: 1525018
auuugugacauccauccuc

SEQ ID NO: 1525020 - RNA, 19 nt, Artificial Sequence
  Description of Artificial Sequence: Synthetic oligonucleotide
  Sense strand starting at position 478 of SEQ ID NO: 1244950
uccagaucgcuuuaagcca

SEQ ID NO: 1525021 - RNA, 19 nt, Artificial Sequence
  Description of Artificial Sequence: Synthetic oligonucleotide
  Antisense strand to SEQ ID NO: 1525020
uggcuuaaagcgaucugga

SEQ ID NO: 1525022 - RNA, 19 nt, Artificial Sequence
  Description of Artificial Sequence: Synthetic oligonucleotide
  Sense strand starting at position 612 of SEQ ID NO: 1244950
ggcucaucacaaugaauau

SEQ ID NO: 1525023 - RNA, 19 nt, Artificial Sequence
  Description of Artificial Sequence: Synthetic oligonucleotide
  Antisense strand to SEQ ID NO: 1525022
auauucauugugaugagcc

SEQ ID NO: 1525024 - RNA, 19 nt, Artificial Sequence
  Description of Artificial Sequence: Synthetic oligonucleotide
  Sense strand starting at position 648 of SEQ ID NO: 1244950
cauaaugcccagugguaag

SEQ ID NO: 1525025 - RNA, 19 nt, Artificial Sequence
  Description of Artificial Sequence: Synthetic oligonucleotide
  Antisense strand to SEQ ID NO: 1525024
cuuaccacugggcauuaug

SEQ ID NO: 1525026 - RNA, 19 nt, Artificial Sequence
  Description of Artificial Sequence: Synthetic oligonucleotide
  Sense strand starting at position 711 of SEQ ID NO: 1244950
ugaagauggcuuggugucu

SEQ ID NO: 1525027 - RNA, 19 nt, Artificial Sequence
  Description of Artificial Sequence: Synthetic oligonucleotide
  Antisense strand to SEQ ID NO: 1525026
agacaccaagccaucuuca

SEQ ID NO: 1525028 - RNA, 19 nt, Artificial Sequence
  Description of Artificial Sequence: Synthetic oligonucleotide
  Sense strand starting at position 868 of SEQ ID NO: 1244950
gacagucaguaugagaaga

SEQ ID NO: 1525029 - RNA, 19 nt, Artificial Sequence
  Description of Artificial Sequence: Synthetic oligonucleotide
  Antisense strand to SEQ ID NO: 1525028
ucuucucauacugacuguc

SEQ ID NO: 1525030 - RNA, 19 nt, Artificial Sequence
  Description of Artificial Sequence: Synthetic oligonucleotide
  Sense strand starting at position 1063 of SEQ ID NO: 1244950
agaauaguuaugggcgaug

SEQ ID NO: 1525031 - RNA, 19 nt, Artificial Sequence
  Description of Artificial Sequence: Synthetic oligonucleotide
  Antisense strand to SEQ ID NO: 1525030
caucgcccauaacuauucu

SEQ ID NO: 1525032 - RNA, 19 nt, Artificial Sequence
  Description of Artificial Sequence: Synthetic oligonucleotide
  Sense strand starting at position 1084 of SEQ ID NO: 1244950
ugauguugaccaugagggu

SEQ ID NO: 1525033 - RNA, 19 nt, Artificial Sequence
  Description of Artificial Sequence: Synthetic oligonucleotide
  Antisense strand to SEQ ID NO: 1525032
acccucauggucaacauca

SEQ ID NO: 1525034 - RNA, 19 nt, Artificial Sequence
  Description of Artificial Sequence: Synthetic oligonucleotide
  Sense strand starting at position 1085 of SEQ ID NO: 1244950
gauguugaccaugaggguu

SEQ ID NO: 1525035 - RNA, 19 nt, Artificial Sequence
  Description of Artificial Sequence: Synthetic oligonucleotide
  Antisense strand to SEQ ID NO: 1525034
aacccucauggucaacauc

SEQ ID NO: 1525036 - RNA, 19 nt, Artificial Sequence
  Description of Artificial Sequence: Synthetic oligonucleotide
  Sense strand starting at position 1289 of SEQ ID NO: 1244950
aagacagugcccuguccau

SEQ ID NO: 1525037 - RNA, 19 nt, Artificial Sequence
  Description of Artificial Sequence: Synthetic oligonucleotide
  Antisense strand to SEQ ID NO: 1525036
auggacagggcacugucuu

SEQ ID NO: 1525038 - RNA, 19 nt, Artificial Sequence
  Description of Artificial Sequence: Synthetic oligonucleotide
  Sense strand starting at position 1398 of SEQ ID NO: 1244950
gugcgacccagguaaguua

SEQ ID NO: 1525039 - RNA, 19 nt, Artificial Sequence
  Description of Artificial Sequence: Synthetic oligonucleotide
  Antisense strand to SEQ ID NO: 1525038
uaacuuaccugggucgcac

SEQ ID NO: 1525040 - RNA, 19 nt, Artificial Sequence
  Description of Artificial Sequence: Synthetic oligonucleotide
  Sense strand starting at position 1405 of SEQ ID NO: 1244950
ccagguaaguuacuuaacu

SEQ ID NO: 1525041 - RNA, 19 nt, Artificial Sequence
  Description of Artificial Sequence: Synthetic oligonucleotide
  Antisense strand to SEQ ID NO: 1525040
aguuaaguaacuuaccugg

SEQ ID NO: 1525042 - RNA, 19 nt, Artificial Sequence
  Description of Artificial Sequence: Synthetic oligonucleotide
  Sense strand starting at position 1484 of SEQ ID NO: 1244950
uguuguugugaggaggauu

SEQ ID NO: 1525043 - RNA, 19 nt, Artificial Sequence
  Description of Artificial Sequence: Synthetic oligonucleotide
  Antisense strand to SEQ ID NO: 1525042
aauccuccucacaacaaca

SEQ ID NO: 1525044 - RNA, 19 nt, Artificial Sequence
  Description of Artificial Sequence: Synthetic oligonucleotide
  Sense strand starting at position 1515 of SEQ ID NO: 1244950
guauguaaauuaucacuag

SEQ ID NO: 1525045 - RNA, 19 nt, Artificial Sequence
  Description of Artificial Sequence: Synthetic oligonucleotide
  Antisense strand to SEQ ID NO: 1525044
cuagugauaauuuacauac

SEQ ID NO: 1525046 - RNA, 19 nt, Artificial Sequence
  Description of Artificial Sequence: Synthetic oligonucleotide
  Sense strand starting at position 1651 of SEQ ID NO: 1244950
cugggaaaugcugaguuga

SEQ ID NO: 1525047 - RNA, 19 nt, Artificial Sequence
  Description of Artificial Sequence: Synthetic oligonucleotide
  Antisense strand to SEQ ID NO: 1525046
ucaacucagcauuucccag

SEQ ID NO: 1525048 - RNA, 19 nt, Artificial Sequence
  Description of Artificial Sequence: Synthetic oligonucleotide
  Sense strand starting at position 1653 of SEQ ID NO: 1244950
gggaaaugcugaguugaag

SEQ ID NO: 1525049 - RNA, 19 nt, Artificial Sequence
  Description of Artificial Sequence: Synthetic oligonucleotide
  Antisense strand to SEQ ID NO: 1525048
cuucaacucagcauuuccc

SEQ ID NO: 1525050 - RNA, 19 nt, Artificial Sequence
  Description of Artificial Sequence: Synthetic oligonucleotide
  Sense strand starting at position 1667 of SEQ ID NO: 1244950
ugaagacguccagguggaa

SEQ ID NO: 1525051 - RNA, 19 nt, Artificial Sequence
  Description of Artificial Sequence: Synthetic oligonucleotide
  Antisense strand to SEQ ID NO: 1525050
uuccaccuggacgucuuca

SEQ ID NO: 1525052 - RNA, 19 nt, Artificial Sequence
  Description of Artificial Sequence: Synthetic oligonucleotide
  Sense strand starting at position 1945 of SEQ ID NO: 1244950
gccaauucucauuggagga

SEQ ID NO: 1525053 - RNA, 19 nt, Artificial Sequence
  Description of Artificial Sequence: Synthetic oligonucleotide
  Antisense strand to SEQ ID NO: 1525052
uccuccaaugagaauuggc

SEQ ID NO: 1525054 - RNA, 19 nt, Artificial Sequence
  Description of Artificial Sequence: Synthetic oligonucleotide
  Sense strand starting at position 1980 of SEQ ID NO: 1244950
uccauucugugcccuuaga

SEQ ID NO: 1525055 - RNA, 19 nt, Artificial Sequence
  Description of Artificial Sequence: Synthetic oligonucleotide
  Antisense strand to SEQ ID NO: 1525054
ucuaagggcacagaaugga

SEQ ID NO: 1525056 - RNA, 19 nt, Artificial Sequence
  Description of Artificial Sequence: Synthetic oligonucleotide
  Sense strand starting at position 1988 of SEQ ID NO: 1244950
gugcccuuagacuaaggaa

SEQ ID NO: 1525057 - RNA, 19 nt, Artificial Sequence
  Description of Artificial Sequence: Synthetic oligonucleotide
  Antisense strand to SEQ ID NO: 1525056
uuccuuagucuaagggcac

SEQ ID NO: 1525058 - RNA, 19 nt, Artificial Sequence
  Description of Artificial Sequence: Synthetic oligonucleotide
  Sense strand starting at position 2032 of SEQ ID NO: 1244950
cuguguugccaucacaagu

SEQ ID NO: 1525059 - RNA, 19 nt, Artificial Sequence
  Description of Artificial Sequence: Synthetic oligonucleotide
  Antisense strand to SEQ ID NO: 1525058
acuugugauggcaacacag

SEQ ID NO: 1525060 - RNA, 19 nt, Artificial Sequence
  Description of Artificial Sequence: Synthetic oligonucleotide
  Sense strand starting at position 2093 of SEQ ID NO: 1244950
cagggagucucaucacguu

SEQ ID NO: 1525061 - RNA, 19 nt, Artificial Sequence
  Description of Artificial Sequence: Synthetic oligonucleotide
  Antisense strand to SEQ ID NO: 1525060
aacgugaugagacucccug

SEQ ID NO: 1525062 - RNA, 19 nt, Artificial Sequence
  Description of Artificial Sequence: Synthetic oligonucleotide
  Sense strand starting at position 2374 of SEQ ID NO: 1244950
gcagccuuaacuuagcgau

SEQ ID NO: 1525063 - RNA, 19 nt, Artificial Sequence
  Description of Artificial Sequence: Synthetic oligonucleotide
  Antisense strand to SEQ ID NO: 1525062
aucgcuaaguuaaggcugc

SEQ ID NO: 1525064 - RNA, 19 nt, Artificial Sequence
  Description of Artificial Sequence: Synthetic oligonucleotide
  Sense strand starting at position 2376 of SEQ ID NO: 1244950
agccuuaacuuagcgauuu

SEQ ID NO: 1525065 - RNA, 19 nt, Artificial Sequence
  Description of Artificial Sequence: Synthetic oligonucleotide
  Antisense strand to SEQ ID NO: 1525064
aaaucgcuaaguuaaggcu

SEQ ID NO: 1525066 - RNA, 19 nt, Artificial Sequence
  Description of Artificial Sequence: Synthetic oligonucleotide
  Sense strand starting at position 2682 of SEQ ID NO: 1244950
augccuuugccauaguguu

SEQ ID NO: 1525067 - RNA, 19 nt, Artificial Sequence
  Description of Artificial Sequence: Synthetic oligonucleotide
  Antisense strand to SEQ ID NO: 1525066
aacacuauggcaaaggcau

SEQ ID NO: 1525068 - RNA, 19 nt, Artificial Sequence
  Description of Artificial Sequence: Synthetic oligonucleotide
  Sense strand starting at position 2689 of SEQ ID NO: 1244950
ugccauaguguugcuguga

SEQ ID NO: 1525069 - RNA, 19 nt, Artificial Sequence
  Description of Artificial Sequence: Synthetic oligonucleotide
  Antisense strand to SEQ ID NO: 1525068
ucacagcaacacuauggca

SEQ ID NO: 1525070 - RNA, 19 nt, Artificial Sequence
  Description of Artificial Sequence: Synthetic oligonucleotide
  Sense strand starting at position 3209 of SEQ ID NO: 1244950
aaagccucucgugaagaua

SEQ ID NO: 1525071 - RNA, 19 nt, Artificial Sequence
  Description of Artificial Sequence: Synthetic oligonucleotide
  Antisense strand to SEQ ID NO: 1525070
uaucuucacgagaggcuuu

SEQ ID NO: 1525072 - RNA, 19 nt, Artificial Sequence
  Description of Artificial Sequence: Synthetic oligonucleotide
  Sense strand starting at position 3220 of SEQ ID NO: 1244950
ugaagauacucucaugaac

SEQ ID NO: 1525073 - RNA, 19 nt, Artificial Sequence
  Description of Artificial Sequence: Synthetic oligonucleotide
  Antisense strand to SEQ ID NO: 1525072
guucaugagaguaucuuca

SEQ ID NO: 1525074 - RNA, 19 nt, Artificial Sequence
  Description of Artificial Sequence: Synthetic oligonucleotide
  Sense strand starting at position 3374 of SEQ ID NO: 1244950
guccuucucacguggcaga

SEQ ID NO: 1525075 - RNA, 19 nt, Artificial Sequence
  Description of Artificial Sequence: Synthetic oligonucleotide
  Antisense strand to SEQ ID NO: 1525074
ucugccacgugagaaggac

SEQ ID NO: 1525076 - RNA, 19 nt, Artificial Sequence
  Description of Artificial Sequence: Synthetic oligonucleotide
  Sense strand starting at position 3409 of SEQ ID NO: 1244950
aucuguugauuuggaaaua

SEQ ID NO: 1525077 - RNA, 19 nt, Artificial Sequence
  Description of Artificial Sequence: Synthetic oligonucleotide
  Antisense strand to SEQ ID NO: 1525076
uauuuccaaaucaacagau

SEQ ID NO: 1525078 - RNA, 19 nt, Artificial Sequence
  Description of Artificial Sequence: Synthetic oligonucleotide
  Sense strand starting at position 3410 of SEQ ID NO: 1244950
ucuguugauuuggaaauau

SEQ ID NO: 1525079 - RNA, 19 nt, Artificial Sequence
  Description of Artificial Sequence: Synthetic oligonucleotide
  Antisense strand to SEQ ID NO: 1525078
auauuuccaaaucaacaga

SEQ ID NO: 1525080 - RNA, 19 nt, Artificial Sequence
  Description of Artificial Sequence: Synthetic oligonucleotide
  Sense strand starting at position 3441 of SEQ ID NO: 1244950
cuguaauaaggguauguuu

SEQ ID NO: 1525081 - RNA, 19 nt, Artificial Sequence
  Description of Artificial Sequence: Synthetic oligonucleotide
  Antisense strand to SEQ ID NO: 1525080
aaacauacccuuauuacag

SEQ ID NO: 1525082 - RNA, 19 nt, Artificial Sequence
  Description of Artificial Sequence: Synthetic oligonucleotide
  Sense strand starting at position 3607 of SEQ ID NO: 1244950
ggaguauauucucagacca

SEQ ID NO: 1525083 - RNA, 19 nt, Artificial Sequence
  Description of Artificial Sequence: Synthetic oligonucleotide
  Antisense strand to SEQ ID NO: 1525082
uggucugagaauauacucc

SEQ ID NO: 1525084 - RNA, 19 nt, Artificial Sequence
  Description of Artificial Sequence: Synthetic oligonucleotide
  Sense strand starting at position 3609 of SEQ ID NO: 1244950
aguauauucucagaccaug

SEQ ID NO: 1525085 - RNA, 19 nt, Artificial Sequence
  Description of Artificial Sequence: Synthetic oligonucleotide
  Antisense strand to SEQ ID NO: 1525084
cauggucugagaauauacu

SEQ ID NO: 1525086 - RNA, 19 nt, Artificial Sequence
  Description of Artificial Sequence: Synthetic oligonucleotide
  Sense strand starting at position 3667 of SEQ ID NO: 1244950
uggguagaaucccagaaag

SEQ ID NO: 1525087 - RNA, 19 nt, Artificial Sequence
  Description of Artificial Sequence: Synthetic oligonucleotide
  Antisense strand to SEQ ID NO: 1525086
cuuucugggauucuaccca

SEQ ID NO: 1525088 - RNA, 19 nt, Artificial Sequence
  Description of Artificial Sequence: Synthetic oligonucleotide
  Sense strand starting at position 3753 of SEQ ID NO: 1244950
gugcaucucgacugaaauu

SEQ ID NO: 1525089 - RNA, 19 nt, Artificial Sequence
  Description of Artificial Sequence: Synthetic oligonucleotide
  Antisense strand to SEQ ID NO: 1525088
aauuucagucgagaugcac

SEQ ID NO: 1525090 - RNA, 19 nt, Artificial Sequence
  Description of Artificial Sequence: Synthetic oligonucleotide
  Sense strand starting at position 3770 of SEQ ID NO: 1244950
uuugaacugugcuuauuaa

SEQ ID NO: 1525091 - RNA, 19 nt, Artificial Sequence
  Description of Artificial Sequence: Synthetic oligonucleotide
  Antisense strand to SEQ ID NO: 1525090
uuaauaagcacaguucaaa

SEQ ID NO: 1525092 - RNA, 19 nt, Artificial Sequence
  Description of Artificial Sequence: Synthetic oligonucleotide
  Sense strand starting at position 3771 of SEQ ID NO: 1244950
uugaacugugcuuauuaau

SEQ ID NO: 1525093 - RNA, 19 nt, Artificial Sequence
  Description of Artificial Sequence: Synthetic oligonucleotide
  Antisense strand to SEQ ID NO: 1525092
auuaauaagcacaguucaa

SEQ ID NO: 1525094 - RNA, 19 nt, Artificial Sequence
  Description of Artificial Sequence: Synthetic oligonucleotide
  Sense strand starting at position 3804 of SEQ ID NO: 1244950
ggugcaugcagauaucauc

SEQ ID NO: 1525095 - RNA, 19 nt, Artificial Sequence
  Description of Artificial Sequence: Synthetic oligonucleotide
  Antisense strand to SEQ ID NO: 1525094
gaugauaucugcaugcacc

SEQ ID NO: 1525096 - RNA, 19 nt, Artificial Sequence
  Description of Artificial Sequence: Synthetic oligonucleotide
  Sense strand starting at position 3942 of SEQ ID NO: 1244950
gcuuauuuaguguggcaaa

SEQ ID NO: 1525097 - RNA, 19 nt, Artificial Sequence
  Description of Artificial Sequence: Synthetic oligonucleotide
  Antisense strand to SEQ ID NO: 1525096
uuugccacacuaaauaagc

SEQ ID NO: 1525098 - RNA, 19 nt, Artificial Sequence
  Description of Artificial Sequence: Synthetic oligonucleotide
  Sense strand starting at position 170 of SEQ ID NO: 1244951
agcuguugggcugauagga

SEQ ID NO: 1525099 - RNA, 19 nt, Artificial Sequence
  Description of Artificial Sequence: Synthetic oligonucleotide
  Antisense strand to SEQ ID NO: 1525098
uccuaucagcccaacagcu

SEQ ID NO: 1525100 - RNA, 19 nt, Artificial Sequence
  Description of Artificial Sequence: Synthetic oligonucleotide
  Sense strand starting at position 418 of SEQ ID NO: 1244951
ucaugcauucucugggaga

SEQ ID NO: 1525101 - RNA, 19 nt, Artificial Sequence
  Description of Artificial Sequence: Synthetic oligonucleotide
  Antisense strand to SEQ ID NO: 1525100
ucucccagagaaugcauga

SEQ ID NO: 1525102 - RNA, 19 nt, Artificial Sequence
  Description of Artificial Sequence: Synthetic oligonucleotide
  Sense strand starting at position 421 of SEQ ID NO: 1244951
ugcauucucugggagagga

SEQ ID NO: 1525103 - RNA, 19 nt, Artificial Sequence
  Description of Artificial Sequence: Synthetic oligonucleotide
  Antisense strand to SEQ ID NO: 1525102
uccucucccagagaaugca

SEQ ID NO: 1525104 - RNA, 19 nt, Artificial Sequence
  Description of Artificial Sequence: Synthetic oligonucleotide
  Sense strand starting at position 437 of SEQ ID NO: 1244951
ggaagauucccuggagcua

SEQ ID NO: 1525105 - RNA, 19 nt, Artificial Sequence
  Description of Artificial Sequence: Synthetic oligonucleotide
  Antisense strand to SEQ ID NO: 1525104
uagcuccagggaaucuucc

SEQ ID NO: 1525106 - RNA, 19 nt, Artificial Sequence
  Description of Artificial Sequence: Synthetic oligonucleotide
  Sense strand starting at position 692 of SEQ ID NO: 1244951
ggaucaggauucccuccaa

SEQ ID NO: 1525107 - RNA, 19 nt, Artificial Sequence
  Description of Artificial Sequence: Synthetic oligonucleotide
  Antisense strand to SEQ ID NO: 1525106
uuggagggaauccugaucc

SEQ ID NO: 1525108 - RNA, 19 nt, Artificial Sequence
  Description of Artificial Sequence: Synthetic oligonucleotide
  Sense strand starting at position 794 of SEQ ID NO: 1244951
ggcgccuggcucugaauaa

SEQ ID NO: 1525109 - RNA, 19 nt, Artificial Sequence
  Description of Artificial Sequence: Synthetic oligonucleotide
  Antisense strand to SEQ ID NO: 1525108
uuauucagagccaggcgcc

SEQ ID NO: 1525110 - RNA, 19 nt, Artificial Sequence
  Description of Artificial Sequence: Synthetic oligonucleotide
  Sense strand starting at position 920 of SEQ ID NO: 1244951
cugggagauucugcagcuu

SEQ ID NO: 1525111 - RNA, 19 nt, Artificial Sequence
  Description of Artificial Sequence: Synthetic oligonucleotide
  Antisense strand to SEQ ID NO: 1525110
aagcugcagaaucucccag

SEQ ID NO: 1525112 - RNA, 19 nt, Artificial Sequence
  Description of Artificial Sequence: Synthetic oligonucleotide
  Sense strand starting at position 1067 of SEQ ID NO: 1244951
ggcuuaaaggugugaggua

SEQ ID NO: 1525113 - RNA, 19 nt, Artificial Sequence
  Description of Artificial Sequence: Synthetic oligonucleotide
  Antisense strand to SEQ ID NO: 1525112
uaccucacaccuuuaagcc

SEQ ID NO: 1525114 - RNA, 19 nt, Artificial Sequence
  Description of Artificial Sequence: Synthetic oligonucleotide
  Sense strand starting at position 1137 of SEQ ID NO: 1244951
cagagaagcugacugucaa

SEQ ID NO: 1525115 - RNA, 19 nt, Artificial Sequence
  Description of Artificial Sequence: Synthetic oligonucleotide
  Antisense strand to SEQ ID NO: 1525114
uugacagucagcuucucug

SEQ ID NO: 1525116 - RNA, 19 nt, Artificial Sequence
  Description of Artificial Sequence: Synthetic oligonucleotide
  Sense strand starting at position 1138 of SEQ ID NO: 1244951
agagaagcugacugucaau

SEQ ID NO: 1525117 - RNA, 19 nt, Artificial Sequence
  Description of Artificial Sequence: Synthetic oligonucleotide
  Antisense strand to SEQ ID NO: 1525116
auugacagucagcuucucu

SEQ ID NO: 1525118 - RNA, 19 nt, Artificial Sequence
  Description of Artificial Sequence: Synthetic oligonucleotide
  Sense strand starting at position 1359 of SEQ ID NO: 1244951
gggagacucuacucaguuu

SEQ ID NO: 1525119 - RNA, 19 nt, Artificial Sequence
  Description of Artificial Sequence: Synthetic oligonucleotide
  Antisense strand to SEQ ID NO: 1525118
aaacugaguagagucuccc

SEQ ID NO: 1525120 - RNA, 19 nt, Artificial Sequence
  Description of Artificial Sequence: Synthetic oligonucleotide
  Sense strand starting at position 2235 of SEQ ID NO: 1244951
ccgggcugcuucuuauuua

SEQ ID NO: 1525121 - RNA, 19 nt, Artificial Sequence
  Description of Artificial Sequence: Synthetic oligonucleotide
  Antisense strand to SEQ ID NO: 1525120
uaaauaagaagcagcccgg

SEQ ID NO: 1525122 - RNA, 19 nt, Artificial Sequence
  Description of Artificial Sequence: Synthetic oligonucleotide
  Sense strand starting at position 2238 of SEQ ID NO: 1244951
ggcugcuucuuauuuauga

SEQ ID NO: 1525123 - RNA, 19 nt, Artificial Sequence
  Description of Artificial Sequence: Synthetic oligonucleotide
  Antisense strand to SEQ ID NO: 1525122
ucauaaauaagaagcagcc

SEQ ID NO: 1525124 - RNA, 19 nt, Artificial Sequence
  Description of Artificial Sequence: Synthetic oligonucleotide
  Sense strand starting at position 2239 of SEQ ID NO: 1244951
gcugcuucuuauuuaugau

SEQ ID NO: 1525125 - RNA, 19 nt, Artificial Sequence
  Description of Artificial Sequence: Synthetic oligonucleotide
  Antisense strand to SEQ ID NO: 1525124
aucauaaauaagaagcagc

SEQ ID NO: 1525126 - RNA, 19 nt, Artificial Sequence
  Description of Artificial Sequence: Synthetic oligonucleotide
  Sense strand starting at position 2242 of SEQ ID NO: 1244951
gcuucuuauuuaugaucag

SEQ ID NO: 1525127 - RNA, 19 nt, Artificial Sequence
  Description of Artificial Sequence: Synthetic oligonucleotide
  Antisense strand to SEQ ID NO: 1525126
cugaucauaaauaagaagc

SEQ ID NO: 1525128 - RNA, 19 nt, Artificial Sequence
  Description of Artificial Sequence: Synthetic oligonucleotide
  Sense strand starting at position 2264 of SEQ ID NO: 1244951
aaggguauaaggugucagu

SEQ ID NO: 1525129 - RNA, 19 nt, Artificial Sequence
  Description of Artificial Sequence: Synthetic oligonucleotide
  Antisense strand to SEQ ID NO: 1525128
acugacaccuuauacccuu

SEQ ID NO: 1525130 - RNA, 19 nt, Artificial Sequence
  Description of Artificial Sequence: Synthetic oligonucleotide
  Sense strand starting at position 2325 of SEQ ID NO: 1244951
gucccaagggcuugucaca

SEQ ID NO: 1525131 - RNA, 19 nt, Artificial Sequence
  Description of Artificial Sequence: Synthetic oligonucleotide
  Antisense strand to SEQ ID NO: 1525130
ugugacaagcccuugggac

SEQ ID NO: 1525132 - RNA, 19 nt, Artificial Sequence
  Description of Artificial Sequence: Synthetic oligonucleotide
  Sense strand starting at position 2332 of SEQ ID NO: 1244951
gggcuugucacaggguaag

SEQ ID NO: 1525133 - RNA, 19 nt, Artificial Sequence
  Description of Artificial Sequence: Synthetic oligonucleotide
  Antisense strand to SEQ ID NO: 1525132
cuuacccugugacaagccc

SEQ ID NO: 1525134 - RNA, 19 nt, Artificial Sequence
  Description of Artificial Sequence: Synthetic oligonucleotide
  Sense strand starting at position 2392 of SEQ ID NO: 1244951
cucggucacucauucuaaa

SEQ ID NO: 1525135 - RNA, 19 nt, Artificial Sequence
  Description of Artificial Sequence: Synthetic oligonucleotide
  Antisense strand to SEQ ID NO: 1525134
uuuagaaugagugaccgag

SEQ ID NO: 1525136 - RNA, 19 nt, Artificial Sequence
  Description of Artificial Sequence: Synthetic oligonucleotide
  Sense strand starting at position 2554 of SEQ ID NO: 1244951
caaggugucucacucagaa

SEQ ID NO: 1525137 - RNA, 19 nt, Artificial Sequence
  Description of Artificial Sequence: Synthetic oligonucleotide
  Antisense strand to SEQ ID NO: 1525136
uucugagugagacaccuug

SEQ ID NO: 1525138 - RNA, 19 nt, Artificial Sequence
  Description of Artificial Sequence: Synthetic oligonucleotide
  Sense strand starting at position 2578 of SEQ ID NO: 1244951
gcuugauucuuccuggcaa

SEQ ID NO: 1525139 - RNA, 19 nt, Artificial Sequence
  Description of Artificial Sequence: Synthetic oligonucleotide
  Antisense strand to SEQ ID NO: 1525138
uugccaggaagaaucaagc

SEQ ID NO: 1525140 - RNA, 19 nt, Artificial Sequence
  Description of Artificial Sequence: Synthetic oligonucleotide
  Sense strand starting at position 2580 of SEQ ID NO: 1244951
uugauucuuccuggcaagu

SEQ ID NO: 1525141 - RNA, 19 nt, Artificial Sequence
  Description of Artificial Sequence: Synthetic oligonucleotide
  Antisense strand to SEQ ID NO: 1525140
acuugccaggaagaaucaa

SEQ ID NO: 1525142 - RNA, 19 nt, Artificial Sequence
  Description of Artificial Sequence: Synthetic oligonucleotide
  Sense strand starting at position 2748 of SEQ ID NO: 1244951
cacuguuacaucggugaug

SEQ ID NO: 1525143 - RNA, 19 nt, Artificial Sequence
  Description of Artificial Sequence: Synthetic oligonucleotide
  Antisense strand to SEQ ID NO: 1525142
caucaccgauguaacagug

SEQ ID NO: 1525144 - RNA, 19 nt, Artificial Sequence
  Description of Artificial Sequence: Synthetic oligonucleotide
  Sense strand starting at position 2749 of SEQ ID NO: 1244951
acuguuacaucggugaugu

SEQ ID NO: 1525145 - RNA, 19 nt, Artificial Sequence
  Description of Artificial Sequence: Synthetic oligonucleotide
  Antisense strand to SEQ ID NO: 1525144
acaucaccgauguaacagu

SEQ ID NO: 1525146 - RNA, 19 nt, Artificial Sequence
  Description of Artificial Sequence: Synthetic oligonucleotide
  Sense strand starting at position 2750 of SEQ ID NO: 1244951
cuguuacaucggugaugua

SEQ ID NO: 1525147 - RNA, 19 nt, Artificial Sequence
  Description of Artificial Sequence: Synthetic oligonucleotide
  Antisense strand to SEQ ID NO: 1525146
uacaucaccgauguaacag

SEQ ID NO: 1525148 - RNA, 19 nt, Artificial Sequence
  Description of Artificial Sequence: Synthetic oligonucleotide
  Sense strand starting at position 2751 of SEQ ID NO: 1244951
uguuacaucggugauguaa

SEQ ID NO: 1525149 - RNA, 19 nt, Artificial Sequence
  Description of Artificial Sequence: Synthetic oligonucleotide
  Antisense strand to SEQ ID NO: 1525148
uuacaucaccgauguaaca

SEQ ID NO: 1525150 - RNA, 19 nt, Artificial Sequence
  Description of Artificial Sequence: Synthetic oligonucleotide
  Sense strand starting at position 2920 of SEQ ID NO: 1244951
cuccguacucugcacauau

SEQ ID NO: 1525151 - RNA, 19 nt, Artificial Sequence
  Description of Artificial Sequence: Synthetic oligonucleotide
  Antisense strand to SEQ ID NO: 1525150
auaugugcagaguacggag

SEQ ID NO: 1525152 - RNA, 19 nt, Artificial Sequence
  Description of Artificial Sequence: Synthetic oligonucleotide
  Sense strand starting at position 3063 of SEQ ID NO: 1244951
gcagauugggcguggaaac

SEQ ID NO: 1525153 - RNA, 19 nt, Artificial Sequence
  Description of Artificial Sequence: Synthetic oligonucleotide
  Antisense strand to SEQ ID NO: 1525152
guuuccacgcccaaucugc

SEQ ID NO: 1525154 - RNA, 19 nt, Artificial Sequence
  Description of Artificial Sequence: Synthetic oligonucleotide
  Sense strand starting at position 3273 of SEQ ID NO: 1244951
aggcccuguguccauuaga

SEQ ID NO: 1525155 - RNA, 19 nt, Artificial Sequence
  Description of Artificial Sequence: Synthetic oligonucleotide
  Antisense strand to SEQ ID NO: 1525154
ucuaauggacacagggccu

SEQ ID NO: 1525156 - RNA, 19 nt, Artificial Sequence
  Description of Artificial Sequence: Synthetic oligonucleotide
  Sense strand starting at position 3276 of SEQ ID NO: 1244951
cccuguguccauuagagga

SEQ ID NO: 1525157 - RNA, 19 nt, Artificial Sequence
  Description of Artificial Sequence: Synthetic oligonucleotide
  Antisense strand to SEQ ID NO: 1525156
uccucuaauggacacaggg

SEQ ID NO: 1525158 - RNA, 19 nt, Artificial Sequence
  Description of Artificial Sequence: Synthetic oligonucleotide
  Sense strand starting at position 3432 of SEQ ID NO: 1244951
gagcacguucucuguucua

SEQ ID NO: 1525159 - RNA, 19 nt, Artificial Sequence
  Description of Artificial Sequence: Synthetic oligonucleotide
  Antisense strand to SEQ ID NO: 1525158
uagaacagagaacgugcuc

SEQ ID NO: 1525160 - RNA, 19 nt, Artificial Sequence
  Description of Artificial Sequence: Synthetic oligonucleotide
  Sense strand starting at position 3439 of SEQ ID NO: 1244951
uucucuguucuagaggaua

SEQ ID NO: 1525161 - RNA, 19 nt, Artificial Sequence
  Description of Artificial Sequence: Synthetic oligonucleotide
  Antisense strand to SEQ ID NO: 1525160
uauccucuagaacagagaa

SEQ ID NO: 1525162 - RNA, 19 nt, Artificial Sequence
  Description of Artificial Sequence: Synthetic oligonucleotide
  Sense strand starting at position 3452 of SEQ ID NO: 1244951
aggauacaguaauggauaa

SEQ ID NO: 1525163 - RNA, 19 nt, Artificial Sequence
  Description of Artificial Sequence: Synthetic oligonucleotide
  Antisense strand to SEQ ID NO: 1525162
uuauccauuacuguauccu

SEQ ID NO: 1525164 - RNA, 19 nt, Artificial Sequence
  Description of Artificial Sequence: Synthetic oligonucleotide
  Sense strand starting at position 3521 of SEQ ID NO: 1244951
guggacuuguauccugcaa

SEQ ID NO: 1525165 - RNA, 19 nt, Artificial Sequence
  Description of Artificial Sequence: Synthetic oligonucleotide
  Antisense strand to SEQ ID NO: 1525164
uugcaggauacaaguccac

SEQ ID NO: 1525166 - RNA, 19 nt, Artificial Sequence
  Description of Artificial Sequence: Synthetic oligonucleotide
  Sense strand starting at position 3525 of SEQ ID NO: 1244951
acuuguauccugcaaacag

SEQ ID NO: 1525167 - RNA, 19 nt, Artificial Sequence
  Description of Artificial Sequence: Synthetic oligonucleotide
  Antisense strand to SEQ ID NO: 1525166
cuguuugcaggauacaagu

SEQ ID NO: 1525168 - RNA, 19 nt, Artificial Sequence
  Description of Artificial Sequence: Synthetic oligonucleotide
  Sense strand starting at position 3545 of SEQ ID NO: 1244951
gauugcaggccuugugaaa

SEQ ID NO: 1525169 - RNA, 19 nt, Artificial Sequence
  Description of Artificial Sequence: Synthetic oligonucleotide
  Antisense strand to SEQ ID NO: 1525168
uuucacaaggccugcaauc

SEQ ID NO: 1525170 - RNA, 19 nt, Artificial Sequence
  Description of Artificial Sequence: Synthetic oligonucleotide
  Sense strand starting at position 3552 of SEQ ID NO: 1244951
ggccuugugaaaugucaga

SEQ ID NO: 1525171 - RNA, 19 nt, Artificial Sequence
  Description of Artificial Sequence: Synthetic oligonucleotide
  Antisense strand to SEQ ID NO: 1525170
ucugacauuucacaaggcc

SEQ ID NO: 1525172 - RNA, 19 nt, Artificial Sequence
  Description of Artificial Sequence: Synthetic oligonucleotide
  Sense strand starting at position 3609 of SEQ ID NO: 1244951
aggguuguuucccaaagga

SEQ ID NO: 1525173 - RNA, 19 nt, Artificial Sequence
  Description of Artificial Sequence: Synthetic oligonucleotide
  Antisense strand to SEQ ID NO: 1525172
uccuuugggaaacaacccu

SEQ ID NO: 1525174 - RNA, 19 nt, Artificial Sequence
  Description of Artificial Sequence: Synthetic oligonucleotide
  Sense strand starting at position 3642 of SEQ ID NO: 1244951
gaaggaugaucgggaguca

SEQ ID NO: 1525175 - RNA, 19 nt, Artificial Sequence
  Description of Artificial Sequence: Synthetic oligonucleotide
  Antisense strand to SEQ ID NO: 1525174
ugacucccgaucauccuuc

SEQ ID NO: 1525176 - RNA, 19 nt, Artificial Sequence
  Description of Artificial Sequence: Synthetic oligonucleotide
  Sense strand starting at position 3856 of SEQ ID NO: 1244951
ggucuuggucucugacuca

SEQ ID NO: 1525177 - RNA, 19 nt, Artificial Sequence
  Description of Artificial Sequence: Synthetic oligonucleotide
  Antisense strand to SEQ ID NO: 1525176
ugagucagagaccaagacc

SEQ ID NO: 1525178 - RNA, 19 nt, Artificial Sequence
  Description of Artificial Sequence: Synthetic oligonucleotide
  Sense strand starting at position 89 of SEQ ID NO: 1244952
gcaagcaggucuuccugaa

SEQ ID NO: 1525179 - RNA, 19 nt, Artificial Sequence
  Description of Artificial Sequence: Synthetic oligonucleotide
  Antisense strand to SEQ ID NO: 1525178
uucaggaagaccugcuugc

SEQ ID NO: 1525180 - RNA, 19 nt, Artificial Sequence
  Description of Artificial Sequence: Synthetic oligonucleotide
  Sense strand starting at position 335 of SEQ ID NO: 1244952
uuaccucugcaguggagaa

SEQ ID NO: 1525181 - RNA, 19 nt, Artificial Sequence
  Description of Artificial Sequence: Synthetic oligonucleotide
  Antisense strand to SEQ ID NO: 1525180
uucuccacugcagagguaa

SEQ ID NO: 1525182 - RNA, 19 nt, Artificial Sequence
  Description of Artificial Sequence: Synthetic oligonucleotide
  Sense strand starting at position 428 of SEQ ID NO: 1244952
gggucugagccaggaaaga

SEQ ID NO: 1525183 - RNA, 19 nt, Artificial Sequence
  Description of Artificial Sequence: Synthetic oligonucleotide
  Antisense strand to SEQ ID NO: 1525182
ucuuuccuggcucagaccc

SEQ ID NO: 1525184 - RNA, 19 nt, Artificial Sequence
  Description of Artificial Sequence: Synthetic oligonucleotide
  Sense strand starting at position 656 of SEQ ID NO: 1244952
agauguggucuuuggacca

SEQ ID NO: 1525185 - RNA, 19 nt, Artificial Sequence
  Description of Artificial Sequence: Synthetic oligonucleotide
  Antisense strand to SEQ ID NO: 1525184
ugguccaaagaccacaucu

SEQ ID NO: 1525186 - RNA, 19 nt, Artificial Sequence
  Description of Artificial Sequence: Synthetic oligonucleotide
  Sense strand starting at position 691 of SEQ ID NO: 1244952
cugggagcuugugaguagu

SEQ ID NO: 1525187 - RNA, 19 nt, Artificial Sequence
  Description of Artificial Sequence: Synthetic oligonucleotide
  Antisense strand to SEQ ID NO: 1525186
acuacucacaagcucccag

SEQ ID NO: 1525188 - RNA, 19 nt, Artificial Sequence
  Description of Artificial Sequence: Synthetic oligonucleotide
  Sense strand starting at position 694 of SEQ ID NO: 1244952
ggagcuugugaguaguaca

SEQ ID NO: 1525189 - RNA, 19 nt, Artificial Sequence
  Description of Artificial Sequence: Synthetic oligonucleotide
  Antisense strand to SEQ ID NO: 1525188
uguacuacucacaagcucc

SEQ ID NO: 1525190 - RNA, 19 nt, Artificial Sequence
  Description of Artificial Sequence: Synthetic oligonucleotide
  Sense strand starting at position 697 of SEQ ID NO: 1244952
gcuugugaguaguacagaa

SEQ ID NO: 1525191 - RNA, 19 nt, Artificial Sequence
  Description of Artificial Sequence: Synthetic oligonucleotide
  Antisense strand to SEQ ID NO: 1525190
uucuguacuacucacaagc

SEQ ID NO: 1525192 - RNA, 19 nt, Artificial Sequence
  Description of Artificial Sequence: Synthetic oligonucleotide
  Sense strand starting at position 699 of SEQ ID NO: 1244952
uugugaguaguacagaauc

SEQ ID NO: 1525193 - RNA, 19 nt, Artificial Sequence
  Description of Artificial Sequence: Synthetic oligonucleotide
  Antisense strand to SEQ ID NO: 1525192
gauucuguacuacucacaa

SEQ ID NO: 1525194 - RNA, 19 nt, Artificial Sequence
  Description of Artificial Sequence: Synthetic oligonucleotide
  Sense strand starting at position 766 of SEQ ID NO: 1244952
cccgcauugagcugcauau

SEQ ID NO: 1525195 - RNA, 19 nt, Artificial Sequence
  Description of Artificial Sequence: Synthetic oligonucleotide
  Antisense strand to SEQ ID NO: 1525194
auaugcagcucaaugcggg

SEQ ID NO: 1525196 - RNA, 19 nt, Artificial Sequence
  Description of Artificial Sequence: Synthetic oligonucleotide
  Sense strand starting at position 772 of SEQ ID NO: 1244952
uugagcugcauauguguua

SEQ ID NO: 1525197 - RNA, 19 nt, Artificial Sequence
  Description of Artificial Sequence: Synthetic oligonucleotide
  Antisense strand to SEQ ID NO: 1525196
uaacacauaugcagcucaa

SEQ ID NO: 1525198 - RNA, 19 nt, Artificial Sequence
  Description of Artificial Sequence: Synthetic oligonucleotide
  Sense strand starting at position 784 of SEQ ID NO: 1244952
uguguuaaccaccaaucua

SEQ ID NO: 1525199 - RNA, 19 nt, Artificial Sequence
  Description of Artificial Sequence: Synthetic oligonucleotide
  Antisense strand to SEQ ID NO: 1525198
uagauuggugguuaacaca

SEQ ID NO: 1525200 - RNA, 19 nt, Artificial Sequence
  Description of Artificial Sequence: Synthetic oligonucleotide
  Sense strand starting at position 888 of SEQ ID NO: 1244952
ccaucuuggucagugguga

SEQ ID NO: 1525201 - RNA, 19 nt, Artificial Sequence
  Description of Artificial Sequence: Synthetic oligonucleotide
  Antisense strand to SEQ ID NO: 1525200
ucaccacugaccaagaugg

SEQ ID NO: 1525202 - RNA, 19 nt, Artificial Sequence
  Description of Artificial Sequence: Synthetic oligonucleotide
  Sense strand starting at position 894 of SEQ ID NO: 1244952
uggucaguggugaggcuua

SEQ ID NO: 1525203 - RNA, 19 nt, Artificial Sequence
  Description of Artificial Sequence: Synthetic oligonucleotide
  Antisense strand to SEQ ID NO: 1525202
uaagccucaccacugacca

SEQ ID NO: 1525204 - RNA, 19 nt, Artificial Sequence
  Description of Artificial Sequence: Synthetic oligonucleotide
  Sense strand starting at position 1131 of SEQ ID NO: 1244952
ggaggcacuuucuaggaaa

SEQ ID NO: 1525205 - RNA, 19 nt, Artificial Sequence
  Description of Artificial Sequence: Synthetic oligonucleotide
  Antisense strand to SEQ ID NO: 1525204
uuuccuagaaagugccucc

SEQ ID NO: 1525206 - RNA, 19 nt, Artificial Sequence
  Description of Artificial Sequence: Synthetic oligonucleotide
  Sense strand starting at position 1133 of SEQ ID NO: 1244952
aggcacuuucuaggaaaug

SEQ ID NO: 1525207 - RNA, 19 nt, Artificial Sequence
  Description of Artificial Sequence: Synthetic oligonucleotide
  Antisense strand to SEQ ID NO: 1525206
cauuuccuagaaagugccu

SEQ ID NO: 1525208 - RNA, 19 nt, Artificial Sequence
  Description of Artificial Sequence: Synthetic oligonucleotide
  Sense strand starting at position 1170 of SEQ ID NO: 1244952
acuugaaguucaggguuga

SEQ ID NO: 1525209 - RNA, 19 nt, Artificial Sequence
  Description of Artificial Sequence: Synthetic oligonucleotide
  Antisense strand to SEQ ID NO: 1525208
ucaacccugaacuucaagu

SEQ ID NO: 1525210 - RNA, 19 nt, Artificial Sequence
  Description of Artificial Sequence: Synthetic oligonucleotide
  Sense strand starting at position 1267 of SEQ ID NO: 1244952
gccugagaguguguaguua

SEQ ID NO: 1525211 - RNA, 19 nt, Artificial Sequence
  Description of Artificial Sequence: Synthetic oligonucleotide
  Antisense strand to SEQ ID NO: 1525210
uaacuacacacucucaggc

SEQ ID NO: 1525212 - RNA, 19 nt, Artificial Sequence
  Description of Artificial Sequence: Synthetic oligonucleotide
  Sense strand starting at position 1278 of SEQ ID NO: 1244952
uguaguuaccugugcugau

SEQ ID NO: 1525213 - RNA, 19 nt, Artificial Sequence
  Description of Artificial Sequence: Synthetic oligonucleotide
  Antisense strand to SEQ ID NO: 1525212
aucagcacagguaacuaca

SEQ ID NO: 1525214 - RNA, 19 nt, Artificial Sequence
  Description of Artificial Sequence: Synthetic oligonucleotide
  Sense strand starting at position 1279 of SEQ ID NO: 1244952
guaguuaccugugcugauc

SEQ ID NO: 1525215 - RNA, 19 nt, Artificial Sequence
  Description of Artificial Sequence: Synthetic oligonucleotide
  Antisense strand to SEQ ID NO: 1525214
gaucagcacagguaacuac

SEQ ID NO: 1525216 - RNA, 19 nt, Artificial Sequence
  Description of Artificial Sequence: Synthetic oligonucleotide
  Sense strand starting at position 1991 of SEQ ID NO: 1244952
cuggcuaagugauugcuaa

SEQ ID NO: 1525217 - RNA, 19 nt, Artificial Sequence
  Description of Artificial Sequence: Synthetic oligonucleotide
  Antisense strand to SEQ ID NO: 1525216
uuagcaaucacuuagccag

SEQ ID NO: 1525218 - RNA, 19 nt, Artificial Sequence
  Description of Artificial Sequence: Synthetic oligonucleotide
  Sense strand starting at position 2108 of SEQ ID NO: 1244952
gcucuagggacuggauaaa

SEQ ID NO: 1525219 - RNA, 19 nt, Artificial Sequence
  Description of Artificial Sequence: Synthetic oligonucleotide
  Antisense strand to SEQ ID NO: 1525218
uuuauccagucccuagagc

SEQ ID NO: 1525220 - RNA, 19 nt, Artificial Sequence
  Description of Artificial Sequence: Synthetic oligonucleotide
  Sense strand starting at position 2175 of SEQ ID NO: 1244952
uggccuguuccuuagggau

SEQ ID NO: 1525221 - RNA, 19 nt, Artificial Sequence
  Description of Artificial Sequence: Synthetic oligonucleotide
  Antisense strand to SEQ ID NO: 1525220
aucccuaaggaacaggcca

SEQ ID NO: 1525222 - RNA, 19 nt, Artificial Sequence
  Description of Artificial Sequence: Synthetic oligonucleotide
  Sense strand starting at position 2315 of SEQ ID NO: 1244952
cuaacuugcuaaguugaua

SEQ ID NO: 1525223 - RNA, 19 nt, Artificial Sequence
  Description of Artificial Sequence: Synthetic oligonucleotide
  Antisense strand to SEQ ID NO: 1525222
uaucaacuuagcaaguuag

SEQ ID NO: 1525224 - RNA, 19 nt, Artificial Sequence
  Description of Artificial Sequence: Synthetic oligonucleotide
  Sense strand starting at position 2330 of SEQ ID NO: 1244952
gauagacauuuauggagua

SEQ ID NO: 1525225 - RNA, 19 nt, Artificial Sequence
  Description of Artificial Sequence: Synthetic oligonucleotide
  Antisense strand to SEQ ID NO: 1525224
uacuccauaaaugucuauc

SEQ ID NO: 1525226 - RNA, 19 nt, Artificial Sequence
  Description of Artificial Sequence: Synthetic oligonucleotide
  Sense strand starting at position 2535 of SEQ ID NO: 1244952
uuaagacccugggagaaau

SEQ ID NO: 1525227 - RNA, 19 nt, Artificial Sequence
  Description of Artificial Sequence: Synthetic oligonucleotide
  Antisense strand to SEQ ID NO: 1525226
auuucucccagggucuuaa

SEQ ID NO: 1525228 - RNA, 19 nt, Artificial Sequence
  Description of Artificial Sequence: Synthetic oligonucleotide
  Sense strand starting at position 2754 of SEQ ID NO: 1244952
caagaaguuugggaaccaa

SEQ ID NO: 1525229 - RNA, 19 nt, Artificial Sequence
  Description of Artificial Sequence: Synthetic oligonucleotide
  Antisense strand to SEQ ID NO: 1525228
uugguucccaaacuucuug

SEQ ID NO: 1525230 - RNA, 19 nt, Artificial Sequence
  Description of Artificial Sequence: Synthetic oligonucleotide
  Sense strand starting at position 2949 of SEQ ID NO: 1244952
ggagucaacucuccuauua

SEQ ID NO: 1525231 - RNA, 19 nt, Artificial Sequence
  Description of Artificial Sequence: Synthetic oligonucleotide
  Antisense strand to SEQ ID NO: 1525230
uaauaggagaguugacucc

SEQ ID NO: 1525232 - RNA, 19 nt, Artificial Sequence
  Description of Artificial Sequence: Synthetic oligonucleotide
  Sense strand starting at position 3002 of SEQ ID NO: 1244952
gugugugaugcccuugugu

SEQ ID NO: 1525233 - RNA, 19 nt, Artificial Sequence
  Description of Artificial Sequence: Synthetic oligonucleotide
  Antisense strand to SEQ ID NO: 1525232
acacaagggcaucacacac

SEQ ID NO: 1525234 - RNA, 19 nt, Artificial Sequence
  Description of Artificial Sequence: Synthetic oligonucleotide
  Sense strand starting at position 3004 of SEQ ID NO: 1244952
gugugaugcccuugugugu

SEQ ID NO: 1525235 - RNA, 19 nt, Artificial Sequence
  Description of Artificial Sequence: Synthetic oligonucleotide
  Antisense strand to SEQ ID NO: 1525234
acacacaagggcaucacac

SEQ ID NO: 1525236 - RNA, 19 nt, Artificial Sequence
  Description of Artificial Sequence: Synthetic oligonucleotide
  Sense strand starting at position 3021 of SEQ ID NO: 1244952
gugugcaugucgaaauggu

SEQ ID NO: 1525237 - RNA, 19 nt, Artificial Sequence
  Description of Artificial Sequence: Synthetic oligonucleotide
  Antisense strand to SEQ ID NO: 1525236
accauuucgacaugcacac

SEQ ID NO: 1525238 - RNA, 19 nt, Artificial Sequence
  Description of Artificial Sequence: Synthetic oligonucleotide
  Sense strand starting at position 3299 of SEQ ID NO: 1244952
cugagauuauaggaaugca

SEQ ID NO: 1525239 - RNA, 19 nt, Artificial Sequence
  Description of Artificial Sequence: Synthetic oligonucleotide
  Antisense strand to SEQ ID NO: 1525238
ugcauuccuauaaucucag

SEQ ID NO: 1525240 - RNA, 19 nt, Artificial Sequence
  Description of Artificial Sequence: Synthetic oligonucleotide
  Sense strand starting at position 3488 of SEQ ID NO: 1244952
ggaguuucccugcauacgu

SEQ ID NO: 1525241 - RNA, 19 nt, Artificial Sequence
  Description of Artificial Sequence: Synthetic oligonucleotide
  Antisense strand to SEQ ID NO: 1525240
acguaugcagggaaacucc

SEQ ID NO: 1525242 - RNA, 19 nt, Artificial Sequence
  Description of Artificial Sequence: Synthetic oligonucleotide
  Sense strand starting at position 3677 of SEQ ID NO: 1244952
cuaauacacgugugcauua

SEQ ID NO: 1525243 - RNA, 19 nt, Artificial Sequence
  Description of Artificial Sequence: Synthetic oligonucleotide
  Antisense strand to SEQ ID NO: 1525242
uaaugcacacguguauuag

SEQ ID NO: 1525244 - RNA, 19 nt, Artificial Sequence
  Description of Artificial Sequence: Synthetic oligonucleotide
  Sense strand starting at position 3682 of SEQ ID NO: 1244952
acacgugugcauuacucau

SEQ ID NO: 1525245 - RNA, 19 nt, Artificial Sequence
  Description of Artificial Sequence: Synthetic oligonucleotide
  Antisense strand to SEQ ID NO: 1525244
augaguaaugcacacgugu

SEQ ID NO: 1525246 - RNA, 19 nt, Artificial Sequence
  Description of Artificial Sequence: Synthetic oligonucleotide
  Sense strand starting at position 3693 of SEQ ID NO: 1244952
uuacucaugccauggugau

SEQ ID NO: 1525247 - RNA, 19 nt, Artificial Sequence
  Description of Artificial Sequence: Synthetic oligonucleotide
  Antisense strand to SEQ ID NO: 1525246
aucaccauggcaugaguaa

SEQ ID NO: 1525248 - RNA, 19 nt, Artificial Sequence
  Description of Artificial Sequence: Synthetic oligonucleotide
  Sense strand starting at position 3694 of SEQ ID NO: 1244952
uacucaugccauggugaua

SEQ ID NO: 1525249 - RNA, 19 nt, Artificial Sequence
  Description of Artificial Sequence: Synthetic oligonucleotide
  Antisense strand to SEQ ID NO: 1525248
uaucaccauggcaugagua

SEQ ID NO: 1525250 - RNA, 19 nt, Artificial Sequence
  Description of Artificial Sequence: Synthetic oligonucleotide
  Sense strand starting at position 3735 of SEQ ID NO: 1244952
gaaggaggucacugagcau

SEQ ID NO: 1525251 - RNA, 19 nt, Artificial Sequence
  Description of Artificial Sequence: Synthetic oligonucleotide
  Antisense strand to SEQ ID NO: 1525250
augcucagugaccuccuuc

SEQ ID NO: 1525252 - RNA, 19 nt, Artificial Sequence
  Description of Artificial Sequence: Synthetic oligonucleotide
  Sense strand starting at position 3738 of SEQ ID NO: 1244952
ggaggucacugagcauagu

SEQ ID NO: 1525253 - RNA, 19 nt, Artificial Sequence
  Description of Artificial Sequence: Synthetic oligonucleotide
  Antisense strand to SEQ ID NO: 1525252
acuaugcucagugaccucc

SEQ ID NO: 1525254 - RNA, 19 nt, Artificial Sequence
  Description of Artificial Sequence: Synthetic oligonucleotide
  Sense strand starting at position 3739 of SEQ ID NO: 1244952
gaggucacugagcauaguu

SEQ ID NO: 1525255 - RNA, 19 nt, Artificial Sequence
  Description of Artificial Sequence: Synthetic oligonucleotide
  Antisense strand to SEQ ID NO: 1525254
aacuaugcucagugaccuc

SEQ ID NO: 1525256 - RNA, 19 nt, Artificial Sequence
  Description of Artificial Sequence: Synthetic oligonucleotide
  Sense strand starting at position 3982 of SEQ ID NO: 1244952
uccuguuauucucuguguu

SEQ ID NO: 1525257 - RNA, 19 nt, Artificial Sequence
  Description of Artificial Sequence: Synthetic oligonucleotide
  Antisense strand to SEQ ID NO: 1525256
aacacagagaauaacagga

SEQ ID NO: 1525258 - RNA, 19 nt, Artificial Sequence
  Description of Artificial Sequence: Synthetic oligonucleotide
  Sense strand starting at position 63 of SEQ ID NO: 1244953
gccacaaacuagguguauu

SEQ ID NO: 1525259 - RNA, 19 nt, Artificial Sequence
  Description of Artificial Sequence: Synthetic oligonucleotide
  Antisense strand to SEQ ID NO: 1525258
aauacaccuaguuuguggc

SEQ ID NO: 1525260 - RNA, 19 nt, Artificial Sequence
  Description of Artificial Sequence: Synthetic oligonucleotide
  Sense strand starting at position 71 of SEQ ID NO: 1244953
cuagguguauuaccucuaa

SEQ ID NO: 1525261 - RNA, 19 nt, Artificial Sequence
  Description of Artificial Sequence: Synthetic oligonucleotide
  Antisense strand to SEQ ID NO: 1525260
uuagagguaauacaccuag

SEQ ID NO: 1525262 - RNA, 19 nt, Artificial Sequence
  Description of Artificial Sequence: Synthetic oligonucleotide
  Sense strand starting at position 509 of SEQ ID NO: 1244953
gccacauacguauauaaua

SEQ ID NO: 1525263 - RNA, 19 nt, Artificial Sequence
  Description of Artificial Sequence: Synthetic oligonucleotide
  Antisense strand to SEQ ID NO: 1525262
uauuauauacguauguggc

SEQ ID NO: 1525264 - RNA, 19 nt, Artificial Sequence
  Description of Artificial Sequence: Synthetic oligonucleotide
  Sense strand starting at position 541 of SEQ ID NO: 1244953
agcuguguugucuaaggag

SEQ ID NO: 1525265 - RNA, 19 nt, Artificial Sequence
  Description of Artificial Sequence: Synthetic oligonucleotide
  Antisense strand to SEQ ID NO: 1525264
cuccuuagacaacacagcu

SEQ ID NO: 1525266 - RNA, 19 nt, Artificial Sequence
  Description of Artificial Sequence: Synthetic oligonucleotide
  Sense strand starting at position 549 of SEQ ID NO: 1244953
ugucuaaggagcuagucau

SEQ ID NO: 1525267 - RNA, 19 nt, Artificial Sequence
  Description of Artificial Sequence: Synthetic oligonucleotide
  Antisense strand to SEQ ID NO: 1525266
augacuagcuccuuagaca

SEQ ID NO: 1525268 - RNA, 19 nt, Artificial Sequence
  Description of Artificial Sequence: Synthetic oligonucleotide
  Sense strand starting at position 710 of SEQ ID NO: 1244953
uccucaguugaggagugau

SEQ ID NO: 1525269 - RNA, 19 nt, Artificial Sequence
  Description of Artificial Sequence: Synthetic oligonucleotide
  Antisense strand to SEQ ID NO: 1525268
aucacuccucaacugagga

SEQ ID NO: 1525270 - RNA, 19 nt, Artificial Sequence
  Description of Artificial Sequence: Synthetic oligonucleotide
  Sense strand starting at position 713 of SEQ ID NO: 1244953
ucaguugaggagugauaaa

SEQ ID NO: 1525271 - RNA, 19 nt, Artificial Sequence
  Description of Artificial Sequence: Synthetic oligonucleotide
  Antisense strand to SEQ ID NO: 1525270
uuuaucacuccucaacuga

SEQ ID NO: 1525272 - RNA, 19 nt, Artificial Sequence
  Description of Artificial Sequence: Synthetic oligonucleotide
  Sense strand starting at position 1128 of SEQ ID NO: 1244953
acagaagugugcucaacau

SEQ ID NO: 1525273 - RNA, 19 nt, Artificial Sequence
  Description of Artificial Sequence: Synthetic oligonucleotide
  Antisense strand to SEQ ID NO: 1525272
auguugagcacacuucugu

SEQ ID NO: 1525274 - RNA, 19 nt, Artificial Sequence
  Description of Artificial Sequence: Synthetic oligonucleotide
  Sense strand starting at position 1132 of SEQ ID NO: 1244953
aagugugcucaacauugua

SEQ ID NO: 1525275 - RNA, 19 nt, Artificial Sequence
  Description of Artificial Sequence: Synthetic oligonucleotide
  Antisense strand to SEQ ID NO: 1525274
uacaauguugagcacacuu

SEQ ID NO: 1525276 - RNA, 19 nt, Artificial Sequence
  Description of Artificial Sequence: Synthetic oligonucleotide
  Sense strand starting at position 1276 of SEQ ID NO: 1244953
aaagaugcagcuuggagaa

SEQ ID NO: 1525277 - RNA, 19 nt, Artificial Sequence
  Description of Artificial Sequence: Synthetic oligonucleotide
  Antisense strand to SEQ ID NO: 1525276
uucuccaagcugcaucuuu

SEQ ID NO: 1525278 - RNA, 19 nt, Artificial Sequence
  Description of Artificial Sequence: Synthetic oligonucleotide
  Sense strand starting at position 1464 of SEQ ID NO: 1244953
agagcaguuccucauuauu

SEQ ID NO: 1525279 - RNA, 19 nt, Artificial Sequence
  Description of Artificial Sequence: Synthetic oligonucleotide
  Antisense strand to SEQ ID NO: 1525278
aauaaugaggaacugcucu

SEQ ID NO: 1525280 - RNA, 19 nt, Artificial Sequence
  Description of Artificial Sequence: Synthetic oligonucleotide
  Sense strand starting at position 1560 of SEQ ID NO: 1244953
gagacagacucugugcuua

SEQ ID NO: 1525281 - RNA, 19 nt, Artificial Sequence
  Description of Artificial Sequence: Synthetic oligonucleotide
  Antisense strand to SEQ ID NO: 1525280
uaagcacagagucugucuc

SEQ ID NO: 1525282 - RNA, 19 nt, Artificial Sequence
  Description of Artificial Sequence: Synthetic oligonucleotide
  Sense strand starting at position 1562 of SEQ ID NO: 1244953
gacagacucugugcuuaaa

SEQ ID NO: 1525283 - RNA, 19 nt, Artificial Sequence
  Description of Artificial Sequence: Synthetic oligonucleotide
  Antisense strand to SEQ ID NO: 1525282
uuuaagcacagagucuguc

SEQ ID NO: 1525284 - RNA, 19 nt, Artificial Sequence
  Description of Artificial Sequence: Synthetic oligonucleotide
  Sense strand starting at position 1597 of SEQ ID NO: 1244953
guagguuuauuauuauccu

SEQ ID NO: 1525285 - RNA, 19 nt, Artificial Sequence
  Description of Artificial Sequence: Synthetic oligonucleotide
  Antisense strand to SEQ ID NO: 1525284
aggauaauaauaaaccuac

SEQ ID NO: 1525286 - RNA, 19 nt, Artificial Sequence
  Description of Artificial Sequence: Synthetic oligonucleotide
  Sense strand starting at position 1600 of SEQ ID NO: 1244953
gguuuauuauuauccucau

SEQ ID NO: 1525287 - RNA, 19 nt, Artificial Sequence
  Description of Artificial Sequence: Synthetic oligonucleotide
  Antisense strand to SEQ ID NO: 1525286
augaggauaauaauaaacc

SEQ ID NO: 1525288 - RNA, 19 nt, Artificial Sequence
  Description of Artificial Sequence: Synthetic oligonucleotide
  Sense strand starting at position 1642 of SEQ ID NO: 1244953
ucugaaagguuauugacuu

SEQ ID NO: 1525289 - RNA, 19 nt, Artificial Sequence
  Description of Artificial Sequence: Synthetic oligonucleotide
  Antisense strand to SEQ ID NO: 1525288
aagucaauaaccuuucaga

SEQ ID NO: 1525290 - RNA, 19 nt, Artificial Sequence
  Description of Artificial Sequence: Synthetic oligonucleotide
  Sense strand starting at position 1721 of SEQ ID NO: 1244953
ccaggaguucuccacacgu

SEQ ID NO: 1525291 - RNA, 19 nt, Artificial Sequence
  Description of Artificial Sequence: Synthetic oligonucleotide
  Antisense strand to SEQ ID NO: 1525290
acguguggagaacuccugg

SEQ ID NO: 1525292 - RNA, 19 nt, Artificial Sequence
  Description of Artificial Sequence: Synthetic oligonucleotide
  Sense strand starting at position 1723 of SEQ ID NO: 1244953
aggaguucuccacacguaa

SEQ ID NO: 1525293 - RNA, 19 nt, Artificial Sequence
  Description of Artificial Sequence: Synthetic oligonucleotide
  Antisense strand to SEQ ID NO: 1525292
uuacguguggagaacuccu

SEQ ID NO: 1525294 - RNA, 19 nt, Artificial Sequence
  Description of Artificial Sequence: Synthetic oligonucleotide
  Sense strand starting at position 1769 of SEQ ID NO: 1244953
cgcuucuguccgguucaaa

SEQ ID NO: 1525295 - RNA, 19 nt, Artificial Sequence
  Description of Artificial Sequence: Synthetic oligonucleotide
  Antisense strand to SEQ ID NO: 1525294
uuugaaccggacagaagcg

SEQ ID NO: 1525296 - RNA, 19 nt, Artificial Sequence
  Description of Artificial Sequence: Synthetic oligonucleotide
  Sense strand starting at position 1860 of SEQ ID NO: 1244953
guuccauaaacggagaguu

SEQ ID NO: 1525297 - RNA, 19 nt, Artificial Sequence
  Description of Artificial Sequence: Synthetic oligonucleotide
  Antisense strand to SEQ ID NO: 1525296
aacucuccguuuauggaac

SEQ ID NO: 1525298 - RNA, 19 nt, Artificial Sequence
  Description of Artificial Sequence: Synthetic oligonucleotide
  Sense strand starting at position 1909 of SEQ ID NO: 1244953
aagauuaauuacgcauguu

SEQ ID NO: 1525299 - RNA, 19 nt, Artificial Sequence
  Description of Artificial Sequence: Synthetic oligonucleotide
  Antisense strand to SEQ ID NO: 1525298
aacaugcguaauuaaucuu

SEQ ID NO: 1525300 - RNA, 19 nt, Artificial Sequence
  Description of Artificial Sequence: Synthetic oligonucleotide
  Sense strand starting at position 2060 of SEQ ID NO: 1244953
cuggauccugccgauaguu

SEQ ID NO: 1525301 - RNA, 19 nt, Artificial Sequence
  Description of Artificial Sequence: Synthetic oligonucleotide
  Antisense strand to SEQ ID NO: 1525300
aacuaucggcaggauccag

SEQ ID NO: 1525302 - RNA, 19 nt, Artificial Sequence
  Description of Artificial Sequence: Synthetic oligonucleotide
  Sense strand starting at position 2098 of SEQ ID NO: 1244953
acuguuuggcuucacggaa

SEQ ID NO: 1525303 - RNA, 19 nt, Artificial Sequence
  Description of Artificial Sequence: Synthetic oligonucleotide
  Antisense strand to SEQ ID NO: 1525302
uuccgugaagccaaacagu

SEQ ID NO: 1525304 - RNA, 19 nt, Artificial Sequence
  Description of Artificial Sequence: Synthetic oligonucleotide
  Sense strand starting at position 2767 of SEQ ID NO: 1244953
ucccuucgagucuagaauu

SEQ ID NO: 1525305 - RNA, 19 nt, Artificial Sequence
  Description of Artificial Sequence: Synthetic oligonucleotide
  Antisense strand to SEQ ID NO: 1525304
aauucuagacucgaaggga

SEQ ID NO: 1525306 - RNA, 19 nt, Artificial Sequence
  Description of Artificial Sequence: Synthetic oligonucleotide
  Sense strand starting at position 3074 of SEQ ID NO: 1244953
aguugaagaugucuguauu

SEQ ID NO: 1525307 - RNA, 19 nt, Artificial Sequence
  Description of Artificial Sequence: Synthetic oligonucleotide
  Antisense strand to SEQ ID NO: 1525306
aauacagacaucuucaacu

SEQ ID NO: 1525308 - RNA, 19 nt, Artificial Sequence
  Description of Artificial Sequence: Synthetic oligonucleotide
  Sense strand starting at position 3075 of SEQ ID NO: 1244953
guugaagaugucuguauuu

SEQ ID NO: 1525309 - RNA, 19 nt, Artificial Sequence
  Description of Artificial Sequence: Synthetic oligonucleotide
  Antisense strand to SEQ ID NO: 1525308
aaauacagacaucuucaac

SEQ ID NO: 1525310 - RNA, 19 nt, Artificial Sequence
  Description of Artificial Sequence: Synthetic oligonucleotide
  Sense strand starting at position 3154 of SEQ ID NO: 1244953
cuugauuuagcuugccaga

SEQ ID NO: 1525311 - RNA, 19 nt, Artificial Sequence
  Description of Artificial Sequence: Synthetic oligonucleotide
  Antisense strand to SEQ ID NO: 1525310
ucuggcaagcuaaaucaag

SEQ ID NO: 1525312 - RNA, 19 nt, Artificial Sequence
  Description of Artificial Sequence: Synthetic oligonucleotide
  Sense strand starting at position 3159 of SEQ ID NO: 1244953
uuuagcuugccagaaauaa

SEQ ID NO: 1525313 - RNA, 19 nt, Artificial Sequence
  Description of Artificial Sequence: Synthetic oligonucleotide
  Antisense strand to SEQ ID NO: 1525312
uuauuucuggcaagcuaaa

SEQ ID NO: 1525314 - RNA, 19 nt, Artificial Sequence
  Description of Artificial Sequence: Synthetic oligonucleotide
  Sense strand starting at position 3170 of SEQ ID NO: 1244953
agaaauaaguugccugaac

SEQ ID NO: 1525315 - RNA, 19 nt, Artificial Sequence
  Description of Artificial Sequence: Synthetic oligonucleotide
  Antisense strand to SEQ ID NO: 1525314
guucaggcaacuuauuucu

SEQ ID NO: 1525316 - RNA, 19 nt, Artificial Sequence
  Description of Artificial Sequence: Synthetic oligonucleotide
  Sense strand starting at position 3191 of SEQ ID NO: 1244953
agacuugugaaugguggua

SEQ ID NO: 1525317 - RNA, 19 nt, Artificial Sequence
  Description of Artificial Sequence: Synthetic oligonucleotide
  Antisense strand to SEQ ID NO: 1525316
uaccaccauucacaagucu

SEQ ID NO: 1525318 - RNA, 19 nt, Artificial Sequence
  Description of Artificial Sequence: Synthetic oligonucleotide
  Sense strand starting at position 3298 of SEQ ID NO: 1244953
guuuguuaaucuuuaugga

SEQ ID NO: 1525319 - RNA, 19 nt, Artificial Sequence
  Description of Artificial Sequence: Synthetic oligonucleotide
  Antisense strand to SEQ ID NO: 1525318
uccauaaagauuaacaaac

SEQ ID NO: 1525320 - RNA, 19 nt, Artificial Sequence
  Description of Artificial Sequence: Synthetic oligonucleotide
  Sense strand starting at position 3395 of SEQ ID NO: 1244953
aucacugauccuggaccaa

SEQ ID NO: 1525321 - RNA, 19 nt, Artificial Sequence
  Description of Artificial Sequence: Synthetic oligonucleotide
  Antisense strand to SEQ ID NO: 1525320
uugguccaggaucagugau

SEQ ID NO: 1525322 - RNA, 19 nt, Artificial Sequence
  Description of Artificial Sequence: Synthetic oligonucleotide
  Sense strand starting at position 3409 of SEQ ID NO: 1244953
accaaaugaucaucaguug

SEQ ID NO: 1525323 - RNA, 19 nt, Artificial Sequence
  Description of Artificial Sequence: Synthetic oligonucleotide
  Antisense strand to SEQ ID NO: 1525322
caacugaugaucauuuggu

SEQ ID NO: 1525324 - RNA, 19 nt, Artificial Sequence
  Description of Artificial Sequence: Synthetic oligonucleotide
  Sense strand starting at position 3426 of SEQ ID NO: 1244953
ugauaaccucuugguaguu

SEQ ID NO: 1525325 - RNA, 19 nt, Artificial Sequence
  Description of Artificial Sequence: Synthetic oligonucleotide
  Antisense strand to SEQ ID NO: 1525324
aacuaccaagagguuauca

SEQ ID NO: 1525326 - RNA, 19 nt, Artificial Sequence
  Description of Artificial Sequence: Synthetic oligonucleotide
  Sense strand starting at position 3457 of SEQ ID NO: 1244953
uccaaugucuaguugaaua

SEQ ID NO: 1525327 - RNA, 19 nt, Artificial Sequence
  Description of Artificial Sequence: Synthetic oligonucleotide
  Antisense strand to SEQ ID NO: 1525326
uauucaacuagacauugga

SEQ ID NO: 1525328 - RNA, 19 nt, Artificial Sequence
  Description of Artificial Sequence: Synthetic oligonucleotide
  Sense strand starting at position 3467 of SEQ ID NO: 1244953
aguugaauacauggguuaa

SEQ ID NO: 1525329 - RNA, 19 nt, Artificial Sequence
  Description of Artificial Sequence: Synthetic oligonucleotide
  Antisense strand to SEQ ID NO: 1525328
uuaacccauguauucaacu

SEQ ID NO: 1525330 - RNA, 19 nt, Artificial Sequence
  Description of Artificial Sequence: Synthetic oligonucleotide
  Sense strand starting at position 3468 of SEQ ID NO: 1244953
guugaauacauggguuaau

SEQ ID NO: 1525331 - RNA, 19 nt, Artificial Sequence
  Description of Artificial Sequence: Synthetic oligonucleotide
  Antisense strand to SEQ ID NO: 1525330
auuaacccauguauucaac

SEQ ID NO: 1525332 - RNA, 19 nt, Artificial Sequence
  Description of Artificial Sequence: Synthetic oligonucleotide
  Sense strand starting at position 3480 of SEQ ID NO: 1244953
gguuaaugacgucagaugu

SEQ ID NO: 1525333 - RNA, 19 nt, Artificial Sequence
  Description of Artificial Sequence: Synthetic oligonucleotide
  Antisense strand to SEQ ID NO: 1525332
acaucugacgucauuaacc

SEQ ID NO: 1525334 - RNA, 19 nt, Artificial Sequence
  Description of Artificial Sequence: Synthetic oligonucleotide
  Sense strand starting at position 3491 of SEQ ID NO: 1244953
ucagauguuugcucuaauu

SEQ ID NO: 1525335 - RNA, 19 nt, Artificial Sequence
  Description of Artificial Sequence: Synthetic oligonucleotide
  Antisense strand to SEQ ID NO: 1525334
aauuagagcaaacaucuga

SEQ ID NO: 1525336 - RNA, 19 nt, Artificial Sequence
  Description of Artificial Sequence: Synthetic oligonucleotide
  Sense strand starting at position 3493 of SEQ ID NO: 1244953
agauguuugcucuaauuac

SEQ ID NO: 1525337 - RNA, 19 nt, Artificial Sequence
  Description of Artificial Sequence: Synthetic oligonucleotide
  Antisense strand to SEQ ID NO: 1525336
guaauuagagcaaacaucu

SEQ ID NO: 1525338 - RNA, 19 nt, Artificial Sequence
  Description of Artificial Sequence: Synthetic oligonucleotide
  Sense strand starting at position 46 of SEQ ID NO: 1244954
gacaguaaguuggauagaa

SEQ ID NO: 1525339 - RNA, 19 nt, Artificial Sequence
  Description of Artificial Sequence: Synthetic oligonucleotide
  Antisense strand to SEQ ID NO: 1525338
uucuauccaacuuacuguc

SEQ ID NO: 1525340 - RNA, 19 nt, Artificial Sequence
  Description of Artificial Sequence: Synthetic oligonucleotide
  Sense strand starting at position 438 of SEQ ID NO: 1244954
uaugaaauguccuuugguu

SEQ ID NO: 1525341 - RNA, 19 nt, Artificial Sequence
  Description of Artificial Sequence: Synthetic oligonucleotide
  Antisense strand to SEQ ID NO: 1525340
aaccaaaggacauuucaua

SEQ ID NO: 1525342 - RNA, 19 nt, Artificial Sequence
  Description of Artificial Sequence: Synthetic oligonucleotide
  Sense strand starting at position 518 of SEQ ID NO: 1244954
uaggguuguugggagauuu

SEQ ID NO: 1525343 - RNA, 19 nt, Artificial Sequence
  Description of Artificial Sequence: Synthetic oligonucleotide
  Antisense strand to SEQ ID NO: 1525342
aaaucucccaacaacccua

SEQ ID NO: 1525344 - RNA, 19 nt, Artificial Sequence
  Description of Artificial Sequence: Synthetic oligonucleotide
  Sense strand starting at position 591 of SEQ ID NO: 1244954
aguguaggcgcuugacaau

SEQ ID NO: 1525345 - RNA, 19 nt, Artificial Sequence
  Description of Artificial Sequence: Synthetic oligonucleotide
  Antisense strand to SEQ ID NO: 1525344
auugucaagcgccuacacu

SEQ ID NO: 1525346 - RNA, 19 nt, Artificial Sequence
  Description of Artificial Sequence: Synthetic oligonucleotide
  Sense strand starting at position 597 of SEQ ID NO: 1244954
ggcgcuugacaauauuaca

SEQ ID NO: 1525347 - RNA, 19 nt, Artificial Sequence
  Description of Artificial Sequence: Synthetic oligonucleotide
  Antisense strand to SEQ ID NO: 1525346
uguaauauugucaagcgcc

SEQ ID NO: 1525348 - RNA, 19 nt, Artificial Sequence
  Description of Artificial Sequence: Synthetic oligonucleotide
  Sense strand starting at position 679 of SEQ ID NO: 1244954
cucucuucgggacgucaua

SEQ ID NO: 1525349 - RNA, 19 nt, Artificial Sequence
  Description of Artificial Sequence: Synthetic oligonucleotide
  Antisense strand to SEQ ID NO: 1525348
uaugacgucccgaagagag

SEQ ID NO: 1525350 - RNA, 19 nt, Artificial Sequence
  Description of Artificial Sequence: Synthetic oligonucleotide
  Sense strand starting at position 1344 of SEQ ID NO: 1244954
aggacucucccgugucuga

SEQ ID NO: 1525351 - RNA, 19 nt, Artificial Sequence
  Description of Artificial Sequence: Synthetic oligonucleotide
  Antisense strand to SEQ ID NO: 1525350
ucagacacgggagaguccu

SEQ ID NO: 1525352 - RNA, 19 nt, Artificial Sequence
  Description of Artificial Sequence: Synthetic oligonucleotide
  Sense strand starting at position 1432 of SEQ ID NO: 1244954
agggaugucucgccuuuca

SEQ ID NO: 1525353 - RNA, 19 nt, Artificial Sequence
  Description of Artificial Sequence: Synthetic oligonucleotide
  Antisense strand to SEQ ID NO: 1525352
ugaaaggcgagacaucccu

SEQ ID NO: 1525354 - RNA, 19 nt, Artificial Sequence
  Description of Artificial Sequence: Synthetic oligonucleotide
  Sense strand starting at position 1497 of SEQ ID NO: 1244954
gcgagaucccauugacccu

SEQ ID NO: 1525355 - RNA, 19 nt, Artificial Sequence
  Description of Artificial Sequence: Synthetic oligonucleotide
  Antisense strand to SEQ ID NO: 1525354
agggucaaugggaucucgc

SEQ ID NO: 1525356 - RNA, 19 nt, Artificial Sequence
  Description of Artificial Sequence: Synthetic oligonucleotide
  Sense strand starting at position 1542 of SEQ ID NO: 1244954
gaguuucgcucacucugau

SEQ ID NO: 1525357 - RNA, 19 nt, Artificial Sequence
  Description of Artificial Sequence: Synthetic oligonucleotide
  Antisense strand to SEQ ID NO: 1525356
aucagagugagcgaaacuc

SEQ ID NO: 1525358 - RNA, 19 nt, Artificial Sequence
  Description of Artificial Sequence: Synthetic oligonucleotide
  Sense strand starting at position 2246 of SEQ ID NO: 1244954
cggcuuucuggugagagaa

SEQ ID NO: 1525359 - RNA, 19 nt, Artificial Sequence
  Description of Artificial Sequence: Synthetic oligonucleotide
  Antisense strand to SEQ ID NO: 1525358
uucucucaccagaaagccg

SEQ ID NO: 1525360 - RNA, 19 nt, Artificial Sequence
  Description of Artificial Sequence: Synthetic oligonucleotide
  Sense strand starting at position 2514 of SEQ ID NO: 1244954
ucuugagccgcucaagagu

SEQ ID NO: 1525361 - RNA, 19 nt, Artificial Sequence
  Description of Artificial Sequence: Synthetic oligonucleotide
  Antisense strand to SEQ ID NO: 1525360
acucuugagcggcucaaga

SEQ ID NO: 1525362 - RNA, 19 nt, Artificial Sequence
  Description of Artificial Sequence: Synthetic oligonucleotide
  Sense strand starting at position 2561 of SEQ ID NO: 1244954
aaagcugcgucccuuuaaa

SEQ ID NO: 1525363 - RNA, 19 nt, Artificial Sequence
  Description of Artificial Sequence: Synthetic oligonucleotide
  Antisense strand to SEQ ID NO: 1525362
uuuaaagggacgcagcuuu

SEQ ID NO: 1525364 - RNA, 19 nt, Artificial Sequence
  Description of Artificial Sequence: Synthetic oligonucleotide
  Sense strand starting at position 2610 of SEQ ID NO: 1244954
gugcaaguucuagauuguu

SEQ ID NO: 1525365 - RNA, 19 nt, Artificial Sequence
  Description of Artificial Sequence: Synthetic oligonucleotide
  Antisense strand to SEQ ID NO: 1525364
aacaaucuagaacuugcac

SEQ ID NO: 1525366 - RNA, 19 nt, Artificial Sequence
  Description of Artificial Sequence: Synthetic oligonucleotide
  Sense strand starting at position 2641 of SEQ ID NO: 1244954
aguaguuuauuguuggagu

SEQ ID NO: 1525367 - RNA, 19 nt, Artificial Sequence
  Description of Artificial Sequence: Synthetic oligonucleotide
  Antisense strand to SEQ ID NO: 1525366
acuccaacaauaaacuacu

SEQ ID NO: 1525368 - RNA, 19 nt, Artificial Sequence
  Description of Artificial Sequence: Synthetic oligonucleotide
  Sense strand starting at position 2643 of SEQ ID NO: 1244954
uaguuuauuguuggaguag

SEQ ID NO: 1525369 - RNA, 19 nt, Artificial Sequence
  Description of Artificial Sequence: Synthetic oligonucleotide
  Antisense strand to SEQ ID NO: 1525368
cuacuccaacaauaaacua

SEQ ID NO: 1525370 - RNA, 19 nt, Artificial Sequence
  Description of Artificial Sequence: Synthetic oligonucleotide
  Sense strand starting at position 2679 of SEQ ID NO: 1244954
aagguauccauagguguga

SEQ ID NO: 1525371 - RNA, 19 nt, Artificial Sequence
  Description of Artificial Sequence: Synthetic oligonucleotide
  Antisense strand to SEQ ID NO: 1525370
ucacaccuauggauaccuu

SEQ ID NO: 1525372 - RNA, 19 nt, Artificial Sequence
  Description of Artificial Sequence: Synthetic oligonucleotide
  Sense strand starting at position 2681 of SEQ ID NO: 1244954
gguauccauaggugugauu

SEQ ID NO: 1525373 - RNA, 19 nt, Artificial Sequence
  Description of Artificial Sequence: Synthetic oligonucleotide
  Antisense strand to SEQ ID NO: 1525372
aaucacaccuauggauacc

SEQ ID NO: 1525374 - RNA, 19 nt, Artificial Sequence
  Description of Artificial Sequence: Synthetic oligonucleotide
  Sense strand starting at position 2683 of SEQ ID NO: 1244954
uauccauaggugugauuau

SEQ ID NO: 1525375 - RNA, 19 nt, Artificial Sequence
  Description of Artificial Sequence: Synthetic oligonucleotide
  Antisense strand to SEQ ID NO: 1525374
auaaucacaccuauggaua

SEQ ID NO: 1525376 - RNA, 19 nt, Artificial Sequence
  Description of Artificial Sequence: Synthetic oligonucleotide
  Sense strand starting at position 2707 of SEQ ID NO: 1244954
aagcuugagcgauucgcau

SEQ ID NO: 1525377 - RNA, 19 nt, Artificial Sequence
  Description of Artificial Sequence: Synthetic oligonucleotide
  Antisense strand to SEQ ID NO: 1525376
augcgaaucgcucaagcuu

SEQ ID NO: 1525378 - RNA, 19 nt, Artificial Sequence
  Description of Artificial Sequence: Synthetic oligonucleotide
  Sense strand starting at position 2713 of SEQ ID NO: 1244954
gagcgauucgcaugaauua

SEQ ID NO: 1525379 - RNA, 19 nt, Artificial Sequence
  Description of Artificial Sequence: Synthetic oligonucleotide
  Antisense strand to SEQ ID NO: 1525378
uaauucaugcgaaucgcuc

SEQ ID NO: 1525380 - RNA, 19 nt, Artificial Sequence
  Description of Artificial Sequence: Synthetic oligonucleotide
  Sense strand starting at position 2714 of SEQ ID NO: 1244954
agcgauucgcaugaauuag

SEQ ID NO: 1525381 - RNA, 19 nt, Artificial Sequence
  Description of Artificial Sequence: Synthetic oligonucleotide
  Antisense strand to SEQ ID NO: 1525380
cuaauucaugcgaaucgcu

SEQ ID NO: 1525382 - RNA, 19 nt, Artificial Sequence
  Description of Artificial Sequence: Synthetic oligonucleotide
  Sense strand starting at position 2737 of SEQ ID NO: 1244954
uuauauaucuaggaaggaa

SEQ ID NO: 1525383 - RNA, 19 nt, Artificial Sequence
  Description of Artificial Sequence: Synthetic oligonucleotide
  Antisense strand to SEQ ID NO: 1525382
uuccuuccuagauauauaa

SEQ ID NO: 1525384 - RNA, 19 nt, Artificial Sequence
  Description of Artificial Sequence: Synthetic oligonucleotide
  Sense strand starting at position 2756 of SEQ ID NO: 1244954
guuuaugaagucuaagcgu

SEQ ID NO: 1525385 - RNA, 19 nt, Artificial Sequence
  Description of Artificial Sequence: Synthetic oligonucleotide
  Antisense strand to SEQ ID NO: 1525384
acgcuuagacuucauaaac

SEQ ID NO: 1525386 - RNA, 19 nt, Artificial Sequence
  Description of Artificial Sequence: Synthetic oligonucleotide
  Sense strand starting at position 2764 of SEQ ID NO: 1244954
agucuaagcgucaguguga

SEQ ID NO: 1525387 - RNA, 19 nt, Artificial Sequence
  Description of Artificial Sequence: Synthetic oligonucleotide
  Antisense strand to SEQ ID NO: 1525386
ucacacugacgcuuagacu

SEQ ID NO: 1525388 - RNA, 19 nt, Artificial Sequence
  Description of Artificial Sequence: Synthetic oligonucleotide
  Sense strand starting at position 2834 of SEQ ID NO: 1244954
aggaaaugaugacggagau

SEQ ID NO: 1525389 - RNA, 19 nt, Artificial Sequence
  Description of Artificial Sequence: Synthetic oligonucleotide
  Antisense strand to SEQ ID NO: 1525388
aucuccgucaucauuuccu

SEQ ID NO: 1525390 - RNA, 19 nt, Artificial Sequence
  Description of Artificial Sequence: Synthetic oligonucleotide
  Sense strand starting at position 2847 of SEQ ID NO: 1244954
ggagauuacacgcguguca

SEQ ID NO: 1525391 - RNA, 19 nt, Artificial Sequence
  Description of Artificial Sequence: Synthetic oligonucleotide
  Antisense strand to SEQ ID NO: 1525390
ugacacgcguguaaucucc

SEQ ID NO: 1525392 - RNA, 19 nt, Artificial Sequence
  Description of Artificial Sequence: Synthetic oligonucleotide
  Sense strand starting at position 2849 of SEQ ID NO: 1244954
agauuacacgcgugucaaa

SEQ ID NO: 1525393 - RNA, 19 nt, Artificial Sequence
  Description of Artificial Sequence: Synthetic oligonucleotide
  Antisense strand to SEQ ID NO: 1525392
uuugacacgcguguaaucu

SEQ ID NO: 1525394 - RNA, 19 nt, Artificial Sequence
  Description of Artificial Sequence: Synthetic oligonucleotide
  Sense strand starting at position 2868 of SEQ ID NO: 1244954
gccaccugugauuguaacu

SEQ ID NO: 1525395 - RNA, 19 nt, Artificial Sequence
  Description of Artificial Sequence: Synthetic oligonucleotide
  Antisense strand to SEQ ID NO: 1525394
aguuacaaucacagguggc

SEQ ID NO: 1525396 - RNA, 19 nt, Artificial Sequence
  Description of Artificial Sequence: Synthetic oligonucleotide
  Sense strand starting at position 2915 of SEQ ID NO: 1244954
auccuuagccaugguuuau

SEQ ID NO: 1525397 - RNA, 19 nt, Artificial Sequence
  Description of Artificial Sequence: Synthetic oligonucleotide
  Antisense strand to SEQ ID NO: 1525396
auaaaccauggcuaaggau

SEQ ID NO: 1525398 - RNA, 19 nt, Artificial Sequence
  Description of Artificial Sequence: Synthetic oligonucleotide
  Sense strand starting at position 2924 of SEQ ID NO: 1244954
caugguuuauaggcaagga

SEQ ID NO: 1525399 - RNA, 19 nt, Artificial Sequence
  Description of Artificial Sequence: Synthetic oligonucleotide
  Antisense strand to SEQ ID NO: 1525398
uccuugccuauaaaccaug

SEQ ID NO: 1525400 - RNA, 19 nt, Artificial Sequence
  Description of Artificial Sequence: Synthetic oligonucleotide
  Sense strand starting at position 2928 of SEQ ID NO: 1244954
guuuauaggcaaggaaauu

SEQ ID NO: 1525401 - RNA, 19 nt, Artificial Sequence
  Description of Artificial Sequence: Synthetic oligonucleotide
  Antisense strand to SEQ ID NO: 1525400
aauuuccuugccuauaaac

SEQ ID NO: 1525402 - RNA, 19 nt, Artificial Sequence
  Description of Artificial Sequence: Synthetic oligonucleotide
  Sense strand starting at position 2940 of SEQ ID NO: 1244954
ggaaauugaugucuaauac

SEQ ID NO: 1525403 - RNA, 19 nt, Artificial Sequence
  Description of Artificial Sequence: Synthetic oligonucleotide
  Antisense strand to SEQ ID NO: 1525402
guauuagacaucaauuucc

SEQ ID NO: 1525404 - RNA, 19 nt, Artificial Sequence
  Description of Artificial Sequence: Synthetic oligonucleotide
  Sense strand starting at position 3015 of SEQ ID NO: 1244954
ugugucaugcucugugaaa

SEQ ID NO: 1525405 - RNA, 19 nt, Artificial Sequence
  Description of Artificial Sequence: Synthetic oligonucleotide
  Antisense strand to SEQ ID NO: 1525404
uuucacagagcaugacaca

SEQ ID NO: 1525406 - RNA, 19 nt, Artificial Sequence
  Description of Artificial Sequence: Synthetic oligonucleotide
  Sense strand starting at position 3051 of SEQ ID NO: 1244954
cucaguugucaucaccuga

SEQ ID NO: 1525407 - RNA, 19 nt, Artificial Sequence
  Description of Artificial Sequence: Synthetic oligonucleotide
  Antisense strand to SEQ ID NO: 1525406
ucaggugaugacaacugag

SEQ ID NO: 1525408 - RNA, 19 nt, Artificial Sequence
  Description of Artificial Sequence: Synthetic oligonucleotide
  Sense strand starting at position 3055 of SEQ ID NO: 1244954
guugucaucaccugaagug

SEQ ID NO: 1525409 - RNA, 19 nt, Artificial Sequence
  Description of Artificial Sequence: Synthetic oligonucleotide
  Antisense strand to SEQ ID NO: 1525408
cacuucaggugaugacaac

SEQ ID NO: 1525410 - RNA, 19 nt, Artificial Sequence
  Description of Artificial Sequence: Synthetic oligonucleotide
  Sense strand starting at position 3189 of SEQ ID NO: 1244954
ucuggauaagccugaaaca

SEQ ID NO: 1525411 - RNA, 19 nt, Artificial Sequence
  Description of Artificial Sequence: Synthetic oligonucleotide
  Antisense strand to SEQ ID NO: 1525410
uguuucaggcuuauccaga

SEQ ID NO: 1525412 - RNA, 19 nt, Artificial Sequence
  Description of Artificial Sequence: Synthetic oligonucleotide
  Sense strand starting at position 3404 of SEQ ID NO: 1244954
cccaguuaaaggugucaca

SEQ ID NO: 1525413 - RNA, 19 nt, Artificial Sequence
  Description of Artificial Sequence: Synthetic oligonucleotide
  Antisense strand to SEQ ID NO: 1525412
ugugacaccuuuaacuggg

SEQ ID NO: 1525414 - RNA, 19 nt, Artificial Sequence
  Description of Artificial Sequence: Synthetic oligonucleotide
  Sense strand starting at position 3419 of SEQ ID NO: 1244954
cacaguagucucuggcauu

SEQ ID NO: 1525415 - RNA, 19 nt, Artificial Sequence
  Description of Artificial Sequence: Synthetic oligonucleotide
  Antisense strand to SEQ ID NO: 1525414
aaugccagagacuacugug

SEQ ID NO: 1525416 - RNA, 19 nt, Artificial Sequence
  Description of Artificial Sequence: Synthetic oligonucleotide
  Sense strand starting at position 3456 of SEQ ID NO: 1244954
uagcaaacucgaugguaaa

SEQ ID NO: 1525417 - RNA, 19 nt, Artificial Sequence
  Description of Artificial Sequence: Synthetic oligonucleotide
  Antisense strand to SEQ ID NO: 1525416
uuuaccaucgaguuugcua

SEQ ID NO: 1525418 - RNA, 19 nt, Artificial Sequence
  Description of Artificial Sequence: Synthetic oligonucleotide
  Sense strand starting at position 94 of SEQ ID NO: 1244955
auacuauuauugcucuagu

SEQ ID NO: 1525419 - RNA, 19 nt, Artificial Sequence
  Description of Artificial Sequence: Synthetic oligonucleotide
  Antisense strand to SEQ ID NO: 1525418
acuagagcaauaauaguau

SEQ ID NO: 1525420 - RNA, 19 nt, Artificial Sequence
  Description of Artificial Sequence: Synthetic oligonucleotide
  Sense strand starting at position 105 of SEQ ID NO: 1244955
gcucuagucccuuaggaaa

SEQ ID NO: 1525421 - RNA, 19 nt, Artificial Sequence
  Description of Artificial Sequence: Synthetic oligonucleotide
  Antisense strand to SEQ ID NO: 1525420
uuuccuaagggacuagagc

SEQ ID NO: 1525422 - RNA, 19 nt, Artificial Sequence
  Description of Artificial Sequence: Synthetic oligonucleotide
  Sense strand starting at position 140 of SEQ ID NO: 1244955
agcuguaagccaggaacau

SEQ ID NO: 1525423 - RNA, 19 nt, Artificial Sequence
  Description of Artificial Sequence: Synthetic oligonucleotide
  Antisense strand to SEQ ID NO: 1525422
auguuccuggcuuacagcu

SEQ ID NO: 1525424 - RNA, 19 nt, Artificial Sequence
  Description of Artificial Sequence: Synthetic oligonucleotide
  Sense strand starting at position 141 of SEQ ID NO: 1244955
gcuguaagccaggaacaua

SEQ ID NO: 1525425 - RNA, 19 nt, Artificial Sequence
  Description of Artificial Sequence: Synthetic oligonucleotide
  Antisense strand to SEQ ID NO: 1525424
uauguuccuggcuuacagc

SEQ ID NO: 1525426 - RNA, 19 nt, Artificial Sequence
  Description of Artificial Sequence: Synthetic oligonucleotide
  Sense strand starting at position 281 of SEQ ID NO: 1244955
ggcugaggcuccuugggaa

SEQ ID NO: 1525427 - RNA, 19 nt, Artificial Sequence
  Description of Artificial Sequence: Synthetic oligonucleotide
  Antisense strand to SEQ ID NO: 1525426
uucccaaggagccucagcc

SEQ ID NO: 1525428 - RNA, 19 nt, Artificial Sequence
  Description of Artificial Sequence: Synthetic oligonucleotide
  Sense strand starting at position 298 of SEQ ID NO: 1244955
aagguuuggagcuggagaa

SEQ ID NO: 1525429 - RNA, 19 nt, Artificial Sequence
  Description of Artificial Sequence: Synthetic oligonucleotide
  Antisense strand to SEQ ID NO: 1525428
uucuccagcuccaaaccuu

SEQ ID NO: 1525430 - RNA, 19 nt, Artificial Sequence
  Description of Artificial Sequence: Synthetic oligonucleotide
  Sense strand starting at position 360 of SEQ ID NO: 1244955
uuaugacuuccuugagaac

SEQ ID NO: 1525431 - RNA, 19 nt, Artificial Sequence
  Description of Artificial Sequence: Synthetic oligonucleotide
  Antisense strand to SEQ ID NO: 1525430
guucucaaggaagucauaa

SEQ ID NO: 1525432 - RNA, 19 nt, Artificial Sequence
  Description of Artificial Sequence: Synthetic oligonucleotide
  Sense strand starting at position 686 of SEQ ID NO: 1244955
uucugucuacccuggaaua

SEQ ID NO: 1525433 - RNA, 19 nt, Artificial Sequence
  Description of Artificial Sequence: Synthetic oligonucleotide
  Antisense strand to SEQ ID NO: 1525432
uauuccaggguagacagaa

SEQ ID NO: 1525434 - RNA, 19 nt, Artificial Sequence
  Description of Artificial Sequence: Synthetic oligonucleotide
  Sense strand starting at position 687 of SEQ ID NO: 1244955
ucugucuacccuggaauau

SEQ ID NO: 1525435 - RNA, 19 nt, Artificial Sequence
  Description of Artificial Sequence: Synthetic oligonucleotide
  Antisense strand to SEQ ID NO: 1525434
auauuccaggguagacaga

SEQ ID NO: 1525436 - RNA, 19 nt, Artificial Sequence
  Description of Artificial Sequence: Synthetic oligonucleotide
  Sense strand starting at position 688 of SEQ ID NO: 1244955
cugucuacccuggaauauu

SEQ ID NO: 1525437 - RNA, 19 nt, Artificial Sequence
  Description of Artificial Sequence: Synthetic oligonucleotide
  Antisense strand to SEQ ID NO: 1525436
aauauuccaggguagacag

SEQ ID NO: 1525438 - RNA, 19 nt, Artificial Sequence
  Description of Artificial Sequence: Synthetic oligonucleotide
  Sense strand starting at position 699 of SEQ ID NO: 1244955
ggaauauuguugccacccu

SEQ ID NO: 1525439 - RNA, 19 nt, Artificial Sequence
  Description of Artificial Sequence: Synthetic oligonucleotide
  Antisense strand to SEQ ID NO: 1525438
aggguggcaacaauauucc

SEQ ID NO: 1525440 - RNA, 19 nt, Artificial Sequence
  Description of Artificial Sequence: Synthetic oligonucleotide
  Sense strand starting at position 883 of SEQ ID NO: 1244955
uugccucuggaugggaaua

SEQ ID NO: 1525441 - RNA, 19 nt, Artificial Sequence
  Description of Artificial Sequence: Synthetic oligonucleotide
  Antisense strand to SEQ ID NO: 1525440
uauucccauccagaggcaa

SEQ ID NO: 1525442 - RNA, 19 nt, Artificial Sequence
  Description of Artificial Sequence: Synthetic oligonucleotide
  Sense strand starting at position 884 of SEQ ID NO: 1244955
ugccucuggaugggaauau

SEQ ID NO: 1525443 - RNA, 19 nt, Artificial Sequence
  Description of Artificial Sequence: Synthetic oligonucleotide
  Antisense strand to SEQ ID NO: 1525442
auauucccauccagaggca

SEQ ID NO: 1525444 - RNA, 19 nt, Artificial Sequence
  Description of Artificial Sequence: Synthetic oligonucleotide
  Sense strand starting at position 895 of SEQ ID NO: 1244955
gggaauaucaaaggucucu

SEQ ID NO: 1525445 - RNA, 19 nt, Artificial Sequence
  Description of Artificial Sequence: Synthetic oligonucleotide
  Antisense strand to SEQ ID NO: 1525444
agagaccuuugauauuccc

SEQ ID NO: 1525446 - RNA, 19 nt, Artificial Sequence
  Description of Artificial Sequence: Synthetic oligonucleotide
  Sense strand starting at position 900 of SEQ ID NO: 1244955
uaucaaaggucucuggaau

SEQ ID NO: 1525447 - RNA, 19 nt, Artificial Sequence
  Description of Artificial Sequence: Synthetic oligonucleotide
  Antisense strand to SEQ ID NO: 1525446
auuccagagaccuuugaua

SEQ ID NO: 1525448 - RNA, 19 nt, Artificial Sequence
  Description of Artificial Sequence: Synthetic oligonucleotide
  Sense strand starting at position 901 of SEQ ID NO: 1244955
aucaaaggucucuggaaug

SEQ ID NO: 1525449 - RNA, 19 nt, Artificial Sequence
  Description of Artificial Sequence: Synthetic oligonucleotide
  Antisense strand to SEQ ID NO: 1525448
cauuccagagaccuuugau

SEQ ID NO: 1525450 - RNA, 19 nt, Artificial Sequence
  Description of Artificial Sequence: Synthetic oligonucleotide
  Sense strand starting at position 913 of SEQ ID NO: 1244955
uggaauggucgcuaggaca

SEQ ID NO: 1525451 - RNA, 19 nt, Artificial Sequence
  Description of Artificial Sequence: Synthetic oligonucleotide
  Antisense strand to SEQ ID NO: 1525450
uguccuagcgaccauucca

SEQ ID NO: 1525452 - RNA, 19 nt, Artificial Sequence
  Description of Artificial Sequence: Synthetic oligonucleotide
  Sense strand starting at position 2121 of SEQ ID NO: 1244955
gugcuuguccacguguaag

SEQ ID NO: 1525453 - RNA, 19 nt, Artificial Sequence
  Description of Artificial Sequence: Synthetic oligonucleotide
  Antisense strand to SEQ ID NO: 1525452
cuuacacguggacaagcac

SEQ ID NO: 1525454 - RNA, 19 nt, Artificial Sequence
  Description of Artificial Sequence: Synthetic oligonucleotide
  Sense strand starting at position 2132 of SEQ ID NO: 1244955
cguguaaggagucaucuac

SEQ ID NO: 1525455 - RNA, 19 nt, Artificial Sequence
  Description of Artificial Sequence: Synthetic oligonucleotide
  Antisense strand to SEQ ID NO: 1525454
guagaugacuccuuacacg

SEQ ID NO: 1525456 - RNA, 19 nt, Artificial Sequence
  Description of Artificial Sequence: Synthetic oligonucleotide
  Sense strand starting at position 2139 of SEQ ID NO: 1244955
ggagucaucuaccuauauu

SEQ ID NO: 1525457 - RNA, 19 nt, Artificial Sequence
  Description of Artificial Sequence: Synthetic oligonucleotide
  Antisense strand to SEQ ID NO: 1525456
aauauagguagaugacucc

SEQ ID NO: 1525458 - RNA, 19 nt, Artificial Sequence
  Description of Artificial Sequence: Synthetic oligonucleotide
  Sense strand starting at position 2151 of SEQ ID NO: 1244955
cuauauugguaggugagga

SEQ ID NO: 1525459 - RNA, 19 nt, Artificial Sequence
  Description of Artificial Sequence: Synthetic oligonucleotide
  Antisense strand to SEQ ID NO: 1525458
uccucaccuaccaauauag

SEQ ID NO: 1525460 - RNA, 19 nt, Artificial Sequence
  Description of Artificial Sequence: Synthetic oligonucleotide
  Sense strand starting at position 2175 of SEQ ID NO: 1244955
ucagcuuugcuagaucaaa

SEQ ID NO: 1525461 - RNA, 19 nt, Artificial Sequence
  Description of Artificial Sequence: Synthetic oligonucleotide
  Antisense strand to SEQ ID NO: 1525460
uuugaucuagcaaagcuga

SEQ ID NO: 1525462 - RNA, 19 nt, Artificial Sequence
  Description of Artificial Sequence: Synthetic oligonucleotide
  Sense strand starting at position 2345 of SEQ ID NO: 1244955
uugaacuucuggcuuaagu

SEQ ID NO: 1525463 - RNA, 19 nt, Artificial Sequence
  Description of Artificial Sequence: Synthetic oligonucleotide
  Antisense strand to SEQ ID NO: 1525462
acuuaagccagaaguucaa

SEQ ID NO: 1525464 - RNA, 19 nt, Artificial Sequence
  Description of Artificial Sequence: Synthetic oligonucleotide
  Sense strand starting at position 2347 of SEQ ID NO: 1244955
gaacuucuggcuuaaguga

SEQ ID NO: 1525465 - RNA, 19 nt, Artificial Sequence
  Description of Artificial Sequence: Synthetic oligonucleotide
  Antisense strand to SEQ ID NO: 1525464
ucacuuaagccagaaguuc

SEQ ID NO: 1525466 - RNA, 19 nt, Artificial Sequence
  Description of Artificial Sequence: Synthetic oligonucleotide
  Sense strand starting at position 2597 of SEQ ID NO: 1244955
guaaguacugcauacaguu

SEQ ID NO: 1525467 - RNA, 19 nt, Artificial Sequence
  Description of Artificial Sequence: Synthetic oligonucleotide
  Antisense strand to SEQ ID NO: 1525466
aacuguaugcaguacuuac

SEQ ID NO: 1525468 - RNA, 19 nt, Artificial Sequence
  Description of Artificial Sequence: Synthetic oligonucleotide
  Sense strand starting at position 2634 of SEQ ID NO: 1244955
ucacauuguucuguaacca

SEQ ID NO: 1525469 - RNA, 19 nt, Artificial Sequence
  Description of Artificial Sequence: Synthetic oligonucleotide
  Antisense strand to SEQ ID NO: 1525468
ugguuacagaacaauguga

SEQ ID NO: 1525470 - RNA, 19 nt, Artificial Sequence
  Description of Artificial Sequence: Synthetic oligonucleotide
  Sense strand starting at position 2706 of SEQ ID NO: 1244955
gcgauuaaacaguaacuuc

SEQ ID NO: 1525471 - RNA, 19 nt, Artificial Sequence
  Description of Artificial Sequence: Synthetic oligonucleotide
  Antisense strand to SEQ ID NO: 1525470
gaaguuacuguuuaaucgc

SEQ ID NO: 1525472 - RNA, 19 nt, Artificial Sequence
  Description of Artificial Sequence: Synthetic oligonucleotide
  Sense strand starting at position 2743 of SEQ ID NO: 1244955
accugauaugaguggaauu

SEQ ID NO: 1525473 - RNA, 19 nt, Artificial Sequence
  Description of Artificial Sequence: Synthetic oligonucleotide
  Antisense strand to SEQ ID NO: 1525472
aauuccacucauaucaggu

SEQ ID NO: 1525474 - RNA, 19 nt, Artificial Sequence
  Description of Artificial Sequence: Synthetic oligonucleotide
  Sense strand starting at position 2744 of SEQ ID NO: 1244955
ccugauaugaguggaauua

SEQ ID NO: 1525475 - RNA, 19 nt, Artificial Sequence
  Description of Artificial Sequence: Synthetic oligonucleotide
  Antisense strand to SEQ ID NO: 1525474
uaauuccacucauaucagg

SEQ ID NO: 1525476 - RNA, 19 nt, Artificial Sequence
  Description of Artificial Sequence: Synthetic oligonucleotide
  Sense strand starting at position 2970 of SEQ ID NO: 1244955
cuuugaaugugaguguaca

SEQ ID NO: 1525477 - RNA, 19 nt, Artificial Sequence
  Description of Artificial Sequence: Synthetic oligonucleotide
  Antisense strand to SEQ ID NO: 1525476
uguacacucacauucaaag

SEQ ID NO: 1525478 - RNA, 19 nt, Artificial Sequence
  Description of Artificial Sequence: Synthetic oligonucleotide
  Sense strand starting at position 2971 of SEQ ID NO: 1244955
uuugaaugugaguguacaa

SEQ ID NO: 1525479 - RNA, 19 nt, Artificial Sequence
  Description of Artificial Sequence: Synthetic oligonucleotide
  Antisense strand to SEQ ID NO: 1525478
uuguacacucacauucaaa

SEQ ID NO: 1525480 - RNA, 19 nt, Artificial Sequence
  Description of Artificial Sequence: Synthetic oligonucleotide
  Sense strand starting at position 3059 of SEQ ID NO: 1244955
gguaauuguguuuaauguu

SEQ ID NO: 1525481 - RNA, 19 nt, Artificial Sequence
  Description of Artificial Sequence: Synthetic oligonucleotide
  Antisense strand to SEQ ID NO: 1525480
aacauuaaacacaauuacc

SEQ ID NO: 1525482 - RNA, 19 nt, Artificial Sequence
  Description of Artificial Sequence: Synthetic oligonucleotide
  Sense strand starting at position 3080 of SEQ ID NO: 1244955
gaggaaucgccauacgauu

SEQ ID NO: 1525483 - RNA, 19 nt, Artificial Sequence
  Description of Artificial Sequence: Synthetic oligonucleotide
  Antisense strand to SEQ ID NO: 1525482
aaucguauggcgauuccuc

SEQ ID NO: 1525484 - RNA, 19 nt, Artificial Sequence
  Description of Artificial Sequence: Synthetic oligonucleotide
  Sense strand starting at position 3195 of SEQ ID NO: 1244955
cugugcuuggcucaacaga

SEQ ID NO: 1525485 - RNA, 19 nt, Artificial Sequence
  Description of Artificial Sequence: Synthetic oligonucleotide
  Antisense strand to SEQ ID NO: 1525484
ucuguugagccaagcacag

SEQ ID NO: 1525486 - RNA, 19 nt, Artificial Sequence
  Description of Artificial Sequence: Synthetic oligonucleotide
  Sense strand starting at position 3243 of SEQ ID NO: 1244955
aguucuaugucacuaagca

SEQ ID NO: 1525487 - RNA, 19 nt, Artificial Sequence
  Description of Artificial Sequence: Synthetic oligonucleotide
  Antisense strand to SEQ ID NO: 1525486
ugcuuagugacauagaacu

SEQ ID NO: 1525488 - RNA, 19 nt, Artificial Sequence
  Description of Artificial Sequence: Synthetic oligonucleotide
  Sense strand starting at position 3244 of SEQ ID NO: 1244955
guucuaugucacuaagcaa

SEQ ID NO: 1525489 - RNA, 19 nt, Artificial Sequence
  Description of Artificial Sequence: Synthetic oligonucleotide
  Antisense strand to SEQ ID NO: 1525488
uugcuuagugacauagaac

SEQ ID NO: 1525490 - RNA, 19 nt, Artificial Sequence
  Description of Artificial Sequence: Synthetic oligonucleotide
  Sense strand starting at position 3262 of SEQ ID NO: 1244955
acacuaaguuguuuaucaa

SEQ ID NO: 1525491 - RNA, 19 nt, Artificial Sequence
  Description of Artificial Sequence: Synthetic oligonucleotide
  Antisense strand to SEQ ID NO: 1525490
uugauaaacaacuuagugu

SEQ ID NO: 1525492 - RNA, 19 nt, Artificial Sequence
  Description of Artificial Sequence: Synthetic oligonucleotide
  Sense strand starting at position 3455 of SEQ ID NO: 1244955
gugcuugacucaucugaac

SEQ ID NO: 1525493 - RNA, 19 nt, Artificial Sequence
  Description of Artificial Sequence: Synthetic oligonucleotide
  Antisense strand to SEQ ID NO: 1525492
guucagaugagucaagcac

SEQ ID NO: 1525494 - RNA, 19 nt, Artificial Sequence
  Description of Artificial Sequence: Synthetic oligonucleotide
  Sense strand starting at position 3498 of SEQ ID NO: 1244955
ugaaacguagccugaucua

SEQ ID NO: 1525495 - RNA, 19 nt, Artificial Sequence
  Description of Artificial Sequence: Synthetic oligonucleotide
  Antisense strand to SEQ ID NO: 1525494
uagaucaggcuacguuuca

SEQ ID NO: 1525496 - RNA, 19 nt, Artificial Sequence
  Description of Artificial Sequence: Synthetic oligonucleotide
  Sense strand starting at position 3501 of SEQ ID NO: 1244955
aacguagccugaucuagaa

SEQ ID NO: 1525497 - RNA, 19 nt, Artificial Sequence
  Description of Artificial Sequence: Synthetic oligonucleotide
  Antisense strand to SEQ ID NO: 1525496
uucuagaucaggcuacguu

SEQ ID NO: 1525498 - RNA, 19 nt, Artificial Sequence
  Description of Artificial Sequence: Synthetic oligonucleotide
  Sense strand starting at position 111 of SEQ ID NO: 1244956
cccugauguccugaaaggu

SEQ ID NO: 1525499 - RNA, 19 nt, Artificial Sequence
  Description of Artificial Sequence: Synthetic oligonucleotide
  Antisense strand to SEQ ID NO: 1525498
accuuucaggacaucaggg

SEQ ID NO: 1525500 - RNA, 19 nt, Artificial Sequence
  Description of Artificial Sequence: Synthetic oligonucleotide
  Sense strand starting at position 115 of SEQ ID NO: 1244956
gauguccugaaagguagua

SEQ ID NO: 1525501 - RNA, 19 nt, Artificial Sequence
  Description of Artificial Sequence: Synthetic oligonucleotide
  Antisense strand to SEQ ID NO: 1525500
uacuaccuuucaggacauc

SEQ ID NO: 1525502 - RNA, 19 nt, Artificial Sequence
  Description of Artificial Sequence: Synthetic oligonucleotide
  Sense strand starting at position 190 of SEQ ID NO: 1244956
uagacagagugguuugaag

SEQ ID NO: 1525503 - RNA, 19 nt, Artificial Sequence
  Description of Artificial Sequence: Synthetic oligonucleotide
  Antisense strand to SEQ ID NO: 1525502
cuucaaaccacucugucua

SEQ ID NO: 1525504 - RNA, 19 nt, Artificial Sequence
  Description of Artificial Sequence: Synthetic oligonucleotide
  Sense strand starting at position 192 of SEQ ID NO: 1244956
gacagagugguuugaagaa

SEQ ID NO: 1525505 - RNA, 19 nt, Artificial Sequence
  Description of Artificial Sequence: Synthetic oligonucleotide
  Antisense strand to SEQ ID NO: 1525504
uucuucaaaccacucuguc

SEQ ID NO: 1525506 - RNA, 19 nt, Artificial Sequence
  Description of Artificial Sequence: Synthetic oligonucleotide
  Sense strand starting at position 214 of SEQ ID NO: 1244956
ggagcuuucucagaggaca

SEQ ID NO: 1525507 - RNA, 19 nt, Artificial Sequence
  Description of Artificial Sequence: Synthetic oligonucleotide
  Antisense strand to SEQ ID NO: 1525506
uguccucugagaaagcucc

SEQ ID NO: 1525508 - RNA, 19 nt, Artificial Sequence
  Description of Artificial Sequence: Synthetic oligonucleotide
  Sense strand starting at position 265 of SEQ ID NO: 1244956
gggagucacucuugggaac

SEQ ID NO: 1525509 - RNA, 19 nt, Artificial Sequence
  Description of Artificial Sequence: Synthetic oligonucleotide
  Antisense strand to SEQ ID NO: 1525508
guucccaagagugacuccc

SEQ ID NO: 1525510 - RNA, 19 nt, Artificial Sequence
  Description of Artificial Sequence: Synthetic oligonucleotide
  Sense strand starting at position 357 of SEQ ID NO: 1244956
cucugaaaucauugcugag

SEQ ID NO: 1525511 - RNA, 19 nt, Artificial Sequence
  Description of Artificial Sequence: Synthetic oligonucleotide
  Antisense strand to SEQ ID NO: 1525510
cucagcaaugauuucagag

SEQ ID NO: 1525512 - RNA, 19 nt, Artificial Sequence
  Description of Artificial Sequence: Synthetic oligonucleotide
  Sense strand starting at position 439 of SEQ ID NO: 1244956
uugccaauaucugcugaca

SEQ ID NO: 1525513 - RNA, 19 nt, Artificial Sequence
  Description of Artificial Sequence: Synthetic oligonucleotide
  Antisense strand to SEQ ID NO: 1525512
ugucagcagauauuggcaa

SEQ ID NO: 1525514 - RNA, 19 nt, Artificial Sequence
  Description of Artificial Sequence: Synthetic oligonucleotide
  Sense strand starting at position 441 of SEQ ID NO: 1244956
gccaauaucugcugacauu

SEQ ID NO: 1525515 - RNA, 19 nt, Artificial Sequence
  Description of Artificial Sequence: Synthetic oligonucleotide
  Antisense strand to SEQ ID NO: 1525514
aaugucagcagauauuggc

SEQ ID NO: 1525516 - RNA, 19 nt, Artificial Sequence
  Description of Artificial Sequence: Synthetic oligonucleotide
  Sense strand starting at position 880 of SEQ ID NO: 1244956
ggugcaaccucugcugaga

SEQ ID NO: 1525517 - RNA, 19 nt, Artificial Sequence
  Description of Artificial Sequence: Synthetic oligonucleotide
  Antisense strand to SEQ ID NO: 1525516
ucucagcagagguugcacc

SEQ ID NO: 1525518 - RNA, 19 nt, Artificial Sequence
  Description of Artificial Sequence: Synthetic oligonucleotide
  Sense strand starting at position 2400 of SEQ ID NO: 1244956
cuuucuuucuguugggaaa

SEQ ID NO: 1525519 - RNA, 19 nt, Artificial Sequence
  Description of Artificial Sequence: Synthetic oligonucleotide
  Antisense strand to SEQ ID NO: 1525518
uuucccaacagaaagaaag

SEQ ID NO: 1525520 - RNA, 19 nt, Artificial Sequence
  Description of Artificial Sequence: Synthetic oligonucleotide
  Sense strand starting at position 2401 of SEQ ID NO: 1244956
uuucuuucuguugggaaau

SEQ ID NO: 1525521 - RNA, 19 nt, Artificial Sequence
  Description of Artificial Sequence: Synthetic oligonucleotide
  Antisense strand to SEQ ID NO: 1525520
auuucccaacagaaagaaa

SEQ ID NO: 1525522 - RNA, 19 nt, Artificial Sequence
  Description of Artificial Sequence: Synthetic oligonucleotide
  Sense strand starting at position 2402 of SEQ ID NO: 1244956
uucuuucuguugggaaaug

SEQ ID NO: 1525523 - RNA, 19 nt, Artificial Sequence
  Description of Artificial Sequence: Synthetic oligonucleotide
  Antisense strand to SEQ ID NO: 1525522
cauuucccaacagaaagaa

SEQ ID NO: 1525524 - RNA, 19 nt, Artificial Sequence
  Description of Artificial Sequence: Synthetic oligonucleotide
  Sense strand starting at position 2411 of SEQ ID NO: 1244956
uugggaaaugcuggaccuu

SEQ ID NO: 1525525 - RNA, 19 nt, Artificial Sequence
  Description of Artificial Sequence: Synthetic oligonucleotide
  Antisense strand to SEQ ID NO: 1525524
aagguccagcauuucccaa

SEQ ID NO: 1525526 - RNA, 19 nt, Artificial Sequence
  Description of Artificial Sequence: Synthetic oligonucleotide
  Sense strand starting at position 2586 of SEQ ID NO: 1244956
augaguagguuucuacgua

SEQ ID NO: 1525527 - RNA, 19 nt, Artificial Sequence
  Description of Artificial Sequence: Synthetic oligonucleotide
  Antisense strand to SEQ ID NO: 1525526
uacguagaaaccuacucau

SEQ ID NO: 1525528 - RNA, 19 nt, Artificial Sequence
  Description of Artificial Sequence: Synthetic oligonucleotide
  Sense strand starting at position 2587 of SEQ ID NO: 1244956
ugaguagguuucuacguag

SEQ ID NO: 1525529 - RNA, 19 nt, Artificial Sequence
  Description of Artificial Sequence: Synthetic oligonucleotide
  Antisense strand to SEQ ID NO: 1525528
cuacguagaaaccuacuca

SEQ ID NO: 1525530 - RNA, 19 nt, Artificial Sequence
  Description of Artificial Sequence: Synthetic oligonucleotide
  Sense strand starting at position 2637 of SEQ ID NO: 1244956
gaguguuggguccaccuca

SEQ ID NO: 1525531 - RNA, 19 nt, Artificial Sequence
  Description of Artificial Sequence: Synthetic oligonucleotide
  Antisense strand to SEQ ID NO: 1525530
ugagguggacccaacacuc

SEQ ID NO: 1525532 - RNA, 19 nt, Artificial Sequence
  Description of Artificial Sequence: Synthetic oligonucleotide
  Sense strand starting at position 2750 of SEQ ID NO: 1244956
ggcuguuuguccuaucgga

SEQ ID NO: 1525533 - RNA, 19 nt, Artificial Sequence
  Description of Artificial Sequence: Synthetic oligonucleotide
  Antisense strand to SEQ ID NO: 1525532
uccgauaggacaaacagcc

SEQ ID NO: 1525534 - RNA, 19 nt, Artificial Sequence
  Description of Artificial Sequence: Synthetic oligonucleotide
  Sense strand starting at position 2778 of SEQ ID NO: 1244956
uuuguucucucuuagguuu

SEQ ID NO: 1525535 - RNA, 19 nt, Artificial Sequence
  Description of Artificial Sequence: Synthetic oligonucleotide
  Antisense strand to SEQ ID NO: 1525534
aaaccuaagagagaacaaa

SEQ ID NO: 1525536 - RNA, 19 nt, Artificial Sequence
  Description of Artificial Sequence: Synthetic oligonucleotide
  Sense strand starting at position 2827 of SEQ ID NO: 1244956
cucggcaucucuuucuaua

SEQ ID NO: 1525537 - RNA, 19 nt, Artificial Sequence
  Description of Artificial Sequence: Synthetic oligonucleotide
  Antisense strand to SEQ ID NO: 1525536
uauagaaagagaugccgag

SEQ ID NO: 1525538 - RNA, 19 nt, Artificial Sequence
  Description of Artificial Sequence: Synthetic oligonucleotide
  Sense strand starting at position 2829 of SEQ ID NO: 1244956
cggcaucucuuucuauauu

SEQ ID NO: 1525539 - RNA, 19 nt, Artificial Sequence
  Description of Artificial Sequence: Synthetic oligonucleotide
  Antisense strand to SEQ ID NO: 1525538
aauauagaaagagaugccg

SEQ ID NO: 1525540 - RNA, 19 nt, Artificial Sequence
  Description of Artificial Sequence: Synthetic oligonucleotide
  Sense strand starting at position 2872 of SEQ ID NO: 1244956
uuacaagugugaucuggag

SEQ ID NO: 1525541 - RNA, 19 nt, Artificial Sequence
  Description of Artificial Sequence: Synthetic oligonucleotide
  Antisense strand to SEQ ID NO: 1525540
cuccagaucacacuuguaa

SEQ ID NO: 1525542 - RNA, 19 nt, Artificial Sequence
  Description of Artificial Sequence: Synthetic oligonucleotide
  Sense strand starting at position 2910 of SEQ ID NO: 1244956
gugguuugaaagugguugu

SEQ ID NO: 1525543 - RNA, 19 nt, Artificial Sequence
  Description of Artificial Sequence: Synthetic oligonucleotide
  Antisense strand to SEQ ID NO: 1525542
acaaccacuuucaaaccac

SEQ ID NO: 1525544 - RNA, 19 nt, Artificial Sequence
  Description of Artificial Sequence: Synthetic oligonucleotide
  Sense strand starting at position 2911 of SEQ ID NO: 1244956
ugguuugaaagugguugua

SEQ ID NO: 1525545 - RNA, 19 nt, Artificial Sequence
  Description of Artificial Sequence: Synthetic oligonucleotide
  Antisense strand to SEQ ID NO: 1525544
uacaaccacuuucaaacca

SEQ ID NO: 1525546 - RNA, 19 nt, Artificial Sequence
  Description of Artificial Sequence: Synthetic oligonucleotide
  Sense strand starting at position 2913 of SEQ ID NO: 1244956
guuugaaagugguuguaug

SEQ ID NO: 1525547 - RNA, 19 nt, Artificial Sequence
  Description of Artificial Sequence: Synthetic oligonucleotide
  Antisense strand to SEQ ID NO: 1525546
cauacaaccacuuucaaac

SEQ ID NO: 1525548 - RNA, 19 nt, Artificial Sequence
  Description of Artificial Sequence: Synthetic oligonucleotide
  Sense strand starting at position 2923 of SEQ ID NO: 1244956
gguuguaugaaauaguuua

SEQ ID NO: 1525549 - RNA, 19 nt, Artificial Sequence
  Description of Artificial Sequence: Synthetic oligonucleotide
  Antisense strand to SEQ ID NO: 1525548
uaaacuauuucauacaacc

SEQ ID NO: 1525550 - RNA, 19 nt, Artificial Sequence
  Description of Artificial Sequence: Synthetic oligonucleotide
  Sense strand starting at position 3200 of SEQ ID NO: 1244956
acagcucagugggagauau

SEQ ID NO: 1525551 - RNA, 19 nt, Artificial Sequence
  Description of Artificial Sequence: Synthetic oligonucleotide
  Antisense strand to SEQ ID NO: 1525550
auaucucccacugagcugu

SEQ ID NO: 1525552 - RNA, 19 nt, Artificial Sequence
  Description of Artificial Sequence: Synthetic oligonucleotide
  Sense strand starting at position 3570 of SEQ ID NO: 1244956
aaacaauguuuguggcuuu

SEQ ID NO: 1525553 - RNA, 19 nt, Artificial Sequence
  Description of Artificial Sequence: Synthetic oligonucleotide
  Antisense strand to SEQ ID NO: 1525552
aaagccacaaacauuguuu

SEQ ID NO: 1525554 - RNA, 19 nt, Artificial Sequence
  Description of Artificial Sequence: Synthetic oligonucleotide
  Sense strand starting at position 3577 of SEQ ID NO: 1244956
guuuguggcuuugggagaa

SEQ ID NO: 1525555 - RNA, 19 nt, Artificial Sequence
  Description of Artificial Sequence: Synthetic oligonucleotide
  Antisense strand to SEQ ID NO: 1525554
uucucccaaagccacaaac

SEQ ID NO: 1525556 - RNA, 19 nt, Artificial Sequence
  Description of Artificial Sequence: Synthetic oligonucleotide
  Sense strand starting at position 3581 of SEQ ID NO: 1244956
guggcuuugggagaacuuu

SEQ ID NO: 1525557 - RNA, 19 nt, Artificial Sequence
  Description of Artificial Sequence: Synthetic oligonucleotide
  Antisense strand to SEQ ID NO: 1525556
aaaguucucccaaagccac

SEQ ID NO: 1525558 - RNA, 19 nt, Artificial Sequence
  Description of Artificial Sequence: Synthetic oligonucleotide
  Sense strand starting at position 3589 of SEQ ID NO: 1244956
gggagaacuuugcagguuu

SEQ ID NO: 1525559 - RNA, 19 nt, Artificial Sequence
  Description of Artificial Sequence: Synthetic oligonucleotide
  Antisense strand to SEQ ID NO: 1525558
aaaccugcaaaguucuccc

SEQ ID NO: 1525560 - RNA, 19 nt, Artificial Sequence
  Description of Artificial Sequence: Synthetic oligonucleotide
  Sense strand starting at position 3947 of SEQ ID NO: 1244956
agagaauugugcucaauaa

SEQ ID NO: 1525561 - RNA, 19 nt, Artificial Sequence
  Description of Artificial Sequence: Synthetic oligonucleotide
  Antisense strand to SEQ ID NO: 1525560
uuauugagcacaauucucu

SEQ ID NO: 1525562 - RNA, 19 nt, Artificial Sequence
  Description of Artificial Sequence: Synthetic oligonucleotide
  Sense strand starting at position 257 of SEQ ID NO: 1244957
gucagaagcaugugaaccu

SEQ ID NO: 1525563 - RNA, 19 nt, Artificial Sequence
  Description of Artificial Sequence: Synthetic oligonucleotide
  Antisense strand to SEQ ID NO: 1525562
agguucacaugcuucugac

SEQ ID NO: 1525564 - RNA, 19 nt, Artificial Sequence
  Description of Artificial Sequence: Synthetic oligonucleotide
  Sense strand starting at position 481 of SEQ ID NO: 1244957
ggucguccucacuacuaga

SEQ ID NO: 1525565 - RNA, 19 nt, Artificial Sequence
  Description of Artificial Sequence: Synthetic oligonucleotide
  Antisense strand to SEQ ID NO: 1525564
ucuaguagugaggacgacc

SEQ ID NO: 1525566 - RNA, 19 nt, Artificial Sequence
  Description of Artificial Sequence: Synthetic oligonucleotide
  Sense strand starting at position 542 of SEQ ID NO: 1244957
ucaggaaguuacucucuau

SEQ ID NO: 1525567 - RNA, 19 nt, Artificial Sequence
  Description of Artificial Sequence: Synthetic oligonucleotide
  Antisense strand to SEQ ID NO: 1525566
auagagaguaacuuccuga

SEQ ID NO: 1525568 - RNA, 19 nt, Artificial Sequence
  Description of Artificial Sequence: Synthetic oligonucleotide
  Sense strand starting at position 545 of SEQ ID NO: 1244957
ggaaguuacucucuaugau

SEQ ID NO: 1525569 - RNA, 19 nt, Artificial Sequence
  Description of Artificial Sequence: Synthetic oligonucleotide
  Antisense strand to SEQ ID NO: 1525568
aucauagagaguaacuucc

SEQ ID NO: 1525570 - RNA, 19 nt, Artificial Sequence
  Description of Artificial Sequence: Synthetic oligonucleotide
  Sense strand starting at position 548 of SEQ ID NO: 1244957
aguuacucucuaugaucua

SEQ ID NO: 1525571 - RNA, 19 nt, Artificial Sequence
  Description of Artificial Sequence: Synthetic oligonucleotide
  Antisense strand to SEQ ID NO: 1525570
uagaucauagagaguaacu

SEQ ID NO: 1525572 - RNA, 19 nt, Artificial Sequence
  Description of Artificial Sequence: Synthetic oligonucleotide
  Sense strand starting at position 730 of SEQ ID NO: 1244957
cuucuugccugauccaaga

SEQ ID NO: 1525573 - RNA, 19 nt, Artificial Sequence
  Description of Artificial Sequence: Synthetic oligonucleotide
  Antisense strand to SEQ ID NO: 1525572
ucuuggaucaggcaagaag

SEQ ID NO: 1525574 - RNA, 19 nt, Artificial Sequence
  Description of Artificial Sequence: Synthetic oligonucleotide
  Sense strand starting at position 1070 of SEQ ID NO: 1244957
cgggacaccuuuccuguaa

SEQ ID NO: 1525575 - RNA, 19 nt, Artificial Sequence
  Description of Artificial Sequence: Synthetic oligonucleotide
  Antisense strand to SEQ ID NO: 1525574
uuacaggaaaggugucccg

SEQ ID NO: 1525576 - RNA, 19 nt, Artificial Sequence
  Description of Artificial Sequence: Synthetic oligonucleotide
  Sense strand starting at position 1071 of SEQ ID NO: 1244957
gggacaccuuuccuguaau

SEQ ID NO: 1525577 - RNA, 19 nt, Artificial Sequence
  Description of Artificial Sequence: Synthetic oligonucleotide
  Antisense strand to SEQ ID NO: 1525576
auuacaggaaagguguccc

SEQ ID NO: 1525578 - RNA, 19 nt, Artificial Sequence
  Description of Artificial Sequence: Synthetic oligonucleotide
  Sense strand starting at position 1144 of SEQ ID NO: 1244957
gcagucuuuccugaccaua

SEQ ID NO: 1525579 - RNA, 19 nt, Artificial Sequence
  Description of Artificial Sequence: Synthetic oligonucleotide
  Antisense strand to SEQ ID NO: 1525578
uauggucaggaaagacugc

SEQ ID NO: 1525580 - RNA, 19 nt, Artificial Sequence
  Description of Artificial Sequence: Synthetic oligonucleotide
  Sense strand starting at position 1170 of SEQ ID NO: 1244957
guuguccuauccucagaca

SEQ ID NO: 1525581 - RNA, 19 nt, Artificial Sequence
  Description of Artificial Sequence: Synthetic oligonucleotide
  Antisense strand to SEQ ID NO: 1525580
ugucugaggauaggacaac

SEQ ID NO: 1525582 - RNA, 19 nt, Artificial Sequence
  Description of Artificial Sequence: Synthetic oligonucleotide
  Sense strand starting at position 1309 of SEQ ID NO: 1244957
gggcaagaaaccugucugu

SEQ ID NO: 1525583 - RNA, 19 nt, Artificial Sequence
  Description of Artificial Sequence: Synthetic oligonucleotide
  Antisense strand to SEQ ID NO: 1525582
acagacagguuucuugccc

SEQ ID NO: 1525584 - RNA, 19 nt, Artificial Sequence
  Description of Artificial Sequence: Synthetic oligonucleotide
  Sense strand starting at position 1675 of SEQ ID NO: 1244957
ggcaauaaggguugaggaa

SEQ ID NO: 1525585 - RNA, 19 nt, Artificial Sequence
  Description of Artificial Sequence: Synthetic oligonucleotide
  Antisense strand to SEQ ID NO: 1525584
uuccucaacccuuauugcc

SEQ ID NO: 1525586 - RNA, 19 nt, Artificial Sequence
  Description of Artificial Sequence: Synthetic oligonucleotide
  Sense strand starting at position 2438 of SEQ ID NO: 1244957
uauguucuugcagagaagu

SEQ ID NO: 1525587 - RNA, 19 nt, Artificial Sequence
  Description of Artificial Sequence: Synthetic oligonucleotide
  Antisense strand to SEQ ID NO: 1525586
acuucucugcaagaacaua

SEQ ID NO: 1525588 - RNA, 19 nt, Artificial Sequence
  Description of Artificial Sequence: Synthetic oligonucleotide
  Sense strand starting at position 2440 of SEQ ID NO: 1244957
uguucuugcagagaaguaa

SEQ ID NO: 1525589 - RNA, 19 nt, Artificial Sequence
  Description of Artificial Sequence: Synthetic oligonucleotide
  Antisense strand to SEQ ID NO: 1525588
uuacuucucugcaagaaca

SEQ ID NO: 1525590 - RNA, 19 nt, Artificial Sequence
  Description of Artificial Sequence: Synthetic oligonucleotide
  Sense strand starting at position 2493 of SEQ ID NO: 1244957
guaacuaauggacgguauu

SEQ ID NO: 1525591 - RNA, 19 nt, Artificial Sequence
  Description of Artificial Sequence: Synthetic oligonucleotide
  Antisense strand to SEQ ID NO: 1525590
aauaccguccauuaguuac

SEQ ID NO: 1525592 - RNA, 19 nt, Artificial Sequence
  Description of Artificial Sequence: Synthetic oligonucleotide
  Sense strand starting at position 2494 of SEQ ID NO: 1244957
uaacuaauggacgguauua

SEQ ID NO: 1525593 - RNA, 19 nt, Artificial Sequence
  Description of Artificial Sequence: Synthetic oligonucleotide
  Antisense strand to SEQ ID NO: 1525592
uaauaccguccauuaguua

SEQ ID NO: 1525594 - RNA, 19 nt, Artificial Sequence
  Description of Artificial Sequence: Synthetic oligonucleotide
  Sense strand starting at position 2496 of SEQ ID NO: 1244957
acuaauggacgguauuauu

SEQ ID NO: 1525595 - RNA, 19 nt, Artificial Sequence
  Description of Artificial Sequence: Synthetic oligonucleotide
  Antisense strand to SEQ ID NO: 1525594
aauaauaccguccauuagu

SEQ ID NO: 1525596 - RNA, 19 nt, Artificial Sequence
  Description of Artificial Sequence: Synthetic oligonucleotide
  Sense strand starting at position 2506 of SEQ ID NO: 1244957
gguauuauuaugggaggua

SEQ ID NO: 1525597 - RNA, 19 nt, Artificial Sequence
  Description of Artificial Sequence: Synthetic oligonucleotide
  Antisense strand to SEQ ID NO: 1525596
uaccucccauaauaauacc

SEQ ID NO: 1525598 - RNA, 19 nt, Artificial Sequence
  Description of Artificial Sequence: Synthetic oligonucleotide
  Sense strand starting at position 2577 of SEQ ID NO: 1244957
ggaacucuauugccaauca

SEQ ID NO: 1525599 - RNA, 19 nt, Artificial Sequence
  Description of Artificial Sequence: Synthetic oligonucleotide
  Antisense strand to SEQ ID NO: 1525598
ugauuggcaauagaguucc

SEQ ID NO: 1525600 - RNA, 19 nt, Artificial Sequence
  Description of Artificial Sequence: Synthetic oligonucleotide
  Sense strand starting at position 2639 of SEQ ID NO: 1244957
gggugauaaugguuuccuu

SEQ ID NO: 1525601 - RNA, 19 nt, Artificial Sequence
  Description of Artificial Sequence: Synthetic oligonucleotide
  Antisense strand to SEQ ID NO: 1525600
aaggaaaccauuaucaccc

SEQ ID NO: 1525602 - RNA, 19 nt, Artificial Sequence
  Description of Artificial Sequence: Synthetic oligonucleotide
  Sense strand starting at position 2642 of SEQ ID NO: 1244957
ugauaaugguuuccuuaca

SEQ ID NO: 1525603 - RNA, 19 nt, Artificial Sequence
  Description of Artificial Sequence: Synthetic oligonucleotide
  Antisense strand to SEQ ID NO: 1525602
uguaaggaaaccauuauca

SEQ ID NO: 1525604 - RNA, 19 nt, Artificial Sequence
  Description of Artificial Sequence: Synthetic oligonucleotide
  Sense strand starting at position 2652 of SEQ ID NO: 1244957
uuccuuacaguguaaguau

SEQ ID NO: 1525605 - RNA, 19 nt, Artificial Sequence
  Description of Artificial Sequence: Synthetic oligonucleotide
  Antisense strand to SEQ ID NO: 1525604
auacuuacacuguaaggaa

SEQ ID NO: 1525606 - RNA, 19 nt, Artificial Sequence
  Description of Artificial Sequence: Synthetic oligonucleotide
  Sense strand starting at position 2660 of SEQ ID NO: 1244957
aguguaaguaucuaguaaa

SEQ ID NO: 1525607 - RNA, 19 nt, Artificial Sequence
  Description of Artificial Sequence: Synthetic oligonucleotide
  Antisense strand to SEQ ID NO: 1525606
uuuacuagauacuuacacu

SEQ ID NO: 1525608 - RNA, 19 nt, Artificial Sequence
  Description of Artificial Sequence: Synthetic oligonucleotide
  Sense strand starting at position 2667 of SEQ ID NO: 1244957
guaucuaguaaaugggaga

SEQ ID NO: 1525609 - RNA, 19 nt, Artificial Sequence
  Description of Artificial Sequence: Synthetic oligonucleotide
  Antisense strand to SEQ ID NO: 1525608
ucucccauuuacuagauac

SEQ ID NO: 1525610 - RNA, 19 nt, Artificial Sequence
  Description of Artificial Sequence: Synthetic oligonucleotide
  Sense strand starting at position 2672 of SEQ ID NO: 1244957
uaguaaaugggagacguua

SEQ ID NO: 1525611 - RNA, 19 nt, Artificial Sequence
  Description of Artificial Sequence: Synthetic oligonucleotide
  Antisense strand to SEQ ID NO: 1525610
uaacgucucccauuuacua

SEQ ID NO: 1525612 - RNA, 19 nt, Artificial Sequence
  Description of Artificial Sequence: Synthetic oligonucleotide
  Sense strand starting at position 2674 of SEQ ID NO: 1244957
guaaaugggagacguuaua

SEQ ID NO: 1525613 - RNA, 19 nt, Artificial Sequence
  Description of Artificial Sequence: Synthetic oligonucleotide
  Antisense strand to SEQ ID NO: 1525612
uauaacgucucccauuuac

SEQ ID NO: 1525614 - RNA, 19 nt, Artificial Sequence
  Description of Artificial Sequence: Synthetic oligonucleotide
  Sense strand starting at position 2725 of SEQ ID NO: 1244957
ugugaucuugccugaacaa

SEQ ID NO: 1525615 - RNA, 19 nt, Artificial Sequence
  Description of Artificial Sequence: Synthetic oligonucleotide
  Antisense strand to SEQ ID NO: 1525614
uuguucaggcaagaucaca

SEQ ID NO: 1525616 - RNA, 19 nt, Artificial Sequence
  Description of Artificial Sequence: Synthetic oligonucleotide
  Sense strand starting at position 2726 of SEQ ID NO: 1244957
gugaucuugccugaacaaa

SEQ ID NO: 1525617 - RNA, 19 nt, Artificial Sequence
  Description of Artificial Sequence: Synthetic oligonucleotide
  Antisense strand to SEQ ID NO: 1525616
uuuguucaggcaagaucac

SEQ ID NO: 1525618 - RNA, 19 nt, Artificial Sequence
  Description of Artificial Sequence: Synthetic oligonucleotide
  Sense strand starting at position 2780 of SEQ ID NO: 1244957
agcggugaugaugacaaua

SEQ ID NO: 1525619 - RNA, 19 nt, Artificial Sequence
  Description of Artificial Sequence: Synthetic oligonucleotide
  Antisense strand to SEQ ID NO: 1525618
uauugucaucaucaccgcu

SEQ ID NO: 1525620 - RNA, 19 nt, Artificial Sequence
  Description of Artificial Sequence: Synthetic oligonucleotide
  Sense strand starting at position 2842 of SEQ ID NO: 1244957
auuugcacguguccuuaau

SEQ ID NO: 1525621 - RNA, 19 nt, Artificial Sequence
  Description of Artificial Sequence: Synthetic oligonucleotide
  Antisense strand to SEQ ID NO: 1525620
auuaaggacacgugcaaau

SEQ ID NO: 1525622 - RNA, 19 nt, Artificial Sequence
  Description of Artificial Sequence: Synthetic oligonucleotide
  Sense strand starting at position 3124 of SEQ ID NO: 1244957
uuaagacauuguguuugaa

SEQ ID NO: 1525623 - RNA, 19 nt, Artificial Sequence
  Description of Artificial Sequence: Synthetic oligonucleotide
  Antisense strand to SEQ ID NO: 1525622
uucaaacacaaugucuuaa

SEQ ID NO: 1525624 - RNA, 19 nt, Artificial Sequence
  Description of Artificial Sequence: Synthetic oligonucleotide
  Sense strand starting at position 3126 of SEQ ID NO: 1244957
aagacauuguguuugaauu

SEQ ID NO: 1525625 - RNA, 19 nt, Artificial Sequence
  Description of Artificial Sequence: Synthetic oligonucleotide
  Antisense strand to SEQ ID NO: 1525624
aauucaaacacaaugucuu

SEQ ID NO: 1525626 - RNA, 19 nt, Artificial Sequence
  Description of Artificial Sequence: Synthetic oligonucleotide
  Sense strand starting at position 3127 of SEQ ID NO: 1244957
agacauuguguuugaauuc

SEQ ID NO: 1525627 - RNA, 19 nt, Artificial Sequence
  Description of Artificial Sequence: Synthetic oligonucleotide
  Antisense strand to SEQ ID NO: 1525626
gaauucaaacacaaugucu

SEQ ID NO: 1525628 - RNA, 19 nt, Artificial Sequence
  Description of Artificial Sequence: Synthetic oligonucleotide
  Sense strand starting at position 3315 of SEQ ID NO: 1244957
uggucaaggcuugaacuuu

SEQ ID NO: 1525629 - RNA, 19 nt, Artificial Sequence
  Description of Artificial Sequence: Synthetic oligonucleotide
  Antisense strand to SEQ ID NO: 1525628
aaaguucaagccuugacca

SEQ ID NO: 1525630 - RNA, 19 nt, Artificial Sequence
  Description of Artificial Sequence: Synthetic oligonucleotide
  Sense strand starting at position 3419 of SEQ ID NO: 1244957
cucaaugcacuugauguua

SEQ ID NO: 1525631 - RNA, 19 nt, Artificial Sequence
  Description of Artificial Sequence: Synthetic oligonucleotide
  Antisense strand to SEQ ID NO: 1525630
uaacaucaagugcauugag

SEQ ID NO: 1525632 - RNA, 19 nt, Artificial Sequence
  Description of Artificial Sequence: Synthetic oligonucleotide
  Sense strand starting at position 3483 of SEQ ID NO: 1244957
aggaguuagcccugagaag

SEQ ID NO: 1525633 - RNA, 19 nt, Artificial Sequence
  Description of Artificial Sequence: Synthetic oligonucleotide
  Antisense strand to SEQ ID NO: 1525632
cuucucagggcuaacuccu

SEQ ID NO: 1525634 - RNA, 19 nt, Artificial Sequence
  Description of Artificial Sequence: Synthetic oligonucleotide
  Sense strand starting at position 3506 of SEQ ID NO: 1244957
agcucaauguugucaaaug

SEQ ID NO: 1525635 - RNA, 19 nt, Artificial Sequence
  Description of Artificial Sequence: Synthetic oligonucleotide
  Antisense strand to SEQ ID NO: 1525634
cauuugacaacauugagcu

SEQ ID NO: 1525636 - RNA, 19 nt, Artificial Sequence
  Description of Artificial Sequence: Synthetic oligonucleotide
  Sense strand starting at position 3673 of SEQ ID NO: 1244957
gguagugaugaaugguauc

SEQ ID NO: 1525637 - RNA, 19 nt, Artificial Sequence
  Description of Artificial Sequence: Synthetic oligonucleotide
  Antisense strand to SEQ ID NO: 1525636
gauaccauucaucacuacc

SEQ ID NO: 1525638 - RNA, 19 nt, Artificial Sequence
  Description of Artificial Sequence: Synthetic oligonucleotide
  Sense strand starting at position 3767 of SEQ ID NO: 1244957
ugggacuacagaugcuaau

SEQ ID NO: 1525639 - RNA, 19 nt, Artificial Sequence
  Description of Artificial Sequence: Synthetic oligonucleotide
  Antisense strand to SEQ ID NO: 1525638
auuagcaucuguaguccca

SEQ ID NO: 1525640 - RNA, 19 nt, Artificial Sequence
  Description of Artificial Sequence: Synthetic oligonucleotide
  Sense strand starting at position 3828 of SEQ ID NO: 1244957
auauuuggcucagaggaag

SEQ ID NO: 1525641 - RNA, 19 nt, Artificial Sequence
  Description of Artificial Sequence: Synthetic oligonucleotide
  Antisense strand to SEQ ID NO: 1525640
cuuccucugagccaaauau

SEQ ID NO: 1525642 - RNA, 19 nt, Artificial Sequence
  Description of Artificial Sequence: Synthetic oligonucleotide
  Sense strand starting at position 98 of SEQ ID NO: 1244958
gucagaagcaugugaaccu

SEQ ID NO: 1525643 - RNA, 19 nt, Artificial Sequence
  Description of Artificial Sequence: Synthetic oligonucleotide
  Antisense strand to SEQ ID NO: 1525642
agguucacaugcuucugac

SEQ ID NO: 1525644 - RNA, 19 nt, Artificial Sequence
  Description of Artificial Sequence: Synthetic oligonucleotide
  Sense strand starting at position 322 of SEQ ID NO: 1244958
ggucguccucacuacuaga

SEQ ID NO: 1525645 - RNA, 19 nt, Artificial Sequence
  Description of Artificial Sequence: Synthetic oligonucleotide
  Antisense strand to SEQ ID NO: 1525644
ucuaguagugaggacgacc

SEQ ID NO: 1525646 - RNA, 19 nt, Artificial Sequence
  Description of Artificial Sequence: Synthetic oligonucleotide
  Sense strand starting at position 383 of SEQ ID NO: 1244958
ucaggaaguuacucucuau

SEQ ID NO: 1525647 - RNA, 19 nt, Artificial Sequence
  Description of Artificial Sequence: Synthetic oligonucleotide
  Antisense strand to SEQ ID NO: 1525646
auagagaguaacuuccuga

SEQ ID NO: 1525648 - RNA, 19 nt, Artificial Sequence
  Description of Artificial Sequence: Synthetic oligonucleotide
  Sense strand starting at position 386 of SEQ ID NO: 1244958
ggaaguuacucucuaugau

SEQ ID NO: 1525649 - RNA, 19 nt, Artificial Sequence
  Description of Artificial Sequence: Synthetic oligonucleotide
  Antisense strand to SEQ ID NO: 1525648
aucauagagaguaacuucc

SEQ ID NO: 1525650 - RNA, 19 nt, Artificial Sequence
  Description of Artificial Sequence: Synthetic oligonucleotide
  Sense strand starting at position 389 of SEQ ID NO: 1244958
aguuacucucuaugaucua

SEQ ID NO: 1525651 - RNA, 19 nt, Artificial Sequence
  Description of Artificial Sequence: Synthetic oligonucleotide
  Antisense strand to SEQ ID NO: 1525650
uagaucauagagaguaacu

SEQ ID NO: 1525652 - RNA, 19 nt, Artificial Sequence
  Description of Artificial Sequence: Synthetic oligonucleotide
  Sense strand starting at position 571 of SEQ ID NO: 1244958
cuucuugccugauccaaga

SEQ ID NO: 1525653 - RNA, 19 nt, Artificial Sequence
  Description of Artificial Sequence: Synthetic oligonucleotide
  Antisense strand to SEQ ID NO: 1525652
ucuuggaucaggcaagaag

SEQ ID NO: 1525654 - RNA, 19 nt, Artificial Sequence
  Description of Artificial Sequence: Synthetic oligonucleotide
  Sense strand starting at position 911 of SEQ ID NO: 1244958
cgggacaccuuuccuguaa

SEQ ID NO: 1525655 - RNA, 19 nt, Artificial Sequence
  Description of Artificial Sequence: Synthetic oligonucleotide
  Antisense strand to SEQ ID NO: 1525654
uuacaggaaaggugucccg

SEQ ID NO: 1525656 - RNA, 19 nt, Artificial Sequence
  Description of Artificial Sequence: Synthetic oligonucleotide
  Sense strand starting at position 912 of SEQ ID NO: 1244958
gggacaccuuuccuguaau

SEQ ID NO: 1525657 - RNA, 19 nt, Artificial Sequence
  Description of Artificial Sequence: Synthetic oligonucleotide
  Antisense strand to SEQ ID NO: 1525656
auuacaggaaagguguccc

SEQ ID NO: 1525658 - RNA, 19 nt, Artificial Sequence
  Description of Artificial Sequence: Synthetic oligonucleotide
  Sense strand starting at position 985 of SEQ ID NO: 1244958
gcagucuuuccugaccaua

SEQ ID NO: 1525659 - RNA, 19 nt, Artificial Sequence
  Description of Artificial Sequence: Synthetic oligonucleotide
  Antisense strand to SEQ ID NO: 1525658
uauggucaggaaagacugc

SEQ ID NO: 1525660 - RNA, 19 nt, Artificial Sequence
  Description of Artificial Sequence: Synthetic oligonucleotide
  Sense strand starting at position 1150 of SEQ ID NO: 1244958
gggcaagaaaccugucugu

SEQ ID NO: 1525661 - RNA, 19 nt, Artificial Sequence
  Description of Artificial Sequence: Synthetic oligonucleotide
  Antisense strand to SEQ ID NO: 1525660
acagacagguuucuugccc

SEQ ID NO: 1525662 - RNA, 19 nt, Artificial Sequence
  Description of Artificial Sequence: Synthetic oligonucleotide
  Sense strand starting at position 1432 of SEQ ID NO: 1244958
cgccgauuccuacaagaua

SEQ ID NO: 1525663 - RNA, 19 nt, Artificial Sequence
  Description of Artificial Sequence: Synthetic oligonucleotide
  Antisense strand to SEQ ID NO: 1525662
uaucuuguaggaaucggcg

SEQ ID NO: 1525664 - RNA, 19 nt, Artificial Sequence
  Description of Artificial Sequence: Synthetic oligonucleotide
  Sense strand starting at position 1516 of SEQ ID NO: 1244958
ggcaauaaggguugaggaa

SEQ ID NO: 1525665 - RNA, 19 nt, Artificial Sequence
  Description of Artificial Sequence: Synthetic oligonucleotide
  Antisense strand to SEQ ID NO: 1525664
uuccucaacccuuauugcc

SEQ ID NO: 1525666 - RNA, 19 nt, Artificial Sequence
  Description of Artificial Sequence: Synthetic oligonucleotide
  Sense strand starting at position 1949 of SEQ ID NO: 1244958
uccgcuuugagggagcaaa

SEQ ID NO: 1525667 - RNA, 19 nt, Artificial Sequence
  Description of Artificial Sequence: Synthetic oligonucleotide
  Antisense strand to SEQ ID NO: 1525666
uuugcucccucaaagcgga

SEQ ID NO: 1525668 - RNA, 19 nt, Artificial Sequence
  Description of Artificial Sequence: Synthetic oligonucleotide
  Sense strand starting at position 2340 of SEQ ID NO: 1244958
cuuuaaauuguagaagcaa

SEQ ID NO: 1525669 - RNA, 19 nt, Artificial Sequence
  Description of Artificial Sequence: Synthetic oligonucleotide
  Antisense strand to SEQ ID NO: 1525668
uugcuucuacaauuuaaag

SEQ ID NO: 1525670 - RNA, 19 nt, Artificial Sequence
  Description of Artificial Sequence: Synthetic oligonucleotide
  Sense strand starting at position 2369 of SEQ ID NO: 1244958
uauguucuugcagagaagu

SEQ ID NO: 1525671 - RNA, 19 nt, Artificial Sequence
  Description of Artificial Sequence: Synthetic oligonucleotide
  Antisense strand to SEQ ID NO: 1525670
acuucucugcaagaacaua

SEQ ID NO: 1525672 - RNA, 19 nt, Artificial Sequence
  Description of Artificial Sequence: Synthetic oligonucleotide
  Sense strand starting at position 2371 of SEQ ID NO: 1244958
uguucuugcagagaaguaa

SEQ ID NO: 1525673 - RNA, 19 nt, Artificial Sequence
  Description of Artificial Sequence: Synthetic oligonucleotide
  Antisense strand to SEQ ID NO: 1525672
uuacuucucugcaagaaca

SEQ ID NO: 1525674 - RNA, 19 nt, Artificial Sequence
  Description of Artificial Sequence: Synthetic oligonucleotide
  Sense strand starting at position 2424 of SEQ ID NO: 1244958
guaacuaauggacgguauu

SEQ ID NO: 1525675 - RNA, 19 nt, Artificial Sequence
  Description of Artificial Sequence: Synthetic oligonucleotide
  Antisense strand to SEQ ID NO: 1525674
aauaccguccauuaguuac

SEQ ID NO: 1525676 - RNA, 19 nt, Artificial Sequence
  Description of Artificial Sequence: Synthetic oligonucleotide
  Sense strand starting at position 2425 of SEQ ID NO: 1244958
uaacuaauggacgguauua

SEQ ID NO: 1525677 - RNA, 19 nt, Artificial Sequence
  Description of Artificial Sequence: Synthetic oligonucleotide
  Antisense strand to SEQ ID NO: 1525676
uaauaccguccauuaguua

SEQ ID NO: 1525678 - RNA, 19 nt, Artificial Sequence
  Description of Artificial Sequence: Synthetic oligonucleotide
  Sense strand starting at position 2427 of SEQ ID NO: 1244958
acuaauggacgguauuauu

SEQ ID NO: 1525679 - RNA, 19 nt, Artificial Sequence
  Description of Artificial Sequence: Synthetic oligonucleotide
  Antisense strand to SEQ ID NO: 1525678
aauaauaccguccauuagu

SEQ ID NO: 1525680 - RNA, 19 nt, Artificial Sequence
  Description of Artificial Sequence: Synthetic oligonucleotide
  Sense strand starting at position 2437 of SEQ ID NO: 1244958
gguauuauuaugggaggua

SEQ ID NO: 1525681 - RNA, 19 nt, Artificial Sequence
  Description of Artificial Sequence: Synthetic oligonucleotide
  Antisense strand to SEQ ID NO: 1525680
uaccucccauaauaauacc

SEQ ID NO: 1525682 - RNA, 19 nt, Artificial Sequence
  Description of Artificial Sequence: Synthetic oligonucleotide
  Sense strand starting at position 2508 of SEQ ID NO: 1244958
ggaacucuauugccaauca

SEQ ID NO: 1525683 - RNA, 19 nt, Artificial Sequence
  Description of Artificial Sequence: Synthetic oligonucleotide
  Antisense strand to SEQ ID NO: 1525682
ugauuggcaauagaguucc

SEQ ID NO: 1525684 - RNA, 19 nt, Artificial Sequence
  Description of Artificial Sequence: Synthetic oligonucleotide
  Sense strand starting at position 2570 of SEQ ID NO: 1244958
gggugauaaugguuuccuu

SEQ ID NO: 1525685 - RNA, 19 nt, Artificial Sequence
  Description of Artificial Sequence: Synthetic oligonucleotide
  Antisense strand to SEQ ID NO: 1525684
aaggaaaccauuaucaccc

SEQ ID NO: 1525686 - RNA, 19 nt, Artificial Sequence
  Description of Artificial Sequence: Synthetic oligonucleotide
  Sense strand starting at position 2573 of SEQ ID NO: 1244958
ugauaaugguuuccuuaca

SEQ ID NO: 1525687 - RNA, 19 nt, Artificial Sequence
  Description of Artificial Sequence: Synthetic oligonucleotide
  Antisense strand to SEQ ID NO: 1525686
uguaaggaaaccauuauca

SEQ ID NO: 1525688 - RNA, 19 nt, Artificial Sequence
  Description of Artificial Sequence: Synthetic oligonucleotide
  Sense strand starting at position 2583 of SEQ ID NO: 1244958
uuccuuacaguguaaguau

SEQ ID NO: 1525689 - RNA, 19 nt, Artificial Sequence
  Description of Artificial Sequence: Synthetic oligonucleotide
  Antisense strand to SEQ ID NO: 1525688
auacuuacacuguaaggaa

SEQ ID NO: 1525690 - RNA, 19 nt, Artificial Sequence
  Description of Artificial Sequence: Synthetic oligonucleotide
  Sense strand starting at position 2590 of SEQ ID NO: 1244958
caguguaaguaucuaguaa

SEQ ID NO: 1525691 - RNA, 19 nt, Artificial Sequence
  Description of Artificial Sequence: Synthetic oligonucleotide
  Antisense strand to SEQ ID NO: 1525690
uuacuagauacuuacacug

SEQ ID NO: 1525692 - RNA, 19 nt, Artificial Sequence
  Description of Artificial Sequence: Synthetic oligonucleotide
  Sense strand starting at position 2591 of SEQ ID NO: 1244958
aguguaaguaucuaguaaa

SEQ ID NO: 1525693 - RNA, 19 nt, Artificial Sequence
  Description of Artificial Sequence: Synthetic oligonucleotide
  Antisense strand to SEQ ID NO: 1525692
uuuacuagauacuuacacu

SEQ ID NO: 1525694 - RNA, 19 nt, Artificial Sequence
  Description of Artificial Sequence: Synthetic oligonucleotide
  Sense strand starting at position 2598 of SEQ ID NO: 1244958
guaucuaguaaaugggaga

SEQ ID NO: 1525695 - RNA, 19 nt, Artificial Sequence
  Description of Artificial Sequence: Synthetic oligonucleotide
  Antisense strand to SEQ ID NO: 1525694
ucucccauuuacuagauac

SEQ ID NO: 1525696 - RNA, 19 nt, Artificial Sequence
  Description of Artificial Sequence: Synthetic oligonucleotide
  Sense strand starting at position 2603 of SEQ ID NO: 1244958
uaguaaaugggagacguua

SEQ ID NO: 1525697 - RNA, 19 nt, Artificial Sequence
  Description of Artificial Sequence: Synthetic oligonucleotide
  Antisense strand to SEQ ID NO: 1525696
uaacgucucccauuuacua

SEQ ID NO: 1525698 - RNA, 19 nt, Artificial Sequence
  Description of Artificial Sequence: Synthetic oligonucleotide
  Sense strand starting at position 2605 of SEQ ID NO: 1244958
guaaaugggagacguuaua

SEQ ID NO: 1525699 - RNA, 19 nt, Artificial Sequence
  Description of Artificial Sequence: Synthetic oligonucleotide
  Antisense strand to SEQ ID NO: 1525698
uauaacgucucccauuuac

SEQ ID NO: 1525700 - RNA, 19 nt, Artificial Sequence
  Description of Artificial Sequence: Synthetic oligonucleotide
  Sense strand starting at position 2711 of SEQ ID NO: 1244958
agcggugaugaugacaaua

SEQ ID NO: 1525701 - RNA, 19 nt, Artificial Sequence
  Description of Artificial Sequence: Synthetic oligonucleotide
  Antisense strand to SEQ ID NO: 1525700
uauugucaucaucaccgcu

SEQ ID NO: 1525702 - RNA, 19 nt, Artificial Sequence
  Description of Artificial Sequence: Synthetic oligonucleotide
  Sense strand starting at position 2773 of SEQ ID NO: 1244958
auuugcacguuuccuuaau

SEQ ID NO: 1525703 - RNA, 19 nt, Artificial Sequence
  Description of Artificial Sequence: Synthetic oligonucleotide
  Antisense strand to SEQ ID NO: 1525702
auuaaggaaacgugcaaau

SEQ ID NO: 1525704 - RNA, 19 nt, Artificial Sequence
  Description of Artificial Sequence: Synthetic oligonucleotide
  Sense strand starting at position 2826 of SEQ ID NO: 1244958
ggcuguuugccagugccau

SEQ ID NO: 1525705 - RNA, 19 nt, Artificial Sequence
  Description of Artificial Sequence: Synthetic oligonucleotide
  Antisense strand to SEQ ID NO: 1525704
auggcacuggcaaacagcc

SEQ ID NO: 1525706 - RNA, 19 nt, Artificial Sequence
  Description of Artificial Sequence: Synthetic oligonucleotide
  Sense strand starting at position 3141 of SEQ ID NO: 1244958
gagguuucaccacgauggu

SEQ ID NO: 1525707 - RNA, 19 nt, Artificial Sequence
  Description of Artificial Sequence: Synthetic oligonucleotide
  Antisense strand to SEQ ID NO: 1525706
accaucguggugaaaccuc

SEQ ID NO: 1525708 - RNA, 19 nt, Artificial Sequence
  Description of Artificial Sequence: Synthetic oligonucleotide
  Sense strand starting at position 3247 of SEQ ID NO: 1244958
uggucaaggcuugaacuuu

SEQ ID NO: 1525709 - RNA, 19 nt, Artificial Sequence
  Description of Artificial Sequence: Synthetic oligonucleotide
  Antisense strand to SEQ ID NO: 1525708
aaaguucaagccuugacca

SEQ ID NO: 1525710 - RNA, 19 nt, Artificial Sequence
  Description of Artificial Sequence: Synthetic oligonucleotide
  Sense strand starting at position 3351 of SEQ ID NO: 1244958
cucaaugcacuugauguua

SEQ ID NO: 1525711 - RNA, 19 nt, Artificial Sequence
  Description of Artificial Sequence: Synthetic oligonucleotide
  Antisense strand to SEQ ID NO: 1525710
uaacaucaagugcauugag

SEQ ID NO: 1525712 - RNA, 19 nt, Artificial Sequence
  Description of Artificial Sequence: Synthetic oligonucleotide
  Sense strand starting at position 3415 of SEQ ID NO: 1244958
aggaguuagcccugagaag

SEQ ID NO: 1525713 - RNA, 19 nt, Artificial Sequence
  Description of Artificial Sequence: Synthetic oligonucleotide
  Antisense strand to SEQ ID NO: 1525712
cuucucagggcuaacuccu

SEQ ID NO: 1525714 - RNA, 19 nt, Artificial Sequence
  Description of Artificial Sequence: Synthetic oligonucleotide
  Sense strand starting at position 3605 of SEQ ID NO: 1244958
gguagugaugaaugguauc

SEQ ID NO: 1525715 - RNA, 19 nt, Artificial Sequence
  Description of Artificial Sequence: Synthetic oligonucleotide
  Antisense strand to SEQ ID NO: 1525714
gauaccauucaucacuacc

SEQ ID NO: 1525716 - RNA, 19 nt, Artificial Sequence
  Description of Artificial Sequence: Synthetic oligonucleotide
  Sense strand starting at position 3699 of SEQ ID NO: 1244958
ugggacuacagaugcuaau

SEQ ID NO: 1525717 - RNA, 19 nt, Artificial Sequence
  Description of Artificial Sequence: Synthetic oligonucleotide
  Antisense strand to SEQ ID NO: 1525716
auuagcaucuguaguccca

SEQ ID NO: 1525718 - RNA, 19 nt, Artificial Sequence
  Description of Artificial Sequence: Synthetic oligonucleotide
  Sense strand starting at position 3889 of SEQ ID NO: 1244958
ucccaaggcugguuuagau

SEQ ID NO: 1525719 - RNA, 19 nt, Artificial Sequence
  Description of Artificial Sequence: Synthetic oligonucleotide
  Antisense strand to SEQ ID NO: 1525718
aucuaaaccagccuuggga

SEQ ID NO: 1525720 - RNA, 19 nt, Artificial Sequence
  Description of Artificial Sequence: Synthetic oligonucleotide
  Sense strand starting at position 3973 of SEQ ID NO: 1244958
ggccuuugaucuuccugau

SEQ ID NO: 1525721 - RNA, 19 nt, Artificial Sequence
  Description of Artificial Sequence: Synthetic oligonucleotide
  Antisense strand to SEQ ID NO: 1525720
aucaggaagaucaaaggcc

SEQ ID NO: 1525722 - RNA, 19 nt, Artificial Sequence
  Description of Artificial Sequence: Synthetic oligonucleotide
  Sense strand starting at position 98 of SEQ ID NO: 1244959
gucagaagcaugugaaccu

SEQ ID NO: 1525723 - RNA, 19 nt, Artificial Sequence
  Description of Artificial Sequence: Synthetic oligonucleotide
  Antisense strand to SEQ ID NO: 1525722
agguucacaugcuucugac

SEQ ID NO: 1525724 - RNA, 19 nt, Artificial Sequence
  Description of Artificial Sequence: Synthetic oligonucleotide
  Sense strand starting at position 322 of SEQ ID NO: 1244959
ggucguccucacuacuaga

SEQ ID NO: 1525725 - RNA, 19 nt, Artificial Sequence
  Description of Artificial Sequence: Synthetic oligonucleotide
  Antisense strand to SEQ ID NO: 1525724
ucuaguagugaggacgacc

SEQ ID NO: 1525726 - RNA, 19 nt, Artificial Sequence
  Description of Artificial Sequence: Synthetic oligonucleotide
  Sense strand starting at position 383 of SEQ ID NO: 1244959
ucaggaaguuacucucuau

SEQ ID NO: 1525727 - RNA, 19 nt, Artificial Sequence
  Description of Artificial Sequence: Synthetic oligonucleotide
  Antisense strand to SEQ ID NO: 1525726
auagagaguaacuuccuga

SEQ ID NO: 1525728 - RNA, 19 nt, Artificial Sequence
  Description of Artificial Sequence: Synthetic oligonucleotide
  Sense strand starting at position 386 of SEQ ID NO: 1244959
ggaaguuacucucuaugau

SEQ ID NO: 1525729 - RNA, 19 nt, Artificial Sequence
  Description of Artificial Sequence: Synthetic oligonucleotide
  Antisense strand to SEQ ID NO: 1525728
aucauagagaguaacuucc

SEQ ID NO: 1525730 - RNA, 19 nt, Artificial Sequence
  Description of Artificial Sequence: Synthetic oligonucleotide
  Sense strand starting at position 389 of SEQ ID NO: 1244959
aguuacucucuaugaucua

SEQ ID NO: 1525731 - RNA, 19 nt, Artificial Sequence
  Description of Artificial Sequence: Synthetic oligonucleotide
  Antisense strand to SEQ ID NO: 1525730
uagaucauagagaguaacu

SEQ ID NO: 1525732 - RNA, 19 nt, Artificial Sequence
  Description of Artificial Sequence: Synthetic oligonucleotide
  Sense strand starting at position 571 of SEQ ID NO: 1244959
cuucuugccugauccaaga

SEQ ID NO: 1525733 - RNA, 19 nt, Artificial Sequence
  Description of Artificial Sequence: Synthetic oligonucleotide
  Antisense strand to SEQ ID NO: 1525732
ucuuggaucaggcaagaag

SEQ ID NO: 1525734 - RNA, 19 nt, Artificial Sequence
  Description of Artificial Sequence: Synthetic oligonucleotide
  Sense strand starting at position 911 of SEQ ID NO: 1244959
cgggacaccuuuccuguaa

SEQ ID NO: 1525735 - RNA, 19 nt, Artificial Sequence
  Description of Artificial Sequence: Synthetic oligonucleotide
  Antisense strand to SEQ ID NO: 1525734
uuacaggaaaggugucccg

SEQ ID NO: 1525736 - RNA, 19 nt, Artificial Sequence
  Description of Artificial Sequence: Synthetic oligonucleotide
  Sense strand starting at position 912 of SEQ ID NO: 1244959
gggacaccuuuccuguaau

SEQ ID NO: 1525737 - RNA, 19 nt, Artificial Sequence
  Description of Artificial Sequence: Synthetic oligonucleotide
  Antisense strand to SEQ ID NO: 1525736
auuacaggaaagguguccc

SEQ ID NO: 1525738 - RNA, 19 nt, Artificial Sequence
  Description of Artificial Sequence: Synthetic oligonucleotide
  Sense strand starting at position 985 of SEQ ID NO: 1244959
gcagucuuuccugaccaua

SEQ ID NO: 1525739 - RNA, 19 nt, Artificial Sequence
  Description of Artificial Sequence: Synthetic oligonucleotide
  Antisense strand to SEQ ID NO: 1525738
uauggucaggaaagacugc

SEQ ID NO: 1525740 - RNA, 19 nt, Artificial Sequence
  Description of Artificial Sequence: Synthetic oligonucleotide
  Sense strand starting at position 1150 of SEQ ID NO: 1244959
gggcaagaaaccugucugu

SEQ ID NO: 1525741 - RNA, 19 nt, Artificial Sequence
  Description of Artificial Sequence: Synthetic oligonucleotide
  Antisense strand to SEQ ID NO: 1525740
acagacagguuucuugccc

SEQ ID NO: 1525742 - RNA, 19 nt, Artificial Sequence
  Description of Artificial Sequence: Synthetic oligonucleotide
  Sense strand starting at position 1432 of SEQ ID NO: 1244959
cgccgauuccuacaagaua

SEQ ID NO: 1525743 - RNA, 19 nt, Artificial Sequence
  Description of Artificial Sequence: Synthetic oligonucleotide
  Antisense strand to SEQ ID NO: 1525742
uaucuuguaggaaucggcg

SEQ ID NO: 1525744 - RNA, 19 nt, Artificial Sequence
  Description of Artificial Sequence: Synthetic oligonucleotide
  Sense strand starting at position 1516 of SEQ ID NO: 1244959
ggcaauaaggguugaggaa

SEQ ID NO: 1525745 - RNA, 19 nt, Artificial Sequence
  Description of Artificial Sequence: Synthetic oligonucleotide
  Antisense strand to SEQ ID NO: 1525744
uuccucaacccuuauugcc

SEQ ID NO: 1525746 - RNA, 19 nt, Artificial Sequence
  Description of Artificial Sequence: Synthetic oligonucleotide
  Sense strand starting at position 1949 of SEQ ID NO: 1244959
uccgcuuugagggagcaaa

SEQ ID NO: 1525747 - RNA, 19 nt, Artificial Sequence
  Description of Artificial Sequence: Synthetic oligonucleotide
  Antisense strand to SEQ ID NO: 1525746
uuugcucccucaaagcgga

SEQ ID NO: 1525748 - RNA, 19 nt, Artificial Sequence
  Description of Artificial Sequence: Synthetic oligonucleotide
  Sense strand starting at position 2340 of SEQ ID NO: 1244959
cuuuaaauuguagaagcaa

SEQ ID NO: 1525749 - RNA, 19 nt, Artificial Sequence
  Description of Artificial Sequence: Synthetic oligonucleotide
  Antisense strand to SEQ ID NO: 1525748
uugcuucuacaauuuaaag

SEQ ID NO: 1525750 - RNA, 19 nt, Artificial Sequence
  Description of Artificial Sequence: Synthetic oligonucleotide
  Sense strand starting at position 2369 of SEQ ID NO: 1244959
uauguucuugcagagaagu

SEQ ID NO: 1525751 - RNA, 19 nt, Artificial Sequence
  Description of Artificial Sequence: Synthetic oligonucleotide
  Antisense strand to SEQ ID NO: 1525750
acuucucugcaagaacaua

SEQ ID NO: 1525752 - RNA, 19 nt, Artificial Sequence
  Description of Artificial Sequence: Synthetic oligonucleotide
  Sense strand starting at position 2371 of SEQ ID NO: 1244959
uguucuugcagagaaguaa

SEQ ID NO: 1525753 - RNA, 19 nt, Artificial Sequence
  Description of Artificial Sequence: Synthetic oligonucleotide
  Antisense strand to SEQ ID NO: 1525752
uuacuucucugcaagaaca

SEQ ID NO: 1525754 - RNA, 19 nt, Artificial Sequence
  Description of Artificial Sequence: Synthetic oligonucleotide
  Sense strand starting at position 2424 of SEQ ID NO: 1244959
guaacuaauggacgguauu

SEQ ID NO: 1525755 - RNA, 19 nt, Artificial Sequence
  Description of Artificial Sequence: Synthetic oligonucleotide
  Antisense strand to SEQ ID NO: 1525754
aauaccguccauuaguuac

SEQ ID NO: 1525756 - RNA, 19 nt, Artificial Sequence
  Description of Artificial Sequence: Synthetic oligonucleotide
  Sense strand starting at position 2425 of SEQ ID NO: 1244959
uaacuaauggacgguauua

SEQ ID NO: 1525757 - RNA, 19 nt, Artificial Sequence
  Description of Artificial Sequence: Synthetic oligonucleotide
  Antisense strand to SEQ ID NO: 1525756
uaauaccguccauuaguua

SEQ ID NO: 1525758 - RNA, 19 nt, Artificial Sequence
  Description of Artificial Sequence: Synthetic oligonucleotide
  Sense strand starting at position 2427 of SEQ ID NO: 1244959
acuaauggacgguauuauu

SEQ ID NO: 1525759 - RNA, 19 nt, Artificial Sequence
  Description of Artificial Sequence: Synthetic oligonucleotide
  Antisense strand to SEQ ID NO: 1525758
aauaauaccguccauuagu

SEQ ID NO: 1525760 - RNA, 19 nt, Artificial Sequence
  Description of Artificial Sequence: Synthetic oligonucleotide
  Sense strand starting at position 2437 of SEQ ID NO: 1244959
gguauuauuaugggaggua

SEQ ID NO: 1525761 - RNA, 19 nt, Artificial Sequence
  Description of Artificial Sequence: Synthetic oligonucleotide
  Antisense strand to SEQ ID NO: 1525760
uaccucccauaauaauacc

SEQ ID NO: 1525762 - RNA, 19 nt, Artificial Sequence
  Description of Artificial Sequence: Synthetic oligonucleotide
  Sense strand starting at position 2508 of SEQ ID NO: 1244959
ggaacucuauugccaauca

SEQ ID NO: 1525763 - RNA, 19 nt, Artificial Sequence
  Description of Artificial Sequence: Synthetic oligonucleotide
  Antisense strand to SEQ ID NO: 1525762
ugauuggcaauagaguucc

SEQ ID NO: 1525764 - RNA, 19 nt, Artificial Sequence
  Description of Artificial Sequence: Synthetic oligonucleotide
  Sense strand starting at position 2570 of SEQ ID NO: 1244959
gggugauaaugguuuccuu

SEQ ID NO: 1525765 - RNA, 19 nt, Artificial Sequence
  Description of Artificial Sequence: Synthetic oligonucleotide
  Antisense strand to SEQ ID NO: 1525764
aaggaaaccauuaucaccc

SEQ ID NO: 1525766 - RNA, 19 nt, Artificial Sequence
  Description of Artificial Sequence: Synthetic oligonucleotide
  Sense strand starting at position 2573 of SEQ ID NO: 1244959
ugauaaugguuuccuuaca

SEQ ID NO: 1525767 - RNA, 19 nt, Artificial Sequence
  Description of Artificial Sequence: Synthetic oligonucleotide
  Antisense strand to SEQ ID NO: 1525766
uguaaggaaaccauuauca

SEQ ID NO: 1525768 - RNA, 19 nt, Artificial Sequence
  Description of Artificial Sequence: Synthetic oligonucleotide
  Sense strand starting at position 2583 of SEQ ID NO: 1244959
uuccuuacaguguaaguau

SEQ ID NO: 1525769 - RNA, 19 nt, Artificial Sequence
  Description of Artificial Sequence: Synthetic oligonucleotide
  Antisense strand to SEQ ID NO: 1525768
auacuuacacuguaaggaa

SEQ ID NO: 1525770 - RNA, 19 nt, Artificial Sequence
  Description of Artificial Sequence: Synthetic oligonucleotide
  Sense strand starting at position 2590 of SEQ ID NO: 1244959
caguguaaguaucuaguaa

SEQ ID NO: 1525771 - RNA, 19 nt, Artificial Sequence
  Description of Artificial Sequence: Synthetic oligonucleotide
  Antisense strand to SEQ ID NO: 1525770
uuacuagauacuuacacug

SEQ ID NO: 1525772 - RNA, 19 nt, Artificial Sequence
  Description of Artificial Sequence: Synthetic oligonucleotide
  Sense strand starting at position 2591 of SEQ ID NO: 1244959
aguguaaguaucuaguaaa

SEQ ID NO: 1525773 - RNA, 19 nt, Artificial Sequence
  Description of Artificial Sequence: Synthetic oligonucleotide
  Antisense strand to SEQ ID NO: 1525772
uuuacuagauacuuacacu

SEQ ID NO: 1525774 - RNA, 19 nt, Artificial Sequence
  Description of Artificial Sequence: Synthetic oligonucleotide
  Sense strand starting at position 2598 of SEQ ID NO: 1244959
guaucuaguaaaugggaga

SEQ ID NO: 1525775 - RNA, 19 nt, Artificial Sequence
  Description of Artificial Sequence: Synthetic oligonucleotide
  Antisense strand to SEQ ID NO: 1525774
ucucccauuuacuagauac

SEQ ID NO: 1525776 - RNA, 19 nt, Artificial Sequence
  Description of Artificial Sequence: Synthetic oligonucleotide
  Sense strand starting at position 2603 of SEQ ID NO: 1244959
uaguaaaugggagacguua

SEQ ID NO: 1525777 - RNA, 19 nt, Artificial Sequence
  Description of Artificial Sequence: Synthetic oligonucleotide
  Antisense strand to SEQ ID NO: 1525776
uaacgucucccauuuacua

SEQ ID NO: 1525778 - RNA, 19 nt, Artificial Sequence
  Description of Artificial Sequence: Synthetic oligonucleotide
  Sense strand starting at position 2605 of SEQ ID NO: 1244959
guaaaugggagacguuaua

SEQ ID NO: 1525779 - RNA, 19 nt, Artificial Sequence
  Description of Artificial Sequence: Synthetic oligonucleotide
  Antisense strand to SEQ ID NO: 1525778
uauaacgucucccauuuac

SEQ ID NO: 1525780 - RNA, 19 nt, Artificial Sequence
  Description of Artificial Sequence: Synthetic oligonucleotide
  Sense strand starting at position 2711 of SEQ ID NO: 1244959
agcggugaugaugacaaua

SEQ ID NO: 1525781 - RNA, 19 nt, Artificial Sequence
  Description of Artificial Sequence: Synthetic oligonucleotide
  Antisense strand to SEQ ID NO: 1525780
uauugucaucaucaccgcu

SEQ ID NO: 1525782 - RNA, 19 nt, Artificial Sequence
  Description of Artificial Sequence: Synthetic oligonucleotide
  Sense strand starting at position 2773 of SEQ ID NO: 1244959
auuugcacguuuccuuaau

SEQ ID NO: 1525783 - RNA, 19 nt, Artificial Sequence
  Description of Artificial Sequence: Synthetic oligonucleotide
  Antisense strand to SEQ ID NO: 1525782
auuaaggaaacgugcaaau

SEQ ID NO: 1525784 - RNA, 19 nt, Artificial Sequence
  Description of Artificial Sequence: Synthetic oligonucleotide
  Sense strand starting at position 2826 of SEQ ID NO: 1244959
ggcuguuugccagugccau

SEQ ID NO: 1525785 - RNA, 19 nt, Artificial Sequence
  Description of Artificial Sequence: Synthetic oligonucleotide
  Antisense strand to SEQ ID NO: 1525784
auggcacuggcaaacagcc

SEQ ID NO: 1525786 - RNA, 19 nt, Artificial Sequence
  Description of Artificial Sequence: Synthetic oligonucleotide
  Sense strand starting at position 3141 of SEQ ID NO: 1244959
gagguuucaccacgauggu

SEQ ID NO: 1525787 - RNA, 19 nt, Artificial Sequence
  Description of Artificial Sequence: Synthetic oligonucleotide
  Antisense strand to SEQ ID NO: 1525786
accaucguggugaaaccuc

SEQ ID NO: 1525788 - RNA, 19 nt, Artificial Sequence
  Description of Artificial Sequence: Synthetic oligonucleotide
  Sense strand starting at position 3247 of SEQ ID NO: 1244959
uggucaaggcuugaacuuu

SEQ ID NO: 1525789 - RNA, 19 nt, Artificial Sequence
  Description of Artificial Sequence: Synthetic oligonucleotide
  Antisense strand to SEQ ID NO: 1525788
aaaguucaagccuugacca

SEQ ID NO: 1525790 - RNA, 19 nt, Artificial Sequence
  Description of Artificial Sequence: Synthetic oligonucleotide
  Sense strand starting at position 3351 of SEQ ID NO: 1244959
cucaaugcacuugauguua

SEQ ID NO: 1525791 - RNA, 19 nt, Artificial Sequence
  Description of Artificial Sequence: Synthetic oligonucleotide
  Antisense strand to SEQ ID NO: 1525790
uaacaucaagugcauugag

SEQ ID NO: 1525792 - RNA, 19 nt, Artificial Sequence
  Description of Artificial Sequence: Synthetic oligonucleotide
  Sense strand starting at position 3415 of SEQ ID NO: 1244959
aggaguuagcccugagaag

SEQ ID NO: 1525793 - RNA, 19 nt, Artificial Sequence
  Description of Artificial Sequence: Synthetic oligonucleotide
  Antisense strand to SEQ ID NO: 1525792
cuucucagggcuaacuccu

SEQ ID NO: 1525794 - RNA, 19 nt, Artificial Sequence
  Description of Artificial Sequence: Synthetic oligonucleotide
  Sense strand starting at position 3605 of SEQ ID NO: 1244959
gguagugaugaaugguauc

SEQ ID NO: 1525795 - RNA, 19 nt, Artificial Sequence
  Description of Artificial Sequence: Synthetic oligonucleotide
  Antisense strand to SEQ ID NO: 1525794
gauaccauucaucacuacc

SEQ ID NO: 1525796 - RNA, 19 nt, Artificial Sequence
  Description of Artificial Sequence: Synthetic oligonucleotide
  Sense strand starting at position 3699 of SEQ ID NO: 1244959
ugggacuacagaugcuaau

SEQ ID NO: 1525797 - RNA, 19 nt, Artificial Sequence
  Description of Artificial Sequence: Synthetic oligonucleotide
  Antisense strand to SEQ ID NO: 1525796
auuagcaucuguaguccca

SEQ ID NO: 1525798 - RNA, 19 nt, Artificial Sequence
  Description of Artificial Sequence: Synthetic oligonucleotide
  Sense strand starting at position 3889 of SEQ ID NO: 1244959
ucccaaggcugguuuagau

SEQ ID NO: 1525799 - RNA, 19 nt, Artificial Sequence
  Description of Artificial Sequence: Synthetic oligonucleotide
  Antisense strand to SEQ ID NO: 1525798
aucuaaaccagccuuggga

SEQ ID NO: 1525800 - RNA, 19 nt, Artificial Sequence
  Description of Artificial Sequence: Synthetic oligonucleotide
  Sense strand starting at position 3973 of SEQ ID NO: 1244959
ggccuuugaucuuccugau

SEQ ID NO: 1525801 - RNA, 19 nt, Artificial Sequence
  Description of Artificial Sequence: Synthetic oligonucleotide
  Antisense strand to SEQ ID NO: 1525800
aucaggaagaucaaaggcc

SEQ ID NO: 1525802 - RNA, 19 nt, Artificial Sequence
  Description of Artificial Sequence: Synthetic oligonucleotide
  Sense strand starting at position 12 of SEQ ID NO: 1244960
ugaguucugccuugaauga

SEQ ID NO: 1525803 - RNA, 19 nt, Artificial Sequence
  Description of Artificial Sequence: Synthetic oligonucleotide
  Antisense strand to SEQ ID NO: 1525802
ucauucaaggcagaacuca

SEQ ID NO: 1525804 - RNA, 19 nt, Artificial Sequence
  Description of Artificial Sequence: Synthetic oligonucleotide
  Sense strand starting at position 13 of SEQ ID NO: 1244960
gaguucugccuugaaugac

SEQ ID NO: 1525805 - RNA, 19 nt, Artificial Sequence
  Description of Artificial Sequence: Synthetic oligonucleotide
  Antisense strand to SEQ ID NO: 1525804
gucauucaaggcagaacuc

SEQ ID NO: 1525806 - RNA, 19 nt, Artificial Sequence
  Description of Artificial Sequence: Synthetic oligonucleotide
  Sense strand starting at position 422 of SEQ ID NO: 1244960
guuuauugggauuggccau

SEQ ID NO: 1525807 - RNA, 19 nt, Artificial Sequence
  Description of Artificial Sequence: Synthetic oligonucleotide
  Antisense strand to SEQ ID NO: 1525806
auggccaaucccaauaaac

SEQ ID NO: 1525808 - RNA, 19 nt, Artificial Sequence
  Description of Artificial Sequence: Synthetic oligonucleotide
  Sense strand starting at position 423 of SEQ ID NO: 1244960
uuuauugggauuggccaua

SEQ ID NO: 1525809 - RNA, 19 nt, Artificial Sequence
  Description of Artificial Sequence: Synthetic oligonucleotide
  Antisense strand to SEQ ID NO: 1525808
uauggccaaucccaauaaa

SEQ ID NO: 1525810 - RNA, 19 nt, Artificial Sequence
  Description of Artificial Sequence: Synthetic oligonucleotide
  Sense strand starting at position 532 of SEQ ID NO: 1244960
gaguucugacagugaauua

SEQ ID NO: 1525811 - RNA, 19 nt, Artificial Sequence
  Description of Artificial Sequence: Synthetic oligonucleotide
  Antisense strand to SEQ ID NO: 1525810
uaauucacugucagaacuc

SEQ ID NO: 1525812 - RNA, 19 nt, Artificial Sequence
  Description of Artificial Sequence: Synthetic oligonucleotide
  Sense strand starting at position 577 of SEQ ID NO: 1244960
acuguuccauacuuaagua

SEQ ID NO: 1525813 - RNA, 19 nt, Artificial Sequence
  Description of Artificial Sequence: Synthetic oligonucleotide
  Antisense strand to SEQ ID NO: 1525812
uacuuaaguauggaacagu

SEQ ID NO: 1525814 - RNA, 19 nt, Artificial Sequence
  Description of Artificial Sequence: Synthetic oligonucleotide
  Sense strand starting at position 709 of SEQ ID NO: 1244960
ugcuuaauauuugacauag

SEQ ID NO: 1525815 - RNA, 19 nt, Artificial Sequence
  Description of Artificial Sequence: Synthetic oligonucleotide
  Antisense strand to SEQ ID NO: 1525814
cuaugucaaauauuaagca

SEQ ID NO: 1525816 - RNA, 19 nt, Artificial Sequence
  Description of Artificial Sequence: Synthetic oligonucleotide
  Sense strand starting at position 719 of SEQ ID NO: 1244960
uugacauaguccuacauuu

SEQ ID NO: 1525817 - RNA, 19 nt, Artificial Sequence
  Description of Artificial Sequence: Synthetic oligonucleotide
  Antisense strand to SEQ ID NO: 1525816
aaauguaggacuaugucaa

SEQ ID NO: 1525818 - RNA, 19 nt, Artificial Sequence
  Description of Artificial Sequence: Synthetic oligonucleotide
  Sense strand starting at position 746 of SEQ ID NO: 1244960
aguaaucacuguucuugca

SEQ ID NO: 1525819 - RNA, 19 nt, Artificial Sequence
  Description of Artificial Sequence: Synthetic oligonucleotide
  Antisense strand to SEQ ID NO: 1525818
ugcaagaacagugauuacu

SEQ ID NO: 1525820 - RNA, 19 nt, Artificial Sequence
  Description of Artificial Sequence: Synthetic oligonucleotide
  Sense strand starting at position 783 of SEQ ID NO: 1244960
cggacuauggcuuaaucua

SEQ ID NO: 1525821 - RNA, 19 nt, Artificial Sequence
  Description of Artificial Sequence: Synthetic oligonucleotide
  Antisense strand to SEQ ID NO: 1525820
uagauuaagccauaguccg

SEQ ID NO: 1525822 - RNA, 19 nt, Artificial Sequence
  Description of Artificial Sequence: Synthetic oligonucleotide
  Sense strand starting at position 802 of SEQ ID NO: 1244960
cuaauuacccugugcaaag

SEQ ID NO: 1525823 - RNA, 19 nt, Artificial Sequence
  Description of Artificial Sequence: Synthetic oligonucleotide
  Antisense strand to SEQ ID NO: 1525822
cuuugcacaggguaauuag

SEQ ID NO: 1525824 - RNA, 19 nt, Artificial Sequence
  Description of Artificial Sequence: Synthetic oligonucleotide
  Sense strand starting at position 876 of SEQ ID NO: 1244960
cagaccaaauucguugaau

SEQ ID NO: 1525825 - RNA, 19 nt, Artificial Sequence
  Description of Artificial Sequence: Synthetic oligonucleotide
  Antisense strand to SEQ ID NO: 1525824
auucaacgaauuuggucug

SEQ ID NO: 1525826 - RNA, 19 nt, Artificial Sequence
  Description of Artificial Sequence: Synthetic oligonucleotide
  Sense strand starting at position 877 of SEQ ID NO: 1244960
agaccaaauucguugaauu

SEQ ID NO: 1525827 - RNA, 19 nt, Artificial Sequence
  Description of Artificial Sequence: Synthetic oligonucleotide
  Antisense strand to SEQ ID NO: 1525826
aauucaacgaauuuggucu

SEQ ID NO: 1525828 - RNA, 19 nt, Artificial Sequence
  Description of Artificial Sequence: Synthetic oligonucleotide
  Sense strand starting at position 878 of SEQ ID NO: 1244960
gaccaaauucguugaauua

SEQ ID NO: 1525829 - RNA, 19 nt, Artificial Sequence
  Description of Artificial Sequence: Synthetic oligonucleotide
  Antisense strand to SEQ ID NO: 1525828
uaauucaacgaauuugguc

SEQ ID NO: 1525830 - RNA, 19 nt, Artificial Sequence
  Description of Artificial Sequence: Synthetic oligonucleotide
  Sense strand starting at position 879 of SEQ ID NO: 1244960
accaaauucguugaauuac

SEQ ID NO: 1525831 - RNA, 19 nt, Artificial Sequence
  Description of Artificial Sequence: Synthetic oligonucleotide
  Antisense strand to SEQ ID NO: 1525830
guaauucaacgaauuuggu

SEQ ID NO: 1525832 - RNA, 19 nt, Artificial Sequence
  Description of Artificial Sequence: Synthetic oligonucleotide
  Sense strand starting at position 944 of SEQ ID NO: 1244960
cuaauuguuuaacuuguca

SEQ ID NO: 1525833 - RNA, 19 nt, Artificial Sequence
  Description of Artificial Sequence: Synthetic oligonucleotide
  Antisense strand to SEQ ID NO: 1525832
ugacaaguuaaacaauuag

SEQ ID NO: 1525834 - RNA, 19 nt, Artificial Sequence
  Description of Artificial Sequence: Synthetic oligonucleotide
  Sense strand starting at position 948 of SEQ ID NO: 1244960
uuguuuaacuugucagaca

SEQ ID NO: 1525835 - RNA, 19 nt, Artificial Sequence
  Description of Artificial Sequence: Synthetic oligonucleotide
  Antisense strand to SEQ ID NO: 1525834
ugucugacaaguuaaacaa

SEQ ID NO: 1525836 - RNA, 19 nt, Artificial Sequence
  Description of Artificial Sequence: Synthetic oligonucleotide
  Sense strand starting at position 959 of SEQ ID NO: 1244960
gucagacauuaccuuguaa

SEQ ID NO: 1525837 - RNA, 19 nt, Artificial Sequence
  Description of Artificial Sequence: Synthetic oligonucleotide
  Antisense strand to SEQ ID NO: 1525836
uuacaagguaaugucugac

SEQ ID NO: 1525838 - RNA, 19 nt, Artificial Sequence
  Description of Artificial Sequence: Synthetic oligonucleotide
  Sense strand starting at position 1035 of SEQ ID NO: 1244960
acgucugcgagguagauua

SEQ ID NO: 1525839 - RNA, 19 nt, Artificial Sequence
  Description of Artificial Sequence: Synthetic oligonucleotide
  Antisense strand to SEQ ID NO: 1525838
uaaucuaccucgcagacgu

SEQ ID NO: 1525840 - RNA, 19 nt, Artificial Sequence
  Description of Artificial Sequence: Synthetic oligonucleotide
  Sense strand starting at position 1037 of SEQ ID NO: 1244960
gucugcgagguagauuaua

SEQ ID NO: 1525841 - RNA, 19 nt, Artificial Sequence
  Description of Artificial Sequence: Synthetic oligonucleotide
  Antisense strand to SEQ ID NO: 1525840
uauaaucuaccucgcagac

SEQ ID NO: 1525842 - RNA, 19 nt, Artificial Sequence
  Description of Artificial Sequence: Synthetic oligonucleotide
  Sense strand starting at position 1136 of SEQ ID NO: 1244960
guacgacugguucagcuuu

SEQ ID NO: 1525843 - RNA, 19 nt, Artificial Sequence
  Description of Artificial Sequence: Synthetic oligonucleotide
  Antisense strand to SEQ ID NO: 1525842
aaagcugaaccagucguac

SEQ ID NO: 1525844 - RNA, 19 nt, Artificial Sequence
  Description of Artificial Sequence: Synthetic oligonucleotide
  Sense strand starting at position 1191 of SEQ ID NO: 1244960
uacaaucaggcacguauaa

SEQ ID NO: 1525845 - RNA, 19 nt, Artificial Sequence
  Description of Artificial Sequence: Synthetic oligonucleotide
  Antisense strand to SEQ ID NO: 1525844
uuauacgugccugauugua

SEQ ID NO: 1525846 - RNA, 19 nt, Artificial Sequence
  Description of Artificial Sequence: Synthetic oligonucleotide
  Sense strand starting at position 1296 of SEQ ID NO: 1244960
guucccuucuggucuuaga

SEQ ID NO: 1525847 - RNA, 19 nt, Artificial Sequence
  Description of Artificial Sequence: Synthetic oligonucleotide
  Antisense strand to SEQ ID NO: 1525846
ucuaagaccagaagggaac

SEQ ID NO: 1525848 - RNA, 19 nt, Artificial Sequence
  Description of Artificial Sequence: Synthetic oligonucleotide
  Sense strand starting at position 1305 of SEQ ID NO: 1244960
uggucuuagagccacguua

SEQ ID NO: 1525849 - RNA, 19 nt, Artificial Sequence
  Description of Artificial Sequence: Synthetic oligonucleotide
  Antisense strand to SEQ ID NO: 1525848
uaacguggcucuaagacca

SEQ ID NO: 1525850 - RNA, 19 nt, Artificial Sequence
  Description of Artificial Sequence: Synthetic oligonucleotide
  Sense strand starting at position 1307 of SEQ ID NO: 1244960
gucuuagagccacguuaag

SEQ ID NO: 1525851 - RNA, 19 nt, Artificial Sequence
  Description of Artificial Sequence: Synthetic oligonucleotide
  Antisense strand to SEQ ID NO: 1525850
cuuaacguggcucuaagac

SEQ ID NO: 1525852 - RNA, 19 nt, Artificial Sequence
  Description of Artificial Sequence: Synthetic oligonucleotide
  Sense strand starting at position 1409 of SEQ ID NO: 1244960
ucacguauccuguaagaca

SEQ ID NO: 1525853 - RNA, 19 nt, Artificial Sequence
  Description of Artificial Sequence: Synthetic oligonucleotide
  Antisense strand to SEQ ID NO: 1525852
ugucuuacaggauacguga

SEQ ID NO: 1525854 - RNA, 19 nt, Artificial Sequence
  Description of Artificial Sequence: Synthetic oligonucleotide
  Sense strand starting at position 1417 of SEQ ID NO: 1244960
ccuguaagacacuaauggu

SEQ ID NO: 1525855 - RNA, 19 nt, Artificial Sequence
  Description of Artificial Sequence: Synthetic oligonucleotide
  Antisense strand to SEQ ID NO: 1525854
accauuagugucuuacagg

SEQ ID NO: 1525856 - RNA, 19 nt, Artificial Sequence
  Description of Artificial Sequence: Synthetic oligonucleotide
  Sense strand starting at position 1459 of SEQ ID NO: 1244960
ggaacuagauuccaagauc

SEQ ID NO: 1525857 - RNA, 19 nt, Artificial Sequence
  Description of Artificial Sequence: Synthetic oligonucleotide
  Antisense strand to SEQ ID NO: 1525856
gaucuuggaaucuaguucc

SEQ ID NO: 1525858 - RNA, 19 nt, Artificial Sequence
  Description of Artificial Sequence: Synthetic oligonucleotide
  Sense strand starting at position 1567 of SEQ ID NO: 1244960
cgcggaugucuggaaccaa

SEQ ID NO: 1525859 - RNA, 19 nt, Artificial Sequence
  Description of Artificial Sequence: Synthetic oligonucleotide
  Antisense strand to SEQ ID NO: 1525858
uugguuccagacauccgcg

SEQ ID NO: 1525860 - RNA, 19 nt, Artificial Sequence
  Description of Artificial Sequence: Synthetic oligonucleotide
  Sense strand starting at position 1996 of SEQ ID NO: 1244960
ugcucuaguuccucagauc

SEQ ID NO: 1525861 - RNA, 19 nt, Artificial Sequence
  Description of Artificial Sequence: Synthetic oligonucleotide
  Antisense strand to SEQ ID NO: 1525860
gaucugaggaacuagagca

SEQ ID NO: 1525862 - RNA, 19 nt, Artificial Sequence
  Description of Artificial Sequence: Synthetic oligonucleotide
  Sense strand starting at position 1997 of SEQ ID NO: 1244960
gcucuaguuccucagaucu

SEQ ID NO: 1525863 - RNA, 19 nt, Artificial Sequence
  Description of Artificial Sequence: Synthetic oligonucleotide
  Antisense strand to SEQ ID NO: 1525862
agaucugaggaacuagagc

SEQ ID NO: 1525864 - RNA, 19 nt, Artificial Sequence
  Description of Artificial Sequence: Synthetic oligonucleotide
  Sense strand starting at position 2581 of SEQ ID NO: 1244960
ggagcuaugagccgggaga

SEQ ID NO: 1525865 - RNA, 19 nt, Artificial Sequence
  Description of Artificial Sequence: Synthetic oligonucleotide
  Antisense strand to SEQ ID NO: 1525864
ucucccggcucauagcucc

SEQ ID NO: 1525866 - RNA, 19 nt, Artificial Sequence
  Description of Artificial Sequence: Synthetic oligonucleotide
  Sense strand starting at position 3171 of SEQ ID NO: 1244960
aggagagggaccugucgaa

SEQ ID NO: 1525867 - RNA, 19 nt, Artificial Sequence
  Description of Artificial Sequence: Synthetic oligonucleotide
  Antisense strand to SEQ ID NO: 1525866
uucgacaggucccucuccu

SEQ ID NO: 1525868 - RNA, 19 nt, Artificial Sequence
  Description of Artificial Sequence: Synthetic oligonucleotide
  Sense strand starting at position 3205 of SEQ ID NO: 1244960
cgagcuuccuggguagaga

SEQ ID NO: 1525869 - RNA, 19 nt, Artificial Sequence
  Description of Artificial Sequence: Synthetic oligonucleotide
  Antisense strand to SEQ ID NO: 1525868
ucucuacccaggaagcucg

SEQ ID NO: 1525870 - RNA, 19 nt, Artificial Sequence
  Description of Artificial Sequence: Synthetic oligonucleotide
  Sense strand starting at position 3323 of SEQ ID NO: 1244960
acgagagagccuuaggcuu

SEQ ID NO: 1525871 - RNA, 19 nt, Artificial Sequence
  Description of Artificial Sequence: Synthetic oligonucleotide
  Antisense strand to SEQ ID NO: 1525870
aagccuaaggcucucucgu

SEQ ID NO: 1525872 - RNA, 19 nt, Artificial Sequence
  Description of Artificial Sequence: Synthetic oligonucleotide
  Sense strand starting at position 3465 of SEQ ID NO: 1244960
ggagauaggcuauggguuu

SEQ ID NO: 1525873 - RNA, 19 nt, Artificial Sequence
  Description of Artificial Sequence: Synthetic oligonucleotide
  Antisense strand to SEQ ID NO: 1525872
aaacccauagccuaucucc

SEQ ID NO: 1525874 - RNA, 19 nt, Artificial Sequence
  Description of Artificial Sequence: Synthetic oligonucleotide
  Sense strand starting at position 3471 of SEQ ID NO: 1244960
aggcuauggguuugucuca

SEQ ID NO: 1525875 - RNA, 19 nt, Artificial Sequence
  Description of Artificial Sequence: Synthetic oligonucleotide
  Antisense strand to SEQ ID NO: 1525874
ugagacaaacccauagccu

SEQ ID NO: 1525876 - RNA, 19 nt, Artificial Sequence
  Description of Artificial Sequence: Synthetic oligonucleotide
  Sense strand starting at position 3484 of SEQ ID NO: 1244960
gucucaggcccuugugaaa

SEQ ID NO: 1525877 - RNA, 19 nt, Artificial Sequence
  Description of Artificial Sequence: Synthetic oligonucleotide
  Antisense strand to SEQ ID NO: 1525876
uuucacaagggccugagac

SEQ ID NO: 1525878 - RNA, 19 nt, Artificial Sequence
  Description of Artificial Sequence: Synthetic oligonucleotide
  Sense strand starting at position 3639 of SEQ ID NO: 1244960
ggcucugacacaugaagca

SEQ ID NO: 1525879 - RNA, 19 nt, Artificial Sequence
  Description of Artificial Sequence: Synthetic oligonucleotide
  Antisense strand to SEQ ID NO: 1525878
ugcuucaugugucagagcc

SEQ ID NO: 1525880 - RNA, 19 nt, Artificial Sequence
  Description of Artificial Sequence: Synthetic oligonucleotide
  Sense strand starting at position 3781 of SEQ ID NO: 1244960
gagacagacucugugggua

SEQ ID NO: 1525881 - RNA, 19 nt, Artificial Sequence
  Description of Artificial Sequence: Synthetic oligonucleotide
  Antisense strand to SEQ ID NO: 1525880
uacccacagagucugucuc

SEQ ID NO: 1525882 - RNA, 19 nt, Artificial Sequence
  Description of Artificial Sequence: Synthetic oligonucleotide
  Sense strand starting at position 78 of SEQ ID NO: 1244961
gccauuucuccuggucaag

SEQ ID NO: 1525883 - RNA, 19 nt, Artificial Sequence
  Description of Artificial Sequence: Synthetic oligonucleotide
  Antisense strand to SEQ ID NO: 1525882
cuugaccaggagaaauggc

SEQ ID NO: 1525884 - RNA, 19 nt, Artificial Sequence
  Description of Artificial Sequence: Synthetic oligonucleotide
  Sense strand starting at position 191 of SEQ ID NO: 1244961
uggcuugauuuauauacag

SEQ ID NO: 1525885 - RNA, 19 nt, Artificial Sequence
  Description of Artificial Sequence: Synthetic oligonucleotide
  Antisense strand to SEQ ID NO: 1525884
cuguauauaaaucaagcca

SEQ ID NO: 1525886 - RNA, 19 nt, Artificial Sequence
  Description of Artificial Sequence: Synthetic oligonucleotide
  Sense strand starting at position 265 of SEQ ID NO: 1244961
guccucugugacuagauga

SEQ ID NO: 1525887 - RNA, 19 nt, Artificial Sequence
  Description of Artificial Sequence: Synthetic oligonucleotide
  Antisense strand to SEQ ID NO: 1525886
ucaucuagucacagaggac

SEQ ID NO: 1525888 - RNA, 19 nt, Artificial Sequence
  Description of Artificial Sequence: Synthetic oligonucleotide
  Sense strand starting at position 449 of SEQ ID NO: 1244961
agagauguccugggccuca

SEQ ID NO: 1525889 - RNA, 19 nt, Artificial Sequence
  Description of Artificial Sequence: Synthetic oligonucleotide
  Antisense strand to SEQ ID NO: 1525888
ugaggcccaggacaucucu

SEQ ID NO: 1525890 - RNA, 19 nt, Artificial Sequence
  Description of Artificial Sequence: Synthetic oligonucleotide
  Sense strand starting at position 454 of SEQ ID NO: 1244961
uguccugggccucaagaaa

SEQ ID NO: 1525891 - RNA, 19 nt, Artificial Sequence
  Description of Artificial Sequence: Synthetic oligonucleotide
  Antisense strand to SEQ ID NO: 1525890
uuucuugaggcccaggaca

SEQ ID NO: 1525892 - RNA, 19 nt, Artificial Sequence
  Description of Artificial Sequence: Synthetic oligonucleotide
  Sense strand starting at position 597 of SEQ ID NO: 1244961
agacacauuccuggccuua

SEQ ID NO: 1525893 - RNA, 19 nt, Artificial Sequence
  Description of Artificial Sequence: Synthetic oligonucleotide
  Antisense strand to SEQ ID NO: 1525892
uaaggccaggaaugugucu

SEQ ID NO: 1525894 - RNA, 19 nt, Artificial Sequence
  Description of Artificial Sequence: Synthetic oligonucleotide
  Sense strand starting at position 652 of SEQ ID NO: 1244961
ggauguauguccuuccaac

SEQ ID NO: 1525895 - RNA, 19 nt, Artificial Sequence
  Description of Artificial Sequence: Synthetic oligonucleotide
  Antisense strand to SEQ ID NO: 1525894
guuggaaggacauacaucc

SEQ ID NO: 1525896 - RNA, 19 nt, Artificial Sequence
  Description of Artificial Sequence: Synthetic oligonucleotide
  Sense strand starting at position 699 of SEQ ID NO: 1244961
ugaacagaucuuugugggu

SEQ ID NO: 1525897 - RNA, 19 nt, Artificial Sequence
  Description of Artificial Sequence: Synthetic oligonucleotide
  Antisense strand to SEQ ID NO: 1525896
acccacaaagaucuguuca

SEQ ID NO: 1525898 - RNA, 19 nt, Artificial Sequence
  Description of Artificial Sequence: Synthetic oligonucleotide
  Sense strand starting at position 1112 of SEQ ID NO: 1244961
cgcucuuuccuggaagaca

SEQ ID NO: 1525899 - RNA, 19 nt, Artificial Sequence
  Description of Artificial Sequence: Synthetic oligonucleotide
  Antisense strand to SEQ ID NO: 1525898
ugucuuccaggaaagagcg

SEQ ID NO: 1525900 - RNA, 19 nt, Artificial Sequence
  Description of Artificial Sequence: Synthetic oligonucleotide
  Sense strand starting at position 2348 of SEQ ID NO: 1244961
cucugaaagauguggucau

SEQ ID NO: 1525901 - RNA, 19 nt, Artificial Sequence
  Description of Artificial Sequence: Synthetic oligonucleotide
  Antisense strand to SEQ ID NO: 1525900
augaccacaucuuucagag

SEQ ID NO: 1525902 - RNA, 19 nt, Artificial Sequence
  Description of Artificial Sequence: Synthetic oligonucleotide
  Sense strand starting at position 2358 of SEQ ID NO: 1244961
uguggucaucucgagaaac

SEQ ID NO: 1525903 - RNA, 19 nt, Artificial Sequence
  Description of Artificial Sequence: Synthetic oligonucleotide
  Antisense strand to SEQ ID NO: 1525902
guuucucgagaugaccaca

SEQ ID NO: 1525904 - RNA, 19 nt, Artificial Sequence
  Description of Artificial Sequence: Synthetic oligonucleotide
  Sense strand starting at position 2595 of SEQ ID NO: 1244961
gcguccugcccucuucuaa

SEQ ID NO: 1525905 - RNA, 19 nt, Artificial Sequence
  Description of Artificial Sequence: Synthetic oligonucleotide
  Antisense strand to SEQ ID NO: 1525904
uuagaagagggcaggacgc

SEQ ID NO: 1525906 - RNA, 19 nt, Artificial Sequence
  Description of Artificial Sequence: Synthetic oligonucleotide
  Sense strand starting at position 2710 of SEQ ID NO: 1244961
uacgauaugcaaggaaaua

SEQ ID NO: 1525907 - RNA, 19 nt, Artificial Sequence
  Description of Artificial Sequence: Synthetic oligonucleotide
  Antisense strand to SEQ ID NO: 1525906
uauuuccuugcauaucgua

SEQ ID NO: 1525908 - RNA, 19 nt, Artificial Sequence
  Description of Artificial Sequence: Synthetic oligonucleotide
  Sense strand starting at position 2740 of SEQ ID NO: 1244961
aagugagacuuucucagug

SEQ ID NO: 1525909 - RNA, 19 nt, Artificial Sequence
  Description of Artificial Sequence: Synthetic oligonucleotide
  Antisense strand to SEQ ID NO: 1525908
cacugagaaagucucacuu

SEQ ID NO: 1525910 - RNA, 19 nt, Artificial Sequence
  Description of Artificial Sequence: Synthetic oligonucleotide
  Sense strand starting at position 2744 of SEQ ID NO: 1244961
gagacuuucucaguggcca

SEQ ID NO: 1525911 - RNA, 19 nt, Artificial Sequence
  Description of Artificial Sequence: Synthetic oligonucleotide
  Antisense strand to SEQ ID NO: 1525910
uggccacugagaaagucuc

SEQ ID NO: 1525912 - RNA, 19 nt, Artificial Sequence
  Description of Artificial Sequence: Synthetic oligonucleotide
  Sense strand starting at position 2745 of SEQ ID NO: 1244961
agacuuucucaguggccaa

SEQ ID NO: 1525913 - RNA, 19 nt, Artificial Sequence
  Description of Artificial Sequence: Synthetic oligonucleotide
  Antisense strand to SEQ ID NO: 1525912
uuggccacugagaaagucu

SEQ ID NO: 1525914 - RNA, 19 nt, Artificial Sequence
  Description of Artificial Sequence: Synthetic oligonucleotide
  Sense strand starting at position 2788 of SEQ ID NO: 1244961
uguuaaaucgguugaccua

SEQ ID NO: 1525915 - RNA, 19 nt, Artificial Sequence
  Description of Artificial Sequence: Synthetic oligonucleotide
  Antisense strand to SEQ ID NO: 1525914
uaggucaaccgauuuaaca

SEQ ID NO: 1525916 - RNA, 19 nt, Artificial Sequence
  Description of Artificial Sequence: Synthetic oligonucleotide
  Sense strand starting at position 2789 of SEQ ID NO: 1244961
guuaaaucgguugaccuaa

SEQ ID NO: 1525917 - RNA, 19 nt, Artificial Sequence
  Description of Artificial Sequence: Synthetic oligonucleotide
  Antisense strand to SEQ ID NO: 1525916
uuaggucaaccgauuuaac

SEQ ID NO: 1525918 - RNA, 19 nt, Artificial Sequence
  Description of Artificial Sequence: Synthetic oligonucleotide
  Sense strand starting at position 3063 of SEQ ID NO: 1244961
aacagugaguguuucuaca

SEQ ID NO: 1525919 - RNA, 19 nt, Artificial Sequence
  Description of Artificial Sequence: Synthetic oligonucleotide
  Antisense strand to SEQ ID NO: 1525918
uguagaaacacucacuguu

SEQ ID NO: 1525920 - RNA, 19 nt, Artificial Sequence
  Description of Artificial Sequence: Synthetic oligonucleotide
  Sense strand starting at position 3065 of SEQ ID NO: 1244961
cagugaguguuucuacaga

SEQ ID NO: 1525921 - RNA, 19 nt, Artificial Sequence
  Description of Artificial Sequence: Synthetic oligonucleotide
  Antisense strand to SEQ ID NO: 1525920
ucuguagaaacacucacug

SEQ ID NO: 1525922 - RNA, 19 nt, Artificial Sequence
  Description of Artificial Sequence: Synthetic oligonucleotide
  Sense strand starting at position 3080 of SEQ ID NO: 1244961
cagagauacuguuucucag

SEQ ID NO: 1525923 - RNA, 19 nt, Artificial Sequence
  Description of Artificial Sequence: Synthetic oligonucleotide
  Antisense strand to SEQ ID NO: 1525922
cugagaaacaguaucucug

SEQ ID NO: 1525924 - RNA, 19 nt, Artificial Sequence
  Description of Artificial Sequence: Synthetic oligonucleotide
  Sense strand starting at position 3082 of SEQ ID NO: 1244961
gagauacuguuucucagug

SEQ ID NO: 1525925 - RNA, 19 nt, Artificial Sequence
  Description of Artificial Sequence: Synthetic oligonucleotide
  Antisense strand to SEQ ID NO: 1525924
cacugagaaacaguaucuc

SEQ ID NO: 1525926 - RNA, 19 nt, Artificial Sequence
  Description of Artificial Sequence: Synthetic oligonucleotide
  Sense strand starting at position 3148 of SEQ ID NO: 1244961
gcuagagugacaugaucau

SEQ ID NO: 1525927 - RNA, 19 nt, Artificial Sequence
  Description of Artificial Sequence: Synthetic oligonucleotide
  Antisense strand to SEQ ID NO: 1525926
augaucaugucacucuagc

SEQ ID NO: 1525928 - RNA, 19 nt, Artificial Sequence
  Description of Artificial Sequence: Synthetic oligonucleotide
  Sense strand starting at position 3384 of SEQ ID NO: 1244961
cccaaauuuguuuguaugu

SEQ ID NO: 1525929 - RNA, 19 nt, Artificial Sequence
  Description of Artificial Sequence: Synthetic oligonucleotide
  Antisense strand to SEQ ID NO: 1525928
acauacaaacaaauuuggg

SEQ ID NO: 1525930 - RNA, 19 nt, Artificial Sequence
  Description of Artificial Sequence: Synthetic oligonucleotide
  Sense strand starting at position 3406 of SEQ ID NO: 1244961
gagcuuccaucuucuggau

SEQ ID NO: 1525931 - RNA, 19 nt, Artificial Sequence
  Description of Artificial Sequence: Synthetic oligonucleotide
  Antisense strand to SEQ ID NO: 1525930
auccagaagauggaagcuc

SEQ ID NO: 1525932 - RNA, 19 nt, Artificial Sequence
  Description of Artificial Sequence: Synthetic oligonucleotide
  Sense strand starting at position 3413 of SEQ ID NO: 1244961
caucuucuggauuagaguu

SEQ ID NO: 1525933 - RNA, 19 nt, Artificial Sequence
  Description of Artificial Sequence: Synthetic oligonucleotide
  Antisense strand to SEQ ID NO: 1525932
aacucuaauccagaagaug

SEQ ID NO: 1525934 - RNA, 19 nt, Artificial Sequence
  Description of Artificial Sequence: Synthetic oligonucleotide
  Sense strand starting at position 3420 of SEQ ID NO: 1244961
uggauuagaguuugaucuu

SEQ ID NO: 1525935 - RNA, 19 nt, Artificial Sequence
  Description of Artificial Sequence: Synthetic oligonucleotide
  Antisense strand to SEQ ID NO: 1525934
aagaucaaacucuaaucca

SEQ ID NO: 1525936 - RNA, 19 nt, Artificial Sequence
  Description of Artificial Sequence: Synthetic oligonucleotide
  Sense strand starting at position 3439 of SEQ ID NO: 1244961
cagggcuguguuugagaau

SEQ ID NO: 1525937 - RNA, 19 nt, Artificial Sequence
  Description of Artificial Sequence: Synthetic oligonucleotide
  Antisense strand to SEQ ID NO: 1525936
auucucaaacacagcccug

SEQ ID NO: 1525938 - RNA, 19 nt, Artificial Sequence
  Description of Artificial Sequence: Synthetic oligonucleotide
  Sense strand starting at position 3477 of SEQ ID NO: 1244961
cuaggaguuuaagcagauu

SEQ ID NO: 1525939 - RNA, 19 nt, Artificial Sequence
  Description of Artificial Sequence: Synthetic oligonucleotide
  Antisense strand to SEQ ID NO: 1525938
aaucugcuuaaacuccuag

SEQ ID NO: 1525940 - RNA, 19 nt, Artificial Sequence
  Description of Artificial Sequence: Synthetic oligonucleotide
  Sense strand starting at position 3507 of SEQ ID NO: 1244961
agaagagauugggaagaua

SEQ ID NO: 1525941 - RNA, 19 nt, Artificial Sequence
  Description of Artificial Sequence: Synthetic oligonucleotide
  Antisense strand to SEQ ID NO: 1525940
uaucuucccaaucucuucu

SEQ ID NO: 1525942 - RNA, 19 nt, Artificial Sequence
  Description of Artificial Sequence: Synthetic oligonucleotide
  Sense strand starting at position 3562 of SEQ ID NO: 1244961
ucaggagaacuuugugagu

SEQ ID NO: 1525943 - RNA, 19 nt, Artificial Sequence
  Description of Artificial Sequence: Synthetic oligonucleotide
  Antisense strand to SEQ ID NO: 1525942
acucacaaaguucuccuga

SEQ ID NO: 1525944 - RNA, 19 nt, Artificial Sequence
  Description of Artificial Sequence: Synthetic oligonucleotide
  Sense strand starting at position 3619 of SEQ ID NO: 1244961
cagcuaaaggucugcagaa

SEQ ID NO: 1525945 - RNA, 19 nt, Artificial Sequence
  Description of Artificial Sequence: Synthetic oligonucleotide
  Antisense strand to SEQ ID NO: 1525944
uucugcagaccuuuagcug

SEQ ID NO: 1525946 - RNA, 19 nt, Artificial Sequence
  Description of Artificial Sequence: Synthetic oligonucleotide
  Sense strand starting at position 3621 of SEQ ID NO: 1244961
gcuaaaggucugcagaaca

SEQ ID NO: 1525947 - RNA, 19 nt, Artificial Sequence
  Description of Artificial Sequence: Synthetic oligonucleotide
  Antisense strand to SEQ ID NO: 1525946
uguucugcagaccuuuagc

SEQ ID NO: 1525948 - RNA, 19 nt, Artificial Sequence
  Description of Artificial Sequence: Synthetic oligonucleotide
  Sense strand starting at position 3665 of SEQ ID NO: 1244961
cgucgugguucuaucuuga

SEQ ID NO: 1525949 - RNA, 19 nt, Artificial Sequence
  Description of Artificial Sequence: Synthetic oligonucleotide
  Antisense strand to SEQ ID NO: 1525948
ucaagauagaaccacgacg

SEQ ID NO: 1525950 - RNA, 19 nt, Artificial Sequence
  Description of Artificial Sequence: Synthetic oligonucleotide
  Sense strand starting at position 3686 of SEQ ID NO: 1244961
uugccuaaauuggauuuaa

SEQ ID NO: 1525951 - RNA, 19 nt, Artificial Sequence
  Description of Artificial Sequence: Synthetic oligonucleotide
  Antisense strand to SEQ ID NO: 1525950
uuaaauccaauuuaggcaa

SEQ ID NO: 1525952 - RNA, 19 nt, Artificial Sequence
  Description of Artificial Sequence: Synthetic oligonucleotide
  Sense strand starting at position 3810 of SEQ ID NO: 1244961
guacuaucaugagcucauu

SEQ ID NO: 1525953 - RNA, 19 nt, Artificial Sequence
  Description of Artificial Sequence: Synthetic oligonucleotide
  Antisense strand to SEQ ID NO: 1525952
aaugagcucaugauaguac

SEQ ID NO: 1525954 - RNA, 19 nt, Artificial Sequence
  Description of Artificial Sequence: Synthetic oligonucleotide
  Sense strand starting at position 3866 of SEQ ID NO: 1244961
aggaguaggagucagcuuu

SEQ ID NO: 1525955 - RNA, 19 nt, Artificial Sequence
  Description of Artificial Sequence: Synthetic oligonucleotide
  Antisense strand to SEQ ID NO: 1525954
aaagcugacuccuacuccu

SEQ ID NO: 1525956 - RNA, 19 nt, Artificial Sequence
  Description of Artificial Sequence: Synthetic oligonucleotide
  Sense strand starting at position 3889 of SEQ ID NO: 1244961
ugggaauggcccugaagua

SEQ ID NO: 1525957 - RNA, 19 nt, Artificial Sequence
  Description of Artificial Sequence: Synthetic oligonucleotide
  Antisense strand to SEQ ID NO: 1525956
uacuucagggccauuccca

SEQ ID NO: 1525958 - RNA, 19 nt, Artificial Sequence
  Description of Artificial Sequence: Synthetic oligonucleotide
  Sense strand starting at position 3935 of SEQ ID NO: 1244961
uggagacuccaguauagcu

SEQ ID NO: 1525959 - RNA, 19 nt, Artificial Sequence
  Description of Artificial Sequence: Synthetic oligonucleotide
  Antisense strand to SEQ ID NO: 1525958
agcuauacuggagucucca

SEQ ID NO: 1525960 - RNA, 19 nt, Artificial Sequence
  Description of Artificial Sequence: Synthetic oligonucleotide
  Sense strand starting at position 3969 of SEQ ID NO: 1244961
caguaauugcaaggugaaa

SEQ ID NO: 1525961 - RNA, 19 nt, Artificial Sequence
  Description of Artificial Sequence: Synthetic oligonucleotide
  Antisense strand to SEQ ID NO: 1525960
uuucaccuugcaauuacug

SEQ ID NO: 1525962 - RNA, 19 nt, Artificial Sequence
  Description of Artificial Sequence: Synthetic oligonucleotide
  Sense strand starting at position 916 of SEQ ID NO: 1244962
cgugucaccucaggaucau

SEQ ID NO: 1525963 - RNA, 19 nt, Artificial Sequence
  Description of Artificial Sequence: Synthetic oligonucleotide
  Antisense strand to SEQ ID NO: 1525962
augauccugaggugacacg

SEQ ID NO: 1525964 - RNA, 19 nt, Artificial Sequence
  Description of Artificial Sequence: Synthetic oligonucleotide
  Sense strand starting at position 922 of SEQ ID NO: 1244962
accucaggaucauuguauu

SEQ ID NO: 1525965 - RNA, 19 nt, Artificial Sequence
  Description of Artificial Sequence: Synthetic oligonucleotide
  Antisense strand to SEQ ID NO: 1525964
aauacaaugauccugaggu

SEQ ID NO: 1525966 - RNA, 19 nt, Artificial Sequence
  Description of Artificial Sequence: Synthetic oligonucleotide
  Sense strand starting at position 992 of SEQ ID NO: 1244962
ugccuuaaauacguuaaua

SEQ ID NO: 1525967 - RNA, 19 nt, Artificial Sequence
  Description of Artificial Sequence: Synthetic oligonucleotide
  Antisense strand to SEQ ID NO: 1525966
uauuaacguauuuaaggca

SEQ ID NO: 1525968 - RNA, 19 nt, Artificial Sequence
  Description of Artificial Sequence: Synthetic oligonucleotide
  Sense strand starting at position 1000 of SEQ ID NO: 1244962
auacguuaauauuccgcaa

SEQ ID NO: 1525969 - RNA, 19 nt, Artificial Sequence
  Description of Artificial Sequence: Synthetic oligonucleotide
  Antisense strand to SEQ ID NO: 1525968
uugcggaauauuaacguau

SEQ ID NO: 1525970 - RNA, 19 nt, Artificial Sequence
  Description of Artificial Sequence: Synthetic oligonucleotide
  Sense strand starting at position 1004 of SEQ ID NO: 1244962
guuaauauuccgcaagccu

SEQ ID NO: 1525971 - RNA, 19 nt, Artificial Sequence
  Description of Artificial Sequence: Synthetic oligonucleotide
  Antisense strand to SEQ ID NO: 1525970
aggcuugcggaauauuaac

SEQ ID NO: 1525972 - RNA, 19 nt, Artificial Sequence
  Description of Artificial Sequence: Synthetic oligonucleotide
  Sense strand starting at position 1039 of SEQ ID NO: 1244962
ggcuaagucacuuaauacg

SEQ ID NO: 1525973 - RNA, 19 nt, Artificial Sequence
  Description of Artificial Sequence: Synthetic oligonucleotide
  Antisense strand to SEQ ID NO: 1525972
cguauuaagugacuuagcc

SEQ ID NO: 1525974 - RNA, 19 nt, Artificial Sequence
  Description of Artificial Sequence: Synthetic oligonucleotide
  Sense strand starting at position 1056 of SEQ ID NO: 1244962
cgaaauucgucauucaagg

SEQ ID NO: 1525975 - RNA, 19 nt, Artificial Sequence
  Description of Artificial Sequence: Synthetic oligonucleotide
  Antisense strand to SEQ ID NO: 1525974
ccuugaaugacgaauuucg

SEQ ID NO: 1525976 - RNA, 19 nt, Artificial Sequence
  Description of Artificial Sequence: Synthetic oligonucleotide
  Sense strand starting at position 2107 of SEQ ID NO: 1244962
cgccgagguugcuaaguaa

SEQ ID NO: 1525977 - RNA, 19 nt, Artificial Sequence
  Description of Artificial Sequence: Synthetic oligonucleotide
  Antisense strand to SEQ ID NO: 1525976
uuacuuagcaaccucggcg

SEQ ID NO: 1525978 - RNA, 19 nt, Artificial Sequence
  Description of Artificial Sequence: Synthetic oligonucleotide
  Sense strand starting at position 2165 of SEQ ID NO: 1244962
gaggguauuuccggcggga

SEQ ID NO: 1525979 - RNA, 19 nt, Artificial Sequence
  Description of Artificial Sequence: Synthetic oligonucleotide
  Antisense strand to SEQ ID NO: 1525978
ucccgccggaaauacccuc

SEQ ID NO: 1525980 - RNA, 19 nt, Artificial Sequence
  Description of Artificial Sequence: Synthetic oligonucleotide
  Sense strand starting at position 2508 of SEQ ID NO: 1244962
cgagacaccugauggugau

SEQ ID NO: 1525981 - RNA, 19 nt, Artificial Sequence
  Description of Artificial Sequence: Synthetic oligonucleotide
  Antisense strand to SEQ ID NO: 1525980
aucaccaucaggugucucg

SEQ ID NO: 1525982 - RNA, 19 nt, Artificial Sequence
  Description of Artificial Sequence: Synthetic oligonucleotide
  Sense strand starting at position 2509 of SEQ ID NO: 1244962
gagacaccugauggugauu

SEQ ID NO: 1525983 - RNA, 19 nt, Artificial Sequence
  Description of Artificial Sequence: Synthetic oligonucleotide
  Antisense strand to SEQ ID NO: 1525982
aaucaccaucaggugucuc

SEQ ID NO: 1525984 - RNA, 19 nt, Artificial Sequence
  Description of Artificial Sequence: Synthetic oligonucleotide
  Sense strand starting at position 2514 of SEQ ID NO: 1244962
accugauggugauugugaa

SEQ ID NO: 1525985 - RNA, 19 nt, Artificial Sequence
  Description of Artificial Sequence: Synthetic oligonucleotide
  Antisense strand to SEQ ID NO: 1525984
uucacaaucaccaucaggu

SEQ ID NO: 1525986 - RNA, 19 nt, Artificial Sequence
  Description of Artificial Sequence: Synthetic oligonucleotide
  Sense strand starting at position 2522 of SEQ ID NO: 1244962
gugauugugaagcacaauu

SEQ ID NO: 1525987 - RNA, 19 nt, Artificial Sequence
  Description of Artificial Sequence: Synthetic oligonucleotide
  Antisense strand to SEQ ID NO: 1525986
aauugugcuucacaaucac

SEQ ID NO: 1525988 - RNA, 19 nt, Artificial Sequence
  Description of Artificial Sequence: Synthetic oligonucleotide
  Sense strand starting at position 2790 of SEQ ID NO: 1244962
auugcagugggccgagaau

SEQ ID NO: 1525989 - RNA, 19 nt, Artificial Sequence
  Description of Artificial Sequence: Synthetic oligonucleotide
  Antisense strand to SEQ ID NO: 1525988
auucucggcccacugcaau

SEQ ID NO: 1525990 - RNA, 19 nt, Artificial Sequence
  Description of Artificial Sequence: Synthetic oligonucleotide
  Sense strand starting at position 3369 of SEQ ID NO: 1244962
guuguuagaucagagucuu

SEQ ID NO: 1525991 - RNA, 19 nt, Artificial Sequence
  Description of Artificial Sequence: Synthetic oligonucleotide
  Antisense strand to SEQ ID NO: 1525990
aagacucugaucuaacaac

SEQ ID NO: 1525992 - RNA, 19 nt, Artificial Sequence
  Description of Artificial Sequence: Synthetic oligonucleotide
  Sense strand starting at position 3375 of SEQ ID NO: 1244962
agaucagagucuugcuaug

SEQ ID NO: 1525993 - RNA, 19 nt, Artificial Sequence
  Description of Artificial Sequence: Synthetic oligonucleotide
  Antisense strand to SEQ ID NO: 1525992
cauagcaagacucugaucu

SEQ ID NO: 1525994 - RNA, 19 nt, Artificial Sequence
  Description of Artificial Sequence: Synthetic oligonucleotide
  Sense strand starting at position 3377 of SEQ ID NO: 1244962
aucagagucuugcuauguu

SEQ ID NO: 1525995 - RNA, 19 nt, Artificial Sequence
  Description of Artificial Sequence: Synthetic oligonucleotide
  Antisense strand to SEQ ID NO: 1525994
aacauagcaagacucugau

SEQ ID NO: 1525996 - RNA, 19 nt, Artificial Sequence
  Description of Artificial Sequence: Synthetic oligonucleotide
  Sense strand starting at position 3548 of SEQ ID NO: 1244962
augcuucuguagucagagu

SEQ ID NO: 1525997 - RNA, 19 nt, Artificial Sequence
  Description of Artificial Sequence: Synthetic oligonucleotide
  Antisense strand to SEQ ID NO: 1525996
acucugacuacagaagcau

SEQ ID NO: 1525998 - RNA, 19 nt, Artificial Sequence
  Description of Artificial Sequence: Synthetic oligonucleotide
  Sense strand starting at position 3557 of SEQ ID NO: 1244962
uagucagagugcucuuagu

SEQ ID NO: 1525999 - RNA, 19 nt, Artificial Sequence
  Description of Artificial Sequence: Synthetic oligonucleotide
  Antisense strand to SEQ ID NO: 1525998
acuaagagcacucugacua

SEQ ID NO: 1526000 - RNA, 19 nt, Artificial Sequence
  Description of Artificial Sequence: Synthetic oligonucleotide
  Sense strand starting at position 3563 of SEQ ID NO: 1244962
gagugcucuuaguugcauu

SEQ ID NO: 1526001 - RNA, 19 nt, Artificial Sequence
  Description of Artificial Sequence: Synthetic oligonucleotide
  Antisense strand to SEQ ID NO: 1526000
aaugcaacuaagagcacuc

SEQ ID NO: 1526002 - RNA, 19 nt, Artificial Sequence
  Description of Artificial Sequence: Synthetic oligonucleotide
  Sense strand starting at position 3571 of SEQ ID NO: 1244962
uuaguugcauugucuuaau

SEQ ID NO: 1526003 - RNA, 19 nt, Artificial Sequence
  Description of Artificial Sequence: Synthetic oligonucleotide
  Antisense strand to SEQ ID NO: 1526002
auuaagacaaugcaacuaa

SEQ ID NO: 1526004 - RNA, 19 nt, Artificial Sequence
  Description of Artificial Sequence: Synthetic oligonucleotide
  Sense strand starting at position 3574 of SEQ ID NO: 1244962
guugcauugucuuaauccu

SEQ ID NO: 1526005 - RNA, 19 nt, Artificial Sequence
  Description of Artificial Sequence: Synthetic oligonucleotide
  Antisense strand to SEQ ID NO: 1526004
aggauuaagacaaugcaac

SEQ ID NO: 1526006 - RNA, 19 nt, Artificial Sequence
  Description of Artificial Sequence: Synthetic oligonucleotide
  Sense strand starting at position 3602 of SEQ ID NO: 1244962
ccgagaacagucuguaaau

SEQ ID NO: 1526007 - RNA, 19 nt, Artificial Sequence
  Description of Artificial Sequence: Synthetic oligonucleotide
  Antisense strand to SEQ ID NO: 1526006
auuuacagacuguucucgg

SEQ ID NO: 1526008 - RNA, 19 nt, Artificial Sequence
  Description of Artificial Sequence: Synthetic oligonucleotide
  Sense strand starting at position 3603 of SEQ ID NO: 1244962
cgagaacagucuguaaauc

SEQ ID NO: 1526009 - RNA, 19 nt, Artificial Sequence
  Description of Artificial Sequence: Synthetic oligonucleotide
  Antisense strand to SEQ ID NO: 1526008
gauuuacagacuguucucg

SEQ ID NO: 1526010 - RNA, 19 nt, Artificial Sequence
  Description of Artificial Sequence: Synthetic oligonucleotide
  Sense strand starting at position 3612 of SEQ ID NO: 1244962
ucuguaaaucgggaguuca

SEQ ID NO: 1526011 - RNA, 19 nt, Artificial Sequence
  Description of Artificial Sequence: Synthetic oligonucleotide
  Antisense strand to SEQ ID NO: 1526010
ugaacucccgauuuacaga

SEQ ID NO: 1526012 - RNA, 19 nt, Artificial Sequence
  Description of Artificial Sequence: Synthetic oligonucleotide
  Sense strand starting at position 3652 of SEQ ID NO: 1244962
ccggaaaccuguugcugaa

SEQ ID NO: 1526013 - RNA, 19 nt, Artificial Sequence
  Description of Artificial Sequence: Synthetic oligonucleotide
  Antisense strand to SEQ ID NO: 1526012
uucagcaacagguuuccgg

SEQ ID NO: 1526014 - RNA, 19 nt, Artificial Sequence
  Description of Artificial Sequence: Synthetic oligonucleotide
  Sense strand starting at position 3779 of SEQ ID NO: 1244962
ucuccaaacugguaggaaa

SEQ ID NO: 1526015 - RNA, 19 nt, Artificial Sequence
  Description of Artificial Sequence: Synthetic oligonucleotide
  Antisense strand to SEQ ID NO: 1526014
uuuccuaccaguuuggaga

SEQ ID NO: 1526016 - RNA, 19 nt, Artificial Sequence
  Description of Artificial Sequence: Synthetic oligonucleotide
  Sense strand starting at position 3881 of SEQ ID NO: 1244962
ugacgugcuuguugugcaa

SEQ ID NO: 1526017 - RNA, 19 nt, Artificial Sequence
  Description of Artificial Sequence: Synthetic oligonucleotide
  Antisense strand to SEQ ID NO: 1526016
uugcacaacaagcacguca

SEQ ID NO: 1526018 - RNA, 19 nt, Artificial Sequence
  Description of Artificial Sequence: Synthetic oligonucleotide
  Sense strand starting at position 3887 of SEQ ID NO: 1244962
gcuuguugugcaaggguga

SEQ ID NO: 1526019 - RNA, 19 nt, Artificial Sequence
  Description of Artificial Sequence: Synthetic oligonucleotide
  Antisense strand to SEQ ID NO: 1526018
ucacccuugcacaacaagc

SEQ ID NO: 1526020 - RNA, 19 nt, Artificial Sequence
  Description of Artificial Sequence: Synthetic oligonucleotide
  Sense strand starting at position 3900 of SEQ ID NO: 1244962
gggugagguuaaccagcua

SEQ ID NO: 1526021 - RNA, 19 nt, Artificial Sequence
  Description of Artificial Sequence: Synthetic oligonucleotide
  Antisense strand to SEQ ID NO: 1526020
uagcugguuaaccucaccc

SEQ ID NO: 1526022 - RNA, 19 nt, Artificial Sequence
  Description of Artificial Sequence: Synthetic oligonucleotide
  Sense strand starting at position 23 of SEQ ID NO: 1244963
acugaaagcaguuacguua

SEQ ID NO: 1526023 - RNA, 19 nt, Artificial Sequence
  Description of Artificial Sequence: Synthetic oligonucleotide
  Antisense strand to SEQ ID NO: 1526022
uaacguaacugcuuucagu

SEQ ID NO: 1526024 - RNA, 19 nt, Artificial Sequence
  Description of Artificial Sequence: Synthetic oligonucleotide
  Sense strand starting at position 78 of SEQ ID NO: 1244963
uccagcaauccuugauuag

SEQ ID NO: 1526025 - RNA, 19 nt, Artificial Sequence
  Description of Artificial Sequence: Synthetic oligonucleotide
  Antisense strand to SEQ ID NO: 1526024
cuaaucaaggauugcugga

SEQ ID NO: 1526026 - RNA, 19 nt, Artificial Sequence
  Description of Artificial Sequence: Synthetic oligonucleotide
  Sense strand starting at position 85 of SEQ ID NO: 1244963
auccuugauuaggucucaa

SEQ ID NO: 1526027 - RNA, 19 nt, Artificial Sequence
  Description of Artificial Sequence: Synthetic oligonucleotide
  Antisense strand to SEQ ID NO: 1526026
uugagaccuaaucaaggau

SEQ ID NO: 1526028 - RNA, 19 nt, Artificial Sequence
  Description of Artificial Sequence: Synthetic oligonucleotide
  Sense strand starting at position 161 of SEQ ID NO: 1244963
gaaugauagugagcuguca

SEQ ID NO: 1526029 - RNA, 19 nt, Artificial Sequence
  Description of Artificial Sequence: Synthetic oligonucleotide
  Antisense strand to SEQ ID NO: 1526028
ugacagcucacuaucauuc

SEQ ID NO: 1526030 - RNA, 19 nt, Artificial Sequence
  Description of Artificial Sequence: Synthetic oligonucleotide
  Sense strand starting at position 163 of SEQ ID NO: 1244963
augauagugagcugucauc

SEQ ID NO: 1526031 - RNA, 19 nt, Artificial Sequence
  Description of Artificial Sequence: Synthetic oligonucleotide
  Antisense strand to SEQ ID NO: 1526030
gaugacagcucacuaucau

SEQ ID NO: 1526032 - RNA, 19 nt, Artificial Sequence
  Description of Artificial Sequence: Synthetic oligonucleotide
  Sense strand starting at position 176 of SEQ ID NO: 1244963
gucaucgugccacuguaua

SEQ ID NO: 1526033 - RNA, 19 nt, Artificial Sequence
  Description of Artificial Sequence: Synthetic oligonucleotide
  Antisense strand to SEQ ID NO: 1526032
uauacaguggcacgaugac

SEQ ID NO: 1526034 - RNA, 19 nt, Artificial Sequence
  Description of Artificial Sequence: Synthetic oligonucleotide
  Sense strand starting at position 440 of SEQ ID NO: 1244963
caggguggucuccauaucu

SEQ ID NO: 1526035 - RNA, 19 nt, Artificial Sequence
  Description of Artificial Sequence: Synthetic oligonucleotide
  Antisense strand to SEQ ID NO: 1526034
agauauggagaccacccug

SEQ ID NO: 1526036 - RNA, 19 nt, Artificial Sequence
  Description of Artificial Sequence: Synthetic oligonucleotide
  Sense strand starting at position 611 of SEQ ID NO: 1244963
gugacuuaacuuugagcac

SEQ ID NO: 1526037 - RNA, 19 nt, Artificial Sequence
  Description of Artificial Sequence: Synthetic oligonucleotide
  Antisense strand to SEQ ID NO: 1526036
gugcucaaaguuaagucac

SEQ ID NO: 1526038 - RNA, 19 nt, Artificial Sequence
  Description of Artificial Sequence: Synthetic oligonucleotide
  Sense strand starting at position 612 of SEQ ID NO: 1244963
ugacuuaacuuugagcaca

SEQ ID NO: 1526039 - RNA, 19 nt, Artificial Sequence
  Description of Artificial Sequence: Synthetic oligonucleotide
  Antisense strand to SEQ ID NO: 1526038
ugugcucaaaguuaaguca

SEQ ID NO: 1526040 - RNA, 19 nt, Artificial Sequence
  Description of Artificial Sequence: Synthetic oligonucleotide
  Sense strand starting at position 1588 of SEQ ID NO: 1244963
cgugucaccucaggaucau

SEQ ID NO: 1526041 - RNA, 19 nt, Artificial Sequence
  Description of Artificial Sequence: Synthetic oligonucleotide
  Antisense strand to SEQ ID NO: 1526040
augauccugaggugacacg

SEQ ID NO: 1526042 - RNA, 19 nt, Artificial Sequence
  Description of Artificial Sequence: Synthetic oligonucleotide
  Sense strand starting at position 1594 of SEQ ID NO: 1244963
accucaggaucauuguauu

SEQ ID NO: 1526043 - RNA, 19 nt, Artificial Sequence
  Description of Artificial Sequence: Synthetic oligonucleotide
  Antisense strand to SEQ ID NO: 1526042
aauacaaugauccugaggu

SEQ ID NO: 1526044 - RNA, 19 nt, Artificial Sequence
  Description of Artificial Sequence: Synthetic oligonucleotide
  Sense strand starting at position 1664 of SEQ ID NO: 1244963
ugccuuaaauacguuaaua

SEQ ID NO: 1526045 - RNA, 19 nt, Artificial Sequence
  Description of Artificial Sequence: Synthetic oligonucleotide
  Antisense strand to SEQ ID NO: 1526044
uauuaacguauuuaaggca

SEQ ID NO: 1526046 - RNA, 19 nt, Artificial Sequence
  Description of Artificial Sequence: Synthetic oligonucleotide
  Sense strand starting at position 1672 of SEQ ID NO: 1244963
auacguuaauauuccgcaa

SEQ ID NO: 1526047 - RNA, 19 nt, Artificial Sequence
  Description of Artificial Sequence: Synthetic oligonucleotide
  Antisense strand to SEQ ID NO: 1526046
uugcggaauauuaacguau

SEQ ID NO: 1526048 - RNA, 19 nt, Artificial Sequence
  Description of Artificial Sequence: Synthetic oligonucleotide
  Sense strand starting at position 1676 of SEQ ID NO: 1244963
guuaauauuccgcaagccu

SEQ ID NO: 1526049 - RNA, 19 nt, Artificial Sequence
  Description of Artificial Sequence: Synthetic oligonucleotide
  Antisense strand to SEQ ID NO: 1526048
aggcuugcggaauauuaac

SEQ ID NO: 1526050 - RNA, 19 nt, Artificial Sequence
  Description of Artificial Sequence: Synthetic oligonucleotide
  Sense strand starting at position 1711 of SEQ ID NO: 1244963
ggcuaagucacuuaauacg

SEQ ID NO: 1526051 - RNA, 19 nt, Artificial Sequence
  Description of Artificial Sequence: Synthetic oligonucleotide
  Antisense strand to SEQ ID NO: 1526050
cguauuaagugacuuagcc

SEQ ID NO: 1526052 - RNA, 19 nt, Artificial Sequence
  Description of Artificial Sequence: Synthetic oligonucleotide
  Sense strand starting at position 1728 of SEQ ID NO: 1244963
cgaaauucgucauucaagg

SEQ ID NO: 1526053 - RNA, 19 nt, Artificial Sequence
  Description of Artificial Sequence: Synthetic oligonucleotide
  Antisense strand to SEQ ID NO: 1526052
ccuugaaugacgaauuucg

SEQ ID NO: 1526054 - RNA, 19 nt, Artificial Sequence
  Description of Artificial Sequence: Synthetic oligonucleotide
  Sense strand starting at position 2779 of SEQ ID NO: 1244963
cgccgagguugcuaaguaa

SEQ ID NO: 1526055 - RNA, 19 nt, Artificial Sequence
  Description of Artificial Sequence: Synthetic oligonucleotide
  Antisense strand to SEQ ID NO: 1526054
uuacuuagcaaccucggcg

SEQ ID NO: 1526056 - RNA, 19 nt, Artificial Sequence
  Description of Artificial Sequence: Synthetic oligonucleotide
  Sense strand starting at position 2837 of SEQ ID NO: 1244963
gaggguauuuccggcggga

SEQ ID NO: 1526057 - RNA, 19 nt, Artificial Sequence
  Description of Artificial Sequence: Synthetic oligonucleotide
  Antisense strand to SEQ ID NO: 1526056
ucccgccggaaauacccuc

SEQ ID NO: 1526058 - RNA, 19 nt, Artificial Sequence
  Description of Artificial Sequence: Synthetic oligonucleotide
  Sense strand starting at position 3180 of SEQ ID NO: 1244963
cgagacaccugauggugau

SEQ ID NO: 1526059 - RNA, 19 nt, Artificial Sequence
  Description of Artificial Sequence: Synthetic oligonucleotide
  Antisense strand to SEQ ID NO: 1526058
aucaccaucaggugucucg

SEQ ID NO: 1526060 - RNA, 19 nt, Artificial Sequence
  Description of Artificial Sequence: Synthetic oligonucleotide
  Sense strand starting at position 3181 of SEQ ID NO: 1244963
gagacaccugauggugauu

SEQ ID NO: 1526061 - RNA, 19 nt, Artificial Sequence
  Description of Artificial Sequence: Synthetic oligonucleotide
  Antisense strand to SEQ ID NO: 1526060
aaucaccaucaggugucuc

SEQ ID NO: 1526062 - RNA, 19 nt, Artificial Sequence
  Description of Artificial Sequence: Synthetic oligonucleotide
  Sense strand starting at position 3186 of SEQ ID NO: 1244963
accugauggugauugugaa

SEQ ID NO: 1526063 - RNA, 19 nt, Artificial Sequence
  Description of Artificial Sequence: Synthetic oligonucleotide
  Antisense strand to SEQ ID NO: 1526062
uucacaaucaccaucaggu

SEQ ID NO: 1526064 - RNA, 19 nt, Artificial Sequence
  Description of Artificial Sequence: Synthetic oligonucleotide
  Sense strand starting at position 3194 of SEQ ID NO: 1244963
gugauugugaagcacaauu

SEQ ID NO: 1526065 - RNA, 19 nt, Artificial Sequence
  Description of Artificial Sequence: Synthetic oligonucleotide
  Antisense strand to SEQ ID NO: 1526064
aauugugcuucacaaucac

SEQ ID NO: 1526066 - RNA, 19 nt, Artificial Sequence
  Description of Artificial Sequence: Synthetic oligonucleotide
  Sense strand starting at position 3462 of SEQ ID NO: 1244963
auugcagugggccgagaau

SEQ ID NO: 1526067 - RNA, 19 nt, Artificial Sequence
  Description of Artificial Sequence: Synthetic oligonucleotide
  Antisense strand to SEQ ID NO: 1526066
auucucggcccacugcaau

SEQ ID NO: 1526068 - RNA, 19 nt, Artificial Sequence
  Description of Artificial Sequence: Synthetic oligonucleotide
  Sense strand starting at position 37 of SEQ ID NO: 1244964
gaaugauagugagcuguca

SEQ ID NO: 1526069 - RNA, 19 nt, Artificial Sequence
  Description of Artificial Sequence: Synthetic oligonucleotide
  Antisense strand to SEQ ID NO: 1526068
ugacagcucacuaucauuc

SEQ ID NO: 1526070 - RNA, 19 nt, Artificial Sequence
  Description of Artificial Sequence: Synthetic oligonucleotide
  Sense strand starting at position 39 of SEQ ID NO: 1244964
augauagugagcugucauc

SEQ ID NO: 1526071 - RNA, 19 nt, Artificial Sequence
  Description of Artificial Sequence: Synthetic oligonucleotide
  Antisense strand to SEQ ID NO: 1526070
gaugacagcucacuaucau

SEQ ID NO: 1526072 - RNA, 19 nt, Artificial Sequence
  Description of Artificial Sequence: Synthetic oligonucleotide
  Sense strand starting at position 52 of SEQ ID NO: 1244964
gucaucgugccacuguaua

SEQ ID NO: 1526073 - RNA, 19 nt, Artificial Sequence
  Description of Artificial Sequence: Synthetic oligonucleotide
  Antisense strand to SEQ ID NO: 1526072
uauacaguggcacgaugac

SEQ ID NO: 1526074 - RNA, 19 nt, Artificial Sequence
  Description of Artificial Sequence: Synthetic oligonucleotide
  Sense strand starting at position 316 of SEQ ID NO: 1244964
caggguggucuccauaucu

SEQ ID NO: 1526075 - RNA, 19 nt, Artificial Sequence
  Description of Artificial Sequence: Synthetic oligonucleotide
  Antisense strand to SEQ ID NO: 1526074
agauauggagaccacccug

SEQ ID NO: 1526076 - RNA, 19 nt, Artificial Sequence
  Description of Artificial Sequence: Synthetic oligonucleotide
  Sense strand starting at position 487 of SEQ ID NO: 1244964
gugacuuaacuuugagcac

SEQ ID NO: 1526077 - RNA, 19 nt, Artificial Sequence
  Description of Artificial Sequence: Synthetic oligonucleotide
  Antisense strand to SEQ ID NO: 1526076
gugcucaaaguuaagucac

SEQ ID NO: 1526078 - RNA, 19 nt, Artificial Sequence
  Description of Artificial Sequence: Synthetic oligonucleotide
  Sense strand starting at position 488 of SEQ ID NO: 1244964
ugacuuaacuuugagcaca

SEQ ID NO: 1526079 - RNA, 19 nt, Artificial Sequence
  Description of Artificial Sequence: Synthetic oligonucleotide
  Antisense strand to SEQ ID NO: 1526078
ugugcucaaaguuaaguca

SEQ ID NO: 1526080 - RNA, 19 nt, Artificial Sequence
  Description of Artificial Sequence: Synthetic oligonucleotide
  Sense strand starting at position 1464 of SEQ ID NO: 1244964
cgugucaccucaggaucau

SEQ ID NO: 1526081 - RNA, 19 nt, Artificial Sequence
  Description of Artificial Sequence: Synthetic oligonucleotide
  Antisense strand to SEQ ID NO: 1526080
augauccugaggugacacg

SEQ ID NO: 1526082 - RNA, 19 nt, Artificial Sequence
  Description of Artificial Sequence: Synthetic oligonucleotide
  Sense strand starting at position 1470 of SEQ ID NO: 1244964
accucaggaucauuguauu

SEQ ID NO: 1526083 - RNA, 19 nt, Artificial Sequence
  Description of Artificial Sequence: Synthetic oligonucleotide
  Antisense strand to SEQ ID NO: 1526082
aauacaaugauccugaggu

SEQ ID NO: 1526084 - RNA, 19 nt, Artificial Sequence
  Description of Artificial Sequence: Synthetic oligonucleotide
  Sense strand starting at position 1540 of SEQ ID NO: 1244964
ugccuuaaauacguuaaua

SEQ ID NO: 1526085 - RNA, 19 nt, Artificial Sequence
  Description of Artificial Sequence: Synthetic oligonucleotide
  Antisense strand to SEQ ID NO: 1526084
uauuaacguauuuaaggca

SEQ ID NO: 1526086 - RNA, 19 nt, Artificial Sequence
  Description of Artificial Sequence: Synthetic oligonucleotide
  Sense strand starting at position 1548 of SEQ ID NO: 1244964
auacguuaauauuccgcaa

SEQ ID NO: 1526087 - RNA, 19 nt, Artificial Sequence
  Description of Artificial Sequence: Synthetic oligonucleotide
  Antisense strand to SEQ ID NO: 1526086
uugcggaauauuaacguau

SEQ ID NO: 1526088 - RNA, 19 nt, Artificial Sequence
  Description of Artificial Sequence: Synthetic oligonucleotide
  Sense strand starting at position 1552 of SEQ ID NO: 1244964
guuaauauuccgcaagccu

SEQ ID NO: 1526089 - RNA, 19 nt, Artificial Sequence
  Description of Artificial Sequence: Synthetic oligonucleotide
  Antisense strand to SEQ ID NO: 1526088
aggcuugcggaauauuaac

SEQ ID NO: 1526090 - RNA, 19 nt, Artificial Sequence
  Description of Artificial Sequence: Synthetic oligonucleotide
  Sense strand starting at position 1587 of SEQ ID NO: 1244964
ggcuaagucacuuaauacg

SEQ ID NO: 1526091 - RNA, 19 nt, Artificial Sequence
  Description of Artificial Sequence: Synthetic oligonucleotide
  Antisense strand to SEQ ID NO: 1526090
cguauuaagugacuuagcc

SEQ ID NO: 1526092 - RNA, 19 nt, Artificial Sequence
  Description of Artificial Sequence: Synthetic oligonucleotide
  Sense strand starting at position 1604 of SEQ ID NO: 1244964
cgaaauucgucauucaagg

SEQ ID NO: 1526093 - RNA, 19 nt, Artificial Sequence
  Description of Artificial Sequence: Synthetic oligonucleotide
  Antisense strand to SEQ ID NO: 1526092
ccuugaaugacgaauuucg

SEQ ID NO: 1526094 - RNA, 19 nt, Artificial Sequence
  Description of Artificial Sequence: Synthetic oligonucleotide
  Sense strand starting at position 2655 of SEQ ID NO: 1244964
cgccgagguugcuaaguaa

SEQ ID NO: 1526095 - RNA, 19 nt, Artificial Sequence
  Description of Artificial Sequence: Synthetic oligonucleotide
  Antisense strand to SEQ ID NO: 1526094
uuacuuagcaaccucggcg

SEQ ID NO: 1526096 - RNA, 19 nt, Artificial Sequence
  Description of Artificial Sequence: Synthetic oligonucleotide
  Sense strand starting at position 2713 of SEQ ID NO: 1244964
gaggguauuuccggcggga

SEQ ID NO: 1526097 - RNA, 19 nt, Artificial Sequence
  Description of Artificial Sequence: Synthetic oligonucleotide
  Antisense strand to SEQ ID NO: 1526096
ucccgccggaaauacccuc

SEQ ID NO: 1526098 - RNA, 19 nt, Artificial Sequence
  Description of Artificial Sequence: Synthetic oligonucleotide
  Sense strand starting at position 3056 of SEQ ID NO: 1244964
cgagacaccugauggugau

SEQ ID NO: 1526099 - RNA, 19 nt, Artificial Sequence
  Description of Artificial Sequence: Synthetic oligonucleotide
  Antisense strand to SEQ ID NO: 1526098
aucaccaucaggugucucg

SEQ ID NO: 1526100 - RNA, 19 nt, Artificial Sequence
  Description of Artificial Sequence: Synthetic oligonucleotide
  Sense strand starting at position 3057 of SEQ ID NO: 1244964
gagacaccugauggugauu

SEQ ID NO: 1526101 - RNA, 19 nt, Artificial Sequence
  Description of Artificial Sequence: Synthetic oligonucleotide
  Antisense strand to SEQ ID NO: 1526100
aaucaccaucaggugucuc

SEQ ID NO: 1526102 - RNA, 19 nt, Artificial Sequence
  Description of Artificial Sequence: Synthetic oligonucleotide
  Sense strand starting at position 3062 of SEQ ID NO: 1244964
accugauggugauugugaa

SEQ ID NO: 1526103 - RNA, 19 nt, Artificial Sequence
  Description of Artificial Sequence: Synthetic oligonucleotide
  Antisense strand to SEQ ID NO: 1526102
uucacaaucaccaucaggu

SEQ ID NO: 1526104 - RNA, 19 nt, Artificial Sequence
  Description of Artificial Sequence: Synthetic oligonucleotide
  Sense strand starting at position 3070 of SEQ ID NO: 1244964
gugauugugaagcacaauu

SEQ ID NO: 1526105 - RNA, 19 nt, Artificial Sequence
  Description of Artificial Sequence: Synthetic oligonucleotide
  Antisense strand to SEQ ID NO: 1526104
aauugugcuucacaaucac

SEQ ID NO: 1526106 - RNA, 19 nt, Artificial Sequence
  Description of Artificial Sequence: Synthetic oligonucleotide
  Sense strand starting at position 3338 of SEQ ID NO: 1244964
auugcagugggccgagaau

SEQ ID NO: 1526107 - RNA, 19 nt, Artificial Sequence
  Description of Artificial Sequence: Synthetic oligonucleotide
  Antisense strand to SEQ ID NO: 1526106
auucucggcccacugcaau

SEQ ID NO: 1526108 - RNA, 19 nt, Artificial Sequence
  Description of Artificial Sequence: Synthetic oligonucleotide
  Sense strand starting at position 3917 of SEQ ID NO: 1244964
guuguuagaucagagucuu

SEQ ID NO: 1526109 - RNA, 19 nt, Artificial Sequence
  Description of Artificial Sequence: Synthetic oligonucleotide
  Antisense strand to SEQ ID NO: 1526108
aagacucugaucuaacaac

SEQ ID NO: 1526110 - RNA, 19 nt, Artificial Sequence
  Description of Artificial Sequence: Synthetic oligonucleotide
  Sense strand starting at position 3923 of SEQ ID NO: 1244964
agaucagagucuugcuaug

SEQ ID NO: 1526111 - RNA, 19 nt, Artificial Sequence
  Description of Artificial Sequence: Synthetic oligonucleotide
  Antisense strand to SEQ ID NO: 1526110
cauagcaagacucugaucu

SEQ ID NO: 1526112 - RNA, 19 nt, Artificial Sequence
  Description of Artificial Sequence: Synthetic oligonucleotide
  Sense strand starting at position 3925 of SEQ ID NO: 1244964
aucagagucuugcuauguu

SEQ ID NO: 1526113 - RNA, 19 nt, Artificial Sequence
  Description of Artificial Sequence: Synthetic oligonucleotide
  Antisense strand to SEQ ID NO: 1526112
aacauagcaagacucugau

SEQ ID NO: 1526114 - RNA, 19 nt, Artificial Sequence
  Description of Artificial Sequence: Synthetic oligonucleotide
  Sense strand starting at position 1 of SEQ ID NO: 1244965
gucaucgugccacuguaua

SEQ ID NO: 1526115 - RNA, 19 nt, Artificial Sequence
  Description of Artificial Sequence: Synthetic oligonucleotide
  Antisense strand to SEQ ID NO: 1526114
uauacaguggcacgaugac

SEQ ID NO: 1526116 - RNA, 19 nt, Artificial Sequence
  Description of Artificial Sequence: Synthetic oligonucleotide
  Sense strand starting at position 265 of SEQ ID NO: 1244965
caggguggucuccauaucu

SEQ ID NO: 1526117 - RNA, 19 nt, Artificial Sequence
  Description of Artificial Sequence: Synthetic oligonucleotide
  Antisense strand to SEQ ID NO: 1526116
agauauggagaccacccug

SEQ ID NO: 1526118 - RNA, 19 nt, Artificial Sequence
  Description of Artificial Sequence: Synthetic oligonucleotide
  Sense strand starting at position 436 of SEQ ID NO: 1244965
gugacuuaacuuugagcac

SEQ ID NO: 1526119 - RNA, 19 nt, Artificial Sequence
  Description of Artificial Sequence: Synthetic oligonucleotide
  Antisense strand to SEQ ID NO: 1526118
gugcucaaaguuaagucac

SEQ ID NO: 1526120 - RNA, 19 nt, Artificial Sequence
  Description of Artificial Sequence: Synthetic oligonucleotide
  Sense strand starting at position 437 of SEQ ID NO: 1244965
ugacuuaacuuugagcaca

SEQ ID NO: 1526121 - RNA, 19 nt, Artificial Sequence
  Description of Artificial Sequence: Synthetic oligonucleotide
  Antisense strand to SEQ ID NO: 1526120
ugugcucaaaguuaaguca

SEQ ID NO: 1526122 - RNA, 19 nt, Artificial Sequence
  Description of Artificial Sequence: Synthetic oligonucleotide
  Sense strand starting at position 1413 of SEQ ID NO: 1244965
cgugucaccucaggaucau

SEQ ID NO: 1526123 - RNA, 19 nt, Artificial Sequence
  Description of Artificial Sequence: Synthetic oligonucleotide
  Antisense strand to SEQ ID NO: 1526122
augauccugaggugacacg

SEQ ID NO: 1526124 - RNA, 19 nt, Artificial Sequence
  Description of Artificial Sequence: Synthetic oligonucleotide
  Sense strand starting at position 1419 of SEQ ID NO: 1244965
accucaggaucauuguauu

SEQ ID NO: 1526125 - RNA, 19 nt, Artificial Sequence
  Description of Artificial Sequence: Synthetic oligonucleotide
  Antisense strand to SEQ ID NO: 1526124
aauacaaugauccugaggu

SEQ ID NO: 1526126 - RNA, 19 nt, Artificial Sequence
  Description of Artificial Sequence: Synthetic oligonucleotide
  Sense strand starting at position 1489 of SEQ ID NO: 1244965
ugccuuaaauacguuaaua

SEQ ID NO: 1526127 - RNA, 19 nt, Artificial Sequence
  Description of Artificial Sequence: Synthetic oligonucleotide
  Antisense strand to SEQ ID NO: 1526126
uauuaacguauuuaaggca

SEQ ID NO: 1526128 - RNA, 19 nt, Artificial Sequence
  Description of Artificial Sequence: Synthetic oligonucleotide
  Sense strand starting at position 1497 of SEQ ID NO: 1244965
auacguuaauauuccgcaa

SEQ ID NO: 1526129 - RNA, 19 nt, Artificial Sequence
  Description of Artificial Sequence: Synthetic oligonucleotide
  Antisense strand to SEQ ID NO: 1526128
uugcggaauauuaacguau

SEQ ID NO: 1526130 - RNA, 19 nt, Artificial Sequence
  Description of Artificial Sequence: Synthetic oligonucleotide
  Sense strand starting at position 1501 of SEQ ID NO: 1244965
guuaauauuccgcaagccu

SEQ ID NO: 1526131 - RNA, 19 nt, Artificial Sequence
  Description of Artificial Sequence: Synthetic oligonucleotide
  Antisense strand to SEQ ID NO: 1526130
aggcuugcggaauauuaac

SEQ ID NO: 1526132 - RNA, 19 nt, Artificial Sequence
  Description of Artificial Sequence: Synthetic oligonucleotide
  Sense strand starting at position 1536 of SEQ ID NO: 1244965
ggcuaagucacuuaauacg

SEQ ID NO: 1526133 - RNA, 19 nt, Artificial Sequence
  Description of Artificial Sequence: Synthetic oligonucleotide
  Antisense strand to SEQ ID NO: 1526132
cguauuaagugacuuagcc

SEQ ID NO: 1526134 - RNA, 19 nt, Artificial Sequence
  Description of Artificial Sequence: Synthetic oligonucleotide
  Sense strand starting at position 1553 of SEQ ID NO: 1244965
cgaaauucgucauucaagg

SEQ ID NO: 1526135 - RNA, 19 nt, Artificial Sequence
  Description of Artificial Sequence: Synthetic oligonucleotide
  Antisense strand to SEQ ID NO: 1526134
ccuugaaugacgaauuucg

SEQ ID NO: 1526136 - RNA, 19 nt, Artificial Sequence
  Description of Artificial Sequence: Synthetic oligonucleotide
  Sense strand starting at position 2604 of SEQ ID NO: 1244965
cgccgagguugcuaaguaa

SEQ ID NO: 1526137 - RNA, 19 nt, Artificial Sequence
  Description of Artificial Sequence: Synthetic oligonucleotide
  Antisense strand to SEQ ID NO: 1526136
uuacuuagcaaccucggcg

SEQ ID NO: 1526138 - RNA, 19 nt, Artificial Sequence
  Description of Artificial Sequence: Synthetic oligonucleotide
  Sense strand starting at position 2662 of SEQ ID NO: 1244965
gaggguauuuccggcggga

SEQ ID NO: 1526139 - RNA, 19 nt, Artificial Sequence
  Description of Artificial Sequence: Synthetic oligonucleotide
  Antisense strand to SEQ ID NO: 1526138
ucccgccggaaauacccuc

SEQ ID NO: 1526140 - RNA, 19 nt, Artificial Sequence
  Description of Artificial Sequence: Synthetic oligonucleotide
  Sense strand starting at position 3005 of SEQ ID NO: 1244965
cgagacaccugauggugau

SEQ ID NO: 1526141 - RNA, 19 nt, Artificial Sequence
  Description of Artificial Sequence: Synthetic oligonucleotide
  Antisense strand to SEQ ID NO: 1526140
aucaccaucaggugucucg

SEQ ID NO: 1526142 - RNA, 19 nt, Artificial Sequence
  Description of Artificial Sequence: Synthetic oligonucleotide
  Sense strand starting at position 3006 of SEQ ID NO: 1244965
gagacaccugauggugauu

SEQ ID NO: 1526143 - RNA, 19 nt, Artificial Sequence
  Description of Artificial Sequence: Synthetic oligonucleotide
  Antisense strand to SEQ ID NO: 1526142
aaucaccaucaggugucuc

SEQ ID NO: 1526144 - RNA, 19 nt, Artificial Sequence
  Description of Artificial Sequence: Synthetic oligonucleotide
  Sense strand starting at position 3011 of SEQ ID NO: 1244965
accugauggugauugugaa

SEQ ID NO: 1526145 - RNA, 19 nt, Artificial Sequence
  Description of Artificial Sequence: Synthetic oligonucleotide
  Antisense strand to SEQ ID NO: 1526144
uucacaaucaccaucaggu

SEQ ID NO: 1526146 - RNA, 19 nt, Artificial Sequence
  Description of Artificial Sequence: Synthetic oligonucleotide
  Sense strand starting at position 3019 of SEQ ID NO: 1244965
gugauugugaagcacaauu

SEQ ID NO: 1526147 - RNA, 19 nt, Artificial Sequence
  Description of Artificial Sequence: Synthetic oligonucleotide
  Antisense strand to SEQ ID NO: 1526146
aauugugcuucacaaucac

SEQ ID NO: 1526148 - RNA, 19 nt, Artificial Sequence
  Description of Artificial Sequence: Synthetic oligonucleotide
  Sense strand starting at position 3287 of SEQ ID NO: 1244965
auugcagugggccgagaau

SEQ ID NO: 1526149 - RNA, 19 nt, Artificial Sequence
  Description of Artificial Sequence: Synthetic oligonucleotide
  Antisense strand to SEQ ID NO: 1526148
auucucggcccacugcaau

SEQ ID NO: 1526150 - RNA, 19 nt, Artificial Sequence
  Description of Artificial Sequence: Synthetic oligonucleotide
  Sense strand starting at position 3866 of SEQ ID NO: 1244965
guuguuagaucagagucuu

SEQ ID NO: 1526151 - RNA, 19 nt, Artificial Sequence
  Description of Artificial Sequence: Synthetic oligonucleotide
  Antisense strand to SEQ ID NO: 1526150
aagacucugaucuaacaac

SEQ ID NO: 1526152 - RNA, 19 nt, Artificial Sequence
  Description of Artificial Sequence: Synthetic oligonucleotide
  Sense strand starting at position 3872 of SEQ ID NO: 1244965
agaucagagucuugcuaug

SEQ ID NO: 1526153 - RNA, 19 nt, Artificial Sequence
  Description of Artificial Sequence: Synthetic oligonucleotide
  Antisense strand to SEQ ID NO: 1526152
cauagcaagacucugaucu

SEQ ID NO: 1526154 - RNA, 19 nt, Artificial Sequence
  Description of Artificial Sequence: Synthetic oligonucleotide
  Sense strand starting at position 3874 of SEQ ID NO: 1244965
aucagagucuugcuauguu

SEQ ID NO: 1526155 - RNA, 19 nt, Artificial Sequence
  Description of Artificial Sequence: Synthetic oligonucleotide
  Antisense strand to SEQ ID NO: 1526154
aacauagcaagacucugau

SEQ ID NO: 1526156 - RNA, 19 nt, Artificial Sequence
  Description of Artificial Sequence: Synthetic oligonucleotide
  Sense strand starting at position 72 of SEQ ID NO: 1244966
caggguggucuccauaucu

SEQ ID NO: 1526157 - RNA, 19 nt, Artificial Sequence
  Description of Artificial Sequence: Synthetic oligonucleotide
  Antisense strand to SEQ ID NO: 1526156
agauauggagaccacccug

SEQ ID NO: 1526158 - RNA, 19 nt, Artificial Sequence
  Description of Artificial Sequence: Synthetic oligonucleotide
  Sense strand starting at position 243 of SEQ ID NO: 1244966
gugacuuaacuuugagcac

SEQ ID NO: 1526159 - RNA, 19 nt, Artificial Sequence
  Description of Artificial Sequence: Synthetic oligonucleotide
  Antisense strand to SEQ ID NO: 1526158
gugcucaaaguuaagucac

SEQ ID NO: 1526160 - RNA, 19 nt, Artificial Sequence
  Description of Artificial Sequence: Synthetic oligonucleotide
  Sense strand starting at position 244 of SEQ ID NO: 1244966
ugacuuaacuuugagcaca

SEQ ID NO: 1526161 - RNA, 19 nt, Artificial Sequence
  Description of Artificial Sequence: Synthetic oligonucleotide
  Antisense strand to SEQ ID NO: 1526160
ugugcucaaaguuaaguca

SEQ ID NO: 1526162 - RNA, 19 nt, Artificial Sequence
  Description of Artificial Sequence: Synthetic oligonucleotide
  Sense strand starting at position 1220 of SEQ ID NO: 1244966
cgugucaccucaggaucau

SEQ ID NO: 1526163 - RNA, 19 nt, Artificial Sequence
  Description of Artificial Sequence: Synthetic oligonucleotide
  Antisense strand to SEQ ID NO: 1526162
augauccugaggugacacg

SEQ ID NO: 1526164 - RNA, 19 nt, Artificial Sequence
  Description of Artificial Sequence: Synthetic oligonucleotide
  Sense strand starting at position 1226 of SEQ ID NO: 1244966
accucaggaucauuguauu

SEQ ID NO: 1526165 - RNA, 19 nt, Artificial Sequence
  Description of Artificial Sequence: Synthetic oligonucleotide
  Antisense strand to SEQ ID NO: 1526164
aauacaaugauccugaggu

SEQ ID NO: 1526166 - RNA, 19 nt, Artificial Sequence
  Description of Artificial Sequence: Synthetic oligonucleotide
  Sense strand starting at position 1296 of SEQ ID NO: 1244966
ugccuuaaauacguuaaua

SEQ ID NO: 1526167 - RNA, 19 nt, Artificial Sequence
  Description of Artificial Sequence: Synthetic oligonucleotide
  Antisense strand to SEQ ID NO: 1526166
uauuaacguauuuaaggca

SEQ ID NO: 1526168 - RNA, 19 nt, Artificial Sequence
  Description of Artificial Sequence: Synthetic oligonucleotide
  Sense strand starting at position 1304 of SEQ ID NO: 1244966
auacguuaauauuccgcaa

SEQ ID NO: 1526169 - RNA, 19 nt, Artificial Sequence
  Description of Artificial Sequence: Synthetic oligonucleotide
  Antisense strand to SEQ ID NO: 1526168
uugcggaauauuaacguau

SEQ ID NO: 1526170 - RNA, 19 nt, Artificial Sequence
  Description of Artificial Sequence: Synthetic oligonucleotide
  Sense strand starting at position 1308 of SEQ ID NO: 1244966
guuaauauuccgcaagccu

SEQ ID NO: 1526171 - RNA, 19 nt, Artificial Sequence
  Description of Artificial Sequence: Synthetic oligonucleotide
  Antisense strand to SEQ ID NO: 1526170
aggcuugcggaauauuaac

SEQ ID NO: 1526172 - RNA, 19 nt, Artificial Sequence
  Description of Artificial Sequence: Synthetic oligonucleotide
  Sense strand starting at position 1343 of SEQ ID NO: 1244966
ggcuaagucacuuaauacg

SEQ ID NO: 1526173 - RNA, 19 nt, Artificial Sequence
  Description of Artificial Sequence: Synthetic oligonucleotide
  Antisense strand to SEQ ID NO: 1526172
cguauuaagugacuuagcc

SEQ ID NO: 1526174 - RNA, 19 nt, Artificial Sequence
  Description of Artificial Sequence: Synthetic oligonucleotide
  Sense strand starting at position 1360 of SEQ ID NO: 1244966
cgaaauucgucauucaagg

SEQ ID NO: 1526175 - RNA, 19 nt, Artificial Sequence
  Description of Artificial Sequence: Synthetic oligonucleotide
  Antisense strand to SEQ ID NO: 1526174
ccuugaaugacgaauuucg

SEQ ID NO: 1526176 - RNA, 19 nt, Artificial Sequence
  Description of Artificial Sequence: Synthetic oligonucleotide
  Sense strand starting at position 2411 of SEQ ID NO: 1244966
cgccgagguugcuaaguaa

SEQ ID NO: 1526177 - RNA, 19 nt, Artificial Sequence
  Description of Artificial Sequence: Synthetic oligonucleotide
  Antisense strand to SEQ ID NO: 1526176
uuacuuagcaaccucggcg

SEQ ID NO: 1526178 - RNA, 19 nt, Artificial Sequence
  Description of Artificial Sequence: Synthetic oligonucleotide
  Sense strand starting at position 2469 of SEQ ID NO: 1244966
gaggguauuuccggcggga

SEQ ID NO: 1526179 - RNA, 19 nt, Artificial Sequence
  Description of Artificial Sequence: Synthetic oligonucleotide
  Antisense strand to SEQ ID NO: 1526178
ucccgccggaaauacccuc

SEQ ID NO: 1526180 - RNA, 19 nt, Artificial Sequence
  Description of Artificial Sequence: Synthetic oligonucleotide
  Sense strand starting at position 2812 of SEQ ID NO: 1244966
cgagacaccugauggugau

SEQ ID NO: 1526181 - RNA, 19 nt, Artificial Sequence
  Description of Artificial Sequence: Synthetic oligonucleotide
  Antisense strand to SEQ ID NO: 1526180
aucaccaucaggugucucg

SEQ ID NO: 1526182 - RNA, 19 nt, Artificial Sequence
  Description of Artificial Sequence: Synthetic oligonucleotide
  Sense strand starting at position 2813 of SEQ ID NO: 1244966
gagacaccugauggugauu

SEQ ID NO: 1526183 - RNA, 19 nt, Artificial Sequence
  Description of Artificial Sequence: Synthetic oligonucleotide
  Antisense strand to SEQ ID NO: 1526182
aaucaccaucaggugucuc

SEQ ID NO: 1526184 - RNA, 19 nt, Artificial Sequence
  Description of Artificial Sequence: Synthetic oligonucleotide
  Sense strand starting at position 2818 of SEQ ID NO: 1244966
accugauggugauugugaa

SEQ ID NO: 1526185 - RNA, 19 nt, Artificial Sequence
  Description of Artificial Sequence: Synthetic oligonucleotide
  Antisense strand to SEQ ID NO: 1526184
uucacaaucaccaucaggu

SEQ ID NO: 1526186 - RNA, 19 nt, Artificial Sequence
  Description of Artificial Sequence: Synthetic oligonucleotide
  Sense strand starting at position 2826 of SEQ ID NO: 1244966
gugauugugaagcacaauu

SEQ ID NO: 1526187 - RNA, 19 nt, Artificial Sequence
  Description of Artificial Sequence: Synthetic oligonucleotide
  Antisense strand to SEQ ID NO: 1526186
aauugugcuucacaaucac

SEQ ID NO: 1526188 - RNA, 19 nt, Artificial Sequence
  Description of Artificial Sequence: Synthetic oligonucleotide
  Sense strand starting at position 3094 of SEQ ID NO: 1244966
auugcagugggccgagaau

SEQ ID NO: 1526189 - RNA, 19 nt, Artificial Sequence
  Description of Artificial Sequence: Synthetic oligonucleotide
  Antisense strand to SEQ ID NO: 1526188
auucucggcccacugcaau

SEQ ID NO: 1526190 - RNA, 19 nt, Artificial Sequence
  Description of Artificial Sequence: Synthetic oligonucleotide
  Sense strand starting at position 3673 of SEQ ID NO: 1244966
guuguuagaucagagucuu

SEQ ID NO: 1526191 - RNA, 19 nt, Artificial Sequence
  Description of Artificial Sequence: Synthetic oligonucleotide
  Antisense strand to SEQ ID NO: 1526190
aagacucugaucuaacaac

SEQ ID NO: 1526192 - RNA, 19 nt, Artificial Sequence
  Description of Artificial Sequence: Synthetic oligonucleotide
  Sense strand starting at position 3679 of SEQ ID NO: 1244966
agaucagagucuugcuaug

SEQ ID NO: 1526193 - RNA, 19 nt, Artificial Sequence
  Description of Artificial Sequence: Synthetic oligonucleotide
  Antisense strand to SEQ ID NO: 1526192
cauagcaagacucugaucu

SEQ ID NO: 1526194 - RNA, 19 nt, Artificial Sequence
  Description of Artificial Sequence: Synthetic oligonucleotide
  Sense strand starting at position 3681 of SEQ ID NO: 1244966
aucagagucuugcuauguu

SEQ ID NO: 1526195 - RNA, 19 nt, Artificial Sequence
  Description of Artificial Sequence: Synthetic oligonucleotide
  Antisense strand to SEQ ID NO: 1526194
aacauagcaagacucugau

SEQ ID NO: 1526196 - RNA, 19 nt, Artificial Sequence
  Description of Artificial Sequence: Synthetic oligonucleotide
  Sense strand starting at position 3852 of SEQ ID NO: 1244966
augcuucuguagucagagu

SEQ ID NO: 1526197 - RNA, 19 nt, Artificial Sequence
  Description of Artificial Sequence: Synthetic oligonucleotide
  Antisense strand to SEQ ID NO: 1526196
acucugacuacagaagcau

SEQ ID NO: 1526198 - RNA, 19 nt, Artificial Sequence
  Description of Artificial Sequence: Synthetic oligonucleotide
  Sense strand starting at position 3861 of SEQ ID NO: 1244966
uagucagagugcucuuagu

SEQ ID NO: 1526199 - RNA, 19 nt, Artificial Sequence
  Description of Artificial Sequence: Synthetic oligonucleotide
  Antisense strand to SEQ ID NO: 1526198
acuaagagcacucugacua

SEQ ID NO: 1526200 - RNA, 19 nt, Artificial Sequence
  Description of Artificial Sequence: Synthetic oligonucleotide
  Sense strand starting at position 3867 of SEQ ID NO: 1244966
gagugcucuuaguugcauu

SEQ ID NO: 1526201 - RNA, 19 nt, Artificial Sequence
  Description of Artificial Sequence: Synthetic oligonucleotide
  Antisense strand to SEQ ID NO: 1526200
aaugcaacuaagagcacuc

SEQ ID NO: 1526202 - RNA, 19 nt, Artificial Sequence
  Description of Artificial Sequence: Synthetic oligonucleotide
  Sense strand starting at position 3875 of SEQ ID NO: 1244966
uuaguugcauugucuuaau

SEQ ID NO: 1526203 - RNA, 19 nt, Artificial Sequence
  Description of Artificial Sequence: Synthetic oligonucleotide
  Antisense strand to SEQ ID NO: 1526202
auuaagacaaugcaacuaa

SEQ ID NO: 1526204 - RNA, 19 nt, Artificial Sequence
  Description of Artificial Sequence: Synthetic oligonucleotide
  Sense strand starting at position 3878 of SEQ ID NO: 1244966
guugcauugucuuaauccu

SEQ ID NO: 1526205 - RNA, 19 nt, Artificial Sequence
  Description of Artificial Sequence: Synthetic oligonucleotide
  Antisense strand to SEQ ID NO: 1526204
aggauuaagacaaugcaac

SEQ ID NO: 1526206 - RNA, 19 nt, Artificial Sequence
  Description of Artificial Sequence: Synthetic oligonucleotide
  Sense strand starting at position 3906 of SEQ ID NO: 1244966
ccgagaacagucuguaaau

SEQ ID NO: 1526207 - RNA, 19 nt, Artificial Sequence
  Description of Artificial Sequence: Synthetic oligonucleotide
  Antisense strand to SEQ ID NO: 1526206
auuuacagacuguucucgg

SEQ ID NO: 1526208 - RNA, 19 nt, Artificial Sequence
  Description of Artificial Sequence: Synthetic oligonucleotide
  Sense strand starting at position 3907 of SEQ ID NO: 1244966
cgagaacagucuguaaauc

SEQ ID NO: 1526209 - RNA, 19 nt, Artificial Sequence
  Description of Artificial Sequence: Synthetic oligonucleotide
  Antisense strand to SEQ ID NO: 1526208
gauuuacagacuguucucg

SEQ ID NO: 1526210 - RNA, 19 nt, Artificial Sequence
  Description of Artificial Sequence: Synthetic oligonucleotide
  Sense strand starting at position 3916 of SEQ ID NO: 1244966
ucuguaaaucgggaguuca

SEQ ID NO: 1526211 - RNA, 19 nt, Artificial Sequence
  Description of Artificial Sequence: Synthetic oligonucleotide
  Antisense strand to SEQ ID NO: 1526210
ugaacucccgauuuacaga

SEQ ID NO: 1526212 - RNA, 19 nt, Artificial Sequence
  Description of Artificial Sequence: Synthetic oligonucleotide
  Sense strand starting at position 3956 of SEQ ID NO: 1244966
ccggaaaccuguugcugaa

SEQ ID NO: 1526213 - RNA, 19 nt, Artificial Sequence
  Description of Artificial Sequence: Synthetic oligonucleotide
  Antisense strand to SEQ ID NO: 1526212
uucagcaacagguuuccgg

SEQ ID NO: 1526214 - RNA, 19 nt, Artificial Sequence
  Description of Artificial Sequence: Synthetic oligonucleotide
  Sense strand starting at position 920 of SEQ ID NO: 1244967
cgugucaccucaggaucau

SEQ ID NO: 1526215 - RNA, 19 nt, Artificial Sequence
  Description of Artificial Sequence: Synthetic oligonucleotide
  Antisense strand to SEQ ID NO: 1526214
augauccugaggugacacg

SEQ ID NO: 1526216 - RNA, 19 nt, Artificial Sequence
  Description of Artificial Sequence: Synthetic oligonucleotide
  Sense strand starting at position 926 of SEQ ID NO: 1244967
accucaggaucauuguauu

SEQ ID NO: 1526217 - RNA, 19 nt, Artificial Sequence
  Description of Artificial Sequence: Synthetic oligonucleotide
  Antisense strand to SEQ ID NO: 1526216
aauacaaugauccugaggu

SEQ ID NO: 1526218 - RNA, 19 nt, Artificial Sequence
  Description of Artificial Sequence: Synthetic oligonucleotide
  Sense strand starting at position 996 of SEQ ID NO: 1244967
ugccuuaaauacguuaaua

SEQ ID NO: 1526219 - RNA, 19 nt, Artificial Sequence
  Description of Artificial Sequence: Synthetic oligonucleotide
  Antisense strand to SEQ ID NO: 1526218
uauuaacguauuuaaggca

SEQ ID NO: 1526220 - RNA, 19 nt, Artificial Sequence
  Description of Artificial Sequence: Synthetic oligonucleotide
  Sense strand starting at position 1004 of SEQ ID NO: 1244967
auacguuaauauuccgcaa

SEQ ID NO: 1526221 - RNA, 19 nt, Artificial Sequence
  Description of Artificial Sequence: Synthetic oligonucleotide
  Antisense strand to SEQ ID NO: 1526220
uugcggaauauuaacguau

SEQ ID NO: 1526222 - RNA, 19 nt, Artificial Sequence
  Description of Artificial Sequence: Synthetic oligonucleotide
  Sense strand starting at position 1008 of SEQ ID NO: 1244967
guuaauauuccgcaagccu

SEQ ID NO: 1526223 - RNA, 19 nt, Artificial Sequence
  Description of Artificial Sequence: Synthetic oligonucleotide
  Antisense strand to SEQ ID NO: 1526222
aggcuugcggaauauuaac

SEQ ID NO: 1526224 - RNA, 19 nt, Artificial Sequence
  Description of Artificial Sequence: Synthetic oligonucleotide
  Sense strand starting at position 1043 of SEQ ID NO: 1244967
ggcuaagucacuuaauacg

SEQ ID NO: 1526225 - RNA, 19 nt, Artificial Sequence
  Description of Artificial Sequence: Synthetic oligonucleotide
  Antisense strand to SEQ ID NO: 1526224
cguauuaagugacuuagcc

SEQ ID NO: 1526226 - RNA, 19 nt, Artificial Sequence
  Description of Artificial Sequence: Synthetic oligonucleotide
  Sense strand starting at position 1060 of SEQ ID NO: 1244967
cgaaauucgucauucaagg

SEQ ID NO: 1526227 - RNA, 19 nt, Artificial Sequence
  Description of Artificial Sequence: Synthetic oligonucleotide
  Antisense strand to SEQ ID NO: 1526226
ccuugaaugacgaauuucg

SEQ ID NO: 1526228 - RNA, 19 nt, Artificial Sequence
  Description of Artificial Sequence: Synthetic oligonucleotide
  Sense strand starting at position 2111 of SEQ ID NO: 1244967
cgccgagguugcuaaguaa

SEQ ID NO: 1526229 - RNA, 19 nt, Artificial Sequence
  Description of Artificial Sequence: Synthetic oligonucleotide
  Antisense strand to SEQ ID NO: 1526228
uuacuuagcaaccucggcg

SEQ ID NO: 1526230 - RNA, 19 nt, Artificial Sequence
  Description of Artificial Sequence: Synthetic oligonucleotide
  Sense strand starting at position 2169 of SEQ ID NO: 1244967
gaggguauuuccggcggga

SEQ ID NO: 1526231 - RNA, 19 nt, Artificial Sequence
  Description of Artificial Sequence: Synthetic oligonucleotide
  Antisense strand to SEQ ID NO: 1526230
ucccgccggaaauacccuc

SEQ ID NO: 1526232 - RNA, 19 nt, Artificial Sequence
  Description of Artificial Sequence: Synthetic oligonucleotide
  Sense strand starting at position 2512 of SEQ ID NO: 1244967
cgagacaccugauggugau

SEQ ID NO: 1526233 - RNA, 19 nt, Artificial Sequence
  Description of Artificial Sequence: Synthetic oligonucleotide
  Antisense strand to SEQ ID NO: 1526232
aucaccaucaggugucucg

SEQ ID NO: 1526234 - RNA, 19 nt, Artificial Sequence
  Description of Artificial Sequence: Synthetic oligonucleotide
  Sense strand starting at position 2513 of SEQ ID NO: 1244967
gagacaccugauggugauu

SEQ ID NO: 1526235 - RNA, 19 nt, Artificial Sequence
  Description of Artificial Sequence: Synthetic oligonucleotide
  Antisense strand to SEQ ID NO: 1526234
aaucaccaucaggugucuc

SEQ ID NO: 1526236 - RNA, 19 nt, Artificial Sequence
  Description of Artificial Sequence: Synthetic oligonucleotide
  Sense strand starting at position 2518 of SEQ ID NO: 1244967
accugauggugauugugaa

SEQ ID NO: 1526237 - RNA, 19 nt, Artificial Sequence
  Description of Artificial Sequence: Synthetic oligonucleotide
  Antisense strand to SEQ ID NO: 1526236
uucacaaucaccaucaggu

SEQ ID NO: 1526238 - RNA, 19 nt, Artificial Sequence
  Description of Artificial Sequence: Synthetic oligonucleotide
  Sense strand starting at position 2526 of SEQ ID NO: 1244967
gugauugugaagcacaauu

SEQ ID NO: 1526239 - RNA, 19 nt, Artificial Sequence
  Description of Artificial Sequence: Synthetic oligonucleotide
  Antisense strand to SEQ ID NO: 1526238
aauugugcuucacaaucac

SEQ ID NO: 1526240 - RNA, 19 nt, Artificial Sequence
  Description of Artificial Sequence: Synthetic oligonucleotide
  Sense strand starting at position 2794 of SEQ ID NO: 1244967
auugcagugggccgagaau

SEQ ID NO: 1526241 - RNA, 19 nt, Artificial Sequence
  Description of Artificial Sequence: Synthetic oligonucleotide
  Antisense strand to SEQ ID NO: 1526240
auucucggcccacugcaau

SEQ ID NO: 1526242 - RNA, 19 nt, Artificial Sequence
  Description of Artificial Sequence: Synthetic oligonucleotide
  Sense strand starting at position 3373 of SEQ ID NO: 1244967
guuguuagaucagagucuu

SEQ ID NO: 1526243 - RNA, 19 nt, Artificial Sequence
  Description of Artificial Sequence: Synthetic oligonucleotide
  Antisense strand to SEQ ID NO: 1526242
aagacucugaucuaacaac

SEQ ID NO: 1526244 - RNA, 19 nt, Artificial Sequence
  Description of Artificial Sequence: Synthetic oligonucleotide
  Sense strand starting at position 3379 of SEQ ID NO: 1244967
agaucagagucuugcuaug

SEQ ID NO: 1526245 - RNA, 19 nt, Artificial Sequence
  Description of Artificial Sequence: Synthetic oligonucleotide
  Antisense strand to SEQ ID NO: 1526244
cauagcaagacucugaucu

SEQ ID NO: 1526246 - RNA, 19 nt, Artificial Sequence
  Description of Artificial Sequence: Synthetic oligonucleotide
  Sense strand starting at position 3381 of SEQ ID NO: 1244967
aucagagucuugcuauguu

SEQ ID NO: 1526247 - RNA, 19 nt, Artificial Sequence
  Description of Artificial Sequence: Synthetic oligonucleotide
  Antisense strand to SEQ ID NO: 1526246
aacauagcaagacucugau

SEQ ID NO: 1526248 - RNA, 19 nt, Artificial Sequence
  Description of Artificial Sequence: Synthetic oligonucleotide
  Sense strand starting at position 3552 of SEQ ID NO: 1244967
augcuucuguagucagagu

SEQ ID NO: 1526249 - RNA, 19 nt, Artificial Sequence
  Description of Artificial Sequence: Synthetic oligonucleotide
  Antisense strand to SEQ ID NO: 1526248
acucugacuacagaagcau

SEQ ID NO: 1526250 - RNA, 19 nt, Artificial Sequence
  Description of Artificial Sequence: Synthetic oligonucleotide
  Sense strand starting at position 3561 of SEQ ID NO: 1244967
uagucagagugcucuuagu

SEQ ID NO: 1526251 - RNA, 19 nt, Artificial Sequence
  Description of Artificial Sequence: Synthetic oligonucleotide
  Antisense strand to SEQ ID NO: 1526250
acuaagagcacucugacua

SEQ ID NO: 1526252 - RNA, 19 nt, Artificial Sequence
  Description of Artificial Sequence: Synthetic oligonucleotide
  Sense strand starting at position 3567 of SEQ ID NO: 1244967
gagugcucuuaguugcauu

SEQ ID NO: 1526253 - RNA, 19 nt, Artificial Sequence
  Description of Artificial Sequence: Synthetic oligonucleotide
  Antisense strand to SEQ ID NO: 1526252
aaugcaacuaagagcacuc

SEQ ID NO: 1526254 - RNA, 19 nt, Artificial Sequence
  Description of Artificial Sequence: Synthetic oligonucleotide
  Sense strand starting at position 3575 of SEQ ID NO: 1244967
uuaguugcauugucuuaau

SEQ ID NO: 1526255 - RNA, 19 nt, Artificial Sequence
  Description of Artificial Sequence: Synthetic oligonucleotide
  Antisense strand to SEQ ID NO: 1526254
auuaagacaaugcaacuaa

SEQ ID NO: 1526256 - RNA, 19 nt, Artificial Sequence
  Description of Artificial Sequence: Synthetic oligonucleotide
  Sense strand starting at position 3578 of SEQ ID NO: 1244967
guugcauugucuuaauccu

SEQ ID NO: 1526257 - RNA, 19 nt, Artificial Sequence
  Description of Artificial Sequence: Synthetic oligonucleotide
  Antisense strand to SEQ ID NO: 1526256
aggauuaagacaaugcaac

SEQ ID NO: 1526258 - RNA, 19 nt, Artificial Sequence
  Description of Artificial Sequence: Synthetic oligonucleotide
  Sense strand starting at position 3606 of SEQ ID NO: 1244967
ccgagaacagucuguaaau

SEQ ID NO: 1526259 - RNA, 19 nt, Artificial Sequence
  Description of Artificial Sequence: Synthetic oligonucleotide
  Antisense strand to SEQ ID NO: 1526258
auuuacagacuguucucgg

SEQ ID NO: 1526260 - RNA, 19 nt, Artificial Sequence
  Description of Artificial Sequence: Synthetic oligonucleotide
  Sense strand starting at position 3607 of SEQ ID NO: 1244967
cgagaacagucuguaaauc

SEQ ID NO: 1526261 - RNA, 19 nt, Artificial Sequence
  Description of Artificial Sequence: Synthetic oligonucleotide
  Antisense strand to SEQ ID NO: 1526260
gauuuacagacuguucucg

SEQ ID NO: 1526262 - RNA, 19 nt, Artificial Sequence
  Description of Artificial Sequence: Synthetic oligonucleotide
  Sense strand starting at position 3616 of SEQ ID NO: 1244967
ucuguaaaucgggaguuca

SEQ ID NO: 1526263 - RNA, 19 nt, Artificial Sequence
  Description of Artificial Sequence: Synthetic oligonucleotide
  Antisense strand to SEQ ID NO: 1526262
ugaacucccgauuuacaga

SEQ ID NO: 1526264 - RNA, 19 nt, Artificial Sequence
  Description of Artificial Sequence: Synthetic oligonucleotide
  Sense strand starting at position 3656 of SEQ ID NO: 1244967
ccggaaaccuguugcugaa

SEQ ID NO: 1526265 - RNA, 19 nt, Artificial Sequence
  Description of Artificial Sequence: Synthetic oligonucleotide
  Antisense strand to SEQ ID NO: 1526264
uucagcaacagguuuccgg

SEQ ID NO: 1526266 - RNA, 19 nt, Artificial Sequence
  Description of Artificial Sequence: Synthetic oligonucleotide
  Sense strand starting at position 3783 of SEQ ID NO: 1244967
ucuccaaacugguaggaaa

SEQ ID NO: 1526267 - RNA, 19 nt, Artificial Sequence
  Description of Artificial Sequence: Synthetic oligonucleotide
  Antisense strand to SEQ ID NO: 1526266
uuuccuaccaguuuggaga

SEQ ID NO: 1526268 - RNA, 19 nt, Artificial Sequence
  Description of Artificial Sequence: Synthetic oligonucleotide
  Sense strand starting at position 3885 of SEQ ID NO: 1244967
ugacgugcuuguugugcaa

SEQ ID NO: 1526269 - RNA, 19 nt, Artificial Sequence
  Description of Artificial Sequence: Synthetic oligonucleotide
  Antisense strand to SEQ ID NO: 1526268
uugcacaacaagcacguca

SEQ ID NO: 1526270 - RNA, 19 nt, Artificial Sequence
  Description of Artificial Sequence: Synthetic oligonucleotide
  Sense strand starting at position 3891 of SEQ ID NO: 1244967
gcuuguugugcaaggguga

SEQ ID NO: 1526271 - RNA, 19 nt, Artificial Sequence
  Description of Artificial Sequence: Synthetic oligonucleotide
  Antisense strand to SEQ ID NO: 1526270
ucacccuugcacaacaagc

SEQ ID NO: 1526272 - RNA, 19 nt, Artificial Sequence
  Description of Artificial Sequence: Synthetic oligonucleotide
  Sense strand starting at position 3904 of SEQ ID NO: 1244967
gggugagguuaaccagcua

SEQ ID NO: 1526273 - RNA, 19 nt, Artificial Sequence
  Description of Artificial Sequence: Synthetic oligonucleotide
  Antisense strand to SEQ ID NO: 1526272
uagcugguuaaccucaccc

SEQ ID NO: 1526274 - RNA, 19 nt, Artificial Sequence
  Description of Artificial Sequence: Synthetic oligonucleotide
  Sense strand starting at position 233 of SEQ ID NO: 1244968
uuaugaguauccuguagua

SEQ ID NO: 1526275 - RNA, 19 nt, Artificial Sequence
  Description of Artificial Sequence: Synthetic oligonucleotide
  Antisense strand to SEQ ID NO: 1526274
uacuacaggauacucauaa

SEQ ID NO: 1526276 - RNA, 19 nt, Artificial Sequence
  Description of Artificial Sequence: Synthetic oligonucleotide
  Sense strand starting at position 235 of SEQ ID NO: 1244968
augaguauccuguaguauc

SEQ ID NO: 1526277 - RNA, 19 nt, Artificial Sequence
  Description of Artificial Sequence: Synthetic oligonucleotide
  Antisense strand to SEQ ID NO: 1526276
gauacuacaggauacucau

SEQ ID NO: 1526278 - RNA, 19 nt, Artificial Sequence
  Description of Artificial Sequence: Synthetic oligonucleotide
  Sense strand starting at position 238 of SEQ ID NO: 1244968
aguauccuguaguaucauu

SEQ ID NO: 1526279 - RNA, 19 nt, Artificial Sequence
  Description of Artificial Sequence: Synthetic oligonucleotide
  Antisense strand to SEQ ID NO: 1526278
aaugauacuacaggauacu

SEQ ID NO: 1526280 - RNA, 19 nt, Artificial Sequence
  Description of Artificial Sequence: Synthetic oligonucleotide
  Sense strand starting at position 243 of SEQ ID NO: 1244968
ccuguaguaucauuagaac

SEQ ID NO: 1526281 - RNA, 19 nt, Artificial Sequence
  Description of Artificial Sequence: Synthetic oligonucleotide
  Antisense strand to SEQ ID NO: 1526280
guucuaaugauacuacagg

SEQ ID NO: 1526282 - RNA, 19 nt, Artificial Sequence
  Description of Artificial Sequence: Synthetic oligonucleotide
  Sense strand starting at position 246 of SEQ ID NO: 1244968
guaguaucauuagaacuuc

SEQ ID NO: 1526283 - RNA, 19 nt, Artificial Sequence
  Description of Artificial Sequence: Synthetic oligonucleotide
  Antisense strand to SEQ ID NO: 1526282
gaaguucuaaugauacuac

SEQ ID NO: 1526284 - RNA, 19 nt, Artificial Sequence
  Description of Artificial Sequence: Synthetic oligonucleotide
  Sense strand starting at position 323 of SEQ ID NO: 1244968
cugcuugcucauggucuaa

SEQ ID NO: 1526285 - RNA, 19 nt, Artificial Sequence
  Description of Artificial Sequence: Synthetic oligonucleotide
  Antisense strand to SEQ ID NO: 1526284
uuagaccaugagcaagcag

SEQ ID NO: 1526286 - RNA, 19 nt, Artificial Sequence
  Description of Artificial Sequence: Synthetic oligonucleotide
  Sense strand starting at position 325 of SEQ ID NO: 1244968
gcuugcucauggucuaaua

SEQ ID NO: 1526287 - RNA, 19 nt, Artificial Sequence
  Description of Artificial Sequence: Synthetic oligonucleotide
  Antisense strand to SEQ ID NO: 1526286
uauuagaccaugagcaagc

SEQ ID NO: 1526288 - RNA, 19 nt, Artificial Sequence
  Description of Artificial Sequence: Synthetic oligonucleotide
  Sense strand starting at position 327 of SEQ ID NO: 1244968
uugcucauggucuaauaau

SEQ ID NO: 1526289 - RNA, 19 nt, Artificial Sequence
  Description of Artificial Sequence: Synthetic oligonucleotide
  Antisense strand to SEQ ID NO: 1526288
auuauuagaccaugagcaa

SEQ ID NO: 1526290 - RNA, 19 nt, Artificial Sequence
  Description of Artificial Sequence: Synthetic oligonucleotide
  Sense strand starting at position 423 of SEQ ID NO: 1244968
ucaaacucuuaguaaaugu

SEQ ID NO: 1526291 - RNA, 19 nt, Artificial Sequence
  Description of Artificial Sequence: Synthetic oligonucleotide
  Antisense strand to SEQ ID NO: 1526290
acauuuacuaagaguuuga

SEQ ID NO: 1526292 - RNA, 19 nt, Artificial Sequence
  Description of Artificial Sequence: Synthetic oligonucleotide
  Sense strand starting at position 1599 of SEQ ID NO: 1244968
gccagcugucuucgcagua

SEQ ID NO: 1526293 - RNA, 19 nt, Artificial Sequence
  Description of Artificial Sequence: Synthetic oligonucleotide
  Antisense strand to SEQ ID NO: 1526292
uacugcgaagacagcuggc

SEQ ID NO: 1526294 - RNA, 19 nt, Artificial Sequence
  Description of Artificial Sequence: Synthetic oligonucleotide
  Sense strand starting at position 2240 of SEQ ID NO: 1244968
gccagaagaagugguagau

SEQ ID NO: 1526295 - RNA, 19 nt, Artificial Sequence
  Description of Artificial Sequence: Synthetic oligonucleotide
  Antisense strand to SEQ ID NO: 1526294
aucuaccacuucuucuggc

SEQ ID NO: 1526296 - RNA, 19 nt, Artificial Sequence
  Description of Artificial Sequence: Synthetic oligonucleotide
  Sense strand starting at position 2256 of SEQ ID NO: 1244968
gaugucuaguccuuggcga

SEQ ID NO: 1526297 - RNA, 19 nt, Artificial Sequence
  Description of Artificial Sequence: Synthetic oligonucleotide
  Antisense strand to SEQ ID NO: 1526296
ucgccaaggacuagacauc

SEQ ID NO: 1526298 - RNA, 19 nt, Artificial Sequence
  Description of Artificial Sequence: Synthetic oligonucleotide
  Sense strand starting at position 2299 of SEQ ID NO: 1244968
ccacauggugugcgaagua

SEQ ID NO: 1526299 - RNA, 19 nt, Artificial Sequence
  Description of Artificial Sequence: Synthetic oligonucleotide
  Antisense strand to SEQ ID NO: 1526298
uacuucgcacaccaugugg

SEQ ID NO: 1526300 - RNA, 19 nt, Artificial Sequence
  Description of Artificial Sequence: Synthetic oligonucleotide
  Sense strand starting at position 2311 of SEQ ID NO: 1244968
cgaaguaggaauuguuaga

SEQ ID NO: 1526301 - RNA, 19 nt, Artificial Sequence
  Description of Artificial Sequence: Synthetic oligonucleotide
  Antisense strand to SEQ ID NO: 1526300
ucuaacaauuccuacuucg

SEQ ID NO: 1526302 - RNA, 19 nt, Artificial Sequence
  Description of Artificial Sequence: Synthetic oligonucleotide
  Sense strand starting at position 2379 of SEQ ID NO: 1244968
gaggcaauauaugaugaua

SEQ ID NO: 1526303 - RNA, 19 nt, Artificial Sequence
  Description of Artificial Sequence: Synthetic oligonucleotide
  Antisense strand to SEQ ID NO: 1526302
uaucaucauauauugccuc

SEQ ID NO: 1526304 - RNA, 19 nt, Artificial Sequence
  Description of Artificial Sequence: Synthetic oligonucleotide
  Sense strand starting at position 2381 of SEQ ID NO: 1244968
ggcaauauaugaugauaac

SEQ ID NO: 1526305 - RNA, 19 nt, Artificial Sequence
  Description of Artificial Sequence: Synthetic oligonucleotide
  Antisense strand to SEQ ID NO: 1526304
guuaucaucauauauugcc

SEQ ID NO: 1526306 - RNA, 19 nt, Artificial Sequence
  Description of Artificial Sequence: Synthetic oligonucleotide
  Sense strand starting at position 2463 of SEQ ID NO: 1244968
cgagaccggcccuguuauu

SEQ ID NO: 1526307 - RNA, 19 nt, Artificial Sequence
  Description of Artificial Sequence: Synthetic oligonucleotide
  Antisense strand to SEQ ID NO: 1526306
aauaacagggccggucucg

SEQ ID NO: 1526308 - RNA, 19 nt, Artificial Sequence
  Description of Artificial Sequence: Synthetic oligonucleotide
  Sense strand starting at position 2580 of SEQ ID NO: 1244968
ccaucugagucuccuuagu

SEQ ID NO: 1526309 - RNA, 19 nt, Artificial Sequence
  Description of Artificial Sequence: Synthetic oligonucleotide
  Antisense strand to SEQ ID NO: 1526308
acuaaggagacucagaugg

SEQ ID NO: 1526310 - RNA, 19 nt, Artificial Sequence
  Description of Artificial Sequence: Synthetic oligonucleotide
  Sense strand starting at position 2582 of SEQ ID NO: 1244968
aucugagucuccuuaguau

SEQ ID NO: 1526311 - RNA, 19 nt, Artificial Sequence
  Description of Artificial Sequence: Synthetic oligonucleotide
  Antisense strand to SEQ ID NO: 1526310
auacuaaggagacucagau

SEQ ID NO: 1526312 - RNA, 19 nt, Artificial Sequence
  Description of Artificial Sequence: Synthetic oligonucleotide
  Sense strand starting at position 3272 of SEQ ID NO: 1244968
cucucagguucccgaguua

SEQ ID NO: 1526313 - RNA, 19 nt, Artificial Sequence
  Description of Artificial Sequence: Synthetic oligonucleotide
  Antisense strand to SEQ ID NO: 1526312
uaacucgggaaccugagag

SEQ ID NO: 1526314 - RNA, 19 nt, Artificial Sequence
  Description of Artificial Sequence: Synthetic oligonucleotide
  Sense strand starting at position 3492 of SEQ ID NO: 1244968
gccuauuccuaguuucuua

SEQ ID NO: 1526315 - RNA, 19 nt, Artificial Sequence
  Description of Artificial Sequence: Synthetic oligonucleotide
  Antisense strand to SEQ ID NO: 1526314
uaagaaacuaggaauaggc

SEQ ID NO: 1526316 - RNA, 19 nt, Artificial Sequence
  Description of Artificial Sequence: Synthetic oligonucleotide
  Sense strand starting at position 3592 of SEQ ID NO: 1244968
gauaaagguuuagaaauug

SEQ ID NO: 1526317 - RNA, 19 nt, Artificial Sequence
  Description of Artificial Sequence: Synthetic oligonucleotide
  Antisense strand to SEQ ID NO: 1526316
caauuucuaaaccuuuauc

SEQ ID NO: 1526318 - RNA, 19 nt, Artificial Sequence
  Description of Artificial Sequence: Synthetic oligonucleotide
  Sense strand starting at position 26 of SEQ ID NO: 1244969
ucuggugucacacaguaua

SEQ ID NO: 1526319 - RNA, 19 nt, Artificial Sequence
  Description of Artificial Sequence: Synthetic oligonucleotide
  Antisense strand to SEQ ID NO: 1526318
uauacugugugacaccaga

SEQ ID NO: 1526320 - RNA, 19 nt, Artificial Sequence
  Description of Artificial Sequence: Synthetic oligonucleotide
  Sense strand starting at position 66 of SEQ ID NO: 1244969
gacacaauacuggguaauu

SEQ ID NO: 1526321 - RNA, 19 nt, Artificial Sequence
  Description of Artificial Sequence: Synthetic oligonucleotide
  Antisense strand to SEQ ID NO: 1526320
aauuacccaguauuguguc

SEQ ID NO: 1526322 - RNA, 19 nt, Artificial Sequence
  Description of Artificial Sequence: Synthetic oligonucleotide
  Sense strand starting at position 131 of SEQ ID NO: 1244969
uuguaaauggacugauaau

SEQ ID NO: 1526323 - RNA, 19 nt, Artificial Sequence
  Description of Artificial Sequence: Synthetic oligonucleotide
  Antisense strand to SEQ ID NO: 1526322
auuaucaguccauuuacaa

SEQ ID NO: 1526324 - RNA, 19 nt, Artificial Sequence
  Description of Artificial Sequence: Synthetic oligonucleotide
  Sense strand starting at position 216 of SEQ ID NO: 1244969
guggauuugugucugugga

SEQ ID NO: 1526325 - RNA, 19 nt, Artificial Sequence
  Description of Artificial Sequence: Synthetic oligonucleotide
  Antisense strand to SEQ ID NO: 1526324
uccacagacacaaauccac

SEQ ID NO: 1526326 - RNA, 19 nt, Artificial Sequence
  Description of Artificial Sequence: Synthetic oligonucleotide
  Sense strand starting at position 217 of SEQ ID NO: 1244969
uggauuugugucuguggau

SEQ ID NO: 1526327 - RNA, 19 nt, Artificial Sequence
  Description of Artificial Sequence: Synthetic oligonucleotide
  Antisense strand to SEQ ID NO: 1526326
auccacagacacaaaucca

SEQ ID NO: 1526328 - RNA, 19 nt, Artificial Sequence
  Description of Artificial Sequence: Synthetic oligonucleotide
  Sense strand starting at position 220 of SEQ ID NO: 1244969
auuugugucuguggaugua

SEQ ID NO: 1526329 - RNA, 19 nt, Artificial Sequence
  Description of Artificial Sequence: Synthetic oligonucleotide
  Antisense strand to SEQ ID NO: 1526328
uacauccacagacacaaau

SEQ ID NO: 1526330 - RNA, 19 nt, Artificial Sequence
  Description of Artificial Sequence: Synthetic oligonucleotide
  Sense strand starting at position 286 of SEQ ID NO: 1244969
gccucuaggaaauggauca

SEQ ID NO: 1526331 - RNA, 19 nt, Artificial Sequence
  Description of Artificial Sequence: Synthetic oligonucleotide
  Antisense strand to SEQ ID NO: 1526330
ugauccauuuccuagaggc

SEQ ID NO: 1526332 - RNA, 19 nt, Artificial Sequence
  Description of Artificial Sequence: Synthetic oligonucleotide
  Sense strand starting at position 358 of SEQ ID NO: 1244969
cccgcuuuguaguuugaca

SEQ ID NO: 1526333 - RNA, 19 nt, Artificial Sequence
  Description of Artificial Sequence: Synthetic oligonucleotide
  Antisense strand to SEQ ID NO: 1526332
ugucaaacuacaaagcggg

SEQ ID NO: 1526334 - RNA, 19 nt, Artificial Sequence
  Description of Artificial Sequence: Synthetic oligonucleotide
  Sense strand starting at position 363 of SEQ ID NO: 1244969
uuuguaguuugacaugaaa

SEQ ID NO: 1526335 - RNA, 19 nt, Artificial Sequence
  Description of Artificial Sequence: Synthetic oligonucleotide
  Antisense strand to SEQ ID NO: 1526334
uuucaugucaaacuacaaa

SEQ ID NO: 1526336 - RNA, 19 nt, Artificial Sequence
  Description of Artificial Sequence: Synthetic oligonucleotide
  Sense strand starting at position 404 of SEQ ID NO: 1244969
ucucccacugugugagaaa

SEQ ID NO: 1526337 - RNA, 19 nt, Artificial Sequence
  Description of Artificial Sequence: Synthetic oligonucleotide
  Antisense strand to SEQ ID NO: 1526336
uuucucacacagugggaga

SEQ ID NO: 1526338 - RNA, 19 nt, Artificial Sequence
  Description of Artificial Sequence: Synthetic oligonucleotide
  Sense strand starting at position 497 of SEQ ID NO: 1244969
ccugauuccugcuuagaaa

SEQ ID NO: 1526339 - RNA, 19 nt, Artificial Sequence
  Description of Artificial Sequence: Synthetic oligonucleotide
  Antisense strand to SEQ ID NO: 1526338
uuucuaagcaggaaucagg

SEQ ID NO: 1526340 - RNA, 19 nt, Artificial Sequence
  Description of Artificial Sequence: Synthetic oligonucleotide
  Sense strand starting at position 498 of SEQ ID NO: 1244969
cugauuccugcuuagaaau

SEQ ID NO: 1526341 - RNA, 19 nt, Artificial Sequence
  Description of Artificial Sequence: Synthetic oligonucleotide
  Antisense strand to SEQ ID NO: 1526340
auuucuaagcaggaaucag

SEQ ID NO: 1526342 - RNA, 19 nt, Artificial Sequence
  Description of Artificial Sequence: Synthetic oligonucleotide
  Sense strand starting at position 500 of SEQ ID NO: 1244969
gauuccugcuuagaaaugu

SEQ ID NO: 1526343 - RNA, 19 nt, Artificial Sequence
  Description of Artificial Sequence: Synthetic oligonucleotide
  Antisense strand to SEQ ID NO: 1526342
acauuucuaagcaggaauc

SEQ ID NO: 1526344 - RNA, 19 nt, Artificial Sequence
  Description of Artificial Sequence: Synthetic oligonucleotide
  Sense strand starting at position 596 of SEQ ID NO: 1244969
gucaauuacugauaggaau

SEQ ID NO: 1526345 - RNA, 19 nt, Artificial Sequence
  Description of Artificial Sequence: Synthetic oligonucleotide
  Antisense strand to SEQ ID NO: 1526344
auuccuaucaguaauugac

SEQ ID NO: 1526346 - RNA, 19 nt, Artificial Sequence
  Description of Artificial Sequence: Synthetic oligonucleotide
  Sense strand starting at position 661 of SEQ ID NO: 1244969
ucggguuuaugaugacaag

SEQ ID NO: 1526347 - RNA, 19 nt, Artificial Sequence
  Description of Artificial Sequence: Synthetic oligonucleotide
  Antisense strand to SEQ ID NO: 1526346
cuugucaucauaaacccga

SEQ ID NO: 1526348 - RNA, 19 nt, Artificial Sequence
  Description of Artificial Sequence: Synthetic oligonucleotide
  Sense strand starting at position 664 of SEQ ID NO: 1244969
gguuuaugaugacaagccu

SEQ ID NO: 1526349 - RNA, 19 nt, Artificial Sequence
  Description of Artificial Sequence: Synthetic oligonucleotide
  Antisense strand to SEQ ID NO: 1526348
aggcuugucaucauaaacc

SEQ ID NO: 1526350 - RNA, 19 nt, Artificial Sequence
  Description of Artificial Sequence: Synthetic oligonucleotide
  Sense strand starting at position 735 of SEQ ID NO: 1244969
ggagucagaugucugcuua

SEQ ID NO: 1526351 - RNA, 19 nt, Artificial Sequence
  Description of Artificial Sequence: Synthetic oligonucleotide
  Antisense strand to SEQ ID NO: 1526350
uaagcagacaucugacucc

SEQ ID NO: 1526352 - RNA, 19 nt, Artificial Sequence
  Description of Artificial Sequence: Synthetic oligonucleotide
  Sense strand starting at position 736 of SEQ ID NO: 1244969
gagucagaugucugcuuaa

SEQ ID NO: 1526353 - RNA, 19 nt, Artificial Sequence
  Description of Artificial Sequence: Synthetic oligonucleotide
  Antisense strand to SEQ ID NO: 1526352
uuaagcagacaucugacuc

SEQ ID NO: 1526354 - RNA, 19 nt, Artificial Sequence
  Description of Artificial Sequence: Synthetic oligonucleotide
  Sense strand starting at position 739 of SEQ ID NO: 1244969
ucagaugucugcuuaacag

SEQ ID NO: 1526355 - RNA, 19 nt, Artificial Sequence
  Description of Artificial Sequence: Synthetic oligonucleotide
  Antisense strand to SEQ ID NO: 1526354
cuguuaagcagacaucuga

SEQ ID NO: 1526356 - RNA, 19 nt, Artificial Sequence
  Description of Artificial Sequence: Synthetic oligonucleotide
  Sense strand starting at position 807 of SEQ ID NO: 1244969
uacccaggguucuggauua
